United States Patent Application Publication US 2015/0141320 A1 - sequence listing, part 25

SEQ ID NO: 875885 - DNA, 15 bp, Homo sapiens
ccggcccaaatgcta

SEQ ID NO: 875886 - DNA, 15 bp, Homo sapiens
cggcccaaatgctac

SEQ ID NO: 875887 - DNA, 15 bp, Homo sapiens
ggcccaaatgctact

SEQ ID NO: 875888 - DNA, 15 bp, Homo sapiens
gcccaaatgctactt

SEQ ID NO: 875889 - DNA, 15 bp, Homo sapiens
cccaaatgctacttt

SEQ ID NO: 875890 - DNA, 15 bp, Homo sapiens
ccaaatgctactttc

SEQ ID NO: 875891 - DNA, 15 bp, Homo sapiens
caaatgctactttct

SEQ ID NO: 875892 - DNA, 15 bp, Homo sapiens
aaatgctactttctt

SEQ ID NO: 875893 - DNA, 15 bp, Homo sapiens
aatgctactttcttt

SEQ ID NO: 875894 - DNA, 15 bp, Homo sapiens
atgctactttctttg

SEQ ID NO: 875895 - DNA, 15 bp, Homo sapiens
tgctactttctttgc

SEQ ID NO: 875896 - DNA, 15 bp, Homo sapiens
gctactttctttgca

SEQ ID NO: 875897 - DNA, 15 bp, Homo sapiens
ctactttctttgcaa

SEQ ID NO: 875898 - DNA, 15 bp, Homo sapiens
tactttctttgcaaa

SEQ ID NO: 875899 - DNA, 15 bp, Homo sapiens
actttctttgcaaaa

SEQ ID NO: 875900 - DNA, 15 bp, Homo sapiens
ctttctttgcaaaac

SEQ ID NO: 875901 - DNA, 15 bp, Homo sapiens
tttctttgcaaaacc

SEQ ID NO: 875902 - DNA, 15 bp, Homo sapiens
ttctttgcaaaacct

SEQ ID NO: 875903 - DNA, 15 bp, Homo sapiens
tctttgcaaaacctt

SEQ ID NO: 875904 - DNA, 15 bp, Homo sapiens
ctttgcaaaaccttc

SEQ ID NO: 875905 - DNA, 15 bp, Homo sapiens
tttgcaaaaccttcc

SEQ ID NO: 875906 - DNA, 15 bp, Homo sapiens
ttgcaaaaccttcct

SEQ ID NO: 875907 - DNA, 15 bp, Homo sapiens
tgcaaaaccttcctt

SEQ ID NO: 875908 - DNA, 15 bp, Homo sapiens
gcaaaaccttcctta

SEQ ID NO: 875909 - DNA, 15 bp, Homo sapiens
caaaaccttccttaa

SEQ ID NO: 875910 - DNA, 15 bp, Homo sapiens
aaaaccttccttaat

SEQ ID NO: 875911 - DNA, 15 bp, Homo sapiens
aaaccttccttaatg

SEQ ID NO: 875912 - DNA, 15 bp, Homo sapiens
aaccttccttaatgc

SEQ ID NO: 875913 - DNA, 15 bp, Homo sapiens
accttccttaatgct

SEQ ID NO: 875914 - DNA, 15 bp, Homo sapiens
ccttccttaatgcta

SEQ ID NO: 875915 - DNA, 15 bp, Homo sapiens
cttccttaatgctac

SEQ ID NO: 875916 - DNA, 15 bp, Homo sapiens
ttccttaatgctacc

SEQ ID NO: 875917 - DNA, 15 bp, Homo sapiens
tccttaatgctaccc

SEQ ID NO: 875918 - DNA, 15 bp, Homo sapiens
ccttaatgctaccca

SEQ ID NO: 875919 - DNA, 15 bp, Homo sapiens
cttaatgctacccaa

SEQ ID NO: 875920 - DNA, 15 bp, Homo sapiens
ttaatgctacccaaa

SEQ ID NO: 875921 - DNA, 15 bp, Homo sapiens
taatgctacccaaat

SEQ ID NO: 875922 - DNA, 15 bp, Homo sapiens
aatgctacccaaata

SEQ ID NO: 875923 - DNA, 15 bp, Homo sapiens
atgctacccaaatac

SEQ ID NO: 875924 - DNA, 15 bp, Homo sapiens
tgctacccaaatacc

SEQ ID NO: 875925 - DNA, 15 bp, Homo sapiens
gctacccaaatacca

SEQ ID NO: 875926 - DNA, 15 bp, Homo sapiens
ctacccaaataccag

SEQ ID NO: 875927 - DNA, 15 bp, Homo sapiens
tacccaaataccagg

SEQ ID NO: 875928 - DNA, 15 bp, Homo sapiens
acccaaataccagga

SEQ ID NO: 875929 - DNA, 15 bp, Homo sapiens
cccaaataccaggat

SEQ ID NO: 875930 - DNA, 15 bp, Homo sapiens
ccaaataccaggata

SEQ ID NO: 875931 - DNA, 15 bp, Homo sapiens
caaataccaggatat

SEQ ID NO: 875932 - DNA, 15 bp, Homo sapiens
aaataccaggatatg

SEQ ID NO: 875933 - DNA, 15 bp, Homo sapiens
aataccaggatatga

SEQ ID NO: 875934 - DNA, 15 bp, Homo sapiens
ataccaggatatgaa

SEQ ID NO: 875935 - DNA, 15 bp, Homo sapiens
taccaggatatgaac

SEQ ID NO: 875936 - DNA, 15 bp, Homo sapiens
accaggatatgaaca

SEQ ID NO: 875937 - DNA, 15 bp, Homo sapiens
ccaggatatgaacag

SEQ ID NO: 875938 - DNA, 15 bp, Homo sapiens
caggatatgaacagc

SEQ ID NO: 875939 - DNA, 15 bp, Homo sapiens
aggatatgaacagct

SEQ ID NO: 875940 - DNA, 15 bp, Homo sapiens
ggatatgaacagctt

SEQ ID NO: 875941 - DNA, 15 bp, Homo sapiens
gatatgaacagcttt

SEQ ID NO: 875942 - DNA, 15 bp, Homo sapiens
atatgaacagctttt

SEQ ID NO: 875943 - DNA, 15 bp, Homo sapiens
tatgaacagcttttt

SEQ ID NO: 875944 - DNA, 15 bp, Homo sapiens
atgaacagctttttt

SEQ ID NO: 875945 - DNA, 15 bp, Homo sapiens
tgaacagcttttttc

SEQ ID NO: 875946 - DNA, 15 bp, Homo sapiens
gaacagcttttttct

SEQ ID NO: 875947 - DNA, 15 bp, Homo sapiens
aacagcttttttctt

SEQ ID NO: 875948 - DNA, 15 bp, Homo sapiens
acagcttttttcttg

SEQ ID NO: 875949 - DNA, 15 bp, Homo sapiens
cagcttttttcttgg

SEQ ID NO: 875950 - DNA, 15 bp, Homo sapiens
agcttttttcttggt

SEQ ID NO: 875951 - DNA, 15 bp, Homo sapiens
gcttttttcttggta

SEQ ID NO: 875952 - DNA, 15 bp, Homo sapiens
cttttttcttggtat

SEQ ID NO: 875953 - DNA, 15 bp, Homo sapiens
ttttttcttggtatt

SEQ ID NO: 875954 - DNA, 15 bp, Homo sapiens
tttttcttggtattc

SEQ ID NO: 875955 - DNA, 15 bp, Homo sapiens
ttttcttggtattct

SEQ ID NO: 875956 - DNA, 15 bp, Homo sapiens
tttcttggtattctt

SEQ ID NO: 875957 - DNA, 15 bp, Homo sapiens
ttcttggtattcttg

SEQ ID NO: 875958 - DNA, 15 bp, Homo sapiens
tcttggtattcttgt

SEQ ID NO: 875959 - DNA, 15 bp, Homo sapiens
cttggtattcttgta

SEQ ID NO: 875960 - DNA, 15 bp, Homo sapiens
ttggtattcttgtat

SEQ ID NO: 875961 - DNA, 15 bp, Homo sapiens
tggtattcttgtatc

SEQ ID NO: 875962 - DNA, 15 bp, Homo sapiens
ggtattcttgtatca

SEQ ID NO: 875963 - DNA, 15 bp, Homo sapiens
gtattcttgtatcac

SEQ ID NO: 875964 - DNA, 15 bp, Homo sapiens
tattcttgtatcacc

SEQ ID NO: 875965 - DNA, 15 bp, Homo sapiens
attcttgtatcacct

SEQ ID NO: 875966 - DNA, 15 bp, Homo sapiens
ttcttgtatcacctt

SEQ ID NO: 875967 - DNA, 15 bp, Homo sapiens
tcttgtatcaccttg

SEQ ID NO: 875968 - DNA, 15 bp, Homo sapiens
cttgtatcaccttgt

SEQ ID NO: 875969 - DNA, 15 bp, Homo sapiens
ttgtatcaccttgta

SEQ ID NO: 875970 - DNA, 15 bp, Homo sapiens
tgtatcaccttgtac

SEQ ID NO: 875971 - DNA, 15 bp, Homo sapiens
gtatcaccttgtact

SEQ ID NO: 875972 - DNA, 15 bp, Homo sapiens
tatcaccttgtactt

SEQ ID NO: 875973 - DNA, 15 bp, Homo sapiens
atcaccttgtacttt

SEQ ID NO: 875974 - DNA, 15 bp, Homo sapiens
tcaccttgtactttg

SEQ ID NO: 875975 - DNA, 15 bp, Homo sapiens
caccttgtactttgc

SEQ ID NO: 875976 - DNA, 15 bp, Homo sapiens
accttgtactttgct

SEQ ID NO: 875977 - DNA, 15 bp, Homo sapiens
ccttgtactttgctg

SEQ ID NO: 875978 - DNA, 15 bp, Homo sapiens
cttgtactttgctgt

SEQ ID NO: 875979 - DNA, 15 bp, Homo sapiens
ttgtactttgctgta

SEQ ID NO: 875980 - DNA, 15 bp, Homo sapiens
tgtactttgctgtaa

SEQ ID NO: 875981 - DNA, 15 bp, Homo sapiens
gtactttgctgtaac

SEQ ID NO: 875982 - DNA, 15 bp, Homo sapiens
tactttgctgtaaca

SEQ ID NO: 875983 - DNA, 15 bp, Homo sapiens
actttgctgtaacac

SEQ ID NO: 875984 - DNA, 15 bp, Homo sapiens
ctttgctgtaacact

SEQ ID NO: 875985 - DNA, 15 bp, Homo sapiens
tttgctgtaacactt

SEQ ID NO: 875986 - DNA, 15 bp, Homo sapiens
ttgctgtaacacttg

SEQ ID NO: 875987 - DNA, 15 bp, Homo sapiens
tgctgtaacacttgc

SEQ ID NO: 875988 - DNA, 15 bp, Homo sapiens
gctgtaacacttgcc

SEQ ID NO: 875989 - DNA, 15 bp, Homo sapiens
ctgtaacacttgcca

SEQ ID NO: 875990 - DNA, 15 bp, Homo sapiens
tgtaacacttgccac

SEQ ID NO: 875991 - DNA, 15 bp, Homo sapiens
gtaacacttgccaca

SEQ ID NO: 875992 - DNA, 15 bp, Homo sapiens
taacacttgccacaa

SEQ ID NO: 875993 - DNA, 15 bp, Homo sapiens
aacacttgccacaag

SEQ ID NO: 875994 - DNA, 15 bp, Homo sapiens
acacttgccacaagg

SEQ ID NO: 875995 - DNA, 15 bp, Homo sapiens
cacttgccacaaggt

SEQ ID NO: 875996 - DNA, 15 bp, Homo sapiens
acttgccacaaggta

SEQ ID NO: 875997 - DNA, 15 bp, Homo sapiens
cttgccacaaggtac

SEQ ID NO: 875998 - DNA, 15 bp, Homo sapiens
ttgccacaaggtact

SEQ ID NO: 875999 - DNA, 15 bp, Homo sapiens
tgccacaaggtactg

SEQ ID NO: 876000 - DNA, 15 bp, Homo sapiens
gccacaaggtactgt

SEQ ID NO: 876001 - DNA, 15 bp, Homo sapiens
ccacaaggtactgta

SEQ ID NO: 876002 - DNA, 15 bp, Homo sapiens
cacaaggtactgtaa

SEQ ID NO: 876003 - DNA, 15 bp, Homo sapiens
acaaggtactgtaac

SEQ ID NO: 876004 - DNA, 15 bp, Homo sapiens
caaggtactgtaact

SEQ ID NO: 876005 - DNA, 15 bp, Homo sapiens
aaggtactgtaacta

SEQ ID NO: 876006 - DNA, 15 bp, Homo sapiens
aggtactgtaactat

SEQ ID NO: 876007 - DNA, 15 bp, Homo sapiens
ggtactgtaactatt

SEQ ID NO: 876008 - DNA, 15 bp, Homo sapiens
gtactgtaactattg

SEQ ID NO: 876009 - DNA, 15 bp, Homo sapiens
tactgtaactattga

SEQ ID NO: 876010 - DNA, 15 bp, Homo sapiens
actgtaactattgaa

SEQ ID NO: 876011 - DNA, 15 bp, Homo sapiens
ctgtaactattgaac

SEQ ID NO: 876012 - DNA, 15 bp, Homo sapiens
tgtaactattgaact

SEQ ID NO: 876013 - DNA, 15 bp, Homo sapiens
gtaactattgaacta

SEQ ID NO: 876014 - DNA, 15 bp, Homo sapiens
taactattgaactat

SEQ ID NO: 876015 - DNA, 15 bp, Homo sapiens
aactattgaactatt

SEQ ID NO: 876016 - DNA, 15 bp, Homo sapiens
actattgaactattg

SEQ ID NO: 876017 - DNA, 15 bp, Homo sapiens
ctattgaactattgg

SEQ ID NO: 876018 - DNA, 15 bp, Homo sapiens
tattgaactattggt

SEQ ID NO: 876019 - DNA, 15 bp, Homo sapiens
attgaactattggtg

SEQ ID NO: 876020 - DNA, 15 bp, Homo sapiens
ttgaactattggtgt

SEQ ID NO: 876021 - DNA, 15 bp, Homo sapiens
tgaactattggtgta

SEQ ID NO: 876022 - DNA, 15 bp, Homo sapiens
gaactattggtgtat

SEQ ID NO: 876023 - DNA, 15 bp, Homo sapiens
aactattggtgtata

SEQ ID NO: 876024 - DNA, 15 bp, Homo sapiens
actattggtgtatat

SEQ ID NO: 876025 - DNA, 15 bp, Homo sapiens
ctattggtgtatata

SEQ ID NO: 876026 - DNA, 15 bp, Homo sapiens
tattggtgtatatat

SEQ ID NO: 876027 - DNA, 15 bp, Homo sapiens
attggtgtatatata

SEQ ID NO: 876028 - DNA, 15 bp, Homo sapiens
ttggtgtatatatat

SEQ ID NO: 876029 - DNA, 15 bp, Homo sapiens
tggtgtatatatatt

SEQ ID NO: 876030 - DNA, 15 bp, Homo sapiens
ggtgtatatatattt

SEQ ID NO: 876031 - DNA, 15 bp, Homo sapiens
gtgtatatatatttt

SEQ ID NO: 876032 - DNA, 15 bp, Homo sapiens
tgtatatatattttt

SEQ ID NO: 876033 - DNA, 15 bp, Homo sapiens
gtatatatatttttt

SEQ ID NO: 876034 - DNA, 15 bp, Homo sapiens
atatatatttttttc

SEQ ID NO: 876035 - DNA, 15 bp, Homo sapiens
tatatatttttttcc

SEQ ID NO: 876036 - DNA, 15 bp, Homo sapiens
atatatttttttcct

SEQ ID NO: 876037 - DNA, 15 bp, Homo sapiens
tatatttttttcctg

SEQ ID NO: 876038 - DNA, 15 bp, Homo sapiens
atatttttttcctgc

SEQ ID NO: 876039 - DNA, 15 bp, Homo sapiens
tatttttttcctgct

SEQ ID NO: 876040 - DNA, 15 bp, Homo sapiens
atttttttcctgcta

SEQ ID NO: 876041 - DNA, 15 bp, Homo sapiens
tttttttcctgctat

SEQ ID NO: 876042 - DNA, 15 bp, Homo sapiens
ttttttcctgctatc

SEQ ID NO: 876043 - DNA, 15 bp, Homo sapiens
tttttcctgctatct

SEQ ID NO: 876044 - DNA, 15 bp, Homo sapiens
ttttcctgctatctt

SEQ ID NO: 876045 - DNA, 15 bp, Homo sapiens
tttcctgctatcttg

SEQ ID NO: 876046 - DNA, 15 bp, Homo sapiens
ttcctgctatcttgt

SEQ ID NO: 876047 - DNA, 15 bp, Homo sapiens
tcctgctatcttgtg

SEQ ID NO: 876048 - DNA, 15 bp, Homo sapiens
cctgctatcttgtgg

SEQ ID NO: 876049 - DNA, 15 bp, Homo sapiens
ctgctatcttgtgga

SEQ ID NO: 876050 - DNA, 15 bp, Homo sapiens
tgctatcttgtggac

SEQ ID NO: 876051 - DNA, 15 bp, Homo sapiens
gctatcttgtggacc

SEQ ID NO: 876052 - DNA, 15 bp, Homo sapiens
ctatcttgtggacct

SEQ ID NO: 876053 - DNA, 15 bp, Homo sapiens
tatcttgtggacctc

SEQ ID NO: 876054 - DNA, 15 bp, Homo sapiens
atcttgtggacctct

SEQ ID NO: 876055 - DNA, 15 bp, Homo sapiens
tcttgtggacctctc

SEQ ID NO: 876056 - DNA, 15 bp, Homo sapiens
cttgtggacctctct

SEQ ID NO: 876057 - DNA, 15 bp, Homo sapiens
ttgtggacctctctt

SEQ ID NO: 876058 - DNA, 15 bp, Homo sapiens
tgtggacctctcttt

SEQ ID NO: 876059 - DNA, 15 bp, Homo sapiens
gtggacctctctttg

SEQ ID NO: 876060 - DNA, 15 bp, Homo sapiens
tggacctctctttga

SEQ ID NO: 876061 - DNA, 15 bp, Homo sapiens
ggacctctctttgac

SEQ ID NO: 876062 - DNA, 15 bp, Homo sapiens
gacctctctttgact

SEQ ID NO: 876063 - DNA, 15 bp, Homo sapiens
acctctctttgacta

SEQ ID NO: 876064 - DNA, 15 bp, Homo sapiens
cctctctttgactag

SEQ ID NO: 876065 - DNA, 15 bp, Homo sapiens
ctctctttgactagg

SEQ ID NO: 876066 - DNA, 15 bp, Homo sapiens
tctctttgactaggg

SEQ ID NO: 876067 - DNA, 15 bp, Homo sapiens
ctctttgactaggga

SEQ ID NO: 876068 - DNA, 15 bp, Homo sapiens
tctttgactagggac

SEQ ID NO: 876069 - DNA, 15 bp, Homo sapiens
ctttgactagggact

SEQ ID NO: 876070 - DNA, 15 bp, Homo sapiens
tttgactagggactt

SEQ ID NO: 876071 - DNA, 15 bp, Homo sapiens
ttgactagggacttt

SEQ ID NO: 876072 - DNA, 15 bp, Homo sapiens
tgactagggacttta

SEQ ID NO: 876073 - DNA, 15 bp, Homo sapiens
gactagggactttat

SEQ ID NO: 876074 - DNA, 15 bp, Homo sapiens
actagggactttatc

SEQ ID NO: 876075 - DNA, 15 bp, Homo sapiens
ctagggactttatct

SEQ ID NO: 876076 - DNA, 15 bp, Homo sapiens
tagggactttatctt

SEQ ID NO: 876077 - DNA, 15 bp, Homo sapiens
agggactttatctta

SEQ ID NO: 876078 - DNA, 15 bp, Homo sapiens
gggactttatcttaa

SEQ ID NO: 876079 - DNA, 15 bp, Homo sapiens
ggactttatcttaat

SEQ ID NO: 876080 - DNA, 15 bp, Homo sapiens
gactttatcttaatc

SEQ ID NO: 876081 - DNA, 15 bp, Homo sapiens
actttatcttaatca

SEQ ID NO: 876082 - DNA, 15 bp, Homo sapiens
ctttatcttaatcat

SEQ ID NO: 876083 - DNA, 15 bp, Homo sapiens
tttatcttaatcatt

SEQ ID NO: 876084 - DNA, 15 bp, Homo sapiens
ttatcttaatcatta

SEQ ID NO: 876085 - DNA, 15 bp, Homo sapiens
tatcttaatcattac

SEQ ID NO: 876086 - DNA, 15 bp, Homo sapiens
atcttaatcattact

SEQ ID NO: 876087 - DNA, 15 bp, Homo sapiens
tcttaatcattactg

SEQ ID NO: 876088 - DNA, 15 bp, Homo sapiens
cttaatcattactgt

SEQ ID NO: 876089 - DNA, 15 bp, Homo sapiens
ttaatcattactgta

SEQ ID NO: 876090 - DNA, 15 bp, Homo sapiens
taatcattactgtag

SEQ ID NO: 876091 - DNA, 15 bp, Homo sapiens
aatcattactgtagc

SEQ ID NO: 876092 - DNA, 15 bp, Homo sapiens
atcattactgtagcc

SEQ ID NO: 876093 - DNA, 15 bp, Homo sapiens
tcattactgtagcct

SEQ ID NO: 876094 - DNA, 15 bp, Homo sapiens
cattactgtagcctc

SEQ ID NO: 876095 - DNA, 15 bp, Homo sapiens
attactgtagcctcc

SEQ ID NO: 876096 - DNA, 15 bp, Homo sapiens
ttactgtagcctcca

SEQ ID NO: 876097 - DNA, 15 bp, Homo sapiens
tactgtagcctccat

SEQ ID NO: 876098 - DNA, 15 bp, Homo sapiens
actgtagcctccatt

SEQ ID NO: 876099 - DNA, 15 bp, Homo sapiens
ctgtagcctccattc

SEQ ID NO: 876100 - DNA, 15 bp, Homo sapiens
tgtagcctccattcc

SEQ ID NO: 876101 - DNA, 15 bp, Homo sapiens
gtagcctccattcca

SEQ ID NO: 876102 - DNA, 15 bp, Homo sapiens
tagcctccattccat

SEQ ID NO: 876103 - DNA, 15 bp, Homo sapiens
agcctccattccatg

SEQ ID NO: 876104 - DNA, 15 bp, Homo sapiens
gcctccattccatgc

SEQ ID NO: 876105 - DNA, 15 bp, Homo sapiens
cctccattccatgct

SEQ ID NO: 876106 - DNA, 15 bp, Homo sapiens
ctccattccatgctc

SEQ ID NO: 876107 - DNA, 15 bp, Homo sapiens
tccattccatgctca

SEQ ID NO: 876108 - DNA, 15 bp, Homo sapiens
ccattccatgctcag

SEQ ID NO: 876109 - DNA, 15 bp, Homo sapiens
cattccatgctcaga

SEQ ID NO: 876110 - DNA, 15 bp, Homo sapiens
attccatgctcagaa

SEQ ID NO: 876111 - DNA, 15 bp, Homo sapiens
ttccatgctcagaat

SEQ ID NO: 876112 - DNA, 15 bp, Homo sapiens
tccatgctcagaata

SEQ ID NO: 876113 - DNA, 15 bp, Homo sapiens
ccatgctcagaatag

SEQ ID NO: 876114 - DNA, 15 bp, Homo sapiens
catgctcagaatagg

SEQ ID NO: 876115 - DNA, 15 bp, Homo sapiens
atgctcagaataggg

SEQ ID NO: 876116 - DNA, 15 bp, Homo sapiens
tgctcagaatagggg

SEQ ID NO: 876117 - DNA, 15 bp, Homo sapiens
gctcagaatagggga

SEQ ID NO: 876118 - DNA, 15 bp, Homo sapiens
ctcagaataggggat

SEQ ID NO: 876119 - DNA, 15 bp, Homo sapiens
tcagaataggggatt

SEQ ID NO: 876120 - DNA, 15 bp, Homo sapiens
cagaataggggattc

SEQ ID NO: 876121 - DNA, 15 bp, Homo sapiens
agaataggggattct

SEQ ID NO: 876122 - DNA, 15 bp, Homo sapiens
gaataggggattctt

SEQ ID NO: 876123 - DNA, 15 bp, Homo sapiens
aataggggattctta

SEQ ID NO: 876124 - DNA, 15 bp, Homo sapiens
ataggggattcttat

SEQ ID NO: 876125 - DNA, 15 bp, Homo sapiens
taggggattcttatt

SEQ ID NO: 876126 - DNA, 15 bp, Homo sapiens
aggggattcttattg

SEQ ID NO: 876127 - DNA, 15 bp, Homo sapiens
ggggattcttattga

SEQ ID NO: 876128 - DNA, 15 bp, Homo sapiens
gggattcttattgat

SEQ ID NO: 876129 - DNA, 15 bp, Homo sapiens
ggattcttattgatt

SEQ ID NO: 876130 - DNA, 15 bp, Homo sapiens
gattcttattgattg

SEQ ID NO: 876131 - DNA, 15 bp, Homo sapiens
attcttattgattgc

SEQ ID NO: 876132 - DNA, 15 bp, Homo sapiens
ttcttattgattgct

SEQ ID NO: 876133 - DNA, 15 bp, Homo sapiens
tcttattgattgctt

SEQ ID NO: 876134 - DNA, 15 bp, Homo sapiens
cttattgattgcttt

SEQ ID NO: 876135 - DNA, 15 bp, Homo sapiens
ttattgattgcttta

SEQ ID NO: 876136 - DNA, 15 bp, Homo sapiens
tattgattgctttac

SEQ ID NO: 876137 - DNA, 15 bp, Homo sapiens
attgattgctttact

SEQ ID NO: 876138 - DNA, 15 bp, Homo sapiens
ttgattgctttactg

SEQ ID NO: 876139 - DNA, 15 bp, Homo sapiens
tgattgctttactga

SEQ ID NO: 876140 - DNA, 15 bp, Homo sapiens
gattgctttactgat

SEQ ID NO: 876141 - DNA, 15 bp, Homo sapiens
attgctttactgatt

SEQ ID NO: 876142 - DNA, 15 bp, Homo sapiens
ttgctttactgattc

SEQ ID NO: 876143 - DNA, 15 bp, Homo sapiens
tgctttactgattca

SEQ ID NO: 876144 - DNA, 15 bp, Homo sapiens
gctttactgattcaa

SEQ ID NO: 876145 - DNA, 15 bp, Homo sapiens
ctttactgattcaat

SEQ ID NO: 876146 - DNA, 15 bp, Homo sapiens
tttactgattcaatt

SEQ ID NO: 876147 - DNA, 15 bp, Homo sapiens
ttactgattcaattg

SEQ ID NO: 876148 - DNA, 15 bp, Homo sapiens
tactgattcaattgg

SEQ ID NO: 876149 - DNA, 15 bp, Homo sapiens
actgattcaattggt

SEQ ID NO: 876150 - DNA, 15 bp, Homo sapiens
ctgattcaattggtt

SEQ ID NO: 876151 - DNA, 15 bp, Homo sapiens
tgattcaattggttg

SEQ ID NO: 876152 - DNA, 15 bp, Homo sapiens
gattcaattggttgc

SEQ ID NO: 876153 - DNA, 15 bp, Homo sapiens
attcaattggttgct

SEQ ID NO: 876154 - DNA, 15 bp, Homo sapiens
ttcaattggttgctt

SEQ ID NO: 876155 - DNA, 15 bp, Homo sapiens
tcaattggttgcttt

SEQ ID NO: 876156 - DNA, 15 bp, Homo sapiens
caattggttgcttta

SEQ ID NO: 876157 - DNA, 15 bp, Homo sapiens
aattggttgctttac

SEQ ID NO: 876158 - DNA, 15 bp, Homo sapiens
attggttgctttact

SEQ ID NO: 876159 - DNA, 15 bp, Homo sapiens
ttggttgctttactg

SEQ ID NO: 876160 - DNA, 15 bp, Homo sapiens
tggttgctttactga

SEQ ID NO: 876161 - DNA, 15 bp, Homo sapiens
ggttgctttactgat

SEQ ID NO: 876162 - DNA, 15 bp, Homo sapiens
gttgctttactgatt

SEQ ID NO: 876163 - DNA, 15 bp, Homo sapiens
tttactgattcaata

SEQ ID NO: 876164 - DNA, 15 bp, Homo sapiens
ttactgattcaataa

SEQ ID NO: 876165 - DNA, 15 bp, Homo sapiens
tactgattcaataaa

SEQ ID NO: 876166 - DNA, 15 bp, Homo sapiens
actgattcaataaac

SEQ ID NO: 876167 - DNA, 15 bp, Homo sapiens
ctgattcaataaacc

SEQ ID NO: 876168 - DNA, 15 bp, Homo sapiens
tgattcaataaacca

SEQ ID NO: 876169 - DNA, 15 bp, Homo sapiens
gattcaataaaccaa

SEQ ID NO: 876170 - DNA, 15 bp, Homo sapiens
attcaataaaccaaa

SEQ ID NO: 876171 - DNA, 15 bp, Homo sapiens
ttcaataaaccaaag

SEQ ID NO: 876172 - DNA, 15 bp, Homo sapiens
tcaataaaccaaagt

SEQ ID NO: 876173 - DNA, 15 bp, Homo sapiens
caataaaccaaagtt

SEQ ID NO: 876174 - DNA, 15 bp, Homo sapiens
aataaaccaaagtta

SEQ ID NO: 876175 - DNA, 15 bp, Homo sapiens
ataaaccaaagttag

SEQ ID NO: 876176 - DNA, 15 bp, Homo sapiens
taaaccaaagttaga

SEQ ID NO: 876177 - DNA, 15 bp, Homo sapiens
aaaccaaagttagaa

SEQ ID NO: 876178 - DNA, 15 bp, Homo sapiens
aaccaaagttagaat

SEQ ID NO: 876179 - DNA, 15 bp, Homo sapiens
accaaagttagaatt

SEQ ID NO: 876180 - DNA, 15 bp, Homo sapiens
ccaaagttagaattc

SEQ ID NO: 876181 - DNA, 15 bp, Homo sapiens
caaagttagaattcc

SEQ ID NO: 876182 - DNA, 15 bp, Homo sapiens
aaagttagaattcca

SEQ ID NO: 876183 - DNA, 15 bp, Homo sapiens
aagttagaattccag

SEQ ID NO: 876184 - DNA, 15 bp, Homo sapiens
agttagaattccagg

SEQ ID NO: 876185 - DNA, 15 bp, Homo sapiens
gttagaattccaggt

SEQ ID NO: 876186 - DNA, 15 bp, Homo sapiens
ttagaattccaggta

SEQ ID NO: 876187 - DNA, 15 bp, Homo sapiens
tagaattccaggtac

SEQ ID NO: 876188 - DNA, 15 bp, Homo sapiens
agaattccaggtacc

SEQ ID NO: 876189 - DNA, 15 bp, Homo sapiens
gaattccaggtacca

SEQ ID NO: 876190 - DNA, 15 bp, Homo sapiens
aattccaggtaccat

SEQ ID NO: 876191 - DNA, 15 bp, Homo sapiens
attccaggtaccatg

SEQ ID NO: 876192 - DNA, 15 bp, Homo sapiens
ttccaggtaccatgc

SEQ ID NO: 876193 - DNA, 15 bp, Homo sapiens
tccaggtaccatgct

SEQ ID NO: 876194 - DNA, 15 bp, Homo sapiens
ccaggtaccatgctg

SEQ ID NO: 876195 - DNA, 15 bp, Homo sapiens
caggtaccatgctgg

SEQ ID NO: 876196 - DNA, 15 bp, Homo sapiens
aggtaccatgctggt

SEQ ID NO: 876197 - DNA, 15 bp, Homo sapiens
ggtaccatgctggtc

SEQ ID NO: 876198 - DNA, 15 bp, Homo sapiens
gtaccatgctggtca

SEQ ID NO: 876199 - DNA, 15 bp, Homo sapiens
taccatgctggtcag

SEQ ID NO: 876200 - DNA, 15 bp, Homo sapiens
accatgctggtcaga

SEQ ID NO: 876201 - DNA, 15 bp, Homo sapiens
ccatgctggtcagag

SEQ ID NO: 876202 - DNA, 15 bp, Homo sapiens
catgctggtcagaga

SEQ ID NO: 876203 - DNA, 15 bp, Homo sapiens
atgctggtcagagag

SEQ ID NO: 876204 - DNA, 15 bp, Homo sapiens
tgctggtcagagagg

SEQ ID NO: 876205 - DNA, 15 bp, Homo sapiens
gctggtcagagaggg

SEQ ID NO: 876206 - DNA, 15 bp, Homo sapiens
ctggtcagagagggt

SEQ ID NO: 876207 - DNA, 15 bp, Homo sapiens
tggtcagagagggta

SEQ ID NO: 876208 - DNA, 15 bp, Homo sapiens
ggtcagagagggtaa

SEQ ID NO: 876209 - DNA, 15 bp, Homo sapiens
gtcagagagggtaat

SEQ ID NO: 876210 - DNA, 15 bp, Homo sapiens
tcagagagggtaatg

SEQ ID NO: 876211 - DNA, 15 bp, Homo sapiens
cagagagggtaatgt

SEQ ID NO: 876212 - DNA, 15 bp, Homo sapiens
agagagggtaatgtc

SEQ ID NO: 876213 - DNA, 15 bp, Homo sapiens
gagagggtaatgtct

SEQ ID NO: 876214 - DNA, 15 bp, Homo sapiens
agagggtaatgtctt

SEQ ID NO: 876215 - DNA, 15 bp, Homo sapiens
gagggtaatgtcttt

SEQ ID NO: 876216 - DNA, 15 bp, Homo sapiens
agggtaatgtctttg

SEQ ID NO: 876217 - DNA, 15 bp, Homo sapiens
gggtaatgtctttgt

SEQ ID NO: 876218 - DNA, 15 bp, Homo sapiens
ggtaatgtctttgtt

SEQ ID NO: 876219 - DNA, 15 bp, Homo sapiens
gtaatgtctttgttc

SEQ ID NO: 876220 - DNA, 15 bp, Homo sapiens
taatgtctttgttcc

SEQ ID NO: 876221 - DNA, 15 bp, Homo sapiens
aatgtctttgttccg

SEQ ID NO: 876222 - DNA, 15 bp, Homo sapiens
atgtctttgttccgg

SEQ ID NO: 876223 - DNA, 15 bp, Homo sapiens
tgtctttgttccggg

SEQ ID NO: 876224 - DNA, 15 bp, Homo sapiens
gtctttgttccggga

SEQ ID NO: 876225 - DNA, 15 bp, Homo sapiens
tctttgttccgggag

SEQ ID NO: 876226 - DNA, 15 bp, Homo sapiens
ctttgttccgggagg

SEQ ID NO: 876227 - DNA, 15 bp, Homo sapiens
tttgttccgggaggt

SEQ ID NO: 876228 - DNA, 15 bp, Homo sapiens
ttgttccgggaggtt

SEQ ID NO: 876229 - DNA, 15 bp, Homo sapiens
tgttccgggaggttt

SEQ ID NO: 876230 - DNA, 15 bp, Homo sapiens
gttccgggaggtttt

SEQ ID NO: 876231 - DNA, 15 bp, Homo sapiens
ttccgggaggttttt

SEQ ID NO: 876232 - DNA, 15 bp, Homo sapiens
tccgggaggtttttg

SEQ ID NO: 876233 - DNA, 15 bp, Homo sapiens
ccgggaggtttttga

SEQ ID NO: 876234 - DNA, 15 bp, Homo sapiens
cgggaggtttttgat

SEQ ID NO: 876235 - DNA, 15 bp, Homo sapiens
gggaggtttttgatg

SEQ ID NO: 876236 - DNA, 15 bp, Homo sapiens
ggaggtttttgatgt

SEQ ID NO: 876237 - DNA, 15 bp, Homo sapiens
gaggtttttgatgtt

SEQ ID NO: 876238 - DNA, 15 bp, Homo sapiens
aggtttttgatgttc

SEQ ID NO: 876239 - DNA, 15 bp, Homo sapiens
ggtttttgatgttcc

SEQ ID NO: 876240 - DNA, 15 bp, Homo sapiens
gtttttgatgttcct

SEQ ID NO: 876241 - DNA, 15 bp, Homo sapiens
tttttgatgttcctc

SEQ ID NO: 876242 - DNA, 15 bp, Homo sapiens
ttttgatgttcctca

SEQ ID NO: 876243 - DNA, 15 bp, Homo sapiens
tttgatgttcctcag

SEQ ID NO: 876244 - DNA, 15 bp, Homo sapiens
ttgatgttcctcagg

SEQ ID NO: 876245 - DNA, 15 bp, Homo sapiens
tgatgttcctcaggt

SEQ ID NO: 876246 - DNA, 15 bp, Homo sapiens
gatgttcctcaggtc

SEQ ID NO: 876247 - DNA, 15 bp, Homo sapiens
atgttcctcaggtca

SEQ ID NO: 876248 - DNA, 15 bp, Homo sapiens
tgttcctcaggtcag

SEQ ID NO: 876249 - DNA, 15 bp, Homo sapiens
gttcctcaggtcagt

SEQ ID NO: 876250 - DNA, 15 bp, Homo sapiens
ttcctcaggtcagtc

SEQ ID NO: 876251 - DNA, 15 bp, Homo sapiens
tcctcaggtcagtct

SEQ ID NO: 876252 - DNA, 15 bp, Homo sapiens
cctcaggtcagtctc

SEQ ID NO: 876253 - DNA, 15 bp, Homo sapiens
ctcaggtcagtctct

SEQ ID NO: 876254 - DNA, 15 bp, Homo sapiens
tcaggtcagtctctt

SEQ ID NO: 876255 - DNA, 15 bp, Homo sapiens
caggtcagtctcttg

SEQ ID NO: 876256 - DNA, 15 bp, Homo sapiens
aggtcagtctcttgg

SEQ ID NO: 876257 - DNA, 15 bp, Homo sapiens
ggtcagtctcttggg

SEQ ID NO: 876258 - DNA, 15 bp, Homo sapiens
gtcagtctcttgggg

SEQ ID NO: 876259 - DNA, 15 bp, Homo sapiens
tcagtctcttggggg

SEQ ID NO: 876260 - DNA, 15 bp, Homo sapiens
cagtctcttggggga

SEQ ID NO: 876261 - DNA, 15 bp, Homo sapiens
agtctcttgggggaa

SEQ ID NO: 876262 - DNA, 15 bp, Homo sapiens
gtctcttgggggaaa

SEQ ID NO: 876263 - DNA, 15 bp, Homo sapiens
tctcttgggggaaat

SEQ ID NO: 876264 - DNA, 15 bp, Homo sapiens
ctcttgggggaaatc

SEQ ID NO: 876265 - DNA, 15 bp, Homo sapiens
tcttgggggaaatcc

SEQ ID NO: 876266 - DNA, 15 bp, Homo sapiens
cttgggggaaatcct

SEQ ID NO: 876267 - DNA, 15 bp, Homo sapiens
ttgggggaaatcctg

SEQ ID NO: 876268 - DNA, 15 bp, Homo sapiens
tgggggaaatcctgg

SEQ ID NO: 876269 - DNA, 15 bp, Homo sapiens
gggggaaatcctgga

SEQ ID NO: 876270 - DNA, 15 bp, Homo sapiens
ggggaaatcctggat

SEQ ID NO: 876271 - DNA, 15 bp, Homo sapiens
gggaaatcctggatt

SEQ ID NO: 876272 - DNA, 15 bp, Homo sapiens
ggaaatcctggattg

SEQ ID NO: 876273 - DNA, 15 bp, Homo sapiens
gaaatcctggattgt

SEQ ID NO: 876274 - DNA, 15 bp, Homo sapiens
aaatcctggattgtt

SEQ ID NO: 876275 - DNA, 15 bp, Homo sapiens
aatcctggattgttt

SEQ ID NO: 876276 - DNA, 15 bp, Homo sapiens
atcctggattgttta

SEQ ID NO: 876277 - DNA, 15 bp, Homo sapiens
tcctggattgtttat

SEQ ID NO: 876278 - DNA, 15 bp, Homo sapiens
cctggattgtttata

SEQ ID NO: 876279 - DNA, 15 bp, Homo sapiens
ctggattgtttatat

SEQ ID NO: 876280 - DNA, 15 bp, Homo sapiens
tggattgtttatatt

SEQ ID NO: 876281 - DNA, 15 bp, Homo sapiens
ggattgtttatattt

SEQ ID NO: 876282 - DNA, 15 bp, Homo sapiens
gattgtttatattta

SEQ ID NO: 876283 - DNA, 15 bp, Homo sapiens
attgtttatatttaa

SEQ ID NO: 876284 - DNA, 15 bp, Homo sapiens
ttgtttatatttaaa

SEQ ID NO: 876285 - DNA, 15 bp, Homo sapiens
tgtttatatttaaat

SEQ ID NO: 876286 - DNA, 15 bp, Homo sapiens
gtttatatttaaatg

SEQ ID NO: 876287 - DNA, 15 bp, Homo sapiens
tttatatttaaatgg

SEQ ID NO: 876288 - DNA, 15 bp, Homo sapiens
ttatatttaaatggt

SEQ ID NO: 876289 - DNA, 15 bp, Homo sapiens
tatatttaaatggtc

SEQ ID NO: 876290 - DNA, 15 bp, Homo sapiens
atatttaaatggtcc

SEQ ID NO: 876291 - DNA, 15 bp, Homo sapiens
tatttaaatggtcca

SEQ ID NO: 876292 - DNA, 15 bp, Homo sapiens
atttaaatggtccag

SEQ ID NO: 876293 - DNA, 15 bp, Homo sapiens
tttaaatggtccagg

SEQ ID NO: 876294 - DNA, 15 bp, Homo sapiens
ttaaatggtccaggc

SEQ ID NO: 876295 - DNA, 15 bp, Homo sapiens
taaatggtccaggcc

SEQ ID NO: 876296 - DNA, 15 bp, Homo sapiens
aaatggtccaggcca

SEQ ID NO: 876297 - DNA, 15 bp, Homo sapiens
aatggtccaggccag

SEQ ID NO: 876298 - DNA, 15 bp, Homo sapiens
atggtccaggccagg

SEQ ID NO: 876299 - DNA, 15 bp, Homo sapiens
tggtccaggccagga

SEQ ID NO: 876300 - DNA, 15 bp, Homo sapiens
ggtccaggccaggat

SEQ ID NO: 876301 - DNA, 15 bp, Homo sapiens
gtccaggccaggatg

SEQ ID NO: 876302 - DNA, 15 bp, Homo sapiens
tccaggccaggatga

SEQ ID NO: 876303 - DNA, 15 bp, Homo sapiens
ccaggccaggatgag

SEQ ID NO: 876304 - DNA, 15 bp, Homo sapiens
caggccaggatgaga

SEQ ID NO: 876305 - DNA, 15 bp, Homo sapiens
aggccaggatgagag

SEQ ID NO: 876306 - DNA, 15 bp, Homo sapiens
ggccaggatgagaga

SEQ ID NO: 876307 - DNA, 15 bp, Homo sapiens
gccaggatgagagat

SEQ ID NO: 876308 - DNA, 15 bp, Homo sapiens
ccaggatgagagatg

SEQ ID NO: 876309 - DNA, 15 bp, Homo sapiens
caggatgagagatgt

SEQ ID NO: 876310 - DNA, 15 bp, Homo sapiens
aggatgagagatgtg

SEQ ID NO: 876311 - DNA, 15 bp, Homo sapiens
ggatgagagatgtgt

SEQ ID NO: 876312 - DNA, 15 bp, Homo sapiens
gatgagagatgtgtg

SEQ ID NO: 876313 - DNA, 15 bp, Homo sapiens
atgagagatgtgtgg

SEQ ID NO: 876314 - DNA, 15 bp, Homo sapiens
tgagagatgtgtggg

SEQ ID NO: 876315 - DNA, 15 bp, Homo sapiens
gagagatgtgtgggg

SEQ ID NO: 876316 - DNA, 15 bp, Homo sapiens
agagatgtgtgggga

SEQ ID NO: 876317 - DNA, 15 bp, Homo sapiens
gagatgtgtggggag

SEQ ID NO: 876318 - DNA, 15 bp, Homo sapiens
agatgtgtggggagt

SEQ ID NO: 876319 - DNA, 15 bp, Homo sapiens
gatgtgtggggagta

SEQ ID NO: 876320 - DNA, 15 bp, Homo sapiens
atgtgtggggagtag

SEQ ID NO: 876321 - DNA, 15 bp, Homo sapiens
tgtgtggggagtaga

SEQ ID NO: 876322 - DNA, 15 bp, Homo sapiens
gtgtggggagtagag

SEQ ID NO: 876323 - DNA, 15 bp, Homo sapiens
tgtggggagtagagt

SEQ ID NO: 876324 - DNA, 15 bp, Homo sapiens
gtggggagtagagtg

SEQ ID NO: 876325 - DNA, 15 bp, Homo sapiens
tggggagtagagtgt

SEQ ID NO: 876326 - DNA, 15 bp, Homo sapiens
ggggagtagagtgta

SEQ ID NO: 876327 - DNA, 15 bp, Homo sapiens
gggagtagagtgtag

SEQ ID NO: 876328 - DNA, 15 bp, Homo sapiens
ggagtagagtgtagt

SEQ ID NO: 876329 - DNA, 15 bp, Homo sapiens
gagtagagtgtagtg

SEQ ID NO: 876330 - DNA, 15 bp, Homo sapiens
agtagagtgtagtgt

SEQ ID NO: 876331 - DNA, 15 bp, Homo sapiens
gtagagtgtagtgtg

SEQ ID NO: 876332 - DNA, 15 bp, Homo sapiens
tagagtgtagtgtgg

SEQ ID NO: 876333 - DNA, 15 bp, Homo sapiens
agagtgtagtgtggc

SEQ ID NO: 876334 - DNA, 15 bp, Homo sapiens
gagtgtagtgtggca

SEQ ID NO: 876335 - DNA, 15 bp, Homo sapiens
agtgtagtgtggcat

SEQ ID NO: 876336 - DNA, 15 bp, Homo sapiens
gtgtagtgtggcata

SEQ ID NO: 876337 - DNA, 15 bp, Homo sapiens
tgtagtgtggcatac

SEQ ID NO: 876338 - DNA, 15 bp, Homo sapiens
gtagtgtggcatacc

SEQ ID NO: 876339 - DNA, 15 bp, Homo sapiens
tagtgtggcatacct

SEQ ID NO: 876340 - DNA, 15 bp, Homo sapiens
agtgtggcatacctc

SEQ ID NO: 876341 - DNA, 15 bp, Homo sapiens
gtgtggcatacctct

SEQ ID NO: 876342 - DNA, 15 bp, Homo sapiens
tgtggcatacctcta

SEQ ID NO: 876343 - DNA, 15 bp, Homo sapiens
gtggcatacctctaa

SEQ ID NO: 876344 - DNA, 15 bp, Homo sapiens
tggcatacctctaag

SEQ ID NO: 876345 - DNA, 15 bp, Homo sapiens
ggcatacctctaaga

SEQ ID NO: 876346 - DNA, 15 bp, Homo sapiens
gcatacctctaagac

SEQ ID NO: 876347 - DNA, 15 bp, Homo sapiens
catacctctaagact

SEQ ID NO: 876348 - DNA, 15 bp, Homo sapiens
atacctctaagactt

SEQ ID NO: 876349 - DNA, 15 bp, Homo sapiens
tacctctaagacttc

SEQ ID NO: 876350 - DNA, 15 bp, Homo sapiens
acctctaagacttcc

SEQ ID NO: 876351 - DNA, 15 bp, Homo sapiens
cctctaagacttcct

SEQ ID NO: 876352 - DNA, 15 bp, Homo sapiens
ctctaagacttcctg

SEQ ID NO: 876353 - DNA, 15 bp, Homo sapiens
tctaagacttcctgg

SEQ ID NO: 876354 - DNA, 15 bp, Homo sapiens
ctaagacttcctgga

SEQ ID NO: 876355 - DNA, 15 bp, Homo sapiens
taagacttcctggat

SEQ ID NO: 876356 - DNA, 15 bp, Homo sapiens
aagacttcctggatg

SEQ ID NO: 876357 - DNA, 15 bp, Homo sapiens
agacttcctggatgc

SEQ ID NO: 876358 - DNA, 15 bp, Homo sapiens
gacttcctggatgcc

SEQ ID NO: 876359 - DNA, 15 bp, Homo sapiens
acttcctggatgcct

SEQ ID NO: 876360 - DNA, 15 bp, Homo sapiens
cttcctggatgcctc

SEQ ID NO: 876361 - DNA, 15 bp, Homo sapiens
ttcctggatgcctct

SEQ ID NO: 876362 - DNA, 15 bp, Homo sapiens
tcctggatgcctctg

SEQ ID NO: 876363 - DNA, 15 bp, Homo sapiens
cctggatgcctctgg

SEQ ID NO: 876364 - DNA, 15 bp, Homo sapiens
ctggatgcctctgga

SEQ ID NO: 876365 - DNA, 15 bp, Homo sapiens
tggatgcctctggat

SEQ ID NO: 876366 - DNA, 15 bp, Homo sapiens
ggatgcctctggatg

SEQ ID NO: 876367 - DNA, 15 bp, Homo sapiens
gatgcctctggatgt

SEQ ID NO: 876368 - DNA, 15 bp, Homo sapiens
atgcctctggatgtt

SEQ ID NO: 876369 - DNA, 15 bp, Homo sapiens
tgcctctggatgttc

SEQ ID NO: 876370 - DNA, 15 bp, Homo sapiens
gcctctggatgttcc

SEQ ID NO: 876371 - DNA, 15 bp, Homo sapiens
cctctggatgttcca

SEQ ID NO: 876372 - DNA, 15 bp, Homo sapiens
ctctggatgttccat

SEQ ID NO: 876373 - DNA, 15 bp, Homo sapiens
tctggatgttccatt

SEQ ID NO: 876374 - DNA, 15 bp, Homo sapiens
ctggatgttccattg

SEQ ID NO: 876375 - DNA, 15 bp, Homo sapiens
tggatgttccattgc

SEQ ID NO: 876376 - DNA, 15 bp, Homo sapiens
ggatgttccattgca

SEQ ID NO: 876377 - DNA, 15 bp, Homo sapiens
gatgttccattgcaa

SEQ ID NO: 876378 - DNA, 15 bp, Homo sapiens
atgttccattgcaaa

SEQ ID NO: 876379 - DNA, 15 bp, Homo sapiens
tgttccattgcaaac

SEQ ID NO: 876380 - DNA, 15 bp, Homo sapiens
gttccattgcaaacc

SEQ ID NO: 876381 - DNA, 15 bp, Homo sapiens
ttccattgcaaacca

SEQ ID NO: 876382 - DNA, 15 bp, Homo sapiens
tccattgcaaaccat

SEQ ID NO: 876383 - DNA, 15 bp, Homo sapiens
ccattgcaaaccatg

SEQ ID NO: 876384 - DNA, 15 bp, Homo sapiens
cattgcaaaccatgg

SEQ ID NO: 876385 - DNA, 15 bp, Homo sapiens
attgcaaaccatggc

SEQ ID NO: 876386 - DNA, 15 bp, Homo sapiens
ttgcaaaccatggct

SEQ ID NO: 876387 - DNA, 15 bp, Homo sapiens
tgcaaaccatggctt

SEQ ID NO: 876388 - DNA, 15 bp, Homo sapiens
gcaaaccatggcttg

SEQ ID NO: 876389 - DNA, 15 bp, Homo sapiens
caaaccatggcttga

SEQ ID NO: 876390 - DNA, 15 bp, Homo sapiens
aaaccatggcttgag

SEQ ID NO: 876391 - DNA, 15 bp, Homo sapiens
aaccatggcttgagc

SEQ ID NO: 876392 - DNA, 15 bp, Homo sapiens
accatggcttgagct

SEQ ID NO: 876393 - DNA, 15 bp, Homo sapiens
ccatggcttgagctc

SEQ ID NO: 876394 - DNA, 15 bp, Homo sapiens
catggcttgagctcc

SEQ ID NO: 876395 - DNA, 15 bp, Homo sapiens
atggcttgagctcca

SEQ ID NO: 876396 - DNA, 15 bp, Homo sapiens
tggcttgagctccag

SEQ ID NO: 876397 - DNA, 15 bp, Homo sapiens
ggcttgagctccagt

SEQ ID NO: 876398 - DNA, 15 bp, Homo sapiens
gcttgagctccagtg

SEQ ID NO: 876399 - DNA, 15 bp, Homo sapiens
cttgagctccagtgt

SEQ ID NO: 876400 - DNA, 15 bp, Homo sapiens
ttgagctccagtgtg

SEQ ID NO: 876401 - DNA, 15 bp, Homo sapiens
tgagctccagtgtga

SEQ ID NO: 876402 - DNA, 15 bp, Homo sapiens
gagctccagtgtgaa

SEQ ID NO: 876403 - DNA, 15 bp, Homo sapiens
agctccagtgtgaaa

SEQ ID NO: 876404 - DNA, 15 bp, Homo sapiens
gctccagtgtgaaat

SEQ ID NO: 876405 - DNA, 15 bp, Homo sapiens
ctccagtgtgaaatt

SEQ ID NO: 876406 - DNA, 15 bp, Homo sapiens
tccagtgtgaaatta

SEQ ID NO: 876407 - DNA, 15 bp, Homo sapiens
ccagtgtgaaattat

SEQ ID NO: 876408 - DNA, 15 bp, Homo sapiens
cagtgtgaaattatg

SEQ ID NO: 876409 - DNA, 15 bp, Homo sapiens
agtgtgaaattatgc

SEQ ID NO: 876410 - DNA, 15 bp, Homo sapiens
gtgtgaaattatgcc

SEQ ID NO: 876411 - DNA, 15 bp, Homo sapiens
tgtgaaattatgcct

SEQ ID NO: 876412 - DNA, 15 bp, Homo sapiens
gtgaaattatgcctg

SEQ ID NO: 876413 - DNA, 15 bp, Homo sapiens
tgaaattatgcctgg

SEQ ID NO: 876414 - DNA, 15 bp, Homo sapiens
gaaattatgcctggt

SEQ ID NO: 876415 - DNA, 15 bp, Homo sapiens
aaattatgcctggtt

SEQ ID NO: 876416 - DNA, 15 bp, Homo sapiens
aattatgcctggttt

SEQ ID NO: 876417 - DNA, 15 bp, Homo sapiens
attatgcctggtttc

SEQ ID NO: 876418 - DNA, 15 bp, Homo sapiens
ttatgcctggtttct

SEQ ID NO: 876419 - DNA, 15 bp, Homo sapiens
tatgcctggtttctg

SEQ ID NO: 876420 - DNA, 15 bp, Homo sapiens
atgcctggtttctgg

SEQ ID NO: 876421 - DNA, 15 bp, Homo sapiens
tgcctggtttctgga

SEQ ID NO: 876422 - DNA, 15 bp, Homo sapiens
gcctggtttctggaa

SEQ ID NO: 876423 - DNA, 15 bp, Homo sapiens
cctggtttctggaaa

SEQ ID NO: 876424 - DNA, 15 bp, Homo sapiens
ctggtttctggaaac

SEQ ID NO: 876425 - DNA, 15 bp, Homo sapiens
tggtttctggaaacc

SEQ ID NO: 876426 - DNA, 15 bp, Homo sapiens
ggtttctggaaacca

SEQ ID NO: 876427 - DNA, 15 bp, Homo sapiens
gtttctggaaaccac

SEQ ID NO: 876428 - DNA, 15 bp, Homo sapiens
tttctggaaaccact

SEQ ID NO: 876429 - DNA, 15 bp, Homo sapiens
ttctggaaaccacta

SEQ ID NO: 876430 - DNA, 15 bp, Homo sapiens
tctggaaaccactac

SEQ ID NO: 876431 - DNA, 15 bp, Homo sapiens
ctggaaaccactacc

SEQ ID NO: 876432 - DNA, 15 bp, Homo sapiens
tggaaaccactaccc

SEQ ID NO: 876433 - DNA, 15 bp, Homo sapiens
ggaaaccactacccc

SEQ ID NO: 876434 - DNA, 15 bp, Homo sapiens
gaaaccactacccca

SEQ ID NO: 876435 - DNA, 15 bp, Homo sapiens
aaaccactaccccag

SEQ ID NO: 876436 - DNA, 15 bp, Homo sapiens
aaccactaccccagt

SEQ ID NO: 876437 - DNA, 15 bp, Homo sapiens
accactaccccagtt

SEQ ID NO: 876438 - DNA, 15 bp, Homo sapiens
ccactaccccagtta

SEQ ID NO: 876439 - DNA, 15 bp, Homo sapiens
cactaccccagttaa

SEQ ID NO: 876440 - DNA, 15 bp, Homo sapiens
actaccccagttaat

SEQ ID NO: 876441 - DNA, 15 bp, Homo sapiens
ctaccccagttaatg

SEQ ID NO: 876442 - DNA, 15 bp, Homo sapiens
taccccagttaatga

SEQ ID NO: 876443 - DNA, 15 bp, Homo sapiens
accccagttaatgaa

SEQ ID NO: 876444 - DNA, 15 bp, Homo sapiens
ccccagttaatgaag

SEQ ID NO: 876445 - DNA, 15 bp, Homo sapiens
cccagttaatgaagc

SEQ ID NO: 876446 - DNA, 15 bp, Homo sapiens
ccagttaatgaagct

SEQ ID NO: 876447 - DNA, 15 bp, Homo sapiens
cagttaatgaagctt

SEQ ID NO: 876448 - DNA, 15 bp, Homo sapiens
agttaatgaagcttg

SEQ ID NO: 876449 - DNA, 15 bp, Homo sapiens
gttaatgaagcttga

SEQ ID NO: 876450 - DNA, 15 bp, Homo sapiens
ttaatgaagcttgac

SEQ ID NO: 876451 - DNA, 15 bp, Homo sapiens
taatgaagcttgaca

SEQ ID NO: 876452 - DNA, 15 bp, Homo sapiens
aatgaagcttgacat

SEQ ID NO: 876453 - DNA, 15 bp, Homo sapiens
atgaagcttgacatt

SEQ ID NO: 876454 - DNA, 15 bp, Homo sapiens
tgaagcttgacatta

SEQ ID NO: 876455 - DNA, 15 bp, Homo sapiens
gaagcttgacattag

SEQ ID NO: 876456 - DNA, 15 bp, Homo sapiens
aagcttgacattagc

SEQ ID NO: 876457 - DNA, 15 bp, Homo sapiens
agcttgacattagct

SEQ ID NO: 876458 - DNA, 15 bp, Homo sapiens
gcttgacattagctg

SEQ ID NO: 876459 - DNA, 15 bp, Homo sapiens
cttgacattagctgt

SEQ ID NO: 876460 - DNA, 15 bp, Homo sapiens
ttgacattagctgtc

SEQ ID NO: 876461 - DNA, 15 bp, Homo sapiens
tgacattagctgtct

SEQ ID NO: 876462 - DNA, 15 bp, Homo sapiens
gacattagctgtctt

SEQ ID NO: 876463 - DNA, 15 bp, Homo sapiens
acattagctgtcttt

SEQ ID NO: 876464 - DNA, 15 bp, Homo sapiens
cattagctgtctttt

SEQ ID NO: 876465 - DNA, 15 bp, Homo sapiens
attagctgtcttttt

SEQ ID NO: 876466 - DNA, 15 bp, Homo sapiens
ttagctgtctttttt

SEQ ID NO: 876467 - DNA, 15 bp, Homo sapiens
tagctgtcttttttc

SEQ ID NO: 876468 - DNA, 15 bp, Homo sapiens
agctgtcttttttct

SEQ ID NO: 876469 - DNA, 15 bp, Homo sapiens
gctgtcttttttctt

SEQ ID NO: 876470 - DNA, 15 bp, Homo sapiens
ctgtcttttttcttt

SEQ ID NO: 876471 - DNA, 15 bp, Homo sapiens
tgtcttttttctttt

SEQ ID NO: 876472 - DNA, 15 bp, Homo sapiens
gtcttttttcttttt

SEQ ID NO: 876473 - DNA, 15 bp, Homo sapiens
tcttttttcttttta

SEQ ID NO: 876474 - DNA, 15 bp, Homo sapiens
cttttttctttttat

SEQ ID NO: 876475 - DNA, 15 bp, Homo sapiens
ttttttctttttatt

SEQ ID NO: 876476 - DNA, 15 bp, Homo sapiens
tttttctttttattg

SEQ ID NO: 876477 - DNA, 15 bp, Homo sapiens
ttttctttttattga

SEQ ID NO: 876478 - DNA, 15 bp, Homo sapiens
tttctttttattgaa

SEQ ID NO: 876479 - DNA, 15 bp, Homo sapiens
ttctttttattgaag

SEQ ID NO: 876480 - DNA, 15 bp, Homo sapiens
tctttttattgaagg

SEQ ID NO: 876481 - DNA, 15 bp, Homo sapiens
ctttttattgaaggg

SEQ ID NO: 876482 - DNA, 15 bp, Homo sapiens
tttttattgaagggc

SEQ ID NO: 876483 - DNA, 15 bp, Homo sapiens
ttttattgaagggcg

SEQ ID NO: 876484 - DNA, 15 bp, Homo sapiens
tttattgaagggcga

SEQ ID NO: 876485 - DNA, 15 bp, Homo sapiens
ttattgaagggcgat

SEQ ID NO: 876486 - DNA, 15 bp, Homo sapiens
tattgaagggcgatc

SEQ ID NO: 876487 - DNA, 15 bp, Homo sapiens
attgaagggcgatcg

SEQ ID NO: 876488 - DNA, 15 bp, Homo sapiens
ttgaagggcgatcga

SEQ ID NO: 876489 - DNA, 15 bp, Homo sapiens
tgaagggcgatcgat

SEQ ID NO: 876490 - DNA, 15 bp, Homo sapiens
gaagggcgatcgatc

SEQ ID NO: 876491 - DNA, 15 bp, Homo sapiens
aagggcgatcgatca

SEQ ID NO: 876492 - DNA, 15 bp, Homo sapiens
agggcgatcgatcat

SEQ ID NO: 876493 - DNA, 15 bp, Homo sapiens
gggcgatcgatcatc

SEQ ID NO: 876494 - DNA, 15 bp, Homo sapiens
ggcgatcgatcatca

SEQ ID NO: 876495 - DNA, 15 bp, Homo sapiens
gcgatcgatcatcag

SEQ ID NO: 876496 - DNA, 15 bp, Homo sapiens
cgatcgatcatcagg

SEQ ID NO: 876497 - DNA, 15 bp, Homo sapiens
gatcgatcatcaggc

SEQ ID NO: 876498 - DNA, 15 bp, Homo sapiens
atcgatcatcaggct

SEQ ID NO: 876499 - DNA, 15 bp, Homo sapiens
tcgatcatcaggctt

SEQ ID NO: 876500 - DNA, 15 bp, Homo sapiens
cgatcatcaggcttg

SEQ ID NO: 876501 - DNA, 15 bp, Homo sapiens
gatcatcaggcttgc

SEQ ID NO: 876502 - DNA, 15 bp, Homo sapiens
atcatcaggcttgct

SEQ ID NO: 876503 - DNA, 15 bp, Homo sapiens
tcatcaggcttgctt

SEQ ID NO: 876504 - DNA, 15 bp, Homo sapiens
catcaggcttgctta

SEQ ID NO: 876505 - DNA, 15 bp, Homo sapiens
atcaggcttgcttat

SEQ ID NO: 876506 - DNA, 15 bp, Homo sapiens
tcaggcttgcttatt

SEQ ID NO: 876507 - DNA, 15 bp, Homo sapiens
caggcttgcttattt

SEQ ID NO: 876508 - DNA, 15 bp, Homo sapiens
aggcttgcttatttg

SEQ ID NO: 876509 - DNA, 15 bp, Homo sapiens
ggcttgcttatttgc

SEQ ID NO: 876510 - DNA, 15 bp, Homo sapiens
gcttgcttatttgct

SEQ ID NO: 876511 - DNA, 15 bp, Homo sapiens
cttgcttatttgctt

SEQ ID NO: 876512 - DNA, 15 bp, Homo sapiens
ttgcttatttgcttt

SEQ ID NO: 876513 - DNA, 15 bp, Homo sapiens
tgcttatttgctttt

SEQ ID NO: 876514 - DNA, 15 bp, Homo sapiens
gcttatttgcttttc

SEQ ID NO: 876515 - DNA, 15 bp, Homo sapiens
cttatttgcttttct

SEQ ID NO: 876516 - DNA, 15 bp, Homo sapiens
ttatttgcttttctg

SEQ ID NO: 876517 - DNA, 15 bp, Homo sapiens
tatttgcttttctgg

SEQ ID NO: 876518 - DNA, 15 bp, Homo sapiens
atttgcttttctgga

SEQ ID NO: 876519 - DNA, 15 bp, Homo sapiens
ttgcttttctggatg

SEQ ID NO: 876520 - DNA, 15 bp, Homo sapiens
tgcttttctggatga

SEQ ID NO: 876521 - DNA, 15 bp, Homo sapiens
gcttttctggatgaa

SEQ ID NO: 876522 - DNA, 15 bp, Homo sapiens
cttttctggatgaaa

SEQ ID NO: 876523 - DNA, 15 bp, Homo sapiens
ttttctggatgaaag

SEQ ID NO: 876524 - DNA, 15 bp, Homo sapiens
tttctggatgaaagt

SEQ ID NO: 876525 - DNA, 15 bp, Homo sapiens
ttctggatgaaagtt

SEQ ID NO: 876526 - DNA, 15 bp, Homo sapiens
tctggatgaaagttg

SEQ ID NO: 876527 - DNA, 15 bp, Homo sapiens
ctggatgaaagttgt

SEQ ID NO: 876528 - DNA, 15 bp, Homo sapiens
tggatgaaagttgta

SEQ ID NO: 876529 - DNA, 15 bp, Homo sapiens
ggatgaaagttgtag

SEQ ID NO: 876530 - DNA, 15 bp, Homo sapiens
gatgaaagttgtagg

SEQ ID NO: 876531 - DNA, 15 bp, Homo sapiens
atgaaagttgtaggc

SEQ ID NO: 876532 - DNA, 15 bp, Homo sapiens
tgaaagttgtaggcc

SEQ ID NO: 876533 - DNA, 15 bp, Homo sapiens
gaaagttgtaggcca

SEQ ID NO: 876534 - DNA, 15 bp, Homo sapiens
aaagttgtaggccac

SEQ ID NO: 876535 - DNA, 15 bp, Homo sapiens
aagttgtaggccact

SEQ ID NO: 876536 - DNA, 15 bp, Homo sapiens
agttgtaggccactg

SEQ ID NO: 876537 - DNA, 15 bp, Homo sapiens
gttgtaggccactgt

SEQ ID NO: 876538 - DNA, 15 bp, Homo sapiens
ttgtaggccactgtt

SEQ ID NO: 876539 - DNA, 15 bp, Homo sapiens
tgtaggccactgtta

SEQ ID NO: 876540 - DNA, 15 bp, Homo sapiens
gtaggccactgttaa

SEQ ID NO: 876541 - DNA, 15 bp, Homo sapiens
taggccactgttaac

SEQ ID NO: 876542 - DNA, 15 bp, Homo sapiens
aggccactgttaaca

SEQ ID NO: 876543 - DNA, 15 bp, Homo sapiens
ggccactgttaacaa

SEQ ID NO: 876544 - DNA, 15 bp, Homo sapiens
gccactgttaacaac

SEQ ID NO: 876545 - DNA, 15 bp, Homo sapiens
ccactgttaacaacg

SEQ ID NO: 876546 - DNA, 15 bp, Homo sapiens
cactgttaacaacgt

SEQ ID NO: 876547 - DNA, 15 bp, Homo sapiens
actgttaacaacgtc

SEQ ID NO: 876548 - DNA, 15 bp, Homo sapiens
ctgttaacaacgtct

SEQ ID NO: 876549 - DNA, 15 bp, Homo sapiens
tgttaacaacgtctg

SEQ ID NO: 876550 - DNA, 15 bp, Homo sapiens
gttaacaacgtctga

SEQ ID NO: 876551 - DNA, 15 bp, Homo sapiens
ttaacaacgtctgac

SEQ ID NO: 876552 - DNA, 15 bp, Homo sapiens
taacaacgtctgact

SEQ ID NO: 876553 - DNA, 15 bp, Homo sapiens
aacaacgtctgactc

SEQ ID NO: 876554 - DNA, 15 bp, Homo sapiens
acaacgtctgactcc

SEQ ID NO: 876555 - DNA, 15 bp, Homo sapiens
caacgtctgactcct

SEQ ID NO: 876556 - DNA, 15 bp, Homo sapiens
aacgtctgactcctt

SEQ ID NO: 876557 - DNA, 15 bp, Homo sapiens
acgtctgactccttc

SEQ ID NO: 876558 - DNA, 15 bp, Homo sapiens
cgtctgactccttcc

SEQ ID NO: 876559 - DNA, 15 bp, Homo sapiens
gtctgactccttccc

SEQ ID NO: 876560 - DNA, 15 bp, Homo sapiens
tctgactccttccca

SEQ ID NO: 876561 - DNA, 15 bp, Homo sapiens
ctgactccttcccag

SEQ ID NO: 876562 - DNA, 15 bp, Homo sapiens
tgactccttcccaga

SEQ ID NO: 876563 - DNA, 15 bp, Homo sapiens
gactccttcccagaa

SEQ ID NO: 876564 - DNA, 15 bp, Homo sapiens
actccttcccagaaa

SEQ ID NO: 876565 - DNA, 15 bp, Homo sapiens
ctccttcccagaaag

SEQ ID NO: 876566 - DNA, 15 bp, Homo sapiens
tccttcccagaaaga

SEQ ID NO: 876567 - DNA, 15 bp, Homo sapiens
ccttcccagaaagaa

SEQ ID NO: 876568 - DNA, 15 bp, Homo sapiens
cttcccagaaagaat

SEQ ID NO: 876569 - DNA, 15 bp, Homo sapiens
ttcccagaaagaatc

SEQ ID NO: 876570 - DNA, 15 bp, Homo sapiens
tcccagaaagaatca

SEQ ID NO: 876571 - DNA, 15 bp, Homo sapiens
cccagaaagaatcaa

SEQ ID NO: 876572 - DNA, 15 bp, Homo sapiens
ccagaaagaatcaag

SEQ ID NO: 876573 - DNA, 15 bp, Homo sapiens
cagaaagaatcaagt

SEQ ID NO: 876574 - DNA, 15 bp, Homo sapiens
agaaagaatcaagta

SEQ ID NO: 876575 - DNA, 15 bp, Homo sapiens
gaaagaatcaagtat

SEQ ID NO: 876576 - DNA, 15 bp, Homo sapiens
aaagaatcaagtata

SEQ ID NO: 876577 - DNA, 15 bp, Homo sapiens
aagaatcaagtatac

SEQ ID NO: 876578 - DNA, 15 bp, Homo sapiens
agaatcaagtatacc

SEQ ID NO: 876579 - DNA, 15 bp, Homo sapiens
gaatcaagtatacca

SEQ ID NO: 876580 - DNA, 15 bp, Homo sapiens
aatcaagtataccaa

SEQ ID NO: 876581 - DNA, 15 bp, Homo sapiens
atcaagtataccaaa

SEQ ID NO: 876582 - DNA, 15 bp, Homo sapiens
tcaagtataccaaac

SEQ ID NO: 876583 - DNA, 15 bp, Homo sapiens
caagtataccaaacc

SEQ ID NO: 876584 - DNA, 15 bp, Homo sapiens
aagtataccaaacca

SEQ ID NO: 876585 - DNA, 15 bp, Homo sapiens
agtataccaaaccaa

SEQ ID NO: 876586 - DNA, 15 bp, Homo sapiens
gtataccaaaccaaa

SEQ ID NO: 876587 - DNA, 15 bp, Homo sapiens
tataccaaaccaaaa

SEQ ID NO: 876588 - DNA, 15 bp, Homo sapiens
ataccaaaccaaaat

SEQ ID NO: 876589 - DNA, 15 bp, Homo sapiens
taccaaaccaaaatg

SEQ ID NO: 876590 - DNA, 15 bp, Homo sapiens
accaaaccaaaatgt

SEQ ID NO: 876591 - DNA, 15 bp, Homo sapiens
ccaaaccaaaatgta

SEQ ID NO: 876592 - DNA, 15 bp, Homo sapiens
caaaccaaaatgtat

SEQ ID NO: 876593 - DNA, 15 bp, Homo sapiens
aaaccaaaatgtatc

SEQ ID NO: 876594 - DNA, 15 bp, Homo sapiens
aaccaaaatgtatct

SEQ ID NO: 876595 - DNA, 15 bp, Homo sapiens
accaaaatgtatctc

SEQ ID NO: 876596 - DNA, 15 bp, Homo sapiens
ccaaaatgtatctcc

SEQ ID NO: 876597 - DNA, 15 bp, Homo sapiens
caaaatgtatctcct

SEQ ID NO: 876598 - DNA, 15 bp, Homo sapiens
aaaatgtatctcctc

SEQ ID NO: 876599 - DNA, 15 bp, Homo sapiens
aaatgtatctcctct

SEQ ID NO: 876600 - DNA, 15 bp, Homo sapiens
aatgtatctcctctt

SEQ ID NO: 876601 - DNA, 15 bp, Homo sapiens
atgtatctcctcttc

SEQ ID NO: 876602 - DNA, 15 bp, Homo sapiens
tgtatctcctcttcc

SEQ ID NO: 876603 - DNA, 15 bp, Homo sapiens
gtatctcctcttccc

SEQ ID NO: 876604 - DNA, 15 bp, Homo sapiens
tatctcctcttcccc

SEQ ID NO: 876605 - DNA, 15 bp, Homo sapiens
atctcctcttcccca

SEQ ID NO: 876606 - DNA, 15 bp, Homo sapiens
tctcctcttccccaa

SEQ ID NO: 876607 - DNA, 15 bp, Homo sapiens
ctcctcttccccaag

SEQ ID NO: 876608 - DNA, 15 bp, Homo sapiens
tcctcttccccaagg

SEQ ID NO: 876609 - DNA, 15 bp, Homo sapiens
cctcttccccaaggc

SEQ ID NO: 876610 - DNA, 15 bp, Homo sapiens
ctcttccccaaggca

SEQ ID NO: 876611 - DNA, 15 bp, Homo sapiens
tcttccccaaggcac

SEQ ID NO: 876612 - DNA, 15 bp, Homo sapiens
cttccccaaggcaca

SEQ ID NO: 876613 - DNA, 15 bp, Homo sapiens
ttccccaaggcacac

SEQ ID NO: 876614 - DNA, 15 bp, Homo sapiens
tccccaaggcacaca

SEQ ID NO: 876615 - DNA, 15 bp, Homo sapiens
ccccaaggcacacat

SEQ ID NO: 876616 - DNA, 15 bp, Homo sapiens
cccaaggcacacatt

SEQ ID NO: 876617 - DNA, 15 bp, Homo sapiens
ccaaggcacacattt

SEQ ID NO: 876618 - DNA, 15 bp, Homo sapiens
caaggcacacatttt

SEQ ID NO: 876619 - DNA, 15 bp, Homo sapiens
aaggcacacattttc

SEQ ID NO: 876620 - DNA, 15 bp, Homo sapiens
aggcacacattttct

SEQ ID NO: 876621 - DNA, 15 bp, Homo sapiens
ggcacacattttcta

SEQ ID NO: 876622 - DNA, 15 bp, Homo sapiens
gcacacattttctaa

SEQ ID NO: 876623 - DNA, 15 bp, Homo sapiens
cacacattttctaaa

SEQ ID NO: 876624 - DNA, 15 bp, Homo sapiens
acacattttctaaaa

SEQ ID NO: 876625 - DNA, 15 bp, Homo sapiens
cacattttctaaaag

SEQ ID NO: 876626 - DNA, 15 bp, Homo sapiens
acattttctaaaagt

SEQ ID NO: 876627 - DNA, 15 bp, Homo sapiens
cattttctaaaagtg

SEQ ID NO: 876628 - DNA, 15 bp, Homo sapiens
attttctaaaagtgt

SEQ ID NO: 876629 - DNA, 15 bp, Homo sapiens
ttttctaaaagtgtt

SEQ ID NO: 876630 - DNA, 15 bp, Homo sapiens
tttctaaaagtgttt

SEQ ID NO: 876631 - DNA, 15 bp, Homo sapiens
ttctaaaagtgtttt

SEQ ID NO: 876632 - DNA, 15 bp, Homo sapiens
tctaaaagtgttttt

SEQ ID NO: 876633 - DNA, 15 bp, Homo sapiens
ctaaaagtgtttttt

SEQ ID NO: 876634 - DNA, 15 bp, Homo sapiens
taaaagtgttttttg

SEQ ID NO: 876635 - DNA, 15 bp, Homo sapiens
aaaagtgttttttgt

SEQ ID NO: 876636 - DNA, 15 bp, Homo sapiens
aaagtgttttttgtc

SEQ ID NO: 876637 - DNA, 15 bp, Homo sapiens
aagtgttttttgtca

SEQ ID NO: 876638 - DNA, 15 bp, Homo sapiens
agtgttttttgtcag

SEQ ID NO: 876639 - DNA, 15 bp, Homo sapiens
gtgttttttgtcagc

SEQ ID NO: 876640 - DNA, 15 bp, Homo sapiens
tgttttttgtcagct

SEQ ID NO: 876641 - DNA, 15 bp, Homo sapiens
gttttttgtcagctt

SEQ ID NO: 876642 - DNA, 15 bp, Homo sapiens
ttttttgtcagcttg

SEQ ID NO: 876643 - DNA, 15 bp, Homo sapiens
tttttgtcagcttgc

SEQ ID NO: 876644 - DNA, 15 bp, Homo sapiens
ttttgtcagcttgct

SEQ ID NO: 876645 - DNA, 15 bp, Homo sapiens
tttgtcagcttgctg

SEQ ID NO: 876646 - DNA, 15 bp, Homo sapiens
ttgtcagcttgctgt

SEQ ID NO: 876647 - DNA, 15 bp, Homo sapiens
tgtcagcttgctgtt

SEQ ID NO: 876648 - DNA, 15 bp, Homo sapiens
gtcagcttgctgttt

SEQ ID NO: 876649 - DNA, 15 bp, Homo sapiens
tcagcttgctgtttc

SEQ ID NO: 876650 - DNA, 15 bp, Homo sapiens
cagcttgctgtttca

SEQ ID NO: 876651 - DNA, 15 bp, Homo sapiens
agcttgctgtttcat

SEQ ID NO: 876652 - DNA, 15 bp, Homo sapiens
gcttgctgtttcatt

SEQ ID NO: 876653 - DNA, 15 bp, Homo sapiens
cttgctgtttcattt

SEQ ID NO: 876654 - DNA, 15 bp, Homo sapiens
ttgctgtttcatttg

SEQ ID NO: 876655 - DNA, 15 bp, Homo sapiens
tgctgtttcatttgc

SEQ ID NO: 876656 - DNA, 15 bp, Homo sapiens
gctgtttcatttgct

SEQ ID NO: 876657 - DNA, 15 bp, Homo sapiens
ctgtttcatttgctt

SEQ ID NO: 876658 - DNA, 15 bp, Homo sapiens
tgtttcatttgcttg

SEQ ID NO: 876659 - DNA, 15 bp, Homo sapiens
gtttcatttgcttgc

SEQ ID NO: 876660 - DNA, 15 bp, Homo sapiens
tttcatttgcttgct

SEQ ID NO: 876661 - DNA, 15 bp, Homo sapiens
ttcatttgcttgctt

SEQ ID NO: 876662 - DNA, 15 bp, Homo sapiens
tcatttgcttgcttg

SEQ ID NO: 876663 - DNA, 15 bp, Homo sapiens
catttgcttgcttgc

SEQ ID NO: 876664 - DNA, 15 bp, Homo sapiens
atttgcttgcttgct

SEQ ID NO: 876665 - DNA, 15 bp, Homo sapiens
tttgcttgcttgctg

SEQ ID NO: 876666 - DNA, 15 bp, Homo sapiens
ttgcttgcttgctga

SEQ ID NO: 876667 - DNA, 15 bp, Homo sapiens
tgcttgcttgctgat

SEQ ID NO: 876668 - DNA, 15 bp, Homo sapiens
gcttgcttgctgata

SEQ ID NO: 876669 - DNA, 15 bp, Homo sapiens
cttgcttgctgatat

SEQ ID NO: 876670 - DNA, 15 bp, Homo sapiens
ttgcttgctgatatt

SEQ ID NO: 876671 - DNA, 15 bp, Homo sapiens
tgcttgctgatatta

SEQ ID NO: 876672 - DNA, 15 bp, Homo sapiens
gcttgctgatattat

SEQ ID NO: 876673 - DNA, 15 bp, Homo sapiens
cttgctgatattatg

SEQ ID NO: 876674 - DNA, 15 bp, Homo sapiens
ttgctgatattatgg

SEQ ID NO: 876675 - DNA, 15 bp, Homo sapiens
tgctgatattatggg

SEQ ID NO: 876676 - DNA, 15 bp, Homo sapiens
gctgatattatggga

SEQ ID NO: 876677 - DNA, 15 bp, Homo sapiens
ctgatattatgggaa

SEQ ID NO: 876678 - DNA, 15 bp, Homo sapiens
tgatattatgggaac

SEQ ID NO: 876679 - DNA, 15 bp, Homo sapiens
gatattatgggaaca

SEQ ID NO: 876680 - DNA, 15 bp, Homo sapiens
atattatgggaacat

SEQ ID NO: 876681 - DNA, 15 bp, Homo sapiens
tattatgggaacata

SEQ ID NO: 876682 - DNA, 15 bp, Homo sapiens
attatgggaacatag

SEQ ID NO: 876683 - DNA, 15 bp, Homo sapiens
ttatgggaacatagt

SEQ ID NO: 876684 - DNA, 15 bp, Homo sapiens
tatgggaacatagtt

SEQ ID NO: 876685 - DNA, 15 bp, Homo sapiens
atgggaacatagttc

SEQ ID NO: 876686 - DNA, 15 bp, Homo sapiens
tgggaacatagttct

SEQ ID NO: 876687 - DNA, 15 bp, Homo sapiens
gggaacatagttctg

SEQ ID NO: 876688 - DNA, 15 bp, Homo sapiens
ggaacatagttctga

SEQ ID NO: 876689 - DNA, 15 bp, Homo sapiens
gaacatagttctgag

SEQ ID NO: 876690 - DNA, 15 bp, Homo sapiens
aacatagttctgagt

SEQ ID NO: 876691 - DNA, 15 bp, Homo sapiens
acatagttctgagta

SEQ ID NO: 876692 - DNA, 15 bp, Homo sapiens
catagttctgagtat

SEQ ID NO: 876693 - DNA, 15 bp, Homo sapiens
atagttctgagtatc

SEQ ID NO: 876694 - DNA, 15 bp, Homo sapiens
tagttctgagtatct

SEQ ID NO: 876695 - DNA, 15 bp, Homo sapiens
agttctgagtatctt

SEQ ID NO: 876696 - DNA, 15 bp, Homo sapiens
gttctgagtatcttt

SEQ ID NO: 876697 - DNA, 15 bp, Homo sapiens
ttctgagtatctttt

SEQ ID NO: 876698 - DNA, 15 bp, Homo sapiens
tctgagtatctttta

SEQ ID NO: 876699 - DNA, 15 bp, Homo sapiens
ctgagtatcttttaa

SEQ ID NO: 876700 - DNA, 15 bp, Homo sapiens
tgagtatcttttaaa

SEQ ID NO: 876701 - DNA, 15 bp, Homo sapiens
gagtatcttttaaat

SEQ ID NO: 876702 - DNA, 15 bp, Homo sapiens
agtatcttttaaatc

SEQ ID NO: 876703 - DNA, 15 bp, Homo sapiens
gtatcttttaaatcc

SEQ ID NO: 876704 - DNA, 15 bp, Homo sapiens
tatcttttaaatcct

SEQ ID NO: 876705 - DNA, 15 bp, Homo sapiens
atcttttaaatccta

SEQ ID NO: 876706 - DNA, 15 bp, Homo sapiens
tcttttaaatcctaa

SEQ ID NO: 876707 - DNA, 15 bp, Homo sapiens
cttttaaatcctaaa

SEQ ID NO: 876708 - DNA, 15 bp, Homo sapiens
ttttaaatcctaaat

SEQ ID NO: 876709 - DNA, 15 bp, Homo sapiens
tttaaatcctaaatg

SEQ ID NO: 876710 - DNA, 15 bp, Homo sapiens
ttaaatcctaaatgc

SEQ ID NO: 876711 - DNA, 15 bp, Homo sapiens
taaatcctaaatgca

SEQ ID NO: 876712 - DNA, 15 bp, Homo sapiens
aaatcctaaatgcac

SEQ ID NO: 876713 - DNA, 15 bp, Homo sapiens
aatcctaaatgcact

SEQ ID NO: 876714 - DNA, 15 bp, Homo sapiens
atcctaaatgcacta

SEQ ID NO: 876715 - DNA, 15 bp, Homo sapiens
tcctaaatgcactag

SEQ ID NO: 876716 - DNA, 15 bp, Homo sapiens
cctaaatgcactagg

SEQ ID NO: 876717 - DNA, 15 bp, Homo sapiens
ctaaatgcactaggg

SEQ ID NO: 876718 - DNA, 15 bp, Homo sapiens
taaatgcactagggg

SEQ ID NO: 876719 - DNA, 15 bp, Homo sapiens
aaatgcactaggggc

SEQ ID NO: 876720 - DNA, 15 bp, Homo sapiens
aatgcactaggggca

SEQ ID NO: 876721 - DNA, 15 bp, Homo sapiens
atgcactaggggcag

SEQ ID NO: 876722 - DNA, 15 bp, Homo sapiens
tgcactaggggcagg

SEQ ID NO: 876723 - DNA, 15 bp, Homo sapiens
gcactaggggcaggt

SEQ ID NO: 876724 - DNA, 15 bp, Homo sapiens
cactaggggcaggtc

SEQ ID NO: 876725 - DNA, 15 bp, Homo sapiens
actaggggcaggtct

SEQ ID NO: 876726 - DNA, 15 bp, Homo sapiens
ctaggggcaggtctc

SEQ ID NO: 876727 - DNA, 15 bp, Homo sapiens
taggggcaggtctca

SEQ ID NO: 876728 - DNA, 15 bp, Homo sapiens
aggggcaggtctcag

SEQ ID NO: 876729 - DNA, 15 bp, Homo sapiens
ggggcaggtctcagg

SEQ ID NO: 876730 - DNA, 15 bp, Homo sapiens
gggcaggtctcaggt

SEQ ID NO: 876731 - DNA, 15 bp, Homo sapiens
ggcaggtctcaggtc

SEQ ID NO: 876732 - DNA, 15 bp, Homo sapiens
gcaggtctcaggtca

SEQ ID NO: 876733 - DNA, 15 bp, Homo sapiens
caggtctcaggtcat

SEQ ID NO: 876734 - DNA, 15 bp, Homo sapiens
aggtctcaggtcatc

SEQ ID NO: 876735 - DNA, 15 bp, Homo sapiens
ggtctcaggtcatcc

SEQ ID NO: 876736 - DNA, 15 bp, Homo sapiens
gtctcaggtcatcct

SEQ ID NO: 876737 - DNA, 15 bp, Homo sapiens
tctcaggtcatcctg

SEQ ID NO: 876738 - DNA, 15 bp, Homo sapiens
ctcaggtcatcctga

SEQ ID NO: 876739 - DNA, 15 bp, Homo sapiens
tcaggtcatcctgag

SEQ ID NO: 876740 - DNA, 15 bp, Homo sapiens
caggtcatcctgagg

SEQ ID NO: 876741 - DNA, 15 bp, Homo sapiens
aggtcatcctgaggt

SEQ ID NO: 876742 - DNA, 15 bp, Homo sapiens
ggtcatcctgaggta

SEQ ID NO: 876743 - DNA, 15 bp, Homo sapiens
gtcatcctgaggtaa

SEQ ID NO: 876744 - DNA, 15 bp, Homo sapiens
tcatcctgaggtaat

SEQ ID NO: 876745 - DNA, 15 bp, Homo sapiens
catcctgaggtaata

SEQ ID NO: 876746 - DNA, 15 bp, Homo sapiens
atcctgaggtaatac

SEQ ID NO: 876747 - DNA, 15 bp, Homo sapiens
tcctgaggtaatact

SEQ ID NO: 876748 - DNA, 15 bp, Homo sapiens
cctgaggtaatactt

SEQ ID NO: 876749 - DNA, 15 bp, Homo sapiens
ctgaggtaatacttt

SEQ ID NO: 876750 - DNA, 15 bp, Homo sapiens
tgaggtaatactttc

SEQ ID NO: 876751 - DNA, 15 bp, Homo sapiens
gaggtaatactttct

SEQ ID NO: 876752 - DNA, 15 bp, Homo sapiens
aggtaatactttctc

SEQ ID NO: 876753 - DNA, 15 bp, Homo sapiens
ggtaatactttctct

SEQ ID NO: 876754 - DNA, 15 bp, Homo sapiens
gtaatactttctctc

SEQ ID NO: 876755 - DNA, 15 bp, Homo sapiens
taatactttctctcc

SEQ ID NO: 876756 - DNA, 15 bp, Homo sapiens
aatactttctctcca

SEQ ID NO: 876757 - DNA, 15 bp, Homo sapiens
atactttctctccaa

SEQ ID NO: 876758 - DNA, 15 bp, Homo sapiens
tactttctctccaac

SEQ ID NO: 876759 - DNA, 15 bp, Homo sapiens
actttctctccaacc

SEQ ID NO: 876760 - DNA, 15 bp, Homo sapiens
ctttctctccaacca

SEQ ID NO: 876761 - DNA, 15 bp, Homo sapiens
tttctctccaaccag

SEQ ID NO: 876762 - DNA, 15 bp, Homo sapiens
ttctctccaaccagt

SEQ ID NO: 876763 - DNA, 15 bp, Homo sapiens
tctctccaaccagta

SEQ ID NO: 876764 - DNA, 15 bp, Homo sapiens
ctctccaaccagtaa

SEQ ID NO: 876765 - DNA, 15 bp, Homo sapiens
tctccaaccagtaaa

SEQ ID NO: 876766 - DNA, 15 bp, Homo sapiens
ctccaaccagtaaac

SEQ ID NO: 876767 - DNA, 15 bp, Homo sapiens
tccaaccagtaaaca

SEQ ID NO: 876768 - DNA, 15 bp, Homo sapiens
ccaaccagtaaacag

SEQ ID NO: 876769 - DNA, 15 bp, Homo sapiens
caaccagtaaacagg

SEQ ID NO: 876770 - DNA, 15 bp, Homo sapiens
aaccagtaaacaggg

SEQ ID NO: 876771 - DNA, 15 bp, Homo sapiens
accagtaaacagggc

SEQ ID NO: 876772 - DNA, 15 bp, Homo sapiens
ccagtaaacagggca

SEQ ID NO: 876773 - DNA, 15 bp, Homo sapiens
cagtaaacagggcaa

SEQ ID NO: 876774 - DNA, 15 bp, Homo sapiens
agtaaacagggcaag

SEQ ID NO: 876775 - DNA, 15 bp, Homo sapiens
gtaaacagggcaaga

SEQ ID NO: 876776 - DNA, 15 bp, Homo sapiens
taaacagggcaagag

SEQ ID NO: 876777 - DNA, 15 bp, Homo sapiens
aaacagggcaagaga

SEQ ID NO: 876778 - DNA, 15 bp, Homo sapiens
aacagggcaagagaa

SEQ ID NO: 876779 - DNA, 15 bp, Homo sapiens
acagggcaagagaat

SEQ ID NO: 876780 - DNA, 15 bp, Homo sapiens
cagggcaagagaatt

SEQ ID NO: 876781 - DNA, 15 bp, Homo sapiens
agggcaagagaattt

SEQ ID NO: 876782 - DNA, 15 bp, Homo sapiens
gggcaagagaatttg

SEQ ID NO: 876783 - DNA, 15 bp, Homo sapiens
ggcaagagaatttga

SEQ ID NO: 876784 - DNA, 15 bp, Homo sapiens
gcaagagaatttgaa

SEQ ID NO: 876785 - DNA, 15 bp, Homo sapiens
caagagaatttgaac

SEQ ID NO: 876786 - DNA, 15 bp, Homo sapiens
aagagaatttgaacc

SEQ ID NO: 876787 - DNA, 15 bp, Homo sapiens
agagaatttgaacct

SEQ ID NO: 876788 - DNA, 15 bp, Homo sapiens
gagaatttgaacctg

SEQ ID NO: 876789 - DNA, 15 bp, Homo sapiens
agaatttgaacctgg

SEQ ID NO: 876790 - DNA, 15 bp, Homo sapiens
gaatttgaacctggc

SEQ ID NO: 876791 - DNA, 15 bp, Homo sapiens
aatttgaacctggct

SEQ ID NO: 876792 - DNA, 15 bp, Homo sapiens
atttgaacctggctc

SEQ ID NO: 876793 - DNA, 15 bp, Homo sapiens
ttgaacctggctcta

SEQ ID NO: 876794 - DNA, 15 bp, Homo sapiens
tgaacctggctctat

SEQ ID NO: 876795 - DNA, 15 bp, Homo sapiens
gaacctggctctata

SEQ ID NO: 876796 - DNA, 15 bp, Homo sapiens
aacctggctctatat

SEQ ID NO: 876797 - DNA, 15 bp, Homo sapiens
acctggctctatatc

SEQ ID NO: 876798 - DNA, 15 bp, Homo sapiens
cctggctctatatct

SEQ ID NO: 876799 - DNA, 15 bp, Homo sapiens
ctggctctatatctt

SEQ ID NO: 876800 - DNA, 15 bp, Homo sapiens
tggctctatatcttc

SEQ ID NO: 876801 - DNA, 15 bp, Homo sapiens
ggctctatatcttca

SEQ ID NO: 876802 - DNA, 15 bp, Homo sapiens
gctctatatcttcag

SEQ ID NO: 876803 - DNA, 15 bp, Homo sapiens
ctctatatcttcagg

SEQ ID NO: 876804 - DNA, 15 bp, Homo sapiens
tctatatcttcaggg

SEQ ID NO: 876805 - DNA, 15 bp, Homo sapiens
ctatatcttcagggc

SEQ ID NO: 876806 - DNA, 15 bp, Homo sapiens
tatatcttcagggca

SEQ ID NO: 876807 - DNA, 15 bp, Homo sapiens
atatcttcagggcaa

SEQ ID NO: 876808 - DNA, 15 bp, Homo sapiens
tatcttcagggcaag

SEQ ID NO: 876809 - DNA, 15 bp, Homo sapiens
atcttcagggcaagt

SEQ ID NO: 876810 - DNA, 15 bp, Homo sapiens
tcttcagggcaagtc

SEQ ID NO: 876811 - DNA, 15 bp, Homo sapiens
cttcagggcaagtct

SEQ ID NO: 876812 - DNA, 15 bp, Homo sapiens
ttcagggcaagtctg

SEQ ID NO: 876813 - DNA, 15 bp, Homo sapiens
tcagggcaagtctgc

SEQ ID NO: 876814 - DNA, 15 bp, Homo sapiens
cagggcaagtctgct

SEQ ID NO: 876815 - DNA, 15 bp, Homo sapiens
agggcaagtctgcta

SEQ ID NO: 876816 - DNA, 15 bp, Homo sapiens
gggcaagtctgctaa

SEQ ID NO: 876817 - DNA, 15 bp, Homo sapiens
ggcaagtctgctaat

SEQ ID NO: 876818 - DNA, 15 bp, Homo sapiens
gcaagtctgctaata

SEQ ID NO: 876819 - DNA, 15 bp, Homo sapiens
caagtctgctaatat

SEQ ID NO: 876820 - DNA, 15 bp, Homo sapiens
aagtctgctaatatc

SEQ ID NO: 876821 - DNA, 15 bp, Homo sapiens
agtctgctaatatcc

SEQ ID NO: 876822 - DNA, 15 bp, Homo sapiens
gtctgctaatatcct

SEQ ID NO: 876823 - DNA, 15 bp, Homo sapiens
tctgctaatatcctc

SEQ ID NO: 876824 - DNA, 15 bp, Homo sapiens
ctgctaatatcctct

SEQ ID NO: 876825 - DNA, 15 bp, Homo sapiens
tgctaatatcctctt

SEQ ID NO: 876826 - DNA, 15 bp, Homo sapiens
gctaatatcctcttg

SEQ ID NO: 876827 - DNA, 15 bp, Homo sapiens
ctaatatcctcttgc

SEQ ID NO: 876828 - DNA, 15 bp, Homo sapiens
taatatcctcttgca

SEQ ID NO: 876829 - DNA, 15 bp, Homo sapiens
aatatcctcttgcaa

SEQ ID NO: 876830 - DNA, 15 bp, Homo sapiens
atatcctcttgcaac

SEQ ID NO: 876831 - DNA, 15 bp, Homo sapiens
tatcctcttgcaact

SEQ ID NO: 876832 - DNA, 15 bp, Homo sapiens
atcctcttgcaactg

SEQ ID NO: 876833 - DNA, 15 bp, Homo sapiens
tcctcttgcaactga

SEQ ID NO: 876834 - DNA, 15 bp, Homo sapiens
cctcttgcaactgaa

SEQ ID NO: 876835 - DNA, 15 bp, Homo sapiens
ctcttgcaactgaaa

SEQ ID NO: 876836 - DNA, 15 bp, Homo sapiens
tcttgcaactgaaat

SEQ ID NO: 876837 - DNA, 15 bp, Homo sapiens
cttgcaactgaaata

SEQ ID NO: 876838 - DNA, 15 bp, Homo sapiens
ttgcaactgaaatat

SEQ ID NO: 876839 - DNA, 15 bp, Homo sapiens
tgcaactgaaatatg

SEQ ID NO: 876840 - DNA, 15 bp, Homo sapiens
gcaactgaaatatgt

SEQ ID NO: 876841 - DNA, 15 bp, Homo sapiens
caactgaaatatgtt

SEQ ID NO: 876842 - DNA, 15 bp, Homo sapiens
aactgaaatatgttc

SEQ ID NO: 876843 - DNA, 15 bp, Homo sapiens
actgaaatatgttct

SEQ ID NO: 876844 - DNA, 15 bp, Homo sapiens
ctgaaatatgttctt

SEQ ID NO: 876845 - DNA, 15 bp, Homo sapiens
tgaaatatgttcttc

SEQ ID NO: 876846 - DNA, 15 bp, Homo sapiens
gaaatatgttcttca

SEQ ID NO: 876847 - DNA, 15 bp, Homo sapiens
aaatatgttcttcat

SEQ ID NO: 876848 - DNA, 15 bp, Homo sapiens
aatatgttcttcatg

SEQ ID NO: 876849 - DNA, 15 bp, Homo sapiens
atatgttcttcatgg

SEQ ID NO: 876850 - DNA, 15 bp, Homo sapiens
tatgttcttcatggg

SEQ ID NO: 876851 - DNA, 15 bp, Homo sapiens
atgttcttcatgggc

SEQ ID NO: 876852 - DNA, 15 bp, Homo sapiens
tgttcttcatgggct

SEQ ID NO: 876853 - DNA, 15 bp, Homo sapiens
gttcttcatgggctg

SEQ ID NO: 876854 - DNA, 15 bp, Homo sapiens
tcttcatgggctgga

SEQ ID NO: 876855 - DNA, 15 bp, Homo sapiens
cttcatgggctggaa

SEQ ID NO: 876856 - DNA, 15 bp, Homo sapiens
ttcatgggctggaaa

SEQ ID NO: 876857 - DNA, 15 bp, Homo sapiens
tcatgggctggaaag

SEQ ID NO: 876858 - DNA, 15 bp, Homo sapiens
catgggctggaaaga

SEQ ID NO: 876859 - DNA, 15 bp, Homo sapiens
atgggctggaaagag

SEQ ID NO: 876860 - DNA, 15 bp, Homo sapiens
tgggctggaaagagt

SEQ ID NO: 876861 - DNA, 15 bp, Homo sapiens
gggctggaaagagtt

SEQ ID NO: 876862 - DNA, 15 bp, Homo sapiens
ggctggaaagagtta

SEQ ID NO: 876863 - DNA, 15 bp, Homo sapiens
gctggaaagagttaa

SEQ ID NO: 876864 - DNA, 15 bp, Homo sapiens
ctggaaagagttaat

SEQ ID NO: 876865 - DNA, 15 bp, Homo sapiens
tggaaagagttaatt

SEQ ID NO: 876866 - DNA, 15 bp, Homo sapiens
ggaaagagttaattt

SEQ ID NO: 876867 - DNA, 15 bp, Homo sapiens
gaaagagttaatttt

SEQ ID NO: 876868 - DNA, 15 bp, Homo sapiens
aaagagttaattttg

SEQ ID NO: 876869 - DNA, 15 bp, Homo sapiens
aagagttaattttgt

SEQ ID NO: 876870 - DNA, 15 bp, Homo sapiens
agagttaattttgtt

SEQ ID NO: 876871 - DNA, 15 bp, Homo sapiens
gagttaattttgttc

SEQ ID NO: 876872 - DNA, 15 bp, Homo sapiens
agttaattttgttca

SEQ ID NO: 876873 - DNA, 15 bp, Homo sapiens
gttaattttgttcat

SEQ ID NO: 876874 - DNA, 15 bp, Homo sapiens
ttaattttgttcatt

SEQ ID NO: 876875 - DNA, 15 bp, Homo sapiens
taattttgttcattt

SEQ ID NO: 876876 - DNA, 15 bp, Homo sapiens
aattttgttcatttt

SEQ ID NO: 876877 - DNA, 15 bp, Homo sapiens
attttgttcattttc

SEQ ID NO: 876878 - DNA, 15 bp, Homo sapiens
ttttgttcattttct

SEQ ID NO: 876879 - DNA, 15 bp, Homo sapiens
tttgttcattttctc

SEQ ID NO: 876880 - DNA, 15 bp, Homo sapiens
ttgttcattttctca

SEQ ID NO: 876881 - DNA, 15 bp, Homo sapiens
tgttcattttctcaa

SEQ ID NO: 876882 - DNA, 15 bp, Homo sapiens
gttcattttctcaaa

SEQ ID NO: 876883 - DNA, 15 bp, Homo sapiens
ttcattttctcaaac

SEQ ID NO: 876884 - DNA, 15 bp, Homo sapiens
tcattttctcaaacc

SEQ ID NO: 876885 - DNA, 15 bp, Homo sapiens
cattttctcaaacct

SEQ ID NO: 876886 - DNA, 15 bp, Homo sapiens
attttctcaaacctc

SEQ ID NO: 876887 - DNA, 15 bp, Homo sapiens
ttttctcaaacctct

SEQ ID NO: 876888 - DNA, 15 bp, Homo sapiens
tttctcaaacctctt

SEQ ID NO: 876889 - DNA, 15 bp, Homo sapiens
ttctcaaacctcttc

SEQ ID NO: 876890 - DNA, 15 bp, Homo sapiens
tctcaaacctcttct

SEQ ID NO: 876891 - DNA, 15 bp, Homo sapiens
ctcaaacctcttctc

SEQ ID NO: 876892 - DNA, 15 bp, Homo sapiens
tcaaacctcttctcc

SEQ ID NO: 876893 - DNA, 15 bp, Homo sapiens
caaacctcttctcca

SEQ ID NO: 876894 - DNA, 15 bp, Homo sapiens
aaacctcttctccat

SEQ ID NO: 876895 - DNA, 15 bp, Homo sapiens
cctcttctccatgat

SEQ ID NO: 876896 - DNA, 15 bp, Homo sapiens
ctcttctccatgatg

SEQ ID NO: 876897 - DNA, 15 bp, Homo sapiens
tcttctccatgatgg

SEQ ID NO: 876898 - DNA, 15 bp, Homo sapiens
cttctccatgatggc

SEQ ID NO: 876899 - DNA, 15 bp, Homo sapiens
ttctccatgatggct

SEQ ID NO: 876900 - DNA, 15 bp, Homo sapiens
tctccatgatggctt

SEQ ID NO: 876901 - DNA, 15 bp, Homo sapiens
ctccatgatggcttt

SEQ ID NO: 876902 - DNA, 15 bp, Homo sapiens
tccatgatggctttt

SEQ ID NO: 876903 - DNA, 15 bp, Homo sapiens
ccatgatggcttttg

SEQ ID NO: 876904 - DNA, 15 bp, Homo sapiens
catgatggcttttgt

SEQ ID NO: 876905 - DNA, 15 bp, Homo sapiens
atgatggcttttgtc

SEQ ID NO: 876906 - DNA, 15 bp, Homo sapiens
tgatggcttttgtct

SEQ ID NO: 876907 - DNA, 15 bp, Homo sapiens
gatggcttttgtcta

SEQ ID NO: 876908 - DNA, 15 bp, Homo sapiens
atggcttttgtctac

SEQ ID NO: 876909 - DNA, 15 bp, Homo sapiens
tggcttttgtctacc

SEQ ID NO: 876910 - DNA, 15 bp, Homo sapiens
ggcttttgtctacct

SEQ ID NO: 876911 - DNA, 15 bp, Homo sapiens
gcttttgtctaccta

SEQ ID NO: 876912 - DNA, 15 bp, Homo sapiens
cttttgtctacctac

SEQ ID NO: 876913 - DNA, 15 bp, Homo sapiens
ttttgtctacctacc

SEQ ID NO: 876914 - DNA, 15 bp, Homo sapiens
tttgtctacctacct

SEQ ID NO: 876915 - DNA, 15 bp, Homo sapiens
ttgtctacctaccta

SEQ ID NO: 876916 - DNA, 15 bp, Homo sapiens
tgtctacctacctat

SEQ ID NO: 876917 - DNA, 15 bp, Homo sapiens
gtctacctacctatt

SEQ ID NO: 876918 - DNA, 15 bp, Homo sapiens
tctacctacctattc

SEQ ID NO: 876919 - DNA, 15 bp, Homo sapiens
ctacctacctattcc

SEQ ID NO: 876920 - DNA, 15 bp, Homo sapiens
tacctacctattcca

SEQ ID NO: 876921 - DNA, 15 bp, Homo sapiens
acctacctattccag

SEQ ID NO: 876922 - DNA, 15 bp, Homo sapiens
cctacctattccaga

SEQ ID NO: 876923 - DNA, 15 bp, Homo sapiens
ctacctattccagat

SEQ ID NO: 876924 - DNA, 15 bp, Homo sapiens
tacctattccagata

SEQ ID NO: 876925 - DNA, 15 bp, Homo sapiens
acctattccagataa

SEQ ID NO: 876926 - DNA, 15 bp, Homo sapiens
cctattccagataat

SEQ ID NO: 876927 - DNA, 15 bp, Homo sapiens
ctattccagataata

SEQ ID NO: 876928 - DNA, 15 bp, Homo sapiens
tattccagataatat

SEQ ID NO: 876929 - DNA, 15 bp, Homo sapiens
attccagataatatt

SEQ ID NO: 876930 - DNA, 15 bp, Homo sapiens
ttccagataatatta

SEQ ID NO: 876931 - DNA, 15 bp, Homo sapiens
tccagataatattaa

SEQ ID NO: 876932 - DNA, 15 bp, Homo sapiens
ccagataatattaat

SEQ ID NO: 876933 - DNA, 15 bp, Homo sapiens
cagataatattaata

SEQ ID NO: 876934 - DNA, 15 bp, Homo sapiens
agataatattaatag

SEQ ID NO: 876935 - DNA, 15 bp, Homo sapiens
gataatattaataga

SEQ ID NO: 876936 - DNA, 15 bp, Homo sapiens
ataatattaatagat

SEQ ID NO: 876937 - DNA, 15 bp, Homo sapiens
taatattaatagata

SEQ ID NO: 876938 - DNA, 15 bp, Homo sapiens
aatattaatagatat

SEQ ID NO: 876939 - DNA, 15 bp, Homo sapiens
atattaatagatatc

SEQ ID NO: 876940 - DNA, 15 bp, Homo sapiens
tattaatagatatct

SEQ ID NO: 876941 - DNA, 15 bp, Homo sapiens
attaatagatatcta

SEQ ID NO: 876942 - DNA, 15 bp, Homo sapiens
ttaatagatatctat

SEQ ID NO: 876943 - DNA, 15 bp, Homo sapiens
taatagatatctatg

SEQ ID NO: 876944 - DNA, 15 bp, Homo sapiens
aatagatatctatgc

SEQ ID NO: 876945 - DNA, 15 bp, Homo sapiens
atagatatctatgca

SEQ ID NO: 876946 - DNA, 15 bp, Homo sapiens
tagatatctatgcaa

SEQ ID NO: 876947 - DNA, 15 bp, Homo sapiens
agatatctatgcaac

SEQ ID NO: 876948 - DNA, 15 bp, Homo sapiens
gatatctatgcaact

SEQ ID NO: 876949 - DNA, 15 bp, Homo sapiens
atatctatgcaactg

SEQ ID NO: 876950 - DNA, 15 bp, Homo sapiens
tatctatgcaactgt

SEQ ID NO: 876951 - DNA, 15 bp, Homo sapiens
atctatgcaactgtt

SEQ ID NO: 876952 - DNA, 15 bp, Homo sapiens
tctatgcaactgtta

SEQ ID NO: 876953 - DNA, 15 bp, Homo sapiens
ctatgcaactgttaa

SEQ ID NO: 876954 - DNA, 15 bp, Homo sapiens
tatgcaactgttaaa

SEQ ID NO: 876955 - DNA, 15 bp, Homo sapiens
atgcaactgttaaag

SEQ ID NO: 876956 - DNA, 15 bp, Homo sapiens
tgcaactgttaaaga

SEQ ID NO: 876957 - DNA, 15 bp, Homo sapiens
gcaactgttaaagac

SEQ ID NO: 876958 - DNA, 15 bp, Homo sapiens
caactgttaaagact

SEQ ID NO: 876959 - DNA, 15 bp, Homo sapiens
aactgttaaagactc

SEQ ID NO: 876960 - DNA, 15 bp, Homo sapiens
actgttaaagactct

SEQ ID NO: 876961 - DNA, 15 bp, Homo sapiens
ctgttaaagactctt

SEQ ID NO: 876962 - DNA, 15 bp, Homo sapiens
tgttaaagactcttc

SEQ ID NO: 876963 - DNA, 15 bp, Homo sapiens
gttaaagactcttca

SEQ ID NO: 876964 - DNA, 15 bp, Homo sapiens
ttaaagactcttcaa

SEQ ID NO: 876965 - DNA, 15 bp, Homo sapiens
taaagactcttcaag

SEQ ID NO: 876966 - DNA, 15 bp, Homo sapiens
aaagactcttcaagg

SEQ ID NO: 876967 - DNA, 15 bp, Homo sapiens
aagactcttcaagga

SEQ ID NO: 876968 - DNA, 15 bp, Homo sapiens
agactcttcaaggac

SEQ ID NO: 876969 - DNA, 15 bp, Homo sapiens
gactcttcaaggaca

SEQ ID NO: 876970 - DNA, 15 bp, Homo sapiens
actcttcaaggacaa

SEQ ID NO: 876971 - DNA, 15 bp, Homo sapiens
ctcttcaaggacaaa

SEQ ID NO: 876972 - DNA, 15 bp, Homo sapiens
tcttcaaggacaaaa

SEQ ID NO: 876973 - DNA, 15 bp, Homo sapiens
cttcaaggacaaaaa

SEQ ID NO: 876974 - DNA, 15 bp, Homo sapiens
ttcaaggacaaaaac

SEQ ID NO: 876975 - DNA, 15 bp, Homo sapiens
tcaaggacaaaaaca

SEQ ID NO: 876976 - DNA, 15 bp, Homo sapiens
caaggacaaaaacat

SEQ ID NO: 876977 - DNA, 15 bp, Homo sapiens
aaggacaaaaacatc

SEQ ID NO: 876978 - DNA, 15 bp, Homo sapiens
aggacaaaaacatcc

SEQ ID NO: 876979 - DNA, 15 bp, Homo sapiens
ggacaaaaacatccc

SEQ ID NO: 876980 - DNA, 15 bp, Homo sapiens
gacaaaaacatccct

SEQ ID NO: 876981 - DNA, 15 bp, Homo sapiens
acaaaaacatccctc

SEQ ID NO: 876982 - DNA, 15 bp, Homo sapiens
caaaaacatccctca

SEQ ID NO: 876983 - DNA, 15 bp, Homo sapiens
aaaaacatccctcaa

SEQ ID NO: 876984 - DNA, 15 bp, Homo sapiens
aaaacatccctcaaa

SEQ ID NO: 876985 - DNA, 15 bp, Homo sapiens
aaacatccctcaaaa

SEQ ID NO: 876986 - DNA, 15 bp, Homo sapiens
aacatccctcaaaat

SEQ ID NO: 876987 - DNA, 15 bp, Homo sapiens
acatccctcaaaatg

SEQ ID NO: 876988 - DNA, 15 bp, Homo sapiens
catccctcaaaatgt

SEQ ID NO: 876989 - DNA, 15 bp, Homo sapiens
atccctcaaaatgtg

SEQ ID NO: 876990 - DNA, 15 bp, Homo sapiens
tccctcaaaatgtgc

SEQ ID NO: 876991 - DNA, 15 bp, Homo sapiens
ccctcaaaatgtgct

SEQ ID NO: 876992 - DNA, 15 bp, Homo sapiens
cctcaaaatgtgctc

SEQ ID NO: 876993 - DNA, 15 bp, Homo sapiens
ctcaaaatgtgctct

SEQ ID NO: 876994 - DNA, 15 bp, Homo sapiens
tcaaaatgtgctctc

SEQ ID NO: 876995 - DNA, 15 bp, Homo sapiens
caaaatgtgctctca

SEQ ID NO: 876996 - DNA, 15 bp, Homo sapiens
aaaatgtgctctcac

SEQ ID NO: 876997 - DNA, 15 bp, Homo sapiens
aaatgtgctctcacc

SEQ ID NO: 876998 - DNA, 15 bp, Homo sapiens
aatgtgctctcaccc

SEQ ID NO: 876999 - DNA, 15 bp, Homo sapiens
atgtgctctcaccct

SEQ ID NO: 877000 - DNA, 15 bp, Homo sapiens
tgtgctctcaccctg

SEQ ID NO: 877001 - DNA, 15 bp, Homo sapiens
gtgctctcaccctga

SEQ ID NO: 877002 - DNA, 15 bp, Homo sapiens
tgctctcaccctgat

SEQ ID NO: 877003 - DNA, 15 bp, Homo sapiens
gctctcaccctgatc

SEQ ID NO: 877004 - DNA, 15 bp, Homo sapiens
ctctcaccctgatct

SEQ ID NO: 877005 - DNA, 15 bp, Homo sapiens
tctcaccctgatctg

SEQ ID NO: 877006 - DNA, 15 bp, Homo sapiens
ctcaccctgatctgt

SEQ ID NO: 877007 - DNA, 15 bp, Homo sapiens
tcaccctgatctgta

SEQ ID NO: 877008 - DNA, 15 bp, Homo sapiens
caccctgatctgtaa

SEQ ID NO: 877009 - DNA, 15 bp, Homo sapiens
accctgatctgtaaa

SEQ ID NO: 877010 - DNA, 15 bp, Homo sapiens
ccctgatctgtaaat

SEQ ID NO: 877011 - DNA, 15 bp, Homo sapiens
cctgatctgtaaata

SEQ ID NO: 877012 - DNA, 15 bp, Homo sapiens
ctgatctgtaaatag

SEQ ID NO: 877013 - DNA, 15 bp, Homo sapiens
tgatctgtaaatagt

SEQ ID NO: 877014 - DNA, 15 bp, Homo sapiens
gatctgtaaatagtt

SEQ ID NO: 877015 - DNA, 15 bp, Homo sapiens
atctgtaaatagttc

SEQ ID NO: 877016 - DNA, 15 bp, Homo sapiens
tctgtaaatagttct

SEQ ID NO: 877017 - DNA, 15 bp, Homo sapiens
ctgtaaatagttctt

SEQ ID NO: 877018 - DNA, 15 bp, Homo sapiens
tgtaaatagttctta

SEQ ID NO: 877019 - DNA, 15 bp, Homo sapiens
gtaaatagttcttat

SEQ ID NO: 877020 - DNA, 15 bp, Homo sapiens
taaatagttcttatc

SEQ ID NO: 877021 - DNA, 15 bp, Homo sapiens
aaatagttcttatca

SEQ ID NO: 877022 - DNA, 15 bp, Homo sapiens
aatagttcttatcag

SEQ ID NO: 877023 - DNA, 15 bp, Homo sapiens
atagttcttatcagc

SEQ ID NO: 877024 - DNA, 15 bp, Homo sapiens
tagttcttatcagcc

SEQ ID NO: 877025 - DNA, 15 bp, Homo sapiens
agttcttatcagcct

SEQ ID NO: 877026 - DNA, 15 bp, Homo sapiens
gttcttatcagcctt

SEQ ID NO: 877027 - DNA, 15 bp, Homo sapiens
ttcttatcagccttt

SEQ ID NO: 877028 - DNA, 15 bp, Homo sapiens
tcttatcagcctttt

SEQ ID NO: 877029 - DNA, 15 bp, Homo sapiens
cttatcagccttttt

SEQ ID NO: 877030 - DNA, 15 bp, Homo sapiens
ttatcagccttttta

SEQ ID NO: 877031 - DNA, 15 bp, Homo sapiens
tatcagcctttttat

SEQ ID NO: 877032 - DNA, 15 bp, Homo sapiens
atcagcctttttatc

SEQ ID NO: 877033 - DNA, 15 bp, Homo sapiens
tcagcctttttatct

SEQ ID NO: 877034 - DNA, 15 bp, Homo sapiens
cagcctttttatctt

SEQ ID NO: 877035 - DNA, 15 bp, Homo sapiens
agcctttttatctta

SEQ ID NO: 877036 - DNA, 15 bp, Homo sapiens
gcctttttatcttaa

SEQ ID NO: 877037 - DNA, 15 bp, Homo sapiens
cctttttatcttaac

SEQ ID NO: 877038 - DNA, 15 bp, Homo sapiens
ctttttatcttaaca

SEQ ID NO: 877039 - DNA, 15 bp, Homo sapiens
tttttatcttaacat

SEQ ID NO: 877040 - DNA, 15 bp, Homo sapiens
ttttatcttaacatc

SEQ ID NO: 877041 - DNA, 15 bp, Homo sapiens
tttatcttaacatct

SEQ ID NO: 877042 - DNA, 15 bp, Homo sapiens
ttatcttaacatctt

SEQ ID NO: 877043 - DNA, 15 bp, Homo sapiens
tatcttaacatcttt

SEQ ID NO: 877044 - DNA, 15 bp, Homo sapiens
atcttaacatctttg

SEQ ID NO: 877045 - DNA, 15 bp, Homo sapiens
tcttaacatctttga

SEQ ID NO: 877046 - DNA, 15 bp, Homo sapiens
cttaacatctttgac

SEQ ID NO: 877047 - DNA, 15 bp, Homo sapiens
ttaacatctttgact

SEQ ID NO: 877048 - DNA, 15 bp, Homo sapiens
taacatctttgacta

SEQ ID NO: 877049 - DNA, 15 bp, Homo sapiens
aacatctttgactaa

SEQ ID NO: 877050 - DNA, 15 bp, Homo sapiens
acatctttgactaag

SEQ ID NO: 877051 - DNA, 15 bp, Homo sapiens
catctttgactaagt

SEQ ID NO: 877052 - DNA, 15 bp, Homo sapiens
atctttgactaagtt

SEQ ID NO: 877053 - DNA, 15 bp, Homo sapiens
tctttgactaagttc

SEQ ID NO: 877054 - DNA, 15 bp, Homo sapiens
ctttgactaagttca

SEQ ID NO: 877055 - DNA, 15 bp, Homo sapiens
tttgactaagttcag

SEQ ID NO: 877056 - DNA, 15 bp, Homo sapiens
ttgactaagttcagt

SEQ ID NO: 877057 - DNA, 15 bp, Homo sapiens
tgactaagttcagta

SEQ ID NO: 877058 - DNA, 15 bp, Homo sapiens
gactaagttcagtat

SEQ ID NO: 877059 - DNA, 15 bp, Homo sapiens
actaagttcagtatt

SEQ ID NO: 877060 - DNA, 15 bp, Homo sapiens
ctaagttcagtattt

SEQ ID NO: 877061 - DNA, 15 bp, Homo sapiens
taagttcagtatttg

SEQ ID NO: 877062 - DNA, 15 bp, Homo sapiens
aagttcagtatttgg

SEQ ID NO: 877063 - DNA, 15 bp, Homo sapiens
agttcagtatttgga

SEQ ID NO: 877064 - DNA, 15 bp, Homo sapiens
gttcagtatttggaa

SEQ ID NO: 877065 - DNA, 15 bp, Homo sapiens
ttcagtatttggaag

SEQ ID NO: 877066 - DNA, 15 bp, Homo sapiens
tcagtatttggaaga

SEQ ID NO: 877067 - DNA, 15 bp, Homo sapiens
cagtatttggaagat

SEQ ID NO: 877068 - DNA, 15 bp, Homo sapiens
agtatttggaagatg

SEQ ID NO: 877069 - DNA, 15 bp, Homo sapiens
gtatttggaagatgg

SEQ ID NO: 877070 - DNA, 15 bp, Homo sapiens
tatttggaagatggc

SEQ ID NO: 877071 - DNA, 15 bp, Homo sapiens
atttggaagatggcc

SEQ ID NO: 877072 - DNA, 15 bp, Homo sapiens
tttggaagatggcct

SEQ ID NO: 877073 - DNA, 15 bp, Homo sapiens
ttggaagatggcctg

SEQ ID NO: 877074 - DNA, 15 bp, Homo sapiens
tggaagatggcctgg

SEQ ID NO: 877075 - DNA, 15 bp, Homo sapiens
ggaagatggcctggt

SEQ ID NO: 877076 - DNA, 15 bp, Homo sapiens
gaagatggcctggtg

SEQ ID NO: 877077 - DNA, 15 bp, Homo sapiens
aagatggcctggtgg

SEQ ID NO: 877078 - DNA, 15 bp, Homo sapiens
agatggcctggtggt

SEQ ID NO: 877079 - DNA, 15 bp, Homo sapiens
gatggcctggtggtt

SEQ ID NO: 877080 - DNA, 15 bp, Homo sapiens
atggcctggtggttt

SEQ ID NO: 877081 - DNA, 15 bp, Homo sapiens
tggcctggtggttta

SEQ ID NO: 877082 - DNA, 15 bp, Homo sapiens
ggcctggtggtttac

SEQ ID NO: 877083 - DNA, 15 bp, Homo sapiens
gcctggtggtttaca

SEQ ID NO: 877084 - DNA, 15 bp, Homo sapiens
cctggtggtttacat

SEQ ID NO: 877085 - DNA, 15 bp, Homo sapiens
ctggtggtttacata

SEQ ID NO: 877086 - DNA, 15 bp, Homo sapiens
tggtggtttacatac

SEQ ID NO: 877087 - DNA, 15 bp, Homo sapiens
ggtggtttacatacc

SEQ ID NO: 877088 - DNA, 15 bp, Homo sapiens
gtggtttacatacct

SEQ ID NO: 877089 - DNA, 15 bp, Homo sapiens
tggtttacatacctc

SEQ ID NO: 877090 - DNA, 15 bp, Homo sapiens
ggtttacatacctca

SEQ ID NO: 877091 - DNA, 15 bp, Homo sapiens
gtttacatacctcaa

SEQ ID NO: 877092 - DNA, 15 bp, Homo sapiens
tttacatacctcaag

SEQ ID NO: 877093 - DNA, 15 bp, Homo sapiens
ttacatacctcaaga

SEQ ID NO: 877094 - DNA, 15 bp, Homo sapiens
tacatacctcaagac

SEQ ID NO: 877095 - DNA, 15 bp, Homo sapiens
acatacctcaagacc

SEQ ID NO: 877096 - DNA, 15 bp, Homo sapiens
catacctcaagacct

SEQ ID NO: 877097 - DNA, 15 bp, Homo sapiens
atacctcaagacctc

SEQ ID NO: 877098 - DNA, 15 bp, Homo sapiens
tacctcaagacctct

SEQ ID NO: 877099 - DNA, 15 bp, Homo sapiens
acctcaagacctctc

SEQ ID NO: 877100 - DNA, 15 bp, Homo sapiens
cctcaagacctctca

SEQ ID NO: 877101 - DNA, 15 bp, Homo sapiens
ctcaagacctctcaa

SEQ ID NO: 877102 - DNA, 15 bp, Homo sapiens
tcaagacctctcaac

SEQ ID NO: 877103 - DNA, 15 bp, Homo sapiens
caagacctctcaaca

SEQ ID NO: 877104 - DNA, 15 bp, Homo sapiens
aagacctctcaacaa

SEQ ID NO: 877105 - DNA, 15 bp, Homo sapiens
agacctctcaacaat

SEQ ID NO: 877106 - DNA, 15 bp, Homo sapiens
gacctctcaacaatc

SEQ ID NO: 877107 - DNA, 15 bp, Homo sapiens
acctctcaacaatcc

SEQ ID NO: 877108 - DNA, 15 bp, Homo sapiens
cctctcaacaatcca

SEQ ID NO: 877109 - DNA, 15 bp, Homo sapiens
ctctcaacaatccag

SEQ ID NO: 877110 - DNA, 15 bp, Homo sapiens
tctcaacaatccaga

SEQ ID NO: 877111 - DNA, 15 bp, Homo sapiens
ctcaacaatccagac

SEQ ID NO: 877112 - DNA, 15 bp, Homo sapiens
tcaacaatccagaca

SEQ ID NO: 877113 - DNA, 15 bp, Homo sapiens
caacaatccagacac

SEQ ID NO: 877114 - DNA, 15 bp, Homo sapiens
aacaatccagacact

SEQ ID NO: 877115 - DNA, 15 bp, Homo sapiens
acaatccagacactg

SEQ ID NO: 877116 - DNA, 15 bp, Homo sapiens
caatccagacactga

SEQ ID NO: 877117 - DNA, 15 bp, Homo sapiens
aatccagacactgag

SEQ ID NO: 877118 - DNA, 15 bp, Homo sapiens
atccagacactgaga

SEQ ID NO: 877119 - DNA, 15 bp, Homo sapiens
tccagacactgagat

SEQ ID NO: 877120 - DNA, 15 bp, Homo sapiens
ccagacactgagatg

SEQ ID NO: 877121 - DNA, 15 bp, Homo sapiens
agacactgagatgct

SEQ ID NO: 877122 - DNA, 15 bp, Homo sapiens
gacactgagatgcta

SEQ ID NO: 877123 - DNA, 15 bp, Homo sapiens
acactgagatgctac

SEQ ID NO: 877124 - DNA, 15 bp, Homo sapiens
cactgagatgctact

SEQ ID NO: 877125 - DNA, 15 bp, Homo sapiens
actgagatgctactc

SEQ ID NO: 877126 - DNA, 15 bp, Homo sapiens
ctgagatgctactcg

SEQ ID NO: 877127 - DNA, 15 bp, Homo sapiens
tgagatgctactcgg

SEQ ID NO: 877128 - DNA, 15 bp, Homo sapiens
gagatgctactcgga

SEQ ID NO: 877129 - DNA, 15 bp, Homo sapiens
agatgctactcggag

SEQ ID NO: 877130 - DNA, 15 bp, Homo sapiens
gatgctactcggagt

SEQ ID NO: 877131 - DNA, 15 bp, Homo sapiens
atgctactcggagtg

SEQ ID NO: 877132 - DNA, 15 bp, Homo sapiens
tgctactcggagtgg

SEQ ID NO: 877133 - DNA, 15 bp, Homo sapiens
gctactcggagtggg

SEQ ID NO: 877134 - DNA, 15 bp, Homo sapiens
ctactcggagtggga

SEQ ID NO: 877135 - DNA, 15 bp, Homo sapiens
tactcggagtgggat

SEQ ID NO: 877136 - DNA, 15 bp, Homo sapiens
actcggagtgggatt

SEQ ID NO: 877137 - DNA, 15 bp, Homo sapiens
ctcggagtgggattg

SEQ ID NO: 877138 - DNA, 15 bp, Homo sapiens
tcggagtgggattgt

SEQ ID NO: 877139 - DNA, 15 bp, Homo sapiens
cggagtgggattgtt

SEQ ID NO: 877140 - DNA, 15 bp, Homo sapiens
ggagtgggattgttc

SEQ ID NO: 877141 - DNA, 15 bp, Homo sapiens
gagtgggattgttct

SEQ ID NO: 877142 - DNA, 15 bp, Homo sapiens
agtgggattgttctt

SEQ ID NO: 877143 - DNA, 15 bp, Homo sapiens
gtgggattgttcttc

SEQ ID NO: 877144 - DNA, 15 bp, Homo sapiens
tgggattgttcttct

SEQ ID NO: 877145 - DNA, 15 bp, Homo sapiens
gggattgttcttctt

SEQ ID NO: 877146 - DNA, 15 bp, Homo sapiens
ggattgttcttcttt

SEQ ID NO: 877147 - DNA, 15 bp, Homo sapiens
gattgttcttctttt

SEQ ID NO: 877148 - DNA, 15 bp, Homo sapiens
attgttcttctttta

SEQ ID NO: 877149 - DNA, 15 bp, Homo sapiens
ttgttcttcttttaa

SEQ ID NO: 877150 - DNA, 15 bp, Homo sapiens
tgttcttcttttaag

SEQ ID NO: 877151 - DNA, 15 bp, Homo sapiens
gttcttcttttaaga

SEQ ID NO: 877152 - DNA, 15 bp, Homo sapiens
ttcttcttttaagat

SEQ ID NO: 877153 - DNA, 15 bp, Homo sapiens
tcttcttttaagatc

SEQ ID NO: 877154 - DNA, 15 bp, Homo sapiens
cttcttttaagatca

SEQ ID NO: 877155 - DNA, 15 bp, Homo sapiens
cttttaagatcagat

SEQ ID NO: 877156 - DNA, 15 bp, Homo sapiens
ttttaagatcagata

SEQ ID NO: 877157 - DNA, 15 bp, Homo sapiens
tttaagatcagatat

SEQ ID NO: 877158 - DNA, 15 bp, Homo sapiens
ttaagatcagatatg

SEQ ID NO: 877159 - DNA, 15 bp, Homo sapiens
taagatcagatatga

SEQ ID NO: 877160 - DNA, 15 bp, Homo sapiens
aagatcagatatgac

SEQ ID NO: 877161 - DNA, 15 bp, Homo sapiens
agatcagatatgaca

SEQ ID NO: 877162 - DNA, 15 bp, Homo sapiens
gatcagatatgacag

SEQ ID NO: 877163 - DNA, 15 bp, Homo sapiens
atcagatatgacaga

SEQ ID NO: 877164 - DNA, 15 bp, Homo sapiens
tcagatatgacagat

SEQ ID NO: 877165 - DNA, 15 bp, Homo sapiens
cagatatgacagata

SEQ ID NO: 877166 - DNA, 15 bp, Homo sapiens
agatatgacagatat

SEQ ID NO: 877167 - DNA, 15 bp, Homo sapiens
gatatgacagatatt

SEQ ID NO: 877168 - DNA, 15 bp, Homo sapiens
atatgacagatattc

SEQ ID NO: 877169 - DNA, 15 bp, Homo sapiens
tatgacagatattcc

SEQ ID NO: 877170 - DNA, 15 bp, Homo sapiens
atgacagatattcct

SEQ ID NO: 877171 - DNA, 15 bp, Homo sapiens
tgacagatattccta

SEQ ID NO: 877172 - DNA, 15 bp, Homo sapiens
gacagatattcctat

SEQ ID NO: 877173 - DNA, 15 bp, Homo sapiens
acagatattcctata

SEQ ID NO: 877174 - DNA, 15 bp, Homo sapiens
cagatattcctatag

SEQ ID NO: 877175 - DNA, 15 bp, Homo sapiens
agatattcctatagt

SEQ ID NO: 877176 - DNA, 15 bp, Homo sapiens
gatattcctatagta

SEQ ID NO: 877177 - DNA, 15 bp, Homo sapiens
atattcctatagtag

SEQ ID NO: 877178 - DNA, 15 bp, Homo sapiens
tattcctatagtagt

SEQ ID NO: 877179 - DNA, 15 bp, Homo sapiens
attcctatagtagtc

SEQ ID NO: 877180 - DNA, 15 bp, Homo sapiens
ttcctatagtagtct

SEQ ID NO: 877181 - DNA, 15 bp, Homo sapiens
tcctatagtagtcta

SEQ ID NO: 877182 - DNA, 15 bp, Homo sapiens
cctatagtagtctag

SEQ ID NO: 877183 - DNA, 15 bp, Homo sapiens
ctatagtagtctagc

SEQ ID NO: 877184 - DNA, 15 bp, Homo sapiens
tatagtagtctagca

SEQ ID NO: 877185 - DNA, 15 bp, Homo sapiens
atagtagtctagcat

SEQ ID NO: 877186 - DNA, 15 bp, Homo sapiens
tagtagtctagcatg

SEQ ID NO: 877187 - DNA, 15 bp, Homo sapiens
agtagtctagcatgt

SEQ ID NO: 877188 - DNA, 15 bp, Homo sapiens
gtagtctagcatgtt

SEQ ID NO: 877189 - DNA, 15 bp, Homo sapiens
tagtctagcatgttc

SEQ ID NO: 877190 - DNA, 15 bp, Homo sapiens
agtctagcatgttcg

SEQ ID NO: 877191 - DNA, 15 bp, Homo sapiens
gtctagcatgttcgt

SEQ ID NO: 877192 - DNA, 15 bp, Homo sapiens
tctagcatgttcgtt

SEQ ID NO: 877193 - DNA, 15 bp, Homo sapiens
ctagcatgttcgttg

SEQ ID NO: 877194 - DNA, 15 bp, Homo sapiens
tagcatgttcgttga

SEQ ID NO: 877195 - DNA, 15 bp, Homo sapiens
agcatgttcgttgaa

SEQ ID NO: 877196 - DNA, 15 bp, Homo sapiens
gcatgttcgttgaag

SEQ ID NO: 877197 - DNA, 15 bp, Homo sapiens
catgttcgttgaaga

SEQ ID NO: 877198 - DNA, 15 bp, Homo sapiens
atgttcgttgaagat

SEQ ID NO: 877199 - DNA, 15 bp, Homo sapiens
tgttcgttgaagata

SEQ ID NO: 877200 - DNA, 15 bp, Homo sapiens
gttcgttgaagataa

SEQ ID NO: 877201 - DNA, 15 bp, Homo sapiens
ttcgttgaagataac

SEQ ID NO: 877202 - DNA, 15 bp, Homo sapiens
tcgttgaagataact

SEQ ID NO: 877203 - DNA, 15 bp, Homo sapiens
cgttgaagataactt

SEQ ID NO: 877204 - DNA, 15 bp, Homo sapiens
gttgaagataacttt

SEQ ID NO: 877205 - DNA, 15 bp, Homo sapiens
ttgaagataactttg

SEQ ID NO: 877206 - DNA, 15 bp, Homo sapiens
tgaagataactttgc

SEQ ID NO: 877207 - DNA, 15 bp, Homo sapiens
gaagataactttgca

SEQ ID NO: 877208 - DNA, 15 bp, Homo sapiens
aagataactttgcaa

SEQ ID NO: 877209 - DNA, 15 bp, Homo sapiens
agataactttgcaag

SEQ ID NO: 877210 - DNA, 15 bp, Homo sapiens
gataactttgcaagt

SEQ ID NO: 877211 - DNA, 15 bp, Homo sapiens
ataactttgcaagtt

SEQ ID NO: 877212 - DNA, 15 bp, Homo sapiens
taactttgcaagttg

SEQ ID NO: 877213 - DNA, 15 bp, Homo sapiens
aactttgcaagttgg

SEQ ID NO: 877214 - DNA, 15 bp, Homo sapiens
actttgcaagttggc

SEQ ID NO: 877215 - DNA, 15 bp, Homo sapiens
ctttgcaagttggct

SEQ ID NO: 877216 - DNA, 15 bp, Homo sapiens
tttgcaagttggctt

SEQ ID NO: 877217 - DNA, 15 bp, Homo sapiens
ttgcaagttggcttc

SEQ ID NO: 877218 - DNA, 15 bp, Homo sapiens
tgcaagttggcttca

SEQ ID NO: 877219 - DNA, 15 bp, Homo sapiens
gcaagttggcttcac

SEQ ID NO: 877220 - DNA, 15 bp, Homo sapiens
caagttggcttcaca

SEQ ID NO: 877221 - DNA, 15 bp, Homo sapiens
aagttggcttcacat

SEQ ID NO: 877222 - DNA, 15 bp, Homo sapiens
agttggcttcacata

SEQ ID NO: 877223 - DNA, 15 bp, Homo sapiens
gttggcttcacatag

SEQ ID NO: 877224 - DNA, 15 bp, Homo sapiens
ttggcttcacatagt

SEQ ID NO: 877225 - DNA, 15 bp, Homo sapiens
tggcttcacatagta

SEQ ID NO: 877226 - DNA, 15 bp, Homo sapiens
ggcttcacatagtat

SEQ ID NO: 877227 - DNA, 15 bp, Homo sapiens
gcttcacatagtatt

SEQ ID NO: 877228 - DNA, 15 bp, Homo sapiens
cttcacatagtattt

SEQ ID NO: 877229 - DNA, 15 bp, Homo sapiens
ttcacatagtatttg

SEQ ID NO: 877230 - DNA, 15 bp, Homo sapiens
tcacatagtatttgt

SEQ ID NO: 877231 - DNA, 15 bp, Homo sapiens
cacatagtatttgtc

SEQ ID NO: 877232 - DNA, 15 bp, Homo sapiens
acatagtatttgtca

SEQ ID NO: 877233 - DNA, 15 bp, Homo sapiens
catagtatttgtcat

SEQ ID NO: 877234 - DNA, 15 bp, Homo sapiens
atagtatttgtcatt

SEQ ID NO: 877235 - DNA, 15 bp, Homo sapiens
tagtatttgtcattt

SEQ ID NO: 877236 - DNA, 15 bp, Homo sapiens
agtatttgtcatttg

SEQ ID NO: 877237 - DNA, 15 bp, Homo sapiens
gtatttgtcatttgg

SEQ ID NO: 877238 - DNA, 15 bp, Homo sapiens
tatttgtcatttggt

SEQ ID NO: 877239 - DNA, 15 bp, Homo sapiens
atttgtcatttggtg

SEQ ID NO: 877240 - DNA, 15 bp, Homo sapiens
tttgtcatttggtgt

SEQ ID NO: 877241 - DNA, 15 bp, Homo sapiens
ttgtcatttggtgta

SEQ ID NO: 877242 - DNA, 15 bp, Homo sapiens
tgtcatttggtgtag

SEQ ID NO: 877243 - DNA, 15 bp, Homo sapiens
gtcatttggtgtagt

SEQ ID NO: 877244 - DNA, 15 bp, Homo sapiens
tcatttggtgtagtc

SEQ ID NO: 877245 - DNA, 15 bp, Homo sapiens
catttggtgtagtct

SEQ ID NO: 877246 - DNA, 15 bp, Homo sapiens
atttggtgtagtcta

SEQ ID NO: 877247 - DNA, 15 bp, Homo sapiens
tttggtgtagtctaa

SEQ ID NO: 877248 - DNA, 15 bp, Homo sapiens
ttggtgtagtctaaa

SEQ ID NO: 877249 - DNA, 15 bp, Homo sapiens
tggtgtagtctaaaa

SEQ ID NO: 877250 - DNA, 15 bp, Homo sapiens
ggtgtagtctaaaag

SEQ ID NO: 877251 - DNA, 15 bp, Homo sapiens
gtgtagtctaaaagc

SEQ ID NO: 877252 - DNA, 15 bp, Homo sapiens
tgtagtctaaaagca

SEQ ID NO: 877253 - DNA, 15 bp, Homo sapiens
gtagtctaaaagcaa

SEQ ID NO: 877254 - DNA, 15 bp, Homo sapiens
tagtctaaaagcaaa

SEQ ID NO: 877255 - DNA, 15 bp, Homo sapiens
agtctaaaagcaaat

SEQ ID NO: 877256 - DNA, 15 bp, Homo sapiens
gtctaaaagcaaatt

SEQ ID NO: 877257 - DNA, 15 bp, Homo sapiens
tctaaaagcaaattc

SEQ ID NO: 877258 - DNA, 15 bp, Homo sapiens
ctaaaagcaaattct

SEQ ID NO: 877259 - DNA, 15 bp, Homo sapiens
taaaagcaaattctc

SEQ ID NO: 877260 - DNA, 15 bp, Homo sapiens
aaaagcaaattctca

SEQ ID NO: 877261 - DNA, 15 bp, Homo sapiens
aaagcaaattctcag

SEQ ID NO: 877262 - DNA, 15 bp, Homo sapiens
aagcaaattctcagg

SEQ ID NO: 877263 - DNA, 15 bp, Homo sapiens
agcaaattctcaggc

SEQ ID NO: 877264 - DNA, 15 bp, Homo sapiens
gcaaattctcaggca

SEQ ID NO: 877265 - DNA, 15 bp, Homo sapiens
caaattctcaggcat

SEQ ID NO: 877266 - DNA, 15 bp, Homo sapiens
aaattctcaggcata

SEQ ID NO: 877267 - DNA, 15 bp, Homo sapiens
aattctcaggcataa

SEQ ID NO: 877268 - DNA, 15 bp, Homo sapiens
attctcaggcataaa

SEQ ID NO: 877269 - DNA, 15 bp, Homo sapiens
ttctcaggcataaat

SEQ ID NO: 877270 - DNA, 15 bp, Homo sapiens
tctcaggcataaata

SEQ ID NO: 877271 - DNA, 15 bp, Homo sapiens
ctcaggcataaataa

SEQ ID NO: 877272 - DNA, 15 bp, Homo sapiens
tcaggcataaataaa

SEQ ID NO: 877273 - DNA, 15 bp, Homo sapiens
caggcataaataaag

SEQ ID NO: 877274 - DNA, 15 bp, Homo sapiens
aggcataaataaagg

SEQ ID NO: 877275 - DNA, 15 bp, Homo sapiens
ggcataaataaaggc

SEQ ID NO: 877276 - DNA, 15 bp, Homo sapiens
gcataaataaaggca

SEQ ID NO: 877277 - DNA, 15 bp, Homo sapiens
cataaataaaggcag

SEQ ID NO: 877278 - DNA, 15 bp, Homo sapiens
ataaataaaggcagt

SEQ ID NO: 877279 - DNA, 15 bp, Homo sapiens
taaataaaggcagtg

SEQ ID NO: 877280 - DNA, 15 bp, Homo sapiens
aaataaaggcagtga

SEQ ID NO: 877281 - DNA, 15 bp, Homo sapiens
aataaaggcagtgag

SEQ ID NO: 877282 - DNA, 15 bp, Homo sapiens
ataaaggcagtgaga

SEQ ID NO: 877283 - DNA, 15 bp, Homo sapiens
taaaggcagtgagaa

SEQ ID NO: 877284 - DNA, 15 bp, Homo sapiens
aaaggcagtgagaaa

SEQ ID NO: 877285 - DNA, 15 bp, Homo sapiens
aaggcagtgagaaag

SEQ ID NO: 877286 - DNA, 15 bp, Homo sapiens
aggcagtgagaaagt

SEQ ID NO: 877287 - DNA, 15 bp, Homo sapiens
ggcagtgagaaagtt

SEQ ID NO: 877288 - DNA, 15 bp, Homo sapiens
gcagtgagaaagttt

SEQ ID NO: 877289 - DNA, 15 bp, Homo sapiens
cagtgagaaagtttt

SEQ ID NO: 877290 - DNA, 15 bp, Homo sapiens
agtgagaaagttttc

SEQ ID NO: 877291 - DNA, 15 bp, Homo sapiens
gtgagaaagttttct

SEQ ID NO: 877292 - DNA, 15 bp, Homo sapiens
tgagaaagttttctc

SEQ ID NO: 877293 - DNA, 15 bp, Homo sapiens
gagaaagttttctca

SEQ ID NO: 877294 - DNA, 15 bp, Homo sapiens
agaaagttttctcac

SEQ ID NO: 877295 - DNA, 15 bp, Homo sapiens
gaaagttttctcacc

SEQ ID NO: 877296 - DNA, 15 bp, Homo sapiens
aaagttttctcacct

SEQ ID NO: 877297 - DNA, 15 bp, Homo sapiens
aagttttctcacctt

SEQ ID NO: 877298 - DNA, 15 bp, Homo sapiens
agttttctcacctta

SEQ ID NO: 877299 - DNA, 15 bp, Homo sapiens
gttttctcaccttat

SEQ ID NO: 877300 - DNA, 15 bp, Homo sapiens
ttttctcaccttatg

SEQ ID NO: 877301 - DNA, 15 bp, Homo sapiens
tttctcaccttatgt

SEQ ID NO: 877302 - DNA, 15 bp, Homo sapiens
ttctcaccttatgtg

SEQ ID NO: 877303 - DNA, 15 bp, Homo sapiens
tctcaccttatgtgg

SEQ ID NO: 877304 - DNA, 15 bp, Homo sapiens
ctcaccttatgtggg

SEQ ID NO: 877305 - DNA, 15 bp, Homo sapiens
tcaccttatgtggga

SEQ ID NO: 877306 - DNA, 15 bp, Homo sapiens
caccttatgtgggag

SEQ ID NO: 877307 - DNA, 15 bp, Homo sapiens
accttatgtgggagt

SEQ ID NO: 877308 - DNA, 15 bp, Homo sapiens
ccttatgtgggagtg

SEQ ID NO: 877309 - DNA, 15 bp, Homo sapiens
cttatgtgggagtgg

SEQ ID NO: 877310 - DNA, 15 bp, Homo sapiens
ttatgtgggagtggg

SEQ ID NO: 877311 - DNA, 15 bp, Homo sapiens
tatgtgggagtgggg

SEQ ID NO: 877312 - DNA, 15 bp, Homo sapiens
atgtgggagtgggga

SEQ ID NO: 877313 - DNA, 15 bp, Homo sapiens
tgtgggagtggggag

SEQ ID NO: 877314 - DNA, 15 bp, Homo sapiens
gtgggagtggggagc

SEQ ID NO: 877315 - DNA, 15 bp, Homo sapiens
tgggagtggggagca

SEQ ID NO: 877316 - DNA, 15 bp, Homo sapiens
gggagtggggagcat

SEQ ID NO: 877317 - DNA, 15 bp, Homo sapiens
ggagtggggagcata

SEQ ID NO: 877318 - DNA, 15 bp, Homo sapiens
gagtggggagcatat

SEQ ID NO: 877319 - DNA, 15 bp, Homo sapiens
agtggggagcatatt

SEQ ID NO: 877320 - DNA, 15 bp, Homo sapiens
gtggggagcatattg

SEQ ID NO: 877321 - DNA, 15 bp, Homo sapiens
tggggagcatattgg

SEQ ID NO: 877322 - DNA, 15 bp, Homo sapiens
ggggagcatattgga

SEQ ID NO: 877323 - DNA, 15 bp, Homo sapiens
gggagcatattggag

SEQ ID NO: 877324 - DNA, 15 bp, Homo sapiens
ggagcatattggagg

SEQ ID NO: 877325 - DNA, 15 bp, Homo sapiens
gagcatattggaggg

SEQ ID NO: 877326 - DNA, 15 bp, Homo sapiens
agcatattggagggt

SEQ ID NO: 877327 - DNA, 15 bp, Homo sapiens
gcatattggagggtc

SEQ ID NO: 877328 - DNA, 15 bp, Homo sapiens
catattggagggtcg

SEQ ID NO: 877329 - DNA, 15 bp, Homo sapiens
atattggagggtcgt

SEQ ID NO: 877330 - DNA, 15 bp, Homo sapiens
tattggagggtcgtg

SEQ ID NO: 877331 - DNA, 15 bp, Homo sapiens
attggagggtcgtgg

SEQ ID NO: 877332 - DNA, 15 bp, Homo sapiens
ttggagggtcgtggt

SEQ ID NO: 877333 - DNA, 15 bp, Homo sapiens
tggagggtcgtggta

SEQ ID NO: 877334 - DNA, 15 bp, Homo sapiens
ggagggtcgtggtag

SEQ ID NO: 877335 - DNA, 15 bp, Homo sapiens
gagggtcgtggtagt

SEQ ID NO: 877336 - DNA, 15 bp, Homo sapiens
agggtcgtggtagtt

SEQ ID NO: 877337 - DNA, 15 bp, Homo sapiens
gggtcgtggtagtta

SEQ ID NO: 877338 - DNA, 15 bp, Homo sapiens
ggtcgtggtagttat

SEQ ID NO: 877339 - DNA, 15 bp, Homo sapiens
gtcgtggtagttatt

SEQ ID NO: 877340 - DNA, 15 bp, Homo sapiens
tcgtggtagttattc

SEQ ID NO: 877341 - DNA, 15 bp, Homo sapiens
cgtggtagttattca

SEQ ID NO: 877342 - DNA, 15 bp, Homo sapiens
gtggtagttattcaa

SEQ ID NO: 877343 - DNA, 15 bp, Homo sapiens
tggtagttattcaaa

SEQ ID NO: 877344 - DNA, 15 bp, Homo sapiens
ggtagttattcaaaa

SEQ ID NO: 877345 - DNA, 15 bp, Homo sapiens
gtagttattcaaaag

SEQ ID NO: 877346 - DNA, 15 bp, Homo sapiens
tagttattcaaaagc

SEQ ID NO: 877347 - DNA, 15 bp, Homo sapiens
agttattcaaaagct

SEQ ID NO: 877348 - DNA, 15 bp, Homo sapiens
gttattcaaaagctt

SEQ ID NO: 877349 - DNA, 15 bp, Homo sapiens
ttattcaaaagctta

SEQ ID NO: 877350 - DNA, 15 bp, Homo sapiens
tattcaaaagcttaa

SEQ ID NO: 877351 - DNA, 15 bp, Homo sapiens
attcaaaagcttaat

SEQ ID NO: 877352 - DNA, 15 bp, Homo sapiens
ttcaaaagcttaatc

SEQ ID NO: 877353 - DNA, 15 bp, Homo sapiens
tcaaaagcttaatcc

SEQ ID NO: 877354 - DNA, 15 bp, Homo sapiens
caaaagcttaatcct

SEQ ID NO: 877355 - DNA, 15 bp, Homo sapiens
aaaagcttaatccta

SEQ ID NO: 877356 - DNA, 15 bp, Homo sapiens
aaagcttaatcctag

SEQ ID NO: 877357 - DNA, 15 bp, Homo sapiens
aagcttaatcctagg

SEQ ID NO: 877358 - DNA, 15 bp, Homo sapiens
agcttaatcctaggt

SEQ ID NO: 877359 - DNA, 15 bp, Homo sapiens
gcttaatcctaggtt

SEQ ID NO: 877360 - DNA, 15 bp, Homo sapiens
cttaatcctaggttt

SEQ ID NO: 877361 - DNA, 15 bp, Homo sapiens
ttaatcctaggtttt

SEQ ID NO: 877362 - DNA, 15 bp, Homo sapiens
taatcctaggttttt

SEQ ID NO: 877363 - DNA, 15 bp, Homo sapiens
aatcctaggtttttg

SEQ ID NO: 877364 - DNA, 15 bp, Homo sapiens
atcctaggtttttgg

SEQ ID NO: 877365 - DNA, 15 bp, Homo sapiens
tcctaggtttttggg

SEQ ID NO: 877366 - DNA, 15 bp, Homo sapiens
cctaggtttttgggc

SEQ ID NO: 877367 - DNA, 15 bp, Homo sapiens
ctaggtttttgggcc

SEQ ID NO: 877368 - DNA, 15 bp, Homo sapiens
taggtttttgggcca

SEQ ID NO: 877369 - DNA, 15 bp, Homo sapiens
aggtttttgggccat

SEQ ID NO: 877370 - DNA, 15 bp, Homo sapiens
ggtttttgggccatg

SEQ ID NO: 877371 - DNA, 15 bp, Homo sapiens
gtttttgggccatgg

SEQ ID NO: 877372 - DNA, 15 bp, Homo sapiens
tttttgggccatgga

SEQ ID NO: 877373 - DNA, 15 bp, Homo sapiens
ttttgggccatggaa

SEQ ID NO: 877374 - DNA, 15 bp, Homo sapiens
tttgggccatggaag

SEQ ID NO: 877375 - DNA, 15 bp, Homo sapiens
ttgggccatggaaga

SEQ ID NO: 877376 - DNA, 15 bp, Homo sapiens
tgggccatggaagag

SEQ ID NO: 877377 - DNA, 15 bp, Homo sapiens
gggccatggaagaga

SEQ ID NO: 877378 - DNA, 15 bp, Homo sapiens
ggccatggaagagat

SEQ ID NO: 877379 - DNA, 15 bp, Homo sapiens
gccatggaagagatt

SEQ ID NO: 877380 - DNA, 15 bp, Homo sapiens
ccatggaagagattg

SEQ ID NO: 877381 - DNA, 15 bp, Homo sapiens
catggaagagattgc

SEQ ID NO: 877382 - DNA, 15 bp, Homo sapiens
atggaagagattgct

SEQ ID NO: 877383 - DNA, 15 bp, Homo sapiens
tggaagagattgctg

SEQ ID NO: 877384 - DNA, 15 bp, Homo sapiens
ggaagagattgctgt

SEQ ID NO: 877385 - DNA, 15 bp, Homo sapiens
gaagagattgctgtc

SEQ ID NO: 877386 - DNA, 15 bp, Homo sapiens
aagagattgctgtcc

SEQ ID NO: 877387 - DNA, 15 bp, Homo sapiens
agagattgctgtccc

SEQ ID NO: 877388 - DNA, 15 bp, Homo sapiens
gagattgctgtccca

SEQ ID NO: 877389 - DNA, 15 bp, Homo sapiens
agattgctgtcccac

SEQ ID NO: 877390 - DNA, 15 bp, Homo sapiens
gattgctgtcccact

SEQ ID NO: 877391 - DNA, 15 bp, Homo sapiens
attgctgtcccactc

SEQ ID NO: 877392 - DNA, 15 bp, Homo sapiens
ttgctgtcccactct

SEQ ID NO: 877393 - DNA, 15 bp, Homo sapiens
tgctgtcccactctg

SEQ ID NO: 877394 - DNA, 15 bp, Homo sapiens
gctgtcccactctgt

SEQ ID NO: 877395 - DNA, 15 bp, Homo sapiens
ctgtcccactctgta

SEQ ID NO: 877396 - DNA, 15 bp, Homo sapiens
tgtcccactctgtac

SEQ ID NO: 877397 - DNA, 15 bp, Homo sapiens
gtcccactctgtact

SEQ ID NO: 877398 - DNA, 15 bp, Homo sapiens
tcccactctgtactc

SEQ ID NO: 877399 - DNA, 15 bp, Homo sapiens
cccactctgtactct

SEQ ID NO: 877400 - DNA, 15 bp, Homo sapiens
ccactctgtactctt

SEQ ID NO: 877401 - DNA, 15 bp, Homo sapiens
cactctgtactcttg

SEQ ID NO: 877402 - DNA, 15 bp, Homo sapiens
actctgtactcttga

SEQ ID NO: 877403 - DNA, 15 bp, Homo sapiens
ctctgtactcttgac

SEQ ID NO: 877404 - DNA, 15 bp, Homo sapiens
tctgtactcttgaca

SEQ ID NO: 877405 - DNA, 15 bp, Homo sapiens
ctgtactcttgacat

SEQ ID NO: 877406 - DNA, 15 bp, Homo sapiens
tgtactcttgacata

SEQ ID NO: 877407 - DNA, 15 bp, Homo sapiens
gtactcttgacatat

SEQ ID NO: 877408 - DNA, 15 bp, Homo sapiens
tactcttgacatata

SEQ ID NO: 877409 - DNA, 15 bp, Homo sapiens
actcttgacatataa

SEQ ID NO: 877410 - DNA, 15 bp, Homo sapiens
ctcttgacatataag

SEQ ID NO: 877411 - DNA, 15 bp, Homo sapiens
tcttgacatataagt

SEQ ID NO: 877412 - DNA, 15 bp, Homo sapiens
cttgacatataagtg

SEQ ID NO: 877413 - DNA, 15 bp, Homo sapiens
ttgacatataagtgg

SEQ ID NO: 877414 - DNA, 15 bp, Homo sapiens
tgacatataagtggg

SEQ ID NO: 877415 - DNA, 15 bp, Homo sapiens
gacatataagtggga

SEQ ID NO: 877416 - DNA, 15 bp, Homo sapiens
acatataagtgggaa

SEQ ID NO: 877417 - DNA, 15 bp, Homo sapiens
catataagtgggaag

SEQ ID NO: 877418 - DNA, 15 bp, Homo sapiens
atataagtgggaagt

SEQ ID NO: 877419 - DNA, 15 bp, Homo sapiens
tataagtgggaagta

SEQ ID NO: 877420 - DNA, 15 bp, Homo sapiens
ataagtgggaagtat

SEQ ID NO: 877421 - DNA, 15 bp, Homo sapiens
taagtgggaagtatc

SEQ ID NO: 877422 - DNA, 15 bp, Homo sapiens
aagtgggaagtatcg

SEQ ID NO: 877423 - DNA, 15 bp, Homo sapiens
agtgggaagtatcgg

SEQ ID NO: 877424 - DNA, 15 bp, Homo sapiens
gtgggaagtatcgga

SEQ ID NO: 877425 - DNA, 15 bp, Homo sapiens
tgggaagtatcggag

SEQ ID NO: 877426 - DNA, 15 bp, Homo sapiens
gggaagtatcggaga

SEQ ID NO: 877427 - DNA, 15 bp, Homo sapiens
ggaagtatcggagac

SEQ ID NO: 877428 - DNA, 15 bp, Homo sapiens
gaagtatcggagaca

SEQ ID NO: 877429 - DNA, 15 bp, Homo sapiens
aagtatcggagacat

SEQ ID NO: 877430 - DNA, 15 bp, Homo sapiens
agtatcggagacatt

SEQ ID NO: 877431 - DNA, 15 bp, Homo sapiens
gtatcggagacattt

SEQ ID NO: 877432 - DNA, 15 bp, Homo sapiens
tatcggagacatttc

SEQ ID NO: 877433 - DNA, 15 bp, Homo sapiens
atcggagacatttca

SEQ ID NO: 877434 - DNA, 15 bp, Homo sapiens
tcggagacatttcag

SEQ ID NO: 877435 - DNA, 15 bp, Homo sapiens
cggagacatttcaga

SEQ ID NO: 877436 - DNA, 15 bp, Homo sapiens
ggagacatttcagaa

SEQ ID NO: 877437 - DNA, 15 bp, Homo sapiens
gagacatttcagaag

SEQ ID NO: 877438 - DNA, 15 bp, Homo sapiens
agacatttcagaagg

SEQ ID NO: 877439 - DNA, 15 bp, Homo sapiens
gacatttcagaagga

SEQ ID NO: 877440 - DNA, 15 bp, Homo sapiens
acatttcagaaggac

SEQ ID NO: 877441 - DNA, 15 bp, Homo sapiens
catttcagaaggaca

SEQ ID NO: 877442 - DNA, 15 bp, Homo sapiens
atttcagaaggacaa

SEQ ID NO: 877443 - DNA, 15 bp, Homo sapiens
tttcagaaggacaaa

SEQ ID NO: 877444 - DNA, 15 bp, Homo sapiens
ttcagaaggacaaat

SEQ ID NO: 877445 - DNA, 15 bp, Homo sapiens
tcagaaggacaaata

SEQ ID NO: 877446 - DNA, 15 bp, Homo sapiens
cagaaggacaaatag

SEQ ID NO: 877447 - DNA, 15 bp, Homo sapiens
agaaggacaaatagt

SEQ ID NO: 877448 - DNA, 15 bp, Homo sapiens
gaaggacaaatagta

SEQ ID NO: 877449 - DNA, 15 bp, Homo sapiens
aaggacaaatagtaa

SEQ ID NO: 877450 - DNA, 15 bp, Homo sapiens
aggacaaatagtaaa

SEQ ID NO: 877451 - DNA, 15 bp, Homo sapiens
ggacaaatagtaaaa

SEQ ID NO: 877452 - DNA, 15 bp, Homo sapiens
gacaaatagtaaaaa

SEQ ID NO: 877453 - DNA, 15 bp, Homo sapiens
acaaatagtaaaaag

SEQ ID NO: 877454 - DNA, 15 bp, Homo sapiens
caaatagtaaaaagt

SEQ ID NO: 877455 - DNA, 15 bp, Homo sapiens
aaatagtaaaaagta

SEQ ID NO: 877456 - DNA, 15 bp, Homo sapiens
aatagtaaaaagtaa

SEQ ID NO: 877457 - DNA, 15 bp, Homo sapiens
atagtaaaaagtaaa

SEQ ID NO: 877458 - DNA, 15 bp, Homo sapiens
tagtaaaaagtaaat

SEQ ID NO: 877459 - DNA, 15 bp, Homo sapiens
agtaaaaagtaaata

SEQ ID NO: 877460 - DNA, 15 bp, Homo sapiens
gtaaaaagtaaataa

SEQ ID NO: 877461 - DNA, 15 bp, Homo sapiens
taaaaagtaaataaa

SEQ ID NO: 877462 - DNA, 15 bp, Homo sapiens
aaaaagtaaataaaa

SEQ ID NO: 877463 - DNA, 15 bp, Homo sapiens
aaaagtaaataaaag

SEQ ID NO: 877464 - DNA, 15 bp, Homo sapiens
aaagtaaataaaagt

SEQ ID NO: 877465 - DNA, 15 bp, Homo sapiens
aagtaaataaaagtc

SEQ ID NO: 877466 - DNA, 15 bp, Homo sapiens
agtaaataaaagtca

SEQ ID NO: 877467 - DNA, 15 bp, Homo sapiens
gtaaataaaagtcag

SEQ ID NO: 877468 - DNA, 15 bp, Homo sapiens
taaataaaagtcagc

SEQ ID NO: 877469 - DNA, 15 bp, Homo sapiens
aaataaaagtcagcc

SEQ ID NO: 877470 - DNA, 15 bp, Homo sapiens
aataaaagtcagcct

SEQ ID NO: 877471 - DNA, 15 bp, Homo sapiens
ataaaagtcagcctc

SEQ ID NO: 877472 - DNA, 15 bp, Homo sapiens
taaaagtcagcctct

SEQ ID NO: 877473 - DNA, 15 bp, Homo sapiens
aaaagtcagcctctg

SEQ ID NO: 877474 - DNA, 15 bp, Homo sapiens
aaagtcagcctctgc

SEQ ID NO: 877475 - DNA, 15 bp, Homo sapiens
aagtcagcctctgca

SEQ ID NO: 877476 - DNA, 15 bp, Homo sapiens
agtcagcctctgcag

SEQ ID NO: 877477 - DNA, 15 bp, Homo sapiens
gtcagcctctgcaga

SEQ ID NO: 877478 - DNA, 15 bp, Homo sapiens
tcagcctctgcagag

SEQ ID NO: 877479 - DNA, 15 bp, Homo sapiens
cagcctctgcagagc

SEQ ID NO: 877480 - DNA, 15 bp, Homo sapiens
agcctctgcagagcg

SEQ ID NO: 877481 - DNA, 15 bp, Homo sapiens
gcctctgcagagcga

SEQ ID NO: 877482 - DNA, 15 bp, Homo sapiens
cctctgcagagcgag

SEQ ID NO: 877483 - DNA, 15 bp, Homo sapiens
ctctgcagagcgaga

SEQ ID NO: 877484 - DNA, 15 bp, Homo sapiens
tctgcagagcgagac

SEQ ID NO: 877485 - DNA, 15 bp, Homo sapiens
ctgcagagcgagact

SEQ ID NO: 877486 - DNA, 15 bp, Homo sapiens
tgcagagcgagactc

SEQ ID NO: 877487 - DNA, 15 bp, Homo sapiens
gcagagcgagactct

SEQ ID NO: 877488 - DNA, 15 bp, Homo sapiens
gcgagactctgtcta

SEQ ID NO: 877489 - DNA, 15 bp, Homo sapiens
cgagactctgtctaa

SEQ ID NO: 877490 - DNA, 15 bp, Homo sapiens
gagactctgtctaaa

SEQ ID NO: 877491 - DNA, 15 bp, Homo sapiens
gactctgtctaaaaa

SEQ ID NO: 877492 - DNA, 15 bp, Homo sapiens
actctgtctaaaaaa

SEQ ID NO: 877493 - DNA, 15 bp, Homo sapiens
ctctgtctaaaaaaa

SEQ ID NO: 877494 - DNA, 15 bp, Homo sapiens
aaaaaaaagaaaaaa

SEQ ID NO: 877495 - DNA, 15 bp, Homo sapiens
aaaaaaagaaaaaag

SEQ ID NO: 877496 - DNA, 15 bp, Homo sapiens
aaaaaagaaaaaaga

SEQ ID NO: 877497 - DNA, 15 bp, Homo sapiens
gaaaaaagaaaaaag

SEQ ID NO: 877498 - DNA, 15 bp, Homo sapiens
aaaaaagaaaaaagt

SEQ ID NO: 877499 - DNA, 15 bp, Homo sapiens
aaaaagaaaaaagtc

SEQ ID NO: 877500 - DNA, 15 bp, Homo sapiens
aaaagaaaaaagtca

SEQ ID NO: 877501 - DNA, 15 bp, Homo sapiens
aaagaaaaaagtcac

SEQ ID NO: 877502 - DNA, 15 bp, Homo sapiens
aagaaaaaagtcacc

SEQ ID NO: 877503 - DNA, 15 bp, Homo sapiens
agaaaaaagtcaccc

SEQ ID NO: 877504 - DNA, 15 bp, Homo sapiens
gaaaaaagtcaccct

SEQ ID NO: 877505 - DNA, 15 bp, Homo sapiens
aaaaaagtcaccctc

SEQ ID NO: 877506 - DNA, 15 bp, Homo sapiens
aaaaagtcaccctct

SEQ ID NO: 877507 - DNA, 15 bp, Homo sapiens
aaaagtcaccctctg

SEQ ID NO: 877508 - DNA, 15 bp, Homo sapiens
aaagtcaccctctga

SEQ ID NO: 877509 - DNA, 15 bp, Homo sapiens
aagtcaccctctgat

SEQ ID NO: 877510 - DNA, 15 bp, Homo sapiens
agtcaccctctgatg

SEQ ID NO: 877511 - DNA, 15 bp, Homo sapiens
gtcaccctctgatgt

SEQ ID NO: 877512 - DNA, 15 bp, Homo sapiens
tcaccctctgatgtt

SEQ ID NO: 877513 - DNA, 15 bp, Homo sapiens
caccctctgatgttg

SEQ ID NO: 877514 - DNA, 15 bp, Homo sapiens
accctctgatgttga

SEQ ID NO: 877515 - DNA, 15 bp, Homo sapiens
ccctctgatgttgaa

SEQ ID NO: 877516 - DNA, 15 bp, Homo sapiens
cctctgatgttgaaa

SEQ ID NO: 877517 - DNA, 15 bp, Homo sapiens
ctctgatgttgaaat

SEQ ID NO: 877518 - DNA, 15 bp, Homo sapiens
tctgatgttgaaata

SEQ ID NO: 877519 - DNA, 15 bp, Homo sapiens
ctgatgttgaaatat

SEQ ID NO: 877520 - DNA, 15 bp, Homo sapiens
tgatgttgaaatata

SEQ ID NO: 877521 - DNA, 15 bp, Homo sapiens
gatgttgaaatatag

SEQ ID NO: 877522 - DNA, 15 bp, Homo sapiens
atgttgaaatataga

SEQ ID NO: 877523 - DNA, 15 bp, Homo sapiens
tgttgaaatatagaa

SEQ ID NO: 877524 - DNA, 15 bp, Homo sapiens
gttgaaatatagaat

SEQ ID NO: 877525 - DNA, 15 bp, Homo sapiens
ttgaaatatagaatt

SEQ ID NO: 877526 - DNA, 15 bp, Homo sapiens
tgaaatatagaattt

SEQ ID NO: 877527 - DNA, 15 bp, Homo sapiens
gaaatatagaatttc

SEQ ID NO: 877528 - DNA, 15 bp, Homo sapiens
aaatatagaatttca

SEQ ID NO: 877529 - DNA, 15 bp, Homo sapiens
aatatagaatttcaa

SEQ ID NO: 877530 - DNA, 15 bp, Homo sapiens
atatagaatttcaaa

SEQ ID NO: 877531 - DNA, 15 bp, Homo sapiens
tatagaatttcaaaa

SEQ ID NO: 877532 - DNA, 15 bp, Homo sapiens
gaatttcaaaaggta

SEQ ID NO: 877533 - DNA, 15 bp, Homo sapiens
aatttcaaaaggtaa

SEQ ID NO: 877534 - DNA, 15 bp, Homo sapiens
atttcaaaaggtaaa

SEQ ID NO: 877535 - DNA, 15 bp, Homo sapiens
tttcaaaaggtaaaa

SEQ ID NO: 877536 - DNA, 15 bp, Homo sapiens
ttcaaaaggtaaaat

SEQ ID NO: 877537 - DNA, 15 bp, Homo sapiens
tcaaaaggtaaaatc

SEQ ID NO: 877538 - DNA, 15 bp, Homo sapiens
caaaaggtaaaatca

SEQ ID NO: 877539 - DNA, 15 bp, Homo sapiens
aaaaggtaaaatcac

SEQ ID NO: 877540 - DNA, 15 bp, Homo sapiens
aaaggtaaaatcact

SEQ ID NO: 877541 - DNA, 15 bp, Homo sapiens
aaggtaaaatcactt

SEQ ID NO: 877542 - DNA, 15 bp, Homo sapiens
aggtaaaatcacttt

SEQ ID NO: 877543 - DNA, 15 bp, Homo sapiens
ggtaaaatcacttta

SEQ ID NO: 877544 - DNA, 15 bp, Homo sapiens
gtaaaatcactttac

SEQ ID NO: 877545 - DNA, 15 bp, Homo sapiens
taaaatcactttaca

SEQ ID NO: 877546 - DNA, 15 bp, Homo sapiens
aaaatcactttacaa

SEQ ID NO: 877547 - DNA, 15 bp, Homo sapiens
aaatcactttacaat

SEQ ID NO: 877548 - DNA, 15 bp, Homo sapiens
aatcactttacaatt

SEQ ID NO: 877549 - DNA, 15 bp, Homo sapiens
atcactttacaattt

SEQ ID NO: 877550 - DNA, 15 bp, Homo sapiens
tcactttacaattta

SEQ ID NO: 877551 - DNA, 15 bp, Homo sapiens
cactttacaatttat

SEQ ID NO: 877552 - DNA, 15 bp, Homo sapiens
actttacaatttatg

SEQ ID NO: 877553 - DNA, 15 bp, Homo sapiens
ctttacaatttatgg

SEQ ID NO: 877554 - DNA, 15 bp, Homo sapiens
tttacaatttatgga

SEQ ID NO: 877555 - DNA, 15 bp, Homo sapiens
ttacaatttatggaa

SEQ ID NO: 877556 - DNA, 15 bp, Homo sapiens
tacaatttatggaat

SEQ ID NO: 877557 - DNA, 15 bp, Homo sapiens
acaatttatggaatg

SEQ ID NO: 877558 - DNA, 15 bp, Homo sapiens
caatttatggaatgt

SEQ ID NO: 877559 - DNA, 15 bp, Homo sapiens
aatttatggaatgtg

SEQ ID NO: 877560 - DNA, 15 bp, Homo sapiens
atttatggaatgtga

SEQ ID NO: 877561 - DNA, 15 bp, Homo sapiens
tttatggaatgtgac

SEQ ID NO: 877562 - DNA, 15 bp, Homo sapiens
ttatggaatgtgacc

SEQ ID NO: 877563 - DNA, 15 bp, Homo sapiens
tatggaatgtgaccc

SEQ ID NO: 877564 - DNA, 15 bp, Homo sapiens
atggaatgtgacccg

SEQ ID NO: 877565 - DNA, 15 bp, Homo sapiens
tggaatgtgacccga

SEQ ID NO: 877566 - DNA, 15 bp, Homo sapiens
ggaatgtgacccgat

SEQ ID NO: 877567 - DNA, 15 bp, Homo sapiens
gaatgtgacccgatg

SEQ ID NO: 877568 - DNA, 15 bp, Homo sapiens
aatgtgacccgatgt

SEQ ID NO: 877569 - DNA, 15 bp, Homo sapiens
atgtgacccgatgta

SEQ ID NO: 877570 - DNA, 15 bp, Homo sapiens
tgtgacccgatgtat

SEQ ID NO: 877571 - DNA, 15 bp, Homo sapiens
gtgacccgatgtata

SEQ ID NO: 877572 - DNA, 15 bp, Homo sapiens
tgacccgatgtatat

SEQ ID NO: 877573 - DNA, 15 bp, Homo sapiens
gacccgatgtatatt

SEQ ID NO: 877574 - DNA, 15 bp, Homo sapiens
acccgatgtatattt

SEQ ID NO: 877575 - DNA, 15 bp, Homo sapiens
cccgatgtatatttt

SEQ ID NO: 877576 - DNA, 15 bp, Homo sapiens
ccgatgtatattttc

SEQ ID NO: 877577 - DNA, 15 bp, Homo sapiens
cgatgtatattttct

SEQ ID NO: 877578 - DNA, 15 bp, Homo sapiens
gatgtatattttctg

SEQ ID NO: 877579 - DNA, 15 bp, Homo sapiens
atgtatattttctgt

SEQ ID NO: 877580 - DNA, 15 bp, Homo sapiens
tgtatattttctgtc

SEQ ID NO: 877581 - DNA, 15 bp, Homo sapiens
gtatattttctgtct

SEQ ID NO: 877582 - DNA, 15 bp, Homo sapiens
tatattttctgtctt

SEQ ID NO: 877583 - DNA, 15 bp, Homo sapiens
atattttctgtcttg

SEQ ID NO: 877584 - DNA, 15 bp, Homo sapiens
tattttctgtcttgt

SEQ ID NO: 877585 - DNA, 15 bp, Homo sapiens
attttctgtcttgtg

SEQ ID NO: 877586 - DNA, 15 bp, Homo sapiens
ttttctgtcttgtgt

SEQ ID NO: 877587 - DNA, 15 bp, Homo sapiens
tttctgtcttgtgtt

SEQ ID NO: 877588 - DNA, 15 bp, Homo sapiens
ttctgtcttgtgttg

SEQ ID NO: 877589 - DNA, 15 bp, Homo sapiens
tctgtcttgtgttga

SEQ ID NO: 877590 - DNA, 15 bp, Homo sapiens
ctgtcttgtgttgac

SEQ ID NO: 877591 - DNA, 15 bp, Homo sapiens
tgtcttgtgttgaca

SEQ ID NO: 877592 - DNA, 15 bp, Homo sapiens
gtcttgtgttgacaa

SEQ ID NO: 877593 - DNA, 15 bp, Homo sapiens
tcttgtgttgacaat

SEQ ID NO: 877594 - DNA, 15 bp, Homo sapiens
cttgtgttgacaata

SEQ ID NO: 877595 - DNA, 15 bp, Homo sapiens
ttgtgttgacaatat

SEQ ID NO: 877596 - DNA, 15 bp, Homo sapiens
tgtgttgacaatatt

SEQ ID NO: 877597 - DNA, 15 bp, Homo sapiens
gtgttgacaatatta

SEQ ID NO: 877598 - DNA, 15 bp, Homo sapiens
tgttgacaatattac

SEQ ID NO: 877599 - DNA, 15 bp, Homo sapiens
gttgacaatattact

SEQ ID NO: 877600 - DNA, 15 bp, Homo sapiens
ttgacaatattactc

SEQ ID NO: 877601 - DNA, 15 bp, Homo sapiens
tgacaatattactca

SEQ ID NO: 877602 - DNA, 15 bp, Homo sapiens
gacaatattactcag

SEQ ID NO: 877603 - DNA, 15 bp, Homo sapiens
acaatattactcaga

SEQ ID NO: 877604 - DNA, 15 bp, Homo sapiens
caatattactcagaa

SEQ ID NO: 877605 - DNA, 15 bp, Homo sapiens
aatattactcagaaa

SEQ ID NO: 877606 - DNA, 15 bp, Homo sapiens
atattactcagaaaa

SEQ ID NO: 877607 - DNA, 15 bp, Homo sapiens
tattactcagaaaag

SEQ ID NO: 877608 - DNA, 15 bp, Homo sapiens
attactcagaaaaga

SEQ ID NO: 877609 - DNA, 15 bp, Homo sapiens
ttactcagaaaagat

SEQ ID NO: 877610 - DNA, 15 bp, Homo sapiens
tactcagaaaagata

SEQ ID NO: 877611 - DNA, 15 bp, Homo sapiens
actcagaaaagatag

SEQ ID NO: 877612 - DNA, 15 bp, Homo sapiens
ctcagaaaagatagc

SEQ ID NO: 877613 - DNA, 15 bp, Homo sapiens
tcagaaaagatagct

SEQ ID NO: 877614 - DNA, 15 bp, Homo sapiens
cagaaaagatagctc

SEQ ID NO: 877615 - DNA, 15 bp, Homo sapiens
agaaaagatagctcc

SEQ ID NO: 877616 - DNA, 15 bp, Homo sapiens
gaaaagatagctcca

SEQ ID NO: 877617 - DNA, 15 bp, Homo sapiens
aaaagatagctccat

SEQ ID NO: 877618 - DNA, 15 bp, Homo sapiens
aaagatagctccatt

SEQ ID NO: 877619 - DNA, 15 bp, Homo sapiens
aagatagctccattt

SEQ ID NO: 877620 - DNA, 15 bp, Homo sapiens
agatagctccatttc

SEQ ID NO: 877621 - DNA, 15 bp, Homo sapiens
gatagctccatttca

SEQ ID NO: 877622 - DNA, 15 bp, Homo sapiens
atagctccatttcaa

SEQ ID NO: 877623 - DNA, 15 bp, Homo sapiens
tagctccatttcaag

SEQ ID NO: 877624 - DNA, 15 bp, Homo sapiens
agctccatttcaaga

SEQ ID NO: 877625 - DNA, 15 bp, Homo sapiens
gctccatttcaagag

SEQ ID NO: 877626 - DNA, 15 bp, Homo sapiens
ctccatttcaagagt

SEQ ID NO: 877627 - DNA, 15 bp, Homo sapiens
tccatttcaagagtg

SEQ ID NO: 877628 - DNA, 15 bp, Homo sapiens
ccatttcaagagtgg

SEQ ID NO: 877629 - DNA, 15 bp, Homo sapiens
catttcaagagtggt

SEQ ID NO: 877630 - DNA, 15 bp, Homo sapiens
atttcaagagtggtt

SEQ ID NO: 877631 - DNA, 15 bp, Homo sapiens
tttcaagagtggtta

SEQ ID NO: 877632 - DNA, 15 bp, Homo sapiens
ttcaagagtggttaa

SEQ ID NO: 877633 - DNA, 15 bp, Homo sapiens
tcaagagtggttaag

SEQ ID NO: 877634 - DNA, 15 bp, Homo sapiens
caagagtggttaagt

SEQ ID NO: 877635 - DNA, 15 bp, Homo sapiens
aagagtggttaagta

SEQ ID NO: 877636 - DNA, 15 bp, Homo sapiens
agagtggttaagtat

SEQ ID NO: 877637 - DNA, 15 bp, Homo sapiens
gagtggttaagtata

SEQ ID NO: 877638 - DNA, 15 bp, Homo sapiens
agtggttaagtatag

SEQ ID NO: 877639 - DNA, 15 bp, Homo sapiens
gtggttaagtatagc

SEQ ID NO: 877640 - DNA, 15 bp, Homo sapiens
tggttaagtatagct

SEQ ID NO: 877641 - DNA, 15 bp, Homo sapiens
ggttaagtatagctg

SEQ ID NO: 877642 - DNA, 15 bp, Homo sapiens
gttaagtatagctgg

SEQ ID NO: 877643 - DNA, 15 bp, Homo sapiens
ttaagtatagctggg

SEQ ID NO: 877644 - DNA, 15 bp, Homo sapiens
taagtatagctggga

SEQ ID NO: 877645 - DNA, 15 bp, Homo sapiens
aagtatagctgggac

SEQ ID NO: 877646 - DNA, 15 bp, Homo sapiens
agtatagctgggaca

SEQ ID NO: 877647 - DNA, 15 bp, Homo sapiens
gtatagctgggacaa

SEQ ID NO: 877648 - DNA, 15 bp, Homo sapiens
tatagctgggacaat

SEQ ID NO: 877649 - DNA, 15 bp, Homo sapiens
atagctgggacaatg

SEQ ID NO: 877650 - DNA, 15 bp, Homo sapiens
tagctgggacaatgt

SEQ ID NO: 877651 - DNA, 15 bp, Homo sapiens
agctgggacaatgtc

SEQ ID NO: 877652 - DNA, 15 bp, Homo sapiens
gctgggacaatgtcc

SEQ ID NO: 877653 - DNA, 15 bp, Homo sapiens
ctgggacaatgtcct

SEQ ID NO: 877654 - DNA, 15 bp, Homo sapiens
tgggacaatgtccta

SEQ ID NO: 877655 - DNA, 15 bp, Homo sapiens
gggacaatgtcctaa

SEQ ID NO: 877656 - DNA, 15 bp, Homo sapiens
ggacaatgtcctaat

SEQ ID NO: 877657 - DNA, 15 bp, Homo sapiens
gacaatgtcctaatt

SEQ ID NO: 877658 - DNA, 15 bp, Homo sapiens
acaatgtcctaatta

SEQ ID NO: 877659 - DNA, 15 bp, Homo sapiens
caatgtcctaattat

SEQ ID NO: 877660 - DNA, 15 bp, Homo sapiens
aatgtcctaattata

SEQ ID NO: 877661 - DNA, 15 bp, Homo sapiens
atgtcctaattatat

SEQ ID NO: 877662 - DNA, 15 bp, Homo sapiens
tgtcctaattatatg

SEQ ID NO: 877663 - DNA, 15 bp, Homo sapiens
gtcctaattatatgg

SEQ ID NO: 877664 - DNA, 15 bp, Homo sapiens
tcctaattatatggc

SEQ ID NO: 877665 - DNA, 15 bp, Homo sapiens
cctaattatatggcc

SEQ ID NO: 877666 - DNA, 15 bp, Homo sapiens
ctaattatatggcca

SEQ ID NO: 877667 - DNA, 15 bp, Homo sapiens
taattatatggccag

SEQ ID NO: 877668 - DNA, 15 bp, Homo sapiens
aattatatggccagt

SEQ ID NO: 877669 - DNA, 15 bp, Homo sapiens
attatatggccagtt

SEQ ID NO: 877670 - DNA, 15 bp, Homo sapiens
ttatatggccagttt

SEQ ID NO: 877671 - DNA, 15 bp, Homo sapiens
tatatggccagtttt

SEQ ID NO: 877672 - DNA, 15 bp, Homo sapiens
atatggccagttttg

SEQ ID NO: 877673 - DNA, 15 bp, Homo sapiens
tatggccagttttgc

SEQ ID NO: 877674 - DNA, 15 bp, Homo sapiens
atggccagttttgca

SEQ ID NO: 877675 - DNA, 15 bp, Homo sapiens
tggccagttttgcag

SEQ ID NO: 877676 - DNA, 15 bp, Homo sapiens
ggccagttttgcagg

SEQ ID NO: 877677 - DNA, 15 bp, Homo sapiens
gccagttttgcagga

SEQ ID NO: 877678 - DNA, 15 bp, Homo sapiens
ccagttttgcaggaa

SEQ ID NO: 877679 - DNA, 15 bp, Homo sapiens
cagttttgcaggaag

SEQ ID NO: 877680 - DNA, 15 bp, Homo sapiens
agttttgcaggaagg

SEQ ID NO: 877681 - DNA, 15 bp, Homo sapiens
gttttgcaggaagga

SEQ ID NO: 877682 - DNA, 15 bp, Homo sapiens
ttttgcaggaaggaa

SEQ ID NO: 877683 - DNA, 15 bp, Homo sapiens
tttgcaggaaggaac

SEQ ID NO: 877684 - DNA, 15 bp, Homo sapiens
ttgcaggaaggaaca

SEQ ID NO: 877685 - DNA, 15 bp, Homo sapiens
tgcaggaaggaacaa

SEQ ID NO: 877686 - DNA, 15 bp, Homo sapiens
gcaggaaggaacaat

SEQ ID NO: 877687 - DNA, 15 bp, Homo sapiens
caggaaggaacaatg

SEQ ID NO: 877688 - DNA, 15 bp, Homo sapiens
aggaaggaacaatga

SEQ ID NO: 877689 - DNA, 15 bp, Homo sapiens
ggaaggaacaatgac

SEQ ID NO: 877690 - DNA, 15 bp, Homo sapiens
gaaggaacaatgact

SEQ ID NO: 877691 - DNA, 15 bp, Homo sapiens
aaggaacaatgactt

SEQ ID NO: 877692 - DNA, 15 bp, Homo sapiens
aggaacaatgacttc

SEQ ID NO: 877693 - DNA, 15 bp, Homo sapiens
ggaacaatgacttcc

SEQ ID NO: 877694 - DNA, 15 bp, Homo sapiens
gaacaatgacttccc

SEQ ID NO: 877695 - DNA, 15 bp, Homo sapiens
aacaatgacttccca

SEQ ID NO: 877696 - DNA, 15 bp, Homo sapiens
acaatgacttcccaa

SEQ ID NO: 877697 - DNA, 15 bp, Homo sapiens
caatgacttcccaaa

SEQ ID NO: 877698 - DNA, 15 bp, Homo sapiens
aatgacttcccaaac

SEQ ID NO: 877699 - DNA, 15 bp, Homo sapiens
atgacttcccaaacc

SEQ ID NO: 877700 - DNA, 15 bp, Homo sapiens
tgacttcccaaaccc

SEQ ID NO: 877701 - DNA, 15 bp, Homo sapiens
gacttcccaaacccg

SEQ ID NO: 877702 - DNA, 15 bp, Homo sapiens
acttcccaaacccga

SEQ ID NO: 877703 - DNA, 15 bp, Homo sapiens
cttcccaaacccgag

SEQ ID NO: 877704 - DNA, 15 bp, Homo sapiens
ttcccaaacccgagg

SEQ ID NO: 877705 - DNA, 15 bp, Homo sapiens
tcccaaacccgaggt

SEQ ID NO: 877706 - DNA, 15 bp, Homo sapiens
cccaaacccgaggtg

SEQ ID NO: 877707 - DNA, 15 bp, Homo sapiens
ccaaacccgaggtgc

SEQ ID NO: 877708 - DNA, 15 bp, Homo sapiens
caaacccgaggtgct

SEQ ID NO: 877709 - DNA, 15 bp, Homo sapiens
aaacccgaggtgctg

SEQ ID NO: 877710 - DNA, 15 bp, Homo sapiens
aacccgaggtgctga

SEQ ID NO: 877711 - DNA, 15 bp, Homo sapiens
acccgaggtgctgaa

SEQ ID NO: 877712 - DNA, 15 bp, Homo sapiens
cccgaggtgctgaat

SEQ ID NO: 877713 - DNA, 15 bp, Homo sapiens
ccgaggtgctgaatc

SEQ ID NO: 877714 - DNA, 15 bp, Homo sapiens
cgaggtgctgaatca

SEQ ID NO: 877715 - DNA, 15 bp, Homo sapiens
gaggtgctgaatcac

SEQ ID NO: 877716 - DNA, 15 bp, Homo sapiens
aggtgctgaatcact

SEQ ID NO: 877717 - DNA, 15 bp, Homo sapiens
ggtgctgaatcacta

SEQ ID NO: 877718 - DNA, 15 bp, Homo sapiens
gtgctgaatcactat

SEQ ID NO: 877719 - DNA, 15 bp, Homo sapiens
tgctgaatcactatc

SEQ ID NO: 877720 - DNA, 15 bp, Homo sapiens
gctgaatcactatca

SEQ ID NO: 877721 - DNA, 15 bp, Homo sapiens
ctgaatcactatcag

SEQ ID NO: 877722 - DNA, 15 bp, Homo sapiens
tgaatcactatcaga

SEQ ID NO: 877723 - DNA, 15 bp, Homo sapiens
gaatcactatcagag

SEQ ID NO: 877724 - DNA, 15 bp, Homo sapiens
aatcactatcagaga

SEQ ID NO: 877725 - DNA, 15 bp, Homo sapiens
atcactatcagagat

SEQ ID NO: 877726 - DNA, 15 bp, Homo sapiens
tcactatcagagata

SEQ ID NO: 877727 - DNA, 15 bp, Homo sapiens
cactatcagagataa

SEQ ID NO: 877728 - DNA, 15 bp, Homo sapiens
actatcagagataaa

SEQ ID NO: 877729 - DNA, 15 bp, Homo sapiens
ctatcagagataaaa

SEQ ID NO: 877730 - DNA, 15 bp, Homo sapiens
tatcagagataaaag

SEQ ID NO: 877731 - DNA, 15 bp, Homo sapiens
atcagagataaaagc

SEQ ID NO: 877732 - DNA, 15 bp, Homo sapiens
tcagagataaaagca

SEQ ID NO: 877733 - DNA, 15 bp, Homo sapiens
cagagataaaagcat

SEQ ID NO: 877734 - DNA, 15 bp, Homo sapiens
agagataaaagcatg

SEQ ID NO: 877735 - DNA, 15 bp, Homo sapiens
gagataaaagcatgg

SEQ ID NO: 877736 - DNA, 15 bp, Homo sapiens
agataaaagcatgga

SEQ ID NO: 877737 - DNA, 15 bp, Homo sapiens
gataaaagcatggac

SEQ ID NO: 877738 - DNA, 15 bp, Homo sapiens
ataaaagcatggaca

SEQ ID NO: 877739 - DNA, 15 bp, Homo sapiens
taaaagcatggacat

SEQ ID NO: 877740 - DNA, 15 bp, Homo sapiens
aaaagcatggacatt

SEQ ID NO: 877741 - DNA, 15 bp, Homo sapiens
aaagcatggacattg

SEQ ID NO: 877742 - DNA, 15 bp, Homo sapiens
aagcatggacattga

SEQ ID NO: 877743 - DNA, 15 bp, Homo sapiens
agcatggacattgac

SEQ ID NO: 877744 - DNA, 15 bp, Homo sapiens
gcatggacattgact

SEQ ID NO: 877745 - DNA, 15 bp, Homo sapiens
catggacattgacta

SEQ ID NO: 877746 - DNA, 15 bp, Homo sapiens
atggacattgactat

SEQ ID NO: 877747 - DNA, 15 bp, Homo sapiens
tggacattgactatg

SEQ ID NO: 877748 - DNA, 15 bp, Homo sapiens
ggacattgactatga

SEQ ID NO: 877749 - DNA, 15 bp, Homo sapiens
gacattgactatgat

SEQ ID NO: 877750 - DNA, 15 bp, Homo sapiens
acattgactatgatt

SEQ ID NO: 877751 - DNA, 15 bp, Homo sapiens
cattgactatgattc

SEQ ID NO: 877752 - DNA, 15 bp, Homo sapiens
attgactatgattca

SEQ ID NO: 877753 - DNA, 15 bp, Homo sapiens
ttgactatgattcaa

SEQ ID NO: 877754 - DNA, 15 bp, Homo sapiens
tgactatgattcaag

SEQ ID NO: 877755 - DNA, 15 bp, Homo sapiens
gactatgattcaagg

SEQ ID NO: 877756 - DNA, 15 bp, Homo sapiens
actatgattcaaggt

SEQ ID NO: 877757 - DNA, 15 bp, Homo sapiens
ctatgattcaaggtg

SEQ ID NO: 877758 - DNA, 15 bp, Homo sapiens
tatgattcaaggtgc

SEQ ID NO: 877759 - DNA, 15 bp, Homo sapiens
atgattcaaggtgca

SEQ ID NO: 877760 - DNA, 15 bp, Homo sapiens
tgattcaaggtgcag

SEQ ID NO: 877761 - DNA, 15 bp, Homo sapiens
gattcaaggtgcagg

SEQ ID NO: 877762 - DNA, 15 bp, Homo sapiens
attcaaggtgcagga

SEQ ID NO: 877763 - DNA, 15 bp, Homo sapiens
ttcaaggtgcaggag

SEQ ID NO: 877764 - DNA, 15 bp, Homo sapiens
tcaaggtgcaggagc

SEQ ID NO: 877765 - DNA, 15 bp, Homo sapiens
caaggtgcaggagct

SEQ ID NO: 877766 - DNA, 15 bp, Homo sapiens
aaggtgcaggagctt

SEQ ID NO: 877767 - DNA, 15 bp, Homo sapiens
aggtgcaggagctta

SEQ ID NO: 877768 - DNA, 15 bp, Homo sapiens
ggtgcaggagcttat

SEQ ID NO: 877769 - DNA, 15 bp, Homo sapiens
gtgcaggagcttatt

SEQ ID NO: 877770 - DNA, 15 bp, Homo sapiens
tgcaggagcttattt

SEQ ID NO: 877771 - DNA, 15 bp, Homo sapiens
gcaggagcttattta

SEQ ID NO: 877772 - DNA, 15 bp, Homo sapiens
caggagcttatttat

SEQ ID NO: 877773 - DNA, 15 bp, Homo sapiens
aggagcttatttatt

SEQ ID NO: 877774 - DNA, 15 bp, Homo sapiens
ggagcttatttattg

SEQ ID NO: 877775 - DNA, 15 bp, Homo sapiens
gagcttatttattgt

SEQ ID NO: 877776 - DNA, 15 bp, Homo sapiens
agcttatttattgtg

SEQ ID NO: 877777 - DNA, 15 bp, Homo sapiens
gcttatttattgtgc

SEQ ID NO: 877778 - DNA, 15 bp, Homo sapiens
cttatttattgtgct

SEQ ID NO: 877779 - DNA, 15 bp, Homo sapiens
ttatttattgtgcta

SEQ ID NO: 877780 - DNA, 15 bp, Homo sapiens
tatttattgtgctat

SEQ ID NO: 877781 - DNA, 15 bp, Homo sapiens
atttattgtgctata

SEQ ID NO: 877782 - DNA, 15 bp, Homo sapiens
tttattgtgctataa

SEQ ID NO: 877783 - DNA, 15 bp, Homo sapiens
ttattgtgctataag

SEQ ID NO: 877784 - DNA, 15 bp, Homo sapiens
tattgtgctataagc

SEQ ID NO: 877785 - DNA, 15 bp, Homo sapiens
attgtgctataagct

SEQ ID NO: 877786 - DNA, 15 bp, Homo sapiens
ttgtgctataagctt

SEQ ID NO: 877787 - DNA, 15 bp, Homo sapiens
tgtgctataagcttg

SEQ ID NO: 877788 - DNA, 15 bp, Homo sapiens
gtgctataagcttgt

SEQ ID NO: 877789 - DNA, 15 bp, Homo sapiens
tgctataagcttgtt

SEQ ID NO: 877790 - DNA, 15 bp, Homo sapiens
gctataagcttgtta

SEQ ID NO: 877791 - DNA, 15 bp, Homo sapiens
ctataagcttgttag

SEQ ID NO: 877792 - DNA, 15 bp, Homo sapiens
tataagcttgttaga

SEQ ID NO: 877793 - DNA, 15 bp, Homo sapiens
ataagcttgttagaa

SEQ ID NO: 877794 - DNA, 15 bp, Homo sapiens
taagcttgttagaac

SEQ ID NO: 877795 - DNA, 15 bp, Homo sapiens
aagcttgttagaact

SEQ ID NO: 877796 - DNA, 15 bp, Homo sapiens
agcttgttagaactg

SEQ ID NO: 877797 - DNA, 15 bp, Homo sapiens
gcttgttagaactgc

SEQ ID NO: 877798 - DNA, 15 bp, Homo sapiens
cttgttagaactgcc

SEQ ID NO: 877799 - DNA, 15 bp, Homo sapiens
ttgttagaactgcct

SEQ ID NO: 877800 - DNA, 15 bp, Homo sapiens
tgttagaactgcctg

SEQ ID NO: 877801 - DNA, 15 bp, Homo sapiens
gttagaactgcctga

SEQ ID NO: 877802 - DNA, 15 bp, Homo sapiens
ttagaactgcctgat

SEQ ID NO: 877803 - DNA, 15 bp, Homo sapiens
tagaactgcctgatt

SEQ ID NO: 877804 - DNA, 15 bp, Homo sapiens
agaactgcctgattc

SEQ ID NO: 877805 - DNA, 15 bp, Homo sapiens
gaactgcctgattcc

SEQ ID NO: 877806 - DNA, 15 bp, Homo sapiens
aactgcctgattcca

SEQ ID NO: 877807 - DNA, 15 bp, Homo sapiens
actgcctgattccat

SEQ ID NO: 877808 - DNA, 15 bp, Homo sapiens
ctgcctgattccatt

SEQ ID NO: 877809 - DNA, 15 bp, Homo sapiens
tgcctgattccattg

SEQ ID NO: 877810 - DNA, 15 bp, Homo sapiens
gcctgattccattgc

SEQ ID NO: 877811 - DNA, 15 bp, Homo sapiens
cctgattccattgca

SEQ ID NO: 877812 - DNA, 15 bp, Homo sapiens
ctgattccattgcag

SEQ ID NO: 877813 - DNA, 15 bp, Homo sapiens
tgattccattgcagt

SEQ ID NO: 877814 - DNA, 15 bp, Homo sapiens
gattccattgcagtt

SEQ ID NO: 877815 - DNA, 15 bp, Homo sapiens
attccattgcagttc

SEQ ID NO: 877816 - DNA, 15 bp, Homo sapiens
ttccattgcagttct

SEQ ID NO: 877817 - DNA, 15 bp, Homo sapiens
tccattgcagttctt

SEQ ID NO: 877818 - DNA, 15 bp, Homo sapiens
ccattgcagttctta

SEQ ID NO: 877819 - DNA, 15 bp, Homo sapiens
cattgcagttcttaa

SEQ ID NO: 877820 - DNA, 15 bp, Homo sapiens
attgcagttcttaag

SEQ ID NO: 877821 - DNA, 15 bp, Homo sapiens
ttgcagttcttaagg

SEQ ID NO: 877822 - DNA, 15 bp, Homo sapiens
tgcagttcttaaggt

SEQ ID NO: 877823 - DNA, 15 bp, Homo sapiens
gcagttcttaaggtt

SEQ ID NO: 877824 - DNA, 15 bp, Homo sapiens
cagttcttaaggttg

SEQ ID NO: 877825 - DNA, 15 bp, Homo sapiens
agttcttaaggttgt

SEQ ID NO: 877826 - DNA, 15 bp, Homo sapiens
gttcttaaggttgtc

SEQ ID NO: 877827 - DNA, 15 bp, Homo sapiens
ttcttaaggttgtca

SEQ ID NO: 877828 - DNA, 15 bp, Homo sapiens
tcttaaggttgtcag

SEQ ID NO: 877829 - DNA, 15 bp, Homo sapiens
cttaaggttgtcagt

SEQ ID NO: 877830 - DNA, 15 bp, Homo sapiens
ttaaggttgtcagtg

SEQ ID NO: 877831 - DNA, 15 bp, Homo sapiens
taaggttgtcagtga

SEQ ID NO: 877832 - DNA, 15 bp, Homo sapiens
aaggttgtcagtgag

SEQ ID NO: 877833 - DNA, 15 bp, Homo sapiens
aggttgtcagtgagg

SEQ ID NO: 877834 - DNA, 15 bp, Homo sapiens
ggttgtcagtgaggc

SEQ ID NO: 877835 - DNA, 15 bp, Homo sapiens
gttgtcagtgaggct

SEQ ID NO: 877836 - DNA, 15 bp, Homo sapiens
ttgtcagtgaggctc

SEQ ID NO: 877837 - DNA, 15 bp, Homo sapiens
tgtcagtgaggctct

SEQ ID NO: 877838 - DNA, 15 bp, Homo sapiens
gtcagtgaggctctg

SEQ ID NO: 877839 - DNA, 15 bp, Homo sapiens
tcagtgaggctctgc

SEQ ID NO: 877840 - DNA, 15 bp, Homo sapiens
cagtgaggctctgcc

SEQ ID NO: 877841 - DNA, 15 bp, Homo sapiens
agtgaggctctgcca

SEQ ID NO: 877842 - DNA, 15 bp, Homo sapiens
gtgaggctctgccaa

SEQ ID NO: 877843 - DNA, 15 bp, Homo sapiens
tgaggctctgccaac

SEQ ID NO: 877844 - DNA, 15 bp, Homo sapiens
gaggctctgccaacc

SEQ ID NO: 877845 - DNA, 15 bp, Homo sapiens
aggctctgccaaccc

SEQ ID NO: 877846 - DNA, 15 bp, Homo sapiens
ggctctgccaaccca

SEQ ID NO: 877847 - DNA, 15 bp, Homo sapiens
gctctgccaacccac

SEQ ID NO: 877848 - DNA, 15 bp, Homo sapiens
ctctgccaacccact

SEQ ID NO: 877849 - DNA, 15 bp, Homo sapiens
tctgccaacccacta

SEQ ID NO: 877850 - DNA, 15 bp, Homo sapiens
ctgccaacccactag

SEQ ID NO: 877851 - DNA, 15 bp, Homo sapiens
tgccaacccactaga

SEQ ID NO: 877852 - DNA, 15 bp, Homo sapiens
gccaacccactagac

SEQ ID NO: 877853 - DNA, 15 bp, Homo sapiens
ccaacccactagacg

SEQ ID NO: 877854 - DNA, 15 bp, Homo sapiens
caacccactagacgg

SEQ ID NO: 877855 - DNA, 15 bp, Homo sapiens
aacccactagacggg

SEQ ID NO: 877856 - DNA, 15 bp, Homo sapiens
acccactagacggga

SEQ ID NO: 877857 - DNA, 15 bp, Homo sapiens
cccactagacgggag

SEQ ID NO: 877858 - DNA, 15 bp, Homo sapiens
ccactagacgggagg

SEQ ID NO: 877859 - DNA, 15 bp, Homo sapiens
cactagacgggaggc

SEQ ID NO: 877860 - DNA, 15 bp, Homo sapiens
actagacgggaggcc

SEQ ID NO: 877861 - DNA, 15 bp, Homo sapiens
ctagacgggaggcct

SEQ ID NO: 877862 - DNA, 15 bp, Homo sapiens
tagacgggaggcctt

SEQ ID NO: 877863 - DNA, 15 bp, Homo sapiens
agacgggaggccttt

SEQ ID NO: 877864 - DNA, 15 bp, Homo sapiens
gacgggaggccttta

SEQ ID NO: 877865 - DNA, 15 bp, Homo sapiens
acgggaggcctttat

SEQ ID NO: 877866 - DNA, 15 bp, Homo sapiens
cgggaggcctttatg

SEQ ID NO: 877867 - DNA, 15 bp, Homo sapiens
gggaggcctttatgg

SEQ ID NO: 877868 - DNA, 15 bp, Homo sapiens
ggaggcctttatgga

SEQ ID NO: 877869 - DNA, 15 bp, Homo sapiens
gaggcctttatggaa

SEQ ID NO: 877870 - DNA, 15 bp, Homo sapiens
aggcctttatggaag

SEQ ID NO: 877871 - DNA, 15 bp, Homo sapiens
ggcctttatggaagc

SEQ ID NO: 877872 - DNA, 15 bp, Homo sapiens
gcctttatggaagca

SEQ ID NO: 877873 - DNA, 15 bp, Homo sapiens
cctttatggaagcat

SEQ ID NO: 877874 - DNA, 15 bp, Homo sapiens
ctttatggaagcatc

SEQ ID NO: 877875 - DNA, 15 bp, Homo sapiens
tttatggaagcatct

SEQ ID NO: 877876 - DNA, 15 bp, Homo sapiens
ttatggaagcatctt

SEQ ID NO: 877877 - DNA, 15 bp, Homo sapiens
tatggaagcatcttc

SEQ ID NO: 877878 - DNA, 15 bp, Homo sapiens
atggaagcatcttcc

SEQ ID NO: 877879 - DNA, 15 bp, Homo sapiens
tggaagcatcttcct

SEQ ID NO: 877880 - DNA, 15 bp, Homo sapiens
ggaagcatcttcctt

SEQ ID NO: 877881 - DNA, 15 bp, Homo sapiens
gaagcatcttccttt

SEQ ID NO: 877882 - DNA, 15 bp, Homo sapiens
aagcatcttcctttt

SEQ ID NO: 877883 - DNA, 15 bp, Homo sapiens
agcatcttccttttc

SEQ ID NO: 877884 - DNA, 15 bp, Homo sapiens
gcatcttccttttcc

SEQ ID NO: 877885 - DNA, 15 bp, Homo sapiens
catcttccttttcca

SEQ ID NO: 877886 - DNA, 15 bp, Homo sapiens
atcttccttttccac

SEQ ID NO: 877887 - DNA, 15 bp, Homo sapiens
tcttccttttccacc

SEQ ID NO: 877888 - DNA, 15 bp, Homo sapiens
cttccttttccacca

SEQ ID NO: 877889 - DNA, 15 bp, Homo sapiens
ttccttttccaccaa

SEQ ID NO: 877890 - DNA, 15 bp, Homo sapiens
tccttttccaccaat

SEQ ID NO: 877891 - DNA, 15 bp, Homo sapiens
ccttttccaccaata

SEQ ID NO: 877892 - DNA, 15 bp, Homo sapiens
cttttccaccaatag

SEQ ID NO: 877893 - DNA, 15 bp, Homo sapiens
ttttccaccaataga

SEQ ID NO: 877894 - DNA, 15 bp, Homo sapiens
tttccaccaatagac

SEQ ID NO: 877895 - DNA, 15 bp, Homo sapiens
ttccaccaatagaca

SEQ ID NO: 877896 - DNA, 15 bp, Homo sapiens
tccaccaatagacaa

SEQ ID NO: 877897 - DNA, 15 bp, Homo sapiens
ccaccaatagacaag

SEQ ID NO: 877898 - DNA, 15 bp, Homo sapiens
caccaatagacaagg

SEQ ID NO: 877899 - DNA, 15 bp, Homo sapiens
accaatagacaaggc

SEQ ID NO: 877900 - DNA, 15 bp, Homo sapiens
ccaatagacaaggca

SEQ ID NO: 877901 - DNA, 15 bp, Homo sapiens
caatagacaaggcaa

SEQ ID NO: 877902 - DNA, 15 bp, Homo sapiens
aatagacaaggcaat

SEQ ID NO: 877903 - DNA, 15 bp, Homo sapiens
atagacaaggcaata

SEQ ID NO: 877904 - DNA, 15 bp, Homo sapiens
tagacaaggcaatag

SEQ ID NO: 877905 - DNA, 15 bp, Homo sapiens
agacaaggcaataga

SEQ ID NO: 877906 - DNA, 15 bp, Homo sapiens
gacaaggcaatagag

SEQ ID NO: 877907 - DNA, 15 bp, Homo sapiens
acaaggcaatagagg

SEQ ID NO: 877908 - DNA, 15 bp, Homo sapiens
caaggcaatagaggg

SEQ ID NO: 877909 - DNA, 15 bp, Homo sapiens
aaggcaatagagggc

SEQ ID NO: 877910 - DNA, 15 bp, Homo sapiens
aggcaatagagggcg

SEQ ID NO: 877911 - DNA, 15 bp, Homo sapiens
ggcaatagagggcga

SEQ ID NO: 877912 - DNA, 15 bp, Homo sapiens
gcaatagagggcgaa

SEQ ID NO: 877913 - DNA, 15 bp, Homo sapiens
caatagagggcgaat

SEQ ID NO: 877914 - DNA, 15 bp, Homo sapiens
aatagagggcgaatg

SEQ ID NO: 877915 - DNA, 15 bp, Homo sapiens
atagagggcgaatgt

SEQ ID NO: 877916 - DNA, 15 bp, Homo sapiens
tagagggcgaatgtt

SEQ ID NO: 877917 - DNA, 15 bp, Homo sapiens
agagggcgaatgttg

SEQ ID NO: 877918 - DNA, 15 bp, Homo sapiens
gagggcgaatgttgc

SEQ ID NO: 877919 - DNA, 15 bp, Homo sapiens
agggcgaatgttgcc

SEQ ID NO: 877920 - DNA, 15 bp, Homo sapiens
gggcgaatgttgccc

SEQ ID NO: 877921 - DNA, 15 bp, Homo sapiens
ggcgaatgttgccct

SEQ ID NO: 877922 - DNA, 15 bp, Homo sapiens
gcgaatgttgccctg

SEQ ID NO: 877923 - DNA, 15 bp, Homo sapiens
cgaatgttgccctga

SEQ ID NO: 877924 - DNA, 15 bp, Homo sapiens
gaatgttgccctgag

SEQ ID NO: 877925 - DNA, 15 bp, Homo sapiens
aatgttgccctgaga

SEQ ID NO: 877926 - DNA, 15 bp, Homo sapiens
atgttgccctgagaa

SEQ ID NO: 877927 - DNA, 15 bp, Homo sapiens
tgttgccctgagaat

SEQ ID NO: 877928 - DNA, 15 bp, Homo sapiens
gttgccctgagaatt

SEQ ID NO: 877929 - DNA, 15 bp, Homo sapiens
ttgccctgagaattt

SEQ ID NO: 877930 - DNA, 15 bp, Homo sapiens
tgccctgagaatttg

SEQ ID NO: 877931 - DNA, 15 bp, Homo sapiens
gccctgagaatttga

SEQ ID NO: 877932 - DNA, 15 bp, Homo sapiens
ccctgagaatttgaa

SEQ ID NO: 877933 - DNA, 15 bp, Homo sapiens
cctgagaatttgaaa

SEQ ID NO: 877934 - DNA, 15 bp, Homo sapiens
ctgagaatttgaaac

SEQ ID NO: 877935 - DNA, 15 bp, Homo sapiens
tgagaatttgaaaca

SEQ ID NO: 877936 - DNA, 15 bp, Homo sapiens
gagaatttgaaacaa

SEQ ID NO: 877937 - DNA, 15 bp, Homo sapiens
agaatttgaaacaag

SEQ ID NO: 877938 - DNA, 15 bp, Homo sapiens
gaatttgaaacaagt

SEQ ID NO: 877939 - DNA, 15 bp, Homo sapiens
aatttgaaacaagtt

SEQ ID NO: 877940 - DNA, 15 bp, Homo sapiens
atttgaaacaagttt

SEQ ID NO: 877941 - DNA, 15 bp, Homo sapiens
tttgaaacaagttta

SEQ ID NO: 877942 - DNA, 15 bp, Homo sapiens
ttgaaacaagtttat

SEQ ID NO: 877943 - DNA, 15 bp, Homo sapiens
tgaaacaagtttatt

SEQ ID NO: 877944 - DNA, 15 bp, Homo sapiens
gaaacaagtttatta

SEQ ID NO: 877945 - DNA, 15 bp, Homo sapiens
aaacaagtttattaa

SEQ ID NO: 877946 - DNA, 15 bp, Homo sapiens
aacaagtttattaag

SEQ ID NO: 877947 - DNA, 15 bp, Homo sapiens
acaagtttattaaga

SEQ ID NO: 877948 - DNA, 15 bp, Homo sapiens
caagtttattaagat

SEQ ID NO: 877949 - DNA, 15 bp, Homo sapiens
aagtttattaagatg

SEQ ID NO: 877950 - DNA, 15 bp, Homo sapiens
agtttattaagatgc

SEQ ID NO: 877951 - DNA, 15 bp, Homo sapiens
gtttattaagatgca

SEQ ID NO: 877952 - DNA, 15 bp, Homo sapiens
tttattaagatgcat

SEQ ID NO: 877953 - DNA, 15 bp, Homo sapiens
ttattaagatgcatc

SEQ ID NO: 877954 - DNA, 15 bp, Homo sapiens
tattaagatgcatct

SEQ ID NO: 877955 - DNA, 15 bp, Homo sapiens
attaagatgcatctg

SEQ ID NO: 877956 - DNA, 15 bp, Homo sapiens
ttaagatgcatctga

SEQ ID NO: 877957 - DNA, 15 bp, Homo sapiens
taagatgcatctgag

SEQ ID NO: 877958 - DNA, 15 bp, Homo sapiens
aagatgcatctgagc

SEQ ID NO: 877959 - DNA, 15 bp, Homo sapiens
agatgcatctgagct

SEQ ID NO: 877960 - DNA, 15 bp, Homo sapiens
gatgcatctgagctt

SEQ ID NO: 877961 - DNA, 15 bp, Homo sapiens
atgcatctgagcttg

SEQ ID NO: 877962 - DNA, 15 bp, Homo sapiens
tgcatctgagcttga

SEQ ID NO: 877963 - DNA, 15 bp, Homo sapiens
gcatctgagcttgag

SEQ ID NO: 877964 - DNA, 15 bp, Homo sapiens
catctgagcttgagg

SEQ ID NO: 877965 - DNA, 15 bp, Homo sapiens
atctgagcttgaggc

SEQ ID NO: 877966 - DNA, 15 bp, Homo sapiens
tctgagcttgaggct

SEQ ID NO: 877967 - DNA, 15 bp, Homo sapiens
ctgagcttgaggctc

SEQ ID NO: 877968 - DNA, 15 bp, Homo sapiens
tgagcttgaggctct

SEQ ID NO: 877969 - DNA, 15 bp, Homo sapiens
gagcttgaggctctc

SEQ ID NO: 877970 - DNA, 15 bp, Homo sapiens
agcttgaggctctca

SEQ ID NO: 877971 - DNA, 15 bp, Homo sapiens
gcttgaggctctcat

SEQ ID NO: 877972 - DNA, 15 bp, Homo sapiens
cttgaggctctcatc

SEQ ID NO: 877973 - DNA, 15 bp, Homo sapiens
ttgaggctctcatct

SEQ ID NO: 877974 - DNA, 15 bp, Homo sapiens
tgaggctctcatcta

SEQ ID NO: 877975 - DNA, 15 bp, Homo sapiens
gaggctctcatctaa

SEQ ID NO: 877976 - DNA, 15 bp, Homo sapiens
aggctctcatctaag

SEQ ID NO: 877977 - DNA, 15 bp, Homo sapiens
ggctctcatctaaga

SEQ ID NO: 877978 - DNA, 15 bp, Homo sapiens
gctctcatctaagat

SEQ ID NO: 877979 - DNA, 15 bp, Homo sapiens
ctctcatctaagata

SEQ ID NO: 877980 - DNA, 15 bp, Homo sapiens
tctcatctaagatat

SEQ ID NO: 877981 - DNA, 15 bp, Homo sapiens
ctcatctaagatatg

SEQ ID NO: 877982 - DNA, 15 bp, Homo sapiens
tcatctaagatatgc

SEQ ID NO: 877983 - DNA, 15 bp, Homo sapiens
catctaagatatgca

SEQ ID NO: 877984 - DNA, 15 bp, Homo sapiens
atctaagatatgcag

SEQ ID NO: 877985 - DNA, 15 bp, Homo sapiens
tctaagatatgcagc

SEQ ID NO: 877986 - DNA, 15 bp, Homo sapiens
ctaagatatgcagca

SEQ ID NO: 877987 - DNA, 15 bp, Homo sapiens
taagatatgcagcag

SEQ ID NO: 877988 - DNA, 15 bp, Homo sapiens
aagatatgcagcagt

SEQ ID NO: 877989 - DNA, 15 bp, Homo sapiens
agatatgcagcagtt

SEQ ID NO: 877990 - DNA, 15 bp, Homo sapiens
gatatgcagcagttg

SEQ ID NO: 877991 - DNA, 15 bp, Homo sapiens
atatgcagcagttgg

SEQ ID NO: 877992 - DNA, 15 bp, Homo sapiens
tatgcagcagttggg

SEQ ID NO: 877993 - DNA, 15 bp, Homo sapiens
atgcagcagttggga

SEQ ID NO: 877994 - DNA, 15 bp, Homo sapiens
tgcagcagttgggag

SEQ ID NO: 877995 - DNA, 15 bp, Homo sapiens
gcagcagttgggagg

SEQ ID NO: 877996 - DNA, 15 bp, Homo sapiens
cagcagttgggaggt

SEQ ID NO: 877997 - DNA, 15 bp, Homo sapiens
agcagttgggaggtg

SEQ ID NO: 877998 - DNA, 15 bp, Homo sapiens
gcagttgggaggtga

SEQ ID NO: 877999 - DNA, 15 bp, Homo sapiens
cagttgggaggtgaa

SEQ ID NO: 878000 - DNA, 15 bp, Homo sapiens
agttgggaggtgaag

SEQ ID NO: 878001 - DNA, 15 bp, Homo sapiens
gttgggaggtgaagg

SEQ ID NO: 878002 - DNA, 15 bp, Homo sapiens
ttgggaggtgaaggt

SEQ ID NO: 878003 - DNA, 15 bp, Homo sapiens
tgggaggtgaaggtg

SEQ ID NO: 878004 - DNA, 15 bp, Homo sapiens
gggaggtgaaggtgg

SEQ ID NO: 878005 - DNA, 15 bp, Homo sapiens
ggaggtgaaggtggt

SEQ ID NO: 878006 - DNA, 15 bp, Homo sapiens
gaggtgaaggtggtg

SEQ ID NO: 878007 - DNA, 15 bp, Homo sapiens
aggtgaaggtggtgg

SEQ ID NO: 878008 - DNA, 15 bp, Homo sapiens
ggtgaaggtggtggg

SEQ ID NO: 878009 - DNA, 15 bp, Homo sapiens
gtgaaggtggtgggg

SEQ ID NO: 878010 - DNA, 15 bp, Homo sapiens
tgaaggtggtgggga

SEQ ID NO: 878011 - DNA, 15 bp, Homo sapiens
gaaggtggtggggag

SEQ ID NO: 878012 - DNA, 15 bp, Homo sapiens
aaggtggtggggagc

SEQ ID NO: 878013 - DNA, 15 bp, Homo sapiens
aggtggtggggagca

SEQ ID NO: 878014 - DNA, 15 bp, Homo sapiens
ggtggtggggagcat

SEQ ID NO: 878015 - DNA, 15 bp, Homo sapiens
gtggtggggagcatc

SEQ ID NO: 878016 - DNA, 15 bp, Homo sapiens
tggtggggagcatca

SEQ ID NO: 878017 - DNA, 15 bp, Homo sapiens
ggtggggagcatcat

SEQ ID NO: 878018 - DNA, 15 bp, Homo sapiens
gtggggagcatcatt

SEQ ID NO: 878019 - DNA, 15 bp, Homo sapiens
tggggagcatcattg

SEQ ID NO: 878020 - DNA, 15 bp, Homo sapiens
ggggagcatcattgg

SEQ ID NO: 878021 - DNA, 15 bp, Homo sapiens
gggagcatcattgga

SEQ ID NO: 878022 - DNA, 15 bp, Homo sapiens
ggagcatcattggat

SEQ ID NO: 878023 - DNA, 15 bp, Homo sapiens
gagcatcattggatg

SEQ ID NO: 878024 - DNA, 15 bp, Homo sapiens
agcatcattggatgg

SEQ ID NO: 878025 - DNA, 15 bp, Homo sapiens
gcatcattggatggt

SEQ ID NO: 878026 - DNA, 15 bp, Homo sapiens
catcattggatggtt

SEQ ID NO: 878027 - DNA, 15 bp, Homo sapiens
atcattggatggtta

SEQ ID NO: 878028 - DNA, 15 bp, Homo sapiens
tcattggatggttag

SEQ ID NO: 878029 - DNA, 15 bp, Homo sapiens
cattggatggttagt

SEQ ID NO: 878030 - DNA, 15 bp, Homo sapiens
attggatggttagtg

SEQ ID NO: 878031 - DNA, 15 bp, Homo sapiens
ttggatggttagtgc

SEQ ID NO: 878032 - DNA, 15 bp, Homo sapiens
tggatggttagtgca

SEQ ID NO: 878033 - DNA, 15 bp, Homo sapiens
ggatggttagtgcat

SEQ ID NO: 878034 - DNA, 15 bp, Homo sapiens
gatggttagtgcata

SEQ ID NO: 878035 - DNA, 15 bp, Homo sapiens
atggttagtgcatat

SEQ ID NO: 878036 - DNA, 15 bp, Homo sapiens
tggttagtgcatata

SEQ ID NO: 878037 - DNA, 15 bp, Homo sapiens
ggttagtgcatatac

SEQ ID NO: 878038 - DNA, 15 bp, Homo sapiens
gttagtgcatataca

SEQ ID NO: 878039 - DNA, 15 bp, Homo sapiens
ttagtgcatatacag

SEQ ID NO: 878040 - DNA, 15 bp, Homo sapiens
tagtgcatatacagt

SEQ ID NO: 878041 - DNA, 15 bp, Homo sapiens
agtgcatatacagtt

SEQ ID NO: 878042 - DNA, 15 bp, Homo sapiens
gtgcatatacagttg

SEQ ID NO: 878043 - DNA, 15 bp, Homo sapiens
tgcatatacagttgt

SEQ ID NO: 878044 - DNA, 15 bp, Homo sapiens
gcatatacagttgtc

SEQ ID NO: 878045 - DNA, 15 bp, Homo sapiens
catatacagttgtca

SEQ ID NO: 878046 - DNA, 15 bp, Homo sapiens
atatacagttgtcaa

SEQ ID NO: 878047 - DNA, 15 bp, Homo sapiens
tatacagttgtcaag

SEQ ID NO: 878048 - DNA, 15 bp, Homo sapiens
atacagttgtcaagg

SEQ ID NO: 878049 - DNA, 15 bp, Homo sapiens
tacagttgtcaaggc

SEQ ID NO: 878050 - DNA, 15 bp, Homo sapiens
acagttgtcaaggca

SEQ ID NO: 878051 - DNA, 15 bp, Homo sapiens
cagttgtcaaggcaa

SEQ ID NO: 878052 - DNA, 15 bp, Homo sapiens
agttgtcaaggcaag

SEQ ID NO: 878053 - DNA, 15 bp, Homo sapiens
gttgtcaaggcaagg

SEQ ID NO: 878054 - DNA, 15 bp, Homo sapiens
ttgtcaaggcaagga

SEQ ID NO: 878055 - DNA, 15 bp, Homo sapiens
tgtcaaggcaaggag

SEQ ID NO: 878056 - DNA, 15 bp, Homo sapiens
gtcaaggcaaggaga

SEQ ID NO: 878057 - DNA, 15 bp, Homo sapiens
tcaaggcaaggagag

SEQ ID NO: 878058 - DNA, 15 bp, Homo sapiens
caaggcaaggagaga

SEQ ID NO: 878059 - DNA, 15 bp, Homo sapiens
aaggcaaggagagag

SEQ ID NO: 878060 - DNA, 15 bp, Homo sapiens
aggcaaggagagagg

SEQ ID NO: 878061 - DNA, 15 bp, Homo sapiens
ggcaaggagagaggg

SEQ ID NO: 878062 - DNA, 15 bp, Homo sapiens
gcaaggagagagggt

SEQ ID NO: 878063 - DNA, 15 bp, Homo sapiens
caaggagagagggtg

SEQ ID NO: 878064 - DNA, 15 bp, Homo sapiens
aaggagagagggtgt

SEQ ID NO: 878065 - DNA, 15 bp, Homo sapiens
aggagagagggtgtt

SEQ ID NO: 878066 - DNA, 15 bp, Homo sapiens
ggagagagggtgttg

SEQ ID NO: 878067 - DNA, 15 bp, Homo sapiens
gagagagggtgttgt

SEQ ID NO: 878068 - DNA, 15 bp, Homo sapiens
agagagggtgttgtt

SEQ ID NO: 878069 - DNA, 15 bp, Homo sapiens
gagagggtgttgttt

SEQ ID NO: 878070 - DNA, 15 bp, Homo sapiens
agagggtgttgttta

SEQ ID NO: 878071 - DNA, 15 bp, Homo sapiens
gagggtgttgtttag

SEQ ID NO: 878072 - DNA, 15 bp, Homo sapiens
agggtgttgtttagt

SEQ ID NO: 878073 - DNA, 15 bp, Homo sapiens
gggtgttgtttagta

SEQ ID NO: 878074 - DNA, 15 bp, Homo sapiens
ggtgttgtttagtat

SEQ ID NO: 878075 - DNA, 15 bp, Homo sapiens
gtgttgtttagtatt

SEQ ID NO: 878076 - DNA, 15 bp, Homo sapiens
tgttgtttagtattg

SEQ ID NO: 878077 - DNA, 15 bp, Homo sapiens
gttgtttagtattga

SEQ ID NO: 878078 - DNA, 15 bp, Homo sapiens
ttgtttagtattgaa

SEQ ID NO: 878079 - DNA, 15 bp, Homo sapiens
tgtttagtattgaaa

SEQ ID NO: 878080 - DNA, 15 bp, Homo sapiens
gtttagtattgaaat

SEQ ID NO: 878081 - DNA, 15 bp, Homo sapiens
tttagtattgaaatc

SEQ ID NO: 878082 - DNA, 15 bp, Homo sapiens
ttagtattgaaatca

SEQ ID NO: 878083 - DNA, 15 bp, Homo sapiens
tagtattgaaatcat

SEQ ID NO: 878084 - DNA, 15 bp, Homo sapiens
agtattgaaatcatg

SEQ ID NO: 878085 - DNA, 15 bp, Homo sapiens
gtattgaaatcatgt

SEQ ID NO: 878086 - DNA, 15 bp, Homo sapiens
tattgaaatcatgta

SEQ ID NO: 878087 - DNA, 15 bp, Homo sapiens
attgaaatcatgtat

SEQ ID NO: 878088 - DNA, 15 bp, Homo sapiens
ttgaaatcatgtatt

SEQ ID NO: 878089 - DNA, 15 bp, Homo sapiens
tgaaatcatgtattc

SEQ ID NO: 878090 - DNA, 15 bp, Homo sapiens
gaaatcatgtattcc

SEQ ID NO: 878091 - DNA, 15 bp, Homo sapiens
aaatcatgtattcca

SEQ ID NO: 878092 - DNA, 15 bp, Homo sapiens
aatcatgtattccag

SEQ ID NO: 878093 - DNA, 15 bp, Homo sapiens
atcatgtattccaga

SEQ ID NO: 878094 - DNA, 15 bp, Homo sapiens
tcatgtattccagat

SEQ ID NO: 878095 - DNA, 15 bp, Homo sapiens
catgtattccagatg

SEQ ID NO: 878096 - DNA, 15 bp, Homo sapiens
atgtattccagatgt

SEQ ID NO: 878097 - DNA, 15 bp, Homo sapiens
tgtattccagatgtg

SEQ ID NO: 878098 - DNA, 15 bp, Homo sapiens
gtattccagatgtgg

SEQ ID NO: 878099 - DNA, 15 bp, Homo sapiens
tattccagatgtggg

SEQ ID NO: 878100 - DNA, 15 bp, Homo sapiens
attccagatgtgggc

SEQ ID NO: 878101 - DNA, 15 bp, Homo sapiens
ttccagatgtgggca

SEQ ID NO: 878102 - DNA, 15 bp, Homo sapiens
tccagatgtgggcat

SEQ ID NO: 878103 - DNA, 15 bp, Homo sapiens
ccagatgtgggcatt

SEQ ID NO: 878104 - DNA, 15 bp, Homo sapiens
cagatgtgggcattt

SEQ ID NO: 878105 - DNA, 15 bp, Homo sapiens
agatgtgggcatttg

SEQ ID NO: 878106 - DNA, 15 bp, Homo sapiens
gatgtgggcatttgg

SEQ ID NO: 878107 - DNA, 15 bp, Homo sapiens
atgtgggcatttggt

SEQ ID NO: 878108 - DNA, 15 bp, Homo sapiens
tgtgggcatttggta

SEQ ID NO: 878109 - DNA, 15 bp, Homo sapiens
tgggcatttggtagt

SEQ ID NO: 878110 - DNA, 15 bp, Homo sapiens
gggcatttggtagtc

SEQ ID NO: 878111 - DNA, 15 bp, Homo sapiens
ggcatttggtagtca

SEQ ID NO: 878112 - DNA, 15 bp, Homo sapiens
gcatttggtagtcag

SEQ ID NO: 878113 - DNA, 15 bp, Homo sapiens
catttggtagtcagt

SEQ ID NO: 878114 - DNA, 15 bp, Homo sapiens
atttggtagtcagtc

SEQ ID NO: 878115 - DNA, 15 bp, Homo sapiens
tttggtagtcagtct

SEQ ID NO: 878116 - DNA, 15 bp, Homo sapiens
ttggtagtcagtctg

SEQ ID NO: 878117 - DNA, 15 bp, Homo sapiens
tggtagtcagtctgc

SEQ ID NO: 878118 - DNA, 15 bp, Homo sapiens
ggtagtcagtctgct

SEQ ID NO: 878119 - DNA, 15 bp, Homo sapiens
gtagtcagtctgctc

SEQ ID NO: 878120 - DNA, 15 bp, Homo sapiens
tagtcagtctgctct

SEQ ID NO: 878121 - DNA, 15 bp, Homo sapiens
agtcagtctgctctg

SEQ ID NO: 878122 - DNA, 15 bp, Homo sapiens
gtcagtctgctctga

SEQ ID NO: 878123 - DNA, 15 bp, Homo sapiens
tcagtctgctctgaa

SEQ ID NO: 878124 - DNA, 15 bp, Homo sapiens
cagtctgctctgaag

SEQ ID NO: 878125 - DNA, 15 bp, Homo sapiens
agtctgctctgaagt

SEQ ID NO: 878126 - DNA, 15 bp, Homo sapiens
gtctgctctgaagtg

SEQ ID NO: 878127 - DNA, 15 bp, Homo sapiens
tctgctctgaagtga

SEQ ID NO: 878128 - DNA, 15 bp, Homo sapiens
ctgctctgaagtgac

SEQ ID NO: 878129 - DNA, 15 bp, Homo sapiens
tgctctgaagtgaca

SEQ ID NO: 878130 - DNA, 15 bp, Homo sapiens
tttggagttggagga

SEQ ID NO: 878131 - DNA, 15 bp, Homo sapiens
ttggagttggaggaa

SEQ ID NO: 878132 - DNA, 15 bp, Homo sapiens
tggagttggaggaag

SEQ ID NO: 878133 - DNA, 15 bp, Homo sapiens
ggagttggaggaaga

SEQ ID NO: 878134 - DNA, 15 bp, Homo sapiens
gagttggaggaagac

SEQ ID NO: 878135 - DNA, 15 bp, Homo sapiens
agttggaggaagaca

SEQ ID NO: 878136 - DNA, 15 bp, Homo sapiens
gttggaggaagacac

SEQ ID NO: 878137 - DNA, 15 bp, Homo sapiens
ttggaggaagacact

SEQ ID NO: 878138 - DNA, 15 bp, Homo sapiens
tggaggaagacactg

SEQ ID NO: 878139 - DNA, 15 bp, Homo sapiens
ggaggaagacactgg

SEQ ID NO: 878140 - DNA, 15 bp, Homo sapiens
gaggaagacactggc

SEQ ID NO: 878141 - DNA, 15 bp, Homo sapiens
aggaagacactggcc

SEQ ID NO: 878142 - DNA, 15 bp, Homo sapiens
ggaagacactggcct

SEQ ID NO: 878143 - DNA, 15 bp, Homo sapiens
gaagacactggcctg

SEQ ID NO: 878144 - DNA, 15 bp, Homo sapiens
aagacactggcctgt

SEQ ID NO: 878145 - DNA, 15 bp, Homo sapiens
agacactggcctgtt

SEQ ID NO: 878146 - DNA, 15 bp, Homo sapiens
gacactggcctgttg

SEQ ID NO: 878147 - DNA, 15 bp, Homo sapiens
acactggcctgttgc

SEQ ID NO: 878148 - DNA, 15 bp, Homo sapiens
cactggcctgttgct

SEQ ID NO: 878149 - DNA, 15 bp, Homo sapiens
actggcctgttgctc

SEQ ID NO: 878150 - DNA, 15 bp, Homo sapiens
ctggcctgttgctct

SEQ ID NO: 878151 - DNA, 15 bp, Homo sapiens
tggcctgttgctctt

SEQ ID NO: 878152 - DNA, 15 bp, Homo sapiens
ggcctgttgctctta

SEQ ID NO: 878153 - DNA, 15 bp, Homo sapiens
gcctgttgctcttac

SEQ ID NO: 878154 - DNA, 15 bp, Homo sapiens
cctgttgctcttact

SEQ ID NO: 878155 - DNA, 15 bp, Homo sapiens
ctgttgctcttacta

SEQ ID NO: 878156 - DNA, 15 bp, Homo sapiens
tgttgctcttactaa

SEQ ID NO: 878157 - DNA, 15 bp, Homo sapiens
gttgctcttactaat

SEQ ID NO: 878158 - DNA, 15 bp, Homo sapiens
ttgctcttactaatc

SEQ ID NO: 878159 - DNA, 15 bp, Homo sapiens
tgctcttactaatct

SEQ ID NO: 878160 - DNA, 15 bp, Homo sapiens
gctcttactaatctc

SEQ ID NO: 878161 - DNA, 15 bp, Homo sapiens
ctcttactaatctct

SEQ ID NO: 878162 - DNA, 15 bp, Homo sapiens
tcttactaatctctc

SEQ ID NO: 878163 - DNA, 15 bp, Homo sapiens
cttactaatctctct

SEQ ID NO: 878164 - DNA, 15 bp, Homo sapiens
ttactaatctctctc

SEQ ID NO: 878165 - DNA, 15 bp, Homo sapiens
actaatctctctcta

SEQ ID NO: 878166 - DNA, 15 bp, Homo sapiens
ctaatctctctctag

SEQ ID NO: 878167 - DNA, 15 bp, Homo sapiens
taatctctctctagc

SEQ ID NO: 878168 - DNA, 15 bp, Homo sapiens
aatctctctctagcc

SEQ ID NO: 878169 - DNA, 15 bp, Homo sapiens
atctctctctagccc

SEQ ID NO: 878170 - DNA, 15 bp, Homo sapiens
tctctctctagcccc

SEQ ID NO: 878171 - DNA, 15 bp, Homo sapiens
ctctctctagcccct

SEQ ID NO: 878172 - DNA, 15 bp, Homo sapiens
tctctctagcccctt

SEQ ID NO: 878173 - DNA, 15 bp, Homo sapiens
ctctctagccccttg

SEQ ID NO: 878174 - DNA, 15 bp, Homo sapiens
tctctagccccttgt

SEQ ID NO: 878175 - DNA, 15 bp, Homo sapiens
ctctagccccttgta

SEQ ID NO: 878176 - DNA, 15 bp, Homo sapiens
tctagccccttgtaa

SEQ ID NO: 878177 - DNA, 15 bp, Homo sapiens
ctagccccttgtaat

SEQ ID NO: 878178 - DNA, 15 bp, Homo sapiens
tagccccttgtaatg

SEQ ID NO: 878179 - DNA, 15 bp, Homo sapiens
agccccttgtaatga

SEQ ID NO: 878180 - DNA, 15 bp, Homo sapiens
gccccttgtaatgat

SEQ ID NO: 878181 - DNA, 15 bp, Homo sapiens
ccccttgtaatgatt

SEQ ID NO: 878182 - DNA, 15 bp, Homo sapiens
cccttgtaatgatta

SEQ ID NO: 878183 - DNA, 15 bp, Homo sapiens
ccttgtaatgattat

SEQ ID NO: 878184 - DNA, 15 bp, Homo sapiens
cttgtaatgattatt

SEQ ID NO: 878185 - DNA, 15 bp, Homo sapiens
ttgtaatgattattt

SEQ ID NO: 878186 - DNA, 15 bp, Homo sapiens
tgtaatgattatttg

SEQ ID NO: 878187 - DNA, 15 bp, Homo sapiens
gtaatgattatttgg

SEQ ID NO: 878188 - DNA, 15 bp, Homo sapiens
taatgattatttggg

SEQ ID NO: 878189 - DNA, 15 bp, Homo sapiens
aatgattatttgggg

SEQ ID NO: 878190 - DNA, 15 bp, Homo sapiens
atgattatttgggga

SEQ ID NO: 878191 - DNA, 15 bp, Homo sapiens
tgattatttggggag

SEQ ID NO: 878192 - DNA, 15 bp, Homo sapiens
gattatttggggaga

SEQ ID NO: 878193 - DNA, 15 bp, Homo sapiens
attatttggggagat

SEQ ID NO: 878194 - DNA, 15 bp, Homo sapiens
ttatttggggagatc

SEQ ID NO: 878195 - DNA, 15 bp, Homo sapiens
tatttggggagatct

SEQ ID NO: 878196 - DNA, 15 bp, Homo sapiens
atttggggagatctt

SEQ ID NO: 878197 - DNA, 15 bp, Homo sapiens
tttggggagatcttt

SEQ ID NO: 878198 - DNA, 15 bp, Homo sapiens
ttggggagatctttt

SEQ ID NO: 878199 - DNA, 15 bp, Homo sapiens
tggggagatcttttc

SEQ ID NO: 878200 - DNA, 15 bp, Homo sapiens
ggggagatcttttct

SEQ ID NO: 878201 - DNA, 15 bp, Homo sapiens
gggagatcttttctc

SEQ ID NO: 878202 - DNA, 15 bp, Homo sapiens
ggagatcttttctct

SEQ ID NO: 878203 - DNA, 15 bp, Homo sapiens
gagatcttttctctg

SEQ ID NO: 878204 - DNA, 15 bp, Homo sapiens
agatcttttctctga

SEQ ID NO: 878205 - DNA, 15 bp, Homo sapiens
gatcttttctctgaa

SEQ ID NO: 878206 - DNA, 15 bp, Homo sapiens
atcttttctctgaat

SEQ ID NO: 878207 - DNA, 15 bp, Homo sapiens
tcttttctctgaatg

SEQ ID NO: 878208 - DNA, 15 bp, Homo sapiens
cttttctctgaatga

SEQ ID NO: 878209 - DNA, 15 bp, Homo sapiens
ttttctctgaatgat

SEQ ID NO: 878210 - DNA, 15 bp, Homo sapiens
tttctctgaatgatt

SEQ ID NO: 878211 - DNA, 15 bp, Homo sapiens
ttctctgaatgattt

SEQ ID NO: 878212 - DNA, 15 bp, Homo sapiens
tctctgaatgattta

SEQ ID NO: 878213 - DNA, 15 bp, Homo sapiens
ctctgaatgatttaa

SEQ ID NO: 878214 - DNA, 15 bp, Homo sapiens
tctgaatgatttaag

SEQ ID NO: 878215 - DNA, 15 bp, Homo sapiens
ctgaatgatttaagc

SEQ ID NO: 878216 - DNA, 15 bp, Homo sapiens
tgaatgatttaagca

SEQ ID NO: 878217 - DNA, 15 bp, Homo sapiens
gaatgatttaagcaa

SEQ ID NO: 878218 - DNA, 15 bp, Homo sapiens
aatgatttaagcaaa

SEQ ID NO: 878219 - DNA, 15 bp, Homo sapiens
atgatttaagcaaaa

SEQ ID NO: 878220 - DNA, 15 bp, Homo sapiens
tgatttaagcaaaac

SEQ ID NO: 878221 - DNA, 15 bp, Homo sapiens
gatttaagcaaaaca

SEQ ID NO: 878222 - DNA, 15 bp, Homo sapiens
atttaagcaaaacag

SEQ ID NO: 878223 - DNA, 15 bp, Homo sapiens
tttaagcaaaacagg

SEQ ID NO: 878224 - DNA, 15 bp, Homo sapiens
ttaagcaaaacaggc

SEQ ID NO: 878225 - DNA, 15 bp, Homo sapiens
taagcaaaacaggcc

SEQ ID NO: 878226 - DNA, 15 bp, Homo sapiens
aagcaaaacaggccc

SEQ ID NO: 878227 - DNA, 15 bp, Homo sapiens
agcaaaacaggcccc

SEQ ID NO: 878228 - DNA, 15 bp, Homo sapiens
gcaaaacaggcccct

SEQ ID NO: 878229 - DNA, 15 bp, Homo sapiens
caaaacaggcccctc

SEQ ID NO: 878230 - DNA, 15 bp, Homo sapiens
aaaacaggcccctcc

SEQ ID NO: 878231 - DNA, 15 bp, Homo sapiens
aaacaggcccctcca

SEQ ID NO: 878232 - DNA, 15 bp, Homo sapiens
aacaggcccctccag

SEQ ID NO: 878233 - DNA, 15 bp, Homo sapiens
acaggcccctccaga

SEQ ID NO: 878234 - DNA, 15 bp, Homo sapiens
caggcccctccagaa

SEQ ID NO: 878235 - DNA, 15 bp, Homo sapiens
aggcccctccagaaa

SEQ ID NO: 878236 - DNA, 15 bp, Homo sapiens
ggcccctccagaaat

SEQ ID NO: 878237 - DNA, 15 bp, Homo sapiens
gcccctccagaaatg

SEQ ID NO: 878238 - DNA, 15 bp, Homo sapiens
cccctccagaaatgt

SEQ ID NO: 878239 - DNA, 15 bp, Homo sapiens
ccctccagaaatgtc

SEQ ID NO: 878240 - DNA, 15 bp, Homo sapiens
cctccagaaatgtcc

SEQ ID NO: 878241 - DNA, 15 bp, Homo sapiens
ctccagaaatgtccc

SEQ ID NO: 878242 - DNA, 15 bp, Homo sapiens
tccagaaatgtccct

SEQ ID NO: 878243 - DNA, 15 bp, Homo sapiens
ccagaaatgtccctg

SEQ ID NO: 878244 - DNA, 15 bp, Homo sapiens
cagaaatgtccctgg

SEQ ID NO: 878245 - DNA, 15 bp, Homo sapiens
agaaatgtccctgga

SEQ ID NO: 878246 - DNA, 15 bp, Homo sapiens
gaaatgtccctggaa

SEQ ID NO: 878247 - DNA, 15 bp, Homo sapiens
aaatgtccctggaaa

SEQ ID NO: 878248 - DNA, 15 bp, Homo sapiens
aatgtccctggaaag

SEQ ID NO: 878249 - DNA, 15 bp, Homo sapiens
atgtccctggaaagt

SEQ ID NO: 878250 - DNA, 15 bp, Homo sapiens
tgtccctggaaagtc

SEQ ID NO: 878251 - DNA, 15 bp, Homo sapiens
gtccctggaaagtcc

SEQ ID NO: 878252 - DNA, 15 bp, Homo sapiens
tccctggaaagtcca

SEQ ID NO: 878253 - DNA, 15 bp, Homo sapiens
ccctggaaagtccaa

SEQ ID NO: 878254 - DNA, 15 bp, Homo sapiens
cctggaaagtccaag

SEQ ID NO: 878255 - DNA, 15 bp, Homo sapiens
ctggaaagtccaagg

SEQ ID NO: 878256 - DNA, 15 bp, Homo sapiens
tggaaagtccaaggc

SEQ ID NO: 878257 - DNA, 15 bp, Homo sapiens
ggaaagtccaaggca

SEQ ID NO: 878258 - DNA, 15 bp, Homo sapiens
gaaagtccaaggcag

SEQ ID NO: 878259 - DNA, 15 bp, Homo sapiens
aaagtccaaggcagc

SEQ ID NO: 878260 - DNA, 15 bp, Homo sapiens
aagtccaaggcagca

SEQ ID NO: 878261 - DNA, 15 bp, Homo sapiens
agtccaaggcagcat

SEQ ID NO: 878262 - DNA, 15 bp, Homo sapiens
gtccaaggcagcatt

SEQ ID NO: 878263 - DNA, 15 bp, Homo sapiens
tccaaggcagcattg

SEQ ID NO: 878264 - DNA, 15 bp, Homo sapiens
ccaaggcagcattgg

SEQ ID NO: 878265 - DNA, 15 bp, Homo sapiens
caaggcagcattgga

SEQ ID NO: 878266 - DNA, 15 bp, Homo sapiens
aaggcagcattggac

SEQ ID NO: 878267 - DNA, 15 bp, Homo sapiens
aggcagcattggaca

SEQ ID NO: 878268 - DNA, 15 bp, Homo sapiens
ggcagcattggacag

SEQ ID NO: 878269 - DNA, 15 bp, Homo sapiens
gcagcattggacagg

SEQ ID NO: 878270 - DNA, 15 bp, Homo sapiens
cagcattggacaggg

SEQ ID NO: 878271 - DNA, 15 bp, Homo sapiens
agcattggacagggg

SEQ ID NO: 878272 - DNA, 15 bp, Homo sapiens
gcattggacaggggt

SEQ ID NO: 878273 - DNA, 15 bp, Homo sapiens
cattggacaggggtc

SEQ ID NO: 878274 - DNA, 15 bp, Homo sapiens
attggacaggggtca

SEQ ID NO: 878275 - DNA, 15 bp, Homo sapiens
ttggacaggggtcag

SEQ ID NO: 878276 - DNA, 15 bp, Homo sapiens
tggacaggggtcagc

SEQ ID NO: 878277 - DNA, 15 bp, Homo sapiens
ggacaggggtcagca

SEQ ID NO: 878278 - DNA, 15 bp, Homo sapiens
gacaggggtcagcaa

SEQ ID NO: 878279 - DNA, 15 bp, Homo sapiens
acaggggtcagcaaa

SEQ ID NO: 878280 - DNA, 15 bp, Homo sapiens
ggtcagcaaactttt

SEQ ID NO: 878281 - DNA, 15 bp, Homo sapiens
gtcagcaaacttttt

SEQ ID NO: 878282 - DNA, 15 bp, Homo sapiens
tcagcaaactttttc

SEQ ID NO: 878283 - DNA, 15 bp, Homo sapiens
cagcaaactttttct

SEQ ID NO: 878284 - DNA, 15 bp, Homo sapiens
agcaaactttttctg

SEQ ID NO: 878285 - DNA, 15 bp, Homo sapiens
gcaaactttttctgt

SEQ ID NO: 878286 - DNA, 15 bp, Homo sapiens
caaactttttctgta

SEQ ID NO: 878287 - DNA, 15 bp, Homo sapiens
aaactttttctgtaa

SEQ ID NO: 878288 - DNA, 15 bp, Homo sapiens
aactttttctgtaat

SEQ ID NO: 878289 - DNA, 15 bp, Homo sapiens
actttttctgtaata

SEQ ID NO: 878290 - DNA, 15 bp, Homo sapiens
ctttttctgtaataa

SEQ ID NO: 878291 - DNA, 15 bp, Homo sapiens
tttttctgtaataag

SEQ ID NO: 878292 - DNA, 15 bp, Homo sapiens
ttttctgtaataagt

SEQ ID NO: 878293 - DNA, 15 bp, Homo sapiens
tttctgtaataagtc

SEQ ID NO: 878294 - DNA, 15 bp, Homo sapiens
ttctgtaataagtca

SEQ ID NO: 878295 - DNA, 15 bp, Homo sapiens
tctgtaataagtcat

SEQ ID NO: 878296 - DNA, 15 bp, Homo sapiens
ctgtaataagtcata

SEQ ID NO: 878297 - DNA, 15 bp, Homo sapiens
tgtaataagtcatat

SEQ ID NO: 878298 - DNA, 15 bp, Homo sapiens
gtaataagtcatata

SEQ ID NO: 878299 - DNA, 15 bp, Homo sapiens
taataagtcatataa

SEQ ID NO: 878300 - DNA, 15 bp, Homo sapiens
aataagtcatataat

SEQ ID NO: 878301 - DNA, 15 bp, Homo sapiens
ataagtcatataatg

SEQ ID NO: 878302 - DNA, 15 bp, Homo sapiens
taagtcatataatga

SEQ ID NO: 878303 - DNA, 15 bp, Homo sapiens
aagtcatataatgaa

SEQ ID NO: 878304 - DNA, 15 bp, Homo sapiens
agtcatataatgaaa

SEQ ID NO: 878305 - DNA, 15 bp, Homo sapiens
gtcatataatgaaaa

SEQ ID NO: 878306 - DNA, 15 bp, Homo sapiens
tcatataatgaaaaa

SEQ ID NO: 878307 - DNA, 15 bp, Homo sapiens
catataatgaaaaat

SEQ ID NO: 878308 - DNA, 15 bp, Homo sapiens
atataatgaaaaatt

SEQ ID NO: 878309 - DNA, 15 bp, Homo sapiens
tataatgaaaaattt

SEQ ID NO: 878310 - DNA, 15 bp, Homo sapiens
ataatgaaaaattta

SEQ ID NO: 878311 - DNA, 15 bp, Homo sapiens
taatgaaaaatttag

SEQ ID NO: 878312 - DNA, 15 bp, Homo sapiens
aatgaaaaatttagg

SEQ ID NO: 878313 - DNA, 15 bp, Homo sapiens
atgaaaaatttaggt

SEQ ID NO: 878314 - DNA, 15 bp, Homo sapiens
tgaaaaatttaggtt

SEQ ID NO: 878315 - DNA, 15 bp, Homo sapiens
gaaaaatttaggttt

SEQ ID NO: 878316 - DNA, 15 bp, Homo sapiens
aaaaatttaggtttt

SEQ ID NO: 878317 - DNA, 15 bp, Homo sapiens
aaaatttaggttttt

SEQ ID NO: 878318 - DNA, 15 bp, Homo sapiens
aaatttaggtttttc

SEQ ID NO: 878319 - DNA, 15 bp, Homo sapiens
aatttaggtttttca

SEQ ID NO: 878320 - DNA, 15 bp, Homo sapiens
atttaggtttttcag

SEQ ID NO: 878321 - DNA, 15 bp, Homo sapiens
tttaggtttttcagg

SEQ ID NO: 878322 - DNA, 15 bp, Homo sapiens
ttaggtttttcaggg

SEQ ID NO: 878323 - DNA, 15 bp, Homo sapiens
taggtttttcagggt

SEQ ID NO: 878324 - DNA, 15 bp, Homo sapiens
aggtttttcagggta

SEQ ID NO: 878325 - DNA, 15 bp, Homo sapiens
ggtttttcagggtat

SEQ ID NO: 878326 - DNA, 15 bp, Homo sapiens
gtttttcagggtata

SEQ ID NO: 878327 - DNA, 15 bp, Homo sapiens
tttttcagggtataa

SEQ ID NO: 878328 - DNA, 15 bp, Homo sapiens
ttttcagggtataag

SEQ ID NO: 878329 - DNA, 15 bp, Homo sapiens
tttcagggtataaga

SEQ ID NO: 878330 - DNA, 15 bp, Homo sapiens
ttcagggtataagat

SEQ ID NO: 878331 - DNA, 15 bp, Homo sapiens
tcagggtataagatc

SEQ ID NO: 878332 - DNA, 15 bp, Homo sapiens
cagggtataagatct

SEQ ID NO: 878333 - DNA, 15 bp, Homo sapiens
agggtataagatctc

SEQ ID NO: 878334 - DNA, 15 bp, Homo sapiens
gggtataagatctct

SEQ ID NO: 878335 - DNA, 15 bp, Homo sapiens
ggtataagatctctg

SEQ ID NO: 878336 - DNA, 15 bp, Homo sapiens
gtataagatctctgt

SEQ ID NO: 878337 - DNA, 15 bp, Homo sapiens
tataagatctctgtt

SEQ ID NO: 878338 - DNA, 15 bp, Homo sapiens
ataagatctctgttg

SEQ ID NO: 878339 - DNA, 15 bp, Homo sapiens
taagatctctgttgc

SEQ ID NO: 878340 - DNA, 15 bp, Homo sapiens
aagatctctgttgct

SEQ ID NO: 878341 - DNA, 15 bp, Homo sapiens
agatctctgttgcta

SEQ ID NO: 878342 - DNA, 15 bp, Homo sapiens
gatctctgttgctac

SEQ ID NO: 878343 - DNA, 15 bp, Homo sapiens
atctctgttgctact

SEQ ID NO: 878344 - DNA, 15 bp, Homo sapiens
tctctgttgctactg

SEQ ID NO: 878345 - DNA, 15 bp, Homo sapiens
ctctgttgctactga

SEQ ID NO: 878346 - DNA, 15 bp, Homo sapiens
tctgttgctactgat

SEQ ID NO: 878347 - DNA, 15 bp, Homo sapiens
ctgttgctactgatt

SEQ ID NO: 878348 - DNA, 15 bp, Homo sapiens
tgttgctactgatta

SEQ ID NO: 878349 - DNA, 15 bp, Homo sapiens
gttgctactgattag

SEQ ID NO: 878350 - DNA, 15 bp, Homo sapiens
ttgctactgattagc

SEQ ID NO: 878351 - DNA, 15 bp, Homo sapiens
tgctactgattagct

SEQ ID NO: 878352 - DNA, 15 bp, Homo sapiens
gctactgattagctc

SEQ ID NO: 878353 - DNA, 15 bp, Homo sapiens
ctactgattagctct

SEQ ID NO: 878354 - DNA, 15 bp, Homo sapiens
tactgattagctctg

SEQ ID NO: 878355 - DNA, 15 bp, Homo sapiens
actgattagctctgc

SEQ ID NO: 878356 - DNA, 15 bp, Homo sapiens
ctgattagctctgct

SEQ ID NO: 878357 - DNA, 15 bp, Homo sapiens
tgattagctctgctg

SEQ ID NO: 878358 - DNA, 15 bp, Homo sapiens
gattagctctgctgt

SEQ ID NO: 878359 - DNA, 15 bp, Homo sapiens
attagctctgctgtt

SEQ ID NO: 878360 - DNA, 15 bp, Homo sapiens
ttagctctgctgttg

SEQ ID NO: 878361 - DNA, 15 bp, Homo sapiens
tagctctgctgttgt

SEQ ID NO: 878362 - DNA, 15 bp, Homo sapiens
agctctgctgttgta

SEQ ID NO: 878363 - DNA, 15 bp, Homo sapiens
gctctgctgttgtag

SEQ ID NO: 878364 - DNA, 15 bp, Homo sapiens
ctctgctgttgtagc

SEQ ID NO: 878365 - DNA, 15 bp, Homo sapiens
tctgctgttgtagca

SEQ ID NO: 878366 - DNA, 15 bp, Homo sapiens
ctgctgttgtagcat

SEQ ID NO: 878367 - DNA, 15 bp, Homo sapiens
tgctgttgtagcata

SEQ ID NO: 878368 - DNA, 15 bp, Homo sapiens
gctgttgtagcataa

SEQ ID NO: 878369 - DNA, 15 bp, Homo sapiens
ctgttgtagcataaa

SEQ ID NO: 878370 - DNA, 15 bp, Homo sapiens
tgttgtagcataaaa

SEQ ID NO: 878371 - DNA, 15 bp, Homo sapiens
gttgtagcataaaag

SEQ ID NO: 878372 - DNA, 15 bp, Homo sapiens
ttgtagcataaaagc

SEQ ID NO: 878373 - DNA, 15 bp, Homo sapiens
tgtagcataaaagca

SEQ ID NO: 878374 - DNA, 15 bp, Homo sapiens
gtagcataaaagcac

SEQ ID NO: 878375 - DNA, 15 bp, Homo sapiens
tagcataaaagcacc

SEQ ID NO: 878376 - DNA, 15 bp, Homo sapiens
agcataaaagcaccc

SEQ ID NO: 878377 - DNA, 15 bp, Homo sapiens
gcataaaagcaccca

SEQ ID NO: 878378 - DNA, 15 bp, Homo sapiens
cataaaagcacccat

SEQ ID NO: 878379 - DNA, 15 bp, Homo sapiens
ataaaagcacccata

SEQ ID NO: 878380 - DNA, 15 bp, Homo sapiens
taaaagcacccatag

SEQ ID NO: 878381 - DNA, 15 bp, Homo sapiens
aaaagcacccatagg

SEQ ID NO: 878382 - DNA, 15 bp, Homo sapiens
aaagcacccataggc

SEQ ID NO: 878383 - DNA, 15 bp, Homo sapiens
aagcacccataggca

SEQ ID NO: 878384 - DNA, 15 bp, Homo sapiens
agcacccataggcaa

SEQ ID NO: 878385 - DNA, 15 bp, Homo sapiens
gcacccataggcaat

SEQ ID NO: 878386 - DNA, 15 bp, Homo sapiens
cacccataggcaata

SEQ ID NO: 878387 - DNA, 15 bp, Homo sapiens
acccataggcaatac

SEQ ID NO: 878388 - DNA, 15 bp, Homo sapiens
cccataggcaatacc

SEQ ID NO: 878389 - DNA, 15 bp, Homo sapiens
ccataggcaatacct

SEQ ID NO: 878390 - DNA, 15 bp, Homo sapiens
cataggcaataccta

SEQ ID NO: 878391 - DNA, 15 bp, Homo sapiens
ataggcaatacctaa

SEQ ID NO: 878392 - DNA, 15 bp, Homo sapiens
taggcaatacctaaa

SEQ ID NO: 878393 - DNA, 15 bp, Homo sapiens
aggcaatacctaaac

SEQ ID NO: 878394 - DNA, 15 bp, Homo sapiens
ggcaatacctaaacg

SEQ ID NO: 878395 - DNA, 15 bp, Homo sapiens
gcaatacctaaacgt

SEQ ID NO: 878396 - DNA, 15 bp, Homo sapiens
caatacctaaacgta

SEQ ID NO: 878397 - DNA, 15 bp, Homo sapiens
aatacctaaacgtat

SEQ ID NO: 878398 - DNA, 15 bp, Homo sapiens
atacctaaacgtatg

SEQ ID NO: 878399 - DNA, 15 bp, Homo sapiens
tacctaaacgtatga

SEQ ID NO: 878400 - DNA, 15 bp, Homo sapiens
acctaaacgtatgag

SEQ ID NO: 878401 - DNA, 15 bp, Homo sapiens
cctaaacgtatgagc

SEQ ID NO: 878402 - DNA, 15 bp, Homo sapiens
ctaaacgtatgagca

SEQ ID NO: 878403 - DNA, 15 bp, Homo sapiens
taaacgtatgagcat

SEQ ID NO: 878404 - DNA, 15 bp, Homo sapiens
aaacgtatgagcatg

SEQ ID NO: 878405 - DNA, 15 bp, Homo sapiens
aacgtatgagcatgg

SEQ ID NO: 878406 - DNA, 15 bp, Homo sapiens
acgtatgagcatggc

SEQ ID NO: 878407 - DNA, 15 bp, Homo sapiens
cgtatgagcatggct

SEQ ID NO: 878408 - DNA, 15 bp, Homo sapiens
gtatgagcatggctg

SEQ ID NO: 878409 - DNA, 15 bp, Homo sapiens
tatgagcatggctgc

SEQ ID NO: 878410 - DNA, 15 bp, Homo sapiens
atgagcatggctgca

SEQ ID NO: 878411 - DNA, 15 bp, Homo sapiens
tgagcatggctgcat

SEQ ID NO: 878412 - DNA, 15 bp, Homo sapiens
gagcatggctgcatt

SEQ ID NO: 878413 - DNA, 15 bp, Homo sapiens
agcatggctgcattc

SEQ ID NO: 878414 - DNA, 15 bp, Homo sapiens
gcatggctgcattcc

SEQ ID NO: 878415 - DNA, 15 bp, Homo sapiens
catggctgcattcca

SEQ ID NO: 878416 - DNA, 15 bp, Homo sapiens
atggctgcattccaa

SEQ ID NO: 878417 - DNA, 15 bp, Homo sapiens
tggctgcattccaat

SEQ ID NO: 878418 - DNA, 15 bp, Homo sapiens
ggctgcattccaata

SEQ ID NO: 878419 - DNA, 15 bp, Homo sapiens
gctgcattccaatac

SEQ ID NO: 878420 - DNA, 15 bp, Homo sapiens
ctgcattccaataca

SEQ ID NO: 878421 - DNA, 15 bp, Homo sapiens
tgcattccaatacaa

SEQ ID NO: 878422 - DNA, 15 bp, Homo sapiens
gcattccaatacaac

SEQ ID NO: 878423 - DNA, 15 bp, Homo sapiens
cattccaatacaact

SEQ ID NO: 878424 - DNA, 15 bp, Homo sapiens
attccaatacaactt

SEQ ID NO: 878425 - DNA, 15 bp, Homo sapiens
ttccaatacaacttt

SEQ ID NO: 878426 - DNA, 15 bp, Homo sapiens
tccaatacaacttta

SEQ ID NO: 878427 - DNA, 15 bp, Homo sapiens
ccaatacaactttat

SEQ ID NO: 878428 - DNA, 15 bp, Homo sapiens
caatacaactttatg

SEQ ID NO: 878429 - DNA, 15 bp, Homo sapiens
aatacaactttatgg

SEQ ID NO: 878430 - DNA, 15 bp, Homo sapiens
atacaactttatggg

SEQ ID NO: 878431 - DNA, 15 bp, Homo sapiens
tacaactttatggga

SEQ ID NO: 878432 - DNA, 15 bp, Homo sapiens
acaactttatgggaa

SEQ ID NO: 878433 - DNA, 15 bp, Homo sapiens
caactttatgggaat

SEQ ID NO: 878434 - DNA, 15 bp, Homo sapiens
aactttatgggaatt

SEQ ID NO: 878435 - DNA, 15 bp, Homo sapiens
actttatgggaattt

SEQ ID NO: 878436 - DNA, 15 bp, Homo sapiens
ctttatgggaatttg

SEQ ID NO: 878437 - DNA, 15 bp, Homo sapiens
tttatgggaatttga

SEQ ID NO: 878438 - DNA, 15 bp, Homo sapiens
ttatgggaatttgaa

SEQ ID NO: 878439 - DNA, 15 bp, Homo sapiens
tatgggaatttgaac

SEQ ID NO: 878440 - DNA, 15 bp, Homo sapiens
atgggaatttgaact

SEQ ID NO: 878441 - DNA, 15 bp, Homo sapiens
tgggaatttgaactt

SEQ ID NO: 878442 - DNA, 15 bp, Homo sapiens
gggaatttgaacttt

SEQ ID NO: 878443 - DNA, 15 bp, Homo sapiens
ggaatttgaacttta

SEQ ID NO: 878444 - DNA, 15 bp, Homo sapiens
gaatttgaactttat

SEQ ID NO: 878445 - DNA, 15 bp, Homo sapiens
aatttgaactttatg

SEQ ID NO: 878446 - DNA, 15 bp, Homo sapiens
atttgaactttatgt

SEQ ID NO: 878447 - DNA, 15 bp, Homo sapiens
tttgaactttatgta

SEQ ID NO: 878448 - DNA, 15 bp, Homo sapiens
ttgaactttatgtaa

SEQ ID NO: 878449 - DNA, 15 bp, Homo sapiens
tgaactttatgtaat

SEQ ID NO: 878450 - DNA, 15 bp, Homo sapiens
gaactttatgtaatt

SEQ ID NO: 878451 - DNA, 15 bp, Homo sapiens
aactttatgtaattt

SEQ ID NO: 878452 - DNA, 15 bp, Homo sapiens
actttatgtaatttt

SEQ ID NO: 878453 - DNA, 15 bp, Homo sapiens
ctttatgtaattttc

SEQ ID NO: 878454 - DNA, 15 bp, Homo sapiens
tttatgtaattttca

SEQ ID NO: 878455 - DNA, 15 bp, Homo sapiens
ttatgtaattttcac

SEQ ID NO: 878456 - DNA, 15 bp, Homo sapiens
tatgtaattttcaca

SEQ ID NO: 878457 - DNA, 15 bp, Homo sapiens
atgtaattttcacag

SEQ ID NO: 878458 - DNA, 15 bp, Homo sapiens
tgtaattttcacaga

SEQ ID NO: 878459 - DNA, 15 bp, Homo sapiens
gtaattttcacagat

SEQ ID NO: 878460 - DNA, 15 bp, Homo sapiens
taattttcacagatt

SEQ ID NO: 878461 - DNA, 15 bp, Homo sapiens
aattttcacagatta

SEQ ID NO: 878462 - DNA, 15 bp, Homo sapiens
attttcacagattat

SEQ ID NO: 878463 - DNA, 15 bp, Homo sapiens
ttttcacagattatg

SEQ ID NO: 878464 - DNA, 15 bp, Homo sapiens
tttcacagattatga

SEQ ID NO: 878465 - DNA, 15 bp, Homo sapiens
ttcacagattatgac

SEQ ID NO: 878466 - DNA, 15 bp, Homo sapiens
tcacagattatgaca

SEQ ID NO: 878467 - DNA, 15 bp, Homo sapiens
cacagattatgacat

SEQ ID NO: 878468 - DNA, 15 bp, Homo sapiens
acagattatgacatt

SEQ ID NO: 878469 - DNA, 15 bp, Homo sapiens
cagattatgacattg

SEQ ID NO: 878470 - DNA, 15 bp, Homo sapiens
agattatgacattgt

SEQ ID NO: 878471 - DNA, 15 bp, Homo sapiens
gattatgacattgtc

SEQ ID NO: 878472 - DNA, 15 bp, Homo sapiens
attatgacattgtct

SEQ ID NO: 878473 - DNA, 15 bp, Homo sapiens
ttatgacattgtctt

SEQ ID NO: 878474 - DNA, 15 bp, Homo sapiens
tatgacattgtcttc

SEQ ID NO: 878475 - DNA, 15 bp, Homo sapiens
atgacattgtcttct

SEQ ID NO: 878476 - DNA, 15 bp, Homo sapiens
tgacattgtcttctt

SEQ ID NO: 878477 - DNA, 15 bp, Homo sapiens
gacattgtcttcttt

SEQ ID NO: 878478 - DNA, 15 bp, Homo sapiens
acattgtcttctttt

SEQ ID NO: 878479 - DNA, 15 bp, Homo sapiens
cattgtcttcttttg

SEQ ID NO: 878480 - DNA, 15 bp, Homo sapiens
attgtcttcttttga

SEQ ID NO: 878481 - DNA, 15 bp, Homo sapiens
ttgtcttcttttgat

SEQ ID NO: 878482 - DNA, 15 bp, Homo sapiens
tgtcttcttttgatt

SEQ ID NO: 878483 - DNA, 15 bp, Homo sapiens
gtcttcttttgattt

SEQ ID NO: 878484 - DNA, 15 bp, Homo sapiens
tcttcttttgatttt

SEQ ID NO: 878485 - DNA, 15 bp, Homo sapiens
cttcttttgattttt

SEQ ID NO: 878486 - DNA, 15 bp, Homo sapiens
ttcttttgatttttt

SEQ ID NO: 878487 - DNA, 15 bp, Homo sapiens
tcttttgattttttt

SEQ ID NO: 878488 - DNA, 15 bp, Homo sapiens
cttttgatttttttt

SEQ ID NO: 878489 - DNA, 15 bp, Homo sapiens
ttttgattttttttc

SEQ ID NO: 878490 - DNA, 15 bp, Homo sapiens
tttgattttttttca

SEQ ID NO: 878491 - DNA, 15 bp, Homo sapiens
ttgattttttttcaa

SEQ ID NO: 878492 - DNA, 15 bp, Homo sapiens
tgattttttttcaac

SEQ ID NO: 878493 - DNA, 15 bp, Homo sapiens
gattttttttcaacc

SEQ ID NO: 878494 - DNA, 15 bp, Homo sapiens
attttttttcaacca

SEQ ID NO: 878495 - DNA, 15 bp, Homo sapiens
ttttttttcaaccat

SEQ ID NO: 878496 - DNA, 15 bp, Homo sapiens
tttttttcaaccatt

SEQ ID NO: 878497 - DNA, 15 bp, Homo sapiens
ttttttcaaccattt

SEQ ID NO: 878498 - DNA, 15 bp, Homo sapiens
tttttcaaccatttt

SEQ ID NO: 878499 - DNA, 15 bp, Homo sapiens
ttttcaaccattttg

SEQ ID NO: 878500 - DNA, 15 bp, Homo sapiens
tttcaaccattttga

SEQ ID NO: 878501 - DNA, 15 bp, Homo sapiens
ttcaaccattttgaa

SEQ ID NO: 878502 - DNA, 15 bp, Homo sapiens
tcaaccattttgaag

SEQ ID NO: 878503 - DNA, 15 bp, Homo sapiens
caaccattttgaagc

SEQ ID NO: 878504 - DNA, 15 bp, Homo sapiens
aaccattttgaagca

SEQ ID NO: 878505 - DNA, 15 bp, Homo sapiens
accattttgaagcac

SEQ ID NO: 878506 - DNA, 15 bp, Homo sapiens
ccattttgaagcaca

SEQ ID NO: 878507 - DNA, 15 bp, Homo sapiens
cattttgaagcacaa

SEQ ID NO: 878508 - DNA, 15 bp, Homo sapiens
attttgaagcacaaa

SEQ ID NO: 878509 - DNA, 15 bp, Homo sapiens
ttttgaagcacaaaa

SEQ ID NO: 878510 - DNA, 15 bp, Homo sapiens
tttgaagcacaaaaa

SEQ ID NO: 878511 - DNA, 15 bp, Homo sapiens
ttgaagcacaaaaac

SEQ ID NO: 878512 - DNA, 15 bp, Homo sapiens
tgaagcacaaaaaca

SEQ ID NO: 878513 - DNA, 15 bp, Homo sapiens
gaagcacaaaaacaa

SEQ ID NO: 878514 - DNA, 15 bp, Homo sapiens
aagcacaaaaacaat

SEQ ID NO: 878515 - DNA, 15 bp, Homo sapiens
agcacaaaaacaatt

SEQ ID NO: 878516 - DNA, 15 bp, Homo sapiens
gcacaaaaacaattt

SEQ ID NO: 878517 - DNA, 15 bp, Homo sapiens
cacaaaaacaatttt

SEQ ID NO: 878518 - DNA, 15 bp, Homo sapiens
acaaaaacaattttt

SEQ ID NO: 878519 - DNA, 15 bp, Homo sapiens
caaaaacaattttta

SEQ ID NO: 878520 - DNA, 15 bp, Homo sapiens
aaaaacaatttttag

SEQ ID NO: 878521 - DNA, 15 bp, Homo sapiens
aaaacaatttttagc

SEQ ID NO: 878522 - DNA, 15 bp, Homo sapiens
aaacaatttttagct

SEQ ID NO: 878523 - DNA, 15 bp, Homo sapiens
aacaatttttagctc

SEQ ID NO: 878524 - DNA, 15 bp, Homo sapiens
acaatttttagctca

SEQ ID NO: 878525 - DNA, 15 bp, Homo sapiens
caatttttagctcac

SEQ ID NO: 878526 - DNA, 15 bp, Homo sapiens
aatttttagctcact

SEQ ID NO: 878527 - DNA, 15 bp, Homo sapiens
atttttagctcactg

SEQ ID NO: 878528 - DNA, 15 bp, Homo sapiens
tttttagctcactga

SEQ ID NO: 878529 - DNA, 15 bp, Homo sapiens
ttttagctcactgaa

SEQ ID NO: 878530 - DNA, 15 bp, Homo sapiens
tttagctcactgaac

SEQ ID NO: 878531 - DNA, 15 bp, Homo sapiens
ttagctcactgaaca

SEQ ID NO: 878532 - DNA, 15 bp, Homo sapiens
tagctcactgaacat

SEQ ID NO: 878533 - DNA, 15 bp, Homo sapiens
agctcactgaacata

SEQ ID NO: 878534 - DNA, 15 bp, Homo sapiens
gctcactgaacatac

SEQ ID NO: 878535 - DNA, 15 bp, Homo sapiens
ctcactgaacataca

SEQ ID NO: 878536 - DNA, 15 bp, Homo sapiens
tcactgaacatacaa

SEQ ID NO: 878537 - DNA, 15 bp, Homo sapiens
cactgaacatacaaa

SEQ ID NO: 878538 - DNA, 15 bp, Homo sapiens
actgaacatacaaaa

SEQ ID NO: 878539 - DNA, 15 bp, Homo sapiens
ctgaacatacaaaag

SEQ ID NO: 878540 - DNA, 15 bp, Homo sapiens
tgaacatacaaaaga

SEQ ID NO: 878541 - DNA, 15 bp, Homo sapiens
gaacatacaaaagaa

SEQ ID NO: 878542 - DNA, 15 bp, Homo sapiens
aacatacaaaagaat

SEQ ID NO: 878543 - DNA, 15 bp, Homo sapiens
acatacaaaagaatg

SEQ ID NO: 878544 - DNA, 15 bp, Homo sapiens
tacaaaagaatgtag

SEQ ID NO: 878545 - DNA, 15 bp, Homo sapiens
acaaaagaatgtagt

SEQ ID NO: 878546 - DNA, 15 bp, Homo sapiens
caaaagaatgtagtg

SEQ ID NO: 878547 - DNA, 15 bp, Homo sapiens
aaaagaatgtagtgg

SEQ ID NO: 878548 - DNA, 15 bp, Homo sapiens
aaagaatgtagtggg

SEQ ID NO: 878549 - DNA, 15 bp, Homo sapiens
aagaatgtagtgggc

SEQ ID NO: 878550 - DNA, 15 bp, Homo sapiens
agaatgtagtgggcc

SEQ ID NO: 878551 - DNA, 15 bp, Homo sapiens
gaatgtagtgggcca

SEQ ID NO: 878552 - DNA, 15 bp, Homo sapiens
aatgtagtgggccag

SEQ ID NO: 878553 - DNA, 15 bp, Homo sapiens
atgtagtgggccaga

SEQ ID NO: 878554 - DNA, 15 bp, Homo sapiens
tgtagtgggccagat

SEQ ID NO: 878555 - DNA, 15 bp, Homo sapiens
gtagtgggccagatt

SEQ ID NO: 878556 - DNA, 15 bp, Homo sapiens
tagtgggccagattt

SEQ ID NO: 878557 - DNA, 15 bp, Homo sapiens
agtgggccagatttg

SEQ ID NO: 878558 - DNA, 15 bp, Homo sapiens
gtgggccagatttgg

SEQ ID NO: 878559 - DNA, 15 bp, Homo sapiens
tgggccagatttggc

SEQ ID NO: 878560 - DNA, 15 bp, Homo sapiens
gggccagatttggcc

SEQ ID NO: 878561 - DNA, 15 bp, Homo sapiens
ggccagatttggcct

SEQ ID NO: 878562 - DNA, 15 bp, Homo sapiens
gccagatttggcctg

SEQ ID NO: 878563 - DNA, 15 bp, Homo sapiens
ccagatttggcctgt

SEQ ID NO: 878564 - DNA, 15 bp, Homo sapiens
cagatttggcctgtg

SEQ ID NO: 878565 - DNA, 15 bp, Homo sapiens
agatttggcctgtgg

SEQ ID NO: 878566 - DNA, 15 bp, Homo sapiens
gatttggcctgtggg

SEQ ID NO: 878567 - DNA, 15 bp, Homo sapiens
atttggcctgtgggt

SEQ ID NO: 878568 - DNA, 15 bp, Homo sapiens
tttggcctgtgggtc

SEQ ID NO: 878569 - DNA, 15 bp, Homo sapiens
ttggcctgtgggtcg

SEQ ID NO: 878570 - DNA, 15 bp, Homo sapiens
tggcctgtgggtcgt

SEQ ID NO: 878571 - DNA, 15 bp, Homo sapiens
ggcctgtgggtcgta

SEQ ID NO: 878572 - DNA, 15 bp, Homo sapiens
gcctgtgggtcgtag

SEQ ID NO: 878573 - DNA, 15 bp, Homo sapiens
cctgtgggtcgtagt

SEQ ID NO: 878574 - DNA, 15 bp, Homo sapiens
ctgtgggtcgtagtt

SEQ ID NO: 878575 - DNA, 15 bp, Homo sapiens
tgtgggtcgtagttt

SEQ ID NO: 878576 - DNA, 15 bp, Homo sapiens
gtgggtcgtagtttt

SEQ ID NO: 878577 - DNA, 15 bp, Homo sapiens
tgggtcgtagttttc

SEQ ID NO: 878578 - DNA, 15 bp, Homo sapiens
gggtcgtagttttcc

SEQ ID NO: 878579 - DNA, 15 bp, Homo sapiens
ggtcgtagttttcca

SEQ ID NO: 878580 - DNA, 15 bp, Homo sapiens
gtcgtagttttccac

SEQ ID NO: 878581 - DNA, 15 bp, Homo sapiens
tcgtagttttccact

SEQ ID NO: 878582 - DNA, 15 bp, Homo sapiens
cgtagttttccactc

SEQ ID NO: 878583 - DNA, 15 bp, Homo sapiens
gtagttttccactcc

SEQ ID NO: 878584 - DNA, 15 bp, Homo sapiens
tagttttccactcct

SEQ ID NO: 878585 - DNA, 15 bp, Homo sapiens
agttttccactcctg

SEQ ID NO: 878586 - DNA, 15 bp, Homo sapiens
gttttccactcctgg

SEQ ID NO: 878587 - DNA, 15 bp, Homo sapiens
ttttccactcctggc

SEQ ID NO: 878588 - DNA, 15 bp, Homo sapiens
tttccactcctggct

SEQ ID NO: 878589 - DNA, 15 bp, Homo sapiens
ttccactcctggctt

SEQ ID NO: 878590 - DNA, 15 bp, Homo sapiens
tccactcctggcttt

SEQ ID NO: 878591 - DNA, 15 bp, Homo sapiens
ccactcctggcttta

SEQ ID NO: 878592 - DNA, 15 bp, Homo sapiens
cactcctggctttag

SEQ ID NO: 878593 - DNA, 15 bp, Homo sapiens
actcctggctttagg

SEQ ID NO: 878594 - DNA, 15 bp, Homo sapiens
ctcctggctttaggt

SEQ ID NO: 878595 - DNA, 15 bp, Homo sapiens
tcctggctttaggta

SEQ ID NO: 878596 - DNA, 15 bp, Homo sapiens
cctggctttaggtag

SEQ ID NO: 878597 - DNA, 15 bp, Homo sapiens
ctggctttaggtagc

SEQ ID NO: 878598 - DNA, 15 bp, Homo sapiens
tggctttaggtagca

SEQ ID NO: 878599 - DNA, 15 bp, Homo sapiens
ggctttaggtagcat

SEQ ID NO: 878600 - DNA, 15 bp, Homo sapiens
gctttaggtagcatg

SEQ ID NO: 878601 - DNA, 15 bp, Homo sapiens
ctttaggtagcatgt

SEQ ID NO: 878602 - DNA, 15 bp, Homo sapiens
tttaggtagcatgtt

SEQ ID NO: 878603 - DNA, 15 bp, Homo sapiens
ttaggtagcatgttc

SEQ ID NO: 878604 - DNA, 15 bp, Homo sapiens
taggtagcatgttcc

SEQ ID NO: 878605 - DNA, 15 bp, Homo sapiens
aggtagcatgttcca

SEQ ID NO: 878606 - DNA, 15 bp, Homo sapiens
ggtagcatgttccac

SEQ ID NO: 878607 - DNA, 15 bp, Homo sapiens
gtagcatgttccacc

SEQ ID NO: 878608 - DNA, 15 bp, Homo sapiens
tagcatgttccacct

SEQ ID NO: 878609 - DNA, 15 bp, Homo sapiens
agcatgttccacctg

SEQ ID NO: 878610 - DNA, 15 bp, Homo sapiens
gcatgttccacctgc

SEQ ID NO: 878611 - DNA, 15 bp, Homo sapiens
catgttccacctgct

SEQ ID NO: 878612 - DNA, 15 bp, Homo sapiens
atgttccacctgctg

SEQ ID NO: 878613 - DNA, 15 bp, Homo sapiens
tgttccacctgctga

SEQ ID NO: 878614 - DNA, 15 bp, Homo sapiens
gttccacctgctgat

SEQ ID NO: 878615 - DNA, 15 bp, Homo sapiens
ttccacctgctgatg

SEQ ID NO: 878616 - DNA, 15 bp, Homo sapiens
tccacctgctgatgc

SEQ ID NO: 878617 - DNA, 15 bp, Homo sapiens
ccacctgctgatgca

SEQ ID NO: 878618 - DNA, 15 bp, Homo sapiens
cacctgctgatgcac

SEQ ID NO: 878619 - DNA, 15 bp, Homo sapiens
acctgctgatgcacg

SEQ ID NO: 878620 - DNA, 15 bp, Homo sapiens
cctgctgatgcacgg

SEQ ID NO: 878621 - DNA, 15 bp, Homo sapiens
ctgctgatgcacgga

SEQ ID NO: 878622 - DNA, 15 bp, Homo sapiens
tgctgatgcacggac

SEQ ID NO: 878623 - DNA, 15 bp, Homo sapiens
gctgatgcacggaca

SEQ ID NO: 878624 - DNA, 15 bp, Homo sapiens
ctgatgcacggacat

SEQ ID NO: 878625 - DNA, 15 bp, Homo sapiens
tgatgcacggacatc

SEQ ID NO: 878626 - DNA, 15 bp, Homo sapiens
gatgcacggacatct

SEQ ID NO: 878627 - DNA, 15 bp, Homo sapiens
atgcacggacatctc

SEQ ID NO: 878628 - DNA, 15 bp, Homo sapiens
tgcacggacatctca

SEQ ID NO: 878629 - DNA, 15 bp, Homo sapiens
gcacggacatctcac

SEQ ID NO: 878630 - DNA, 15 bp, Homo sapiens
cacggacatctcact

SEQ ID NO: 878631 - DNA, 15 bp, Homo sapiens
acggacatctcactg

SEQ ID NO: 878632 - DNA, 15 bp, Homo sapiens
cggacatctcactga

SEQ ID NO: 878633 - DNA, 15 bp, Homo sapiens
ggacatctcactgat

SEQ ID NO: 878634 - DNA, 15 bp, Homo sapiens
gacatctcactgata

SEQ ID NO: 878635 - DNA, 15 bp, Homo sapiens
acatctcactgataa

SEQ ID NO: 878636 - DNA, 15 bp, Homo sapiens
catctcactgataag

SEQ ID NO: 878637 - DNA, 15 bp, Homo sapiens
atctcactgataagt

SEQ ID NO: 878638 - DNA, 15 bp, Homo sapiens
tctcactgataagtc

SEQ ID NO: 878639 - DNA, 15 bp, Homo sapiens
ctcactgataagtct

SEQ ID NO: 878640 - DNA, 15 bp, Homo sapiens
tcactgataagtcta

SEQ ID NO: 878641 - DNA, 15 bp, Homo sapiens
cactgataagtctag

SEQ ID NO: 878642 - DNA, 15 bp, Homo sapiens
actgataagtctaga

SEQ ID NO: 878643 - DNA, 15 bp, Homo sapiens
ctgataagtctagaa

SEQ ID NO: 878644 - DNA, 15 bp, Homo sapiens
tgataagtctagaat

SEQ ID NO: 878645 - DNA, 15 bp, Homo sapiens
gataagtctagaatt

SEQ ID NO: 878646 - DNA, 15 bp, Homo sapiens
ataagtctagaattc

SEQ ID NO: 878647 - DNA, 15 bp, Homo sapiens
taagtctagaattct

SEQ ID NO: 878648 - DNA, 15 bp, Homo sapiens
aagtctagaattcta

SEQ ID NO: 878649 - DNA, 15 bp, Homo sapiens
agtctagaattctaa

SEQ ID NO: 878650 - DNA, 15 bp, Homo sapiens
gtctagaattctaaa

SEQ ID NO: 878651 - DNA, 15 bp, Homo sapiens
tctagaattctaaag

SEQ ID NO: 878652 - DNA, 15 bp, Homo sapiens
ctagaattctaaagt

SEQ ID NO: 878653 - DNA, 15 bp, Homo sapiens
tagaattctaaagtc

SEQ ID NO: 878654 - DNA, 15 bp, Homo sapiens
agaattctaaagtca

SEQ ID NO: 878655 - DNA, 15 bp, Homo sapiens
gaattctaaagtcaa

SEQ ID NO: 878656 - DNA, 15 bp, Homo sapiens
aattctaaagtcaaa

SEQ ID NO: 878657 - DNA, 15 bp, Homo sapiens
attctaaagtcaaat

SEQ ID NO: 878658 - DNA, 15 bp, Homo sapiens
ttctaaagtcaaatt

SEQ ID NO: 878659 - DNA, 15 bp, Homo sapiens
tctaaagtcaaattt

SEQ ID NO: 878660 - DNA, 15 bp, Homo sapiens
ctaaagtcaaatttc

SEQ ID NO: 878661 - DNA, 15 bp, Homo sapiens
taaagtcaaatttct

SEQ ID NO: 878662 - DNA, 15 bp, Homo sapiens
aaagtcaaatttctc

SEQ ID NO: 878663 - DNA, 15 bp, Homo sapiens
aagtcaaatttctcc

SEQ ID NO: 878664 - DNA, 15 bp, Homo sapiens
agtcaaatttctccc

SEQ ID NO: 878665 - DNA, 15 bp, Homo sapiens
gtcaaatttctccca

SEQ ID NO: 878666 - DNA, 15 bp, Homo sapiens
tcaaatttctcccac

SEQ ID NO: 878667 - DNA, 15 bp, Homo sapiens
caaatttctcccact

SEQ ID NO: 878668 - DNA, 15 bp, Homo sapiens
aaatttctcccactg

SEQ ID NO: 878669 - DNA, 15 bp, Homo sapiens
aatttctcccactga

SEQ ID NO: 878670 - DNA, 15 bp, Homo sapiens
atttctcccactgag

SEQ ID NO: 878671 - DNA, 15 bp, Homo sapiens
tttctcccactgagc

SEQ ID NO: 878672 - DNA, 15 bp, Homo sapiens
ttctcccactgagcc

SEQ ID NO: 878673 - DNA, 15 bp, Homo sapiens
tctcccactgagccc

SEQ ID NO: 878674 - DNA, 15 bp, Homo sapiens
ctcccactgagccca

SEQ ID NO: 878675 - DNA, 15 bp, Homo sapiens
tcccactgagcccag

SEQ ID NO: 878676 - DNA, 15 bp, Homo sapiens
cccactgagcccagt

SEQ ID NO: 878677 - DNA, 15 bp, Homo sapiens
ccactgagcccagtg

SEQ ID NO: 878678 - DNA, 15 bp, Homo sapiens
cactgagcccagtgc

SEQ ID NO: 878679 - DNA, 15 bp, Homo sapiens
actgagcccagtgca

SEQ ID NO: 878680 - DNA, 15 bp, Homo sapiens
ctgagcccagtgcag

SEQ ID NO: 878681 - DNA, 15 bp, Homo sapiens
tgagcccagtgcagg

SEQ ID NO: 878682 - DNA, 15 bp, Homo sapiens
gagcccagtgcaggc

SEQ ID NO: 878683 - DNA, 15 bp, Homo sapiens
agcccagtgcaggca

SEQ ID NO: 878684 - DNA, 15 bp, Homo sapiens
gcccagtgcaggcat

SEQ ID NO: 878685 - DNA, 15 bp, Homo sapiens
cccagtgcaggcatc

SEQ ID NO: 878686 - DNA, 15 bp, Homo sapiens
ccagtgcaggcatct

SEQ ID NO: 878687 - DNA, 15 bp, Homo sapiens
cagtgcaggcatctg

SEQ ID NO: 878688 - DNA, 15 bp, Homo sapiens
agtgcaggcatctga

SEQ ID NO: 878689 - DNA, 15 bp, Homo sapiens
gtgcaggcatctgac

SEQ ID NO: 878690 - DNA, 15 bp, Homo sapiens
tgcaggcatctgacc

SEQ ID NO: 878691 - DNA, 15 bp, Homo sapiens
gcaggcatctgacca

SEQ ID NO: 878692 - DNA, 15 bp, Homo sapiens
caggcatctgaccat

SEQ ID NO: 878693 - DNA, 15 bp, Homo sapiens
aggcatctgaccatt

SEQ ID NO: 878694 - DNA, 15 bp, Homo sapiens
ggcatctgaccattt

SEQ ID NO: 878695 - DNA, 15 bp, Homo sapiens
gcatctgaccatttt

SEQ ID NO: 878696 - DNA, 15 bp, Homo sapiens
catctgaccatttta

SEQ ID NO: 878697 - DNA, 15 bp, Homo sapiens
atctgaccattttat

SEQ ID NO: 878698 - DNA, 15 bp, Homo sapiens
tctgaccattttatc

SEQ ID NO: 878699 - DNA, 15 bp, Homo sapiens
ctgaccattttatca

SEQ ID NO: 878700 - DNA, 15 bp, Homo sapiens
tgaccattttatcat

SEQ ID NO: 878701 - DNA, 15 bp, Homo sapiens
gaccattttatcatc

SEQ ID NO: 878702 - DNA, 15 bp, Homo sapiens
accattttatcatca

SEQ ID NO: 878703 - DNA, 15 bp, Homo sapiens
ccattttatcatcat

SEQ ID NO: 878704 - DNA, 15 bp, Homo sapiens
cattttatcatcatc

SEQ ID NO: 878705 - DNA, 15 bp, Homo sapiens
attttatcatcatct

SEQ ID NO: 878706 - DNA, 15 bp, Homo sapiens
ttttatcatcatctc

SEQ ID NO: 878707 - DNA, 15 bp, Homo sapiens
tttatcatcatctca

SEQ ID NO: 878708 - DNA, 15 bp, Homo sapiens
ttatcatcatctcag

SEQ ID NO: 878709 - DNA, 15 bp, Homo sapiens
tatcatcatctcagc

SEQ ID NO: 878710 - DNA, 15 bp, Homo sapiens
atcatcatctcagca

SEQ ID NO: 878711 - DNA, 15 bp, Homo sapiens
tcatcatctcagcaa

SEQ ID NO: 878712 - DNA, 15 bp, Homo sapiens
catcatctcagcaag

SEQ ID NO: 878713 - DNA, 15 bp, Homo sapiens
atcatctcagcaagc

SEQ ID NO: 878714 - DNA, 15 bp, Homo sapiens
tcatctcagcaagca

SEQ ID NO: 878715 - DNA, 15 bp, Homo sapiens
catctcagcaagcaa

SEQ ID NO: 878716 - DNA, 15 bp, Homo sapiens
atctcagcaagcaag

SEQ ID NO: 878717 - DNA, 15 bp, Homo sapiens
tctcagcaagcaagc

SEQ ID NO: 878718 - DNA, 15 bp, Homo sapiens
ctcagcaagcaagcc

SEQ ID NO: 878719 - DNA, 15 bp, Homo sapiens
tcagcaagcaagcca

SEQ ID NO: 878720 - DNA, 15 bp, Homo sapiens
cagcaagcaagccag

SEQ ID NO: 878721 - DNA, 15 bp, Homo sapiens
agcaagcaagccaga

SEQ ID NO: 878722 - DNA, 15 bp, Homo sapiens
gcaagcaagccagaa

SEQ ID NO: 878723 - DNA, 15 bp, Homo sapiens
caagcaagccagaaa

SEQ ID NO: 878724 - DNA, 15 bp, Homo sapiens
aagcaagccagaaaa

SEQ ID NO: 878725 - DNA, 15 bp, Homo sapiens
agcaagccagaaaag

SEQ ID NO: 878726 - DNA, 15 bp, Homo sapiens
gcaagccagaaaagg

SEQ ID NO: 878727 - DNA, 15 bp, Homo sapiens
caagccagaaaaggc

SEQ ID NO: 878728 - DNA, 15 bp, Homo sapiens
aagccagaaaaggca

SEQ ID NO: 878729 - DNA, 15 bp, Homo sapiens
agccagaaaaggcag

SEQ ID NO: 878730 - DNA, 15 bp, Homo sapiens
gccagaaaaggcagc

SEQ ID NO: 878731 - DNA, 15 bp, Homo sapiens
ccagaaaaggcagct

SEQ ID NO: 878732 - DNA, 15 bp, Homo sapiens
cagaaaaggcagctc

SEQ ID NO: 878733 - DNA, 15 bp, Homo sapiens
agaaaaggcagctca

SEQ ID NO: 878734 - DNA, 15 bp, Homo sapiens
gaaaaggcagctcat

SEQ ID NO: 878735 - DNA, 15 bp, Homo sapiens
aaaaggcagctcatt

SEQ ID NO: 878736 - DNA, 15 bp, Homo sapiens
aaaggcagctcattt

SEQ ID NO: 878737 - DNA, 15 bp, Homo sapiens
aaggcagctcattta

SEQ ID NO: 878738 - DNA, 15 bp, Homo sapiens
aggcagctcatttaa

SEQ ID NO: 878739 - DNA, 15 bp, Homo sapiens
ggcagctcatttaat

SEQ ID NO: 878740 - DNA, 15 bp, Homo sapiens
gcagctcatttaatc

SEQ ID NO: 878741 - DNA, 15 bp, Homo sapiens
cagctcatttaatca

SEQ ID NO: 878742 - DNA, 15 bp, Homo sapiens
agctcatttaatcaa

SEQ ID NO: 878743 - DNA, 15 bp, Homo sapiens
gctcatttaatcaac

SEQ ID NO: 878744 - DNA, 15 bp, Homo sapiens
ctcatttaatcaaca

SEQ ID NO: 878745 - DNA, 15 bp, Homo sapiens
tcatttaatcaacaa

SEQ ID NO: 878746 - DNA, 15 bp, Homo sapiens
catttaatcaacaat

SEQ ID NO: 878747 - DNA, 15 bp, Homo sapiens
atttaatcaacaatt

SEQ ID NO: 878748 - DNA, 15 bp, Homo sapiens
tttaatcaacaattt

SEQ ID NO: 878749 - DNA, 15 bp, Homo sapiens
ttaatcaacaatttc

SEQ ID NO: 878750 - DNA, 15 bp, Homo sapiens
taatcaacaatttca

SEQ ID NO: 878751 - DNA, 15 bp, Homo sapiens
aatcaacaatttcat

SEQ ID NO: 878752 - DNA, 15 bp, Homo sapiens
atcaacaatttcatg

SEQ ID NO: 878753 - DNA, 15 bp, Homo sapiens
tcaacaatttcatgg

SEQ ID NO: 878754 - DNA, 15 bp, Homo sapiens
caacaatttcatgga

SEQ ID NO: 878755 - DNA, 15 bp, Homo sapiens
aacaatttcatggaa

SEQ ID NO: 878756 - DNA, 15 bp, Homo sapiens
acaatttcatggaaa

SEQ ID NO: 878757 - DNA, 15 bp, Homo sapiens
caatttcatggaaac

SEQ ID NO: 878758 - DNA, 15 bp, Homo sapiens
aatttcatggaaact

SEQ ID NO: 878759 - DNA, 15 bp, Homo sapiens
atttcatggaaacta

SEQ ID NO: 878760 - DNA, 15 bp, Homo sapiens
tttcatggaaactaa

SEQ ID NO: 878761 - DNA, 15 bp, Homo sapiens
ttcatggaaactaag

SEQ ID NO: 878762 - DNA, 15 bp, Homo sapiens
tcatggaaactaaga

SEQ ID NO: 878763 - DNA, 15 bp, Homo sapiens
catggaaactaagac

SEQ ID NO: 878764 - DNA, 15 bp, Homo sapiens
atggaaactaagact

SEQ ID NO: 878765 - DNA, 15 bp, Homo sapiens
tggaaactaagactt

SEQ ID NO: 878766 - DNA, 15 bp, Homo sapiens
ggaaactaagacttc

SEQ ID NO: 878767 - DNA, 15 bp, Homo sapiens
gaaactaagacttct

SEQ ID NO: 878768 - DNA, 15 bp, Homo sapiens
aaactaagacttctc

SEQ ID NO: 878769 - DNA, 15 bp, Homo sapiens
aactaagacttctct

SEQ ID NO: 878770 - DNA, 15 bp, Homo sapiens
actaagacttctctt

SEQ ID NO: 878771 - DNA, 15 bp, Homo sapiens
ctaagacttctcttt

SEQ ID NO: 878772 - DNA, 15 bp, Homo sapiens
taagacttctctttc

SEQ ID NO: 878773 - DNA, 15 bp, Homo sapiens
aagacttctctttcc

SEQ ID NO: 878774 - DNA, 15 bp, Homo sapiens
agacttctctttcca

SEQ ID NO: 878775 - DNA, 15 bp, Homo sapiens
gacttctctttccaa

SEQ ID NO: 878776 - DNA, 15 bp, Homo sapiens
acttctctttccaaa

SEQ ID NO: 878777 - DNA, 15 bp, Homo sapiens
cttctctttccaaat

SEQ ID NO: 878778 - DNA, 15 bp, Homo sapiens
ttctctttccaaata

SEQ ID NO: 878779 - DNA, 15 bp, Homo sapiens
tctctttccaaatag

SEQ ID NO: 878780 - DNA, 15 bp, Homo sapiens
ctctttccaaatagc

SEQ ID NO: 878781 - DNA, 15 bp, Homo sapiens
tctttccaaatagca

SEQ ID NO: 878782 - DNA, 15 bp, Homo sapiens
ctttccaaatagcat

SEQ ID NO: 878783 - DNA, 15 bp, Homo sapiens
tttccaaatagcata

SEQ ID NO: 878784 - DNA, 15 bp, Homo sapiens
ttccaaatagcataa

SEQ ID NO: 878785 - DNA, 15 bp, Homo sapiens
tccaaatagcataaa

SEQ ID NO: 878786 - DNA, 15 bp, Homo sapiens
ccaaatagcataaat

SEQ ID NO: 878787 - DNA, 15 bp, Homo sapiens
caaatagcataaata

SEQ ID NO: 878788 - DNA, 15 bp, Homo sapiens
aaatagcataaatat

SEQ ID NO: 878789 - DNA, 15 bp, Homo sapiens
aatagcataaatatt

SEQ ID NO: 878790 - DNA, 15 bp, Homo sapiens
atagcataaatattc

SEQ ID NO: 878791 - DNA, 15 bp, Homo sapiens
tagcataaatattcc

SEQ ID NO: 878792 - DNA, 15 bp, Homo sapiens
agcataaatattcct

SEQ ID NO: 878793 - DNA, 15 bp, Homo sapiens
gcataaatattcctt

SEQ ID NO: 878794 - DNA, 15 bp, Homo sapiens
cataaatattccttt

SEQ ID NO: 878795 - DNA, 15 bp, Homo sapiens
ataaatattcctttt

SEQ ID NO: 878796 - DNA, 15 bp, Homo sapiens
taaatattccttttc

SEQ ID NO: 878797 - DNA, 15 bp, Homo sapiens
aaatattccttttcc

SEQ ID NO: 878798 - DNA, 15 bp, Homo sapiens
aatattccttttcct

SEQ ID NO: 878799 - DNA, 15 bp, Homo sapiens
atattccttttcctt

SEQ ID NO: 878800 - DNA, 15 bp, Homo sapiens
tattccttttccttt

SEQ ID NO: 878801 - DNA, 15 bp, Homo sapiens
attccttttcctttt

SEQ ID NO: 878802 - DNA, 15 bp, Homo sapiens
ttccttttccttttt

SEQ ID NO: 878803 - DNA, 15 bp, Homo sapiens
tccttttccttttta

SEQ ID NO: 878804 - DNA, 15 bp, Homo sapiens
ccttttcctttttat

SEQ ID NO: 878805 - DNA, 15 bp, Homo sapiens
ttttcctttttattt

SEQ ID NO: 878806 - DNA, 15 bp, Homo sapiens
tttcctttttatttt

SEQ ID NO: 878807 - DNA, 15 bp, Homo sapiens
ttcctttttatttta

SEQ ID NO: 878808 - DNA, 15 bp, Homo sapiens
tcctttttattttac

SEQ ID NO: 878809 - DNA, 15 bp, Homo sapiens
cctttttattttacc

SEQ ID NO: 878810 - DNA, 15 bp, Homo sapiens
ctttttattttacct

SEQ ID NO: 878811 - DNA, 15 bp, Homo sapiens
tttttattttacctc

SEQ ID NO: 878812 - DNA, 15 bp, Homo sapiens
ttttattttacctcc

SEQ ID NO: 878813 - DNA, 15 bp, Homo sapiens
tttattttacctcct

SEQ ID NO: 878814 - DNA, 15 bp, Homo sapiens
ttattttacctcctg

SEQ ID NO: 878815 - DNA, 15 bp, Homo sapiens
tattttacctcctga

SEQ ID NO: 878816 - DNA, 15 bp, Homo sapiens
attttacctcctgaa

SEQ ID NO: 878817 - DNA, 15 bp, Homo sapiens
ttttacctcctgaaa

SEQ ID NO: 878818 - DNA, 15 bp, Homo sapiens
tttacctcctgaaaa

SEQ ID NO: 878819 - DNA, 15 bp, Homo sapiens
ttacctcctgaaaat

SEQ ID NO: 878820 - DNA, 15 bp, Homo sapiens
tacctcctgaaaatt

SEQ ID NO: 878821 - DNA, 15 bp, Homo sapiens
acctcctgaaaatta

SEQ ID NO: 878822 - DNA, 15 bp, Homo sapiens
cctcctgaaaattat

SEQ ID NO: 878823 - DNA, 15 bp, Homo sapiens
ctcctgaaaattatt

SEQ ID NO: 878824 - DNA, 15 bp, Homo sapiens
tcctgaaaattatta

SEQ ID NO: 878825 - DNA, 15 bp, Homo sapiens
cctgaaaattattat

SEQ ID NO: 878826 - DNA, 15 bp, Homo sapiens
ctgaaaattattatg

SEQ ID NO: 878827 - DNA, 15 bp, Homo sapiens
tgaaaattattatga

SEQ ID NO: 878828 - DNA, 15 bp, Homo sapiens
gaaaattattatgaa

SEQ ID NO: 878829 - DNA, 15 bp, Homo sapiens
aaaattattatgaag

SEQ ID NO: 878830 - DNA, 15 bp, Homo sapiens
aaattattatgaagg

SEQ ID NO: 878831 - DNA, 15 bp, Homo sapiens
aattattatgaaggt

SEQ ID NO: 878832 - DNA, 15 bp, Homo sapiens
attattatgaaggtc

SEQ ID NO: 878833 - DNA, 15 bp, Homo sapiens
ttattatgaaggtct

SEQ ID NO: 878834 - DNA, 15 bp, Homo sapiens
tattatgaaggtctg

SEQ ID NO: 878835 - DNA, 15 bp, Homo sapiens
attatgaaggtctgc

SEQ ID NO: 878836 - DNA, 15 bp, Homo sapiens
ttatgaaggtctgct

SEQ ID NO: 878837 - DNA, 15 bp, Homo sapiens
tatgaaggtctgctc

SEQ ID NO: 878838 - DNA, 15 bp, Homo sapiens
atgaaggtctgctca

SEQ ID NO: 878839 - DNA, 15 bp, Homo sapiens
tgaaggtctgctcac

SEQ ID NO: 878840 - DNA, 15 bp, Homo sapiens
gaaggtctgctcaca

SEQ ID NO: 878841 - DNA, 15 bp, Homo sapiens
aaggtctgctcacac

SEQ ID NO: 878842 - DNA, 15 bp, Homo sapiens
aggtctgctcacaca

SEQ ID NO: 878843 - DNA, 15 bp, Homo sapiens
ggtctgctcacacat

SEQ ID NO: 878844 - DNA, 15 bp, Homo sapiens
gtctgctcacacata

SEQ ID NO: 878845 - DNA, 15 bp, Homo sapiens
tctgctcacacatat

SEQ ID NO: 878846 - DNA, 15 bp, Homo sapiens
ctgctcacacatatt

SEQ ID NO: 878847 - DNA, 15 bp, Homo sapiens
tgctcacacatattt

SEQ ID NO: 878848 - DNA, 15 bp, Homo sapiens
gctcacacatattta

SEQ ID NO: 878849 - DNA, 15 bp, Homo sapiens
ctcacacatatttat

SEQ ID NO: 878850 - DNA, 15 bp, Homo sapiens
tcacacatatttatg

SEQ ID NO: 878851 - DNA, 15 bp, Homo sapiens
cacacatatttatgg

SEQ ID NO: 878852 - DNA, 15 bp, Homo sapiens
acacatatttatggc

SEQ ID NO: 878853 - DNA, 15 bp, Homo sapiens
cacatatttatggca

SEQ ID NO: 878854 - DNA, 15 bp, Homo sapiens
acatatttatggcat

SEQ ID NO: 878855 - DNA, 15 bp, Homo sapiens
catatttatggcata

SEQ ID NO: 878856 - DNA, 15 bp, Homo sapiens
atatttatggcatac

SEQ ID NO: 878857 - DNA, 15 bp, Homo sapiens
tatttatggcatacc

SEQ ID NO: 878858 - DNA, 15 bp, Homo sapiens
atttatggcatacct

SEQ ID NO: 878859 - DNA, 15 bp, Homo sapiens
tttatggcatacctt

SEQ ID NO: 878860 - DNA, 15 bp, Homo sapiens
ttatggcataccttt

SEQ ID NO: 878861 - DNA, 15 bp, Homo sapiens
tatggcatacctttc

SEQ ID NO: 878862 - DNA, 15 bp, Homo sapiens
atggcatacctttct

SEQ ID NO: 878863 - DNA, 15 bp, Homo sapiens
tggcatacctttctt

SEQ ID NO: 878864 - DNA, 15 bp, Homo sapiens
ggcatacctttctta

SEQ ID NO: 878865 - DNA, 15 bp, Homo sapiens
gcatacctttcttaa

SEQ ID NO: 878866 - DNA, 15 bp, Homo sapiens
catacctttcttaaa

SEQ ID NO: 878867 - DNA, 15 bp, Homo sapiens
atacctttcttaaat

SEQ ID NO: 878868 - DNA, 15 bp, Homo sapiens
tacctttcttaaatc

SEQ ID NO: 878869 - DNA, 15 bp, Homo sapiens
acctttcttaaatct

SEQ ID NO: 878870 - DNA, 15 bp, Homo sapiens
cctttcttaaatctt

SEQ ID NO: 878871 - DNA, 15 bp, Homo sapiens
ctttcttaaatcttt

SEQ ID NO: 878872 - DNA, 15 bp, Homo sapiens
tttcttaaatctttt

SEQ ID NO: 878873 - DNA, 15 bp, Homo sapiens
ttcttaaatcttttg

SEQ ID NO: 878874 - DNA, 15 bp, Homo sapiens
tcttaaatcttttgt

SEQ ID NO: 878875 - DNA, 15 bp, Homo sapiens
cttaaatcttttgtc

SEQ ID NO: 878876 - DNA, 15 bp, Homo sapiens
ttaaatcttttgtca

SEQ ID NO: 878877 - DNA, 15 bp, Homo sapiens
taaatcttttgtcaa

SEQ ID NO: 878878 - DNA, 15 bp, Homo sapiens
aaatcttttgtcaaa

SEQ ID NO: 878879 - DNA, 15 bp, Homo sapiens
aatcttttgtcaaag

SEQ ID NO: 878880 - DNA, 15 bp, Homo sapiens
atcttttgtcaaaga

SEQ ID NO: 878881 - DNA, 15 bp, Homo sapiens
tcttttgtcaaagaa

SEQ ID NO: 878882 - DNA, 15 bp, Homo sapiens
cttttgtcaaagaag

SEQ ID NO: 878883 - DNA, 15 bp, Homo sapiens
ttttgtcaaagaagg

SEQ ID NO: 878884 - DNA, 15 bp, Homo sapiens
tttgtcaaagaaggt

SEQ ID NO: 878885 - DNA, 15 bp, Homo sapiens
ttgtcaaagaaggta

SEQ ID NO: 878886 - DNA, 15 bp, Homo sapiens
tgtcaaagaaggtag

SEQ ID NO: 878887 - DNA, 15 bp, Homo sapiens
gtcaaagaaggtagc

SEQ ID NO: 878888 - DNA, 15 bp, Homo sapiens
tcaaagaaggtagca

SEQ ID NO: 878889 - DNA, 15 bp, Homo sapiens
caaagaaggtagcaa

SEQ ID NO: 878890 - DNA, 15 bp, Homo sapiens
aaagaaggtagcaat

SEQ ID NO: 878891 - DNA, 15 bp, Homo sapiens
aagaaggtagcaatg

SEQ ID NO: 878892 - DNA, 15 bp, Homo sapiens
agaaggtagcaatgt

SEQ ID NO: 878893 - DNA, 15 bp, Homo sapiens
gaaggtagcaatgtg

SEQ ID NO: 878894 - DNA, 15 bp, Homo sapiens
aaggtagcaatgtgt

SEQ ID NO: 878895 - DNA, 15 bp, Homo sapiens
aggtagcaatgtgta

SEQ ID NO: 878896 - DNA, 15 bp, Homo sapiens
ggtagcaatgtgtat

SEQ ID NO: 878897 - DNA, 15 bp, Homo sapiens
gtagcaatgtgtatg

SEQ ID NO: 878898 - DNA, 15 bp, Homo sapiens
tagcaatgtgtatgg

SEQ ID NO: 878899 - DNA, 15 bp, Homo sapiens
agcaatgtgtatggc

SEQ ID NO: 878900 - DNA, 15 bp, Homo sapiens
gcaatgtgtatggct

SEQ ID NO: 878901 - DNA, 15 bp, Homo sapiens
caatgtgtatggcta

SEQ ID NO: 878902 - DNA, 15 bp, Homo sapiens
aatgtgtatggctat

SEQ ID NO: 878903 - DNA, 15 bp, Homo sapiens
atgtgtatggctata

SEQ ID NO: 878904 - DNA, 15 bp, Homo sapiens
tgtgtatggctatac

SEQ ID NO: 878905 - DNA, 15 bp, Homo sapiens
gtgtatggctataca

SEQ ID NO: 878906 - DNA, 15 bp, Homo sapiens
tgtatggctatacat

SEQ ID NO: 878907 - DNA, 15 bp, Homo sapiens
gtatggctatacatt

SEQ ID NO: 878908 - DNA, 15 bp, Homo sapiens
tatggctatacattt

SEQ ID NO: 878909 - DNA, 15 bp, Homo sapiens
atggctatacatttg

SEQ ID NO: 878910 - DNA, 15 bp, Homo sapiens
tggctatacatttgg

SEQ ID NO: 878911 - DNA, 15 bp, Homo sapiens
ggctatacatttgga

SEQ ID NO: 878912 - DNA, 15 bp, Homo sapiens
gctatacatttggac

SEQ ID NO: 878913 - DNA, 15 bp, Homo sapiens
ctatacatttggaca

SEQ ID NO: 878914 - DNA, 15 bp, Homo sapiens
tatacatttggacag

SEQ ID NO: 878915 - DNA, 15 bp, Homo sapiens
atacatttggacaga

SEQ ID NO: 878916 - DNA, 15 bp, Homo sapiens
tacatttggacagat

SEQ ID NO: 878917 - DNA, 15 bp, Homo sapiens
acatttggacagatt

SEQ ID NO: 878918 - DNA, 15 bp, Homo sapiens
catttggacagattt

SEQ ID NO: 878919 - DNA, 15 bp, Homo sapiens
atttggacagattta

SEQ ID NO: 878920 - DNA, 15 bp, Homo sapiens
tttggacagatttat

SEQ ID NO: 878921 - DNA, 15 bp, Homo sapiens
ttggacagatttatt

SEQ ID NO: 878922 - DNA, 15 bp, Homo sapiens
tggacagatttatta

SEQ ID NO: 878923 - DNA, 15 bp, Homo sapiens
ggacagatttattac

SEQ ID NO: 878924 - DNA, 15 bp, Homo sapiens
gacagatttattaca

SEQ ID NO: 878925 - DNA, 15 bp, Homo sapiens
acagatttattacaa

SEQ ID NO: 878926 - DNA, 15 bp, Homo sapiens
cagatttattacaaa

SEQ ID NO: 878927 - DNA, 15 bp, Homo sapiens
agatttattacaaaa

SEQ ID NO: 878928 - DNA, 15 bp, Homo sapiens
gatttattacaaaaa

SEQ ID NO: 878929 - DNA, 15 bp, Homo sapiens
atttattacaaaaat

SEQ ID NO: 878930 - DNA, 15 bp, Homo sapiens
tttattacaaaaata

SEQ ID NO: 878931 - DNA, 15 bp, Homo sapiens
ttattacaaaaatat

SEQ ID NO: 878932 - DNA, 15 bp, Homo sapiens
tattacaaaaatata

SEQ ID NO: 878933 - DNA, 15 bp, Homo sapiens
attacaaaaatataa

SEQ ID NO: 878934 - DNA, 15 bp, Homo sapiens
ttacaaaaatataat

SEQ ID NO: 878935 - DNA, 15 bp, Homo sapiens
tacaaaaatataata

SEQ ID NO: 878936 - DNA, 15 bp, Homo sapiens
acaaaaatataatac

SEQ ID NO: 878937 - DNA, 15 bp, Homo sapiens
caaaaatataataca

SEQ ID NO: 878938 - DNA, 15 bp, Homo sapiens
aaaaatataatacat

SEQ ID NO: 878939 - DNA, 15 bp, Homo sapiens
aaaatataatacata

SEQ ID NO: 878940 - DNA, 15 bp, Homo sapiens
aaatataatacatat

SEQ ID NO: 878941 - DNA, 15 bp, Homo sapiens
aatataatacatata

SEQ ID NO: 878942 - DNA, 15 bp, Homo sapiens
atataatacatatac

SEQ ID NO: 878943 - DNA, 15 bp, Homo sapiens
tataatacatataca

SEQ ID NO: 878944 - DNA, 15 bp, Homo sapiens
ataatacatatacac

SEQ ID NO: 878945 - DNA, 15 bp, Homo sapiens
taatacatatacacg

SEQ ID NO: 878946 - DNA, 15 bp, Homo sapiens
aatacatatacacgt

SEQ ID NO: 878947 - DNA, 15 bp, Homo sapiens
atacatatacacgtg

SEQ ID NO: 878948 - DNA, 15 bp, Homo sapiens
tacatatacacgtgc

SEQ ID NO: 878949 - DNA, 15 bp, Homo sapiens
acatatacacgtgct

SEQ ID NO: 878950 - DNA, 15 bp, Homo sapiens
catatacacgtgctc

SEQ ID NO: 878951 - DNA, 15 bp, Homo sapiens
atatacacgtgctca

SEQ ID NO: 878952 - DNA, 15 bp, Homo sapiens
tatacacgtgctcaa

SEQ ID NO: 878953 - DNA, 15 bp, Homo sapiens
atacacgtgctcaaa

SEQ ID NO: 878954 - DNA, 15 bp, Homo sapiens
tacacgtgctcaaat

SEQ ID NO: 878955 - DNA, 15 bp, Homo sapiens
acacgtgctcaaatt

SEQ ID NO: 878956 - DNA, 15 bp, Homo sapiens
cacgtgctcaaatta

SEQ ID NO: 878957 - DNA, 15 bp, Homo sapiens
acgtgctcaaattat

SEQ ID NO: 878958 - DNA, 15 bp, Homo sapiens
cgtgctcaaattata

SEQ ID NO: 878959 - DNA, 15 bp, Homo sapiens
gtgctcaaattatag

SEQ ID NO: 878960 - DNA, 15 bp, Homo sapiens
tgctcaaattatagc

SEQ ID NO: 878961 - DNA, 15 bp, Homo sapiens
gctcaaattatagct

SEQ ID NO: 878962 - DNA, 15 bp, Homo sapiens
ctcaaattatagctc

SEQ ID NO: 878963 - DNA, 15 bp, Homo sapiens
tcaaattatagctct

SEQ ID NO: 878964 - DNA, 15 bp, Homo sapiens
caaattatagctcta

SEQ ID NO: 878965 - DNA, 15 bp, Homo sapiens
aaattatagctctat

SEQ ID NO: 878966 - DNA, 15 bp, Homo sapiens
aattatagctctata

SEQ ID NO: 878967 - DNA, 15 bp, Homo sapiens
attatagctctatat

SEQ ID NO: 878968 - DNA, 15 bp, Homo sapiens
ttatagctctatatg

SEQ ID NO: 878969 - DNA, 15 bp, Homo sapiens
tatagctctatatgg

SEQ ID NO: 878970 - DNA, 15 bp, Homo sapiens
atagctctatatggc

SEQ ID NO: 878971 - DNA, 15 bp, Homo sapiens
tagctctatatggca

SEQ ID NO: 878972 - DNA, 15 bp, Homo sapiens
agctctatatggcat

SEQ ID NO: 878973 - DNA, 15 bp, Homo sapiens
gctctatatggcatg

SEQ ID NO: 878974 - DNA, 15 bp, Homo sapiens
ctctatatggcatgt

SEQ ID NO: 878975 - DNA, 15 bp, Homo sapiens
tctatatggcatgta

SEQ ID NO: 878976 - DNA, 15 bp, Homo sapiens
ctatatggcatgtat

SEQ ID NO: 878977 - DNA, 15 bp, Homo sapiens
tatatggcatgtata

SEQ ID NO: 878978 - DNA, 15 bp, Homo sapiens
atatggcatgtatat

SEQ ID NO: 878979 - DNA, 15 bp, Homo sapiens
tatggcatgtatata

SEQ ID NO: 878980 - DNA, 15 bp, Homo sapiens
atggcatgtatataa

SEQ ID NO: 878981 - DNA, 15 bp, Homo sapiens
tggcatgtatataac

SEQ ID NO: 878982 - DNA, 15 bp, Homo sapiens
ggcatgtatataaca

SEQ ID NO: 878983 - DNA, 15 bp, Homo sapiens
gcatgtatataacat

SEQ ID NO: 878984 - DNA, 15 bp, Homo sapiens
catgtatataacatt

SEQ ID NO: 878985 - DNA, 15 bp, Homo sapiens
atgtatataacattg

SEQ ID NO: 878986 - DNA, 15 bp, Homo sapiens
tgtatataacattga

SEQ ID NO: 878987 - DNA, 15 bp, Homo sapiens
gtatataacattgat

SEQ ID NO: 878988 - DNA, 15 bp, Homo sapiens
tatataacattgatg

SEQ ID NO: 878989 - DNA, 15 bp, Homo sapiens
atataacattgatga

SEQ ID NO: 878990 - DNA, 15 bp, Homo sapiens
tataacattgatgaa

SEQ ID NO: 878991 - DNA, 15 bp, Homo sapiens
ataacattgatgaaa

SEQ ID NO: 878992 - DNA, 15 bp, Homo sapiens
taacattgatgaaat

SEQ ID NO: 878993 - DNA, 15 bp, Homo sapiens
aacattgatgaaata

SEQ ID NO: 878994 - DNA, 15 bp, Homo sapiens
acattgatgaaataa

SEQ ID NO: 878995 - DNA, 15 bp, Homo sapiens
cattgatgaaataaa

SEQ ID NO: 878996 - DNA, 15 bp, Homo sapiens
attgatgaaataaaa

SEQ ID NO: 878997 - DNA, 15 bp, Homo sapiens
ttgatgaaataaaaa

SEQ ID NO: 878998 - DNA, 15 bp, Homo sapiens
tgatgaaataaaaat

SEQ ID NO: 878999 - DNA, 15 bp, Homo sapiens
gatgaaataaaaata

SEQ ID NO: 879000 - DNA, 15 bp, Homo sapiens
atgaaataaaaataa

SEQ ID NO: 879001 - DNA, 15 bp, Homo sapiens
tgaaataaaaataat

SEQ ID NO: 879002 - DNA, 15 bp, Homo sapiens
gaaataaaaataata

SEQ ID NO: 879003 - DNA, 15 bp, Homo sapiens
aaataaaaataatag

SEQ ID NO: 879004 - DNA, 15 bp, Homo sapiens
aataaaaataatagc

SEQ ID NO: 879005 - DNA, 15 bp, Homo sapiens
ataaaaataatagca

SEQ ID NO: 879006 - DNA, 15 bp, Homo sapiens
taaaaataatagcac

SEQ ID NO: 879007 - DNA, 15 bp, Homo sapiens
aaaaataatagcaca

SEQ ID NO: 879008 - DNA, 15 bp, Homo sapiens
aaaataatagcacat

SEQ ID NO: 879009 - DNA, 15 bp, Homo sapiens
aaataatagcacata

SEQ ID NO: 879010 - DNA, 15 bp, Homo sapiens
aataatagcacatag

SEQ ID NO: 879011 - DNA, 15 bp, Homo sapiens
ataatagcacatagt

SEQ ID NO: 879012 - DNA, 15 bp, Homo sapiens
taatagcacatagta

SEQ ID NO: 879013 - DNA, 15 bp, Homo sapiens
aatagcacatagtaa

SEQ ID NO: 879014 - DNA, 15 bp, Homo sapiens
atagcacatagtaag

SEQ ID NO: 879015 - DNA, 15 bp, Homo sapiens
tagcacatagtaagc

SEQ ID NO: 879016 - DNA, 15 bp, Homo sapiens
agcacatagtaagct

SEQ ID NO: 879017 - DNA, 15 bp, Homo sapiens
gcacatagtaagctc

SEQ ID NO: 879018 - DNA, 15 bp, Homo sapiens
cacatagtaagctct

SEQ ID NO: 879019 - DNA, 15 bp, Homo sapiens
acatagtaagctctc

SEQ ID NO: 879020 - DNA, 15 bp, Homo sapiens
catagtaagctctca

SEQ ID NO: 879021 - DNA, 15 bp, Homo sapiens
atagtaagctctcag

SEQ ID NO: 879022 - DNA, 15 bp, Homo sapiens
tagtaagctctcagc

SEQ ID NO: 879023 - DNA, 15 bp, Homo sapiens
agtaagctctcagca

SEQ ID NO: 879024 - DNA, 15 bp, Homo sapiens
gtaagctctcagcaa

SEQ ID NO: 879025 - DNA, 15 bp, Homo sapiens
taagctctcagcaaa

SEQ ID NO: 879026 - DNA, 15 bp, Homo sapiens
aagctctcagcaaat

SEQ ID NO: 879027 - DNA, 15 bp, Homo sapiens
agctctcagcaaata

SEQ ID NO: 879028 - DNA, 15 bp, Homo sapiens
gctctcagcaaatat

SEQ ID NO: 879029 - DNA, 15 bp, Homo sapiens
ctctcagcaaatatt

SEQ ID NO: 879030 - DNA, 15 bp, Homo sapiens
tctcagcaaatattt

SEQ ID NO: 879031 - DNA, 15 bp, Homo sapiens
ctcagcaaatatttg

SEQ ID NO: 879032 - DNA, 15 bp, Homo sapiens
tcagcaaatatttgc

SEQ ID NO: 879033 - DNA, 15 bp, Homo sapiens
cagcaaatatttgct

SEQ ID NO: 879034 - DNA, 15 bp, Homo sapiens
agcaaatatttgctt

SEQ ID NO: 879035 - DNA, 15 bp, Homo sapiens
gcaaatatttgcttg

SEQ ID NO: 879036 - DNA, 15 bp, Homo sapiens
caaatatttgcttga

SEQ ID NO: 879037 - DNA, 15 bp, Homo sapiens
aaatatttgcttgat

SEQ ID NO: 879038 - DNA, 15 bp, Homo sapiens
aatatttgcttgatt

SEQ ID NO: 879039 - DNA, 15 bp, Homo sapiens
atatttgcttgattc

SEQ ID NO: 879040 - DNA, 15 bp, Homo sapiens
tatttgcttgattct

SEQ ID NO: 879041 - DNA, 15 bp, Homo sapiens
atttgcttgattctt

SEQ ID NO: 879042 - DNA, 15 bp, Homo sapiens
tttgcttgattcttt

SEQ ID NO: 879043 - DNA, 15 bp, Homo sapiens
ttgcttgattctttg

SEQ ID NO: 879044 - DNA, 15 bp, Homo sapiens
tgcttgattctttgc

SEQ ID NO: 879045 - DNA, 15 bp, Homo sapiens
gcttgattctttgca

SEQ ID NO: 879046 - DNA, 15 bp, Homo sapiens
cttgattctttgcac

SEQ ID NO: 879047 - DNA, 15 bp, Homo sapiens
ttgattctttgcaca

SEQ ID NO: 879048 - DNA, 15 bp, Homo sapiens
tgattctttgcacaa

SEQ ID NO: 879049 - DNA, 15 bp, Homo sapiens
gattctttgcacaaa

SEQ ID NO: 879050 - DNA, 15 bp, Homo sapiens
attctttgcacaaat

SEQ ID NO: 879051 - DNA, 15 bp, Homo sapiens
ttctttgcacaaatg

SEQ ID NO: 879052 - DNA, 15 bp, Homo sapiens
tctttgcacaaatga

SEQ ID NO: 879053 - DNA, 15 bp, Homo sapiens
ctttgcacaaatgat

SEQ ID NO: 879054 - DNA, 15 bp, Homo sapiens
tttgcacaaatgatt

SEQ ID NO: 879055 - DNA, 15 bp, Homo sapiens
ttgcacaaatgattt

SEQ ID NO: 879056 - DNA, 15 bp, Homo sapiens
tgcacaaatgattta

SEQ ID NO: 879057 - DNA, 15 bp, Homo sapiens
gcacaaatgatttat

SEQ ID NO: 879058 - DNA, 15 bp, Homo sapiens
cacaaatgatttatt

SEQ ID NO: 879059 - DNA, 15 bp, Homo sapiens
acaaatgatttattt

SEQ ID NO: 879060 - DNA, 15 bp, Homo sapiens
caaatgatttatttc

SEQ ID NO: 879061 - DNA, 15 bp, Homo sapiens
aaatgatttatttca

SEQ ID NO: 879062 - DNA, 15 bp, Homo sapiens
aatgatttatttcac

SEQ ID NO: 879063 - DNA, 15 bp, Homo sapiens
atgatttatttcact

SEQ ID NO: 879064 - DNA, 15 bp, Homo sapiens
tgatttatttcactc

SEQ ID NO: 879065 - DNA, 15 bp, Homo sapiens
gatttatttcactcc

SEQ ID NO: 879066 - DNA, 15 bp, Homo sapiens
atttatttcactcct

SEQ ID NO: 879067 - DNA, 15 bp, Homo sapiens
tttatttcactcctt

SEQ ID NO: 879068 - DNA, 15 bp, Homo sapiens
ttatttcactcctta

SEQ ID NO: 879069 - DNA, 15 bp, Homo sapiens
tatttcactccttac

SEQ ID NO: 879070 - DNA, 15 bp, Homo sapiens
atttcactccttaca

SEQ ID NO: 879071 - DNA, 15 bp, Homo sapiens
tttcactccttacaa

SEQ ID NO: 879072 - DNA, 15 bp, Homo sapiens
ttcactccttacaac

SEQ ID NO: 879073 - DNA, 15 bp, Homo sapiens
tcactccttacaaca

SEQ ID NO: 879074 - DNA, 15 bp, Homo sapiens
cactccttacaacag

SEQ ID NO: 879075 - DNA, 15 bp, Homo sapiens
actccttacaacagc

SEQ ID NO: 879076 - DNA, 15 bp, Homo sapiens
ctccttacaacagcc

SEQ ID NO: 879077 - DNA, 15 bp, Homo sapiens
tccttacaacagccc

SEQ ID NO: 879078 - DNA, 15 bp, Homo sapiens
ccttacaacagccct

SEQ ID NO: 879079 - DNA, 15 bp, Homo sapiens
cttacaacagcccta

SEQ ID NO: 879080 - DNA, 15 bp, Homo sapiens
ttacaacagccctat

SEQ ID NO: 879081 - DNA, 15 bp, Homo sapiens
tacaacagccctatg

SEQ ID NO: 879082 - DNA, 15 bp, Homo sapiens
acaacagccctatgc

SEQ ID NO: 879083 - DNA, 15 bp, Homo sapiens
caacagccctatgca

SEQ ID NO: 879084 - DNA, 15 bp, Homo sapiens
aacagccctatgcag

SEQ ID NO: 879085 - DNA, 15 bp, Homo sapiens
acagccctatgcagt

SEQ ID NO: 879086 - DNA, 15 bp, Homo sapiens
cagccctatgcagtc

SEQ ID NO: 879087 - DNA, 15 bp, Homo sapiens
agccctatgcagtct

SEQ ID NO: 879088 - DNA, 15 bp, Homo sapiens
gccctatgcagtctt

SEQ ID NO: 879089 - DNA, 15 bp, Homo sapiens
ccctatgcagtcttc

SEQ ID NO: 879090 - DNA, 15 bp, Homo sapiens
cctatgcagtcttct

SEQ ID NO: 879091 - DNA, 15 bp, Homo sapiens
ctatgcagtcttctc

SEQ ID NO: 879092 - DNA, 15 bp, Homo sapiens
tatgcagtcttctct

SEQ ID NO: 879093 - DNA, 15 bp, Homo sapiens
atgcagtcttctctc

SEQ ID NO: 879094 - DNA, 15 bp, Homo sapiens
tgcagtcttctctct

SEQ ID NO: 879095 - DNA, 15 bp, Homo sapiens
gcagtcttctctctg

SEQ ID NO: 879096 - DNA, 15 bp, Homo sapiens
cagtcttctctctga

SEQ ID NO: 879097 - DNA, 15 bp, Homo sapiens
agtcttctctctgac

SEQ ID NO: 879098 - DNA, 15 bp, Homo sapiens
gtcttctctctgact

SEQ ID NO: 879099 - DNA, 15 bp, Homo sapiens
tcttctctctgactc

SEQ ID NO: 879100 - DNA, 15 bp, Homo sapiens
cttctctctgactct

SEQ ID NO: 879101 - DNA, 15 bp, Homo sapiens
ttctctctgactctt

SEQ ID NO: 879102 - DNA, 15 bp, Homo sapiens
tctctctgactctta

SEQ ID NO: 879103 - DNA, 15 bp, Homo sapiens
ctctctgactcttac

SEQ ID NO: 879104 - DNA, 15 bp, Homo sapiens
tctctgactcttacc

SEQ ID NO: 879105 - DNA, 15 bp, Homo sapiens
ctctgactcttaccc

SEQ ID NO: 879106 - DNA, 15 bp, Homo sapiens
tctgactcttaccca

SEQ ID NO: 879107 - DNA, 15 bp, Homo sapiens
ctgactcttacccac

SEQ ID NO: 879108 - DNA, 15 bp, Homo sapiens
tgactcttacccact

SEQ ID NO: 879109 - DNA, 15 bp, Homo sapiens
gactcttacccactt

SEQ ID NO: 879110 - DNA, 15 bp, Homo sapiens
actcttacccacttc

SEQ ID NO: 879111 - DNA, 15 bp, Homo sapiens
ctcttacccacttct

SEQ ID NO: 879112 - DNA, 15 bp, Homo sapiens
tcttacccacttctc

SEQ ID NO: 879113 - DNA, 15 bp, Homo sapiens
cttacccacttctcc

SEQ ID NO: 879114 - DNA, 15 bp, Homo sapiens
ttacccacttctccc

SEQ ID NO: 879115 - DNA, 15 bp, Homo sapiens
tacccacttctccct

SEQ ID NO: 879116 - DNA, 15 bp, Homo sapiens
acccacttctccctg

SEQ ID NO: 879117 - DNA, 15 bp, Homo sapiens
cccacttctccctgt

SEQ ID NO: 879118 - DNA, 15 bp, Homo sapiens
ccacttctccctgtt

SEQ ID NO: 879119 - DNA, 15 bp, Homo sapiens
cacttctccctgttg

SEQ ID NO: 879120 - DNA, 15 bp, Homo sapiens
acttctccctgttgt

SEQ ID NO: 879121 - DNA, 15 bp, Homo sapiens
cttctccctgttgta

SEQ ID NO: 879122 - DNA, 15 bp, Homo sapiens
ttctccctgttgtag

SEQ ID NO: 879123 - DNA, 15 bp, Homo sapiens
tctccctgttgtaga

SEQ ID NO: 879124 - DNA, 15 bp, Homo sapiens
ctccctgttgtagac

SEQ ID NO: 879125 - DNA, 15 bp, Homo sapiens
tccctgttgtagact

SEQ ID NO: 879126 - DNA, 15 bp, Homo sapiens
ccctgttgtagactc

SEQ ID NO: 879127 - DNA, 15 bp, Homo sapiens
cctgttgtagactcg

SEQ ID NO: 879128 - DNA, 15 bp, Homo sapiens
ctgttgtagactcga

SEQ ID NO: 879129 - DNA, 15 bp, Homo sapiens
tgttgtagactcgaa

SEQ ID NO: 879130 - DNA, 15 bp, Homo sapiens
gttgtagactcgaag

SEQ ID NO: 879131 - DNA, 15 bp, Homo sapiens
ttgtagactcgaagt

SEQ ID NO: 879132 - DNA, 15 bp, Homo sapiens
tgtagactcgaagtg

SEQ ID NO: 879133 - DNA, 15 bp, Homo sapiens
gtagactcgaagtga

SEQ ID NO: 879134 - DNA, 15 bp, Homo sapiens
tagactcgaagtgaa

SEQ ID NO: 879135 - DNA, 15 bp, Homo sapiens
agactcgaagtgaag

SEQ ID NO: 879136 - DNA, 15 bp, Homo sapiens
gactcgaagtgaagc

SEQ ID NO: 879137 - DNA, 15 bp, Homo sapiens
actcgaagtgaagct

SEQ ID NO: 879138 - DNA, 15 bp, Homo sapiens
ctcgaagtgaagctg

SEQ ID NO: 879139 - DNA, 15 bp, Homo sapiens
tcgaagtgaagctgc

SEQ ID NO: 879140 - DNA, 15 bp, Homo sapiens
cgaagtgaagctgcc

SEQ ID NO: 879141 - DNA, 15 bp, Homo sapiens
gaagtgaagctgcca

SEQ ID NO: 879142 - DNA, 15 bp, Homo sapiens
aagtgaagctgccat

SEQ ID NO: 879143 - DNA, 15 bp, Homo sapiens
agtgaagctgccatg

SEQ ID NO: 879144 - DNA, 15 bp, Homo sapiens
gtgaagctgccatga

SEQ ID NO: 879145 - DNA, 15 bp, Homo sapiens
tgaagctgccatgac

SEQ ID NO: 879146 - DNA, 15 bp, Homo sapiens
gaagctgccatgacc

SEQ ID NO: 879147 - DNA, 15 bp, Homo sapiens
aagctgccatgaccg

SEQ ID NO: 879148 - DNA, 15 bp, Homo sapiens
agctgccatgaccgt

SEQ ID NO: 879149 - DNA, 15 bp, Homo sapiens
gctgccatgaccgtc

SEQ ID NO: 879150 - DNA, 15 bp, Homo sapiens
ctgccatgaccgtcc

SEQ ID NO: 879151 - DNA, 15 bp, Homo sapiens
tgccatgaccgtcct

SEQ ID NO: 879152 - DNA, 15 bp, Homo sapiens
gccatgaccgtcctg

SEQ ID NO: 879153 - DNA, 15 bp, Homo sapiens
ccatgaccgtcctga

SEQ ID NO: 879154 - DNA, 15 bp, Homo sapiens
catgaccgtcctgag

SEQ ID NO: 879155 - DNA, 15 bp, Homo sapiens
atgaccgtcctgagt

SEQ ID NO: 879156 - DNA, 15 bp, Homo sapiens
tgaccgtcctgagtg

SEQ ID NO: 879157 - DNA, 15 bp, Homo sapiens
gaccgtcctgagtgg

SEQ ID NO: 879158 - DNA, 15 bp, Homo sapiens
accgtcctgagtggc

SEQ ID NO: 879159 - DNA, 15 bp, Homo sapiens
ccgtcctgagtggcc

SEQ ID NO: 879160 - DNA, 15 bp, Homo sapiens
cgtcctgagtggcca

SEQ ID NO: 879161 - DNA, 15 bp, Homo sapiens
gtcctgagtggccat

SEQ ID NO: 879162 - DNA, 15 bp, Homo sapiens
tcctgagtggccatg

SEQ ID NO: 879163 - DNA, 15 bp, Homo sapiens
cctgagtggccatgt

SEQ ID NO: 879164 - DNA, 15 bp, Homo sapiens
ctgagtggccatgtc

SEQ ID NO: 879165 - DNA, 15 bp, Homo sapiens
tgagtggccatgtcg

SEQ ID NO: 879166 - DNA, 15 bp, Homo sapiens
gagtggccatgtcgt

SEQ ID NO: 879167 - DNA, 15 bp, Homo sapiens
agtggccatgtcgtg

SEQ ID NO: 879168 - DNA, 15 bp, Homo sapiens
gtggccatgtcgtgg

SEQ ID NO: 879169 - DNA, 15 bp, Homo sapiens
tggccatgtcgtggt

SEQ ID NO: 879170 - DNA, 15 bp, Homo sapiens
ggccatgtcgtggtc

SEQ ID NO: 879171 - DNA, 15 bp, Homo sapiens
gccatgtcgtggtct

SEQ ID NO: 879172 - DNA, 15 bp, Homo sapiens
ccatgtcgtggtctg

SEQ ID NO: 879173 - DNA, 15 bp, Homo sapiens
catgtcgtggtctgc

SEQ ID NO: 879174 - DNA, 15 bp, Homo sapiens
atgtcgtggtctgca

SEQ ID NO: 879175 - DNA, 15 bp, Homo sapiens
tgtcgtggtctgcat

SEQ ID NO: 879176 - DNA, 15 bp, Homo sapiens
gtcgtggtctgcatc

SEQ ID NO: 879177 - DNA, 15 bp, Homo sapiens
tcgtggtctgcatct

SEQ ID NO: 879178 - DNA, 15 bp, Homo sapiens
cgtggtctgcatctt

SEQ ID NO: 879179 - DNA, 15 bp, Homo sapiens
gtggtctgcatcttt

SEQ ID NO: 879180 - DNA, 15 bp, Homo sapiens
tggtctgcatctttg

SEQ ID NO: 879181 - DNA, 15 bp, Homo sapiens
ggtctgcatctttgg

SEQ ID NO: 879182 - DNA, 15 bp, Homo sapiens
gtctgcatctttggc

SEQ ID NO: 879183 - DNA, 15 bp, Homo sapiens
tctgcatctttggcg

SEQ ID NO: 879184 - DNA, 15 bp, Homo sapiens
ctgcatctttggcga

SEQ ID NO: 879185 - DNA, 15 bp, Homo sapiens
tgcatctttggcgac

SEQ ID NO: 879186 - DNA, 15 bp, Homo sapiens
gcatctttggcgacg

SEQ ID NO: 879187 - DNA, 15 bp, Homo sapiens
catctttggcgacgt

SEQ ID NO: 879188 - DNA, 15 bp, Homo sapiens
atctttggcgacgtc

SEQ ID NO: 879189 - DNA, 15 bp, Homo sapiens
tctttggcgacgtca

SEQ ID NO: 879190 - DNA, 15 bp, Homo sapiens
ctttggcgacgtcag

SEQ ID NO: 879191 - DNA, 15 bp, Homo sapiens
tttggcgacgtcagc

SEQ ID NO: 879192 - DNA, 15 bp, Homo sapiens
ttggcgacgtcagct

SEQ ID NO: 879193 - DNA, 15 bp, Homo sapiens
tggcgacgtcagctc

SEQ ID NO: 879194 - DNA, 15 bp, Homo sapiens
ggcgacgtcagctca

SEQ ID NO: 879195 - DNA, 15 bp, Homo sapiens
gcgacgtcagctcag

SEQ ID NO: 879196 - DNA, 15 bp, Homo sapiens
cgacgtcagctcagc

SEQ ID NO: 879197 - DNA, 15 bp, Homo sapiens
gacgtcagctcagcc

SEQ ID NO: 879198 - DNA, 15 bp, Homo sapiens
acgtcagctcagccc

SEQ ID NO: 879199 - DNA, 15 bp, Homo sapiens
cgtcagctcagccct

SEQ ID NO: 879200 - DNA, 15 bp, Homo sapiens
gtcagctcagccctg

SEQ ID NO: 879201 - DNA, 15 bp, Homo sapiens
tcagctcagccctga

SEQ ID NO: 879202 - DNA, 15 bp, Homo sapiens
cagctcagccctgat

SEQ ID NO: 879203 - DNA, 15 bp, Homo sapiens
agctcagccctgatc

SEQ ID NO: 879204 - DNA, 15 bp, Homo sapiens
gctcagccctgatcg

SEQ ID NO: 879205 - DNA, 15 bp, Homo sapiens
ctcagccctgatcgg

SEQ ID NO: 879206 - DNA, 15 bp, Homo sapiens
tcagccctgatcggc

SEQ ID NO: 879207 - DNA, 15 bp, Homo sapiens
cagccctgatcggcc

SEQ ID NO: 879208 - DNA, 15 bp, Homo sapiens
agccctgatcggcct

SEQ ID NO: 879209 - DNA, 15 bp, Homo sapiens
gccctgatcggcctc

SEQ ID NO: 879210 - DNA, 15 bp, Homo sapiens
ccctgatcggcctcc

SEQ ID NO: 879211 - DNA, 15 bp, Homo sapiens
cctgatcggcctccg

SEQ ID NO: 879212 - DNA, 15 bp, Homo sapiens
ctgatcggcctccgg

SEQ ID NO: 879213 - DNA, 15 bp, Homo sapiens
tgatcggcctccgga

SEQ ID NO: 879214 - DNA, 15 bp, Homo sapiens
gatcggcctccggaa

SEQ ID NO: 879215 - DNA, 15 bp, Homo sapiens
atcggcctccggaac

SEQ ID NO: 879216 - DNA, 15 bp, Homo sapiens
tcggcctccggaacc

SEQ ID NO: 879217 - DNA, 15 bp, Homo sapiens
cggcctccggaacct

SEQ ID NO: 879218 - DNA, 15 bp, Homo sapiens
ggcctccggaacctg

SEQ ID NO: 879219 - DNA, 15 bp, Homo sapiens
gcctccggaacctgg

SEQ ID NO: 879220 - DNA, 15 bp, Homo sapiens
cctccggaacctggt

SEQ ID NO: 879221 - DNA, 15 bp, Homo sapiens
ctccggaacctggtg

SEQ ID NO: 879222 - DNA, 15 bp, Homo sapiens
tccggaacctggtga

SEQ ID NO: 879223 - DNA, 15 bp, Homo sapiens
ccggaacctggtgat

SEQ ID NO: 879224 - DNA, 15 bp, Homo sapiens
cggaacctggtgatg

SEQ ID NO: 879225 - DNA, 15 bp, Homo sapiens
ggaacctggtgatgc

SEQ ID NO: 879226 - DNA, 15 bp, Homo sapiens
gaacctggtgatgcc

SEQ ID NO: 879227 - DNA, 15 bp, Homo sapiens
aacctggtgatgccg

SEQ ID NO: 879228 - DNA, 15 bp, Homo sapiens
acctggtgatgccgc

SEQ ID NO: 879229 - DNA, 15 bp, Homo sapiens
cctggtgatgccgct

SEQ ID NO: 879230 - DNA, 15 bp, Homo sapiens
ctggtgatgccgctc

SEQ ID NO: 879231 - DNA, 15 bp, Homo sapiens
tggtgatgccgctcc

SEQ ID NO: 879232 - DNA, 15 bp, Homo sapiens
ggtgatgccgctccg

SEQ ID NO: 879233 - DNA, 15 bp, Homo sapiens
gtgatgccgctccgt

SEQ ID NO: 879234 - DNA, 15 bp, Homo sapiens
tgatgccgctccgtg

SEQ ID NO: 879235 - DNA, 15 bp, Homo sapiens
gatgccgctccgtgc

SEQ ID NO: 879236 - DNA, 15 bp, Homo sapiens
atgccgctccgtgcc

SEQ ID NO: 879237 - DNA, 15 bp, Homo sapiens
tgccgctccgtgcca

SEQ ID NO: 879238 - DNA, 15 bp, Homo sapiens
gccgctccgtgccag

SEQ ID NO: 879239 - DNA, 15 bp, Homo sapiens
ccgctccgtgccagc

SEQ ID NO: 879240 - DNA, 15 bp, Homo sapiens
cgctccgtgccagca

SEQ ID NO: 879241 - DNA, 15 bp, Homo sapiens
gctccgtgccagcaa

SEQ ID NO: 879242 - DNA, 15 bp, Homo sapiens
ctccgtgccagcaac

SEQ ID NO: 879243 - DNA, 15 bp, Homo sapiens
tccgtgccagcaact

SEQ ID NO: 879244 - DNA, 15 bp, Homo sapiens
ccgtgccagcaactt

SEQ ID NO: 879245 - DNA, 15 bp, Homo sapiens
cgtgccagcaacttt

SEQ ID NO: 879246 - DNA, 15 bp, Homo sapiens
gtgccagcaactttc

SEQ ID NO: 879247 - DNA, 15 bp, Homo sapiens
tgccagcaactttca

SEQ ID NO: 879248 - DNA, 15 bp, Homo sapiens
gccagcaactttcat

SEQ ID NO: 879249 - DNA, 15 bp, Homo sapiens
ccagcaactttcatt

SEQ ID NO: 879250 - DNA, 15 bp, Homo sapiens
cagcaactttcatta

SEQ ID NO: 879251 - DNA, 15 bp, Homo sapiens
agcaactttcattac

SEQ ID NO: 879252 - DNA, 15 bp, Homo sapiens
gcaactttcattacc

SEQ ID NO: 879253 - DNA, 15 bp, Homo sapiens
caactttcattacca

SEQ ID NO: 879254 - DNA, 15 bp, Homo sapiens
aactttcattaccat

SEQ ID NO: 879255 - DNA, 15 bp, Homo sapiens
actttcattaccatg

SEQ ID NO: 879256 - DNA, 15 bp, Homo sapiens
ctttcattaccatga

SEQ ID NO: 879257 - DNA, 15 bp, Homo sapiens
tttcattaccatgag

SEQ ID NO: 879258 - DNA, 15 bp, Homo sapiens
ttcattaccatgagc

SEQ ID NO: 879259 - DNA, 15 bp, Homo sapiens
tcattaccatgagct

SEQ ID NO: 879260 - DNA, 15 bp, Homo sapiens
cattaccatgagctc

SEQ ID NO: 879261 - DNA, 15 bp, Homo sapiens
attaccatgagctca

SEQ ID NO: 879262 - DNA, 15 bp, Homo sapiens
ttaccatgagctcaa

SEQ ID NO: 879263 - DNA, 15 bp, Homo sapiens
taccatgagctcaag

SEQ ID NO: 879264 - DNA, 15 bp, Homo sapiens
accatgagctcaagc

SEQ ID NO: 879265 - DNA, 15 bp, Homo sapiens
ccatgagctcaagca

SEQ ID NO: 879266 - DNA, 15 bp, Homo sapiens
catgagctcaagcac

SEQ ID NO: 879267 - DNA, 15 bp, Homo sapiens
atgagctcaagcaca

SEQ ID NO: 879268 - DNA, 15 bp, Homo sapiens
tgagctcaagcacat

SEQ ID NO: 879269 - DNA, 15 bp, Homo sapiens
gagctcaagcacatt

SEQ ID NO: 879270 - DNA, 15 bp, Homo sapiens
agctcaagcacattg

SEQ ID NO: 879271 - DNA, 15 bp, Homo sapiens
gctcaagcacattgt

SEQ ID NO: 879272 - DNA, 15 bp, Homo sapiens
ctcaagcacattgtg

SEQ ID NO: 879273 - DNA, 15 bp, Homo sapiens
tcaagcacattgtgt

SEQ ID NO: 879274 - DNA, 15 bp, Homo sapiens
caagcacattgtgtt

SEQ ID NO: 879275 - DNA, 15 bp, Homo sapiens
aagcacattgtgttt

SEQ ID NO: 879276 - DNA, 15 bp, Homo sapiens
agcacattgtgtttg

SEQ ID NO: 879277 - DNA, 15 bp, Homo sapiens
gcacattgtgtttgt

SEQ ID NO: 879278 - DNA, 15 bp, Homo sapiens
cacattgtgtttgtg

SEQ ID NO: 879279 - DNA, 15 bp, Homo sapiens
acattgtgtttgtgg

SEQ ID NO: 879280 - DNA, 15 bp, Homo sapiens
cattgtgtttgtggg

SEQ ID NO: 879281 - DNA, 15 bp, Homo sapiens
attgtgtttgtgggc

SEQ ID NO: 879282 - DNA, 15 bp, Homo sapiens
ttgtgtttgtgggct

SEQ ID NO: 879283 - DNA, 15 bp, Homo sapiens
tgtgtttgtgggctc

SEQ ID NO: 879284 - DNA, 15 bp, Homo sapiens
gtgtttgtgggctct

SEQ ID NO: 879285 - DNA, 15 bp, Homo sapiens
tgtttgtgggctcta

SEQ ID NO: 879286 - DNA, 15 bp, Homo sapiens
gtttgtgggctctat

SEQ ID NO: 879287 - DNA, 15 bp, Homo sapiens
tttgtgggctctatt

SEQ ID NO: 879288 - DNA, 15 bp, Homo sapiens
ttgtgggctctattg

SEQ ID NO: 879289 - DNA, 15 bp, Homo sapiens
tgtgggctctattga

SEQ ID NO: 879290 - DNA, 15 bp, Homo sapiens
gtgggctctattgag

SEQ ID NO: 879291 - DNA, 15 bp, Homo sapiens
tgggctctattgagt

SEQ ID NO: 879292 - DNA, 15 bp, Homo sapiens
gggctctattgagta

SEQ ID NO: 879293 - DNA, 15 bp, Homo sapiens
ggctctattgagtac

SEQ ID NO: 879294 - DNA, 15 bp, Homo sapiens
gctctattgagtacc

SEQ ID NO: 879295 - DNA, 15 bp, Homo sapiens
ctctattgagtacct

SEQ ID NO: 879296 - DNA, 15 bp, Homo sapiens
tctattgagtacctc

SEQ ID NO: 879297 - DNA, 15 bp, Homo sapiens
ctattgagtacctca

SEQ ID NO: 879298 - DNA, 15 bp, Homo sapiens
tattgagtacctcaa

SEQ ID NO: 879299 - DNA, 15 bp, Homo sapiens
attgagtacctcaag

SEQ ID NO: 879300 - DNA, 15 bp, Homo sapiens
ttgagtacctcaagc

SEQ ID NO: 879301 - DNA, 15 bp, Homo sapiens
tgagtacctcaagcg

SEQ ID NO: 879302 - DNA, 15 bp, Homo sapiens
gagtacctcaagcgg

SEQ ID NO: 879303 - DNA, 15 bp, Homo sapiens
agtacctcaagcggg

SEQ ID NO: 879304 - DNA, 15 bp, Homo sapiens
gtacctcaagcggga

SEQ ID NO: 879305 - DNA, 15 bp, Homo sapiens
tacctcaagcgggaa

SEQ ID NO: 879306 - DNA, 15 bp, Homo sapiens
acctcaagcgggaat

SEQ ID NO: 879307 - DNA, 15 bp, Homo sapiens
cctcaagcgggaatg

SEQ ID NO: 879308 - DNA, 15 bp, Homo sapiens
ctcaagcgggaatgg

SEQ ID NO: 879309 - DNA, 15 bp, Homo sapiens
tcaagcgggaatggg

SEQ ID NO: 879310 - DNA, 15 bp, Homo sapiens
caagcgggaatggga

SEQ ID NO: 879311 - DNA, 15 bp, Homo sapiens
aagcgggaatgggag

SEQ ID NO: 879312 - DNA, 15 bp, Homo sapiens
agcgggaatgggaga

SEQ ID NO: 879313 - DNA, 15 bp, Homo sapiens
gcgggaatgggagac

SEQ ID NO: 879314 - DNA, 15 bp, Homo sapiens
cgggaatgggagacg

SEQ ID NO: 879315 - DNA, 15 bp, Homo sapiens
gggaatgggagacgc

SEQ ID NO: 879316 - DNA, 15 bp, Homo sapiens
ggaatgggagacgct

SEQ ID NO: 879317 - DNA, 15 bp, Homo sapiens
gaatgggagacgctt

SEQ ID NO: 879318 - DNA, 15 bp, Homo sapiens
aatgggagacgcttc

SEQ ID NO: 879319 - DNA, 15 bp, Homo sapiens
atgggagacgcttca

SEQ ID NO: 879320 - DNA, 15 bp, Homo sapiens
tgggagacgcttcat

SEQ ID NO: 879321 - DNA, 15 bp, Homo sapiens
gggagacgcttcata

SEQ ID NO: 879322 - DNA, 15 bp, Homo sapiens
ggagacgcttcataa

SEQ ID NO: 879323 - DNA, 15 bp, Homo sapiens
gagacgcttcataac

SEQ ID NO: 879324 - DNA, 15 bp, Homo sapiens
agacgcttcataact

SEQ ID NO: 879325 - DNA, 15 bp, Homo sapiens
gacgcttcataactt

SEQ ID NO: 879326 - DNA, 15 bp, Homo sapiens
acgcttcataacttc

SEQ ID NO: 879327 - DNA, 15 bp, Homo sapiens
cgcttcataacttcc

SEQ ID NO: 879328 - DNA, 15 bp, Homo sapiens
gcttcataacttccc

SEQ ID NO: 879329 - DNA, 15 bp, Homo sapiens
cttcataacttcccc

SEQ ID NO: 879330 - DNA, 15 bp, Homo sapiens
ttcataacttcccca

SEQ ID NO: 879331 - DNA, 15 bp, Homo sapiens
tcataacttccccaa

SEQ ID NO: 879332 - DNA, 15 bp, Homo sapiens
cataacttccccaaa

SEQ ID NO: 879333 - DNA, 15 bp, Homo sapiens
ataacttccccaaag

SEQ ID NO: 879334 - DNA, 15 bp, Homo sapiens
taacttccccaaagt

SEQ ID NO: 879335 - DNA, 15 bp, Homo sapiens
aacttccccaaagtg

SEQ ID NO: 879336 - DNA, 15 bp, Homo sapiens
acttccccaaagtgt

SEQ ID NO: 879337 - DNA, 15 bp, Homo sapiens
cttccccaaagtgtc

SEQ ID NO: 879338 - DNA, 15 bp, Homo sapiens
ttccccaaagtgtcc

SEQ ID NO: 879339 - DNA, 15 bp, Homo sapiens
tccccaaagtgtcca

SEQ ID NO: 879340 - DNA, 15 bp, Homo sapiens
ccccaaagtgtccat

SEQ ID NO: 879341 - DNA, 15 bp, Homo sapiens
cccaaagtgtccata

SEQ ID NO: 879342 - DNA, 15 bp, Homo sapiens
ccaaagtgtccatat

SEQ ID NO: 879343 - DNA, 15 bp, Homo sapiens
caaagtgtccatatt

SEQ ID NO: 879344 - DNA, 15 bp, Homo sapiens
aaagtgtccatattg

SEQ ID NO: 879345 - DNA, 15 bp, Homo sapiens
aagtgtccatattgc

SEQ ID NO: 879346 - DNA, 15 bp, Homo sapiens
agtgtccatattgcc

SEQ ID NO: 879347 - DNA, 15 bp, Homo sapiens
gtgtccatattgcct

SEQ ID NO: 879348 - DNA, 15 bp, Homo sapiens
tgtccatattgcctg

SEQ ID NO: 879349 - DNA, 15 bp, Homo sapiens
gtccatattgcctgt

SEQ ID NO: 879350 - DNA, 15 bp, Homo sapiens
tccatattgcctgta

SEQ ID NO: 879351 - DNA, 15 bp, Homo sapiens
ccatattgcctgtaa

SEQ ID NO: 879352 - DNA, 15 bp, Homo sapiens
catattgcctgtaag

SEQ ID NO: 879353 - DNA, 15 bp, Homo sapiens
atattgcctgtaagt

SEQ ID NO: 879354 - DNA, 15 bp, Homo sapiens
tattgcctgtaagtc

SEQ ID NO: 879355 - DNA, 15 bp, Homo sapiens
attgcctgtaagtcc

SEQ ID NO: 879356 - DNA, 15 bp, Homo sapiens
ttgcctgtaagtcca

SEQ ID NO: 879357 - DNA, 15 bp, Homo sapiens
tgcctgtaagtccaa

SEQ ID NO: 879358 - DNA, 15 bp, Homo sapiens
gcctgtaagtccaag

SEQ ID NO: 879359 - DNA, 15 bp, Homo sapiens
cctgtaagtccaagg

SEQ ID NO: 879360 - DNA, 15 bp, Homo sapiens
ctgtaagtccaaggt

SEQ ID NO: 879361 - DNA, 15 bp, Homo sapiens
tgtaagtccaaggtc

SEQ ID NO: 879362 - DNA, 15 bp, Homo sapiens
gtaagtccaaggtca

SEQ ID NO: 879363 - DNA, 15 bp, Homo sapiens
taagtccaaggtcac

SEQ ID NO: 879364 - DNA, 15 bp, Homo sapiens
aagtccaaggtcaca

SEQ ID NO: 879365 - DNA, 15 bp, Homo sapiens
agtccaaggtcacat

SEQ ID NO: 879366 - DNA, 15 bp, Homo sapiens
gtccaaggtcacatt

SEQ ID NO: 879367 - DNA, 15 bp, Homo sapiens
tccaaggtcacatta

SEQ ID NO: 879368 - DNA, 15 bp, Homo sapiens
ccaaggtcacattat

SEQ ID NO: 879369 - DNA, 15 bp, Homo sapiens
caaggtcacattatt

SEQ ID NO: 879370 - DNA, 15 bp, Homo sapiens
aaggtcacattattg

SEQ ID NO: 879371 - DNA, 15 bp, Homo sapiens
aggtcacattattga

SEQ ID NO: 879372 - DNA, 15 bp, Homo sapiens
ggtcacattattgat

SEQ ID NO: 879373 - DNA, 15 bp, Homo sapiens
gtcacattattgatg

SEQ ID NO: 879374 - DNA, 15 bp, Homo sapiens
tcacattattgatgc

SEQ ID NO: 879375 - DNA, 15 bp, Homo sapiens
cacattattgatgcc

SEQ ID NO: 879376 - DNA, 15 bp, Homo sapiens
acattattgatgcct

SEQ ID NO: 879377 - DNA, 15 bp, Homo sapiens
cattattgatgcctt

SEQ ID NO: 879378 - DNA, 15 bp, Homo sapiens
attattgatgccttt

SEQ ID NO: 879379 - DNA, 15 bp, Homo sapiens
ttattgatgcctttt

SEQ ID NO: 879380 - DNA, 15 bp, Homo sapiens
tattgatgccttttc

SEQ ID NO: 879381 - DNA, 15 bp, Homo sapiens
attgatgccttttct

SEQ ID NO: 879382 - DNA, 15 bp, Homo sapiens
ttgatgccttttctt

SEQ ID NO: 879383 - DNA, 15 bp, Homo sapiens
tgatgccttttcttc

SEQ ID NO: 879384 - DNA, 15 bp, Homo sapiens
gatgccttttcttct

SEQ ID NO: 879385 - DNA, 15 bp, Homo sapiens
atgccttttcttctt

SEQ ID NO: 879386 - DNA, 15 bp, Homo sapiens
tgccttttcttcttt

SEQ ID NO: 879387 - DNA, 15 bp, Homo sapiens
gccttttcttctttt

SEQ ID NO: 879388 - DNA, 15 bp, Homo sapiens
ccttttcttcttttc

SEQ ID NO: 879389 - DNA, 15 bp, Homo sapiens
cttttcttcttttca

SEQ ID NO: 879390 - DNA, 15 bp, Homo sapiens
tcttcttttcattca

SEQ ID NO: 879391 - DNA, 15 bp, Homo sapiens
cttcttttcattcac

SEQ ID NO: 879392 - DNA, 15 bp, Homo sapiens
ttcttttcattcaca

SEQ ID NO: 879393 - DNA, 15 bp, Homo sapiens
tcttttcattcacaa

SEQ ID NO: 879394 - DNA, 15 bp, Homo sapiens
cttttcattcacaaa

SEQ ID NO: 879395 - DNA, 15 bp, Homo sapiens
ttttcattcacaaaa

SEQ ID NO: 879396 - DNA, 15 bp, Homo sapiens
tttcattcacaaaag

SEQ ID NO: 879397 - DNA, 15 bp, Homo sapiens
ttcattcacaaaaga

SEQ ID NO: 879398 - DNA, 15 bp, Homo sapiens
tcattcacaaaagaa

SEQ ID NO: 879399 - DNA, 15 bp, Homo sapiens
cattcacaaaagaaa

SEQ ID NO: 879400 - DNA, 15 bp, Homo sapiens
ttcacaaaagaaaat

SEQ ID NO: 879401 - DNA, 15 bp, Homo sapiens
tcacaaaagaaaatc

SEQ ID NO: 879402 - DNA, 15 bp, Homo sapiens
cacaaaagaaaatcc

SEQ ID NO: 879403 - DNA, 15 bp, Homo sapiens
acaaaagaaaatccc

SEQ ID NO: 879404 - DNA, 15 bp, Homo sapiens
caaaagaaaatcccg

SEQ ID NO: 879405 - DNA, 15 bp, Homo sapiens
aaaagaaaatcccgg

SEQ ID NO: 879406 - DNA, 15 bp, Homo sapiens
aaagaaaatcccgga

SEQ ID NO: 879407 - DNA, 15 bp, Homo sapiens
aagaaaatcccggat

SEQ ID NO: 879408 - DNA, 15 bp, Homo sapiens
agaaaatcccggatg

SEQ ID NO: 879409 - DNA, 15 bp, Homo sapiens
gaaaatcccggatgg

SEQ ID NO: 879410 - DNA, 15 bp, Homo sapiens
aaaatcccggatgga

SEQ ID NO: 879411 - DNA, 15 bp, Homo sapiens
aaatcccggatggat

SEQ ID NO: 879412 - DNA, 15 bp, Homo sapiens
aatcccggatggata

SEQ ID NO: 879413 - DNA, 15 bp, Homo sapiens
atcccggatggatat

SEQ ID NO: 879414 - DNA, 15 bp, Homo sapiens
tcccggatggatata

SEQ ID NO: 879415 - DNA, 15 bp, Homo sapiens
cccggatggatataa

SEQ ID NO: 879416 - DNA, 15 bp, Homo sapiens
ccggatggatataat

SEQ ID NO: 879417 - DNA, 15 bp, Homo sapiens
cggatggatataata

SEQ ID NO: 879418 - DNA, 15 bp, Homo sapiens
ggatggatataatag

SEQ ID NO: 879419 - DNA, 15 bp, Homo sapiens
gatggatataatagt

SEQ ID NO: 879420 - DNA, 15 bp, Homo sapiens
atggatataatagtt

SEQ ID NO: 879421 - DNA, 15 bp, Homo sapiens
tggatataatagttg

SEQ ID NO: 879422 - DNA, 15 bp, Homo sapiens
ggatataatagttgt

SEQ ID NO: 879423 - DNA, 15 bp, Homo sapiens
gatataatagttgta

SEQ ID NO: 879424 - DNA, 15 bp, Homo sapiens
atataatagttgtag

SEQ ID NO: 879425 - DNA, 15 bp, Homo sapiens
tataatagttgtagc

SEQ ID NO: 879426 - DNA, 15 bp, Homo sapiens
ataatagttgtagct

SEQ ID NO: 879427 - DNA, 15 bp, Homo sapiens
taatagttgtagctt

SEQ ID NO: 879428 - DNA, 15 bp, Homo sapiens
aatagttgtagcttt

SEQ ID NO: 879429 - DNA, 15 bp, Homo sapiens
atagttgtagctttg

SEQ ID NO: 879430 - DNA, 15 bp, Homo sapiens
tagttgtagctttga

SEQ ID NO: 879431 - DNA, 15 bp, Homo sapiens
agttgtagctttgat

SEQ ID NO: 879432 - DNA, 15 bp, Homo sapiens
gttgtagctttgatc

SEQ ID NO: 879433 - DNA, 15 bp, Homo sapiens
ttgtagctttgatca

SEQ ID NO: 879434 - DNA, 15 bp, Homo sapiens
tgtagctttgatcat

SEQ ID NO: 879435 - DNA, 15 bp, Homo sapiens
gtagctttgatcatg

SEQ ID NO: 879436 - DNA, 15 bp, Homo sapiens
tagctttgatcatgc

SEQ ID NO: 879437 - DNA, 15 bp, Homo sapiens
agctttgatcatgcc

SEQ ID NO: 879438 - DNA, 15 bp, Homo sapiens
gctttgatcatgcct

SEQ ID NO: 879439 - DNA, 15 bp, Homo sapiens
ctttgatcatgcctg

SEQ ID NO: 879440 - DNA, 15 bp, Homo sapiens
tttgatcatgcctgt

SEQ ID NO: 879441 - DNA, 15 bp, Homo sapiens
ttgatcatgcctgtg

SEQ ID NO: 879442 - DNA, 15 bp, Homo sapiens
tgatcatgcctgtgc

SEQ ID NO: 879443 - DNA, 15 bp, Homo sapiens
gatcatgcctgtgct

SEQ ID NO: 879444 - DNA, 15 bp, Homo sapiens
atcatgcctgtgctt

SEQ ID NO: 879445 - DNA, 15 bp, Homo sapiens
tcatgcctgtgcttc

SEQ ID NO: 879446 - DNA, 15 bp, Homo sapiens
catgcctgtgcttct

SEQ ID NO: 879447 - DNA, 15 bp, Homo sapiens
atgcctgtgcttctt

SEQ ID NO: 879448 - DNA, 15 bp, Homo sapiens
tgcctgtgcttcttc

SEQ ID NO: 879449 - DNA, 15 bp, Homo sapiens
gcctgtgcttcttca

SEQ ID NO: 879450 - DNA, 15 bp, Homo sapiens
cctgtgcttcttcat

SEQ ID NO: 879451 - DNA, 15 bp, Homo sapiens
ctgtgcttcttcatc

SEQ ID NO: 879452 - DNA, 15 bp, Homo sapiens
tgtgcttcttcatct

SEQ ID NO: 879453 - DNA, 15 bp, Homo sapiens
gtgcttcttcatctg

SEQ ID NO: 879454 - DNA, 15 bp, Homo sapiens
tgcttcttcatctgg

SEQ ID NO: 879455 - DNA, 15 bp, Homo sapiens
gcttcttcatctggg

SEQ ID NO: 879456 - DNA, 15 bp, Homo sapiens
cttcttcatctgggt

SEQ ID NO: 879457 - DNA, 15 bp, Homo sapiens
ttcttcatctgggta

SEQ ID NO: 879458 - DNA, 15 bp, Homo sapiens
tcttcatctgggtat

SEQ ID NO: 879459 - DNA, 15 bp, Homo sapiens
cttcatctgggtatg

SEQ ID NO: 879460 - DNA, 15 bp, Homo sapiens
ttcatctgggtatgg

SEQ ID NO: 879461 - DNA, 15 bp, Homo sapiens
tcatctgggtatggg

SEQ ID NO: 879462 - DNA, 15 bp, Homo sapiens
catctgggtatgggc

SEQ ID NO: 879463 - DNA, 15 bp, Homo sapiens
atctgggtatgggcc

SEQ ID NO: 879464 - DNA, 15 bp, Homo sapiens
tctgggtatgggcct

SEQ ID NO: 879465 - DNA, 15 bp, Homo sapiens
ctgggtatgggcctg

SEQ ID NO: 879466 - DNA, 15 bp, Homo sapiens
tgggtatgggcctga

SEQ ID NO: 879467 - DNA, 15 bp, Homo sapiens
gggtatgggcctgag

SEQ ID NO: 879468 - DNA, 15 bp, Homo sapiens
ggtatgggcctgagg

SEQ ID NO: 879469 - DNA, 15 bp, Homo sapiens
gtatgggcctgagga

SEQ ID NO: 879470 - DNA, 15 bp, Homo sapiens
tatgggcctgaggac

SEQ ID NO: 879471 - DNA, 15 bp, Homo sapiens
atgggcctgaggact

SEQ ID NO: 879472 - DNA, 15 bp, Homo sapiens
tgggcctgaggactc

SEQ ID NO: 879473 - DNA, 15 bp, Homo sapiens
gggcctgaggactca

SEQ ID NO: 879474 - DNA, 15 bp, Homo sapiens
ggcctgaggactcag

SEQ ID NO: 879475 - DNA, 15 bp, Homo sapiens
gcctgaggactcagc

SEQ ID NO: 879476 - DNA, 15 bp, Homo sapiens
cctgaggactcagca

SEQ ID NO: 879477 - DNA, 15 bp, Homo sapiens
ctgaggactcagcac

SEQ ID NO: 879478 - DNA, 15 bp, Homo sapiens
tgaggactcagcact

SEQ ID NO: 879479 - DNA, 15 bp, Homo sapiens
gaggactcagcactt

SEQ ID NO: 879480 - DNA, 15 bp, Homo sapiens
aggactcagcacttc

SEQ ID NO: 879481 - DNA, 15 bp, Homo sapiens
ggactcagcacttcc

SEQ ID NO: 879482 - DNA, 15 bp, Homo sapiens
gactcagcacttccc

SEQ ID NO: 879483 - DNA, 15 bp, Homo sapiens
actcagcacttcccc

SEQ ID NO: 879484 - DNA, 15 bp, Homo sapiens
ctcagcacttcccct

SEQ ID NO: 879485 - DNA, 15 bp, Homo sapiens
tcagcacttccccta

SEQ ID NO: 879486 - DNA, 15 bp, Homo sapiens
cagcacttcccctat

SEQ ID NO: 879487 - DNA, 15 bp, Homo sapiens
agcacttcccctatg

SEQ ID NO: 879488 - DNA, 15 bp, Homo sapiens
gcacttcccctatgc

SEQ ID NO: 879489 - DNA, 15 bp, Homo sapiens
cacttcccctatgct

SEQ ID NO: 879490 - DNA, 15 bp, Homo sapiens
acttcccctatgctc

SEQ ID NO: 879491 - DNA, 15 bp, Homo sapiens
cttcccctatgctct

SEQ ID NO: 879492 - DNA, 15 bp, Homo sapiens
ttcccctatgctctg

SEQ ID NO: 879493 - DNA, 15 bp, Homo sapiens
tcccctatgctctgt

SEQ ID NO: 879494 - DNA, 15 bp, Homo sapiens
cccctatgctctgtc

SEQ ID NO: 879495 - DNA, 15 bp, Homo sapiens
ccctatgctctgtca

SEQ ID NO: 879496 - DNA, 15 bp, Homo sapiens
cctatgctctgtcaa

SEQ ID NO: 879497 - DNA, 15 bp, Homo sapiens
ctatgctctgtcaag

SEQ ID NO: 879498 - DNA, 15 bp, Homo sapiens
tatgctctgtcaagg

SEQ ID NO: 879499 - DNA, 15 bp, Homo sapiens
atgctctgtcaagga

SEQ ID NO: 879500 - DNA, 15 bp, Homo sapiens
tgctctgtcaaggaa

SEQ ID NO: 879501 - DNA, 15 bp, Homo sapiens
gctctgtcaaggaaa

SEQ ID NO: 879502 - DNA, 15 bp, Homo sapiens
ctctgtcaaggaaaa

SEQ ID NO: 879503 - DNA, 15 bp, Homo sapiens
tctgtcaaggaaaat

SEQ ID NO: 879504 - DNA, 15 bp, Homo sapiens
ctgtcaaggaaaatc

SEQ ID NO: 879505 - DNA, 15 bp, Homo sapiens
tgtcaaggaaaatcc

SEQ ID NO: 879506 - DNA, 15 bp, Homo sapiens
gtcaaggaaaatcca

SEQ ID NO: 879507 - DNA, 15 bp, Homo sapiens
tcaaggaaaatccaa

SEQ ID NO: 879508 - DNA, 15 bp, Homo sapiens
caaggaaaatccaaa

SEQ ID NO: 879509 - DNA, 15 bp, Homo sapiens
aaggaaaatccaaac

SEQ ID NO: 879510 - DNA, 15 bp, Homo sapiens
aggaaaatccaaacc

SEQ ID NO: 879511 - DNA, 15 bp, Homo sapiens
ggaaaatccaaaccc

SEQ ID NO: 879512 - DNA, 15 bp, Homo sapiens
gaaaatccaaaccct

SEQ ID NO: 879513 - DNA, 15 bp, Homo sapiens
aaaatccaaaccctg

SEQ ID NO: 879514 - DNA, 15 bp, Homo sapiens
aaatccaaaccctgg

SEQ ID NO: 879515 - DNA, 15 bp, Homo sapiens
aatccaaaccctggg

SEQ ID NO: 879516 - DNA, 15 bp, Homo sapiens
atccaaaccctggga

SEQ ID NO: 879517 - DNA, 15 bp, Homo sapiens
tccaaaccctgggag

SEQ ID NO: 879518 - DNA, 15 bp, Homo sapiens
ccaaaccctgggaga

SEQ ID NO: 879519 - DNA, 15 bp, Homo sapiens
caaaccctgggagac

SEQ ID NO: 879520 - DNA, 15 bp, Homo sapiens
aaaccctgggagacc

SEQ ID NO: 879521 - DNA, 15 bp, Homo sapiens
aaccctgggagacct

SEQ ID NO: 879522 - DNA, 15 bp, Homo sapiens
accctgggagacctt

SEQ ID NO: 879523 - DNA, 15 bp, Homo sapiens
ccctgggagacctta

SEQ ID NO: 879524 - DNA, 15 bp, Homo sapiens
cctgggagaccttat

SEQ ID NO: 879525 - DNA, 15 bp, Homo sapiens
ctgggagaccttatt

SEQ ID NO: 879526 - DNA, 15 bp, Homo sapiens
tgggagaccttatta

SEQ ID NO: 879527 - DNA, 15 bp, Homo sapiens
gggagaccttattaa

SEQ ID NO: 879528 - DNA, 15 bp, Homo sapiens
ggagaccttattaaa

SEQ ID NO: 879529 - DNA, 15 bp, Homo sapiens
gagaccttattaaaa

SEQ ID NO: 879530 - DNA, 15 bp, Homo sapiens
agaccttattaaaag

SEQ ID NO: 879531 - DNA, 15 bp, Homo sapiens
gaccttattaaaagg

SEQ ID NO: 879532 - DNA, 15 bp, Homo sapiens
accttattaaaagga

SEQ ID NO: 879533 - DNA, 15 bp, Homo sapiens
ccttattaaaaggaa

SEQ ID NO: 879534 - DNA, 15 bp, Homo sapiens
cttattaaaaggaat

SEQ ID NO: 879535 - DNA, 15 bp, Homo sapiens
ttattaaaaggaatt

SEQ ID NO: 879536 - DNA, 15 bp, Homo sapiens
tattaaaaggaattt

SEQ ID NO: 879537 - DNA, 15 bp, Homo sapiens
attaaaaggaatttg

SEQ ID NO: 879538 - DNA, 15 bp, Homo sapiens
ttaaaaggaatttgc

SEQ ID NO: 879539 - DNA, 15 bp, Homo sapiens
taaaaggaatttgca

SEQ ID NO: 879540 - DNA, 15 bp, Homo sapiens
aaaaggaatttgcag

SEQ ID NO: 879541 - DNA, 15 bp, Homo sapiens
aaaggaatttgcagc

SEQ ID NO: 879542 - DNA, 15 bp, Homo sapiens
aaggaatttgcagcc

SEQ ID NO: 879543 - DNA, 15 bp, Homo sapiens
aggaatttgcagcca

SEQ ID NO: 879544 - DNA, 15 bp, Homo sapiens
ggaatttgcagccaa

SEQ ID NO: 879545 - DNA, 15 bp, Homo sapiens
gaatttgcagccaag

SEQ ID NO: 879546 - DNA, 15 bp, Homo sapiens
aatttgcagccaagt

SEQ ID NO: 879547 - DNA, 15 bp, Homo sapiens
atttgcagccaagtt

SEQ ID NO: 879548 - DNA, 15 bp, Homo sapiens
tttgcagccaagttc

SEQ ID NO: 879549 - DNA, 15 bp, Homo sapiens
ttgcagccaagttca

SEQ ID NO: 879550 - DNA, 15 bp, Homo sapiens
tgcagccaagttcag

SEQ ID NO: 879551 - DNA, 15 bp, Homo sapiens
gcagccaagttcagt

SEQ ID NO: 879552 - DNA, 15 bp, Homo sapiens
cagccaagttcagtc

SEQ ID NO: 879553 - DNA, 15 bp, Homo sapiens
agccaagttcagtcc

SEQ ID NO: 879554 - DNA, 15 bp, Homo sapiens
gccaagttcagtccc

SEQ ID NO: 879555 - DNA, 15 bp, Homo sapiens
ccaagttcagtccct

SEQ ID NO: 879556 - DNA, 15 bp, Homo sapiens
caagttcagtccctc

SEQ ID NO: 879557 - DNA, 15 bp, Homo sapiens
aagttcagtccctca

SEQ ID NO: 879558 - DNA, 15 bp, Homo sapiens
agttcagtccctcat

SEQ ID NO: 879559 - DNA, 15 bp, Homo sapiens
gttcagtccctcatc

SEQ ID NO: 879560 - DNA, 15 bp, Homo sapiens
ttcagtccctcatca

SEQ ID NO: 879561 - DNA, 15 bp, Homo sapiens
tcagtccctcatcag

SEQ ID NO: 879562 - DNA, 15 bp, Homo sapiens
cagtccctcatcagg

SEQ ID NO: 879563 - DNA, 15 bp, Homo sapiens
agtccctcatcaggg

SEQ ID NO: 879564 - DNA, 15 bp, Homo sapiens
gtccctcatcaggga

SEQ ID NO: 879565 - DNA, 15 bp, Homo sapiens
tccctcatcagggat

SEQ ID NO: 879566 - DNA, 15 bp, Homo sapiens
ccctcatcagggatg

SEQ ID NO: 879567 - DNA, 15 bp, Homo sapiens
cctcatcagggatga

SEQ ID NO: 879568 - DNA, 15 bp, Homo sapiens
ctcatcagggatgaa

SEQ ID NO: 879569 - DNA, 15 bp, Homo sapiens
tcatcagggatgaag

SEQ ID NO: 879570 - DNA, 15 bp, Homo sapiens
catcagggatgaagt

SEQ ID NO: 879571 - DNA, 15 bp, Homo sapiens
atcagggatgaagtt

SEQ ID NO: 879572 - DNA, 15 bp, Homo sapiens
tcagggatgaagttt

SEQ ID NO: 879573 - DNA, 15 bp, Homo sapiens
cagggatgaagttta

SEQ ID NO: 879574 - DNA, 15 bp, Homo sapiens
agggatgaagtttag

SEQ ID NO: 879575 - DNA, 15 bp, Homo sapiens
gggatgaagtttagc

SEQ ID NO: 879576 - DNA, 15 bp, Homo sapiens
ggatgaagtttagct

SEQ ID NO: 879577 - DNA, 15 bp, Homo sapiens
gatgaagtttagctt

SEQ ID NO: 879578 - DNA, 15 bp, Homo sapiens
atgaagtttagcttg

SEQ ID NO: 879579 - DNA, 15 bp, Homo sapiens
tgaagtttagcttgt

SEQ ID NO: 879580 - DNA, 15 bp, Homo sapiens
gaagtttagcttgta

SEQ ID NO: 879581 - DNA, 15 bp, Homo sapiens
aagtttagcttgtat

SEQ ID NO: 879582 - DNA, 15 bp, Homo sapiens
agtttagcttgtatc

SEQ ID NO: 879583 - DNA, 15 bp, Homo sapiens
gtttagcttgtatca

SEQ ID NO: 879584 - DNA, 15 bp, Homo sapiens
tttagcttgtatcaa

SEQ ID NO: 879585 - DNA, 15 bp, Homo sapiens
ttagcttgtatcaag

SEQ ID NO: 879586 - DNA, 15 bp, Homo sapiens
tagcttgtatcaagt

SEQ ID NO: 879587 - DNA, 15 bp, Homo sapiens
agcttgtatcaagta

SEQ ID NO: 879588 - DNA, 15 bp, Homo sapiens
gcttgtatcaagtat

SEQ ID NO: 879589 - DNA, 15 bp, Homo sapiens
cttgtatcaagtata

SEQ ID NO: 879590 - DNA, 15 bp, Homo sapiens
ttgtatcaagtatat

SEQ ID NO: 879591 - DNA, 15 bp, Homo sapiens
tgtatcaagtatatt

SEQ ID NO: 879592 - DNA, 15 bp, Homo sapiens
gtatcaagtatatta

SEQ ID NO: 879593 - DNA, 15 bp, Homo sapiens
tatcaagtatattaa

SEQ ID NO: 879594 - DNA, 15 bp, Homo sapiens
atcaagtatattaac

SEQ ID NO: 879595 - DNA, 15 bp, Homo sapiens
tcaagtatattaacc

SEQ ID NO: 879596 - DNA, 15 bp, Homo sapiens
caagtatattaacca

SEQ ID NO: 879597 - DNA, 15 bp, Homo sapiens
aagtatattaaccat

SEQ ID NO: 879598 - DNA, 15 bp, Homo sapiens
agtatattaaccata

SEQ ID NO: 879599 - DNA, 15 bp, Homo sapiens
gtatattaaccatat

SEQ ID NO: 879600 - DNA, 15 bp, Homo sapiens
tatattaaccatatc

SEQ ID NO: 879601 - DNA, 15 bp, Homo sapiens
atattaaccatatca

SEQ ID NO: 879602 - DNA, 15 bp, Homo sapiens
tattaaccatatcag

SEQ ID NO: 879603 - DNA, 15 bp, Homo sapiens
attaaccatatcagc

SEQ ID NO: 879604 - DNA, 15 bp, Homo sapiens
ttaaccatatcagcg

SEQ ID NO: 879605 - DNA, 15 bp, Homo sapiens
taaccatatcagcgt

SEQ ID NO: 879606 - DNA, 15 bp, Homo sapiens
aaccatatcagcgtc

SEQ ID NO: 879607 - DNA, 15 bp, Homo sapiens
accatatcagcgtct

SEQ ID NO: 879608 - DNA, 15 bp, Homo sapiens
ccatatcagcgtcta

SEQ ID NO: 879609 - DNA, 15 bp, Homo sapiens
catatcagcgtctaa

SEQ ID NO: 879610 - DNA, 15 bp, Homo sapiens
atatcagcgtctaaa

SEQ ID NO: 879611 - DNA, 15 bp, Homo sapiens
tatcagcgtctaaac

SEQ ID NO: 879612 - DNA, 15 bp, Homo sapiens
atcagcgtctaaaca

SEQ ID NO: 879613 - DNA, 15 bp, Homo sapiens
tcagcgtctaaacac

SEQ ID NO: 879614 - DNA, 15 bp, Homo sapiens
cagcgtctaaacact

SEQ ID NO: 879615 - DNA, 15 bp, Homo sapiens
agcgtctaaacactc

SEQ ID NO: 879616 - DNA, 15 bp, Homo sapiens
gcgtctaaacactct

SEQ ID NO: 879617 - DNA, 15 bp, Homo sapiens
cgtctaaacactctc

SEQ ID NO: 879618 - DNA, 15 bp, Homo sapiens
gtctaaacactctca

SEQ ID NO: 879619 - DNA, 15 bp, Homo sapiens
tctaaacactctcac

SEQ ID NO: 879620 - DNA, 15 bp, Homo sapiens
ctaaacactctcact

SEQ ID NO: 879621 - DNA, 15 bp, Homo sapiens
taaacactctcactc

SEQ ID NO: 879622 - DNA, 15 bp, Homo sapiens
aaacactctcactcc

SEQ ID NO: 879623 - DNA, 15 bp, Homo sapiens
aacactctcactcct

SEQ ID NO: 879624 - DNA, 15 bp, Homo sapiens
acactctcactcctg

SEQ ID NO: 879625 - DNA, 15 bp, Homo sapiens
cactctcactcctgc

SEQ ID NO: 879626 - DNA, 15 bp, Homo sapiens
actctcactcctgcc

SEQ ID NO: 879627 - DNA, 15 bp, Homo sapiens
ctctcactcctgcct

SEQ ID NO: 879628 - DNA, 15 bp, Homo sapiens
tctcactcctgccta

SEQ ID NO: 879629 - DNA, 15 bp, Homo sapiens
ctcactcctgcctat

SEQ ID NO: 879630 - DNA, 15 bp, Homo sapiens
tcactcctgcctata

SEQ ID NO: 879631 - DNA, 15 bp, Homo sapiens
cactcctgcctatac

SEQ ID NO: 879632 - DNA, 15 bp, Homo sapiens
actcctgcctataca

SEQ ID NO: 879633 - DNA, 15 bp, Homo sapiens
ctcctgcctatacaa

SEQ ID NO: 879634 - DNA, 15 bp, Homo sapiens
tcctgcctatacaaa

SEQ ID NO: 879635 - DNA, 15 bp, Homo sapiens
cctgcctatacaaaa

SEQ ID NO: 879636 - DNA, 15 bp, Homo sapiens
ctgcctatacaaaac

SEQ ID NO: 879637 - DNA, 15 bp, Homo sapiens
tgcctatacaaaacc

SEQ ID NO: 879638 - DNA, 15 bp, Homo sapiens
gcctatacaaaacct

SEQ ID NO: 879639 - DNA, 15 bp, Homo sapiens
cctatacaaaaccta

SEQ ID NO: 879640 - DNA, 15 bp, Homo sapiens
ctatacaaaacctag

SEQ ID NO: 879641 - DNA, 15 bp, Homo sapiens
tatacaaaacctaga

SEQ ID NO: 879642 - DNA, 15 bp, Homo sapiens
atacaaaacctagag

SEQ ID NO: 879643 - DNA, 15 bp, Homo sapiens
tacaaaacctagagc

SEQ ID NO: 879644 - DNA, 15 bp, Homo sapiens
acaaaacctagagca

SEQ ID NO: 879645 - DNA, 15 bp, Homo sapiens
caaaacctagagcat

SEQ ID NO: 879646 - DNA, 15 bp, Homo sapiens
aaaacctagagcatt

SEQ ID NO: 879647 - DNA, 15 bp, Homo sapiens
aaacctagagcattg

SEQ ID NO: 879648 - DNA, 15 bp, Homo sapiens
aacctagagcattgt

SEQ ID NO: 879649 - DNA, 15 bp, Homo sapiens
acctagagcattgtt

SEQ ID NO: 879650 - DNA, 15 bp, Homo sapiens
cctagagcattgtta

SEQ ID NO: 879651 - DNA, 15 bp, Homo sapiens
ctagagcattgttat

SEQ ID NO: 879652 - DNA, 15 bp, Homo sapiens
tagagcattgttata

SEQ ID NO: 879653 - DNA, 15 bp, Homo sapiens
agagcattgttatat

SEQ ID NO: 879654 - DNA, 15 bp, Homo sapiens
gagcattgttatatt

SEQ ID NO: 879655 - DNA, 15 bp, Homo sapiens
agcattgttatatta

SEQ ID NO: 879656 - DNA, 15 bp, Homo sapiens
gcattgttatattat

SEQ ID NO: 879657 - DNA, 15 bp, Homo sapiens
cattgttatattatg

SEQ ID NO: 879658 - DNA, 15 bp, Homo sapiens
attgttatattatga

SEQ ID NO: 879659 - DNA, 15 bp, Homo sapiens
ttgttatattatgat

SEQ ID NO: 879660 - DNA, 15 bp, Homo sapiens
tgttatattatgatg

SEQ ID NO: 879661 - DNA, 15 bp, Homo sapiens
gttatattatgatgt

SEQ ID NO: 879662 - DNA, 15 bp, Homo sapiens
ttatattatgatgtt

SEQ ID NO: 879663 - DNA, 15 bp, Homo sapiens
tatattatgatgttt

SEQ ID NO: 879664 - DNA, 15 bp, Homo sapiens
atattatgatgttta

SEQ ID NO: 879665 - DNA, 15 bp, Homo sapiens
tattatgatgtttat

SEQ ID NO: 879666 - DNA, 15 bp, Homo sapiens
attatgatgtttata

SEQ ID NO: 879667 - DNA, 15 bp, Homo sapiens
ttatgatgtttatag

SEQ ID NO: 879668 - DNA, 15 bp, Homo sapiens
tatgatgtttatagt

SEQ ID NO: 879669 - DNA, 15 bp, Homo sapiens
atgatgtttatagta

SEQ ID NO: 879670 - DNA, 15 bp, Homo sapiens
tgatgtttatagtaa

SEQ ID NO: 879671 - DNA, 15 bp, Homo sapiens
gatgtttatagtaag

SEQ ID NO: 879672 - DNA, 15 bp, Homo sapiens
atgtttatagtaagg

SEQ ID NO: 879673 - DNA, 15 bp, Homo sapiens
tgtttatagtaagga

SEQ ID NO: 879674 - DNA, 15 bp, Homo sapiens
gtttatagtaaggat

SEQ ID NO: 879675 - DNA, 15 bp, Homo sapiens
tttatagtaaggatt

SEQ ID NO: 879676 - DNA, 15 bp, Homo sapiens
ttatagtaaggattt

SEQ ID NO: 879677 - DNA, 15 bp, Homo sapiens
tatagtaaggatttg

SEQ ID NO: 879678 - DNA, 15 bp, Homo sapiens
atagtaaggatttgc

SEQ ID NO: 879679 - DNA, 15 bp, Homo sapiens
tagtaaggatttgct

SEQ ID NO: 879680 - DNA, 15 bp, Homo sapiens
agtaaggatttgctt

SEQ ID NO: 879681 - DNA, 15 bp, Homo sapiens
gtaaggatttgctta

SEQ ID NO: 879682 - DNA, 15 bp, Homo sapiens
taaggatttgcttac

SEQ ID NO: 879683 - DNA, 15 bp, Homo sapiens
aaggatttgcttaca

SEQ ID NO: 879684 - DNA, 15 bp, Homo sapiens
aggatttgcttacag

SEQ ID NO: 879685 - DNA, 15 bp, Homo sapiens
ggatttgcttacaga

SEQ ID NO: 879686 - DNA, 15 bp, Homo sapiens
gatttgcttacagaa

SEQ ID NO: 879687 - DNA, 15 bp, Homo sapiens
atttgcttacagaac

SEQ ID NO: 879688 - DNA, 15 bp, Homo sapiens
tttgcttacagaact

SEQ ID NO: 879689 - DNA, 15 bp, Homo sapiens
ttgcttacagaacta

SEQ ID NO: 879690 - DNA, 15 bp, Homo sapiens
tgcttacagaactat

SEQ ID NO: 879691 - DNA, 15 bp, Homo sapiens
gcttacagaactatt

SEQ ID NO: 879692 - DNA, 15 bp, Homo sapiens
cttacagaactattt

SEQ ID NO: 879693 - DNA, 15 bp, Homo sapiens
ttacagaactattta

SEQ ID NO: 879694 - DNA, 15 bp, Homo sapiens
tacagaactatttat

SEQ ID NO: 879695 - DNA, 15 bp, Homo sapiens
acagaactatttata

SEQ ID NO: 879696 - DNA, 15 bp, Homo sapiens
cagaactatttatag

SEQ ID NO: 879697 - DNA, 15 bp, Homo sapiens
agaactatttatagc

SEQ ID NO: 879698 - DNA, 15 bp, Homo sapiens
gaactatttatagca

SEQ ID NO: 879699 - DNA, 15 bp, Homo sapiens
aactatttatagcat

SEQ ID NO: 879700 - DNA, 15 bp, Homo sapiens
actatttatagcatt

SEQ ID NO: 879701 - DNA, 15 bp, Homo sapiens
ctatttatagcatta

SEQ ID NO: 879702 - DNA, 15 bp, Homo sapiens
tatttatagcattat

SEQ ID NO: 879703 - DNA, 15 bp, Homo sapiens
atttatagcattata

SEQ ID NO: 879704 - DNA, 15 bp, Homo sapiens
tttatagcattatac

SEQ ID NO: 879705 - DNA, 15 bp, Homo sapiens
ttatagcattatact

SEQ ID NO: 879706 - DNA, 15 bp, Homo sapiens
tatagcattatactt

SEQ ID NO: 879707 - DNA, 15 bp, Homo sapiens
atagcattatactta

SEQ ID NO: 879708 - DNA, 15 bp, Homo sapiens
tagcattatacttat

SEQ ID NO: 879709 - DNA, 15 bp, Homo sapiens
agcattatacttatg

SEQ ID NO: 879710 - DNA, 15 bp, Homo sapiens
gcattatacttatgg

SEQ ID NO: 879711 - DNA, 15 bp, Homo sapiens
cattatacttatggc

SEQ ID NO: 879712 - DNA, 15 bp, Homo sapiens
attatacttatggca

SEQ ID NO: 879713 - DNA, 15 bp, Homo sapiens
ttatacttatggcat

SEQ ID NO: 879714 - DNA, 15 bp, Homo sapiens
tatacttatggcatt

SEQ ID NO: 879715 - DNA, 15 bp, Homo sapiens
atacttatggcattt

SEQ ID NO: 879716 - DNA, 15 bp, Homo sapiens
tacttatggcatttt

SEQ ID NO: 879717 - DNA, 15 bp, Homo sapiens
acttatggcattttt

SEQ ID NO: 879718 - DNA, 15 bp, Homo sapiens
cttatggcattttta

SEQ ID NO: 879719 - DNA, 15 bp, Homo sapiens
ttatggcatttttaa

SEQ ID NO: 879720 - DNA, 15 bp, Homo sapiens
tatggcatttttaat

SEQ ID NO: 879721 - DNA, 15 bp, Homo sapiens
atggcatttttaatg

SEQ ID NO: 879722 - DNA, 15 bp, Homo sapiens
tggcatttttaatgc

SEQ ID NO: 879723 - DNA, 15 bp, Homo sapiens
ggcatttttaatgct

SEQ ID NO: 879724 - DNA, 15 bp, Homo sapiens
gcatttttaatgctt

SEQ ID NO: 879725 - DNA, 15 bp, Homo sapiens
catttttaatgcttg

SEQ ID NO: 879726 - DNA, 15 bp, Homo sapiens
atttttaatgcttga

SEQ ID NO: 879727 - DNA, 15 bp, Homo sapiens
tttttaatgcttgaa

SEQ ID NO: 879728 - DNA, 15 bp, Homo sapiens
ttttaatgcttgaag

SEQ ID NO: 879729 - DNA, 15 bp, Homo sapiens
tttaatgcttgaaga

SEQ ID NO: 879730 - DNA, 15 bp, Homo sapiens
ttaatgcttgaagaa

SEQ ID NO: 879731 - DNA, 15 bp, Homo sapiens
taatgcttgaagaaa

SEQ ID NO: 879732 - DNA, 15 bp, Homo sapiens
aatgcttgaagaaac

SEQ ID NO: 879733 - DNA, 15 bp, Homo sapiens
atgcttgaagaaaca

SEQ ID NO: 879734 - DNA, 15 bp, Homo sapiens
tgcttgaagaaacat

SEQ ID NO: 879735 - DNA, 15 bp, Homo sapiens
gcttgaagaaacatt

SEQ ID NO: 879736 - DNA, 15 bp, Homo sapiens
cttgaagaaacattg

SEQ ID NO: 879737 - DNA, 15 bp, Homo sapiens
ttgaagaaacattga

SEQ ID NO: 879738 - DNA, 15 bp, Homo sapiens
tgaagaaacattgat

SEQ ID NO: 879739 - DNA, 15 bp, Homo sapiens
gaagaaacattgatc

SEQ ID NO: 879740 - DNA, 15 bp, Homo sapiens
aagaaacattgatct

SEQ ID NO: 879741 - DNA, 15 bp, Homo sapiens
agaaacattgatctg

SEQ ID NO: 879742 - DNA, 15 bp, Homo sapiens
gaaacattgatctgt

SEQ ID NO: 879743 - DNA, 15 bp, Homo sapiens
aaacattgatctgtg

SEQ ID NO: 879744 - DNA, 15 bp, Homo sapiens
aacattgatctgtgc

SEQ ID NO: 879745 - DNA, 15 bp, Homo sapiens
acattgatctgtgcc

SEQ ID NO: 879746 - DNA, 15 bp, Homo sapiens
cattgatctgtgcca

SEQ ID NO: 879747 - DNA, 15 bp, Homo sapiens
attgatctgtgccac

SEQ ID NO: 879748 - DNA, 15 bp, Homo sapiens
ttgatctgtgccacc

SEQ ID NO: 879749 - DNA, 15 bp, Homo sapiens
tgatctgtgccacct

SEQ ID NO: 879750 - DNA, 15 bp, Homo sapiens
gatctgtgccacctt

SEQ ID NO: 879751 - DNA, 15 bp, Homo sapiens
atctgtgccaccttc

SEQ ID NO: 879752 - DNA, 15 bp, Homo sapiens
tctgtgccaccttct

SEQ ID NO: 879753 - DNA, 15 bp, Homo sapiens
ctgtgccaccttctg

SEQ ID NO: 879754 - DNA, 15 bp, Homo sapiens
tgtgccaccttctgt

SEQ ID NO: 879755 - DNA, 15 bp, Homo sapiens
gtgccaccttctgtt

SEQ ID NO: 879756 - DNA, 15 bp, Homo sapiens
tgccaccttctgttt

SEQ ID NO: 879757 - DNA, 15 bp, Homo sapiens
gccaccttctgtttt

SEQ ID NO: 879758 - DNA, 15 bp, Homo sapiens
ccaccttctgttttt

SEQ ID NO: 879759 - DNA, 15 bp, Homo sapiens
caccttctgttttta

SEQ ID NO: 879760 - DNA, 15 bp, Homo sapiens
accttctgtttttaa

SEQ ID NO: 879761 - DNA, 15 bp, Homo sapiens
ccttctgtttttaac

SEQ ID NO: 879762 - DNA, 15 bp, Homo sapiens
cttctgtttttaact

SEQ ID NO: 879763 - DNA, 15 bp, Homo sapiens
ttctgtttttaacta

SEQ ID NO: 879764 - DNA, 15 bp, Homo sapiens
tctgtttttaactaa

SEQ ID NO: 879765 - DNA, 15 bp, Homo sapiens
ctgtttttaactaaa

SEQ ID NO: 879766 - DNA, 15 bp, Homo sapiens
tgtttttaactaaat

SEQ ID NO: 879767 - DNA, 15 bp, Homo sapiens
gtttttaactaaata

SEQ ID NO: 879768 - DNA, 15 bp, Homo sapiens
tttttaactaaataa

SEQ ID NO: 879769 - DNA, 15 bp, Homo sapiens
ttttaactaaataaa

SEQ ID NO: 879770 - DNA, 15 bp, Homo sapiens
tttaactaaataaat

SEQ ID NO: 879771 - DNA, 15 bp, Homo sapiens
ttaactaaataaatg

SEQ ID NO: 879772 - DNA, 15 bp, Homo sapiens
taactaaataaatgc

SEQ ID NO: 879773 - DNA, 15 bp, Homo sapiens
aactaaataaatgca

SEQ ID NO: 879774 - DNA, 15 bp, Homo sapiens
actaaataaatgcaa

SEQ ID NO: 879775 - DNA, 15 bp, Homo sapiens
ctaaataaatgcaaa

SEQ ID NO: 879776 - DNA, 15 bp, Homo sapiens
taaataaatgcaaat

SEQ ID NO: 879777 - DNA, 15 bp, Homo sapiens
aaataaatgcaaata

SEQ ID NO: 879778 - DNA, 15 bp, Homo sapiens
aataaatgcaaataa

SEQ ID NO: 879779 - DNA, 15 bp, Homo sapiens
ataaatgcaaataac

SEQ ID NO: 879780 - DNA, 15 bp, Homo sapiens
taaatgcaaataaca

SEQ ID NO: 879781 - DNA, 15 bp, Homo sapiens
aaatgcaaataacag

SEQ ID NO: 879782 - DNA, 15 bp, Homo sapiens
aatgcaaataacaga

SEQ ID NO: 879783 - DNA, 15 bp, Homo sapiens
atgcaaataacagag

SEQ ID NO: 879784 - DNA, 15 bp, Homo sapiens
tgcaaataacagagt

SEQ ID NO: 879785 - DNA, 15 bp, Homo sapiens
gcaaataacagagtt

SEQ ID NO: 879786 - DNA, 15 bp, Homo sapiens
caaataacagagttc

SEQ ID NO: 879787 - DNA, 15 bp, Homo sapiens
aaataacagagttct

SEQ ID NO: 879788 - DNA, 15 bp, Homo sapiens
aataacagagttctt

SEQ ID NO: 879789 - DNA, 15 bp, Homo sapiens
ataacagagttcttt

SEQ ID NO: 879790 - DNA, 15 bp, Homo sapiens
taacagagttcttta

SEQ ID NO: 879791 - DNA, 15 bp, Homo sapiens
aacagagttctttat

SEQ ID NO: 879792 - DNA, 15 bp, Homo sapiens
acagagttctttatt

SEQ ID NO: 879793 - DNA, 15 bp, Homo sapiens
cagagttctttattt

SEQ ID NO: 879794 - DNA, 15 bp, Homo sapiens
agagttctttatttc

SEQ ID NO: 879795 - DNA, 15 bp, Homo sapiens
gagttctttatttct

SEQ ID NO: 879796 - DNA, 15 bp, Homo sapiens
agttctttatttctg

SEQ ID NO: 879797 - DNA, 15 bp, Homo sapiens
gttctttatttctgc

SEQ ID NO: 879798 - DNA, 15 bp, Homo sapiens
ttctttatttctgct

SEQ ID NO: 879799 - DNA, 15 bp, Homo sapiens
tctttatttctgctg

SEQ ID NO: 879800 - DNA, 15 bp, Homo sapiens
ctttatttctgctgt

SEQ ID NO: 879801 - DNA, 15 bp, Homo sapiens
tttatttctgctgta

SEQ ID NO: 879802 - DNA, 15 bp, Homo sapiens
ttatttctgctgtac

SEQ ID NO: 879803 - DNA, 15 bp, Homo sapiens
tatttctgctgtaca

SEQ ID NO: 879804 - DNA, 15 bp, Homo sapiens
atttctgctgtacag

SEQ ID NO: 879805 - DNA, 15 bp, Homo sapiens
tttctgctgtacaga

SEQ ID NO: 879806 - DNA, 15 bp, Homo sapiens
ttctgctgtacagaa

SEQ ID NO: 879807 - DNA, 15 bp, Homo sapiens
tctgctgtacagaag

SEQ ID NO: 879808 - DNA, 15 bp, Homo sapiens
ctgctgtacagaagg

SEQ ID NO: 879809 - DNA, 15 bp, Homo sapiens
tgctgtacagaaggc

SEQ ID NO: 879810 - DNA, 15 bp, Homo sapiens
gctgtacagaaggcc

SEQ ID NO: 879811 - DNA, 15 bp, Homo sapiens
ctgtacagaaggcca

SEQ ID NO: 879812 - DNA, 15 bp, Homo sapiens
tgtacagaaggccaa

SEQ ID NO: 879813 - DNA, 15 bp, Homo sapiens
gtacagaaggccaac

SEQ ID NO: 879814 - DNA, 15 bp, Homo sapiens
tacagaaggccaact

SEQ ID NO: 879815 - DNA, 15 bp, Homo sapiens
acagaaggccaactc

SEQ ID NO: 879816 - DNA, 15 bp, Homo sapiens
cagaaggccaactcc

SEQ ID NO: 879817 - DNA, 15 bp, Homo sapiens
agaaggccaactcct

SEQ ID NO: 879818 - DNA, 15 bp, Homo sapiens
gaaggccaactcctt

SEQ ID NO: 879819 - DNA, 15 bp, Homo sapiens
aaggccaactccttc

SEQ ID NO: 879820 - DNA, 15 bp, Homo sapiens
aggccaactccttct

SEQ ID NO: 879821 - DNA, 15 bp, Homo sapiens
ggccaactccttctg

SEQ ID NO: 879822 - DNA, 15 bp, Homo sapiens
gccaactccttctgc

SEQ ID NO: 879823 - DNA, 15 bp, Homo sapiens
ccaactccttctgca

SEQ ID NO: 879824 - DNA, 15 bp, Homo sapiens
caactccttctgcag

SEQ ID NO: 879825 - DNA, 15 bp, Homo sapiens
aactccttctgcagc

SEQ ID NO: 879826 - DNA, 15 bp, Homo sapiens
actccttctgcagct

SEQ ID NO: 879827 - DNA, 15 bp, Homo sapiens
ctccttctgcagctc

SEQ ID NO: 879828 - DNA, 15 bp, Homo sapiens
tccttctgcagctca

SEQ ID NO: 879829 - DNA, 15 bp, Homo sapiens
ccttctgcagctcag

SEQ ID NO: 879830 - DNA, 15 bp, Homo sapiens
cttctgcagctcagc

SEQ ID NO: 879831 - DNA, 15 bp, Homo sapiens
ttctgcagctcagcc

SEQ ID NO: 879832 - DNA, 15 bp, Homo sapiens
tctgcagctcagccc

SEQ ID NO: 879833 - DNA, 15 bp, Homo sapiens
ctgcagctcagcccc

SEQ ID NO: 879834 - DNA, 15 bp, Homo sapiens
tgcagctcagcccca

SEQ ID NO: 879835 - DNA, 15 bp, Homo sapiens
gcagctcagccccaa

SEQ ID NO: 879836 - DNA, 15 bp, Homo sapiens
cagctcagccccaac

SEQ ID NO: 879837 - DNA, 15 bp, Homo sapiens
agctcagccccaacc

SEQ ID NO: 879838 - DNA, 15 bp, Homo sapiens
gctcagccccaaccc

SEQ ID NO: 879839 - DNA, 15 bp, Homo sapiens
ctcagccccaacccc

SEQ ID NO: 879840 - DNA, 15 bp, Homo sapiens
tcagccccaacccct

SEQ ID NO: 879841 - DNA, 15 bp, Homo sapiens
cagccccaacccctg

SEQ ID NO: 879842 - DNA, 15 bp, Homo sapiens
agccccaacccctgt

SEQ ID NO: 879843 - DNA, 15 bp, Homo sapiens
gccccaacccctgtt

SEQ ID NO: 879844 - DNA, 15 bp, Homo sapiens
ccccaacccctgttc

SEQ ID NO: 879845 - DNA, 15 bp, Homo sapiens
cccaacccctgttca

SEQ ID NO: 879846 - DNA, 15 bp, Homo sapiens
ccaacccctgttcat

SEQ ID NO: 879847 - DNA, 15 bp, Homo sapiens
caacccctgttcatt

SEQ ID NO: 879848 - DNA, 15 bp, Homo sapiens
aacccctgttcattt

SEQ ID NO: 879849 - DNA, 15 bp, Homo sapiens
acccctgttcattta

SEQ ID NO: 879850 - DNA, 15 bp, Homo sapiens
cccctgttcatttag

SEQ ID NO: 879851 - DNA, 15 bp, Homo sapiens
ccctgttcatttaga

SEQ ID NO: 879852 - DNA, 15 bp, Homo sapiens
cctgttcatttagaa

SEQ ID NO: 879853 - DNA, 15 bp, Homo sapiens
ctgttcatttagaag

SEQ ID NO: 879854 - DNA, 15 bp, Homo sapiens
tgttcatttagaagt

SEQ ID NO: 879855 - DNA, 15 bp, Homo sapiens
gttcatttagaagtc

SEQ ID NO: 879856 - DNA, 15 bp, Homo sapiens
ttcatttagaagtcc

SEQ ID NO: 879857 - DNA, 15 bp, Homo sapiens
tcatttagaagtcca

SEQ ID NO: 879858 - DNA, 15 bp, Homo sapiens
catttagaagtccag

SEQ ID NO: 879859 - DNA, 15 bp, Homo sapiens
atttagaagtccagc

SEQ ID NO: 879860 - DNA, 15 bp, Homo sapiens
tttagaagtccagca

SEQ ID NO: 879861 - DNA, 15 bp, Homo sapiens
ttagaagtccagcaa

SEQ ID NO: 879862 - DNA, 15 bp, Homo sapiens
tagaagtccagcaac

SEQ ID NO: 879863 - DNA, 15 bp, Homo sapiens
agaagtccagcaacg

SEQ ID NO: 879864 - DNA, 15 bp, Homo sapiens
gaagtccagcaacgt

SEQ ID NO: 879865 - DNA, 15 bp, Homo sapiens
aagtccagcaacgtg

SEQ ID NO: 879866 - DNA, 15 bp, Homo sapiens
agtccagcaacgtgt

SEQ ID NO: 879867 - DNA, 15 bp, Homo sapiens
gtccagcaacgtgtt

SEQ ID NO: 879868 - DNA, 15 bp, Homo sapiens
tccagcaacgtgttc

SEQ ID NO: 879869 - DNA, 15 bp, Homo sapiens
ccagcaacgtgttca

SEQ ID NO: 879870 - DNA, 15 bp, Homo sapiens
cagcaacgtgttcat

SEQ ID NO: 879871 - DNA, 15 bp, Homo sapiens
agcaacgtgttcatg

SEQ ID NO: 879872 - DNA, 15 bp, Homo sapiens
gcaacgtgttcatgg

SEQ ID NO: 879873 - DNA, 15 bp, Homo sapiens
caacgtgttcatggt

SEQ ID NO: 879874 - DNA, 15 bp, Homo sapiens
aacgtgttcatggtt

SEQ ID NO: 879875 - DNA, 15 bp, Homo sapiens
acgtgttcatggttg

SEQ ID NO: 879876 - DNA, 15 bp, Homo sapiens
cgtgttcatggttgt

SEQ ID NO: 879877 - DNA, 15 bp, Homo sapiens
gtgttcatggttgtg

SEQ ID NO: 879878 - DNA, 15 bp, Homo sapiens
tgttcatggttgtgt

SEQ ID NO: 879879 - DNA, 15 bp, Homo sapiens
gttcatggttgtgtt

SEQ ID NO: 879880 - DNA, 15 bp, Homo sapiens
ttcatggttgtgttt

SEQ ID NO: 879881 - DNA, 15 bp, Homo sapiens
tcatggttgtgtttg

SEQ ID NO: 879882 - DNA, 15 bp, Homo sapiens
catggttgtgtttgt

SEQ ID NO: 879883 - DNA, 15 bp, Homo sapiens
atggttgtgtttgtg

SEQ ID NO: 879884 - DNA, 15 bp, Homo sapiens
tggttgtgtttgtgt

SEQ ID NO: 879885 - DNA, 15 bp, Homo sapiens
ggttgtgtttgtgtg

SEQ ID NO: 879886 - DNA, 15 bp, Homo sapiens
gttgtgtttgtgtgt

SEQ ID NO: 879887 - DNA, 15 bp, Homo sapiens
ttgtgtttgtgtgtg

SEQ ID NO: 879888 - DNA, 15 bp, Homo sapiens
gtttgtgtgtgtgtc

SEQ ID NO: 879889 - DNA, 15 bp, Homo sapiens
tttgtgtgtgtgtcc

SEQ ID NO: 879890 - DNA, 15 bp, Homo sapiens
ttgtgtgtgtgtccg

SEQ ID NO: 879891 - DNA, 15 bp, Homo sapiens
tgtgtgtgtgtccgt

SEQ ID NO: 879892 - DNA, 15 bp, Homo sapiens
gtgtgtgtgtccgtg

SEQ ID NO: 879893 - DNA, 15 bp, Homo sapiens
gtgtgtgtccgtgtg

SEQ ID NO: 879894 - DNA, 15 bp, Homo sapiens
tgtgtgtccgtgtgt

SEQ ID NO: 879895 - DNA, 15 bp, Homo sapiens
gtgtgtccgtgtgtg

SEQ ID NO: 879896 - DNA, 15 bp, Homo sapiens
tgtgtccgtgtgtgc

SEQ ID NO: 879897 - DNA, 15 bp, Homo sapiens
gtgtccgtgtgtgca

SEQ ID NO: 879898 - DNA, 15 bp, Homo sapiens
tgtccgtgtgtgcat

SEQ ID NO: 879899 - DNA, 15 bp, Homo sapiens
gtccgtgtgtgcatg

SEQ ID NO: 879900 - DNA, 15 bp, Homo sapiens
tccgtgtgtgcatgt

SEQ ID NO: 879901 - DNA, 15 bp, Homo sapiens
ccgtgtgtgcatgtg

SEQ ID NO: 879902 - DNA, 15 bp, Homo sapiens
cgtgtgtgcatgtgt

SEQ ID NO: 879903 - DNA, 15 bp, Homo sapiens
tgtgtgcatgtgtgc

SEQ ID NO: 879904 - DNA, 15 bp, Homo sapiens
gtgtgcatgtgtgca

SEQ ID NO: 879905 - DNA, 15 bp, Homo sapiens
tgtgcatgtgtgcat

SEQ ID NO: 879906 - DNA, 15 bp, Homo sapiens
gtgcatgtgtgcatg

SEQ ID NO: 879907 - DNA, 15 bp, Homo sapiens
tgcatgtgtgcatga

SEQ ID NO: 879908 - DNA, 15 bp, Homo sapiens
gcatgtgtgcatgat

SEQ ID NO: 879909 - DNA, 15 bp, Homo sapiens
catgtgtgcatgata

SEQ ID NO: 879910 - DNA, 15 bp, Homo sapiens
atgtgtgcatgatat

SEQ ID NO: 879911 - DNA, 15 bp, Homo sapiens
tgtgtgcatgatatt

SEQ ID NO: 879912 - DNA, 15 bp, Homo sapiens
gtgtgcatgatattc

SEQ ID NO: 879913 - DNA, 15 bp, Homo sapiens
tgtgcatgatattct

SEQ ID NO: 879914 - DNA, 15 bp, Homo sapiens
gtgcatgatattctt

SEQ ID NO: 879915 - DNA, 15 bp, Homo sapiens
tgcatgatattcttg

SEQ ID NO: 879916 - DNA, 15 bp, Homo sapiens
gcatgatattcttga

SEQ ID NO: 879917 - DNA, 15 bp, Homo sapiens
catgatattcttgac

SEQ ID NO: 879918 - DNA, 15 bp, Homo sapiens
atgatattcttgact

SEQ ID NO: 879919 - DNA, 15 bp, Homo sapiens
tgatattcttgactg

SEQ ID NO: 879920 - DNA, 15 bp, Homo sapiens
gatattcttgactgc

SEQ ID NO: 879921 - DNA, 15 bp, Homo sapiens
atattcttgactgca

SEQ ID NO: 879922 - DNA, 15 bp, Homo sapiens
tattcttgactgcaa

SEQ ID NO: 879923 - DNA, 15 bp, Homo sapiens
attcttgactgcaaa

SEQ ID NO: 879924 - DNA, 15 bp, Homo sapiens
ttcttgactgcaaaa

SEQ ID NO: 879925 - DNA, 15 bp, Homo sapiens
tcttgactgcaaaac

SEQ ID NO: 879926 - DNA, 15 bp, Homo sapiens
cttgactgcaaaaca

SEQ ID NO: 879927 - DNA, 15 bp, Homo sapiens
ttgactgcaaaacat

SEQ ID NO: 879928 - DNA, 15 bp, Homo sapiens
tgactgcaaaacatt

SEQ ID NO: 879929 - DNA, 15 bp, Homo sapiens
gactgcaaaacatta

SEQ ID NO: 879930 - DNA, 15 bp, Homo sapiens
actgcaaaacattag

SEQ ID NO: 879931 - DNA, 15 bp, Homo sapiens
ctgcaaaacattagg

SEQ ID NO: 879932 - DNA, 15 bp, Homo sapiens
tgcaaaacattagga

SEQ ID NO: 879933 - DNA, 15 bp, Homo sapiens
gcaaaacattaggac

SEQ ID NO: 879934 - DNA, 15 bp, Homo sapiens
caaaacattaggact

SEQ ID NO: 879935 - DNA, 15 bp, Homo sapiens
aaaacattaggactt

SEQ ID NO: 879936 - DNA, 15 bp, Homo sapiens
aaacattaggacttc

SEQ ID NO: 879937 - DNA, 15 bp, Homo sapiens
aacattaggacttca

SEQ ID NO: 879938 - DNA, 15 bp, Homo sapiens
acattaggacttcag

SEQ ID NO: 879939 - DNA, 15 bp, Homo sapiens
cattaggacttcagt

SEQ ID NO: 879940 - DNA, 15 bp, Homo sapiens
attaggacttcagtc

SEQ ID NO: 879941 - DNA, 15 bp, Homo sapiens
ttaggacttcagtct

SEQ ID NO: 879942 - DNA, 15 bp, Homo sapiens
taggacttcagtctg

SEQ ID NO: 879943 - DNA, 15 bp, Homo sapiens
aggacttcagtctga

SEQ ID NO: 879944 - DNA, 15 bp, Homo sapiens
ggacttcagtctgaa

SEQ ID NO: 879945 - DNA, 15 bp, Homo sapiens
gacttcagtctgaaa

SEQ ID NO: 879946 - DNA, 15 bp, Homo sapiens
acttcagtctgaaaa

SEQ ID NO: 879947 - DNA, 15 bp, Homo sapiens
cttcagtctgaaaaa

SEQ ID NO: 879948 - DNA, 15 bp, Homo sapiens
ttcagtctgaaaaaa

SEQ ID NO: 879949 - DNA, 15 bp, Homo sapiens
tcagtctgaaaaaac

SEQ ID NO: 879950 - DNA, 15 bp, Homo sapiens
cagtctgaaaaaaca

SEQ ID NO: 879951 - DNA, 15 bp, Homo sapiens
agtctgaaaaaacag

SEQ ID NO: 879952 - DNA, 15 bp, Homo sapiens
gtctgaaaaaacagt

SEQ ID NO: 879953 - DNA, 15 bp, Homo sapiens
tctgaaaaaacagtc

SEQ ID NO: 879954 - DNA, 15 bp, Homo sapiens
ctgaaaaaacagtct

SEQ ID NO: 879955 - DNA, 15 bp, Homo sapiens
tgaaaaaacagtctg

SEQ ID NO: 879956 - DNA, 15 bp, Homo sapiens
gaaaaaacagtctgg

SEQ ID NO: 879957 - DNA, 15 bp, Homo sapiens
aaaaaacagtctggg

SEQ ID NO: 879958 - DNA, 15 bp, Homo sapiens
aaaaacagtctggga

SEQ ID NO: 879959 - DNA, 15 bp, Homo sapiens
aaaacagtctgggac

SEQ ID NO: 879960 - DNA, 15 bp, Homo sapiens
aaacagtctgggact

SEQ ID NO: 879961 - DNA, 15 bp, Homo sapiens
aacagtctgggactc

SEQ ID NO: 879962 - DNA, 15 bp, Homo sapiens
acagtctgggactcc

SEQ ID NO: 879963 - DNA, 15 bp, Homo sapiens
cagtctgggactcca

SEQ ID NO: 879964 - DNA, 15 bp, Homo sapiens
agtctgggactccac

SEQ ID NO: 879965 - DNA, 15 bp, Homo sapiens
gtctgggactccaca

SEQ ID NO: 879966 - DNA, 15 bp, Homo sapiens
tctgggactccacaa

SEQ ID NO: 879967 - DNA, 15 bp, Homo sapiens
ctgggactccacaat

SEQ ID NO: 879968 - DNA, 15 bp, Homo sapiens
tgggactccacaatt

SEQ ID NO: 879969 - DNA, 15 bp, Homo sapiens
gggactccacaattt

SEQ ID NO: 879970 - DNA, 15 bp, Homo sapiens
ggactccacaattta

SEQ ID NO: 879971 - DNA, 15 bp, Homo sapiens
gactccacaatttag

SEQ ID NO: 879972 - DNA, 15 bp, Homo sapiens
actccacaatttagt

SEQ ID NO: 879973 - DNA, 15 bp, Homo sapiens
ctccacaatttagtg

SEQ ID NO: 879974 - DNA, 15 bp, Homo sapiens
tccacaatttagtgt

SEQ ID NO: 879975 - DNA, 15 bp, Homo sapiens
ccacaatttagtgtg

SEQ ID NO: 879976 - DNA, 15 bp, Homo sapiens
cacaatttagtgtga

SEQ ID NO: 879977 - DNA, 15 bp, Homo sapiens
acaatttagtgtgag

SEQ ID NO: 879978 - DNA, 15 bp, Homo sapiens
caatttagtgtgagg

SEQ ID NO: 879979 - DNA, 15 bp, Homo sapiens
aatttagtgtgagga

SEQ ID NO: 879980 - DNA, 15 bp, Homo sapiens
atttagtgtgaggat

SEQ ID NO: 879981 - DNA, 15 bp, Homo sapiens
tttagtgtgaggata

SEQ ID NO: 879982 - DNA, 15 bp, Homo sapiens
ttagtgtgaggatat

SEQ ID NO: 879983 - DNA, 15 bp, Homo sapiens
tagtgtgaggatatg

SEQ ID NO: 879984 - DNA, 15 bp, Homo sapiens
agtgtgaggatatgg

SEQ ID NO: 879985 - DNA, 15 bp, Homo sapiens
gtgtgaggatatggg

SEQ ID NO: 879986 - DNA, 15 bp, Homo sapiens
tgtgaggatatggga

SEQ ID NO: 879987 - DNA, 15 bp, Homo sapiens
gtgaggatatgggat

SEQ ID NO: 879988 - DNA, 15 bp, Homo sapiens
tgaggatatgggatt

SEQ ID NO: 879989 - DNA, 15 bp, Homo sapiens
gaggatatgggattt

SEQ ID NO: 879990 - DNA, 15 bp, Homo sapiens
aggatatgggattta

SEQ ID NO: 879991 - DNA, 15 bp, Homo sapiens
ggatatgggatttag

SEQ ID NO: 879992 - DNA, 15 bp, Homo sapiens
gatatgggatttagg

SEQ ID NO: 879993 - DNA, 15 bp, Homo sapiens
atatgggatttagga

SEQ ID NO: 879994 - DNA, 15 bp, Homo sapiens
tatgggatttaggag

SEQ ID NO: 879995 - DNA, 15 bp, Homo sapiens
atgggatttaggagt

SEQ ID NO: 879996 - DNA, 15 bp, Homo sapiens
tgggatttaggagtc

SEQ ID NO: 879997 - DNA, 15 bp, Homo sapiens
gggatttaggagtca

SEQ ID NO: 879998 - DNA, 15 bp, Homo sapiens
ggatttaggagtcat

SEQ ID NO: 879999 - DNA, 15 bp, Homo sapiens
gatttaggagtcatg

SEQ ID NO: 880000 - DNA, 15 bp, Homo sapiens
atttaggagtcatgt

SEQ ID NO: 880001 - DNA, 15 bp, Homo sapiens
tttaggagtcatgta

SEQ ID NO: 880002 - DNA, 15 bp, Homo sapiens
ttaggagtcatgtaa

SEQ ID NO: 880003 - DNA, 15 bp, Homo sapiens
taggagtcatgtaat

SEQ ID NO: 880004 - DNA, 15 bp, Homo sapiens
aggagtcatgtaatt

SEQ ID NO: 880005 - DNA, 15 bp, Homo sapiens
ggagtcatgtaatta

SEQ ID NO: 880006 - DNA, 15 bp, Homo sapiens
gagtcatgtaattaa

SEQ ID NO: 880007 - DNA, 15 bp, Homo sapiens
agtcatgtaattaac

SEQ ID NO: 880008 - DNA, 15 bp, Homo sapiens
gtcatgtaattaact

SEQ ID NO: 880009 - DNA, 15 bp, Homo sapiens
tcatgtaattaacta

SEQ ID NO: 880010 - DNA, 15 bp, Homo sapiens
catgtaattaactac

SEQ ID NO: 880011 - DNA, 15 bp, Homo sapiens
atgtaattaactact

SEQ ID NO: 880012 - DNA, 15 bp, Homo sapiens
tgtaattaactactt

SEQ ID NO: 880013 - DNA, 15 bp, Homo sapiens
gtaattaactacttc

SEQ ID NO: 880014 - DNA, 15 bp, Homo sapiens
taattaactacttcc

SEQ ID NO: 880015 - DNA, 15 bp, Homo sapiens
aattaactacttcct

SEQ ID NO: 880016 - DNA, 15 bp, Homo sapiens
attaactacttccta

SEQ ID NO: 880017 - DNA, 15 bp, Homo sapiens
ttaactacttcctaa

SEQ ID NO: 880018 - DNA, 15 bp, Homo sapiens
taactacttcctaat

SEQ ID NO: 880019 - DNA, 15 bp, Homo sapiens
aactacttcctaatc

SEQ ID NO: 880020 - DNA, 15 bp, Homo sapiens
actacttcctaatca

SEQ ID NO: 880021 - DNA, 15 bp, Homo sapiens
ctacttcctaatcat

SEQ ID NO: 880022 - DNA, 15 bp, Homo sapiens
tacttcctaatcata

SEQ ID NO: 880023 - DNA, 15 bp, Homo sapiens
acttcctaatcataa

SEQ ID NO: 880024 - DNA, 15 bp, Homo sapiens
cttcctaatcataat

SEQ ID NO: 880025 - DNA, 15 bp, Homo sapiens
ttcctaatcataatg

SEQ ID NO: 880026 - DNA, 15 bp, Homo sapiens
tcctaatcataatga

SEQ ID NO: 880027 - DNA, 15 bp, Homo sapiens
cctaatcataatgaa

SEQ ID NO: 880028 - DNA, 15 bp, Homo sapiens
ctaatcataatgaat

SEQ ID NO: 880029 - DNA, 15 bp, Homo sapiens
taatcataatgaatg

SEQ ID NO: 880030 - DNA, 15 bp, Homo sapiens
aatcataatgaatgc

SEQ ID NO: 880031 - DNA, 15 bp, Homo sapiens
atcataatgaatgca

SEQ ID NO: 880032 - DNA, 15 bp, Homo sapiens
tcataatgaatgcat

SEQ ID NO: 880033 - DNA, 15 bp, Homo sapiens
cataatgaatgcata

SEQ ID NO: 880034 - DNA, 15 bp, Homo sapiens
ataatgaatgcatag

SEQ ID NO: 880035 - DNA, 15 bp, Homo sapiens
taatgaatgcatagt

SEQ ID NO: 880036 - DNA, 15 bp, Homo sapiens
aatgaatgcatagtc

SEQ ID NO: 880037 - DNA, 15 bp, Homo sapiens
atgaatgcatagtcc

SEQ ID NO: 880038 - DNA, 15 bp, Homo sapiens
tgaatgcatagtcca

SEQ ID NO: 880039 - DNA, 15 bp, Homo sapiens
gaatgcatagtccac

SEQ ID NO: 880040 - DNA, 15 bp, Homo sapiens
aatgcatagtccaca

SEQ ID NO: 880041 - DNA, 15 bp, Homo sapiens
atgcatagtccacaa

SEQ ID NO: 880042 - DNA, 15 bp, Homo sapiens
tgcatagtccacaaa

SEQ ID NO: 880043 - DNA, 15 bp, Homo sapiens
gcatagtccacaaac

SEQ ID NO: 880044 - DNA, 15 bp, Homo sapiens
catagtccacaaact

SEQ ID NO: 880045 - DNA, 15 bp, Homo sapiens
atagtccacaaactc

SEQ ID NO: 880046 - DNA, 15 bp, Homo sapiens
tagtccacaaactct

SEQ ID NO: 880047 - DNA, 15 bp, Homo sapiens
agtccacaaactctc

SEQ ID NO: 880048 - DNA, 15 bp, Homo sapiens
gtccacaaactctca

SEQ ID NO: 880049 - DNA, 15 bp, Homo sapiens
tccacaaactctcaa

SEQ ID NO: 880050 - DNA, 15 bp, Homo sapiens
ccacaaactctcaaa

SEQ ID NO: 880051 - DNA, 15 bp, Homo sapiens
cacaaactctcaaaa

SEQ ID NO: 880052 - DNA, 15 bp, Homo sapiens
acaaactctcaaaac

SEQ ID NO: 880053 - DNA, 15 bp, Homo sapiens
caaactctcaaaaca

SEQ ID NO: 880054 - DNA, 15 bp, Homo sapiens
aaactctcaaaacat

SEQ ID NO: 880055 - DNA, 15 bp, Homo sapiens
aactctcaaaacatt

SEQ ID NO: 880056 - DNA, 15 bp, Homo sapiens
actctcaaaacattg

SEQ ID NO: 880057 - DNA, 15 bp, Homo sapiens
ctctcaaaacattgt

SEQ ID NO: 880058 - DNA, 15 bp, Homo sapiens
tctcaaaacattgta

SEQ ID NO: 880059 - DNA, 15 bp, Homo sapiens
ctcaaaacattgtag

SEQ ID NO: 880060 - DNA, 15 bp, Homo sapiens
tcaaaacattgtaga

SEQ ID NO: 880061 - DNA, 15 bp, Homo sapiens
caaaacattgtagag

SEQ ID NO: 880062 - DNA, 15 bp, Homo sapiens
aaaacattgtagaga

SEQ ID NO: 880063 - DNA, 15 bp, Homo sapiens
aaacattgtagagaa

SEQ ID NO: 880064 - DNA, 15 bp, Homo sapiens
aacattgtagagaat

SEQ ID NO: 880065 - DNA, 15 bp, Homo sapiens
acattgtagagaatt

SEQ ID NO: 880066 - DNA, 15 bp, Homo sapiens
cattgtagagaatta

SEQ ID NO: 880067 - DNA, 15 bp, Homo sapiens
attgtagagaattat

SEQ ID NO: 880068 - DNA, 15 bp, Homo sapiens
ttgtagagaattatg

SEQ ID NO: 880069 - DNA, 15 bp, Homo sapiens
tgtagagaattatgc

SEQ ID NO: 880070 - DNA, 15 bp, Homo sapiens
gtagagaattatgca

SEQ ID NO: 880071 - DNA, 15 bp, Homo sapiens
tagagaattatgcat

SEQ ID NO: 880072 - DNA, 15 bp, Homo sapiens
agagaattatgcatt

SEQ ID NO: 880073 - DNA, 15 bp, Homo sapiens
gagaattatgcattt

SEQ ID NO: 880074 - DNA, 15 bp, Homo sapiens
agaattatgcatttc

SEQ ID NO: 880075 - DNA, 15 bp, Homo sapiens
gaattatgcatttca

SEQ ID NO: 880076 - DNA, 15 bp, Homo sapiens
aattatgcatttcaa

SEQ ID NO: 880077 - DNA, 15 bp, Homo sapiens
attatgcatttcaac

SEQ ID NO: 880078 - DNA, 15 bp, Homo sapiens
ttatgcatttcaaca

SEQ ID NO: 880079 - DNA, 15 bp, Homo sapiens
tatgcatttcaacat

SEQ ID NO: 880080 - DNA, 15 bp, Homo sapiens
atgcatttcaacatt

SEQ ID NO: 880081 - DNA, 15 bp, Homo sapiens
tgcatttcaacattt

SEQ ID NO: 880082 - DNA, 15 bp, Homo sapiens
gcatttcaacatttg

SEQ ID NO: 880083 - DNA, 15 bp, Homo sapiens
catttcaacatttga

SEQ ID NO: 880084 - DNA, 15 bp, Homo sapiens
atttcaacatttgat

SEQ ID NO: 880085 - DNA, 15 bp, Homo sapiens
tttcaacatttgatg

SEQ ID NO: 880086 - DNA, 15 bp, Homo sapiens
ttcaacatttgatgt

SEQ ID NO: 880087 - DNA, 15 bp, Homo sapiens
tcaacatttgatgta

SEQ ID NO: 880088 - DNA, 15 bp, Homo sapiens
caacatttgatgtaa

SEQ ID NO: 880089 - DNA, 15 bp, Homo sapiens
aacatttgatgtaat

SEQ ID NO: 880090 - DNA, 15 bp, Homo sapiens
acatttgatgtaatt

SEQ ID NO: 880091 - DNA, 15 bp, Homo sapiens
catttgatgtaattc

SEQ ID NO: 880092 - DNA, 15 bp, Homo sapiens
atttgatgtaattct

SEQ ID NO: 880093 - DNA, 15 bp, Homo sapiens
tttgatgtaattctc

SEQ ID NO: 880094 - DNA, 15 bp, Homo sapiens
ttgatgtaattctcc

SEQ ID NO: 880095 - DNA, 15 bp, Homo sapiens
tgatgtaattctcca

SEQ ID NO: 880096 - DNA, 15 bp, Homo sapiens
gatgtaattctccac

SEQ ID NO: 880097 - DNA, 15 bp, Homo sapiens
atgtaattctccaca

SEQ ID NO: 880098 - DNA, 15 bp, Homo sapiens
tgtaattctccacat

SEQ ID NO: 880099 - DNA, 15 bp, Homo sapiens
gtaattctccacatc

SEQ ID NO: 880100 - DNA, 15 bp, Homo sapiens
taattctccacatca

SEQ ID NO: 880101 - DNA, 15 bp, Homo sapiens
aattctccacatcac

SEQ ID NO: 880102 - DNA, 15 bp, Homo sapiens
attctccacatcaca

SEQ ID NO: 880103 - DNA, 15 bp, Homo sapiens
ttctccacatcacaa

SEQ ID NO: 880104 - DNA, 15 bp, Homo sapiens
tctccacatcacaaa

SEQ ID NO: 880105 - DNA, 15 bp, Homo sapiens
ctccacatcacaaat

SEQ ID NO: 880106 - DNA, 15 bp, Homo sapiens
tccacatcacaaatt

SEQ ID NO: 880107 - DNA, 15 bp, Homo sapiens
ccacatcacaaattc

SEQ ID NO: 880108 - DNA, 15 bp, Homo sapiens
cacatcacaaattca

SEQ ID NO: 880109 - DNA, 15 bp, Homo sapiens
acatcacaaattcat

SEQ ID NO: 880110 - DNA, 15 bp, Homo sapiens
catcacaaattcatg

SEQ ID NO: 880111 - DNA, 15 bp, Homo sapiens
atcacaaattcatgc

SEQ ID NO: 880112 - DNA, 15 bp, Homo sapiens
tcacaaattcatgca

SEQ ID NO: 880113 - DNA, 15 bp, Homo sapiens
cacaaattcatgcaa

SEQ ID NO: 880114 - DNA, 15 bp, Homo sapiens
acaaattcatgcaaa

SEQ ID NO: 880115 - DNA, 15 bp, Homo sapiens
caaattcatgcaaat

SEQ ID NO: 880116 - DNA, 15 bp, Homo sapiens
aaattcatgcaaatc

SEQ ID NO: 880117 - DNA, 15 bp, Homo sapiens
aattcatgcaaatct

SEQ ID NO: 880118 - DNA, 15 bp, Homo sapiens
attcatgcaaatctc

SEQ ID NO: 880119 - DNA, 15 bp, Homo sapiens
ttcatgcaaatctca

SEQ ID NO: 880120 - DNA, 15 bp, Homo sapiens
tcatgcaaatctcac

SEQ ID NO: 880121 - DNA, 15 bp, Homo sapiens
catgcaaatctcact

SEQ ID NO: 880122 - DNA, 15 bp, Homo sapiens
atgcaaatctcactt

SEQ ID NO: 880123 - DNA, 15 bp, Homo sapiens
tgcaaatctcactta

SEQ ID NO: 880124 - DNA, 15 bp, Homo sapiens
gcaaatctcacttat

SEQ ID NO: 880125 - DNA, 15 bp, Homo sapiens
caaatctcacttatc

SEQ ID NO: 880126 - DNA, 15 bp, Homo sapiens
aaatctcacttatcc

SEQ ID NO: 880127 - DNA, 15 bp, Homo sapiens
aatctcacttatcct

SEQ ID NO: 880128 - DNA, 15 bp, Homo sapiens
atctcacttatcctc

SEQ ID NO: 880129 - DNA, 15 bp, Homo sapiens
tctcacttatcctcc

SEQ ID NO: 880130 - DNA, 15 bp, Homo sapiens
ctcacttatcctcca

SEQ ID NO: 880131 - DNA, 15 bp, Homo sapiens
tcacttatcctccaa

SEQ ID NO: 880132 - DNA, 15 bp, Homo sapiens
cacttatcctccaaa

SEQ ID NO: 880133 - DNA, 15 bp, Homo sapiens
acttatcctccaaat

SEQ ID NO: 880134 - DNA, 15 bp, Homo sapiens
cttatcctccaaata

SEQ ID NO: 880135 - DNA, 15 bp, Homo sapiens
ttatcctccaaatat

SEQ ID NO: 880136 - DNA, 15 bp, Homo sapiens
tatcctccaaatatt

SEQ ID NO: 880137 - DNA, 15 bp, Homo sapiens
atcctccaaatattt

SEQ ID NO: 880138 - DNA, 15 bp, Homo sapiens
tcctccaaatatttt

SEQ ID NO: 880139 - DNA, 15 bp, Homo sapiens
cctccaaatattttt

SEQ ID NO: 880140 - DNA, 15 bp, Homo sapiens
ctccaaatatttttc

SEQ ID NO: 880141 - DNA, 15 bp, Homo sapiens
tccaaatatttttct

SEQ ID NO: 880142 - DNA, 15 bp, Homo sapiens
ccaaatatttttctt

SEQ ID NO: 880143 - DNA, 15 bp, Homo sapiens
caaatatttttcttg

SEQ ID NO: 880144 - DNA, 15 bp, Homo sapiens
aaatatttttcttgt

SEQ ID NO: 880145 - DNA, 15 bp, Homo sapiens
aatatttttcttgta

SEQ ID NO: 880146 - DNA, 15 bp, Homo sapiens
atatttttcttgtaa

SEQ ID NO: 880147 - DNA, 15 bp, Homo sapiens
tatttttcttgtaag

SEQ ID NO: 880148 - DNA, 15 bp, Homo sapiens
atttttcttgtaagt

SEQ ID NO: 880149 - DNA, 15 bp, Homo sapiens
tttttcttgtaagtt

SEQ ID NO: 880150 - DNA, 15 bp, Homo sapiens
ttttcttgtaagttc

SEQ ID NO: 880151 - DNA, 15 bp, Homo sapiens
tttcttgtaagttca

SEQ ID NO: 880152 - DNA, 15 bp, Homo sapiens
ttcttgtaagttcac

SEQ ID NO: 880153 - DNA, 15 bp, Homo sapiens
tcttgtaagttcaca

SEQ ID NO: 880154 - DNA, 15 bp, Homo sapiens
cttgtaagttcacat

SEQ ID NO: 880155 - DNA, 15 bp, Homo sapiens
ttgtaagttcacatc

SEQ ID NO: 880156 - DNA, 15 bp, Homo sapiens
tgtaagttcacatcc

SEQ ID NO: 880157 - DNA, 15 bp, Homo sapiens
gtaagttcacatccc

SEQ ID NO: 880158 - DNA, 15 bp, Homo sapiens
taagttcacatccct

SEQ ID NO: 880159 - DNA, 15 bp, Homo sapiens
aagttcacatccctg

SEQ ID NO: 880160 - DNA, 15 bp, Homo sapiens
agttcacatccctga

SEQ ID NO: 880161 - DNA, 15 bp, Homo sapiens
gttcacatccctgaa

SEQ ID NO: 880162 - DNA, 15 bp, Homo sapiens
ttcacatccctgaaa

SEQ ID NO: 880163 - DNA, 15 bp, Homo sapiens
tcacatccctgaaac

SEQ ID NO: 880164 - DNA, 15 bp, Homo sapiens
cacatccctgaaact

SEQ ID NO: 880165 - DNA, 15 bp, Homo sapiens
acatccctgaaactg

SEQ ID NO: 880166 - DNA, 15 bp, Homo sapiens
catccctgaaactga

SEQ ID NO: 880167 - DNA, 15 bp, Homo sapiens
atccctgaaactgag

SEQ ID NO: 880168 - DNA, 15 bp, Homo sapiens
tccctgaaactgaga

SEQ ID NO: 880169 - DNA, 15 bp, Homo sapiens
ccctgaaactgagaa

SEQ ID NO: 880170 - DNA, 15 bp, Homo sapiens
cctgaaactgagaaa

SEQ ID NO: 880171 - DNA, 15 bp, Homo sapiens
ctgaaactgagaaac

SEQ ID NO: 880172 - DNA, 15 bp, Homo sapiens
tgaaactgagaaaca

SEQ ID NO: 880173 - DNA, 15 bp, Homo sapiens
gaaactgagaaacag

SEQ ID NO: 880174 - DNA, 15 bp, Homo sapiens
aaactgagaaacagg

SEQ ID NO: 880175 - DNA, 15 bp, Homo sapiens
aactgagaaacaggg

SEQ ID NO: 880176 - DNA, 15 bp, Homo sapiens
actgagaaacagggg

SEQ ID NO: 880177 - DNA, 15 bp, Homo sapiens
ctgagaaacaggggc

SEQ ID NO: 880178 - DNA, 15 bp, Homo sapiens
tgagaaacaggggcc

SEQ ID NO: 880179 - DNA, 15 bp, Homo sapiens
gagaaacaggggcca

SEQ ID NO: 880180 - DNA, 15 bp, Homo sapiens
agaaacaggggccag

SEQ ID NO: 880181 - DNA, 15 bp, Homo sapiens
gaaacaggggccagg

SEQ ID NO: 880182 - DNA, 15 bp, Homo sapiens
aaacaggggccaggt

SEQ ID NO: 880183 - DNA, 15 bp, Homo sapiens
aacaggggccaggtg

SEQ ID NO: 880184 - DNA, 15 bp, Homo sapiens
acaggggccaggtgc

SEQ ID NO: 880185 - DNA, 15 bp, Homo sapiens
caggggccaggtgca

SEQ ID NO: 880186 - DNA, 15 bp, Homo sapiens
aggggccaggtgcag

SEQ ID NO: 880187 - DNA, 15 bp, Homo sapiens
ggggccaggtgcagt

SEQ ID NO: 880188 - DNA, 15 bp, Homo sapiens
gggccaggtgcagtg

SEQ ID NO: 880189 - DNA, 15 bp, Homo sapiens
ggccaggtgcagtgg

SEQ ID NO: 880190 - DNA, 15 bp, Homo sapiens
caggtgcagtggcta

SEQ ID NO: 880191 - DNA, 15 bp, Homo sapiens
aggtgcagtggctaa

SEQ ID NO: 880192 - DNA, 15 bp, Homo sapiens
ggtgcagtggctaat

SEQ ID NO: 880193 - DNA, 15 bp, Homo sapiens
gtgcagtggctaatc

SEQ ID NO: 880194 - DNA, 15 bp, Homo sapiens
tgcagtggctaatcc

SEQ ID NO: 880195 - DNA, 15 bp, Homo sapiens
gcagtggctaatccc

SEQ ID NO: 880196 - DNA, 15 bp, Homo sapiens
cagtggctaatccct

SEQ ID NO: 880197 - DNA, 15 bp, Homo sapiens
agtggctaatccctg

SEQ ID NO: 880198 - DNA, 15 bp, Homo sapiens
gtggctaatccctgt

SEQ ID NO: 880199 - DNA, 15 bp, Homo sapiens
tggctaatccctgta

SEQ ID NO: 880200 - DNA, 15 bp, Homo sapiens
ggctaatccctgtaa

SEQ ID NO: 880201 - DNA, 15 bp, Homo sapiens
gctaatccctgtaat

SEQ ID NO: 880202 - DNA, 15 bp, Homo sapiens
ctaatccctgtaatc

SEQ ID NO: 880203 - DNA, 15 bp, Homo sapiens
taatccctgtaatcc

SEQ ID NO: 880204 - DNA, 15 bp, Homo sapiens
aatccctgtaatccc

SEQ ID NO: 880205 - DNA, 15 bp, Homo sapiens
atccctgtaatccct

SEQ ID NO: 880206 - DNA, 15 bp, Homo sapiens
tccctgtaatccctg

SEQ ID NO: 880207 - DNA, 15 bp, Homo sapiens
ccctgtaatccctgc

SEQ ID NO: 880208 - DNA, 15 bp, Homo sapiens
cctgtaatccctgca

SEQ ID NO: 880209 - DNA, 15 bp, Homo sapiens
ctgtaatccctgcat

SEQ ID NO: 880210 - DNA, 15 bp, Homo sapiens
tgtaatccctgcatt

SEQ ID NO: 880211 - DNA, 15 bp, Homo sapiens
gtaatccctgcattt

SEQ ID NO: 880212 - DNA, 15 bp, Homo sapiens
taatccctgcatttt

SEQ ID NO: 880213 - DNA, 15 bp, Homo sapiens
aatccctgcattttg

SEQ ID NO: 880214 - DNA, 15 bp, Homo sapiens
atccctgcattttgg

SEQ ID NO: 880215 - DNA, 15 bp, Homo sapiens
tccctgcattttggg

SEQ ID NO: 880216 - DNA, 15 bp, Homo sapiens
ccctgcattttggga

SEQ ID NO: 880217 - DNA, 15 bp, Homo sapiens
cctgcattttgggat

SEQ ID NO: 880218 - DNA, 15 bp, Homo sapiens
ctgcattttgggatg

SEQ ID NO: 880219 - DNA, 15 bp, Homo sapiens
tgcattttgggatgc

SEQ ID NO: 880220 - DNA, 15 bp, Homo sapiens
gcattttgggatgct

SEQ ID NO: 880221 - DNA, 15 bp, Homo sapiens
cattttgggatgctg

SEQ ID NO: 880222 - DNA, 15 bp, Homo sapiens
attttgggatgctga

SEQ ID NO: 880223 - DNA, 15 bp, Homo sapiens
ttttgggatgctgag

SEQ ID NO: 880224 - DNA, 15 bp, Homo sapiens
tgggatgctgaggcg

SEQ ID NO: 880225 - DNA, 15 bp, Homo sapiens
gggatgctgaggcgg

SEQ ID NO: 880226 - DNA, 15 bp, Homo sapiens
ggatgctgaggcggg

SEQ ID NO: 880227 - DNA, 15 bp, Homo sapiens
gatgctgaggcggga

SEQ ID NO: 880228 - DNA, 15 bp, Homo sapiens
atgctgaggcgggag

SEQ ID NO: 880229 - DNA, 15 bp, Homo sapiens
tgctgaggcgggagg

SEQ ID NO: 880230 - DNA, 15 bp, Homo sapiens
ctgaggcgggaggac

SEQ ID NO: 880231 - DNA, 15 bp, Homo sapiens
tgaggcgggaggacc

SEQ ID NO: 880232 - DNA, 15 bp, Homo sapiens
gaggcgggaggacca

SEQ ID NO: 880233 - DNA, 15 bp, Homo sapiens
aggcgggaggaccac

SEQ ID NO: 880234 - DNA, 15 bp, Homo sapiens
ggcgggaggaccact

SEQ ID NO: 880235 - DNA, 15 bp, Homo sapiens
gcgggaggaccactt

SEQ ID NO: 880236 - DNA, 15 bp, Homo sapiens
cgggaggaccactta

SEQ ID NO: 880237 - DNA, 15 bp, Homo sapiens
gggaggaccacttaa

SEQ ID NO: 880238 - DNA, 15 bp, Homo sapiens
ggaggaccacttaag

SEQ ID NO: 880239 - DNA, 15 bp, Homo sapiens
gaggaccacttaagc

SEQ ID NO: 880240 - DNA, 15 bp, Homo sapiens
aggaccacttaagct

SEQ ID NO: 880241 - DNA, 15 bp, Homo sapiens
ggaccacttaagctc

SEQ ID NO: 880242 - DNA, 15 bp, Homo sapiens
gaccacttaagctca

SEQ ID NO: 880243 - DNA, 15 bp, Homo sapiens
accacttaagctcag

SEQ ID NO: 880244 - DNA, 15 bp, Homo sapiens
ccacttaagctcagg

SEQ ID NO: 880245 - DNA, 15 bp, Homo sapiens
cacttaagctcagga

SEQ ID NO: 880246 - DNA, 15 bp, Homo sapiens
acttaagctcaggag

SEQ ID NO: 880247 - DNA, 15 bp, Homo sapiens
cttaagctcaggagt

SEQ ID NO: 880248 - DNA, 15 bp, Homo sapiens
ttaagctcaggagtt

SEQ ID NO: 880249 - DNA, 15 bp, Homo sapiens
taagctcaggagttc

SEQ ID NO: 880250 - DNA, 15 bp, Homo sapiens
aagctcaggagttca

SEQ ID NO: 880251 - DNA, 15 bp, Homo sapiens
agctcaggagttcat

SEQ ID NO: 880252 - DNA, 15 bp, Homo sapiens
gctcaggagttcatg

SEQ ID NO: 880253 - DNA, 15 bp, Homo sapiens
ctcaggagttcatga

SEQ ID NO: 880254 - DNA, 15 bp, Homo sapiens
tcaggagttcatgag

SEQ ID NO: 880255 - DNA, 15 bp, Homo sapiens
caggagttcatgagc

SEQ ID NO: 880256 - DNA, 15 bp, Homo sapiens
aggagttcatgagca

SEQ ID NO: 880257 - DNA, 15 bp, Homo sapiens
ggagttcatgagcag

SEQ ID NO: 880258 - DNA, 15 bp, Homo sapiens
gagttcatgagcagc

SEQ ID NO: 880259 - DNA, 15 bp, Homo sapiens
agttcatgagcagcc

SEQ ID NO: 880260 - DNA, 15 bp, Homo sapiens
gttcatgagcagcct

SEQ ID NO: 880261 - DNA, 15 bp, Homo sapiens
ttcatgagcagcctg

SEQ ID NO: 880262 - DNA, 15 bp, Homo sapiens
tcatgagcagcctgg

SEQ ID NO: 880263 - DNA, 15 bp, Homo sapiens
catgagcagcctggg

SEQ ID NO: 880264 - DNA, 15 bp, Homo sapiens
atgagcagcctgggc

SEQ ID NO: 880265 - DNA, 15 bp, Homo sapiens
tgagcagcctgggca

SEQ ID NO: 880266 - DNA, 15 bp, Homo sapiens
gagcagcctgggcaa

SEQ ID NO: 880267 - DNA, 15 bp, Homo sapiens
agcagcctgggcaac

SEQ ID NO: 880268 - DNA, 15 bp, Homo sapiens
gcagcctgggcaaca

SEQ ID NO: 880269 - DNA, 15 bp, Homo sapiens
aacatggtgagacct

SEQ ID NO: 880270 - DNA, 15 bp, Homo sapiens
acatggtgagacctc

SEQ ID NO: 880271 - DNA, 15 bp, Homo sapiens
catggtgagacctct

SEQ ID NO: 880272 - DNA, 15 bp, Homo sapiens
atggtgagacctctt

SEQ ID NO: 880273 - DNA, 15 bp, Homo sapiens
tggtgagacctcttc

SEQ ID NO: 880274 - DNA, 15 bp, Homo sapiens
ggtgagacctcttct

SEQ ID NO: 880275 - DNA, 15 bp, Homo sapiens
gtgagacctcttctc

SEQ ID NO: 880276 - DNA, 15 bp, Homo sapiens
tgagacctcttctct

SEQ ID NO: 880277 - DNA, 15 bp, Homo sapiens
gagacctcttctcta

SEQ ID NO: 880278 - DNA, 15 bp, Homo sapiens
agacctcttctctac

SEQ ID NO: 880279 - DNA, 15 bp, Homo sapiens
gacctcttctctaca

SEQ ID NO: 880280 - DNA, 15 bp, Homo sapiens
acctcttctctacaa

SEQ ID NO: 880281 - DNA, 15 bp, Homo sapiens
cctcttctctacaaa

SEQ ID NO: 880282 - DNA, 15 bp, Homo sapiens
ctcttctctacaaaa

SEQ ID NO: 880283 - DNA, 15 bp, Homo sapiens
tcttctctacaaaaa

SEQ ID NO: 880284 - DNA, 15 bp, Homo sapiens
cttctctacaaaaag

SEQ ID NO: 880285 - DNA, 15 bp, Homo sapiens
ttctctacaaaaagt

SEQ ID NO: 880286 - DNA, 15 bp, Homo sapiens
tctctacaaaaagtt

SEQ ID NO: 880287 - DNA, 15 bp, Homo sapiens
ctctacaaaaagtta

SEQ ID NO: 880288 - DNA, 15 bp, Homo sapiens
tctacaaaaagttaa

SEQ ID NO: 880289 - DNA, 15 bp, Homo sapiens
ctacaaaaagttaaa

SEQ ID NO: 880290 - DNA, 15 bp, Homo sapiens
tacaaaaagttaaaa

SEQ ID NO: 880291 - DNA, 15 bp, Homo sapiens
acaaaaagttaaaaa

SEQ ID NO: 880292 - DNA, 15 bp, Homo sapiens
caaaaagttaaaaaa

SEQ ID NO: 880293 - DNA, 15 bp, Homo sapiens
aaaagttaaaaaaat

SEQ ID NO: 880294 - DNA, 15 bp, Homo sapiens
aaagttaaaaaaatt

SEQ ID NO: 880295 - DNA, 15 bp, Homo sapiens
aagttaaaaaaatta

SEQ ID NO: 880296 - DNA, 15 bp, Homo sapiens
agttaaaaaaattag

SEQ ID NO: 880297 - DNA, 15 bp, Homo sapiens
gttaaaaaaattagc

SEQ ID NO: 880298 - DNA, 15 bp, Homo sapiens
ttaaaaaaattagcc

SEQ ID NO: 880299 - DNA, 15 bp, Homo sapiens
taaaaaaattagcct

SEQ ID NO: 880300 - DNA, 15 bp, Homo sapiens
aaaaaaattagcctg

SEQ ID NO: 880301 - DNA, 15 bp, Homo sapiens
aaaaaattagcctga

SEQ ID NO: 880302 - DNA, 15 bp, Homo sapiens
aaaaattagcctgat

SEQ ID NO: 880303 - DNA, 15 bp, Homo sapiens
aaaattagcctgatg

SEQ ID NO: 880304 - DNA, 15 bp, Homo sapiens
aaattagcctgatgt

SEQ ID NO: 880305 - DNA, 15 bp, Homo sapiens
aattagcctgatgtg

SEQ ID NO: 880306 - DNA, 15 bp, Homo sapiens
attagcctgatgtgg

SEQ ID NO: 880307 - DNA, 15 bp, Homo sapiens
ttagcctgatgtggt

SEQ ID NO: 880308 - DNA, 15 bp, Homo sapiens
tagcctgatgtggtg

SEQ ID NO: 880309 - DNA, 15 bp, Homo sapiens
agcctgatgtggtgg

SEQ ID NO: 880310 - DNA, 15 bp, Homo sapiens
gcctgatgtggtggc

SEQ ID NO: 880311 - DNA, 15 bp, Homo sapiens
cctgatgtggtggcg

SEQ ID NO: 880312 - DNA, 15 bp, Homo sapiens
ctgatgtggtggcgt

SEQ ID NO: 880313 - DNA, 15 bp, Homo sapiens
tgatgtggtggcgtg

SEQ ID NO: 880314 - DNA, 15 bp, Homo sapiens
gatgtggtggcgtgt

SEQ ID NO: 880315 - DNA, 15 bp, Homo sapiens
atgtggtggcgtgtg

SEQ ID NO: 880316 - DNA, 15 bp, Homo sapiens
tgtggtggcgtgtgc

SEQ ID NO: 880317 - DNA, 15 bp, Homo sapiens
gtggtggcgtgtgct

SEQ ID NO: 880318 - DNA, 15 bp, Homo sapiens
tggtggcgtgtgctt

SEQ ID NO: 880319 - DNA, 15 bp, Homo sapiens
ggtggcgtgtgcttg

SEQ ID NO: 880320 - DNA, 15 bp, Homo sapiens
gtggcgtgtgcttgt

SEQ ID NO: 880321 - DNA, 15 bp, Homo sapiens
tggcgtgtgcttgta

SEQ ID NO: 880322 - DNA, 15 bp, Homo sapiens
ggcgtgtgcttgtag

SEQ ID NO: 880323 - DNA, 15 bp, Homo sapiens
gcgtgtgcttgtagt

SEQ ID NO: 880324 - DNA, 15 bp, Homo sapiens
cgtgtgcttgtagtt

SEQ ID NO: 880325 - DNA, 15 bp, Homo sapiens
gtgtgcttgtagttc

SEQ ID NO: 880326 - DNA, 15 bp, Homo sapiens
tgtgcttgtagttcc

SEQ ID NO: 880327 - DNA, 15 bp, Homo sapiens
gtgcttgtagttcca

SEQ ID NO: 880328 - DNA, 15 bp, Homo sapiens
tgcttgtagttccag

SEQ ID NO: 880329 - DNA, 15 bp, Homo sapiens
gcttgtagttccagc

SEQ ID NO: 880330 - DNA, 15 bp, Homo sapiens
cttgtagttccagct

SEQ ID NO: 880331 - DNA, 15 bp, Homo sapiens
ttgtagttccagcta

SEQ ID NO: 880332 - DNA, 15 bp, Homo sapiens
tagttccagctactt

SEQ ID NO: 880333 - DNA, 15 bp, Homo sapiens
agttccagctacttg

SEQ ID NO: 880334 - DNA, 15 bp, Homo sapiens
gttccagctacttga

SEQ ID NO: 880335 - DNA, 15 bp, Homo sapiens
ttccagctacttgag

SEQ ID NO: 880336 - DNA, 15 bp, Homo sapiens
tccagctacttgaga

SEQ ID NO: 880337 - DNA, 15 bp, Homo sapiens
cttgagaggctgagt

SEQ ID NO: 880338 - DNA, 15 bp, Homo sapiens
ttgagaggctgagtt

SEQ ID NO: 880339 - DNA, 15 bp, Homo sapiens
tgagaggctgagttg

SEQ ID NO: 880340 - DNA, 15 bp, Homo sapiens
gagaggctgagttgg

SEQ ID NO: 880341 - DNA, 15 bp, Homo sapiens
agaggctgagttggg

SEQ ID NO: 880342 - DNA, 15 bp, Homo sapiens
gaggctgagttggga

SEQ ID NO: 880343 - DNA, 15 bp, Homo sapiens
aggctgagttgggag

SEQ ID NO: 880344 - DNA, 15 bp, Homo sapiens
ggctgagttgggagg

SEQ ID NO: 880345 - DNA, 15 bp, Homo sapiens
gctgagttgggagga

SEQ ID NO: 880346 - DNA, 15 bp, Homo sapiens
ctgagttgggaggat

SEQ ID NO: 880347 - DNA, 15 bp, Homo sapiens
tgagttgggaggatc

SEQ ID NO: 880348 - DNA, 15 bp, Homo sapiens
gagttgggaggatca

SEQ ID NO: 880349 - DNA, 15 bp, Homo sapiens
agttgggaggatcac

SEQ ID NO: 880350 - DNA, 15 bp, Homo sapiens
gttgggaggatcact

SEQ ID NO: 880351 - DNA, 15 bp, Homo sapiens
ttgggaggatcactt

SEQ ID NO: 880352 - DNA, 15 bp, Homo sapiens
gcagtgggctgtgaa

SEQ ID NO: 880353 - DNA, 15 bp, Homo sapiens
cagtgggctgtgaaa

SEQ ID NO: 880354 - DNA, 15 bp, Homo sapiens
agtgggctgtgaaag

SEQ ID NO: 880355 - DNA, 15 bp, Homo sapiens
gtgggctgtgaaagc

SEQ ID NO: 880356 - DNA, 15 bp, Homo sapiens
tgggctgtgaaagca

SEQ ID NO: 880357 - DNA, 15 bp, Homo sapiens
gggctgtgaaagcac

SEQ ID NO: 880358 - DNA, 15 bp, Homo sapiens
ggctgtgaaagcacc

SEQ ID NO: 880359 - DNA, 15 bp, Homo sapiens
gctgtgaaagcacca

SEQ ID NO: 880360 - DNA, 15 bp, Homo sapiens
ctgtgaaagcaccac

SEQ ID NO: 880361 - DNA, 15 bp, Homo sapiens
tgtgaaagcaccact

SEQ ID NO: 880362 - DNA, 15 bp, Homo sapiens
gtgaaagcaccactg

SEQ ID NO: 880363 - DNA, 15 bp, Homo sapiens
tgaaagcaccactgc

SEQ ID NO: 880364 - DNA, 15 bp, Homo sapiens
gaaagcaccactgca

SEQ ID NO: 880365 - DNA, 15 bp, Homo sapiens
aaagcaccactgcac

SEQ ID NO: 880366 - DNA, 15 bp, Homo sapiens
aagcaccactgcact

SEQ ID NO: 880367 - DNA, 15 bp, Homo sapiens
agcaccactgcactc

SEQ ID NO: 880368 - DNA, 15 bp, Homo sapiens
gcctgggcaacagaa

SEQ ID NO: 880369 - DNA, 15 bp, Homo sapiens
cctgggcaacagaac

SEQ ID NO: 880370 - DNA, 15 bp, Homo sapiens
ctgggcaacagaaca

SEQ ID NO: 880371 - DNA, 15 bp, Homo sapiens
tgggcaacagaacaa

SEQ ID NO: 880372 - DNA, 15 bp, Homo sapiens
gggcaacagaacaag

SEQ ID NO: 880373 - DNA, 15 bp, Homo sapiens
ggcaacagaacaaga

SEQ ID NO: 880374 - DNA, 15 bp, Homo sapiens
gcaacagaacaagag

SEQ ID NO: 880375 - DNA, 15 bp, Homo sapiens
caacagaacaagagc

SEQ ID NO: 880376 - DNA, 15 bp, Homo sapiens
aacagaacaagagcc

SEQ ID NO: 880377 - DNA, 15 bp, Homo sapiens
acagaacaagagcct

SEQ ID NO: 880378 - DNA, 15 bp, Homo sapiens
cagaacaagagcctg

SEQ ID NO: 880379 - DNA, 15 bp, Homo sapiens
agaacaagagcctgc

SEQ ID NO: 880380 - DNA, 15 bp, Homo sapiens
gaacaagagcctgcc

SEQ ID NO: 880381 - DNA, 15 bp, Homo sapiens
aacaagagcctgcct

SEQ ID NO: 880382 - DNA, 15 bp, Homo sapiens
acaagagcctgcctc

SEQ ID NO: 880383 - DNA, 15 bp, Homo sapiens
caagagcctgcctca

SEQ ID NO: 880384 - DNA, 15 bp, Homo sapiens
aagagcctgcctcaa

SEQ ID NO: 880385 - DNA, 15 bp, Homo sapiens
agagcctgcctcaaa

SEQ ID NO: 880386 - DNA, 15 bp, Homo sapiens
gagcctgcctcaaac

SEQ ID NO: 880387 - DNA, 15 bp, Homo sapiens
agcctgcctcaaaca

SEQ ID NO: 880388 - DNA, 15 bp, Homo sapiens
gcctgcctcaaacaa

SEQ ID NO: 880389 - DNA, 15 bp, Homo sapiens
cctgcctcaaacaaa

SEQ ID NO: 880390 - DNA, 15 bp, Homo sapiens
ctgcctcaaacaaaa

SEQ ID NO: 880391 - DNA, 15 bp, Homo sapiens
tgcctcaaacaaaaa

SEQ ID NO: 880392 - DNA, 15 bp, Homo sapiens
gcctcaaacaaaaac

SEQ ID NO: 880393 - DNA, 15 bp, Homo sapiens
cctcaaacaaaaaca

SEQ ID NO: 880394 - DNA, 15 bp, Homo sapiens
ctcaaacaaaaacaa

SEQ ID NO: 880395 - DNA, 15 bp, Homo sapiens
tcaaacaaaaacaaa

SEQ ID NO: 880396 - DNA, 15 bp, Homo sapiens
caaacaaaaacaaaa

SEQ ID NO: 880397 - DNA, 15 bp, Homo sapiens
aaacaaaaacaaaac

SEQ ID NO: 880398 - DNA, 15 bp, Homo sapiens
aacaaaaacaaaaca

SEQ ID NO: 880399 - DNA, 15 bp, Homo sapiens
caaaaacaaaacaag

SEQ ID NO: 880400 - DNA, 15 bp, Homo sapiens
aaaaacaaaacaaga

SEQ ID NO: 880401 - DNA, 15 bp, Homo sapiens
aaaacaaaacaagaa

SEQ ID NO: 880402 - DNA, 15 bp, Homo sapiens
aaacaaaacaagaaa

SEQ ID NO: 880403 - DNA, 15 bp, Homo sapiens
aacaaaacaagaaac

SEQ ID NO: 880404 - DNA, 15 bp, Homo sapiens
acaaaacaagaaaca

SEQ ID NO: 880405 - DNA, 15 bp, Homo sapiens
caaaacaagaaacaa

SEQ ID NO: 880406 - DNA, 15 bp, Homo sapiens
aaaacaagaaacaac

SEQ ID NO: 880407 - DNA, 15 bp, Homo sapiens
aaacaagaaacaact

SEQ ID NO: 880408 - DNA, 15 bp, Homo sapiens
aacaagaaacaactg

SEQ ID NO: 880409 - DNA, 15 bp, Homo sapiens
acaagaaacaactga

SEQ ID NO: 880410 - DNA, 15 bp, Homo sapiens
caagaaacaactgag

SEQ ID NO: 880411 - DNA, 15 bp, Homo sapiens
aagaaacaactgagg

SEQ ID NO: 880412 - DNA, 15 bp, Homo sapiens
agaaacaactgagga

SEQ ID NO: 880413 - DNA, 15 bp, Homo sapiens
gaaacaactgaggaa

SEQ ID NO: 880414 - DNA, 15 bp, Homo sapiens
aaacaactgaggaac

SEQ ID NO: 880415 - DNA, 15 bp, Homo sapiens
aacaactgaggaaca

SEQ ID NO: 880416 - DNA, 15 bp, Homo sapiens
acaactgaggaacat

SEQ ID NO: 880417 - DNA, 15 bp, Homo sapiens
caactgaggaacatg

SEQ ID NO: 880418 - DNA, 15 bp, Homo sapiens
aactgaggaacatgg

SEQ ID NO: 880419 - DNA, 15 bp, Homo sapiens
actgaggaacatgga

SEQ ID NO: 880420 - DNA, 15 bp, Homo sapiens
ctgaggaacatggat

SEQ ID NO: 880421 - DNA, 15 bp, Homo sapiens
tgaggaacatggatt

SEQ ID NO: 880422 - DNA, 15 bp, Homo sapiens
gaggaacatggattt

SEQ ID NO: 880423 - DNA, 15 bp, Homo sapiens
aggaacatggatttc

SEQ ID NO: 880424 - DNA, 15 bp, Homo sapiens
ggaacatggatttct

SEQ ID NO: 880425 - DNA, 15 bp, Homo sapiens
gaacatggatttctc

SEQ ID NO: 880426 - DNA, 15 bp, Homo sapiens
aacatggatttctct

SEQ ID NO: 880427 - DNA, 15 bp, Homo sapiens
acatggatttctcta

SEQ ID NO: 880428 - DNA, 15 bp, Homo sapiens
catggatttctctac

SEQ ID NO: 880429 - DNA, 15 bp, Homo sapiens
atggatttctctaca

SEQ ID NO: 880430 - DNA, 15 bp, Homo sapiens
tggatttctctacat

SEQ ID NO: 880431 - DNA, 15 bp, Homo sapiens
ggatttctctacatg

SEQ ID NO: 880432 - DNA, 15 bp, Homo sapiens
gatttctctacatgt

SEQ ID NO: 880433 - DNA, 15 bp, Homo sapiens
atttctctacatgtt

SEQ ID NO: 880434 - DNA, 15 bp, Homo sapiens
tttctctacatgtta

SEQ ID NO: 880435 - DNA, 15 bp, Homo sapiens
ttctctacatgttaa

SEQ ID NO: 880436 - DNA, 15 bp, Homo sapiens
tctctacatgttaag

SEQ ID NO: 880437 - DNA, 15 bp, Homo sapiens
ctctacatgttaaga

SEQ ID NO: 880438 - DNA, 15 bp, Homo sapiens
tctacatgttaagaa

SEQ ID NO: 880439 - DNA, 15 bp, Homo sapiens
ctacatgttaagaag

SEQ ID NO: 880440 - DNA, 15 bp, Homo sapiens
tacatgttaagaagt

SEQ ID NO: 880441 - DNA, 15 bp, Homo sapiens
acatgttaagaagtc

SEQ ID NO: 880442 - DNA, 15 bp, Homo sapiens
catgttaagaagtct

SEQ ID NO: 880443 - DNA, 15 bp, Homo sapiens
atgttaagaagtctg

SEQ ID NO: 880444 - DNA, 15 bp, Homo sapiens
tgttaagaagtctgg

SEQ ID NO: 880445 - DNA, 15 bp, Homo sapiens
gttaagaagtctggg

SEQ ID NO: 880446 - DNA, 15 bp, Homo sapiens
ttaagaagtctgggt

SEQ ID NO: 880447 - DNA, 15 bp, Homo sapiens
taagaagtctgggtt

SEQ ID NO: 880448 - DNA, 15 bp, Homo sapiens
aagaagtctgggttt

SEQ ID NO: 880449 - DNA, 15 bp, Homo sapiens
agaagtctgggtttt

SEQ ID NO: 880450 - DNA, 15 bp, Homo sapiens
gaagtctgggttttc

SEQ ID NO: 880451 - DNA, 15 bp, Homo sapiens
aagtctgggttttcc

SEQ ID NO: 880452 - DNA, 15 bp, Homo sapiens
agtctgggttttccc

SEQ ID NO: 880453 - DNA, 15 bp, Homo sapiens
gtctgggttttcccc

SEQ ID NO: 880454 - DNA, 15 bp, Homo sapiens
tctgggttttccccc

SEQ ID NO: 880455 - DNA, 15 bp, Homo sapiens
ctgggttttccccca

SEQ ID NO: 880456 - DNA, 15 bp, Homo sapiens
tgggttttcccccac

SEQ ID NO: 880457 - DNA, 15 bp, Homo sapiens
gggttttcccccact

SEQ ID NO: 880458 - DNA, 15 bp, Homo sapiens
ggttttcccccactt

SEQ ID NO: 880459 - DNA, 15 bp, Homo sapiens
gttttcccccactta

SEQ ID NO: 880460 - DNA, 15 bp, Homo sapiens
ttttcccccacttac

SEQ ID NO: 880461 - DNA, 15 bp, Homo sapiens
tttcccccacttaca

SEQ ID NO: 880462 - DNA, 15 bp, Homo sapiens
ttcccccacttacaa

SEQ ID NO: 880463 - DNA, 15 bp, Homo sapiens
tcccccacttacaaa

SEQ ID NO: 880464 - DNA, 15 bp, Homo sapiens
cccccacttacaaag

SEQ ID NO: 880465 - DNA, 15 bp, Homo sapiens
ccccacttacaaagc

SEQ ID NO: 880466 - DNA, 15 bp, Homo sapiens
cccacttacaaagct

SEQ ID NO: 880467 - DNA, 15 bp, Homo sapiens
ccacttacaaagcta

SEQ ID NO: 880468 - DNA, 15 bp, Homo sapiens
cacttacaaagctaa

SEQ ID NO: 880469 - DNA, 15 bp, Homo sapiens
acttacaaagctaaa

SEQ ID NO: 880470 - DNA, 15 bp, Homo sapiens
cttacaaagctaaaa

SEQ ID NO: 880471 - DNA, 15 bp, Homo sapiens
ttacaaagctaaaat

SEQ ID NO: 880472 - DNA, 15 bp, Homo sapiens
tacaaagctaaaatg

SEQ ID NO: 880473 - DNA, 15 bp, Homo sapiens
acaaagctaaaatgt

SEQ ID NO: 880474 - DNA, 15 bp, Homo sapiens
caaagctaaaatgta

SEQ ID NO: 880475 - DNA, 15 bp, Homo sapiens
aaagctaaaatgtat

SEQ ID NO: 880476 - DNA, 15 bp, Homo sapiens
aagctaaaatgtatt

SEQ ID NO: 880477 - DNA, 15 bp, Homo sapiens
agctaaaatgtatta

SEQ ID NO: 880478 - DNA, 15 bp, Homo sapiens
gctaaaatgtattat

SEQ ID NO: 880479 - DNA, 15 bp, Homo sapiens
ctaaaatgtattatt

SEQ ID NO: 880480 - DNA, 15 bp, Homo sapiens
taaaatgtattattt

SEQ ID NO: 880481 - DNA, 15 bp, Homo sapiens
aaaatgtattatttc

SEQ ID NO: 880482 - DNA, 15 bp, Homo sapiens
aaatgtattatttct

SEQ ID NO: 880483 - DNA, 15 bp, Homo sapiens
aatgtattatttctg

SEQ ID NO: 880484 - DNA, 15 bp, Homo sapiens
atgtattatttctgt

SEQ ID NO: 880485 - DNA, 15 bp, Homo sapiens
tgtattatttctgtt

SEQ ID NO: 880486 - DNA, 15 bp, Homo sapiens
gtattatttctgtta

SEQ ID NO: 880487 - DNA, 15 bp, Homo sapiens
tattatttctgttat

SEQ ID NO: 880488 - DNA, 15 bp, Homo sapiens
attatttctgttatc

SEQ ID NO: 880489 - DNA, 15 bp, Homo sapiens
ttatttctgttatca

SEQ ID NO: 880490 - DNA, 15 bp, Homo sapiens
tatttctgttatcag

SEQ ID NO: 880491 - DNA, 15 bp, Homo sapiens
atttctgttatcagc

SEQ ID NO: 880492 - DNA, 15 bp, Homo sapiens
tttctgttatcagct

SEQ ID NO: 880493 - DNA, 15 bp, Homo sapiens
ttctgttatcagctt

SEQ ID NO: 880494 - DNA, 15 bp, Homo sapiens
tctgttatcagcttc

SEQ ID NO: 880495 - DNA, 15 bp, Homo sapiens
ctgttatcagcttcc

SEQ ID NO: 880496 - DNA, 15 bp, Homo sapiens
tgttatcagcttcca

SEQ ID NO: 880497 - DNA, 15 bp, Homo sapiens
gttatcagcttccaa

SEQ ID NO: 880498 - DNA, 15 bp, Homo sapiens
ttatcagcttccaaa

SEQ ID NO: 880499 - DNA, 15 bp, Homo sapiens
tatcagcttccaaaa

SEQ ID NO: 880500 - DNA, 15 bp, Homo sapiens
atcagcttccaaaac

SEQ ID NO: 880501 - DNA, 15 bp, Homo sapiens
tcagcttccaaaacc

SEQ ID NO: 880502 - DNA, 15 bp, Homo sapiens
cagcttccaaaacct

SEQ ID NO: 880503 - DNA, 15 bp, Homo sapiens
agcttccaaaacctc

SEQ ID NO: 880504 - DNA, 15 bp, Homo sapiens
gcttccaaaacctca

SEQ ID NO: 880505 - DNA, 15 bp, Homo sapiens
cttccaaaacctcag

SEQ ID NO: 880506 - DNA, 15 bp, Homo sapiens
ttccaaaacctcaga

SEQ ID NO: 880507 - DNA, 15 bp, Homo sapiens
tccaaaacctcagaa

SEQ ID NO: 880508 - DNA, 15 bp, Homo sapiens
ccaaaacctcagaaa

SEQ ID NO: 880509 - DNA, 15 bp, Homo sapiens
caaaacctcagaaat

SEQ ID NO: 880510 - DNA, 15 bp, Homo sapiens
aaaacctcagaaatg

SEQ ID NO: 880511 - DNA, 15 bp, Homo sapiens
aaacctcagaaatgg

SEQ ID NO: 880512 - DNA, 15 bp, Homo sapiens
aacctcagaaatggg

SEQ ID NO: 880513 - DNA, 15 bp, Homo sapiens
acctcagaaatgggg

SEQ ID NO: 880514 - DNA, 15 bp, Homo sapiens
cctcagaaatggggg

SEQ ID NO: 880515 - DNA, 15 bp, Homo sapiens
ctcagaaatgggggg

SEQ ID NO: 880516 - DNA, 15 bp, Homo sapiens
tcagaaatgggggga

SEQ ID NO: 880517 - DNA, 15 bp, Homo sapiens
cagaaatggggggaa

SEQ ID NO: 880518 - DNA, 15 bp, Homo sapiens
agaaatggggggaaa

SEQ ID NO: 880519 - DNA, 15 bp, Homo sapiens
gaaatggggggaaaa

SEQ ID NO: 880520 - DNA, 15 bp, Homo sapiens
aaatggggggaaaaa

SEQ ID NO: 880521 - DNA, 15 bp, Homo sapiens
aatggggggaaaaag

SEQ ID NO: 880522 - DNA, 15 bp, Homo sapiens
atggggggaaaaaga

SEQ ID NO: 880523 - DNA, 15 bp, Homo sapiens
tggggggaaaaagag

SEQ ID NO: 880524 - DNA, 15 bp, Homo sapiens
ggggggaaaaagagc

SEQ ID NO: 880525 - DNA, 15 bp, Homo sapiens
gggggaaaaagagcc

SEQ ID NO: 880526 - DNA, 15 bp, Homo sapiens
ggggaaaaagagcca

SEQ ID NO: 880527 - DNA, 15 bp, Homo sapiens
gggaaaaagagccaa

SEQ ID NO: 880528 - DNA, 15 bp, Homo sapiens
ggaaaaagagccaag

SEQ ID NO: 880529 - DNA, 15 bp, Homo sapiens
gaaaaagagccaagt

SEQ ID NO: 880530 - DNA, 15 bp, Homo sapiens
aaaaagagccaagta

SEQ ID NO: 880531 - DNA, 15 bp, Homo sapiens
aaaagagccaagtaa

SEQ ID NO: 880532 - DNA, 15 bp, Homo sapiens
aaagagccaagtaat

SEQ ID NO: 880533 - DNA, 15 bp, Homo sapiens
aagagccaagtaata

SEQ ID NO: 880534 - DNA, 15 bp, Homo sapiens
agagccaagtaatat

SEQ ID NO: 880535 - DNA, 15 bp, Homo sapiens
gagccaagtaatata

SEQ ID NO: 880536 - DNA, 15 bp, Homo sapiens
agccaagtaatataa

SEQ ID NO: 880537 - DNA, 15 bp, Homo sapiens
gccaagtaatataat

SEQ ID NO: 880538 - DNA, 15 bp, Homo sapiens
ccaagtaatataatt

SEQ ID NO: 880539 - DNA, 15 bp, Homo sapiens
caagtaatataattc

SEQ ID NO: 880540 - DNA, 15 bp, Homo sapiens
aagtaatataattca

SEQ ID NO: 880541 - DNA, 15 bp, Homo sapiens
agtaatataattcat

SEQ ID NO: 880542 - DNA, 15 bp, Homo sapiens
gtaatataattcatt

SEQ ID NO: 880543 - DNA, 15 bp, Homo sapiens
taatataattcatta

SEQ ID NO: 880544 - DNA, 15 bp, Homo sapiens
aatataattcattaa

SEQ ID NO: 880545 - DNA, 15 bp, Homo sapiens
atataattcattaaa

SEQ ID NO: 880546 - DNA, 15 bp, Homo sapiens
tataattcattaaag

SEQ ID NO: 880547 - DNA, 15 bp, Homo sapiens
ataattcattaaaga

SEQ ID NO: 880548 - DNA, 15 bp, Homo sapiens
taattcattaaagaa

SEQ ID NO: 880549 - DNA, 15 bp, Homo sapiens
aattcattaaagaac

SEQ ID NO: 880550 - DNA, 15 bp, Homo sapiens
attcattaaagaaca

SEQ ID NO: 880551 - DNA, 15 bp, Homo sapiens
ttcattaaagaacac

SEQ ID NO: 880552 - DNA, 15 bp, Homo sapiens
tcattaaagaacaca

SEQ ID NO: 880553 - DNA, 15 bp, Homo sapiens
cattaaagaacacac

SEQ ID NO: 880554 - DNA, 15 bp, Homo sapiens
attaaagaacacaca

SEQ ID NO: 880555 - DNA, 15 bp, Homo sapiens
ttaaagaacacacaa

SEQ ID NO: 880556 - DNA, 15 bp, Homo sapiens
taaagaacacacaag

SEQ ID NO: 880557 - DNA, 15 bp, Homo sapiens
aaagaacacacaaga

SEQ ID NO: 880558 - DNA, 15 bp, Homo sapiens
aagaacacacaagaa

SEQ ID NO: 880559 - DNA, 15 bp, Homo sapiens
agaacacacaagaat

SEQ ID NO: 880560 - DNA, 15 bp, Homo sapiens
gaacacacaagaatc

SEQ ID NO: 880561 - DNA, 15 bp, Homo sapiens
aacacacaagaatct

SEQ ID NO: 880562 - DNA, 15 bp, Homo sapiens
acacacaagaatcta

SEQ ID NO: 880563 - DNA, 15 bp, Homo sapiens
cacacaagaatctat

SEQ ID NO: 880564 - DNA, 15 bp, Homo sapiens
acacaagaatctatc

SEQ ID NO: 880565 - DNA, 15 bp, Homo sapiens
cacaagaatctatcc

SEQ ID NO: 880566 - DNA, 15 bp, Homo sapiens
acaagaatctatcca

SEQ ID NO: 880567 - DNA, 15 bp, Homo sapiens
caagaatctatccac

SEQ ID NO: 880568 - DNA, 15 bp, Homo sapiens
aagaatctatccaca

SEQ ID NO: 880569 - DNA, 15 bp, Homo sapiens
agaatctatccacaa

SEQ ID NO: 880570 - DNA, 15 bp, Homo sapiens
gaatctatccacaag

SEQ ID NO: 880571 - DNA, 15 bp, Homo sapiens
aatctatccacaagc

SEQ ID NO: 880572 - DNA, 15 bp, Homo sapiens
atctatccacaagca

SEQ ID NO: 880573 - DNA, 15 bp, Homo sapiens
tctatccacaagcag

SEQ ID NO: 880574 - DNA, 15 bp, Homo sapiens
ctatccacaagcagt

SEQ ID NO: 880575 - DNA, 15 bp, Homo sapiens
tatccacaagcagta

SEQ ID NO: 880576 - DNA, 15 bp, Homo sapiens
atccacaagcagtac

SEQ ID NO: 880577 - DNA, 15 bp, Homo sapiens
tccacaagcagtaca

SEQ ID NO: 880578 - DNA, 15 bp, Homo sapiens
ccacaagcagtacat

SEQ ID NO: 880579 - DNA, 15 bp, Homo sapiens
cacaagcagtacatg

SEQ ID NO: 880580 - DNA, 15 bp, Homo sapiens
acaagcagtacatgt

SEQ ID NO: 880581 - DNA, 15 bp, Homo sapiens
caagcagtacatgtt

SEQ ID NO: 880582 - DNA, 15 bp, Homo sapiens
aagcagtacatgtta

SEQ ID NO: 880583 - DNA, 15 bp, Homo sapiens
agcagtacatgttac

SEQ ID NO: 880584 - DNA, 15 bp, Homo sapiens
gcagtacatgttact

SEQ ID NO: 880585 - DNA, 15 bp, Homo sapiens
cagtacatgttactc

SEQ ID NO: 880586 - DNA, 15 bp, Homo sapiens
agtacatgttactca

SEQ ID NO: 880587 - DNA, 15 bp, Homo sapiens
gtacatgttactcat

SEQ ID NO: 880588 - DNA, 15 bp, Homo sapiens
tacatgttactcatt

SEQ ID NO: 880589 - DNA, 15 bp, Homo sapiens
acatgttactcatta

SEQ ID NO: 880590 - DNA, 15 bp, Homo sapiens
catgttactcattag

SEQ ID NO: 880591 - DNA, 15 bp, Homo sapiens
atgttactcattaga

SEQ ID NO: 880592 - DNA, 15 bp, Homo sapiens
tgttactcattagat

SEQ ID NO: 880593 - DNA, 15 bp, Homo sapiens
gttactcattagatg

SEQ ID NO: 880594 - DNA, 15 bp, Homo sapiens
ttactcattagatgc

SEQ ID NO: 880595 - DNA, 15 bp, Homo sapiens
tactcattagatgcc

SEQ ID NO: 880596 - DNA, 15 bp, Homo sapiens
actcattagatgcca

SEQ ID NO: 880597 - DNA, 15 bp, Homo sapiens
ctcattagatgccac

SEQ ID NO: 880598 - DNA, 15 bp, Homo sapiens
tcattagatgccacc

SEQ ID NO: 880599 - DNA, 15 bp, Homo sapiens
cattagatgccacca

SEQ ID NO: 880600 - DNA, 15 bp, Homo sapiens
attagatgccaccat

SEQ ID NO: 880601 - DNA, 15 bp, Homo sapiens
ttagatgccaccatg

SEQ ID NO: 880602 - DNA, 15 bp, Homo sapiens
tagatgccaccatgt

SEQ ID NO: 880603 - DNA, 15 bp, Homo sapiens
agatgccaccatgtg

SEQ ID NO: 880604 - DNA, 15 bp, Homo sapiens
gatgccaccatgtgc

SEQ ID NO: 880605 - DNA, 15 bp, Homo sapiens
atgccaccatgtgcc

SEQ ID NO: 880606 - DNA, 15 bp, Homo sapiens
tgccaccatgtgcct

SEQ ID NO: 880607 - DNA, 15 bp, Homo sapiens
gccaccatgtgcctt

SEQ ID NO: 880608 - DNA, 15 bp, Homo sapiens
ccaccatgtgccttt

SEQ ID NO: 880609 - DNA, 15 bp, Homo sapiens
caccatgtgccttta

SEQ ID NO: 880610 - DNA, 15 bp, Homo sapiens
accatgtgcctttac

SEQ ID NO: 880611 - DNA, 15 bp, Homo sapiens
ccatgtgcctttaca

SEQ ID NO: 880612 - DNA, 15 bp, Homo sapiens
catgtgcctttacat

SEQ ID NO: 880613 - DNA, 15 bp, Homo sapiens
atgtgcctttacata

SEQ ID NO: 880614 - DNA, 15 bp, Homo sapiens
tgtgcctttacataa

SEQ ID NO: 880615 - DNA, 15 bp, Homo sapiens
gtgcctttacataat

SEQ ID NO: 880616 - DNA, 15 bp, Homo sapiens
tgcctttacataatg

SEQ ID NO: 880617 - DNA, 15 bp, Homo sapiens
gcctttacataatgc

SEQ ID NO: 880618 - DNA, 15 bp, Homo sapiens
cctttacataatgcc

SEQ ID NO: 880619 - DNA, 15 bp, Homo sapiens
ctttacataatgcct

SEQ ID NO: 880620 - DNA, 15 bp, Homo sapiens
tttacataatgcctg

SEQ ID NO: 880621 - DNA, 15 bp, Homo sapiens
ttacataatgcctga

SEQ ID NO: 880622 - DNA, 15 bp, Homo sapiens
tacataatgcctgac

SEQ ID NO: 880623 - DNA, 15 bp, Homo sapiens
acataatgcctgaca

SEQ ID NO: 880624 - DNA, 15 bp, Homo sapiens
cataatgcctgacac

SEQ ID NO: 880625 - DNA, 15 bp, Homo sapiens
ataatgcctgacaca

SEQ ID NO: 880626 - DNA, 15 bp, Homo sapiens
taatgcctgacacaa

SEQ ID NO: 880627 - DNA, 15 bp, Homo sapiens
aatgcctgacacaat

SEQ ID NO: 880628 - DNA, 15 bp, Homo sapiens
atgcctgacacaata

SEQ ID NO: 880629 - DNA, 15 bp, Homo sapiens
tgcctgacacaatag

SEQ ID NO: 880630 - DNA, 15 bp, Homo sapiens
gcctgacacaatagg

SEQ ID NO: 880631 - DNA, 15 bp, Homo sapiens
cctgacacaataggg

SEQ ID NO: 880632 - DNA, 15 bp, Homo sapiens
ctgacacaataggga

SEQ ID NO: 880633 - DNA, 15 bp, Homo sapiens
tgacacaatagggac

SEQ ID NO: 880634 - DNA, 15 bp, Homo sapiens
gacacaatagggact

SEQ ID NO: 880635 - DNA, 15 bp, Homo sapiens
acacaatagggactc

SEQ ID NO: 880636 - DNA, 15 bp, Homo sapiens
cacaatagggactca

SEQ ID NO: 880637 - DNA, 15 bp, Homo sapiens
acaatagggactcaa

SEQ ID NO: 880638 - DNA, 15 bp, Homo sapiens
caatagggactcaat

SEQ ID NO: 880639 - DNA, 15 bp, Homo sapiens
aatagggactcaata

SEQ ID NO: 880640 - DNA, 15 bp, Homo sapiens
atagggactcaataa

SEQ ID NO: 880641 - DNA, 15 bp, Homo sapiens
tagggactcaataaa

SEQ ID NO: 880642 - DNA, 15 bp, Homo sapiens
agggactcaataaat

SEQ ID NO: 880643 - DNA, 15 bp, Homo sapiens
gggactcaataaata

SEQ ID NO: 880644 - DNA, 15 bp, Homo sapiens
ggactcaataaatat

SEQ ID NO: 880645 - DNA, 15 bp, Homo sapiens
gactcaataaatatt

SEQ ID NO: 880646 - DNA, 15 bp, Homo sapiens
tcaataaatatttaa

SEQ ID NO: 880647 - DNA, 15 bp, Homo sapiens
caataaatatttaaa

SEQ ID NO: 880648 - DNA, 15 bp, Homo sapiens
aataaatatttaaag

SEQ ID NO: 880649 - DNA, 15 bp, Homo sapiens
ataaatatttaaagg

SEQ ID NO: 880650 - DNA, 15 bp, Homo sapiens
taaatatttaaagga

SEQ ID NO: 880651 - DNA, 15 bp, Homo sapiens
aaatatttaaaggag

SEQ ID NO: 880652 - DNA, 15 bp, Homo sapiens
aatatttaaaggagt

SEQ ID NO: 880653 - DNA, 15 bp, Homo sapiens
atatttaaaggagtg

SEQ ID NO: 880654 - DNA, 15 bp, Homo sapiens
tatttaaaggagtga

SEQ ID NO: 880655 - DNA, 15 bp, Homo sapiens
atttaaaggagtgag

SEQ ID NO: 880656 - DNA, 15 bp, Homo sapiens
tttaaaggagtgaga

SEQ ID NO: 880657 - DNA, 15 bp, Homo sapiens
ttaaaggagtgagaa

SEQ ID NO: 880658 - DNA, 15 bp, Homo sapiens
taaaggagtgagaaa

SEQ ID NO: 880659 - DNA, 15 bp, Homo sapiens
aaaggagtgagaaaa

SEQ ID NO: 880660 - DNA, 15 bp, Homo sapiens
aaggagtgagaaaaa

SEQ ID NO: 880661 - DNA, 15 bp, Homo sapiens
aggagtgagaaaaag

SEQ ID NO: 880662 - DNA, 15 bp, Homo sapiens
ggagtgagaaaaaga

SEQ ID NO: 880663 - DNA, 15 bp, Homo sapiens
gagtgagaaaaagat

SEQ ID NO: 880664 - DNA, 15 bp, Homo sapiens
agtgagaaaaagatc

SEQ ID NO: 880665 - DNA, 15 bp, Homo sapiens
gtgagaaaaagatcg

SEQ ID NO: 880666 - DNA, 15 bp, Homo sapiens
tgagaaaaagatcgg

SEQ ID NO: 880667 - DNA, 15 bp, Homo sapiens
gagaaaaagatcgga

SEQ ID NO: 880668 - DNA, 15 bp, Homo sapiens
agaaaaagatcggac

SEQ ID NO: 880669 - DNA, 15 bp, Homo sapiens
gaaaaagatcggaca

SEQ ID NO: 880670 - DNA, 15 bp, Homo sapiens
aaaaagatcggacag

SEQ ID NO: 880671 - DNA, 15 bp, Homo sapiens
aaaagatcggacagt

SEQ ID NO: 880672 - DNA, 15 bp, Homo sapiens
aaagatcggacagtt

SEQ ID NO: 880673 - DNA, 15 bp, Homo sapiens
aagatcggacagtta

SEQ ID NO: 880674 - DNA, 15 bp, Homo sapiens
agatcggacagttat

SEQ ID NO: 880675 - DNA, 15 bp, Homo sapiens
gatcggacagttatc

SEQ ID NO: 880676 - DNA, 15 bp, Homo sapiens
atcggacagttatct

SEQ ID NO: 880677 - DNA, 15 bp, Homo sapiens
tcggacagttatctt

SEQ ID NO: 880678 - DNA, 15 bp, Homo sapiens
cggacagttatcttt

SEQ ID NO: 880679 - DNA, 15 bp, Homo sapiens
ggacagttatctttt

SEQ ID NO: 880680 - DNA, 15 bp, Homo sapiens
gacagttatcttttg

SEQ ID NO: 880681 - DNA, 15 bp, Homo sapiens
acagttatcttttgg

SEQ ID NO: 880682 - DNA, 15 bp, Homo sapiens
cagttatcttttgga

SEQ ID NO: 880683 - DNA, 15 bp, Homo sapiens
agttatcttttggat

SEQ ID NO: 880684 - DNA, 15 bp, Homo sapiens
gttatcttttggatg

SEQ ID NO: 880685 - DNA, 15 bp, Homo sapiens
ttatcttttggatgc

SEQ ID NO: 880686 - DNA, 15 bp, Homo sapiens
tatcttttggatgct

SEQ ID NO: 880687 - DNA, 15 bp, Homo sapiens
atcttttggatgctg

SEQ ID NO: 880688 - DNA, 15 bp, Homo sapiens
tcttttggatgctgg

SEQ ID NO: 880689 - DNA, 15 bp, Homo sapiens
cttttggatgctggg

SEQ ID NO: 880690 - DNA, 15 bp, Homo sapiens
ttttggatgctgggc

SEQ ID NO: 880691 - DNA, 15 bp, Homo sapiens
tttggatgctgggcc

SEQ ID NO: 880692 - DNA, 15 bp, Homo sapiens
ttggatgctgggcca

SEQ ID NO: 880693 - DNA, 15 bp, Homo sapiens
tggatgctgggccaa

SEQ ID NO: 880694 - DNA, 15 bp, Homo sapiens
ggatgctgggccaaa

SEQ ID NO: 880695 - DNA, 15 bp, Homo sapiens
gatgctgggccaaaa

SEQ ID NO: 880696 - DNA, 15 bp, Homo sapiens
atgctgggccaaaaa

SEQ ID NO: 880697 - DNA, 15 bp, Homo sapiens
tgctgggccaaaaac

SEQ ID NO: 880698 - DNA, 15 bp, Homo sapiens
gctgggccaaaaacc

SEQ ID NO: 880699 - DNA, 15 bp, Homo sapiens
ctgggccaaaaaccc

SEQ ID NO: 880700 - DNA, 15 bp, Homo sapiens
tgggccaaaaaccca

SEQ ID NO: 880701 - DNA, 15 bp, Homo sapiens
gggccaaaaacccac

SEQ ID NO: 880702 - DNA, 15 bp, Homo sapiens
ggccaaaaacccact

SEQ ID NO: 880703 - DNA, 15 bp, Homo sapiens
gccaaaaacccactg

SEQ ID NO: 880704 - DNA, 15 bp, Homo sapiens
ccaaaaacccactgc

SEQ ID NO: 880705 - DNA, 15 bp, Homo sapiens
caaaaacccactgcc

SEQ ID NO: 880706 - DNA, 15 bp, Homo sapiens
aaaaacccactgcct

SEQ ID NO: 880707 - DNA, 15 bp, Homo sapiens
aaaacccactgcctt

SEQ ID NO: 880708 - DNA, 15 bp, Homo sapiens
aaacccactgcctta

SEQ ID NO: 880709 - DNA, 15 bp, Homo sapiens
aacccactgccttag

SEQ ID NO: 880710 - DNA, 15 bp, Homo sapiens
acccactgccttagt

SEQ ID NO: 880711 - DNA, 15 bp, Homo sapiens
cccactgccttagtg

SEQ ID NO: 880712 - DNA, 15 bp, Homo sapiens
ccactgccttagtga

SEQ ID NO: 880713 - DNA, 15 bp, Homo sapiens
cactgccttagtgag

SEQ ID NO: 880714 - DNA, 15 bp, Homo sapiens
actgccttagtgagc

SEQ ID NO: 880715 - DNA, 15 bp, Homo sapiens
ctgccttagtgagca

SEQ ID NO: 880716 - DNA, 15 bp, Homo sapiens
tgccttagtgagcac

SEQ ID NO: 880717 - DNA, 15 bp, Homo sapiens
gccttagtgagcaca

SEQ ID NO: 880718 - DNA, 15 bp, Homo sapiens
ccttagtgagcacag

SEQ ID NO: 880719 - DNA, 15 bp, Homo sapiens
cttagtgagcacagg

SEQ ID NO: 880720 - DNA, 15 bp, Homo sapiens
ttagtgagcacaggc

SEQ ID NO: 880721 - DNA, 15 bp, Homo sapiens
tagtgagcacaggca

SEQ ID NO: 880722 - DNA, 15 bp, Homo sapiens
agtgagcacaggcag

SEQ ID NO: 880723 - DNA, 15 bp, Homo sapiens
gtgagcacaggcagt

SEQ ID NO: 880724 - DNA, 15 bp, Homo sapiens
tgagcacaggcagtt

SEQ ID NO: 880725 - DNA, 15 bp, Homo sapiens
gagcacaggcagttg

SEQ ID NO: 880726 - DNA, 15 bp, Homo sapiens
agcacaggcagttga

SEQ ID NO: 880727 - DNA, 15 bp, Homo sapiens
gcacaggcagttgaa

SEQ ID NO: 880728 - DNA, 15 bp, Homo sapiens
cacaggcagttgaaa

SEQ ID NO: 880729 - DNA, 15 bp, Homo sapiens
acaggcagttgaaaa

SEQ ID NO: 880730 - DNA, 15 bp, Homo sapiens
caggcagttgaaaat

SEQ ID NO: 880731 - DNA, 15 bp, Homo sapiens
aggcagttgaaaata

SEQ ID NO: 880732 - DNA, 15 bp, Homo sapiens
ggcagttgaaaatag

SEQ ID NO: 880733 - DNA, 15 bp, Homo sapiens
gcagttgaaaatagt

SEQ ID NO: 880734 - DNA, 15 bp, Homo sapiens
cagttgaaaatagtc

SEQ ID NO: 880735 - DNA, 15 bp, Homo sapiens
agttgaaaatagtca

SEQ ID NO: 880736 - DNA, 15 bp, Homo sapiens
gttgaaaatagtcac

SEQ ID NO: 880737 - DNA, 15 bp, Homo sapiens
ttgaaaatagtcacc

SEQ ID NO: 880738 - DNA, 15 bp, Homo sapiens
tgaaaatagtcacct

SEQ ID NO: 880739 - DNA, 15 bp, Homo sapiens
gaaaatagtcaccta

SEQ ID NO: 880740 - DNA, 15 bp, Homo sapiens
aaaatagtcacctat

SEQ ID NO: 880741 - DNA, 15 bp, Homo sapiens
aaatagtcacctata

SEQ ID NO: 880742 - DNA, 15 bp, Homo sapiens
aatagtcacctatag

SEQ ID NO: 880743 - DNA, 15 bp, Homo sapiens
atagtcacctataga

SEQ ID NO: 880744 - DNA, 15 bp, Homo sapiens
tagtcacctatagac

SEQ ID NO: 880745 - DNA, 15 bp, Homo sapiens
agtcacctatagaca

SEQ ID NO: 880746 - DNA, 15 bp, Homo sapiens
gtcacctatagacaa

SEQ ID NO: 880747 - DNA, 15 bp, Homo sapiens
tcacctatagacaaa

SEQ ID NO: 880748 - DNA, 15 bp, Homo sapiens
cacctatagacaaac

SEQ ID NO: 880749 - DNA, 15 bp, Homo sapiens
acctatagacaaaca

SEQ ID NO: 880750 - DNA, 15 bp, Homo sapiens
cctatagacaaacag

SEQ ID NO: 880751 - DNA, 15 bp, Homo sapiens
ctatagacaaacagt

SEQ ID NO: 880752 - DNA, 15 bp, Homo sapiens
tatagacaaacagtc

SEQ ID NO: 880753 - DNA, 15 bp, Homo sapiens
atagacaaacagtca

SEQ ID NO: 880754 - DNA, 15 bp, Homo sapiens
tagacaaacagtcat

SEQ ID NO: 880755 - DNA, 15 bp, Homo sapiens
agacaaacagtcata

SEQ ID NO: 880756 - DNA, 15 bp, Homo sapiens
gacaaacagtcatac

SEQ ID NO: 880757 - DNA, 15 bp, Homo sapiens
acaaacagtcataca

SEQ ID NO: 880758 - DNA, 15 bp, Homo sapiens
caaacagtcatacac

SEQ ID NO: 880759 - DNA, 15 bp, Homo sapiens
aaacagtcatacaca

SEQ ID NO: 880760 - DNA, 15 bp, Homo sapiens
aacagtcatacacag

SEQ ID NO: 880761 - DNA, 15 bp, Homo sapiens
acagtcatacacaga

SEQ ID NO: 880762 - DNA, 15 bp, Homo sapiens
cagtcatacacagag

SEQ ID NO: 880763 - DNA, 15 bp, Homo sapiens
agtcatacacagagg

SEQ ID NO: 880764 - DNA, 15 bp, Homo sapiens
gtcatacacagagga

SEQ ID NO: 880765 - DNA, 15 bp, Homo sapiens
tcatacacagaggag

SEQ ID NO: 880766 - DNA, 15 bp, Homo sapiens
catacacagaggaga

SEQ ID NO: 880767 - DNA, 15 bp, Homo sapiens
atacacagaggagag

SEQ ID NO: 880768 - DNA, 15 bp, Homo sapiens
tacacagaggagagc

SEQ ID NO: 880769 - DNA, 15 bp, Homo sapiens
acacagaggagagca

SEQ ID NO: 880770 - DNA, 15 bp, Homo sapiens
cacagaggagagcat

SEQ ID NO: 880771 - DNA, 15 bp, Homo sapiens
acagaggagagcata

SEQ ID NO: 880772 - DNA, 15 bp, Homo sapiens
cagaggagagcataa

SEQ ID NO: 880773 - DNA, 15 bp, Homo sapiens
agaggagagcataag

SEQ ID NO: 880774 - DNA, 15 bp, Homo sapiens
gaggagagcataagc

SEQ ID NO: 880775 - DNA, 15 bp, Homo sapiens
aggagagcataagca

SEQ ID NO: 880776 - DNA, 15 bp, Homo sapiens
ggagagcataagcat

SEQ ID NO: 880777 - DNA, 15 bp, Homo sapiens
gagagcataagcata

SEQ ID NO: 880778 - DNA, 15 bp, Homo sapiens
agagcataagcatat

SEQ ID NO: 880779 - DNA, 15 bp, Homo sapiens
gagcataagcatata

SEQ ID NO: 880780 - DNA, 15 bp, Homo sapiens
agcataagcatatat

SEQ ID NO: 880781 - DNA, 15 bp, Homo sapiens
gcataagcatatata

SEQ ID NO: 880782 - DNA, 15 bp, Homo sapiens
cataagcatatatat

SEQ ID NO: 880783 - DNA, 15 bp, Homo sapiens
ataagcatatatatg

SEQ ID NO: 880784 - DNA, 15 bp, Homo sapiens
taagcatatatatgc

SEQ ID NO: 880785 - DNA, 15 bp, Homo sapiens
aagcatatatatgct

SEQ ID NO: 880786 - DNA, 15 bp, Homo sapiens
agcatatatatgctt

SEQ ID NO: 880787 - DNA, 15 bp, Homo sapiens
gcatatatatgcttt

SEQ ID NO: 880788 - DNA, 15 bp, Homo sapiens
catatatatgctttg

SEQ ID NO: 880789 - DNA, 15 bp, Homo sapiens
atatatatgctttgc

SEQ ID NO: 880790 - DNA, 15 bp, Homo sapiens
tatatatgctttgct

SEQ ID NO: 880791 - DNA, 15 bp, Homo sapiens
atatatgctttgctc

SEQ ID NO: 880792 - DNA, 15 bp, Homo sapiens
tatatgctttgctca

SEQ ID NO: 880793 - DNA, 15 bp, Homo sapiens
atatgctttgctcat

SEQ ID NO: 880794 - DNA, 15 bp, Homo sapiens
tatgctttgctcatt

SEQ ID NO: 880795 - DNA, 15 bp, Homo sapiens
atgctttgctcattc

SEQ ID NO: 880796 - DNA, 15 bp, Homo sapiens
tgctttgctcattcc

SEQ ID NO: 880797 - DNA, 15 bp, Homo sapiens
gctttgctcattcca

SEQ ID NO: 880798 - DNA, 15 bp, Homo sapiens
ctttgctcattccag

SEQ ID NO: 880799 - DNA, 15 bp, Homo sapiens
tttgctcattccaga

SEQ ID NO: 880800 - DNA, 15 bp, Homo sapiens
ttgctcattccagaa

SEQ ID NO: 880801 - DNA, 15 bp, Homo sapiens
tgctcattccagaaa

SEQ ID NO: 880802 - DNA, 15 bp, Homo sapiens
gctcattccagaaat

SEQ ID NO: 880803 - DNA, 15 bp, Homo sapiens
ctcattccagaaata

SEQ ID NO: 880804 - DNA, 15 bp, Homo sapiens
tcattccagaaatat

SEQ ID NO: 880805 - DNA, 15 bp, Homo sapiens
cattccagaaatatg

SEQ ID NO: 880806 - DNA, 15 bp, Homo sapiens
attccagaaatatgg

SEQ ID NO: 880807 - DNA, 15 bp, Homo sapiens
ttccagaaatatggt

SEQ ID NO: 880808 - DNA, 15 bp, Homo sapiens
tccagaaatatggtc

SEQ ID NO: 880809 - DNA, 15 bp, Homo sapiens
ccagaaatatggtcg

SEQ ID NO: 880810 - DNA, 15 bp, Homo sapiens
cagaaatatggtcga

SEQ ID NO: 880811 - DNA, 15 bp, Homo sapiens
agaaatatggtcgat

SEQ ID NO: 880812 - DNA, 15 bp, Homo sapiens
gaaatatggtcgatt

SEQ ID NO: 880813 - DNA, 15 bp, Homo sapiens
aaatatggtcgattt

SEQ ID NO: 880814 - DNA, 15 bp, Homo sapiens
aatatggtcgatttg

SEQ ID NO: 880815 - DNA, 15 bp, Homo sapiens
atatggtcgatttga

SEQ ID NO: 880816 - DNA, 15 bp, Homo sapiens
tatggtcgatttgat

SEQ ID NO: 880817 - DNA, 15 bp, Homo sapiens
atggtcgatttgatt

SEQ ID NO: 880818 - DNA, 15 bp, Homo sapiens
tggtcgatttgatta

SEQ ID NO: 880819 - DNA, 15 bp, Homo sapiens
ggtcgatttgattat

SEQ ID NO: 880820 - DNA, 15 bp, Homo sapiens
gtcgatttgattata

SEQ ID NO: 880821 - DNA, 15 bp, Homo sapiens
tcgatttgattatat

SEQ ID NO: 880822 - DNA, 15 bp, Homo sapiens
cgatttgattatatg

SEQ ID NO: 880823 - DNA, 15 bp, Homo sapiens
gatttgattatatga

SEQ ID NO: 880824 - DNA, 15 bp, Homo sapiens
atttgattatatgat

SEQ ID NO: 880825 - DNA, 15 bp, Homo sapiens
tttgattatatgatt

SEQ ID NO: 880826 - DNA, 15 bp, Homo sapiens
ttgattatatgattc

SEQ ID NO: 880827 - DNA, 15 bp, Homo sapiens
tgattatatgattcc

SEQ ID NO: 880828 - DNA, 15 bp, Homo sapiens
gattatatgattcca

SEQ ID NO: 880829 - DNA, 15 bp, Homo sapiens
attatatgattccat

SEQ ID NO: 880830 - DNA, 15 bp, Homo sapiens
ttatatgattccatg

SEQ ID NO: 880831 - DNA, 15 bp, Homo sapiens
tatatgattccatgg

SEQ ID NO: 880832 - DNA, 15 bp, Homo sapiens
atatgattccatggt

SEQ ID NO: 880833 - DNA, 15 bp, Homo sapiens
tatgattccatggtt

SEQ ID NO: 880834 - DNA, 15 bp, Homo sapiens
atgattccatggtta

SEQ ID NO: 880835 - DNA, 15 bp, Homo sapiens
tgattccatggttat

SEQ ID NO: 880836 - DNA, 15 bp, Homo sapiens
gattccatggttatc

SEQ ID NO: 880837 - DNA, 15 bp, Homo sapiens
attccatggttatct

SEQ ID NO: 880838 - DNA, 15 bp, Homo sapiens
ttccatggttatctt

SEQ ID NO: 880839 - DNA, 15 bp, Homo sapiens
tccatggttatcttt

SEQ ID NO: 880840 - DNA, 15 bp, Homo sapiens
ccatggttatctttc

SEQ ID NO: 880841 - DNA, 15 bp, Homo sapiens
catggttatctttct

SEQ ID NO: 880842 - DNA, 15 bp, Homo sapiens
atggttatctttctg

SEQ ID NO: 880843 - DNA, 15 bp, Homo sapiens
tggttatctttctgt

SEQ ID NO: 880844 - DNA, 15 bp, Homo sapiens
ggttatctttctgtc

SEQ ID NO: 880845 - DNA, 15 bp, Homo sapiens
gttatctttctgtca

SEQ ID NO: 880846 - DNA, 15 bp, Homo sapiens
ttatctttctgtcat

SEQ ID NO: 880847 - DNA, 15 bp, Homo sapiens
tatctttctgtcatg

SEQ ID NO: 880848 - DNA, 15 bp, Homo sapiens
atctttctgtcatgt

SEQ ID NO: 880849 - DNA, 15 bp, Homo sapiens
tctttctgtcatgtg

SEQ ID NO: 880850 - DNA, 15 bp, Homo sapiens
ctttctgtcatgtgc

SEQ ID NO: 880851 - DNA, 15 bp, Homo sapiens
tttctgtcatgtgct

SEQ ID NO: 880852 - DNA, 15 bp, Homo sapiens
ttctgtcatgtgctc

SEQ ID NO: 880853 - DNA, 15 bp, Homo sapiens
tctgtcatgtgctcc

SEQ ID NO: 880854 - DNA, 15 bp, Homo sapiens
ctgtcatgtgctcct

SEQ ID NO: 880855 - DNA, 15 bp, Homo sapiens
tgtcatgtgctcctc

SEQ ID NO: 880856 - DNA, 15 bp, Homo sapiens
gtcatgtgctcctcc

SEQ ID NO: 880857 - DNA, 15 bp, Homo sapiens
tcatgtgctcctcca

SEQ ID NO: 880858 - DNA, 15 bp, Homo sapiens
catgtgctcctccac

SEQ ID NO: 880859 - DNA, 15 bp, Homo sapiens
atgtgctcctccaca

SEQ ID NO: 880860 - DNA, 15 bp, Homo sapiens
tgtgctcctccacat

SEQ ID NO: 880861 - DNA, 15 bp, Homo sapiens
gtgctcctccacata

SEQ ID NO: 880862 - DNA, 15 bp, Homo sapiens
tgctcctccacatag

SEQ ID NO: 880863 - DNA, 15 bp, Homo sapiens
gctcctccacatagt

SEQ ID NO: 880864 - DNA, 15 bp, Homo sapiens
ctcctccacatagtc

SEQ ID NO: 880865 - DNA, 15 bp, Homo sapiens
tcctccacatagtcc

SEQ ID NO: 880866 - DNA, 15 bp, Homo sapiens
cctccacatagtccc

SEQ ID NO: 880867 - DNA, 15 bp, Homo sapiens
ctccacatagtcccc

SEQ ID NO: 880868 - DNA, 15 bp, Homo sapiens
tccacatagtcccct

SEQ ID NO: 880869 - DNA, 15 bp, Homo sapiens
ccacatagtcccctg

SEQ ID NO: 880870 - DNA, 15 bp, Homo sapiens
cacatagtcccctga

SEQ ID NO: 880871 - DNA, 15 bp, Homo sapiens
acatagtcccctgac

SEQ ID NO: 880872 - DNA, 15 bp, Homo sapiens
catagtcccctgacc

SEQ ID NO: 880873 - DNA, 15 bp, Homo sapiens
atagtcccctgacct

SEQ ID NO: 880874 - DNA, 15 bp, Homo sapiens
tagtcccctgacctc

SEQ ID NO: 880875 - DNA, 15 bp, Homo sapiens
agtcccctgacctct

SEQ ID NO: 880876 - DNA, 15 bp, Homo sapiens
gtcccctgacctctg

SEQ ID NO: 880877 - DNA, 15 bp, Homo sapiens
tcccctgacctctga

SEQ ID NO: 880878 - DNA, 15 bp, Homo sapiens
cccctgacctctgaa

SEQ ID NO: 880879 - DNA, 15 bp, Homo sapiens
ccctgacctctgaaa

SEQ ID NO: 880880 - DNA, 15 bp, Homo sapiens
cctgacctctgaaag

SEQ ID NO: 880881 - DNA, 15 bp, Homo sapiens
ctgacctctgaaagt

SEQ ID NO: 880882 - DNA, 15 bp, Homo sapiens
tgacctctgaaagtg

SEQ ID NO: 880883 - DNA, 15 bp, Homo sapiens
gacctctgaaagtgt

SEQ ID NO: 880884 - DNA, 15 bp, Homo sapiens
acctctgaaagtgtc

SEQ ID NO: 880885 - DNA, 15 bp, Homo sapiens
cctctgaaagtgtct

SEQ ID NO: 880886 - DNA, 15 bp, Homo sapiens
ctctgaaagtgtctt

SEQ ID NO: 880887 - DNA, 15 bp, Homo sapiens
tctgaaagtgtcttt

SEQ ID NO: 880888 - DNA, 15 bp, Homo sapiens
ctgaaagtgtctttg

SEQ ID NO: 880889 - DNA, 15 bp, Homo sapiens
tgaaagtgtctttgt

SEQ ID NO: 880890 - DNA, 15 bp, Homo sapiens
gaaagtgtctttgta

SEQ ID NO: 880891 - DNA, 15 bp, Homo sapiens
aaagtgtctttgtaa

SEQ ID NO: 880892 - DNA, 15 bp, Homo sapiens
aagtgtctttgtaaa

SEQ ID NO: 880893 - DNA, 15 bp, Homo sapiens
agtgtctttgtaaag

SEQ ID NO: 880894 - DNA, 15 bp, Homo sapiens
gtgtctttgtaaagg

SEQ ID NO: 880895 - DNA, 15 bp, Homo sapiens
tgtctttgtaaaggg

SEQ ID NO: 880896 - DNA, 15 bp, Homo sapiens
gtctttgtaaagggt

SEQ ID NO: 880897 - DNA, 15 bp, Homo sapiens
tctttgtaaagggtt

SEQ ID NO: 880898 - DNA, 15 bp, Homo sapiens
ctttgtaaagggttt

SEQ ID NO: 880899 - DNA, 15 bp, Homo sapiens
tttgtaaagggttta

SEQ ID NO: 880900 - DNA, 15 bp, Homo sapiens
ttgtaaagggtttat

SEQ ID NO: 880901 - DNA, 15 bp, Homo sapiens
tgtaaagggtttatt

SEQ ID NO: 880902 - DNA, 15 bp, Homo sapiens
gtaaagggtttatta

SEQ ID NO: 880903 - DNA, 15 bp, Homo sapiens
taaagggtttattat

SEQ ID NO: 880904 - DNA, 15 bp, Homo sapiens
aaagggtttattatt

SEQ ID NO: 880905 - DNA, 15 bp, Homo sapiens
aagggtttattattt

SEQ ID NO: 880906 - DNA, 15 bp, Homo sapiens
agggtttattatttt

SEQ ID NO: 880907 - DNA, 15 bp, Homo sapiens
gggtttattatttta

SEQ ID NO: 880908 - DNA, 15 bp, Homo sapiens
ggtttattattttac

SEQ ID NO: 880909 - DNA, 15 bp, Homo sapiens
gtttattattttacc

SEQ ID NO: 880910 - DNA, 15 bp, Homo sapiens
tttattattttacca

SEQ ID NO: 880911 - DNA, 15 bp, Homo sapiens
ttattattttaccag

SEQ ID NO: 880912 - DNA, 15 bp, Homo sapiens
tattattttaccagg

SEQ ID NO: 880913 - DNA, 15 bp, Homo sapiens
attattttaccagga

SEQ ID NO: 880914 - DNA, 15 bp, Homo sapiens
ttattttaccaggat

SEQ ID NO: 880915 - DNA, 15 bp, Homo sapiens
tattttaccaggata

SEQ ID NO: 880916 - DNA, 15 bp, Homo sapiens
attttaccaggatac

SEQ ID NO: 880917 - DNA, 15 bp, Homo sapiens
ttttaccaggataca

SEQ ID NO: 880918 - DNA, 15 bp, Homo sapiens
tttaccaggatacat

SEQ ID NO: 880919 - DNA, 15 bp, Homo sapiens
ttaccaggatacatg

SEQ ID NO: 880920 - DNA, 15 bp, Homo sapiens
taccaggatacatga

SEQ ID NO: 880921 - DNA, 15 bp, Homo sapiens
accaggatacatgag

SEQ ID NO: 880922 - DNA, 15 bp, Homo sapiens
ccaggatacatgagt

SEQ ID NO: 880923 - DNA, 15 bp, Homo sapiens
caggatacatgagtc

SEQ ID NO: 880924 - DNA, 15 bp, Homo sapiens
aggatacatgagtct

SEQ ID NO: 880925 - DNA, 15 bp, Homo sapiens
ggatacatgagtctg

SEQ ID NO: 880926 - DNA, 15 bp, Homo sapiens
gatacatgagtctgt

SEQ ID NO: 880927 - DNA, 15 bp, Homo sapiens
atacatgagtctgtg

SEQ ID NO: 880928 - DNA, 15 bp, Homo sapiens
tacatgagtctgtgt

SEQ ID NO: 880929 - DNA, 15 bp, Homo sapiens
acatgagtctgtgtg

SEQ ID NO: 880930 - DNA, 15 bp, Homo sapiens
catgagtctgtgtgt

SEQ ID NO: 880931 - DNA, 15 bp, Homo sapiens
atgagtctgtgtgtg

SEQ ID NO: 880932 - DNA, 15 bp, Homo sapiens
tgagtctgtgtgtgt

SEQ ID NO: 880933 - DNA, 15 bp, Homo sapiens
gagtctgtgtgtgta

SEQ ID NO: 880934 - DNA, 15 bp, Homo sapiens
agtctgtgtgtgtat

SEQ ID NO: 880935 - DNA, 15 bp, Homo sapiens
gtctgtgtgtgtatg

SEQ ID NO: 880936 - DNA, 15 bp, Homo sapiens
tctgtgtgtgtatgt

SEQ ID NO: 880937 - DNA, 15 bp, Homo sapiens
ctgtgtgtgtatgtg

SEQ ID NO: 880938 - DNA, 15 bp, Homo sapiens
tgtgtatgtgtgtgg

SEQ ID NO: 880939 - DNA, 15 bp, Homo sapiens
gtgtatgtgtgtgga

SEQ ID NO: 880940 - DNA, 15 bp, Homo sapiens
tgtatgtgtgtggag

SEQ ID NO: 880941 - DNA, 15 bp, Homo sapiens
gtatgtgtgtggaga

SEQ ID NO: 880942 - DNA, 15 bp, Homo sapiens
tatgtgtgtggagag

SEQ ID NO: 880943 - DNA, 15 bp, Homo sapiens
atgtgtgtggagaga

SEQ ID NO: 880944 - DNA, 15 bp, Homo sapiens
tgtgtgtggagagag

SEQ ID NO: 880945 - DNA, 15 bp, Homo sapiens
gtgtgtggagagaga

SEQ ID NO: 880946 - DNA, 15 bp, Homo sapiens
tgtgtggagagagat

SEQ ID NO: 880947 - DNA, 15 bp, Homo sapiens
gtgtggagagagatg

SEQ ID NO: 880948 - DNA, 15 bp, Homo sapiens
tgtggagagagatgg

SEQ ID NO: 880949 - DNA, 15 bp, Homo sapiens
gtggagagagatggg

SEQ ID NO: 880950 - DNA, 15 bp, Homo sapiens
tggagagagatgggt

SEQ ID NO: 880951 - DNA, 15 bp, Homo sapiens
ggagagagatgggta

SEQ ID NO: 880952 - DNA, 15 bp, Homo sapiens
gagagagatgggtat

SEQ ID NO: 880953 - DNA, 15 bp, Homo sapiens
agagagatgggtata

SEQ ID NO: 880954 - DNA, 15 bp, Homo sapiens
gagagatgggtatat

SEQ ID NO: 880955 - DNA, 15 bp, Homo sapiens
agagatgggtatatg

SEQ ID NO: 880956 - DNA, 15 bp, Homo sapiens
gagatgggtatatgt

SEQ ID NO: 880957 - DNA, 15 bp, Homo sapiens
agatgggtatatgtg

SEQ ID NO: 880958 - DNA, 15 bp, Homo sapiens
gatgggtatatgtgt

SEQ ID NO: 880959 - DNA, 15 bp, Homo sapiens
atgggtatatgtgtg

SEQ ID NO: 880960 - DNA, 15 bp, Homo sapiens
tgggtatatgtgtga

SEQ ID NO: 880961 - DNA, 15 bp, Homo sapiens
gggtatatgtgtgat

SEQ ID NO: 880962 - DNA, 15 bp, Homo sapiens
ggtatatgtgtgata

SEQ ID NO: 880963 - DNA, 15 bp, Homo sapiens
gtatatgtgtgatat

SEQ ID NO: 880964 - DNA, 15 bp, Homo sapiens
tatatgtgtgatatt

SEQ ID NO: 880965 - DNA, 15 bp, Homo sapiens
atatgtgtgatattt

SEQ ID NO: 880966 - DNA, 15 bp, Homo sapiens
atgtgtgatatttgg

SEQ ID NO: 880967 - DNA, 15 bp, Homo sapiens
tgtgtgatatttggt

SEQ ID NO: 880968 - DNA, 15 bp, Homo sapiens
gtgtgatatttggta

SEQ ID NO: 880969 - DNA, 15 bp, Homo sapiens
tgtgatatttggtat

SEQ ID NO: 880970 - DNA, 15 bp, Homo sapiens
gtgatatttggtatt

SEQ ID NO: 880971 - DNA, 15 bp, Homo sapiens
tgatatttggtattt

SEQ ID NO: 880972 - DNA, 15 bp, Homo sapiens
gatatttggtatttg

SEQ ID NO: 880973 - DNA, 15 bp, Homo sapiens
atatttggtatttgt

SEQ ID NO: 880974 - DNA, 15 bp, Homo sapiens
tatttggtatttgtg

SEQ ID NO: 880975 - DNA, 15 bp, Homo sapiens
atttggtatttgtgt

SEQ ID NO: 880976 - DNA, 15 bp, Homo sapiens
tttggtatttgtgtg

SEQ ID NO: 880977 - DNA, 15 bp, Homo sapiens
ttggtatttgtgtgt

SEQ ID NO: 880978 - DNA, 15 bp, Homo sapiens
tggtatttgtgtgtg

SEQ ID NO: 880979 - DNA, 15 bp, Homo sapiens
ggtatttgtgtgtgt

SEQ ID NO: 880980 - DNA, 15 bp, Homo sapiens
gtatttgtgtgtgtg

SEQ ID NO: 880981 - DNA, 15 bp, Homo sapiens
tatttgtgtgtgtgt

SEQ ID NO: 880982 - DNA, 15 bp, Homo sapiens
atttgtgtgtgtgtt

SEQ ID NO: 880983 - DNA, 15 bp, Homo sapiens
ttgtgtgtgtgtttt

SEQ ID NO: 880984 - DNA, 15 bp, Homo sapiens
tgtgtgtgttttgtg

SEQ ID NO: 880985 - DNA, 15 bp, Homo sapiens
gtgtgtgttttgtgt

SEQ ID NO: 880986 - DNA, 15 bp, Homo sapiens
tgtgtgttttgtgtg

SEQ ID NO: 880987 - DNA, 15 bp, Homo sapiens
gtgtgttttgtgtgt

SEQ ID NO: 880988 - DNA, 15 bp, Homo sapiens
tgtgttttgtgtgtt

SEQ ID NO: 880989 - DNA, 15 bp, Homo sapiens
gtgttttgtgtgttt

SEQ ID NO: 880990 - DNA, 15 bp, Homo sapiens
tgttttgtgtgtttg

SEQ ID NO: 880991 - DNA, 15 bp, Homo sapiens
gttttgtgtgtttgt

SEQ ID NO: 880992 - DNA, 15 bp, Homo sapiens
ttttgtgtgtttgtg

SEQ ID NO: 880993 - DNA, 15 bp, Homo sapiens
tttgtgtgtttgtgt

SEQ ID NO: 880994 - DNA, 15 bp, Homo sapiens
ttgtgtgtttgtgta

SEQ ID NO: 880995 - DNA, 15 bp, Homo sapiens
tgtgtgtttgtgtat

SEQ ID NO: 880996 - DNA, 15 bp, Homo sapiens
gtgtgtttgtgtatg

SEQ ID NO: 880997 - DNA, 15 bp, Homo sapiens
tgtgtttgtgtatgt

SEQ ID NO: 880998 - DNA, 15 bp, Homo sapiens
gtgtttgtgtatgtt

SEQ ID NO: 880999 - DNA, 15 bp, Homo sapiens
tgtttgtgtatgttt

SEQ ID NO: 881000 - DNA, 15 bp, Homo sapiens
gtttgtgtatgtttc

SEQ ID NO: 881001 - DNA, 15 bp, Homo sapiens
tttgtgtatgtttcc

SEQ ID NO: 881002 - DNA, 15 bp, Homo sapiens
ttgtgtatgtttcct

SEQ ID NO: 881003 - DNA, 15 bp, Homo sapiens
tgtgtatgtttcctc

SEQ ID NO: 881004 - DNA, 15 bp, Homo sapiens
gtgtatgtttcctcc

SEQ ID NO: 881005 - DNA, 15 bp, Homo sapiens
tgtatgtttcctcct

SEQ ID NO: 881006 - DNA, 15 bp, Homo sapiens
gtatgtttcctcctg

SEQ ID NO: 881007 - DNA, 15 bp, Homo sapiens
tatgtttcctcctgt

SEQ ID NO: 881008 - DNA, 15 bp, Homo sapiens
atgtttcctcctgtg

SEQ ID NO: 881009 - DNA, 15 bp, Homo sapiens
tgtttcctcctgtgt

SEQ ID NO: 881010 - DNA, 15 bp, Homo sapiens
gtttcctcctgtgtg

SEQ ID NO: 881011 - DNA, 15 bp, Homo sapiens
tttcctcctgtgtga

SEQ ID NO: 881012 - DNA, 15 bp, Homo sapiens
ttcctcctgtgtgac

SEQ ID NO: 881013 - DNA, 15 bp, Homo sapiens
tcctcctgtgtgacc

SEQ ID NO: 881014 - DNA, 15 bp, Homo sapiens
cctcctgtgtgacct

SEQ ID NO: 881015 - DNA, 15 bp, Homo sapiens
ctcctgtgtgacctt

SEQ ID NO: 881016 - DNA, 15 bp, Homo sapiens
tcctgtgtgaccttt

SEQ ID NO: 881017 - DNA, 15 bp, Homo sapiens
cctgtgtgacctttt

SEQ ID NO: 881018 - DNA, 15 bp, Homo sapiens
ctgtgtgaccttttt

SEQ ID NO: 881019 - DNA, 15 bp, Homo sapiens
tgtgtgacctttttt

SEQ ID NO: 881020 - DNA, 15 bp, Homo sapiens
gtgtgaccttttttg

SEQ ID NO: 881021 - DNA, 15 bp, Homo sapiens
tgtgaccttttttgt

SEQ ID NO: 881022 - DNA, 15 bp, Homo sapiens
gtgaccttttttgtt

SEQ ID NO: 881023 - DNA, 15 bp, Homo sapiens
tgaccttttttgttt

SEQ ID NO: 881024 - DNA, 15 bp, Homo sapiens
gaccttttttgtttg

SEQ ID NO: 881025 - DNA, 15 bp, Homo sapiens
accttttttgtttgt

SEQ ID NO: 881026 - DNA, 15 bp, Homo sapiens
ccttttttgtttgtt

SEQ ID NO: 881027 - DNA, 15 bp, Homo sapiens
cttttttgtttgttt

SEQ ID NO: 881028 - DNA, 15 bp, Homo sapiens
gtttgtttgtttttg

SEQ ID NO: 881029 - DNA, 15 bp, Homo sapiens
tttgtttgtttttgt

SEQ ID NO: 881030 - DNA, 15 bp, Homo sapiens
ttgtttgtttttgtt

SEQ ID NO: 881031 - DNA, 15 bp, Homo sapiens
tgtttgtttttgttt

SEQ ID NO: 881032 - DNA, 15 bp, Homo sapiens
gtttgtttttgtttg

SEQ ID NO: 881033 - DNA, 15 bp, Homo sapiens
tgtttgtttgttttg

SEQ ID NO: 881034 - DNA, 15 bp, Homo sapiens
gtttgtttgttttga

SEQ ID NO: 881035 - DNA, 15 bp, Homo sapiens
tttgtttgttttgag

SEQ ID NO: 881036 - DNA, 15 bp, Homo sapiens
ttgtttgttttgagt

SEQ ID NO: 881037 - DNA, 15 bp, Homo sapiens
tgtttgttttgagtc

SEQ ID NO: 881038 - DNA, 15 bp, Homo sapiens
tttgttttgagtcca

SEQ ID NO: 881039 - DNA, 15 bp, Homo sapiens
ttgttttgagtccaa

SEQ ID NO: 881040 - DNA, 15 bp, Homo sapiens
tgttttgagtccaag

SEQ ID NO: 881041 - DNA, 15 bp, Homo sapiens
gttttgagtccaagt

SEQ ID NO: 881042 - DNA, 15 bp, Homo sapiens
ttttgagtccaagtt

SEQ ID NO: 881043 - DNA, 15 bp, Homo sapiens
tttgagtccaagttt

SEQ ID NO: 881044 - DNA, 15 bp, Homo sapiens
ttgagtccaagtttc

SEQ ID NO: 881045 - DNA, 15 bp, Homo sapiens
tgagtccaagtttca

SEQ ID NO: 881046 - DNA, 15 bp, Homo sapiens
gagtccaagtttcac

SEQ ID NO: 881047 - DNA, 15 bp, Homo sapiens
agtccaagtttcact

SEQ ID NO: 881048 - DNA, 15 bp, Homo sapiens
gtccaagtttcactc

SEQ ID NO: 881049 - DNA, 15 bp, Homo sapiens
tccaagtttcactct

SEQ ID NO: 881050 - DNA, 15 bp, Homo sapiens
ccaagtttcactctt

SEQ ID NO: 881051 - DNA, 15 bp, Homo sapiens
caagtttcactcttg

SEQ ID NO: 881052 - DNA, 15 bp, Homo sapiens
aagtttcactcttgc

SEQ ID NO: 881053 - DNA, 15 bp, Homo sapiens
agtttcactcttgct

SEQ ID NO: 881054 - DNA, 15 bp, Homo sapiens
gtttcactcttgctg

SEQ ID NO: 881055 - DNA, 15 bp, Homo sapiens
tttcactcttgctgc

SEQ ID NO: 881056 - DNA, 15 bp, Homo sapiens
ttcactcttgctgcc

SEQ ID NO: 881057 - DNA, 15 bp, Homo sapiens
tcactcttgctgccc

SEQ ID NO: 881058 - DNA, 15 bp, Homo sapiens
cactcttgctgccca

SEQ ID NO: 881059 - DNA, 15 bp, Homo sapiens
actcttgctgcccag

SEQ ID NO: 881060 - DNA, 15 bp, Homo sapiens
ctcttgctgcccagg

SEQ ID NO: 881061 - DNA, 15 bp, Homo sapiens
tcttgctgcccaggc

SEQ ID NO: 881062 - DNA, 15 bp, Homo sapiens
cttgctgcccaggct

SEQ ID NO: 881063 - DNA, 15 bp, Homo sapiens
ttgctgcccaggctg

SEQ ID NO: 881064 - DNA, 15 bp, Homo sapiens
tgctgcccaggctgg

SEQ ID NO: 881065 - DNA, 15 bp, Homo sapiens
gctgcccaggctgga

SEQ ID NO: 881066 - DNA, 15 bp, Homo sapiens
ctgcccaggctggag

SEQ ID NO: 881067 - DNA, 15 bp, Homo sapiens
gagtgcaatggcacg

SEQ ID NO: 881068 - DNA, 15 bp, Homo sapiens
agtgcaatggcacga

SEQ ID NO: 881069 - DNA, 15 bp, Homo sapiens
gtgcaatggcacgat

SEQ ID NO: 881070 - DNA, 15 bp, Homo sapiens
tgcaatggcacgatc

SEQ ID NO: 881071 - DNA, 15 bp, Homo sapiens
gcaatggcacgatct

SEQ ID NO: 881072 - DNA, 15 bp, Homo sapiens
caatggcacgatctc

SEQ ID NO: 881073 - DNA, 15 bp, Homo sapiens
aatggcacgatctcg

SEQ ID NO: 881074 - DNA, 15 bp, Homo sapiens
atggcacgatctcgg

SEQ ID NO: 881075 - DNA, 15 bp, Homo sapiens
gctcactgcaacctt

SEQ ID NO: 881076 - DNA, 15 bp, Homo sapiens
ctcactgcaaccttc

SEQ ID NO: 881077 - DNA, 15 bp, Homo sapiens
tcactgcaaccttca

SEQ ID NO: 881078 - DNA, 15 bp, Homo sapiens
cactgcaaccttcac

SEQ ID NO: 881079 - DNA, 15 bp, Homo sapiens
actgcaaccttcacc

SEQ ID NO: 881080 - DNA, 15 bp, Homo sapiens
ctgcaaccttcacct

SEQ ID NO: 881081 - DNA, 15 bp, Homo sapiens
tgcaaccttcacctc

SEQ ID NO: 881082 - DNA, 15 bp, Homo sapiens
gcaaccttcacctcc

SEQ ID NO: 881083 - DNA, 15 bp, Homo sapiens
caaccttcacctcct

SEQ ID NO: 881084 - DNA, 15 bp, Homo sapiens
aaccttcacctcctg

SEQ ID NO: 881085 - DNA, 15 bp, Homo sapiens
accttcacctcctgg

SEQ ID NO: 881086 - DNA, 15 bp, Homo sapiens
ccttcacctcctggg

SEQ ID NO: 881087 - DNA, 15 bp, Homo sapiens
cttcacctcctgggt

SEQ ID NO: 881088 - DNA, 15 bp, Homo sapiens
ttcacctcctgggtt

SEQ ID NO: 881089 - DNA, 15 bp, Homo sapiens
tcacctcctgggttc

SEQ ID NO: 881090 - DNA, 15 bp, Homo sapiens
ctgcctcagtctcct

SEQ ID NO: 881091 - DNA, 15 bp, Homo sapiens
tgcctcagtctcctg

SEQ ID NO: 881092 - DNA, 15 bp, Homo sapiens
gcctcagtctcctga

SEQ ID NO: 881093 - DNA, 15 bp, Homo sapiens
cctcagtctcctgag

SEQ ID NO: 881094 - DNA, 15 bp, Homo sapiens
agtctcctgagtagc

SEQ ID NO: 881095 - DNA, 15 bp, Homo sapiens
gtctcctgagtagct

SEQ ID NO: 881096 - DNA, 15 bp, Homo sapiens
tctcctgagtagctg

SEQ ID NO: 881097 - DNA, 15 bp, Homo sapiens
cctgagtagctgggt

SEQ ID NO: 881098 - DNA, 15 bp, Homo sapiens
ctgagtagctgggtt

SEQ ID NO: 881099 - DNA, 15 bp, Homo sapiens
tgagtagctgggttt

SEQ ID NO: 881100 - DNA, 15 bp, Homo sapiens
gagtagctgggttta

SEQ ID NO: 881101 - DNA, 15 bp, Homo sapiens
agtagctgggtttac

SEQ ID NO: 881102 - DNA, 15 bp, Homo sapiens
gtagctgggtttaca

SEQ ID NO: 881103 - DNA, 15 bp, Homo sapiens
tagctgggtttacag

SEQ ID NO: 881104 - DNA, 15 bp, Homo sapiens
agctgggtttacagg

SEQ ID NO: 881105 - DNA, 15 bp, Homo sapiens
gctgggtttacaggc

SEQ ID NO: 881106 - DNA, 15 bp, Homo sapiens
ctgggtttacaggca

SEQ ID NO: 881107 - DNA, 15 bp, Homo sapiens
tgggtttacaggcat

SEQ ID NO: 881108 - DNA, 15 bp, Homo sapiens
gggtttacaggcatg

SEQ ID NO: 881109 - DNA, 15 bp, Homo sapiens
ggtttacaggcatgc

SEQ ID NO: 881110 - DNA, 15 bp, Homo sapiens
gtttacaggcatgca

SEQ ID NO: 881111 - DNA, 15 bp, Homo sapiens
tttacaggcatgcac

SEQ ID NO: 881112 - DNA, 15 bp, Homo sapiens
gcatgcaccaccatg

SEQ ID NO: 881113 - DNA, 15 bp, Homo sapiens
catgcaccaccatgc

SEQ ID NO: 881114 - DNA, 15 bp, Homo sapiens
atgcaccaccatgcc

SEQ ID NO: 881115 - DNA, 15 bp, Homo sapiens
accatgcctggctac

SEQ ID NO: 881116 - DNA, 15 bp, Homo sapiens
ccatgcctggctact

SEQ ID NO: 881117 - DNA, 15 bp, Homo sapiens
catgcctggctactt

SEQ ID NO: 881118 - DNA, 15 bp, Homo sapiens
atgcctggctacttt

SEQ ID NO: 881119 - DNA, 15 bp, Homo sapiens
tgcctggctactttt

SEQ ID NO: 881120 - DNA, 15 bp, Homo sapiens
gcctggctacttttt

SEQ ID NO: 881121 - DNA, 15 bp, Homo sapiens
cctggctactttttt

SEQ ID NO: 881122 - DNA, 15 bp, Homo sapiens
ctggctacttttttt

SEQ ID NO: 881123 - DNA, 15 bp, Homo sapiens
tggctactttttttg

SEQ ID NO: 881124 - DNA, 15 bp, Homo sapiens
ggctactttttttgt

SEQ ID NO: 881125 - DNA, 15 bp, Homo sapiens
gctactttttttgta

SEQ ID NO: 881126 - DNA, 15 bp, Homo sapiens
ctactttttttgtat

SEQ ID NO: 881127 - DNA, 15 bp, Homo sapiens
tactttttttgtatt

SEQ ID NO: 881128 - DNA, 15 bp, Homo sapiens
actttttttgtattt

SEQ ID NO: 881129 - DNA, 15 bp, Homo sapiens
ctttttttgtatttt

SEQ ID NO: 881130 - DNA, 15 bp, Homo sapiens
tttttttgtattttc

SEQ ID NO: 881131 - DNA, 15 bp, Homo sapiens
ttttttgtattttca

SEQ ID NO: 881132 - DNA, 15 bp, Homo sapiens
tttgtattttcagta

SEQ ID NO: 881133 - DNA, 15 bp, Homo sapiens
ttgtattttcagtag

SEQ ID NO: 881134 - DNA, 15 bp, Homo sapiens
tgtattttcagtaga

SEQ ID NO: 881135 - DNA, 15 bp, Homo sapiens
gtattttcagtagag

SEQ ID NO: 881136 - DNA, 15 bp, Homo sapiens
tattttcagtagaga

SEQ ID NO: 881137 - DNA, 15 bp, Homo sapiens
attttcagtagagac

SEQ ID NO: 881138 - DNA, 15 bp, Homo sapiens
ttttcagtagagaca

SEQ ID NO: 881139 - DNA, 15 bp, Homo sapiens
tttcagtagagacag

SEQ ID NO: 881140 - DNA, 15 bp, Homo sapiens
ttcagtagagacagg

SEQ ID NO: 881141 - DNA, 15 bp, Homo sapiens
tcagtagagacaggg

SEQ ID NO: 881142 - DNA, 15 bp, Homo sapiens
cagtagagacagggt

SEQ ID NO: 881143 - DNA, 15 bp, Homo sapiens
tggccaggatggttg

SEQ ID NO: 881144 - DNA, 15 bp, Homo sapiens
ggccaggatggttgc

SEQ ID NO: 881145 - DNA, 15 bp, Homo sapiens
gccaggatggttgca

SEQ ID NO: 881146 - DNA, 15 bp, Homo sapiens
ccaggatggttgcaa

SEQ ID NO: 881147 - DNA, 15 bp, Homo sapiens
caggatggttgcaaa

SEQ ID NO: 881148 - DNA, 15 bp, Homo sapiens
aggatggttgcaaac

SEQ ID NO: 881149 - DNA, 15 bp, Homo sapiens
ggatggttgcaaact

SEQ ID NO: 881150 - DNA, 15 bp, Homo sapiens
gatggttgcaaactc

SEQ ID NO: 881151 - DNA, 15 bp, Homo sapiens
atggttgcaaactcc

SEQ ID NO: 881152 - DNA, 15 bp, Homo sapiens
tggttgcaaactcct

SEQ ID NO: 881153 - DNA, 15 bp, Homo sapiens
ggttgcaaactcctg

SEQ ID NO: 881154 - DNA, 15 bp, Homo sapiens
gttgcaaactcctga

SEQ ID NO: 881155 - DNA, 15 bp, Homo sapiens
ttgcaaactcctgac

SEQ ID NO: 881156 - DNA, 15 bp, Homo sapiens
tgcaaactcctgacc

SEQ ID NO: 881157 - DNA, 15 bp, Homo sapiens
gcaaactcctgacct

SEQ ID NO: 881158 - DNA, 15 bp, Homo sapiens
tgatccacccacctc

SEQ ID NO: 881159 - DNA, 15 bp, Homo sapiens
gatccacccacctcg

SEQ ID NO: 881160 - DNA, 15 bp, Homo sapiens
atccacccacctcgg

SEQ ID NO: 881161 - DNA, 15 bp, Homo sapiens
tccacccacctcggc

SEQ ID NO: 881162 - DNA, 15 bp, Homo sapiens
ccacccacctcggcc

SEQ ID NO: 881163 - DNA, 15 bp, Homo sapiens
cacccacctcggcct

SEQ ID NO: 881164 - DNA, 15 bp, Homo sapiens
acccacctcggcctc

SEQ ID NO: 881165 - DNA, 15 bp, Homo sapiens
gggattacaggcatc

SEQ ID NO: 881166 - DNA, 15 bp, Homo sapiens
ggattacaggcatca

SEQ ID NO: 881167 - DNA, 15 bp, Homo sapiens
gattacaggcatcag

SEQ ID NO: 881168 - DNA, 15 bp, Homo sapiens
attacaggcatcagc

SEQ ID NO: 881169 - DNA, 15 bp, Homo sapiens
ttacaggcatcagcc

SEQ ID NO: 881170 - DNA, 15 bp, Homo sapiens
tacaggcatcagcca

SEQ ID NO: 881171 - DNA, 15 bp, Homo sapiens
acaggcatcagccac

SEQ ID NO: 881172 - DNA, 15 bp, Homo sapiens
caggcatcagccacc

SEQ ID NO: 881173 - DNA, 15 bp, Homo sapiens
aggcatcagccaccg

SEQ ID NO: 881174 - DNA, 15 bp, Homo sapiens
ggcatcagccaccgc

SEQ ID NO: 881175 - DNA, 15 bp, Homo sapiens
gcatcagccaccgcg

SEQ ID NO: 881176 - DNA, 15 bp, Homo sapiens
catcagccaccgcgc

SEQ ID NO: 881177 - DNA, 15 bp, Homo sapiens
atcagccaccgcgcc

SEQ ID NO: 881178 - DNA, 15 bp, Homo sapiens
cagccaccgcgcccg

SEQ ID NO: 881179 - DNA, 15 bp, Homo sapiens
caccgcgcccggctc

SEQ ID NO: 881180 - DNA, 15 bp, Homo sapiens
accgcgcccggctct

SEQ ID NO: 881181 - DNA, 15 bp, Homo sapiens
ccgcgcccggctctg

SEQ ID NO: 881182 - DNA, 15 bp, Homo sapiens
cgcgcccggctctgt

SEQ ID NO: 881183 - DNA, 15 bp, Homo sapiens
gcgcccggctctgtg

SEQ ID NO: 881184 - DNA, 15 bp, Homo sapiens
cgcccggctctgtgt

SEQ ID NO: 881185 - DNA, 15 bp, Homo sapiens
gcccggctctgtgtg

SEQ ID NO: 881186 - DNA, 15 bp, Homo sapiens
cccggctctgtgtgc

SEQ ID NO: 881187 - DNA, 15 bp, Homo sapiens
ccggctctgtgtgcc

SEQ ID NO: 881188 - DNA, 15 bp, Homo sapiens
cggctctgtgtgccc

SEQ ID NO: 881189 - DNA, 15 bp, Homo sapiens
ggctctgtgtgccct

SEQ ID NO: 881190 - DNA, 15 bp, Homo sapiens
gctctgtgtgccctt

SEQ ID NO: 881191 - DNA, 15 bp, Homo sapiens
ctctgtgtgcccttg

SEQ ID NO: 881192 - DNA, 15 bp, Homo sapiens
tctgtgtgcccttgt

SEQ ID NO: 881193 - DNA, 15 bp, Homo sapiens
ctgtgtgcccttgta

SEQ ID NO: 881194 - DNA, 15 bp, Homo sapiens
tgtgtgcccttgtac

SEQ ID NO: 881195 - DNA, 15 bp, Homo sapiens
gtgtgcccttgtaca

SEQ ID NO: 881196 - DNA, 15 bp, Homo sapiens
tgtgcccttgtacac

SEQ ID NO: 881197 - DNA, 15 bp, Homo sapiens
gtgcccttgtacacg

SEQ ID NO: 881198 - DNA, 15 bp, Homo sapiens
tgcccttgtacacgt

SEQ ID NO: 881199 - DNA, 15 bp, Homo sapiens
gcccttgtacacgtt

SEQ ID NO: 881200 - DNA, 15 bp, Homo sapiens
cccttgtacacgttc

SEQ ID NO: 881201 - DNA, 15 bp, Homo sapiens
ccttgtacacgttca

SEQ ID NO: 881202 - DNA, 15 bp, Homo sapiens
cttgtacacgttcac

SEQ ID NO: 881203 - DNA, 15 bp, Homo sapiens
ttgtacacgttcact

SEQ ID NO: 881204 - DNA, 15 bp, Homo sapiens
tgtacacgttcactc

SEQ ID NO: 881205 - DNA, 15 bp, Homo sapiens
gtacacgttcactca

SEQ ID NO: 881206 - DNA, 15 bp, Homo sapiens
tacacgttcactcat

SEQ ID NO: 881207 - DNA, 15 bp, Homo sapiens
acacgttcactcatc

SEQ ID NO: 881208 - DNA, 15 bp, Homo sapiens
cacgttcactcatct

SEQ ID NO: 881209 - DNA, 15 bp, Homo sapiens
acgttcactcatctt

SEQ ID NO: 881210 - DNA, 15 bp, Homo sapiens
cgttcactcatcttt

SEQ ID NO: 881211 - DNA, 15 bp, Homo sapiens
gttcactcatctttc

SEQ ID NO: 881212 - DNA, 15 bp, Homo sapiens
ttcactcatctttct

SEQ ID NO: 881213 - DNA, 15 bp, Homo sapiens
tcactcatctttctt

SEQ ID NO: 881214 - DNA, 15 bp, Homo sapiens
cactcatctttcttc

SEQ ID NO: 881215 - DNA, 15 bp, Homo sapiens
actcatctttcttca

SEQ ID NO: 881216 - DNA, 15 bp, Homo sapiens
ctcatctttcttcat

SEQ ID NO: 881217 - DNA, 15 bp, Homo sapiens
tcatctttcttcatg

SEQ ID NO: 881218 - DNA, 15 bp, Homo sapiens
catctttcttcatgt

SEQ ID NO: 881219 - DNA, 15 bp, Homo sapiens
atctttcttcatgta

SEQ ID NO: 881220 - DNA, 15 bp, Homo sapiens
cttgtacctacccct

SEQ ID NO: 881221 - DNA, 15 bp, Homo sapiens
ttgtacctacccctt

SEQ ID NO: 881222 - DNA, 15 bp, Homo sapiens
tgtacctaccccttt

SEQ ID NO: 881223 - DNA, 15 bp, Homo sapiens
gtacctaccccttta

SEQ ID NO: 881224 - DNA, 15 bp, Homo sapiens
tacctacccctttaa

SEQ ID NO: 881225 - DNA, 15 bp, Homo sapiens
acctacccctttaaa

SEQ ID NO: 881226 - DNA, 15 bp, Homo sapiens
cctacccctttaaat

SEQ ID NO: 881227 - DNA, 15 bp, Homo sapiens
ctacccctttaaata

SEQ ID NO: 881228 - DNA, 15 bp, Homo sapiens
tacccctttaaatag

SEQ ID NO: 881229 - DNA, 15 bp, Homo sapiens
acccctttaaatagc

SEQ ID NO: 881230 - DNA, 15 bp, Homo sapiens
cccctttaaatagct

SEQ ID NO: 881231 - DNA, 15 bp, Homo sapiens
ccctttaaatagcta

SEQ ID NO: 881232 - DNA, 15 bp, Homo sapiens
cctttaaatagctaa

SEQ ID NO: 881233 - DNA, 15 bp, Homo sapiens
ctttaaatagctaat

SEQ ID NO: 881234 - DNA, 15 bp, Homo sapiens
tttaaatagctaata

SEQ ID NO: 881235 - DNA, 15 bp, Homo sapiens
ttaaatagctaataa

SEQ ID NO: 881236 - DNA, 15 bp, Homo sapiens
taaatagctaataat

SEQ ID NO: 881237 - DNA, 15 bp, Homo sapiens
aaatagctaataatg

SEQ ID NO: 881238 - DNA, 15 bp, Homo sapiens
aatagctaataatga

SEQ ID NO: 881239 - DNA, 15 bp, Homo sapiens
atagctaataatgaa

SEQ ID NO: 881240 - DNA, 15 bp, Homo sapiens
tagctaataatgaat

SEQ ID NO: 881241 - DNA, 15 bp, Homo sapiens
agctaataatgaatc

SEQ ID NO: 881242 - DNA, 15 bp, Homo sapiens
gctaataatgaatct

SEQ ID NO: 881243 - DNA, 15 bp, Homo sapiens
ctaataatgaatctt

SEQ ID NO: 881244 - DNA, 15 bp, Homo sapiens
taataatgaatcttc

SEQ ID NO: 881245 - DNA, 15 bp, Homo sapiens
aataatgaatcttct

SEQ ID NO: 881246 - DNA, 15 bp, Homo sapiens
ataatgaatcttctc

SEQ ID NO: 881247 - DNA, 15 bp, Homo sapiens
taatgaatcttctct

SEQ ID NO: 881248 - DNA, 15 bp, Homo sapiens
aatgaatcttctctg

SEQ ID NO: 881249 - DNA, 15 bp, Homo sapiens
atgaatcttctctgt

SEQ ID NO: 881250 - DNA, 15 bp, Homo sapiens
tgaatcttctctgtg

SEQ ID NO: 881251 - DNA, 15 bp, Homo sapiens
gaatcttctctgtga

SEQ ID NO: 881252 - DNA, 15 bp, Homo sapiens
aatcttctctgtgac

SEQ ID NO: 881253 - DNA, 15 bp, Homo sapiens
atcttctctgtgacc

SEQ ID NO: 881254 - DNA, 15 bp, Homo sapiens
tcttctctgtgaccc

SEQ ID NO: 881255 - DNA, 15 bp, Homo sapiens
cttctctgtgaccct

SEQ ID NO: 881256 - DNA, 15 bp, Homo sapiens
ttctctgtgaccctc

SEQ ID NO: 881257 - DNA, 15 bp, Homo sapiens
tctctgtgaccctcc

SEQ ID NO: 881258 - DNA, 15 bp, Homo sapiens
ctctgtgaccctcct

SEQ ID NO: 881259 - DNA, 15 bp, Homo sapiens
tctgtgaccctcctc

SEQ ID NO: 881260 - DNA, 15 bp, Homo sapiens
ctgtgaccctcctcc

SEQ ID NO: 881261 - DNA, 15 bp, Homo sapiens
tgtgaccctcctcct

SEQ ID NO: 881262 - DNA, 15 bp, Homo sapiens
gtgaccctcctccta

SEQ ID NO: 881263 - DNA, 15 bp, Homo sapiens
tgaccctcctcctac

SEQ ID NO: 881264 - DNA, 15 bp, Homo sapiens
gaccctcctcctacc

SEQ ID NO: 881265 - DNA, 15 bp, Homo sapiens
accctcctcctacct

SEQ ID NO: 881266 - DNA, 15 bp, Homo sapiens
ccctcctcctacctc

SEQ ID NO: 881267 - DNA, 15 bp, Homo sapiens
cctcctcctacctct

SEQ ID NO: 881268 - DNA, 15 bp, Homo sapiens
ctcctcctacctctt

SEQ ID NO: 881269 - DNA, 15 bp, Homo sapiens
tcctcctacctcttc

SEQ ID NO: 881270 - DNA, 15 bp, Homo sapiens
cctcctacctcttca

SEQ ID NO: 881271 - DNA, 15 bp, Homo sapiens
ctcctacctcttcat

SEQ ID NO: 881272 - DNA, 15 bp, Homo sapiens
tcctacctcttcata

SEQ ID NO: 881273 - DNA, 15 bp, Homo sapiens
cctacctcttcatag

SEQ ID NO: 881274 - DNA, 15 bp, Homo sapiens
ctacctcttcataga

SEQ ID NO: 881275 - DNA, 15 bp, Homo sapiens
tacctcttcatagac

SEQ ID NO: 881276 - DNA, 15 bp, Homo sapiens
acctcttcatagaca

SEQ ID NO: 881277 - DNA, 15 bp, Homo sapiens
cctcttcatagacac

SEQ ID NO: 881278 - DNA, 15 bp, Homo sapiens
ctcttcatagacaca

SEQ ID NO: 881279 - DNA, 15 bp, Homo sapiens
tcttcatagacacat

SEQ ID NO: 881280 - DNA, 15 bp, Homo sapiens
cttcatagacacata

SEQ ID NO: 881281 - DNA, 15 bp, Homo sapiens
ttcatagacacataa

SEQ ID NO: 881282 - DNA, 15 bp, Homo sapiens
tcatagacacataaa

SEQ ID NO: 881283 - DNA, 15 bp, Homo sapiens
catagacacataaat

SEQ ID NO: 881284 - DNA, 15 bp, Homo sapiens
atagacacataaata

SEQ ID NO: 881285 - DNA, 15 bp, Homo sapiens
tagacacataaatat

SEQ ID NO: 881286 - DNA, 15 bp, Homo sapiens
agacacataaatatt

SEQ ID NO: 881287 - DNA, 15 bp, Homo sapiens
gacacataaatattt

SEQ ID NO: 881288 - DNA, 15 bp, Homo sapiens
acacataaatattta

SEQ ID NO: 881289 - DNA, 15 bp, Homo sapiens
cacataaatatttat

SEQ ID NO: 881290 - DNA, 15 bp, Homo sapiens
acataaatatttata

SEQ ID NO: 881291 - DNA, 15 bp, Homo sapiens
cataaatatttatat

SEQ ID NO: 881292 - DNA, 15 bp, Homo sapiens
ataaatatttatata

SEQ ID NO: 881293 - DNA, 15 bp, Homo sapiens
taaatatttatatac

SEQ ID NO: 881294 - DNA, 15 bp, Homo sapiens
aaatatttatataca

SEQ ID NO: 881295 - DNA, 15 bp, Homo sapiens
aatatttatatacaa

SEQ ID NO: 881296 - DNA, 15 bp, Homo sapiens
atatttatatacaaa

SEQ ID NO: 881297 - DNA, 15 bp, Homo sapiens
tatttatatacaaat

SEQ ID NO: 881298 - DNA, 15 bp, Homo sapiens
atttatatacaaatt

SEQ ID NO: 881299 - DNA, 15 bp, Homo sapiens
tttatatacaaattt

SEQ ID NO: 881300 - DNA, 15 bp, Homo sapiens
ttatatacaaattta

SEQ ID NO: 881301 - DNA, 15 bp, Homo sapiens
tatatacaaatttaa

SEQ ID NO: 881302 - DNA, 15 bp, Homo sapiens
atatacaaatttaag

SEQ ID NO: 881303 - DNA, 15 bp, Homo sapiens
tatacaaatttaaga

SEQ ID NO: 881304 - DNA, 15 bp, Homo sapiens
atacaaatttaagag

SEQ ID NO: 881305 - DNA, 15 bp, Homo sapiens
tacaaatttaagagt

SEQ ID NO: 881306 - DNA, 15 bp, Homo sapiens
acaaatttaagagtt

SEQ ID NO: 881307 - DNA, 15 bp, Homo sapiens
caaatttaagagttt

SEQ ID NO: 881308 - DNA, 15 bp, Homo sapiens
aaatttaagagtttt

SEQ ID NO: 881309 - DNA, 15 bp, Homo sapiens
aatttaagagttttg

SEQ ID NO: 881310 - DNA, 15 bp, Homo sapiens
atttaagagttttgt

SEQ ID NO: 881311 - DNA, 15 bp, Homo sapiens
tttaagagttttgtc

SEQ ID NO: 881312 - DNA, 15 bp, Homo sapiens
ttaagagttttgtct

SEQ ID NO: 881313 - DNA, 15 bp, Homo sapiens
taagagttttgtcta

SEQ ID NO: 881314 - DNA, 15 bp, Homo sapiens
aagagttttgtctac

SEQ ID NO: 881315 - DNA, 15 bp, Homo sapiens
agagttttgtctacc

SEQ ID NO: 881316 - DNA, 15 bp, Homo sapiens
gagttttgtctaccc

SEQ ID NO: 881317 - DNA, 15 bp, Homo sapiens
agttttgtctaccct

SEQ ID NO: 881318 - DNA, 15 bp, Homo sapiens
gttttgtctacccta

SEQ ID NO: 881319 - DNA, 15 bp, Homo sapiens
ttttgtctaccctaa

SEQ ID NO: 881320 - DNA, 15 bp, Homo sapiens
tttgtctaccctaat

SEQ ID NO: 881321 - DNA, 15 bp, Homo sapiens
ttgtctaccctaatg

SEQ ID NO: 881322 - DNA, 15 bp, Homo sapiens
tgtctaccctaatga

SEQ ID NO: 881323 - DNA, 15 bp, Homo sapiens
gtctaccctaatgat

SEQ ID NO: 881324 - DNA, 15 bp, Homo sapiens
tctaccctaatgatt

SEQ ID NO: 881325 - DNA, 15 bp, Homo sapiens
ctaccctaatgattt

SEQ ID NO: 881326 - DNA, 15 bp, Homo sapiens
taccctaatgatttt

SEQ ID NO: 881327 - DNA, 15 bp, Homo sapiens
accctaatgattttc

SEQ ID NO: 881328 - DNA, 15 bp, Homo sapiens
ccctaatgattttct

SEQ ID NO: 881329 - DNA, 15 bp, Homo sapiens
cctaatgattttctt

SEQ ID NO: 881330 - DNA, 15 bp, Homo sapiens
ctaatgattttcttc

SEQ ID NO: 881331 - DNA, 15 bp, Homo sapiens
taatgattttcttcc

SEQ ID NO: 881332 - DNA, 15 bp, Homo sapiens
aatgattttcttccc

SEQ ID NO: 881333 - DNA, 15 bp, Homo sapiens
atgattttcttcccc

SEQ ID NO: 881334 - DNA, 15 bp, Homo sapiens
tgattttcttcccct

SEQ ID NO: 881335 - DNA, 15 bp, Homo sapiens
gattttcttcccctc

SEQ ID NO: 881336 - DNA, 15 bp, Homo sapiens
attttcttcccctcc

SEQ ID NO: 881337 - DNA, 15 bp, Homo sapiens
ttttcttcccctcca

SEQ ID NO: 881338 - DNA, 15 bp, Homo sapiens
tttcttcccctccag

SEQ ID NO: 881339 - DNA, 15 bp, Homo sapiens
ttcttcccctccagg

SEQ ID NO: 881340 - DNA, 15 bp, Homo sapiens
tcttcccctccaggt

SEQ ID NO: 881341 - DNA, 15 bp, Homo sapiens
cttcccctccaggtt

SEQ ID NO: 881342 - DNA, 15 bp, Homo sapiens
ttcccctccaggttt

SEQ ID NO: 881343 - DNA, 15 bp, Homo sapiens
tcccctccaggttta

SEQ ID NO: 881344 - DNA, 15 bp, Homo sapiens
cccctccaggtttat

SEQ ID NO: 881345 - DNA, 15 bp, Homo sapiens
ccctccaggtttatt

SEQ ID NO: 881346 - DNA, 15 bp, Homo sapiens
cctccaggtttattg

SEQ ID NO: 881347 - DNA, 15 bp, Homo sapiens
ctccaggtttattga

SEQ ID NO: 881348 - DNA, 15 bp, Homo sapiens
tccaggtttattgaa

SEQ ID NO: 881349 - DNA, 15 bp, Homo sapiens
ccaggtttattgaaa

SEQ ID NO: 881350 - DNA, 15 bp, Homo sapiens
caggtttattgaaat

SEQ ID NO: 881351 - DNA, 15 bp, Homo sapiens
aggtttattgaaata

SEQ ID NO: 881352 - DNA, 15 bp, Homo sapiens
ggtttattgaaatac

SEQ ID NO: 881353 - DNA, 15 bp, Homo sapiens
gtttattgaaataca

SEQ ID NO: 881354 - DNA, 15 bp, Homo sapiens
tttattgaaatacaa

SEQ ID NO: 881355 - DNA, 15 bp, Homo sapiens
ttattgaaatacaac

SEQ ID NO: 881356 - DNA, 15 bp, Homo sapiens
tattgaaatacaact

SEQ ID NO: 881357 - DNA, 15 bp, Homo sapiens
attgaaatacaactg

SEQ ID NO: 881358 - DNA, 15 bp, Homo sapiens
ttgaaatacaactga

SEQ ID NO: 881359 - DNA, 15 bp, Homo sapiens
tgaaatacaactgac

SEQ ID NO: 881360 - DNA, 15 bp, Homo sapiens
gaaatacaactgaca

SEQ ID NO: 881361 - DNA, 15 bp, Homo sapiens
aaatacaactgacaa

SEQ ID NO: 881362 - DNA, 15 bp, Homo sapiens
aatacaactgacaag

SEQ ID NO: 881363 - DNA, 15 bp, Homo sapiens
atacaactgacaagt

SEQ ID NO: 881364 - DNA, 15 bp, Homo sapiens
tacaactgacaagta

SEQ ID NO: 881365 - DNA, 15 bp, Homo sapiens
acaactgacaagtaa

SEQ ID NO: 881366 - DNA, 15 bp, Homo sapiens
caactgacaagtaaa

SEQ ID NO: 881367 - DNA, 15 bp, Homo sapiens
aactgacaagtaaaa

SEQ ID NO: 881368 - DNA, 15 bp, Homo sapiens
actgacaagtaaaag

SEQ ID NO: 881369 - DNA, 15 bp, Homo sapiens
ctgacaagtaaaagt

SEQ ID NO: 881370 - DNA, 15 bp, Homo sapiens
tgacaagtaaaagtt

SEQ ID NO: 881371 - DNA, 15 bp, Homo sapiens
gacaagtaaaagttg

SEQ ID NO: 881372 - DNA, 15 bp, Homo sapiens
acaagtaaaagttgt

SEQ ID NO: 881373 - DNA, 15 bp, Homo sapiens
caagtaaaagttgta

SEQ ID NO: 881374 - DNA, 15 bp, Homo sapiens
aagtaaaagttgtat

SEQ ID NO: 881375 - DNA, 15 bp, Homo sapiens
agtaaaagttgtata

SEQ ID NO: 881376 - DNA, 15 bp, Homo sapiens
gtaaaagttgtatat

SEQ ID NO: 881377 - DNA, 15 bp, Homo sapiens
taaaagttgtatata

SEQ ID NO: 881378 - DNA, 15 bp, Homo sapiens
aaaagttgtatatat

SEQ ID NO: 881379 - DNA, 15 bp, Homo sapiens
aaagttgtatatatt

SEQ ID NO: 881380 - DNA, 15 bp, Homo sapiens
aagttgtatatattc

SEQ ID NO: 881381 - DNA, 15 bp, Homo sapiens
agttgtatatattca

SEQ ID NO: 881382 - DNA, 15 bp, Homo sapiens
gttgtatatattcaa

SEQ ID NO: 881383 - DNA, 15 bp, Homo sapiens
ttgtatatattcaag

SEQ ID NO: 881384 - DNA, 15 bp, Homo sapiens
tgtatatattcaagg

SEQ ID NO: 881385 - DNA, 15 bp, Homo sapiens
gtatatattcaaggt

SEQ ID NO: 881386 - DNA, 15 bp, Homo sapiens
tatatattcaaggtt

SEQ ID NO: 881387 - DNA, 15 bp, Homo sapiens
atatattcaaggttt

SEQ ID NO: 881388 - DNA, 15 bp, Homo sapiens
tatattcaaggttta

SEQ ID NO: 881389 - DNA, 15 bp, Homo sapiens
atattcaaggtttac

SEQ ID NO: 881390 - DNA, 15 bp, Homo sapiens
tattcaaggtttaca

SEQ ID NO: 881391 - DNA, 15 bp, Homo sapiens
attcaaggtttacaa

SEQ ID NO: 881392 - DNA, 15 bp, Homo sapiens
ttcaaggtttacaac

SEQ ID NO: 881393 - DNA, 15 bp, Homo sapiens
tcaaggtttacaaca

SEQ ID NO: 881394 - DNA, 15 bp, Homo sapiens
caaggtttacaacat

SEQ ID NO: 881395 - DNA, 15 bp, Homo sapiens
aaggtttacaacatg

SEQ ID NO: 881396 - DNA, 15 bp, Homo sapiens
aggtttacaacatga

SEQ ID NO: 881397 - DNA, 15 bp, Homo sapiens
ggtttacaacatgat

SEQ ID NO: 881398 - DNA, 15 bp, Homo sapiens
gtttacaacatgatg

SEQ ID NO: 881399 - DNA, 15 bp, Homo sapiens
tttacaacatgatga

SEQ ID NO: 881400 - DNA, 15 bp, Homo sapiens
ttacaacatgatgat

SEQ ID NO: 881401 - DNA, 15 bp, Homo sapiens
tacaacatgatgatt

SEQ ID NO: 881402 - DNA, 15 bp, Homo sapiens
acaacatgatgattt

SEQ ID NO: 881403 - DNA, 15 bp, Homo sapiens
caacatgatgatttg

SEQ ID NO: 881404 - DNA, 15 bp, Homo sapiens
aacatgatgatttga

SEQ ID NO: 881405 - DNA, 15 bp, Homo sapiens
acatgatgatttgat

SEQ ID NO: 881406 - DNA, 15 bp, Homo sapiens
catgatgatttgata

SEQ ID NO: 881407 - DNA, 15 bp, Homo sapiens
atgatgatttgatat

SEQ ID NO: 881408 - DNA, 15 bp, Homo sapiens
tgatgatttgatata

SEQ ID NO: 881409 - DNA, 15 bp, Homo sapiens
gatgatttgatatac

SEQ ID NO: 881410 - DNA, 15 bp, Homo sapiens
atgatttgatataca

SEQ ID NO: 881411 - DNA, 15 bp, Homo sapiens
tgatttgatatacat

SEQ ID NO: 881412 - DNA, 15 bp, Homo sapiens
gatttgatatacata

SEQ ID NO: 881413 - DNA, 15 bp, Homo sapiens
atttgatatacatat

SEQ ID NO: 881414 - DNA, 15 bp, Homo sapiens
tttgatatacatata

SEQ ID NO: 881415 - DNA, 15 bp, Homo sapiens
ttgatatacatatac

SEQ ID NO: 881416 - DNA, 15 bp, Homo sapiens
tgatatacatataca

SEQ ID NO: 881417 - DNA, 15 bp, Homo sapiens
gatatacatatacat

SEQ ID NO: 881418 - DNA, 15 bp, Homo sapiens
atatacatatacatt

SEQ ID NO: 881419 - DNA, 15 bp, Homo sapiens
tatacatatacattg

SEQ ID NO: 881420 - DNA, 15 bp, Homo sapiens
atacatatacattgt

SEQ ID NO: 881421 - DNA, 15 bp, Homo sapiens
tacatatacattgtg

SEQ ID NO: 881422 - DNA, 15 bp, Homo sapiens
acatatacattgtga

SEQ ID NO: 881423 - DNA, 15 bp, Homo sapiens
catatacattgtgaa

SEQ ID NO: 881424 - DNA, 15 bp, Homo sapiens
atatacattgtgaaa

SEQ ID NO: 881425 - DNA, 15 bp, Homo sapiens
tatacattgtgaaat

SEQ ID NO: 881426 - DNA, 15 bp, Homo sapiens
atacattgtgaaatt

SEQ ID NO: 881427 - DNA, 15 bp, Homo sapiens
tacattgtgaaatta

SEQ ID NO: 881428 - DNA, 15 bp, Homo sapiens
acattgtgaaattat

SEQ ID NO: 881429 - DNA, 15 bp, Homo sapiens
cattgtgaaattatt

SEQ ID NO: 881430 - DNA, 15 bp, Homo sapiens
attgtgaaattatta

SEQ ID NO: 881431 - DNA, 15 bp, Homo sapiens
ttgtgaaattattac

SEQ ID NO: 881432 - DNA, 15 bp, Homo sapiens
tgtgaaattattacc

SEQ ID NO: 881433 - DNA, 15 bp, Homo sapiens
gtgaaattattacca

SEQ ID NO: 881434 - DNA, 15 bp, Homo sapiens
tgaaattattaccaa

SEQ ID NO: 881435 - DNA, 15 bp, Homo sapiens
gaaattattaccaaa

SEQ ID NO: 881436 - DNA, 15 bp, Homo sapiens
aaattattaccaaaa

SEQ ID NO: 881437 - DNA, 15 bp, Homo sapiens
aattattaccaaaat

SEQ ID NO: 881438 - DNA, 15 bp, Homo sapiens
attattaccaaaatc

SEQ ID NO: 881439 - DNA, 15 bp, Homo sapiens
ttattaccaaaatca

SEQ ID NO: 881440 - DNA, 15 bp, Homo sapiens
tattaccaaaatcaa

SEQ ID NO: 881441 - DNA, 15 bp, Homo sapiens
attaccaaaatcaag

SEQ ID NO: 881442 - DNA, 15 bp, Homo sapiens
ttaccaaaatcaagt

SEQ ID NO: 881443 - DNA, 15 bp, Homo sapiens
taccaaaatcaagtt

SEQ ID NO: 881444 - DNA, 15 bp, Homo sapiens
accaaaatcaagtta

SEQ ID NO: 881445 - DNA, 15 bp, Homo sapiens
ccaaaatcaagttaa

SEQ ID NO: 881446 - DNA, 15 bp, Homo sapiens
caaaatcaagttaat

SEQ ID NO: 881447 - DNA, 15 bp, Homo sapiens
aaaatcaagttaata

SEQ ID NO: 881448 - DNA, 15 bp, Homo sapiens
aaatcaagttaataa

SEQ ID NO: 881449 - DNA, 15 bp, Homo sapiens
aatcaagttaataaa

SEQ ID NO: 881450 - DNA, 15 bp, Homo sapiens
atcaagttaataaac

SEQ ID NO: 881451 - DNA, 15 bp, Homo sapiens
tcaagttaataaaca

SEQ ID NO: 881452 - DNA, 15 bp, Homo sapiens
caagttaataaacac

SEQ ID NO: 881453 - DNA, 15 bp, Homo sapiens
aagttaataaacaca

SEQ ID NO: 881454 - DNA, 15 bp, Homo sapiens
agttaataaacacat

SEQ ID NO: 881455 - DNA, 15 bp, Homo sapiens
gttaataaacacatc

SEQ ID NO: 881456 - DNA, 15 bp, Homo sapiens
ttaataaacacatcc

SEQ ID NO: 881457 - DNA, 15 bp, Homo sapiens
taataaacacatcca

SEQ ID NO: 881458 - DNA, 15 bp, Homo sapiens
aataaacacatccat

SEQ ID NO: 881459 - DNA, 15 bp, Homo sapiens
ataaacacatccatc

SEQ ID NO: 881460 - DNA, 15 bp, Homo sapiens
taaacacatccatca

SEQ ID NO: 881461 - DNA, 15 bp, Homo sapiens
aaacacatccatcat

SEQ ID NO: 881462 - DNA, 15 bp, Homo sapiens
aacacatccatcatc

SEQ ID NO: 881463 - DNA, 15 bp, Homo sapiens
acacatccatcatct

SEQ ID NO: 881464 - DNA, 15 bp, Homo sapiens
cacatccatcatctc

SEQ ID NO: 881465 - DNA, 15 bp, Homo sapiens
acatccatcatctcc

SEQ ID NO: 881466 - DNA, 15 bp, Homo sapiens
catccatcatctccc

SEQ ID NO: 881467 - DNA, 15 bp, Homo sapiens
atccatcatctccca

SEQ ID NO: 881468 - DNA, 15 bp, Homo sapiens
tccatcatctcccat

SEQ ID NO: 881469 - DNA, 15 bp, Homo sapiens
ccatcatctcccata

SEQ ID NO: 881470 - DNA, 15 bp, Homo sapiens
catcatctcccatag

SEQ ID NO: 881471 - DNA, 15 bp, Homo sapiens
atcatctcccatagt

SEQ ID NO: 881472 - DNA, 15 bp, Homo sapiens
tcatctcccatagtt

SEQ ID NO: 881473 - DNA, 15 bp, Homo sapiens
catctcccatagtta

SEQ ID NO: 881474 - DNA, 15 bp, Homo sapiens
atctcccatagttac

SEQ ID NO: 881475 - DNA, 15 bp, Homo sapiens
tctcccatagttact

SEQ ID NO: 881476 - DNA, 15 bp, Homo sapiens
ctcccatagttacta

SEQ ID NO: 881477 - DNA, 15 bp, Homo sapiens
tcccatagttactat

SEQ ID NO: 881478 - DNA, 15 bp, Homo sapiens
cccatagttactatt

SEQ ID NO: 881479 - DNA, 15 bp, Homo sapiens
ccatagttactattg

SEQ ID NO: 881480 - DNA, 15 bp, Homo sapiens
catagttactattgt

SEQ ID NO: 881481 - DNA, 15 bp, Homo sapiens
atagttactattgtg

SEQ ID NO: 881482 - DNA, 15 bp, Homo sapiens
tagttactattgtgt

SEQ ID NO: 881483 - DNA, 15 bp, Homo sapiens
agttactattgtgtg

SEQ ID NO: 881484 - DNA, 15 bp, Homo sapiens
gttactattgtgtgt

SEQ ID NO: 881485 - DNA, 15 bp, Homo sapiens
ttactattgtgtgtg

SEQ ID NO: 881486 - DNA, 15 bp, Homo sapiens
tactattgtgtgtgt

SEQ ID NO: 881487 - DNA, 15 bp, Homo sapiens
actattgtgtgtgtg

SEQ ID NO: 881488 - DNA, 15 bp, Homo sapiens
ctattgtgtgtgtgt

SEQ ID NO: 881489 - DNA, 15 bp, Homo sapiens
tattgtgtgtgtgtg

SEQ ID NO: 881490 - DNA, 15 bp, Homo sapiens
gtgtgtgtgtgtgcc

SEQ ID NO: 881491 - DNA, 15 bp, Homo sapiens
tgtgtgtgtgtgccc

SEQ ID NO: 881492 - DNA, 15 bp, Homo sapiens
gtgtgtgtgtgcccg

SEQ ID NO: 881493 - DNA, 15 bp, Homo sapiens
tgtgtgtgtgcccgg

SEQ ID NO: 881494 - DNA, 15 bp, Homo sapiens
gtgtgtgtgcccggg

SEQ ID NO: 881495 - DNA, 15 bp, Homo sapiens
tgtgtgtgcccgggt

SEQ ID NO: 881496 - DNA, 15 bp, Homo sapiens
gtgtgtgcccgggtg

SEQ ID NO: 881497 - DNA, 15 bp, Homo sapiens
tgtgtgcccgggtgt

SEQ ID NO: 881498 - DNA, 15 bp, Homo sapiens
gtgtgcccgggtgtg

SEQ ID NO: 881499 - DNA, 15 bp, Homo sapiens
tgtgcccgggtgtgt

SEQ ID NO: 881500 - DNA, 15 bp, Homo sapiens
gtgcccgggtgtgtg

SEQ ID NO: 881501 - DNA, 15 bp, Homo sapiens
tgcccgggtgtgtgt

SEQ ID NO: 881502 - DNA, 15 bp, Homo sapiens
gcccgggtgtgtgtc

SEQ ID NO: 881503 - DNA, 15 bp, Homo sapiens
cccgggtgtgtgtca

SEQ ID NO: 881504 - DNA, 15 bp, Homo sapiens
ccgggtgtgtgtcat

SEQ ID NO: 881505 - DNA, 15 bp, Homo sapiens
cgggtgtgtgtcatg

SEQ ID NO: 881506 - DNA, 15 bp, Homo sapiens
gggtgtgtgtcatga

SEQ ID NO: 881507 - DNA, 15 bp, Homo sapiens
ggtgtgtgtcatgag

SEQ ID NO: 881508 - DNA, 15 bp, Homo sapiens
gtgtgtgtcatgagg

SEQ ID NO: 881509 - DNA, 15 bp, Homo sapiens
tgtgtgtcatgagga

SEQ ID NO: 881510 - DNA, 15 bp, Homo sapiens
gtgtgtcatgaggac

SEQ ID NO: 881511 - DNA, 15 bp, Homo sapiens
tgtgtcatgaggaca

SEQ ID NO: 881512 - DNA, 15 bp, Homo sapiens
gtgtcatgaggacac

SEQ ID NO: 881513 - DNA, 15 bp, Homo sapiens
tgtcatgaggacact

SEQ ID NO: 881514 - DNA, 15 bp, Homo sapiens
gtcatgaggacactt

SEQ ID NO: 881515 - DNA, 15 bp, Homo sapiens
tcatgaggacactta

SEQ ID NO: 881516 - DNA, 15 bp, Homo sapiens
catgaggacacttaa

SEQ ID NO: 881517 - DNA, 15 bp, Homo sapiens
atgaggacacttaag

SEQ ID NO: 881518 - DNA, 15 bp, Homo sapiens
tgaggacacttaaga

SEQ ID NO: 881519 - DNA, 15 bp, Homo sapiens
gaggacacttaagat

SEQ ID NO: 881520 - DNA, 15 bp, Homo sapiens
aggacacttaagatc

SEQ ID NO: 881521 - DNA, 15 bp, Homo sapiens
ggacacttaagatct

SEQ ID NO: 881522 - DNA, 15 bp, Homo sapiens
gacacttaagatcta

SEQ ID NO: 881523 - DNA, 15 bp, Homo sapiens
acacttaagatctat

SEQ ID NO: 881524 - DNA, 15 bp, Homo sapiens
cacttaagatctatt

SEQ ID NO: 881525 - DNA, 15 bp, Homo sapiens
acttaagatctattc

SEQ ID NO: 881526 - DNA, 15 bp, Homo sapiens
cttaagatctattct

SEQ ID NO: 881527 - DNA, 15 bp, Homo sapiens
ttaagatctattctt

SEQ ID NO: 881528 - DNA, 15 bp, Homo sapiens
taagatctattcttt

SEQ ID NO: 881529 - DNA, 15 bp, Homo sapiens
aagatctattctttt

SEQ ID NO: 881530 - DNA, 15 bp, Homo sapiens
agatctattcttttt

SEQ ID NO: 881531 - DNA, 15 bp, Homo sapiens
gatctattctttttg

SEQ ID NO: 881532 - DNA, 15 bp, Homo sapiens
atctattctttttgc

SEQ ID NO: 881533 - DNA, 15 bp, Homo sapiens
tctattctttttgca

SEQ ID NO: 881534 - DNA, 15 bp, Homo sapiens
ctattctttttgcaa

SEQ ID NO: 881535 - DNA, 15 bp, Homo sapiens
tattctttttgcaaa

SEQ ID NO: 881536 - DNA, 15 bp, Homo sapiens
attctttttgcaaac

SEQ ID NO: 881537 - DNA, 15 bp, Homo sapiens
ttctttttgcaaact

SEQ ID NO: 881538 - DNA, 15 bp, Homo sapiens
tctttttgcaaactt

SEQ ID NO: 881539 - DNA, 15 bp, Homo sapiens
ctttttgcaaacttc

SEQ ID NO: 881540 - DNA, 15 bp, Homo sapiens
tttttgcaaacttca

SEQ ID NO: 881541 - DNA, 15 bp, Homo sapiens
ttttgcaaacttcaa

SEQ ID NO: 881542 - DNA, 15 bp, Homo sapiens
tttgcaaacttcaag

SEQ ID NO: 881543 - DNA, 15 bp, Homo sapiens
ttgcaaacttcaagt

SEQ ID NO: 881544 - DNA, 15 bp, Homo sapiens
tgcaaacttcaagtg

SEQ ID NO: 881545 - DNA, 15 bp, Homo sapiens
gcaaacttcaagtgt

SEQ ID NO: 881546 - DNA, 15 bp, Homo sapiens
caaacttcaagtgta

SEQ ID NO: 881547 - DNA, 15 bp, Homo sapiens
aaacttcaagtgtac

SEQ ID NO: 881548 - DNA, 15 bp, Homo sapiens
aacttcaagtgtact

SEQ ID NO: 881549 - DNA, 15 bp, Homo sapiens
acttcaagtgtacta

SEQ ID NO: 881550 - DNA, 15 bp, Homo sapiens
cttcaagtgtactac

SEQ ID NO: 881551 - DNA, 15 bp, Homo sapiens
ttcaagtgtactaca

SEQ ID NO: 881552 - DNA, 15 bp, Homo sapiens
tcaagtgtactacac

SEQ ID NO: 881553 - DNA, 15 bp, Homo sapiens
caagtgtactacaca

SEQ ID NO: 881554 - DNA, 15 bp, Homo sapiens
aagtgtactacacag

SEQ ID NO: 881555 - DNA, 15 bp, Homo sapiens
agtgtactacacagc

SEQ ID NO: 881556 - DNA, 15 bp, Homo sapiens
gtgtactacacagca

SEQ ID NO: 881557 - DNA, 15 bp, Homo sapiens
tgtactacacagcac

SEQ ID NO: 881558 - DNA, 15 bp, Homo sapiens
gtactacacagcact

SEQ ID NO: 881559 - DNA, 15 bp, Homo sapiens
tactacacagcacta

SEQ ID NO: 881560 - DNA, 15 bp, Homo sapiens
actacacagcactat

SEQ ID NO: 881561 - DNA, 15 bp, Homo sapiens
ctacacagcactatc

SEQ ID NO: 881562 - DNA, 15 bp, Homo sapiens
tacacagcactatca

SEQ ID NO: 881563 - DNA, 15 bp, Homo sapiens
acacagcactatcaa

SEQ ID NO: 881564 - DNA, 15 bp, Homo sapiens
cacagcactatcaac

SEQ ID NO: 881565 - DNA, 15 bp, Homo sapiens
acagcactatcaact

SEQ ID NO: 881566 - DNA, 15 bp, Homo sapiens
cagcactatcaacta

SEQ ID NO: 881567 - DNA, 15 bp, Homo sapiens
agcactatcaactat

SEQ ID NO: 881568 - DNA, 15 bp, Homo sapiens
gcactatcaactata

SEQ ID NO: 881569 - DNA, 15 bp, Homo sapiens
cactatcaactatag

SEQ ID NO: 881570 - DNA, 15 bp, Homo sapiens
actatcaactatagt

SEQ ID NO: 881571 - DNA, 15 bp, Homo sapiens
ctatcaactatagtc

SEQ ID NO: 881572 - DNA, 15 bp, Homo sapiens
tatcaactatagtca

SEQ ID NO: 881573 - DNA, 15 bp, Homo sapiens
atcaactatagtcac

SEQ ID NO: 881574 - DNA, 15 bp, Homo sapiens
tcaactatagtcacc

SEQ ID NO: 881575 - DNA, 15 bp, Homo sapiens
caactatagtcacca

SEQ ID NO: 881576 - DNA, 15 bp, Homo sapiens
aactatagtcaccac

SEQ ID NO: 881577 - DNA, 15 bp, Homo sapiens
actatagtcaccaca

SEQ ID NO: 881578 - DNA, 15 bp, Homo sapiens
ctatagtcaccacac

SEQ ID NO: 881579 - DNA, 15 bp, Homo sapiens
tatagtcaccacact

SEQ ID NO: 881580 - DNA, 15 bp, Homo sapiens
atagtcaccacactt

SEQ ID NO: 881581 - DNA, 15 bp, Homo sapiens
tagtcaccacacttt

SEQ ID NO: 881582 - DNA, 15 bp, Homo sapiens
agtcaccacacttta

SEQ ID NO: 881583 - DNA, 15 bp, Homo sapiens
gtcaccacactttac

SEQ ID NO: 881584 - DNA, 15 bp, Homo sapiens
tcaccacactttaca

SEQ ID NO: 881585 - DNA, 15 bp, Homo sapiens
caccacactttacat

SEQ ID NO: 881586 - DNA, 15 bp, Homo sapiens
accacactttacatt

SEQ ID NO: 881587 - DNA, 15 bp, Homo sapiens
ccacactttacatta

SEQ ID NO: 881588 - DNA, 15 bp, Homo sapiens
cacactttacattac

SEQ ID NO: 881589 - DNA, 15 bp, Homo sapiens
acactttacattaca

SEQ ID NO: 881590 - DNA, 15 bp, Homo sapiens
cactttacattacag

SEQ ID NO: 881591 - DNA, 15 bp, Homo sapiens
actttacattacagc

SEQ ID NO: 881592 - DNA, 15 bp, Homo sapiens
ctttacattacagcc

SEQ ID NO: 881593 - DNA, 15 bp, Homo sapiens
tttacattacagccc

SEQ ID NO: 881594 - DNA, 15 bp, Homo sapiens
ttacattacagcccc

SEQ ID NO: 881595 - DNA, 15 bp, Homo sapiens
tacattacagcccca

SEQ ID NO: 881596 - DNA, 15 bp, Homo sapiens
acattacagccccag

SEQ ID NO: 881597 - DNA, 15 bp, Homo sapiens
cattacagccccaga

SEQ ID NO: 881598 - DNA, 15 bp, Homo sapiens
attacagccccagaa

SEQ ID NO: 881599 - DNA, 15 bp, Homo sapiens
ttacagccccagaat

SEQ ID NO: 881600 - DNA, 15 bp, Homo sapiens
tacagccccagaatt

SEQ ID NO: 881601 - DNA, 15 bp, Homo sapiens
acagccccagaattt

SEQ ID NO: 881602 - DNA, 15 bp, Homo sapiens
cagccccagaattta

SEQ ID NO: 881603 - DNA, 15 bp, Homo sapiens
agccccagaatttat

SEQ ID NO: 881604 - DNA, 15 bp, Homo sapiens
gccccagaatttatt

SEQ ID NO: 881605 - DNA, 15 bp, Homo sapiens
ccccagaatttattc

SEQ ID NO: 881606 - DNA, 15 bp, Homo sapiens
cccagaatttattca

SEQ ID NO: 881607 - DNA, 15 bp, Homo sapiens
ccagaatttattcat

SEQ ID NO: 881608 - DNA, 15 bp, Homo sapiens
cagaatttattcatc

SEQ ID NO: 881609 - DNA, 15 bp, Homo sapiens
agaatttattcatcc

SEQ ID NO: 881610 - DNA, 15 bp, Homo sapiens
gaatttattcatcct

SEQ ID NO: 881611 - DNA, 15 bp, Homo sapiens
aatttattcatccta

SEQ ID NO: 881612 - DNA, 15 bp, Homo sapiens
atttattcatcctat

SEQ ID NO: 881613 - DNA, 15 bp, Homo sapiens
tttattcatcctata

SEQ ID NO: 881614 - DNA, 15 bp, Homo sapiens
ttattcatcctataa

SEQ ID NO: 881615 - DNA, 15 bp, Homo sapiens
tattcatcctataat

SEQ ID NO: 881616 - DNA, 15 bp, Homo sapiens
attcatcctataatg

SEQ ID NO: 881617 - DNA, 15 bp, Homo sapiens
ttcatcctataatgg

SEQ ID NO: 881618 - DNA, 15 bp, Homo sapiens
tcatcctataatggc

SEQ ID NO: 881619 - DNA, 15 bp, Homo sapiens
catcctataatggca

SEQ ID NO: 881620 - DNA, 15 bp, Homo sapiens
atcctataatggcaa

SEQ ID NO: 881621 - DNA, 15 bp, Homo sapiens
tcctataatggcaag

SEQ ID NO: 881622 - DNA, 15 bp, Homo sapiens
cctataatggcaagt

SEQ ID NO: 881623 - DNA, 15 bp, Homo sapiens
ctataatggcaagtt

SEQ ID NO: 881624 - DNA, 15 bp, Homo sapiens
tataatggcaagttt

SEQ ID NO: 881625 - DNA, 15 bp, Homo sapiens
ataatggcaagtttg

SEQ ID NO: 881626 - DNA, 15 bp, Homo sapiens
taatggcaagtttgt

SEQ ID NO: 881627 - DNA, 15 bp, Homo sapiens
aatggcaagtttgta

SEQ ID NO: 881628 - DNA, 15 bp, Homo sapiens
atggcaagtttgtat

SEQ ID NO: 881629 - DNA, 15 bp, Homo sapiens
tggcaagtttgtatc

SEQ ID NO: 881630 - DNA, 15 bp, Homo sapiens
ggcaagtttgtatcc

SEQ ID NO: 881631 - DNA, 15 bp, Homo sapiens
gcaagtttgtatcct

SEQ ID NO: 881632 - DNA, 15 bp, Homo sapiens
caagtttgtatcctt

SEQ ID NO: 881633 - DNA, 15 bp, Homo sapiens
aagtttgtatccttt

SEQ ID NO: 881634 - DNA, 15 bp, Homo sapiens
agtttgtatcctttg

SEQ ID NO: 881635 - DNA, 15 bp, Homo sapiens
gtttgtatcctttga

SEQ ID NO: 881636 - DNA, 15 bp, Homo sapiens
tttgaccaacatctc

SEQ ID NO: 881637 - DNA, 15 bp, Homo sapiens
ttgaccaacatctcc

SEQ ID NO: 881638 - DNA, 15 bp, Homo sapiens
tgaccaacatctccc

SEQ ID NO: 881639 - DNA, 15 bp, Homo sapiens
gaccaacatctcccc

SEQ ID NO: 881640 - DNA, 15 bp, Homo sapiens
accaacatctcccca

SEQ ID NO: 881641 - DNA, 15 bp, Homo sapiens
ccaacatctccccat

SEQ ID NO: 881642 - DNA, 15 bp, Homo sapiens
caacatctccccatt

SEQ ID NO: 881643 - DNA, 15 bp, Homo sapiens
aacatctccccattc

SEQ ID NO: 881644 - DNA, 15 bp, Homo sapiens
acatctccccattcc

SEQ ID NO: 881645 - DNA, 15 bp, Homo sapiens
catctccccattccc

SEQ ID NO: 881646 - DNA, 15 bp, Homo sapiens
atctccccattcccc

SEQ ID NO: 881647 - DNA, 15 bp, Homo sapiens
tctccccattccccc

SEQ ID NO: 881648 - DNA, 15 bp, Homo sapiens
ctccccattccccct

SEQ ID NO: 881649 - DNA, 15 bp, Homo sapiens
tccccattccccctg

SEQ ID NO: 881650 - DNA, 15 bp, Homo sapiens
ccccattccccctga

SEQ ID NO: 881651 - DNA, 15 bp, Homo sapiens
cccattccccctgac

SEQ ID NO: 881652 - DNA, 15 bp, Homo sapiens
ccattccccctgacc

SEQ ID NO: 881653 - DNA, 15 bp, Homo sapiens
cattccccctgaccc

SEQ ID NO: 881654 - DNA, 15 bp, Homo sapiens
attccccctgaccct

SEQ ID NO: 881655 - DNA, 15 bp, Homo sapiens
ttccccctgaccctc

SEQ ID NO: 881656 - DNA, 15 bp, Homo sapiens
tccccctgaccctca

SEQ ID NO: 881657 - DNA, 15 bp, Homo sapiens
ccccctgaccctcac

SEQ ID NO: 881658 - DNA, 15 bp, Homo sapiens
cccctgaccctcacc

SEQ ID NO: 881659 - DNA, 15 bp, Homo sapiens
ccctgaccctcacca

SEQ ID NO: 881660 - DNA, 15 bp, Homo sapiens
cctgaccctcaccac

SEQ ID NO: 881661 - DNA, 15 bp, Homo sapiens
ctgaccctcaccaca

SEQ ID NO: 881662 - DNA, 15 bp, Homo sapiens
tgaccctcaccacag

SEQ ID NO: 881663 - DNA, 15 bp, Homo sapiens
gaccctcaccacagt

SEQ ID NO: 881664 - DNA, 15 bp, Homo sapiens
accctcaccacagtc

SEQ ID NO: 881665 - DNA, 15 bp, Homo sapiens
ccctcaccacagtcc

SEQ ID NO: 881666 - DNA, 15 bp, Homo sapiens
cctcaccacagtccc

SEQ ID NO: 881667 - DNA, 15 bp, Homo sapiens
ctcaccacagtccct

SEQ ID NO: 881668 - DNA, 15 bp, Homo sapiens
tcaccacagtccctg

SEQ ID NO: 881669 - DNA, 15 bp, Homo sapiens
caccacagtccctgg

SEQ ID NO: 881670 - DNA, 15 bp, Homo sapiens
accacagtccctggc

SEQ ID NO: 881671 - DNA, 15 bp, Homo sapiens
ccacagtccctggcc

SEQ ID NO: 881672 - DNA, 15 bp, Homo sapiens
cacagtccctggcca

SEQ ID NO: 881673 - DNA, 15 bp, Homo sapiens
acagtccctggccac

SEQ ID NO: 881674 - DNA, 15 bp, Homo sapiens
cagtccctggccacc

SEQ ID NO: 881675 - DNA, 15 bp, Homo sapiens
agtccctggccacca

SEQ ID NO: 881676 - DNA, 15 bp, Homo sapiens
gtccctggccaccac

SEQ ID NO: 881677 - DNA, 15 bp, Homo sapiens
tccctggccaccact

SEQ ID NO: 881678 - DNA, 15 bp, Homo sapiens
ccctggccaccactg

SEQ ID NO: 881679 - DNA, 15 bp, Homo sapiens
cctggccaccactgt

SEQ ID NO: 881680 - DNA, 15 bp, Homo sapiens
ctggccaccactgtt

SEQ ID NO: 881681 - DNA, 15 bp, Homo sapiens
tggccaccactgttc

SEQ ID NO: 881682 - DNA, 15 bp, Homo sapiens
ggccaccactgttct

SEQ ID NO: 881683 - DNA, 15 bp, Homo sapiens
gccaccactgttcta

SEQ ID NO: 881684 - DNA, 15 bp, Homo sapiens
ccaccactgttctac

SEQ ID NO: 881685 - DNA, 15 bp, Homo sapiens
caccactgttctact

SEQ ID NO: 881686 - DNA, 15 bp, Homo sapiens
accactgttctactt

SEQ ID NO: 881687 - DNA, 15 bp, Homo sapiens
ccactgttctacttt

SEQ ID NO: 881688 - DNA, 15 bp, Homo sapiens
cactgttctactttc

SEQ ID NO: 881689 - DNA, 15 bp, Homo sapiens
actgttctactttct

SEQ ID NO: 881690 - DNA, 15 bp, Homo sapiens
ctgttctactttctg

SEQ ID NO: 881691 - DNA, 15 bp, Homo sapiens
tgttctactttctgc

SEQ ID NO: 881692 - DNA, 15 bp, Homo sapiens
gttctactttctgct

SEQ ID NO: 881693 - DNA, 15 bp, Homo sapiens
ttctactttctgctt

SEQ ID NO: 881694 - DNA, 15 bp, Homo sapiens
tctactttctgcttc

SEQ ID NO: 881695 - DNA, 15 bp, Homo sapiens
ctactttctgcttct

SEQ ID NO: 881696 - DNA, 15 bp, Homo sapiens
tactttctgcttcta

SEQ ID NO: 881697 - DNA, 15 bp, Homo sapiens
actttctgcttctat

SEQ ID NO: 881698 - DNA, 15 bp, Homo sapiens
ctttctgcttctatg

SEQ ID NO: 881699 - DNA, 15 bp, Homo sapiens
tttctgcttctatga

SEQ ID NO: 881700 - DNA, 15 bp, Homo sapiens
ttctgcttctatgag

SEQ ID NO: 881701 - DNA, 15 bp, Homo sapiens
tctgcttctatgagt

SEQ ID NO: 881702 - DNA, 15 bp, Homo sapiens
ctgcttctatgagtt

SEQ ID NO: 881703 - DNA, 15 bp, Homo sapiens
tgcttctatgagttc

SEQ ID NO: 881704 - DNA, 15 bp, Homo sapiens
gcttctatgagttca

SEQ ID NO: 881705 - DNA, 15 bp, Homo sapiens
cttctatgagttcaa

SEQ ID NO: 881706 - DNA, 15 bp, Homo sapiens
ttctatgagttcaac

SEQ ID NO: 881707 - DNA, 15 bp, Homo sapiens
tctatgagttcaact

SEQ ID NO: 881708 - DNA, 15 bp, Homo sapiens
ctatgagttcaactt

SEQ ID NO: 881709 - DNA, 15 bp, Homo sapiens
tatgagttcaacttt

SEQ ID NO: 881710 - DNA, 15 bp, Homo sapiens
atgagttcaactttt

SEQ ID NO: 881711 - DNA, 15 bp, Homo sapiens
tgagttcaacttttt

SEQ ID NO: 881712 - DNA, 15 bp, Homo sapiens
gagttcaacttttta

SEQ ID NO: 881713 - DNA, 15 bp, Homo sapiens
agttcaactttttag

SEQ ID NO: 881714 - DNA, 15 bp, Homo sapiens
gttcaactttttaga

SEQ ID NO: 881715 - DNA, 15 bp, Homo sapiens
ttcaactttttagat

SEQ ID NO: 881716 - DNA, 15 bp, Homo sapiens
tcaactttttagatt

SEQ ID NO: 881717 - DNA, 15 bp, Homo sapiens
caactttttagattc

SEQ ID NO: 881718 - DNA, 15 bp, Homo sapiens
aactttttagattcc

SEQ ID NO: 881719 - DNA, 15 bp, Homo sapiens
actttttagattcca

SEQ ID NO: 881720 - DNA, 15 bp, Homo sapiens
ctttttagattccat

SEQ ID NO: 881721 - DNA, 15 bp, Homo sapiens
tttttagattccatg

SEQ ID NO: 881722 - DNA, 15 bp, Homo sapiens
ttttagattccatgt

SEQ ID NO: 881723 - DNA, 15 bp, Homo sapiens
tttagattccatgta

SEQ ID NO: 881724 - DNA, 15 bp, Homo sapiens
ttagattccatgtat

SEQ ID NO: 881725 - DNA, 15 bp, Homo sapiens
tagattccatgtata

SEQ ID NO: 881726 - DNA, 15 bp, Homo sapiens
agattccatgtataa

SEQ ID NO: 881727 - DNA, 15 bp, Homo sapiens
gattccatgtataag

SEQ ID NO: 881728 - DNA, 15 bp, Homo sapiens
attccatgtataagt

SEQ ID NO: 881729 - DNA, 15 bp, Homo sapiens
ttccatgtataagtg

SEQ ID NO: 881730 - DNA, 15 bp, Homo sapiens
tccatgtataagtga

SEQ ID NO: 881731 - DNA, 15 bp, Homo sapiens
ccatgtataagtgag

SEQ ID NO: 881732 - DNA, 15 bp, Homo sapiens
catgtataagtgaga

SEQ ID NO: 881733 - DNA, 15 bp, Homo sapiens
atgtataagtgagat

SEQ ID NO: 881734 - DNA, 15 bp, Homo sapiens
tgtataagtgagatc

SEQ ID NO: 881735 - DNA, 15 bp, Homo sapiens
gtataagtgagatca

SEQ ID NO: 881736 - DNA, 15 bp, Homo sapiens
tataagtgagatcat

SEQ ID NO: 881737 - DNA, 15 bp, Homo sapiens
ataagtgagatcata

SEQ ID NO: 881738 - DNA, 15 bp, Homo sapiens
taagtgagatcatac

SEQ ID NO: 881739 - DNA, 15 bp, Homo sapiens
aagtgagatcataca

SEQ ID NO: 881740 - DNA, 15 bp, Homo sapiens
agtgagatcatacag

SEQ ID NO: 881741 - DNA, 15 bp, Homo sapiens
gtgagatcatacagt

SEQ ID NO: 881742 - DNA, 15 bp, Homo sapiens
tgagatcatacagta

SEQ ID NO: 881743 - DNA, 15 bp, Homo sapiens
gagatcatacagtat

SEQ ID NO: 881744 - DNA, 15 bp, Homo sapiens
agatcatacagtatt

SEQ ID NO: 881745 - DNA, 15 bp, Homo sapiens
gatcatacagtattt

SEQ ID NO: 881746 - DNA, 15 bp, Homo sapiens
atcatacagtatttg

SEQ ID NO: 881747 - DNA, 15 bp, Homo sapiens
tcatacagtatttgt

SEQ ID NO: 881748 - DNA, 15 bp, Homo sapiens
catacagtatttgtc

SEQ ID NO: 881749 - DNA, 15 bp, Homo sapiens
atacagtatttgtcc

SEQ ID NO: 881750 - DNA, 15 bp, Homo sapiens
tacagtatttgtcct

SEQ ID NO: 881751 - DNA, 15 bp, Homo sapiens
acagtatttgtcctt

SEQ ID NO: 881752 - DNA, 15 bp, Homo sapiens
cagtatttgtccttc

SEQ ID NO: 881753 - DNA, 15 bp, Homo sapiens
agtatttgtccttct

SEQ ID NO: 881754 - DNA, 15 bp, Homo sapiens
gtatttgtccttcta

SEQ ID NO: 881755 - DNA, 15 bp, Homo sapiens
tatttgtccttctat

SEQ ID NO: 881756 - DNA, 15 bp, Homo sapiens
atttgtccttctata

SEQ ID NO: 881757 - DNA, 15 bp, Homo sapiens
tttgtccttctataa

SEQ ID NO: 881758 - DNA, 15 bp, Homo sapiens
ttgtccttctataac

SEQ ID NO: 881759 - DNA, 15 bp, Homo sapiens
tgtccttctataact

SEQ ID NO: 881760 - DNA, 15 bp, Homo sapiens
gtccttctataactg

SEQ ID NO: 881761 - DNA, 15 bp, Homo sapiens
tccttctataactgg

SEQ ID NO: 881762 - DNA, 15 bp, Homo sapiens
ccttctataactggc

SEQ ID NO: 881763 - DNA, 15 bp, Homo sapiens
cttctataactggct

SEQ ID NO: 881764 - DNA, 15 bp, Homo sapiens
ttctataactggctt

SEQ ID NO: 881765 - DNA, 15 bp, Homo sapiens
tctataactggctta

SEQ ID NO: 881766 - DNA, 15 bp, Homo sapiens
ctataactggcttat

SEQ ID NO: 881767 - DNA, 15 bp, Homo sapiens
tataactggcttatt

SEQ ID NO: 881768 - DNA, 15 bp, Homo sapiens
ataactggcttattt

SEQ ID NO: 881769 - DNA, 15 bp, Homo sapiens
taactggcttatttc

SEQ ID NO: 881770 - DNA, 15 bp, Homo sapiens
aactggcttatttca

SEQ ID NO: 881771 - DNA, 15 bp, Homo sapiens
actggcttatttcac

SEQ ID NO: 881772 - DNA, 15 bp, Homo sapiens
atttcacttagcatg

SEQ ID NO: 881773 - DNA, 15 bp, Homo sapiens
tttcacttagcatga

SEQ ID NO: 881774 - DNA, 15 bp, Homo sapiens
ttcacttagcatgat

SEQ ID NO: 881775 - DNA, 15 bp, Homo sapiens
tcacttagcatgatg

SEQ ID NO: 881776 - DNA, 15 bp, Homo sapiens
cacttagcatgatgt

SEQ ID NO: 881777 - DNA, 15 bp, Homo sapiens
acttagcatgatgtt

SEQ ID NO: 881778 - DNA, 15 bp, Homo sapiens
cttagcatgatgttc

SEQ ID NO: 881779 - DNA, 15 bp, Homo sapiens
ttagcatgatgttct

SEQ ID NO: 881780 - DNA, 15 bp, Homo sapiens
tagcatgatgttctc

SEQ ID NO: 881781 - DNA, 15 bp, Homo sapiens
agcatgatgttctcc

SEQ ID NO: 881782 - DNA, 15 bp, Homo sapiens
gcatgatgttctcca

SEQ ID NO: 881783 - DNA, 15 bp, Homo sapiens
catgatgttctccag

SEQ ID NO: 881784 - DNA, 15 bp, Homo sapiens
atgatgttctccagt

SEQ ID NO: 881785 - DNA, 15 bp, Homo sapiens
tgatgttctccagtt

SEQ ID NO: 881786 - DNA, 15 bp, Homo sapiens
gatgttctccagttc

SEQ ID NO: 881787 - DNA, 15 bp, Homo sapiens
atgttctccagttca

SEQ ID NO: 881788 - DNA, 15 bp, Homo sapiens
tgttctccagttcat

SEQ ID NO: 881789 - DNA, 15 bp, Homo sapiens
gttctccagttcatc

SEQ ID NO: 881790 - DNA, 15 bp, Homo sapiens
ttctccagttcatct

SEQ ID NO: 881791 - DNA, 15 bp, Homo sapiens
tctccagttcatcta

SEQ ID NO: 881792 - DNA, 15 bp, Homo sapiens
ctccagttcatctat

SEQ ID NO: 881793 - DNA, 15 bp, Homo sapiens
tccagttcatctatg

SEQ ID NO: 881794 - DNA, 15 bp, Homo sapiens
ccagttcatctatgt

SEQ ID NO: 881795 - DNA, 15 bp, Homo sapiens
cagttcatctatgtt

SEQ ID NO: 881796 - DNA, 15 bp, Homo sapiens
agttcatctatgttg

SEQ ID NO: 881797 - DNA, 15 bp, Homo sapiens
gttcatctatgttgt

SEQ ID NO: 881798 - DNA, 15 bp, Homo sapiens
ttcatctatgttgtt

SEQ ID NO: 881799 - DNA, 15 bp, Homo sapiens
tcatctatgttgttg

SEQ ID NO: 881800 - DNA, 15 bp, Homo sapiens
catctatgttgttga

SEQ ID NO: 881801 - DNA, 15 bp, Homo sapiens
atctatgttgttgaa

SEQ ID NO: 881802 - DNA, 15 bp, Homo sapiens
tctatgttgttgaat

SEQ ID NO: 881803 - DNA, 15 bp, Homo sapiens
ctatgttgttgaatg

SEQ ID NO: 881804 - DNA, 15 bp, Homo sapiens
tatgttgttgaatga

SEQ ID NO: 881805 - DNA, 15 bp, Homo sapiens
atgttgttgaatgac

SEQ ID NO: 881806 - DNA, 15 bp, Homo sapiens
tgttgttgaatgaca

SEQ ID NO: 881807 - DNA, 15 bp, Homo sapiens
gttgttgaatgacag

SEQ ID NO: 881808 - DNA, 15 bp, Homo sapiens
ttgttgaatgacaga

SEQ ID NO: 881809 - DNA, 15 bp, Homo sapiens
tgttgaatgacagaa

SEQ ID NO: 881810 - DNA, 15 bp, Homo sapiens
gttgaatgacagaat

SEQ ID NO: 881811 - DNA, 15 bp, Homo sapiens
ttgaatgacagaatt

SEQ ID NO: 881812 - DNA, 15 bp, Homo sapiens
tgaatgacagaattt

SEQ ID NO: 881813 - DNA, 15 bp, Homo sapiens
gaatgacagaatttc

SEQ ID NO: 881814 - DNA, 15 bp, Homo sapiens
aatgacagaatttct

SEQ ID NO: 881815 - DNA, 15 bp, Homo sapiens
atgacagaatttctt

SEQ ID NO: 881816 - DNA, 15 bp, Homo sapiens
tgacagaatttcttt

SEQ ID NO: 881817 - DNA, 15 bp, Homo sapiens
gacagaatttctttc

SEQ ID NO: 881818 - DNA, 15 bp, Homo sapiens
acagaatttctttct

SEQ ID NO: 881819 - DNA, 15 bp, Homo sapiens
cagaatttctttctt

SEQ ID NO: 881820 - DNA, 15 bp, Homo sapiens
agaatttctttcttt

SEQ ID NO: 881821 - DNA, 15 bp, Homo sapiens
gaatttctttctttt

SEQ ID NO: 881822 - DNA, 15 bp, Homo sapiens
aatttctttcttttt

SEQ ID NO: 881823 - DNA, 15 bp, Homo sapiens
atttctttctttttt

SEQ ID NO: 881824 - DNA, 15 bp, Homo sapiens
tttctttctttttta

SEQ ID NO: 881825 - DNA, 15 bp, Homo sapiens
ttctttcttttttat

SEQ ID NO: 881826 - DNA, 15 bp, Homo sapiens
tctttcttttttatg

SEQ ID NO: 881827 - DNA, 15 bp, Homo sapiens
ctttcttttttatgg

SEQ ID NO: 881828 - DNA, 15 bp, Homo sapiens
tttcttttttatggc

SEQ ID NO: 881829 - DNA, 15 bp, Homo sapiens
ttcttttttatggct

SEQ ID NO: 881830 - DNA, 15 bp, Homo sapiens
tcttttttatggctg

SEQ ID NO: 881831 - DNA, 15 bp, Homo sapiens
cttttttatggctga

SEQ ID NO: 881832 - DNA, 15 bp, Homo sapiens
ttttttatggctgaa

SEQ ID NO: 881833 - DNA, 15 bp, Homo sapiens
tttttatggctgaat

SEQ ID NO: 881834 - DNA, 15 bp, Homo sapiens
ttttatggctgaata

SEQ ID NO: 881835 - DNA, 15 bp, Homo sapiens
tttatggctgaataa

SEQ ID NO: 881836 - DNA, 15 bp, Homo sapiens
ttatggctgaataat

SEQ ID NO: 881837 - DNA, 15 bp, Homo sapiens
tatggctgaataata

SEQ ID NO: 881838 - DNA, 15 bp, Homo sapiens
aataatattccatta

SEQ ID NO: 881839 - DNA, 15 bp, Homo sapiens
ataatattccattat

SEQ ID NO: 881840 - DNA, 15 bp, Homo sapiens
taatattccattata

SEQ ID NO: 881841 - DNA, 15 bp, Homo sapiens
aatattccattatat

SEQ ID NO: 881842 - DNA, 15 bp, Homo sapiens
atattccattatata

SEQ ID NO: 881843 - DNA, 15 bp, Homo sapiens
tattccattatatat

SEQ ID NO: 881844 - DNA, 15 bp, Homo sapiens
attccattatatata

SEQ ID NO: 881845 - DNA, 15 bp, Homo sapiens
ttccattatatatat

SEQ ID NO: 881846 - DNA, 15 bp, Homo sapiens
tccattatatatatg

SEQ ID NO: 881847 - DNA, 15 bp, Homo sapiens
ccattatatatatgt

SEQ ID NO: 881848 - DNA, 15 bp, Homo sapiens
cattatatatatgtg

SEQ ID NO: 881849 - DNA, 15 bp, Homo sapiens
attatatatatgtgc

SEQ ID NO: 881850 - DNA, 15 bp, Homo sapiens
ttatatatatgtgca

SEQ ID NO: 881851 - DNA, 15 bp, Homo sapiens
tatatatatgtgcag

SEQ ID NO: 881852 - DNA, 15 bp, Homo sapiens
atatatatgtgcagg

SEQ ID NO: 881853 - DNA, 15 bp, Homo sapiens
tatatatgtgcaggt

SEQ ID NO: 881854 - DNA, 15 bp, Homo sapiens
atatatgtgcaggta

SEQ ID NO: 881855 - DNA, 15 bp, Homo sapiens
tatatgtgcaggtac

SEQ ID NO: 881856 - DNA, 15 bp, Homo sapiens
atatgtgcaggtaca

SEQ ID NO: 881857 - DNA, 15 bp, Homo sapiens
tatgtgcaggtacat

SEQ ID NO: 881858 - DNA, 15 bp, Homo sapiens
atgtgcaggtacata

SEQ ID NO: 881859 - DNA, 15 bp, Homo sapiens
tgtgcaggtacatac

SEQ ID NO: 881860 - DNA, 15 bp, Homo sapiens
gtgcaggtacataca

SEQ ID NO: 881861 - DNA, 15 bp, Homo sapiens
tgcaggtacatacac

SEQ ID NO: 881862 - DNA, 15 bp, Homo sapiens
gcaggtacatacaca

SEQ ID NO: 881863 - DNA, 15 bp, Homo sapiens
caggtacatacacaa

SEQ ID NO: 881864 - DNA, 15 bp, Homo sapiens
aggtacatacacaac

SEQ ID NO: 881865 - DNA, 15 bp, Homo sapiens
ggtacatacacaaca

SEQ ID NO: 881866 - DNA, 15 bp, Homo sapiens
gtacatacacaacac

SEQ ID NO: 881867 - DNA, 15 bp, Homo sapiens
tacatacacaacaca

SEQ ID NO: 881868 - DNA, 15 bp, Homo sapiens
acatacacaacacag

SEQ ID NO: 881869 - DNA, 15 bp, Homo sapiens
catacacaacacaga

SEQ ID NO: 881870 - DNA, 15 bp, Homo sapiens
atacacaacacagac

SEQ ID NO: 881871 - DNA, 15 bp, Homo sapiens
tacacaacacagacc

SEQ ID NO: 881872 - DNA, 15 bp, Homo sapiens
acacaacacagacca

SEQ ID NO: 881873 - DNA, 15 bp, Homo sapiens
cacaacacagaccat

SEQ ID NO: 881874 - DNA, 15 bp, Homo sapiens
acaacacagaccata

SEQ ID NO: 881875 - DNA, 15 bp, Homo sapiens
caacacagaccatat

SEQ ID NO: 881876 - DNA, 15 bp, Homo sapiens
aacacagaccatatt

SEQ ID NO: 881877 - DNA, 15 bp, Homo sapiens
acacagaccatattt

SEQ ID NO: 881878 - DNA, 15 bp, Homo sapiens
cacagaccatatttt

SEQ ID NO: 881879 - DNA, 15 bp, Homo sapiens
acagaccatattttc

SEQ ID NO: 881880 - DNA, 15 bp, Homo sapiens
cagaccatattttct

SEQ ID NO: 881881 - DNA, 15 bp, Homo sapiens
gaccatattttcttt

SEQ ID NO: 881882 - DNA, 15 bp, Homo sapiens
accatattttcttta

SEQ ID NO: 881883 - DNA, 15 bp, Homo sapiens
ccatattttctttat

SEQ ID NO: 881884 - DNA, 15 bp, Homo sapiens
catattttctttatc

SEQ ID NO: 881885 - DNA, 15 bp, Homo sapiens
atattttctttatct

SEQ ID NO: 881886 - DNA, 15 bp, Homo sapiens
tattttctttatcta

SEQ ID NO: 881887 - DNA, 15 bp, Homo sapiens
attttctttatctac

SEQ ID NO: 881888 - DNA, 15 bp, Homo sapiens
ttttctttatctact

SEQ ID NO: 881889 - DNA, 15 bp, Homo sapiens
tttctttatctactc

SEQ ID NO: 881890 - DNA, 15 bp, Homo sapiens
ttctttatctactca

SEQ ID NO: 881891 - DNA, 15 bp, Homo sapiens
tctttatctactcat

SEQ ID NO: 881892 - DNA, 15 bp, Homo sapiens
ctttatctactcatc

SEQ ID NO: 881893 - DNA, 15 bp, Homo sapiens
tttatctactcatct

SEQ ID NO: 881894 - DNA, 15 bp, Homo sapiens
ttatctactcatctg

SEQ ID NO: 881895 - DNA, 15 bp, Homo sapiens
tatctactcatctgt

SEQ ID NO: 881896 - DNA, 15 bp, Homo sapiens
atctactcatctgtc

SEQ ID NO: 881897 - DNA, 15 bp, Homo sapiens
tctactcatctgtca

SEQ ID NO: 881898 - DNA, 15 bp, Homo sapiens
ctactcatctgtcaa

SEQ ID NO: 881899 - DNA, 15 bp, Homo sapiens
tactcatctgtcaat

SEQ ID NO: 881900 - DNA, 15 bp, Homo sapiens
actcatctgtcaatg

SEQ ID NO: 881901 - DNA, 15 bp, Homo sapiens
catctgtcaatggac

SEQ ID NO: 881902 - DNA, 15 bp, Homo sapiens
atctgtcaatggaca

SEQ ID NO: 881903 - DNA, 15 bp, Homo sapiens
tctgtcaatggacac

SEQ ID NO: 881904 - DNA, 15 bp, Homo sapiens
ctgtcaatggacacc

SEQ ID NO: 881905 - DNA, 15 bp, Homo sapiens
tgtcaatggacacca

SEQ ID NO: 881906 - DNA, 15 bp, Homo sapiens
gtcaatggacaccag

SEQ ID NO: 881907 - DNA, 15 bp, Homo sapiens
tcaatggacaccagt

SEQ ID NO: 881908 - DNA, 15 bp, Homo sapiens
caatggacaccagtg

SEQ ID NO: 881909 - DNA, 15 bp, Homo sapiens
aatggacaccagtgg

SEQ ID NO: 881910 - DNA, 15 bp, Homo sapiens
atggacaccagtggt

SEQ ID NO: 881911 - DNA, 15 bp, Homo sapiens
tggacaccagtggtt

SEQ ID NO: 881912 - DNA, 15 bp, Homo sapiens
ggacaccagtggttt

SEQ ID NO: 881913 - DNA, 15 bp, Homo sapiens
gacaccagtggtttc

SEQ ID NO: 881914 - DNA, 15 bp, Homo sapiens
acaccagtggtttct

SEQ ID NO: 881915 - DNA, 15 bp, Homo sapiens
caccagtggtttcta

SEQ ID NO: 881916 - DNA, 15 bp, Homo sapiens
accagtggtttctat

SEQ ID NO: 881917 - DNA, 15 bp, Homo sapiens
ccagtggtttctata

SEQ ID NO: 881918 - DNA, 15 bp, Homo sapiens
cagtggtttctatat

SEQ ID NO: 881919 - DNA, 15 bp, Homo sapiens
agtggtttctatatc

SEQ ID NO: 881920 - DNA, 15 bp, Homo sapiens
gtggtttctatatct

SEQ ID NO: 881921 - DNA, 15 bp, Homo sapiens
tggtttctatatctt

SEQ ID NO: 881922 - DNA, 15 bp, Homo sapiens
ggtttctatatcttg

SEQ ID NO: 881923 - DNA, 15 bp, Homo sapiens
gtttctatatcttgg

SEQ ID NO: 881924 - DNA, 15 bp, Homo sapiens
tttctatatcttggc

SEQ ID NO: 881925 - DNA, 15 bp, Homo sapiens
ttctatatcttggct

SEQ ID NO: 881926 - DNA, 15 bp, Homo sapiens
tctatatcttggcta

SEQ ID NO: 881927 - DNA, 15 bp, Homo sapiens
ctatatcttggctat

SEQ ID NO: 881928 - DNA, 15 bp, Homo sapiens
tatatcttggctatt

SEQ ID NO: 881929 - DNA, 15 bp, Homo sapiens
atatcttggctattg

SEQ ID NO: 881930 - DNA, 15 bp, Homo sapiens
ttgtgaatagtgctc

SEQ ID NO: 881931 - DNA, 15 bp, Homo sapiens
tgtgaatagtgctcc

SEQ ID NO: 881932 - DNA, 15 bp, Homo sapiens
gtgaatagtgctcca

SEQ ID NO: 881933 - DNA, 15 bp, Homo sapiens
tgaatagtgctccaa

SEQ ID NO: 881934 - DNA, 15 bp, Homo sapiens
gaatagtgctccaat

SEQ ID NO: 881935 - DNA, 15 bp, Homo sapiens
aatagtgctccaata

SEQ ID NO: 881936 - DNA, 15 bp, Homo sapiens
atagtgctccaataa

SEQ ID NO: 881937 - DNA, 15 bp, Homo sapiens
tagtgctccaataaa

SEQ ID NO: 881938 - DNA, 15 bp, Homo sapiens
agtgctccaataaac

SEQ ID NO: 881939 - DNA, 15 bp, Homo sapiens
gtgctccaataaaca

SEQ ID NO: 881940 - DNA, 15 bp, Homo sapiens
tgctccaataaacat

SEQ ID NO: 881941 - DNA, 15 bp, Homo sapiens
gctccaataaacatg

SEQ ID NO: 881942 - DNA, 15 bp, Homo sapiens
ctccaataaacatgg

SEQ ID NO: 881943 - DNA, 15 bp, Homo sapiens
tccaataaacatgga

SEQ ID NO: 881944 - DNA, 15 bp, Homo sapiens
ccaataaacatggag

SEQ ID NO: 881945 - DNA, 15 bp, Homo sapiens
caataaacatggagg

SEQ ID NO: 881946 - DNA, 15 bp, Homo sapiens
aataaacatggaggt

SEQ ID NO: 881947 - DNA, 15 bp, Homo sapiens
ataaacatggaggtg

SEQ ID NO: 881948 - DNA, 15 bp, Homo sapiens
taaacatggaggtgc

SEQ ID NO: 881949 - DNA, 15 bp, Homo sapiens
aaacatggaggtgca

SEQ ID NO: 881950 - DNA, 15 bp, Homo sapiens
aacatggaggtgcag

SEQ ID NO: 881951 - DNA, 15 bp, Homo sapiens
acatggaggtgcaga

SEQ ID NO: 881952 - DNA, 15 bp, Homo sapiens
catggaggtgcagat

SEQ ID NO: 881953 - DNA, 15 bp, Homo sapiens
atggaggtgcagatg

SEQ ID NO: 881954 - DNA, 15 bp, Homo sapiens
tggaggtgcagatgt

SEQ ID NO: 881955 - DNA, 15 bp, Homo sapiens
ggaggtgcagatgtc

SEQ ID NO: 881956 - DNA, 15 bp, Homo sapiens
gaggtgcagatgtct

SEQ ID NO: 881957 - DNA, 15 bp, Homo sapiens
aggtgcagatgtctc

SEQ ID NO: 881958 - DNA, 15 bp, Homo sapiens
ggtgcagatgtctct

SEQ ID NO: 881959 - DNA, 15 bp, Homo sapiens
gtgcagatgtctctt

SEQ ID NO: 881960 - DNA, 15 bp, Homo sapiens
tgcagatgtctcttt

SEQ ID NO: 881961 - DNA, 15 bp, Homo sapiens
gcagatgtctctttg

SEQ ID NO: 881962 - DNA, 15 bp, Homo sapiens
cagatgtctctttga

SEQ ID NO: 881963 - DNA, 15 bp, Homo sapiens
agatgtctctttgag

SEQ ID NO: 881964 - DNA, 15 bp, Homo sapiens
gatgtctctttgaga

SEQ ID NO: 881965 - DNA, 15 bp, Homo sapiens
atgtctctttgagat

SEQ ID NO: 881966 - DNA, 15 bp, Homo sapiens
tgtctctttgagata

SEQ ID NO: 881967 - DNA, 15 bp, Homo sapiens
gtctctttgagatac

SEQ ID NO: 881968 - DNA, 15 bp, Homo sapiens
tctctttgagatact

SEQ ID NO: 881969 - DNA, 15 bp, Homo sapiens
ctctttgagatactg

SEQ ID NO: 881970 - DNA, 15 bp, Homo sapiens
tctttgagatactga

SEQ ID NO: 881971 - DNA, 15 bp, Homo sapiens
ctttgagatactgat

SEQ ID NO: 881972 - DNA, 15 bp, Homo sapiens
tttgagatactgatt

SEQ ID NO: 881973 - DNA, 15 bp, Homo sapiens
ttgagatactgattt

SEQ ID NO: 881974 - DNA, 15 bp, Homo sapiens
tgagatactgatttc

SEQ ID NO: 881975 - DNA, 15 bp, Homo sapiens
gagatactgatttca

SEQ ID NO: 881976 - DNA, 15 bp, Homo sapiens
agatactgatttcat

SEQ ID NO: 881977 - DNA, 15 bp, Homo sapiens
gatactgatttcatt

SEQ ID NO: 881978 - DNA, 15 bp, Homo sapiens
atactgatttcattt

SEQ ID NO: 881979 - DNA, 15 bp, Homo sapiens
actgatttcatttct

SEQ ID NO: 881980 - DNA, 15 bp, Homo sapiens
ctgatttcatttctg

SEQ ID NO: 881981 - DNA, 15 bp, Homo sapiens
tgatttcatttctgt

SEQ ID NO: 881982 - DNA, 15 bp, Homo sapiens
gatttcatttctgtt

SEQ ID NO: 881983 - DNA, 15 bp, Homo sapiens
atttcatttctgttg

SEQ ID NO: 881984 - DNA, 15 bp, Homo sapiens
tttcatttctgttgg

SEQ ID NO: 881985 - DNA, 15 bp, Homo sapiens
ttcatttctgttgga

SEQ ID NO: 881986 - DNA, 15 bp, Homo sapiens
tcatttctgttggat

SEQ ID NO: 881987 - DNA, 15 bp, Homo sapiens
catttctgttggata

SEQ ID NO: 881988 - DNA, 15 bp, Homo sapiens
atttctgttggatat

SEQ ID NO: 881989 - DNA, 15 bp, Homo sapiens
tttctgttggatata

SEQ ID NO: 881990 - DNA, 15 bp, Homo sapiens
ttctgttggatatat

SEQ ID NO: 881991 - DNA, 15 bp, Homo sapiens
tctgttggatatata

SEQ ID NO: 881992 - DNA, 15 bp, Homo sapiens
ctgttggatatatac

SEQ ID NO: 881993 - DNA, 15 bp, Homo sapiens
tgttggatatatacc

SEQ ID NO: 881994 - DNA, 15 bp, Homo sapiens
gttggatatataccc

SEQ ID NO: 881995 - DNA, 15 bp, Homo sapiens
ttggatatataccca

SEQ ID NO: 881996 - DNA, 15 bp, Homo sapiens
tggatatatacccag

SEQ ID NO: 881997 - DNA, 15 bp, Homo sapiens
ggatatatacccaga

SEQ ID NO: 881998 - DNA, 15 bp, Homo sapiens
gatatatacccagaa

SEQ ID NO: 881999 - DNA, 15 bp, Homo sapiens
atatatacccagaag

SEQ ID NO: 882000 - DNA, 15 bp, Homo sapiens
tatatacccagaagt

SEQ ID NO: 882001 - DNA, 15 bp, Homo sapiens
atatacccagaagtg

SEQ ID NO: 882002 - DNA, 15 bp, Homo sapiens
tatacccagaagtgg

SEQ ID NO: 882003 - DNA, 15 bp, Homo sapiens
atacccagaagtggg

SEQ ID NO: 882004 - DNA, 15 bp, Homo sapiens
tacccagaagtggga

SEQ ID NO: 882005 - DNA, 15 bp, Homo sapiens
acccagaagtgggat

SEQ ID NO: 882006 - DNA, 15 bp, Homo sapiens
cccagaagtgggatt

SEQ ID NO: 882007 - DNA, 15 bp, Homo sapiens
ccagaagtgggattg

SEQ ID NO: 882008 - DNA, 15 bp, Homo sapiens
cagaagtgggattgc

SEQ ID NO: 882009 - DNA, 15 bp, Homo sapiens
agaagtgggattgct

SEQ ID NO: 882010 - DNA, 15 bp, Homo sapiens
gaagtgggattgcta

SEQ ID NO: 882011 - DNA, 15 bp, Homo sapiens
aagtgggattgctaa

SEQ ID NO: 882012 - DNA, 15 bp, Homo sapiens
agtgggattgctaaa

SEQ ID NO: 882013 - DNA, 15 bp, Homo sapiens
gtgggattgctaaat

SEQ ID NO: 882014 - DNA, 15 bp, Homo sapiens
tgggattgctaaatc

SEQ ID NO: 882015 - DNA, 15 bp, Homo sapiens
gggattgctaaatca

SEQ ID NO: 882016 - DNA, 15 bp, Homo sapiens
ggattgctaaatcat

SEQ ID NO: 882017 - DNA, 15 bp, Homo sapiens
gattgctaaatcatg

SEQ ID NO: 882018 - DNA, 15 bp, Homo sapiens
attgctaaatcatgt

SEQ ID NO: 882019 - DNA, 15 bp, Homo sapiens
ttgctaaatcatgtg

SEQ ID NO: 882020 - DNA, 15 bp, Homo sapiens
tgctaaatcatgtgg

SEQ ID NO: 882021 - DNA, 15 bp, Homo sapiens
gctaaatcatgtggt

SEQ ID NO: 882022 - DNA, 15 bp, Homo sapiens
ctaaatcatgtggtg

SEQ ID NO: 882023 - DNA, 15 bp, Homo sapiens
taaatcatgtggtgg

SEQ ID NO: 882024 - DNA, 15 bp, Homo sapiens
aaatcatgtggtggt

SEQ ID NO: 882025 - DNA, 15 bp, Homo sapiens
aatcatgtggtggtt

SEQ ID NO: 882026 - DNA, 15 bp, Homo sapiens
atcatgtggtggttc

SEQ ID NO: 882027 - DNA, 15 bp, Homo sapiens
tcatgtggtggttct

SEQ ID NO: 882028 - DNA, 15 bp, Homo sapiens
catgtggtggttcta

SEQ ID NO: 882029 - DNA, 15 bp, Homo sapiens
atgtggtggttctat

SEQ ID NO: 882030 - DNA, 15 bp, Homo sapiens
tgtggtggttctatt

SEQ ID NO: 882031 - DNA, 15 bp, Homo sapiens
gtggtggttctattt

SEQ ID NO: 882032 - DNA, 15 bp, Homo sapiens
tggtggttctatttt

SEQ ID NO: 882033 - DNA, 15 bp, Homo sapiens
ggtggttctattttt

SEQ ID NO: 882034 - DNA, 15 bp, Homo sapiens
gtggttctattttta

SEQ ID NO: 882035 - DNA, 15 bp, Homo sapiens
tggttctatttttaa

SEQ ID NO: 882036 - DNA, 15 bp, Homo sapiens
ggttctatttttaat

SEQ ID NO: 882037 - DNA, 15 bp, Homo sapiens
gttctatttttaatt

SEQ ID NO: 882038 - DNA, 15 bp, Homo sapiens
ttctatttttaattt

SEQ ID NO: 882039 - DNA, 15 bp, Homo sapiens
tctatttttaatttt

SEQ ID NO: 882040 - DNA, 15 bp, Homo sapiens
ctatttttaattttt

SEQ ID NO: 882041 - DNA, 15 bp, Homo sapiens
tatttttaatttttt

SEQ ID NO: 882042 - DNA, 15 bp, Homo sapiens
atttttaatttttta

SEQ ID NO: 882043 - DNA, 15 bp, Homo sapiens
tttttaattttttat

SEQ ID NO: 882044 - DNA, 15 bp, Homo sapiens
ttttaattttttata

SEQ ID NO: 882045 - DNA, 15 bp, Homo sapiens
tttaattttttatag

SEQ ID NO: 882046 - DNA, 15 bp, Homo sapiens
ttaattttttataga

SEQ ID NO: 882047 - DNA, 15 bp, Homo sapiens
taattttttatagaa

SEQ ID NO: 882048 - DNA, 15 bp, Homo sapiens
aattttttatagaaa

SEQ ID NO: 882049 - DNA, 15 bp, Homo sapiens
attttttatagaaac

SEQ ID NO: 882050 - DNA, 15 bp, Homo sapiens
ttttttatagaaact

SEQ ID NO: 882051 - DNA, 15 bp, Homo sapiens
tttttatagaaactt

SEQ ID NO: 882052 - DNA, 15 bp, Homo sapiens
ttttatagaaacttc

SEQ ID NO: 882053 - DNA, 15 bp, Homo sapiens
tttatagaaacttca

SEQ ID NO: 882054 - DNA, 15 bp, Homo sapiens
ttatagaaacttcat

SEQ ID NO: 882055 - DNA, 15 bp, Homo sapiens
tatagaaacttcata

SEQ ID NO: 882056 - DNA, 15 bp, Homo sapiens
atagaaacttcatac

SEQ ID NO: 882057 - DNA, 15 bp, Homo sapiens
tagaaacttcatact

SEQ ID NO: 882058 - DNA, 15 bp, Homo sapiens
agaaacttcatactg

SEQ ID NO: 882059 - DNA, 15 bp, Homo sapiens
gaaacttcatactgt

SEQ ID NO: 882060 - DNA, 15 bp, Homo sapiens
aaacttcatactgtc

SEQ ID NO: 882061 - DNA, 15 bp, Homo sapiens
aacttcatactgtct

SEQ ID NO: 882062 - DNA, 15 bp, Homo sapiens
acttcatactgtctt

SEQ ID NO: 882063 - DNA, 15 bp, Homo sapiens
cttcatactgtcttc

SEQ ID NO: 882064 - DNA, 15 bp, Homo sapiens
ttcatactgtcttct

SEQ ID NO: 882065 - DNA, 15 bp, Homo sapiens
tcatactgtcttcta

SEQ ID NO: 882066 - DNA, 15 bp, Homo sapiens
catactgtcttctat

SEQ ID NO: 882067 - DNA, 15 bp, Homo sapiens
atactgtcttctata

SEQ ID NO: 882068 - DNA, 15 bp, Homo sapiens
tactgtcttctatag

SEQ ID NO: 882069 - DNA, 15 bp, Homo sapiens
actgtcttctatagg

SEQ ID NO: 882070 - DNA, 15 bp, Homo sapiens
ctgtcttctataggg

SEQ ID NO: 882071 - DNA, 15 bp, Homo sapiens
tgtcttctatagggc

SEQ ID NO: 882072 - DNA, 15 bp, Homo sapiens
gtcttctatagggct

SEQ ID NO: 882073 - DNA, 15 bp, Homo sapiens
tcttctatagggctg

SEQ ID NO: 882074 - DNA, 15 bp, Homo sapiens
cttctatagggctgt

SEQ ID NO: 882075 - DNA, 15 bp, Homo sapiens
ttctatagggctgta

SEQ ID NO: 882076 - DNA, 15 bp, Homo sapiens
tctatagggctgtac

SEQ ID NO: 882077 - DNA, 15 bp, Homo sapiens
ctatagggctgtacc

SEQ ID NO: 882078 - DNA, 15 bp, Homo sapiens
tatagggctgtacca

SEQ ID NO: 882079 - DNA, 15 bp, Homo sapiens
atagggctgtaccaa

SEQ ID NO: 882080 - DNA, 15 bp, Homo sapiens
tagggctgtaccaat

SEQ ID NO: 882081 - DNA, 15 bp, Homo sapiens
agggctgtaccaatt

SEQ ID NO: 882082 - DNA, 15 bp, Homo sapiens
gggctgtaccaattt

SEQ ID NO: 882083 - DNA, 15 bp, Homo sapiens
ttacattcccaccag

SEQ ID NO: 882084 - DNA, 15 bp, Homo sapiens
tacattcccaccagc

SEQ ID NO: 882085 - DNA, 15 bp, Homo sapiens
acattcccaccagca

SEQ ID NO: 882086 - DNA, 15 bp, Homo sapiens
cattcccaccagcag

SEQ ID NO: 882087 - DNA, 15 bp, Homo sapiens
attcccaccagcagt

SEQ ID NO: 882088 - DNA, 15 bp, Homo sapiens
ttcccaccagcagtg

SEQ ID NO: 882089 - DNA, 15 bp, Homo sapiens
tcccaccagcagtgt

SEQ ID NO: 882090 - DNA, 15 bp, Homo sapiens
cccaccagcagtgta

SEQ ID NO: 882091 - DNA, 15 bp, Homo sapiens
ccaccagcagtgtac

SEQ ID NO: 882092 - DNA, 15 bp, Homo sapiens
caccagcagtgtaca

SEQ ID NO: 882093 - DNA, 15 bp, Homo sapiens
accagcagtgtacaa

SEQ ID NO: 882094 - DNA, 15 bp, Homo sapiens
ccagcagtgtacaag

SEQ ID NO: 882095 - DNA, 15 bp, Homo sapiens
cagcagtgtacaagg

SEQ ID NO: 882096 - DNA, 15 bp, Homo sapiens
agcagtgtacaaggg

SEQ ID NO: 882097 - DNA, 15 bp, Homo sapiens
gcagtgtacaagggt

SEQ ID NO: 882098 - DNA, 15 bp, Homo sapiens
cagtgtacaagggtt

SEQ ID NO: 882099 - DNA, 15 bp, Homo sapiens
agtgtacaagggttc

SEQ ID NO: 882100 - DNA, 15 bp, Homo sapiens
gtgtacaagggttca

SEQ ID NO: 882101 - DNA, 15 bp, Homo sapiens
tgtacaagggttcac

SEQ ID NO: 882102 - DNA, 15 bp, Homo sapiens
gtacaagggttcact

SEQ ID NO: 882103 - DNA, 15 bp, Homo sapiens
tacaagggttcactt

SEQ ID NO: 882104 - DNA, 15 bp, Homo sapiens
acaagggttcacttt

SEQ ID NO: 882105 - DNA, 15 bp, Homo sapiens
caagggttcactttt

SEQ ID NO: 882106 - DNA, 15 bp, Homo sapiens
aagggttcacttttc

SEQ ID NO: 882107 - DNA, 15 bp, Homo sapiens
agggttcacttttct

SEQ ID NO: 882108 - DNA, 15 bp, Homo sapiens
gggttcacttttctc

SEQ ID NO: 882109 - DNA, 15 bp, Homo sapiens
ggttcacttttctct

SEQ ID NO: 882110 - DNA, 15 bp, Homo sapiens
gttcacttttctctc

SEQ ID NO: 882111 - DNA, 15 bp, Homo sapiens
ttcacttttctctcc

SEQ ID NO: 882112 - DNA, 15 bp, Homo sapiens
tcacttttctctcca

SEQ ID NO: 882113 - DNA, 15 bp, Homo sapiens
cacttttctctccaa

SEQ ID NO: 882114 - DNA, 15 bp, Homo sapiens
acttttctctccaac

SEQ ID NO: 882115 - DNA, 15 bp, Homo sapiens
cttttctctccaacc

SEQ ID NO: 882116 - DNA, 15 bp, Homo sapiens
ttttctctccaacct

SEQ ID NO: 882117 - DNA, 15 bp, Homo sapiens
tttctctccaacctc

SEQ ID NO: 882118 - DNA, 15 bp, Homo sapiens
ttctctccaacctca

SEQ ID NO: 882119 - DNA, 15 bp, Homo sapiens
tctctccaacctcac

SEQ ID NO: 882120 - DNA, 15 bp, Homo sapiens
ctctccaacctcacc

SEQ ID NO: 882121 - DNA, 15 bp, Homo sapiens
tctccaacctcacca

SEQ ID NO: 882122 - DNA, 15 bp, Homo sapiens
ctccaacctcaccaa

SEQ ID NO: 882123 - DNA, 15 bp, Homo sapiens
tccaacctcaccaac

SEQ ID NO: 882124 - DNA, 15 bp, Homo sapiens
ccaacctcaccaaca

SEQ ID NO: 882125 - DNA, 15 bp, Homo sapiens
caacctcaccaacac

SEQ ID NO: 882126 - DNA, 15 bp, Homo sapiens
aacctcaccaacact

SEQ ID NO: 882127 - DNA, 15 bp, Homo sapiens
acctcaccaacactt

SEQ ID NO: 882128 - DNA, 15 bp, Homo sapiens
cctcaccaacacttg

SEQ ID NO: 882129 - DNA, 15 bp, Homo sapiens
ctcaccaacacttgt

SEQ ID NO: 882130 - DNA, 15 bp, Homo sapiens
tcaccaacacttgtt

SEQ ID NO: 882131 - DNA, 15 bp, Homo sapiens
caccaacacttgtta

SEQ ID NO: 882132 - DNA, 15 bp, Homo sapiens
accaacacttgttat

SEQ ID NO: 882133 - DNA, 15 bp, Homo sapiens
ccaacacttgttatc

SEQ ID NO: 882134 - DNA, 15 bp, Homo sapiens
caacacttgttatca

SEQ ID NO: 882135 - DNA, 15 bp, Homo sapiens
aacacttgttatcac

SEQ ID NO: 882136 - DNA, 15 bp, Homo sapiens
acacttgttatcact

SEQ ID NO: 882137 - DNA, 15 bp, Homo sapiens
cacttgttatcactt

SEQ ID NO: 882138 - DNA, 15 bp, Homo sapiens
acttgttatcacttg

SEQ ID NO: 882139 - DNA, 15 bp, Homo sapiens
cttgttatcacttgt

SEQ ID NO: 882140 - DNA, 15 bp, Homo sapiens
ttgttatcacttgtc

SEQ ID NO: 882141 - DNA, 15 bp, Homo sapiens
tgttatcacttgtct

SEQ ID NO: 882142 - DNA, 15 bp, Homo sapiens
gttatcacttgtctt

SEQ ID NO: 882143 - DNA, 15 bp, Homo sapiens
ttatcacttgtcttt

SEQ ID NO: 882144 - DNA, 15 bp, Homo sapiens
tatcacttgtctttt

SEQ ID NO: 882145 - DNA, 15 bp, Homo sapiens
atcacttgtcttttc

SEQ ID NO: 882146 - DNA, 15 bp, Homo sapiens
tcacttgtcttttca

SEQ ID NO: 882147 - DNA, 15 bp, Homo sapiens
cacttgtcttttcaa

SEQ ID NO: 882148 - DNA, 15 bp, Homo sapiens
acttgtcttttcaat

SEQ ID NO: 882149 - DNA, 15 bp, Homo sapiens
cttgtcttttcaata

SEQ ID NO: 882150 - DNA, 15 bp, Homo sapiens
ttgtcttttcaataa

SEQ ID NO: 882151 - DNA, 15 bp, Homo sapiens
tgtcttttcaataat

SEQ ID NO: 882152 - DNA, 15 bp, Homo sapiens
gtcttttcaataata

SEQ ID NO: 882153 - DNA, 15 bp, Homo sapiens
tcttttcaataatag

SEQ ID NO: 882154 - DNA, 15 bp, Homo sapiens
cttttcaataatagc

SEQ ID NO: 882155 - DNA, 15 bp, Homo sapiens
ttttcaataatagca

SEQ ID NO: 882156 - DNA, 15 bp, Homo sapiens
tttcaataatagcaa

SEQ ID NO: 882157 - DNA, 15 bp, Homo sapiens
ttcaataatagcaat

SEQ ID NO: 882158 - DNA, 15 bp, Homo sapiens
tcaataatagcaatc

SEQ ID NO: 882159 - DNA, 15 bp, Homo sapiens
caataatagcaatct

SEQ ID NO: 882160 - DNA, 15 bp, Homo sapiens
aataatagcaatctt

SEQ ID NO: 882161 - DNA, 15 bp, Homo sapiens
ataatagcaatctta

SEQ ID NO: 882162 - DNA, 15 bp, Homo sapiens
taatagcaatcttaa

SEQ ID NO: 882163 - DNA, 15 bp, Homo sapiens
aatagcaatcttaac

SEQ ID NO: 882164 - DNA, 15 bp, Homo sapiens
atagcaatcttaaca

SEQ ID NO: 882165 - DNA, 15 bp, Homo sapiens
tagcaatcttaacag

SEQ ID NO: 882166 - DNA, 15 bp, Homo sapiens
agcaatcttaacagg

SEQ ID NO: 882167 - DNA, 15 bp, Homo sapiens
gcaatcttaacaggt

SEQ ID NO: 882168 - DNA, 15 bp, Homo sapiens
caatcttaacaggta

SEQ ID NO: 882169 - DNA, 15 bp, Homo sapiens
aatcttaacaggtat

SEQ ID NO: 882170 - DNA, 15 bp, Homo sapiens
atcttaacaggtatg

SEQ ID NO: 882171 - DNA, 15 bp, Homo sapiens
tcttaacaggtatga

SEQ ID NO: 882172 - DNA, 15 bp, Homo sapiens
cttaacaggtatgag

SEQ ID NO: 882173 - DNA, 15 bp, Homo sapiens
ttaacaggtatgagg

SEQ ID NO: 882174 - DNA, 15 bp, Homo sapiens
taacaggtatgaggt

SEQ ID NO: 882175 - DNA, 15 bp, Homo sapiens
aacaggtatgaggtg

SEQ ID NO: 882176 - DNA, 15 bp, Homo sapiens
acaggtatgaggtga

SEQ ID NO: 882177 - DNA, 15 bp, Homo sapiens
caggtatgaggtgat

SEQ ID NO: 882178 - DNA, 15 bp, Homo sapiens
aggtatgaggtgata

SEQ ID NO: 882179 - DNA, 15 bp, Homo sapiens
ggtatgaggtgatat

SEQ ID NO: 882180 - DNA, 15 bp, Homo sapiens
gtatgaggtgatatc

SEQ ID NO: 882181 - DNA, 15 bp, Homo sapiens
tatgaggtgatatct

SEQ ID NO: 882182 - DNA, 15 bp, Homo sapiens
atgaggtgatatctt

SEQ ID NO: 882183 - DNA, 15 bp, Homo sapiens
tgaggtgatatctta

SEQ ID NO: 882184 - DNA, 15 bp, Homo sapiens
gaggtgatatcttat

SEQ ID NO: 882185 - DNA, 15 bp, Homo sapiens
aggtgatatcttatt

SEQ ID NO: 882186 - DNA, 15 bp, Homo sapiens
ggtgatatcttattg

SEQ ID NO: 882187 - DNA, 15 bp, Homo sapiens
gtgatatcttattgt

SEQ ID NO: 882188 - DNA, 15 bp, Homo sapiens
tgatatcttattgtg

SEQ ID NO: 882189 - DNA, 15 bp, Homo sapiens
gatatcttattgtga

SEQ ID NO: 882190 - DNA, 15 bp, Homo sapiens
atatcttattgtgat

SEQ ID NO: 882191 - DNA, 15 bp, Homo sapiens
tatcttattgtgatt

SEQ ID NO: 882192 - DNA, 15 bp, Homo sapiens
atcttattgtgattt

SEQ ID NO: 882193 - DNA, 15 bp, Homo sapiens
tcttattgtgatttg

SEQ ID NO: 882194 - DNA, 15 bp, Homo sapiens
cttattgtgatttgc

SEQ ID NO: 882195 - DNA, 15 bp, Homo sapiens
ttattgtgatttgca

SEQ ID NO: 882196 - DNA, 15 bp, Homo sapiens
tattgtgatttgcat

SEQ ID NO: 882197 - DNA, 15 bp, Homo sapiens
attgtgatttgcatt

SEQ ID NO: 882198 - DNA, 15 bp, Homo sapiens
ttgtgatttgcattt

SEQ ID NO: 882199 - DNA, 15 bp, Homo sapiens
tgtgatttgcatttt

SEQ ID NO: 882200 - DNA, 15 bp, Homo sapiens
gtgatttgcattttt

SEQ ID NO: 882201 - DNA, 15 bp, Homo sapiens
tgatttgcatttttc

SEQ ID NO: 882202 - DNA, 15 bp, Homo sapiens
gatttgcatttttct

SEQ ID NO: 882203 - DNA, 15 bp, Homo sapiens
atttgcatttttctg

SEQ ID NO: 882204 - DNA, 15 bp, Homo sapiens
tttgcatttttctga

SEQ ID NO: 882205 - DNA, 15 bp, Homo sapiens
ttgcatttttctgat

SEQ ID NO: 882206 - DNA, 15 bp, Homo sapiens
tgcatttttctgatg

SEQ ID NO: 882207 - DNA, 15 bp, Homo sapiens
gcatttttctgatga

SEQ ID NO: 882208 - DNA, 15 bp, Homo sapiens
catttttctgatgat

SEQ ID NO: 882209 - DNA, 15 bp, Homo sapiens
atttttctgatgatt

SEQ ID NO: 882210 - DNA, 15 bp, Homo sapiens
tttttctgatgatta

SEQ ID NO: 882211 - DNA, 15 bp, Homo sapiens
ttttctgatgattag

SEQ ID NO: 882212 - DNA, 15 bp, Homo sapiens
tttctgatgattagt

SEQ ID NO: 882213 - DNA, 15 bp, Homo sapiens
ttctgatgattagtg

SEQ ID NO: 882214 - DNA, 15 bp, Homo sapiens
tctgatgattagtga

SEQ ID NO: 882215 - DNA, 15 bp, Homo sapiens
tgatgattagtgata

SEQ ID NO: 882216 - DNA, 15 bp, Homo sapiens
gatgattagtgatat

SEQ ID NO: 882217 - DNA, 15 bp, Homo sapiens
atgattagtgatatt

SEQ ID NO: 882218 - DNA, 15 bp, Homo sapiens
tgattagtgatattg

SEQ ID NO: 882219 - DNA, 15 bp, Homo sapiens
gattagtgatattga

SEQ ID NO: 882220 - DNA, 15 bp, Homo sapiens
attagtgatattgag

SEQ ID NO: 882221 - DNA, 15 bp, Homo sapiens
ttagtgatattgagc

SEQ ID NO: 882222 - DNA, 15 bp, Homo sapiens
tagtgatattgagca

SEQ ID NO: 882223 - DNA, 15 bp, Homo sapiens
agtgatattgagcac

SEQ ID NO: 882224 - DNA, 15 bp, Homo sapiens
gtgatattgagcacc

SEQ ID NO: 882225 - DNA, 15 bp, Homo sapiens
tgatattgagcacct

SEQ ID NO: 882226 - DNA, 15 bp, Homo sapiens
gatattgagcacctt

SEQ ID NO: 882227 - DNA, 15 bp, Homo sapiens
atattgagcaccttt

SEQ ID NO: 882228 - DNA, 15 bp, Homo sapiens
attgagcaccttttc

SEQ ID NO: 882229 - DNA, 15 bp, Homo sapiens
ttgagcaccttttca

SEQ ID NO: 882230 - DNA, 15 bp, Homo sapiens
tgagcaccttttcat

SEQ ID NO: 882231 - DNA, 15 bp, Homo sapiens
gagcaccttttcata

SEQ ID NO: 882232 - DNA, 15 bp, Homo sapiens
agcaccttttcatat

SEQ ID NO: 882233 - DNA, 15 bp, Homo sapiens
gcaccttttcatatc

SEQ ID NO: 882234 - DNA, 15 bp, Homo sapiens
caccttttcatatct

SEQ ID NO: 882235 - DNA, 15 bp, Homo sapiens
accttttcatatcta

SEQ ID NO: 882236 - DNA, 15 bp, Homo sapiens
ccttttcatatctac

SEQ ID NO: 882237 - DNA, 15 bp, Homo sapiens
cttttcatatctact

SEQ ID NO: 882238 - DNA, 15 bp, Homo sapiens
ttttcatatctactt

SEQ ID NO: 882239 - DNA, 15 bp, Homo sapiens
tttcatatctacttg

SEQ ID NO: 882240 - DNA, 15 bp, Homo sapiens
ttcatatctacttgt

SEQ ID NO: 882241 - DNA, 15 bp, Homo sapiens
tcatatctacttgtt

SEQ ID NO: 882242 - DNA, 15 bp, Homo sapiens
catatctacttgttg

SEQ ID NO: 882243 - DNA, 15 bp, Homo sapiens
atatctacttgttgg

SEQ ID NO: 882244 - DNA, 15 bp, Homo sapiens
tatctacttgttggc

SEQ ID NO: 882245 - DNA, 15 bp, Homo sapiens
atctacttgttggcc

SEQ ID NO: 882246 - DNA, 15 bp, Homo sapiens
tctacttgttggcca

SEQ ID NO: 882247 - DNA, 15 bp, Homo sapiens
ctacttgttggccat

SEQ ID NO: 882248 - DNA, 15 bp, Homo sapiens
tacttgttggccatt

SEQ ID NO: 882249 - DNA, 15 bp, Homo sapiens
acttgttggccattt

SEQ ID NO: 882250 - DNA, 15 bp, Homo sapiens
cttgttggccatttg

SEQ ID NO: 882251 - DNA, 15 bp, Homo sapiens
ttgttggccatttgt

SEQ ID NO: 882252 - DNA, 15 bp, Homo sapiens
tgttggccatttgta

SEQ ID NO: 882253 - DNA, 15 bp, Homo sapiens
gttggccatttgtat

SEQ ID NO: 882254 - DNA, 15 bp, Homo sapiens
ttggccatttgtata

SEQ ID NO: 882255 - DNA, 15 bp, Homo sapiens
tggccatttgtatat

SEQ ID NO: 882256 - DNA, 15 bp, Homo sapiens
ggccatttgtatatc

SEQ ID NO: 882257 - DNA, 15 bp, Homo sapiens
gccatttgtatatct

SEQ ID NO: 882258 - DNA, 15 bp, Homo sapiens
ccatttgtatatctt

SEQ ID NO: 882259 - DNA, 15 bp, Homo sapiens
catttgtatatcttc

SEQ ID NO: 882260 - DNA, 15 bp, Homo sapiens
atttgtatatcttct

SEQ ID NO: 882261 - DNA, 15 bp, Homo sapiens
tttgtatatcttctt

SEQ ID NO: 882262 - DNA, 15 bp, Homo sapiens
ttgtatatcttcttt

SEQ ID NO: 882263 - DNA, 15 bp, Homo sapiens
tgtatatcttcttta

SEQ ID NO: 882264 - DNA, 15 bp, Homo sapiens
gtatatcttctttat

SEQ ID NO: 882265 - DNA, 15 bp, Homo sapiens
tatatcttctttata

SEQ ID NO: 882266 - DNA, 15 bp, Homo sapiens
atatcttctttataa

SEQ ID NO: 882267 - DNA, 15 bp, Homo sapiens
tatcttctttataaa

SEQ ID NO: 882268 - DNA, 15 bp, Homo sapiens
atcttctttataaag

SEQ ID NO: 882269 - DNA, 15 bp, Homo sapiens
tcttctttataaaga

SEQ ID NO: 882270 - DNA, 15 bp, Homo sapiens
cttctttataaagat

SEQ ID NO: 882271 - DNA, 15 bp, Homo sapiens
ttctttataaagatg

SEQ ID NO: 882272 - DNA, 15 bp, Homo sapiens
tctttataaagatgt

SEQ ID NO: 882273 - DNA, 15 bp, Homo sapiens
ctttataaagatgtc

SEQ ID NO: 882274 - DNA, 15 bp, Homo sapiens
tttataaagatgtct

SEQ ID NO: 882275 - DNA, 15 bp, Homo sapiens
ttataaagatgtcta

SEQ ID NO: 882276 - DNA, 15 bp, Homo sapiens
tataaagatgtctat

SEQ ID NO: 882277 - DNA, 15 bp, Homo sapiens
ataaagatgtctatt

SEQ ID NO: 882278 - DNA, 15 bp, Homo sapiens
taaagatgtctatta

SEQ ID NO: 882279 - DNA, 15 bp, Homo sapiens
aaagatgtctattag

SEQ ID NO: 882280 - DNA, 15 bp, Homo sapiens
aagatgtctattagg

SEQ ID NO: 882281 - DNA, 15 bp, Homo sapiens
agatgtctattaggt

SEQ ID NO: 882282 - DNA, 15 bp, Homo sapiens
gatgtctattaggtt

SEQ ID NO: 882283 - DNA, 15 bp, Homo sapiens
atgtctattaggttc

SEQ ID NO: 882284 - DNA, 15 bp, Homo sapiens
tgtctattaggttcc

SEQ ID NO: 882285 - DNA, 15 bp, Homo sapiens
gtctattaggttcct

SEQ ID NO: 882286 - DNA, 15 bp, Homo sapiens
tctattaggttcctt

SEQ ID NO: 882287 - DNA, 15 bp, Homo sapiens
ctattaggttccttt

SEQ ID NO: 882288 - DNA, 15 bp, Homo sapiens
tattaggttcctttg

SEQ ID NO: 882289 - DNA, 15 bp, Homo sapiens
attaggttcctttgc

SEQ ID NO: 882290 - DNA, 15 bp, Homo sapiens
ttaggttcctttgcc

SEQ ID NO: 882291 - DNA, 15 bp, Homo sapiens
taggttcctttgccc

SEQ ID NO: 882292 - DNA, 15 bp, Homo sapiens
aggttcctttgccca

SEQ ID NO: 882293 - DNA, 15 bp, Homo sapiens
ggttcctttgcccat

SEQ ID NO: 882294 - DNA, 15 bp, Homo sapiens
gttcctttgcccatt

SEQ ID NO: 882295 - DNA, 15 bp, Homo sapiens
ttcctttgcccattt

SEQ ID NO: 882296 - DNA, 15 bp, Homo sapiens
gcccatttcttaatc

SEQ ID NO: 882297 - DNA, 15 bp, Homo sapiens
cccatttcttaatca

SEQ ID NO: 882298 - DNA, 15 bp, Homo sapiens
ccatttcttaatcag

SEQ ID NO: 882299 - DNA, 15 bp, Homo sapiens
catttcttaatcagg

SEQ ID NO: 882300 - DNA, 15 bp, Homo sapiens
atttcttaatcaggt

SEQ ID NO: 882301 - DNA, 15 bp, Homo sapiens
tttcttaatcaggtt

SEQ ID NO: 882302 - DNA, 15 bp, Homo sapiens
ttcttaatcaggtta

SEQ ID NO: 882303 - DNA, 15 bp, Homo sapiens
tcttaatcaggttat

SEQ ID NO: 882304 - DNA, 15 bp, Homo sapiens
cttaatcaggttatt

SEQ ID NO: 882305 - DNA, 15 bp, Homo sapiens
ttaatcaggttattt

SEQ ID NO: 882306 - DNA, 15 bp, Homo sapiens
taatcaggttattta

SEQ ID NO: 882307 - DNA, 15 bp, Homo sapiens
aatcaggttatttat

SEQ ID NO: 882308 - DNA, 15 bp, Homo sapiens
atcaggttatttatt

SEQ ID NO: 882309 - DNA, 15 bp, Homo sapiens
tcaggttatttattt

SEQ ID NO: 882310 - DNA, 15 bp, Homo sapiens
caggttatttatttt

SEQ ID NO: 882311 - DNA, 15 bp, Homo sapiens
aggttatttattttc

SEQ ID NO: 882312 - DNA, 15 bp, Homo sapiens
ggttatttattttct

SEQ ID NO: 882313 - DNA, 15 bp, Homo sapiens
gttatttattttctt

SEQ ID NO: 882314 - DNA, 15 bp, Homo sapiens
ttatttattttcttg

SEQ ID NO: 882315 - DNA, 15 bp, Homo sapiens
tatttattttcttgc

SEQ ID NO: 882316 - DNA, 15 bp, Homo sapiens
atttattttcttgct

SEQ ID NO: 882317 - DNA, 15 bp, Homo sapiens
tttattttcttgcta

SEQ ID NO: 882318 - DNA, 15 bp, Homo sapiens
ttattttcttgctac

SEQ ID NO: 882319 - DNA, 15 bp, Homo sapiens
tattttcttgctact

SEQ ID NO: 882320 - DNA, 15 bp, Homo sapiens
attttcttgctactg

SEQ ID NO: 882321 - DNA, 15 bp, Homo sapiens
ttttcttgctactga

SEQ ID NO: 882322 - DNA, 15 bp, Homo sapiens
tttcttgctactgag

SEQ ID NO: 882323 - DNA, 15 bp, Homo sapiens
ttcttgctactgagt

SEQ ID NO: 882324 - DNA, 15 bp, Homo sapiens
tcttgctactgagta

SEQ ID NO: 882325 - DNA, 15 bp, Homo sapiens
cttgctactgagtat

SEQ ID NO: 882326 - DNA, 15 bp, Homo sapiens
ttgctactgagtata

SEQ ID NO: 882327 - DNA, 15 bp, Homo sapiens
tgctactgagtatat

SEQ ID NO: 882328 - DNA, 15 bp, Homo sapiens
gctactgagtatatg

SEQ ID NO: 882329 - DNA, 15 bp, Homo sapiens
ctactgagtatatga

SEQ ID NO: 882330 - DNA, 15 bp, Homo sapiens
tactgagtatatgag

SEQ ID NO: 882331 - DNA, 15 bp, Homo sapiens
actgagtatatgagt

SEQ ID NO: 882332 - DNA, 15 bp, Homo sapiens
ctgagtatatgagtt

SEQ ID NO: 882333 - DNA, 15 bp, Homo sapiens
tgagtatatgagttc

SEQ ID NO: 882334 - DNA, 15 bp, Homo sapiens
gagtatatgagttct

SEQ ID NO: 882335 - DNA, 15 bp, Homo sapiens
agtatatgagttctt

SEQ ID NO: 882336 - DNA, 15 bp, Homo sapiens
gtatatgagttcttt

SEQ ID NO: 882337 - DNA, 15 bp, Homo sapiens
tatatgagttcttta

SEQ ID NO: 882338 - DNA, 15 bp, Homo sapiens
atatgagttctttat

SEQ ID NO: 882339 - DNA, 15 bp, Homo sapiens
tatgagttctttata

SEQ ID NO: 882340 - DNA, 15 bp, Homo sapiens
atgagttctttatat

SEQ ID NO: 882341 - DNA, 15 bp, Homo sapiens
tgagttctttatata

SEQ ID NO: 882342 - DNA, 15 bp, Homo sapiens
gagttctttatatag

SEQ ID NO: 882343 - DNA, 15 bp, Homo sapiens
agttctttatataga

SEQ ID NO: 882344 - DNA, 15 bp, Homo sapiens
gttctttatatagat

SEQ ID NO: 882345 - DNA, 15 bp, Homo sapiens
ttctttatatagatg

SEQ ID NO: 882346 - DNA, 15 bp, Homo sapiens
tctttatatagatgg

SEQ ID NO: 882347 - DNA, 15 bp, Homo sapiens
ctttatatagatggg

SEQ ID NO: 882348 - DNA, 15 bp, Homo sapiens
tttatatagatggga

SEQ ID NO: 882349 - DNA, 15 bp, Homo sapiens
ttatatagatgggat

SEQ ID NO: 882350 - DNA, 15 bp, Homo sapiens
tatatagatgggata

SEQ ID NO: 882351 - DNA, 15 bp, Homo sapiens
atatagatgggatat

SEQ ID NO: 882352 - DNA, 15 bp, Homo sapiens
tatagatgggatatt

SEQ ID NO: 882353 - DNA, 15 bp, Homo sapiens
atagatgggatatta

SEQ ID NO: 882354 - DNA, 15 bp, Homo sapiens
tagatgggatattaa

SEQ ID NO: 882355 - DNA, 15 bp, Homo sapiens
agatgggatattaac

SEQ ID NO: 882356 - DNA, 15 bp, Homo sapiens
gatgggatattaacc

SEQ ID NO: 882357 - DNA, 15 bp, Homo sapiens
atgggatattaaccc

SEQ ID NO: 882358 - DNA, 15 bp, Homo sapiens
tgggatattaaccct

SEQ ID NO: 882359 - DNA, 15 bp, Homo sapiens
gggatattaaccctt

SEQ ID NO: 882360 - DNA, 15 bp, Homo sapiens
ggatattaacccttt

SEQ ID NO: 882361 - DNA, 15 bp, Homo sapiens
gatattaacccttta

SEQ ID NO: 882362 - DNA, 15 bp, Homo sapiens
atattaaccctttat

SEQ ID NO: 882363 - DNA, 15 bp, Homo sapiens
tattaaccctttatt

SEQ ID NO: 882364 - DNA, 15 bp, Homo sapiens
attaaccctttattg

SEQ ID NO: 882365 - DNA, 15 bp, Homo sapiens
ttaaccctttattgg

SEQ ID NO: 882366 - DNA, 15 bp, Homo sapiens
taaccctttattggc

SEQ ID NO: 882367 - DNA, 15 bp, Homo sapiens
aaccctttattggct

SEQ ID NO: 882368 - DNA, 15 bp, Homo sapiens
accctttattggcta

SEQ ID NO: 882369 - DNA, 15 bp, Homo sapiens
ccctttattggctag

SEQ ID NO: 882370 - DNA, 15 bp, Homo sapiens
cctttattggctagg

SEQ ID NO: 882371 - DNA, 15 bp, Homo sapiens
ctttattggctaggt

SEQ ID NO: 882372 - DNA, 15 bp, Homo sapiens
tttattggctaggtg

SEQ ID NO: 882373 - DNA, 15 bp, Homo sapiens
ttattggctaggtgg

SEQ ID NO: 882374 - DNA, 15 bp, Homo sapiens
tattggctaggtggt

SEQ ID NO: 882375 - DNA, 15 bp, Homo sapiens
attggctaggtggtt

SEQ ID NO: 882376 - DNA, 15 bp, Homo sapiens
ttggctaggtggttt

SEQ ID NO: 882377 - DNA, 15 bp, Homo sapiens
tggctaggtggtttt

SEQ ID NO: 882378 - DNA, 15 bp, Homo sapiens
ggctaggtggtttta

SEQ ID NO: 882379 - DNA, 15 bp, Homo sapiens
gctaggtggttttaa

SEQ ID NO: 882380 - DNA, 15 bp, Homo sapiens
ctaggtggttttaaa

SEQ ID NO: 882381 - DNA, 15 bp, Homo sapiens
taggtggttttaaaa

SEQ ID NO: 882382 - DNA, 15 bp, Homo sapiens
aggtggttttaaaat

SEQ ID NO: 882383 - DNA, 15 bp, Homo sapiens
ggtggttttaaaata

SEQ ID NO: 882384 - DNA, 15 bp, Homo sapiens
gtggttttaaaatat

SEQ ID NO: 882385 - DNA, 15 bp, Homo sapiens
tggttttaaaatatt

SEQ ID NO: 882386 - DNA, 15 bp, Homo sapiens
ggttttaaaatattt

SEQ ID NO: 882387 - DNA, 15 bp, Homo sapiens
gttttaaaatatttt

SEQ ID NO: 882388 - DNA, 15 bp, Homo sapiens
ttttaaaatattttc

SEQ ID NO: 882389 - DNA, 15 bp, Homo sapiens
tttaaaatattttct

SEQ ID NO: 882390 - DNA, 15 bp, Homo sapiens
ttaaaatattttctc

SEQ ID NO: 882391 - DNA, 15 bp, Homo sapiens
taaaatattttctcc

SEQ ID NO: 882392 - DNA, 15 bp, Homo sapiens
aaaatattttctccc

SEQ ID NO: 882393 - DNA, 15 bp, Homo sapiens
aaatattttctcccg

SEQ ID NO: 882394 - DNA, 15 bp, Homo sapiens
aatattttctcccgt

SEQ ID NO: 882395 - DNA, 15 bp, Homo sapiens
atattttctcccgtt

SEQ ID NO: 882396 - DNA, 15 bp, Homo sapiens
tattttctcccgttc

SEQ ID NO: 882397 - DNA, 15 bp, Homo sapiens
attttctcccgttca

SEQ ID NO: 882398 - DNA, 15 bp, Homo sapiens
ttttctcccgttcag

SEQ ID NO: 882399 - DNA, 15 bp, Homo sapiens
tttctcccgttcagt

SEQ ID NO: 882400 - DNA, 15 bp, Homo sapiens
ttctcccgttcagta

SEQ ID NO: 882401 - DNA, 15 bp, Homo sapiens
tctcccgttcagtag

SEQ ID NO: 882402 - DNA, 15 bp, Homo sapiens
ctcccgttcagtaga

SEQ ID NO: 882403 - DNA, 15 bp, Homo sapiens
tcccgttcagtagat

SEQ ID NO: 882404 - DNA, 15 bp, Homo sapiens
cccgttcagtagatt

SEQ ID NO: 882405 - DNA, 15 bp, Homo sapiens
ccgttcagtagattg

SEQ ID NO: 882406 - DNA, 15 bp, Homo sapiens
cgttcagtagattgg

SEQ ID NO: 882407 - DNA, 15 bp, Homo sapiens
gttcagtagattggc

SEQ ID NO: 882408 - DNA, 15 bp, Homo sapiens
ttcagtagattggct

SEQ ID NO: 882409 - DNA, 15 bp, Homo sapiens
tcagtagattggctt

SEQ ID NO: 882410 - DNA, 15 bp, Homo sapiens
cagtagattggcttc

SEQ ID NO: 882411 - DNA, 15 bp, Homo sapiens
agtagattggcttct

SEQ ID NO: 882412 - DNA, 15 bp, Homo sapiens
gtagattggcttctc

SEQ ID NO: 882413 - DNA, 15 bp, Homo sapiens
tagattggcttctca

SEQ ID NO: 882414 - DNA, 15 bp, Homo sapiens
agattggcttctcac

SEQ ID NO: 882415 - DNA, 15 bp, Homo sapiens
gattggcttctcact

SEQ ID NO: 882416 - DNA, 15 bp, Homo sapiens
attggcttctcactt

SEQ ID NO: 882417 - DNA, 15 bp, Homo sapiens
ttggcttctcacttt

SEQ ID NO: 882418 - DNA, 15 bp, Homo sapiens
tggcttctcactttg

SEQ ID NO: 882419 - DNA, 15 bp, Homo sapiens
ggcttctcactttgt

SEQ ID NO: 882420 - DNA, 15 bp, Homo sapiens
gcttctcactttgtt

SEQ ID NO: 882421 - DNA, 15 bp, Homo sapiens
cttctcactttgttg

SEQ ID NO: 882422 - DNA, 15 bp, Homo sapiens
ttctcactttgttga

SEQ ID NO: 882423 - DNA, 15 bp, Homo sapiens
tctcactttgttgat

SEQ ID NO: 882424 - DNA, 15 bp, Homo sapiens
ctcactttgttgatt

SEQ ID NO: 882425 - DNA, 15 bp, Homo sapiens
tcactttgttgattg

SEQ ID NO: 882426 - DNA, 15 bp, Homo sapiens
cactttgttgattgt

SEQ ID NO: 882427 - DNA, 15 bp, Homo sapiens
actttgttgattgtt

SEQ ID NO: 882428 - DNA, 15 bp, Homo sapiens
ctttgttgattgttt

SEQ ID NO: 882429 - DNA, 15 bp, Homo sapiens
tttgttgattgtttt

SEQ ID NO: 882430 - DNA, 15 bp, Homo sapiens
ttgttgattgttttc

SEQ ID NO: 882431 - DNA, 15 bp, Homo sapiens
tgttgattgttttct

SEQ ID NO: 882432 - DNA, 15 bp, Homo sapiens
gttgattgttttctt

SEQ ID NO: 882433 - DNA, 15 bp, Homo sapiens
tgattgttttctttg

SEQ ID NO: 882434 - DNA, 15 bp, Homo sapiens
gattgttttctttgc

SEQ ID NO: 882435 - DNA, 15 bp, Homo sapiens
attgttttctttgct

SEQ ID NO: 882436 - DNA, 15 bp, Homo sapiens
ttgttttctttgctg

SEQ ID NO: 882437 - DNA, 15 bp, Homo sapiens
tgttttctttgctgt

SEQ ID NO: 882438 - DNA, 15 bp, Homo sapiens
gttttctttgctgtg

SEQ ID NO: 882439 - DNA, 15 bp, Homo sapiens
ttttctttgctgtgc

SEQ ID NO: 882440 - DNA, 15 bp, Homo sapiens
tttctttgctgtgca

SEQ ID NO: 882441 - DNA, 15 bp, Homo sapiens
ttctttgctgtgcag

SEQ ID NO: 882442 - DNA, 15 bp, Homo sapiens
tctttgctgtgcaga

SEQ ID NO: 882443 - DNA, 15 bp, Homo sapiens
ctttgctgtgcagat

SEQ ID NO: 882444 - DNA, 15 bp, Homo sapiens
tttgctgtgcagatt

SEQ ID NO: 882445 - DNA, 15 bp, Homo sapiens
ttgctgtgcagattt

SEQ ID NO: 882446 - DNA, 15 bp, Homo sapiens
tgctgtgcagatttt

SEQ ID NO: 882447 - DNA, 15 bp, Homo sapiens
gctgtgcagattttt

SEQ ID NO: 882448 - DNA, 15 bp, Homo sapiens
ctgtgcagattttta

SEQ ID NO: 882449 - DNA, 15 bp, Homo sapiens
tgtgcagatttttag

SEQ ID NO: 882450 - DNA, 15 bp, Homo sapiens
gtgcagatttttagt

SEQ ID NO: 882451 - DNA, 15 bp, Homo sapiens
tgcagatttttagtt

SEQ ID NO: 882452 - DNA, 15 bp, Homo sapiens
gcagatttttagttt

SEQ ID NO: 882453 - DNA, 15 bp, Homo sapiens
cagatttttagtttg

SEQ ID NO: 882454 - DNA, 15 bp, Homo sapiens
agatttttagtttga

SEQ ID NO: 882455 - DNA, 15 bp, Homo sapiens
gatttttagtttgat

SEQ ID NO: 882456 - DNA, 15 bp, Homo sapiens
atttttagtttgatg

SEQ ID NO: 882457 - DNA, 15 bp, Homo sapiens
tttagtttgatgtag

SEQ ID NO: 882458 - DNA, 15 bp, Homo sapiens
ttagtttgatgtagt

SEQ ID NO: 882459 - DNA, 15 bp, Homo sapiens
tagtttgatgtagtc

SEQ ID NO: 882460 - DNA, 15 bp, Homo sapiens
agtttgatgtagtcc

SEQ ID NO: 882461 - DNA, 15 bp, Homo sapiens
gtttgatgtagtccc

SEQ ID NO: 882462 - DNA, 15 bp, Homo sapiens
tttgatgtagtcccg

SEQ ID NO: 882463 - DNA, 15 bp, Homo sapiens
ttgatgtagtcccgc

SEQ ID NO: 882464 - DNA, 15 bp, Homo sapiens
tgatgtagtcccgct

SEQ ID NO: 882465 - DNA, 15 bp, Homo sapiens
gatgtagtcccgctt

SEQ ID NO: 882466 - DNA, 15 bp, Homo sapiens
atgtagtcccgcttt

SEQ ID NO: 882467 - DNA, 15 bp, Homo sapiens
tgtagtcccgctttt

SEQ ID NO: 882468 - DNA, 15 bp, Homo sapiens
gtagtcccgcttttt

SEQ ID NO: 882469 - DNA, 15 bp, Homo sapiens
tagtcccgcttttta

SEQ ID NO: 882470 - DNA, 15 bp, Homo sapiens
agtcccgctttttaa

SEQ ID NO: 882471 - DNA, 15 bp, Homo sapiens
gtcccgctttttaat

SEQ ID NO: 882472 - DNA, 15 bp, Homo sapiens
tcccgctttttaatt

SEQ ID NO: 882473 - DNA, 15 bp, Homo sapiens
cccgctttttaattt

SEQ ID NO: 882474 - DNA, 15 bp, Homo sapiens
ccgctttttaatttt

SEQ ID NO: 882475 - DNA, 15 bp, Homo sapiens
cgctttttaattttt

SEQ ID NO: 882476 - DNA, 15 bp, Homo sapiens
gctttttaatttttg

SEQ ID NO: 882477 - DNA, 15 bp, Homo sapiens
ctttttaatttttgc

SEQ ID NO: 882478 - DNA, 15 bp, Homo sapiens
tttttaatttttgct

SEQ ID NO: 882479 - DNA, 15 bp, Homo sapiens
ttttaatttttgctt

SEQ ID NO: 882480 - DNA, 15 bp, Homo sapiens
ttaatttttgctttt

SEQ ID NO: 882481 - DNA, 15 bp, Homo sapiens
taatttttgcttttg

SEQ ID NO: 882482 - DNA, 15 bp, Homo sapiens
aatttttgcttttgt

SEQ ID NO: 882483 - DNA, 15 bp, Homo sapiens
atttttgcttttgtt

SEQ ID NO: 882484 - DNA, 15 bp, Homo sapiens
tttgcttttgttgcc

SEQ ID NO: 882485 - DNA, 15 bp, Homo sapiens
ttgcttttgttgcct

SEQ ID NO: 882486 - DNA, 15 bp, Homo sapiens
tgcttttgttgcctg

SEQ ID NO: 882487 - DNA, 15 bp, Homo sapiens
gcttttgttgcctgt

SEQ ID NO: 882488 - DNA, 15 bp, Homo sapiens
cttttgttgcctgtg

SEQ ID NO: 882489 - DNA, 15 bp, Homo sapiens
ttttgttgcctgtgc

SEQ ID NO: 882490 - DNA, 15 bp, Homo sapiens
tttgttgcctgtgct

SEQ ID NO: 882491 - DNA, 15 bp, Homo sapiens
ttgttgcctgtgctt

SEQ ID NO: 882492 - DNA, 15 bp, Homo sapiens
tgttgcctgtgcttt

SEQ ID NO: 882493 - DNA, 15 bp, Homo sapiens
gttgcctgtgctttt

SEQ ID NO: 882494 - DNA, 15 bp, Homo sapiens
ttgcctgtgcttttg

SEQ ID NO: 882495 - DNA, 15 bp, Homo sapiens
tgcctgtgcttttgg

SEQ ID NO: 882496 - DNA, 15 bp, Homo sapiens
gcctgtgcttttggt

SEQ ID NO: 882497 - DNA, 15 bp, Homo sapiens
cctgtgcttttggtg

SEQ ID NO: 882498 - DNA, 15 bp, Homo sapiens
ctgtgcttttggtgt

SEQ ID NO: 882499 - DNA, 15 bp, Homo sapiens
tgtgcttttggtgtc

SEQ ID NO: 882500 - DNA, 15 bp, Homo sapiens
gtgcttttggtgtca

SEQ ID NO: 882501 - DNA, 15 bp, Homo sapiens
tgcttttggtgtcat

SEQ ID NO: 882502 - DNA, 15 bp, Homo sapiens
gcttttggtgtcata

SEQ ID NO: 882503 - DNA, 15 bp, Homo sapiens
cttttggtgtcatat

SEQ ID NO: 882504 - DNA, 15 bp, Homo sapiens
ttttggtgtcatatc

SEQ ID NO: 882505 - DNA, 15 bp, Homo sapiens
tttggtgtcatatcc

SEQ ID NO: 882506 - DNA, 15 bp, Homo sapiens
ttggtgtcatatcca

SEQ ID NO: 882507 - DNA, 15 bp, Homo sapiens
tggtgtcatatccaa

SEQ ID NO: 882508 - DNA, 15 bp, Homo sapiens
ggtgtcatatccaag

SEQ ID NO: 882509 - DNA, 15 bp, Homo sapiens
gtgtcatatccaaga

SEQ ID NO: 882510 - DNA, 15 bp, Homo sapiens
tgtcatatccaagaa

SEQ ID NO: 882511 - DNA, 15 bp, Homo sapiens
gtcatatccaagaaa

SEQ ID NO: 882512 - DNA, 15 bp, Homo sapiens
tcatatccaagaaat

SEQ ID NO: 882513 - DNA, 15 bp, Homo sapiens
catatccaagaaatc

SEQ ID NO: 882514 - DNA, 15 bp, Homo sapiens
atatccaagaaatca

SEQ ID NO: 882515 - DNA, 15 bp, Homo sapiens
tatccaagaaatcat

SEQ ID NO: 882516 - DNA, 15 bp, Homo sapiens
atccaagaaatcatc

SEQ ID NO: 882517 - DNA, 15 bp, Homo sapiens
tccaagaaatcatcg

SEQ ID NO: 882518 - DNA, 15 bp, Homo sapiens
ccaagaaatcatcgc

SEQ ID NO: 882519 - DNA, 15 bp, Homo sapiens
caagaaatcatcgcc

SEQ ID NO: 882520 - DNA, 15 bp, Homo sapiens
aagaaatcatcgccc

SEQ ID NO: 882521 - DNA, 15 bp, Homo sapiens
agaaatcatcgccca

SEQ ID NO: 882522 - DNA, 15 bp, Homo sapiens
gaaatcatcgcccag

SEQ ID NO: 882523 - DNA, 15 bp, Homo sapiens
aaatcatcgcccaga

SEQ ID NO: 882524 - DNA, 15 bp, Homo sapiens
aatcatcgcccagac

SEQ ID NO: 882525 - DNA, 15 bp, Homo sapiens
atcatcgcccagacc

SEQ ID NO: 882526 - DNA, 15 bp, Homo sapiens
tcatcgcccagacca

SEQ ID NO: 882527 - DNA, 15 bp, Homo sapiens
catcgcccagaccaa

SEQ ID NO: 882528 - DNA, 15 bp, Homo sapiens
atcgcccagaccaat

SEQ ID NO: 882529 - DNA, 15 bp, Homo sapiens
tcgcccagaccaatg

SEQ ID NO: 882530 - DNA, 15 bp, Homo sapiens
cgcccagaccaatgt

SEQ ID NO: 882531 - DNA, 15 bp, Homo sapiens
gcccagaccaatgtc

SEQ ID NO: 882532 - DNA, 15 bp, Homo sapiens
cccagaccaatgtca

SEQ ID NO: 882533 - DNA, 15 bp, Homo sapiens
ccagaccaatgtcaa

SEQ ID NO: 882534 - DNA, 15 bp, Homo sapiens
cagaccaatgtcaaa

SEQ ID NO: 882535 - DNA, 15 bp, Homo sapiens
agaccaatgtcaaag

SEQ ID NO: 882536 - DNA, 15 bp, Homo sapiens
gaccaatgtcaaaga

SEQ ID NO: 882537 - DNA, 15 bp, Homo sapiens
accaatgtcaaagag

SEQ ID NO: 882538 - DNA, 15 bp, Homo sapiens
ccaatgtcaaagagc

SEQ ID NO: 882539 - DNA, 15 bp, Homo sapiens
caatgtcaaagagct

SEQ ID NO: 882540 - DNA, 15 bp, Homo sapiens
aatgtcaaagagctt

SEQ ID NO: 882541 - DNA, 15 bp, Homo sapiens
atgtcaaagagcttt

SEQ ID NO: 882542 - DNA, 15 bp, Homo sapiens
tgtcaaagagctttt

SEQ ID NO: 882543 - DNA, 15 bp, Homo sapiens
gtcaaagagcttttc

SEQ ID NO: 882544 - DNA, 15 bp, Homo sapiens
tcaaagagcttttcc

SEQ ID NO: 882545 - DNA, 15 bp, Homo sapiens
caaagagcttttccc

SEQ ID NO: 882546 - DNA, 15 bp, Homo sapiens
aaagagcttttcccc

SEQ ID NO: 882547 - DNA, 15 bp, Homo sapiens
aagagcttttcccct

SEQ ID NO: 882548 - DNA, 15 bp, Homo sapiens
agagcttttccccta

SEQ ID NO: 882549 - DNA, 15 bp, Homo sapiens
gagcttttcccctat

SEQ ID NO: 882550 - DNA, 15 bp, Homo sapiens
agcttttcccctatt

SEQ ID NO: 882551 - DNA, 15 bp, Homo sapiens
gcttttcccctattt

SEQ ID NO: 882552 - DNA, 15 bp, Homo sapiens
cttttcccctatttt

SEQ ID NO: 882553 - DNA, 15 bp, Homo sapiens
ttttcccctattttt

SEQ ID NO: 882554 - DNA, 15 bp, Homo sapiens
tttcccctatttttt

SEQ ID NO: 882555 - DNA, 15 bp, Homo sapiens
ttcccctattttttc

SEQ ID NO: 882556 - DNA, 15 bp, Homo sapiens
tcccctattttttct

SEQ ID NO: 882557 - DNA, 15 bp, Homo sapiens
cccctattttttctc

SEQ ID NO: 882558 - DNA, 15 bp, Homo sapiens
ccctattttttctcc

SEQ ID NO: 882559 - DNA, 15 bp, Homo sapiens
cctattttttctcct

SEQ ID NO: 882560 - DNA, 15 bp, Homo sapiens
ctattttttctccta

SEQ ID NO: 882561 - DNA, 15 bp, Homo sapiens
tattttttctcctag

SEQ ID NO: 882562 - DNA, 15 bp, Homo sapiens
attttttctcctagg

SEQ ID NO: 882563 - DNA, 15 bp, Homo sapiens
ttttttctcctagga

SEQ ID NO: 882564 - DNA, 15 bp, Homo sapiens
tttttctcctaggag

SEQ ID NO: 882565 - DNA, 15 bp, Homo sapiens
ttttctcctaggagt

SEQ ID NO: 882566 - DNA, 15 bp, Homo sapiens
tttctcctaggagtt

SEQ ID NO: 882567 - DNA, 15 bp, Homo sapiens
ttctcctaggagttt

SEQ ID NO: 882568 - DNA, 15 bp, Homo sapiens
tctcctaggagtttt

SEQ ID NO: 882569 - DNA, 15 bp, Homo sapiens
ctcctaggagtttta

SEQ ID NO: 882570 - DNA, 15 bp, Homo sapiens
tcctaggagttttac

SEQ ID NO: 882571 - DNA, 15 bp, Homo sapiens
cctaggagttttacg

SEQ ID NO: 882572 - DNA, 15 bp, Homo sapiens
ctaggagttttacgg

SEQ ID NO: 882573 - DNA, 15 bp, Homo sapiens
taggagttttacggt

SEQ ID NO: 882574 - DNA, 15 bp, Homo sapiens
aggagttttacggtt

SEQ ID NO: 882575 - DNA, 15 bp, Homo sapiens
ggagttttacggttt

SEQ ID NO: 882576 - DNA, 15 bp, Homo sapiens
gagttttacggtttc

SEQ ID NO: 882577 - DNA, 15 bp, Homo sapiens
agttttacggtttca

SEQ ID NO: 882578 - DNA, 15 bp, Homo sapiens
gttttacggtttcag

SEQ ID NO: 882579 - DNA, 15 bp, Homo sapiens
ttttacggtttcaga

SEQ ID NO: 882580 - DNA, 15 bp, Homo sapiens
tttacggtttcagat

SEQ ID NO: 882581 - DNA, 15 bp, Homo sapiens
ttacggtttcagatt

SEQ ID NO: 882582 - DNA, 15 bp, Homo sapiens
tacggtttcagattt

SEQ ID NO: 882583 - DNA, 15 bp, Homo sapiens
acggtttcagatttt

SEQ ID NO: 882584 - DNA, 15 bp, Homo sapiens
cggtttcagatttta

SEQ ID NO: 882585 - DNA, 15 bp, Homo sapiens
ggtttcagattttac

SEQ ID NO: 882586 - DNA, 15 bp, Homo sapiens
gtttcagattttaca

SEQ ID NO: 882587 - DNA, 15 bp, Homo sapiens
tttcagattttacat

SEQ ID NO: 882588 - DNA, 15 bp, Homo sapiens
ttcagattttacatt

SEQ ID NO: 882589 - DNA, 15 bp, Homo sapiens
tcagattttacattc

SEQ ID NO: 882590 - DNA, 15 bp, Homo sapiens
cagattttacattca

SEQ ID NO: 882591 - DNA, 15 bp, Homo sapiens
agattttacattcaa

SEQ ID NO: 882592 - DNA, 15 bp, Homo sapiens
gattttacattcaag

SEQ ID NO: 882593 - DNA, 15 bp, Homo sapiens
attttacattcaagt

SEQ ID NO: 882594 - DNA, 15 bp, Homo sapiens
ttttacattcaagtc

SEQ ID NO: 882595 - DNA, 15 bp, Homo sapiens
tttacattcaagtct

SEQ ID NO: 882596 - DNA, 15 bp, Homo sapiens
ttacattcaagtctt

SEQ ID NO: 882597 - DNA, 15 bp, Homo sapiens
tacattcaagtcttt

SEQ ID NO: 882598 - DNA, 15 bp, Homo sapiens
acattcaagtcttta

SEQ ID NO: 882599 - DNA, 15 bp, Homo sapiens
cattcaagtctttaa

SEQ ID NO: 882600 - DNA, 15 bp, Homo sapiens
attcaagtctttaat

SEQ ID NO: 882601 - DNA, 15 bp, Homo sapiens
ttcaagtctttaatc

SEQ ID NO: 882602 - DNA, 15 bp, Homo sapiens
tcaagtctttaatcc

SEQ ID NO: 882603 - DNA, 15 bp, Homo sapiens
caagtctttaatcca

SEQ ID NO: 882604 - DNA, 15 bp, Homo sapiens
agtctttaatccatt

SEQ ID NO: 882605 - DNA, 15 bp, Homo sapiens
gtctttaatccattt

SEQ ID NO: 882606 - DNA, 15 bp, Homo sapiens
tctttaatccatttg

SEQ ID NO: 882607 - DNA, 15 bp, Homo sapiens
ctttaatccatttga

SEQ ID NO: 882608 - DNA, 15 bp, Homo sapiens
tttaatccatttgat

SEQ ID NO: 882609 - DNA, 15 bp, Homo sapiens
ttaatccatttgatt

SEQ ID NO: 882610 - DNA, 15 bp, Homo sapiens
taatccatttgattt

SEQ ID NO: 882611 - DNA, 15 bp, Homo sapiens
aatccatttgatttt

SEQ ID NO: 882612 - DNA, 15 bp, Homo sapiens
atccatttgattttt

SEQ ID NO: 882613 - DNA, 15 bp, Homo sapiens
tccatttgatttttg

SEQ ID NO: 882614 - DNA, 15 bp, Homo sapiens
ccatttgatttttgt

SEQ ID NO: 882615 - DNA, 15 bp, Homo sapiens
catttgatttttgta

SEQ ID NO: 882616 - DNA, 15 bp, Homo sapiens
atttgatttttgtat

SEQ ID NO: 882617 - DNA, 15 bp, Homo sapiens
tttgatttttgtata

SEQ ID NO: 882618 - DNA, 15 bp, Homo sapiens
ttgatttttgtatat

SEQ ID NO: 882619 - DNA, 15 bp, Homo sapiens
tgatttttgtatatg

SEQ ID NO: 882620 - DNA, 15 bp, Homo sapiens
gatttttgtatatgc

SEQ ID NO: 882621 - DNA, 15 bp, Homo sapiens
atttttgtatatgct

SEQ ID NO: 882622 - DNA, 15 bp, Homo sapiens
tttttgtatatgctg

SEQ ID NO: 882623 - DNA, 15 bp, Homo sapiens
ttttgtatatgctgt

SEQ ID NO: 882624 - DNA, 15 bp, Homo sapiens
tttgtatatgctgta

SEQ ID NO: 882625 - DNA, 15 bp, Homo sapiens
ttgtatatgctgtaa

SEQ ID NO: 882626 - DNA, 15 bp, Homo sapiens
tgtatatgctgtaag

SEQ ID NO: 882627 - DNA, 15 bp, Homo sapiens
gtatatgctgtaaga

SEQ ID NO: 882628 - DNA, 15 bp, Homo sapiens
tatatgctgtaagag

SEQ ID NO: 882629 - DNA, 15 bp, Homo sapiens
atatgctgtaagaga

SEQ ID NO: 882630 - DNA, 15 bp, Homo sapiens
tatgctgtaagagaa

SEQ ID NO: 882631 - DNA, 15 bp, Homo sapiens
atgctgtaagagaag

SEQ ID NO: 882632 - DNA, 15 bp, Homo sapiens
tgctgtaagagaagt

SEQ ID NO: 882633 - DNA, 15 bp, Homo sapiens
gctgtaagagaagtg

SEQ ID NO: 882634 - DNA, 15 bp, Homo sapiens
ctgtaagagaagtgt

SEQ ID NO: 882635 - DNA, 15 bp, Homo sapiens
tgtaagagaagtgtt

SEQ ID NO: 882636 - DNA, 15 bp, Homo sapiens
gtaagagaagtgttc

SEQ ID NO: 882637 - DNA, 15 bp, Homo sapiens
taagagaagtgttca

SEQ ID NO: 882638 - DNA, 15 bp, Homo sapiens
aagagaagtgttcag

SEQ ID NO: 882639 - DNA, 15 bp, Homo sapiens
agagaagtgttcaga

SEQ ID NO: 882640 - DNA, 15 bp, Homo sapiens
gagaagtgttcagat

SEQ ID NO: 882641 - DNA, 15 bp, Homo sapiens
agaagtgttcagatt

SEQ ID NO: 882642 - DNA, 15 bp, Homo sapiens
gaagtgttcagattt

SEQ ID NO: 882643 - DNA, 15 bp, Homo sapiens
aagtgttcagattta

SEQ ID NO: 882644 - DNA, 15 bp, Homo sapiens
agtgttcagatttat

SEQ ID NO: 882645 - DNA, 15 bp, Homo sapiens
gtgttcagatttatt

SEQ ID NO: 882646 - DNA, 15 bp, Homo sapiens
tgttcagatttattc

SEQ ID NO: 882647 - DNA, 15 bp, Homo sapiens
gttcagatttattct

SEQ ID NO: 882648 - DNA, 15 bp, Homo sapiens
ttcagatttattctt

SEQ ID NO: 882649 - DNA, 15 bp, Homo sapiens
tcagatttattcttt

SEQ ID NO: 882650 - DNA, 15 bp, Homo sapiens
cagatttattctttt

SEQ ID NO: 882651 - DNA, 15 bp, Homo sapiens
agatttattcttttg

SEQ ID NO: 882652 - DNA, 15 bp, Homo sapiens
gatttattcttttgc

SEQ ID NO: 882653 - DNA, 15 bp, Homo sapiens
atttattcttttgca

SEQ ID NO: 882654 - DNA, 15 bp, Homo sapiens
tttattcttttgcat

SEQ ID NO: 882655 - DNA, 15 bp, Homo sapiens
ttattcttttgcatg

SEQ ID NO: 882656 - DNA, 15 bp, Homo sapiens
tattcttttgcatgt

SEQ ID NO: 882657 - DNA, 15 bp, Homo sapiens
attcttttgcatgta

SEQ ID NO: 882658 - DNA, 15 bp, Homo sapiens
ttcttttgcatgtaa

SEQ ID NO: 882659 - DNA, 15 bp, Homo sapiens
tcttttgcatgtaaa

SEQ ID NO: 882660 - DNA, 15 bp, Homo sapiens
cttttgcatgtaaat

SEQ ID NO: 882661 - DNA, 15 bp, Homo sapiens
ttttgcatgtaaata

SEQ ID NO: 882662 - DNA, 15 bp, Homo sapiens
tttgcatgtaaatat

SEQ ID NO: 882663 - DNA, 15 bp, Homo sapiens
ttgcatgtaaatatt

SEQ ID NO: 882664 - DNA, 15 bp, Homo sapiens
tgcatgtaaatattg

SEQ ID NO: 882665 - DNA, 15 bp, Homo sapiens
gcatgtaaatattgt

SEQ ID NO: 882666 - DNA, 15 bp, Homo sapiens
catgtaaatattgtt

SEQ ID NO: 882667 - DNA, 15 bp, Homo sapiens
atgtaaatattgttt

SEQ ID NO: 882668 - DNA, 15 bp, Homo sapiens
tgtaaatattgtttt

SEQ ID NO: 882669 - DNA, 15 bp, Homo sapiens
gtaaatattgttttc

SEQ ID NO: 882670 - DNA, 15 bp, Homo sapiens
taaatattgttttct

SEQ ID NO: 882671 - DNA, 15 bp, Homo sapiens
aaatattgttttctg

SEQ ID NO: 882672 - DNA, 15 bp, Homo sapiens
aatattgttttctga

SEQ ID NO: 882673 - DNA, 15 bp, Homo sapiens
atattgttttctgaa

SEQ ID NO: 882674 - DNA, 15 bp, Homo sapiens
tattgttttctgaac

SEQ ID NO: 882675 - DNA, 15 bp, Homo sapiens
attgttttctgaaca

SEQ ID NO: 882676 - DNA, 15 bp, Homo sapiens
ttgttttctgaacat

SEQ ID NO: 882677 - DNA, 15 bp, Homo sapiens
tgttttctgaacatc

SEQ ID NO: 882678 - DNA, 15 bp, Homo sapiens
gttttctgaacatca

SEQ ID NO: 882679 - DNA, 15 bp, Homo sapiens
ttttctgaacatcat

SEQ ID NO: 882680 - DNA, 15 bp, Homo sapiens
tttctgaacatcatt

SEQ ID NO: 882681 - DNA, 15 bp, Homo sapiens
ttctgaacatcatta

SEQ ID NO: 882682 - DNA, 15 bp, Homo sapiens
tctgaacatcattat

SEQ ID NO: 882683 - DNA, 15 bp, Homo sapiens
ctgaacatcattatt

SEQ ID NO: 882684 - DNA, 15 bp, Homo sapiens
tgaacatcattattc

SEQ ID NO: 882685 - DNA, 15 bp, Homo sapiens
gaacatcattattca

SEQ ID NO: 882686 - DNA, 15 bp, Homo sapiens
aacatcattattcat

SEQ ID NO: 882687 - DNA, 15 bp, Homo sapiens
acatcattattcatt

SEQ ID NO: 882688 - DNA, 15 bp, Homo sapiens
catcattattcattg

SEQ ID NO: 882689 - DNA, 15 bp, Homo sapiens
atcattattcattga

SEQ ID NO: 882690 - DNA, 15 bp, Homo sapiens
tcattattcattgaa

SEQ ID NO: 882691 - DNA, 15 bp, Homo sapiens
cattattcattgaat

SEQ ID NO: 882692 - DNA, 15 bp, Homo sapiens
attattcattgaata

SEQ ID NO: 882693 - DNA, 15 bp, Homo sapiens
ttattcattgaatag

SEQ ID NO: 882694 - DNA, 15 bp, Homo sapiens
tattcattgaataga

SEQ ID NO: 882695 - DNA, 15 bp, Homo sapiens
attcattgaatagac

SEQ ID NO: 882696 - DNA, 15 bp, Homo sapiens
ttcattgaatagact

SEQ ID NO: 882697 - DNA, 15 bp, Homo sapiens
tcattgaatagactg

SEQ ID NO: 882698 - DNA, 15 bp, Homo sapiens
cattgaatagactgt

SEQ ID NO: 882699 - DNA, 15 bp, Homo sapiens
attgaatagactgtc

SEQ ID NO: 882700 - DNA, 15 bp, Homo sapiens
ttgaatagactgtcc

SEQ ID NO: 882701 - DNA, 15 bp, Homo sapiens
tgaatagactgtcct

SEQ ID NO: 882702 - DNA, 15 bp, Homo sapiens
gaatagactgtcctt

SEQ ID NO: 882703 - DNA, 15 bp, Homo sapiens
aatagactgtccttt

SEQ ID NO: 882704 - DNA, 15 bp, Homo sapiens
atagactgtccttta

SEQ ID NO: 882705 - DNA, 15 bp, Homo sapiens
tagactgtcctttac

SEQ ID NO: 882706 - DNA, 15 bp, Homo sapiens
agactgtcctttacc

SEQ ID NO: 882707 - DNA, 15 bp, Homo sapiens
gactgtcctttacct

SEQ ID NO: 882708 - DNA, 15 bp, Homo sapiens
actgtcctttaccta

SEQ ID NO: 882709 - DNA, 15 bp, Homo sapiens
ctgtcctttacctat

SEQ ID NO: 882710 - DNA, 15 bp, Homo sapiens
tgtcctttacctatt

SEQ ID NO: 882711 - DNA, 15 bp, Homo sapiens
gtcctttacctattg

SEQ ID NO: 882712 - DNA, 15 bp, Homo sapiens
tcctttacctattgt

SEQ ID NO: 882713 - DNA, 15 bp, Homo sapiens
cctttacctattgtg

SEQ ID NO: 882714 - DNA, 15 bp, Homo sapiens
ctttacctattgtgt

SEQ ID NO: 882715 - DNA, 15 bp, Homo sapiens
tttacctattgtgtg

SEQ ID NO: 882716 - DNA, 15 bp, Homo sapiens
ttacctattgtgtgt

SEQ ID NO: 882717 - DNA, 15 bp, Homo sapiens
tacctattgtgtgtt

SEQ ID NO: 882718 - DNA, 15 bp, Homo sapiens
acctattgtgtgttc

SEQ ID NO: 882719 - DNA, 15 bp, Homo sapiens
cctattgtgtgttct

SEQ ID NO: 882720 - DNA, 15 bp, Homo sapiens
ctattgtgtgttctt

SEQ ID NO: 882721 - DNA, 15 bp, Homo sapiens
tattgtgtgttcttg

SEQ ID NO: 882722 - DNA, 15 bp, Homo sapiens
attgtgtgttcttga

SEQ ID NO: 882723 - DNA, 15 bp, Homo sapiens
ttgtgtgttcttgac

SEQ ID NO: 882724 - DNA, 15 bp, Homo sapiens
tgtgtgttcttgaca

SEQ ID NO: 882725 - DNA, 15 bp, Homo sapiens
gtgtgttcttgacat

SEQ ID NO: 882726 - DNA, 15 bp, Homo sapiens
tgtgttcttgacatc

SEQ ID NO: 882727 - DNA, 15 bp, Homo sapiens
gtgttcttgacatcc

SEQ ID NO: 882728 - DNA, 15 bp, Homo sapiens
tgttcttgacatcct

SEQ ID NO: 882729 - DNA, 15 bp, Homo sapiens
gttcttgacatcctt

SEQ ID NO: 882730 - DNA, 15 bp, Homo sapiens
ttcttgacatccttg

SEQ ID NO: 882731 - DNA, 15 bp, Homo sapiens
tcttgacatccttgt

SEQ ID NO: 882732 - DNA, 15 bp, Homo sapiens
cttgacatccttgtc

SEQ ID NO: 882733 - DNA, 15 bp, Homo sapiens
ttgacatccttgtca

SEQ ID NO: 882734 - DNA, 15 bp, Homo sapiens
tgacatccttgtcaa

SEQ ID NO: 882735 - DNA, 15 bp, Homo sapiens
gacatccttgtcaaa

SEQ ID NO: 882736 - DNA, 15 bp, Homo sapiens
acatccttgtcaaag

SEQ ID NO: 882737 - DNA, 15 bp, Homo sapiens
catccttgtcaaaga

SEQ ID NO: 882738 - DNA, 15 bp, Homo sapiens
atccttgtcaaagat

SEQ ID NO: 882739 - DNA, 15 bp, Homo sapiens
tccttgtcaaagatt

SEQ ID NO: 882740 - DNA, 15 bp, Homo sapiens
ccttgtcaaagatta

SEQ ID NO: 882741 - DNA, 15 bp, Homo sapiens
cttgtcaaagattag

SEQ ID NO: 882742 - DNA, 15 bp, Homo sapiens
ttgtcaaagattagt

SEQ ID NO: 882743 - DNA, 15 bp, Homo sapiens
tgtcaaagattagtt

SEQ ID NO: 882744 - DNA, 15 bp, Homo sapiens
gtcaaagattagttg

SEQ ID NO: 882745 - DNA, 15 bp, Homo sapiens
tcaaagattagttgc

SEQ ID NO: 882746 - DNA, 15 bp, Homo sapiens
caaagattagttgcc

SEQ ID NO: 882747 - DNA, 15 bp, Homo sapiens
aaagattagttgccc

SEQ ID NO: 882748 - DNA, 15 bp, Homo sapiens
aagattagttgccct

SEQ ID NO: 882749 - DNA, 15 bp, Homo sapiens
agattagttgccctt

SEQ ID NO: 882750 - DNA, 15 bp, Homo sapiens
gattagttgccctta

SEQ ID NO: 882751 - DNA, 15 bp, Homo sapiens
attagttgcccttaa

SEQ ID NO: 882752 - DNA, 15 bp, Homo sapiens
ttagttgcccttaaa

SEQ ID NO: 882753 - DNA, 15 bp, Homo sapiens
tagttgcccttaaat

SEQ ID NO: 882754 - DNA, 15 bp, Homo sapiens
agttgcccttaaatg

SEQ ID NO: 882755 - DNA, 15 bp, Homo sapiens
gttgcccttaaatgg

SEQ ID NO: 882756 - DNA, 15 bp, Homo sapiens
ttgcccttaaatggg

SEQ ID NO: 882757 - DNA, 15 bp, Homo sapiens
tgcccttaaatgggt

SEQ ID NO: 882758 - DNA, 15 bp, Homo sapiens
gcccttaaatgggtg

SEQ ID NO: 882759 - DNA, 15 bp, Homo sapiens
cccttaaatgggtgg

SEQ ID NO: 882760 - DNA, 15 bp, Homo sapiens
ccttaaatgggtgga

SEQ ID NO: 882761 - DNA, 15 bp, Homo sapiens
cttaaatgggtggat

SEQ ID NO: 882762 - DNA, 15 bp, Homo sapiens
ttaaatgggtggatt

SEQ ID NO: 882763 - DNA, 15 bp, Homo sapiens
taaatgggtggattt

SEQ ID NO: 882764 - DNA, 15 bp, Homo sapiens
aaatgggtggattta

SEQ ID NO: 882765 - DNA, 15 bp, Homo sapiens
aatgggtggatttaa

SEQ ID NO: 882766 - DNA, 15 bp, Homo sapiens
atgggtggatttaat

SEQ ID NO: 882767 - DNA, 15 bp, Homo sapiens
tgggtggatttaatt

SEQ ID NO: 882768 - DNA, 15 bp, Homo sapiens
gggtggatttaattc

SEQ ID NO: 882769 - DNA, 15 bp, Homo sapiens
ggtggatttaattct

SEQ ID NO: 882770 - DNA, 15 bp, Homo sapiens
gtggatttaattctg

SEQ ID NO: 882771 - DNA, 15 bp, Homo sapiens
tggatttaattctga

SEQ ID NO: 882772 - DNA, 15 bp, Homo sapiens
ggatttaattctgaa

SEQ ID NO: 882773 - DNA, 15 bp, Homo sapiens
gatttaattctgaac

SEQ ID NO: 882774 - DNA, 15 bp, Homo sapiens
atttaattctgaact

SEQ ID NO: 882775 - DNA, 15 bp, Homo sapiens
tttaattctgaacta

SEQ ID NO: 882776 - DNA, 15 bp, Homo sapiens
ttaattctgaactag

SEQ ID NO: 882777 - DNA, 15 bp, Homo sapiens
taattctgaactagc

SEQ ID NO: 882778 - DNA, 15 bp, Homo sapiens
aattctgaactagcc

SEQ ID NO: 882779 - DNA, 15 bp, Homo sapiens
attctgaactagccc

SEQ ID NO: 882780 - DNA, 15 bp, Homo sapiens
ttctgaactagccca

SEQ ID NO: 882781 - DNA, 15 bp, Homo sapiens
tctgaactagcccac

SEQ ID NO: 882782 - DNA, 15 bp, Homo sapiens
ctgaactagcccact

SEQ ID NO: 882783 - DNA, 15 bp, Homo sapiens
tgaactagcccactg

SEQ ID NO: 882784 - DNA, 15 bp, Homo sapiens
gaactagcccactgt

SEQ ID NO: 882785 - DNA, 15 bp, Homo sapiens
aactagcccactgtt

SEQ ID NO: 882786 - DNA, 15 bp, Homo sapiens
actagcccactgttt

SEQ ID NO: 882787 - DNA, 15 bp, Homo sapiens
ctagcccactgtttt

SEQ ID NO: 882788 - DNA, 15 bp, Homo sapiens
tagcccactgttttt

SEQ ID NO: 882789 - DNA, 15 bp, Homo sapiens
agcccactgtttttc

SEQ ID NO: 882790 - DNA, 15 bp, Homo sapiens
gcccactgtttttca

SEQ ID NO: 882791 - DNA, 15 bp, Homo sapiens
cccactgtttttcaa

SEQ ID NO: 882792 - DNA, 15 bp, Homo sapiens
ccactgtttttcaac

SEQ ID NO: 882793 - DNA, 15 bp, Homo sapiens
cactgtttttcaacc

SEQ ID NO: 882794 - DNA, 15 bp, Homo sapiens
actgtttttcaacct

SEQ ID NO: 882795 - DNA, 15 bp, Homo sapiens
ctgtttttcaacctt

SEQ ID NO: 882796 - DNA, 15 bp, Homo sapiens
tgtttttcaacctta

SEQ ID NO: 882797 - DNA, 15 bp, Homo sapiens
gtttttcaaccttag

SEQ ID NO: 882798 - DNA, 15 bp, Homo sapiens
tttttcaaccttagc

SEQ ID NO: 882799 - DNA, 15 bp, Homo sapiens
ttttcaaccttagct

SEQ ID NO: 882800 - DNA, 15 bp, Homo sapiens
tttcaaccttagctg

SEQ ID NO: 882801 - DNA, 15 bp, Homo sapiens
ttcaaccttagctgc

SEQ ID NO: 882802 - DNA, 15 bp, Homo sapiens
tcaaccttagctgca

SEQ ID NO: 882803 - DNA, 15 bp, Homo sapiens
caaccttagctgcac

SEQ ID NO: 882804 - DNA, 15 bp, Homo sapiens
aaccttagctgcaca

SEQ ID NO: 882805 - DNA, 15 bp, Homo sapiens
accttagctgcacat

SEQ ID NO: 882806 - DNA, 15 bp, Homo sapiens
ccttagctgcacatt

SEQ ID NO: 882807 - DNA, 15 bp, Homo sapiens
cttagctgcacattg

SEQ ID NO: 882808 - DNA, 15 bp, Homo sapiens
ttagctgcacattgc

SEQ ID NO: 882809 - DNA, 15 bp, Homo sapiens
tagctgcacattgca

SEQ ID NO: 882810 - DNA, 15 bp, Homo sapiens
agctgcacattgcac

SEQ ID NO: 882811 - DNA, 15 bp, Homo sapiens
gctgcacattgcact

SEQ ID NO: 882812 - DNA, 15 bp, Homo sapiens
ctgcacattgcactc

SEQ ID NO: 882813 - DNA, 15 bp, Homo sapiens
tgcacattgcactca

SEQ ID NO: 882814 - DNA, 15 bp, Homo sapiens
gcacattgcactcac

SEQ ID NO: 882815 - DNA, 15 bp, Homo sapiens
cacattgcactcacc

SEQ ID NO: 882816 - DNA, 15 bp, Homo sapiens
acattgcactcacct

SEQ ID NO: 882817 - DNA, 15 bp, Homo sapiens
cattgcactcacctg

SEQ ID NO: 882818 - DNA, 15 bp, Homo sapiens
attgcactcacctgg

SEQ ID NO: 882819 - DNA, 15 bp, Homo sapiens
ttgcactcacctggg

SEQ ID NO: 882820 - DNA, 15 bp, Homo sapiens
tgcactcacctgggg

SEQ ID NO: 882821 - DNA, 15 bp, Homo sapiens
gcactcacctgggga

SEQ ID NO: 882822 - DNA, 15 bp, Homo sapiens
cactcacctggggaa

SEQ ID NO: 882823 - DNA, 15 bp, Homo sapiens
actcacctggggaac

SEQ ID NO: 882824 - DNA, 15 bp, Homo sapiens
ctcacctggggaact

SEQ ID NO: 882825 - DNA, 15 bp, Homo sapiens
tcacctggggaactt

SEQ ID NO: 882826 - DNA, 15 bp, Homo sapiens
cacctggggaacttt

SEQ ID NO: 882827 - DNA, 15 bp, Homo sapiens
acctggggaactttt

SEQ ID NO: 882828 - DNA, 15 bp, Homo sapiens
cctggggaactttta

SEQ ID NO: 882829 - DNA, 15 bp, Homo sapiens
ctggggaacttttaa

SEQ ID NO: 882830 - DNA, 15 bp, Homo sapiens
tggggaacttttaac

SEQ ID NO: 882831 - DNA, 15 bp, Homo sapiens
ggggaacttttaaca

SEQ ID NO: 882832 - DNA, 15 bp, Homo sapiens
gggaacttttaacat

SEQ ID NO: 882833 - DNA, 15 bp, Homo sapiens
ggaacttttaacatt

SEQ ID NO: 882834 - DNA, 15 bp, Homo sapiens
gaacttttaacattc

SEQ ID NO: 882835 - DNA, 15 bp, Homo sapiens
aacttttaacattct

SEQ ID NO: 882836 - DNA, 15 bp, Homo sapiens
acttttaacattctt

SEQ ID NO: 882837 - DNA, 15 bp, Homo sapiens
cttttaacattcttg

SEQ ID NO: 882838 - DNA, 15 bp, Homo sapiens
ttttaacattcttga

SEQ ID NO: 882839 - DNA, 15 bp, Homo sapiens
tttaacattcttgaa

SEQ ID NO: 882840 - DNA, 15 bp, Homo sapiens
ttaacattcttgaaa

SEQ ID NO: 882841 - DNA, 15 bp, Homo sapiens
taacattcttgaaat

SEQ ID NO: 882842 - DNA, 15 bp, Homo sapiens
aacattcttgaaatg

SEQ ID NO: 882843 - DNA, 15 bp, Homo sapiens
acattcttgaaatgc

SEQ ID NO: 882844 - DNA, 15 bp, Homo sapiens
cattcttgaaatgct

SEQ ID NO: 882845 - DNA, 15 bp, Homo sapiens
attcttgaaatgctc

SEQ ID NO: 882846 - DNA, 15 bp, Homo sapiens
ttcttgaaatgctca

SEQ ID NO: 882847 - DNA, 15 bp, Homo sapiens
tcttgaaatgctcag

SEQ ID NO: 882848 - DNA, 15 bp, Homo sapiens
cttgaaatgctcagg

SEQ ID NO: 882849 - DNA, 15 bp, Homo sapiens
ttgaaatgctcaggc

SEQ ID NO: 882850 - DNA, 15 bp, Homo sapiens
tgaaatgctcaggcc

SEQ ID NO: 882851 - DNA, 15 bp, Homo sapiens
gaaatgctcaggcca

SEQ ID NO: 882852 - DNA, 15 bp, Homo sapiens
aaatgctcaggccat

SEQ ID NO: 882853 - DNA, 15 bp, Homo sapiens
aatgctcaggccata

SEQ ID NO: 882854 - DNA, 15 bp, Homo sapiens
atgctcaggccatac

SEQ ID NO: 882855 - DNA, 15 bp, Homo sapiens
tgctcaggccatact

SEQ ID NO: 882856 - DNA, 15 bp, Homo sapiens
gctcaggccatactc

SEQ ID NO: 882857 - DNA, 15 bp, Homo sapiens
ctcaggccatactcc

SEQ ID NO: 882858 - DNA, 15 bp, Homo sapiens
tcaggccatactcca

SEQ ID NO: 882859 - DNA, 15 bp, Homo sapiens
caggccatactccag

SEQ ID NO: 882860 - DNA, 15 bp, Homo sapiens
aggccatactccaga

SEQ ID NO: 882861 - DNA, 15 bp, Homo sapiens
ggccatactccagag

SEQ ID NO: 882862 - DNA, 15 bp, Homo sapiens
gccatactccagagc

SEQ ID NO: 882863 - DNA, 15 bp, Homo sapiens
ccatactccagagca

SEQ ID NO: 882864 - DNA, 15 bp, Homo sapiens
catactccagagcaa

SEQ ID NO: 882865 - DNA, 15 bp, Homo sapiens
atactccagagcaat

SEQ ID NO: 882866 - DNA, 15 bp, Homo sapiens
tactccagagcaatt

SEQ ID NO: 882867 - DNA, 15 bp, Homo sapiens
actccagagcaatta

SEQ ID NO: 882868 - DNA, 15 bp, Homo sapiens
ctccagagcaattaa

SEQ ID NO: 882869 - DNA, 15 bp, Homo sapiens
tccagagcaattaaa

SEQ ID NO: 882870 - DNA, 15 bp, Homo sapiens
ccagagcaattaaat

SEQ ID NO: 882871 - DNA, 15 bp, Homo sapiens
cagagcaattaaatt

SEQ ID NO: 882872 - DNA, 15 bp, Homo sapiens
agagcaattaaatta

SEQ ID NO: 882873 - DNA, 15 bp, Homo sapiens
gagcaattaaattag

SEQ ID NO: 882874 - DNA, 15 bp, Homo sapiens
agcaattaaattaga

SEQ ID NO: 882875 - DNA, 15 bp, Homo sapiens
gcaattaaattagac

SEQ ID NO: 882876 - DNA, 15 bp, Homo sapiens
caattaaattagaca

SEQ ID NO: 882877 - DNA, 15 bp, Homo sapiens
aattaaattagacat

SEQ ID NO: 882878 - DNA, 15 bp, Homo sapiens
attaaattagacatt

SEQ ID NO: 882879 - DNA, 15 bp, Homo sapiens
ttaaattagacattg

SEQ ID NO: 882880 - DNA, 15 bp, Homo sapiens
taaattagacattga

SEQ ID NO: 882881 - DNA, 15 bp, Homo sapiens
aaattagacattgat

SEQ ID NO: 882882 - DNA, 15 bp, Homo sapiens
aattagacattgatg

SEQ ID NO: 882883 - DNA, 15 bp, Homo sapiens
attagacattgatgc

SEQ ID NO: 882884 - DNA, 15 bp, Homo sapiens
ttagacattgatgca

SEQ ID NO: 882885 - DNA, 15 bp, Homo sapiens
tagacattgatgcag

SEQ ID NO: 882886 - DNA, 15 bp, Homo sapiens
agacattgatgcagg

SEQ ID NO: 882887 - DNA, 15 bp, Homo sapiens
gacattgatgcaggc

SEQ ID NO: 882888 - DNA, 15 bp, Homo sapiens
acattgatgcaggca

SEQ ID NO: 882889 - DNA, 15 bp, Homo sapiens
cattgatgcaggcat

SEQ ID NO: 882890 - DNA, 15 bp, Homo sapiens
attgatgcaggcatg

SEQ ID NO: 882891 - DNA, 15 bp, Homo sapiens
ttgatgcaggcatgc

SEQ ID NO: 882892 - DNA, 15 bp, Homo sapiens
tgatgcaggcatgca

SEQ ID NO: 882893 - DNA, 15 bp, Homo sapiens
gatgcaggcatgcat

SEQ ID NO: 882894 - DNA, 15 bp, Homo sapiens
atgcaggcatgcatt

SEQ ID NO: 882895 - DNA, 15 bp, Homo sapiens
tgcaggcatgcattg

SEQ ID NO: 882896 - DNA, 15 bp, Homo sapiens
gcaggcatgcattgg

SEQ ID NO: 882897 - DNA, 15 bp, Homo sapiens
caggcatgcattggt

SEQ ID NO: 882898 - DNA, 15 bp, Homo sapiens
aggcatgcattggtg

SEQ ID NO: 882899 - DNA, 15 bp, Homo sapiens
ggcatgcattggtga

SEQ ID NO: 882900 - DNA, 15 bp, Homo sapiens
gcatgcattggtgat

SEQ ID NO: 882901 - DNA, 15 bp, Homo sapiens
catgcattggtgatt

SEQ ID NO: 882902 - DNA, 15 bp, Homo sapiens
atgcattggtgattc

SEQ ID NO: 882903 - DNA, 15 bp, Homo sapiens
tgcattggtgattcc

SEQ ID NO: 882904 - DNA, 15 bp, Homo sapiens
gcattggtgattcca

SEQ ID NO: 882905 - DNA, 15 bp, Homo sapiens
cattggtgattccaa

SEQ ID NO: 882906 - DNA, 15 bp, Homo sapiens
attggtgattccaac

SEQ ID NO: 882907 - DNA, 15 bp, Homo sapiens
ttggtgattccaacg

SEQ ID NO: 882908 - DNA, 15 bp, Homo sapiens
tggtgattccaacgt

SEQ ID NO: 882909 - DNA, 15 bp, Homo sapiens
ggtgattccaacgtg

SEQ ID NO: 882910 - DNA, 15 bp, Homo sapiens
gtgattccaacgtgc

SEQ ID NO: 882911 - DNA, 15 bp, Homo sapiens
tgattccaacgtgca

SEQ ID NO: 882912 - DNA, 15 bp, Homo sapiens
gattccaacgtgcag

SEQ ID NO: 882913 - DNA, 15 bp, Homo sapiens
attccaacgtgcagc

SEQ ID NO: 882914 - DNA, 15 bp, Homo sapiens
ttccaacgtgcagcc

SEQ ID NO: 882915 - DNA, 15 bp, Homo sapiens
tccaacgtgcagccc

SEQ ID NO: 882916 - DNA, 15 bp, Homo sapiens
ccaacgtgcagccca

SEQ ID NO: 882917 - DNA, 15 bp, Homo sapiens
caacgtgcagcccaa

SEQ ID NO: 882918 - DNA, 15 bp, Homo sapiens
aacgtgcagcccaag

SEQ ID NO: 882919 - DNA, 15 bp, Homo sapiens
acgtgcagcccaagt

SEQ ID NO: 882920 - DNA, 15 bp, Homo sapiens
cgtgcagcccaagtt

SEQ ID NO: 882921 - DNA, 15 bp, Homo sapiens
gtgcagcccaagttg

SEQ ID NO: 882922 - DNA, 15 bp, Homo sapiens
tgcagcccaagttga

SEQ ID NO: 882923 - DNA, 15 bp, Homo sapiens
gcagcccaagttgag

SEQ ID NO: 882924 - DNA, 15 bp, Homo sapiens
cagcccaagttgaga

SEQ ID NO: 882925 - DNA, 15 bp, Homo sapiens
agcccaagttgagaa

SEQ ID NO: 882926 - DNA, 15 bp, Homo sapiens
gcccaagttgagaaa

SEQ ID NO: 882927 - DNA, 15 bp, Homo sapiens
cccaagttgagaaac

SEQ ID NO: 882928 - DNA, 15 bp, Homo sapiens
ccaagttgagaaaca

SEQ ID NO: 882929 - DNA, 15 bp, Homo sapiens
caagttgagaaacac

SEQ ID NO: 882930 - DNA, 15 bp, Homo sapiens
aagttgagaaacacc

SEQ ID NO: 882931 - DNA, 15 bp, Homo sapiens
agttgagaaacacca

SEQ ID NO: 882932 - DNA, 15 bp, Homo sapiens
gttgagaaacaccag

SEQ ID NO: 882933 - DNA, 15 bp, Homo sapiens
ttgagaaacaccagc

SEQ ID NO: 882934 - DNA, 15 bp, Homo sapiens
tgagaaacaccagcc

SEQ ID NO: 882935 - DNA, 15 bp, Homo sapiens
gagaaacaccagcct

SEQ ID NO: 882936 - DNA, 15 bp, Homo sapiens
agaaacaccagccta

SEQ ID NO: 882937 - DNA, 15 bp, Homo sapiens
gaaacaccagcctag

SEQ ID NO: 882938 - DNA, 15 bp, Homo sapiens
aaacaccagcctagc

SEQ ID NO: 882939 - DNA, 15 bp, Homo sapiens
aacaccagcctagcc

SEQ ID NO: 882940 - DNA, 15 bp, Homo sapiens
acaccagcctagccc

SEQ ID NO: 882941 - DNA, 15 bp, Homo sapiens
caccagcctagcccc

SEQ ID NO: 882942 - DNA, 15 bp, Homo sapiens
accagcctagcccct

SEQ ID NO: 882943 - DNA, 15 bp, Homo sapiens
ccagcctagcccctt

SEQ ID NO: 882944 - DNA, 15 bp, Homo sapiens
cagcctagcccctta

SEQ ID NO: 882945 - DNA, 15 bp, Homo sapiens
agcctagccccttac

SEQ ID NO: 882946 - DNA, 15 bp, Homo sapiens
gcctagccccttact

SEQ ID NO: 882947 - DNA, 15 bp, Homo sapiens
cctagccccttactt

SEQ ID NO: 882948 - DNA, 15 bp, Homo sapiens
ctagccccttactta

SEQ ID NO: 882949 - DNA, 15 bp, Homo sapiens
tagccccttacttac

SEQ ID NO: 882950 - DNA, 15 bp, Homo sapiens
agccccttacttact

SEQ ID NO: 882951 - DNA, 15 bp, Homo sapiens
gccccttacttactc

SEQ ID NO: 882952 - DNA, 15 bp, Homo sapiens
ccccttacttactca

SEQ ID NO: 882953 - DNA, 15 bp, Homo sapiens
cccttacttactcaa

SEQ ID NO: 882954 - DNA, 15 bp, Homo sapiens
ccttacttactcaag

SEQ ID NO: 882955 - DNA, 15 bp, Homo sapiens
cttacttactcaagg

SEQ ID NO: 882956 - DNA, 15 bp, Homo sapiens
ttacttactcaagga

SEQ ID NO: 882957 - DNA, 15 bp, Homo sapiens
tacttactcaaggaa

SEQ ID NO: 882958 - DNA, 15 bp, Homo sapiens
acttactcaaggaaa

SEQ ID NO: 882959 - DNA, 15 bp, Homo sapiens
cttactcaaggaaac

SEQ ID NO: 882960 - DNA, 15 bp, Homo sapiens
ttactcaaggaaacc

SEQ ID NO: 882961 - DNA, 15 bp, Homo sapiens
tactcaaggaaacca

SEQ ID NO: 882962 - DNA, 15 bp, Homo sapiens
actcaaggaaaccat

SEQ ID NO: 882963 - DNA, 15 bp, Homo sapiens
ctcaaggaaaccatc

SEQ ID NO: 882964 - DNA, 15 bp, Homo sapiens
tcaaggaaaccatct

SEQ ID NO: 882965 - DNA, 15 bp, Homo sapiens
caaggaaaccatctc

SEQ ID NO: 882966 - DNA, 15 bp, Homo sapiens
aaggaaaccatctct

SEQ ID NO: 882967 - DNA, 15 bp, Homo sapiens
aggaaaccatctctg

SEQ ID NO: 882968 - DNA, 15 bp, Homo sapiens
ggaaaccatctctga

SEQ ID NO: 882969 - DNA, 15 bp, Homo sapiens
gaaaccatctctgat

SEQ ID NO: 882970 - DNA, 15 bp, Homo sapiens
aaaccatctctgatc

SEQ ID NO: 882971 - DNA, 15 bp, Homo sapiens
aaccatctctgatcc

SEQ ID NO: 882972 - DNA, 15 bp, Homo sapiens
accatctctgatcct

SEQ ID NO: 882973 - DNA, 15 bp, Homo sapiens
ccatctctgatcctt

SEQ ID NO: 882974 - DNA, 15 bp, Homo sapiens
catctctgatccttg

SEQ ID NO: 882975 - DNA, 15 bp, Homo sapiens
atctctgatccttgt

SEQ ID NO: 882976 - DNA, 15 bp, Homo sapiens
tctctgatccttgta

SEQ ID NO: 882977 - DNA, 15 bp, Homo sapiens
ctctgatccttgtat

SEQ ID NO: 882978 - DNA, 15 bp, Homo sapiens
tctgatccttgtatc

SEQ ID NO: 882979 - DNA, 15 bp, Homo sapiens
ctgatccttgtatca

SEQ ID NO: 882980 - DNA, 15 bp, Homo sapiens
tgatccttgtatcag

SEQ ID NO: 882981 - DNA, 15 bp, Homo sapiens
gatccttgtatcagg

SEQ ID NO: 882982 - DNA, 15 bp, Homo sapiens
atccttgtatcaggc

SEQ ID NO: 882983 - DNA, 15 bp, Homo sapiens
tccttgtatcaggca

SEQ ID NO: 882984 - DNA, 15 bp, Homo sapiens
ccttgtatcaggcag

SEQ ID NO: 882985 - DNA, 15 bp, Homo sapiens
cttgtatcaggcagc

SEQ ID NO: 882986 - DNA, 15 bp, Homo sapiens
ttgtatcaggcagct

SEQ ID NO: 882987 - DNA, 15 bp, Homo sapiens
tgtatcaggcagctg

SEQ ID NO: 882988 - DNA, 15 bp, Homo sapiens
gtatcaggcagctga

SEQ ID NO: 882989 - DNA, 15 bp, Homo sapiens
tatcaggcagctgat

SEQ ID NO: 882990 - DNA, 15 bp, Homo sapiens
atcaggcagctgatt

SEQ ID NO: 882991 - DNA, 15 bp, Homo sapiens
tcaggcagctgattt

SEQ ID NO: 882992 - DNA, 15 bp, Homo sapiens
caggcagctgattta

SEQ ID NO: 882993 - DNA, 15 bp, Homo sapiens
aggcagctgatttac

SEQ ID NO: 882994 - DNA, 15 bp, Homo sapiens
ggcagctgatttact

SEQ ID NO: 882995 - DNA, 15 bp, Homo sapiens
gcagctgatttacta

SEQ ID NO: 882996 - DNA, 15 bp, Homo sapiens
cagctgatttactaa

SEQ ID NO: 882997 - DNA, 15 bp, Homo sapiens
agctgatttactaaa

SEQ ID NO: 882998 - DNA, 15 bp, Homo sapiens
gctgatttactaaag

SEQ ID NO: 882999 - DNA, 15 bp, Homo sapiens
ctgatttactaaagc

SEQ ID NO: 883000 - DNA, 15 bp, Homo sapiens
tgatttactaaagct

SEQ ID NO: 883001 - DNA, 15 bp, Homo sapiens
gatttactaaagctt

SEQ ID NO: 883002 - DNA, 15 bp, Homo sapiens
atttactaaagctta

SEQ ID NO: 883003 - DNA, 15 bp, Homo sapiens
tttactaaagcttac

SEQ ID NO: 883004 - DNA, 15 bp, Homo sapiens
ttactaaagcttaca

SEQ ID NO: 883005 - DNA, 15 bp, Homo sapiens
tactaaagcttacat

SEQ ID NO: 883006 - DNA, 15 bp, Homo sapiens
actaaagcttacatt

SEQ ID NO: 883007 - DNA, 15 bp, Homo sapiens
ctaaagcttacattt

SEQ ID NO: 883008 - DNA, 15 bp, Homo sapiens
taaagcttacatttc

SEQ ID NO: 883009 - DNA, 15 bp, Homo sapiens
aaagcttacatttcc

SEQ ID NO: 883010 - DNA, 15 bp, Homo sapiens
aagcttacatttcca

SEQ ID NO: 883011 - DNA, 15 bp, Homo sapiens
agcttacatttccat

SEQ ID NO: 883012 - DNA, 15 bp, Homo sapiens
gcttacatttccata

SEQ ID NO: 883013 - DNA, 15 bp, Homo sapiens
cttacatttccatag

SEQ ID NO: 883014 - DNA, 15 bp, Homo sapiens
ttacatttccataga

SEQ ID NO: 883015 - DNA, 15 bp, Homo sapiens
tacatttccatagaa

SEQ ID NO: 883016 - DNA, 15 bp, Homo sapiens
acatttccatagaaa

SEQ ID NO: 883017 - DNA, 15 bp, Homo sapiens
catttccatagaaat

SEQ ID NO: 883018 - DNA, 15 bp, Homo sapiens
atttccatagaaatt

SEQ ID NO: 883019 - DNA, 15 bp, Homo sapiens
tttccatagaaattt

SEQ ID NO: 883020 - DNA, 15 bp, Homo sapiens
ttccatagaaattta

SEQ ID NO: 883021 - DNA, 15 bp, Homo sapiens
tccatagaaatttat

SEQ ID NO: 883022 - DNA, 15 bp, Homo sapiens
ccatagaaatttatc

SEQ ID NO: 883023 - DNA, 15 bp, Homo sapiens
catagaaatttatct

SEQ ID NO: 883024 - DNA, 15 bp, Homo sapiens
atagaaatttatctt

SEQ ID NO: 883025 - DNA, 15 bp, Homo sapiens
tagaaatttatcttg

SEQ ID NO: 883026 - DNA, 15 bp, Homo sapiens
agaaatttatcttgg

SEQ ID NO: 883027 - DNA, 15 bp, Homo sapiens
gaaatttatcttgga

SEQ ID NO: 883028 - DNA, 15 bp, Homo sapiens
aaatttatcttggaa

SEQ ID NO: 883029 - DNA, 15 bp, Homo sapiens
aatttatcttggaaa

SEQ ID NO: 883030 - DNA, 15 bp, Homo sapiens
atttatcttggaaat

SEQ ID NO: 883031 - DNA, 15 bp, Homo sapiens
tttatcttggaaatt

SEQ ID NO: 883032 - DNA, 15 bp, Homo sapiens
ttatcttggaaattt

SEQ ID NO: 883033 - DNA, 15 bp, Homo sapiens
tatcttggaaattta

SEQ ID NO: 883034 - DNA, 15 bp, Homo sapiens
atcttggaaatttat

SEQ ID NO: 883035 - DNA, 15 bp, Homo sapiens
tcttggaaatttatt

SEQ ID NO: 883036 - DNA, 15 bp, Homo sapiens
cttggaaatttattt

SEQ ID NO: 883037 - DNA, 15 bp, Homo sapiens
ttggaaatttattta

SEQ ID NO: 883038 - DNA, 15 bp, Homo sapiens
tggaaatttatttat

SEQ ID NO: 883039 - DNA, 15 bp, Homo sapiens
ggaaatttatttata

SEQ ID NO: 883040 - DNA, 15 bp, Homo sapiens
gaaatttatttatag

SEQ ID NO: 883041 - DNA, 15 bp, Homo sapiens
aaatttatttataga

SEQ ID NO: 883042 - DNA, 15 bp, Homo sapiens
aatttatttatagaa

SEQ ID NO: 883043 - DNA, 15 bp, Homo sapiens
atttatttatagaat

SEQ ID NO: 883044 - DNA, 15 bp, Homo sapiens
tttatttatagaata

SEQ ID NO: 883045 - DNA, 15 bp, Homo sapiens
ttatttatagaataa

SEQ ID NO: 883046 - DNA, 15 bp, Homo sapiens
tatttatagaataaa

SEQ ID NO: 883047 - DNA, 15 bp, Homo sapiens
atttatagaataaat

SEQ ID NO: 883048 - DNA, 15 bp, Homo sapiens
tttatagaataaatc

SEQ ID NO: 883049 - DNA, 15 bp, Homo sapiens
ttatagaataaatca

SEQ ID NO: 883050 - DNA, 15 bp, Homo sapiens
tatagaataaatcat

SEQ ID NO: 883051 - DNA, 15 bp, Homo sapiens
atagaataaatcatt

SEQ ID NO: 883052 - DNA, 15 bp, Homo sapiens
tagaataaatcattc

SEQ ID NO: 883053 - DNA, 15 bp, Homo sapiens
agaataaatcattct

SEQ ID NO: 883054 - DNA, 15 bp, Homo sapiens
gaataaatcattctc

SEQ ID NO: 883055 - DNA, 15 bp, Homo sapiens
aataaatcattctcc

SEQ ID NO: 883056 - DNA, 15 bp, Homo sapiens
ataaatcattctcct

SEQ ID NO: 883057 - DNA, 15 bp, Homo sapiens
taaatcattctccta

SEQ ID NO: 883058 - DNA, 15 bp, Homo sapiens
aaatcattctcctag

SEQ ID NO: 883059 - DNA, 15 bp, Homo sapiens
aatcattctcctagg

SEQ ID NO: 883060 - DNA, 15 bp, Homo sapiens
atcattctcctaggc

SEQ ID NO: 883061 - DNA, 15 bp, Homo sapiens
tcattctcctaggca

SEQ ID NO: 883062 - DNA, 15 bp, Homo sapiens
cattctcctaggcat

SEQ ID NO: 883063 - DNA, 15 bp, Homo sapiens
attctcctaggcatg

SEQ ID NO: 883064 - DNA, 15 bp, Homo sapiens
ttctcctaggcatga

SEQ ID NO: 883065 - DNA, 15 bp, Homo sapiens
tctcctaggcatgat

SEQ ID NO: 883066 - DNA, 15 bp, Homo sapiens
ctcctaggcatgatt

SEQ ID NO: 883067 - DNA, 15 bp, Homo sapiens
tcctaggcatgattg

SEQ ID NO: 883068 - DNA, 15 bp, Homo sapiens
cctaggcatgattgc

SEQ ID NO: 883069 - DNA, 15 bp, Homo sapiens
ctaggcatgattgct

SEQ ID NO: 883070 - DNA, 15 bp, Homo sapiens
taggcatgattgcta

SEQ ID NO: 883071 - DNA, 15 bp, Homo sapiens
aggcatgattgctag

SEQ ID NO: 883072 - DNA, 15 bp, Homo sapiens
ggcatgattgctagg

SEQ ID NO: 883073 - DNA, 15 bp, Homo sapiens
gcatgattgctagga

SEQ ID NO: 883074 - DNA, 15 bp, Homo sapiens
catgattgctaggag

SEQ ID NO: 883075 - DNA, 15 bp, Homo sapiens
atgattgctaggaga

SEQ ID NO: 883076 - DNA, 15 bp, Homo sapiens
tgattgctaggagat

SEQ ID NO: 883077 - DNA, 15 bp, Homo sapiens
gattgctaggagatt

SEQ ID NO: 883078 - DNA, 15 bp, Homo sapiens
attgctaggagattt

SEQ ID NO: 883079 - DNA, 15 bp, Homo sapiens
ttgctaggagatttg

SEQ ID NO: 883080 - DNA, 15 bp, Homo sapiens
tgctaggagatttgg

SEQ ID NO: 883081 - DNA, 15 bp, Homo sapiens
gctaggagatttgga

SEQ ID NO: 883082 - DNA, 15 bp, Homo sapiens
ctaggagatttggaa

SEQ ID NO: 883083 - DNA, 15 bp, Homo sapiens
taggagatttggaaa

SEQ ID NO: 883084 - DNA, 15 bp, Homo sapiens
aggagatttggaaag

SEQ ID NO: 883085 - DNA, 15 bp, Homo sapiens
ggagatttggaaagc

SEQ ID NO: 883086 - DNA, 15 bp, Homo sapiens
gagatttggaaagca

SEQ ID NO: 883087 - DNA, 15 bp, Homo sapiens
agatttggaaagcat

SEQ ID NO: 883088 - DNA, 15 bp, Homo sapiens
gatttggaaagcata

SEQ ID NO: 883089 - DNA, 15 bp, Homo sapiens
atttggaaagcatat

SEQ ID NO: 883090 - DNA, 15 bp, Homo sapiens
tttggaaagcatata

SEQ ID NO: 883091 - DNA, 15 bp, Homo sapiens
ttggaaagcatataa

SEQ ID NO: 883092 - DNA, 15 bp, Homo sapiens
tggaaagcatataat

SEQ ID NO: 883093 - DNA, 15 bp, Homo sapiens
ggaaagcatataatg

SEQ ID NO: 883094 - DNA, 15 bp, Homo sapiens
gaaagcatataatgg

SEQ ID NO: 883095 - DNA, 15 bp, Homo sapiens
aaagcatataatggg

SEQ ID NO: 883096 - DNA, 15 bp, Homo sapiens
aagcatataatgggc

SEQ ID NO: 883097 - DNA, 15 bp, Homo sapiens
agcatataatgggca

SEQ ID NO: 883098 - DNA, 15 bp, Homo sapiens
gcatataatgggcat

SEQ ID NO: 883099 - DNA, 15 bp, Homo sapiens
catataatgggcatt

SEQ ID NO: 883100 - DNA, 15 bp, Homo sapiens
atataatgggcattg

SEQ ID NO: 883101 - DNA, 15 bp, Homo sapiens
tataatgggcattgt

SEQ ID NO: 883102 - DNA, 15 bp, Homo sapiens
ataatgggcattgtg

SEQ ID NO: 883103 - DNA, 15 bp, Homo sapiens
taatgggcattgtga

SEQ ID NO: 883104 - DNA, 15 bp, Homo sapiens
aatgggcattgtgaa

SEQ ID NO: 883105 - DNA, 15 bp, Homo sapiens
atgggcattgtgaaa

SEQ ID NO: 883106 - DNA, 15 bp, Homo sapiens
tgggcattgtgaaaa

SEQ ID NO: 883107 - DNA, 15 bp, Homo sapiens
gggcattgtgaaaat

SEQ ID NO: 883108 - DNA, 15 bp, Homo sapiens
ggcattgtgaaaatg

SEQ ID NO: 883109 - DNA, 15 bp, Homo sapiens
gcattgtgaaaatgc

SEQ ID NO: 883110 - DNA, 15 bp, Homo sapiens
cattgtgaaaatgca

SEQ ID NO: 883111 - DNA, 15 bp, Homo sapiens
attgtgaaaatgcaa

SEQ ID NO: 883112 - DNA, 15 bp, Homo sapiens
ttgtgaaaatgcaag

SEQ ID NO: 883113 - DNA, 15 bp, Homo sapiens
tgtgaaaatgcaaga

SEQ ID NO: 883114 - DNA, 15 bp, Homo sapiens
gtgaaaatgcaagat

SEQ ID NO: 883115 - DNA, 15 bp, Homo sapiens
tgaaaatgcaagata

SEQ ID NO: 883116 - DNA, 15 bp, Homo sapiens
gaaaatgcaagatac

SEQ ID NO: 883117 - DNA, 15 bp, Homo sapiens
aaaatgcaagataca

SEQ ID NO: 883118 - DNA, 15 bp, Homo sapiens
aaatgcaagatacat

SEQ ID NO: 883119 - DNA, 15 bp, Homo sapiens
aatgcaagatacatg

SEQ ID NO: 883120 - DNA, 15 bp, Homo sapiens
atgcaagatacatga

SEQ ID NO: 883121 - DNA, 15 bp, Homo sapiens
tgcaagatacatgag

SEQ ID NO: 883122 - DNA, 15 bp, Homo sapiens
gcaagatacatgaga

SEQ ID NO: 883123 - DNA, 15 bp, Homo sapiens
caagatacatgagaa

SEQ ID NO: 883124 - DNA, 15 bp, Homo sapiens
aagatacatgagaaa

SEQ ID NO: 883125 - DNA, 15 bp, Homo sapiens
agatacatgagaaat

SEQ ID NO: 883126 - DNA, 15 bp, Homo sapiens
gatacatgagaaatt

SEQ ID NO: 883127 - DNA, 15 bp, Homo sapiens
atacatgagaaattc

SEQ ID NO: 883128 - DNA, 15 bp, Homo sapiens
tacatgagaaattca

SEQ ID NO: 883129 - DNA, 15 bp, Homo sapiens
acatgagaaattcac

SEQ ID NO: 883130 - DNA, 15 bp, Homo sapiens
catgagaaattcaca

SEQ ID NO: 883131 - DNA, 15 bp, Homo sapiens
atgagaaattcacaa

SEQ ID NO: 883132 - DNA, 15 bp, Homo sapiens
tgagaaattcacaaa

SEQ ID NO: 883133 - DNA, 15 bp, Homo sapiens
gagaaattcacaaac

SEQ ID NO: 883134 - DNA, 15 bp, Homo sapiens
agaaattcacaaact

SEQ ID NO: 883135 - DNA, 15 bp, Homo sapiens
gaaattcacaaactt

SEQ ID NO: 883136 - DNA, 15 bp, Homo sapiens
aaattcacaaacttc

SEQ ID NO: 883137 - DNA, 15 bp, Homo sapiens
aattcacaaacttcc

SEQ ID NO: 883138 - DNA, 15 bp, Homo sapiens
attcacaaacttcca

SEQ ID NO: 883139 - DNA, 15 bp, Homo sapiens
ttcacaaacttccac

SEQ ID NO: 883140 - DNA, 15 bp, Homo sapiens
tcacaaacttccaca

SEQ ID NO: 883141 - DNA, 15 bp, Homo sapiens
cacaaacttccacat

SEQ ID NO: 883142 - DNA, 15 bp, Homo sapiens
acaaacttccacatg

SEQ ID NO: 883143 - DNA, 15 bp, Homo sapiens
caaacttccacatgg

SEQ ID NO: 883144 - DNA, 15 bp, Homo sapiens
aaacttccacatggt

SEQ ID NO: 883145 - DNA, 15 bp, Homo sapiens
aacttccacatggtt

SEQ ID NO: 883146 - DNA, 15 bp, Homo sapiens
acttccacatggttc

SEQ ID NO: 883147 - DNA, 15 bp, Homo sapiens
cttccacatggttcc

SEQ ID NO: 883148 - DNA, 15 bp, Homo sapiens
ttccacatggttccc

SEQ ID NO: 883149 - DNA, 15 bp, Homo sapiens
tccacatggttccca

SEQ ID NO: 883150 - DNA, 15 bp, Homo sapiens
ccacatggttcccag

SEQ ID NO: 883151 - DNA, 15 bp, Homo sapiens
cacatggttcccagc

SEQ ID NO: 883152 - DNA, 15 bp, Homo sapiens
acatggttcccagca

SEQ ID NO: 883153 - DNA, 15 bp, Homo sapiens
catggttcccagcag

SEQ ID NO: 883154 - DNA, 15 bp, Homo sapiens
atggttcccagcagg

SEQ ID NO: 883155 - DNA, 15 bp, Homo sapiens
tggttcccagcaggg

SEQ ID NO: 883156 - DNA, 15 bp, Homo sapiens
ggttcccagcaggga

SEQ ID NO: 883157 - DNA, 15 bp, Homo sapiens
gttcccagcagggag

SEQ ID NO: 883158 - DNA, 15 bp, Homo sapiens
ttcccagcagggagc

SEQ ID NO: 883159 - DNA, 15 bp, Homo sapiens
tcccagcagggagct

SEQ ID NO: 883160 - DNA, 15 bp, Homo sapiens
cccagcagggagcta

SEQ ID NO: 883161 - DNA, 15 bp, Homo sapiens
ccagcagggagctag

SEQ ID NO: 883162 - DNA, 15 bp, Homo sapiens
cagcagggagctagt

SEQ ID NO: 883163 - DNA, 15 bp, Homo sapiens
agcagggagctagtg

SEQ ID NO: 883164 - DNA, 15 bp, Homo sapiens
gcagggagctagtgg

SEQ ID NO: 883165 - DNA, 15 bp, Homo sapiens
cagggagctagtggg

SEQ ID NO: 883166 - DNA, 15 bp, Homo sapiens
agggagctagtggga

SEQ ID NO: 883167 - DNA, 15 bp, Homo sapiens
gggagctagtgggag

SEQ ID NO: 883168 - DNA, 15 bp, Homo sapiens
ggagctagtgggagc

SEQ ID NO: 883169 - DNA, 15 bp, Homo sapiens
gagctagtgggagct

SEQ ID NO: 883170 - DNA, 15 bp, Homo sapiens
agctagtgggagctg

SEQ ID NO: 883171 - DNA, 15 bp, Homo sapiens
gctagtgggagctgg

SEQ ID NO: 883172 - DNA, 15 bp, Homo sapiens
ctagtgggagctggg

SEQ ID NO: 883173 - DNA, 15 bp, Homo sapiens
tagtgggagctggga

SEQ ID NO: 883174 - DNA, 15 bp, Homo sapiens
agtgggagctgggaa

SEQ ID NO: 883175 - DNA, 15 bp, Homo sapiens
gtgggagctgggaaa

SEQ ID NO: 883176 - DNA, 15 bp, Homo sapiens
tgggagctgggaaaa

SEQ ID NO: 883177 - DNA, 15 bp, Homo sapiens
gggagctgggaaaat

SEQ ID NO: 883178 - DNA, 15 bp, Homo sapiens
ggagctgggaaaata

SEQ ID NO: 883179 - DNA, 15 bp, Homo sapiens
gagctgggaaaataa

SEQ ID NO: 883180 - DNA, 15 bp, Homo sapiens
agctgggaaaataaa

SEQ ID NO: 883181 - DNA, 15 bp, Homo sapiens
gctgggaaaataaac

SEQ ID NO: 883182 - DNA, 15 bp, Homo sapiens
ctgggaaaataaacc

SEQ ID NO: 883183 - DNA, 15 bp, Homo sapiens
tgggaaaataaacca

SEQ ID NO: 883184 - DNA, 15 bp, Homo sapiens
gggaaaataaaccag

SEQ ID NO: 883185 - DNA, 15 bp, Homo sapiens
ggaaaataaaccagg

SEQ ID NO: 883186 - DNA, 15 bp, Homo sapiens
gaaaataaaccaggg

SEQ ID NO: 883187 - DNA, 15 bp, Homo sapiens
aaaataaaccagggg

SEQ ID NO: 883188 - DNA, 15 bp, Homo sapiens
aaataaaccaggggg

SEQ ID NO: 883189 - DNA, 15 bp, Homo sapiens
aataaaccagggggt

SEQ ID NO: 883190 - DNA, 15 bp, Homo sapiens
ataaaccagggggtg

SEQ ID NO: 883191 - DNA, 15 bp, Homo sapiens
taaaccagggggtgt

SEQ ID NO: 883192 - DNA, 15 bp, Homo sapiens
aaaccagggggtgtc

SEQ ID NO: 883193 - DNA, 15 bp, Homo sapiens
aaccagggggtgtcc

SEQ ID NO: 883194 - DNA, 15 bp, Homo sapiens
accagggggtgtcca

SEQ ID NO: 883195 - DNA, 15 bp, Homo sapiens
ccagggggtgtccat

SEQ ID NO: 883196 - DNA, 15 bp, Homo sapiens
cagggggtgtccatt

SEQ ID NO: 883197 - DNA, 15 bp, Homo sapiens
agggggtgtccattt

SEQ ID NO: 883198 - DNA, 15 bp, Homo sapiens
gggggtgtccatttg

SEQ ID NO: 883199 - DNA, 15 bp, Homo sapiens
ggggtgtccatttga

SEQ ID NO: 883200 - DNA, 15 bp, Homo sapiens
gggtgtccatttgag

SEQ ID NO: 883201 - DNA, 15 bp, Homo sapiens
ggtgtccatttgaga

SEQ ID NO: 883202 - DNA, 15 bp, Homo sapiens
gtgtccatttgagag

SEQ ID NO: 883203 - DNA, 15 bp, Homo sapiens
tgtccatttgagagg

SEQ ID NO: 883204 - DNA, 15 bp, Homo sapiens
gtccatttgagaggt

SEQ ID NO: 883205 - DNA, 15 bp, Homo sapiens
tccatttgagaggtc

SEQ ID NO: 883206 - DNA, 15 bp, Homo sapiens
ccatttgagaggtca

SEQ ID NO: 883207 - DNA, 15 bp, Homo sapiens
catttgagaggtcaa

SEQ ID NO: 883208 - DNA, 15 bp, Homo sapiens
atttgagaggtcaag

SEQ ID NO: 883209 - DNA, 15 bp, Homo sapiens
tttgagaggtcaagg

SEQ ID NO: 883210 - DNA, 15 bp, Homo sapiens
ttgagaggtcaaggc

SEQ ID NO: 883211 - DNA, 15 bp, Homo sapiens
tgagaggtcaaggca

SEQ ID NO: 883212 - DNA, 15 bp, Homo sapiens
gagaggtcaaggcag

SEQ ID NO: 883213 - DNA, 15 bp, Homo sapiens
agaggtcaaggcagg

SEQ ID NO: 883214 - DNA, 15 bp, Homo sapiens
gaggtcaaggcaggt

SEQ ID NO: 883215 - DNA, 15 bp, Homo sapiens
aggtcaaggcaggtg

SEQ ID NO: 883216 - DNA, 15 bp, Homo sapiens
ggtcaaggcaggtgg

SEQ ID NO: 883217 - DNA, 15 bp, Homo sapiens
gtcaaggcaggtggg

SEQ ID NO: 883218 - DNA, 15 bp, Homo sapiens
tcaaggcaggtgggc

SEQ ID NO: 883219 - DNA, 15 bp, Homo sapiens
caaggcaggtgggca

SEQ ID NO: 883220 - DNA, 15 bp, Homo sapiens
aaggcaggtgggcac

SEQ ID NO: 883221 - DNA, 15 bp, Homo sapiens
aggcaggtgggcaca

SEQ ID NO: 883222 - DNA, 15 bp, Homo sapiens
ggcaggtgggcacaa

SEQ ID NO: 883223 - DNA, 15 bp, Homo sapiens
gcaggtgggcacaaa

SEQ ID NO: 883224 - DNA, 15 bp, Homo sapiens
caggtgggcacaaac

SEQ ID NO: 883225 - DNA, 15 bp, Homo sapiens
aggtgggcacaaaca

SEQ ID NO: 883226 - DNA, 15 bp, Homo sapiens
ggtgggcacaaacaa

SEQ ID NO: 883227 - DNA, 15 bp, Homo sapiens
gtgggcacaaacaat

SEQ ID NO: 883228 - DNA, 15 bp, Homo sapiens
tgggcacaaacaatt

SEQ ID NO: 883229 - DNA, 15 bp, Homo sapiens
gggcacaaacaattc

SEQ ID NO: 883230 - DNA, 15 bp, Homo sapiens
ggcacaaacaattct

SEQ ID NO: 883231 - DNA, 15 bp, Homo sapiens
gcacaaacaattctt

SEQ ID NO: 883232 - DNA, 15 bp, Homo sapiens
cacaaacaattcttt

SEQ ID NO: 883233 - DNA, 15 bp, Homo sapiens
acaaacaattctttg

SEQ ID NO: 883234 - DNA, 15 bp, Homo sapiens
caaacaattctttga

SEQ ID NO: 883235 - DNA, 15 bp, Homo sapiens
aaacaattctttgaa

SEQ ID NO: 883236 - DNA, 15 bp, Homo sapiens
aacaattctttgaat

SEQ ID NO: 883237 - DNA, 15 bp, Homo sapiens
acaattctttgaata

SEQ ID NO: 883238 - DNA, 15 bp, Homo sapiens
caattctttgaatac

SEQ ID NO: 883239 - DNA, 15 bp, Homo sapiens
aattctttgaatacc

SEQ ID NO: 883240 - DNA, 15 bp, Homo sapiens
attctttgaatacct

SEQ ID NO: 883241 - DNA, 15 bp, Homo sapiens
ttctttgaataccta

SEQ ID NO: 883242 - DNA, 15 bp, Homo sapiens
tctttgaatacctaa

SEQ ID NO: 883243 - DNA, 15 bp, Homo sapiens
ctttgaatacctaat

SEQ ID NO: 883244 - DNA, 15 bp, Homo sapiens
tttgaatacctaatc

SEQ ID NO: 883245 - DNA, 15 bp, Homo sapiens
ttgaatacctaatca

SEQ ID NO: 883246 - DNA, 15 bp, Homo sapiens
tgaatacctaatcag

SEQ ID NO: 883247 - DNA, 15 bp, Homo sapiens
gaatacctaatcagc

SEQ ID NO: 883248 - DNA, 15 bp, Homo sapiens
aatacctaatcagca

SEQ ID NO: 883249 - DNA, 15 bp, Homo sapiens
atacctaatcagcat

SEQ ID NO: 883250 - DNA, 15 bp, Homo sapiens
tacctaatcagcata

SEQ ID NO: 883251 - DNA, 15 bp, Homo sapiens
acctaatcagcatag

SEQ ID NO: 883252 - DNA, 15 bp, Homo sapiens
cctaatcagcatagg

SEQ ID NO: 883253 - DNA, 15 bp, Homo sapiens
ctaatcagcatagga

SEQ ID NO: 883254 - DNA, 15 bp, Homo sapiens
taatcagcataggaa

SEQ ID NO: 883255 - DNA, 15 bp, Homo sapiens
aatcagcataggaaa

SEQ ID NO: 883256 - DNA, 15 bp, Homo sapiens
atcagcataggaaat

SEQ ID NO: 883257 - DNA, 15 bp, Homo sapiens
tcagcataggaaatg

SEQ ID NO: 883258 - DNA, 15 bp, Homo sapiens
cagcataggaaatgg

SEQ ID NO: 883259 - DNA, 15 bp, Homo sapiens
agcataggaaatgga

SEQ ID NO: 883260 - DNA, 15 bp, Homo sapiens
gcataggaaatggaa

SEQ ID NO: 883261 - DNA, 15 bp, Homo sapiens
cataggaaatggaag

SEQ ID NO: 883262 - DNA, 15 bp, Homo sapiens
ataggaaatggaaga

SEQ ID NO: 883263 - DNA, 15 bp, Homo sapiens
taggaaatggaagaa

SEQ ID NO: 883264 - DNA, 15 bp, Homo sapiens
aggaaatggaagaat

SEQ ID NO: 883265 - DNA, 15 bp, Homo sapiens
ggaaatggaagaatt

SEQ ID NO: 883266 - DNA, 15 bp, Homo sapiens
gaaatggaagaattt

SEQ ID NO: 883267 - DNA, 15 bp, Homo sapiens
aaatggaagaatttt

SEQ ID NO: 883268 - DNA, 15 bp, Homo sapiens
aatggaagaattttg

SEQ ID NO: 883269 - DNA, 15 bp, Homo sapiens
atggaagaattttga

SEQ ID NO: 883270 - DNA, 15 bp, Homo sapiens
tggaagaattttgaa

SEQ ID NO: 883271 - DNA, 15 bp, Homo sapiens
ggaagaattttgaaa

SEQ ID NO: 883272 - DNA, 15 bp, Homo sapiens
gaagaattttgaaaa

SEQ ID NO: 883273 - DNA, 15 bp, Homo sapiens
aagaattttgaaaat

SEQ ID NO: 883274 - DNA, 15 bp, Homo sapiens
agaattttgaaaatc

SEQ ID NO: 883275 - DNA, 15 bp, Homo sapiens
gaattttgaaaatca

SEQ ID NO: 883276 - DNA, 15 bp, Homo sapiens
aattttgaaaatcaa

SEQ ID NO: 883277 - DNA, 15 bp, Homo sapiens
attttgaaaatcaat

SEQ ID NO: 883278 - DNA, 15 bp, Homo sapiens
ttttgaaaatcaatc

SEQ ID NO: 883279 - DNA, 15 bp, Homo sapiens
tttgaaaatcaatca

SEQ ID NO: 883280 - DNA, 15 bp, Homo sapiens
ttgaaaatcaatcag

SEQ ID NO: 883281 - DNA, 15 bp, Homo sapiens
tgaaaatcaatcagg

SEQ ID NO: 883282 - DNA, 15 bp, Homo sapiens
gaaaatcaatcaggc

SEQ ID NO: 883283 - DNA, 15 bp, Homo sapiens
aaaatcaatcaggcc

SEQ ID NO: 883284 - DNA, 15 bp, Homo sapiens
aaatcaatcaggcca

SEQ ID NO: 883285 - DNA, 15 bp, Homo sapiens
aatcaatcaggccat

SEQ ID NO: 883286 - DNA, 15 bp, Homo sapiens
atcaatcaggccatg

SEQ ID NO: 883287 - DNA, 15 bp, Homo sapiens
tcaatcaggccatgg

SEQ ID NO: 883288 - DNA, 15 bp, Homo sapiens
caatcaggccatggg

SEQ ID NO: 883289 - DNA, 15 bp, Homo sapiens
aatcaggccatgggc

SEQ ID NO: 883290 - DNA, 15 bp, Homo sapiens
atcaggccatgggcc

SEQ ID NO: 883291 - DNA, 15 bp, Homo sapiens
tcaggccatgggcct

SEQ ID NO: 883292 - DNA, 15 bp, Homo sapiens
caggccatgggccta

SEQ ID NO: 883293 - DNA, 15 bp, Homo sapiens
aggccatgggcctaa

SEQ ID NO: 883294 - DNA, 15 bp, Homo sapiens
ggccatgggcctaaa

SEQ ID NO: 883295 - DNA, 15 bp, Homo sapiens
gccatgggcctaaag

SEQ ID NO: 883296 - DNA, 15 bp, Homo sapiens
ccatgggcctaaagg

SEQ ID NO: 883297 - DNA, 15 bp, Homo sapiens
catgggcctaaaggc

SEQ ID NO: 883298 - DNA, 15 bp, Homo sapiens
atgggcctaaaggca

SEQ ID NO: 883299 - DNA, 15 bp, Homo sapiens
tgggcctaaaggcaa

SEQ ID NO: 883300 - DNA, 15 bp, Homo sapiens
gggcctaaaggcaag

SEQ ID NO: 883301 - DNA, 15 bp, Homo sapiens
ggcctaaaggcaagc

SEQ ID NO: 883302 - DNA, 15 bp, Homo sapiens
gcctaaaggcaagca

SEQ ID NO: 883303 - DNA, 15 bp, Homo sapiens
cctaaaggcaagcaa

SEQ ID NO: 883304 - DNA, 15 bp, Homo sapiens
ctaaaggcaagcaag

SEQ ID NO: 883305 - DNA, 15 bp, Homo sapiens
taaaggcaagcaagg

SEQ ID NO: 883306 - DNA, 15 bp, Homo sapiens
aaaggcaagcaagga

SEQ ID NO: 883307 - DNA, 15 bp, Homo sapiens
aaggcaagcaaggaa

SEQ ID NO: 883308 - DNA, 15 bp, Homo sapiens
aggcaagcaaggaag

SEQ ID NO: 883309 - DNA, 15 bp, Homo sapiens
ggcaagcaaggaagg

SEQ ID NO: 883310 - DNA, 15 bp, Homo sapiens
gcaagcaaggaaggt

SEQ ID NO: 883311 - DNA, 15 bp, Homo sapiens
caagcaaggaaggta

SEQ ID NO: 883312 - DNA, 15 bp, Homo sapiens
aagcaaggaaggtaa

SEQ ID NO: 883313 - DNA, 15 bp, Homo sapiens
agcaaggaaggtaaa

SEQ ID NO: 883314 - DNA, 15 bp, Homo sapiens
gcaaggaaggtaaat

SEQ ID NO: 883315 - DNA, 15 bp, Homo sapiens
caaggaaggtaaata

SEQ ID NO: 883316 - DNA, 15 bp, Homo sapiens
aaggaaggtaaataa

SEQ ID NO: 883317 - DNA, 15 bp, Homo sapiens
aggaaggtaaataat

SEQ ID NO: 883318 - DNA, 15 bp, Homo sapiens
ggaaggtaaataata

SEQ ID NO: 883319 - DNA, 15 bp, Homo sapiens
gaaggtaaataataa

SEQ ID NO: 883320 - DNA, 15 bp, Homo sapiens
aaggtaaataataat

SEQ ID NO: 883321 - DNA, 15 bp, Homo sapiens
aggtaaataataata

SEQ ID NO: 883322 - DNA, 15 bp, Homo sapiens
ggtaaataataataa

SEQ ID NO: 883323 - DNA, 15 bp, Homo sapiens
gtaaataataataac

SEQ ID NO: 883324 - DNA, 15 bp, Homo sapiens
taaataataataaca

SEQ ID NO: 883325 - DNA, 15 bp, Homo sapiens
aaataataataacat

SEQ ID NO: 883326 - DNA, 15 bp, Homo sapiens
aataataataacatc

SEQ ID NO: 883327 - DNA, 15 bp, Homo sapiens
ataataataacatca

SEQ ID NO: 883328 - DNA, 15 bp, Homo sapiens
taataataacatcag

SEQ ID NO: 883329 - DNA, 15 bp, Homo sapiens
aataataacatcagg

SEQ ID NO: 883330 - DNA, 15 bp, Homo sapiens
ataataacatcaggg

SEQ ID NO: 883331 - DNA, 15 bp, Homo sapiens
taataacatcagggt

SEQ ID NO: 883332 - DNA, 15 bp, Homo sapiens
aataacatcagggtt

SEQ ID NO: 883333 - DNA, 15 bp, Homo sapiens
ataacatcagggttg

SEQ ID NO: 883334 - DNA, 15 bp, Homo sapiens
taacatcagggttga

SEQ ID NO: 883335 - DNA, 15 bp, Homo sapiens
aacatcagggttgag

SEQ ID NO: 883336 - DNA, 15 bp, Homo sapiens
acatcagggttgagg

SEQ ID NO: 883337 - DNA, 15 bp, Homo sapiens
catcagggttgaggt

SEQ ID NO: 883338 - DNA, 15 bp, Homo sapiens
atcagggttgaggtt

SEQ ID NO: 883339 - DNA, 15 bp, Homo sapiens
tcagggttgaggttt

SEQ ID NO: 883340 - DNA, 15 bp, Homo sapiens
cagggttgaggtttc

SEQ ID NO: 883341 - DNA, 15 bp, Homo sapiens
agggttgaggtttca

SEQ ID NO: 883342 - DNA, 15 bp, Homo sapiens
gggttgaggtttcac

SEQ ID NO: 883343 - DNA, 15 bp, Homo sapiens
ggttgaggtttcaca

SEQ ID NO: 883344 - DNA, 15 bp, Homo sapiens
gttgaggtttcacac

SEQ ID NO: 883345 - DNA, 15 bp, Homo sapiens
ttgaggtttcacact

SEQ ID NO: 883346 - DNA, 15 bp, Homo sapiens
tgaggtttcacactt

SEQ ID NO: 883347 - DNA, 15 bp, Homo sapiens
gaggtttcacactta

SEQ ID NO: 883348 - DNA, 15 bp, Homo sapiens
aggtttcacacttaa

SEQ ID NO: 883349 - DNA, 15 bp, Homo sapiens
ggtttcacacttaat

SEQ ID NO: 883350 - DNA, 15 bp, Homo sapiens
gtttcacacttaatc

SEQ ID NO: 883351 - DNA, 15 bp, Homo sapiens
tttcacacttaatct

SEQ ID NO: 883352 - DNA, 15 bp, Homo sapiens
ttcacacttaatcta

SEQ ID NO: 883353 - DNA, 15 bp, Homo sapiens
tcacacttaatctat

SEQ ID NO: 883354 - DNA, 15 bp, Homo sapiens
cacacttaatctata

SEQ ID NO: 883355 - DNA, 15 bp, Homo sapiens
acacttaatctataa

SEQ ID NO: 883356 - DNA, 15 bp, Homo sapiens
cacttaatctataaa

SEQ ID NO: 883357 - DNA, 15 bp, Homo sapiens
acttaatctataaaa

SEQ ID NO: 883358 - DNA, 15 bp, Homo sapiens
cttaatctataaaac

SEQ ID NO: 883359 - DNA, 15 bp, Homo sapiens
ttaatctataaaact

SEQ ID NO: 883360 - DNA, 15 bp, Homo sapiens
taatctataaaacta

SEQ ID NO: 883361 - DNA, 15 bp, Homo sapiens
aatctataaaactac

SEQ ID NO: 883362 - DNA, 15 bp, Homo sapiens
atctataaaactact

SEQ ID NO: 883363 - DNA, 15 bp, Homo sapiens
tctataaaactactt

SEQ ID NO: 883364 - DNA, 15 bp, Homo sapiens
ctataaaactacttt

SEQ ID NO: 883365 - DNA, 15 bp, Homo sapiens
tataaaactactttt

SEQ ID NO: 883366 - DNA, 15 bp, Homo sapiens
ataaaactactttta

SEQ ID NO: 883367 - DNA, 15 bp, Homo sapiens
taaaactacttttaa

SEQ ID NO: 883368 - DNA, 15 bp, Homo sapiens
aaaactacttttaac

SEQ ID NO: 883369 - DNA, 15 bp, Homo sapiens
aaactacttttaaca

SEQ ID NO: 883370 - DNA, 15 bp, Homo sapiens
aactacttttaacag

SEQ ID NO: 883371 - DNA, 15 bp, Homo sapiens
actacttttaacagg

SEQ ID NO: 883372 - DNA, 15 bp, Homo sapiens
ctacttttaacaggc

SEQ ID NO: 883373 - DNA, 15 bp, Homo sapiens
tacttttaacaggcc

SEQ ID NO: 883374 - DNA, 15 bp, Homo sapiens
acttttaacaggccc

SEQ ID NO: 883375 - DNA, 15 bp, Homo sapiens
cttttaacaggcccc

SEQ ID NO: 883376 - DNA, 15 bp, Homo sapiens
ttttaacaggcccct

SEQ ID NO: 883377 - DNA, 15 bp, Homo sapiens
tttaacaggccccta

SEQ ID NO: 883378 - DNA, 15 bp, Homo sapiens
ttaacaggcccctag

SEQ ID NO: 883379 - DNA, 15 bp, Homo sapiens
taacaggcccctagg

SEQ ID NO: 883380 - DNA, 15 bp, Homo sapiens
aacaggcccctaggt

SEQ ID NO: 883381 - DNA, 15 bp, Homo sapiens
acaggcccctaggtg

SEQ ID NO: 883382 - DNA, 15 bp, Homo sapiens
caggcccctaggtga

SEQ ID NO: 883383 - DNA, 15 bp, Homo sapiens
aggcccctaggtgat

SEQ ID NO: 883384 - DNA, 15 bp, Homo sapiens
ggcccctaggtgatt

SEQ ID NO: 883385 - DNA, 15 bp, Homo sapiens
gcccctaggtgatta

SEQ ID NO: 883386 - DNA, 15 bp, Homo sapiens
cccctaggtgattat

SEQ ID NO: 883387 - DNA, 15 bp, Homo sapiens
ccctaggtgattata

SEQ ID NO: 883388 - DNA, 15 bp, Homo sapiens
cctaggtgattataa

SEQ ID NO: 883389 - DNA, 15 bp, Homo sapiens
ctaggtgattataaa

SEQ ID NO: 883390 - DNA, 15 bp, Homo sapiens
taggtgattataaat

SEQ ID NO: 883391 - DNA, 15 bp, Homo sapiens
aggtgattataaatt

SEQ ID NO: 883392 - DNA, 15 bp, Homo sapiens
ggtgattataaattc

SEQ ID NO: 883393 - DNA, 15 bp, Homo sapiens
gtgattataaattcg

SEQ ID NO: 883394 - DNA, 15 bp, Homo sapiens
tgattataaattcgt

SEQ ID NO: 883395 - DNA, 15 bp, Homo sapiens
gattataaattcgtg

SEQ ID NO: 883396 - DNA, 15 bp, Homo sapiens
attataaattcgtgg

SEQ ID NO: 883397 - DNA, 15 bp, Homo sapiens
ttataaattcgtggt

SEQ ID NO: 883398 - DNA, 15 bp, Homo sapiens
tataaattcgtggtg

SEQ ID NO: 883399 - DNA, 15 bp, Homo sapiens
ataaattcgtggtgg

SEQ ID NO: 883400 - DNA, 15 bp, Homo sapiens
taaattcgtggtggc

SEQ ID NO: 883401 - DNA, 15 bp, Homo sapiens
aaattcgtggtggct

SEQ ID NO: 883402 - DNA, 15 bp, Homo sapiens
aattcgtggtggctt

SEQ ID NO: 883403 - DNA, 15 bp, Homo sapiens
attcgtggtggcttt

SEQ ID NO: 883404 - DNA, 15 bp, Homo sapiens
ttcgtggtggctttc

SEQ ID NO: 883405 - DNA, 15 bp, Homo sapiens
tcgtggtggctttct

SEQ ID NO: 883406 - DNA, 15 bp, Homo sapiens
cgtggtggctttctc

SEQ ID NO: 883407 - DNA, 15 bp, Homo sapiens
gtggtggctttctct

SEQ ID NO: 883408 - DNA, 15 bp, Homo sapiens
tggtggctttctctt

SEQ ID NO: 883409 - DNA, 15 bp, Homo sapiens
ggtggctttctcttt

SEQ ID NO: 883410 - DNA, 15 bp, Homo sapiens
gtggctttctcttta

SEQ ID NO: 883411 - DNA, 15 bp, Homo sapiens
tggctttctctttat

SEQ ID NO: 883412 - DNA, 15 bp, Homo sapiens
ggctttctctttatt

SEQ ID NO: 883413 - DNA, 15 bp, Homo sapiens
gctttctctttattg

SEQ ID NO: 883414 - DNA, 15 bp, Homo sapiens
ctttctctttattgg

SEQ ID NO: 883415 - DNA, 15 bp, Homo sapiens
tttctctttattggg

SEQ ID NO: 883416 - DNA, 15 bp, Homo sapiens
ttctctttattggga

SEQ ID NO: 883417 - DNA, 15 bp, Homo sapiens
tctctttattgggat

SEQ ID NO: 883418 - DNA, 15 bp, Homo sapiens
ctctttattgggatt

SEQ ID NO: 883419 - DNA, 15 bp, Homo sapiens
tctttattgggatta

SEQ ID NO: 883420 - DNA, 15 bp, Homo sapiens
ctttattgggattat

SEQ ID NO: 883421 - DNA, 15 bp, Homo sapiens
tttattgggattata

SEQ ID NO: 883422 - DNA, 15 bp, Homo sapiens
ttattgggattatat

SEQ ID NO: 883423 - DNA, 15 bp, Homo sapiens
tattgggattatatg

SEQ ID NO: 883424 - DNA, 15 bp, Homo sapiens
attgggattatatgg

SEQ ID NO: 883425 - DNA, 15 bp, Homo sapiens
ttgggattatatggg

SEQ ID NO: 883426 - DNA, 15 bp, Homo sapiens
tgggattatatgggt

SEQ ID NO: 883427 - DNA, 15 bp, Homo sapiens
gggattatatgggtc

SEQ ID NO: 883428 - DNA, 15 bp, Homo sapiens
ggattatatgggtct

SEQ ID NO: 883429 - DNA, 15 bp, Homo sapiens
gattatatgggtcta

SEQ ID NO: 883430 - DNA, 15 bp, Homo sapiens
attatatgggtctat

SEQ ID NO: 883431 - DNA, 15 bp, Homo sapiens
ttatatgggtctatt

SEQ ID NO: 883432 - DNA, 15 bp, Homo sapiens
tatatgggtctattc

SEQ ID NO: 883433 - DNA, 15 bp, Homo sapiens
atatgggtctattcc

SEQ ID NO: 883434 - DNA, 15 bp, Homo sapiens
tatgggtctattcca

SEQ ID NO: 883435 - DNA, 15 bp, Homo sapiens
atgggtctattccat

SEQ ID NO: 883436 - DNA, 15 bp, Homo sapiens
tgggtctattccata

SEQ ID NO: 883437 - DNA, 15 bp, Homo sapiens
gggtctattccatat

SEQ ID NO: 883438 - DNA, 15 bp, Homo sapiens
ggtctattccatatt

SEQ ID NO: 883439 - DNA, 15 bp, Homo sapiens
gtctattccatattt

SEQ ID NO: 883440 - DNA, 15 bp, Homo sapiens
tctattccatatttc

SEQ ID NO: 883441 - DNA, 15 bp, Homo sapiens
ctattccatatttcc

SEQ ID NO: 883442 - DNA, 15 bp, Homo sapiens
tattccatatttcca

SEQ ID NO: 883443 - DNA, 15 bp, Homo sapiens
attccatatttccaa

SEQ ID NO: 883444 - DNA, 15 bp, Homo sapiens
ttccatatttccaaa

SEQ ID NO: 883445 - DNA, 15 bp, Homo sapiens
tccatatttccaaag

SEQ ID NO: 883446 - DNA, 15 bp, Homo sapiens
ccatatttccaaagg

SEQ ID NO: 883447 - DNA, 15 bp, Homo sapiens
catatttccaaagga

SEQ ID NO: 883448 - DNA, 15 bp, Homo sapiens
atatttccaaaggaa

SEQ ID NO: 883449 - DNA, 15 bp, Homo sapiens
tatttccaaaggaag

SEQ ID NO: 883450 - DNA, 15 bp, Homo sapiens
atttccaaaggaagc

SEQ ID NO: 883451 - DNA, 15 bp, Homo sapiens
tttccaaaggaagcc

SEQ ID NO: 883452 - DNA, 15 bp, Homo sapiens
ttccaaaggaagccc

SEQ ID NO: 883453 - DNA, 15 bp, Homo sapiens
tccaaaggaagccct

SEQ ID NO: 883454 - DNA, 15 bp, Homo sapiens
ccaaaggaagccctt

SEQ ID NO: 883455 - DNA, 15 bp, Homo sapiens
caaaggaagcccttc

SEQ ID NO: 883456 - DNA, 15 bp, Homo sapiens
aaaggaagcccttcc

SEQ ID NO: 883457 - DNA, 15 bp, Homo sapiens
aaggaagcccttcct

SEQ ID NO: 883458 - DNA, 15 bp, Homo sapiens
aggaagcccttccta

SEQ ID NO: 883459 - DNA, 15 bp, Homo sapiens
ggaagcccttcctat

SEQ ID NO: 883460 - DNA, 15 bp, Homo sapiens
gaagcccttcctatt

SEQ ID NO: 883461 - DNA, 15 bp, Homo sapiens
aagcccttcctatta

SEQ ID NO: 883462 - DNA, 15 bp, Homo sapiens
agcccttcctattat

SEQ ID NO: 883463 - DNA, 15 bp, Homo sapiens
gcccttcctattatg

SEQ ID NO: 883464 - DNA, 15 bp, Homo sapiens
cccttcctattatgc

SEQ ID NO: 883465 - DNA, 15 bp, Homo sapiens
ccttcctattatgca

SEQ ID NO: 883466 - DNA, 15 bp, Homo sapiens
cttcctattatgcag

SEQ ID NO: 883467 - DNA, 15 bp, Homo sapiens
ttcctattatgcagg

SEQ ID NO: 883468 - DNA, 15 bp, Homo sapiens
tcctattatgcaggt

SEQ ID NO: 883469 - DNA, 15 bp, Homo sapiens
cctattatgcaggtg

SEQ ID NO: 883470 - DNA, 15 bp, Homo sapiens
ctattatgcaggtgt

SEQ ID NO: 883471 - DNA, 15 bp, Homo sapiens
tattatgcaggtgtg

SEQ ID NO: 883472 - DNA, 15 bp, Homo sapiens
attatgcaggtgtgt

SEQ ID NO: 883473 - DNA, 15 bp, Homo sapiens
ttatgcaggtgtgtc

SEQ ID NO: 883474 - DNA, 15 bp, Homo sapiens
tatgcaggtgtgtct

SEQ ID NO: 883475 - DNA, 15 bp, Homo sapiens
atgcaggtgtgtctc

SEQ ID NO: 883476 - DNA, 15 bp, Homo sapiens
tgcaggtgtgtctcc

SEQ ID NO: 883477 - DNA, 15 bp, Homo sapiens
gcaggtgtgtctcct

SEQ ID NO: 883478 - DNA, 15 bp, Homo sapiens
caggtgtgtctcctt

SEQ ID NO: 883479 - DNA, 15 bp, Homo sapiens
aggtgtgtctcctta

SEQ ID NO: 883480 - DNA, 15 bp, Homo sapiens
ggtgtgtctccttat

SEQ ID NO: 883481 - DNA, 15 bp, Homo sapiens
gtgtgtctccttatt

SEQ ID NO: 883482 - DNA, 15 bp, Homo sapiens
tgtgtctccttattt

SEQ ID NO: 883483 - DNA, 15 bp, Homo sapiens
gtgtctccttattta

SEQ ID NO: 883484 - DNA, 15 bp, Homo sapiens
tgtctccttatttat

SEQ ID NO: 883485 - DNA, 15 bp, Homo sapiens
gtctccttatttatt

SEQ ID NO: 883486 - DNA, 15 bp, Homo sapiens
tctccttatttattt

SEQ ID NO: 883487 - DNA, 15 bp, Homo sapiens
ctccttatttattta

SEQ ID NO: 883488 - DNA, 15 bp, Homo sapiens
tccttatttatttat

SEQ ID NO: 883489 - DNA, 15 bp, Homo sapiens
ccttatttatttatt

SEQ ID NO: 883490 - DNA, 15 bp, Homo sapiens
ttatttatttatttg

SEQ ID NO: 883491 - DNA, 15 bp, Homo sapiens
tatttatttatttgc

SEQ ID NO: 883492 - DNA, 15 bp, Homo sapiens
atttatttatttgca

SEQ ID NO: 883493 - DNA, 15 bp, Homo sapiens
tttatttatttgcat

SEQ ID NO: 883494 - DNA, 15 bp, Homo sapiens
ttatttatttgcatt

SEQ ID NO: 883495 - DNA, 15 bp, Homo sapiens
tatttatttgcattt

SEQ ID NO: 883496 - DNA, 15 bp, Homo sapiens
atttatttgcattta

SEQ ID NO: 883497 - DNA, 15 bp, Homo sapiens
tttatttgcatttaa

SEQ ID NO: 883498 - DNA, 15 bp, Homo sapiens
ttatttgcatttaag

SEQ ID NO: 883499 - DNA, 15 bp, Homo sapiens
tatttgcatttaaga

SEQ ID NO: 883500 - DNA, 15 bp, Homo sapiens
atttgcatttaagat

SEQ ID NO: 883501 - DNA, 15 bp, Homo sapiens
tttgcatttaagata

SEQ ID NO: 883502 - DNA, 15 bp, Homo sapiens
ttgcatttaagatat

SEQ ID NO: 883503 - DNA, 15 bp, Homo sapiens
tgcatttaagatatt

SEQ ID NO: 883504 - DNA, 15 bp, Homo sapiens
gcatttaagatattg

SEQ ID NO: 883505 - DNA, 15 bp, Homo sapiens
catttaagatattga

SEQ ID NO: 883506 - DNA, 15 bp, Homo sapiens
atttaagatattgaa

SEQ ID NO: 883507 - DNA, 15 bp, Homo sapiens
tttaagatattgaaa

SEQ ID NO: 883508 - DNA, 15 bp, Homo sapiens
ttaagatattgaaac

SEQ ID NO: 883509 - DNA, 15 bp, Homo sapiens
taagatattgaaact

SEQ ID NO: 883510 - DNA, 15 bp, Homo sapiens
aagatattgaaactt

SEQ ID NO: 883511 - DNA, 15 bp, Homo sapiens
agatattgaaacttt

SEQ ID NO: 883512 - DNA, 15 bp, Homo sapiens
gatattgaaactttt

SEQ ID NO: 883513 - DNA, 15 bp, Homo sapiens
atattgaaacttttt

SEQ ID NO: 883514 - DNA, 15 bp, Homo sapiens
tattgaaactttttt

SEQ ID NO: 883515 - DNA, 15 bp, Homo sapiens
attgaaactttttta

SEQ ID NO: 883516 - DNA, 15 bp, Homo sapiens
ttgaaacttttttaa

SEQ ID NO: 883517 - DNA, 15 bp, Homo sapiens
tgaaacttttttaaa

SEQ ID NO: 883518 - DNA, 15 bp, Homo sapiens
gaaacttttttaaaa

SEQ ID NO: 883519 - DNA, 15 bp, Homo sapiens
aaacttttttaaaaa

SEQ ID NO: 883520 - DNA, 15 bp, Homo sapiens
aacttttttaaaaaa

SEQ ID NO: 883521 - DNA, 15 bp, Homo sapiens
acttttttaaaaaaa

SEQ ID NO: 883522 - DNA, 15 bp, Homo sapiens
cttttttaaaaaaaa

SEQ ID NO: 883523 - DNA, 15 bp, Homo sapiens
ttttttaaaaaaaac

SEQ ID NO: 883524 - DNA, 15 bp, Homo sapiens
tttttaaaaaaaact

SEQ ID NO: 883525 - DNA, 15 bp, Homo sapiens
ttttaaaaaaaactc

SEQ ID NO: 883526 - DNA, 15 bp, Homo sapiens
tttaaaaaaaactca

SEQ ID NO: 883527 - DNA, 15 bp, Homo sapiens
ttaaaaaaaactcat

SEQ ID NO: 883528 - DNA, 15 bp, Homo sapiens
taaaaaaaactcatt

SEQ ID NO: 883529 - DNA, 15 bp, Homo sapiens
aaaaaaaactcattt

SEQ ID NO: 883530 - DNA, 15 bp, Homo sapiens
aaaaaaactcatttc

SEQ ID NO: 883531 - DNA, 15 bp, Homo sapiens
aaaaaactcatttct

SEQ ID NO: 883532 - DNA, 15 bp, Homo sapiens
aaaaactcatttctg

SEQ ID NO: 883533 - DNA, 15 bp, Homo sapiens
aaaactcatttctgt

SEQ ID NO: 883534 - DNA, 15 bp, Homo sapiens
aaactcatttctgtg

SEQ ID NO: 883535 - DNA, 15 bp, Homo sapiens
aactcatttctgtga

SEQ ID NO: 883536 - DNA, 15 bp, Homo sapiens
actcatttctgtgag

SEQ ID NO: 883537 - DNA, 15 bp, Homo sapiens
ctcatttctgtgagc

SEQ ID NO: 883538 - DNA, 15 bp, Homo sapiens
tcatttctgtgagca

SEQ ID NO: 883539 - DNA, 15 bp, Homo sapiens
catttctgtgagcat

SEQ ID NO: 883540 - DNA, 15 bp, Homo sapiens
atttctgtgagcatt

SEQ ID NO: 883541 - DNA, 15 bp, Homo sapiens
tttctgtgagcatta

SEQ ID NO: 883542 - DNA, 15 bp, Homo sapiens
ttctgtgagcattaa

SEQ ID NO: 883543 - DNA, 15 bp, Homo sapiens
tctgtgagcattaag

SEQ ID NO: 883544 - DNA, 15 bp, Homo sapiens
ctgtgagcattaagt

SEQ ID NO: 883545 - DNA, 15 bp, Homo sapiens
tgtgagcattaagta

SEQ ID NO: 883546 - DNA, 15 bp, Homo sapiens
gtgagcattaagtat

SEQ ID NO: 883547 - DNA, 15 bp, Homo sapiens
tgagcattaagtata

SEQ ID NO: 883548 - DNA, 15 bp, Homo sapiens
gagcattaagtatat

SEQ ID NO: 883549 - DNA, 15 bp, Homo sapiens
agcattaagtatata

SEQ ID NO: 883550 - DNA, 15 bp, Homo sapiens
gcattaagtatatac

SEQ ID NO: 883551 - DNA, 15 bp, Homo sapiens
cattaagtatatacc

SEQ ID NO: 883552 - DNA, 15 bp, Homo sapiens
attaagtatatacca

SEQ ID NO: 883553 - DNA, 15 bp, Homo sapiens
ttaagtatataccat

SEQ ID NO: 883554 - DNA, 15 bp, Homo sapiens
taagtatataccatg

SEQ ID NO: 883555 - DNA, 15 bp, Homo sapiens
aagtatataccatgc

SEQ ID NO: 883556 - DNA, 15 bp, Homo sapiens
agtatataccatgca

SEQ ID NO: 883557 - DNA, 15 bp, Homo sapiens
gtatataccatgcaa

SEQ ID NO: 883558 - DNA, 15 bp, Homo sapiens
tatataccatgcaag

SEQ ID NO: 883559 - DNA, 15 bp, Homo sapiens
atataccatgcaagg

SEQ ID NO: 883560 - DNA, 15 bp, Homo sapiens
tataccatgcaagga

SEQ ID NO: 883561 - DNA, 15 bp, Homo sapiens
ataccatgcaaggaa

SEQ ID NO: 883562 - DNA, 15 bp, Homo sapiens
taccatgcaaggaag

SEQ ID NO: 883563 - DNA, 15 bp, Homo sapiens
accatgcaaggaagc

SEQ ID NO: 883564 - DNA, 15 bp, Homo sapiens
ccatgcaaggaagca

SEQ ID NO: 883565 - DNA, 15 bp, Homo sapiens
catgcaaggaagcaa

SEQ ID NO: 883566 - DNA, 15 bp, Homo sapiens
atgcaaggaagcaat

SEQ ID NO: 883567 - DNA, 15 bp, Homo sapiens
tgcaaggaagcaatt

SEQ ID NO: 883568 - DNA, 15 bp, Homo sapiens
gcaaggaagcaattg

SEQ ID NO: 883569 - DNA, 15 bp, Homo sapiens
caaggaagcaattgt

SEQ ID NO: 883570 - DNA, 15 bp, Homo sapiens
aaggaagcaattgtc

SEQ ID NO: 883571 - DNA, 15 bp, Homo sapiens
aggaagcaattgtct

SEQ ID NO: 883572 - DNA, 15 bp, Homo sapiens
ggaagcaattgtctc

SEQ ID NO: 883573 - DNA, 15 bp, Homo sapiens
gaagcaattgtctct

SEQ ID NO: 883574 - DNA, 15 bp, Homo sapiens
aagcaattgtctcta

SEQ ID NO: 883575 - DNA, 15 bp, Homo sapiens
agcaattgtctctat

SEQ ID NO: 883576 - DNA, 15 bp, Homo sapiens
gcaattgtctctatc

SEQ ID NO: 883577 - DNA, 15 bp, Homo sapiens
caattgtctctatct

SEQ ID NO: 883578 - DNA, 15 bp, Homo sapiens
aattgtctctatctt

SEQ ID NO: 883579 - DNA, 15 bp, Homo sapiens
attgtctctatctta

SEQ ID NO: 883580 - DNA, 15 bp, Homo sapiens
ttgtctctatcttat

SEQ ID NO: 883581 - DNA, 15 bp, Homo sapiens
tgtctctatcttatg

SEQ ID NO: 883582 - DNA, 15 bp, Homo sapiens
gtctctatcttatga

SEQ ID NO: 883583 - DNA, 15 bp, Homo sapiens
tctctatcttatgaa

SEQ ID NO: 883584 - DNA, 15 bp, Homo sapiens
ctctatcttatgaaa

SEQ ID NO: 883585 - DNA, 15 bp, Homo sapiens
tctatcttatgaaat

SEQ ID NO: 883586 - DNA, 15 bp, Homo sapiens
ctatcttatgaaata

SEQ ID NO: 883587 - DNA, 15 bp, Homo sapiens
tatcttatgaaatat

SEQ ID NO: 883588 - DNA, 15 bp, Homo sapiens
atcttatgaaatatt

SEQ ID NO: 883589 - DNA, 15 bp, Homo sapiens
tcttatgaaatatta

SEQ ID NO: 883590 - DNA, 15 bp, Homo sapiens
cttatgaaatattaa

SEQ ID NO: 883591 - DNA, 15 bp, Homo sapiens
ttatgaaatattaaa

SEQ ID NO: 883592 - DNA, 15 bp, Homo sapiens
tatgaaatattaaat

SEQ ID NO: 883593 - DNA, 15 bp, Homo sapiens
atgaaatattaaatc

SEQ ID NO: 883594 - DNA, 15 bp, Homo sapiens
tgaaatattaaatca

SEQ ID NO: 883595 - DNA, 15 bp, Homo sapiens
gaaatattaaatcaa

SEQ ID NO: 883596 - DNA, 15 bp, Homo sapiens
aaatattaaatcaaa

SEQ ID NO: 883597 - DNA, 15 bp, Homo sapiens
aatattaaatcaaaa

SEQ ID NO: 883598 - DNA, 15 bp, Homo sapiens
atattaaatcaaaat

SEQ ID NO: 883599 - DNA, 15 bp, Homo sapiens
tattaaatcaaaatg

SEQ ID NO: 883600 - DNA, 15 bp, Homo sapiens
attaaatcaaaatgc

SEQ ID NO: 883601 - DNA, 15 bp, Homo sapiens
ttaaatcaaaatgct

SEQ ID NO: 883602 - DNA, 15 bp, Homo sapiens
taaatcaaaatgctt

SEQ ID NO: 883603 - DNA, 15 bp, Homo sapiens
aaatcaaaatgcttc

SEQ ID NO: 883604 - DNA, 15 bp, Homo sapiens
aatcaaaatgcttcc

SEQ ID NO: 883605 - DNA, 15 bp, Homo sapiens
atcaaaatgcttcct

SEQ ID NO: 883606 - DNA, 15 bp, Homo sapiens
tcaaaatgcttcctg

SEQ ID NO: 883607 - DNA, 15 bp, Homo sapiens
caaaatgcttcctgt

SEQ ID NO: 883608 - DNA, 15 bp, Homo sapiens
aaaatgcttcctgtt

SEQ ID NO: 883609 - DNA, 15 bp, Homo sapiens
aaatgcttcctgttc

SEQ ID NO: 883610 - DNA, 15 bp, Homo sapiens
aatgcttcctgttcc

SEQ ID NO: 883611 - DNA, 15 bp, Homo sapiens
atgcttcctgttccc

SEQ ID NO: 883612 - DNA, 15 bp, Homo sapiens
tgcttcctgttccct

SEQ ID NO: 883613 - DNA, 15 bp, Homo sapiens
gcttcctgttccctc

SEQ ID NO: 883614 - DNA, 15 bp, Homo sapiens
cttcctgttccctca

SEQ ID NO: 883615 - DNA, 15 bp, Homo sapiens
ttcctgttccctcat

SEQ ID NO: 883616 - DNA, 15 bp, Homo sapiens
tcctgttccctcatg

SEQ ID NO: 883617 - DNA, 15 bp, Homo sapiens
cctgttccctcatgt

SEQ ID NO: 883618 - DNA, 15 bp, Homo sapiens
ctgttccctcatgtc

SEQ ID NO: 883619 - DNA, 15 bp, Homo sapiens
tgttccctcatgtcc

SEQ ID NO: 883620 - DNA, 15 bp, Homo sapiens
gttccctcatgtccc

SEQ ID NO: 883621 - DNA, 15 bp, Homo sapiens
ttccctcatgtccca

SEQ ID NO: 883622 - DNA, 15 bp, Homo sapiens
tccctcatgtcccag

SEQ ID NO: 883623 - DNA, 15 bp, Homo sapiens
ccctcatgtcccaga

SEQ ID NO: 883624 - DNA, 15 bp, Homo sapiens
cctcatgtcccagag

SEQ ID NO: 883625 - DNA, 15 bp, Homo sapiens
ctcatgtcccagaga

SEQ ID NO: 883626 - DNA, 15 bp, Homo sapiens
tcatgtcccagagat

SEQ ID NO: 883627 - DNA, 15 bp, Homo sapiens
catgtcccagagata

SEQ ID NO: 883628 - DNA, 15 bp, Homo sapiens
atgtcccagagataa

SEQ ID NO: 883629 - DNA, 15 bp, Homo sapiens
tgtcccagagataaa

SEQ ID NO: 883630 - DNA, 15 bp, Homo sapiens
gtcccagagataaat

SEQ ID NO: 883631 - DNA, 15 bp, Homo sapiens
tcccagagataaata

SEQ ID NO: 883632 - DNA, 15 bp, Homo sapiens
cccagagataaatac

SEQ ID NO: 883633 - DNA, 15 bp, Homo sapiens
ccagagataaataca

SEQ ID NO: 883634 - DNA, 15 bp, Homo sapiens
cagagataaatacag

SEQ ID NO: 883635 - DNA, 15 bp, Homo sapiens
agagataaatacagc

SEQ ID NO: 883636 - DNA, 15 bp, Homo sapiens
gagataaatacagca

SEQ ID NO: 883637 - DNA, 15 bp, Homo sapiens
agataaatacagcag

SEQ ID NO: 883638 - DNA, 15 bp, Homo sapiens
gataaatacagcagt

SEQ ID NO: 883639 - DNA, 15 bp, Homo sapiens
ataaatacagcagta

SEQ ID NO: 883640 - DNA, 15 bp, Homo sapiens
taaatacagcagtac

SEQ ID NO: 883641 - DNA, 15 bp, Homo sapiens
aaatacagcagtact

SEQ ID NO: 883642 - DNA, 15 bp, Homo sapiens
aatacagcagtactt

SEQ ID NO: 883643 - DNA, 15 bp, Homo sapiens
atacagcagtacttt

SEQ ID NO: 883644 - DNA, 15 bp, Homo sapiens
tacagcagtactttg

SEQ ID NO: 883645 - DNA, 15 bp, Homo sapiens
acagcagtactttga

SEQ ID NO: 883646 - DNA, 15 bp, Homo sapiens
cagcagtactttgaa

SEQ ID NO: 883647 - DNA, 15 bp, Homo sapiens
agcagtactttgaag

SEQ ID NO: 883648 - DNA, 15 bp, Homo sapiens
gcagtactttgaagc

SEQ ID NO: 883649 - DNA, 15 bp, Homo sapiens
cagtactttgaagcc

SEQ ID NO: 883650 - DNA, 15 bp, Homo sapiens
agtactttgaagccc

SEQ ID NO: 883651 - DNA, 15 bp, Homo sapiens
gtactttgaagcccc

SEQ ID NO: 883652 - DNA, 15 bp, Homo sapiens
tactttgaagcccct

SEQ ID NO: 883653 - DNA, 15 bp, Homo sapiens
actttgaagcccctc

SEQ ID NO: 883654 - DNA, 15 bp, Homo sapiens
ctttgaagcccctct

SEQ ID NO: 883655 - DNA, 15 bp, Homo sapiens
tttgaagcccctctt

SEQ ID NO: 883656 - DNA, 15 bp, Homo sapiens
ttgaagcccctcttg

SEQ ID NO: 883657 - DNA, 15 bp, Homo sapiens
tgaagcccctcttgg

SEQ ID NO: 883658 - DNA, 15 bp, Homo sapiens
gaagcccctcttgga

SEQ ID NO: 883659 - DNA, 15 bp, Homo sapiens
aagcccctcttggag

SEQ ID NO: 883660 - DNA, 15 bp, Homo sapiens
agcccctcttggagc

SEQ ID NO: 883661 - DNA, 15 bp, Homo sapiens
gcccctcttggagct

SEQ ID NO: 883662 - DNA, 15 bp, Homo sapiens
cccctcttggagctg

SEQ ID NO: 883663 - DNA, 15 bp, Homo sapiens
ccctcttggagctgt

SEQ ID NO: 883664 - DNA, 15 bp, Homo sapiens
cctcttggagctgtt

SEQ ID NO: 883665 - DNA, 15 bp, Homo sapiens
ctcttggagctgttt

SEQ ID NO: 883666 - DNA, 15 bp, Homo sapiens
tcttggagctgtttt

SEQ ID NO: 883667 - DNA, 15 bp, Homo sapiens
cttggagctgttttg

SEQ ID NO: 883668 - DNA, 15 bp, Homo sapiens
ttggagctgttttgc

SEQ ID NO: 883669 - DNA, 15 bp, Homo sapiens
tggagctgttttgcc

SEQ ID NO: 883670 - DNA, 15 bp, Homo sapiens
ggagctgttttgcct

SEQ ID NO: 883671 - DNA, 15 bp, Homo sapiens
gagctgttttgcctg

SEQ ID NO: 883672 - DNA, 15 bp, Homo sapiens
agctgttttgcctgc

SEQ ID NO: 883673 - DNA, 15 bp, Homo sapiens
gctgttttgcctgca

SEQ ID NO: 883674 - DNA, 15 bp, Homo sapiens
ctgttttgcctgcaa

SEQ ID NO: 883675 - DNA, 15 bp, Homo sapiens
tgttttgcctgcaaa

SEQ ID NO: 883676 - DNA, 15 bp, Homo sapiens
gttttgcctgcaaat

SEQ ID NO: 883677 - DNA, 15 bp, Homo sapiens
ttttgcctgcaaatt

SEQ ID NO: 883678 - DNA, 15 bp, Homo sapiens
tttgcctgcaaattt

SEQ ID NO: 883679 - DNA, 15 bp, Homo sapiens
ttgcctgcaaattta

SEQ ID NO: 883680 - DNA, 15 bp, Homo sapiens
tgcctgcaaatttat

SEQ ID NO: 883681 - DNA, 15 bp, Homo sapiens
gcctgcaaatttatt

SEQ ID NO: 883682 - DNA, 15 bp, Homo sapiens
cctgcaaatttattg

SEQ ID NO: 883683 - DNA, 15 bp, Homo sapiens
ctgcaaatttattgt

SEQ ID NO: 883684 - DNA, 15 bp, Homo sapiens
tgcaaatttattgtt

SEQ ID NO: 883685 - DNA, 15 bp, Homo sapiens
gcaaatttattgttt

SEQ ID NO: 883686 - DNA, 15 bp, Homo sapiens
caaatttattgtttt

SEQ ID NO: 883687 - DNA, 15 bp, Homo sapiens
aaatttattgttttg

SEQ ID NO: 883688 - DNA, 15 bp, Homo sapiens
aatttattgttttgt

SEQ ID NO: 883689 - DNA, 15 bp, Homo sapiens
atttattgttttgtc

SEQ ID NO: 883690 - DNA, 15 bp, Homo sapiens
tttattgttttgtct

SEQ ID NO: 883691 - DNA, 15 bp, Homo sapiens
ttattgttttgtctc

SEQ ID NO: 883692 - DNA, 15 bp, Homo sapiens
tattgttttgtctcc

SEQ ID NO: 883693 - DNA, 15 bp, Homo sapiens
attgttttgtctcca

SEQ ID NO: 883694 - DNA, 15 bp, Homo sapiens
ttgttttgtctccat

SEQ ID NO: 883695 - DNA, 15 bp, Homo sapiens
tgttttgtctccatt

SEQ ID NO: 883696 - DNA, 15 bp, Homo sapiens
gttttgtctccattt

SEQ ID NO: 883697 - DNA, 15 bp, Homo sapiens
ttttgtctccatttt

SEQ ID NO: 883698 - DNA, 15 bp, Homo sapiens
tttgtctccattttc

SEQ ID NO: 883699 - DNA, 15 bp, Homo sapiens
ttgtctccattttca

SEQ ID NO: 883700 - DNA, 15 bp, Homo sapiens
tgtctccattttcag

SEQ ID NO: 883701 - DNA, 15 bp, Homo sapiens
gtctccattttcaga

SEQ ID NO: 883702 - DNA, 15 bp, Homo sapiens
tctccattttcagaa

SEQ ID NO: 883703 - DNA, 15 bp, Homo sapiens
ctccattttcagaaa

SEQ ID NO: 883704 - DNA, 15 bp, Homo sapiens
tccattttcagaaag

SEQ ID NO: 883705 - DNA, 15 bp, Homo sapiens
ccattttcagaaagc

SEQ ID NO: 883706 - DNA, 15 bp, Homo sapiens
cattttcagaaagcc

SEQ ID NO: 883707 - DNA, 15 bp, Homo sapiens
attttcagaaagccc

SEQ ID NO: 883708 - DNA, 15 bp, Homo sapiens
ttttcagaaagccct

SEQ ID NO: 883709 - DNA, 15 bp, Homo sapiens
tttcagaaagccctg

SEQ ID NO: 883710 - DNA, 15 bp, Homo sapiens
ttcagaaagccctgt

SEQ ID NO: 883711 - DNA, 15 bp, Homo sapiens
tcagaaagccctgtt

SEQ ID NO: 883712 - DNA, 15 bp, Homo sapiens
cagaaagccctgttt

SEQ ID NO: 883713 - DNA, 15 bp, Homo sapiens
agaaagccctgtttt

SEQ ID NO: 883714 - DNA, 15 bp, Homo sapiens
gaaagccctgttttc

SEQ ID NO: 883715 - DNA, 15 bp, Homo sapiens
aaagccctgttttct

SEQ ID NO: 883716 - DNA, 15 bp, Homo sapiens
aagccctgttttcta

SEQ ID NO: 883717 - DNA, 15 bp, Homo sapiens
agccctgttttctat

SEQ ID NO: 883718 - DNA, 15 bp, Homo sapiens
gccctgttttctatg

SEQ ID NO: 883719 - DNA, 15 bp, Homo sapiens
ccctgttttctatga

SEQ ID NO: 883720 - DNA, 15 bp, Homo sapiens
cctgttttctatgaa

SEQ ID NO: 883721 - DNA, 15 bp, Homo sapiens
ctgttttctatgaag

SEQ ID NO: 883722 - DNA, 15 bp, Homo sapiens
tgttttctatgaagt

SEQ ID NO: 883723 - DNA, 15 bp, Homo sapiens
gttttctatgaagta

SEQ ID NO: 883724 - DNA, 15 bp, Homo sapiens
ttttctatgaagtat

SEQ ID NO: 883725 - DNA, 15 bp, Homo sapiens
tttctatgaagtata

SEQ ID NO: 883726 - DNA, 15 bp, Homo sapiens
ttctatgaagtatag

SEQ ID NO: 883727 - DNA, 15 bp, Homo sapiens
tctatgaagtatagc

SEQ ID NO: 883728 - DNA, 15 bp, Homo sapiens
ctatgaagtatagca

SEQ ID NO: 883729 - DNA, 15 bp, Homo sapiens
tatgaagtatagcac

SEQ ID NO: 883730 - DNA, 15 bp, Homo sapiens
atgaagtatagcact

SEQ ID NO: 883731 - DNA, 15 bp, Homo sapiens
tgaagtatagcactc

SEQ ID NO: 883732 - DNA, 15 bp, Homo sapiens
gaagtatagcactct

SEQ ID NO: 883733 - DNA, 15 bp, Homo sapiens
aagtatagcactcta

SEQ ID NO: 883734 - DNA, 15 bp, Homo sapiens
agtatagcactctag

SEQ ID NO: 883735 - DNA, 15 bp, Homo sapiens
gtatagcactctagg

SEQ ID NO: 883736 - DNA, 15 bp, Homo sapiens
tatagcactctaggt

SEQ ID NO: 883737 - DNA, 15 bp, Homo sapiens
atagcactctaggta

SEQ ID NO: 883738 - DNA, 15 bp, Homo sapiens
tagcactctaggtag

SEQ ID NO: 883739 - DNA, 15 bp, Homo sapiens
agcactctaggtagt

SEQ ID NO: 883740 - DNA, 15 bp, Homo sapiens
gcactctaggtagtt

SEQ ID NO: 883741 - DNA, 15 bp, Homo sapiens
cactctaggtagttt

SEQ ID NO: 883742 - DNA, 15 bp, Homo sapiens
actctaggtagtttt

SEQ ID NO: 883743 - DNA, 15 bp, Homo sapiens
ctctaggtagttttt

SEQ ID NO: 883744 - DNA, 15 bp, Homo sapiens
tctaggtagttttta

SEQ ID NO: 883745 - DNA, 15 bp, Homo sapiens
ctaggtagtttttaa

SEQ ID NO: 883746 - DNA, 15 bp, Homo sapiens
taggtagtttttaag

SEQ ID NO: 883747 - DNA, 15 bp, Homo sapiens
aggtagtttttaagg

SEQ ID NO: 883748 - DNA, 15 bp, Homo sapiens
ggtagtttttaaggc

SEQ ID NO: 883749 - DNA, 15 bp, Homo sapiens
gtagtttttaaggcg

SEQ ID NO: 883750 - DNA, 15 bp, Homo sapiens
tagtttttaaggcgc

SEQ ID NO: 883751 - DNA, 15 bp, Homo sapiens
agtttttaaggcgca

SEQ ID NO: 883752 - DNA, 15 bp, Homo sapiens
gtttttaaggcgcaa

SEQ ID NO: 883753 - DNA, 15 bp, Homo sapiens
tttttaaggcgcaaa

SEQ ID NO: 883754 - DNA, 15 bp, Homo sapiens
ttttaaggcgcaaac

SEQ ID NO: 883755 - DNA, 15 bp, Homo sapiens
tttaaggcgcaaact

SEQ ID NO: 883756 - DNA, 15 bp, Homo sapiens
ttaaggcgcaaactc

SEQ ID NO: 883757 - DNA, 15 bp, Homo sapiens
taaggcgcaaactcc

SEQ ID NO: 883758 - DNA, 15 bp, Homo sapiens
aaggcgcaaactcct

SEQ ID NO: 883759 - DNA, 15 bp, Homo sapiens
aggcgcaaactcctc

SEQ ID NO: 883760 - DNA, 15 bp, Homo sapiens
ggcgcaaactcctct

SEQ ID NO: 883761 - DNA, 15 bp, Homo sapiens
gcgcaaactcctctg

SEQ ID NO: 883762 - DNA, 15 bp, Homo sapiens
cgcaaactcctctgg

SEQ ID NO: 883763 - DNA, 15 bp, Homo sapiens
gcaaactcctctgga

SEQ ID NO: 883764 - DNA, 15 bp, Homo sapiens
caaactcctctggag

SEQ ID NO: 883765 - DNA, 15 bp, Homo sapiens
aaactcctctggagt

SEQ ID NO: 883766 - DNA, 15 bp, Homo sapiens
aactcctctggagtt

SEQ ID NO: 883767 - DNA, 15 bp, Homo sapiens
actcctctggagttg

SEQ ID NO: 883768 - DNA, 15 bp, Homo sapiens
ctcctctggagttgc

SEQ ID NO: 883769 - DNA, 15 bp, Homo sapiens
tcctctggagttgcc

SEQ ID NO: 883770 - DNA, 15 bp, Homo sapiens
cctctggagttgcct

SEQ ID NO: 883771 - DNA, 15 bp, Homo sapiens
ctctggagttgcctg

SEQ ID NO: 883772 - DNA, 15 bp, Homo sapiens
tctggagttgcctgt

SEQ ID NO: 883773 - DNA, 15 bp, Homo sapiens
ctggagttgcctgtg

SEQ ID NO: 883774 - DNA, 15 bp, Homo sapiens
tggagttgcctgtgt

SEQ ID NO: 883775 - DNA, 15 bp, Homo sapiens
ggagttgcctgtgtc

SEQ ID NO: 883776 - DNA, 15 bp, Homo sapiens
gagttgcctgtgtcg

SEQ ID NO: 883777 - DNA, 15 bp, Homo sapiens
agttgcctgtgtcgg

SEQ ID NO: 883778 - DNA, 15 bp, Homo sapiens
gttgcctgtgtcggc

SEQ ID NO: 883779 - DNA, 15 bp, Homo sapiens
ttgcctgtgtcggca

SEQ ID NO: 883780 - DNA, 15 bp, Homo sapiens
tgcctgtgtcggcaa

SEQ ID NO: 883781 - DNA, 15 bp, Homo sapiens
gcctgtgtcggcaac

SEQ ID NO: 883782 - DNA, 15 bp, Homo sapiens
cctgtgtcggcaaca

SEQ ID NO: 883783 - DNA, 15 bp, Homo sapiens
ctgtgtcggcaacaa

SEQ ID NO: 883784 - DNA, 15 bp, Homo sapiens
tgtgtcggcaacaac

SEQ ID NO: 883785 - DNA, 15 bp, Homo sapiens
gtgtcggcaacaact

SEQ ID NO: 883786 - DNA, 15 bp, Homo sapiens
tgtcggcaacaactc

SEQ ID NO: 883787 - DNA, 15 bp, Homo sapiens
gtcggcaacaactct

SEQ ID NO: 883788 - DNA, 15 bp, Homo sapiens
tcggcaacaactctt

SEQ ID NO: 883789 - DNA, 15 bp, Homo sapiens
cggcaacaactctta

SEQ ID NO: 883790 - DNA, 15 bp, Homo sapiens
ggcaacaactcttat

SEQ ID NO: 883791 - DNA, 15 bp, Homo sapiens
gcaacaactcttatg

SEQ ID NO: 883792 - DNA, 15 bp, Homo sapiens
caacaactcttatgt

SEQ ID NO: 883793 - DNA, 15 bp, Homo sapiens
aacaactcttatgta

SEQ ID NO: 883794 - DNA, 15 bp, Homo sapiens
acaactcttatgtag

SEQ ID NO: 883795 - DNA, 15 bp, Homo sapiens
caactcttatgtaga

SEQ ID NO: 883796 - DNA, 15 bp, Homo sapiens
aactcttatgtagat

SEQ ID NO: 883797 - DNA, 15 bp, Homo sapiens
actcttatgtagatg

SEQ ID NO: 883798 - DNA, 15 bp, Homo sapiens
ctcttatgtagatgg

SEQ ID NO: 883799 - DNA, 15 bp, Homo sapiens
tcttatgtagatggc

SEQ ID NO: 883800 - DNA, 15 bp, Homo sapiens
cttatgtagatggca

SEQ ID NO: 883801 - DNA, 15 bp, Homo sapiens
ttatgtagatggcac

SEQ ID NO: 883802 - DNA, 15 bp, Homo sapiens
tatgtagatggcaca

SEQ ID NO: 883803 - DNA, 15 bp, Homo sapiens
atgtagatggcacac

SEQ ID NO: 883804 - DNA, 15 bp, Homo sapiens
tgtagatggcacacg

SEQ ID NO: 883805 - DNA, 15 bp, Homo sapiens
gtagatggcacacga

SEQ ID NO: 883806 - DNA, 15 bp, Homo sapiens
tagatggcacacgag

SEQ ID NO: 883807 - DNA, 15 bp, Homo sapiens
agatggcacacgagg

SEQ ID NO: 883808 - DNA, 15 bp, Homo sapiens
gatggcacacgaggg

SEQ ID NO: 883809 - DNA, 15 bp, Homo sapiens
atggcacacgaggga

SEQ ID NO: 883810 - DNA, 15 bp, Homo sapiens
tggcacacgagggat

SEQ ID NO: 883811 - DNA, 15 bp, Homo sapiens
ggcacacgagggatg

SEQ ID NO: 883812 - DNA, 15 bp, Homo sapiens
gcacacgagggatgg

SEQ ID NO: 883813 - DNA, 15 bp, Homo sapiens
cacacgagggatggc

SEQ ID NO: 883814 - DNA, 15 bp, Homo sapiens
acacgagggatggcg

SEQ ID NO: 883815 - DNA, 15 bp, Homo sapiens
cacgagggatggcgc

SEQ ID NO: 883816 - DNA, 15 bp, Homo sapiens
acgagggatggcgcg

SEQ ID NO: 883817 - DNA, 15 bp, Homo sapiens
cgagggatggcgcgt

SEQ ID NO: 883818 - DNA, 15 bp, Homo sapiens
gagggatggcgcgtt

SEQ ID NO: 883819 - DNA, 15 bp, Homo sapiens
agggatggcgcgttg

SEQ ID NO: 883820 - DNA, 15 bp, Homo sapiens
gggatggcgcgttga

SEQ ID NO: 883821 - DNA, 15 bp, Homo sapiens
ggatggcgcgttgat

SEQ ID NO: 883822 - DNA, 15 bp, Homo sapiens
gatggcgcgttgatc

SEQ ID NO: 883823 - DNA, 15 bp, Homo sapiens
atggcgcgttgatcg

SEQ ID NO: 883824 - DNA, 15 bp, Homo sapiens
tggcgcgttgatcgg

SEQ ID NO: 883825 - DNA, 15 bp, Homo sapiens
ggcgcgttgatcggc

SEQ ID NO: 883826 - DNA, 15 bp, Homo sapiens
gcgcgttgatcggct

SEQ ID NO: 883827 - DNA, 15 bp, Homo sapiens
cgcgttgatcggctc

SEQ ID NO: 883828 - DNA, 15 bp, Homo sapiens
gcgttgatcggctcc

SEQ ID NO: 883829 - DNA, 15 bp, Homo sapiens
cgttgatcggctcct

SEQ ID NO: 883830 - DNA, 15 bp, Homo sapiens
gttgatcggctcctt

SEQ ID NO: 883831 - DNA, 15 bp, Homo sapiens
ttgatcggctccttt

SEQ ID NO: 883832 - DNA, 15 bp, Homo sapiens
tgatcggctccttta

SEQ ID NO: 883833 - DNA, 15 bp, Homo sapiens
gatcggctcctttaa

SEQ ID NO: 883834 - DNA, 15 bp, Homo sapiens
atcggctcctttaag

SEQ ID NO: 883835 - DNA, 15 bp, Homo sapiens
tcggctcctttaaga

SEQ ID NO: 883836 - DNA, 15 bp, Homo sapiens
cggctcctttaagat

SEQ ID NO: 883837 - DNA, 15 bp, Homo sapiens
ggctcctttaagatg

SEQ ID NO: 883838 - DNA, 15 bp, Homo sapiens
gctcctttaagatga

SEQ ID NO: 883839 - DNA, 15 bp, Homo sapiens
ctcctttaagatgac

SEQ ID NO: 883840 - DNA, 15 bp, Homo sapiens
tcctttaagatgaca

SEQ ID NO: 883841 - DNA, 15 bp, Homo sapiens
cctttaagatgacaa

SEQ ID NO: 883842 - DNA, 15 bp, Homo sapiens
ctttaagatgacaaa

SEQ ID NO: 883843 - DNA, 15 bp, Homo sapiens
tttaagatgacaaat

SEQ ID NO: 883844 - DNA, 15 bp, Homo sapiens
ttaagatgacaaatg

SEQ ID NO: 883845 - DNA, 15 bp, Homo sapiens
taagatgacaaatgg

SEQ ID NO: 883846 - DNA, 15 bp, Homo sapiens
aagatgacaaatggg

SEQ ID NO: 883847 - DNA, 15 bp, Homo sapiens
agatgacaaatgggc

SEQ ID NO: 883848 - DNA, 15 bp, Homo sapiens
gatgacaaatgggca

SEQ ID NO: 883849 - DNA, 15 bp, Homo sapiens
atgacaaatgggcag

SEQ ID NO: 883850 - DNA, 15 bp, Homo sapiens
tgacaaatgggcaga

SEQ ID NO: 883851 - DNA, 15 bp, Homo sapiens
gacaaatgggcagag

SEQ ID NO: 883852 - DNA, 15 bp, Homo sapiens
acaaatgggcagaga

SEQ ID NO: 883853 - DNA, 15 bp, Homo sapiens
caaatgggcagagag

SEQ ID NO: 883854 - DNA, 15 bp, Homo sapiens
aaatgggcagagagt

SEQ ID NO: 883855 - DNA, 15 bp, Homo sapiens
aatgggcagagagtg

SEQ ID NO: 883856 - DNA, 15 bp, Homo sapiens
atgggcagagagtgt

SEQ ID NO: 883857 - DNA, 15 bp, Homo sapiens
tgggcagagagtgtt

SEQ ID NO: 883858 - DNA, 15 bp, Homo sapiens
gggcagagagtgtta

SEQ ID NO: 883859 - DNA, 15 bp, Homo sapiens
ggcagagagtgttat

SEQ ID NO: 883860 - DNA, 15 bp, Homo sapiens
gcagagagtgttatt

SEQ ID NO: 883861 - DNA, 15 bp, Homo sapiens
cagagagtgttattg

SEQ ID NO: 883862 - DNA, 15 bp, Homo sapiens
agagagtgttattgt

SEQ ID NO: 883863 - DNA, 15 bp, Homo sapiens
gagagtgttattgtc

SEQ ID NO: 883864 - DNA, 15 bp, Homo sapiens
agagtgttattgtct

SEQ ID NO: 883865 - DNA, 15 bp, Homo sapiens
gagtgttattgtctt

SEQ ID NO: 883866 - DNA, 15 bp, Homo sapiens
agtgttattgtcttt

SEQ ID NO: 883867 - DNA, 15 bp, Homo sapiens
gtgttattgtctttg

SEQ ID NO: 883868 - DNA, 15 bp, Homo sapiens
tgttattgtctttga

SEQ ID NO: 883869 - DNA, 15 bp, Homo sapiens
gttattgtctttgat

SEQ ID NO: 883870 - DNA, 15 bp, Homo sapiens
ttattgtctttgatt

SEQ ID NO: 883871 - DNA, 15 bp, Homo sapiens
tattgtctttgattg

SEQ ID NO: 883872 - DNA, 15 bp, Homo sapiens
attgtctttgattgc

SEQ ID NO: 883873 - DNA, 15 bp, Homo sapiens
ttgtctttgattgca

SEQ ID NO: 883874 - DNA, 15 bp, Homo sapiens
tgtctttgattgcat

SEQ ID NO: 883875 - DNA, 15 bp, Homo sapiens
gtctttgattgcatg

SEQ ID NO: 883876 - DNA, 15 bp, Homo sapiens
tctttgattgcatgc

SEQ ID NO: 883877 - DNA, 15 bp, Homo sapiens
ctttgattgcatgcc

SEQ ID NO: 883878 - DNA, 15 bp, Homo sapiens
tttgattgcatgcct

SEQ ID NO: 883879 - DNA, 15 bp, Homo sapiens
ttgattgcatgcctt

SEQ ID NO: 883880 - DNA, 15 bp, Homo sapiens
tgattgcatgcctta

SEQ ID NO: 883881 - DNA, 15 bp, Homo sapiens
gattgcatgccttac

SEQ ID NO: 883882 - DNA, 15 bp, Homo sapiens
attgcatgccttaca

SEQ ID NO: 883883 - DNA, 15 bp, Homo sapiens
ttgcatgccttacat

SEQ ID NO: 883884 - DNA, 15 bp, Homo sapiens
tgcatgccttacatc

SEQ ID NO: 883885 - DNA, 15 bp, Homo sapiens
gcatgccttacatca

SEQ ID NO: 883886 - DNA, 15 bp, Homo sapiens
catgccttacatcat

SEQ ID NO: 883887 - DNA, 15 bp, Homo sapiens
atgccttacatcatc

SEQ ID NO: 883888 - DNA, 15 bp, Homo sapiens
tgccttacatcatct

SEQ ID NO: 883889 - DNA, 15 bp, Homo sapiens
gccttacatcatctg

SEQ ID NO: 883890 - DNA, 15 bp, Homo sapiens
ccttacatcatctgt

SEQ ID NO: 883891 - DNA, 15 bp, Homo sapiens
cttacatcatctgta

SEQ ID NO: 883892 - DNA, 15 bp, Homo sapiens
ttacatcatctgtat

SEQ ID NO: 883893 - DNA, 15 bp, Homo sapiens
tacatcatctgtatg

SEQ ID NO: 883894 - DNA, 15 bp, Homo sapiens
acatcatctgtatgt

SEQ ID NO: 883895 - DNA, 15 bp, Homo sapiens
catcatctgtatgta

SEQ ID NO: 883896 - DNA, 15 bp, Homo sapiens
atcatctgtatgtag

SEQ ID NO: 883897 - DNA, 15 bp, Homo sapiens
tcatctgtatgtagg

SEQ ID NO: 883898 - DNA, 15 bp, Homo sapiens
catctgtatgtagga

SEQ ID NO: 883899 - DNA, 15 bp, Homo sapiens
atctgtatgtaggaa

SEQ ID NO: 883900 - DNA, 15 bp, Homo sapiens
tctgtatgtaggaat

SEQ ID NO: 883901 - DNA, 15 bp, Homo sapiens
ctgtatgtaggaata

SEQ ID NO: 883902 - DNA, 15 bp, Homo sapiens
tgtatgtaggaataa

SEQ ID NO: 883903 - DNA, 15 bp, Homo sapiens
gtatgtaggaataag

SEQ ID NO: 883904 - DNA, 15 bp, Homo sapiens
tatgtaggaataaga

SEQ ID NO: 883905 - DNA, 15 bp, Homo sapiens
atgtaggaataagag

SEQ ID NO: 883906 - DNA, 15 bp, Homo sapiens
tgtaggaataagagg

SEQ ID NO: 883907 - DNA, 15 bp, Homo sapiens
gtaggaataagaggg

SEQ ID NO: 883908 - DNA, 15 bp, Homo sapiens
taggaataagagggc

SEQ ID NO: 883909 - DNA, 15 bp, Homo sapiens
aggaataagagggcc

SEQ ID NO: 883910 - DNA, 15 bp, Homo sapiens
ggaataagagggcca

SEQ ID NO: 883911 - DNA, 15 bp, Homo sapiens
gaataagagggccat

SEQ ID NO: 883912 - DNA, 15 bp, Homo sapiens
aataagagggccata

SEQ ID NO: 883913 - DNA, 15 bp, Homo sapiens
ataagagggccatac

SEQ ID NO: 883914 - DNA, 15 bp, Homo sapiens
taagagggccatact

SEQ ID NO: 883915 - DNA, 15 bp, Homo sapiens
aagagggccatactt

SEQ ID NO: 883916 - DNA, 15 bp, Homo sapiens
agagggccatacttt

SEQ ID NO: 883917 - DNA, 15 bp, Homo sapiens
gagggccatacttta

SEQ ID NO: 883918 - DNA, 15 bp, Homo sapiens
agggccatactttat

SEQ ID NO: 883919 - DNA, 15 bp, Homo sapiens
gggccatactttatc

SEQ ID NO: 883920 - DNA, 15 bp, Homo sapiens
ggccatactttatct

SEQ ID NO: 883921 - DNA, 15 bp, Homo sapiens
gccatactttatctt

SEQ ID NO: 883922 - DNA, 15 bp, Homo sapiens
ccatactttatcttt

SEQ ID NO: 883923 - DNA, 15 bp, Homo sapiens
catactttatcttta

SEQ ID NO: 883924 - DNA, 15 bp, Homo sapiens
atactttatctttag

SEQ ID NO: 883925 - DNA, 15 bp, Homo sapiens
tactttatctttagc

SEQ ID NO: 883926 - DNA, 15 bp, Homo sapiens
actttatctttagcc

SEQ ID NO: 883927 - DNA, 15 bp, Homo sapiens
ctttatctttagcca

SEQ ID NO: 883928 - DNA, 15 bp, Homo sapiens
tttatctttagccat

SEQ ID NO: 883929 - DNA, 15 bp, Homo sapiens
ttatctttagccatt

SEQ ID NO: 883930 - DNA, 15 bp, Homo sapiens
tatctttagccattt

SEQ ID NO: 883931 - DNA, 15 bp, Homo sapiens
atctttagccatttt

SEQ ID NO: 883932 - DNA, 15 bp, Homo sapiens
tctttagccatttta

SEQ ID NO: 883933 - DNA, 15 bp, Homo sapiens
ctttagccattttat

SEQ ID NO: 883934 - DNA, 15 bp, Homo sapiens
tttagccattttata

SEQ ID NO: 883935 - DNA, 15 bp, Homo sapiens
ttagccattttataa

SEQ ID NO: 883936 - DNA, 15 bp, Homo sapiens
tagccattttataaa

SEQ ID NO: 883937 - DNA, 15 bp, Homo sapiens
agccattttataaat

SEQ ID NO: 883938 - DNA, 15 bp, Homo sapiens
gccattttataaata

SEQ ID NO: 883939 - DNA, 15 bp, Homo sapiens
ccattttataaatat

SEQ ID NO: 883940 - DNA, 15 bp, Homo sapiens
cattttataaatatt

SEQ ID NO: 883941 - DNA, 15 bp, Homo sapiens
attttataaatattt

SEQ ID NO: 883942 - DNA, 15 bp, Homo sapiens
ttttataaatattta

SEQ ID NO: 883943 - DNA, 15 bp, Homo sapiens
tttataaatatttaa

SEQ ID NO: 883944 - DNA, 15 bp, Homo sapiens
ttataaatatttaag

SEQ ID NO: 883945 - DNA, 15 bp, Homo sapiens
tataaatatttaagt

SEQ ID NO: 883946 - DNA, 15 bp, Homo sapiens
ataaatatttaagtc

SEQ ID NO: 883947 - DNA, 15 bp, Homo sapiens
taaatatttaagtcc

SEQ ID NO: 883948 - DNA, 15 bp, Homo sapiens
aaatatttaagtcct

SEQ ID NO: 883949 - DNA, 15 bp, Homo sapiens
aatatttaagtcctt

SEQ ID NO: 883950 - DNA, 15 bp, Homo sapiens
atatttaagtcctta

SEQ ID NO: 883951 - DNA, 15 bp, Homo sapiens
tatttaagtccttat

SEQ ID NO: 883952 - DNA, 15 bp, Homo sapiens
atttaagtccttata

SEQ ID NO: 883953 - DNA, 15 bp, Homo sapiens
tttaagtccttatag

SEQ ID NO: 883954 - DNA, 15 bp, Homo sapiens
ttaagtccttatagt

SEQ ID NO: 883955 - DNA, 15 bp, Homo sapiens
taagtccttatagtt

SEQ ID NO: 883956 - DNA, 15 bp, Homo sapiens
aagtccttatagttg

SEQ ID NO: 883957 - DNA, 15 bp, Homo sapiens
agtccttatagttgc

SEQ ID NO: 883958 - DNA, 15 bp, Homo sapiens
gtccttatagttgcc

SEQ ID NO: 883959 - DNA, 15 bp, Homo sapiens
tccttatagttgcct

SEQ ID NO: 883960 - DNA, 15 bp, Homo sapiens
ccttatagttgccta

SEQ ID NO: 883961 - DNA, 15 bp, Homo sapiens
cttatagttgcctaa

SEQ ID NO: 883962 - DNA, 15 bp, Homo sapiens
ttatagttgcctaaa

SEQ ID NO: 883963 - DNA, 15 bp, Homo sapiens
tatagttgcctaaag

SEQ ID NO: 883964 - DNA, 15 bp, Homo sapiens
atagttgcctaaaga

SEQ ID NO: 883965 - DNA, 15 bp, Homo sapiens
tagttgcctaaagat

SEQ ID NO: 883966 - DNA, 15 bp, Homo sapiens
agttgcctaaagata

SEQ ID NO: 883967 - DNA, 15 bp, Homo sapiens
gttgcctaaagatat

SEQ ID NO: 883968 - DNA, 15 bp, Homo sapiens
ttgcctaaagatatt

SEQ ID NO: 883969 - DNA, 15 bp, Homo sapiens
tgcctaaagatatta

SEQ ID NO: 883970 - DNA, 15 bp, Homo sapiens
gcctaaagatattaa

SEQ ID NO: 883971 - DNA, 15 bp, Homo sapiens
cctaaagatattaaa

SEQ ID NO: 883972 - DNA, 15 bp, Homo sapiens
ctaaagatattaaag

SEQ ID NO: 883973 - DNA, 15 bp, Homo sapiens
taaagatattaaagc

SEQ ID NO: 883974 - DNA, 15 bp, Homo sapiens
aaagatattaaagca

SEQ ID NO: 883975 - DNA, 15 bp, Homo sapiens
aagatattaaagcat

SEQ ID NO: 883976 - DNA, 15 bp, Homo sapiens
agatattaaagcata

SEQ ID NO: 883977 - DNA, 15 bp, Homo sapiens
gatattaaagcatat

SEQ ID NO: 883978 - DNA, 15 bp, Homo sapiens
atattaaagcatatt

SEQ ID NO: 883979 - DNA, 15 bp, Homo sapiens
tattaaagcatattt

SEQ ID NO: 883980 - DNA, 15 bp, Homo sapiens
attaaagcatatttt

SEQ ID NO: 883981 - DNA, 15 bp, Homo sapiens
ttaaagcatatttta

SEQ ID NO: 883982 - DNA, 15 bp, Homo sapiens
taaagcatattttac

SEQ ID NO: 883983 - DNA, 15 bp, Homo sapiens
aaagcatattttaca

SEQ ID NO: 883984 - DNA, 15 bp, Homo sapiens
aagcatattttacag

SEQ ID NO: 883985 - DNA, 15 bp, Homo sapiens
agcatattttacagt

SEQ ID NO: 883986 - DNA, 15 bp, Homo sapiens
gcatattttacagta

SEQ ID NO: 883987 - DNA, 15 bp, Homo sapiens
catattttacagtag

SEQ ID NO: 883988 - DNA, 15 bp, Homo sapiens
atattttacagtagt

SEQ ID NO: 883989 - DNA, 15 bp, Homo sapiens
tattttacagtagtc

SEQ ID NO: 883990 - DNA, 15 bp, Homo sapiens
attttacagtagtcg

SEQ ID NO: 883991 - DNA, 15 bp, Homo sapiens
ttttacagtagtcgg

SEQ ID NO: 883992 - DNA, 15 bp, Homo sapiens
tttacagtagtcgga

SEQ ID NO: 883993 - DNA, 15 bp, Homo sapiens
ttacagtagtcggaa

SEQ ID NO: 883994 - DNA, 15 bp, Homo sapiens
tacagtagtcggaat

SEQ ID NO: 883995 - DNA, 15 bp, Homo sapiens
acagtagtcggaata

SEQ ID NO: 883996 - DNA, 15 bp, Homo sapiens
cagtagtcggaatat

SEQ ID NO: 883997 - DNA, 15 bp, Homo sapiens
agtagtcggaatata

SEQ ID NO: 883998 - DNA, 15 bp, Homo sapiens
gtagtcggaatataa

SEQ ID NO: 883999 - DNA, 15 bp, Homo sapiens
tagtcggaatataaa

SEQ ID NO: 884000 - DNA, 15 bp, Homo sapiens
agtcggaatataaat

SEQ ID NO: 884001 - DNA, 15 bp, Homo sapiens
gtcggaatataaata

SEQ ID NO: 884002 - DNA, 15 bp, Homo sapiens
tcggaatataaatat

SEQ ID NO: 884003 - DNA, 15 bp, Homo sapiens
cggaatataaatatt

SEQ ID NO: 884004 - DNA, 15 bp, Homo sapiens
ggaatataaatatta

SEQ ID NO: 884005 - DNA, 15 bp, Homo sapiens
gaatataaatattat

SEQ ID NO: 884006 - DNA, 15 bp, Homo sapiens
aatataaatattata

SEQ ID NO: 884007 - DNA, 15 bp, Homo sapiens
atataaatattatat

SEQ ID NO: 884008 - DNA, 15 bp, Homo sapiens
tataaatattatata

SEQ ID NO: 884009 - DNA, 15 bp, Homo sapiens
ataaatattatatat

SEQ ID NO: 884010 - DNA, 15 bp, Homo sapiens
taaatattatatata

SEQ ID NO: 884011 - DNA, 15 bp, Homo sapiens
aaatattatatatag

SEQ ID NO: 884012 - DNA, 15 bp, Homo sapiens
aatattatatatagc

SEQ ID NO: 884013 - DNA, 15 bp, Homo sapiens
atattatatatagca

SEQ ID NO: 884014 - DNA, 15 bp, Homo sapiens
tattatatatagcac

SEQ ID NO: 884015 - DNA, 15 bp, Homo sapiens
attatatatagcaca

SEQ ID NO: 884016 - DNA, 15 bp, Homo sapiens
ttatatatagcacaa

SEQ ID NO: 884017 - DNA, 15 bp, Homo sapiens
tatatatagcacaag

SEQ ID NO: 884018 - DNA, 15 bp, Homo sapiens
atatatagcacaaga

SEQ ID NO: 884019 - DNA, 15 bp, Homo sapiens
tatatagcacaagat

SEQ ID NO: 884020 - DNA, 15 bp, Homo sapiens
atatagcacaagata

SEQ ID NO: 884021 - DNA, 15 bp, Homo sapiens
tatagcacaagatac

SEQ ID NO: 884022 - DNA, 15 bp, Homo sapiens
atagcacaagatacc

SEQ ID NO: 884023 - DNA, 15 bp, Homo sapiens
tagcacaagatacca

SEQ ID NO: 884024 - DNA, 15 bp, Homo sapiens
agcacaagataccaa

SEQ ID NO: 884025 - DNA, 15 bp, Homo sapiens
gcacaagataccaaa

SEQ ID NO: 884026 - DNA, 15 bp, Homo sapiens
cacaagataccaaag

SEQ ID NO: 884027 - DNA, 15 bp, Homo sapiens
acaagataccaaagt

SEQ ID NO: 884028 - DNA, 15 bp, Homo sapiens
caagataccaaagta

SEQ ID NO: 884029 - DNA, 15 bp, Homo sapiens
aagataccaaagtag

SEQ ID NO: 884030 - DNA, 15 bp, Homo sapiens
agataccaaagtagt

SEQ ID NO: 884031 - DNA, 15 bp, Homo sapiens
gataccaaagtagtt

SEQ ID NO: 884032 - DNA, 15 bp, Homo sapiens
ataccaaagtagttt

SEQ ID NO: 884033 - DNA, 15 bp, Homo sapiens
taccaaagtagttta

SEQ ID NO: 884034 - DNA, 15 bp, Homo sapiens
accaaagtagtttaa

SEQ ID NO: 884035 - DNA, 15 bp, Homo sapiens
ccaaagtagtttaat

SEQ ID NO: 884036 - DNA, 15 bp, Homo sapiens
caaagtagtttaatg

SEQ ID NO: 884037 - DNA, 15 bp, Homo sapiens
aaagtagtttaatga

SEQ ID NO: 884038 - DNA, 15 bp, Homo sapiens
aagtagtttaatgaa

SEQ ID NO: 884039 - DNA, 15 bp, Homo sapiens
agtagtttaatgaat

SEQ ID NO: 884040 - DNA, 15 bp, Homo sapiens
gtagtttaatgaatt

SEQ ID NO: 884041 - DNA, 15 bp, Homo sapiens
tagtttaatgaattc

SEQ ID NO: 884042 - DNA, 15 bp, Homo sapiens
agtttaatgaattca

SEQ ID NO: 884043 - DNA, 15 bp, Homo sapiens
gtttaatgaattcat

SEQ ID NO: 884044 - DNA, 15 bp, Homo sapiens
tttaatgaattcata

SEQ ID NO: 884045 - DNA, 15 bp, Homo sapiens
ttaatgaattcataa

SEQ ID NO: 884046 - DNA, 15 bp, Homo sapiens
taatgaattcataat

SEQ ID NO: 884047 - DNA, 15 bp, Homo sapiens
aatgaattcataatt

SEQ ID NO: 884048 - DNA, 15 bp, Homo sapiens
atgaattcataattt

SEQ ID NO: 884049 - DNA, 15 bp, Homo sapiens
tgaattcataatttt

SEQ ID NO: 884050 - DNA, 15 bp, Homo sapiens
gaattcataattttc

SEQ ID NO: 884051 - DNA, 15 bp, Homo sapiens
aattcataattttct

SEQ ID NO: 884052 - DNA, 15 bp, Homo sapiens
attcataattttctg

SEQ ID NO: 884053 - DNA, 15 bp, Homo sapiens
ttcataattttctgc

SEQ ID NO: 884054 - DNA, 15 bp, Homo sapiens
tcataattttctgct

SEQ ID NO: 884055 - DNA, 15 bp, Homo sapiens
cataattttctgctc

SEQ ID NO: 884056 - DNA, 15 bp, Homo sapiens
ataattttctgctca

SEQ ID NO: 884057 - DNA, 15 bp, Homo sapiens
taattttctgctcac

SEQ ID NO: 884058 - DNA, 15 bp, Homo sapiens
aattttctgctcaca

SEQ ID NO: 884059 - DNA, 15 bp, Homo sapiens
attttctgctcacat

SEQ ID NO: 884060 - DNA, 15 bp, Homo sapiens
ttttctgctcacatt

SEQ ID NO: 884061 - DNA, 15 bp, Homo sapiens
tttctgctcacattt

SEQ ID NO: 884062 - DNA, 15 bp, Homo sapiens
ttctgctcacattta

SEQ ID NO: 884063 - DNA, 15 bp, Homo sapiens
tctgctcacatttat

SEQ ID NO: 884064 - DNA, 15 bp, Homo sapiens
ctgctcacatttatt

SEQ ID NO: 884065 - DNA, 15 bp, Homo sapiens
tgctcacatttattg

SEQ ID NO: 884066 - DNA, 15 bp, Homo sapiens
gctcacatttattgg

SEQ ID NO: 884067 - DNA, 15 bp, Homo sapiens
ctcacatttattgga

SEQ ID NO: 884068 - DNA, 15 bp, Homo sapiens
tcacatttattggaa

SEQ ID NO: 884069 - DNA, 15 bp, Homo sapiens
cacatttattggaat

SEQ ID NO: 884070 - DNA, 15 bp, Homo sapiens
acatttattggaatg

SEQ ID NO: 884071 - DNA, 15 bp, Homo sapiens
catttattggaatgt

SEQ ID NO: 884072 - DNA, 15 bp, Homo sapiens
atttattggaatgtg

SEQ ID NO: 884073 - DNA, 15 bp, Homo sapiens
tttattggaatgtgt

SEQ ID NO: 884074 - DNA, 15 bp, Homo sapiens
ttattggaatgtgtt

SEQ ID NO: 884075 - DNA, 15 bp, Homo sapiens
tattggaatgtgttt

SEQ ID NO: 884076 - DNA, 15 bp, Homo sapiens
attggaatgtgtttt

SEQ ID NO: 884077 - DNA, 15 bp, Homo sapiens
ttggaatgtgtttta

SEQ ID NO: 884078 - DNA, 15 bp, Homo sapiens
tggaatgtgttttat

SEQ ID NO: 884079 - DNA, 15 bp, Homo sapiens
ggaatgtgttttatg

SEQ ID NO: 884080 - DNA, 15 bp, Homo sapiens
gaatgtgttttatgt

SEQ ID NO: 884081 - DNA, 15 bp, Homo sapiens
aatgtgttttatgtt

SEQ ID NO: 884082 - DNA, 15 bp, Homo sapiens
atgtgttttatgttc

SEQ ID NO: 884083 - DNA, 15 bp, Homo sapiens
tgtgttttatgttcc

SEQ ID NO: 884084 - DNA, 15 bp, Homo sapiens
gtgttttatgttcca

SEQ ID NO: 884085 - DNA, 15 bp, Homo sapiens
tgttttatgttccaa

SEQ ID NO: 884086 - DNA, 15 bp, Homo sapiens
gttttatgttccaaa

SEQ ID NO: 884087 - DNA, 15 bp, Homo sapiens
ttttatgttccaaaa

SEQ ID NO: 884088 - DNA, 15 bp, Homo sapiens
tttatgttccaaaag

SEQ ID NO: 884089 - DNA, 15 bp, Homo sapiens
ttatgttccaaaagt

SEQ ID NO: 884090 - DNA, 15 bp, Homo sapiens
tatgttccaaaagtt

SEQ ID NO: 884091 - DNA, 15 bp, Homo sapiens
atgttccaaaagttc

SEQ ID NO: 884092 - DNA, 15 bp, Homo sapiens
tgttccaaaagttcc

SEQ ID NO: 884093 - DNA, 15 bp, Homo sapiens
gttccaaaagttcca

SEQ ID NO: 884094 - DNA, 15 bp, Homo sapiens
ttccaaaagttccat

SEQ ID NO: 884095 - DNA, 15 bp, Homo sapiens
tccaaaagttccatt

SEQ ID NO: 884096 - DNA, 15 bp, Homo sapiens
ccaaaagttccattt

SEQ ID NO: 884097 - DNA, 15 bp, Homo sapiens
caaaagttccattta

SEQ ID NO: 884098 - DNA, 15 bp, Homo sapiens
aaaagttccatttaa

SEQ ID NO: 884099 - DNA, 15 bp, Homo sapiens
aaagttccatttaaa

SEQ ID NO: 884100 - DNA, 15 bp, Homo sapiens
aagttccatttaaag

SEQ ID NO: 884101 - DNA, 15 bp, Homo sapiens
agttccatttaaaga

SEQ ID NO: 884102 - DNA, 15 bp, Homo sapiens
gttccatttaaagaa

SEQ ID NO: 884103 - DNA, 15 bp, Homo sapiens
ttccatttaaagaat

SEQ ID NO: 884104 - DNA, 15 bp, Homo sapiens
tccatttaaagaata

SEQ ID NO: 884105 - DNA, 15 bp, Homo sapiens
ccatttaaagaataa

SEQ ID NO: 884106 - DNA, 15 bp, Homo sapiens
catttaaagaataag

SEQ ID NO: 884107 - DNA, 15 bp, Homo sapiens
atttaaagaataaga

SEQ ID NO: 884108 - DNA, 15 bp, Homo sapiens
tttaaagaataagat

SEQ ID NO: 884109 - DNA, 15 bp, Homo sapiens
ttaaagaataagata

SEQ ID NO: 884110 - DNA, 15 bp, Homo sapiens
taaagaataagatac

SEQ ID NO: 884111 - DNA, 15 bp, Homo sapiens
aaagaataagatacc

SEQ ID NO: 884112 - DNA, 15 bp, Homo sapiens
aagaataagatacca

SEQ ID NO: 884113 - DNA, 15 bp, Homo sapiens
agaataagataccat

SEQ ID NO: 884114 - DNA, 15 bp, Homo sapiens
gaataagataccatt

SEQ ID NO: 884115 - DNA, 15 bp, Homo sapiens
aataagataccattc

SEQ ID NO: 884116 - DNA, 15 bp, Homo sapiens
ataagataccattct

SEQ ID NO: 884117 - DNA, 15 bp, Homo sapiens
taagataccattcta

SEQ ID NO: 884118 - DNA, 15 bp, Homo sapiens
aagataccattctac

SEQ ID NO: 884119 - DNA, 15 bp, Homo sapiens
agataccattctact

SEQ ID NO: 884120 - DNA, 15 bp, Homo sapiens
gataccattctactc

SEQ ID NO: 884121 - DNA, 15 bp, Homo sapiens
ataccattctactcc

SEQ ID NO: 884122 - DNA, 15 bp, Homo sapiens
taccattctactccc

SEQ ID NO: 884123 - DNA, 15 bp, Homo sapiens
accattctactccct

SEQ ID NO: 884124 - DNA, 15 bp, Homo sapiens
ccattctactccctg

SEQ ID NO: 884125 - DNA, 15 bp, Homo sapiens
cattctactccctga

SEQ ID NO: 884126 - DNA, 15 bp, Homo sapiens
attctactccctgac

SEQ ID NO: 884127 - DNA, 15 bp, Homo sapiens
ttctactccctgaca

SEQ ID NO: 884128 - DNA, 15 bp, Homo sapiens
tctactccctgacaa

SEQ ID NO: 884129 - DNA, 15 bp, Homo sapiens
ctactccctgacaac

SEQ ID NO: 884130 - DNA, 15 bp, Homo sapiens
tactccctgacaaca

SEQ ID NO: 884131 - DNA, 15 bp, Homo sapiens
actccctgacaacac

SEQ ID NO: 884132 - DNA, 15 bp, Homo sapiens
ctccctgacaacaca

SEQ ID NO: 884133 - DNA, 15 bp, Homo sapiens
tccctgacaacacac

SEQ ID NO: 884134 - DNA, 15 bp, Homo sapiens
ccctgacaacacacc

SEQ ID NO: 884135 - DNA, 15 bp, Homo sapiens
cctgacaacacacca

SEQ ID NO: 884136 - DNA, 15 bp, Homo sapiens
ctgacaacacaccaa

SEQ ID NO: 884137 - DNA, 15 bp, Homo sapiens
tgacaacacaccaag

SEQ ID NO: 884138 - DNA, 15 bp, Homo sapiens
gacaacacaccaagc

SEQ ID NO: 884139 - DNA, 15 bp, Homo sapiens
acaacacaccaagca

SEQ ID NO: 884140 - DNA, 15 bp, Homo sapiens
caacacaccaagcat

SEQ ID NO: 884141 - DNA, 15 bp, Homo sapiens
aacacaccaagcatt

SEQ ID NO: 884142 - DNA, 15 bp, Homo sapiens
acacaccaagcattg

SEQ ID NO: 884143 - DNA, 15 bp, Homo sapiens
cacaccaagcattgg

SEQ ID NO: 884144 - DNA, 15 bp, Homo sapiens
acaccaagcattggc

SEQ ID NO: 884145 - DNA, 15 bp, Homo sapiens
caccaagcattggcc

SEQ ID NO: 884146 - DNA, 15 bp, Homo sapiens
accaagcattggcca

SEQ ID NO: 884147 - DNA, 15 bp, Homo sapiens
ccaagcattggccag

SEQ ID NO: 884148 - DNA, 15 bp, Homo sapiens
caagcattggccagt

SEQ ID NO: 884149 - DNA, 15 bp, Homo sapiens
aagcattggccagtg

SEQ ID NO: 884150 - DNA, 15 bp, Homo sapiens
agcattggccagtgt

SEQ ID NO: 884151 - DNA, 15 bp, Homo sapiens
gcattggccagtgtt

SEQ ID NO: 884152 - DNA, 15 bp, Homo sapiens
cattggccagtgttg

SEQ ID NO: 884153 - DNA, 15 bp, Homo sapiens
attggccagtgttgg

SEQ ID NO: 884154 - DNA, 15 bp, Homo sapiens
ttggccagtgttggg

SEQ ID NO: 884155 - DNA, 15 bp, Homo sapiens
tggccagtgttgggg

SEQ ID NO: 884156 - DNA, 15 bp, Homo sapiens
ggccagtgttggggg

SEQ ID NO: 884157 - DNA, 15 bp, Homo sapiens
gccagtgttgggggc

SEQ ID NO: 884158 - DNA, 15 bp, Homo sapiens
ccagtgttgggggcg

SEQ ID NO: 884159 - DNA, 15 bp, Homo sapiens
cagtgttgggggcgg

SEQ ID NO: 884160 - DNA, 15 bp, Homo sapiens
agtgttgggggcggg

SEQ ID NO: 884161 - DNA, 15 bp, Homo sapiens
gtgttgggggcgggg

SEQ ID NO: 884162 - DNA, 15 bp, Homo sapiens
tgttgggggcggggt

SEQ ID NO: 884163 - DNA, 15 bp, Homo sapiens
gttgggggcggggtc

SEQ ID NO: 884164 - DNA, 15 bp, Homo sapiens
ttgggggcggggtct

SEQ ID NO: 884165 - DNA, 15 bp, Homo sapiens
tgggggcggggtctg

SEQ ID NO: 884166 - DNA, 15 bp, Homo sapiens
gggggcggggtctga

SEQ ID NO: 884167 - DNA, 15 bp, Homo sapiens
ggggcggggtctgag

SEQ ID NO: 884168 - DNA, 15 bp, Homo sapiens
gggcggggtctgagt

SEQ ID NO: 884169 - DNA, 15 bp, Homo sapiens
ggcggggtctgagtt

SEQ ID NO: 884170 - DNA, 15 bp, Homo sapiens
gcggggtctgagttc

SEQ ID NO: 884171 - DNA, 15 bp, Homo sapiens
cggggtctgagttcc

SEQ ID NO: 884172 - DNA, 15 bp, Homo sapiens
ggggtctgagttcca

SEQ ID NO: 884173 - DNA, 15 bp, Homo sapiens
gggtctgagttccaa

SEQ ID NO: 884174 - DNA, 15 bp, Homo sapiens
ggtctgagttccaat

SEQ ID NO: 884175 - DNA, 15 bp, Homo sapiens
gtctgagttccaatg

SEQ ID NO: 884176 - DNA, 15 bp, Homo sapiens
tctgagttccaatgt

SEQ ID NO: 884177 - DNA, 15 bp, Homo sapiens
ctgagttccaatgtg

SEQ ID NO: 884178 - DNA, 15 bp, Homo sapiens
tgagttccaatgtgg

SEQ ID NO: 884179 - DNA, 15 bp, Homo sapiens
gagttccaatgtggg

SEQ ID NO: 884180 - DNA, 15 bp, Homo sapiens
agttccaatgtgggg

SEQ ID NO: 884181 - DNA, 15 bp, Homo sapiens
gttccaatgtgggga

SEQ ID NO: 884182 - DNA, 15 bp, Homo sapiens
ttccaatgtggggaa

SEQ ID NO: 884183 - DNA, 15 bp, Homo sapiens
tccaatgtggggaag

SEQ ID NO: 884184 - DNA, 15 bp, Homo sapiens
ccaatgtggggaaga

SEQ ID NO: 884185 - DNA, 15 bp, Homo sapiens
caatgtggggaagat

SEQ ID NO: 884186 - DNA, 15 bp, Homo sapiens
aatgtggggaagatt

SEQ ID NO: 884187 - DNA, 15 bp, Homo sapiens
atgtggggaagattc

SEQ ID NO: 884188 - DNA, 15 bp, Homo sapiens
tgtggggaagattct

SEQ ID NO: 884189 - DNA, 15 bp, Homo sapiens
gtggggaagattcta

SEQ ID NO: 884190 - DNA, 15 bp, Homo sapiens
tggggaagattctat

SEQ ID NO: 884191 - DNA, 15 bp, Homo sapiens
ggggaagattctatt

SEQ ID NO: 884192 - DNA, 15 bp, Homo sapiens
gggaagattctatta

SEQ ID NO: 884193 - DNA, 15 bp, Homo sapiens
ggaagattctattag

SEQ ID NO: 884194 - DNA, 15 bp, Homo sapiens
gaagattctattagg

SEQ ID NO: 884195 - DNA, 15 bp, Homo sapiens
aagattctattagga

SEQ ID NO: 884196 - DNA, 15 bp, Homo sapiens
agattctattaggaa

SEQ ID NO: 884197 - DNA, 15 bp, Homo sapiens
gattctattaggaag

SEQ ID NO: 884198 - DNA, 15 bp, Homo sapiens
attctattaggaagc

SEQ ID NO: 884199 - DNA, 15 bp, Homo sapiens
ttctattaggaagca

SEQ ID NO: 884200 - DNA, 15 bp, Homo sapiens
tctattaggaagcat

SEQ ID NO: 884201 - DNA, 15 bp, Homo sapiens
ctattaggaagcatg

SEQ ID NO: 884202 - DNA, 15 bp, Homo sapiens
tattaggaagcatgg

SEQ ID NO: 884203 - DNA, 15 bp, Homo sapiens
attaggaagcatgga

SEQ ID NO: 884204 - DNA, 15 bp, Homo sapiens
ttaggaagcatggag

SEQ ID NO: 884205 - DNA, 15 bp, Homo sapiens
taggaagcatggagg

SEQ ID NO: 884206 - DNA, 15 bp, Homo sapiens
aggaagcatggaggc

SEQ ID NO: 884207 - DNA, 15 bp, Homo sapiens
ggaagcatggaggca

SEQ ID NO: 884208 - DNA, 15 bp, Homo sapiens
gaagcatggaggcag

SEQ ID NO: 884209 - DNA, 15 bp, Homo sapiens
aagcatggaggcagg

SEQ ID NO: 884210 - DNA, 15 bp, Homo sapiens
agcatggaggcagga

SEQ ID NO: 884211 - DNA, 15 bp, Homo sapiens
gcatggaggcaggaa

SEQ ID NO: 884212 - DNA, 15 bp, Homo sapiens
catggaggcaggaag

SEQ ID NO: 884213 - DNA, 15 bp, Homo sapiens
atggaggcaggaagt

SEQ ID NO: 884214 - DNA, 15 bp, Homo sapiens
tggaggcaggaagtc

SEQ ID NO: 884215 - DNA, 15 bp, Homo sapiens
ggaggcaggaagtct

SEQ ID NO: 884216 - DNA, 15 bp, Homo sapiens
gaggcaggaagtctc

SEQ ID NO: 884217 - DNA, 15 bp, Homo sapiens
aggcaggaagtctct

SEQ ID NO: 884218 - DNA, 15 bp, Homo sapiens
ggcaggaagtctctt

SEQ ID NO: 884219 - DNA, 15 bp, Homo sapiens
gcaggaagtctcttc

SEQ ID NO: 884220 - DNA, 15 bp, Homo sapiens
caggaagtctcttcc

SEQ ID NO: 884221 - DNA, 15 bp, Homo sapiens
aggaagtctcttccc

SEQ ID NO: 884222 - DNA, 15 bp, Homo sapiens
ggaagtctcttccct

SEQ ID NO: 884223 - DNA, 15 bp, Homo sapiens
gaagtctcttccctg

SEQ ID NO: 884224 - DNA, 15 bp, Homo sapiens
aagtctcttccctgg

SEQ ID NO: 884225 - DNA, 15 bp, Homo sapiens
agtctcttccctgga

SEQ ID NO: 884226 - DNA, 15 bp, Homo sapiens
gtctcttccctggaa

SEQ ID NO: 884227 - DNA, 15 bp, Homo sapiens
tctcttccctggaat

SEQ ID NO: 884228 - DNA, 15 bp, Homo sapiens
ctcttccctggaata

SEQ ID NO: 884229 - DNA, 15 bp, Homo sapiens
tcttccctggaatat

SEQ ID NO: 884230 - DNA, 15 bp, Homo sapiens
cttccctggaatata

SEQ ID NO: 884231 - DNA, 15 bp, Homo sapiens
ttccctggaatatat

SEQ ID NO: 884232 - DNA, 15 bp, Homo sapiens
tccctggaatatatt

SEQ ID NO: 884233 - DNA, 15 bp, Homo sapiens
ccctggaatatattt

SEQ ID NO: 884234 - DNA, 15 bp, Homo sapiens
cctggaatatatttc

SEQ ID NO: 884235 - DNA, 15 bp, Homo sapiens
ctggaatatatttct

SEQ ID NO: 884236 - DNA, 15 bp, Homo sapiens
tggaatatatttctt

SEQ ID NO: 884237 - DNA, 15 bp, Homo sapiens
ggaatatatttcttc

SEQ ID NO: 884238 - DNA, 15 bp, Homo sapiens
gaatatatttcttct

SEQ ID NO: 884239 - DNA, 15 bp, Homo sapiens
aatatatttcttctc

SEQ ID NO: 884240 - DNA, 15 bp, Homo sapiens
atatatttcttctct

SEQ ID NO: 884241 - DNA, 15 bp, Homo sapiens
tatatttcttctctc

SEQ ID NO: 884242 - DNA, 15 bp, Homo sapiens
atatttcttctctct

SEQ ID NO: 884243 - DNA, 15 bp, Homo sapiens
tatttcttctctctt

SEQ ID NO: 884244 - DNA, 15 bp, Homo sapiens
atttcttctctcttt

SEQ ID NO: 884245 - DNA, 15 bp, Homo sapiens
tttcttctctcttta

SEQ ID NO: 884246 - DNA, 15 bp, Homo sapiens
ttcttctctctttag

SEQ ID NO: 884247 - DNA, 15 bp, Homo sapiens
tcttctctctttagg

SEQ ID NO: 884248 - DNA, 15 bp, Homo sapiens
cttctctctttaggt

SEQ ID NO: 884249 - DNA, 15 bp, Homo sapiens
ttctctctttaggtc

SEQ ID NO: 884250 - DNA, 15 bp, Homo sapiens
tctctctttaggtct

SEQ ID NO: 884251 - DNA, 15 bp, Homo sapiens
ctctctttaggtcta

SEQ ID NO: 884252 - DNA, 15 bp, Homo sapiens
tctctttaggtctaa

SEQ ID NO: 884253 - DNA, 15 bp, Homo sapiens
ctctttaggtctaaa

SEQ ID NO: 884254 - DNA, 15 bp, Homo sapiens
tctttaggtctaaat

SEQ ID NO: 884255 - DNA, 15 bp, Homo sapiens
ctttaggtctaaata

SEQ ID NO: 884256 - DNA, 15 bp, Homo sapiens
tttaggtctaaatat

SEQ ID NO: 884257 - DNA, 15 bp, Homo sapiens
ttaggtctaaatatg

SEQ ID NO: 884258 - DNA, 15 bp, Homo sapiens
taggtctaaatatgt

SEQ ID NO: 884259 - DNA, 15 bp, Homo sapiens
aggtctaaatatgtg

SEQ ID NO: 884260 - DNA, 15 bp, Homo sapiens
ggtctaaatatgtgt

SEQ ID NO: 884261 - DNA, 15 bp, Homo sapiens
gtctaaatatgtgtg

SEQ ID NO: 884262 - DNA, 15 bp, Homo sapiens
tctaaatatgtgtgt

SEQ ID NO: 884263 - DNA, 15 bp, Homo sapiens
ctaaatatgtgtgtg

SEQ ID NO: 884264 - DNA, 15 bp, Homo sapiens
taaatatgtgtgtgt

SEQ ID NO: 884265 - DNA, 15 bp, Homo sapiens
aaatatgtgtgtgta

SEQ ID NO: 884266 - DNA, 15 bp, Homo sapiens
aatatgtgtgtgtat

SEQ ID NO: 884267 - DNA, 15 bp, Homo sapiens
atatgtgtgtgtatg

SEQ ID NO: 884268 - DNA, 15 bp, Homo sapiens
tatgtgtgtgtatgt

SEQ ID NO: 884269 - DNA, 15 bp, Homo sapiens
atgtgtgtgtatgtg

SEQ ID NO: 884270 - DNA, 15 bp, Homo sapiens
gtatgtgcgtgtgtg

SEQ ID NO: 884271 - DNA, 15 bp, Homo sapiens
tatgtgcgtgtgtgt

SEQ ID NO: 884272 - DNA, 15 bp, Homo sapiens
atgtgcgtgtgtgtg

SEQ ID NO: 884273 - DNA, 15 bp, Homo sapiens
gtgtgtgtgtgtgcg

SEQ ID NO: 884274 - DNA, 15 bp, Homo sapiens
tgtgtgtgtgtgcgc

SEQ ID NO: 884275 - DNA, 15 bp, Homo sapiens
gtgtgtgtgtgcgcg

SEQ ID NO: 884276 - DNA, 15 bp, Homo sapiens
tgtgtgtgtgcgcgc

SEQ ID NO: 884277 - DNA, 15 bp, Homo sapiens
gtgtgtgtgcgcgcg

SEQ ID NO: 884278 - DNA, 15 bp, Homo sapiens
tgtgtgtgcgcgcgc

SEQ ID NO: 884279 - DNA, 15 bp, Homo sapiens
gtgtgtgcgcgcgcg

SEQ ID NO: 884280 - DNA, 15 bp, Homo sapiens
tgtgtgcgcgcgcgt

SEQ ID NO: 884281 - DNA, 15 bp, Homo sapiens
gtgtgcgcgcgcgtg

SEQ ID NO: 884282 - DNA, 15 bp, Homo sapiens
tgtgcgcgcgcgtgt

SEQ ID NO: 884283 - DNA, 15 bp, Homo sapiens
gtgcgcgcgcgtgtt

SEQ ID NO: 884284 - DNA, 15 bp, Homo sapiens
tgcgcgcgcgtgttc

SEQ ID NO: 884285 - DNA, 15 bp, Homo sapiens
gcgcgcgcgtgttcg

SEQ ID NO: 884286 - DNA, 15 bp, Homo sapiens
cgcgcgcgtgttcgt

SEQ ID NO: 884287 - DNA, 15 bp, Homo sapiens
gcgcgcgtgttcgtg

SEQ ID NO: 884288 - DNA, 15 bp, Homo sapiens
cgcgcgtgttcgtgt

SEQ ID NO: 884289 - DNA, 15 bp, Homo sapiens
gcgcgtgttcgtgtg

SEQ ID NO: 884290 - DNA, 15 bp, Homo sapiens
cgcgtgttcgtgtgt

SEQ ID NO: 884291 - DNA, 15 bp, Homo sapiens
gcgtgttcgtgtgtg

SEQ ID NO: 884292 - DNA, 15 bp, Homo sapiens
cgtgttcgtgtgtgt

SEQ ID NO: 884293 - DNA, 15 bp, Homo sapiens
gtgttcgtgtgtgtg

SEQ ID NO: 884294 - DNA, 15 bp, Homo sapiens
tgttcgtgtgtgtgt

SEQ ID NO: 884295 - DNA, 15 bp, Homo sapiens
gttcgtgtgtgtgtg

SEQ ID NO: 884296 - DNA, 15 bp, Homo sapiens
gtgtgtgtgtgtatt

SEQ ID NO: 884297 - DNA, 15 bp, Homo sapiens
tgtgtgtgtgtattt

SEQ ID NO: 884298 - DNA, 15 bp, Homo sapiens
gtgtgtgtgtatttt

SEQ ID NO: 884299 - DNA, 15 bp, Homo sapiens
tgtgtgtgtattttt

SEQ ID NO: 884300 - DNA, 15 bp, Homo sapiens
gtgtgtgtatttttc

SEQ ID NO: 884301 - DNA, 15 bp, Homo sapiens
tgtgtgtatttttct

SEQ ID NO: 884302 - DNA, 15 bp, Homo sapiens
gtgtgtatttttctg

SEQ ID NO: 884303 - DNA, 15 bp, Homo sapiens
tgtgtatttttctga

SEQ ID NO: 884304 - DNA, 15 bp, Homo sapiens
gtgtatttttctgaa

SEQ ID NO: 884305 - DNA, 15 bp, Homo sapiens
tgtatttttctgaat

SEQ ID NO: 884306 - DNA, 15 bp, Homo sapiens
gtatttttctgaata

SEQ ID NO: 884307 - DNA, 15 bp, Homo sapiens
tatttttctgaataa

SEQ ID NO: 884308 - DNA, 15 bp, Homo sapiens
atttttctgaataaa

SEQ ID NO: 884309 - DNA, 15 bp, Homo sapiens
tttttctgaataaat

SEQ ID NO: 884310 - DNA, 15 bp, Homo sapiens
ttttctgaataaata

SEQ ID NO: 884311 - DNA, 15 bp, Homo sapiens
tttctgaataaataa

SEQ ID NO: 884312 - DNA, 15 bp, Homo sapiens
ttctgaataaataat

SEQ ID NO: 884313 - DNA, 15 bp, Homo sapiens
tctgaataaataatt

SEQ ID NO: 884314 - DNA, 15 bp, Homo sapiens
ctgaataaataattc

SEQ ID NO: 884315 - DNA, 15 bp, Homo sapiens
tgaataaataattct

SEQ ID NO: 884316 - DNA, 15 bp, Homo sapiens
gaataaataattctg

SEQ ID NO: 884317 - DNA, 15 bp, Homo sapiens
aataaataattctgg

SEQ ID NO: 884318 - DNA, 15 bp, Homo sapiens
ataaataattctggt

SEQ ID NO: 884319 - DNA, 15 bp, Homo sapiens
taaataattctggtg

SEQ ID NO: 884320 - DNA, 15 bp, Homo sapiens
aaataattctggtgc

SEQ ID NO: 884321 - DNA, 15 bp, Homo sapiens
aataattctggtgct

SEQ ID NO: 884322 - DNA, 15 bp, Homo sapiens
ataattctggtgctt

SEQ ID NO: 884323 - DNA, 15 bp, Homo sapiens
taattctggtgctta

SEQ ID NO: 884324 - DNA, 15 bp, Homo sapiens
aattctggtgcttat

SEQ ID NO: 884325 - DNA, 15 bp, Homo sapiens
attctggtgcttatt

SEQ ID NO: 884326 - DNA, 15 bp, Homo sapiens
ttctggtgcttattt

SEQ ID NO: 884327 - DNA, 15 bp, Homo sapiens
tctggtgcttattta

SEQ ID NO: 884328 - DNA, 15 bp, Homo sapiens
ctggtgcttatttaa

SEQ ID NO: 884329 - DNA, 15 bp, Homo sapiens
tggtgcttatttaag

SEQ ID NO: 884330 - DNA, 15 bp, Homo sapiens
ggtgcttatttaagt

SEQ ID NO: 884331 - DNA, 15 bp, Homo sapiens
gtgcttatttaagtc

SEQ ID NO: 884332 - DNA, 15 bp, Homo sapiens
tgcttatttaagtcc

SEQ ID NO: 884333 - DNA, 15 bp, Homo sapiens
gcttatttaagtccc

SEQ ID NO: 884334 - DNA, 15 bp, Homo sapiens
cttatttaagtcccg

SEQ ID NO: 884335 - DNA, 15 bp, Homo sapiens
ttatttaagtcccgt

SEQ ID NO: 884336 - DNA, 15 bp, Homo sapiens
tatttaagtcccgta

SEQ ID NO: 884337 - DNA, 15 bp, Homo sapiens
atttaagtcccgtag

SEQ ID NO: 884338 - DNA, 15 bp, Homo sapiens
tttaagtcccgtagc

SEQ ID NO: 884339 - DNA, 15 bp, Homo sapiens
ttaagtcccgtagca

SEQ ID NO: 884340 - DNA, 15 bp, Homo sapiens
taagtcccgtagcat

SEQ ID NO: 884341 - DNA, 15 bp, Homo sapiens
aagtcccgtagcatt

SEQ ID NO: 884342 - DNA, 15 bp, Homo sapiens
agtcccgtagcattt

SEQ ID NO: 884343 - DNA, 15 bp, Homo sapiens
gtcccgtagcatttc

SEQ ID NO: 884344 - DNA, 15 bp, Homo sapiens
tcccgtagcatttca

SEQ ID NO: 884345 - DNA, 15 bp, Homo sapiens
cccgtagcatttcaa

SEQ ID NO: 884346 - DNA, 15 bp, Homo sapiens
ccgtagcatttcaaa

SEQ ID NO: 884347 - DNA, 15 bp, Homo sapiens
cgtagcatttcaaaa

SEQ ID NO: 884348 - DNA, 15 bp, Homo sapiens
gtagcatttcaaaaa

SEQ ID NO: 884349 - DNA, 15 bp, Homo sapiens
tagcatttcaaaaag

SEQ ID NO: 884350 - DNA, 15 bp, Homo sapiens
agcatttcaaaaaga

SEQ ID NO: 884351 - DNA, 15 bp, Homo sapiens
gcatttcaaaaagaa

SEQ ID NO: 884352 - DNA, 15 bp, Homo sapiens
catttcaaaaagaaa

SEQ ID NO: 884353 - DNA, 15 bp, Homo sapiens
atttcaaaaagaaaa

SEQ ID NO: 884354 - DNA, 15 bp, Homo sapiens
tttcaaaaagaaaat

SEQ ID NO: 884355 - DNA, 15 bp, Homo sapiens
ttcaaaaagaaaatt

SEQ ID NO: 884356 - DNA, 15 bp, Homo sapiens
tcaaaaagaaaattt

SEQ ID NO: 884357 - DNA, 15 bp, Homo sapiens
caaaaagaaaatttt

SEQ ID NO: 884358 - DNA, 15 bp, Homo sapiens
aaaaagaaaatttta

SEQ ID NO: 884359 - DNA, 15 bp, Homo sapiens
aaaagaaaattttat

SEQ ID NO: 884360 - DNA, 15 bp, Homo sapiens
aaagaaaattttata

SEQ ID NO: 884361 - DNA, 15 bp, Homo sapiens
aagaaaattttatat

SEQ ID NO: 884362 - DNA, 15 bp, Homo sapiens
agaaaattttatatc

SEQ ID NO: 884363 - DNA, 15 bp, Homo sapiens
gaaaattttatatct

SEQ ID NO: 884364 - DNA, 15 bp, Homo sapiens
aaaattttatatctc

SEQ ID NO: 884365 - DNA, 15 bp, Homo sapiens
aaattttatatctcc

SEQ ID NO: 884366 - DNA, 15 bp, Homo sapiens
aattttatatctcct

SEQ ID NO: 884367 - DNA, 15 bp, Homo sapiens
attttatatctcctt

SEQ ID NO: 884368 - DNA, 15 bp, Homo sapiens
ttttatatctccttt

SEQ ID NO: 884369 - DNA, 15 bp, Homo sapiens
tttatatctcctttc

SEQ ID NO: 884370 - DNA, 15 bp, Homo sapiens
ttatatctcctttct

SEQ ID NO: 884371 - DNA, 15 bp, Homo sapiens
tatatctcctttctt

SEQ ID NO: 884372 - DNA, 15 bp, Homo sapiens
atatctcctttcttc

SEQ ID NO: 884373 - DNA, 15 bp, Homo sapiens
tatctcctttcttct

SEQ ID NO: 884374 - DNA, 15 bp, Homo sapiens
atctcctttcttctg

SEQ ID NO: 884375 - DNA, 15 bp, Homo sapiens
tctcctttcttctgt

SEQ ID NO: 884376 - DNA, 15 bp, Homo sapiens
ctcctttcttctgtt

SEQ ID NO: 884377 - DNA, 15 bp, Homo sapiens
tcctttcttctgttt

SEQ ID NO: 884378 - DNA, 15 bp, Homo sapiens
cctttcttctgtttc

SEQ ID NO: 884379 - DNA, 15 bp, Homo sapiens
ctttcttctgtttca

SEQ ID NO: 884380 - DNA, 15 bp, Homo sapiens
tttcttctgtttcaa

SEQ ID NO: 884381 - DNA, 15 bp, Homo sapiens
ttcttctgtttcaag

SEQ ID NO: 884382 - DNA, 15 bp, Homo sapiens
tcttctgtttcaagg

SEQ ID NO: 884383 - DNA, 15 bp, Homo sapiens
cttctgtttcaagga

SEQ ID NO: 884384 - DNA, 15 bp, Homo sapiens
ttctgtttcaaggag

SEQ ID NO: 884385 - DNA, 15 bp, Homo sapiens
tctgtttcaaggaga

SEQ ID NO: 884386 - DNA, 15 bp, Homo sapiens
ctgtttcaaggagat

SEQ ID NO: 884387 - DNA, 15 bp, Homo sapiens
tgtttcaaggagatt

SEQ ID NO: 884388 - DNA, 15 bp, Homo sapiens
gtttcaaggagatta

SEQ ID NO: 884389 - DNA, 15 bp, Homo sapiens
tttcaaggagattaa

SEQ ID NO: 884390 - DNA, 15 bp, Homo sapiens
ttcaaggagattaat

SEQ ID NO: 884391 - DNA, 15 bp, Homo sapiens
tcaaggagattaatt

SEQ ID NO: 884392 - DNA, 15 bp, Homo sapiens
caaggagattaattc

SEQ ID NO: 884393 - DNA, 15 bp, Homo sapiens
aaggagattaattca

SEQ ID NO: 884394 - DNA, 15 bp, Homo sapiens
aggagattaattcaa

SEQ ID NO: 884395 - DNA, 15 bp, Homo sapiens
ggagattaattcaaa

SEQ ID NO: 884396 - DNA, 15 bp, Homo sapiens
gagattaattcaaat

SEQ ID NO: 884397 - DNA, 15 bp, Homo sapiens
agattaattcaaata

SEQ ID NO: 884398 - DNA, 15 bp, Homo sapiens
gattaattcaaataa

SEQ ID NO: 884399 - DNA, 15 bp, Homo sapiens
attaattcaaataac

SEQ ID NO: 884400 - DNA, 15 bp, Homo sapiens
ttaattcaaataaca

SEQ ID NO: 884401 - DNA, 15 bp, Homo sapiens
taattcaaataacat

SEQ ID NO: 884402 - DNA, 15 bp, Homo sapiens
aattcaaataacata

SEQ ID NO: 884403 - DNA, 15 bp, Homo sapiens
attcaaataacataa

SEQ ID NO: 884404 - DNA, 15 bp, Homo sapiens
ttcaaataacataag

SEQ ID NO: 884405 - DNA, 15 bp, Homo sapiens
tcaaataacataagt

SEQ ID NO: 884406 - DNA, 15 bp, Homo sapiens
caaataacataagta

SEQ ID NO: 884407 - DNA, 15 bp, Homo sapiens
aaataacataagtaa

SEQ ID NO: 884408 - DNA, 15 bp, Homo sapiens
aataacataagtaag

SEQ ID NO: 884409 - DNA, 15 bp, Homo sapiens
ataacataagtaaga

SEQ ID NO: 884410 - DNA, 15 bp, Homo sapiens
taacataagtaagag

SEQ ID NO: 884411 - DNA, 15 bp, Homo sapiens
aacataagtaagagc

SEQ ID NO: 884412 - DNA, 15 bp, Homo sapiens
acataagtaagagca

SEQ ID NO: 884413 - DNA, 15 bp, Homo sapiens
cataagtaagagcaa

SEQ ID NO: 884414 - DNA, 15 bp, Homo sapiens
ataagtaagagcaat

SEQ ID NO: 884415 - DNA, 15 bp, Homo sapiens
taagtaagagcaata

SEQ ID NO: 884416 - DNA, 15 bp, Homo sapiens
aagtaagagcaataa

SEQ ID NO: 884417 - DNA, 15 bp, Homo sapiens
agtaagagcaataaa

SEQ ID NO: 884418 - DNA, 15 bp, Homo sapiens
gtaagagcaataaag

SEQ ID NO: 884419 - DNA, 15 bp, Homo sapiens
taagagcaataaaga

SEQ ID NO: 884420 - DNA, 15 bp, Homo sapiens
aagagcaataaagat

SEQ ID NO: 884421 - DNA, 15 bp, Homo sapiens
agagcaataaagata

SEQ ID NO: 884422 - DNA, 15 bp, Homo sapiens
gagcaataaagataa

SEQ ID NO: 884423 - DNA, 15 bp, Homo sapiens
agcaataaagataaa

SEQ ID NO: 884424 - DNA, 15 bp, Homo sapiens
gcaataaagataaag

SEQ ID NO: 884425 - DNA, 15 bp, Homo sapiens
caataaagataaagt

SEQ ID NO: 884426 - DNA, 15 bp, Homo sapiens
aataaagataaagtt

SEQ ID NO: 884427 - DNA, 15 bp, Homo sapiens
ataaagataaagttt

SEQ ID NO: 884428 - DNA, 15 bp, Homo sapiens
taaagataaagtttg

SEQ ID NO: 884429 - DNA, 15 bp, Homo sapiens
aaagataaagtttgc

SEQ ID NO: 884430 - DNA, 15 bp, Homo sapiens
aagataaagtttgca

SEQ ID NO: 884431 - DNA, 15 bp, Homo sapiens
agataaagtttgcaa

SEQ ID NO: 884432 - DNA, 15 bp, Homo sapiens
gataaagtttgcaat

SEQ ID NO: 884433 - DNA, 15 bp, Homo sapiens
ataaagtttgcaatt

SEQ ID NO: 884434 - DNA, 15 bp, Homo sapiens
taaagtttgcaattt

SEQ ID NO: 884435 - DNA, 15 bp, Homo sapiens
aaagtttgcaatttt

SEQ ID NO: 884436 - DNA, 15 bp, Homo sapiens
aagtttgcaattttc

SEQ ID NO: 884437 - DNA, 15 bp, Homo sapiens
agtttgcaattttcc

SEQ ID NO: 884438 - DNA, 15 bp, Homo sapiens
gtttgcaattttccc

SEQ ID NO: 884439 - DNA, 15 bp, Homo sapiens
tttgcaattttcccg

SEQ ID NO: 884440 - DNA, 15 bp, Homo sapiens
ttgcaattttcccgt

SEQ ID NO: 884441 - DNA, 15 bp, Homo sapiens
tgcaattttcccgtc

SEQ ID NO: 884442 - DNA, 15 bp, Homo sapiens
gcaattttcccgtcc

SEQ ID NO: 884443 - DNA, 15 bp, Homo sapiens
caattttcccgtcct

SEQ ID NO: 884444 - DNA, 15 bp, Homo sapiens
aattttcccgtcctc

SEQ ID NO: 884445 - DNA, 15 bp, Homo sapiens
attttcccgtcctcc

SEQ ID NO: 884446 - DNA, 15 bp, Homo sapiens
ttttcccgtcctccc

SEQ ID NO: 884447 - DNA, 15 bp, Homo sapiens
tttcccgtcctccca

SEQ ID NO: 884448 - DNA, 15 bp, Homo sapiens
ttcccgtcctcccat

SEQ ID NO: 884449 - DNA, 15 bp, Homo sapiens
tcccgtcctcccatc

SEQ ID NO: 884450 - DNA, 15 bp, Homo sapiens
cccgtcctcccatct

SEQ ID NO: 884451 - DNA, 15 bp, Homo sapiens
ccgtcctcccatctc

SEQ ID NO: 884452 - DNA, 15 bp, Homo sapiens
cgtcctcccatctcc

SEQ ID NO: 884453 - DNA, 15 bp, Homo sapiens
gtcctcccatctcca

SEQ ID NO: 884454 - DNA, 15 bp, Homo sapiens
tcctcccatctccaa

SEQ ID NO: 884455 - DNA, 15 bp, Homo sapiens
cctcccatctccaac

SEQ ID NO: 884456 - DNA, 15 bp, Homo sapiens
ctcccatctccaact

SEQ ID NO: 884457 - DNA, 15 bp, Homo sapiens
tcccatctccaactc

SEQ ID NO: 884458 - DNA, 15 bp, Homo sapiens
cccatctccaactcc

SEQ ID NO: 884459 - DNA, 15 bp, Homo sapiens
ccatctccaactccc

SEQ ID NO: 884460 - DNA, 15 bp, Homo sapiens
catctccaactccct

SEQ ID NO: 884461 - DNA, 15 bp, Homo sapiens
atctccaactccctt

SEQ ID NO: 884462 - DNA, 15 bp, Homo sapiens
tctccaactcccttt

SEQ ID NO: 884463 - DNA, 15 bp, Homo sapiens
ctccaactccctttt

SEQ ID NO: 884464 - DNA, 15 bp, Homo sapiens
tccaactcccttttg

SEQ ID NO: 884465 - DNA, 15 bp, Homo sapiens
ccaactcccttttgt

SEQ ID NO: 884466 - DNA, 15 bp, Homo sapiens
caactcccttttgta

SEQ ID NO: 884467 - DNA, 15 bp, Homo sapiens
aactcccttttgtaa

SEQ ID NO: 884468 - DNA, 15 bp, Homo sapiens
actcccttttgtaaa

SEQ ID NO: 884469 - DNA, 15 bp, Homo sapiens
ctcccttttgtaaac

SEQ ID NO: 884470 - DNA, 15 bp, Homo sapiens
tcccttttgtaaaca

SEQ ID NO: 884471 - DNA, 15 bp, Homo sapiens
cccttttgtaaacag

SEQ ID NO: 884472 - DNA, 15 bp, Homo sapiens
ccttttgtaaacagg

SEQ ID NO: 884473 - DNA, 15 bp, Homo sapiens
cttttgtaaacaggg

SEQ ID NO: 884474 - DNA, 15 bp, Homo sapiens
ttttgtaaacaggga

SEQ ID NO: 884475 - DNA, 15 bp, Homo sapiens
tttgtaaacagggat

SEQ ID NO: 884476 - DNA, 15 bp, Homo sapiens
ttgtaaacagggatg

SEQ ID NO: 884477 - DNA, 15 bp, Homo sapiens
tgtaaacagggatgc

SEQ ID NO: 884478 - DNA, 15 bp, Homo sapiens
gtaaacagggatgca

SEQ ID NO: 884479 - DNA, 15 bp, Homo sapiens
taaacagggatgcag

SEQ ID NO: 884480 - DNA, 15 bp, Homo sapiens
aaacagggatgcaga

SEQ ID NO: 884481 - DNA, 15 bp, Homo sapiens
aacagggatgcagat

SEQ ID NO: 884482 - DNA, 15 bp, Homo sapiens
acagggatgcagatt

SEQ ID NO: 884483 - DNA, 15 bp, Homo sapiens
cagggatgcagattc

SEQ ID NO: 884484 - DNA, 15 bp, Homo sapiens
agggatgcagattct

SEQ ID NO: 884485 - DNA, 15 bp, Homo sapiens
gggatgcagattcta

SEQ ID NO: 884486 - DNA, 15 bp, Homo sapiens
ggatgcagattctat

SEQ ID NO: 884487 - DNA, 15 bp, Homo sapiens
gatgcagattctatt

SEQ ID NO: 884488 - DNA, 15 bp, Homo sapiens
atgcagattctattt

SEQ ID NO: 884489 - DNA, 15 bp, Homo sapiens
tgcagattctatttg

SEQ ID NO: 884490 - DNA, 15 bp, Homo sapiens
gcagattctatttgc

SEQ ID NO: 884491 - DNA, 15 bp, Homo sapiens
cagattctatttgcc

SEQ ID NO: 884492 - DNA, 15 bp, Homo sapiens
agattctatttgcca

SEQ ID NO: 884493 - DNA, 15 bp, Homo sapiens
gattctatttgccag

SEQ ID NO: 884494 - DNA, 15 bp, Homo sapiens
attctatttgccagt

SEQ ID NO: 884495 - DNA, 15 bp, Homo sapiens
ttctatttgccagta

SEQ ID NO: 884496 - DNA, 15 bp, Homo sapiens
tctatttgccagtat

SEQ ID NO: 884497 - DNA, 15 bp, Homo sapiens
ctatttgccagtata

SEQ ID NO: 884498 - DNA, 15 bp, Homo sapiens
tatttgccagtatac

SEQ ID NO: 884499 - DNA, 15 bp, Homo sapiens
atttgccagtataca

SEQ ID NO: 884500 - DNA, 15 bp, Homo sapiens
tttgccagtatacaa

SEQ ID NO: 884501 - DNA, 15 bp, Homo sapiens
ttgccagtatacaat

SEQ ID NO: 884502 - DNA, 15 bp, Homo sapiens
tgccagtatacaatg

SEQ ID NO: 884503 - DNA, 15 bp, Homo sapiens
gccagtatacaatgg

SEQ ID NO: 884504 - DNA, 15 bp, Homo sapiens
ccagtatacaatggt

SEQ ID NO: 884505 - DNA, 15 bp, Homo sapiens
cagtatacaatggtg

SEQ ID NO: 884506 - DNA, 15 bp, Homo sapiens
agtatacaatggtga

SEQ ID NO: 884507 - DNA, 15 bp, Homo sapiens
gtatacaatggtgat

SEQ ID NO: 884508 - DNA, 15 bp, Homo sapiens
tatacaatggtgatc

SEQ ID NO: 884509 - DNA, 15 bp, Homo sapiens
atacaatggtgatcc

SEQ ID NO: 884510 - DNA, 15 bp, Homo sapiens
tacaatggtgatcca

SEQ ID NO: 884511 - DNA, 15 bp, Homo sapiens
acaatggtgatccag

SEQ ID NO: 884512 - DNA, 15 bp, Homo sapiens
caatggtgatccagg

SEQ ID NO: 884513 - DNA, 15 bp, Homo sapiens
aatggtgatccaggg

SEQ ID NO: 884514 - DNA, 15 bp, Homo sapiens
atggtgatccagggt

SEQ ID NO: 884515 - DNA, 15 bp, Homo sapiens
tggtgatccagggtc

SEQ ID NO: 884516 - DNA, 15 bp, Homo sapiens
ggtgatccagggtct

SEQ ID NO: 884517 - DNA, 15 bp, Homo sapiens
gtgatccagggtctt

SEQ ID NO: 884518 - DNA, 15 bp, Homo sapiens
tgatccagggtctta

SEQ ID NO: 884519 - DNA, 15 bp, Homo sapiens
gatccagggtcttaa

SEQ ID NO: 884520 - DNA, 15 bp, Homo sapiens
atccagggtcttaat

SEQ ID NO: 884521 - DNA, 15 bp, Homo sapiens
tccagggtcttaatg

SEQ ID NO: 884522 - DNA, 15 bp, Homo sapiens
ccagggtcttaatgt

SEQ ID NO: 884523 - DNA, 15 bp, Homo sapiens
cagggtcttaatgtg

SEQ ID NO: 884524 - DNA, 15 bp, Homo sapiens
agggtcttaatgtgg

SEQ ID NO: 884525 - DNA, 15 bp, Homo sapiens
gggtcttaatgtggg

SEQ ID NO: 884526 - DNA, 15 bp, Homo sapiens
ggtcttaatgtgggt

SEQ ID NO: 884527 - DNA, 15 bp, Homo sapiens
gtcttaatgtgggta

SEQ ID NO: 884528 - DNA, 15 bp, Homo sapiens
tcttaatgtgggtag

SEQ ID NO: 884529 - DNA, 15 bp, Homo sapiens
cttaatgtgggtagt

SEQ ID NO: 884530 - DNA, 15 bp, Homo sapiens
ttaatgtgggtagtg

SEQ ID NO: 884531 - DNA, 15 bp, Homo sapiens
taatgtgggtagtga

SEQ ID NO: 884532 - DNA, 15 bp, Homo sapiens
aatgtgggtagtgac

SEQ ID NO: 884533 - DNA, 15 bp, Homo sapiens
atgtgggtagtgact

SEQ ID NO: 884534 - DNA, 15 bp, Homo sapiens
tgtgggtagtgactt

SEQ ID NO: 884535 - DNA, 15 bp, Homo sapiens
gtgggtagtgacttc

SEQ ID NO: 884536 - DNA, 15 bp, Homo sapiens
tgggtagtgacttcc

SEQ ID NO: 884537 - DNA, 15 bp, Homo sapiens
gggtagtgacttccc

SEQ ID NO: 884538 - DNA, 15 bp, Homo sapiens
ggtagtgacttccca

SEQ ID NO: 884539 - DNA, 15 bp, Homo sapiens
gtagtgacttcccaa

SEQ ID NO: 884540 - DNA, 15 bp, Homo sapiens
tagtgacttcccaat

SEQ ID NO: 884541 - DNA, 15 bp, Homo sapiens
agtgacttcccaatg

SEQ ID NO: 884542 - DNA, 15 bp, Homo sapiens
gtgacttcccaatgc

SEQ ID NO: 884543 - DNA, 15 bp, Homo sapiens
tgacttcccaatgca

SEQ ID NO: 884544 - DNA, 15 bp, Homo sapiens
gacttcccaatgcat

SEQ ID NO: 884545 - DNA, 15 bp, Homo sapiens
acttcccaatgcatt

SEQ ID NO: 884546 - DNA, 15 bp, Homo sapiens
cttcccaatgcattt

SEQ ID NO: 884547 - DNA, 15 bp, Homo sapiens
ttcccaatgcatttt

SEQ ID NO: 884548 - DNA, 15 bp, Homo sapiens
tcccaatgcattttg

SEQ ID NO: 884549 - DNA, 15 bp, Homo sapiens
cccaatgcattttga

SEQ ID NO: 884550 - DNA, 15 bp, Homo sapiens
ccaatgcattttgaa

SEQ ID NO: 884551 - DNA, 15 bp, Homo sapiens
caatgcattttgaat

SEQ ID NO: 884552 - DNA, 15 bp, Homo sapiens
aatgcattttgaata

SEQ ID NO: 884553 - DNA, 15 bp, Homo sapiens
atgcattttgaatat

SEQ ID NO: 884554 - DNA, 15 bp, Homo sapiens
tgcattttgaatatt

SEQ ID NO: 884555 - DNA, 15 bp, Homo sapiens
gcattttgaatattt

SEQ ID NO: 884556 - DNA, 15 bp, Homo sapiens
cattttgaatatttc

SEQ ID NO: 884557 - DNA, 15 bp, Homo sapiens
attttgaatatttct

SEQ ID NO: 884558 - DNA, 15 bp, Homo sapiens
ttttgaatatttctc

SEQ ID NO: 884559 - DNA, 15 bp, Homo sapiens
tttgaatatttctcc

SEQ ID NO: 884560 - DNA, 15 bp, Homo sapiens
ttgaatatttctcct

SEQ ID NO: 884561 - DNA, 15 bp, Homo sapiens
tgaatatttctcctg

SEQ ID NO: 884562 - DNA, 15 bp, Homo sapiens
gaatatttctcctga

SEQ ID NO: 884563 - DNA, 15 bp, Homo sapiens
aatatttctcctgaa

SEQ ID NO: 884564 - DNA, 15 bp, Homo sapiens
atatttctcctgaaa

SEQ ID NO: 884565 - DNA, 15 bp, Homo sapiens
tatttctcctgaaat

SEQ ID NO: 884566 - DNA, 15 bp, Homo sapiens
atttctcctgaaatt

SEQ ID NO: 884567 - DNA, 15 bp, Homo sapiens
tttctcctgaaatta

SEQ ID NO: 884568 - DNA, 15 bp, Homo sapiens
ttctcctgaaattaa

SEQ ID NO: 884569 - DNA, 15 bp, Homo sapiens
tctcctgaaattaaa

SEQ ID NO: 884570 - DNA, 15 bp, Homo sapiens
ctcctgaaattaaag

SEQ ID NO: 884571 - DNA, 15 bp, Homo sapiens
tcctgaaattaaaga

SEQ ID NO: 884572 - DNA, 15 bp, Homo sapiens
cctgaaattaaagag

SEQ ID NO: 884573 - DNA, 15 bp, Homo sapiens
ctgaaattaaagagt

SEQ ID NO: 884574 - DNA, 15 bp, Homo sapiens
tgaaattaaagagtt

SEQ ID NO: 884575 - DNA, 15 bp, Homo sapiens
gaaattaaagagttc

SEQ ID NO: 884576 - DNA, 15 bp, Homo sapiens
aaattaaagagttcc

SEQ ID NO: 884577 - DNA, 15 bp, Homo sapiens
aattaaagagttcca

SEQ ID NO: 884578 - DNA, 15 bp, Homo sapiens
attaaagagttccaa

SEQ ID NO: 884579 - DNA, 15 bp, Homo sapiens
ttaaagagttccaag

SEQ ID NO: 884580 - DNA, 15 bp, Homo sapiens
taaagagttccaagt

SEQ ID NO: 884581 - DNA, 15 bp, Homo sapiens
aaagagttccaagtt

SEQ ID NO: 884582 - DNA, 15 bp, Homo sapiens
aagagttccaagttg

SEQ ID NO: 884583 - DNA, 15 bp, Homo sapiens
agagttccaagttgc

SEQ ID NO: 884584 - DNA, 15 bp, Homo sapiens
gagttccaagttgca

SEQ ID NO: 884585 - DNA, 15 bp, Homo sapiens
agttccaagttgcat

SEQ ID NO: 884586 - DNA, 15 bp, Homo sapiens
gttccaagttgcatt

SEQ ID NO: 884587 - DNA, 15 bp, Homo sapiens
ttccaagttgcattt

SEQ ID NO: 884588 - DNA, 15 bp, Homo sapiens
tccaagttgcatttt

SEQ ID NO: 884589 - DNA, 15 bp, Homo sapiens
ccaagttgcattttc

SEQ ID NO: 884590 - DNA, 15 bp, Homo sapiens
caagttgcattttcc

SEQ ID NO: 884591 - DNA, 15 bp, Homo sapiens
aagttgcattttcct

SEQ ID NO: 884592 - DNA, 15 bp, Homo sapiens
agttgcattttcctt

SEQ ID NO: 884593 - DNA, 15 bp, Homo sapiens
gttgcattttccttt

SEQ ID NO: 884594 - DNA, 15 bp, Homo sapiens
ttgcattttcctttt

SEQ ID NO: 884595 - DNA, 15 bp, Homo sapiens
tgcattttccttttc

SEQ ID NO: 884596 - DNA, 15 bp, Homo sapiens
gcattttccttttcc

SEQ ID NO: 884597 - DNA, 15 bp, Homo sapiens
cattttccttttcct

SEQ ID NO: 884598 - DNA, 15 bp, Homo sapiens
attttccttttccta

SEQ ID NO: 884599 - DNA, 15 bp, Homo sapiens
ttttccttttcctaa

SEQ ID NO: 884600 - DNA, 15 bp, Homo sapiens
tttccttttcctaaa

SEQ ID NO: 884601 - DNA, 15 bp, Homo sapiens
ttccttttcctaaat

SEQ ID NO: 884602 - DNA, 15 bp, Homo sapiens
tccttttcctaaatg

SEQ ID NO: 884603 - DNA, 15 bp, Homo sapiens
ccttttcctaaatgc

SEQ ID NO: 884604 - DNA, 15 bp, Homo sapiens
cttttcctaaatgca

SEQ ID NO: 884605 - DNA, 15 bp, Homo sapiens
ttttcctaaatgcaa

SEQ ID NO: 884606 - DNA, 15 bp, Homo sapiens
tttcctaaatgcaaa

SEQ ID NO: 884607 - DNA, 15 bp, Homo sapiens
ttcctaaatgcaaaa

SEQ ID NO: 884608 - DNA, 15 bp, Homo sapiens
tcctaaatgcaaaaa

SEQ ID NO: 884609 - DNA, 15 bp, Homo sapiens
cctaaatgcaaaaag

SEQ ID NO: 884610 - DNA, 15 bp, Homo sapiens
ctaaatgcaaaaaga

SEQ ID NO: 884611 - DNA, 15 bp, Homo sapiens
taaatgcaaaaagat

SEQ ID NO: 884612 - DNA, 15 bp, Homo sapiens
aaatgcaaaaagatg

SEQ ID NO: 884613 - DNA, 15 bp, Homo sapiens
aatgcaaaaagatga

SEQ ID NO: 884614 - DNA, 15 bp, Homo sapiens
atgcaaaaagatgac

SEQ ID NO: 884615 - DNA, 15 bp, Homo sapiens
tgcaaaaagatgaca

SEQ ID NO: 884616 - DNA, 15 bp, Homo sapiens
gcaaaaagatgacag

SEQ ID NO: 884617 - DNA, 15 bp, Homo sapiens
caaaaagatgacagg

SEQ ID NO: 884618 - DNA, 15 bp, Homo sapiens
aaaaagatgacaggg

SEQ ID NO: 884619 - DNA, 15 bp, Homo sapiens
aaaagatgacaggga

SEQ ID NO: 884620 - DNA, 15 bp, Homo sapiens
aaagatgacagggag

SEQ ID NO: 884621 - DNA, 15 bp, Homo sapiens
aagatgacagggaga

SEQ ID NO: 884622 - DNA, 15 bp, Homo sapiens
agatgacagggagaa

SEQ ID NO: 884623 - DNA, 15 bp, Homo sapiens
gatgacagggagaat

SEQ ID NO: 884624 - DNA, 15 bp, Homo sapiens
atgacagggagaata

SEQ ID NO: 884625 - DNA, 15 bp, Homo sapiens
tgacagggagaatat

SEQ ID NO: 884626 - DNA, 15 bp, Homo sapiens
gacagggagaatatt

SEQ ID NO: 884627 - DNA, 15 bp, Homo sapiens
acagggagaatatta

SEQ ID NO: 884628 - DNA, 15 bp, Homo sapiens
cagggagaatattac

SEQ ID NO: 884629 - DNA, 15 bp, Homo sapiens
agggagaatattact

SEQ ID NO: 884630 - DNA, 15 bp, Homo sapiens
gggagaatattactg

SEQ ID NO: 884631 - DNA, 15 bp, Homo sapiens
ggagaatattactgc

SEQ ID NO: 884632 - DNA, 15 bp, Homo sapiens
gagaatattactgca

SEQ ID NO: 884633 - DNA, 15 bp, Homo sapiens
agaatattactgcac

SEQ ID NO: 884634 - DNA, 15 bp, Homo sapiens
gaatattactgcacc

SEQ ID NO: 884635 - DNA, 15 bp, Homo sapiens
aatattactgcacct

SEQ ID NO: 884636 - DNA, 15 bp, Homo sapiens
atattactgcacctc

SEQ ID NO: 884637 - DNA, 15 bp, Homo sapiens
tattactgcacctct

SEQ ID NO: 884638 - DNA, 15 bp, Homo sapiens
attactgcacctctt

SEQ ID NO: 884639 - DNA, 15 bp, Homo sapiens
ttactgcacctcttt

SEQ ID NO: 884640 - DNA, 15 bp, Homo sapiens
tactgcacctctttt

SEQ ID NO: 884641 - DNA, 15 bp, Homo sapiens
actgcacctcttttc

SEQ ID NO: 884642 - DNA, 15 bp, Homo sapiens
ctgcacctcttttca

SEQ ID NO: 884643 - DNA, 15 bp, Homo sapiens
tgcacctcttttcaa

SEQ ID NO: 884644 - DNA, 15 bp, Homo sapiens
gcacctcttttcaat

SEQ ID NO: 884645 - DNA, 15 bp, Homo sapiens
cacctcttttcaatt

SEQ ID NO: 884646 - DNA, 15 bp, Homo sapiens
acctcttttcaattt

SEQ ID NO: 884647 - DNA, 15 bp, Homo sapiens
cctcttttcaatttt

SEQ ID NO: 884648 - DNA, 15 bp, Homo sapiens
ctcttttcaattttc

SEQ ID NO: 884649 - DNA, 15 bp, Homo sapiens
tcttttcaattttcc

SEQ ID NO: 884650 - DNA, 15 bp, Homo sapiens
cttttcaattttcca

SEQ ID NO: 884651 - DNA, 15 bp, Homo sapiens
ttttcaattttccag

SEQ ID NO: 884652 - DNA, 15 bp, Homo sapiens
tttcaattttccagt

SEQ ID NO: 884653 - DNA, 15 bp, Homo sapiens
ttcaattttccagtg

SEQ ID NO: 884654 - DNA, 15 bp, Homo sapiens
tcaattttccagtga

SEQ ID NO: 884655 - DNA, 15 bp, Homo sapiens
caattttccagtgaa

SEQ ID NO: 884656 - DNA, 15 bp, Homo sapiens
aattttccagtgaaa

SEQ ID NO: 884657 - DNA, 15 bp, Homo sapiens
attttccagtgaaat

SEQ ID NO: 884658 - DNA, 15 bp, Homo sapiens
ttttccagtgaaata

SEQ ID NO: 884659 - DNA, 15 bp, Homo sapiens
tttccagtgaaatat

SEQ ID NO: 884660 - DNA, 15 bp, Homo sapiens
ttccagtgaaatata

SEQ ID NO: 884661 - DNA, 15 bp, Homo sapiens
tccagtgaaatataa

SEQ ID NO: 884662 - DNA, 15 bp, Homo sapiens
ccagtgaaatataaa

SEQ ID NO: 884663 - DNA, 15 bp, Homo sapiens
cagtgaaatataaag

SEQ ID NO: 884664 - DNA, 15 bp, Homo sapiens
agtgaaatataaagg

SEQ ID NO: 884665 - DNA, 15 bp, Homo sapiens
gtgaaatataaaggc

SEQ ID NO: 884666 - DNA, 15 bp, Homo sapiens
tgaaatataaaggct

SEQ ID NO: 884667 - DNA, 15 bp, Homo sapiens
gaaatataaaggctt

SEQ ID NO: 884668 - DNA, 15 bp, Homo sapiens
aaatataaaggcttt

SEQ ID NO: 884669 - DNA, 15 bp, Homo sapiens
aatataaaggctttc

SEQ ID NO: 884670 - DNA, 15 bp, Homo sapiens
atataaaggctttct

SEQ ID NO: 884671 - DNA, 15 bp, Homo sapiens
tataaaggctttctt

SEQ ID NO: 884672 - DNA, 15 bp, Homo sapiens
ataaaggctttcttc

SEQ ID NO: 884673 - DNA, 15 bp, Homo sapiens
taaaggctttcttct

SEQ ID NO: 884674 - DNA, 15 bp, Homo sapiens
aaaggctttcttctt

SEQ ID NO: 884675 - DNA, 15 bp, Homo sapiens
aaggctttcttcttt

SEQ ID NO: 884676 - DNA, 15 bp, Homo sapiens
aggctttcttcttta

SEQ ID NO: 884677 - DNA, 15 bp, Homo sapiens
ggctttcttctttaa

SEQ ID NO: 884678 - DNA, 15 bp, Homo sapiens
gctttcttctttaat

SEQ ID NO: 884679 - DNA, 15 bp, Homo sapiens
ctttcttctttaata

SEQ ID NO: 884680 - DNA, 15 bp, Homo sapiens
tttcttctttaatat

SEQ ID NO: 884681 - DNA, 15 bp, Homo sapiens
ttcttctttaatatt

SEQ ID NO: 884682 - DNA, 15 bp, Homo sapiens
tcttctttaatattt

SEQ ID NO: 884683 - DNA, 15 bp, Homo sapiens
cttctttaatatttc

SEQ ID NO: 884684 - DNA, 15 bp, Homo sapiens
ttctttaatatttca

SEQ ID NO: 884685 - DNA, 15 bp, Homo sapiens
tctttaatatttcac

SEQ ID NO: 884686 - DNA, 15 bp, Homo sapiens
ctttaatatttcaca

SEQ ID NO: 884687 - DNA, 15 bp, Homo sapiens
tttaatatttcacaa

SEQ ID NO: 884688 - DNA, 15 bp, Homo sapiens
ttaatatttcacaaa

SEQ ID NO: 884689 - DNA, 15 bp, Homo sapiens
taatatttcacaaag

SEQ ID NO: 884690 - DNA, 15 bp, Homo sapiens
aatatttcacaaagt

SEQ ID NO: 884691 - DNA, 15 bp, Homo sapiens
atatttcacaaagtt

SEQ ID NO: 884692 - DNA, 15 bp, Homo sapiens
tatttcacaaagttc

SEQ ID NO: 884693 - DNA, 15 bp, Homo sapiens
atttcacaaagttcc

SEQ ID NO: 884694 - DNA, 15 bp, Homo sapiens
tttcacaaagttcct

SEQ ID NO: 884695 - DNA, 15 bp, Homo sapiens
ttcacaaagttcctc

SEQ ID NO: 884696 - DNA, 15 bp, Homo sapiens
tcacaaagttcctcc

SEQ ID NO: 884697 - DNA, 15 bp, Homo sapiens
cacaaagttcctcca

SEQ ID NO: 884698 - DNA, 15 bp, Homo sapiens
acaaagttcctccag

SEQ ID NO: 884699 - DNA, 15 bp, Homo sapiens
caaagttcctccagt

SEQ ID NO: 884700 - DNA, 15 bp, Homo sapiens
aaagttcctccagtt

SEQ ID NO: 884701 - DNA, 15 bp, Homo sapiens
aagttcctccagttc

SEQ ID NO: 884702 - DNA, 15 bp, Homo sapiens
agttcctccagttcc

SEQ ID NO: 884703 - DNA, 15 bp, Homo sapiens
gttcctccagttccc

SEQ ID NO: 884704 - DNA, 15 bp, Homo sapiens
ttcctccagttccca

SEQ ID NO: 884705 - DNA, 15 bp, Homo sapiens
tcctccagttcccag

SEQ ID NO: 884706 - DNA, 15 bp, Homo sapiens
cctccagttcccagt

SEQ ID NO: 884707 - DNA, 15 bp, Homo sapiens
ctccagttcccagtg

SEQ ID NO: 884708 - DNA, 15 bp, Homo sapiens
tccagttcccagtgg

SEQ ID NO: 884709 - DNA, 15 bp, Homo sapiens
ccagttcccagtggg

SEQ ID NO: 884710 - DNA, 15 bp, Homo sapiens
cagttcccagtggga

SEQ ID NO: 884711 - DNA, 15 bp, Homo sapiens
agttcccagtgggag

SEQ ID NO: 884712 - DNA, 15 bp, Homo sapiens
gttcccagtgggagt

SEQ ID NO: 884713 - DNA, 15 bp, Homo sapiens
ttcccagtgggagtc

SEQ ID NO: 884714 - DNA, 15 bp, Homo sapiens
tcccagtgggagtct

SEQ ID NO: 884715 - DNA, 15 bp, Homo sapiens
cccagtgggagtcta

SEQ ID NO: 884716 - DNA, 15 bp, Homo sapiens
ccagtgggagtctat

SEQ ID NO: 884717 - DNA, 15 bp, Homo sapiens
cagtgggagtctatg

SEQ ID NO: 884718 - DNA, 15 bp, Homo sapiens
agtgggagtctatgc

SEQ ID NO: 884719 - DNA, 15 bp, Homo sapiens
gtgggagtctatgct

SEQ ID NO: 884720 - DNA, 15 bp, Homo sapiens
tgggagtctatgctg

SEQ ID NO: 884721 - DNA, 15 bp, Homo sapiens
gggagtctatgctgg

SEQ ID NO: 884722 - DNA, 15 bp, Homo sapiens
ggagtctatgctggg

SEQ ID NO: 884723 - DNA, 15 bp, Homo sapiens
gagtctatgctgggt

SEQ ID NO: 884724 - DNA, 15 bp, Homo sapiens
agtctatgctgggta

SEQ ID NO: 884725 - DNA, 15 bp, Homo sapiens
gtctatgctgggtaa

SEQ ID NO: 884726 - DNA, 15 bp, Homo sapiens
tctatgctgggtaat

SEQ ID NO: 884727 - DNA, 15 bp, Homo sapiens
ctatgctgggtaatg

SEQ ID NO: 884728 - DNA, 15 bp, Homo sapiens
tatgctgggtaatgt

SEQ ID NO: 884729 - DNA, 15 bp, Homo sapiens
atgctgggtaatgtt

SEQ ID NO: 884730 - DNA, 15 bp, Homo sapiens
tgctgggtaatgttt

SEQ ID NO: 884731 - DNA, 15 bp, Homo sapiens
gctgggtaatgtttg

SEQ ID NO: 884732 - DNA, 15 bp, Homo sapiens
ctgggtaatgtttgc

SEQ ID NO: 884733 - DNA, 15 bp, Homo sapiens
tgggtaatgtttgct

SEQ ID NO: 884734 - DNA, 15 bp, Homo sapiens
gggtaatgtttgcta

SEQ ID NO: 884735 - DNA, 15 bp, Homo sapiens
ggtaatgtttgctaa

SEQ ID NO: 884736 - DNA, 15 bp, Homo sapiens
gtaatgtttgctaat

SEQ ID NO: 884737 - DNA, 15 bp, Homo sapiens
taatgtttgctaatt

SEQ ID NO: 884738 - DNA, 15 bp, Homo sapiens
aatgtttgctaatta

SEQ ID NO: 884739 - DNA, 15 bp, Homo sapiens
atgtttgctaattac

SEQ ID NO: 884740 - DNA, 15 bp, Homo sapiens
tgtttgctaattacc

SEQ ID NO: 884741 - DNA, 15 bp, Homo sapiens
gtttgctaattacca

SEQ ID NO: 884742 - DNA, 15 bp, Homo sapiens
tttgctaattaccaa

SEQ ID NO: 884743 - DNA, 15 bp, Homo sapiens
ttgctaattaccaac

SEQ ID NO: 884744 - DNA, 15 bp, Homo sapiens
tgctaattaccaaca

SEQ ID NO: 884745 - DNA, 15 bp, Homo sapiens
gctaattaccaacaa

SEQ ID NO: 884746 - DNA, 15 bp, Homo sapiens
ctaattaccaacaac

SEQ ID NO: 884747 - DNA, 15 bp, Homo sapiens
taattaccaacaaca

SEQ ID NO: 884748 - DNA, 15 bp, Homo sapiens
aattaccaacaacaa

SEQ ID NO: 884749 - DNA, 15 bp, Homo sapiens
attaccaacaacaaa

SEQ ID NO: 884750 - DNA, 15 bp, Homo sapiens
ttaccaacaacaaaa

SEQ ID NO: 884751 - DNA, 15 bp, Homo sapiens
taccaacaacaaaac

SEQ ID NO: 884752 - DNA, 15 bp, Homo sapiens
accaacaacaaaact

SEQ ID NO: 884753 - DNA, 15 bp, Homo sapiens
ccaacaacaaaacta

SEQ ID NO: 884754 - DNA, 15 bp, Homo sapiens
caacaacaaaactag

SEQ ID NO: 884755 - DNA, 15 bp, Homo sapiens
aacaacaaaactaga

SEQ ID NO: 884756 - DNA, 15 bp, Homo sapiens
acaacaaaactagac

SEQ ID NO: 884757 - DNA, 15 bp, Homo sapiens
caacaaaactagaca

SEQ ID NO: 884758 - DNA, 15 bp, Homo sapiens
aacaaaactagacat

SEQ ID NO: 884759 - DNA, 15 bp, Homo sapiens
acaaaactagacata

SEQ ID NO: 884760 - DNA, 15 bp, Homo sapiens
caaaactagacatac

SEQ ID NO: 884761 - DNA, 15 bp, Homo sapiens
aaaactagacataca

SEQ ID NO: 884762 - DNA, 15 bp, Homo sapiens
aaactagacatacaa

SEQ ID NO: 884763 - DNA, 15 bp, Homo sapiens
aactagacatacaac

SEQ ID NO: 884764 - DNA, 15 bp, Homo sapiens
actagacatacaacg

SEQ ID NO: 884765 - DNA, 15 bp, Homo sapiens
ctagacatacaacgt

SEQ ID NO: 884766 - DNA, 15 bp, Homo sapiens
tagacatacaacgtt

SEQ ID NO: 884767 - DNA, 15 bp, Homo sapiens
agacatacaacgttg

SEQ ID NO: 884768 - DNA, 15 bp, Homo sapiens
gacatacaacgttgg

SEQ ID NO: 884769 - DNA, 15 bp, Homo sapiens
acatacaacgttggt

SEQ ID NO: 884770 - DNA, 15 bp, Homo sapiens
catacaacgttggta

SEQ ID NO: 884771 - DNA, 15 bp, Homo sapiens
atacaacgttggtaa

SEQ ID NO: 884772 - DNA, 15 bp, Homo sapiens
tacaacgttggtaaa

SEQ ID NO: 884773 - DNA, 15 bp, Homo sapiens
acaacgttggtaaat

SEQ ID NO: 884774 - DNA, 15 bp, Homo sapiens
caacgttggtaaatt

SEQ ID NO: 884775 - DNA, 15 bp, Homo sapiens
aacgttggtaaatta

SEQ ID NO: 884776 - DNA, 15 bp, Homo sapiens
acgttggtaaattac

SEQ ID NO: 884777 - DNA, 15 bp, Homo sapiens
cgttggtaaattacc

SEQ ID NO: 884778 - DNA, 15 bp, Homo sapiens
gttggtaaattacct

SEQ ID NO: 884779 - DNA, 15 bp, Homo sapiens
ttggtaaattacctg

SEQ ID NO: 884780 - DNA, 15 bp, Homo sapiens
tggtaaattacctga

SEQ ID NO: 884781 - DNA, 15 bp, Homo sapiens
ggtaaattacctgac

SEQ ID NO: 884782 - DNA, 15 bp, Homo sapiens
gtaaattacctgacc

SEQ ID NO: 884783 - DNA, 15 bp, Homo sapiens
taaattacctgaccc

SEQ ID NO: 884784 - DNA, 15 bp, Homo sapiens
aaattacctgaccct

SEQ ID NO: 884785 - DNA, 15 bp, Homo sapiens
aattacctgaccctt

SEQ ID NO: 884786 - DNA, 15 bp, Homo sapiens
attacctgacccttt

SEQ ID NO: 884787 - DNA, 15 bp, Homo sapiens
ttacctgaccctttc

SEQ ID NO: 884788 - DNA, 15 bp, Homo sapiens
tacctgaccctttcc

SEQ ID NO: 884789 - DNA, 15 bp, Homo sapiens
acctgaccctttcct

SEQ ID NO: 884790 - DNA, 15 bp, Homo sapiens
cctgaccctttcctt

SEQ ID NO: 884791 - DNA, 15 bp, Homo sapiens
ctgaccctttccttt

SEQ ID NO: 884792 - DNA, 15 bp, Homo sapiens
tgaccctttcctttt

SEQ ID NO: 884793 - DNA, 15 bp, Homo sapiens
gaccctttccttttt

SEQ ID NO: 884794 - DNA, 15 bp, Homo sapiens
accctttccttttta

SEQ ID NO: 884795 - DNA, 15 bp, Homo sapiens
ccctttcctttttaa

SEQ ID NO: 884796 - DNA, 15 bp, Homo sapiens
cctttcctttttaat

SEQ ID NO: 884797 - DNA, 15 bp, Homo sapiens
ctttcctttttaatg

SEQ ID NO: 884798 - DNA, 15 bp, Homo sapiens
tttcctttttaatga

SEQ ID NO: 884799 - DNA, 15 bp, Homo sapiens
ttcctttttaatgag

SEQ ID NO: 884800 - DNA, 15 bp, Homo sapiens
tcctttttaatgaga

SEQ ID NO: 884801 - DNA, 15 bp, Homo sapiens
cctttttaatgagac

SEQ ID NO: 884802 - DNA, 15 bp, Homo sapiens
ctttttaatgagaca

SEQ ID NO: 884803 - DNA, 15 bp, Homo sapiens
tttttaatgagacaa

SEQ ID NO: 884804 - DNA, 15 bp, Homo sapiens
ttttaatgagacaac

SEQ ID NO: 884805 - DNA, 15 bp, Homo sapiens
tttaatgagacaaca

SEQ ID NO: 884806 - DNA, 15 bp, Homo sapiens
ttaatgagacaacaa

SEQ ID NO: 884807 - DNA, 15 bp, Homo sapiens
taatgagacaacaag

SEQ ID NO: 884808 - DNA, 15 bp, Homo sapiens
aatgagacaacaagg

SEQ ID NO: 884809 - DNA, 15 bp, Homo sapiens
atgagacaacaagga

SEQ ID NO: 884810 - DNA, 15 bp, Homo sapiens
tgagacaacaaggat

SEQ ID NO: 884811 - DNA, 15 bp, Homo sapiens
gagacaacaaggatt

SEQ ID NO: 884812 - DNA, 15 bp, Homo sapiens
agacaacaaggattt

SEQ ID NO: 884813 - DNA, 15 bp, Homo sapiens
gacaacaaggatttc

SEQ ID NO: 884814 - DNA, 15 bp, Homo sapiens
acaacaaggatttcg

SEQ ID NO: 884815 - DNA, 15 bp, Homo sapiens
caacaaggatttcgc

SEQ ID NO: 884816 - DNA, 15 bp, Homo sapiens
aacaaggatttcgcg

SEQ ID NO: 884817 - DNA, 15 bp, Homo sapiens
acaaggatttcgcga

SEQ ID NO: 884818 - DNA, 15 bp, Homo sapiens
caaggatttcgcgaa

SEQ ID NO: 884819 - DNA, 15 bp, Homo sapiens
aaggatttcgcgaag

SEQ ID NO: 884820 - DNA, 15 bp, Homo sapiens
aggatttcgcgaagt

SEQ ID NO: 884821 - DNA, 15 bp, Homo sapiens
ggatttcgcgaagtg

SEQ ID NO: 884822 - DNA, 15 bp, Homo sapiens
gatttcgcgaagtgg

SEQ ID NO: 884823 - DNA, 15 bp, Homo sapiens
atttcgcgaagtggt

SEQ ID NO: 884824 - DNA, 15 bp, Homo sapiens
tttcgcgaagtggtg

SEQ ID NO: 884825 - DNA, 15 bp, Homo sapiens
ttcgcgaagtggtgt

SEQ ID NO: 884826 - DNA, 15 bp, Homo sapiens
tcgcgaagtggtgtt

SEQ ID NO: 884827 - DNA, 15 bp, Homo sapiens
cgcgaagtggtgttg

SEQ ID NO: 884828 - DNA, 15 bp, Homo sapiens
gcgaagtggtgttgt

SEQ ID NO: 884829 - DNA, 15 bp, Homo sapiens
cgaagtggtgttgtt

SEQ ID NO: 884830 - DNA, 15 bp, Homo sapiens
gaagtggtgttgttt

SEQ ID NO: 884831 - DNA, 15 bp, Homo sapiens
aagtggtgttgtttc

SEQ ID NO: 884832 - DNA, 15 bp, Homo sapiens
agtggtgttgtttca

SEQ ID NO: 884833 - DNA, 15 bp, Homo sapiens
gtggtgttgtttcac

SEQ ID NO: 884834 - DNA, 15 bp, Homo sapiens
tggtgttgtttcact

SEQ ID NO: 884835 - DNA, 15 bp, Homo sapiens
ggtgttgtttcactg

SEQ ID NO: 884836 - DNA, 15 bp, Homo sapiens
gtgttgtttcactgg

SEQ ID NO: 884837 - DNA, 15 bp, Homo sapiens
tgttgtttcactggt

SEQ ID NO: 884838 - DNA, 15 bp, Homo sapiens
gttgtttcactggtt

SEQ ID NO: 884839 - DNA, 15 bp, Homo sapiens
ttgtttcactggtta

SEQ ID NO: 884840 - DNA, 15 bp, Homo sapiens
tgtttcactggttaa

SEQ ID NO: 884841 - DNA, 15 bp, Homo sapiens
gtttcactggttaat

SEQ ID NO: 884842 - DNA, 15 bp, Homo sapiens
tttcactggttaatg

SEQ ID NO: 884843 - DNA, 15 bp, Homo sapiens
ttcactggttaatgg

SEQ ID NO: 884844 - DNA, 15 bp, Homo sapiens
tcactggttaatggt

SEQ ID NO: 884845 - DNA, 15 bp, Homo sapiens
cactggttaatggtg

SEQ ID NO: 884846 - DNA, 15 bp, Homo sapiens
actggttaatggtgt

SEQ ID NO: 884847 - DNA, 15 bp, Homo sapiens
ctggttaatggtgtc

SEQ ID NO: 884848 - DNA, 15 bp, Homo sapiens
tggttaatggtgtca

SEQ ID NO: 884849 - DNA, 15 bp, Homo sapiens
ggttaatggtgtcag

SEQ ID NO: 884850 - DNA, 15 bp, Homo sapiens
gttaatggtgtcagc

SEQ ID NO: 884851 - DNA, 15 bp, Homo sapiens
ttaatggtgtcagca

SEQ ID NO: 884852 - DNA, 15 bp, Homo sapiens
taatggtgtcagcaa

SEQ ID NO: 884853 - DNA, 15 bp, Homo sapiens
aatggtgtcagcaat

SEQ ID NO: 884854 - DNA, 15 bp, Homo sapiens
atggtgtcagcaatg

SEQ ID NO: 884855 - DNA, 15 bp, Homo sapiens
tggtgtcagcaatgt

SEQ ID NO: 884856 - DNA, 15 bp, Homo sapiens
ggtgtcagcaatgtt

SEQ ID NO: 884857 - DNA, 15 bp, Homo sapiens
gtgtcagcaatgttg

SEQ ID NO: 884858 - DNA, 15 bp, Homo sapiens
tgtcagcaatgttgt

SEQ ID NO: 884859 - DNA, 15 bp, Homo sapiens
gtcagcaatgttgta

SEQ ID NO: 884860 - DNA, 15 bp, Homo sapiens
tcagcaatgttgtaa

SEQ ID NO: 884861 - DNA, 15 bp, Homo sapiens
cagcaatgttgtaat

SEQ ID NO: 884862 - DNA, 15 bp, Homo sapiens
agcaatgttgtaatt

SEQ ID NO: 884863 - DNA, 15 bp, Homo sapiens
gcaatgttgtaattg

SEQ ID NO: 884864 - DNA, 15 bp, Homo sapiens
caatgttgtaattgt

SEQ ID NO: 884865 - DNA, 15 bp, Homo sapiens
aatgttgtaattgtg

SEQ ID NO: 884866 - DNA, 15 bp, Homo sapiens
atgttgtaattgtgg

SEQ ID NO: 884867 - DNA, 15 bp, Homo sapiens
tgttgtaattgtggg

SEQ ID NO: 884868 - DNA, 15 bp, Homo sapiens
gttgtaattgtgggt

SEQ ID NO: 884869 - DNA, 15 bp, Homo sapiens
ttgtaattgtgggtt

SEQ ID NO: 884870 - DNA, 15 bp, Homo sapiens
tgtaattgtgggttg

SEQ ID NO: 884871 - DNA, 15 bp, Homo sapiens
gtaattgtgggttga

SEQ ID NO: 884872 - DNA, 15 bp, Homo sapiens
taattgtgggttgag

SEQ ID NO: 884873 - DNA, 15 bp, Homo sapiens
aattgtgggttgaga

SEQ ID NO: 884874 - DNA, 15 bp, Homo sapiens
attgtgggttgagac

SEQ ID NO: 884875 - DNA, 15 bp, Homo sapiens
ttgtgggttgagaca

SEQ ID NO: 884876 - DNA, 15 bp, Homo sapiens
tgtgggttgagacac

SEQ ID NO: 884877 - DNA, 15 bp, Homo sapiens
gtgggttgagacaca

SEQ ID NO: 884878 - DNA, 15 bp, Homo sapiens
tgggttgagacacat

SEQ ID NO: 884879 - DNA, 15 bp, Homo sapiens
gggttgagacacatt

SEQ ID NO: 884880 - DNA, 15 bp, Homo sapiens
ggttgagacacatta

SEQ ID NO: 884881 - DNA, 15 bp, Homo sapiens
gttgagacacattag

SEQ ID NO: 884882 - DNA, 15 bp, Homo sapiens
ttgagacacattagc

SEQ ID NO: 884883 - DNA, 15 bp, Homo sapiens
tgagacacattagct

SEQ ID NO: 884884 - DNA, 15 bp, Homo sapiens
gagacacattagctg

SEQ ID NO: 884885 - DNA, 15 bp, Homo sapiens
agacacattagctga

SEQ ID NO: 884886 - DNA, 15 bp, Homo sapiens
gacacattagctgaa

SEQ ID NO: 884887 - DNA, 15 bp, Homo sapiens
acacattagctgaac

SEQ ID NO: 884888 - DNA, 15 bp, Homo sapiens
cacattagctgaaca

SEQ ID NO: 884889 - DNA, 15 bp, Homo sapiens
acattagctgaacaa

SEQ ID NO: 884890 - DNA, 15 bp, Homo sapiens
cattagctgaacaac

SEQ ID NO: 884891 - DNA, 15 bp, Homo sapiens
attagctgaacaacc

SEQ ID NO: 884892 - DNA, 15 bp, Homo sapiens
ttagctgaacaacca

SEQ ID NO: 884893 - DNA, 15 bp, Homo sapiens
tagctgaacaaccac

SEQ ID NO: 884894 - DNA, 15 bp, Homo sapiens
agctgaacaaccaca

SEQ ID NO: 884895 - DNA, 15 bp, Homo sapiens
gctgaacaaccacat

SEQ ID NO: 884896 - DNA, 15 bp, Homo sapiens
ctgaacaaccacatg

SEQ ID NO: 884897 - DNA, 15 bp, Homo sapiens
tgaacaaccacatgt

SEQ ID NO: 884898 - DNA, 15 bp, Homo sapiens
gaacaaccacatgta

SEQ ID NO: 884899 - DNA, 15 bp, Homo sapiens
aacaaccacatgtag

SEQ ID NO: 884900 - DNA, 15 bp, Homo sapiens
acaaccacatgtaga

SEQ ID NO: 884901 - DNA, 15 bp, Homo sapiens
caaccacatgtagaa

SEQ ID NO: 884902 - DNA, 15 bp, Homo sapiens
aaccacatgtagaaa

SEQ ID NO: 884903 - DNA, 15 bp, Homo sapiens
accacatgtagaaag

SEQ ID NO: 884904 - DNA, 15 bp, Homo sapiens
ccacatgtagaaagg

SEQ ID NO: 884905 - DNA, 15 bp, Homo sapiens
cacatgtagaaaggg

SEQ ID NO: 884906 - DNA, 15 bp, Homo sapiens
acatgtagaaagggc

SEQ ID NO: 884907 - DNA, 15 bp, Homo sapiens
catgtagaaagggct

SEQ ID NO: 884908 - DNA, 15 bp, Homo sapiens
atgtagaaagggctt

SEQ ID NO: 884909 - DNA, 15 bp, Homo sapiens
tgtagaaagggcttt

SEQ ID NO: 884910 - DNA, 15 bp, Homo sapiens
gtagaaagggctttc

SEQ ID NO: 884911 - DNA, 15 bp, Homo sapiens
tagaaagggctttct

SEQ ID NO: 884912 - DNA, 15 bp, Homo sapiens
agaaagggctttctc

SEQ ID NO: 884913 - DNA, 15 bp, Homo sapiens
gaaagggctttctct

SEQ ID NO: 884914 - DNA, 15 bp, Homo sapiens
aaagggctttctctc

SEQ ID NO: 884915 - DNA, 15 bp, Homo sapiens
aagggctttctctcg

SEQ ID NO: 884916 - DNA, 15 bp, Homo sapiens
agggctttctctcga

SEQ ID NO: 884917 - DNA, 15 bp, Homo sapiens
gggctttctctcgac

SEQ ID NO: 884918 - DNA, 15 bp, Homo sapiens
ggctttctctcgaca

SEQ ID NO: 884919 - DNA, 15 bp, Homo sapiens
gctttctctcgacaa

SEQ ID NO: 884920 - DNA, 15 bp, Homo sapiens
ctttctctcgacaag

SEQ ID NO: 884921 - DNA, 15 bp, Homo sapiens
tttctctcgacaagc

SEQ ID NO: 884922 - DNA, 15 bp, Homo sapiens
ttctctcgacaagct

SEQ ID NO: 884923 - DNA, 15 bp, Homo sapiens
tctctcgacaagctg

SEQ ID NO: 884924 - DNA, 15 bp, Homo sapiens
ctctcgacaagctgt

SEQ ID NO: 884925 - DNA, 15 bp, Homo sapiens
tctcgacaagctgtt

SEQ ID NO: 884926 - DNA, 15 bp, Homo sapiens
ctcgacaagctgttt

SEQ ID NO: 884927 - DNA, 15 bp, Homo sapiens
tcgacaagctgtttg

SEQ ID NO: 884928 - DNA, 15 bp, Homo sapiens
cgacaagctgtttgg

SEQ ID NO: 884929 - DNA, 15 bp, Homo sapiens
gacaagctgtttgga

SEQ ID NO: 884930 - DNA, 15 bp, Homo sapiens
acaagctgtttggag

SEQ ID NO: 884931 - DNA, 15 bp, Homo sapiens
caagctgtttggaga

SEQ ID NO: 884932 - DNA, 15 bp, Homo sapiens
aagctgtttggagac

SEQ ID NO: 884933 - DNA, 15 bp, Homo sapiens
agctgtttggagact

SEQ ID NO: 884934 - DNA, 15 bp, Homo sapiens
gctgtttggagacta

SEQ ID NO: 884935 - DNA, 15 bp, Homo sapiens
ctgtttggagactag

SEQ ID NO: 884936 - DNA, 15 bp, Homo sapiens
tgtttggagactaga

SEQ ID NO: 884937 - DNA, 15 bp, Homo sapiens
gtttggagactagaa

SEQ ID NO: 884938 - DNA, 15 bp, Homo sapiens
tttggagactagaac

SEQ ID NO: 884939 - DNA, 15 bp, Homo sapiens
ttggagactagaacc

SEQ ID NO: 884940 - DNA, 15 bp, Homo sapiens
tggagactagaacca

SEQ ID NO: 884941 - DNA, 15 bp, Homo sapiens
ggagactagaaccat

SEQ ID NO: 884942 - DNA, 15 bp, Homo sapiens
gagactagaaccata

SEQ ID NO: 884943 - DNA, 15 bp, Homo sapiens
agactagaaccatat

SEQ ID NO: 884944 - DNA, 15 bp, Homo sapiens
gactagaaccatatt

SEQ ID NO: 884945 - DNA, 15 bp, Homo sapiens
actagaaccatatta

SEQ ID NO: 884946 - DNA, 15 bp, Homo sapiens
ctagaaccatattat

SEQ ID NO: 884947 - DNA, 15 bp, Homo sapiens
tagaaccatattatc

SEQ ID NO: 884948 - DNA, 15 bp, Homo sapiens
agaaccatattatca

SEQ ID NO: 884949 - DNA, 15 bp, Homo sapiens
gaaccatattatcat

SEQ ID NO: 884950 - DNA, 15 bp, Homo sapiens
aaccatattatcatt

SEQ ID NO: 884951 - DNA, 15 bp, Homo sapiens
accatattatcatta

SEQ ID NO: 884952 - DNA, 15 bp, Homo sapiens
ccatattatcattaa

SEQ ID NO: 884953 - DNA, 15 bp, Homo sapiens
catattatcattaag

SEQ ID NO: 884954 - DNA, 15 bp, Homo sapiens
atattatcattaagc

SEQ ID NO: 884955 - DNA, 15 bp, Homo sapiens
tattatcattaagcc

SEQ ID NO: 884956 - DNA, 15 bp, Homo sapiens
attatcattaagcct

SEQ ID NO: 884957 - DNA, 15 bp, Homo sapiens
ttatcattaagccta

SEQ ID NO: 884958 - DNA, 15 bp, Homo sapiens
tatcattaagcctat

SEQ ID NO: 884959 - DNA, 15 bp, Homo sapiens
atcattaagcctatg

SEQ ID NO: 884960 - DNA, 15 bp, Homo sapiens
tcattaagcctatgt

SEQ ID NO: 884961 - DNA, 15 bp, Homo sapiens
cattaagcctatgtc

SEQ ID NO: 884962 - DNA, 15 bp, Homo sapiens
attaagcctatgtca

SEQ ID NO: 884963 - DNA, 15 bp, Homo sapiens
ttaagcctatgtcat

SEQ ID NO: 884964 - DNA, 15 bp, Homo sapiens
taagcctatgtcatt

SEQ ID NO: 884965 - DNA, 15 bp, Homo sapiens
aagcctatgtcattt

SEQ ID NO: 884966 - DNA, 15 bp, Homo sapiens
agcctatgtcatttg

SEQ ID NO: 884967 - DNA, 15 bp, Homo sapiens
gcctatgtcatttgc

SEQ ID NO: 884968 - DNA, 15 bp, Homo sapiens
cctatgtcatttgca

SEQ ID NO: 884969 - DNA, 15 bp, Homo sapiens
ctatgtcatttgcat

SEQ ID NO: 884970 - DNA, 15 bp, Homo sapiens
tatgtcatttgcatg

SEQ ID NO: 884971 - DNA, 15 bp, Homo sapiens
atgtcatttgcatgc

SEQ ID NO: 884972 - DNA, 15 bp, Homo sapiens
tgtcatttgcatgct

SEQ ID NO: 884973 - DNA, 15 bp, Homo sapiens
gtcatttgcatgctg

SEQ ID NO: 884974 - DNA, 15 bp, Homo sapiens
tcatttgcatgctgc

SEQ ID NO: 884975 - DNA, 15 bp, Homo sapiens
catttgcatgctgct

SEQ ID NO: 884976 - DNA, 15 bp, Homo sapiens
atttgcatgctgcta

SEQ ID NO: 884977 - DNA, 15 bp, Homo sapiens
tttgcatgctgctaa

SEQ ID NO: 884978 - DNA, 15 bp, Homo sapiens
ttgcatgctgctaat

SEQ ID NO: 884979 - DNA, 15 bp, Homo sapiens
tgcatgctgctaatc

SEQ ID NO: 884980 - DNA, 15 bp, Homo sapiens
gcatgctgctaatcg

SEQ ID NO: 884981 - DNA, 15 bp, Homo sapiens
catgctgctaatcgc

SEQ ID NO: 884982 - DNA, 15 bp, Homo sapiens
atgctgctaatcgct

SEQ ID NO: 884983 - DNA, 15 bp, Homo sapiens
tgctgctaatcgctt

SEQ ID NO: 884984 - DNA, 15 bp, Homo sapiens
gctgctaatcgctta

SEQ ID NO: 884985 - DNA, 15 bp, Homo sapiens
ctgctaatcgcttac

SEQ ID NO: 884986 - DNA, 15 bp, Homo sapiens
tgctaatcgcttact

SEQ ID NO: 884987 - DNA, 15 bp, Homo sapiens
gctaatcgcttactt

SEQ ID NO: 884988 - DNA, 15 bp, Homo sapiens
ctaatcgcttacttt

SEQ ID NO: 884989 - DNA, 15 bp, Homo sapiens
taatcgcttacttta

SEQ ID NO: 884990 - DNA, 15 bp, Homo sapiens
aatcgcttactttat

SEQ ID NO: 884991 - DNA, 15 bp, Homo sapiens
atcgcttactttatt

SEQ ID NO: 884992 - DNA, 15 bp, Homo sapiens
tcgcttactttatta

SEQ ID NO: 884993 - DNA, 15 bp, Homo sapiens
cgcttactttattat

SEQ ID NO: 884994 - DNA, 15 bp, Homo sapiens
gcttactttattatc

SEQ ID NO: 884995 - DNA, 15 bp, Homo sapiens
cttactttattatcc

SEQ ID NO: 884996 - DNA, 15 bp, Homo sapiens
ttactttattatcct

SEQ ID NO: 884997 - DNA, 15 bp, Homo sapiens
tactttattatcctg

SEQ ID NO: 884998 - DNA, 15 bp, Homo sapiens
actttattatcctgc

SEQ ID NO: 884999 - DNA, 15 bp, Homo sapiens
ctttattatcctgca

SEQ ID NO: 885000 - DNA, 15 bp, Homo sapiens
tttattatcctgcat

SEQ ID NO: 885001 - DNA, 15 bp, Homo sapiens
ttattatcctgcata

SEQ ID NO: 885002 - DNA, 15 bp, Homo sapiens
tattatcctgcatat

SEQ ID NO: 885003 - DNA, 15 bp, Homo sapiens
attatcctgcatatc

SEQ ID NO: 885004 - DNA, 15 bp, Homo sapiens
ttatcctgcatatcc

SEQ ID NO: 885005 - DNA, 15 bp, Homo sapiens
tatcctgcatatcca

SEQ ID NO: 885006 - DNA, 15 bp, Homo sapiens
atcctgcatatccat

SEQ ID NO: 885007 - DNA, 15 bp, Homo sapiens
tcctgcatatccatt

SEQ ID NO: 885008 - DNA, 15 bp, Homo sapiens
cctgcatatccattg

SEQ ID NO: 885009 - DNA, 15 bp, Homo sapiens
ctgcatatccattgt

SEQ ID NO: 885010 - DNA, 15 bp, Homo sapiens
tgcatatccattgtc

SEQ ID NO: 885011 - DNA, 15 bp, Homo sapiens
gcatatccattgtct

SEQ ID NO: 885012 - DNA, 15 bp, Homo sapiens
catatccattgtctt

SEQ ID NO: 885013 - DNA, 15 bp, Homo sapiens
atatccattgtcttt

SEQ ID NO: 885014 - DNA, 15 bp, Homo sapiens
tatccattgtctttc

SEQ ID NO: 885015 - DNA, 15 bp, Homo sapiens
atccattgtctttct

SEQ ID NO: 885016 - DNA, 15 bp, Homo sapiens
tccattgtctttctt

SEQ ID NO: 885017 - DNA, 15 bp, Homo sapiens
ccattgtctttcttt

SEQ ID NO: 885018 - DNA, 15 bp, Homo sapiens
cattgtctttcttta

SEQ ID NO: 885019 - DNA, 15 bp, Homo sapiens
attgtctttctttaa

SEQ ID NO: 885020 - DNA, 15 bp, Homo sapiens
ttgtctttctttaat

SEQ ID NO: 885021 - DNA, 15 bp, Homo sapiens
tgtctttctttaatt

SEQ ID NO: 885022 - DNA, 15 bp, Homo sapiens
gtctttctttaatta

SEQ ID NO: 885023 - DNA, 15 bp, Homo sapiens
tctttctttaattac

SEQ ID NO: 885024 - DNA, 15 bp, Homo sapiens
ctttctttaattact

SEQ ID NO: 885025 - DNA, 15 bp, Homo sapiens
tttctttaattactc

SEQ ID NO: 885026 - DNA, 15 bp, Homo sapiens
ttctttaattactct

SEQ ID NO: 885027 - DNA, 15 bp, Homo sapiens
tctttaattactctt

SEQ ID NO: 885028 - DNA, 15 bp, Homo sapiens
ctttaattactcttt

SEQ ID NO: 885029 - DNA, 15 bp, Homo sapiens
tttaattactcttta

SEQ ID NO: 885030 - DNA, 15 bp, Homo sapiens
ttaattactctttaa

SEQ ID NO: 885031 - DNA, 15 bp, Homo sapiens
taattactctttaaa

SEQ ID NO: 885032 - DNA, 15 bp, Homo sapiens
aattactctttaaat

SEQ ID NO: 885033 - DNA, 15 bp, Homo sapiens
attactctttaaatt

SEQ ID NO: 885034 - DNA, 15 bp, Homo sapiens
ttactctttaaatta

SEQ ID NO: 885035 - DNA, 15 bp, Homo sapiens
tactctttaaattaa

SEQ ID NO: 885036 - DNA, 15 bp, Homo sapiens
actctttaaattaaa

SEQ ID NO: 885037 - DNA, 15 bp, Homo sapiens
ctctttaaattaaaa

SEQ ID NO: 885038 - DNA, 15 bp, Homo sapiens
tctttaaattaaaat

SEQ ID NO: 885039 - DNA, 15 bp, Homo sapiens
ctttaaattaaaatt

SEQ ID NO: 885040 - DNA, 15 bp, Homo sapiens
tttaaattaaaatta

SEQ ID NO: 885041 - DNA, 15 bp, Homo sapiens
ttaaattaaaattaa

SEQ ID NO: 885042 - DNA, 15 bp, Homo sapiens
taaattaaaattaaa

SEQ ID NO: 885043 - DNA, 15 bp, Homo sapiens
aaattaaaattaaaa

SEQ ID NO: 885044 - DNA, 15 bp, Homo sapiens
aattaaaattaaaaa

SEQ ID NO: 885045 - DNA, 15 bp, Homo sapiens
attaaaattaaaaat

SEQ ID NO: 885046 - DNA, 15 bp, Homo sapiens
ttaaaattaaaaata

SEQ ID NO: 885047 - DNA, 15 bp, Homo sapiens
taaaattaaaaatag

SEQ ID NO: 885048 - DNA, 15 bp, Homo sapiens
aaaattaaaaatagt

SEQ ID NO: 885049 - DNA, 15 bp, Homo sapiens
aaattaaaaatagtt

SEQ ID NO: 885050 - DNA, 15 bp, Homo sapiens
aattaaaaatagttt

SEQ ID NO: 885051 - DNA, 15 bp, Homo sapiens
attaaaaatagtttt

SEQ ID NO: 885052 - DNA, 15 bp, Homo sapiens
ttaaaaatagtttta

SEQ ID NO: 885053 - DNA, 15 bp, Homo sapiens
taaaaatagttttaa

SEQ ID NO: 885054 - DNA, 15 bp, Homo sapiens
aaaaatagttttaaa

SEQ ID NO: 885055 - DNA, 15 bp, Homo sapiens
aaaatagttttaaag

SEQ ID NO: 885056 - DNA, 15 bp, Homo sapiens
aaatagttttaaagc

SEQ ID NO: 885057 - DNA, 15 bp, Homo sapiens
aatagttttaaagcc

SEQ ID NO: 885058 - DNA, 15 bp, Homo sapiens
atagttttaaagccc

SEQ ID NO: 885059 - DNA, 15 bp, Homo sapiens
tagttttaaagccca

SEQ ID NO: 885060 - DNA, 15 bp, Homo sapiens
agttttaaagcccac

SEQ ID NO: 885061 - DNA, 15 bp, Homo sapiens
gttttaaagcccaca

SEQ ID NO: 885062 - DNA, 15 bp, Homo sapiens
ttttaaagcccacaa

SEQ ID NO: 885063 - DNA, 15 bp, Homo sapiens
tttaaagcccacaat

SEQ ID NO: 885064 - DNA, 15 bp, Homo sapiens
ttaaagcccacaatg

SEQ ID NO: 885065 - DNA, 15 bp, Homo sapiens
taaagcccacaatgc

SEQ ID NO: 885066 - DNA, 15 bp, Homo sapiens
aaagcccacaatgcc

SEQ ID NO: 885067 - DNA, 15 bp, Homo sapiens
aagcccacaatgccc

SEQ ID NO: 885068 - DNA, 15 bp, Homo sapiens
agcccacaatgcccg

SEQ ID NO: 885069 - DNA, 15 bp, Homo sapiens
gcccacaatgcccga

SEQ ID NO: 885070 - DNA, 15 bp, Homo sapiens
cccacaatgcccgag

SEQ ID NO: 885071 - DNA, 15 bp, Homo sapiens
ccacaatgcccgaga

SEQ ID NO: 885072 - DNA, 15 bp, Homo sapiens
cacaatgcccgagat

SEQ ID NO: 885073 - DNA, 15 bp, Homo sapiens
acaatgcccgagata

SEQ ID NO: 885074 - DNA, 15 bp, Homo sapiens
caatgcccgagatag

SEQ ID NO: 885075 - DNA, 15 bp, Homo sapiens
aatgcccgagatagc

SEQ ID NO: 885076 - DNA, 15 bp, Homo sapiens
atgcccgagatagca

SEQ ID NO: 885077 - DNA, 15 bp, Homo sapiens
tgcccgagatagcat

SEQ ID NO: 885078 - DNA, 15 bp, Homo sapiens
gcccgagatagcatc

SEQ ID NO: 885079 - DNA, 15 bp, Homo sapiens
cccgagatagcatct

SEQ ID NO: 885080 - DNA, 15 bp, Homo sapiens
ccgagatagcatctt

SEQ ID NO: 885081 - DNA, 15 bp, Homo sapiens
cgagatagcatcttg

SEQ ID NO: 885082 - DNA, 15 bp, Homo sapiens
gagatagcatcttga

SEQ ID NO: 885083 - DNA, 15 bp, Homo sapiens
agatagcatcttgat

SEQ ID NO: 885084 - DNA, 15 bp, Homo sapiens
gatagcatcttgatt

SEQ ID NO: 885085 - DNA, 15 bp, Homo sapiens
atagcatcttgatta

SEQ ID NO: 885086 - DNA, 15 bp, Homo sapiens
tagcatcttgattat

SEQ ID NO: 885087 - DNA, 15 bp, Homo sapiens
agcatcttgattatg

SEQ ID NO: 885088 - DNA, 15 bp, Homo sapiens
gcatcttgattatga

SEQ ID NO: 885089 - DNA, 15 bp, Homo sapiens
catcttgattatgaa

SEQ ID NO: 885090 - DNA, 15 bp, Homo sapiens
atcttgattatgaag

SEQ ID NO: 885091 - DNA, 15 bp, Homo sapiens
tcttgattatgaaga

SEQ ID NO: 885092 - DNA, 15 bp, Homo sapiens
cttgattatgaagat

SEQ ID NO: 885093 - DNA, 15 bp, Homo sapiens
ttgattatgaagata

SEQ ID NO: 885094 - DNA, 15 bp, Homo sapiens
tgattatgaagataa

SEQ ID NO: 885095 - DNA, 15 bp, Homo sapiens
gattatgaagataac

SEQ ID NO: 885096 - DNA, 15 bp, Homo sapiens
attatgaagataact

SEQ ID NO: 885097 - DNA, 15 bp, Homo sapiens
ttatgaagataactt

SEQ ID NO: 885098 - DNA, 15 bp, Homo sapiens
tatgaagataacttc

SEQ ID NO: 885099 - DNA, 15 bp, Homo sapiens
atgaagataacttca

SEQ ID NO: 885100 - DNA, 15 bp, Homo sapiens
tgaagataacttcaa

SEQ ID NO: 885101 - DNA, 15 bp, Homo sapiens
gaagataacttcaag

SEQ ID NO: 885102 - DNA, 15 bp, Homo sapiens
aagataacttcaaga

SEQ ID NO: 885103 - DNA, 15 bp, Homo sapiens
agataacttcaagaa

SEQ ID NO: 885104 - DNA, 15 bp, Homo sapiens
gataacttcaagaaa

SEQ ID NO: 885105 - DNA, 15 bp, Homo sapiens
ataacttcaagaaaa

SEQ ID NO: 885106 - DNA, 15 bp, Homo sapiens
taacttcaagaaaat

SEQ ID NO: 885107 - DNA, 15 bp, Homo sapiens
aacttcaagaaaatg

SEQ ID NO: 885108 - DNA, 15 bp, Homo sapiens
acttcaagaaaatgg

SEQ ID NO: 885109 - DNA, 15 bp, Homo sapiens
cttcaagaaaatgga

SEQ ID NO: 885110 - DNA, 15 bp, Homo sapiens
ttcaagaaaatggaa

SEQ ID NO: 885111 - DNA, 15 bp, Homo sapiens
tcaagaaaatggaac

SEQ ID NO: 885112 - DNA, 15 bp, Homo sapiens
caagaaaatggaaca

SEQ ID NO: 885113 - DNA, 15 bp, Homo sapiens
aagaaaatggaacaa

SEQ ID NO: 885114 - DNA, 15 bp, Homo sapiens
agaaaatggaacaac

SEQ ID NO: 885115 - DNA, 15 bp, Homo sapiens
gaaaatggaacaact

SEQ ID NO: 885116 - DNA, 15 bp, Homo sapiens
aaaatggaacaactg

SEQ ID NO: 885117 - DNA, 15 bp, Homo sapiens
aaatggaacaactgg

SEQ ID NO: 885118 - DNA, 15 bp, Homo sapiens
aatggaacaactggt

SEQ ID NO: 885119 - DNA, 15 bp, Homo sapiens
atggaacaactggtt

SEQ ID NO: 885120 - DNA, 15 bp, Homo sapiens
tggaacaactggtta

SEQ ID NO: 885121 - DNA, 15 bp, Homo sapiens
ggaacaactggttat

SEQ ID NO: 885122 - DNA, 15 bp, Homo sapiens
gaacaactggttata

SEQ ID NO: 885123 - DNA, 15 bp, Homo sapiens
aacaactggttatat

SEQ ID NO: 885124 - DNA, 15 bp, Homo sapiens
acaactggttatata

SEQ ID NO: 885125 - DNA, 15 bp, Homo sapiens
caactggttatatat

SEQ ID NO: 885126 - DNA, 15 bp, Homo sapiens
aactggttatatatt

SEQ ID NO: 885127 - DNA, 15 bp, Homo sapiens
actggttatatattg

SEQ ID NO: 885128 - DNA, 15 bp, Homo sapiens
ctggttatatattgc

SEQ ID NO: 885129 - DNA, 15 bp, Homo sapiens
tggttatatattgcc

SEQ ID NO: 885130 - DNA, 15 bp, Homo sapiens
ggttatatattgcct

SEQ ID NO: 885131 - DNA, 15 bp, Homo sapiens
gttatatattgcctg

SEQ ID NO: 885132 - DNA, 15 bp, Homo sapiens
ttatatattgcctgg

SEQ ID NO: 885133 - DNA, 15 bp, Homo sapiens
tatatattgcctgga

SEQ ID NO: 885134 - DNA, 15 bp, Homo sapiens
atatattgcctggat

SEQ ID NO: 885135 - DNA, 15 bp, Homo sapiens
tatattgcctggatt

SEQ ID NO: 885136 - DNA, 15 bp, Homo sapiens
atattgcctggatta

SEQ ID NO: 885137 - DNA, 15 bp, Homo sapiens
tattgcctggattat

SEQ ID NO: 885138 - DNA, 15 bp, Homo sapiens
attgcctggattatg

SEQ ID NO: 885139 - DNA, 15 bp, Homo sapiens
ttgcctggattatga

SEQ ID NO: 885140 - DNA, 15 bp, Homo sapiens
tgcctggattatgag

SEQ ID NO: 885141 - DNA, 15 bp, Homo sapiens
gcctggattatgaga

SEQ ID NO: 885142 - DNA, 15 bp, Homo sapiens
cctggattatgagag

SEQ ID NO: 885143 - DNA, 15 bp, Homo sapiens
ctggattatgagagt

SEQ ID NO: 885144 - DNA, 15 bp, Homo sapiens
tggattatgagagtc

SEQ ID NO: 885145 - DNA, 15 bp, Homo sapiens
ggattatgagagtcc

SEQ ID NO: 885146 - DNA, 15 bp, Homo sapiens
gattatgagagtccc

SEQ ID NO: 885147 - DNA, 15 bp, Homo sapiens
attatgagagtccca

SEQ ID NO: 885148 - DNA, 15 bp, Homo sapiens
ttatgagagtcccat

SEQ ID NO: 885149 - DNA, 15 bp, Homo sapiens
tatgagagtcccatc

SEQ ID NO: 885150 - DNA, 15 bp, Homo sapiens
atgagagtcccatcg

SEQ ID NO: 885151 - DNA, 15 bp, Homo sapiens
tgagagtcccatcgt

SEQ ID NO: 885152 - DNA, 15 bp, Homo sapiens
gagagtcccatcgtt

SEQ ID NO: 885153 - DNA, 15 bp, Homo sapiens
agagtcccatcgtta

SEQ ID NO: 885154 - DNA, 15 bp, Homo sapiens
gagtcccatcgttat

SEQ ID NO: 885155 - DNA, 15 bp, Homo sapiens
agtcccatcgttatg

SEQ ID NO: 885156 - DNA, 15 bp, Homo sapiens
gtcccatcgttatgt

SEQ ID NO: 885157 - DNA, 15 bp, Homo sapiens
tcccatcgttatgta

SEQ ID NO: 885158 - DNA, 15 bp, Homo sapiens
cccatcgttatgtac

SEQ ID NO: 885159 - DNA, 15 bp, Homo sapiens
ccatcgttatgtact

SEQ ID NO: 885160 - DNA, 15 bp, Homo sapiens
catcgttatgtactg

SEQ ID NO: 885161 - DNA, 15 bp, Homo sapiens
atcgttatgtactgt

SEQ ID NO: 885162 - DNA, 15 bp, Homo sapiens
tcgttatgtactgtg

SEQ ID NO: 885163 - DNA, 15 bp, Homo sapiens
cgttatgtactgtgc

SEQ ID NO: 885164 - DNA, 15 bp, Homo sapiens
gttatgtactgtgcc

SEQ ID NO: 885165 - DNA, 15 bp, Homo sapiens
ttatgtactgtgcct

SEQ ID NO: 885166 - DNA, 15 bp, Homo sapiens
tatgtactgtgcctg

SEQ ID NO: 885167 - DNA, 15 bp, Homo sapiens
atgtactgtgcctgc

SEQ ID NO: 885168 - DNA, 15 bp, Homo sapiens
tgtactgtgcctgca

SEQ ID NO: 885169 - DNA, 15 bp, Homo sapiens
gtactgtgcctgcag

SEQ ID NO: 885170 - DNA, 15 bp, Homo sapiens
tactgtgcctgcagg

SEQ ID NO: 885171 - DNA, 15 bp, Homo sapiens
actgtgcctgcaggc

SEQ ID NO: 885172 - DNA, 15 bp, Homo sapiens
ctgtgcctgcaggcc

SEQ ID NO: 885173 - DNA, 15 bp, Homo sapiens
tgtgcctgcaggcct

SEQ ID NO: 885174 - DNA, 15 bp, Homo sapiens
gtgcctgcaggcctc

SEQ ID NO: 885175 - DNA, 15 bp, Homo sapiens
tgcctgcaggcctca

SEQ ID NO: 885176 - DNA, 15 bp, Homo sapiens
gcctgcaggcctcag

SEQ ID NO: 885177 - DNA, 15 bp, Homo sapiens
cctgcaggcctcagg

SEQ ID NO: 885178 - DNA, 15 bp, Homo sapiens
ctgcaggcctcaggg

SEQ ID NO: 885179 - DNA, 15 bp, Homo sapiens
tgcaggcctcagggg

SEQ ID NO: 885180 - DNA, 15 bp, Homo sapiens
gcaggcctcaggggc

SEQ ID NO: 885181 - DNA, 15 bp, Homo sapiens
caggcctcaggggcc

SEQ ID NO: 885182 - DNA, 15 bp, Homo sapiens
aggcctcaggggcct

SEQ ID NO: 885183 - DNA, 15 bp, Homo sapiens
ggcctcaggggccta

SEQ ID NO: 885184 - DNA, 15 bp, Homo sapiens
gcctcaggggcctaa

SEQ ID NO: 885185 - DNA, 15 bp, Homo sapiens
cctcaggggcctaat

SEQ ID NO: 885186 - DNA, 15 bp, Homo sapiens
ctcaggggcctaatt

SEQ ID NO: 885187 - DNA, 15 bp, Homo sapiens
tcaggggcctaattg

SEQ ID NO: 885188 - DNA, 15 bp, Homo sapiens
caggggcctaattgc

SEQ ID NO: 885189 - DNA, 15 bp, Homo sapiens
aggggcctaattgcg

SEQ ID NO: 885190 - DNA, 15 bp, Homo sapiens
ggggcctaattgcgg

SEQ ID NO: 885191 - DNA, 15 bp, Homo sapiens
gggcctaattgcggt

SEQ ID NO: 885192 - DNA, 15 bp, Homo sapiens
ggcctaattgcggtg

SEQ ID NO: 885193 - DNA, 15 bp, Homo sapiens
gcctaattgcggtgg

SEQ ID NO: 885194 - DNA, 15 bp, Homo sapiens
cctaattgcggtggt

SEQ ID NO: 885195 - DNA, 15 bp, Homo sapiens
ctaattgcggtggtt

SEQ ID NO: 885196 - DNA, 15 bp, Homo sapiens
taattgcggtggttt

SEQ ID NO: 885197 - DNA, 15 bp, Homo sapiens
aattgcggtggtttc

SEQ ID NO: 885198 - DNA, 15 bp, Homo sapiens
attgcggtggtttct

SEQ ID NO: 885199 - DNA, 15 bp, Homo sapiens
ttgcggtggtttctc

SEQ ID NO: 885200 - DNA, 15 bp, Homo sapiens
tgcggtggtttctct

SEQ ID NO: 885201 - DNA, 15 bp, Homo sapiens
gcggtggtttctctt

SEQ ID NO: 885202 - DNA, 15 bp, Homo sapiens
cggtggtttctcttc

SEQ ID NO: 885203 - DNA, 15 bp, Homo sapiens
ggtggtttctcttcc

SEQ ID NO: 885204 - DNA, 15 bp, Homo sapiens
gtggtttctcttcct

SEQ ID NO: 885205 - DNA, 15 bp, Homo sapiens
tggtttctcttcctt

SEQ ID NO: 885206 - DNA, 15 bp, Homo sapiens
ggtttctcttccttt

SEQ ID NO: 885207 - DNA, 15 bp, Homo sapiens
gtttctcttccttta

SEQ ID NO: 885208 - DNA, 15 bp, Homo sapiens
tttctcttcctttag

SEQ ID NO: 885209 - DNA, 15 bp, Homo sapiens
ttctcttcctttagc

SEQ ID NO: 885210 - DNA, 15 bp, Homo sapiens
tctcttcctttagcc

SEQ ID NO: 885211 - DNA, 15 bp, Homo sapiens
ctcttcctttagccc

SEQ ID NO: 885212 - DNA, 15 bp, Homo sapiens
tcttcctttagccca

SEQ ID NO: 885213 - DNA, 15 bp, Homo sapiens
cttcctttagcccat

SEQ ID NO: 885214 - DNA, 15 bp, Homo sapiens
ttcctttagcccata

SEQ ID NO: 885215 - DNA, 15 bp, Homo sapiens
tcctttagcccatag

SEQ ID NO: 885216 - DNA, 15 bp, Homo sapiens
cctttagcccatagt

SEQ ID NO: 885217 - DNA, 15 bp, Homo sapiens
ctttagcccatagtg

SEQ ID NO: 885218 - DNA, 15 bp, Homo sapiens
tttagcccatagtgt

SEQ ID NO: 885219 - DNA, 15 bp, Homo sapiens
ttagcccatagtgtt

SEQ ID NO: 885220 - DNA, 15 bp, Homo sapiens
tagcccatagtgttt

SEQ ID NO: 885221 - DNA, 15 bp, Homo sapiens
agcccatagtgtttg

SEQ ID NO: 885222 - DNA, 15 bp, Homo sapiens
gcccatagtgtttgt

SEQ ID NO: 885223 - DNA, 15 bp, Homo sapiens
cccatagtgtttgtt

SEQ ID NO: 885224 - DNA, 15 bp, Homo sapiens
ccatagtgtttgttt

SEQ ID NO: 885225 - DNA, 15 bp, Homo sapiens
catagtgtttgttta

SEQ ID NO: 885226 - DNA, 15 bp, Homo sapiens
atagtgtttgtttaa

SEQ ID NO: 885227 - DNA, 15 bp, Homo sapiens
tagtgtttgtttaat

SEQ ID NO: 885228 - DNA, 15 bp, Homo sapiens
agtgtttgtttaata

SEQ ID NO: 885229 - DNA, 15 bp, Homo sapiens
gtgtttgtttaataa

SEQ ID NO: 885230 - DNA, 15 bp, Homo sapiens
tgtttgtttaataaa

SEQ ID NO: 885231 - DNA, 15 bp, Homo sapiens
gtttgtttaataaat

SEQ ID NO: 885232 - DNA, 15 bp, Homo sapiens
tttgtttaataaatg

SEQ ID NO: 885233 - DNA, 15 bp, Homo sapiens
ttgtttaataaatgg

SEQ ID NO: 885234 - DNA, 15 bp, Homo sapiens
tgtttaataaatggt

SEQ ID NO: 885235 - DNA, 15 bp, Homo sapiens
gtttaataaatggtt

SEQ ID NO: 885236 - DNA, 15 bp, Homo sapiens
tttaataaatggtta

SEQ ID NO: 885237 - DNA, 15 bp, Homo sapiens
ttaataaatggttat

SEQ ID NO: 885238 - DNA, 15 bp, Homo sapiens
taataaatggttatt

SEQ ID NO: 885239 - DNA, 15 bp, Homo sapiens
aataaatggttattt

SEQ ID NO: 885240 - DNA, 15 bp, Homo sapiens
ataaatggttattta

SEQ ID NO: 885241 - DNA, 15 bp, Homo sapiens
taaatggttatttat

SEQ ID NO: 885242 - DNA, 15 bp, Homo sapiens
aaatggttatttatg

SEQ ID NO: 885243 - DNA, 15 bp, Homo sapiens
aatggttatttatgg

SEQ ID NO: 885244 - DNA, 15 bp, Homo sapiens
atggttatttatggc

SEQ ID NO: 885245 - DNA, 15 bp, Homo sapiens
tggttatttatggcc

SEQ ID NO: 885246 - DNA, 15 bp, Homo sapiens
ggttatttatggcct

SEQ ID NO: 885247 - DNA, 15 bp, Homo sapiens
gttatttatggcctt

SEQ ID NO: 885248 - DNA, 15 bp, Homo sapiens
ttatttatggccttc

SEQ ID NO: 885249 - DNA, 15 bp, Homo sapiens
tatttatggccttct

SEQ ID NO: 885250 - DNA, 15 bp, Homo sapiens
atttatggccttctc

SEQ ID NO: 885251 - DNA, 15 bp, Homo sapiens
tttatggccttctca

SEQ ID NO: 885252 - DNA, 15 bp, Homo sapiens
ttatggccttctcag

SEQ ID NO: 885253 - DNA, 15 bp, Homo sapiens
tatggccttctcagc

SEQ ID NO: 885254 - DNA, 15 bp, Homo sapiens
atggccttctcagcc

SEQ ID NO: 885255 - DNA, 15 bp, Homo sapiens
tggccttctcagcca

SEQ ID NO: 885256 - DNA, 15 bp, Homo sapiens
ggccttctcagccat

SEQ ID NO: 885257 - DNA, 15 bp, Homo sapiens
gccttctcagccatt

SEQ ID NO: 885258 - DNA, 15 bp, Homo sapiens
ccttctcagccatta

SEQ ID NO: 885259 - DNA, 15 bp, Homo sapiens
cttctcagccattag

SEQ ID NO: 885260 - DNA, 15 bp, Homo sapiens
ttctcagccattaga

SEQ ID NO: 885261 - DNA, 15 bp, Homo sapiens
tctcagccattagag

SEQ ID NO: 885262 - DNA, 15 bp, Homo sapiens
ctcagccattagagc

SEQ ID NO: 885263 - DNA, 15 bp, Homo sapiens
tcagccattagagca

SEQ ID NO: 885264 - DNA, 15 bp, Homo sapiens
cagccattagagcaa

SEQ ID NO: 885265 - DNA, 15 bp, Homo sapiens
agccattagagcaac

SEQ ID NO: 885266 - DNA, 15 bp, Homo sapiens
gccattagagcaact

SEQ ID NO: 885267 - DNA, 15 bp, Homo sapiens
ccattagagcaactt

SEQ ID NO: 885268 - DNA, 15 bp, Homo sapiens
cattagagcaacttt

SEQ ID NO: 885269 - DNA, 15 bp, Homo sapiens
attagagcaactttg

SEQ ID NO: 885270 - DNA, 15 bp, Homo sapiens
ttagagcaactttgg

SEQ ID NO: 885271 - DNA, 15 bp, Homo sapiens
tagagcaactttgga

SEQ ID NO: 885272 - DNA, 15 bp, Homo sapiens
agagcaactttggag

SEQ ID NO: 885273 - DNA, 15 bp, Homo sapiens
gagcaactttggaga

SEQ ID NO: 885274 - DNA, 15 bp, Homo sapiens
agcaactttggagaa

SEQ ID NO: 885275 - DNA, 15 bp, Homo sapiens
gcaactttggagaaa

SEQ ID NO: 885276 - DNA, 15 bp, Homo sapiens
caactttggagaaag

SEQ ID NO: 885277 - DNA, 15 bp, Homo sapiens
aactttggagaaagt

SEQ ID NO: 885278 - DNA, 15 bp, Homo sapiens
actttggagaaagta

SEQ ID NO: 885279 - DNA, 15 bp, Homo sapiens
ctttggagaaagtac

SEQ ID NO: 885280 - DNA, 15 bp, Homo sapiens
tttggagaaagtact

SEQ ID NO: 885281 - DNA, 15 bp, Homo sapiens
ttggagaaagtactt

SEQ ID NO: 885282 - DNA, 15 bp, Homo sapiens
tggagaaagtacttc

SEQ ID NO: 885283 - DNA, 15 bp, Homo sapiens
ggagaaagtacttcc

SEQ ID NO: 885284 - DNA, 15 bp, Homo sapiens
gagaaagtacttcct

SEQ ID NO: 885285 - DNA, 15 bp, Homo sapiens
agaaagtacttcctt

SEQ ID NO: 885286 - DNA, 15 bp, Homo sapiens
gaaagtacttccttc

SEQ ID NO: 885287 - DNA, 15 bp, Homo sapiens
aaagtacttccttct

SEQ ID NO: 885288 - DNA, 15 bp, Homo sapiens
aagtacttccttctc

SEQ ID NO: 885289 - DNA, 15 bp, Homo sapiens
agtacttccttctcc

SEQ ID NO: 885290 - DNA, 15 bp, Homo sapiens
gtacttccttctcct

SEQ ID NO: 885291 - DNA, 15 bp, Homo sapiens
tacttccttctcctt

SEQ ID NO: 885292 - DNA, 15 bp, Homo sapiens
acttccttctccttg

SEQ ID NO: 885293 - DNA, 15 bp, Homo sapiens
cttccttctccttgg

SEQ ID NO: 885294 - DNA, 15 bp, Homo sapiens
ttccttctccttggt

SEQ ID NO: 885295 - DNA, 15 bp, Homo sapiens
tccttctccttggtt

SEQ ID NO: 885296 - DNA, 15 bp, Homo sapiens
ccttctccttggttt

SEQ ID NO: 885297 - DNA, 15 bp, Homo sapiens
cttctccttggtttg

SEQ ID NO: 885298 - DNA, 15 bp, Homo sapiens
ttctccttggtttga

SEQ ID NO: 885299 - DNA, 15 bp, Homo sapiens
tctccttggtttgag

SEQ ID NO: 885300 - DNA, 15 bp, Homo sapiens
ctccttggtttgaga

SEQ ID NO: 885301 - DNA, 15 bp, Homo sapiens
tccttggtttgagaa

SEQ ID NO: 885302 - DNA, 15 bp, Homo sapiens
ccttggtttgagaag

SEQ ID NO: 885303 - DNA, 15 bp, Homo sapiens
cttggtttgagaagt

SEQ ID NO: 885304 - DNA, 15 bp, Homo sapiens
ttggtttgagaagtg

SEQ ID NO: 885305 - DNA, 15 bp, Homo sapiens
tggtttgagaagtga

SEQ ID NO: 885306 - DNA, 15 bp, Homo sapiens
ggtttgagaagtgaa

SEQ ID NO: 885307 - DNA, 15 bp, Homo sapiens
gtttgagaagtgaag

SEQ ID NO: 885308 - DNA, 15 bp, Homo sapiens
tttgagaagtgaagt

SEQ ID NO: 885309 - DNA, 15 bp, Homo sapiens
ttgagaagtgaagtt

SEQ ID NO: 885310 - DNA, 15 bp, Homo sapiens
tgagaagtgaagttt

SEQ ID NO: 885311 - DNA, 15 bp, Homo sapiens
gagaagtgaagtttt

SEQ ID NO: 885312 - DNA, 15 bp, Homo sapiens
agaagtgaagtttta

SEQ ID NO: 885313 - DNA, 15 bp, Homo sapiens
gaagtgaagttttat

SEQ ID NO: 885314 - DNA, 15 bp, Homo sapiens
aagtgaagttttatc

SEQ ID NO: 885315 - DNA, 15 bp, Homo sapiens
agtgaagttttatcc

SEQ ID NO: 885316 - DNA, 15 bp, Homo sapiens
gtgaagttttatcct

SEQ ID NO: 885317 - DNA, 15 bp, Homo sapiens
tgaagttttatcctc

SEQ ID NO: 885318 - DNA, 15 bp, Homo sapiens
gaagttttatcctct

SEQ ID NO: 885319 - DNA, 15 bp, Homo sapiens
aagttttatcctctg

SEQ ID NO: 885320 - DNA, 15 bp, Homo sapiens
agttttatcctctgg

SEQ ID NO: 885321 - DNA, 15 bp, Homo sapiens
gttttatcctctggg

SEQ ID NO: 885322 - DNA, 15 bp, Homo sapiens
ttttatcctctgggc

SEQ ID NO: 885323 - DNA, 15 bp, Homo sapiens
tttatcctctgggca

SEQ ID NO: 885324 - DNA, 15 bp, Homo sapiens
ttatcctctgggcaa

SEQ ID NO: 885325 - DNA, 15 bp, Homo sapiens
tatcctctgggcaaa

SEQ ID NO: 885326 - DNA, 15 bp, Homo sapiens
atcctctgggcaaag

SEQ ID NO: 885327 - DNA, 15 bp, Homo sapiens
tcctctgggcaaagg

SEQ ID NO: 885328 - DNA, 15 bp, Homo sapiens
cctctgggcaaaggt

SEQ ID NO: 885329 - DNA, 15 bp, Homo sapiens
ctctgggcaaaggta

SEQ ID NO: 885330 - DNA, 15 bp, Homo sapiens
tctgggcaaaggtat

SEQ ID NO: 885331 - DNA, 15 bp, Homo sapiens
ctgggcaaaggtata

SEQ ID NO: 885332 - DNA, 15 bp, Homo sapiens
tgggcaaaggtataa

SEQ ID NO: 885333 - DNA, 15 bp, Homo sapiens
gggcaaaggtataaa

SEQ ID NO: 885334 - DNA, 15 bp, Homo sapiens
ggcaaaggtataaaa

SEQ ID NO: 885335 - DNA, 15 bp, Homo sapiens
gcaaaggtataaaac

SEQ ID NO: 885336 - DNA, 15 bp, Homo sapiens
caaaggtataaaact

SEQ ID NO: 885337 - DNA, 15 bp, Homo sapiens
aaaggtataaaactg

SEQ ID NO: 885338 - DNA, 15 bp, Homo sapiens
aaggtataaaactga

SEQ ID NO: 885339 - DNA, 15 bp, Homo sapiens
aggtataaaactgaa

SEQ ID NO: 885340 - DNA, 15 bp, Homo sapiens
ggtataaaactgaat

SEQ ID NO: 885341 - DNA, 15 bp, Homo sapiens
gtataaaactgaatc

SEQ ID NO: 885342 - DNA, 15 bp, Homo sapiens
tataaaactgaatca

SEQ ID NO: 885343 - DNA, 15 bp, Homo sapiens
ataaaactgaatcaa

SEQ ID NO: 885344 - DNA, 15 bp, Homo sapiens
taaaactgaatcaaa

SEQ ID NO: 885345 - DNA, 15 bp, Homo sapiens
aaaactgaatcaaaa

SEQ ID NO: 885346 - DNA, 15 bp, Homo sapiens
aaactgaatcaaaaa

SEQ ID NO: 885347 - DNA, 15 bp, Homo sapiens
aactgaatcaaaaaa

SEQ ID NO: 885348 - DNA, 15 bp, Homo sapiens
actgaatcaaaaaaa

SEQ ID NO: 885349 - DNA, 15 bp, Homo sapiens
ctgaatcaaaaaaat

SEQ ID NO: 885350 - DNA, 15 bp, Homo sapiens
tgaatcaaaaaaatc

SEQ ID NO: 885351 - DNA, 15 bp, Homo sapiens
gaatcaaaaaaatct

SEQ ID NO: 885352 - DNA, 15 bp, Homo sapiens
aatcaaaaaaatctg

SEQ ID NO: 885353 - DNA, 15 bp, Homo sapiens
atcaaaaaaatctgg

SEQ ID NO: 885354 - DNA, 15 bp, Homo sapiens
tcaaaaaaatctgga

SEQ ID NO: 885355 - DNA, 15 bp, Homo sapiens
caaaaaaatctggat

SEQ ID NO: 885356 - DNA, 15 bp, Homo sapiens
aaaaaaatctggatg

SEQ ID NO: 885357 - DNA, 15 bp, Homo sapiens
aaaaaatctggatgt

SEQ ID NO: 885358 - DNA, 15 bp, Homo sapiens
aaaaatctggatgta

SEQ ID NO: 885359 - DNA, 15 bp, Homo sapiens
aaaatctggatgtac

SEQ ID NO: 885360 - DNA, 15 bp, Homo sapiens
aaatctggatgtaca

SEQ ID NO: 885361 - DNA, 15 bp, Homo sapiens
aatctggatgtacac

SEQ ID NO: 885362 - DNA, 15 bp, Homo sapiens
atctggatgtacact

SEQ ID NO: 885363 - DNA, 15 bp, Homo sapiens
tctggatgtacacta

SEQ ID NO: 885364 - DNA, 15 bp, Homo sapiens
ctggatgtacactag

SEQ ID NO: 885365 - DNA, 15 bp, Homo sapiens
tggatgtacactaga

SEQ ID NO: 885366 - DNA, 15 bp, Homo sapiens
ggatgtacactagag

SEQ ID NO: 885367 - DNA, 15 bp, Homo sapiens
gatgtacactagagc

SEQ ID NO: 885368 - DNA, 15 bp, Homo sapiens
atgtacactagagct

SEQ ID NO: 885369 - DNA, 15 bp, Homo sapiens
tgtacactagagctt

SEQ ID NO: 885370 - DNA, 15 bp, Homo sapiens
gtacactagagcttg

SEQ ID NO: 885371 - DNA, 15 bp, Homo sapiens
tacactagagcttgt

SEQ ID NO: 885372 - DNA, 15 bp, Homo sapiens
acactagagcttgtg

SEQ ID NO: 885373 - DNA, 15 bp, Homo sapiens
cactagagcttgtga

SEQ ID NO: 885374 - DNA, 15 bp, Homo sapiens
actagagcttgtgaa

SEQ ID NO: 885375 - DNA, 15 bp, Homo sapiens
ctagagcttgtgaag

SEQ ID NO: 885376 - DNA, 15 bp, Homo sapiens
tagagcttgtgaagg

SEQ ID NO: 885377 - DNA, 15 bp, Homo sapiens
agagcttgtgaagga

SEQ ID NO: 885378 - DNA, 15 bp, Homo sapiens
gagcttgtgaaggag

SEQ ID NO: 885379 - DNA, 15 bp, Homo sapiens
agcttgtgaaggagt

SEQ ID NO: 885380 - DNA, 15 bp, Homo sapiens
gcttgtgaaggagtc

SEQ ID NO: 885381 - DNA, 15 bp, Homo sapiens
cttgtgaaggagtct

SEQ ID NO: 885382 - DNA, 15 bp, Homo sapiens
ttgtgaaggagtctg

SEQ ID NO: 885383 - DNA, 15 bp, Homo sapiens
tgtgaaggagtctgt

SEQ ID NO: 885384 - DNA, 15 bp, Homo sapiens
gtgaaggagtctgta

SEQ ID NO: 885385 - DNA, 15 bp, Homo sapiens
tgaaggagtctgtaa

SEQ ID NO: 885386 - DNA, 15 bp, Homo sapiens
gaaggagtctgtaag

SEQ ID NO: 885387 - DNA, 15 bp, Homo sapiens
aaggagtctgtaagg

SEQ ID NO: 885388 - DNA, 15 bp, Homo sapiens
aggagtctgtaagga

SEQ ID NO: 885389 - DNA, 15 bp, Homo sapiens
ggagtctgtaaggag

SEQ ID NO: 885390 - DNA, 15 bp, Homo sapiens
gagtctgtaaggaga

SEQ ID NO: 885391 - DNA, 15 bp, Homo sapiens
agtctgtaaggagat

SEQ ID NO: 885392 - DNA, 15 bp, Homo sapiens
gtctgtaaggagatc

SEQ ID NO: 885393 - DNA, 15 bp, Homo sapiens
tctgtaaggagatcc

SEQ ID NO: 885394 - DNA, 15 bp, Homo sapiens
ctgtaaggagatcct

SEQ ID NO: 885395 - DNA, 15 bp, Homo sapiens
tgtaaggagatcctc

SEQ ID NO: 885396 - DNA, 15 bp, Homo sapiens
gtaaggagatcctct

SEQ ID NO: 885397 - DNA, 15 bp, Homo sapiens
taaggagatcctctg

SEQ ID NO: 885398 - DNA, 15 bp, Homo sapiens
aaggagatcctctgg

SEQ ID NO: 885399 - DNA, 15 bp, Homo sapiens
aggagatcctctgga

SEQ ID NO: 885400 - DNA, 15 bp, Homo sapiens
ggagatcctctggat

SEQ ID NO: 885401 - DNA, 15 bp, Homo sapiens
gagatcctctggatt

SEQ ID NO: 885402 - DNA, 15 bp, Homo sapiens
agatcctctggattc

SEQ ID NO: 885403 - DNA, 15 bp, Homo sapiens
gatcctctggattcc

SEQ ID NO: 885404 - DNA, 15 bp, Homo sapiens
atcctctggattccc

SEQ ID NO: 885405 - DNA, 15 bp, Homo sapiens
tcctctggattccct

SEQ ID NO: 885406 - DNA, 15 bp, Homo sapiens
cctctggattccctt

SEQ ID NO: 885407 - DNA, 15 bp, Homo sapiens
ctctggattcccttt

SEQ ID NO: 885408 - DNA, 15 bp, Homo sapiens
tctggattccctttg

SEQ ID NO: 885409 - DNA, 15 bp, Homo sapiens
ctggattccctttgc

SEQ ID NO: 885410 - DNA, 15 bp, Homo sapiens
tggattccctttgct

SEQ ID NO: 885411 - DNA, 15 bp, Homo sapiens
ggattccctttgcta

SEQ ID NO: 885412 - DNA, 15 bp, Homo sapiens
gattccctttgctag

SEQ ID NO: 885413 - DNA, 15 bp, Homo sapiens
attccctttgctagc

SEQ ID NO: 885414 - DNA, 15 bp, Homo sapiens
ttccctttgctagct

SEQ ID NO: 885415 - DNA, 15 bp, Homo sapiens
tccctttgctagctt

SEQ ID NO: 885416 - DNA, 15 bp, Homo sapiens
ccctttgctagctta

SEQ ID NO: 885417 - DNA, 15 bp, Homo sapiens
cctttgctagcttat

SEQ ID NO: 885418 - DNA, 15 bp, Homo sapiens
ctttgctagcttatt

SEQ ID NO: 885419 - DNA, 15 bp, Homo sapiens
tttgctagcttattt

SEQ ID NO: 885420 - DNA, 15 bp, Homo sapiens
ttgctagcttatttt

SEQ ID NO: 885421 - DNA, 15 bp, Homo sapiens
tgctagcttattttg

SEQ ID NO: 885422 - DNA, 15 bp, Homo sapiens
gctagcttattttgt

SEQ ID NO: 885423 - DNA, 15 bp, Homo sapiens
ctagcttattttgtt

SEQ ID NO: 885424 - DNA, 15 bp, Homo sapiens
tagcttattttgttg

SEQ ID NO: 885425 - DNA, 15 bp, Homo sapiens
agcttattttgttgg

SEQ ID NO: 885426 - DNA, 15 bp, Homo sapiens
gcttattttgttgga

SEQ ID NO: 885427 - DNA, 15 bp, Homo sapiens
cttattttgttggag

SEQ ID NO: 885428 - DNA, 15 bp, Homo sapiens
ttattttgttggaga

SEQ ID NO: 885429 - DNA, 15 bp, Homo sapiens
tattttgttggagat

SEQ ID NO: 885430 - DNA, 15 bp, Homo sapiens
attttgttggagatc

SEQ ID NO: 885431 - DNA, 15 bp, Homo sapiens
ttttgttggagatca

SEQ ID NO: 885432 - DNA, 15 bp, Homo sapiens
tttgttggagatcac

SEQ ID NO: 885433 - DNA, 15 bp, Homo sapiens
ttgttggagatcacg

SEQ ID NO: 885434 - DNA, 15 bp, Homo sapiens
tgttggagatcacgt

SEQ ID NO: 885435 - DNA, 15 bp, Homo sapiens
gttggagatcacgtt

SEQ ID NO: 885436 - DNA, 15 bp, Homo sapiens
ttggagatcacgttt

SEQ ID NO: 885437 - DNA, 15 bp, Homo sapiens
tggagatcacgttta

SEQ ID NO: 885438 - DNA, 15 bp, Homo sapiens
ggagatcacgtttaa

SEQ ID NO: 885439 - DNA, 15 bp, Homo sapiens
gagatcacgtttaaa

SEQ ID NO: 885440 - DNA, 15 bp, Homo sapiens
agatcacgtttaaaa

SEQ ID NO: 885441 - DNA, 15 bp, Homo sapiens
gatcacgtttaaaat

SEQ ID NO: 885442 - DNA, 15 bp, Homo sapiens
atcacgtttaaaatt

SEQ ID NO: 885443 - DNA, 15 bp, Homo sapiens
tcacgtttaaaattt

SEQ ID NO: 885444 - DNA, 15 bp, Homo sapiens
cacgtttaaaatttg

SEQ ID NO: 885445 - DNA, 15 bp, Homo sapiens
acgtttaaaatttgg

SEQ ID NO: 885446 - DNA, 15 bp, Homo sapiens
cgtttaaaatttggg

SEQ ID NO: 885447 - DNA, 15 bp, Homo sapiens
gtttaaaatttgggg

SEQ ID NO: 885448 - DNA, 15 bp, Homo sapiens
tttaaaatttggggt

SEQ ID NO: 885449 - DNA, 15 bp, Homo sapiens
ttaaaatttggggtc

SEQ ID NO: 885450 - DNA, 15 bp, Homo sapiens
taaaatttggggtca

SEQ ID NO: 885451 - DNA, 15 bp, Homo sapiens
aaaatttggggtcat

SEQ ID NO: 885452 - DNA, 15 bp, Homo sapiens
aaatttggggtcatg

SEQ ID NO: 885453 - DNA, 15 bp, Homo sapiens
aatttggggtcatga

SEQ ID NO: 885454 - DNA, 15 bp, Homo sapiens
atttggggtcatgaa

SEQ ID NO: 885455 - DNA, 15 bp, Homo sapiens
tttggggtcatgaaa

SEQ ID NO: 885456 - DNA, 15 bp, Homo sapiens
ttggggtcatgaaag

SEQ ID NO: 885457 - DNA, 15 bp, Homo sapiens
tggggtcatgaaaga

SEQ ID NO: 885458 - DNA, 15 bp, Homo sapiens
ggggtcatgaaagag

SEQ ID NO: 885459 - DNA, 15 bp, Homo sapiens
gggtcatgaaagaga

SEQ ID NO: 885460 - DNA, 15 bp, Homo sapiens
ggtcatgaaagagac

SEQ ID NO: 885461 - DNA, 15 bp, Homo sapiens
gtcatgaaagagaca

SEQ ID NO: 885462 - DNA, 15 bp, Homo sapiens
tcatgaaagagacat

SEQ ID NO: 885463 - DNA, 15 bp, Homo sapiens
catgaaagagacata

SEQ ID NO: 885464 - DNA, 15 bp, Homo sapiens
atgaaagagacataa

SEQ ID NO: 885465 - DNA, 15 bp, Homo sapiens
tgaaagagacataaa

SEQ ID NO: 885466 - DNA, 15 bp, Homo sapiens
gaaagagacataaat

SEQ ID NO: 885467 - DNA, 15 bp, Homo sapiens
aaagagacataaatc

SEQ ID NO: 885468 - DNA, 15 bp, Homo sapiens
aagagacataaatct

SEQ ID NO: 885469 - DNA, 15 bp, Homo sapiens
agagacataaatctc

SEQ ID NO: 885470 - DNA, 15 bp, Homo sapiens
gagacataaatctca

SEQ ID NO: 885471 - DNA, 15 bp, Homo sapiens
agacataaatctcaa

SEQ ID NO: 885472 - DNA, 15 bp, Homo sapiens
gacataaatctcaaa

SEQ ID NO: 885473 - DNA, 15 bp, Homo sapiens
acataaatctcaaag

SEQ ID NO: 885474 - DNA, 15 bp, Homo sapiens
cataaatctcaaagc

SEQ ID NO: 885475 - DNA, 15 bp, Homo sapiens
ataaatctcaaagct

SEQ ID NO: 885476 - DNA, 15 bp, Homo sapiens
taaatctcaaagctg

SEQ ID NO: 885477 - DNA, 15 bp, Homo sapiens
aaatctcaaagctga

SEQ ID NO: 885478 - DNA, 15 bp, Homo sapiens
aatctcaaagctgag

SEQ ID NO: 885479 - DNA, 15 bp, Homo sapiens
atctcaaagctgaga

SEQ ID NO: 885480 - DNA, 15 bp, Homo sapiens
tctcaaagctgagag

SEQ ID NO: 885481 - DNA, 15 bp, Homo sapiens
ctcaaagctgagagg

SEQ ID NO: 885482 - DNA, 15 bp, Homo sapiens
tcaaagctgagaggg

SEQ ID NO: 885483 - DNA, 15 bp, Homo sapiens
caaagctgagagggc

SEQ ID NO: 885484 - DNA, 15 bp, Homo sapiens
aaagctgagagggcc

SEQ ID NO: 885485 - DNA, 15 bp, Homo sapiens
aagctgagagggcct

SEQ ID NO: 885486 - DNA, 15 bp, Homo sapiens
agctgagagggcctt

SEQ ID NO: 885487 - DNA, 15 bp, Homo sapiens
gctgagagggcctta

SEQ ID NO: 885488 - DNA, 15 bp, Homo sapiens
ctgagagggccttag

SEQ ID NO: 885489 - DNA, 15 bp, Homo sapiens
tgagagggccttaga

SEQ ID NO: 885490 - DNA, 15 bp, Homo sapiens
gagagggccttagag

SEQ ID NO: 885491 - DNA, 15 bp, Homo sapiens
agagggccttagagt

SEQ ID NO: 885492 - DNA, 15 bp, Homo sapiens
gagggccttagagtc

SEQ ID NO: 885493 - DNA, 15 bp, Homo sapiens
agggccttagagtca

SEQ ID NO: 885494 - DNA, 15 bp, Homo sapiens
gggccttagagtcat

SEQ ID NO: 885495 - DNA, 15 bp, Homo sapiens
ggccttagagtcatt

SEQ ID NO: 885496 - DNA, 15 bp, Homo sapiens
gccttagagtcattc

SEQ ID NO: 885497 - DNA, 15 bp, Homo sapiens
ccttagagtcattcc

SEQ ID NO: 885498 - DNA, 15 bp, Homo sapiens
cttagagtcattcct

SEQ ID NO: 885499 - DNA, 15 bp, Homo sapiens
ttagagtcattccta

SEQ ID NO: 885500 - DNA, 15 bp, Homo sapiens
tagagtcattcctat

SEQ ID NO: 885501 - DNA, 15 bp, Homo sapiens
agagtcattcctatt

SEQ ID NO: 885502 - DNA, 15 bp, Homo sapiens
gagtcattcctattt

SEQ ID NO: 885503 - DNA, 15 bp, Homo sapiens
agtcattcctatttt

SEQ ID NO: 885504 - DNA, 15 bp, Homo sapiens
gtcattcctatttta

SEQ ID NO: 885505 - DNA, 15 bp, Homo sapiens
tcattcctattttac

SEQ ID NO: 885506 - DNA, 15 bp, Homo sapiens
cattcctattttaca

SEQ ID NO: 885507 - DNA, 15 bp, Homo sapiens
attcctattttacag

SEQ ID NO: 885508 - DNA, 15 bp, Homo sapiens
ttcctattttacaga

SEQ ID NO: 885509 - DNA, 15 bp, Homo sapiens
tcctattttacagat

SEQ ID NO: 885510 - DNA, 15 bp, Homo sapiens
cctattttacagatg

SEQ ID NO: 885511 - DNA, 15 bp, Homo sapiens
ctattttacagatga

SEQ ID NO: 885512 - DNA, 15 bp, Homo sapiens
tattttacagatgaa

SEQ ID NO: 885513 - DNA, 15 bp, Homo sapiens
tttacagatgaagac

SEQ ID NO: 885514 - DNA, 15 bp, Homo sapiens
ttacagatgaagaca

SEQ ID NO: 885515 - DNA, 15 bp, Homo sapiens
tacagatgaagacac

SEQ ID NO: 885516 - DNA, 15 bp, Homo sapiens
acagatgaagacacc

SEQ ID NO: 885517 - DNA, 15 bp, Homo sapiens
cagatgaagacacca

SEQ ID NO: 885518 - DNA, 15 bp, Homo sapiens
agatgaagacaccaa

SEQ ID NO: 885519 - DNA, 15 bp, Homo sapiens
gatgaagacaccaag

SEQ ID NO: 885520 - DNA, 15 bp, Homo sapiens
atgaagacaccaagg

SEQ ID NO: 885521 - DNA, 15 bp, Homo sapiens
tgaagacaccaaggg

SEQ ID NO: 885522 - DNA, 15 bp, Homo sapiens
gaagacaccaagggc

SEQ ID NO: 885523 - DNA, 15 bp, Homo sapiens
aagacaccaagggcc

SEQ ID NO: 885524 - DNA, 15 bp, Homo sapiens
agacaccaagggcca

SEQ ID NO: 885525 - DNA, 15 bp, Homo sapiens
gacaccaagggccac

SEQ ID NO: 885526 - DNA, 15 bp, Homo sapiens
acaccaagggccaca

SEQ ID NO: 885527 - DNA, 15 bp, Homo sapiens
caccaagggccacag

SEQ ID NO: 885528 - DNA, 15 bp, Homo sapiens
accaagggccacagc

SEQ ID NO: 885529 - DNA, 15 bp, Homo sapiens
ccaagggccacagcc

SEQ ID NO: 885530 - DNA, 15 bp, Homo sapiens
caagggccacagcca

SEQ ID NO: 885531 - DNA, 15 bp, Homo sapiens
aagggccacagccat

SEQ ID NO: 885532 - DNA, 15 bp, Homo sapiens
agggccacagccatt

SEQ ID NO: 885533 - DNA, 15 bp, Homo sapiens
gggccacagccattg

SEQ ID NO: 885534 - DNA, 15 bp, Homo sapiens
ggccacagccattgc

SEQ ID NO: 885535 - DNA, 15 bp, Homo sapiens
gccacagccattgcc

SEQ ID NO: 885536 - DNA, 15 bp, Homo sapiens
ccacagccattgcca

SEQ ID NO: 885537 - DNA, 15 bp, Homo sapiens
cacagccattgccac

SEQ ID NO: 885538 - DNA, 15 bp, Homo sapiens
acagccattgccacg

SEQ ID NO: 885539 - DNA, 15 bp, Homo sapiens
cagccattgccacga

SEQ ID NO: 885540 - DNA, 15 bp, Homo sapiens
agccattgccacgac

SEQ ID NO: 885541 - DNA, 15 bp, Homo sapiens
gccattgccacgact

SEQ ID NO: 885542 - DNA, 15 bp, Homo sapiens
ccattgccacgactg

SEQ ID NO: 885543 - DNA, 15 bp, Homo sapiens
cattgccacgactgt

SEQ ID NO: 885544 - DNA, 15 bp, Homo sapiens
attgccacgactgtg

SEQ ID NO: 885545 - DNA, 15 bp, Homo sapiens
ttgccacgactgtga

SEQ ID NO: 885546 - DNA, 15 bp, Homo sapiens
tgccacgactgtgat

SEQ ID NO: 885547 - DNA, 15 bp, Homo sapiens
gccacgactgtgatc

SEQ ID NO: 885548 - DNA, 15 bp, Homo sapiens
ccacgactgtgatcg

SEQ ID NO: 885549 - DNA, 15 bp, Homo sapiens
cacgactgtgatcgc

SEQ ID NO: 885550 - DNA, 15 bp, Homo sapiens
acgactgtgatcgca

SEQ ID NO: 885551 - DNA, 15 bp, Homo sapiens
cgactgtgatcgcat

SEQ ID NO: 885552 - DNA, 15 bp, Homo sapiens
gactgtgatcgcata

SEQ ID NO: 885553 - DNA, 15 bp, Homo sapiens
actgtgatcgcatag

SEQ ID NO: 885554 - DNA, 15 bp, Homo sapiens
ctgtgatcgcatagc

SEQ ID NO: 885555 - DNA, 15 bp, Homo sapiens
tgtgatcgcatagca

SEQ ID NO: 885556 - DNA, 15 bp, Homo sapiens
gtgatcgcatagcag

SEQ ID NO: 885557 - DNA, 15 bp, Homo sapiens
tgatcgcatagcagc

SEQ ID NO: 885558 - DNA, 15 bp, Homo sapiens
gatcgcatagcagca

SEQ ID NO: 885559 - DNA, 15 bp, Homo sapiens
atcgcatagcagcaa

SEQ ID NO: 885560 - DNA, 15 bp, Homo sapiens
tcgcatagcagcaaa

SEQ ID NO: 885561 - DNA, 15 bp, Homo sapiens
cgcatagcagcaaat

SEQ ID NO: 885562 - DNA, 15 bp, Homo sapiens
gcatagcagcaaatg

SEQ ID NO: 885563 - DNA, 15 bp, Homo sapiens
catagcagcaaatga

SEQ ID NO: 885564 - DNA, 15 bp, Homo sapiens
atagcagcaaatgaa

SEQ ID NO: 885565 - DNA, 15 bp, Homo sapiens
tagcagcaaatgaat

SEQ ID NO: 885566 - DNA, 15 bp, Homo sapiens
agcagcaaatgaatg

SEQ ID NO: 885567 - DNA, 15 bp, Homo sapiens
gcagcaaatgaatga

SEQ ID NO: 885568 - DNA, 15 bp, Homo sapiens
cagcaaatgaatgat

SEQ ID NO: 885569 - DNA, 15 bp, Homo sapiens
agcaaatgaatgatt

SEQ ID NO: 885570 - DNA, 15 bp, Homo sapiens
gcaaatgaatgattt

SEQ ID NO: 885571 - DNA, 15 bp, Homo sapiens
caaatgaatgatttg

SEQ ID NO: 885572 - DNA, 15 bp, Homo sapiens
aaatgaatgatttga

SEQ ID NO: 885573 - DNA, 15 bp, Homo sapiens
aatgaatgatttgac

SEQ ID NO: 885574 - DNA, 15 bp, Homo sapiens
atgaatgatttgact

SEQ ID NO: 885575 - DNA, 15 bp, Homo sapiens
tgaatgatttgactg

SEQ ID NO: 885576 - DNA, 15 bp, Homo sapiens
gaatgatttgactgt

SEQ ID NO: 885577 - DNA, 15 bp, Homo sapiens
aatgatttgactgtt

SEQ ID NO: 885578 - DNA, 15 bp, Homo sapiens
atgatttgactgtta

SEQ ID NO: 885579 - DNA, 15 bp, Homo sapiens
tgatttgactgttag

SEQ ID NO: 885580 - DNA, 15 bp, Homo sapiens
gatttgactgttagc

SEQ ID NO: 885581 - DNA, 15 bp, Homo sapiens
atttgactgttagca

SEQ ID NO: 885582 - DNA, 15 bp, Homo sapiens
tttgactgttagcaa

SEQ ID NO: 885583 - DNA, 15 bp, Homo sapiens
ttgactgttagcaaa

SEQ ID NO: 885584 - DNA, 15 bp, Homo sapiens
tgactgttagcaaat

SEQ ID NO: 885585 - DNA, 15 bp, Homo sapiens
gactgttagcaaatg

SEQ ID NO: 885586 - DNA, 15 bp, Homo sapiens
actgttagcaaatgg

SEQ ID NO: 885587 - DNA, 15 bp, Homo sapiens
ctgttagcaaatgga

SEQ ID NO: 885588 - DNA, 15 bp, Homo sapiens
tgttagcaaatggaa

SEQ ID NO: 885589 - DNA, 15 bp, Homo sapiens
gttagcaaatggaaa

SEQ ID NO: 885590 - DNA, 15 bp, Homo sapiens
ttagcaaatggaaag

SEQ ID NO: 885591 - DNA, 15 bp, Homo sapiens
tagcaaatggaaagg

SEQ ID NO: 885592 - DNA, 15 bp, Homo sapiens
agcaaatggaaagga

SEQ ID NO: 885593 - DNA, 15 bp, Homo sapiens
gcaaatggaaaggat

SEQ ID NO: 885594 - DNA, 15 bp, Homo sapiens
caaatggaaaggatg

SEQ ID NO: 885595 - DNA, 15 bp, Homo sapiens
aaatggaaaggatgc

SEQ ID NO: 885596 - DNA, 15 bp, Homo sapiens
aatggaaaggatgca

SEQ ID NO: 885597 - DNA, 15 bp, Homo sapiens
atggaaaggatgcag

SEQ ID NO: 885598 - DNA, 15 bp, Homo sapiens
tggaaaggatgcagg

SEQ ID NO: 885599 - DNA, 15 bp, Homo sapiens
ggaaaggatgcaggg

SEQ ID NO: 885600 - DNA, 15 bp, Homo sapiens
gaaaggatgcagggc

SEQ ID NO: 885601 - DNA, 15 bp, Homo sapiens
aaaggatgcagggct

SEQ ID NO: 885602 - DNA, 15 bp, Homo sapiens
aaggatgcagggctc

SEQ ID NO: 885603 - DNA, 15 bp, Homo sapiens
aggatgcagggctcc

SEQ ID NO: 885604 - DNA, 15 bp, Homo sapiens
ggatgcagggctcct

SEQ ID NO: 885605 - DNA, 15 bp, Homo sapiens
gatgcagggctcctg

SEQ ID NO: 885606 - DNA, 15 bp, Homo sapiens
atgcagggctcctgg

SEQ ID NO: 885607 - DNA, 15 bp, Homo sapiens
tgcagggctcctgga

SEQ ID NO: 885608 - DNA, 15 bp, Homo sapiens
gcagggctcctggag

SEQ ID NO: 885609 - DNA, 15 bp, Homo sapiens
cagggctcctggagg

SEQ ID NO: 885610 - DNA, 15 bp, Homo sapiens
agggctcctggaggg

SEQ ID NO: 885611 - DNA, 15 bp, Homo sapiens
gggctcctggaggga

SEQ ID NO: 885612 - DNA, 15 bp, Homo sapiens
gctcctggagggagg

SEQ ID NO: 885613 - DNA, 15 bp, Homo sapiens
tcctggagggaggat

SEQ ID NO: 885614 - DNA, 15 bp, Homo sapiens
cctggagggaggatc

SEQ ID NO: 885615 - DNA, 15 bp, Homo sapiens
ctggagggaggatca

SEQ ID NO: 885616 - DNA, 15 bp, Homo sapiens
tggagggaggatcat

SEQ ID NO: 885617 - DNA, 15 bp, Homo sapiens
ggagggaggatcatg

SEQ ID NO: 885618 - DNA, 15 bp, Homo sapiens
gagggaggatcatgc

SEQ ID NO: 885619 - DNA, 15 bp, Homo sapiens
agggaggatcatgcc

SEQ ID NO: 885620 - DNA, 15 bp, Homo sapiens
gggaggatcatgcct

SEQ ID NO: 885621 - DNA, 15 bp, Homo sapiens
ggaggatcatgcctt

SEQ ID NO: 885622 - DNA, 15 bp, Homo sapiens
gaggatcatgcctta

SEQ ID NO: 885623 - DNA, 15 bp, Homo sapiens
aggatcatgccttag

SEQ ID NO: 885624 - DNA, 15 bp, Homo sapiens
ggatcatgccttagg

SEQ ID NO: 885625 - DNA, 15 bp, Homo sapiens
gatcatgccttaggg

SEQ ID NO: 885626 - DNA, 15 bp, Homo sapiens
atcatgccttagggg

SEQ ID NO: 885627 - DNA, 15 bp, Homo sapiens
tcatgccttaggggc

SEQ ID NO: 885628 - DNA, 15 bp, Homo sapiens
catgccttaggggct

SEQ ID NO: 885629 - DNA, 15 bp, Homo sapiens
atgccttaggggcta

SEQ ID NO: 885630 - DNA, 15 bp, Homo sapiens
tgccttaggggctac

SEQ ID NO: 885631 - DNA, 15 bp, Homo sapiens
gccttaggggctact

SEQ ID NO: 885632 - DNA, 15 bp, Homo sapiens
ccttaggggctactc

SEQ ID NO: 885633 - DNA, 15 bp, Homo sapiens
cttaggggctactcc

SEQ ID NO: 885634 - DNA, 15 bp, Homo sapiens
ttaggggctactcct

SEQ ID NO: 885635 - DNA, 15 bp, Homo sapiens
taggggctactcctg

SEQ ID NO: 885636 - DNA, 15 bp, Homo sapiens
aggggctactcctga

SEQ ID NO: 885637 - DNA, 15 bp, Homo sapiens
ggggctactcctgag

SEQ ID NO: 885638 - DNA, 15 bp, Homo sapiens
gggctactcctgaga

SEQ ID NO: 885639 - DNA, 15 bp, Homo sapiens
ggctactcctgagag

SEQ ID NO: 885640 - DNA, 15 bp, Homo sapiens
gctactcctgagaga

SEQ ID NO: 885641 - DNA, 15 bp, Homo sapiens
ctactcctgagagag

SEQ ID NO: 885642 - DNA, 15 bp, Homo sapiens
tactcctgagagagg

SEQ ID NO: 885643 - DNA, 15 bp, Homo sapiens
actcctgagagagga

SEQ ID NO: 885644 - DNA, 15 bp, Homo sapiens
ctcctgagagaggat

SEQ ID NO: 885645 - DNA, 15 bp, Homo sapiens
tcctgagagaggata

SEQ ID NO: 885646 - DNA, 15 bp, Homo sapiens
cctgagagaggatat

SEQ ID NO: 885647 - DNA, 15 bp, Homo sapiens
ctgagagaggatatg

SEQ ID NO: 885648 - DNA, 15 bp, Homo sapiens
tgagagaggatatga

SEQ ID NO: 885649 - DNA, 15 bp, Homo sapiens
gagagaggatatgat

SEQ ID NO: 885650 - DNA, 15 bp, Homo sapiens
agagaggatatgatg

SEQ ID NO: 885651 - DNA, 15 bp, Homo sapiens
gagaggatatgatgt

SEQ ID NO: 885652 - DNA, 15 bp, Homo sapiens
agaggatatgatgtg

SEQ ID NO: 885653 - DNA, 15 bp, Homo sapiens
gaggatatgatgtgt

SEQ ID NO: 885654 - DNA, 15 bp, Homo sapiens
aggatatgatgtgta

SEQ ID NO: 885655 - DNA, 15 bp, Homo sapiens
ggatatgatgtgtac

SEQ ID NO: 885656 - DNA, 15 bp, Homo sapiens
gatatgatgtgtacc

SEQ ID NO: 885657 - DNA, 15 bp, Homo sapiens
atatgatgtgtacct

SEQ ID NO: 885658 - DNA, 15 bp, Homo sapiens
tatgatgtgtacctg

SEQ ID NO: 885659 - DNA, 15 bp, Homo sapiens
atgatgtgtacctgg

SEQ ID NO: 885660 - DNA, 15 bp, Homo sapiens
tgatgtgtacctgga

SEQ ID NO: 885661 - DNA, 15 bp, Homo sapiens
gatgtgtacctggag

SEQ ID NO: 885662 - DNA, 15 bp, Homo sapiens
atgtgtacctggagt

SEQ ID NO: 885663 - DNA, 15 bp, Homo sapiens
tgtgtacctggagtt

SEQ ID NO: 885664 - DNA, 15 bp, Homo sapiens
gtgtacctggagttg

SEQ ID NO: 885665 - DNA, 15 bp, Homo sapiens
tgtacctggagttgt

SEQ ID NO: 885666 - DNA, 15 bp, Homo sapiens
gtacctggagttgtg

SEQ ID NO: 885667 - DNA, 15 bp, Homo sapiens
tacctggagttgtga

SEQ ID NO: 885668 - DNA, 15 bp, Homo sapiens
acctggagttgtgat

SEQ ID NO: 885669 - DNA, 15 bp, Homo sapiens
cctggagttgtgatg

SEQ ID NO: 885670 - DNA, 15 bp, Homo sapiens
ctggagttgtgatgt

SEQ ID NO: 885671 - DNA, 15 bp, Homo sapiens
tggagttgtgatgtg

SEQ ID NO: 885672 - DNA, 15 bp, Homo sapiens
ggagttgtgatgtgc

SEQ ID NO: 885673 - DNA, 15 bp, Homo sapiens
gagttgtgatgtgca

SEQ ID NO: 885674 - DNA, 15 bp, Homo sapiens
agttgtgatgtgcaa

SEQ ID NO: 885675 - DNA, 15 bp, Homo sapiens
gttgtgatgtgcaag

SEQ ID NO: 885676 - DNA, 15 bp, Homo sapiens
ttgtgatgtgcaagc

SEQ ID NO: 885677 - DNA, 15 bp, Homo sapiens
tgtgatgtgcaagct

SEQ ID NO: 885678 - DNA, 15 bp, Homo sapiens
gtgatgtgcaagcta

SEQ ID NO: 885679 - DNA, 15 bp, Homo sapiens
tgatgtgcaagctac

SEQ ID NO: 885680 - DNA, 15 bp, Homo sapiens
gatgtgcaagctaca

SEQ ID NO: 885681 - DNA, 15 bp, Homo sapiens
atgtgcaagctacat

SEQ ID NO: 885682 - DNA, 15 bp, Homo sapiens
tgtgcaagctacatg

SEQ ID NO: 885683 - DNA, 15 bp, Homo sapiens
gtgcaagctacatgg

SEQ ID NO: 885684 - DNA, 15 bp, Homo sapiens
tgcaagctacatggt

SEQ ID NO: 885685 - DNA, 15 bp, Homo sapiens
gcaagctacatggtt

SEQ ID NO: 885686 - DNA, 15 bp, Homo sapiens
caagctacatggttg

SEQ ID NO: 885687 - DNA, 15 bp, Homo sapiens
aagctacatggttgt

SEQ ID NO: 885688 - DNA, 15 bp, Homo sapiens
agctacatggttgtt

SEQ ID NO: 885689 - DNA, 15 bp, Homo sapiens
gctacatggttgttg

SEQ ID NO: 885690 - DNA, 15 bp, Homo sapiens
ctacatggttgttgt

SEQ ID NO: 885691 - DNA, 15 bp, Homo sapiens
tacatggttgttgtg

SEQ ID NO: 885692 - DNA, 15 bp, Homo sapiens
acatggttgttgtgg

SEQ ID NO: 885693 - DNA, 15 bp, Homo sapiens
catggttgttgtggt

SEQ ID NO: 885694 - DNA, 15 bp, Homo sapiens
atggttgttgtggtt

SEQ ID NO: 885695 - DNA, 15 bp, Homo sapiens
tggttgttgtggttt

SEQ ID NO: 885696 - DNA, 15 bp, Homo sapiens
ggttgttgtggttta

SEQ ID NO: 885697 - DNA, 15 bp, Homo sapiens
gttgttgtggtttaa

SEQ ID NO: 885698 - DNA, 15 bp, Homo sapiens
ttgttgtggtttaat

SEQ ID NO: 885699 - DNA, 15 bp, Homo sapiens
tgttgtggtttaatg

SEQ ID NO: 885700 - DNA, 15 bp, Homo sapiens
gttgtggtttaatgt

SEQ ID NO: 885701 - DNA, 15 bp, Homo sapiens
ttgtggtttaatgta

SEQ ID NO: 885702 - DNA, 15 bp, Homo sapiens
tgtggtttaatgtat

SEQ ID NO: 885703 - DNA, 15 bp, Homo sapiens
gtggtttaatgtatt

SEQ ID NO: 885704 - DNA, 15 bp, Homo sapiens
tggtttaatgtattt

SEQ ID NO: 885705 - DNA, 15 bp, Homo sapiens
ggtttaatgtatttg

SEQ ID NO: 885706 - DNA, 15 bp, Homo sapiens
gtttaatgtatttgg

SEQ ID NO: 885707 - DNA, 15 bp, Homo sapiens
tttaatgtatttggt

SEQ ID NO: 885708 - DNA, 15 bp, Homo sapiens
ttaatgtatttggtg

SEQ ID NO: 885709 - DNA, 15 bp, Homo sapiens
taatgtatttggtgc

SEQ ID NO: 885710 - DNA, 15 bp, Homo sapiens
aatgtatttggtgcg

SEQ ID NO: 885711 - DNA, 15 bp, Homo sapiens
atgtatttggtgcgc

SEQ ID NO: 885712 - DNA, 15 bp, Homo sapiens
tgtatttggtgcgca

SEQ ID NO: 885713 - DNA, 15 bp, Homo sapiens
gtatttggtgcgcat

SEQ ID NO: 885714 - DNA, 15 bp, Homo sapiens
tatttggtgcgcatc

SEQ ID NO: 885715 - DNA, 15 bp, Homo sapiens
atttggtgcgcatct

SEQ ID NO: 885716 - DNA, 15 bp, Homo sapiens
tttggtgcgcatctc

SEQ ID NO: 885717 - DNA, 15 bp, Homo sapiens
ttggtgcgcatctct

SEQ ID NO: 885718 - DNA, 15 bp, Homo sapiens
tggtgcgcatctctt

SEQ ID NO: 885719 - DNA, 15 bp, Homo sapiens
ggtgcgcatctcttg

SEQ ID NO: 885720 - DNA, 15 bp, Homo sapiens
gtgcgcatctcttgt

SEQ ID NO: 885721 - DNA, 15 bp, Homo sapiens
tgcgcatctcttgta

SEQ ID NO: 885722 - DNA, 15 bp, Homo sapiens
gcgcatctcttgtat

SEQ ID NO: 885723 - DNA, 15 bp, Homo sapiens
cgcatctcttgtatg

SEQ ID NO: 885724 - DNA, 15 bp, Homo sapiens
gcatctcttgtatga

SEQ ID NO: 885725 - DNA, 15 bp, Homo sapiens
catctcttgtatgaa

SEQ ID NO: 885726 - DNA, 15 bp, Homo sapiens
atctcttgtatgaaa

SEQ ID NO: 885727 - DNA, 15 bp, Homo sapiens
tctcttgtatgaaat

SEQ ID NO: 885728 - DNA, 15 bp, Homo sapiens
ctcttgtatgaaatg

SEQ ID NO: 885729 - DNA, 15 bp, Homo sapiens
tcttgtatgaaatgt

SEQ ID NO: 885730 - DNA, 15 bp, Homo sapiens
cttgtatgaaatgtt

SEQ ID NO: 885731 - DNA, 15 bp, Homo sapiens
ttgtatgaaatgttg

SEQ ID NO: 885732 - DNA, 15 bp, Homo sapiens
tgtatgaaatgttga

SEQ ID NO: 885733 - DNA, 15 bp, Homo sapiens
gtatgaaatgttgat

SEQ ID NO: 885734 - DNA, 15 bp, Homo sapiens
tatgaaatgttgata

SEQ ID NO: 885735 - DNA, 15 bp, Homo sapiens
atgaaatgttgatat

SEQ ID NO: 885736 - DNA, 15 bp, Homo sapiens
tgaaatgttgatatg

SEQ ID NO: 885737 - DNA, 15 bp, Homo sapiens
gaaatgttgatatgt

SEQ ID NO: 885738 - DNA, 15 bp, Homo sapiens
aaatgttgatatgtt

SEQ ID NO: 885739 - DNA, 15 bp, Homo sapiens
aatgttgatatgttt

SEQ ID NO: 885740 - DNA, 15 bp, Homo sapiens
atgttgatatgtttg

SEQ ID NO: 885741 - DNA, 15 bp, Homo sapiens
tgttgatatgtttgt

SEQ ID NO: 885742 - DNA, 15 bp, Homo sapiens
gttgatatgtttgtt

SEQ ID NO: 885743 - DNA, 15 bp, Homo sapiens
ttgatatgtttgttg

SEQ ID NO: 885744 - DNA, 15 bp, Homo sapiens
tgatatgtttgttga

SEQ ID NO: 885745 - DNA, 15 bp, Homo sapiens
gatatgtttgttgat

SEQ ID NO: 885746 - DNA, 15 bp, Homo sapiens
atatgtttgttgata

SEQ ID NO: 885747 - DNA, 15 bp, Homo sapiens
tatgtttgttgatac

SEQ ID NO: 885748 - DNA, 15 bp, Homo sapiens
atgtttgttgatacc

SEQ ID NO: 885749 - DNA, 15 bp, Homo sapiens
tgtttgttgataccg

SEQ ID NO: 885750 - DNA, 15 bp, Homo sapiens
gtttgttgataccga

SEQ ID NO: 885751 - DNA, 15 bp, Homo sapiens
tttgttgataccgac

SEQ ID NO: 885752 - DNA, 15 bp, Homo sapiens
ttgttgataccgaca

SEQ ID NO: 885753 - DNA, 15 bp, Homo sapiens
tgttgataccgacaa

SEQ ID NO: 885754 - DNA, 15 bp, Homo sapiens
gttgataccgacaat

SEQ ID NO: 885755 - DNA, 15 bp, Homo sapiens
ttgataccgacaatg

SEQ ID NO: 885756 - DNA, 15 bp, Homo sapiens
tgataccgacaatgt

SEQ ID NO: 885757 - DNA, 15 bp, Homo sapiens
gataccgacaatgtg

SEQ ID NO: 885758 - DNA, 15 bp, Homo sapiens
ataccgacaatgtga

SEQ ID NO: 885759 - DNA, 15 bp, Homo sapiens
taccgacaatgtgat

SEQ ID NO: 885760 - DNA, 15 bp, Homo sapiens
accgacaatgtgata

SEQ ID NO: 885761 - DNA, 15 bp, Homo sapiens
ccgacaatgtgatag

SEQ ID NO: 885762 - DNA, 15 bp, Homo sapiens
cgacaatgtgatagg

SEQ ID NO: 885763 - DNA, 15 bp, Homo sapiens
gacaatgtgatagga

SEQ ID NO: 885764 - DNA, 15 bp, Homo sapiens
acaatgtgataggat

SEQ ID NO: 885765 - DNA, 15 bp, Homo sapiens
caatgtgataggatt

SEQ ID NO: 885766 - DNA, 15 bp, Homo sapiens
aatgtgataggattc

SEQ ID NO: 885767 - DNA, 15 bp, Homo sapiens
atgtgataggattct

SEQ ID NO: 885768 - DNA, 15 bp, Homo sapiens
tgtgataggattctg

SEQ ID NO: 885769 - DNA, 15 bp, Homo sapiens
gtgataggattctgg

SEQ ID NO: 885770 - DNA, 15 bp, Homo sapiens
tgataggattctgga

SEQ ID NO: 885771 - DNA, 15 bp, Homo sapiens
gataggattctggaa

SEQ ID NO: 885772 - DNA, 15 bp, Homo sapiens
ataggattctggaag

SEQ ID NO: 885773 - DNA, 15 bp, Homo sapiens
taggattctggaaga

SEQ ID NO: 885774 - DNA, 15 bp, Homo sapiens
aggattctggaagag

SEQ ID NO: 885775 - DNA, 15 bp, Homo sapiens
ggattctggaagaga

SEQ ID NO: 885776 - DNA, 15 bp, Homo sapiens
gattctggaagagag

SEQ ID NO: 885777 - DNA, 15 bp, Homo sapiens
attctggaagagagg

SEQ ID NO: 885778 - DNA, 15 bp, Homo sapiens
ttctggaagagaggg

SEQ ID NO: 885779 - DNA, 15 bp, Homo sapiens
tctggaagagagggc

SEQ ID NO: 885780 - DNA, 15 bp, Homo sapiens
ctggaagagagggct

SEQ ID NO: 885781 - DNA, 15 bp, Homo sapiens
tggaagagagggctc

SEQ ID NO: 885782 - DNA, 15 bp, Homo sapiens
ggaagagagggctcc

SEQ ID NO: 885783 - DNA, 15 bp, Homo sapiens
gaagagagggctcct

SEQ ID NO: 885784 - DNA, 15 bp, Homo sapiens
aagagagggctcctg

SEQ ID NO: 885785 - DNA, 15 bp, Homo sapiens
agagagggctcctgt

SEQ ID NO: 885786 - DNA, 15 bp, Homo sapiens
gagagggctcctgtg

SEQ ID NO: 885787 - DNA, 15 bp, Homo sapiens
agagggctcctgtgt

SEQ ID NO: 885788 - DNA, 15 bp, Homo sapiens
gagggctcctgtgtt

SEQ ID NO: 885789 - DNA, 15 bp, Homo sapiens
agggctcctgtgttc

SEQ ID NO: 885790 - DNA, 15 bp, Homo sapiens
gggctcctgtgttcc

SEQ ID NO: 885791 - DNA, 15 bp, Homo sapiens
ggctcctgtgttcca

SEQ ID NO: 885792 - DNA, 15 bp, Homo sapiens
gctcctgtgttccac

SEQ ID NO: 885793 - DNA, 15 bp, Homo sapiens
ctcctgtgttccact

SEQ ID NO: 885794 - DNA, 15 bp, Homo sapiens
tcctgtgttccactt

SEQ ID NO: 885795 - DNA, 15 bp, Homo sapiens
cctgtgttccacttc

SEQ ID NO: 885796 - DNA, 15 bp, Homo sapiens
ctgtgttccacttcc

SEQ ID NO: 885797 - DNA, 15 bp, Homo sapiens
tgtgttccacttcct

SEQ ID NO: 885798 - DNA, 15 bp, Homo sapiens
gtgttccacttcctt

SEQ ID NO: 885799 - DNA, 15 bp, Homo sapiens
tgttccacttcctta

SEQ ID NO: 885800 - DNA, 15 bp, Homo sapiens
gttccacttccttaa

SEQ ID NO: 885801 - DNA, 15 bp, Homo sapiens
ttccacttccttaaa

SEQ ID NO: 885802 - DNA, 15 bp, Homo sapiens
tccacttccttaaaa

SEQ ID NO: 885803 - DNA, 15 bp, Homo sapiens
ccacttccttaaaag

SEQ ID NO: 885804 - DNA, 15 bp, Homo sapiens
cacttccttaaaaga

SEQ ID NO: 885805 - DNA, 15 bp, Homo sapiens
acttccttaaaagaa

SEQ ID NO: 885806 - DNA, 15 bp, Homo sapiens
cttccttaaaagaac

SEQ ID NO: 885807 - DNA, 15 bp, Homo sapiens
ttccttaaaagaaca

SEQ ID NO: 885808 - DNA, 15 bp, Homo sapiens
tccttaaaagaacaa

SEQ ID NO: 885809 - DNA, 15 bp, Homo sapiens
ccttaaaagaacaac

SEQ ID NO: 885810 - DNA, 15 bp, Homo sapiens
cttaaaagaacaacc

SEQ ID NO: 885811 - DNA, 15 bp, Homo sapiens
ttaaaagaacaaccc

SEQ ID NO: 885812 - DNA, 15 bp, Homo sapiens
taaaagaacaacccc

SEQ ID NO: 885813 - DNA, 15 bp, Homo sapiens
aaaagaacaacccca

SEQ ID NO: 885814 - DNA, 15 bp, Homo sapiens
aaagaacaaccccat

SEQ ID NO: 885815 - DNA, 15 bp, Homo sapiens
aagaacaaccccatg

SEQ ID NO: 885816 - DNA, 15 bp, Homo sapiens
agaacaaccccatga

SEQ ID NO: 885817 - DNA, 15 bp, Homo sapiens
gaacaaccccatgaa

SEQ ID NO: 885818 - DNA, 15 bp, Homo sapiens
aacaaccccatgaat

SEQ ID NO: 885819 - DNA, 15 bp, Homo sapiens
acaaccccatgaatg

SEQ ID NO: 885820 - DNA, 15 bp, Homo sapiens
caaccccatgaatga

SEQ ID NO: 885821 - DNA, 15 bp, Homo sapiens
aaccccatgaatgac

SEQ ID NO: 885822 - DNA, 15 bp, Homo sapiens
accccatgaatgact

SEQ ID NO: 885823 - DNA, 15 bp, Homo sapiens
ccccatgaatgactc

SEQ ID NO: 885824 - DNA, 15 bp, Homo sapiens
cccatgaatgactcc

SEQ ID NO: 885825 - DNA, 15 bp, Homo sapiens
ccatgaatgactcca

SEQ ID NO: 885826 - DNA, 15 bp, Homo sapiens
catgaatgactccac

SEQ ID NO: 885827 - DNA, 15 bp, Homo sapiens
atgaatgactccaca

SEQ ID NO: 885828 - DNA, 15 bp, Homo sapiens
tgaatgactccacag

SEQ ID NO: 885829 - DNA, 15 bp, Homo sapiens
gaatgactccacaga

SEQ ID NO: 885830 - DNA, 15 bp, Homo sapiens
aatgactccacagac

SEQ ID NO: 885831 - DNA, 15 bp, Homo sapiens
atgactccacagaca

SEQ ID NO: 885832 - DNA, 15 bp, Homo sapiens
tgactccacagacat

SEQ ID NO: 885833 - DNA, 15 bp, Homo sapiens
gactccacagacatt

SEQ ID NO: 885834 - DNA, 15 bp, Homo sapiens
actccacagacattc

SEQ ID NO: 885835 - DNA, 15 bp, Homo sapiens
ctccacagacattcc

SEQ ID NO: 885836 - DNA, 15 bp, Homo sapiens
tccacagacattcct

SEQ ID NO: 885837 - DNA, 15 bp, Homo sapiens
ccacagacattcctg

SEQ ID NO: 885838 - DNA, 15 bp, Homo sapiens
cacagacattcctga

SEQ ID NO: 885839 - DNA, 15 bp, Homo sapiens
acagacattcctgaa

SEQ ID NO: 885840 - DNA, 15 bp, Homo sapiens
cagacattcctgaat

SEQ ID NO: 885841 - DNA, 15 bp, Homo sapiens
agacattcctgaata

SEQ ID NO: 885842 - DNA, 15 bp, Homo sapiens
gacattcctgaatat

SEQ ID NO: 885843 - DNA, 15 bp, Homo sapiens
acattcctgaatatt

SEQ ID NO: 885844 - DNA, 15 bp, Homo sapiens
cattcctgaatattg

SEQ ID NO: 885845 - DNA, 15 bp, Homo sapiens
attcctgaatattga

SEQ ID NO: 885846 - DNA, 15 bp, Homo sapiens
ttcctgaatattgag

SEQ ID NO: 885847 - DNA, 15 bp, Homo sapiens
tcctgaatattgagt

SEQ ID NO: 885848 - DNA, 15 bp, Homo sapiens
cctgaatattgagta

SEQ ID NO: 885849 - DNA, 15 bp, Homo sapiens
ctgaatattgagtag

SEQ ID NO: 885850 - DNA, 15 bp, Homo sapiens
tgaatattgagtagc

SEQ ID NO: 885851 - DNA, 15 bp, Homo sapiens
gaatattgagtagct

SEQ ID NO: 885852 - DNA, 15 bp, Homo sapiens
aatattgagtagctg

SEQ ID NO: 885853 - DNA, 15 bp, Homo sapiens
atattgagtagctga

SEQ ID NO: 885854 - DNA, 15 bp, Homo sapiens
tattgagtagctgaa

SEQ ID NO: 885855 - DNA, 15 bp, Homo sapiens
attgagtagctgaac

SEQ ID NO: 885856 - DNA, 15 bp, Homo sapiens
ttgagtagctgaaca

SEQ ID NO: 885857 - DNA, 15 bp, Homo sapiens
tgagtagctgaacac

SEQ ID NO: 885858 - DNA, 15 bp, Homo sapiens
gagtagctgaacaca

SEQ ID NO: 885859 - DNA, 15 bp, Homo sapiens
agtagctgaacacag

SEQ ID NO: 885860 - DNA, 15 bp, Homo sapiens
gtagctgaacacaga

SEQ ID NO: 885861 - DNA, 15 bp, Homo sapiens
tagctgaacacagaa

SEQ ID NO: 885862 - DNA, 15 bp, Homo sapiens
agctgaacacagaat

SEQ ID NO: 885863 - DNA, 15 bp, Homo sapiens
gctgaacacagaatt

SEQ ID NO: 885864 - DNA, 15 bp, Homo sapiens
ctgaacacagaatta

SEQ ID NO: 885865 - DNA, 15 bp, Homo sapiens
tgaacacagaattat

SEQ ID NO: 885866 - DNA, 15 bp, Homo sapiens
gaacacagaattatc

SEQ ID NO: 885867 - DNA, 15 bp, Homo sapiens
aacacagaattatcg

SEQ ID NO: 885868 - DNA, 15 bp, Homo sapiens
acacagaattatcgt

SEQ ID NO: 885869 - DNA, 15 bp, Homo sapiens
cacagaattatcgtg

SEQ ID NO: 885870 - DNA, 15 bp, Homo sapiens
acagaattatcgtgg

SEQ ID NO: 885871 - DNA, 15 bp, Homo sapiens
cagaattatcgtggt

SEQ ID NO: 885872 - DNA, 15 bp, Homo sapiens
agaattatcgtggtt

SEQ ID NO: 885873 - DNA, 15 bp, Homo sapiens
gaattatcgtggttt

SEQ ID NO: 885874 - DNA, 15 bp, Homo sapiens
aattatcgtggtttc

SEQ ID NO: 885875 - DNA, 15 bp, Homo sapiens
attatcgtggtttca

SEQ ID NO: 885876 - DNA, 15 bp, Homo sapiens
ttatcgtggtttcaa

SEQ ID NO: 885877 - DNA, 15 bp, Homo sapiens
tatcgtggtttcaat

SEQ ID NO: 885878 - DNA, 15 bp, Homo sapiens
atcgtggtttcaata

SEQ ID NO: 885879 - DNA, 15 bp, Homo sapiens
tcgtggtttcaatat

SEQ ID NO: 885880 - DNA, 15 bp, Homo sapiens
cgtggtttcaatatt

SEQ ID NO: 885881 - DNA, 15 bp, Homo sapiens
gtggtttcaatatta

SEQ ID NO: 885882 - DNA, 15 bp, Homo sapiens
tggtttcaatattat

SEQ ID NO: 885883 - DNA, 15 bp, Homo sapiens
ggtttcaatattatg

SEQ ID NO: 885884 - DNA, 15 bp, Homo sapiens
gtttcaatattatgt

SEQ ID NO: 885885 - DNA, 15 bp, Homo sapiens
tttcaatattatgta

SEQ ID NO: 885886 - DNA, 15 bp, Homo sapiens
ttcaatattatgtat

SEQ ID NO: 885887 - DNA, 15 bp, Homo sapiens
tcaatattatgtatg

SEQ ID NO: 885888 - DNA, 15 bp, Homo sapiens
caatattatgtatga

SEQ ID NO: 885889 - DNA, 15 bp, Homo sapiens
aatattatgtatgat

SEQ ID NO: 885890 - DNA, 15 bp, Homo sapiens
atattatgtatgatg

SEQ ID NO: 885891 - DNA, 15 bp, Homo sapiens
tattatgtatgatgc

SEQ ID NO: 885892 - DNA, 15 bp, Homo sapiens
attatgtatgatgca

SEQ ID NO: 885893 - DNA, 15 bp, Homo sapiens
ttatgtatgatgcac

SEQ ID NO: 885894 - DNA, 15 bp, Homo sapiens
tatgtatgatgcacg

SEQ ID NO: 885895 - DNA, 15 bp, Homo sapiens
atgtatgatgcacgg

SEQ ID NO: 885896 - DNA, 15 bp, Homo sapiens
tgtatgatgcacggt

SEQ ID NO: 885897 - DNA, 15 bp, Homo sapiens
gtatgatgcacggta

SEQ ID NO: 885898 - DNA, 15 bp, Homo sapiens
tatgatgcacggtaa

SEQ ID NO: 885899 - DNA, 15 bp, Homo sapiens
atgatgcacggtaat

SEQ ID NO: 885900 - DNA, 15 bp, Homo sapiens
tgatgcacggtaatc

SEQ ID NO: 885901 - DNA, 15 bp, Homo sapiens
gatgcacggtaatct

SEQ ID NO: 885902 - DNA, 15 bp, Homo sapiens
atgcacggtaatcta

SEQ ID NO: 885903 - DNA, 15 bp, Homo sapiens
tgcacggtaatctaa

SEQ ID NO: 885904 - DNA, 15 bp, Homo sapiens
gcacggtaatctaaa

SEQ ID NO: 885905 - DNA, 15 bp, Homo sapiens
cacggtaatctaaag

SEQ ID NO: 885906 - DNA, 15 bp, Homo sapiens
acggtaatctaaagg

SEQ ID NO: 885907 - DNA, 15 bp, Homo sapiens
cggtaatctaaaggg

SEQ ID NO: 885908 - DNA, 15 bp, Homo sapiens
ggtaatctaaaggga

SEQ ID NO: 885909 - DNA, 15 bp, Homo sapiens
gtaatctaaagggat

SEQ ID NO: 885910 - DNA, 15 bp, Homo sapiens
taatctaaagggatt

SEQ ID NO: 885911 - DNA, 15 bp, Homo sapiens
aatctaaagggattt

SEQ ID NO: 885912 - DNA, 15 bp, Homo sapiens
atctaaagggatttg

SEQ ID NO: 885913 - DNA, 15 bp, Homo sapiens
tctaaagggatttgg

SEQ ID NO: 885914 - DNA, 15 bp, Homo sapiens
ctaaagggatttggg

SEQ ID NO: 885915 - DNA, 15 bp, Homo sapiens
taaagggatttggga

SEQ ID NO: 885916 - DNA, 15 bp, Homo sapiens
aaagggatttgggac

SEQ ID NO: 885917 - DNA, 15 bp, Homo sapiens
aagggatttgggaca

SEQ ID NO: 885918 - DNA, 15 bp, Homo sapiens
agggatttgggacat

SEQ ID NO: 885919 - DNA, 15 bp, Homo sapiens
gggatttgggacatt

SEQ ID NO: 885920 - DNA, 15 bp, Homo sapiens
ggatttgggacattg

SEQ ID NO: 885921 - DNA, 15 bp, Homo sapiens
gatttgggacattgc

SEQ ID NO: 885922 - DNA, 15 bp, Homo sapiens
atttgggacattgct

SEQ ID NO: 885923 - DNA, 15 bp, Homo sapiens
tttgggacattgcta

SEQ ID NO: 885924 - DNA, 15 bp, Homo sapiens
ttgggacattgctac

SEQ ID NO: 885925 - DNA, 15 bp, Homo sapiens
tgggacattgctaca

SEQ ID NO: 885926 - DNA, 15 bp, Homo sapiens
gggacattgctacaa

SEQ ID NO: 885927 - DNA, 15 bp, Homo sapiens
ggacattgctacaac

SEQ ID NO: 885928 - DNA, 15 bp, Homo sapiens
gacattgctacaacc

SEQ ID NO: 885929 - DNA, 15 bp, Homo sapiens
acattgctacaacct

SEQ ID NO: 885930 - DNA, 15 bp, Homo sapiens
cattgctacaacctc

SEQ ID NO: 885931 - DNA, 15 bp, Homo sapiens
attgctacaacctca

SEQ ID NO: 885932 - DNA, 15 bp, Homo sapiens
ttgctacaacctcat

SEQ ID NO: 885933 - DNA, 15 bp, Homo sapiens
tgctacaacctcatt

SEQ ID NO: 885934 - DNA, 15 bp, Homo sapiens
gctacaacctcattt

SEQ ID NO: 885935 - DNA, 15 bp, Homo sapiens
ctacaacctcatttt

SEQ ID NO: 885936 - DNA, 15 bp, Homo sapiens
tacaacctcatttta

SEQ ID NO: 885937 - DNA, 15 bp, Homo sapiens
acaacctcattttat

SEQ ID NO: 885938 - DNA, 15 bp, Homo sapiens
caacctcattttatg

SEQ ID NO: 885939 - DNA, 15 bp, Homo sapiens
aacctcattttatgg

SEQ ID NO: 885940 - DNA, 15 bp, Homo sapiens
acctcattttatgga

SEQ ID NO: 885941 - DNA, 15 bp, Homo sapiens
cctcattttatggat

SEQ ID NO: 885942 - DNA, 15 bp, Homo sapiens
ctcattttatggatg

SEQ ID NO: 885943 - DNA, 15 bp, Homo sapiens
tcattttatggatgg

SEQ ID NO: 885944 - DNA, 15 bp, Homo sapiens
cattttatggatggg

SEQ ID NO: 885945 - DNA, 15 bp, Homo sapiens
attttatggatggga

SEQ ID NO: 885946 - DNA, 15 bp, Homo sapiens
ttttatggatgggag

SEQ ID NO: 885947 - DNA, 15 bp, Homo sapiens
tttatggatgggaga

SEQ ID NO: 885948 - DNA, 15 bp, Homo sapiens
ttatggatgggagaa

SEQ ID NO: 885949 - DNA, 15 bp, Homo sapiens
tatggatgggagaac

SEQ ID NO: 885950 - DNA, 15 bp, Homo sapiens
atggatgggagaact

SEQ ID NO: 885951 - DNA, 15 bp, Homo sapiens
tggatgggagaactg

SEQ ID NO: 885952 - DNA, 15 bp, Homo sapiens
ggatgggagaactga

SEQ ID NO: 885953 - DNA, 15 bp, Homo sapiens
gatgggagaactgag

SEQ ID NO: 885954 - DNA, 15 bp, Homo sapiens
atgggagaactgagt

SEQ ID NO: 885955 - DNA, 15 bp, Homo sapiens
tgggagaactgagtt

SEQ ID NO: 885956 - DNA, 15 bp, Homo sapiens
gggagaactgagttt

SEQ ID NO: 885957 - DNA, 15 bp, Homo sapiens
ggagaactgagtttg

SEQ ID NO: 885958 - DNA, 15 bp, Homo sapiens
gagaactgagtttgg

SEQ ID NO: 885959 - DNA, 15 bp, Homo sapiens
agaactgagtttgga

SEQ ID NO: 885960 - DNA, 15 bp, Homo sapiens
gaactgagtttggat

SEQ ID NO: 885961 - DNA, 15 bp, Homo sapiens
aactgagtttggata

SEQ ID NO: 885962 - DNA, 15 bp, Homo sapiens
actgagtttggataa

SEQ ID NO: 885963 - DNA, 15 bp, Homo sapiens
ctgagtttggataag

SEQ ID NO: 885964 - DNA, 15 bp, Homo sapiens
tgagtttggataaga

SEQ ID NO: 885965 - DNA, 15 bp, Homo sapiens
gagtttggataagac

SEQ ID NO: 885966 - DNA, 15 bp, Homo sapiens
agtttggataagaca

SEQ ID NO: 885967 - DNA, 15 bp, Homo sapiens
gtttggataagacat

SEQ ID NO: 885968 - DNA, 15 bp, Homo sapiens
tttggataagacatt

SEQ ID NO: 885969 - DNA, 15 bp, Homo sapiens
ttggataagacattg

SEQ ID NO: 885970 - DNA, 15 bp, Homo sapiens
tggataagacattga

SEQ ID NO: 885971 - DNA, 15 bp, Homo sapiens
ggataagacattgaa

SEQ ID NO: 885972 - DNA, 15 bp, Homo sapiens
gataagacattgaat

SEQ ID NO: 885973 - DNA, 15 bp, Homo sapiens
ataagacattgaatc

SEQ ID NO: 885974 - DNA, 15 bp, Homo sapiens
taagacattgaatcc

SEQ ID NO: 885975 - DNA, 15 bp, Homo sapiens
aagacattgaatcct

SEQ ID NO: 885976 - DNA, 15 bp, Homo sapiens
agacattgaatcctt

SEQ ID NO: 885977 - DNA, 15 bp, Homo sapiens
gacattgaatccttc

SEQ ID NO: 885978 - DNA, 15 bp, Homo sapiens
acattgaatccttct

SEQ ID NO: 885979 - DNA, 15 bp, Homo sapiens
cattgaatccttcta

SEQ ID NO: 885980 - DNA, 15 bp, Homo sapiens
attgaatccttctac

SEQ ID NO: 885981 - DNA, 15 bp, Homo sapiens
ttgaatccttctaca

SEQ ID NO: 885982 - DNA, 15 bp, Homo sapiens
tgaatccttctacat

SEQ ID NO: 885983 - DNA, 15 bp, Homo sapiens
gaatccttctacatt

SEQ ID NO: 885984 - DNA, 15 bp, Homo sapiens
aatccttctacattc

SEQ ID NO: 885985 - DNA, 15 bp, Homo sapiens
atccttctacattct

SEQ ID NO: 885986 - DNA, 15 bp, Homo sapiens
tccttctacattctc

SEQ ID NO: 885987 - DNA, 15 bp, Homo sapiens
ccttctacattctca

SEQ ID NO: 885988 - DNA, 15 bp, Homo sapiens
cttctacattctcac

SEQ ID NO: 885989 - DNA, 15 bp, Homo sapiens
ttctacattctcaca

SEQ ID NO: 885990 - DNA, 15 bp, Homo sapiens
tctacattctcacag

SEQ ID NO: 885991 - DNA, 15 bp, Homo sapiens
ctacattctcacaga

SEQ ID NO: 885992 - DNA, 15 bp, Homo sapiens
tacattctcacagag

SEQ ID NO: 885993 - DNA, 15 bp, Homo sapiens
acattctcacagaga

SEQ ID NO: 885994 - DNA, 15 bp, Homo sapiens
cattctcacagagag

SEQ ID NO: 885995 - DNA, 15 bp, Homo sapiens
attctcacagagagg

SEQ ID NO: 885996 - DNA, 15 bp, Homo sapiens
ttctcacagagaggt

SEQ ID NO: 885997 - DNA, 15 bp, Homo sapiens
tctcacagagaggta

SEQ ID NO: 885998 - DNA, 15 bp, Homo sapiens
ctcacagagaggtag

SEQ ID NO: 885999 - DNA, 15 bp, Homo sapiens
tcacagagaggtagg

SEQ ID NO: 886000 - DNA, 15 bp, Homo sapiens
cacagagaggtagga

SEQ ID NO: 886001 - DNA, 15 bp, Homo sapiens
acagagaggtaggag

SEQ ID NO: 886002 - DNA, 15 bp, Homo sapiens
cagagaggtaggagt

SEQ ID NO: 886003 - DNA, 15 bp, Homo sapiens
agagaggtaggagtt

SEQ ID NO: 886004 - DNA, 15 bp, Homo sapiens
gagaggtaggagttg

SEQ ID NO: 886005 - DNA, 15 bp, Homo sapiens
agaggtaggagttga

SEQ ID NO: 886006 - DNA, 15 bp, Homo sapiens
gaggtaggagttgac

SEQ ID NO: 886007 - DNA, 15 bp, Homo sapiens
aggtaggagttgacc

SEQ ID NO: 886008 - DNA, 15 bp, Homo sapiens
ggtaggagttgacct

SEQ ID NO: 886009 - DNA, 15 bp, Homo sapiens
gtaggagttgacctg

SEQ ID NO: 886010 - DNA, 15 bp, Homo sapiens
taggagttgacctgg

SEQ ID NO: 886011 - DNA, 15 bp, Homo sapiens
aggagttgacctggg

SEQ ID NO: 886012 - DNA, 15 bp, Homo sapiens
ggagttgacctggga

SEQ ID NO: 886013 - DNA, 15 bp, Homo sapiens
gagttgacctgggac

SEQ ID NO: 886014 - DNA, 15 bp, Homo sapiens
agttgacctgggact

SEQ ID NO: 886015 - DNA, 15 bp, Homo sapiens
gttgacctgggacta

SEQ ID NO: 886016 - DNA, 15 bp, Homo sapiens
ttgacctgggactaa

SEQ ID NO: 886017 - DNA, 15 bp, Homo sapiens
tgacctgggactaaa

SEQ ID NO: 886018 - DNA, 15 bp, Homo sapiens
gacctgggactaaaa

SEQ ID NO: 886019 - DNA, 15 bp, Homo sapiens
acctgggactaaaac

SEQ ID NO: 886020 - DNA, 15 bp, Homo sapiens
cctgggactaaaacc

SEQ ID NO: 886021 - DNA, 15 bp, Homo sapiens
ctgggactaaaaccc

SEQ ID NO: 886022 - DNA, 15 bp, Homo sapiens
tgggactaaaaccca

SEQ ID NO: 886023 - DNA, 15 bp, Homo sapiens
gggactaaaacccat

SEQ ID NO: 886024 - DNA, 15 bp, Homo sapiens
ggactaaaacccatg

SEQ ID NO: 886025 - DNA, 15 bp, Homo sapiens
gactaaaacccatgt

SEQ ID NO: 886026 - DNA, 15 bp, Homo sapiens
actaaaacccatgtg

SEQ ID NO: 886027 - DNA, 15 bp, Homo sapiens
ctaaaacccatgtgt

SEQ ID NO: 886028 - DNA, 15 bp, Homo sapiens
taaaacccatgtgtt

SEQ ID NO: 886029 - DNA, 15 bp, Homo sapiens
aaaacccatgtgttt

SEQ ID NO: 886030 - DNA, 15 bp, Homo sapiens
aaacccatgtgtttt

SEQ ID NO: 886031 - DNA, 15 bp, Homo sapiens
aacccatgtgttttg

SEQ ID NO: 886032 - DNA, 15 bp, Homo sapiens
acccatgtgttttgt

SEQ ID NO: 886033 - DNA, 15 bp, Homo sapiens
cccatgtgttttgtt

SEQ ID NO: 886034 - DNA, 15 bp, Homo sapiens
ccatgtgttttgttt

SEQ ID NO: 886035 - DNA, 15 bp, Homo sapiens
catgtgttttgtttt

SEQ ID NO: 886036 - DNA, 15 bp, Homo sapiens
atgtgttttgttttc

SEQ ID NO: 886037 - DNA, 15 bp, Homo sapiens
gtgttttgttttctc

SEQ ID NO: 886038 - DNA, 15 bp, Homo sapiens
tgttttgttttctct

SEQ ID NO: 886039 - DNA, 15 bp, Homo sapiens
gttttgttttctctg

SEQ ID NO: 886040 - DNA, 15 bp, Homo sapiens
ttttgttttctctgt

SEQ ID NO: 886041 - DNA, 15 bp, Homo sapiens
tttgttttctctgtc

SEQ ID NO: 886042 - DNA, 15 bp, Homo sapiens
ttgttttctctgtca

SEQ ID NO: 886043 - DNA, 15 bp, Homo sapiens
tgttttctctgtcag

SEQ ID NO: 886044 - DNA, 15 bp, Homo sapiens
gttttctctgtcagc

SEQ ID NO: 886045 - DNA, 15 bp, Homo sapiens
ttttctctgtcagct

SEQ ID NO: 886046 - DNA, 15 bp, Homo sapiens
tttctctgtcagctt

SEQ ID NO: 886047 - DNA, 15 bp, Homo sapiens
ttctctgtcagctta

SEQ ID NO: 886048 - DNA, 15 bp, Homo sapiens
tctctgtcagcttac

SEQ ID NO: 886049 - DNA, 15 bp, Homo sapiens
ctctgtcagcttaca

SEQ ID NO: 886050 - DNA, 15 bp, Homo sapiens
tctgtcagcttacaa

SEQ ID NO: 886051 - DNA, 15 bp, Homo sapiens
ctgtcagcttacaac

SEQ ID NO: 886052 - DNA, 15 bp, Homo sapiens
tgtcagcttacaacc

SEQ ID NO: 886053 - DNA, 15 bp, Homo sapiens
gtcagcttacaaccc

SEQ ID NO: 886054 - DNA, 15 bp, Homo sapiens
tcagcttacaaccct

SEQ ID NO: 886055 - DNA, 15 bp, Homo sapiens
cagcttacaaccctg

SEQ ID NO: 886056 - DNA, 15 bp, Homo sapiens
agcttacaaccctgt

SEQ ID NO: 886057 - DNA, 15 bp, Homo sapiens
gcttacaaccctgtt

SEQ ID NO: 886058 - DNA, 15 bp, Homo sapiens
cttacaaccctgttg

SEQ ID NO: 886059 - DNA, 15 bp, Homo sapiens
ttacaaccctgttgt

SEQ ID NO: 886060 - DNA, 15 bp, Homo sapiens
tacaaccctgttgtt

SEQ ID NO: 886061 - DNA, 15 bp, Homo sapiens
acaaccctgttgttg

SEQ ID NO: 886062 - DNA, 15 bp, Homo sapiens
caaccctgttgttga

SEQ ID NO: 886063 - DNA, 15 bp, Homo sapiens
aaccctgttgttgat

SEQ ID NO: 886064 - DNA, 15 bp, Homo sapiens
accctgttgttgata

SEQ ID NO: 886065 - DNA, 15 bp, Homo sapiens
ccctgttgttgataa

SEQ ID NO: 886066 - DNA, 15 bp, Homo sapiens
cctgttgttgataaa

SEQ ID NO: 886067 - DNA, 15 bp, Homo sapiens
ctgttgttgataaat

SEQ ID NO: 886068 - DNA, 15 bp, Homo sapiens
tgttgttgataaata

SEQ ID NO: 886069 - DNA, 15 bp, Homo sapiens
gttgttgataaataa

SEQ ID NO: 886070 - DNA, 15 bp, Homo sapiens
ttgttgataaataat

SEQ ID NO: 886071 - DNA, 15 bp, Homo sapiens
tgttgataaataata

SEQ ID NO: 886072 - DNA, 15 bp, Homo sapiens
gttgataaataatag

SEQ ID NO: 886073 - DNA, 15 bp, Homo sapiens
ttgataaataatagt

SEQ ID NO: 886074 - DNA, 15 bp, Homo sapiens
tgataaataatagta

SEQ ID NO: 886075 - DNA, 15 bp, Homo sapiens
gataaataatagtaa

SEQ ID NO: 886076 - DNA, 15 bp, Homo sapiens
ataaataatagtaag

SEQ ID NO: 886077 - DNA, 15 bp, Homo sapiens
taaataatagtaagt

SEQ ID NO: 886078 - DNA, 15 bp, Homo sapiens
aaataatagtaagtt

SEQ ID NO: 886079 - DNA, 15 bp, Homo sapiens
aataatagtaagtta

SEQ ID NO: 886080 - DNA, 15 bp, Homo sapiens
ataatagtaagttag

SEQ ID NO: 886081 - DNA, 15 bp, Homo sapiens
taatagtaagttagt

SEQ ID NO: 886082 - DNA, 15 bp, Homo sapiens
aatagtaagttagta

SEQ ID NO: 886083 - DNA, 15 bp, Homo sapiens
atagtaagttagtac

SEQ ID NO: 886084 - DNA, 15 bp, Homo sapiens
tagtaagttagtact

SEQ ID NO: 886085 - DNA, 15 bp, Homo sapiens
agtaagttagtactg

SEQ ID NO: 886086 - DNA, 15 bp, Homo sapiens
gtaagttagtactga

SEQ ID NO: 886087 - DNA, 15 bp, Homo sapiens
taagttagtactgat

SEQ ID NO: 886088 - DNA, 15 bp, Homo sapiens
aagttagtactgatg

SEQ ID NO: 886089 - DNA, 15 bp, Homo sapiens
agttagtactgatga

SEQ ID NO: 886090 - DNA, 15 bp, Homo sapiens
gttagtactgatgaa

SEQ ID NO: 886091 - DNA, 15 bp, Homo sapiens
ttagtactgatgaag

SEQ ID NO: 886092 - DNA, 15 bp, Homo sapiens
tagtactgatgaagt

SEQ ID NO: 886093 - DNA, 15 bp, Homo sapiens
agtactgatgaagta

SEQ ID NO: 886094 - DNA, 15 bp, Homo sapiens
gtactgatgaagtac

SEQ ID NO: 886095 - DNA, 15 bp, Homo sapiens
tactgatgaagtaca

SEQ ID NO: 886096 - DNA, 15 bp, Homo sapiens
actgatgaagtacat

SEQ ID NO: 886097 - DNA, 15 bp, Homo sapiens
ctgatgaagtacatg

SEQ ID NO: 886098 - DNA, 15 bp, Homo sapiens
tgatgaagtacatgc

SEQ ID NO: 886099 - DNA, 15 bp, Homo sapiens
gatgaagtacatgct

SEQ ID NO: 886100 - DNA, 15 bp, Homo sapiens
atgaagtacatgctc

SEQ ID NO: 886101 - DNA, 15 bp, Homo sapiens
tgaagtacatgctct

SEQ ID NO: 886102 - DNA, 15 bp, Homo sapiens
gaagtacatgctctg

SEQ ID NO: 886103 - DNA, 15 bp, Homo sapiens
aagtacatgctctgt

SEQ ID NO: 886104 - DNA, 15 bp, Homo sapiens
agtacatgctctgtg

SEQ ID NO: 886105 - DNA, 15 bp, Homo sapiens
gtacatgctctgtgc

SEQ ID NO: 886106 - DNA, 15 bp, Homo sapiens
tacatgctctgtgcc

SEQ ID NO: 886107 - DNA, 15 bp, Homo sapiens
acatgctctgtgcca

SEQ ID NO: 886108 - DNA, 15 bp, Homo sapiens
catgctctgtgccag

SEQ ID NO: 886109 - DNA, 15 bp, Homo sapiens
atgctctgtgccagg

SEQ ID NO: 886110 - DNA, 15 bp, Homo sapiens
tgctctgtgccaggt

SEQ ID NO: 886111 - DNA, 15 bp, Homo sapiens
gctctgtgccaggtg

SEQ ID NO: 886112 - DNA, 15 bp, Homo sapiens
ctctgtgccaggtgc

SEQ ID NO: 886113 - DNA, 15 bp, Homo sapiens
tctgtgccaggtgct

SEQ ID NO: 886114 - DNA, 15 bp, Homo sapiens
ctgtgccaggtgctg

SEQ ID NO: 886115 - DNA, 15 bp, Homo sapiens
tgtgccaggtgctgt

SEQ ID NO: 886116 - DNA, 15 bp, Homo sapiens
gtgccaggtgctgtt

SEQ ID NO: 886117 - DNA, 15 bp, Homo sapiens
tgccaggtgctgttg

SEQ ID NO: 886118 - DNA, 15 bp, Homo sapiens
gccaggtgctgttgt

SEQ ID NO: 886119 - DNA, 15 bp, Homo sapiens
ccaggtgctgttgta

SEQ ID NO: 886120 - DNA, 15 bp, Homo sapiens
caggtgctgttgtaa

SEQ ID NO: 886121 - DNA, 15 bp, Homo sapiens
aggtgctgttgtaag

SEQ ID NO: 886122 - DNA, 15 bp, Homo sapiens
ggtgctgttgtaagc

SEQ ID NO: 886123 - DNA, 15 bp, Homo sapiens
gtgctgttgtaagca

SEQ ID NO: 886124 - DNA, 15 bp, Homo sapiens
tgctgttgtaagcag

SEQ ID NO: 886125 - DNA, 15 bp, Homo sapiens
gctgttgtaagcagt

SEQ ID NO: 886126 - DNA, 15 bp, Homo sapiens
ctgttgtaagcagtt

SEQ ID NO: 886127 - DNA, 15 bp, Homo sapiens
tgttgtaagcagttt

SEQ ID NO: 886128 - DNA, 15 bp, Homo sapiens
gttgtaagcagtttc

SEQ ID NO: 886129 - DNA, 15 bp, Homo sapiens
ttgtaagcagtttcc

SEQ ID NO: 886130 - DNA, 15 bp, Homo sapiens
tgtaagcagtttccc

SEQ ID NO: 886131 - DNA, 15 bp, Homo sapiens
gtaagcagtttccct

SEQ ID NO: 886132 - DNA, 15 bp, Homo sapiens
taagcagtttccctg

SEQ ID NO: 886133 - DNA, 15 bp, Homo sapiens
aagcagtttccctgt

SEQ ID NO: 886134 - DNA, 15 bp, Homo sapiens
agcagtttccctgta

SEQ ID NO: 886135 - DNA, 15 bp, Homo sapiens
gcagtttccctgtat

SEQ ID NO: 886136 - DNA, 15 bp, Homo sapiens
cagtttccctgtatt

SEQ ID NO: 886137 - DNA, 15 bp, Homo sapiens
agtttccctgtatta

SEQ ID NO: 886138 - DNA, 15 bp, Homo sapiens
gtttccctgtattat

SEQ ID NO: 886139 - DNA, 15 bp, Homo sapiens
tttccctgtattatt

SEQ ID NO: 886140 - DNA, 15 bp, Homo sapiens
ttccctgtattatta

SEQ ID NO: 886141 - DNA, 15 bp, Homo sapiens
tccctgtattattat

SEQ ID NO: 886142 - DNA, 15 bp, Homo sapiens
ccctgtattattatt

SEQ ID NO: 886143 - DNA, 15 bp, Homo sapiens
cctgtattattatta

SEQ ID NO: 886144 - DNA, 15 bp, Homo sapiens
ctgtattattattat

SEQ ID NO: 886145 - DNA, 15 bp, Homo sapiens
tgtattattattatt

SEQ ID NO: 886146 - DNA, 15 bp, Homo sapiens
gtattattattatta

SEQ ID NO: 886147 - DNA, 15 bp, Homo sapiens
tattattattattaa

SEQ ID NO: 886148 - DNA, 15 bp, Homo sapiens
attattattattaac

SEQ ID NO: 886149 - DNA, 15 bp, Homo sapiens
ttattattattaact

SEQ ID NO: 886150 - DNA, 15 bp, Homo sapiens
tattattattaactc

SEQ ID NO: 886151 - DNA, 15 bp, Homo sapiens
attattattaactca

SEQ ID NO: 886152 - DNA, 15 bp, Homo sapiens
ttattattaactcat

SEQ ID NO: 886153 - DNA, 15 bp, Homo sapiens
tattattaactcatt

SEQ ID NO: 886154 - DNA, 15 bp, Homo sapiens
attattaactcattc

SEQ ID NO: 886155 - DNA, 15 bp, Homo sapiens
ttattaactcattca

SEQ ID NO: 886156 - DNA, 15 bp, Homo sapiens
tattaactcattcaa

SEQ ID NO: 886157 - DNA, 15 bp, Homo sapiens
attaactcattcaat

SEQ ID NO: 886158 - DNA, 15 bp, Homo sapiens
ttaactcattcaatc

SEQ ID NO: 886159 - DNA, 15 bp, Homo sapiens
taactcattcaatct

SEQ ID NO: 886160 - DNA, 15 bp, Homo sapiens
aactcattcaatctt

SEQ ID NO: 886161 - DNA, 15 bp, Homo sapiens
actcattcaatcttc

SEQ ID NO: 886162 - DNA, 15 bp, Homo sapiens
ctcattcaatcttca

SEQ ID NO: 886163 - DNA, 15 bp, Homo sapiens
tcattcaatcttcat

SEQ ID NO: 886164 - DNA, 15 bp, Homo sapiens
cattcaatcttcatg

SEQ ID NO: 886165 - DNA, 15 bp, Homo sapiens
attcaatcttcatga

SEQ ID NO: 886166 - DNA, 15 bp, Homo sapiens
ttcaatcttcatgac

SEQ ID NO: 886167 - DNA, 15 bp, Homo sapiens
tcaatcttcatgaca

SEQ ID NO: 886168 - DNA, 15 bp, Homo sapiens
caatcttcatgacat

SEQ ID NO: 886169 - DNA, 15 bp, Homo sapiens
aatcttcatgacatc

SEQ ID NO: 886170 - DNA, 15 bp, Homo sapiens
atcttcatgacatct

SEQ ID NO: 886171 - DNA, 15 bp, Homo sapiens
tcttcatgacatctt

SEQ ID NO: 886172 - DNA, 15 bp, Homo sapiens
cttcatgacatcttc

SEQ ID NO: 886173 - DNA, 15 bp, Homo sapiens
ttcatgacatcttcc

SEQ ID NO: 886174 - DNA, 15 bp, Homo sapiens
tcatgacatcttcct

SEQ ID NO: 886175 - DNA, 15 bp, Homo sapiens
catgacatcttcctc

SEQ ID NO: 886176 - DNA, 15 bp, Homo sapiens
atgacatcttcctct

SEQ ID NO: 886177 - DNA, 15 bp, Homo sapiens
tgacatcttcctctt

SEQ ID NO: 886178 - DNA, 15 bp, Homo sapiens
gacatcttcctcttc

SEQ ID NO: 886179 - DNA, 15 bp, Homo sapiens
acatcttcctcttcc

SEQ ID NO: 886180 - DNA, 15 bp, Homo sapiens
catcttcctcttcca

SEQ ID NO: 886181 - DNA, 15 bp, Homo sapiens
atcttcctcttccaa

SEQ ID NO: 886182 - DNA, 15 bp, Homo sapiens
tcttcctcttccaat

SEQ ID NO: 886183 - DNA, 15 bp, Homo sapiens
cttcctcttccaatt

SEQ ID NO: 886184 - DNA, 15 bp, Homo sapiens
ttcctcttccaattt

SEQ ID NO: 886185 - DNA, 15 bp, Homo sapiens
tcctcttccaatttg

SEQ ID NO: 886186 - DNA, 15 bp, Homo sapiens
cctcttccaatttgc

SEQ ID NO: 886187 - DNA, 15 bp, Homo sapiens
ctcttccaatttgca

SEQ ID NO: 886188 - DNA, 15 bp, Homo sapiens
tcttccaatttgcag

SEQ ID NO: 886189 - DNA, 15 bp, Homo sapiens
cttccaatttgcaga

SEQ ID NO: 886190 - DNA, 15 bp, Homo sapiens
ttccaatttgcagat

SEQ ID NO: 886191 - DNA, 15 bp, Homo sapiens
tccaatttgcagatg

SEQ ID NO: 886192 - DNA, 15 bp, Homo sapiens
ccaatttgcagatga

SEQ ID NO: 886193 - DNA, 15 bp, Homo sapiens
caatttgcagatgag

SEQ ID NO: 886194 - DNA, 15 bp, Homo sapiens
aatttgcagatgagg

SEQ ID NO: 886195 - DNA, 15 bp, Homo sapiens
atttgcagatgagga

SEQ ID NO: 886196 - DNA, 15 bp, Homo sapiens
tttgcagatgaggaa

SEQ ID NO: 886197 - DNA, 15 bp, Homo sapiens
ttgcagatgaggaaa

SEQ ID NO: 886198 - DNA, 15 bp, Homo sapiens
tgcagatgaggaaac

SEQ ID NO: 886199 - DNA, 15 bp, Homo sapiens
gcagatgaggaaact

SEQ ID NO: 886200 - DNA, 15 bp, Homo sapiens
atgaggaaactgaga

SEQ ID NO: 886201 - DNA, 15 bp, Homo sapiens
tgaggaaactgagac

SEQ ID NO: 886202 - DNA, 15 bp, Homo sapiens
gaggaaactgagaca

SEQ ID NO: 886203 - DNA, 15 bp, Homo sapiens
aggaaactgagacac

SEQ ID NO: 886204 - DNA, 15 bp, Homo sapiens
ggaaactgagacaca

SEQ ID NO: 886205 - DNA, 15 bp, Homo sapiens
gaaactgagacacaa

SEQ ID NO: 886206 - DNA, 15 bp, Homo sapiens
aaactgagacacaaa

SEQ ID NO: 886207 - DNA, 15 bp, Homo sapiens
aactgagacacaaaa

SEQ ID NO: 886208 - DNA, 15 bp, Homo sapiens
actgagacacaaaat

SEQ ID NO: 886209 - DNA, 15 bp, Homo sapiens
ctgagacacaaaatt

SEQ ID NO: 886210 - DNA, 15 bp, Homo sapiens
tgagacacaaaattt

SEQ ID NO: 886211 - DNA, 15 bp, Homo sapiens
gagacacaaaattta

SEQ ID NO: 886212 - DNA, 15 bp, Homo sapiens
agacacaaaatttaa

SEQ ID NO: 886213 - DNA, 15 bp, Homo sapiens
gacacaaaatttaaa

SEQ ID NO: 886214 - DNA, 15 bp, Homo sapiens
acacaaaatttaaat

SEQ ID NO: 886215 - DNA, 15 bp, Homo sapiens
cacaaaatttaaata

SEQ ID NO: 886216 - DNA, 15 bp, Homo sapiens
acaaaatttaaataa

SEQ ID NO: 886217 - DNA, 15 bp, Homo sapiens
caaaatttaaataaa

SEQ ID NO: 886218 - DNA, 15 bp, Homo sapiens
aaaatttaaataaat

SEQ ID NO: 886219 - DNA, 15 bp, Homo sapiens
aatttaaataaattg

SEQ ID NO: 886220 - DNA, 15 bp, Homo sapiens
atttaaataaattgc

SEQ ID NO: 886221 - DNA, 15 bp, Homo sapiens
tttaaataaattgcc

SEQ ID NO: 886222 - DNA, 15 bp, Homo sapiens
ttaaataaattgccc

SEQ ID NO: 886223 - DNA, 15 bp, Homo sapiens
taaataaattgcccc

SEQ ID NO: 886224 - DNA, 15 bp, Homo sapiens
aaataaattgcccca

SEQ ID NO: 886225 - DNA, 15 bp, Homo sapiens
aataaattgccccag

SEQ ID NO: 886226 - DNA, 15 bp, Homo sapiens
ataaattgccccaga

SEQ ID NO: 886227 - DNA, 15 bp, Homo sapiens
taaattgccccagat

SEQ ID NO: 886228 - DNA, 15 bp, Homo sapiens
aaattgccccagatc

SEQ ID NO: 886229 - DNA, 15 bp, Homo sapiens
aattgccccagatca

SEQ ID NO: 886230 - DNA, 15 bp, Homo sapiens
attgccccagatcac

SEQ ID NO: 886231 - DNA, 15 bp, Homo sapiens
ttgccccagatcaca

SEQ ID NO: 886232 - DNA, 15 bp, Homo sapiens
tgccccagatcacaa

SEQ ID NO: 886233 - DNA, 15 bp, Homo sapiens
gccccagatcacaaa

SEQ ID NO: 886234 - DNA, 15 bp, Homo sapiens
ccccagatcacaaat

SEQ ID NO: 886235 - DNA, 15 bp, Homo sapiens
cccagatcacaaatt

SEQ ID NO: 886236 - DNA, 15 bp, Homo sapiens
ccagatcacaaatta

SEQ ID NO: 886237 - DNA, 15 bp, Homo sapiens
cagatcacaaattag

SEQ ID NO: 886238 - DNA, 15 bp, Homo sapiens
agatcacaaattaga

SEQ ID NO: 886239 - DNA, 15 bp, Homo sapiens
gatcacaaattagaa

SEQ ID NO: 886240 - DNA, 15 bp, Homo sapiens
atcacaaattagaaa

SEQ ID NO: 886241 - DNA, 15 bp, Homo sapiens
tcacaaattagaaac

SEQ ID NO: 886242 - DNA, 15 bp, Homo sapiens
cacaaattagaaaca

SEQ ID NO: 886243 - DNA, 15 bp, Homo sapiens
acaaattagaaacag

SEQ ID NO: 886244 - DNA, 15 bp, Homo sapiens
caaattagaaacaga

SEQ ID NO: 886245 - DNA, 15 bp, Homo sapiens
aaattagaaacagaa

SEQ ID NO: 886246 - DNA, 15 bp, Homo sapiens
aattagaaacagaaa

SEQ ID NO: 886247 - DNA, 15 bp, Homo sapiens
attagaaacagaaag

SEQ ID NO: 886248 - DNA, 15 bp, Homo sapiens
ttagaaacagaaaga

SEQ ID NO: 886249 - DNA, 15 bp, Homo sapiens
tagaaacagaaagag

SEQ ID NO: 886250 - DNA, 15 bp, Homo sapiens
agaaacagaaagagg

SEQ ID NO: 886251 - DNA, 15 bp, Homo sapiens
gaaacagaaagaggc

SEQ ID NO: 886252 - DNA, 15 bp, Homo sapiens
aaacagaaagaggca

SEQ ID NO: 886253 - DNA, 15 bp, Homo sapiens
aacagaaagaggcag

SEQ ID NO: 886254 - DNA, 15 bp, Homo sapiens
acagaaagaggcagg

SEQ ID NO: 886255 - DNA, 15 bp, Homo sapiens
cagaaagaggcagga

SEQ ID NO: 886256 - DNA, 15 bp, Homo sapiens
agaaagaggcaggac

SEQ ID NO: 886257 - DNA, 15 bp, Homo sapiens
gaaagaggcaggacc

SEQ ID NO: 886258 - DNA, 15 bp, Homo sapiens
aaagaggcaggaccc

SEQ ID NO: 886259 - DNA, 15 bp, Homo sapiens
aagaggcaggaccca

SEQ ID NO: 886260 - DNA, 15 bp, Homo sapiens
agaggcaggacccaa

SEQ ID NO: 886261 - DNA, 15 bp, Homo sapiens
gaggcaggacccaaa

SEQ ID NO: 886262 - DNA, 15 bp, Homo sapiens
aggcaggacccaaac

SEQ ID NO: 886263 - DNA, 15 bp, Homo sapiens
ggcaggacccaaact

SEQ ID NO: 886264 - DNA, 15 bp, Homo sapiens
gcaggacccaaactc

SEQ ID NO: 886265 - DNA, 15 bp, Homo sapiens
caggacccaaactca

SEQ ID NO: 886266 - DNA, 15 bp, Homo sapiens
aggacccaaactcat

SEQ ID NO: 886267 - DNA, 15 bp, Homo sapiens
ggacccaaactcatt

SEQ ID NO: 886268 - DNA, 15 bp, Homo sapiens
gacccaaactcattc

SEQ ID NO: 886269 - DNA, 15 bp, Homo sapiens
acccaaactcattca

SEQ ID NO: 886270 - DNA, 15 bp, Homo sapiens
cccaaactcattcag

SEQ ID NO: 886271 - DNA, 15 bp, Homo sapiens
ccaaactcattcagt

SEQ ID NO: 886272 - DNA, 15 bp, Homo sapiens
caaactcattcagtc

SEQ ID NO: 886273 - DNA, 15 bp, Homo sapiens
aaactcattcagtct

SEQ ID NO: 886274 - DNA, 15 bp, Homo sapiens
aactcattcagtcta

SEQ ID NO: 886275 - DNA, 15 bp, Homo sapiens
actcattcagtctag

SEQ ID NO: 886276 - DNA, 15 bp, Homo sapiens
ctcattcagtctagc

SEQ ID NO: 886277 - DNA, 15 bp, Homo sapiens
tcattcagtctagcc

SEQ ID NO: 886278 - DNA, 15 bp, Homo sapiens
cattcagtctagcca

SEQ ID NO: 886279 - DNA, 15 bp, Homo sapiens
attcagtctagccac

SEQ ID NO: 886280 - DNA, 15 bp, Homo sapiens
ttcagtctagccaca

SEQ ID NO: 886281 - DNA, 15 bp, Homo sapiens
tcagtctagccacag

SEQ ID NO: 886282 - DNA, 15 bp, Homo sapiens
cagtctagccacagt

SEQ ID NO: 886283 - DNA, 15 bp, Homo sapiens
agtctagccacagtg

SEQ ID NO: 886284 - DNA, 15 bp, Homo sapiens
gtctagccacagtgt

SEQ ID NO: 886285 - DNA, 15 bp, Homo sapiens
tctagccacagtgtt

SEQ ID NO: 886286 - DNA, 15 bp, Homo sapiens
ctagccacagtgttc

SEQ ID NO: 886287 - DNA, 15 bp, Homo sapiens
tagccacagtgttca

SEQ ID NO: 886288 - DNA, 15 bp, Homo sapiens
agccacagtgttcaa

SEQ ID NO: 886289 - DNA, 15 bp, Homo sapiens
gccacagtgttcaag

SEQ ID NO: 886290 - DNA, 15 bp, Homo sapiens
ccacagtgttcaagt

SEQ ID NO: 886291 - DNA, 15 bp, Homo sapiens
cacagtgttcaagtt

SEQ ID NO: 886292 - DNA, 15 bp, Homo sapiens
acagtgttcaagttc

SEQ ID NO: 886293 - DNA, 15 bp, Homo sapiens
cagtgttcaagttct

SEQ ID NO: 886294 - DNA, 15 bp, Homo sapiens
agtgttcaagttcta

SEQ ID NO: 886295 - DNA, 15 bp, Homo sapiens
gtgttcaagttctag

SEQ ID NO: 886296 - DNA, 15 bp, Homo sapiens
tgttcaagttctaga

SEQ ID NO: 886297 - DNA, 15 bp, Homo sapiens
gttcaagttctagac

SEQ ID NO: 886298 - DNA, 15 bp, Homo sapiens
ttcaagttctagacc

SEQ ID NO: 886299 - DNA, 15 bp, Homo sapiens
tcaagttctagacca

SEQ ID NO: 886300 - DNA, 15 bp, Homo sapiens
caagttctagaccac

SEQ ID NO: 886301 - DNA, 15 bp, Homo sapiens
aagttctagaccaca

SEQ ID NO: 886302 - DNA, 15 bp, Homo sapiens
agttctagaccacaa

SEQ ID NO: 886303 - DNA, 15 bp, Homo sapiens
gttctagaccacaaa

SEQ ID NO: 886304 - DNA, 15 bp, Homo sapiens
ttctagaccacaaat

SEQ ID NO: 886305 - DNA, 15 bp, Homo sapiens
tctagaccacaaatg

SEQ ID NO: 886306 - DNA, 15 bp, Homo sapiens
ctagaccacaaatgg

SEQ ID NO: 886307 - DNA, 15 bp, Homo sapiens
tagaccacaaatggt

SEQ ID NO: 886308 - DNA, 15 bp, Homo sapiens
agaccacaaatggta

SEQ ID NO: 886309 - DNA, 15 bp, Homo sapiens
gaccacaaatggtat

SEQ ID NO: 886310 - DNA, 15 bp, Homo sapiens
accacaaatggtatg

SEQ ID NO: 886311 - DNA, 15 bp, Homo sapiens
ccacaaatggtatgg

SEQ ID NO: 886312 - DNA, 15 bp, Homo sapiens
cacaaatggtatggc

SEQ ID NO: 886313 - DNA, 15 bp, Homo sapiens
acaaatggtatggct

SEQ ID NO: 886314 - DNA, 15 bp, Homo sapiens
caaatggtatggctt

SEQ ID NO: 886315 - DNA, 15 bp, Homo sapiens
aaatggtatggctta

SEQ ID NO: 886316 - DNA, 15 bp, Homo sapiens
aatggtatggcttat

SEQ ID NO: 886317 - DNA, 15 bp, Homo sapiens
atggtatggcttatt

SEQ ID NO: 886318 - DNA, 15 bp, Homo sapiens
tggtatggcttattt

SEQ ID NO: 886319 - DNA, 15 bp, Homo sapiens
ggtatggcttatttc

SEQ ID NO: 886320 - DNA, 15 bp, Homo sapiens
gtatggcttatttca

SEQ ID NO: 886321 - DNA, 15 bp, Homo sapiens
tatggcttatttcag

SEQ ID NO: 886322 - DNA, 15 bp, Homo sapiens
atggcttatttcagg

SEQ ID NO: 886323 - DNA, 15 bp, Homo sapiens
tggcttatttcaggt

SEQ ID NO: 886324 - DNA, 15 bp, Homo sapiens
ggcttatttcaggta

SEQ ID NO: 886325 - DNA, 15 bp, Homo sapiens
gcttatttcaggtag

SEQ ID NO: 886326 - DNA, 15 bp, Homo sapiens
cttatttcaggtagt

SEQ ID NO: 886327 - DNA, 15 bp, Homo sapiens
ttatttcaggtagtg

SEQ ID NO: 886328 - DNA, 15 bp, Homo sapiens
tatttcaggtagtgg

SEQ ID NO: 886329 - DNA, 15 bp, Homo sapiens
atttcaggtagtggt

SEQ ID NO: 886330 - DNA, 15 bp, Homo sapiens
tttcaggtagtggtc

SEQ ID NO: 886331 - DNA, 15 bp, Homo sapiens
ttcaggtagtggtca

SEQ ID NO: 886332 - DNA, 15 bp, Homo sapiens
tcaggtagtggtcaa

SEQ ID NO: 886333 - DNA, 15 bp, Homo sapiens
caggtagtggtcaaa

SEQ ID NO: 886334 - DNA, 15 bp, Homo sapiens
aggtagtggtcaaaa

SEQ ID NO: 886335 - DNA, 15 bp, Homo sapiens
ggtagtggtcaaaag

SEQ ID NO: 886336 - DNA, 15 bp, Homo sapiens
gtagtggtcaaaagt

SEQ ID NO: 886337 - DNA, 15 bp, Homo sapiens
tagtggtcaaaagtt

SEQ ID NO: 886338 - DNA, 15 bp, Homo sapiens
agtggtcaaaagtta

SEQ ID NO: 886339 - DNA, 15 bp, Homo sapiens
gtggtcaaaagttat

SEQ ID NO: 886340 - DNA, 15 bp, Homo sapiens
tggtcaaaagttatt

SEQ ID NO: 886341 - DNA, 15 bp, Homo sapiens
ggtcaaaagttattg

SEQ ID NO: 886342 - DNA, 15 bp, Homo sapiens
gtcaaaagttattga

SEQ ID NO: 886343 - DNA, 15 bp, Homo sapiens
tcaaaagttattgac

SEQ ID NO: 886344 - DNA, 15 bp, Homo sapiens
caaaagttattgacc

SEQ ID NO: 886345 - DNA, 15 bp, Homo sapiens
aaaagttattgacca

SEQ ID NO: 886346 - DNA, 15 bp, Homo sapiens
aaagttattgaccac

SEQ ID NO: 886347 - DNA, 15 bp, Homo sapiens
aagttattgaccacg

SEQ ID NO: 886348 - DNA, 15 bp, Homo sapiens
agttattgaccacgc

SEQ ID NO: 886349 - DNA, 15 bp, Homo sapiens
gttattgaccacgct

SEQ ID NO: 886350 - DNA, 15 bp, Homo sapiens
ttattgaccacgctg

SEQ ID NO: 886351 - DNA, 15 bp, Homo sapiens
tattgaccacgctgt

SEQ ID NO: 886352 - DNA, 15 bp, Homo sapiens
attgaccacgctgta

SEQ ID NO: 886353 - DNA, 15 bp, Homo sapiens
ttgaccacgctgtac

SEQ ID NO: 886354 - DNA, 15 bp, Homo sapiens
tgaccacgctgtaca

SEQ ID NO: 886355 - DNA, 15 bp, Homo sapiens
gaccacgctgtacag

SEQ ID NO: 886356 - DNA, 15 bp, Homo sapiens
accacgctgtacaga

SEQ ID NO: 886357 - DNA, 15 bp, Homo sapiens
ccacgctgtacagag

SEQ ID NO: 886358 - DNA, 15 bp, Homo sapiens
cacgctgtacagaga

SEQ ID NO: 886359 - DNA, 15 bp, Homo sapiens
acgctgtacagagag

SEQ ID NO: 886360 - DNA, 15 bp, Homo sapiens
cgctgtacagagaga

SEQ ID NO: 886361 - DNA, 15 bp, Homo sapiens
gctgtacagagagat

SEQ ID NO: 886362 - DNA, 15 bp, Homo sapiens
ctgtacagagagatg

SEQ ID NO: 886363 - DNA, 15 bp, Homo sapiens
tgtacagagagatgc

SEQ ID NO: 886364 - DNA, 15 bp, Homo sapiens
gtacagagagatgct

SEQ ID NO: 886365 - DNA, 15 bp, Homo sapiens
tacagagagatgctc

SEQ ID NO: 886366 - DNA, 15 bp, Homo sapiens
acagagagatgctca

SEQ ID NO: 886367 - DNA, 15 bp, Homo sapiens
cagagagatgctcag

SEQ ID NO: 886368 - DNA, 15 bp, Homo sapiens
agagagatgctcaga

SEQ ID NO: 886369 - DNA, 15 bp, Homo sapiens
gagagatgctcagag

SEQ ID NO: 886370 - DNA, 15 bp, Homo sapiens
agagatgctcagagt

SEQ ID NO: 886371 - DNA, 15 bp, Homo sapiens
gagatgctcagagtc

SEQ ID NO: 886372 - DNA, 15 bp, Homo sapiens
agatgctcagagtca

SEQ ID NO: 886373 - DNA, 15 bp, Homo sapiens
gatgctcagagtcaa

SEQ ID NO: 886374 - DNA, 15 bp, Homo sapiens
atgctcagagtcaaa

SEQ ID NO: 886375 - DNA, 15 bp, Homo sapiens
tgctcagagtcaaac

SEQ ID NO: 886376 - DNA, 15 bp, Homo sapiens
gctcagagtcaaacc

SEQ ID NO: 886377 - DNA, 15 bp, Homo sapiens
ctcagagtcaaacca

SEQ ID NO: 886378 - DNA, 15 bp, Homo sapiens
tcagagtcaaaccag

SEQ ID NO: 886379 - DNA, 15 bp, Homo sapiens
cagagtcaaaccagc

SEQ ID NO: 886380 - DNA, 15 bp, Homo sapiens
agagtcaaaccagca

SEQ ID NO: 886381 - DNA, 15 bp, Homo sapiens
gagtcaaaccagcat

SEQ ID NO: 886382 - DNA, 15 bp, Homo sapiens
agtcaaaccagcatc

SEQ ID NO: 886383 - DNA, 15 bp, Homo sapiens
gtcaaaccagcatca

SEQ ID NO: 886384 - DNA, 15 bp, Homo sapiens
tcaaaccagcatcaa

SEQ ID NO: 886385 - DNA, 15 bp, Homo sapiens
caaaccagcatcaaa

SEQ ID NO: 886386 - DNA, 15 bp, Homo sapiens
aaaccagcatcaaac

SEQ ID NO: 886387 - DNA, 15 bp, Homo sapiens
aaccagcatcaaacc

SEQ ID NO: 886388 - DNA, 15 bp, Homo sapiens
accagcatcaaaccc

SEQ ID NO: 886389 - DNA, 15 bp, Homo sapiens
ccagcatcaaaccct

SEQ ID NO: 886390 - DNA, 15 bp, Homo sapiens
cagcatcaaaccctc

SEQ ID NO: 886391 - DNA, 15 bp, Homo sapiens
agcatcaaaccctca

SEQ ID NO: 886392 - DNA, 15 bp, Homo sapiens
gcatcaaaccctcat

SEQ ID NO: 886393 - DNA, 15 bp, Homo sapiens
catcaaaccctcatc

SEQ ID NO: 886394 - DNA, 15 bp, Homo sapiens
atcaaaccctcatct

SEQ ID NO: 886395 - DNA, 15 bp, Homo sapiens
tcaaaccctcatcta

SEQ ID NO: 886396 - DNA, 15 bp, Homo sapiens
caaaccctcatctag

SEQ ID NO: 886397 - DNA, 15 bp, Homo sapiens
aaaccctcatctagt

SEQ ID NO: 886398 - DNA, 15 bp, Homo sapiens
aaccctcatctagtg

SEQ ID NO: 886399 - DNA, 15 bp, Homo sapiens
accctcatctagtga

SEQ ID NO: 886400 - DNA, 15 bp, Homo sapiens
ccctcatctagtgaa

SEQ ID NO: 886401 - DNA, 15 bp, Homo sapiens
cctcatctagtgaag

SEQ ID NO: 886402 - DNA, 15 bp, Homo sapiens
ctcatctagtgaaga

SEQ ID NO: 886403 - DNA, 15 bp, Homo sapiens
tcatctagtgaagat

SEQ ID NO: 886404 - DNA, 15 bp, Homo sapiens
catctagtgaagatt

SEQ ID NO: 886405 - DNA, 15 bp, Homo sapiens
atctagtgaagattc

SEQ ID NO: 886406 - DNA, 15 bp, Homo sapiens
tctagtgaagattcg

SEQ ID NO: 886407 - DNA, 15 bp, Homo sapiens
ctagtgaagattcgt

SEQ ID NO: 886408 - DNA, 15 bp, Homo sapiens
tagtgaagattcgtg

SEQ ID NO: 886409 - DNA, 15 bp, Homo sapiens
agtgaagattcgtgt

SEQ ID NO: 886410 - DNA, 15 bp, Homo sapiens
gtgaagattcgtgtg

SEQ ID NO: 886411 - DNA, 15 bp, Homo sapiens
tgaagattcgtgtgt

SEQ ID NO: 886412 - DNA, 15 bp, Homo sapiens
gaagattcgtgtgtg

SEQ ID NO: 886413 - DNA, 15 bp, Homo sapiens
aagattcgtgtgtgt

SEQ ID NO: 886414 - DNA, 15 bp, Homo sapiens
agattcgtgtgtgta

SEQ ID NO: 886415 - DNA, 15 bp, Homo sapiens
gattcgtgtgtgtat

SEQ ID NO: 886416 - DNA, 15 bp, Homo sapiens
attcgtgtgtgtatg

SEQ ID NO: 886417 - DNA, 15 bp, Homo sapiens
ttcgtgtgtgtatgt

SEQ ID NO: 886418 - DNA, 15 bp, Homo sapiens
tcgtgtgtgtatgta

SEQ ID NO: 886419 - DNA, 15 bp, Homo sapiens
cgtgtgtgtatgtat

SEQ ID NO: 886420 - DNA, 15 bp, Homo sapiens
gtgtgtgtatgtatg

SEQ ID NO: 886421 - DNA, 15 bp, Homo sapiens
tgtgtgtatgtatgt

SEQ ID NO: 886422 - DNA, 15 bp, Homo sapiens
gtgtgtatgtatgtg

SEQ ID NO: 886423 - DNA, 15 bp, Homo sapiens
tgtgtatgtatgtgg

SEQ ID NO: 886424 - DNA, 15 bp, Homo sapiens
gtgtatgtatgtggg

SEQ ID NO: 886425 - DNA, 15 bp, Homo sapiens
tgtatgtatgtggga

SEQ ID NO: 886426 - DNA, 15 bp, Homo sapiens
gtatgtatgtgggaa

SEQ ID NO: 886427 - DNA, 15 bp, Homo sapiens
tatgtatgtgggaat

SEQ ID NO: 886428 - DNA, 15 bp, Homo sapiens
atgtatgtgggaatg

SEQ ID NO: 886429 - DNA, 15 bp, Homo sapiens
tgtatgtgggaatgc

SEQ ID NO: 886430 - DNA, 15 bp, Homo sapiens
gtatgtgggaatgcc

SEQ ID NO: 886431 - DNA, 15 bp, Homo sapiens
tatgtgggaatgcct

SEQ ID NO: 886432 - DNA, 15 bp, Homo sapiens
atgtgggaatgcctg

SEQ ID NO: 886433 - DNA, 15 bp, Homo sapiens
tgtgggaatgcctga

SEQ ID NO: 886434 - DNA, 15 bp, Homo sapiens
gtgggaatgcctgac

SEQ ID NO: 886435 - DNA, 15 bp, Homo sapiens
tgggaatgcctgacc

SEQ ID NO: 886436 - DNA, 15 bp, Homo sapiens
gggaatgcctgaccc

SEQ ID NO: 886437 - DNA, 15 bp, Homo sapiens
ggaatgcctgacccc

SEQ ID NO: 886438 - DNA, 15 bp, Homo sapiens
gaatgcctgacccca

SEQ ID NO: 886439 - DNA, 15 bp, Homo sapiens
aatgcctgaccccaa

SEQ ID NO: 886440 - DNA, 15 bp, Homo sapiens
atgcctgaccccaag

SEQ ID NO: 886441 - DNA, 15 bp, Homo sapiens
tgcctgaccccaaga

SEQ ID NO: 886442 - DNA, 15 bp, Homo sapiens
gcctgaccccaagat

SEQ ID NO: 886443 - DNA, 15 bp, Homo sapiens
cctgaccccaagatc

SEQ ID NO: 886444 - DNA, 15 bp, Homo sapiens
ctgaccccaagatcc

SEQ ID NO: 886445 - DNA, 15 bp, Homo sapiens
tgaccccaagatcca

SEQ ID NO: 886446 - DNA, 15 bp, Homo sapiens
gaccccaagatccaa

SEQ ID NO: 886447 - DNA, 15 bp, Homo sapiens
accccaagatccaag

SEQ ID NO: 886448 - DNA, 15 bp, Homo sapiens
ccccaagatccaaga

SEQ ID NO: 886449 - DNA, 15 bp, Homo sapiens
cccaagatccaagat

SEQ ID NO: 886450 - DNA, 15 bp, Homo sapiens
ccaagatccaagatc

SEQ ID NO: 886451 - DNA, 15 bp, Homo sapiens
caagatccaagatcc

SEQ ID NO: 886452 - DNA, 15 bp, Homo sapiens
aagatccaagatccc

SEQ ID NO: 886453 - DNA, 15 bp, Homo sapiens
agatccaagatccca

SEQ ID NO: 886454 - DNA, 15 bp, Homo sapiens
gatccaagatcccag

SEQ ID NO: 886455 - DNA, 15 bp, Homo sapiens
atccaagatcccagt

SEQ ID NO: 886456 - DNA, 15 bp, Homo sapiens
tccaagatcccagtt

SEQ ID NO: 886457 - DNA, 15 bp, Homo sapiens
ccaagatcccagttt

SEQ ID NO: 886458 - DNA, 15 bp, Homo sapiens
caagatcccagtttc

SEQ ID NO: 886459 - DNA, 15 bp, Homo sapiens
aagatcccagtttcc

SEQ ID NO: 886460 - DNA, 15 bp, Homo sapiens
agatcccagtttcct

SEQ ID NO: 886461 - DNA, 15 bp, Homo sapiens
gatcccagtttccta

SEQ ID NO: 886462 - DNA, 15 bp, Homo sapiens
atcccagtttcctat

SEQ ID NO: 886463 - DNA, 15 bp, Homo sapiens
tcccagtttcctatt

SEQ ID NO: 886464 - DNA, 15 bp, Homo sapiens
cccagtttcctattc

SEQ ID NO: 886465 - DNA, 15 bp, Homo sapiens
ccagtttcctattca

SEQ ID NO: 886466 - DNA, 15 bp, Homo sapiens
cagtttcctattcat

SEQ ID NO: 886467 - DNA, 15 bp, Homo sapiens
agtttcctattcatc

SEQ ID NO: 886468 - DNA, 15 bp, Homo sapiens
gtttcctattcatct

SEQ ID NO: 886469 - DNA, 15 bp, Homo sapiens
tttcctattcatctg

SEQ ID NO: 886470 - DNA, 15 bp, Homo sapiens
ttcctattcatctgc

SEQ ID NO: 886471 - DNA, 15 bp, Homo sapiens
tcctattcatctgcc

SEQ ID NO: 886472 - DNA, 15 bp, Homo sapiens
cctattcatctgcca

SEQ ID NO: 886473 - DNA, 15 bp, Homo sapiens
ctattcatctgccag

SEQ ID NO: 886474 - DNA, 15 bp, Homo sapiens
tattcatctgccagc

SEQ ID NO: 886475 - DNA, 15 bp, Homo sapiens
attcatctgccagca

SEQ ID NO: 886476 - DNA, 15 bp, Homo sapiens
ttcatctgccagcat

SEQ ID NO: 886477 - DNA, 15 bp, Homo sapiens
tcatctgccagcata

SEQ ID NO: 886478 - DNA, 15 bp, Homo sapiens
catctgccagcataa

SEQ ID NO: 886479 - DNA, 15 bp, Homo sapiens
atctgccagcataaa

SEQ ID NO: 886480 - DNA, 15 bp, Homo sapiens
tctgccagcataaac

SEQ ID NO: 886481 - DNA, 15 bp, Homo sapiens
ctgccagcataaacg

SEQ ID NO: 886482 - DNA, 15 bp, Homo sapiens
tgccagcataaacgt

SEQ ID NO: 886483 - DNA, 15 bp, Homo sapiens
gccagcataaacgta

SEQ ID NO: 886484 - DNA, 15 bp, Homo sapiens
ccagcataaacgtat

SEQ ID NO: 886485 - DNA, 15 bp, Homo sapiens
cagcataaacgtatg

SEQ ID NO: 886486 - DNA, 15 bp, Homo sapiens
agcataaacgtatgt

SEQ ID NO: 886487 - DNA, 15 bp, Homo sapiens
gcataaacgtatgta

SEQ ID NO: 886488 - DNA, 15 bp, Homo sapiens
cataaacgtatgtac

SEQ ID NO: 886489 - DNA, 15 bp, Homo sapiens
ataaacgtatgtaca

SEQ ID NO: 886490 - DNA, 15 bp, Homo sapiens
taaacgtatgtacag

SEQ ID NO: 886491 - DNA, 15 bp, Homo sapiens
aaacgtatgtacagg

SEQ ID NO: 886492 - DNA, 15 bp, Homo sapiens
aacgtatgtacagga

SEQ ID NO: 886493 - DNA, 15 bp, Homo sapiens
acgtatgtacaggaa

SEQ ID NO: 886494 - DNA, 15 bp, Homo sapiens
cgtatgtacaggaaa

SEQ ID NO: 886495 - DNA, 15 bp, Homo sapiens
gtatgtacaggaaac

SEQ ID NO: 886496 - DNA, 15 bp, Homo sapiens
tatgtacaggaaaca

SEQ ID NO: 886497 - DNA, 15 bp, Homo sapiens
atgtacaggaaacac

SEQ ID NO: 886498 - DNA, 15 bp, Homo sapiens
tgtacaggaaacact

SEQ ID NO: 886499 - DNA, 15 bp, Homo sapiens
gtacaggaaacactt

SEQ ID NO: 886500 - DNA, 15 bp, Homo sapiens
tacaggaaacacttc

SEQ ID NO: 886501 - DNA, 15 bp, Homo sapiens
acaggaaacacttca

SEQ ID NO: 886502 - DNA, 15 bp, Homo sapiens
caggaaacacttcaa

SEQ ID NO: 886503 - DNA, 15 bp, Homo sapiens
aggaaacacttcaac

SEQ ID NO: 886504 - DNA, 15 bp, Homo sapiens
ggaaacacttcaaca

SEQ ID NO: 886505 - DNA, 15 bp, Homo sapiens
gaaacacttcaacac

SEQ ID NO: 886506 - DNA, 15 bp, Homo sapiens
aaacacttcaacact

SEQ ID NO: 886507 - DNA, 15 bp, Homo sapiens
aacacttcaacactt

SEQ ID NO: 886508 - DNA, 15 bp, Homo sapiens
acacttcaacactta

SEQ ID NO: 886509 - DNA, 15 bp, Homo sapiens
cacttcaacacttaa

SEQ ID NO: 886510 - DNA, 15 bp, Homo sapiens
acttcaacacttaag

SEQ ID NO: 886511 - DNA, 15 bp, Homo sapiens
cttcaacacttaaga

SEQ ID NO: 886512 - DNA, 15 bp, Homo sapiens
ttcaacacttaagaa

SEQ ID NO: 886513 - DNA, 15 bp, Homo sapiens
tcaacacttaagaaa

SEQ ID NO: 886514 - DNA, 15 bp, Homo sapiens
caacacttaagaaaa

SEQ ID NO: 886515 - DNA, 15 bp, Homo sapiens
aacacttaagaaaaa

SEQ ID NO: 886516 - DNA, 15 bp, Homo sapiens
acacttaagaaaaaa

SEQ ID NO: 886517 - DNA, 15 bp, Homo sapiens
cacttaagaaaaaaa

SEQ ID NO: 886518 - DNA, 15 bp, Homo sapiens
acttaagaaaaaaag

SEQ ID NO: 886519 - DNA, 15 bp, Homo sapiens
cttaagaaaaaaaga

SEQ ID NO: 886520 - DNA, 15 bp, Homo sapiens
ttaagaaaaaaagat

SEQ ID NO: 886521 - DNA, 15 bp, Homo sapiens
taagaaaaaaagatt

SEQ ID NO: 886522 - DNA, 15 bp, Homo sapiens
aagaaaaaaagattc

SEQ ID NO: 886523 - DNA, 15 bp, Homo sapiens
agaaaaaaagattct

SEQ ID NO: 886524 - DNA, 15 bp, Homo sapiens
gaaaaaaagattctt

SEQ ID NO: 886525 - DNA, 15 bp, Homo sapiens
aaaaaaagattcttt

SEQ ID NO: 886526 - DNA, 15 bp, Homo sapiens
aaaaaagattctttc

SEQ ID NO: 886527 - DNA, 15 bp, Homo sapiens
aaaaagattctttct

SEQ ID NO: 886528 - DNA, 15 bp, Homo sapiens
aaaagattctttctt

SEQ ID NO: 886529 - DNA, 15 bp, Homo sapiens
aaagattctttcttt

SEQ ID NO: 886530 - DNA, 15 bp, Homo sapiens
aagattctttctttt

SEQ ID NO: 886531 - DNA, 15 bp, Homo sapiens
agattctttctttta

SEQ ID NO: 886532 - DNA, 15 bp, Homo sapiens
gattctttcttttaa

SEQ ID NO: 886533 - DNA, 15 bp, Homo sapiens
attctttcttttaaa

SEQ ID NO: 886534 - DNA, 15 bp, Homo sapiens
ttctttcttttaaag

SEQ ID NO: 886535 - DNA, 15 bp, Homo sapiens
tctttcttttaaaga

SEQ ID NO: 886536 - DNA, 15 bp, Homo sapiens
ctttcttttaaagaa

SEQ ID NO: 886537 - DNA, 15 bp, Homo sapiens
tttcttttaaagaac

SEQ ID NO: 886538 - DNA, 15 bp, Homo sapiens
ttcttttaaagaacc

SEQ ID NO: 886539 - DNA, 15 bp, Homo sapiens
tcttttaaagaacca

SEQ ID NO: 886540 - DNA, 15 bp, Homo sapiens
cttttaaagaaccat

SEQ ID NO: 886541 - DNA, 15 bp, Homo sapiens
ttttaaagaaccatc

SEQ ID NO: 886542 - DNA, 15 bp, Homo sapiens
tttaaagaaccatca

SEQ ID NO: 886543 - DNA, 15 bp, Homo sapiens
ttaaagaaccatcaa

SEQ ID NO: 886544 - DNA, 15 bp, Homo sapiens
taaagaaccatcaac

SEQ ID NO: 886545 - DNA, 15 bp, Homo sapiens
aaagaaccatcaact

SEQ ID NO: 886546 - DNA, 15 bp, Homo sapiens
aagaaccatcaactg

SEQ ID NO: 886547 - DNA, 15 bp, Homo sapiens
agaaccatcaactgt

SEQ ID NO: 886548 - DNA, 15 bp, Homo sapiens
gaaccatcaactgtt

SEQ ID NO: 886549 - DNA, 15 bp, Homo sapiens
aaccatcaactgttt

SEQ ID NO: 886550 - DNA, 15 bp, Homo sapiens
accatcaactgtttg

SEQ ID NO: 886551 - DNA, 15 bp, Homo sapiens
ccatcaactgtttgg

SEQ ID NO: 886552 - DNA, 15 bp, Homo sapiens
catcaactgtttgga

SEQ ID NO: 886553 - DNA, 15 bp, Homo sapiens
atcaactgtttggaa

SEQ ID NO: 886554 - DNA, 15 bp, Homo sapiens
tcaactgtttggaac

SEQ ID NO: 886555 - DNA, 15 bp, Homo sapiens
caactgtttggaacc

SEQ ID NO: 886556 - DNA, 15 bp, Homo sapiens
aactgtttggaacct

SEQ ID NO: 886557 - DNA, 15 bp, Homo sapiens
actgtttggaacctt

SEQ ID NO: 886558 - DNA, 15 bp, Homo sapiens
ctgtttggaaccttg

SEQ ID NO: 886559 - DNA, 15 bp, Homo sapiens
tgtttggaaccttgg

SEQ ID NO: 886560 - DNA, 15 bp, Homo sapiens
gtttggaaccttggt

SEQ ID NO: 886561 - DNA, 15 bp, Homo sapiens
tttggaaccttggtg

SEQ ID NO: 886562 - DNA, 15 bp, Homo sapiens
ttggaaccttggtgc

SEQ ID NO: 886563 - DNA, 15 bp, Homo sapiens
tggaaccttggtgct

SEQ ID NO: 886564 - DNA, 15 bp, Homo sapiens
ggaaccttggtgcta

SEQ ID NO: 886565 - DNA, 15 bp, Homo sapiens
gaaccttggtgctat

SEQ ID NO: 886566 - DNA, 15 bp, Homo sapiens
aaccttggtgctatc

SEQ ID NO: 886567 - DNA, 15 bp, Homo sapiens
accttggtgctatct

SEQ ID NO: 886568 - DNA, 15 bp, Homo sapiens
ccttggtgctatctt

SEQ ID NO: 886569 - DNA, 15 bp, Homo sapiens
cttggtgctatcttg

SEQ ID NO: 886570 - DNA, 15 bp, Homo sapiens
ttggtgctatcttgg

SEQ ID NO: 886571 - DNA, 15 bp, Homo sapiens
tggtgctatcttggg

SEQ ID NO: 886572 - DNA, 15 bp, Homo sapiens
ggtgctatcttgggc

SEQ ID NO: 886573 - DNA, 15 bp, Homo sapiens
gtgctatcttgggcc

SEQ ID NO: 886574 - DNA, 15 bp, Homo sapiens
tgctatcttgggcca

SEQ ID NO: 886575 - DNA, 15 bp, Homo sapiens
gctatcttgggccag

SEQ ID NO: 886576 - DNA, 15 bp, Homo sapiens
ctatcttgggccagg

SEQ ID NO: 886577 - DNA, 15 bp, Homo sapiens
tatcttgggccaggc

SEQ ID NO: 886578 - DNA, 15 bp, Homo sapiens
atcttgggccaggcg

SEQ ID NO: 886579 - DNA, 15 bp, Homo sapiens
tcttgggccaggcgt

SEQ ID NO: 886580 - DNA, 15 bp, Homo sapiens
cttgggccaggcgtc

SEQ ID NO: 886581 - DNA, 15 bp, Homo sapiens
ttgggccaggcgtct

SEQ ID NO: 886582 - DNA, 15 bp, Homo sapiens
tgggccaggcgtctt

SEQ ID NO: 886583 - DNA, 15 bp, Homo sapiens
gggccaggcgtcttg

SEQ ID NO: 886584 - DNA, 15 bp, Homo sapiens
ggccaggcgtcttgt

SEQ ID NO: 886585 - DNA, 15 bp, Homo sapiens
gccaggcgtcttgtc

SEQ ID NO: 886586 - DNA, 15 bp, Homo sapiens
ccaggcgtcttgtct

SEQ ID NO: 886587 - DNA, 15 bp, Homo sapiens
caggcgtcttgtctc

SEQ ID NO: 886588 - DNA, 15 bp, Homo sapiens
aggcgtcttgtctct

SEQ ID NO: 886589 - DNA, 15 bp, Homo sapiens
ggcgtcttgtctcta

SEQ ID NO: 886590 - DNA, 15 bp, Homo sapiens
gcgtcttgtctctag

SEQ ID NO: 886591 - DNA, 15 bp, Homo sapiens
cgtcttgtctctaga

SEQ ID NO: 886592 - DNA, 15 bp, Homo sapiens
gtcttgtctctagaa

SEQ ID NO: 886593 - DNA, 15 bp, Homo sapiens
tcttgtctctagaac

SEQ ID NO: 886594 - DNA, 15 bp, Homo sapiens
cttgtctctagaacc

SEQ ID NO: 886595 - DNA, 15 bp, Homo sapiens
ttgtctctagaacca

SEQ ID NO: 886596 - DNA, 15 bp, Homo sapiens
tgtctctagaaccat

SEQ ID NO: 886597 - DNA, 15 bp, Homo sapiens
gtctctagaaccatt

SEQ ID NO: 886598 - DNA, 15 bp, Homo sapiens
tctctagaaccattc

SEQ ID NO: 886599 - DNA, 15 bp, Homo sapiens
ctctagaaccattca

SEQ ID NO: 886600 - DNA, 15 bp, Homo sapiens
tctagaaccattcag

SEQ ID NO: 886601 - DNA, 15 bp, Homo sapiens
ctagaaccattcaga

SEQ ID NO: 886602 - DNA, 15 bp, Homo sapiens
tagaaccattcagag

SEQ ID NO: 886603 - DNA, 15 bp, Homo sapiens
agaaccattcagaga

SEQ ID NO: 886604 - DNA, 15 bp, Homo sapiens
gaaccattcagagat

SEQ ID NO: 886605 - DNA, 15 bp, Homo sapiens
aaccattcagagata

SEQ ID NO: 886606 - DNA, 15 bp, Homo sapiens
accattcagagatag

SEQ ID NO: 886607 - DNA, 15 bp, Homo sapiens
ccattcagagatagc

SEQ ID NO: 886608 - DNA, 15 bp, Homo sapiens
cattcagagatagct

SEQ ID NO: 886609 - DNA, 15 bp, Homo sapiens
attcagagatagctg

SEQ ID NO: 886610 - DNA, 15 bp, Homo sapiens
ttcagagatagctgg

SEQ ID NO: 886611 - DNA, 15 bp, Homo sapiens
tcagagatagctggc

SEQ ID NO: 886612 - DNA, 15 bp, Homo sapiens
cagagatagctggct

SEQ ID NO: 886613 - DNA, 15 bp, Homo sapiens
agagatagctggctg

SEQ ID NO: 886614 - DNA, 15 bp, Homo sapiens
gagatagctggctga

SEQ ID NO: 886615 - DNA, 15 bp, Homo sapiens
agatagctggctgaa

SEQ ID NO: 886616 - DNA, 15 bp, Homo sapiens
gatagctggctgaaa

SEQ ID NO: 886617 - DNA, 15 bp, Homo sapiens
atagctggctgaaag

SEQ ID NO: 886618 - DNA, 15 bp, Homo sapiens
tagctggctgaaagt

SEQ ID NO: 886619 - DNA, 15 bp, Homo sapiens
agctggctgaaagtt

SEQ ID NO: 886620 - DNA, 15 bp, Homo sapiens
gctggctgaaagttg

SEQ ID NO: 886621 - DNA, 15 bp, Homo sapiens
ctggctgaaagttgt

SEQ ID NO: 886622 - DNA, 15 bp, Homo sapiens
tggctgaaagttgtt

SEQ ID NO: 886623 - DNA, 15 bp, Homo sapiens
ggctgaaagttgttg

SEQ ID NO: 886624 - DNA, 15 bp, Homo sapiens
gctgaaagttgttga

SEQ ID NO: 886625 - DNA, 15 bp, Homo sapiens
ctgaaagttgttgat

SEQ ID NO: 886626 - DNA, 15 bp, Homo sapiens
tgaaagttgttgatg

SEQ ID NO: 886627 - DNA, 15 bp, Homo sapiens
gaaagttgttgatgc

SEQ ID NO: 886628 - DNA, 15 bp, Homo sapiens
aaagttgttgatgcg

SEQ ID NO: 886629 - DNA, 15 bp, Homo sapiens
aagttgttgatgcga

SEQ ID NO: 886630 - DNA, 15 bp, Homo sapiens
agttgttgatgcgat

SEQ ID NO: 886631 - DNA, 15 bp, Homo sapiens
gttgttgatgcgatt

SEQ ID NO: 886632 - DNA, 15 bp, Homo sapiens
ttgttgatgcgattc

SEQ ID NO: 886633 - DNA, 15 bp, Homo sapiens
tgttgatgcgattct

SEQ ID NO: 886634 - DNA, 15 bp, Homo sapiens
gttgatgcgattctg

SEQ ID NO: 886635 - DNA, 15 bp, Homo sapiens
ttgatgcgattctgc

SEQ ID NO: 886636 - DNA, 15 bp, Homo sapiens
tgatgcgattctgct

SEQ ID NO: 886637 - DNA, 15 bp, Homo sapiens
gatgcgattctgctt

SEQ ID NO: 886638 - DNA, 15 bp, Homo sapiens
atgcgattctgcttt

SEQ ID NO: 886639 - DNA, 15 bp, Homo sapiens
tgcgattctgctttc

SEQ ID NO: 886640 - DNA, 15 bp, Homo sapiens
gcgattctgctttcc

SEQ ID NO: 886641 - DNA, 15 bp, Homo sapiens
cgattctgctttcct

SEQ ID NO: 886642 - DNA, 15 bp, Homo sapiens
gattctgctttcctg

SEQ ID NO: 886643 - DNA, 15 bp, Homo sapiens
attctgctttcctga

SEQ ID NO: 886644 - DNA, 15 bp, Homo sapiens
ttctgctttcctgaa

SEQ ID NO: 886645 - DNA, 15 bp, Homo sapiens
tctgctttcctgaat

SEQ ID NO: 886646 - DNA, 15 bp, Homo sapiens
ctgctttcctgaatt

SEQ ID NO: 886647 - DNA, 15 bp, Homo sapiens
tgctttcctgaattt

SEQ ID NO: 886648 - DNA, 15 bp, Homo sapiens
gctttcctgaatttc

SEQ ID NO: 886649 - DNA, 15 bp, Homo sapiens
ctttcctgaatttca

SEQ ID NO: 886650 - DNA, 15 bp, Homo sapiens
tttcctgaatttcat

SEQ ID NO: 886651 - DNA, 15 bp, Homo sapiens
ttcctgaatttcatg

SEQ ID NO: 886652 - DNA, 15 bp, Homo sapiens
tcctgaatttcatgg

SEQ ID NO: 886653 - DNA, 15 bp, Homo sapiens
cctgaatttcatggc

SEQ ID NO: 886654 - DNA, 15 bp, Homo sapiens
ctgaatttcatggca

SEQ ID NO: 886655 - DNA, 15 bp, Homo sapiens
tgaatttcatggcaa

SEQ ID NO: 886656 - DNA, 15 bp, Homo sapiens
gaatttcatggcaag

SEQ ID NO: 886657 - DNA, 15 bp, Homo sapiens
aatttcatggcaagg

SEQ ID NO: 886658 - DNA, 15 bp, Homo sapiens
atttcatggcaaggc

SEQ ID NO: 886659 - DNA, 15 bp, Homo sapiens
tttcatggcaaggcc

SEQ ID NO: 886660 - DNA, 15 bp, Homo sapiens
ttcatggcaaggcct

SEQ ID NO: 886661 - DNA, 15 bp, Homo sapiens
tcatggcaaggcctt

SEQ ID NO: 886662 - DNA, 15 bp, Homo sapiens
catggcaaggccttg

SEQ ID NO: 886663 - DNA, 15 bp, Homo sapiens
atggcaaggccttgg

SEQ ID NO: 886664 - DNA, 15 bp, Homo sapiens
tggcaaggccttgga

SEQ ID NO: 886665 - DNA, 15 bp, Homo sapiens
ggcaaggccttggat

SEQ ID NO: 886666 - DNA, 15 bp, Homo sapiens
gcaaggccttggatc

SEQ ID NO: 886667 - DNA, 15 bp, Homo sapiens
caaggccttggatca

SEQ ID NO: 886668 - DNA, 15 bp, Homo sapiens
aaggccttggatcac

SEQ ID NO: 886669 - DNA, 15 bp, Homo sapiens
aggccttggatcact

SEQ ID NO: 886670 - DNA, 15 bp, Homo sapiens
ggccttggatcactt

SEQ ID NO: 886671 - DNA, 15 bp, Homo sapiens
gccttggatcacttg

SEQ ID NO: 886672 - DNA, 15 bp, Homo sapiens
ccttggatcacttgg

SEQ ID NO: 886673 - DNA, 15 bp, Homo sapiens
cttggatcacttggc

SEQ ID NO: 886674 - DNA, 15 bp, Homo sapiens
ttggatcacttggca

SEQ ID NO: 886675 - DNA, 15 bp, Homo sapiens
tggatcacttggcaa

SEQ ID NO: 886676 - DNA, 15 bp, Homo sapiens
ggatcacttggcaaa

SEQ ID NO: 886677 - DNA, 15 bp, Homo sapiens
gatcacttggcaaac

SEQ ID NO: 886678 - DNA, 15 bp, Homo sapiens
atcacttggcaaacc

SEQ ID NO: 886679 - DNA, 15 bp, Homo sapiens
tcacttggcaaaccc

SEQ ID NO: 886680 - DNA, 15 bp, Homo sapiens
cacttggcaaaccca

SEQ ID NO: 886681 - DNA, 15 bp, Homo sapiens
acttggcaaacccat

SEQ ID NO: 886682 - DNA, 15 bp, Homo sapiens
cttggcaaacccatc

SEQ ID NO: 886683 - DNA, 15 bp, Homo sapiens
ttggcaaacccatct

SEQ ID NO: 886684 - DNA, 15 bp, Homo sapiens
tggcaaacccatctt

SEQ ID NO: 886685 - DNA, 15 bp, Homo sapiens
ggcaaacccatcttt

SEQ ID NO: 886686 - DNA, 15 bp, Homo sapiens
gcaaacccatctttt

SEQ ID NO: 886687 - DNA, 15 bp, Homo sapiens
caaacccatctttta

SEQ ID NO: 886688 - DNA, 15 bp, Homo sapiens
aaacccatcttttac

SEQ ID NO: 886689 - DNA, 15 bp, Homo sapiens
aacccatcttttaca

SEQ ID NO: 886690 - DNA, 15 bp, Homo sapiens
acccatcttttacag

SEQ ID NO: 886691 - DNA, 15 bp, Homo sapiens
cccatcttttacagc

SEQ ID NO: 886692 - DNA, 15 bp, Homo sapiens
ccatcttttacagct

SEQ ID NO: 886693 - DNA, 15 bp, Homo sapiens
catcttttacagcta

SEQ ID NO: 886694 - DNA, 15 bp, Homo sapiens
atcttttacagctac

SEQ ID NO: 886695 - DNA, 15 bp, Homo sapiens
tcttttacagctact

SEQ ID NO: 886696 - DNA, 15 bp, Homo sapiens
cttttacagctactt

SEQ ID NO: 886697 - DNA, 15 bp, Homo sapiens
ttttacagctactta

SEQ ID NO: 886698 - DNA, 15 bp, Homo sapiens
tttacagctacttaa

SEQ ID NO: 886699 - DNA, 15 bp, Homo sapiens
ttacagctacttaat

SEQ ID NO: 886700 - DNA, 15 bp, Homo sapiens
tacagctacttaatt

SEQ ID NO: 886701 - DNA, 15 bp, Homo sapiens
acagctacttaattt

SEQ ID NO: 886702 - DNA, 15 bp, Homo sapiens
cagctacttaatttt

SEQ ID NO: 886703 - DNA, 15 bp, Homo sapiens
agctacttaattttc

SEQ ID NO: 886704 - DNA, 15 bp, Homo sapiens
gctacttaattttct

SEQ ID NO: 886705 - DNA, 15 bp, Homo sapiens
ctacttaattttctg

SEQ ID NO: 886706 - DNA, 15 bp, Homo sapiens
tacttaattttctgt

SEQ ID NO: 886707 - DNA, 15 bp, Homo sapiens
acttaattttctgtg

SEQ ID NO: 886708 - DNA, 15 bp, Homo sapiens
cttaattttctgtgt

SEQ ID NO: 886709 - DNA, 15 bp, Homo sapiens
ttaattttctgtgtg

SEQ ID NO: 886710 - DNA, 15 bp, Homo sapiens
taattttctgtgtgc

SEQ ID NO: 886711 - DNA, 15 bp, Homo sapiens
aattttctgtgtgct

SEQ ID NO: 886712 - DNA, 15 bp, Homo sapiens
attttctgtgtgctt

SEQ ID NO: 886713 - DNA, 15 bp, Homo sapiens
ttttctgtgtgctta

SEQ ID NO: 886714 - DNA, 15 bp, Homo sapiens
tttctgtgtgcttaa

SEQ ID NO: 886715 - DNA, 15 bp, Homo sapiens
ttctgtgtgcttaag

SEQ ID NO: 886716 - DNA, 15 bp, Homo sapiens
tctgtgtgcttaaga

SEQ ID NO: 886717 - DNA, 15 bp, Homo sapiens
ctgtgtgcttaagat

SEQ ID NO: 886718 - DNA, 15 bp, Homo sapiens
tgtgtgcttaagata

SEQ ID NO: 886719 - DNA, 15 bp, Homo sapiens
gtgtgcttaagatat

SEQ ID NO: 886720 - DNA, 15 bp, Homo sapiens
tgtgcttaagatatg

SEQ ID NO: 886721 - DNA, 15 bp, Homo sapiens
gtgcttaagatatgg

SEQ ID NO: 886722 - DNA, 15 bp, Homo sapiens
tgcttaagatatgga

SEQ ID NO: 886723 - DNA, 15 bp, Homo sapiens
gcttaagatatggat

SEQ ID NO: 886724 - DNA, 15 bp, Homo sapiens
cttaagatatggatg

SEQ ID NO: 886725 - DNA, 15 bp, Homo sapiens
ttaagatatggatgt

SEQ ID NO: 886726 - DNA, 15 bp, Homo sapiens
taagatatggatgtt

SEQ ID NO: 886727 - DNA, 15 bp, Homo sapiens
aagatatggatgtta

SEQ ID NO: 886728 - DNA, 15 bp, Homo sapiens
agatatggatgttat

SEQ ID NO: 886729 - DNA, 15 bp, Homo sapiens
gatatggatgttata

SEQ ID NO: 886730 - DNA, 15 bp, Homo sapiens
atatggatgttatac

SEQ ID NO: 886731 - DNA, 15 bp, Homo sapiens
tatggatgttatact

SEQ ID NO: 886732 - DNA, 15 bp, Homo sapiens
atggatgttatactt

SEQ ID NO: 886733 - DNA, 15 bp, Homo sapiens
tggatgttatacttt

SEQ ID NO: 886734 - DNA, 15 bp, Homo sapiens
ggatgttatactttg

SEQ ID NO: 886735 - DNA, 15 bp, Homo sapiens
gatgttatactttgc

SEQ ID NO: 886736 - DNA, 15 bp, Homo sapiens
atgttatactttgct

SEQ ID NO: 886737 - DNA, 15 bp, Homo sapiens
tgttatactttgctc

SEQ ID NO: 886738 - DNA, 15 bp, Homo sapiens
gttatactttgctcg

SEQ ID NO: 886739 - DNA, 15 bp, Homo sapiens
ttatactttgctcgt

SEQ ID NO: 886740 - DNA, 15 bp, Homo sapiens
tatactttgctcgtg

SEQ ID NO: 886741 - DNA, 15 bp, Homo sapiens
atactttgctcgtga

SEQ ID NO: 886742 - DNA, 15 bp, Homo sapiens
tactttgctcgtgat

SEQ ID NO: 886743 - DNA, 15 bp, Homo sapiens
actttgctcgtgatt

SEQ ID NO: 886744 - DNA, 15 bp, Homo sapiens
ctttgctcgtgattt

SEQ ID NO: 886745 - DNA, 15 bp, Homo sapiens
tttgctcgtgatttt

SEQ ID NO: 886746 - DNA, 15 bp, Homo sapiens
ttgctcgtgattttg

SEQ ID NO: 886747 - DNA, 15 bp, Homo sapiens
tgctcgtgattttgg

SEQ ID NO: 886748 - DNA, 15 bp, Homo sapiens
gctcgtgattttgga

SEQ ID NO: 886749 - DNA, 15 bp, Homo sapiens
ctcgtgattttggag

SEQ ID NO: 886750 - DNA, 15 bp, Homo sapiens
tcgtgattttggagt

SEQ ID NO: 886751 - DNA, 15 bp, Homo sapiens
cgtgattttggagtt

SEQ ID NO: 886752 - DNA, 15 bp, Homo sapiens
gtgattttggagttc

SEQ ID NO: 886753 - DNA, 15 bp, Homo sapiens
tgattttggagttct

SEQ ID NO: 886754 - DNA, 15 bp, Homo sapiens
gattttggagttctg

SEQ ID NO: 886755 - DNA, 15 bp, Homo sapiens
attttggagttctgg

SEQ ID NO: 886756 - DNA, 15 bp, Homo sapiens
ttttggagttctggt

SEQ ID NO: 886757 - DNA, 15 bp, Homo sapiens
tttggagttctggtt

SEQ ID NO: 886758 - DNA, 15 bp, Homo sapiens
ttggagttctggttt

SEQ ID NO: 886759 - DNA, 15 bp, Homo sapiens
tggagttctggtttc

SEQ ID NO: 886760 - DNA, 15 bp, Homo sapiens
ggagttctggtttct

SEQ ID NO: 886761 - DNA, 15 bp, Homo sapiens
gagttctggtttctg

SEQ ID NO: 886762 - DNA, 15 bp, Homo sapiens
agttctggtttctgc

SEQ ID NO: 886763 - DNA, 15 bp, Homo sapiens
gttctggtttctgct

SEQ ID NO: 886764 - DNA, 15 bp, Homo sapiens
ttctggtttctgctg

SEQ ID NO: 886765 - DNA, 15 bp, Homo sapiens
tctggtttctgctgt

SEQ ID NO: 886766 - DNA, 15 bp, Homo sapiens
ctggtttctgctgtg

SEQ ID NO: 886767 - DNA, 15 bp, Homo sapiens
tggtttctgctgtgc

SEQ ID NO: 886768 - DNA, 15 bp, Homo sapiens
ggtttctgctgtgct

SEQ ID NO: 886769 - DNA, 15 bp, Homo sapiens
gtttctgctgtgctg

SEQ ID NO: 886770 - DNA, 15 bp, Homo sapiens
tttctgctgtgctgg

SEQ ID NO: 886771 - DNA, 15 bp, Homo sapiens
ttctgctgtgctggc

SEQ ID NO: 886772 - DNA, 15 bp, Homo sapiens
tctgctgtgctggcc

SEQ ID NO: 886773 - DNA, 15 bp, Homo sapiens
ctgctgtgctggcca

SEQ ID NO: 886774 - DNA, 15 bp, Homo sapiens
tgctgtgctggccat

SEQ ID NO: 886775 - DNA, 15 bp, Homo sapiens
gctgtgctggccatc

SEQ ID NO: 886776 - DNA, 15 bp, Homo sapiens
ctgtgctggccatca

SEQ ID NO: 886777 - DNA, 15 bp, Homo sapiens
tgtgctggccatcaa

SEQ ID NO: 886778 - DNA, 15 bp, Homo sapiens
gtgctggccatcaat

SEQ ID NO: 886779 - DNA, 15 bp, Homo sapiens
tgctggccatcaatt

SEQ ID NO: 886780 - DNA, 15 bp, Homo sapiens
gctggccatcaattc

SEQ ID NO: 886781 - DNA, 15 bp, Homo sapiens
ctggccatcaattca

SEQ ID NO: 886782 - DNA, 15 bp, Homo sapiens
tggccatcaattcat

SEQ ID NO: 886783 - DNA, 15 bp, Homo sapiens
ggccatcaattcata

SEQ ID NO: 886784 - DNA, 15 bp, Homo sapiens
gccatcaattcatac

SEQ ID NO: 886785 - DNA, 15 bp, Homo sapiens
ccatcaattcatact

SEQ ID NO: 886786 - DNA, 15 bp, Homo sapiens
catcaattcatacta

SEQ ID NO: 886787 - DNA, 15 bp, Homo sapiens
atcaattcatactaa

SEQ ID NO: 886788 - DNA, 15 bp, Homo sapiens
tcaattcatactaaa

SEQ ID NO: 886789 - DNA, 15 bp, Homo sapiens
caattcatactaaac

SEQ ID NO: 886790 - DNA, 15 bp, Homo sapiens
aattcatactaaacc

SEQ ID NO: 886791 - DNA, 15 bp, Homo sapiens
attcatactaaacca

SEQ ID NO: 886792 - DNA, 15 bp, Homo sapiens
ttcatactaaaccaa

SEQ ID NO: 886793 - DNA, 15 bp, Homo sapiens
tcatactaaaccaaa

SEQ ID NO: 886794 - DNA, 15 bp, Homo sapiens
catactaaaccaaac

SEQ ID NO: 886795 - DNA, 15 bp, Homo sapiens
atactaaaccaaaca

SEQ ID NO: 886796 - DNA, 15 bp, Homo sapiens
tactaaaccaaacaa

SEQ ID NO: 886797 - DNA, 15 bp, Homo sapiens
actaaaccaaacaac

SEQ ID NO: 886798 - DNA, 15 bp, Homo sapiens
ctaaaccaaacaact

SEQ ID NO: 886799 - DNA, 15 bp, Homo sapiens
taaaccaaacaactg

SEQ ID NO: 886800 - DNA, 15 bp, Homo sapiens
aaaccaaacaactgg

SEQ ID NO: 886801 - DNA, 15 bp, Homo sapiens
aaccaaacaactggg

SEQ ID NO: 886802 - DNA, 15 bp, Homo sapiens
accaaacaactgggg

SEQ ID NO: 886803 - DNA, 15 bp, Homo sapiens
ccaaacaactggggc

SEQ ID NO: 886804 - DNA, 15 bp, Homo sapiens
caaacaactggggcc

SEQ ID NO: 886805 - DNA, 15 bp, Homo sapiens
aaacaactggggccc

SEQ ID NO: 886806 - DNA, 15 bp, Homo sapiens
aacaactggggccca

SEQ ID NO: 886807 - DNA, 15 bp, Homo sapiens
acaactggggcccat

SEQ ID NO: 886808 - DNA, 15 bp, Homo sapiens
caactggggcccatt

SEQ ID NO: 886809 - DNA, 15 bp, Homo sapiens
aactggggcccattt

SEQ ID NO: 886810 - DNA, 15 bp, Homo sapiens
actggggcccatttg

SEQ ID NO: 886811 - DNA, 15 bp, Homo sapiens
ctggggcccatttgg

SEQ ID NO: 886812 - DNA, 15 bp, Homo sapiens
tggggcccatttggc

SEQ ID NO: 886813 - DNA, 15 bp, Homo sapiens
ggggcccatttggca

SEQ ID NO: 886814 - DNA, 15 bp, Homo sapiens
gggcccatttggcat

SEQ ID NO: 886815 - DNA, 15 bp, Homo sapiens
ggcccatttggcatt

SEQ ID NO: 886816 - DNA, 15 bp, Homo sapiens
gcccatttggcattt

SEQ ID NO: 886817 - DNA, 15 bp, Homo sapiens
cccatttggcatttg

SEQ ID NO: 886818 - DNA, 15 bp, Homo sapiens
ccatttggcatttgg

SEQ ID NO: 886819 - DNA, 15 bp, Homo sapiens
catttggcatttggt

SEQ ID NO: 886820 - DNA, 15 bp, Homo sapiens
atttggcatttggta

SEQ ID NO: 886821 - DNA, 15 bp, Homo sapiens
tttggcatttggtat

SEQ ID NO: 886822 - DNA, 15 bp, Homo sapiens
ttggcatttggtatt

SEQ ID NO: 886823 - DNA, 15 bp, Homo sapiens
tggcatttggtattt

SEQ ID NO: 886824 - DNA, 15 bp, Homo sapiens
ggcatttggtatttt

SEQ ID NO: 886825 - DNA, 15 bp, Homo sapiens
gcatttggtatttta

SEQ ID NO: 886826 - DNA, 15 bp, Homo sapiens
catttggtattttaa

SEQ ID NO: 886827 - DNA, 15 bp, Homo sapiens
atttggtattttaaa

SEQ ID NO: 886828 - DNA, 15 bp, Homo sapiens
tttggtattttaaat

SEQ ID NO: 886829 - DNA, 15 bp, Homo sapiens
ttggtattttaaatg

SEQ ID NO: 886830 - DNA, 15 bp, Homo sapiens
tggtattttaaatgt

SEQ ID NO: 886831 - DNA, 15 bp, Homo sapiens
ggtattttaaatgta

SEQ ID NO: 886832 - DNA, 15 bp, Homo sapiens
gtattttaaatgtaa

SEQ ID NO: 886833 - DNA, 15 bp, Homo sapiens
tattttaaatgtaaa

SEQ ID NO: 886834 - DNA, 15 bp, Homo sapiens
attttaaatgtaaaa

SEQ ID NO: 886835 - DNA, 15 bp, Homo sapiens
ttttaaatgtaaaag

SEQ ID NO: 886836 - DNA, 15 bp, Homo sapiens
tttaaatgtaaaagg

SEQ ID NO: 886837 - DNA, 15 bp, Homo sapiens
ttaaatgtaaaagga

SEQ ID NO: 886838 - DNA, 15 bp, Homo sapiens
taaatgtaaaaggac

SEQ ID NO: 886839 - DNA, 15 bp, Homo sapiens
aaatgtaaaaggaca

SEQ ID NO: 886840 - DNA, 15 bp, Homo sapiens
aatgtaaaaggacat

SEQ ID NO: 886841 - DNA, 15 bp, Homo sapiens
atgtaaaaggacatt

SEQ ID NO: 886842 - DNA, 15 bp, Homo sapiens
tgtaaaaggacattt

SEQ ID NO: 886843 - DNA, 15 bp, Homo sapiens
gtaaaaggacatttg

SEQ ID NO: 886844 - DNA, 15 bp, Homo sapiens
taaaaggacatttga

SEQ ID NO: 886845 - DNA, 15 bp, Homo sapiens
aaaaggacatttgaa

SEQ ID NO: 886846 - DNA, 15 bp, Homo sapiens
aaaggacatttgaac

SEQ ID NO: 886847 - DNA, 15 bp, Homo sapiens
aaggacatttgaact

SEQ ID NO: 886848 - DNA, 15 bp, Homo sapiens
aggacatttgaacta

SEQ ID NO: 886849 - DNA, 15 bp, Homo sapiens
ggacatttgaactac

SEQ ID NO: 886850 - DNA, 15 bp, Homo sapiens
gacatttgaactaca

SEQ ID NO: 886851 - DNA, 15 bp, Homo sapiens
acatttgaactacat

SEQ ID NO: 886852 - DNA, 15 bp, Homo sapiens
catttgaactacatg

SEQ ID NO: 886853 - DNA, 15 bp, Homo sapiens
atttgaactacatga

SEQ ID NO: 886854 - DNA, 15 bp, Homo sapiens
tttgaactacatgac

SEQ ID NO: 886855 - DNA, 15 bp, Homo sapiens
ttgaactacatgaca

SEQ ID NO: 886856 - DNA, 15 bp, Homo sapiens
tgaactacatgacaa

SEQ ID NO: 886857 - DNA, 15 bp, Homo sapiens
gaactacatgacaaa

SEQ ID NO: 886858 - DNA, 15 bp, Homo sapiens
aactacatgacaaat

SEQ ID NO: 886859 - DNA, 15 bp, Homo sapiens
actacatgacaaatg

SEQ ID NO: 886860 - DNA, 15 bp, Homo sapiens
ctacatgacaaatgc

SEQ ID NO: 886861 - DNA, 15 bp, Homo sapiens
tacatgacaaatgct

SEQ ID NO: 886862 - DNA, 15 bp, Homo sapiens
acatgacaaatgctg

SEQ ID NO: 886863 - DNA, 15 bp, Homo sapiens
catgacaaatgctga

SEQ ID NO: 886864 - DNA, 15 bp, Homo sapiens
atgacaaatgctgaa

SEQ ID NO: 886865 - DNA, 15 bp, Homo sapiens
tgacaaatgctgaaa

SEQ ID NO: 886866 - DNA, 15 bp, Homo sapiens
gacaaatgctgaaaa

SEQ ID NO: 886867 - DNA, 15 bp, Homo sapiens
acaaatgctgaaaaa

SEQ ID NO: 886868 - DNA, 15 bp, Homo sapiens
caaatgctgaaaaac

SEQ ID NO: 886869 - DNA, 15 bp, Homo sapiens
aaatgctgaaaaaca

SEQ ID NO: 886870 - DNA, 15 bp, Homo sapiens
aatgctgaaaaacaa

SEQ ID NO: 886871 - DNA, 15 bp, Homo sapiens
atgctgaaaaacaaa

SEQ ID NO: 886872 - DNA, 15 bp, Homo sapiens
tgctgaaaaacaaag

SEQ ID NO: 886873 - DNA, 15 bp, Homo sapiens
gctgaaaaacaaagc

SEQ ID NO: 886874 - DNA, 15 bp, Homo sapiens
ctgaaaaacaaagcc

SEQ ID NO: 886875 - DNA, 15 bp, Homo sapiens
tgaaaaacaaagccc

SEQ ID NO: 886876 - DNA, 15 bp, Homo sapiens
gaaaaacaaagccca

SEQ ID NO: 886877 - DNA, 15 bp, Homo sapiens
aaaaacaaagcccat

SEQ ID NO: 886878 - DNA, 15 bp, Homo sapiens
aaaacaaagcccata

SEQ ID NO: 886879 - DNA, 15 bp, Homo sapiens
aaacaaagcccatag

SEQ ID NO: 886880 - DNA, 15 bp, Homo sapiens
aacaaagcccatagc

SEQ ID NO: 886881 - DNA, 15 bp, Homo sapiens
acaaagcccatagca

SEQ ID NO: 886882 - DNA, 15 bp, Homo sapiens
caaagcccatagcac

SEQ ID NO: 886883 - DNA, 15 bp, Homo sapiens
aaagcccatagcacc

SEQ ID NO: 886884 - DNA, 15 bp, Homo sapiens
aagcccatagcacca

SEQ ID NO: 886885 - DNA, 15 bp, Homo sapiens
agcccatagcaccaa

SEQ ID NO: 886886 - DNA, 15 bp, Homo sapiens
gcccatagcaccaag

SEQ ID NO: 886887 - DNA, 15 bp, Homo sapiens
cccatagcaccaaga

SEQ ID NO: 886888 - DNA, 15 bp, Homo sapiens
ccatagcaccaagaa

SEQ ID NO: 886889 - DNA, 15 bp, Homo sapiens
catagcaccaagaac

SEQ ID NO: 886890 - DNA, 15 bp, Homo sapiens
atagcaccaagaaca

SEQ ID NO: 886891 - DNA, 15 bp, Homo sapiens
tagcaccaagaacat

SEQ ID NO: 886892 - DNA, 15 bp, Homo sapiens
agcaccaagaacata

SEQ ID NO: 886893 - DNA, 15 bp, Homo sapiens
gcaccaagaacataa

SEQ ID NO: 886894 - DNA, 15 bp, Homo sapiens
caccaagaacataaa

SEQ ID NO: 886895 - DNA, 15 bp, Homo sapiens
accaagaacataaag

SEQ ID NO: 886896 - DNA, 15 bp, Homo sapiens
ccaagaacataaaga

SEQ ID NO: 886897 - DNA, 15 bp, Homo sapiens
caagaacataaagaa

SEQ ID NO: 886898 - DNA, 15 bp, Homo sapiens
aagaacataaagaaa

SEQ ID NO: 886899 - DNA, 15 bp, Homo sapiens
agaacataaagaaac

SEQ ID NO: 886900 - DNA, 15 bp, Homo sapiens
gaacataaagaaact

SEQ ID NO: 886901 - DNA, 15 bp, Homo sapiens
aacataaagaaactg

SEQ ID NO: 886902 - DNA, 15 bp, Homo sapiens
acataaagaaactgt

SEQ ID NO: 886903 - DNA, 15 bp, Homo sapiens
cataaagaaactgtt

SEQ ID NO: 886904 - DNA, 15 bp, Homo sapiens
ataaagaaactgttt

SEQ ID NO: 886905 - DNA, 15 bp, Homo sapiens
taaagaaactgttta

SEQ ID NO: 886906 - DNA, 15 bp, Homo sapiens
aaagaaactgtttat

SEQ ID NO: 886907 - DNA, 15 bp, Homo sapiens
aagaaactgtttata

SEQ ID NO: 886908 - DNA, 15 bp, Homo sapiens
agaaactgtttataa

SEQ ID NO: 886909 - DNA, 15 bp, Homo sapiens
gaaactgtttataat

SEQ ID NO: 886910 - DNA, 15 bp, Homo sapiens
aaactgtttataatg

SEQ ID NO: 886911 - DNA, 15 bp, Homo sapiens
aactgtttataatga

SEQ ID NO: 886912 - DNA, 15 bp, Homo sapiens
actgtttataatgaa

SEQ ID NO: 886913 - DNA, 15 bp, Homo sapiens
ctgtttataatgaaa

SEQ ID NO: 886914 - DNA, 15 bp, Homo sapiens
tgtttataatgaaaa

SEQ ID NO: 886915 - DNA, 15 bp, Homo sapiens
gtttataatgaaaaa

SEQ ID NO: 886916 - DNA, 15 bp, Homo sapiens
tttataatgaaaaag

SEQ ID NO: 886917 - DNA, 15 bp, Homo sapiens
ttataatgaaaaagt

SEQ ID NO: 886918 - DNA, 15 bp, Homo sapiens
tataatgaaaaagtg

SEQ ID NO: 886919 - DNA, 15 bp, Homo sapiens
ataatgaaaaagtgg

SEQ ID NO: 886920 - DNA, 15 bp, Homo sapiens
taatgaaaaagtggt

SEQ ID NO: 886921 - DNA, 15 bp, Homo sapiens
aatgaaaaagtggtt

SEQ ID NO: 886922 - DNA, 15 bp, Homo sapiens
atgaaaaagtggtta

SEQ ID NO: 886923 - DNA, 15 bp, Homo sapiens
tgaaaaagtggttac

SEQ ID NO: 886924 - DNA, 15 bp, Homo sapiens
gaaaaagtggttaca

SEQ ID NO: 886925 - DNA, 15 bp, Homo sapiens
aaaaagtggttacat

SEQ ID NO: 886926 - DNA, 15 bp, Homo sapiens
aaaagtggttacatt

SEQ ID NO: 886927 - DNA, 15 bp, Homo sapiens
aaagtggttacattt

SEQ ID NO: 886928 - DNA, 15 bp, Homo sapiens
aagtggttacatttt

SEQ ID NO: 886929 - DNA, 15 bp, Homo sapiens
agtggttacattttc

SEQ ID NO: 886930 - DNA, 15 bp, Homo sapiens
gtggttacattttca

SEQ ID NO: 886931 - DNA, 15 bp, Homo sapiens
tggttacattttcag

SEQ ID NO: 886932 - DNA, 15 bp, Homo sapiens
ggttacattttcagt

SEQ ID NO: 886933 - DNA, 15 bp, Homo sapiens
gttacattttcagtc

SEQ ID NO: 886934 - DNA, 15 bp, Homo sapiens
ttacattttcagtca

SEQ ID NO: 886935 - DNA, 15 bp, Homo sapiens
tacattttcagtcaa

SEQ ID NO: 886936 - DNA, 15 bp, Homo sapiens
cattttcagtcaatc

SEQ ID NO: 886937 - DNA, 15 bp, Homo sapiens
attttcagtcaatct

SEQ ID NO: 886938 - DNA, 15 bp, Homo sapiens
ttttcagtcaatcta

SEQ ID NO: 886939 - DNA, 15 bp, Homo sapiens
tttcagtcaatctat

SEQ ID NO: 886940 - DNA, 15 bp, Homo sapiens
ttcagtcaatctatc

SEQ ID NO: 886941 - DNA, 15 bp, Homo sapiens
tcagtcaatctatca

SEQ ID NO: 886942 - DNA, 15 bp, Homo sapiens
cagtcaatctatcac

SEQ ID NO: 886943 - DNA, 15 bp, Homo sapiens
agtcaatctatcact

SEQ ID NO: 886944 - DNA, 15 bp, Homo sapiens
gtcaatctatcactt

SEQ ID NO: 886945 - DNA, 15 bp, Homo sapiens
tcaatctatcacttt

SEQ ID NO: 886946 - DNA, 15 bp, Homo sapiens
caatctatcacttta

SEQ ID NO: 886947 - DNA, 15 bp, Homo sapiens
aatctatcactttaa

SEQ ID NO: 886948 - DNA, 15 bp, Homo sapiens
atctatcactttaat

SEQ ID NO: 886949 - DNA, 15 bp, Homo sapiens
tctatcactttaatg

SEQ ID NO: 886950 - DNA, 15 bp, Homo sapiens
ctatcactttaatga

SEQ ID NO: 886951 - DNA, 15 bp, Homo sapiens
tatcactttaatgag

SEQ ID NO: 886952 - DNA, 15 bp, Homo sapiens
atcactttaatgagc

SEQ ID NO: 886953 - DNA, 15 bp, Homo sapiens
tcactttaatgagct

SEQ ID NO: 886954 - DNA, 15 bp, Homo sapiens
cactttaatgagctc

SEQ ID NO: 886955 - DNA, 15 bp, Homo sapiens
actttaatgagctct

SEQ ID NO: 886956 - DNA, 15 bp, Homo sapiens
ctttaatgagctctt

SEQ ID NO: 886957 - DNA, 15 bp, Homo sapiens
tttaatgagctcttc

SEQ ID NO: 886958 - DNA, 15 bp, Homo sapiens
ttaatgagctcttca

SEQ ID NO: 886959 - DNA, 15 bp, Homo sapiens
taatgagctcttcac

SEQ ID NO: 886960 - DNA, 15 bp, Homo sapiens
aatgagctcttcacg

SEQ ID NO: 886961 - DNA, 15 bp, Homo sapiens
atgagctcttcacgt

SEQ ID NO: 886962 - DNA, 15 bp, Homo sapiens
tgagctcttcacgtt

SEQ ID NO: 886963 - DNA, 15 bp, Homo sapiens
gagctcttcacgttt

SEQ ID NO: 886964 - DNA, 15 bp, Homo sapiens
agctcttcacgtttc

SEQ ID NO: 886965 - DNA, 15 bp, Homo sapiens
gctcttcacgtttct

SEQ ID NO: 886966 - DNA, 15 bp, Homo sapiens
ctcttcacgtttctt

SEQ ID NO: 886967 - DNA, 15 bp, Homo sapiens
tcttcacgtttcttt

SEQ ID NO: 886968 - DNA, 15 bp, Homo sapiens
cttcacgtttctttg

SEQ ID NO: 886969 - DNA, 15 bp, Homo sapiens
ttcacgtttctttga

SEQ ID NO: 886970 - DNA, 15 bp, Homo sapiens
tcacgtttctttgat

SEQ ID NO: 886971 - DNA, 15 bp, Homo sapiens
cacgtttctttgatt

SEQ ID NO: 886972 - DNA, 15 bp, Homo sapiens
acgtttctttgatta

SEQ ID NO: 886973 - DNA, 15 bp, Homo sapiens
cgtttctttgattaa

SEQ ID NO: 886974 - DNA, 15 bp, Homo sapiens
gtttctttgattaat

SEQ ID NO: 886975 - DNA, 15 bp, Homo sapiens
tttctttgattaatg

SEQ ID NO: 886976 - DNA, 15 bp, Homo sapiens
ttctttgattaatgc

SEQ ID NO: 886977 - DNA, 15 bp, Homo sapiens
tctttgattaatgct

SEQ ID NO: 886978 - DNA, 15 bp, Homo sapiens
ctttgattaatgctt

SEQ ID NO: 886979 - DNA, 15 bp, Homo sapiens
tttgattaatgcttg

SEQ ID NO: 886980 - DNA, 15 bp, Homo sapiens
ttgattaatgcttgc

SEQ ID NO: 886981 - DNA, 15 bp, Homo sapiens
tgattaatgcttgca

SEQ ID NO: 886982 - DNA, 15 bp, Homo sapiens
gattaatgcttgcaa

SEQ ID NO: 886983 - DNA, 15 bp, Homo sapiens
attaatgcttgcaaa

SEQ ID NO: 886984 - DNA, 15 bp, Homo sapiens
ttaatgcttgcaaaa

SEQ ID NO: 886985 - DNA, 15 bp, Homo sapiens
taatgcttgcaaaag

SEQ ID NO: 886986 - DNA, 15 bp, Homo sapiens
aatgcttgcaaaagg

SEQ ID NO: 886987 - DNA, 15 bp, Homo sapiens
atgcttgcaaaaggg

SEQ ID NO: 886988 - DNA, 15 bp, Homo sapiens
tgcttgcaaaagggg

SEQ ID NO: 886989 - DNA, 15 bp, Homo sapiens
gcttgcaaaagggga

SEQ ID NO: 886990 - DNA, 15 bp, Homo sapiens
cttgcaaaaggggag

SEQ ID NO: 886991 - DNA, 15 bp, Homo sapiens
ttgcaaaaggggaga

SEQ ID NO: 886992 - DNA, 15 bp, Homo sapiens
tgcaaaaggggagaa

SEQ ID NO: 886993 - DNA, 15 bp, Homo sapiens
gcaaaaggggagaaa

SEQ ID NO: 886994 - DNA, 15 bp, Homo sapiens
caaaaggggagaaaa

SEQ ID NO: 886995 - DNA, 15 bp, Homo sapiens
aaaaggggagaaaaa

SEQ ID NO: 886996 - DNA, 15 bp, Homo sapiens
aaaggggagaaaaaa

SEQ ID NO: 886997 - DNA, 15 bp, Homo sapiens
aaggggagaaaaaaa

SEQ ID NO: 886998 - DNA, 15 bp, Homo sapiens
aggggagaaaaaaat

SEQ ID NO: 886999 - DNA, 15 bp, Homo sapiens
ggggagaaaaaaatt

SEQ ID NO: 887000 - DNA, 15 bp, Homo sapiens
gggagaaaaaaattg

SEQ ID NO: 887001 - DNA, 15 bp, Homo sapiens
ggagaaaaaaattga

SEQ ID NO: 887002 - DNA, 15 bp, Homo sapiens
gagaaaaaaattgat

SEQ ID NO: 887003 - DNA, 15 bp, Homo sapiens
agaaaaaaattgatg

SEQ ID NO: 887004 - DNA, 15 bp, Homo sapiens
gaaaaaaattgatgt

SEQ ID NO: 887005 - DNA, 15 bp, Homo sapiens
aaaaaaattgatgta

SEQ ID NO: 887006 - DNA, 15 bp, Homo sapiens
aaaaaattgatgtaa

SEQ ID NO: 887007 - DNA, 15 bp, Homo sapiens
aaaaattgatgtaat

SEQ ID NO: 887008 - DNA, 15 bp, Homo sapiens
aaaattgatgtaatg

SEQ ID NO: 887009 - DNA, 15 bp, Homo sapiens
aaattgatgtaatgg

SEQ ID NO: 887010 - DNA, 15 bp, Homo sapiens
aattgatgtaatgga

SEQ ID NO: 887011 - DNA, 15 bp, Homo sapiens
attgatgtaatggaa

SEQ ID NO: 887012 - DNA, 15 bp, Homo sapiens
ttgatgtaatggaaa

SEQ ID NO: 887013 - DNA, 15 bp, Homo sapiens
tgatgtaatggaaac

SEQ ID NO: 887014 - DNA, 15 bp, Homo sapiens
gatgtaatggaaaca

SEQ ID NO: 887015 - DNA, 15 bp, Homo sapiens
atgtaatggaaacaa

SEQ ID NO: 887016 - DNA, 15 bp, Homo sapiens
tgtaatggaaacaaa

SEQ ID NO: 887017 - DNA, 15 bp, Homo sapiens
gtaatggaaacaaaa

SEQ ID NO: 887018 - DNA, 15 bp, Homo sapiens
taatggaaacaaaat

SEQ ID NO: 887019 - DNA, 15 bp, Homo sapiens
aatggaaacaaaatg

SEQ ID NO: 887020 - DNA, 15 bp, Homo sapiens
atggaaacaaaatgg

SEQ ID NO: 887021 - DNA, 15 bp, Homo sapiens
tggaaacaaaatggt

SEQ ID NO: 887022 - DNA, 15 bp, Homo sapiens
ggaaacaaaatggta

SEQ ID NO: 887023 - DNA, 15 bp, Homo sapiens
gaaacaaaatggtat

SEQ ID NO: 887024 - DNA, 15 bp, Homo sapiens
aaacaaaatggtata

SEQ ID NO: 887025 - DNA, 15 bp, Homo sapiens
aacaaaatggtatat

SEQ ID NO: 887026 - DNA, 15 bp, Homo sapiens
acaaaatggtatata

SEQ ID NO: 887027 - DNA, 15 bp, Homo sapiens
caaaatggtatatag

SEQ ID NO: 887028 - DNA, 15 bp, Homo sapiens
aaaatggtatatagt

SEQ ID NO: 887029 - DNA, 15 bp, Homo sapiens
aaatggtatatagtc

SEQ ID NO: 887030 - DNA, 15 bp, Homo sapiens
aatggtatatagtct

SEQ ID NO: 887031 - DNA, 15 bp, Homo sapiens
atggtatatagtctt

SEQ ID NO: 887032 - DNA, 15 bp, Homo sapiens
tggtatatagtcttg

SEQ ID NO: 887033 - DNA, 15 bp, Homo sapiens
ggtatatagtcttgg

SEQ ID NO: 887034 - DNA, 15 bp, Homo sapiens
gtatatagtcttggc

SEQ ID NO: 887035 - DNA, 15 bp, Homo sapiens
tatatagtcttggca

SEQ ID NO: 887036 - DNA, 15 bp, Homo sapiens
atatagtcttggcag

SEQ ID NO: 887037 - DNA, 15 bp, Homo sapiens
tatagtcttggcagc

SEQ ID NO: 887038 - DNA, 15 bp, Homo sapiens
atagtcttggcagca

SEQ ID NO: 887039 - DNA, 15 bp, Homo sapiens
tagtcttggcagcat

SEQ ID NO: 887040 - DNA, 15 bp, Homo sapiens
agtcttggcagcatg

SEQ ID NO: 887041 - DNA, 15 bp, Homo sapiens
gtcttggcagcatga

SEQ ID NO: 887042 - DNA, 15 bp, Homo sapiens
tcttggcagcatgag

SEQ ID NO: 887043 - DNA, 15 bp, Homo sapiens
cttggcagcatgagg

SEQ ID NO: 887044 - DNA, 15 bp, Homo sapiens
ttggcagcatgaggg

SEQ ID NO: 887045 - DNA, 15 bp, Homo sapiens
tggcagcatgagggg

SEQ ID NO: 887046 - DNA, 15 bp, Homo sapiens
ggcagcatgaggggg

SEQ ID NO: 887047 - DNA, 15 bp, Homo sapiens
gcagcatgagggggg

SEQ ID NO: 887048 - DNA, 15 bp, Homo sapiens
cagcatgagggggga

SEQ ID NO: 887049 - DNA, 15 bp, Homo sapiens
agcatgaggggggat

SEQ ID NO: 887050 - DNA, 15 bp, Homo sapiens
gcatgaggggggatg

SEQ ID NO: 887051 - DNA, 15 bp, Homo sapiens
catgaggggggatgt

SEQ ID NO: 887052 - DNA, 15 bp, Homo sapiens
atgaggggggatgtc

SEQ ID NO: 887053 - DNA, 15 bp, Homo sapiens
tgaggggggatgtct

SEQ ID NO: 887054 - DNA, 15 bp, Homo sapiens
gaggggggatgtctg

SEQ ID NO: 887055 - DNA, 15 bp, Homo sapiens
aggggggatgtctgt

SEQ ID NO: 887056 - DNA, 15 bp, Homo sapiens
ggggggatgtctgtg

SEQ ID NO: 887057 - DNA, 15 bp, Homo sapiens
gggggatgtctgtgt

SEQ ID NO: 887058 - DNA, 15 bp, Homo sapiens
ggggatgtctgtgtg

SEQ ID NO: 887059 - DNA, 15 bp, Homo sapiens
gggatgtctgtgtgt

SEQ ID NO: 887060 - DNA, 15 bp, Homo sapiens
ggatgtctgtgtgtt

SEQ ID NO: 887061 - DNA, 15 bp, Homo sapiens
gatgtctgtgtgttt

SEQ ID NO: 887062 - DNA, 15 bp, Homo sapiens
atgtctgtgtgtttt

SEQ ID NO: 887063 - DNA, 15 bp, Homo sapiens
tgtctgtgtgtttta

SEQ ID NO: 887064 - DNA, 15 bp, Homo sapiens
gtctgtgtgttttat

SEQ ID NO: 887065 - DNA, 15 bp, Homo sapiens
tctgtgtgttttatt

SEQ ID NO: 887066 - DNA, 15 bp, Homo sapiens
ctgtgtgttttatta

SEQ ID NO: 887067 - DNA, 15 bp, Homo sapiens
tgtgtgttttattag

SEQ ID NO: 887068 - DNA, 15 bp, Homo sapiens
gtgtgttttattagt

SEQ ID NO: 887069 - DNA, 15 bp, Homo sapiens
tgtgttttattagta

SEQ ID NO: 887070 - DNA, 15 bp, Homo sapiens
gtgttttattagtat

SEQ ID NO: 887071 - DNA, 15 bp, Homo sapiens
tgttttattagtatc

SEQ ID NO: 887072 - DNA, 15 bp, Homo sapiens
gttttattagtatcc

SEQ ID NO: 887073 - DNA, 15 bp, Homo sapiens
ttttattagtatccc

SEQ ID NO: 887074 - DNA, 15 bp, Homo sapiens
tttattagtatcccc

SEQ ID NO: 887075 - DNA, 15 bp, Homo sapiens
ttattagtatcccct

SEQ ID NO: 887076 - DNA, 15 bp, Homo sapiens
tattagtatcccctt

SEQ ID NO: 887077 - DNA, 15 bp, Homo sapiens
attagtatccccttg

SEQ ID NO: 887078 - DNA, 15 bp, Homo sapiens
ttagtatccccttga

SEQ ID NO: 887079 - DNA, 15 bp, Homo sapiens
tagtatccccttgat

SEQ ID NO: 887080 - DNA, 15 bp, Homo sapiens
agtatccccttgata

SEQ ID NO: 887081 - DNA, 15 bp, Homo sapiens
gtatccccttgatat

SEQ ID NO: 887082 - DNA, 15 bp, Homo sapiens
tatccccttgatatc

SEQ ID NO: 887083 - DNA, 15 bp, Homo sapiens
atccccttgatatca

SEQ ID NO: 887084 - DNA, 15 bp, Homo sapiens
tccccttgatatcat

SEQ ID NO: 887085 - DNA, 15 bp, Homo sapiens
ccccttgatatcatt

SEQ ID NO: 887086 - DNA, 15 bp, Homo sapiens
cccttgatatcattg

SEQ ID NO: 887087 - DNA, 15 bp, Homo sapiens
ccttgatatcattgt

SEQ ID NO: 887088 - DNA, 15 bp, Homo sapiens
cttgatatcattgtc

SEQ ID NO: 887089 - DNA, 15 bp, Homo sapiens
ttgatatcattgtct

SEQ ID NO: 887090 - DNA, 15 bp, Homo sapiens
tgatatcattgtctt

SEQ ID NO: 887091 - DNA, 15 bp, Homo sapiens
gatatcattgtcttg

SEQ ID NO: 887092 - DNA, 15 bp, Homo sapiens
atatcattgtcttgt

SEQ ID NO: 887093 - DNA, 15 bp, Homo sapiens
tatcattgtcttgta

SEQ ID NO: 887094 - DNA, 15 bp, Homo sapiens
atcattgtcttgtaa

SEQ ID NO: 887095 - DNA, 15 bp, Homo sapiens
tcattgtcttgtaat

SEQ ID NO: 887096 - DNA, 15 bp, Homo sapiens
cattgtcttgtaatg

SEQ ID NO: 887097 - DNA, 15 bp, Homo sapiens
attgtcttgtaatgt

SEQ ID NO: 887098 - DNA, 15 bp, Homo sapiens
ttgtcttgtaatgta

SEQ ID NO: 887099 - DNA, 15 bp, Homo sapiens
tgtcttgtaatgtat

SEQ ID NO: 887100 - DNA, 15 bp, Homo sapiens
gtcttgtaatgtata

SEQ ID NO: 887101 - DNA, 15 bp, Homo sapiens
tcttgtaatgtatat

SEQ ID NO: 887102 - DNA, 15 bp, Homo sapiens
cttgtaatgtatata

SEQ ID NO: 887103 - DNA, 15 bp, Homo sapiens
ttgtaatgtatatat

SEQ ID NO: 887104 - DNA, 15 bp, Homo sapiens
tgtaatgtatatatc

SEQ ID NO: 887105 - DNA, 15 bp, Homo sapiens
gtaatgtatatatct

SEQ ID NO: 887106 - DNA, 15 bp, Homo sapiens
taatgtatatatctg

SEQ ID NO: 887107 - DNA, 15 bp, Homo sapiens
aatgtatatatctgc

SEQ ID NO: 887108 - DNA, 15 bp, Homo sapiens
atgtatatatctgcc

SEQ ID NO: 887109 - DNA, 15 bp, Homo sapiens
tgtatatatctgcct

SEQ ID NO: 887110 - DNA, 15 bp, Homo sapiens
gtatatatctgcctt

SEQ ID NO: 887111 - DNA, 15 bp, Homo sapiens
tatatatctgccttt

SEQ ID NO: 887112 - DNA, 15 bp, Homo sapiens
atatatctgcctttt

SEQ ID NO: 887113 - DNA, 15 bp, Homo sapiens
tatatctgccttttc

SEQ ID NO: 887114 - DNA, 15 bp, Homo sapiens
atatctgccttttcc

SEQ ID NO: 887115 - DNA, 15 bp, Homo sapiens
tatctgccttttccc

SEQ ID NO: 887116 - DNA, 15 bp, Homo sapiens
atctgccttttccct

SEQ ID NO: 887117 - DNA, 15 bp, Homo sapiens
tctgccttttccctg

SEQ ID NO: 887118 - DNA, 15 bp, Homo sapiens
ctgccttttccctgg

SEQ ID NO: 887119 - DNA, 15 bp, Homo sapiens
tgccttttccctggc

SEQ ID NO: 887120 - DNA, 15 bp, Homo sapiens
gccttttccctggca

SEQ ID NO: 887121 - DNA, 15 bp, Homo sapiens
ccttttccctggcat

SEQ ID NO: 887122 - DNA, 15 bp, Homo sapiens
cttttccctggcata

SEQ ID NO: 887123 - DNA, 15 bp, Homo sapiens
ttttccctggcatag

SEQ ID NO: 887124 - DNA, 15 bp, Homo sapiens
tttccctggcatagt

SEQ ID NO: 887125 - DNA, 15 bp, Homo sapiens
ttccctggcatagta

SEQ ID NO: 887126 - DNA, 15 bp, Homo sapiens
tccctggcatagtaa

SEQ ID NO: 887127 - DNA, 15 bp, Homo sapiens
ccctggcatagtaag

SEQ ID NO: 887128 - DNA, 15 bp, Homo sapiens
cctggcatagtaagc

SEQ ID NO: 887129 - DNA, 15 bp, Homo sapiens
ctggcatagtaagcc

SEQ ID NO: 887130 - DNA, 15 bp, Homo sapiens
tggcatagtaagcct

SEQ ID NO: 887131 - DNA, 15 bp, Homo sapiens
ggcatagtaagcctc

SEQ ID NO: 887132 - DNA, 15 bp, Homo sapiens
gcatagtaagcctct

SEQ ID NO: 887133 - DNA, 15 bp, Homo sapiens
catagtaagcctcta

SEQ ID NO: 887134 - DNA, 15 bp, Homo sapiens
atagtaagcctctag

SEQ ID NO: 887135 - DNA, 15 bp, Homo sapiens
tagtaagcctctagt

SEQ ID NO: 887136 - DNA, 15 bp, Homo sapiens
agtaagcctctagtt

SEQ ID NO: 887137 - DNA, 15 bp, Homo sapiens
gtaagcctctagttt

SEQ ID NO: 887138 - DNA, 15 bp, Homo sapiens
taagcctctagttta

SEQ ID NO: 887139 - DNA, 15 bp, Homo sapiens
aagcctctagtttac

SEQ ID NO: 887140 - DNA, 15 bp, Homo sapiens
agcctctagtttact

SEQ ID NO: 887141 - DNA, 15 bp, Homo sapiens
gcctctagtttactg

SEQ ID NO: 887142 - DNA, 15 bp, Homo sapiens
cctctagtttactgg

SEQ ID NO: 887143 - DNA, 15 bp, Homo sapiens
ctctagtttactgga

SEQ ID NO: 887144 - DNA, 15 bp, Homo sapiens
tctagtttactggaa

SEQ ID NO: 887145 - DNA, 15 bp, Homo sapiens
ctagtttactggaaa

SEQ ID NO: 887146 - DNA, 15 bp, Homo sapiens
tagtttactggaaat

SEQ ID NO: 887147 - DNA, 15 bp, Homo sapiens
agtttactggaaatg

SEQ ID NO: 887148 - DNA, 15 bp, Homo sapiens
gtttactggaaatgt

SEQ ID NO: 887149 - DNA, 15 bp, Homo sapiens
tttactggaaatgtg

SEQ ID NO: 887150 - DNA, 15 bp, Homo sapiens
ttactggaaatgtga

SEQ ID NO: 887151 - DNA, 15 bp, Homo sapiens
tactggaaatgtgat

SEQ ID NO: 887152 - DNA, 15 bp, Homo sapiens
actggaaatgtgatc

SEQ ID NO: 887153 - DNA, 15 bp, Homo sapiens
ctggaaatgtgatcc

SEQ ID NO: 887154 - DNA, 15 bp, Homo sapiens
tggaaatgtgatcca

SEQ ID NO: 887155 - DNA, 15 bp, Homo sapiens
ggaaatgtgatccat

SEQ ID NO: 887156 - DNA, 15 bp, Homo sapiens
gaaatgtgatccatc

SEQ ID NO: 887157 - DNA, 15 bp, Homo sapiens
aaatgtgatccatca

SEQ ID NO: 887158 - DNA, 15 bp, Homo sapiens
aatgtgatccatcat

SEQ ID NO: 887159 - DNA, 15 bp, Homo sapiens
atgtgatccatcatg

SEQ ID NO: 887160 - DNA, 15 bp, Homo sapiens
tgtgatccatcatga

SEQ ID NO: 887161 - DNA, 15 bp, Homo sapiens
gtgatccatcatgaa

SEQ ID NO: 887162 - DNA, 15 bp, Homo sapiens
tgatccatcatgaaa

SEQ ID NO: 887163 - DNA, 15 bp, Homo sapiens
gatccatcatgaaag

SEQ ID NO: 887164 - DNA, 15 bp, Homo sapiens
atccatcatgaaaga

SEQ ID NO: 887165 - DNA, 15 bp, Homo sapiens
tccatcatgaaagag

SEQ ID NO: 887166 - DNA, 15 bp, Homo sapiens
ccatcatgaaagagg

SEQ ID NO: 887167 - DNA, 15 bp, Homo sapiens
catcatgaaagagga

SEQ ID NO: 887168 - DNA, 15 bp, Homo sapiens
atcatgaaagaggag

SEQ ID NO: 887169 - DNA, 15 bp, Homo sapiens
tcatgaaagaggaga

SEQ ID NO: 887170 - DNA, 15 bp, Homo sapiens
catgaaagaggagat

SEQ ID NO: 887171 - DNA, 15 bp, Homo sapiens
atgaaagaggagatc

SEQ ID NO: 887172 - DNA, 15 bp, Homo sapiens
tgaaagaggagatcc

SEQ ID NO: 887173 - DNA, 15 bp, Homo sapiens
gaaagaggagatccc

SEQ ID NO: 887174 - DNA, 15 bp, Homo sapiens
aaagaggagatccca

SEQ ID NO: 887175 - DNA, 15 bp, Homo sapiens
aagaggagatcccat

SEQ ID NO: 887176 - DNA, 15 bp, Homo sapiens
agaggagatcccatg

SEQ ID NO: 887177 - DNA, 15 bp, Homo sapiens
gaggagatcccatgt

SEQ ID NO: 887178 - DNA, 15 bp, Homo sapiens
aggagatcccatgtt

SEQ ID NO: 887179 - DNA, 15 bp, Homo sapiens
ggagatcccatgtta

SEQ ID NO: 887180 - DNA, 15 bp, Homo sapiens
gagatcccatgttag

SEQ ID NO: 887181 - DNA, 15 bp, Homo sapiens
agatcccatgttagt

SEQ ID NO: 887182 - DNA, 15 bp, Homo sapiens
gatcccatgttagtg

SEQ ID NO: 887183 - DNA, 15 bp, Homo sapiens
atcccatgttagtgg

SEQ ID NO: 887184 - DNA, 15 bp, Homo sapiens
tcccatgttagtggc

SEQ ID NO: 887185 - DNA, 15 bp, Homo sapiens
cccatgttagtggca

SEQ ID NO: 887186 - DNA, 15 bp, Homo sapiens
ccatgttagtggcaa

SEQ ID NO: 887187 - DNA, 15 bp, Homo sapiens
catgttagtggcaaa

SEQ ID NO: 887188 - DNA, 15 bp, Homo sapiens
atgttagtggcaaaa

SEQ ID NO: 887189 - DNA, 15 bp, Homo sapiens
tgttagtggcaaaac

SEQ ID NO: 887190 - DNA, 15 bp, Homo sapiens
gttagtggcaaaaca

SEQ ID NO: 887191 - DNA, 15 bp, Homo sapiens
ttagtggcaaaacag

SEQ ID NO: 887192 - DNA, 15 bp, Homo sapiens
tagtggcaaaacagc

SEQ ID NO: 887193 - DNA, 15 bp, Homo sapiens
agtggcaaaacagcc

SEQ ID NO: 887194 - DNA, 15 bp, Homo sapiens
gtggcaaaacagcct

SEQ ID NO: 887195 - DNA, 15 bp, Homo sapiens
tggcaaaacagcctt

SEQ ID NO: 887196 - DNA, 15 bp, Homo sapiens
ggcaaaacagccttt

SEQ ID NO: 887197 - DNA, 15 bp, Homo sapiens
gcaaaacagcctttg

SEQ ID NO: 887198 - DNA, 15 bp, Homo sapiens
caaaacagcctttgt

SEQ ID NO: 887199 - DNA, 15 bp, Homo sapiens
aaaacagcctttgtc

SEQ ID NO: 887200 - DNA, 15 bp, Homo sapiens
aaacagcctttgtcc

SEQ ID NO: 887201 - DNA, 15 bp, Homo sapiens
aacagcctttgtcct

SEQ ID NO: 887202 - DNA, 15 bp, Homo sapiens
acagcctttgtcctc

SEQ ID NO: 887203 - DNA, 15 bp, Homo sapiens
cagcctttgtcctct

SEQ ID NO: 887204 - DNA, 15 bp, Homo sapiens
agcctttgtcctctt

SEQ ID NO: 887205 - DNA, 15 bp, Homo sapiens
gcctttgtcctcttg

SEQ ID NO: 887206 - DNA, 15 bp, Homo sapiens
cctttgtcctcttgt

SEQ ID NO: 887207 - DNA, 15 bp, Homo sapiens
ctttgtcctcttgtg

SEQ ID NO: 887208 - DNA, 15 bp, Homo sapiens
tttgtcctcttgtgg

SEQ ID NO: 887209 - DNA, 15 bp, Homo sapiens
ttgtcctcttgtggt

SEQ ID NO: 887210 - DNA, 15 bp, Homo sapiens
tgtcctcttgtggtg

SEQ ID NO: 887211 - DNA, 15 bp, Homo sapiens
gtcctcttgtggtgg

SEQ ID NO: 887212 - DNA, 15 bp, Homo sapiens
tcctcttgtggtggc

SEQ ID NO: 887213 - DNA, 15 bp, Homo sapiens
cctcttgtggtggca

SEQ ID NO: 887214 - DNA, 15 bp, Homo sapiens
ctcttgtggtggcag

SEQ ID NO: 887215 - DNA, 15 bp, Homo sapiens
tcttgtggtggcagc

SEQ ID NO: 887216 - DNA, 15 bp, Homo sapiens
cttgtggtggcagca

SEQ ID NO: 887217 - DNA, 15 bp, Homo sapiens
ttgtggtggcagcaa

SEQ ID NO: 887218 - DNA, 15 bp, Homo sapiens
tgtggtggcagcaaa

SEQ ID NO: 887219 - DNA, 15 bp, Homo sapiens
gtggtggcagcaaag

SEQ ID NO: 887220 - DNA, 15 bp, Homo sapiens
tggtggcagcaaaga

SEQ ID NO: 887221 - DNA, 15 bp, Homo sapiens
ggtggcagcaaagag

SEQ ID NO: 887222 - DNA, 15 bp, Homo sapiens
gtggcagcaaagagg

SEQ ID NO: 887223 - DNA, 15 bp, Homo sapiens
tggcagcaaagaggg

SEQ ID NO: 887224 - DNA, 15 bp, Homo sapiens
ggcagcaaagaggga

SEQ ID NO: 887225 - DNA, 15 bp, Homo sapiens
gcagcaaagagggag

SEQ ID NO: 887226 - DNA, 15 bp, Homo sapiens
cagcaaagagggagg

SEQ ID NO: 887227 - DNA, 15 bp, Homo sapiens
agcaaagagggaggg

SEQ ID NO: 887228 - DNA, 15 bp, Homo sapiens
gcaaagagggagggt

SEQ ID NO: 887229 - DNA, 15 bp, Homo sapiens
caaagagggagggtc

SEQ ID NO: 887230 - DNA, 15 bp, Homo sapiens
aagagggagggtccc

SEQ ID NO: 887231 - DNA, 15 bp, Homo sapiens
agagggagggtccca

SEQ ID NO: 887232 - DNA, 15 bp, Homo sapiens
gagggagggtcccag

SEQ ID NO: 887233 - DNA, 15 bp, Homo sapiens
agggagggtcccaga

SEQ ID NO: 887234 - DNA, 15 bp, Homo sapiens
gggagggtcccagaa

SEQ ID NO: 887235 - DNA, 15 bp, Homo sapiens
ggagggtcccagaac

SEQ ID NO: 887236 - DNA, 15 bp, Homo sapiens
gagggtcccagaaca

SEQ ID NO: 887237 - DNA, 15 bp, Homo sapiens
agggtcccagaacag

SEQ ID NO: 887238 - DNA, 15 bp, Homo sapiens
gggtcccagaacagg

SEQ ID NO: 887239 - DNA, 15 bp, Homo sapiens
ggtcccagaacagga

SEQ ID NO: 887240 - DNA, 15 bp, Homo sapiens
gtcccagaacaggaa

SEQ ID NO: 887241 - DNA, 15 bp, Homo sapiens
tcccagaacaggaat

SEQ ID NO: 887242 - DNA, 15 bp, Homo sapiens
cccagaacaggaatt

SEQ ID NO: 887243 - DNA, 15 bp, Homo sapiens
ccagaacaggaatta

SEQ ID NO: 887244 - DNA, 15 bp, Homo sapiens
cagaacaggaattaa

SEQ ID NO: 887245 - DNA, 15 bp, Homo sapiens
agaacaggaattaag

SEQ ID NO: 887246 - DNA, 15 bp, Homo sapiens
gaacaggaattaaga

SEQ ID NO: 887247 - DNA, 15 bp, Homo sapiens
aacaggaattaagaa

SEQ ID NO: 887248 - DNA, 15 bp, Homo sapiens
acaggaattaagaat

SEQ ID NO: 887249 - DNA, 15 bp, Homo sapiens
caggaattaagaata

SEQ ID NO: 887250 - DNA, 15 bp, Homo sapiens
aggaattaagaataa

SEQ ID NO: 887251 - DNA, 15 bp, Homo sapiens
ggaattaagaataaa

SEQ ID NO: 887252 - DNA, 15 bp, Homo sapiens
gaattaagaataaat

SEQ ID NO: 887253 - DNA, 15 bp, Homo sapiens
aattaagaataaata

SEQ ID NO: 887254 - DNA, 15 bp, Homo sapiens
attaagaataaataa

SEQ ID NO: 887255 - DNA, 15 bp, Homo sapiens
ttaagaataaataaa

SEQ ID NO: 887256 - DNA, 15 bp, Homo sapiens
taagaataaataaaa

SEQ ID NO: 887257 - DNA, 15 bp, Homo sapiens
aagaataaataaaaa

SEQ ID NO: 887258 - DNA, 15 bp, Homo sapiens
agaataaataaaaac

SEQ ID NO: 887259 - DNA, 15 bp, Homo sapiens
gaataaataaaaaca

SEQ ID NO: 887260 - DNA, 15 bp, Homo sapiens
taaataaaaacaata

SEQ ID NO: 887261 - DNA, 15 bp, Homo sapiens
aaataaaaacaataa

SEQ ID NO: 887262 - DNA, 15 bp, Homo sapiens
aataaaaacaataaa

SEQ ID NO: 887263 - DNA, 15 bp, Homo sapiens
ataaaaacaataaag

SEQ ID NO: 887264 - DNA, 15 bp, Homo sapiens
taaaaacaataaaga

SEQ ID NO: 887265 - DNA, 15 bp, Homo sapiens
aaaaacaataaagaa

SEQ ID NO: 887266 - DNA, 15 bp, Homo sapiens
aaaacaataaagaaa

SEQ ID NO: 887267 - DNA, 15 bp, Homo sapiens
aaacaataaagaaag

SEQ ID NO: 887268 - DNA, 15 bp, Homo sapiens
aacaataaagaaagg

SEQ ID NO: 887269 - DNA, 15 bp, Homo sapiens
acaataaagaaaggt

SEQ ID NO: 887270 - DNA, 15 bp, Homo sapiens
caataaagaaaggtt

SEQ ID NO: 887271 - DNA, 15 bp, Homo sapiens
aataaagaaaggtta

SEQ ID NO: 887272 - DNA, 15 bp, Homo sapiens
ataaagaaaggttag

SEQ ID NO: 887273 - DNA, 15 bp, Homo sapiens
taaagaaaggttagc

SEQ ID NO: 887274 - DNA, 15 bp, Homo sapiens
aaagaaaggttagca

SEQ ID NO: 887275 - DNA, 15 bp, Homo sapiens
aagaaaggttagcat

SEQ ID NO: 887276 - DNA, 15 bp, Homo sapiens
agaaaggttagcata

SEQ ID NO: 887277 - DNA, 15 bp, Homo sapiens
gaaaggttagcataa

SEQ ID NO: 887278 - DNA, 15 bp, Homo sapiens
aaaggttagcataag

SEQ ID NO: 887279 - DNA, 15 bp, Homo sapiens
aaggttagcataagc

SEQ ID NO: 887280 - DNA, 15 bp, Homo sapiens
aggttagcataagct

SEQ ID NO: 887281 - DNA, 15 bp, Homo sapiens
ggttagcataagctg

SEQ ID NO: 887282 - DNA, 15 bp, Homo sapiens
gttagcataagctgt

SEQ ID NO: 887283 - DNA, 15 bp, Homo sapiens
ttagcataagctgtg

SEQ ID NO: 887284 - DNA, 15 bp, Homo sapiens
tagcataagctgtgc

SEQ ID NO: 887285 - DNA, 15 bp, Homo sapiens
agcataagctgtgcc

SEQ ID NO: 887286 - DNA, 15 bp, Homo sapiens
gcataagctgtgcca

SEQ ID NO: 887287 - DNA, 15 bp, Homo sapiens
cataagctgtgccat

SEQ ID NO: 887288 - DNA, 15 bp, Homo sapiens
ataagctgtgccata

SEQ ID NO: 887289 - DNA, 15 bp, Homo sapiens
taagctgtgccatat

SEQ ID NO: 887290 - DNA, 15 bp, Homo sapiens
aagctgtgccatatt

SEQ ID NO: 887291 - DNA, 15 bp, Homo sapiens
agctgtgccatattg

SEQ ID NO: 887292 - DNA, 15 bp, Homo sapiens
gctgtgccatattga

SEQ ID NO: 887293 - DNA, 15 bp, Homo sapiens
ctgtgccatattgaa

SEQ ID NO: 887294 - DNA, 15 bp, Homo sapiens
tgtgccatattgaaa

SEQ ID NO: 887295 - DNA, 15 bp, Homo sapiens
gtgccatattgaaat

SEQ ID NO: 887296 - DNA, 15 bp, Homo sapiens
tgccatattgaaatt

SEQ ID NO: 887297 - DNA, 15 bp, Homo sapiens
gccatattgaaattg

SEQ ID NO: 887298 - DNA, 15 bp, Homo sapiens
ccatattgaaattgg

SEQ ID NO: 887299 - DNA, 15 bp, Homo sapiens
catattgaaattggg

SEQ ID NO: 887300 - DNA, 15 bp, Homo sapiens
atattgaaattggga

SEQ ID NO: 887301 - DNA, 15 bp, Homo sapiens
tattgaaattgggaa

SEQ ID NO: 887302 - DNA, 15 bp, Homo sapiens
attgaaattgggaag

SEQ ID NO: 887303 - DNA, 15 bp, Homo sapiens
ttgaaattgggaagt

SEQ ID NO: 887304 - DNA, 15 bp, Homo sapiens
tgaaattgggaagtc

SEQ ID NO: 887305 - DNA, 15 bp, Homo sapiens
gaaattgggaagtcc

SEQ ID NO: 887306 - DNA, 15 bp, Homo sapiens
aaattgggaagtcca

SEQ ID NO: 887307 - DNA, 15 bp, Homo sapiens
aattgggaagtccag

SEQ ID NO: 887308 - DNA, 15 bp, Homo sapiens
attgggaagtccagt

SEQ ID NO: 887309 - DNA, 15 bp, Homo sapiens
ttgggaagtccagtg

SEQ ID NO: 887310 - DNA, 15 bp, Homo sapiens
tgggaagtccagtgg

SEQ ID NO: 887311 - DNA, 15 bp, Homo sapiens
gggaagtccagtggg

SEQ ID NO: 887312 - DNA, 15 bp, Homo sapiens
ggaagtccagtgggt

SEQ ID NO: 887313 - DNA, 15 bp, Homo sapiens
gaagtccagtgggta

SEQ ID NO: 887314 - DNA, 15 bp, Homo sapiens
aagtccagtgggtat

SEQ ID NO: 887315 - DNA, 15 bp, Homo sapiens
agtccagtgggtata

SEQ ID NO: 887316 - DNA, 15 bp, Homo sapiens
gtccagtgggtatat

SEQ ID NO: 887317 - DNA, 15 bp, Homo sapiens
tccagtgggtatatg

SEQ ID NO: 887318 - DNA, 15 bp, Homo sapiens
ccagtgggtatatga

SEQ ID NO: 887319 - DNA, 15 bp, Homo sapiens
cagtgggtatatgaa

SEQ ID NO: 887320 - DNA, 15 bp, Homo sapiens
agtgggtatatgaag

SEQ ID NO: 887321 - DNA, 15 bp, Homo sapiens
gtgggtatatgaaga

SEQ ID NO: 887322 - DNA, 15 bp, Homo sapiens
tgggtatatgaagat

SEQ ID NO: 887323 - DNA, 15 bp, Homo sapiens
gggtatatgaagata

SEQ ID NO: 887324 - DNA, 15 bp, Homo sapiens
ggtatatgaagataa

SEQ ID NO: 887325 - DNA, 15 bp, Homo sapiens
gtatatgaagataaa

SEQ ID NO: 887326 - DNA, 15 bp, Homo sapiens
tatatgaagataaaa

SEQ ID NO: 887327 - DNA, 15 bp, Homo sapiens
atatgaagataaaac

SEQ ID NO: 887328 - DNA, 15 bp, Homo sapiens
tatgaagataaaaca

SEQ ID NO: 887329 - DNA, 15 bp, Homo sapiens
atgaagataaaacag

SEQ ID NO: 887330 - DNA, 15 bp, Homo sapiens
tgaagataaaacaga

SEQ ID NO: 887331 - DNA, 15 bp, Homo sapiens
gaagataaaacagaa

SEQ ID NO: 887332 - DNA, 15 bp, Homo sapiens
aagataaaacagaag

SEQ ID NO: 887333 - DNA, 15 bp, Homo sapiens
agataaaacagaaga

SEQ ID NO: 887334 - DNA, 15 bp, Homo sapiens
gataaaacagaagaa

SEQ ID NO: 887335 - DNA, 15 bp, Homo sapiens
ataaaacagaagaat

SEQ ID NO: 887336 - DNA, 15 bp, Homo sapiens
taaaacagaagaatt

SEQ ID NO: 887337 - DNA, 15 bp, Homo sapiens
aaaacagaagaatta

SEQ ID NO: 887338 - DNA, 15 bp, Homo sapiens
aaacagaagaattaa

SEQ ID NO: 887339 - DNA, 15 bp, Homo sapiens
aacagaagaattaaa

SEQ ID NO: 887340 - DNA, 15 bp, Homo sapiens
acagaagaattaaag

SEQ ID NO: 887341 - DNA, 15 bp, Homo sapiens
cagaagaattaaaga

SEQ ID NO: 887342 - DNA, 15 bp, Homo sapiens
agaagaattaaagat

SEQ ID NO: 887343 - DNA, 15 bp, Homo sapiens
gaagaattaaagatg

SEQ ID NO: 887344 - DNA, 15 bp, Homo sapiens
aagaattaaagatgc

SEQ ID NO: 887345 - DNA, 15 bp, Homo sapiens
agaattaaagatgct

SEQ ID NO: 887346 - DNA, 15 bp, Homo sapiens
gaattaaagatgctt

SEQ ID NO: 887347 - DNA, 15 bp, Homo sapiens
aattaaagatgctta

SEQ ID NO: 887348 - DNA, 15 bp, Homo sapiens
attaaagatgcttaa

SEQ ID NO: 887349 - DNA, 15 bp, Homo sapiens
ttaaagatgcttaac

SEQ ID NO: 887350 - DNA, 15 bp, Homo sapiens
taaagatgcttaaca

SEQ ID NO: 887351 - DNA, 15 bp, Homo sapiens
aaagatgcttaacaa

SEQ ID NO: 887352 - DNA, 15 bp, Homo sapiens
aagatgcttaacaac

SEQ ID NO: 887353 - DNA, 15 bp, Homo sapiens
agatgcttaacaaca

SEQ ID NO: 887354 - DNA, 15 bp, Homo sapiens
gatgcttaacaacat

SEQ ID NO: 887355 - DNA, 15 bp, Homo sapiens
atgcttaacaacatt

SEQ ID NO: 887356 - DNA, 15 bp, Homo sapiens
tgcttaacaacattt

SEQ ID NO: 887357 - DNA, 15 bp, Homo sapiens
gcttaacaacattta

SEQ ID NO: 887358 - DNA, 15 bp, Homo sapiens
cttaacaacatttaa

SEQ ID NO: 887359 - DNA, 15 bp, Homo sapiens
ttaacaacatttaaa

SEQ ID NO: 887360 - DNA, 15 bp, Homo sapiens
taacaacatttaaac

SEQ ID NO: 887361 - DNA, 15 bp, Homo sapiens
aacaacatttaaaca

SEQ ID NO: 887362 - DNA, 15 bp, Homo sapiens
acaacatttaaacat

SEQ ID NO: 887363 - DNA, 15 bp, Homo sapiens
caacatttaaacatt

SEQ ID NO: 887364 - DNA, 15 bp, Homo sapiens
aacatttaaacatta

SEQ ID NO: 887365 - DNA, 15 bp, Homo sapiens
acatttaaacattaa

SEQ ID NO: 887366 - DNA, 15 bp, Homo sapiens
catttaaacattaat

SEQ ID NO: 887367 - DNA, 15 bp, Homo sapiens
atttaaacattaata

SEQ ID NO: 887368 - DNA, 15 bp, Homo sapiens
tttaaacattaatat

SEQ ID NO: 887369 - DNA, 15 bp, Homo sapiens
ttaaacattaatatg

SEQ ID NO: 887370 - DNA, 15 bp, Homo sapiens
taaacattaatatgt

SEQ ID NO: 887371 - DNA, 15 bp, Homo sapiens
aaacattaatatgta

SEQ ID NO: 887372 - DNA, 15 bp, Homo sapiens
aacattaatatgtag

SEQ ID NO: 887373 - DNA, 15 bp, Homo sapiens
acattaatatgtagt

SEQ ID NO: 887374 - DNA, 15 bp, Homo sapiens
cattaatatgtagta

SEQ ID NO: 887375 - DNA, 15 bp, Homo sapiens
attaatatgtagtaa

SEQ ID NO: 887376 - DNA, 15 bp, Homo sapiens
ttaatatgtagtaat

SEQ ID NO: 887377 - DNA, 15 bp, Homo sapiens
taatatgtagtaatt

SEQ ID NO: 887378 - DNA, 15 bp, Homo sapiens
aatatgtagtaattt

SEQ ID NO: 887379 - DNA, 15 bp, Homo sapiens
atatgtagtaatttg

SEQ ID NO: 887380 - DNA, 15 bp, Homo sapiens
tatgtagtaatttgt

SEQ ID NO: 887381 - DNA, 15 bp, Homo sapiens
atgtagtaatttgta

SEQ ID NO: 887382 - DNA, 15 bp, Homo sapiens
tgtagtaatttgtat

SEQ ID NO: 887383 - DNA, 15 bp, Homo sapiens
gtagtaatttgtata

SEQ ID NO: 887384 - DNA, 15 bp, Homo sapiens
tagtaatttgtatat

SEQ ID NO: 887385 - DNA, 15 bp, Homo sapiens
agtaatttgtatata

SEQ ID NO: 887386 - DNA, 15 bp, Homo sapiens
gtaatttgtatatat

SEQ ID NO: 887387 - DNA, 15 bp, Homo sapiens
taatttgtatatatt

SEQ ID NO: 887388 - DNA, 15 bp, Homo sapiens
aatttgtatatattt

SEQ ID NO: 887389 - DNA, 15 bp, Homo sapiens
atttgtatatattta

SEQ ID NO: 887390 - DNA, 15 bp, Homo sapiens
tttgtatatatttag

SEQ ID NO: 887391 - DNA, 15 bp, Homo sapiens
ttgtatatatttagt

SEQ ID NO: 887392 - DNA, 15 bp, Homo sapiens
tgtatatatttagta

SEQ ID NO: 887393 - DNA, 15 bp, Homo sapiens
gtatatatttagtaa

SEQ ID NO: 887394 - DNA, 15 bp, Homo sapiens
tatatatttagtaat

SEQ ID NO: 887395 - DNA, 15 bp, Homo sapiens
atatatttagtaata

SEQ ID NO: 887396 - DNA, 15 bp, Homo sapiens
tatatttagtaataa

SEQ ID NO: 887397 - DNA, 15 bp, Homo sapiens
atatttagtaataat

SEQ ID NO: 887398 - DNA, 15 bp, Homo sapiens
tatttagtaataatt

SEQ ID NO: 887399 - DNA, 15 bp, Homo sapiens
atttagtaataattc

SEQ ID NO: 887400 - DNA, 15 bp, Homo sapiens
tttagtaataattca

SEQ ID NO: 887401 - DNA, 15 bp, Homo sapiens
ttagtaataattcat

SEQ ID NO: 887402 - DNA, 15 bp, Homo sapiens
tagtaataattcata

SEQ ID NO: 887403 - DNA, 15 bp, Homo sapiens
agtaataattcatac

SEQ ID NO: 887404 - DNA, 15 bp, Homo sapiens
gtaataattcataca

SEQ ID NO: 887405 - DNA, 15 bp, Homo sapiens
taataattcatacat

SEQ ID NO: 887406 - DNA, 15 bp, Homo sapiens
aataattcatacatt

SEQ ID NO: 887407 - DNA, 15 bp, Homo sapiens
ataattcatacattt

SEQ ID NO: 887408 - DNA, 15 bp, Homo sapiens
taattcatacatttt

SEQ ID NO: 887409 - DNA, 15 bp, Homo sapiens
aattcatacatttta

SEQ ID NO: 887410 - DNA, 15 bp, Homo sapiens
attcatacattttaa

SEQ ID NO: 887411 - DNA, 15 bp, Homo sapiens
ttcatacattttaaa

SEQ ID NO: 887412 - DNA, 15 bp, Homo sapiens
tcatacattttaaaa

SEQ ID NO: 887413 - DNA, 15 bp, Homo sapiens
catacattttaaaat

SEQ ID NO: 887414 - DNA, 15 bp, Homo sapiens
atacattttaaaata

SEQ ID NO: 887415 - DNA, 15 bp, Homo sapiens
tacattttaaaataa

SEQ ID NO: 887416 - DNA, 15 bp, Homo sapiens
acattttaaaataac

SEQ ID NO: 887417 - DNA, 15 bp, Homo sapiens
cattttaaaataacg

SEQ ID NO: 887418 - DNA, 15 bp, Homo sapiens
attttaaaataacga

SEQ ID NO: 887419 - DNA, 15 bp, Homo sapiens
ttttaaaataacgaa

SEQ ID NO: 887420 - DNA, 15 bp, Homo sapiens
tttaaaataacgaat

SEQ ID NO: 887421 - DNA, 15 bp, Homo sapiens
ttaaaataacgaata

SEQ ID NO: 887422 - DNA, 15 bp, Homo sapiens
taaaataacgaataa

SEQ ID NO: 887423 - DNA, 15 bp, Homo sapiens
aaaataacgaataaa

SEQ ID NO: 887424 - DNA, 15 bp, Homo sapiens
aaataacgaataaag

SEQ ID NO: 887425 - DNA, 15 bp, Homo sapiens
aataacgaataaagg

SEQ ID NO: 887426 - DNA, 15 bp, Homo sapiens
ataacgaataaaggg

SEQ ID NO: 887427 - DNA, 15 bp, Homo sapiens
taacgaataaagggg

SEQ ID NO: 887428 - DNA, 15 bp, Homo sapiens
aacgaataaagggga

SEQ ID NO: 887429 - DNA, 15 bp, Homo sapiens
acgaataaaggggat

SEQ ID NO: 887430 - DNA, 15 bp, Homo sapiens
cgaataaaggggatg

SEQ ID NO: 887431 - DNA, 15 bp, Homo sapiens
gaataaaggggatgg

SEQ ID NO: 887432 - DNA, 15 bp, Homo sapiens
aataaaggggatgga

SEQ ID NO: 887433 - DNA, 15 bp, Homo sapiens
ataaaggggatggaa

SEQ ID NO: 887434 - DNA, 15 bp, Homo sapiens
taaaggggatggaaa

SEQ ID NO: 887435 - DNA, 15 bp, Homo sapiens
aaaggggatggaaaa

SEQ ID NO: 887436 - DNA, 15 bp, Homo sapiens
aaggggatggaaaaa

SEQ ID NO: 887437 - DNA, 15 bp, Homo sapiens
aggggatggaaaaaa

SEQ ID NO: 887438 - DNA, 15 bp, Homo sapiens
ggggatggaaaaaaa

SEQ ID NO: 887439 - DNA, 15 bp, Homo sapiens
gggatggaaaaaaag

SEQ ID NO: 887440 - DNA, 15 bp, Homo sapiens
ggatggaaaaaaagg

SEQ ID NO: 887441 - DNA, 15 bp, Homo sapiens
gatggaaaaaaaggc

SEQ ID NO: 887442 - DNA, 15 bp, Homo sapiens
atggaaaaaaaggca

SEQ ID NO: 887443 - DNA, 15 bp, Homo sapiens
tggaaaaaaaggcag

SEQ ID NO: 887444 - DNA, 15 bp, Homo sapiens
ggaaaaaaaggcaga

SEQ ID NO: 887445 - DNA, 15 bp, Homo sapiens
gaaaaaaaggcagag

SEQ ID NO: 887446 - DNA, 15 bp, Homo sapiens
aaaaaaaggcagagg

SEQ ID NO: 887447 - DNA, 15 bp, Homo sapiens
aaaaaaggcagagga

SEQ ID NO: 887448 - DNA, 15 bp, Homo sapiens
aaaaaggcagaggaa

SEQ ID NO: 887449 - DNA, 15 bp, Homo sapiens
aaaaggcagaggaaa

SEQ ID NO: 887450 - DNA, 15 bp, Homo sapiens
aaaggcagaggaaaa

SEQ ID NO: 887451 - DNA, 15 bp, Homo sapiens
aaggcagaggaaaac

SEQ ID NO: 887452 - DNA, 15 bp, Homo sapiens
aggcagaggaaaaca

SEQ ID NO: 887453 - DNA, 15 bp, Homo sapiens
ggcagaggaaaacat

SEQ ID NO: 887454 - DNA, 15 bp, Homo sapiens
gcagaggaaaacatc

SEQ ID NO: 887455 - DNA, 15 bp, Homo sapiens
cagaggaaaacatct

SEQ ID NO: 887456 - DNA, 15 bp, Homo sapiens
agaggaaaacatctt

SEQ ID NO: 887457 - DNA, 15 bp, Homo sapiens
gaggaaaacatcttc

SEQ ID NO: 887458 - DNA, 15 bp, Homo sapiens
aggaaaacatcttca

SEQ ID NO: 887459 - DNA, 15 bp, Homo sapiens
ggaaaacatcttcat

SEQ ID NO: 887460 - DNA, 15 bp, Homo sapiens
gaaaacatcttcata

SEQ ID NO: 887461 - DNA, 15 bp, Homo sapiens
aaaacatcttcataa

SEQ ID NO: 887462 - DNA, 15 bp, Homo sapiens
aaacatcttcataaa

SEQ ID NO: 887463 - DNA, 15 bp, Homo sapiens
aacatcttcataaag

SEQ ID NO: 887464 - DNA, 15 bp, Homo sapiens
acatcttcataaagt

SEQ ID NO: 887465 - DNA, 15 bp, Homo sapiens
catcttcataaagta

SEQ ID NO: 887466 - DNA, 15 bp, Homo sapiens
atcttcataaagtaa

SEQ ID NO: 887467 - DNA, 15 bp, Homo sapiens
tcttcataaagtaac

SEQ ID NO: 887468 - DNA, 15 bp, Homo sapiens
cttcataaagtaact

SEQ ID NO: 887469 - DNA, 15 bp, Homo sapiens
ttcataaagtaacta

SEQ ID NO: 887470 - DNA, 15 bp, Homo sapiens
tcataaagtaactaa

SEQ ID NO: 887471 - DNA, 15 bp, Homo sapiens
cataaagtaactaaa

SEQ ID NO: 887472 - DNA, 15 bp, Homo sapiens
ataaagtaactaaat

SEQ ID NO: 887473 - DNA, 15 bp, Homo sapiens
taaagtaactaaatg

SEQ ID NO: 887474 - DNA, 15 bp, Homo sapiens
aaagtaactaaatgt

SEQ ID NO: 887475 - DNA, 15 bp, Homo sapiens
aagtaactaaatgtg

SEQ ID NO: 887476 - DNA, 15 bp, Homo sapiens
agtaactaaatgtga

SEQ ID NO: 887477 - DNA, 15 bp, Homo sapiens
gtaactaaatgtgag

SEQ ID NO: 887478 - DNA, 15 bp, Homo sapiens
taactaaatgtgaga

SEQ ID NO: 887479 - DNA, 15 bp, Homo sapiens
aactaaatgtgagaa

SEQ ID NO: 887480 - DNA, 15 bp, Homo sapiens
actaaatgtgagaag

SEQ ID NO: 887481 - DNA, 15 bp, Homo sapiens
ctaaatgtgagaagt

SEQ ID NO: 887482 - DNA, 15 bp, Homo sapiens
taaatgtgagaagtt

SEQ ID NO: 887483 - DNA, 15 bp, Homo sapiens
aaatgtgagaagtta

SEQ ID NO: 887484 - DNA, 15 bp, Homo sapiens
aatgtgagaagttat

SEQ ID NO: 887485 - DNA, 15 bp, Homo sapiens
atgtgagaagttatt

SEQ ID NO: 887486 - DNA, 15 bp, Homo sapiens
tgtgagaagttattc

SEQ ID NO: 887487 - DNA, 15 bp, Homo sapiens
gtgagaagttattca

SEQ ID NO: 887488 - DNA, 15 bp, Homo sapiens
tgagaagttattcaa

SEQ ID NO: 887489 - DNA, 15 bp, Homo sapiens
gagaagttattcaag

SEQ ID NO: 887490 - DNA, 15 bp, Homo sapiens
agaagttattcaagg

SEQ ID NO: 887491 - DNA, 15 bp, Homo sapiens
gaagttattcaaggc

SEQ ID NO: 887492 - DNA, 15 bp, Homo sapiens
aagttattcaaggca

SEQ ID NO: 887493 - DNA, 15 bp, Homo sapiens
agttattcaaggcag

SEQ ID NO: 887494 - DNA, 15 bp, Homo sapiens
gttattcaaggcaga

SEQ ID NO: 887495 - DNA, 15 bp, Homo sapiens
ttattcaaggcagac

SEQ ID NO: 887496 - DNA, 15 bp, Homo sapiens
tattcaaggcagacg

SEQ ID NO: 887497 - DNA, 15 bp, Homo sapiens
attcaaggcagacgt

SEQ ID NO: 887498 - DNA, 15 bp, Homo sapiens
ttcaaggcagacgtc

SEQ ID NO: 887499 - DNA, 15 bp, Homo sapiens
tcaaggcagacgtcc

SEQ ID NO: 887500 - DNA, 15 bp, Homo sapiens
caaggcagacgtcct

SEQ ID NO: 887501 - DNA, 15 bp, Homo sapiens
aaggcagacgtcctg

SEQ ID NO: 887502 - DNA, 15 bp, Homo sapiens
aggcagacgtcctgg

SEQ ID NO: 887503 - DNA, 15 bp, Homo sapiens
ggcagacgtcctgga

SEQ ID NO: 887504 - DNA, 15 bp, Homo sapiens
gcagacgtcctggaa

SEQ ID NO: 887505 - DNA, 15 bp, Homo sapiens
cagacgtcctggaag

SEQ ID NO: 887506 - DNA, 15 bp, Homo sapiens
agacgtcctggaaga

SEQ ID NO: 887507 - DNA, 15 bp, Homo sapiens
gacgtcctggaagag

SEQ ID NO: 887508 - DNA, 15 bp, Homo sapiens
acgtcctggaagagg

SEQ ID NO: 887509 - DNA, 15 bp, Homo sapiens
cgtcctggaagaggt

SEQ ID NO: 887510 - DNA, 15 bp, Homo sapiens
gtcctggaagaggta

SEQ ID NO: 887511 - DNA, 15 bp, Homo sapiens
tcctggaagaggtaa

SEQ ID NO: 887512 - DNA, 15 bp, Homo sapiens
cctggaagaggtaaa

SEQ ID NO: 887513 - DNA, 15 bp, Homo sapiens
ctggaagaggtaaag

SEQ ID NO: 887514 - DNA, 15 bp, Homo sapiens
tggaagaggtaaaga

SEQ ID NO: 887515 - DNA, 15 bp, Homo sapiens
ggaagaggtaaagaa

SEQ ID NO: 887516 - DNA, 15 bp, Homo sapiens
gaagaggtaaagaaa

SEQ ID NO: 887517 - DNA, 15 bp, Homo sapiens
aagaggtaaagaaac

SEQ ID NO: 887518 - DNA, 15 bp, Homo sapiens
agaggtaaagaaacg

SEQ ID NO: 887519 - DNA, 15 bp, Homo sapiens
gaggtaaagaaacga

SEQ ID NO: 887520 - DNA, 15 bp, Homo sapiens
aggtaaagaaacgac

SEQ ID NO: 887521 - DNA, 15 bp, Homo sapiens
ggtaaagaaacgaca

SEQ ID NO: 887522 - DNA, 15 bp, Homo sapiens
gtaaagaaacgacag

SEQ ID NO: 887523 - DNA, 15 bp, Homo sapiens
taaagaaacgacagg

SEQ ID NO: 887524 - DNA, 15 bp, Homo sapiens
aaagaaacgacagga

SEQ ID NO: 887525 - DNA, 15 bp, Homo sapiens
aagaaacgacaggag

SEQ ID NO: 887526 - DNA, 15 bp, Homo sapiens
agaaacgacaggagc

SEQ ID NO: 887527 - DNA, 15 bp, Homo sapiens
gaaacgacaggagct

SEQ ID NO: 887528 - DNA, 15 bp, Homo sapiens
aaacgacaggagctg

SEQ ID NO: 887529 - DNA, 15 bp, Homo sapiens
aacgacaggagctgg

SEQ ID NO: 887530 - DNA, 15 bp, Homo sapiens
acgacaggagctggg

SEQ ID NO: 887531 - DNA, 15 bp, Homo sapiens
cgacaggagctgggt

SEQ ID NO: 887532 - DNA, 15 bp, Homo sapiens
gacaggagctgggtt

SEQ ID NO: 887533 - DNA, 15 bp, Homo sapiens
acaggagctgggttg

SEQ ID NO: 887534 - DNA, 15 bp, Homo sapiens
caggagctgggttgg

SEQ ID NO: 887535 - DNA, 15 bp, Homo sapiens
aggagctgggttggg

SEQ ID NO: 887536 - DNA, 15 bp, Homo sapiens
ggagctgggttggga

SEQ ID NO: 887537 - DNA, 15 bp, Homo sapiens
gagctgggttgggag

SEQ ID NO: 887538 - DNA, 15 bp, Homo sapiens
agctgggttgggagg

SEQ ID NO: 887539 - DNA, 15 bp, Homo sapiens
gctgggttgggaggg

SEQ ID NO: 887540 - DNA, 15 bp, Homo sapiens
ctgggttgggaggga

SEQ ID NO: 887541 - DNA, 15 bp, Homo sapiens
tgggttgggagggaa

SEQ ID NO: 887542 - DNA, 15 bp, Homo sapiens
gggttgggagggaag

SEQ ID NO: 887543 - DNA, 15 bp, Homo sapiens
ggttgggagggaaga

SEQ ID NO: 887544 - DNA, 15 bp, Homo sapiens
gttgggagggaagag

SEQ ID NO: 887545 - DNA, 15 bp, Homo sapiens
ttgggagggaagagg

SEQ ID NO: 887546 - DNA, 15 bp, Homo sapiens
tgggagggaagaggg

SEQ ID NO: 887547 - DNA, 15 bp, Homo sapiens
gggagggaagagggg

SEQ ID NO: 887548 - DNA, 15 bp, Homo sapiens
ggagggaagaggggg

SEQ ID NO: 887549 - DNA, 15 bp, Homo sapiens
gagggaagaggggga

SEQ ID NO: 887550 - DNA, 15 bp, Homo sapiens
agggaagagggggaa

SEQ ID NO: 887551 - DNA, 15 bp, Homo sapiens
gggaagagggggaac

SEQ ID NO: 887552 - DNA, 15 bp, Homo sapiens
ggaagagggggaaca

SEQ ID NO: 887553 - DNA, 15 bp, Homo sapiens
gaagagggggaacag

SEQ ID NO: 887554 - DNA, 15 bp, Homo sapiens
aagagggggaacagc

SEQ ID NO: 887555 - DNA, 15 bp, Homo sapiens
agagggggaacagcg

SEQ ID NO: 887556 - DNA, 15 bp, Homo sapiens
gagggggaacagcgt

SEQ ID NO: 887557 - DNA, 15 bp, Homo sapiens
agggggaacagcgtt

SEQ ID NO: 887558 - DNA, 15 bp, Homo sapiens
gggggaacagcgttt

SEQ ID NO: 887559 - DNA, 15 bp, Homo sapiens
ggggaacagcgtttc

SEQ ID NO: 887560 - DNA, 15 bp, Homo sapiens
gggaacagcgtttct

SEQ ID NO: 887561 - DNA, 15 bp, Homo sapiens
ggaacagcgtttctg

SEQ ID NO: 887562 - DNA, 15 bp, Homo sapiens
gaacagcgtttctga

SEQ ID NO: 887563 - DNA, 15 bp, Homo sapiens
aacagcgtttctgaa

SEQ ID NO: 887564 - DNA, 15 bp, Homo sapiens
acagcgtttctgaag

SEQ ID NO: 887565 - DNA, 15 bp, Homo sapiens
cagcgtttctgaagt

SEQ ID NO: 887566 - DNA, 15 bp, Homo sapiens
agcgtttctgaagtg

SEQ ID NO: 887567 - DNA, 15 bp, Homo sapiens
gcgtttctgaagtgg

SEQ ID NO: 887568 - DNA, 15 bp, Homo sapiens
cgtttctgaagtggg

SEQ ID NO: 887569 - DNA, 15 bp, Homo sapiens
gtttctgaagtgggt

SEQ ID NO: 887570 - DNA, 15 bp, Homo sapiens
tttctgaagtgggta

SEQ ID NO: 887571 - DNA, 15 bp, Homo sapiens
ttctgaagtgggtaa

SEQ ID NO: 887572 - DNA, 15 bp, Homo sapiens
tctgaagtgggtaag

SEQ ID NO: 887573 - DNA, 15 bp, Homo sapiens
ctgaagtgggtaagg

SEQ ID NO: 887574 - DNA, 15 bp, Homo sapiens
tgaagtgggtaaggc

SEQ ID NO: 887575 - DNA, 15 bp, Homo sapiens
gaagtgggtaaggct

SEQ ID NO: 887576 - DNA, 15 bp, Homo sapiens
aagtgggtaaggctg

SEQ ID NO: 887577 - DNA, 15 bp, Homo sapiens
agtgggtaaggctgg

SEQ ID NO: 887578 - DNA, 15 bp, Homo sapiens
gtgggtaaggctggt

SEQ ID NO: 887579 - DNA, 15 bp, Homo sapiens
tgggtaaggctggtg

SEQ ID NO: 887580 - DNA, 15 bp, Homo sapiens
gggtaaggctggtgg

SEQ ID NO: 887581 - DNA, 15 bp, Homo sapiens
ggtaaggctggtggg

SEQ ID NO: 887582 - DNA, 15 bp, Homo sapiens
gtaaggctggtggga

SEQ ID NO: 887583 - DNA, 15 bp, Homo sapiens
taaggctggtgggag

SEQ ID NO: 887584 - DNA, 15 bp, Homo sapiens
aaggctggtgggagc

SEQ ID NO: 887585 - DNA, 15 bp, Homo sapiens
aggctggtgggagca

SEQ ID NO: 887586 - DNA, 15 bp, Homo sapiens
ggctggtgggagcag

SEQ ID NO: 887587 - DNA, 15 bp, Homo sapiens
gctggtgggagcagg

SEQ ID NO: 887588 - DNA, 15 bp, Homo sapiens
ctggtgggagcaggg

SEQ ID NO: 887589 - DNA, 15 bp, Homo sapiens
tggtgggagcaggga

SEQ ID NO: 887590 - DNA, 15 bp, Homo sapiens
ggtgggagcagggat

SEQ ID NO: 887591 - DNA, 15 bp, Homo sapiens
gtgggagcagggatg

SEQ ID NO: 887592 - DNA, 15 bp, Homo sapiens
tgggagcagggatgg

SEQ ID NO: 887593 - DNA, 15 bp, Homo sapiens
gggagcagggatggg

SEQ ID NO: 887594 - DNA, 15 bp, Homo sapiens
ggagcagggatgggc

SEQ ID NO: 887595 - DNA, 15 bp, Homo sapiens
gagcagggatgggca

SEQ ID NO: 887596 - DNA, 15 bp, Homo sapiens
agcagggatgggcat

SEQ ID NO: 887597 - DNA, 15 bp, Homo sapiens
gcagggatgggcatc

SEQ ID NO: 887598 - DNA, 15 bp, Homo sapiens
cagggatgggcatca

SEQ ID NO: 887599 - DNA, 15 bp, Homo sapiens
agggatgggcatcag

SEQ ID NO: 887600 - DNA, 15 bp, Homo sapiens
gggatgggcatcagc

SEQ ID NO: 887601 - DNA, 15 bp, Homo sapiens
ggatgggcatcagca

SEQ ID NO: 887602 - DNA, 15 bp, Homo sapiens
gatgggcatcagcag

SEQ ID NO: 887603 - DNA, 15 bp, Homo sapiens
atgggcatcagcagg

SEQ ID NO: 887604 - DNA, 15 bp, Homo sapiens
tgggcatcagcaggt

SEQ ID NO: 887605 - DNA, 15 bp, Homo sapiens
gggcatcagcaggtg

SEQ ID NO: 887606 - DNA, 15 bp, Homo sapiens
ggcatcagcaggtgc

SEQ ID NO: 887607 - DNA, 15 bp, Homo sapiens
gcatcagcaggtgcc

SEQ ID NO: 887608 - DNA, 15 bp, Homo sapiens
catcagcaggtgcca

SEQ ID NO: 887609 - DNA, 15 bp, Homo sapiens
atcagcaggtgccac

SEQ ID NO: 887610 - DNA, 15 bp, Homo sapiens
tcagcaggtgccact

SEQ ID NO: 887611 - DNA, 15 bp, Homo sapiens
cagcaggtgccactt

SEQ ID NO: 887612 - DNA, 15 bp, Homo sapiens
agcaggtgccacttt

SEQ ID NO: 887613 - DNA, 15 bp, Homo sapiens
gcaggtgccactttc

SEQ ID NO: 887614 - DNA, 15 bp, Homo sapiens
caggtgccactttcc

SEQ ID NO: 887615 - DNA, 15 bp, Homo sapiens
aggtgccactttccc

SEQ ID NO: 887616 - DNA, 15 bp, Homo sapiens
ggtgccactttccct

SEQ ID NO: 887617 - DNA, 15 bp, Homo sapiens
gtgccactttccctc

SEQ ID NO: 887618 - DNA, 15 bp, Homo sapiens
tgccactttccctct

SEQ ID NO: 887619 - DNA, 15 bp, Homo sapiens
gccactttccctctg

SEQ ID NO: 887620 - DNA, 15 bp, Homo sapiens
ccactttccctctgt

SEQ ID NO: 887621 - DNA, 15 bp, Homo sapiens
cactttccctctgtg

SEQ ID NO: 887622 - DNA, 15 bp, Homo sapiens
actttccctctgtgt

SEQ ID NO: 887623 - DNA, 15 bp, Homo sapiens
ctttccctctgtgtt

SEQ ID NO: 887624 - DNA, 15 bp, Homo sapiens
tttccctctgtgttg

SEQ ID NO: 887625 - DNA, 15 bp, Homo sapiens
ttccctctgtgttgg

SEQ ID NO: 887626 - DNA, 15 bp, Homo sapiens
tccctctgtgttgga

SEQ ID NO: 887627 - DNA, 15 bp, Homo sapiens
ccctctgtgttggaa

SEQ ID NO: 887628 - DNA, 15 bp, Homo sapiens
cctctgtgttggaaa

SEQ ID NO: 887629 - DNA, 15 bp, Homo sapiens
ctctgtgttggaaac

SEQ ID NO: 887630 - DNA, 15 bp, Homo sapiens
tctgtgttggaaacc

SEQ ID NO: 887631 - DNA, 15 bp, Homo sapiens
ctgtgttggaaacca

SEQ ID NO: 887632 - DNA, 15 bp, Homo sapiens
tgtgttggaaaccag

SEQ ID NO: 887633 - DNA, 15 bp, Homo sapiens
gtgttggaaaccagc

SEQ ID NO: 887634 - DNA, 15 bp, Homo sapiens
tgttggaaaccagct

SEQ ID NO: 887635 - DNA, 15 bp, Homo sapiens
gttggaaaccagctc

SEQ ID NO: 887636 - DNA, 15 bp, Homo sapiens
ttggaaaccagctct

SEQ ID NO: 887637 - DNA, 15 bp, Homo sapiens
tggaaaccagctctg

SEQ ID NO: 887638 - DNA, 15 bp, Homo sapiens
ggaaaccagctctga

SEQ ID NO: 887639 - DNA, 15 bp, Homo sapiens
gaaaccagctctgac

SEQ ID NO: 887640 - DNA, 15 bp, Homo sapiens
aaaccagctctgact

SEQ ID NO: 887641 - DNA, 15 bp, Homo sapiens
aaccagctctgactg

SEQ ID NO: 887642 - DNA, 15 bp, Homo sapiens
accagctctgactgc

SEQ ID NO: 887643 - DNA, 15 bp, Homo sapiens
ccagctctgactgct

SEQ ID NO: 887644 - DNA, 15 bp, Homo sapiens
cagctctgactgctc

SEQ ID NO: 887645 - DNA, 15 bp, Homo sapiens
agctctgactgctcc

SEQ ID NO: 887646 - DNA, 15 bp, Homo sapiens
gctctgactgctcct

SEQ ID NO: 887647 - DNA, 15 bp, Homo sapiens
ctctgactgctcctc

SEQ ID NO: 887648 - DNA, 15 bp, Homo sapiens
tctgactgctcctcc

SEQ ID NO: 887649 - DNA, 15 bp, Homo sapiens
ctgactgctcctccc

SEQ ID NO: 887650 - DNA, 15 bp, Homo sapiens
tgactgctcctccct

SEQ ID NO: 887651 - DNA, 15 bp, Homo sapiens
gactgctcctccctt

SEQ ID NO: 887652 - DNA, 15 bp, Homo sapiens
actgctcctcccttc

SEQ ID NO: 887653 - DNA, 15 bp, Homo sapiens
ctgctcctcccttcc

SEQ ID NO: 887654 - DNA, 15 bp, Homo sapiens
tgctcctcccttccc

SEQ ID NO: 887655 - DNA, 15 bp, Homo sapiens
gctcctcccttcccc

SEQ ID NO: 887656 - DNA, 15 bp, Homo sapiens
ctcctcccttcccct

SEQ ID NO: 887657 - DNA, 15 bp, Homo sapiens
tcctcccttccccta

SEQ ID NO: 887658 - DNA, 15 bp, Homo sapiens
cctcccttcccctat

SEQ ID NO: 887659 - DNA, 15 bp, Homo sapiens
ctcccttcccctatg

SEQ ID NO: 887660 - DNA, 15 bp, Homo sapiens
tcccttcccctatgt

SEQ ID NO: 887661 - DNA, 15 bp, Homo sapiens
cccttcccctatgtg

SEQ ID NO: 887662 - DNA, 15 bp, Homo sapiens
ccttcccctatgtgc

SEQ ID NO: 887663 - DNA, 15 bp, Homo sapiens
cttcccctatgtgca

SEQ ID NO: 887664 - DNA, 15 bp, Homo sapiens
ttcccctatgtgcat

SEQ ID NO: 887665 - DNA, 15 bp, Homo sapiens
tcccctatgtgcatg

SEQ ID NO: 887666 - DNA, 15 bp, Homo sapiens
cccctatgtgcatgg

SEQ ID NO: 887667 - DNA, 15 bp, Homo sapiens
ccctatgtgcatggg

SEQ ID NO: 887668 - DNA, 15 bp, Homo sapiens
cctatgtgcatgggg

SEQ ID NO: 887669 - DNA, 15 bp, Homo sapiens
ctatgtgcatggggc

SEQ ID NO: 887670 - DNA, 15 bp, Homo sapiens
tatgtgcatggggca

SEQ ID NO: 887671 - DNA, 15 bp, Homo sapiens
atgtgcatggggcat

SEQ ID NO: 887672 - DNA, 15 bp, Homo sapiens
tgtgcatggggcatt

SEQ ID NO: 887673 - DNA, 15 bp, Homo sapiens
gtgcatggggcattg

SEQ ID NO: 887674 - DNA, 15 bp, Homo sapiens
tgcatggggcattgt

SEQ ID NO: 887675 - DNA, 15 bp, Homo sapiens
gcatggggcattgtg

SEQ ID NO: 887676 - DNA, 15 bp, Homo sapiens
catggggcattgtgg

SEQ ID NO: 887677 - DNA, 15 bp, Homo sapiens
atggggcattgtggg

SEQ ID NO: 887678 - DNA, 15 bp, Homo sapiens
tggggcattgtgggt

SEQ ID NO: 887679 - DNA, 15 bp, Homo sapiens
ggggcattgtgggtt

SEQ ID NO: 887680 - DNA, 15 bp, Homo sapiens
gggcattgtgggttt

SEQ ID NO: 887681 - DNA, 15 bp, Homo sapiens
ggcattgtgggtttc

SEQ ID NO: 887682 - DNA, 15 bp, Homo sapiens
gcattgtgggtttct

SEQ ID NO: 887683 - DNA, 15 bp, Homo sapiens
cattgtgggtttctt

SEQ ID NO: 887684 - DNA, 15 bp, Homo sapiens
attgtgggtttcttg

SEQ ID NO: 887685 - DNA, 15 bp, Homo sapiens
ttgtgggtttcttgg

SEQ ID NO: 887686 - DNA, 15 bp, Homo sapiens
tgtgggtttcttggg

SEQ ID NO: 887687 - DNA, 15 bp, Homo sapiens
gtgggtttcttgggc

SEQ ID NO: 887688 - DNA, 15 bp, Homo sapiens
tgggtttcttgggct

SEQ ID NO: 887689 - DNA, 15 bp, Homo sapiens
gggtttcttgggctc

SEQ ID NO: 887690 - DNA, 15 bp, Homo sapiens
ggtttcttgggctct

SEQ ID NO: 887691 - DNA, 15 bp, Homo sapiens
gtttcttgggctctt

SEQ ID NO: 887692 - DNA, 15 bp, Homo sapiens
tttcttgggctcttc

SEQ ID NO: 887693 - DNA, 15 bp, Homo sapiens
ttcttgggctcttca

SEQ ID NO: 887694 - DNA, 15 bp, Homo sapiens
tcttgggctcttcac

SEQ ID NO: 887695 - DNA, 15 bp, Homo sapiens
cttgggctcttcact

SEQ ID NO: 887696 - DNA, 15 bp, Homo sapiens
ttgggctcttcactg

SEQ ID NO: 887697 - DNA, 15 bp, Homo sapiens
tgggctcttcactgc

SEQ ID NO: 887698 - DNA, 15 bp, Homo sapiens
gggctcttcactgcc

SEQ ID NO: 887699 - DNA, 15 bp, Homo sapiens
ggctcttcactgccc

SEQ ID NO: 887700 - DNA, 15 bp, Homo sapiens
gctcttcactgccca

SEQ ID NO: 887701 - DNA, 15 bp, Homo sapiens
ctcttcactgcccat

SEQ ID NO: 887702 - DNA, 15 bp, Homo sapiens
tcttcactgcccatg

SEQ ID NO: 887703 - DNA, 15 bp, Homo sapiens
cttcactgcccatgt

SEQ ID NO: 887704 - DNA, 15 bp, Homo sapiens
ttcactgcccatgtg

SEQ ID NO: 887705 - DNA, 15 bp, Homo sapiens
tcactgcccatgtgt

SEQ ID NO: 887706 - DNA, 15 bp, Homo sapiens
cactgcccatgtgtg

SEQ ID NO: 887707 - DNA, 15 bp, Homo sapiens
actgcccatgtgtgc

SEQ ID NO: 887708 - DNA, 15 bp, Homo sapiens
ctgcccatgtgtgct

SEQ ID NO: 887709 - DNA, 15 bp, Homo sapiens
tgcccatgtgtgctt

SEQ ID NO: 887710 - DNA, 15 bp, Homo sapiens
gcccatgtgtgcttt

SEQ ID NO: 887711 - DNA, 15 bp, Homo sapiens
cccatgtgtgcttta

SEQ ID NO: 887712 - DNA, 15 bp, Homo sapiens
ccatgtgtgctttat

SEQ ID NO: 887713 - DNA, 15 bp, Homo sapiens
catgtgtgctttatg

SEQ ID NO: 887714 - DNA, 15 bp, Homo sapiens
atgtgtgctttatgt

SEQ ID NO: 887715 - DNA, 15 bp, Homo sapiens
tgtgtgctttatgta

SEQ ID NO: 887716 - DNA, 15 bp, Homo sapiens
gtgtgctttatgtaa

SEQ ID NO: 887717 - DNA, 15 bp, Homo sapiens
tgtgctttatgtaaa

SEQ ID NO: 887718 - DNA, 15 bp, Homo sapiens
gtgctttatgtaaat

SEQ ID NO: 887719 - DNA, 15 bp, Homo sapiens
tgctttatgtaaatg

SEQ ID NO: 887720 - DNA, 15 bp, Homo sapiens
gctttatgtaaatgg

SEQ ID NO: 887721 - DNA, 15 bp, Homo sapiens
ctttatgtaaatggc

SEQ ID NO: 887722 - DNA, 15 bp, Homo sapiens
tttatgtaaatggcc

SEQ ID NO: 887723 - DNA, 15 bp, Homo sapiens
ttatgtaaatggcct

SEQ ID NO: 887724 - DNA, 15 bp, Homo sapiens
tatgtaaatggcctc

SEQ ID NO: 887725 - DNA, 15 bp, Homo sapiens
atgtaaatggcctct

SEQ ID NO: 887726 - DNA, 15 bp, Homo sapiens
tgtaaatggcctctg

SEQ ID NO: 887727 - DNA, 15 bp, Homo sapiens
gtaaatggcctctgc

SEQ ID NO: 887728 - DNA, 15 bp, Homo sapiens
taaatggcctctgct

SEQ ID NO: 887729 - DNA, 15 bp, Homo sapiens
aaatggcctctgctc

SEQ ID NO: 887730 - DNA, 15 bp, Homo sapiens
aatggcctctgctct

SEQ ID NO: 887731 - DNA, 15 bp, Homo sapiens
atggcctctgctctg

SEQ ID NO: 887732 - DNA, 15 bp, Homo sapiens
tggcctctgctctga

SEQ ID NO: 887733 - DNA, 15 bp, Homo sapiens
ggcctctgctctgag

SEQ ID NO: 887734 - DNA, 15 bp, Homo sapiens
gcctctgctctgaga

SEQ ID NO: 887735 - DNA, 15 bp, Homo sapiens
cctctgctctgagat

SEQ ID NO: 887736 - DNA, 15 bp, Homo sapiens
ctctgctctgagatt

SEQ ID NO: 887737 - DNA, 15 bp, Homo sapiens
tctgctctgagattg

SEQ ID NO: 887738 - DNA, 15 bp, Homo sapiens
ctgctctgagattga

SEQ ID NO: 887739 - DNA, 15 bp, Homo sapiens
tgctctgagattgag

SEQ ID NO: 887740 - DNA, 15 bp, Homo sapiens
gctctgagattgagt

SEQ ID NO: 887741 - DNA, 15 bp, Homo sapiens
ctctgagattgagta

SEQ ID NO: 887742 - DNA, 15 bp, Homo sapiens
tctgagattgagtag

SEQ ID NO: 887743 - DNA, 15 bp, Homo sapiens
ctgagattgagtagc

SEQ ID NO: 887744 - DNA, 15 bp, Homo sapiens
tgagattgagtagct

SEQ ID NO: 887745 - DNA, 15 bp, Homo sapiens
gagattgagtagctc

SEQ ID NO: 887746 - DNA, 15 bp, Homo sapiens
agattgagtagctct

SEQ ID NO: 887747 - DNA, 15 bp, Homo sapiens
gattgagtagctctt

SEQ ID NO: 887748 - DNA, 15 bp, Homo sapiens
attgagtagctctta

SEQ ID NO: 887749 - DNA, 15 bp, Homo sapiens
ttgagtagctcttac

SEQ ID NO: 887750 - DNA, 15 bp, Homo sapiens
tgagtagctcttaca

SEQ ID NO: 887751 - DNA, 15 bp, Homo sapiens
gagtagctcttacaa

SEQ ID NO: 887752 - DNA, 15 bp, Homo sapiens
agtagctcttacaag

SEQ ID NO: 887753 - DNA, 15 bp, Homo sapiens
gtagctcttacaaga

SEQ ID NO: 887754 - DNA, 15 bp, Homo sapiens
tagctcttacaagat

SEQ ID NO: 887755 - DNA, 15 bp, Homo sapiens
agctcttacaagatg

SEQ ID NO: 887756 - DNA, 15 bp, Homo sapiens
gctcttacaagatgg

SEQ ID NO: 887757 - DNA, 15 bp, Homo sapiens
ctcttacaagatggt

SEQ ID NO: 887758 - DNA, 15 bp, Homo sapiens
tcttacaagatggtg

SEQ ID NO: 887759 - DNA, 15 bp, Homo sapiens
cttacaagatggtgg

SEQ ID NO: 887760 - DNA, 15 bp, Homo sapiens
ttacaagatggtggg

SEQ ID NO: 887761 - DNA, 15 bp, Homo sapiens
tacaagatggtggga

SEQ ID NO: 887762 - DNA, 15 bp, Homo sapiens
acaagatggtgggag

SEQ ID NO: 887763 - DNA, 15 bp, Homo sapiens
caagatggtgggagg

SEQ ID NO: 887764 - DNA, 15 bp, Homo sapiens
aagatggtgggaggc

SEQ ID NO: 887765 - DNA, 15 bp, Homo sapiens
agatggtgggaggct

SEQ ID NO: 887766 - DNA, 15 bp, Homo sapiens
gatggtgggaggctg

SEQ ID NO: 887767 - DNA, 15 bp, Homo sapiens
atggtgggaggctga

SEQ ID NO: 887768 - DNA, 15 bp, Homo sapiens
tggtgggaggctgaa

SEQ ID NO: 887769 - DNA, 15 bp, Homo sapiens
ggtgggaggctgaaa

SEQ ID NO: 887770 - DNA, 15 bp, Homo sapiens
gtgggaggctgaaat

SEQ ID NO: 887771 - DNA, 15 bp, Homo sapiens
tgggaggctgaaata

SEQ ID NO: 887772 - DNA, 15 bp, Homo sapiens
gggaggctgaaataa

SEQ ID NO: 887773 - DNA, 15 bp, Homo sapiens
ggaggctgaaataac

SEQ ID NO: 887774 - DNA, 15 bp, Homo sapiens
gaggctgaaataaca

SEQ ID NO: 887775 - DNA, 15 bp, Homo sapiens
aggctgaaataacag

SEQ ID NO: 887776 - DNA, 15 bp, Homo sapiens
tgaaataacagagaa

SEQ ID NO: 887777 - DNA, 15 bp, Homo sapiens
gaaataacagagaac

SEQ ID NO: 887778 - DNA, 15 bp, Homo sapiens
aaataacagagaact

SEQ ID NO: 887779 - DNA, 15 bp, Homo sapiens
aataacagagaacta

SEQ ID NO: 887780 - DNA, 15 bp, Homo sapiens
ataacagagaactag

SEQ ID NO: 887781 - DNA, 15 bp, Homo sapiens
taacagagaactagg

SEQ ID NO: 887782 - DNA, 15 bp, Homo sapiens
aacagagaactagga

SEQ ID NO: 887783 - DNA, 15 bp, Homo sapiens
acagagaactaggaa

SEQ ID NO: 887784 - DNA, 15 bp, Homo sapiens
cagagaactaggaag

SEQ ID NO: 887785 - DNA, 15 bp, Homo sapiens
agagaactaggaagc

SEQ ID NO: 887786 - DNA, 15 bp, Homo sapiens
gagaactaggaagcc

SEQ ID NO: 887787 - DNA, 15 bp, Homo sapiens
gaactaggaagcctg

SEQ ID NO: 887788 - DNA, 15 bp, Homo sapiens
aactaggaagcctga

SEQ ID NO: 887789 - DNA, 15 bp, Homo sapiens
actaggaagcctgaa

SEQ ID NO: 887790 - DNA, 15 bp, Homo sapiens
ctaggaagcctgaaa

SEQ ID NO: 887791 - DNA, 15 bp, Homo sapiens
taggaagcctgaaaa

SEQ ID NO: 887792 - DNA, 15 bp, Homo sapiens
aggaagcctgaaaac

SEQ ID NO: 887793 - DNA, 15 bp, Homo sapiens
ggaagcctgaaaact

SEQ ID NO: 887794 - DNA, 15 bp, Homo sapiens
gaagcctgaaaactc

SEQ ID NO: 887795 - DNA, 15 bp, Homo sapiens
aagcctgaaaactct

SEQ ID NO: 887796 - DNA, 15 bp, Homo sapiens
agcctgaaaactctc

SEQ ID NO: 887797 - DNA, 15 bp, Homo sapiens
gcctgaaaactctct

SEQ ID NO: 887798 - DNA, 15 bp, Homo sapiens
cctgaaaactctctc

SEQ ID NO: 887799 - DNA, 15 bp, Homo sapiens
ctgaaaactctctct

SEQ ID NO: 887800 - DNA, 15 bp, Homo sapiens
tgaaaactctctctg

SEQ ID NO: 887801 - DNA, 15 bp, Homo sapiens
gaaaactctctctgg

SEQ ID NO: 887802 - DNA, 15 bp, Homo sapiens
aaaactctctctggg

SEQ ID NO: 887803 - DNA, 15 bp, Homo sapiens
aaactctctctgggc

SEQ ID NO: 887804 - DNA, 15 bp, Homo sapiens
aactctctctgggcc

SEQ ID NO: 887805 - DNA, 15 bp, Homo sapiens
actctctctgggccc

SEQ ID NO: 887806 - DNA, 15 bp, Homo sapiens
ctctctctgggccct

SEQ ID NO: 887807 - DNA, 15 bp, Homo sapiens
tctctctgggccctg

SEQ ID NO: 887808 - DNA, 15 bp, Homo sapiens
ctctctgggccctgt

SEQ ID NO: 887809 - DNA, 15 bp, Homo sapiens
tctctgggccctgtt

SEQ ID NO: 887810 - DNA, 15 bp, Homo sapiens
ctctgggccctgttc

SEQ ID NO: 887811 - DNA, 15 bp, Homo sapiens
tctgggccctgttct

SEQ ID NO: 887812 - DNA, 15 bp, Homo sapiens
ctgggccctgttctt

SEQ ID NO: 887813 - DNA, 15 bp, Homo sapiens
tgggccctgttcttt

SEQ ID NO: 887814 - DNA, 15 bp, Homo sapiens
gggccctgttctttt

SEQ ID NO: 887815 - DNA, 15 bp, Homo sapiens
ggccctgttctttta

SEQ ID NO: 887816 - DNA, 15 bp, Homo sapiens
gccctgttcttttaa

SEQ ID NO: 887817 - DNA, 15 bp, Homo sapiens
ccctgttcttttaaa

SEQ ID NO: 887818 - DNA, 15 bp, Homo sapiens
cctgttcttttaaag

SEQ ID NO: 887819 - DNA, 15 bp, Homo sapiens
ctgttcttttaaagc

SEQ ID NO: 887820 - DNA, 15 bp, Homo sapiens
tgttcttttaaagcc

SEQ ID NO: 887821 - DNA, 15 bp, Homo sapiens
gttcttttaaagccc

SEQ ID NO: 887822 - DNA, 15 bp, Homo sapiens
ttcttttaaagcccc

SEQ ID NO: 887823 - DNA, 15 bp, Homo sapiens
tcttttaaagcccct

SEQ ID NO: 887824 - DNA, 15 bp, Homo sapiens
cttttaaagcccctt

SEQ ID NO: 887825 - DNA, 15 bp, Homo sapiens
ttttaaagccccttt

SEQ ID NO: 887826 - DNA, 15 bp, Homo sapiens
tttaaagcccctttg

SEQ ID NO: 887827 - DNA, 15 bp, Homo sapiens
ttaaagcccctttgc

SEQ ID NO: 887828 - DNA, 15 bp, Homo sapiens
taaagcccctttgct

SEQ ID NO: 887829 - DNA, 15 bp, Homo sapiens
aaagcccctttgctt

SEQ ID NO: 887830 - DNA, 15 bp, Homo sapiens
aagcccctttgcttt

SEQ ID NO: 887831 - DNA, 15 bp, Homo sapiens
agcccctttgctttg

SEQ ID NO: 887832 - DNA, 15 bp, Homo sapiens
gcccctttgctttgt

SEQ ID NO: 887833 - DNA, 15 bp, Homo sapiens
cccctttgctttgta

SEQ ID NO: 887834 - DNA, 15 bp, Homo sapiens
ccctttgctttgtaa

SEQ ID NO: 887835 - DNA, 15 bp, Homo sapiens
cctttgctttgtaac

SEQ ID NO: 887836 - DNA, 15 bp, Homo sapiens
ctttgctttgtaacc

SEQ ID NO: 887837 - DNA, 15 bp, Homo sapiens
tttgctttgtaacct

SEQ ID NO: 887838 - DNA, 15 bp, Homo sapiens
ttgctttgtaacctt

SEQ ID NO: 887839 - DNA, 15 bp, Homo sapiens
tgctttgtaaccttg

SEQ ID NO: 887840 - DNA, 15 bp, Homo sapiens
gctttgtaaccttgg

SEQ ID NO: 887841 - DNA, 15 bp, Homo sapiens
ctttgtaaccttggc

SEQ ID NO: 887842 - DNA, 15 bp, Homo sapiens
tttgtaaccttggcc

SEQ ID NO: 887843 - DNA, 15 bp, Homo sapiens
ttgtaaccttggcct

SEQ ID NO: 887844 - DNA, 15 bp, Homo sapiens
tgtaaccttggcctg

SEQ ID NO: 887845 - DNA, 15 bp, Homo sapiens
gtaaccttggcctga

SEQ ID NO: 887846 - DNA, 15 bp, Homo sapiens
taaccttggcctgat

SEQ ID NO: 887847 - DNA, 15 bp, Homo sapiens
aaccttggcctgatc

SEQ ID NO: 887848 - DNA, 15 bp, Homo sapiens
accttggcctgatca

SEQ ID NO: 887849 - DNA, 15 bp, Homo sapiens
ccttggcctgatcac

SEQ ID NO: 887850 - DNA, 15 bp, Homo sapiens
cttggcctgatcact

SEQ ID NO: 887851 - DNA, 15 bp, Homo sapiens
ttggcctgatcactt

SEQ ID NO: 887852 - DNA, 15 bp, Homo sapiens
tggcctgatcacttc

SEQ ID NO: 887853 - DNA, 15 bp, Homo sapiens
ggcctgatcacttcc

SEQ ID NO: 887854 - DNA, 15 bp, Homo sapiens
gcctgatcacttcca

SEQ ID NO: 887855 - DNA, 15 bp, Homo sapiens
cctgatcacttccat

SEQ ID NO: 887856 - DNA, 15 bp, Homo sapiens
ctgatcacttccatc

SEQ ID NO: 887857 - DNA, 15 bp, Homo sapiens
tgatcacttccatct

SEQ ID NO: 887858 - DNA, 15 bp, Homo sapiens
gatcacttccatctc

SEQ ID NO: 887859 - DNA, 15 bp, Homo sapiens
atcacttccatctca

SEQ ID NO: 887860 - DNA, 15 bp, Homo sapiens
tcacttccatctcag

SEQ ID NO: 887861 - DNA, 15 bp, Homo sapiens
cacttccatctcaga

SEQ ID NO: 887862 - DNA, 15 bp, Homo sapiens
acttccatctcagaa

SEQ ID NO: 887863 - DNA, 15 bp, Homo sapiens
cttccatctcagaac

SEQ ID NO: 887864 - DNA, 15 bp, Homo sapiens
ttccatctcagaact

SEQ ID NO: 887865 - DNA, 15 bp, Homo sapiens
tccatctcagaactt

SEQ ID NO: 887866 - DNA, 15 bp, Homo sapiens
ccatctcagaacttc

SEQ ID NO: 887867 - DNA, 15 bp, Homo sapiens
catctcagaacttca

SEQ ID NO: 887868 - DNA, 15 bp, Homo sapiens
atctcagaacttcag

SEQ ID NO: 887869 - DNA, 15 bp, Homo sapiens
tctcagaacttcagt

SEQ ID NO: 887870 - DNA, 15 bp, Homo sapiens
ctcagaacttcagtc

SEQ ID NO: 887871 - DNA, 15 bp, Homo sapiens
tcagaacttcagtct

SEQ ID NO: 887872 - DNA, 15 bp, Homo sapiens
cagaacttcagtctc

SEQ ID NO: 887873 - DNA, 15 bp, Homo sapiens
agaacttcagtctcc

SEQ ID NO: 887874 - DNA, 15 bp, Homo sapiens
gaacttcagtctcct

SEQ ID NO: 887875 - DNA, 15 bp, Homo sapiens
aacttcagtctcctt

SEQ ID NO: 887876 - DNA, 15 bp, Homo sapiens
acttcagtctcctta

SEQ ID NO: 887877 - DNA, 15 bp, Homo sapiens
cttcagtctccttaa

SEQ ID NO: 887878 - DNA, 15 bp, Homo sapiens
ttcagtctccttaac

SEQ ID NO: 887879 - DNA, 15 bp, Homo sapiens
tcagtctccttaact

SEQ ID NO: 887880 - DNA, 15 bp, Homo sapiens
cagtctccttaactg

SEQ ID NO: 887881 - DNA, 15 bp, Homo sapiens
agtctccttaactgc

SEQ ID NO: 887882 - DNA, 15 bp, Homo sapiens
gtctccttaactgcc

SEQ ID NO: 887883 - DNA, 15 bp, Homo sapiens
tctccttaactgcca

SEQ ID NO: 887884 - DNA, 15 bp, Homo sapiens
ctccttaactgccaa

SEQ ID NO: 887885 - DNA, 15 bp, Homo sapiens
tccttaactgccaaa

SEQ ID NO: 887886 - DNA, 15 bp, Homo sapiens
ccttaactgccaaat

SEQ ID NO: 887887 - DNA, 15 bp, Homo sapiens
cttaactgccaaatc

SEQ ID NO: 887888 - DNA, 15 bp, Homo sapiens
ttaactgccaaatca

SEQ ID NO: 887889 - DNA, 15 bp, Homo sapiens
taactgccaaatcaa

SEQ ID NO: 887890 - DNA, 15 bp, Homo sapiens
aactgccaaatcaag

SEQ ID NO: 887891 - DNA, 15 bp, Homo sapiens
actgccaaatcaagt

SEQ ID NO: 887892 - DNA, 15 bp, Homo sapiens
ctgccaaatcaagtg

SEQ ID NO: 887893 - DNA, 15 bp, Homo sapiens
tgccaaatcaagtgg

SEQ ID NO: 887894 - DNA, 15 bp, Homo sapiens
gccaaatcaagtgga

SEQ ID NO: 887895 - DNA, 15 bp, Homo sapiens
ccaaatcaagtggat

SEQ ID NO: 887896 - DNA, 15 bp, Homo sapiens
caaatcaagtggatg

SEQ ID NO: 887897 - DNA, 15 bp, Homo sapiens
aaatcaagtggatgt

SEQ ID NO: 887898 - DNA, 15 bp, Homo sapiens
aatcaagtggatgtt

SEQ ID NO: 887899 - DNA, 15 bp, Homo sapiens
atcaagtggatgttc

SEQ ID NO: 887900 - DNA, 15 bp, Homo sapiens
tcaagtggatgttca

SEQ ID NO: 887901 - DNA, 15 bp, Homo sapiens
caagtggatgttcaa

SEQ ID NO: 887902 - DNA, 15 bp, Homo sapiens
aagtggatgttcaaa

SEQ ID NO: 887903 - DNA, 15 bp, Homo sapiens
agtggatgttcaaag

SEQ ID NO: 887904 - DNA, 15 bp, Homo sapiens
gtggatgttcaaaga

SEQ ID NO: 887905 - DNA, 15 bp, Homo sapiens
tggatgttcaaagac

SEQ ID NO: 887906 - DNA, 15 bp, Homo sapiens
ggatgttcaaagacc

SEQ ID NO: 887907 - DNA, 15 bp, Homo sapiens
gatgttcaaagacct

SEQ ID NO: 887908 - DNA, 15 bp, Homo sapiens
atgttcaaagacctg

SEQ ID NO: 887909 - DNA, 15 bp, Homo sapiens
tgttcaaagacctgt

SEQ ID NO: 887910 - DNA, 15 bp, Homo sapiens
gttcaaagacctgtc

SEQ ID NO: 887911 - DNA, 15 bp, Homo sapiens
ttcaaagacctgtca

SEQ ID NO: 887912 - DNA, 15 bp, Homo sapiens
tcaaagacctgtcag

SEQ ID NO: 887913 - DNA, 15 bp, Homo sapiens
caaagacctgtcaga

SEQ ID NO: 887914 - DNA, 15 bp, Homo sapiens
aaagacctgtcagac

SEQ ID NO: 887915 - DNA, 15 bp, Homo sapiens
aagacctgtcagacc

SEQ ID NO: 887916 - DNA, 15 bp, Homo sapiens
agacctgtcagaccc

SEQ ID NO: 887917 - DNA, 15 bp, Homo sapiens
gacctgtcagaccct

SEQ ID NO: 887918 - DNA, 15 bp, Homo sapiens
acctgtcagaccctt

SEQ ID NO: 887919 - DNA, 15 bp, Homo sapiens
cctgtcagaccctta

SEQ ID NO: 887920 - DNA, 15 bp, Homo sapiens
ctgtcagacccttac

SEQ ID NO: 887921 - DNA, 15 bp, Homo sapiens
tgtcagacccttaca

SEQ ID NO: 887922 - DNA, 15 bp, Homo sapiens
gtcagacccttacag

SEQ ID NO: 887923 - DNA, 15 bp, Homo sapiens
tcagacccttacaga

SEQ ID NO: 887924 - DNA, 15 bp, Homo sapiens
cagacccttacagat

SEQ ID NO: 887925 - DNA, 15 bp, Homo sapiens
agacccttacagatg

SEQ ID NO: 887926 - DNA, 15 bp, Homo sapiens
gacccttacagatga

SEQ ID NO: 887927 - DNA, 15 bp, Homo sapiens
acccttacagatgaa

SEQ ID NO: 887928 - DNA, 15 bp, Homo sapiens
cccttacagatgaac

SEQ ID NO: 887929 - DNA, 15 bp, Homo sapiens
ccttacagatgaacc

SEQ ID NO: 887930 - DNA, 15 bp, Homo sapiens
cttacagatgaacca

SEQ ID NO: 887931 - DNA, 15 bp, Homo sapiens
ttacagatgaaccag

SEQ ID NO: 887932 - DNA, 15 bp, Homo sapiens
tacagatgaaccagc

SEQ ID NO: 887933 - DNA, 15 bp, Homo sapiens
acagatgaaccagct

SEQ ID NO: 887934 - DNA, 15 bp, Homo sapiens
cagatgaaccagctg

SEQ ID NO: 887935 - DNA, 15 bp, Homo sapiens
agatgaaccagctgt

SEQ ID NO: 887936 - DNA, 15 bp, Homo sapiens
gatgaaccagctgtg

SEQ ID NO: 887937 - DNA, 15 bp, Homo sapiens
atgaaccagctgtgt

SEQ ID NO: 887938 - DNA, 15 bp, Homo sapiens
tgaaccagctgtgtc

SEQ ID NO: 887939 - DNA, 15 bp, Homo sapiens
gaaccagctgtgtcc

SEQ ID NO: 887940 - DNA, 15 bp, Homo sapiens
aaccagctgtgtcca

SEQ ID NO: 887941 - DNA, 15 bp, Homo sapiens
accagctgtgtccat

SEQ ID NO: 887942 - DNA, 15 bp, Homo sapiens
ccagctgtgtccatc

SEQ ID NO: 887943 - DNA, 15 bp, Homo sapiens
cagctgtgtccatcc

SEQ ID NO: 887944 - DNA, 15 bp, Homo sapiens
agctgtgtccatcca

SEQ ID NO: 887945 - DNA, 15 bp, Homo sapiens
gctgtgtccatccat

SEQ ID NO: 887946 - DNA, 15 bp, Homo sapiens
ctgtgtccatccatc

SEQ ID NO: 887947 - DNA, 15 bp, Homo sapiens
tgtgtccatccatca

SEQ ID NO: 887948 - DNA, 15 bp, Homo sapiens
gtgtccatccatcat

SEQ ID NO: 887949 - DNA, 15 bp, Homo sapiens
tgtccatccatcatg

SEQ ID NO: 887950 - DNA, 15 bp, Homo sapiens
gtccatccatcatgt

SEQ ID NO: 887951 - DNA, 15 bp, Homo sapiens
tccatccatcatgtt

SEQ ID NO: 887952 - DNA, 15 bp, Homo sapiens
ccatccatcatgttc

SEQ ID NO: 887953 - DNA, 15 bp, Homo sapiens
catccatcatgttca

SEQ ID NO: 887954 - DNA, 15 bp, Homo sapiens
atccatcatgttcat

SEQ ID NO: 887955 - DNA, 15 bp, Homo sapiens
tccatcatgttcatc

SEQ ID NO: 887956 - DNA, 15 bp, Homo sapiens
ccatcatgttcatca

SEQ ID NO: 887957 - DNA, 15 bp, Homo sapiens
catcatgttcatcag

SEQ ID NO: 887958 - DNA, 15 bp, Homo sapiens
atcatgttcatcagc

SEQ ID NO: 887959 - DNA, 15 bp, Homo sapiens
tcatgttcatcagct

SEQ ID NO: 887960 - DNA, 15 bp, Homo sapiens
catgttcatcagctg

SEQ ID NO: 887961 - DNA, 15 bp, Homo sapiens
atgttcatcagctgc

SEQ ID NO: 887962 - DNA, 15 bp, Homo sapiens
tgttcatcagctgct

SEQ ID NO: 887963 - DNA, 15 bp, Homo sapiens
gttcatcagctgctc

SEQ ID NO: 887964 - DNA, 15 bp, Homo sapiens
ttcatcagctgctct

SEQ ID NO: 887965 - DNA, 15 bp, Homo sapiens
tcatcagctgctctc

SEQ ID NO: 887966 - DNA, 15 bp, Homo sapiens
catcagctgctctca

SEQ ID NO: 887967 - DNA, 15 bp, Homo sapiens
atcagctgctctcaa

SEQ ID NO: 887968 - DNA, 15 bp, Homo sapiens
tcagctgctctcaac

SEQ ID NO: 887969 - DNA, 15 bp, Homo sapiens
cagctgctctcaacc

SEQ ID NO: 887970 - DNA, 15 bp, Homo sapiens
agctgctctcaaccc

SEQ ID NO: 887971 - DNA, 15 bp, Homo sapiens
gctgctctcaaccca

SEQ ID NO: 887972 - DNA, 15 bp, Homo sapiens
ctgctctcaacccat

SEQ ID NO: 887973 - DNA, 15 bp, Homo sapiens
tgctctcaacccata

SEQ ID NO: 887974 - DNA, 15 bp, Homo sapiens
gctctcaacccatag

SEQ ID NO: 887975 - DNA, 15 bp, Homo sapiens
ctctcaacccataga

SEQ ID NO: 887976 - DNA, 15 bp, Homo sapiens
tctcaacccatagag

SEQ ID NO: 887977 - DNA, 15 bp, Homo sapiens
ctcaacccatagaga

SEQ ID NO: 887978 - DNA, 15 bp, Homo sapiens
tcaacccatagagat

SEQ ID NO: 887979 - DNA, 15 bp, Homo sapiens
caacccatagagatc

SEQ ID NO: 887980 - DNA, 15 bp, Homo sapiens
aacccatagagatca

SEQ ID NO: 887981 - DNA, 15 bp, Homo sapiens
acccatagagatcac

SEQ ID NO: 887982 - DNA, 15 bp, Homo sapiens
cccatagagatcaca

SEQ ID NO: 887983 - DNA, 15 bp, Homo sapiens
ccatagagatcacat

SEQ ID NO: 887984 - DNA, 15 bp, Homo sapiens
catagagatcacatg

SEQ ID NO: 887985 - DNA, 15 bp, Homo sapiens
atagagatcacatga

SEQ ID NO: 887986 - DNA, 15 bp, Homo sapiens
tagagatcacatgag

SEQ ID NO: 887987 - DNA, 15 bp, Homo sapiens
agagatcacatgagg

SEQ ID NO: 887988 - DNA, 15 bp, Homo sapiens
gagatcacatgaggt

SEQ ID NO: 887989 - DNA, 15 bp, Homo sapiens
agatcacatgaggtt

SEQ ID NO: 887990 - DNA, 15 bp, Homo sapiens
gatcacatgaggttt

SEQ ID NO: 887991 - DNA, 15 bp, Homo sapiens
atcacatgaggtttc

SEQ ID NO: 887992 - DNA, 15 bp, Homo sapiens
tcacatgaggtttcg

SEQ ID NO: 887993 - DNA, 15 bp, Homo sapiens
cacatgaggtttcga

SEQ ID NO: 887994 - DNA, 15 bp, Homo sapiens
acatgaggtttcgag

SEQ ID NO: 887995 - DNA, 15 bp, Homo sapiens
catgaggtttcgaga

SEQ ID NO: 887996 - DNA, 15 bp, Homo sapiens
atgaggtttcgagat

SEQ ID NO: 887997 - DNA, 15 bp, Homo sapiens
tgaggtttcgagatt

SEQ ID NO: 887998 - DNA, 15 bp, Homo sapiens
gaggtttcgagattt

SEQ ID NO: 887999 - DNA, 15 bp, Homo sapiens
aggtttcgagatttc

SEQ ID NO: 888000 - DNA, 15 bp, Homo sapiens
ggtttcgagatttca

SEQ ID NO: 888001 - DNA, 15 bp, Homo sapiens
gtttcgagatttcag

SEQ ID NO: 888002 - DNA, 15 bp, Homo sapiens
tttcgagatttcagg

SEQ ID NO: 888003 - DNA, 15 bp, Homo sapiens
ttcgagatttcaggg

SEQ ID NO: 888004 - DNA, 15 bp, Homo sapiens
tcgagatttcagggt

SEQ ID NO: 888005 - DNA, 15 bp, Homo sapiens
cgagatttcagggtc

SEQ ID NO: 888006 - DNA, 15 bp, Homo sapiens
gagatttcagggtct

SEQ ID NO: 888007 - DNA, 15 bp, Homo sapiens
agatttcagggtctt

SEQ ID NO: 888008 - DNA, 15 bp, Homo sapiens
gatttcagggtcttt

SEQ ID NO: 888009 - DNA, 15 bp, Homo sapiens
atttcagggtcttta

SEQ ID NO: 888010 - DNA, 15 bp, Homo sapiens
tttcagggtctttaa

SEQ ID NO: 888011 - DNA, 15 bp, Homo sapiens
ttcagggtctttaac

SEQ ID NO: 888012 - DNA, 15 bp, Homo sapiens
tcagggtctttaaca

SEQ ID NO: 888013 - DNA, 15 bp, Homo sapiens
cagggtctttaacat

SEQ ID NO: 888014 - DNA, 15 bp, Homo sapiens
agggtctttaacatc

SEQ ID NO: 888015 - DNA, 15 bp, Homo sapiens
gggtctttaacatca

SEQ ID NO: 888016 - DNA, 15 bp, Homo sapiens
ggtctttaacatcaa

SEQ ID NO: 888017 - DNA, 15 bp, Homo sapiens
gtctttaacatcaat

SEQ ID NO: 888018 - DNA, 15 bp, Homo sapiens
tctttaacatcaatt

SEQ ID NO: 888019 - DNA, 15 bp, Homo sapiens
ctttaacatcaattt

SEQ ID NO: 888020 - DNA, 15 bp, Homo sapiens
tttaacatcaattta

SEQ ID NO: 888021 - DNA, 15 bp, Homo sapiens
ttaacatcaatttat

SEQ ID NO: 888022 - DNA, 15 bp, Homo sapiens
taacatcaatttata

SEQ ID NO: 888023 - DNA, 15 bp, Homo sapiens
aacatcaatttataa

SEQ ID NO: 888024 - DNA, 15 bp, Homo sapiens
acatcaatttataat

SEQ ID NO: 888025 - DNA, 15 bp, Homo sapiens
catcaatttataatt

SEQ ID NO: 888026 - DNA, 15 bp, Homo sapiens
atcaatttataattt

SEQ ID NO: 888027 - DNA, 15 bp, Homo sapiens
tcaatttataattta

SEQ ID NO: 888028 - DNA, 15 bp, Homo sapiens
caatttataatttaa

SEQ ID NO: 888029 - DNA, 15 bp, Homo sapiens
aatttataatttaaa

SEQ ID NO: 888030 - DNA, 15 bp, Homo sapiens
atttataatttaaaa

SEQ ID NO: 888031 - DNA, 15 bp, Homo sapiens
tttataatttaaaaa

SEQ ID NO: 888032 - DNA, 15 bp, Homo sapiens
ttataatttaaaaaa

SEQ ID NO: 888033 - DNA, 15 bp, Homo sapiens
tataatttaaaaaat

SEQ ID NO: 888034 - DNA, 15 bp, Homo sapiens
ataatttaaaaaatt

SEQ ID NO: 888035 - DNA, 15 bp, Homo sapiens
taatttaaaaaattt

SEQ ID NO: 888036 - DNA, 15 bp, Homo sapiens
aatttaaaaaatttt

SEQ ID NO: 888037 - DNA, 15 bp, Homo sapiens
atttaaaaaattttt

SEQ ID NO: 888038 - DNA, 15 bp, Homo sapiens
tttaaaaaatttttt

SEQ ID NO: 888039 - DNA, 15 bp, Homo sapiens
ttaaaaaattttttt

SEQ ID NO: 888040 - DNA, 15 bp, Homo sapiens
taaaaaatttttttc

SEQ ID NO: 888041 - DNA, 15 bp, Homo sapiens
aaaaaatttttttca

SEQ ID NO: 888042 - DNA, 15 bp, Homo sapiens
aaaaatttttttcat

SEQ ID NO: 888043 - DNA, 15 bp, Homo sapiens
aaaatttttttcatt

SEQ ID NO: 888044 - DNA, 15 bp, Homo sapiens
aaatttttttcatta

SEQ ID NO: 888045 - DNA, 15 bp, Homo sapiens
aatttttttcattac

SEQ ID NO: 888046 - DNA, 15 bp, Homo sapiens
atttttttcattaca

SEQ ID NO: 888047 - DNA, 15 bp, Homo sapiens
tttttttcattacat

SEQ ID NO: 888048 - DNA, 15 bp, Homo sapiens
ttttttcattacata

SEQ ID NO: 888049 - DNA, 15 bp, Homo sapiens
tttttcattacataa

SEQ ID NO: 888050 - DNA, 15 bp, Homo sapiens
ttttcattacataaa

SEQ ID NO: 888051 - DNA, 15 bp, Homo sapiens
tttcattacataaat

SEQ ID NO: 888052 - DNA, 15 bp, Homo sapiens
ttcattacataaata

SEQ ID NO: 888053 - DNA, 15 bp, Homo sapiens
tcattacataaataa

SEQ ID NO: 888054 - DNA, 15 bp, Homo sapiens
cattacataaataaa

SEQ ID NO: 888055 - DNA, 15 bp, Homo sapiens
attacataaataaaa

SEQ ID NO: 888056 - DNA, 15 bp, Homo sapiens
ttacataaataaaat

SEQ ID NO: 888057 - DNA, 15 bp, Homo sapiens
tacataaataaaatg

SEQ ID NO: 888058 - DNA, 15 bp, Homo sapiens
acataaataaaatgt

SEQ ID NO: 888059 - DNA, 15 bp, Homo sapiens
cataaataaaatgtg

SEQ ID NO: 888060 - DNA, 15 bp, Homo sapiens
ataaataaaatgtgt

SEQ ID NO: 888061 - DNA, 15 bp, Homo sapiens
taaataaaatgtgtt

SEQ ID NO: 888062 - DNA, 15 bp, Homo sapiens
aaataaaatgtgttt

SEQ ID NO: 888063 - DNA, 15 bp, Homo sapiens
aataaaatgtgttta

SEQ ID NO: 888064 - DNA, 15 bp, Homo sapiens
ataaaatgtgtttat

SEQ ID NO: 888065 - DNA, 15 bp, Homo sapiens
taaaatgtgtttatt

SEQ ID NO: 888066 - DNA, 15 bp, Homo sapiens
aaaatgtgtttattt

SEQ ID NO: 888067 - DNA, 15 bp, Homo sapiens
aaatgtgtttatttt

SEQ ID NO: 888068 - DNA, 15 bp, Homo sapiens
aatgtgtttatttta

SEQ ID NO: 888069 - DNA, 15 bp, Homo sapiens
atgtgtttattttag

SEQ ID NO: 888070 - DNA, 15 bp, Homo sapiens
tgtgtttattttaga

SEQ ID NO: 888071 - DNA, 15 bp, Homo sapiens
gtgtttattttagaa

SEQ ID NO: 888072 - DNA, 15 bp, Homo sapiens
tgtttattttagaaa

SEQ ID NO: 888073 - DNA, 15 bp, Homo sapiens
gtttattttagaaaa

SEQ ID NO: 888074 - DNA, 15 bp, Homo sapiens
tttattttagaaaat

SEQ ID NO: 888075 - DNA, 15 bp, Homo sapiens
ttattttagaaaatt

SEQ ID NO: 888076 - DNA, 15 bp, Homo sapiens
tattttagaaaattt

SEQ ID NO: 888077 - DNA, 15 bp, Homo sapiens
attttagaaaattta

SEQ ID NO: 888078 - DNA, 15 bp, Homo sapiens
ttttagaaaatttag

SEQ ID NO: 888079 - DNA, 15 bp, Homo sapiens
tttagaaaatttagc

SEQ ID NO: 888080 - DNA, 15 bp, Homo sapiens
ttagaaaatttagca

SEQ ID NO: 888081 - DNA, 15 bp, Homo sapiens
tagaaaatttagcaa

SEQ ID NO: 888082 - DNA, 15 bp, Homo sapiens
agaaaatttagcaat

SEQ ID NO: 888083 - DNA, 15 bp, Homo sapiens
gaaaatttagcaatt

SEQ ID NO: 888084 - DNA, 15 bp, Homo sapiens
aaaatttagcaatta

SEQ ID NO: 888085 - DNA, 15 bp, Homo sapiens
aaatttagcaattat

SEQ ID NO: 888086 - DNA, 15 bp, Homo sapiens
aatttagcaattata

SEQ ID NO: 888087 - DNA, 15 bp, Homo sapiens
atttagcaattatag

SEQ ID NO: 888088 - DNA, 15 bp, Homo sapiens
tttagcaattataga

SEQ ID NO: 888089 - DNA, 15 bp, Homo sapiens
ttagcaattatagaa

SEQ ID NO: 888090 - DNA, 15 bp, Homo sapiens
tagcaattatagaaa

SEQ ID NO: 888091 - DNA, 15 bp, Homo sapiens
agcaattatagaaac

SEQ ID NO: 888092 - DNA, 15 bp, Homo sapiens
gcaattatagaaacc

SEQ ID NO: 888093 - DNA, 15 bp, Homo sapiens
caattatagaaacca

SEQ ID NO: 888094 - DNA, 15 bp, Homo sapiens
aattatagaaaccaa

SEQ ID NO: 888095 - DNA, 15 bp, Homo sapiens
attatagaaaccaaa

SEQ ID NO: 888096 - DNA, 15 bp, Homo sapiens
ttatagaaaccaaaa

SEQ ID NO: 888097 - DNA, 15 bp, Homo sapiens
tatagaaaccaaaaa

SEQ ID NO: 888098 - DNA, 15 bp, Homo sapiens
atagaaaccaaaaag

SEQ ID NO: 888099 - DNA, 15 bp, Homo sapiens
tagaaaccaaaaaga

SEQ ID NO: 888100 - DNA, 15 bp, Homo sapiens
agaaaccaaaaagaa

SEQ ID NO: 888101 - DNA, 15 bp, Homo sapiens
gaaaccaaaaagaaa

SEQ ID NO: 888102 - DNA, 15 bp, Homo sapiens
aaaccaaaaagaaaa

SEQ ID NO: 888103 - DNA, 15 bp, Homo sapiens
aaccaaaaagaaaat

SEQ ID NO: 888104 - DNA, 15 bp, Homo sapiens
accaaaaagaaaatg

SEQ ID NO: 888105 - DNA, 15 bp, Homo sapiens
ccaaaaagaaaatgc

SEQ ID NO: 888106 - DNA, 15 bp, Homo sapiens
caaaaagaaaatgca

SEQ ID NO: 888107 - DNA, 15 bp, Homo sapiens
aaaaagaaaatgcac

SEQ ID NO: 888108 - DNA, 15 bp, Homo sapiens
aaaagaaaatgcaca

SEQ ID NO: 888109 - DNA, 15 bp, Homo sapiens
aaagaaaatgcacat

SEQ ID NO: 888110 - DNA, 15 bp, Homo sapiens
aagaaaatgcacatt

SEQ ID NO: 888111 - DNA, 15 bp, Homo sapiens
agaaaatgcacattc

SEQ ID NO: 888112 - DNA, 15 bp, Homo sapiens
gaaaatgcacattcc

SEQ ID NO: 888113 - DNA, 15 bp, Homo sapiens
aaaatgcacattccc

SEQ ID NO: 888114 - DNA, 15 bp, Homo sapiens
aaatgcacattccct

SEQ ID NO: 888115 - DNA, 15 bp, Homo sapiens
aatgcacattccctg

SEQ ID NO: 888116 - DNA, 15 bp, Homo sapiens
atgcacattccctgt

SEQ ID NO: 888117 - DNA, 15 bp, Homo sapiens
tgcacattccctgta

SEQ ID NO: 888118 - DNA, 15 bp, Homo sapiens
gcacattccctgtaa

SEQ ID NO: 888119 - DNA, 15 bp, Homo sapiens
cacattccctgtaat

SEQ ID NO: 888120 - DNA, 15 bp, Homo sapiens
acattccctgtaatt

SEQ ID NO: 888121 - DNA, 15 bp, Homo sapiens
cattccctgtaattt

SEQ ID NO: 888122 - DNA, 15 bp, Homo sapiens
attccctgtaatttt

SEQ ID NO: 888123 - DNA, 15 bp, Homo sapiens
ttccctgtaatttta

SEQ ID NO: 888124 - DNA, 15 bp, Homo sapiens
tccctgtaattttac

SEQ ID NO: 888125 - DNA, 15 bp, Homo sapiens
ccctgtaattttact

SEQ ID NO: 888126 - DNA, 15 bp, Homo sapiens
cctgtaattttactg

SEQ ID NO: 888127 - DNA, 15 bp, Homo sapiens
ctgtaattttactgc

SEQ ID NO: 888128 - DNA, 15 bp, Homo sapiens
tgtaattttactgct

SEQ ID NO: 888129 - DNA, 15 bp, Homo sapiens
gtaattttactgctc

SEQ ID NO: 888130 - DNA, 15 bp, Homo sapiens
taattttactgctca

SEQ ID NO: 888131 - DNA, 15 bp, Homo sapiens
aattttactgctcag

SEQ ID NO: 888132 - DNA, 15 bp, Homo sapiens
attttactgctcaga

SEQ ID NO: 888133 - DNA, 15 bp, Homo sapiens
ttttactgctcagac

SEQ ID NO: 888134 - DNA, 15 bp, Homo sapiens
tttactgctcagaca

SEQ ID NO: 888135 - DNA, 15 bp, Homo sapiens
ttactgctcagacat

SEQ ID NO: 888136 - DNA, 15 bp, Homo sapiens
tactgctcagacata

SEQ ID NO: 888137 - DNA, 15 bp, Homo sapiens
actgctcagacataa

SEQ ID NO: 888138 - DNA, 15 bp, Homo sapiens
ctgctcagacataag

SEQ ID NO: 888139 - DNA, 15 bp, Homo sapiens
tgctcagacataaga

SEQ ID NO: 888140 - DNA, 15 bp, Homo sapiens
gctcagacataagaa

SEQ ID NO: 888141 - DNA, 15 bp, Homo sapiens
ctcagacataagaaa

SEQ ID NO: 888142 - DNA, 15 bp, Homo sapiens
tcagacataagaaag

SEQ ID NO: 888143 - DNA, 15 bp, Homo sapiens
cagacataagaaagt

SEQ ID NO: 888144 - DNA, 15 bp, Homo sapiens
agacataagaaagtt

SEQ ID NO: 888145 - DNA, 15 bp, Homo sapiens
gacataagaaagttg

SEQ ID NO: 888146 - DNA, 15 bp, Homo sapiens
acataagaaagttga

SEQ ID NO: 888147 - DNA, 15 bp, Homo sapiens
cataagaaagttgac

SEQ ID NO: 888148 - DNA, 15 bp, Homo sapiens
ataagaaagttgaca

SEQ ID NO: 888149 - DNA, 15 bp, Homo sapiens
taagaaagttgacat

SEQ ID NO: 888150 - DNA, 15 bp, Homo sapiens
aagaaagttgacata

SEQ ID NO: 888151 - DNA, 15 bp, Homo sapiens
agaaagttgacatat

SEQ ID NO: 888152 - DNA, 15 bp, Homo sapiens
gaaagttgacatatt

SEQ ID NO: 888153 - DNA, 15 bp, Homo sapiens
aaagttgacatattt

SEQ ID NO: 888154 - DNA, 15 bp, Homo sapiens
aagttgacatatttg

SEQ ID NO: 888155 - DNA, 15 bp, Homo sapiens
agttgacatatttgt

SEQ ID NO: 888156 - DNA, 15 bp, Homo sapiens
gttgacatatttgtc

SEQ ID NO: 888157 - DNA, 15 bp, Homo sapiens
ttgacatatttgtct

SEQ ID NO: 888158 - DNA, 15 bp, Homo sapiens
tgacatatttgtctt

SEQ ID NO: 888159 - DNA, 15 bp, Homo sapiens
gacatatttgtctta

SEQ ID NO: 888160 - DNA, 15 bp, Homo sapiens
acatatttgtcttat

SEQ ID NO: 888161 - DNA, 15 bp, Homo sapiens
catatttgtcttatt

SEQ ID NO: 888162 - DNA, 15 bp, Homo sapiens
atatttgtcttattt

SEQ ID NO: 888163 - DNA, 15 bp, Homo sapiens
tatttgtcttatttc

SEQ ID NO: 888164 - DNA, 15 bp, Homo sapiens
atttgtcttatttcc

SEQ ID NO: 888165 - DNA, 15 bp, Homo sapiens
tttgtcttatttcca

SEQ ID NO: 888166 - DNA, 15 bp, Homo sapiens
ttgtcttatttccat

SEQ ID NO: 888167 - DNA, 15 bp, Homo sapiens
tgtcttatttccata

SEQ ID NO: 888168 - DNA, 15 bp, Homo sapiens
gtcttatttccatag

SEQ ID NO: 888169 - DNA, 15 bp, Homo sapiens
tcttatttccataga

SEQ ID NO: 888170 - DNA, 15 bp, Homo sapiens
cttatttccatagat

SEQ ID NO: 888171 - DNA, 15 bp, Homo sapiens
ttatttccatagata

SEQ ID NO: 888172 - DNA, 15 bp, Homo sapiens
tatttccatagatat

SEQ ID NO: 888173 - DNA, 15 bp, Homo sapiens
atttccatagatata

SEQ ID NO: 888174 - DNA, 15 bp, Homo sapiens
tttccatagatataa

SEQ ID NO: 888175 - DNA, 15 bp, Homo sapiens
ttccatagatataaa

SEQ ID NO: 888176 - DNA, 15 bp, Homo sapiens
tccatagatataaat

SEQ ID NO: 888177 - DNA, 15 bp, Homo sapiens
ccatagatataaata

SEQ ID NO: 888178 - DNA, 15 bp, Homo sapiens
catagatataaatac

SEQ ID NO: 888179 - DNA, 15 bp, Homo sapiens
atagatataaatact

SEQ ID NO: 888180 - DNA, 15 bp, Homo sapiens
tagatataaatactt

SEQ ID NO: 888181 - DNA, 15 bp, Homo sapiens
agatataaatacttt

SEQ ID NO: 888182 - DNA, 15 bp, Homo sapiens
gatataaatactttt

SEQ ID NO: 888183 - DNA, 15 bp, Homo sapiens
atataaatactttta

SEQ ID NO: 888184 - DNA, 15 bp, Homo sapiens
tataaatacttttac

SEQ ID NO: 888185 - DNA, 15 bp, Homo sapiens
ataaatacttttacc

SEQ ID NO: 888186 - DNA, 15 bp, Homo sapiens
taaatacttttaccc

SEQ ID NO: 888187 - DNA, 15 bp, Homo sapiens
aaatacttttaccct

SEQ ID NO: 888188 - DNA, 15 bp, Homo sapiens
aatacttttaccctc

SEQ ID NO: 888189 - DNA, 15 bp, Homo sapiens
atacttttaccctca

SEQ ID NO: 888190 - DNA, 15 bp, Homo sapiens
tacttttaccctcaa

SEQ ID NO: 888191 - DNA, 15 bp, Homo sapiens
acttttaccctcaaa

SEQ ID NO: 888192 - DNA, 15 bp, Homo sapiens
cttttaccctcaaaa

SEQ ID NO: 888193 - DNA, 15 bp, Homo sapiens
ttttaccctcaaaaa

SEQ ID NO: 888194 - DNA, 15 bp, Homo sapiens
tttaccctcaaaaaa

SEQ ID NO: 888195 - DNA, 15 bp, Homo sapiens
ttaccctcaaaaaaa

SEQ ID NO: 888196 - DNA, 15 bp, Homo sapiens
taccctcaaaaaaat

SEQ ID NO: 888197 - DNA, 15 bp, Homo sapiens
accctcaaaaaaatg

SEQ ID NO: 888198 - DNA, 15 bp, Homo sapiens
ccctcaaaaaaatgg

SEQ ID NO: 888199 - DNA, 15 bp, Homo sapiens
cctcaaaaaaatgga

SEQ ID NO: 888200 - DNA, 15 bp, Homo sapiens
ctcaaaaaaatggat

SEQ ID NO: 888201 - DNA, 15 bp, Homo sapiens
tcaaaaaaatggatc

SEQ ID NO: 888202 - DNA, 15 bp, Homo sapiens
caaaaaaatggatca

SEQ ID NO: 888203 - DNA, 15 bp, Homo sapiens
aaaaaaatggatcat

SEQ ID NO: 888204 - DNA, 15 bp, Homo sapiens
aaaaaatggatcata

SEQ ID NO: 888205 - DNA, 15 bp, Homo sapiens
aaaaatggatcatac

SEQ ID NO: 888206 - DNA, 15 bp, Homo sapiens
aaaatggatcataca

SEQ ID NO: 888207 - DNA, 15 bp, Homo sapiens
aaatggatcatacat

SEQ ID NO: 888208 - DNA, 15 bp, Homo sapiens
aatggatcatacatg

SEQ ID NO: 888209 - DNA, 15 bp, Homo sapiens
atggatcatacatgt

SEQ ID NO: 888210 - DNA, 15 bp, Homo sapiens
tggatcatacatgtc

SEQ ID NO: 888211 - DNA, 15 bp, Homo sapiens
ggatcatacatgtca

SEQ ID NO: 888212 - DNA, 15 bp, Homo sapiens
gatcatacatgtcag

SEQ ID NO: 888213 - DNA, 15 bp, Homo sapiens
atcatacatgtcagt

SEQ ID NO: 888214 - DNA, 15 bp, Homo sapiens
tcatacatgtcagta

SEQ ID NO: 888215 - DNA, 15 bp, Homo sapiens
catacatgtcagtat

SEQ ID NO: 888216 - DNA, 15 bp, Homo sapiens
atacatgtcagtatg

SEQ ID NO: 888217 - DNA, 15 bp, Homo sapiens
tacatgtcagtatgt

SEQ ID NO: 888218 - DNA, 15 bp, Homo sapiens
acatgtcagtatgtt

SEQ ID NO: 888219 - DNA, 15 bp, Homo sapiens
catgtcagtatgtta

SEQ ID NO: 888220 - DNA, 15 bp, Homo sapiens
atgtcagtatgttac

SEQ ID NO: 888221 - DNA, 15 bp, Homo sapiens
tgtcagtatgttacc

SEQ ID NO: 888222 - DNA, 15 bp, Homo sapiens
gtcagtatgttacct

SEQ ID NO: 888223 - DNA, 15 bp, Homo sapiens
tcagtatgttacctg

SEQ ID NO: 888224 - DNA, 15 bp, Homo sapiens
cagtatgttacctgt

SEQ ID NO: 888225 - DNA, 15 bp, Homo sapiens
agtatgttacctgtg

SEQ ID NO: 888226 - DNA, 15 bp, Homo sapiens
gtatgttacctgtgg

SEQ ID NO: 888227 - DNA, 15 bp, Homo sapiens
tatgttacctgtggt

SEQ ID NO: 888228 - DNA, 15 bp, Homo sapiens
atgttacctgtggtt

SEQ ID NO: 888229 - DNA, 15 bp, Homo sapiens
tgttacctgtggttt

SEQ ID NO: 888230 - DNA, 15 bp, Homo sapiens
gttacctgtggtttt

SEQ ID NO: 888231 - DNA, 15 bp, Homo sapiens
ttacctgtggttttt

SEQ ID NO: 888232 - DNA, 15 bp, Homo sapiens
tacctgtggtttttc

SEQ ID NO: 888233 - DNA, 15 bp, Homo sapiens
acctgtggtttttca

SEQ ID NO: 888234 - DNA, 15 bp, Homo sapiens
cctgtggtttttcac

SEQ ID NO: 888235 - DNA, 15 bp, Homo sapiens
ctgtggtttttcaca

SEQ ID NO: 888236 - DNA, 15 bp, Homo sapiens
tgtggtttttcacaa

SEQ ID NO: 888237 - DNA, 15 bp, Homo sapiens
gtggtttttcacaaa

SEQ ID NO: 888238 - DNA, 15 bp, Homo sapiens
tggtttttcacaaac

SEQ ID NO: 888239 - DNA, 15 bp, Homo sapiens
ggtttttcacaaaca

SEQ ID NO: 888240 - DNA, 15 bp, Homo sapiens
gtttttcacaaacat

SEQ ID NO: 888241 - DNA, 15 bp, Homo sapiens
tttttcacaaacatt

SEQ ID NO: 888242 - DNA, 15 bp, Homo sapiens
ttttcacaaacattt

SEQ ID NO: 888243 - DNA, 15 bp, Homo sapiens
tttcacaaacatttt

SEQ ID NO: 888244 - DNA, 15 bp, Homo sapiens
ttcacaaacatttta

SEQ ID NO: 888245 - DNA, 15 bp, Homo sapiens
tcacaaacattttat

SEQ ID NO: 888246 - DNA, 15 bp, Homo sapiens
cacaaacattttatc

SEQ ID NO: 888247 - DNA, 15 bp, Homo sapiens
acaaacattttatca

SEQ ID NO: 888248 - DNA, 15 bp, Homo sapiens
caaacattttatcat

SEQ ID NO: 888249 - DNA, 15 bp, Homo sapiens
aaacattttatcatg

SEQ ID NO: 888250 - DNA, 15 bp, Homo sapiens
aacattttatcatga

SEQ ID NO: 888251 - DNA, 15 bp, Homo sapiens
acattttatcatgac

SEQ ID NO: 888252 - DNA, 15 bp, Homo sapiens
cattttatcatgacc

SEQ ID NO: 888253 - DNA, 15 bp, Homo sapiens
attttatcatgacca

SEQ ID NO: 888254 - DNA, 15 bp, Homo sapiens
ttttatcatgaccat

SEQ ID NO: 888255 - DNA, 15 bp, Homo sapiens
tttatcatgaccatt

SEQ ID NO: 888256 - DNA, 15 bp, Homo sapiens
ttatcatgaccattt

SEQ ID NO: 888257 - DNA, 15 bp, Homo sapiens
tatcatgaccatttt

SEQ ID NO: 888258 - DNA, 15 bp, Homo sapiens
atcatgaccattttt

SEQ ID NO: 888259 - DNA, 15 bp, Homo sapiens
tcatgaccatttttc

SEQ ID NO: 888260 - DNA, 15 bp, Homo sapiens
catgaccatttttct

SEQ ID NO: 888261 - DNA, 15 bp, Homo sapiens
atgaccatttttctg

SEQ ID NO: 888262 - DNA, 15 bp, Homo sapiens
tgaccatttttctgt

SEQ ID NO: 888263 - DNA, 15 bp, Homo sapiens
gaccatttttctgtc

SEQ ID NO: 888264 - DNA, 15 bp, Homo sapiens
accatttttctgtcg

SEQ ID NO: 888265 - DNA, 15 bp, Homo sapiens
ccatttttctgtcgt

SEQ ID NO: 888266 - DNA, 15 bp, Homo sapiens
catttttctgtcgtg

SEQ ID NO: 888267 - DNA, 15 bp, Homo sapiens
atttttctgtcgtga

SEQ ID NO: 888268 - DNA, 15 bp, Homo sapiens
tttttctgtcgtgaa

SEQ ID NO: 888269 - DNA, 15 bp, Homo sapiens
ttttctgtcgtgaaa

SEQ ID NO: 888270 - DNA, 15 bp, Homo sapiens
tttctgtcgtgaaat

SEQ ID NO: 888271 - DNA, 15 bp, Homo sapiens
ttctgtcgtgaaatg

SEQ ID NO: 888272 - DNA, 15 bp, Homo sapiens
tctgtcgtgaaatgt

SEQ ID NO: 888273 - DNA, 15 bp, Homo sapiens
ctgtcgtgaaatgtt

SEQ ID NO: 888274 - DNA, 15 bp, Homo sapiens
tgtcgtgaaatgttt

SEQ ID NO: 888275 - DNA, 15 bp, Homo sapiens
gtcgtgaaatgtttt

SEQ ID NO: 888276 - DNA, 15 bp, Homo sapiens
tcgtgaaatgttttt

SEQ ID NO: 888277 - DNA, 15 bp, Homo sapiens
cgtgaaatgtttttc

SEQ ID NO: 888278 - DNA, 15 bp, Homo sapiens
gtgaaatgtttttct

SEQ ID NO: 888279 - DNA, 15 bp, Homo sapiens
tgaaatgtttttctg

SEQ ID NO: 888280 - DNA, 15 bp, Homo sapiens
gaaatgtttttctgc

SEQ ID NO: 888281 - DNA, 15 bp, Homo sapiens
aaatgtttttctgca

SEQ ID NO: 888282 - DNA, 15 bp, Homo sapiens
aatgtttttctgcat

SEQ ID NO: 888283 - DNA, 15 bp, Homo sapiens
atgtttttctgcatt

SEQ ID NO: 888284 - DNA, 15 bp, Homo sapiens
tgtttttctgcatta

SEQ ID NO: 888285 - DNA, 15 bp, Homo sapiens
gtttttctgcattat

SEQ ID NO: 888286 - DNA, 15 bp, Homo sapiens
tttttctgcattatt

SEQ ID NO: 888287 - DNA, 15 bp, Homo sapiens
ttttctgcattattt

SEQ ID NO: 888288 - DNA, 15 bp, Homo sapiens
tttctgcattatttt

SEQ ID NO: 888289 - DNA, 15 bp, Homo sapiens
ttctgcattattttt

SEQ ID NO: 888290 - DNA, 15 bp, Homo sapiens
tctgcattattttta

SEQ ID NO: 888291 - DNA, 15 bp, Homo sapiens
ctgcattatttttag

SEQ ID NO: 888292 - DNA, 15 bp, Homo sapiens
tgcattatttttagt

SEQ ID NO: 888293 - DNA, 15 bp, Homo sapiens
gcattatttttagtg

SEQ ID NO: 888294 - DNA, 15 bp, Homo sapiens
cattatttttagtgg

SEQ ID NO: 888295 - DNA, 15 bp, Homo sapiens
attatttttagtgga

SEQ ID NO: 888296 - DNA, 15 bp, Homo sapiens
ttatttttagtggat

SEQ ID NO: 888297 - DNA, 15 bp, Homo sapiens
tatttttagtggatg

SEQ ID NO: 888298 - DNA, 15 bp, Homo sapiens
atttttagtggatgc

SEQ ID NO: 888299 - DNA, 15 bp, Homo sapiens
tttttagtggatgca

SEQ ID NO: 888300 - DNA, 15 bp, Homo sapiens
ttttagtggatgcat

SEQ ID NO: 888301 - DNA, 15 bp, Homo sapiens
tttagtggatgcata

SEQ ID NO: 888302 - DNA, 15 bp, Homo sapiens
ttagtggatgcatac

SEQ ID NO: 888303 - DNA, 15 bp, Homo sapiens
tagtggatgcatact

SEQ ID NO: 888304 - DNA, 15 bp, Homo sapiens
agtggatgcatactt

SEQ ID NO: 888305 - DNA, 15 bp, Homo sapiens
gtggatgcatactta

SEQ ID NO: 888306 - DNA, 15 bp, Homo sapiens
tggatgcatacttaa

SEQ ID NO: 888307 - DNA, 15 bp, Homo sapiens
ggatgcatacttaac

SEQ ID NO: 888308 - DNA, 15 bp, Homo sapiens
gatgcatacttaacc

SEQ ID NO: 888309 - DNA, 15 bp, Homo sapiens
atgcatacttaacca

SEQ ID NO: 888310 - DNA, 15 bp, Homo sapiens
tgcatacttaaccaa

SEQ ID NO: 888311 - DNA, 15 bp, Homo sapiens
gcatacttaaccaat

SEQ ID NO: 888312 - DNA, 15 bp, Homo sapiens
catacttaaccaatt

SEQ ID NO: 888313 - DNA, 15 bp, Homo sapiens
atacttaaccaattt

SEQ ID NO: 888314 - DNA, 15 bp, Homo sapiens
tacttaaccaatttc

SEQ ID NO: 888315 - DNA, 15 bp, Homo sapiens
acttaaccaatttcc

SEQ ID NO: 888316 - DNA, 15 bp, Homo sapiens
cttaaccaatttccc

SEQ ID NO: 888317 - DNA, 15 bp, Homo sapiens
ttaaccaatttccct

SEQ ID NO: 888318 - DNA, 15 bp, Homo sapiens
taaccaatttcccta

SEQ ID NO: 888319 - DNA, 15 bp, Homo sapiens
aaccaatttccctaa

SEQ ID NO: 888320 - DNA, 15 bp, Homo sapiens
accaatttccctaaa

SEQ ID NO: 888321 - DNA, 15 bp, Homo sapiens
ccaatttccctaaaa

SEQ ID NO: 888322 - DNA, 15 bp, Homo sapiens
caatttccctaaaat

SEQ ID NO: 888323 - DNA, 15 bp, Homo sapiens
aatttccctaaaatt

SEQ ID NO: 888324 - DNA, 15 bp, Homo sapiens
atttccctaaaattg

SEQ ID NO: 888325 - DNA, 15 bp, Homo sapiens
tttccctaaaattgg

SEQ ID NO: 888326 - DNA, 15 bp, Homo sapiens
ttccctaaaattgga

SEQ ID NO: 888327 - DNA, 15 bp, Homo sapiens
tccctaaaattggac

SEQ ID NO: 888328 - DNA, 15 bp, Homo sapiens
ccctaaaattggaca

SEQ ID NO: 888329 - DNA, 15 bp, Homo sapiens
cctaaaattggacat

SEQ ID NO: 888330 - DNA, 15 bp, Homo sapiens
ctaaaattggacatt

SEQ ID NO: 888331 - DNA, 15 bp, Homo sapiens
taaaattggacattc

SEQ ID NO: 888332 - DNA, 15 bp, Homo sapiens
aaaattggacattca

SEQ ID NO: 888333 - DNA, 15 bp, Homo sapiens
aaattggacattcat

SEQ ID NO: 888334 - DNA, 15 bp, Homo sapiens
aattggacattcatg

SEQ ID NO: 888335 - DNA, 15 bp, Homo sapiens
attggacattcatgt

SEQ ID NO: 888336 - DNA, 15 bp, Homo sapiens
ttggacattcatgtt

SEQ ID NO: 888337 - DNA, 15 bp, Homo sapiens
tggacattcatgttg

SEQ ID NO: 888338 - DNA, 15 bp, Homo sapiens
ggacattcatgttgt

SEQ ID NO: 888339 - DNA, 15 bp, Homo sapiens
gacattcatgttgtt

SEQ ID NO: 888340 - DNA, 15 bp, Homo sapiens
acattcatgttgttt

SEQ ID NO: 888341 - DNA, 15 bp, Homo sapiens
cattcatgttgtttt

SEQ ID NO: 888342 - DNA, 15 bp, Homo sapiens
attcatgttgttttc

SEQ ID NO: 888343 - DNA, 15 bp, Homo sapiens
ttcatgttgttttca

SEQ ID NO: 888344 - DNA, 15 bp, Homo sapiens
tcatgttgttttcag

SEQ ID NO: 888345 - DNA, 15 bp, Homo sapiens
catgttgttttcagt

SEQ ID NO: 888346 - DNA, 15 bp, Homo sapiens
atgttgttttcagtg

SEQ ID NO: 888347 - DNA, 15 bp, Homo sapiens
tgttgttttcagtgg

SEQ ID NO: 888348 - DNA, 15 bp, Homo sapiens
gttgttttcagtgga

SEQ ID NO: 888349 - DNA, 15 bp, Homo sapiens
ttgttttcagtggaa

SEQ ID NO: 888350 - DNA, 15 bp, Homo sapiens
tgttttcagtggaat

SEQ ID NO: 888351 - DNA, 15 bp, Homo sapiens
gttttcagtggaatg

SEQ ID NO: 888352 - DNA, 15 bp, Homo sapiens
ttttcagtggaatgt

SEQ ID NO: 888353 - DNA, 15 bp, Homo sapiens
tttcagtggaatgtt

SEQ ID NO: 888354 - DNA, 15 bp, Homo sapiens
ttcagtggaatgttg

SEQ ID NO: 888355 - DNA, 15 bp, Homo sapiens
tcagtggaatgttgt

SEQ ID NO: 888356 - DNA, 15 bp, Homo sapiens
cagtggaatgttgtt

SEQ ID NO: 888357 - DNA, 15 bp, Homo sapiens
agtggaatgttgtta

SEQ ID NO: 888358 - DNA, 15 bp, Homo sapiens
gtggaatgttgttac

SEQ ID NO: 888359 - DNA, 15 bp, Homo sapiens
tggaatgttgttact

SEQ ID NO: 888360 - DNA, 15 bp, Homo sapiens
ggaatgttgttactt

SEQ ID NO: 888361 - DNA, 15 bp, Homo sapiens
gaatgttgttactta

SEQ ID NO: 888362 - DNA, 15 bp, Homo sapiens
aatgttgttacttaa

SEQ ID NO: 888363 - DNA, 15 bp, Homo sapiens
atgttgttacttaat

SEQ ID NO: 888364 - DNA, 15 bp, Homo sapiens
tgttgttacttaata

SEQ ID NO: 888365 - DNA, 15 bp, Homo sapiens
gttgttacttaatac

SEQ ID NO: 888366 - DNA, 15 bp, Homo sapiens
ttgttacttaatacc

SEQ ID NO: 888367 - DNA, 15 bp, Homo sapiens
tgttacttaatacct

SEQ ID NO: 888368 - DNA, 15 bp, Homo sapiens
gttacttaataccta

SEQ ID NO: 888369 - DNA, 15 bp, Homo sapiens
ttacttaatacctat

SEQ ID NO: 888370 - DNA, 15 bp, Homo sapiens
tacttaatacctatg

SEQ ID NO: 888371 - DNA, 15 bp, Homo sapiens
acttaatacctatga

SEQ ID NO: 888372 - DNA, 15 bp, Homo sapiens
cttaatacctatgaa

SEQ ID NO: 888373 - DNA, 15 bp, Homo sapiens
ttaatacctatgaat

SEQ ID NO: 888374 - DNA, 15 bp, Homo sapiens
taatacctatgaatg

SEQ ID NO: 888375 - DNA, 15 bp, Homo sapiens
aatacctatgaatga

SEQ ID NO: 888376 - DNA, 15 bp, Homo sapiens
atacctatgaatgaa

SEQ ID NO: 888377 - DNA, 15 bp, Homo sapiens
tacctatgaatgaag

SEQ ID NO: 888378 - DNA, 15 bp, Homo sapiens
acctatgaatgaaga

SEQ ID NO: 888379 - DNA, 15 bp, Homo sapiens
cctatgaatgaagac

SEQ ID NO: 888380 - DNA, 15 bp, Homo sapiens
ctatgaatgaagacc

SEQ ID NO: 888381 - DNA, 15 bp, Homo sapiens
tatgaatgaagaccc

SEQ ID NO: 888382 - DNA, 15 bp, Homo sapiens
atgaatgaagaccct

SEQ ID NO: 888383 - DNA, 15 bp, Homo sapiens
tgaatgaagaccctg

SEQ ID NO: 888384 - DNA, 15 bp, Homo sapiens
gaatgaagaccctgg

SEQ ID NO: 888385 - DNA, 15 bp, Homo sapiens
aatgaagaccctggc

SEQ ID NO: 888386 - DNA, 15 bp, Homo sapiens
atgaagaccctggca

SEQ ID NO: 888387 - DNA, 15 bp, Homo sapiens
tgaagaccctggcag

SEQ ID NO: 888388 - DNA, 15 bp, Homo sapiens
gaagaccctggcagc

SEQ ID NO: 888389 - DNA, 15 bp, Homo sapiens
aagaccctggcagcc

SEQ ID NO: 888390 - DNA, 15 bp, Homo sapiens
agaccctggcagcca

SEQ ID NO: 888391 - DNA, 15 bp, Homo sapiens
gaccctggcagccaa

SEQ ID NO: 888392 - DNA, 15 bp, Homo sapiens
accctggcagccaaa

SEQ ID NO: 888393 - DNA, 15 bp, Homo sapiens
ccctggcagccaaat

SEQ ID NO: 888394 - DNA, 15 bp, Homo sapiens
cctggcagccaaatt

SEQ ID NO: 888395 - DNA, 15 bp, Homo sapiens
ctggcagccaaattt

SEQ ID NO: 888396 - DNA, 15 bp, Homo sapiens
tggcagccaaatttt

SEQ ID NO: 888397 - DNA, 15 bp, Homo sapiens
ggcagccaaattttt

SEQ ID NO: 888398 - DNA, 15 bp, Homo sapiens
gcagccaaattttta

SEQ ID NO: 888399 - DNA, 15 bp, Homo sapiens
cagccaaatttttaa

SEQ ID NO: 888400 - DNA, 15 bp, Homo sapiens
agccaaatttttaat

SEQ ID NO: 888401 - DNA, 15 bp, Homo sapiens
gccaaatttttaatg

SEQ ID NO: 888402 - DNA, 15 bp, Homo sapiens
ccaaatttttaatgt

SEQ ID NO: 888403 - DNA, 15 bp, Homo sapiens
caaatttttaatgta

SEQ ID NO: 888404 - DNA, 15 bp, Homo sapiens
aaatttttaatgtaa

SEQ ID NO: 888405 - DNA, 15 bp, Homo sapiens
aatttttaatgtaag

SEQ ID NO: 888406 - DNA, 15 bp, Homo sapiens
atttttaatgtaagg

SEQ ID NO: 888407 - DNA, 15 bp, Homo sapiens
tttttaatgtaagga

SEQ ID NO: 888408 - DNA, 15 bp, Homo sapiens
ttttaatgtaaggaa

SEQ ID NO: 888409 - DNA, 15 bp, Homo sapiens
tttaatgtaaggaaa

SEQ ID NO: 888410 - DNA, 15 bp, Homo sapiens
ttaatgtaaggaaat

SEQ ID NO: 888411 - DNA, 15 bp, Homo sapiens
taatgtaaggaaatt

SEQ ID NO: 888412 - DNA, 15 bp, Homo sapiens
aatgtaaggaaatta

SEQ ID NO: 888413 - DNA, 15 bp, Homo sapiens
atgtaaggaaattat

SEQ ID NO: 888414 - DNA, 15 bp, Homo sapiens
tgtaaggaaattatg

SEQ ID NO: 888415 - DNA, 15 bp, Homo sapiens
gtaaggaaattatgg

SEQ ID NO: 888416 - DNA, 15 bp, Homo sapiens
taaggaaattatggc

SEQ ID NO: 888417 - DNA, 15 bp, Homo sapiens
aaggaaattatggct

SEQ ID NO: 888418 - DNA, 15 bp, Homo sapiens
aggaaattatggctg

SEQ ID NO: 888419 - DNA, 15 bp, Homo sapiens
ggaaattatggctgt

SEQ ID NO: 888420 - DNA, 15 bp, Homo sapiens
gaaattatggctgta

SEQ ID NO: 888421 - DNA, 15 bp, Homo sapiens
aaattatggctgtac

SEQ ID NO: 888422 - DNA, 15 bp, Homo sapiens
aattatggctgtaca

SEQ ID NO: 888423 - DNA, 15 bp, Homo sapiens
attatggctgtacac

SEQ ID NO: 888424 - DNA, 15 bp, Homo sapiens
ttatggctgtacaca

SEQ ID NO: 888425 - DNA, 15 bp, Homo sapiens
tatggctgtacacat

SEQ ID NO: 888426 - DNA, 15 bp, Homo sapiens
atggctgtacacata

SEQ ID NO: 888427 - DNA, 15 bp, Homo sapiens
tggctgtacacatat

SEQ ID NO: 888428 - DNA, 15 bp, Homo sapiens
ggctgtacacatatt

SEQ ID NO: 888429 - DNA, 15 bp, Homo sapiens
gctgtacacatattt

SEQ ID NO: 888430 - DNA, 15 bp, Homo sapiens
ctgtacacatatttt

SEQ ID NO: 888431 - DNA, 15 bp, Homo sapiens
tgtacacatattttt

SEQ ID NO: 888432 - DNA, 15 bp, Homo sapiens
gtacacatattttta

SEQ ID NO: 888433 - DNA, 15 bp, Homo sapiens
tacacatatttttag

SEQ ID NO: 888434 - DNA, 15 bp, Homo sapiens
acacatatttttaga

SEQ ID NO: 888435 - DNA, 15 bp, Homo sapiens
cacatatttttagaa

SEQ ID NO: 888436 - DNA, 15 bp, Homo sapiens
acatatttttagaag

SEQ ID NO: 888437 - DNA, 15 bp, Homo sapiens
catatttttagaagt

SEQ ID NO: 888438 - DNA, 15 bp, Homo sapiens
atatttttagaagta

SEQ ID NO: 888439 - DNA, 15 bp, Homo sapiens
tatttttagaagtac

SEQ ID NO: 888440 - DNA, 15 bp, Homo sapiens
atttttagaagtaca

SEQ ID NO: 888441 - DNA, 15 bp, Homo sapiens
tttttagaagtacaa

SEQ ID NO: 888442 - DNA, 15 bp, Homo sapiens
ttttagaagtacaat

SEQ ID NO: 888443 - DNA, 15 bp, Homo sapiens
tttagaagtacaatt

SEQ ID NO: 888444 - DNA, 15 bp, Homo sapiens
ttagaagtacaattg

SEQ ID NO: 888445 - DNA, 15 bp, Homo sapiens
tagaagtacaattgc

SEQ ID NO: 888446 - DNA, 15 bp, Homo sapiens
agaagtacaattgct

SEQ ID NO: 888447 - DNA, 15 bp, Homo sapiens
gaagtacaattgctt

SEQ ID NO: 888448 - DNA, 15 bp, Homo sapiens
aagtacaattgctta

SEQ ID NO: 888449 - DNA, 15 bp, Homo sapiens
agtacaattgcttag

SEQ ID NO: 888450 - DNA, 15 bp, Homo sapiens
gtacaattgcttagg

SEQ ID NO: 888451 - DNA, 15 bp, Homo sapiens
tacaattgcttaggc

SEQ ID NO: 888452 - DNA, 15 bp, Homo sapiens
acaattgcttaggcc

SEQ ID NO: 888453 - DNA, 15 bp, Homo sapiens
caattgcttaggcca

SEQ ID NO: 888454 - DNA, 15 bp, Homo sapiens
aattgcttaggccaa

SEQ ID NO: 888455 - DNA, 15 bp, Homo sapiens
attgcttaggccaaa

SEQ ID NO: 888456 - DNA, 15 bp, Homo sapiens
ttgcttaggccaaag

SEQ ID NO: 888457 - DNA, 15 bp, Homo sapiens
tgcttaggccaaagt

SEQ ID NO: 888458 - DNA, 15 bp, Homo sapiens
gcttaggccaaagtg

SEQ ID NO: 888459 - DNA, 15 bp, Homo sapiens
cttaggccaaagtgg

SEQ ID NO: 888460 - DNA, 15 bp, Homo sapiens
ttaggccaaagtgga

SEQ ID NO: 888461 - DNA, 15 bp, Homo sapiens
taggccaaagtggag

SEQ ID NO: 888462 - DNA, 15 bp, Homo sapiens
aggccaaagtggagg

SEQ ID NO: 888463 - DNA, 15 bp, Homo sapiens
ggccaaagtggaggt

SEQ ID NO: 888464 - DNA, 15 bp, Homo sapiens
gccaaagtggaggta

SEQ ID NO: 888465 - DNA, 15 bp, Homo sapiens
ccaaagtggaggtaa

SEQ ID NO: 888466 - DNA, 15 bp, Homo sapiens
caaagtggaggtaaa

SEQ ID NO: 888467 - DNA, 15 bp, Homo sapiens
aaagtggaggtaaaa

SEQ ID NO: 888468 - DNA, 15 bp, Homo sapiens
aagtggaggtaaaat

SEQ ID NO: 888469 - DNA, 15 bp, Homo sapiens
agtggaggtaaaatt

SEQ ID NO: 888470 - DNA, 15 bp, Homo sapiens
gtggaggtaaaatta

SEQ ID NO: 888471 - DNA, 15 bp, Homo sapiens
tggaggtaaaattat

SEQ ID NO: 888472 - DNA, 15 bp, Homo sapiens
ggaggtaaaattata

SEQ ID NO: 888473 - DNA, 15 bp, Homo sapiens
gaggtaaaattataa

SEQ ID NO: 888474 - DNA, 15 bp, Homo sapiens
aggtaaaattataag

SEQ ID NO: 888475 - DNA, 15 bp, Homo sapiens
ggtaaaattataagt

SEQ ID NO: 888476 - DNA, 15 bp, Homo sapiens
gtaaaattataagta

SEQ ID NO: 888477 - DNA, 15 bp, Homo sapiens
taaaattataagtaa

SEQ ID NO: 888478 - DNA, 15 bp, Homo sapiens
aaaattataagtaat

SEQ ID NO: 888479 - DNA, 15 bp, Homo sapiens
aaattataagtaatt

SEQ ID NO: 888480 - DNA, 15 bp, Homo sapiens
aattataagtaattt

SEQ ID NO: 888481 - DNA, 15 bp, Homo sapiens
attataagtaatttg

SEQ ID NO: 888482 - DNA, 15 bp, Homo sapiens
ttataagtaatttga

SEQ ID NO: 888483 - DNA, 15 bp, Homo sapiens
tataagtaatttgat

SEQ ID NO: 888484 - DNA, 15 bp, Homo sapiens
ataagtaatttgatc

SEQ ID NO: 888485 - DNA, 15 bp, Homo sapiens
taagtaatttgatcc

SEQ ID NO: 888486 - DNA, 15 bp, Homo sapiens
aagtaatttgatcca

SEQ ID NO: 888487 - DNA, 15 bp, Homo sapiens
agtaatttgatccac

SEQ ID NO: 888488 - DNA, 15 bp, Homo sapiens
gtaatttgatccaca

SEQ ID NO: 888489 - DNA, 15 bp, Homo sapiens
taatttgatccacac

SEQ ID NO: 888490 - DNA, 15 bp, Homo sapiens
aatttgatccacact

SEQ ID NO: 888491 - DNA, 15 bp, Homo sapiens
atttgatccacactg

SEQ ID NO: 888492 - DNA, 15 bp, Homo sapiens
tttgatccacactgg

SEQ ID NO: 888493 - DNA, 15 bp, Homo sapiens
ttgatccacactggc

SEQ ID NO: 888494 - DNA, 15 bp, Homo sapiens
tgatccacactggcc

SEQ ID NO: 888495 - DNA, 15 bp, Homo sapiens
gatccacactggcca

SEQ ID NO: 888496 - DNA, 15 bp, Homo sapiens
atccacactggccaa

SEQ ID NO: 888497 - DNA, 15 bp, Homo sapiens
tccacactggccaag

SEQ ID NO: 888498 - DNA, 15 bp, Homo sapiens
ccacactggccaagc

SEQ ID NO: 888499 - DNA, 15 bp, Homo sapiens
cacactggccaagca

SEQ ID NO: 888500 - DNA, 15 bp, Homo sapiens
acactggccaagcaa

SEQ ID NO: 888501 - DNA, 15 bp, Homo sapiens
cactggccaagcaag

SEQ ID NO: 888502 - DNA, 15 bp, Homo sapiens
actggccaagcaagt

SEQ ID NO: 888503 - DNA, 15 bp, Homo sapiens
ctggccaagcaagta

SEQ ID NO: 888504 - DNA, 15 bp, Homo sapiens
tggccaagcaagtat

SEQ ID NO: 888505 - DNA, 15 bp, Homo sapiens
ggccaagcaagtatg

SEQ ID NO: 888506 - DNA, 15 bp, Homo sapiens
gccaagcaagtatgt

SEQ ID NO: 888507 - DNA, 15 bp, Homo sapiens
ccaagcaagtatgtc

SEQ ID NO: 888508 - DNA, 15 bp, Homo sapiens
caagcaagtatgtct

SEQ ID NO: 888509 - DNA, 15 bp, Homo sapiens
aagcaagtatgtctc

SEQ ID NO: 888510 - DNA, 15 bp, Homo sapiens
agcaagtatgtctca

SEQ ID NO: 888511 - DNA, 15 bp, Homo sapiens
gcaagtatgtctcat

SEQ ID NO: 888512 - DNA, 15 bp, Homo sapiens
caagtatgtctcatt

SEQ ID NO: 888513 - DNA, 15 bp, Homo sapiens
aagtatgtctcatta

SEQ ID NO: 888514 - DNA, 15 bp, Homo sapiens
agtatgtctcattat

SEQ ID NO: 888515 - DNA, 15 bp, Homo sapiens
gtatgtctcattata

SEQ ID NO: 888516 - DNA, 15 bp, Homo sapiens
tatgtctcattatat

SEQ ID NO: 888517 - DNA, 15 bp, Homo sapiens
atgtctcattatatt

SEQ ID NO: 888518 - DNA, 15 bp, Homo sapiens
tgtctcattatattt

SEQ ID NO: 888519 - DNA, 15 bp, Homo sapiens
gtctcattatatttt

SEQ ID NO: 888520 - DNA, 15 bp, Homo sapiens
tctcattatatttta

SEQ ID NO: 888521 - DNA, 15 bp, Homo sapiens
ctcattatattttat

SEQ ID NO: 888522 - DNA, 15 bp, Homo sapiens
tcattatattttatt

SEQ ID NO: 888523 - DNA, 15 bp, Homo sapiens
cattatattttattt

SEQ ID NO: 888524 - DNA, 15 bp, Homo sapiens
attatattttatttt

SEQ ID NO: 888525 - DNA, 15 bp, Homo sapiens
ttatattttattttt

SEQ ID NO: 888526 - DNA, 15 bp, Homo sapiens
tatattttatttttt

SEQ ID NO: 888527 - DNA, 15 bp, Homo sapiens
atattttattttttg

SEQ ID NO: 888528 - DNA, 15 bp, Homo sapiens
tattttattttttga

SEQ ID NO: 888529 - DNA, 15 bp, Homo sapiens
attttattttttgag

SEQ ID NO: 888530 - DNA, 15 bp, Homo sapiens
ttttattttttgaga

SEQ ID NO: 888531 - DNA, 15 bp, Homo sapiens
attttttgagacagg

SEQ ID NO: 888532 - DNA, 15 bp, Homo sapiens
agacagggtctcacc

SEQ ID NO: 888533 - DNA, 15 bp, Homo sapiens
gacagggtctcacct

SEQ ID NO: 888534 - DNA, 15 bp, Homo sapiens
acagggtctcacctt

SEQ ID NO: 888535 - DNA, 15 bp, Homo sapiens
cagggtctcaccttt

SEQ ID NO: 888536 - DNA, 15 bp, Homo sapiens
agggtctcacctttt

SEQ ID NO: 888537 - DNA, 15 bp, Homo sapiens
gggtctcaccttttc

SEQ ID NO: 888538 - DNA, 15 bp, Homo sapiens
ggtctcaccttttca

SEQ ID NO: 888539 - DNA, 15 bp, Homo sapiens
gtctcaccttttcac

SEQ ID NO: 888540 - DNA, 15 bp, Homo sapiens
tctcaccttttcacc

SEQ ID NO: 888541 - DNA, 15 bp, Homo sapiens
ctcaccttttcaccc

SEQ ID NO: 888542 - DNA, 15 bp, Homo sapiens
tcaccttttcaccca

SEQ ID NO: 888543 - DNA, 15 bp, Homo sapiens
caccttttcacccag

SEQ ID NO: 888544 - DNA, 15 bp, Homo sapiens
accttttcacccagg

SEQ ID NO: 888545 - DNA, 15 bp, Homo sapiens
ccttttcacccaggc

SEQ ID NO: 888546 - DNA, 15 bp, Homo sapiens
cttttcacccaggct

SEQ ID NO: 888547 - DNA, 15 bp, Homo sapiens
ttttcacccaggctg

SEQ ID NO: 888548 - DNA, 15 bp, Homo sapiens
tttcacccaggctgg

SEQ ID NO: 888549 - DNA, 15 bp, Homo sapiens
ttcacccaggctgga

SEQ ID NO: 888550 - DNA, 15 bp, Homo sapiens
caggctggagtacaa

SEQ ID NO: 888551 - DNA, 15 bp, Homo sapiens
aggctggagtacaat

SEQ ID NO: 888552 - DNA, 15 bp, Homo sapiens
ggctggagtacaatg

SEQ ID NO: 888553 - DNA, 15 bp, Homo sapiens
gctggagtacaatgg

SEQ ID NO: 888554 - DNA, 15 bp, Homo sapiens
ctggagtacaatggc

SEQ ID NO: 888555 - DNA, 15 bp, Homo sapiens
tggagtacaatggca

SEQ ID NO: 888556 - DNA, 15 bp, Homo sapiens
ggagtacaatggcac

SEQ ID NO: 888557 - DNA, 15 bp, Homo sapiens
gagtacaatggcaca

SEQ ID NO: 888558 - DNA, 15 bp, Homo sapiens
agtacaatggcacaa

SEQ ID NO: 888559 - DNA, 15 bp, Homo sapiens
gtacaatggcacaat

SEQ ID NO: 888560 - DNA, 15 bp, Homo sapiens
tacaatggcacaatc

SEQ ID NO: 888561 - DNA, 15 bp, Homo sapiens
acaatggcacaatct

SEQ ID NO: 888562 - DNA, 15 bp, Homo sapiens
caatggcacaatctt

SEQ ID NO: 888563 - DNA, 15 bp, Homo sapiens
aatggcacaatcttg

SEQ ID NO: 888564 - DNA, 15 bp, Homo sapiens
atggcacaatcttgg

SEQ ID NO: 888565 - DNA, 15 bp, Homo sapiens
aacctctgcctccct

SEQ ID NO: 888566 - DNA, 15 bp, Homo sapiens
acctctgcctccctg

SEQ ID NO: 888567 - DNA, 15 bp, Homo sapiens
cctctgcctccctgg

SEQ ID NO: 888568 - DNA, 15 bp, Homo sapiens
ctctgcctccctggc

SEQ ID NO: 888569 - DNA, 15 bp, Homo sapiens
tctgcctccctggct

SEQ ID NO: 888570 - DNA, 15 bp, Homo sapiens
ctgcctccctggctc

SEQ ID NO: 888571 - DNA, 15 bp, Homo sapiens
tgcctccctggctca

SEQ ID NO: 888572 - DNA, 15 bp, Homo sapiens
gcctccctggctcaa

SEQ ID NO: 888573 - DNA, 15 bp, Homo sapiens
cctccctggctcaag

SEQ ID NO: 888574 - DNA, 15 bp, Homo sapiens
ctccctggctcaagc

SEQ ID NO: 888575 - DNA, 15 bp, Homo sapiens
tccctggctcaagca

SEQ ID NO: 888576 - DNA, 15 bp, Homo sapiens
ccctggctcaagcaa

SEQ ID NO: 888577 - DNA, 15 bp, Homo sapiens
cctggctcaagcaat

SEQ ID NO: 888578 - DNA, 15 bp, Homo sapiens
ctggctcaagcaatc

SEQ ID NO: 888579 - DNA, 15 bp, Homo sapiens
tggctcaagcaatcc

SEQ ID NO: 888580 - DNA, 15 bp, Homo sapiens
ggctcaagcaatcct

SEQ ID NO: 888581 - DNA, 15 bp, Homo sapiens
gctcaagcaatcctc

SEQ ID NO: 888582 - DNA, 15 bp, Homo sapiens
ctcaagcaatcctcc

SEQ ID NO: 888583 - DNA, 15 bp, Homo sapiens
tcaagcaatcctccc

SEQ ID NO: 888584 - DNA, 15 bp, Homo sapiens
caagcaatcctccca

SEQ ID NO: 888585 - DNA, 15 bp, Homo sapiens
aagcaatcctcccac

SEQ ID NO: 888586 - DNA, 15 bp, Homo sapiens
agcaatcctcccacg

SEQ ID NO: 888587 - DNA, 15 bp, Homo sapiens
gcaatcctcccacgt

SEQ ID NO: 888588 - DNA, 15 bp, Homo sapiens
caatcctcccacgtc

SEQ ID NO: 888589 - DNA, 15 bp, Homo sapiens
aatcctcccacgtca

SEQ ID NO: 888590 - DNA, 15 bp, Homo sapiens
atcctcccacgtcag

SEQ ID NO: 888591 - DNA, 15 bp, Homo sapiens
tcctcccacgtcagc

SEQ ID NO: 888592 - DNA, 15 bp, Homo sapiens
cctcccacgtcagcc

SEQ ID NO: 888593 - DNA, 15 bp, Homo sapiens
ctcccacgtcagcct

SEQ ID NO: 888594 - DNA, 15 bp, Homo sapiens
tcccacgtcagcctc

SEQ ID NO: 888595 - DNA, 15 bp, Homo sapiens
cccacgtcagcctcc

SEQ ID NO: 888596 - DNA, 15 bp, Homo sapiens
ccacgtcagcctccc

SEQ ID NO: 888597 - DNA, 15 bp, Homo sapiens
cacgtcagcctccca

SEQ ID NO: 888598 - DNA, 15 bp, Homo sapiens
acgtcagcctcccaa

SEQ ID NO: 888599 - DNA, 15 bp, Homo sapiens
cgtcagcctcccaag

SEQ ID NO: 888600 - DNA, 15 bp, Homo sapiens
gtcagcctcccaagt

SEQ ID NO: 888601 - DNA, 15 bp, Homo sapiens
ccaagtagctgggaa

SEQ ID NO: 888602 - DNA, 15 bp, Homo sapiens
caagtagctgggaat

SEQ ID NO: 888603 - DNA, 15 bp, Homo sapiens
aagtagctgggaata

SEQ ID NO: 888604 - DNA, 15 bp, Homo sapiens
ctgggaatacaggca

SEQ ID NO: 888605 - DNA, 15 bp, Homo sapiens
tgggaatacaggcac

SEQ ID NO: 888606 - DNA, 15 bp, Homo sapiens
gggaatacaggcaca

SEQ ID NO: 888607 - DNA, 15 bp, Homo sapiens
ggaatacaggcacac

SEQ ID NO: 888608 - DNA, 15 bp, Homo sapiens
gaatacaggcacacc

SEQ ID NO: 888609 - DNA, 15 bp, Homo sapiens
aatacaggcacaccc

SEQ ID NO: 888610 - DNA, 15 bp, Homo sapiens
atacaggcacaccct

SEQ ID NO: 888611 - DNA, 15 bp, Homo sapiens
tacaggcacacccta

SEQ ID NO: 888612 - DNA, 15 bp, Homo sapiens
acaggcacaccctac

SEQ ID NO: 888613 - DNA, 15 bp, Homo sapiens
caggcacaccctacc

SEQ ID NO: 888614 - DNA, 15 bp, Homo sapiens
aggcacaccctacca

SEQ ID NO: 888615 - DNA, 15 bp, Homo sapiens
ggcacaccctaccat

SEQ ID NO: 888616 - DNA, 15 bp, Homo sapiens
gcacaccctaccatg

SEQ ID NO: 888617 - DNA, 15 bp, Homo sapiens
cacaccctaccatgc

SEQ ID NO: 888618 - DNA, 15 bp, Homo sapiens
acaccctaccatgcc

SEQ ID NO: 888619 - DNA, 15 bp, Homo sapiens
caccctaccatgccc

SEQ ID NO: 888620 - DNA, 15 bp, Homo sapiens
accctaccatgccca

SEQ ID NO: 888621 - DNA, 15 bp, Homo sapiens
ccctaccatgcccag

SEQ ID NO: 888622 - DNA, 15 bp, Homo sapiens
cctaccatgcccagc

SEQ ID NO: 888623 - DNA, 15 bp, Homo sapiens
ctaccatgcccagct

SEQ ID NO: 888624 - DNA, 15 bp, Homo sapiens
taccatgcccagcta

SEQ ID NO: 888625 - DNA, 15 bp, Homo sapiens
cagctaatttttttg

SEQ ID NO: 888626 - DNA, 15 bp, Homo sapiens
agctaatttttttgt

SEQ ID NO: 888627 - DNA, 15 bp, Homo sapiens
atttttttgtgtttg

SEQ ID NO: 888628 - DNA, 15 bp, Homo sapiens
tttttttgtgtttgt

SEQ ID NO: 888629 - DNA, 15 bp, Homo sapiens
ttttttgtgtttgtt

SEQ ID NO: 888630 - DNA, 15 bp, Homo sapiens
tttttgtgtttgttt

SEQ ID NO: 888631 - DNA, 15 bp, Homo sapiens
ttttgtgtttgtttg

SEQ ID NO: 888632 - DNA, 15 bp, Homo sapiens
ttgtgtttgtttgtt

SEQ ID NO: 888633 - DNA, 15 bp, Homo sapiens
tgtgtttgtttgttt

SEQ ID NO: 888634 - DNA, 15 bp, Homo sapiens
gtgtttgtttgtttg

SEQ ID NO: 888635 - DNA, 15 bp, Homo sapiens
gtttgtttgttttta

SEQ ID NO: 888636 - DNA, 15 bp, Homo sapiens
tttgtttgtttttag

SEQ ID NO: 888637 - DNA, 15 bp, Homo sapiens
ttgtttgtttttagt

SEQ ID NO: 888638 - DNA, 15 bp, Homo sapiens
tgtttgtttttagta

SEQ ID NO: 888639 - DNA, 15 bp, Homo sapiens
gtttgtttttagtag

SEQ ID NO: 888640 - DNA, 15 bp, Homo sapiens
tttgtttttagtaga

SEQ ID NO: 888641 - DNA, 15 bp, Homo sapiens
ttgtttttagtagag

SEQ ID NO: 888642 - DNA, 15 bp, Homo sapiens
tgtttttagtagaga

SEQ ID NO: 888643 - DNA, 15 bp, Homo sapiens
gtttttagtagagac

SEQ ID NO: 888644 - DNA, 15 bp, Homo sapiens
ttttagtagagacga

SEQ ID NO: 888645 - DNA, 15 bp, Homo sapiens
tttagtagagacgag

SEQ ID NO: 888646 - DNA, 15 bp, Homo sapiens
ttagtagagacgagg

SEQ ID NO: 888647 - DNA, 15 bp, Homo sapiens
tagtagagacgaggt

SEQ ID NO: 888648 - DNA, 15 bp, Homo sapiens
agtagagacgaggtt

SEQ ID NO: 888649 - DNA, 15 bp, Homo sapiens
gtagagacgaggttt

SEQ ID NO: 888650 - DNA, 15 bp, Homo sapiens
tagagacgaggtttc

SEQ ID NO: 888651 - DNA, 15 bp, Homo sapiens
agagacgaggtttca

SEQ ID NO: 888652 - DNA, 15 bp, Homo sapiens
gagacgaggtttcac

SEQ ID NO: 888653 - DNA, 15 bp, Homo sapiens
agacgaggtttcacc

SEQ ID NO: 888654 - DNA, 15 bp, Homo sapiens
gacgaggtttcacca

SEQ ID NO: 888655 - DNA, 15 bp, Homo sapiens
acgaggtttcaccat

SEQ ID NO: 888656 - DNA, 15 bp, Homo sapiens
cgaggtttcaccatg

SEQ ID NO: 888657 - DNA, 15 bp, Homo sapiens
gaggtttcaccatgt

SEQ ID NO: 888658 - DNA, 15 bp, Homo sapiens
tttcaccatgttgct

SEQ ID NO: 888659 - DNA, 15 bp, Homo sapiens
ttcaccatgttgctc

SEQ ID NO: 888660 - DNA, 15 bp, Homo sapiens
tcaccatgttgctca

SEQ ID NO: 888661 - DNA, 15 bp, Homo sapiens
caccatgttgctcag

SEQ ID NO: 888662 - DNA, 15 bp, Homo sapiens
accatgttgctcagg

SEQ ID NO: 888663 - DNA, 15 bp, Homo sapiens
ccatgttgctcaggc

SEQ ID NO: 888664 - DNA, 15 bp, Homo sapiens
catgttgctcaggct

SEQ ID NO: 888665 - DNA, 15 bp, Homo sapiens
atgttgctcaggctt

SEQ ID NO: 888666 - DNA, 15 bp, Homo sapiens
tgttgctcaggcttg

SEQ ID NO: 888667 - DNA, 15 bp, Homo sapiens
gttgctcaggcttgt

SEQ ID NO: 888668 - DNA, 15 bp, Homo sapiens
ttgctcaggcttgtc

SEQ ID NO: 888669 - DNA, 15 bp, Homo sapiens
tgctcaggcttgtct

SEQ ID NO: 888670 - DNA, 15 bp, Homo sapiens
gctcaggcttgtctt

SEQ ID NO: 888671 - DNA, 15 bp, Homo sapiens
ctcaggcttgtcttg

SEQ ID NO: 888672 - DNA, 15 bp, Homo sapiens
tcaggcttgtcttga

SEQ ID NO: 888673 - DNA, 15 bp, Homo sapiens
gagctcaagcaatcc

SEQ ID NO: 888674 - DNA, 15 bp, Homo sapiens
agctcaagcaatcca

SEQ ID NO: 888675 - DNA, 15 bp, Homo sapiens
gctcaagcaatccac

SEQ ID NO: 888676 - DNA, 15 bp, Homo sapiens
ctcaagcaatccact

SEQ ID NO: 888677 - DNA, 15 bp, Homo sapiens
tcaagcaatccactc

SEQ ID NO: 888678 - DNA, 15 bp, Homo sapiens
caagcaatccactca

SEQ ID NO: 888679 - DNA, 15 bp, Homo sapiens
aagcaatccactcac

SEQ ID NO: 888680 - DNA, 15 bp, Homo sapiens
agcaatccactcaca

SEQ ID NO: 888681 - DNA, 15 bp, Homo sapiens
gcaatccactcacat

SEQ ID NO: 888682 - DNA, 15 bp, Homo sapiens
caatccactcacatt

SEQ ID NO: 888683 - DNA, 15 bp, Homo sapiens
aatccactcacattg

SEQ ID NO: 888684 - DNA, 15 bp, Homo sapiens
atccactcacattgg

SEQ ID NO: 888685 - DNA, 15 bp, Homo sapiens
tccactcacattggc

SEQ ID NO: 888686 - DNA, 15 bp, Homo sapiens
ccactcacattggcc

SEQ ID NO: 888687 - DNA, 15 bp, Homo sapiens
cactcacattggcct

SEQ ID NO: 888688 - DNA, 15 bp, Homo sapiens
actcacattggcctc

SEQ ID NO: 888689 - DNA, 15 bp, Homo sapiens
ctcacattggcctcc

SEQ ID NO: 888690 - DNA, 15 bp, Homo sapiens
tcacattggcctcca

SEQ ID NO: 888691 - DNA, 15 bp, Homo sapiens
cacattggcctccaa

SEQ ID NO: 888692 - DNA, 15 bp, Homo sapiens
acattggcctccaaa

SEQ ID NO: 888693 - DNA, 15 bp, Homo sapiens
cattggcctccaaag

SEQ ID NO: 888694 - DNA, 15 bp, Homo sapiens
attggcctccaaagt

SEQ ID NO: 888695 - DNA, 15 bp, Homo sapiens
ttggcctccaaagta

SEQ ID NO: 888696 - DNA, 15 bp, Homo sapiens
tggcctccaaagtac

SEQ ID NO: 888697 - DNA, 15 bp, Homo sapiens
ggcctccaaagtact

SEQ ID NO: 888698 - DNA, 15 bp, Homo sapiens
gcctccaaagtactg

SEQ ID NO: 888699 - DNA, 15 bp, Homo sapiens
cctccaaagtactgg

SEQ ID NO: 888700 - DNA, 15 bp, Homo sapiens
ctccaaagtactggg

SEQ ID NO: 888701 - DNA, 15 bp, Homo sapiens
tccaaagtactggga

SEQ ID NO: 888702 - DNA, 15 bp, Homo sapiens
catgagccactgcat

SEQ ID NO: 888703 - DNA, 15 bp, Homo sapiens
atgagccactgcatc

SEQ ID NO: 888704 - DNA, 15 bp, Homo sapiens
tgagccactgcatct

SEQ ID NO: 888705 - DNA, 15 bp, Homo sapiens
gagccactgcatctg

SEQ ID NO: 888706 - DNA, 15 bp, Homo sapiens
agccactgcatctgg

SEQ ID NO: 888707 - DNA, 15 bp, Homo sapiens
gccactgcatctggc

SEQ ID NO: 888708 - DNA, 15 bp, Homo sapiens
ccactgcatctggcc

SEQ ID NO: 888709 - DNA, 15 bp, Homo sapiens
cactgcatctggcct

SEQ ID NO: 888710 - DNA, 15 bp, Homo sapiens
actgcatctggcctt

SEQ ID NO: 888711 - DNA, 15 bp, Homo sapiens
ctgcatctggcctta

SEQ ID NO: 888712 - DNA, 15 bp, Homo sapiens
tgcatctggccttat

SEQ ID NO: 888713 - DNA, 15 bp, Homo sapiens
gcatctggccttatc

SEQ ID NO: 888714 - DNA, 15 bp, Homo sapiens
catctggccttatct

SEQ ID NO: 888715 - DNA, 15 bp, Homo sapiens
atctggccttatctt

SEQ ID NO: 888716 - DNA, 15 bp, Homo sapiens
tctggccttatcttt

SEQ ID NO: 888717 - DNA, 15 bp, Homo sapiens
ctggccttatcttta

SEQ ID NO: 888718 - DNA, 15 bp, Homo sapiens
tggccttatctttaa

SEQ ID NO: 888719 - DNA, 15 bp, Homo sapiens
ggccttatctttaaa

SEQ ID NO: 888720 - DNA, 15 bp, Homo sapiens
gccttatctttaaat

SEQ ID NO: 888721 - DNA, 15 bp, Homo sapiens
ccttatctttaaatt

SEQ ID NO: 888722 - DNA, 15 bp, Homo sapiens
cttatctttaaattg

SEQ ID NO: 888723 - DNA, 15 bp, Homo sapiens
ttatctttaaattgt

SEQ ID NO: 888724 - DNA, 15 bp, Homo sapiens
tatctttaaattgta

SEQ ID NO: 888725 - DNA, 15 bp, Homo sapiens
atctttaaattgtaa

SEQ ID NO: 888726 - DNA, 15 bp, Homo sapiens
tctttaaattgtaag

SEQ ID NO: 888727 - DNA, 15 bp, Homo sapiens
ctttaaattgtaaga

SEQ ID NO: 888728 - DNA, 15 bp, Homo sapiens
tttaaattgtaagat

SEQ ID NO: 888729 - DNA, 15 bp, Homo sapiens
ttaaattgtaagatg

SEQ ID NO: 888730 - DNA, 15 bp, Homo sapiens
taaattgtaagatga

SEQ ID NO: 888731 - DNA, 15 bp, Homo sapiens
aaattgtaagatgaa

SEQ ID NO: 888732 - DNA, 15 bp, Homo sapiens
aattgtaagatgaat

SEQ ID NO: 888733 - DNA, 15 bp, Homo sapiens
attgtaagatgaatt

SEQ ID NO: 888734 - DNA, 15 bp, Homo sapiens
ttgtaagatgaatta

SEQ ID NO: 888735 - DNA, 15 bp, Homo sapiens
tgtaagatgaattaa

SEQ ID NO: 888736 - DNA, 15 bp, Homo sapiens
gtaagatgaattaag

SEQ ID NO: 888737 - DNA, 15 bp, Homo sapiens
taagatgaattaaga

SEQ ID NO: 888738 - DNA, 15 bp, Homo sapiens
aagatgaattaagat

SEQ ID NO: 888739 - DNA, 15 bp, Homo sapiens
agatgaattaagata

SEQ ID NO: 888740 - DNA, 15 bp, Homo sapiens
gatgaattaagataa

SEQ ID NO: 888741 - DNA, 15 bp, Homo sapiens
atgaattaagataag

SEQ ID NO: 888742 - DNA, 15 bp, Homo sapiens
tgaattaagataagg

SEQ ID NO: 888743 - DNA, 15 bp, Homo sapiens
gaattaagataaggt

SEQ ID NO: 888744 - DNA, 15 bp, Homo sapiens
aattaagataaggta

SEQ ID NO: 888745 - DNA, 15 bp, Homo sapiens
attaagataaggtaa

SEQ ID NO: 888746 - DNA, 15 bp, Homo sapiens
ttaagataaggtaaa

SEQ ID NO: 888747 - DNA, 15 bp, Homo sapiens
taagataaggtaaaa

SEQ ID NO: 888748 - DNA, 15 bp, Homo sapiens
aagataaggtaaaac

SEQ ID NO: 888749 - DNA, 15 bp, Homo sapiens
agataaggtaaaact

SEQ ID NO: 888750 - DNA, 15 bp, Homo sapiens
gataaggtaaaactg

SEQ ID NO: 888751 - DNA, 15 bp, Homo sapiens
ataaggtaaaactga

SEQ ID NO: 888752 - DNA, 15 bp, Homo sapiens
taaggtaaaactgag

SEQ ID NO: 888753 - DNA, 15 bp, Homo sapiens
aaggtaaaactgaga

SEQ ID NO: 888754 - DNA, 15 bp, Homo sapiens
aggtaaaactgagaa

SEQ ID NO: 888755 - DNA, 15 bp, Homo sapiens
ggtaaaactgagaag

SEQ ID NO: 888756 - DNA, 15 bp, Homo sapiens
gtaaaactgagaagt

SEQ ID NO: 888757 - DNA, 15 bp, Homo sapiens
taaaactgagaagtt

SEQ ID NO: 888758 - DNA, 15 bp, Homo sapiens
aaaactgagaagttg

SEQ ID NO: 888759 - DNA, 15 bp, Homo sapiens
aaactgagaagttga

SEQ ID NO: 888760 - DNA, 15 bp, Homo sapiens
aactgagaagttgag

SEQ ID NO: 888761 - DNA, 15 bp, Homo sapiens
actgagaagttgaga

SEQ ID NO: 888762 - DNA, 15 bp, Homo sapiens
ctgagaagttgagat

SEQ ID NO: 888763 - DNA, 15 bp, Homo sapiens
tgagaagttgagatg

SEQ ID NO: 888764 - DNA, 15 bp, Homo sapiens
gagaagttgagatgt

SEQ ID NO: 888765 - DNA, 15 bp, Homo sapiens
agaagttgagatgtt

SEQ ID NO: 888766 - DNA, 15 bp, Homo sapiens
gaagttgagatgttg

SEQ ID NO: 888767 - DNA, 15 bp, Homo sapiens
aagttgagatgttgt

SEQ ID NO: 888768 - DNA, 15 bp, Homo sapiens
agttgagatgttgtg

SEQ ID NO: 888769 - DNA, 15 bp, Homo sapiens
gttgagatgttgtgg

SEQ ID NO: 888770 - DNA, 15 bp, Homo sapiens
ttgagatgttgtgga

SEQ ID NO: 888771 - DNA, 15 bp, Homo sapiens
tgagatgttgtggag

SEQ ID NO: 888772 - DNA, 15 bp, Homo sapiens
gagatgttgtggaga

SEQ ID NO: 888773 - DNA, 15 bp, Homo sapiens
agatgttgtggagaa

SEQ ID NO: 888774 - DNA, 15 bp, Homo sapiens
gatgttgtggagaaa

SEQ ID NO: 888775 - DNA, 15 bp, Homo sapiens
atgttgtggagaaag

SEQ ID NO: 888776 - DNA, 15 bp, Homo sapiens
tgttgtggagaaagc

SEQ ID NO: 888777 - DNA, 15 bp, Homo sapiens
gttgtggagaaagca

SEQ ID NO: 888778 - DNA, 15 bp, Homo sapiens
ttgtggagaaagcaa

SEQ ID NO: 888779 - DNA, 15 bp, Homo sapiens
tgtggagaaagcaat

SEQ ID NO: 888780 - DNA, 15 bp, Homo sapiens
gtggagaaagcaatg

SEQ ID NO: 888781 - DNA, 15 bp, Homo sapiens
tggagaaagcaatga

SEQ ID NO: 888782 - DNA, 15 bp, Homo sapiens
ggagaaagcaatgat

SEQ ID NO: 888783 - DNA, 15 bp, Homo sapiens
gagaaagcaatgata

SEQ ID NO: 888784 - DNA, 15 bp, Homo sapiens
agaaagcaatgatac

SEQ ID NO: 888785 - DNA, 15 bp, Homo sapiens
gaaagcaatgatacc

SEQ ID NO: 888786 - DNA, 15 bp, Homo sapiens
aaagcaatgatacca

SEQ ID NO: 888787 - DNA, 15 bp, Homo sapiens
aagcaatgataccat

SEQ ID NO: 888788 - DNA, 15 bp, Homo sapiens
agcaatgataccatg

SEQ ID NO: 888789 - DNA, 15 bp, Homo sapiens
gcaatgataccatga

SEQ ID NO: 888790 - DNA, 15 bp, Homo sapiens
caatgataccatgag

SEQ ID NO: 888791 - DNA, 15 bp, Homo sapiens
aatgataccatgagc

SEQ ID NO: 888792 - DNA, 15 bp, Homo sapiens
atgataccatgagct

SEQ ID NO: 888793 - DNA, 15 bp, Homo sapiens
tgataccatgagctc

SEQ ID NO: 888794 - DNA, 15 bp, Homo sapiens
gataccatgagctct

SEQ ID NO: 888795 - DNA, 15 bp, Homo sapiens
ataccatgagctctt

SEQ ID NO: 888796 - DNA, 15 bp, Homo sapiens
taccatgagctcttg

SEQ ID NO: 888797 - DNA, 15 bp, Homo sapiens
accatgagctcttgg

SEQ ID NO: 888798 - DNA, 15 bp, Homo sapiens
ccatgagctcttggg

SEQ ID NO: 888799 - DNA, 15 bp, Homo sapiens
catgagctcttgggt

SEQ ID NO: 888800 - DNA, 15 bp, Homo sapiens
atgagctcttgggta

SEQ ID NO: 888801 - DNA, 15 bp, Homo sapiens
tgagctcttgggtaa

SEQ ID NO: 888802 - DNA, 15 bp, Homo sapiens
gagctcttgggtaaa

SEQ ID NO: 888803 - DNA, 15 bp, Homo sapiens
agctcttgggtaaac

SEQ ID NO: 888804 - DNA, 15 bp, Homo sapiens
gctcttgggtaaacg

SEQ ID NO: 888805 - DNA, 15 bp, Homo sapiens
ctcttgggtaaacgg

SEQ ID NO: 888806 - DNA, 15 bp, Homo sapiens
tcttgggtaaacgga

SEQ ID NO: 888807 - DNA, 15 bp, Homo sapiens
cttgggtaaacggag

SEQ ID NO: 888808 - DNA, 15 bp, Homo sapiens
ttgggtaaacggaga

SEQ ID NO: 888809 - DNA, 15 bp, Homo sapiens
tgggtaaacggagac

SEQ ID NO: 888810 - DNA, 15 bp, Homo sapiens
gggtaaacggagaca

SEQ ID NO: 888811 - DNA, 15 bp, Homo sapiens
ggtaaacggagacat

SEQ ID NO: 888812 - DNA, 15 bp, Homo sapiens
gtaaacggagacatt

SEQ ID NO: 888813 - DNA, 15 bp, Homo sapiens
taaacggagacatta

SEQ ID NO: 888814 - DNA, 15 bp, Homo sapiens
aaacggagacattag

SEQ ID NO: 888815 - DNA, 15 bp, Homo sapiens
aacggagacattaga

SEQ ID NO: 888816 - DNA, 15 bp, Homo sapiens
acggagacattagac

SEQ ID NO: 888817 - DNA, 15 bp, Homo sapiens
cggagacattagacc

SEQ ID NO: 888818 - DNA, 15 bp, Homo sapiens
ggagacattagaccg

SEQ ID NO: 888819 - DNA, 15 bp, Homo sapiens
gagacattagaccgg

SEQ ID NO: 888820 - DNA, 15 bp, Homo sapiens
agacattagaccggg

SEQ ID NO: 888821 - DNA, 15 bp, Homo sapiens
gacattagaccgggt

SEQ ID NO: 888822 - DNA, 15 bp, Homo sapiens
acattagaccgggtg

SEQ ID NO: 888823 - DNA, 15 bp, Homo sapiens
cattagaccgggtga

SEQ ID NO: 888824 - DNA, 15 bp, Homo sapiens
attagaccgggtgaa

SEQ ID NO: 888825 - DNA, 15 bp, Homo sapiens
ttagaccgggtgaat

SEQ ID NO: 888826 - DNA, 15 bp, Homo sapiens
tagaccgggtgaata

SEQ ID NO: 888827 - DNA, 15 bp, Homo sapiens
agaccgggtgaatat

SEQ ID NO: 888828 - DNA, 15 bp, Homo sapiens
gaccgggtgaatatt

SEQ ID NO: 888829 - DNA, 15 bp, Homo sapiens
accgggtgaatatta

SEQ ID NO: 888830 - DNA, 15 bp, Homo sapiens
ccgggtgaatattag

SEQ ID NO: 888831 - DNA, 15 bp, Homo sapiens
cgggtgaatattagg

SEQ ID NO: 888832 - DNA, 15 bp, Homo sapiens
gggtgaatattaggt

SEQ ID NO: 888833 - DNA, 15 bp, Homo sapiens
ggtgaatattaggtt

SEQ ID NO: 888834 - DNA, 15 bp, Homo sapiens
gtgaatattaggttt

SEQ ID NO: 888835 - DNA, 15 bp, Homo sapiens
tgaatattaggtttc

SEQ ID NO: 888836 - DNA, 15 bp, Homo sapiens
gaatattaggtttct

SEQ ID NO: 888837 - DNA, 15 bp, Homo sapiens
aatattaggtttctc

SEQ ID NO: 888838 - DNA, 15 bp, Homo sapiens
atattaggtttctct

SEQ ID NO: 888839 - DNA, 15 bp, Homo sapiens
tattaggtttctctc

SEQ ID NO: 888840 - DNA, 15 bp, Homo sapiens
attaggtttctctcc

SEQ ID NO: 888841 - DNA, 15 bp, Homo sapiens
ttaggtttctctcca

SEQ ID NO: 888842 - DNA, 15 bp, Homo sapiens
taggtttctctccaa

SEQ ID NO: 888843 - DNA, 15 bp, Homo sapiens
aggtttctctccaaa

SEQ ID NO: 888844 - DNA, 15 bp, Homo sapiens
ggtttctctccaaat

SEQ ID NO: 888845 - DNA, 15 bp, Homo sapiens
gtttctctccaaatc

SEQ ID NO: 888846 - DNA, 15 bp, Homo sapiens
tttctctccaaatct

SEQ ID NO: 888847 - DNA, 15 bp, Homo sapiens
ttctctccaaatctg

SEQ ID NO: 888848 - DNA, 15 bp, Homo sapiens
tctctccaaatctgt

SEQ ID NO: 888849 - DNA, 15 bp, Homo sapiens
ctctccaaatctgta

SEQ ID NO: 888850 - DNA, 15 bp, Homo sapiens
tctccaaatctgtag

SEQ ID NO: 888851 - DNA, 15 bp, Homo sapiens
ctccaaatctgtagt

SEQ ID NO: 888852 - DNA, 15 bp, Homo sapiens
tccaaatctgtagtt

SEQ ID NO: 888853 - DNA, 15 bp, Homo sapiens
ccaaatctgtagttt

SEQ ID NO: 888854 - DNA, 15 bp, Homo sapiens
caaatctgtagtttt

SEQ ID NO: 888855 - DNA, 15 bp, Homo sapiens
aaatctgtagtttta

SEQ ID NO: 888856 - DNA, 15 bp, Homo sapiens
aatctgtagttttag

SEQ ID NO: 888857 - DNA, 15 bp, Homo sapiens
atctgtagttttagg

SEQ ID NO: 888858 - DNA, 15 bp, Homo sapiens
tctgtagttttaggt

SEQ ID NO: 888859 - DNA, 15 bp, Homo sapiens
ctgtagttttaggtg

SEQ ID NO: 888860 - DNA, 15 bp, Homo sapiens
tgtagttttaggtgt

SEQ ID NO: 888861 - DNA, 15 bp, Homo sapiens
gtagttttaggtgtg

SEQ ID NO: 888862 - DNA, 15 bp, Homo sapiens
tagttttaggtgtgt

SEQ ID NO: 888863 - DNA, 15 bp, Homo sapiens
agttttaggtgtgtt

SEQ ID NO: 888864 - DNA, 15 bp, Homo sapiens
gttttaggtgtgttt

SEQ ID NO: 888865 - DNA, 15 bp, Homo sapiens
ttttaggtgtgtttg

SEQ ID NO: 888866 - DNA, 15 bp, Homo sapiens
tttaggtgtgtttga

SEQ ID NO: 888867 - DNA, 15 bp, Homo sapiens
ttaggtgtgtttgag

SEQ ID NO: 888868 - DNA, 15 bp, Homo sapiens
taggtgtgtttgagt

SEQ ID NO: 888869 - DNA, 15 bp, Homo sapiens
aggtgtgtttgagtt

SEQ ID NO: 888870 - DNA, 15 bp, Homo sapiens
ggtgtgtttgagttg

SEQ ID NO: 888871 - DNA, 15 bp, Homo sapiens
gtgtgtttgagttgt

SEQ ID NO: 888872 - DNA, 15 bp, Homo sapiens
tgtgtttgagttgtt

SEQ ID NO: 888873 - DNA, 15 bp, Homo sapiens
gtgtttgagttgtta

SEQ ID NO: 888874 - DNA, 15 bp, Homo sapiens
tgtttgagttgttac

SEQ ID NO: 888875 - DNA, 15 bp, Homo sapiens
gtttgagttgttact

SEQ ID NO: 888876 - DNA, 15 bp, Homo sapiens
tttgagttgttacta

SEQ ID NO: 888877 - DNA, 15 bp, Homo sapiens
ttgagttgttactag

SEQ ID NO: 888878 - DNA, 15 bp, Homo sapiens
tgagttgttactagc

SEQ ID NO: 888879 - DNA, 15 bp, Homo sapiens
gagttgttactagct

SEQ ID NO: 888880 - DNA, 15 bp, Homo sapiens
agttgttactagctt

SEQ ID NO: 888881 - DNA, 15 bp, Homo sapiens
gttgttactagcttt

SEQ ID NO: 888882 - DNA, 15 bp, Homo sapiens
ttgttactagctttg

SEQ ID NO: 888883 - DNA, 15 bp, Homo sapiens
tgttactagctttgt

SEQ ID NO: 888884 - DNA, 15 bp, Homo sapiens
gttactagctttgtc

SEQ ID NO: 888885 - DNA, 15 bp, Homo sapiens
ttactagctttgtct

SEQ ID NO: 888886 - DNA, 15 bp, Homo sapiens
tactagctttgtctt

SEQ ID NO: 888887 - DNA, 15 bp, Homo sapiens
actagctttgtcttt

SEQ ID NO: 888888 - DNA, 15 bp, Homo sapiens
ctagctttgtctttt

SEQ ID NO: 888889 - DNA, 15 bp, Homo sapiens
tagctttgtcttttt

SEQ ID NO: 888890 - DNA, 15 bp, Homo sapiens
agctttgtctttttc

SEQ ID NO: 888891 - DNA, 15 bp, Homo sapiens
gctttgtctttttct

SEQ ID NO: 888892 - DNA, 15 bp, Homo sapiens
ctttgtctttttctt

SEQ ID NO: 888893 - DNA, 15 bp, Homo sapiens
tttgtctttttcttc

SEQ ID NO: 888894 - DNA, 15 bp, Homo sapiens
ttgtctttttcttcc

SEQ ID NO: 888895 - DNA, 15 bp, Homo sapiens
tgtctttttcttcct

SEQ ID NO: 888896 - DNA, 15 bp, Homo sapiens
gtctttttcttcctt

SEQ ID NO: 888897 - DNA, 15 bp, Homo sapiens
tctttttcttccttc

SEQ ID NO: 888898 - DNA, 15 bp, Homo sapiens
ctttttcttccttcc

SEQ ID NO: 888899 - DNA, 15 bp, Homo sapiens
tttttcttccttcct

SEQ ID NO: 888900 - DNA, 15 bp, Homo sapiens
ttttcttccttcctc

SEQ ID NO: 888901 - DNA, 15 bp, Homo sapiens
tttcttccttcctcc

SEQ ID NO: 888902 - DNA, 15 bp, Homo sapiens
ttcttccttcctccc

SEQ ID NO: 888903 - DNA, 15 bp, Homo sapiens
tcttccttcctcccc

SEQ ID NO: 888904 - DNA, 15 bp, Homo sapiens
cttccttcctcccct

SEQ ID NO: 888905 - DNA, 15 bp, Homo sapiens
ttccttcctcccctt

SEQ ID NO: 888906 - DNA, 15 bp, Homo sapiens
tccttcctcccctta

SEQ ID NO: 888907 - DNA, 15 bp, Homo sapiens
ccttcctccccttaa

SEQ ID NO: 888908 - DNA, 15 bp, Homo sapiens
cttcctccccttaac

SEQ ID NO: 888909 - DNA, 15 bp, Homo sapiens
ttcctccccttaacc

SEQ ID NO: 888910 - DNA, 15 bp, Homo sapiens
tcctccccttaacca

SEQ ID NO: 888911 - DNA, 15 bp, Homo sapiens
cctccccttaaccaa

SEQ ID NO: 888912 - DNA, 15 bp, Homo sapiens
ctccccttaaccaac

SEQ ID NO: 888913 - DNA, 15 bp, Homo sapiens
tccccttaaccaacc

SEQ ID NO: 888914 - DNA, 15 bp, Homo sapiens
ccccttaaccaaccc

SEQ ID NO: 888915 - DNA, 15 bp, Homo sapiens
cccttaaccaaccct

SEQ ID NO: 888916 - DNA, 15 bp, Homo sapiens
ccttaaccaaccctt

SEQ ID NO: 888917 - DNA, 15 bp, Homo sapiens
cttaaccaacccttc

SEQ ID NO: 888918 - DNA, 15 bp, Homo sapiens
ttaaccaacccttct

SEQ ID NO: 888919 - DNA, 15 bp, Homo sapiens
taaccaacccttctg

SEQ ID NO: 888920 - DNA, 15 bp, Homo sapiens
aaccaacccttctga

SEQ ID NO: 888921 - DNA, 15 bp, Homo sapiens
accaacccttctgag

SEQ ID NO: 888922 - DNA, 15 bp, Homo sapiens
ccaacccttctgaga

SEQ ID NO: 888923 - DNA, 15 bp, Homo sapiens
caacccttctgagaa

SEQ ID NO: 888924 - DNA, 15 bp, Homo sapiens
aacccttctgagaaa

SEQ ID NO: 888925 - DNA, 15 bp, Homo sapiens
acccttctgagaaac

SEQ ID NO: 888926 - DNA, 15 bp, Homo sapiens
cccttctgagaaaca

SEQ ID NO: 888927 - DNA, 15 bp, Homo sapiens
ccttctgagaaacat

SEQ ID NO: 888928 - DNA, 15 bp, Homo sapiens
cttctgagaaacatc

SEQ ID NO: 888929 - DNA, 15 bp, Homo sapiens
ttctgagaaacatct

SEQ ID NO: 888930 - DNA, 15 bp, Homo sapiens
tctgagaaacatctt

SEQ ID NO: 888931 - DNA, 15 bp, Homo sapiens
ctgagaaacatctta

SEQ ID NO: 888932 - DNA, 15 bp, Homo sapiens
tgagaaacatcttac

SEQ ID NO: 888933 - DNA, 15 bp, Homo sapiens
gagaaacatcttaca

SEQ ID NO: 888934 - DNA, 15 bp, Homo sapiens
agaaacatcttacac

SEQ ID NO: 888935 - DNA, 15 bp, Homo sapiens
gaaacatcttacaca

SEQ ID NO: 888936 - DNA, 15 bp, Homo sapiens
aaacatcttacacag

SEQ ID NO: 888937 - DNA, 15 bp, Homo sapiens
aacatcttacacagt

SEQ ID NO: 888938 - DNA, 15 bp, Homo sapiens
acatcttacacagta

SEQ ID NO: 888939 - DNA, 15 bp, Homo sapiens
catcttacacagtaa

SEQ ID NO: 888940 - DNA, 15 bp, Homo sapiens
atcttacacagtaag

SEQ ID NO: 888941 - DNA, 15 bp, Homo sapiens
tcttacacagtaagc

SEQ ID NO: 888942 - DNA, 15 bp, Homo sapiens
cttacacagtaagct

SEQ ID NO: 888943 - DNA, 15 bp, Homo sapiens
ttacacagtaagctc

SEQ ID NO: 888944 - DNA, 15 bp, Homo sapiens
tacacagtaagctct

SEQ ID NO: 888945 - DNA, 15 bp, Homo sapiens
acacagtaagctctt

SEQ ID NO: 888946 - DNA, 15 bp, Homo sapiens
cacagtaagctcttt

SEQ ID NO: 888947 - DNA, 15 bp, Homo sapiens
acagtaagctcttta

SEQ ID NO: 888948 - DNA, 15 bp, Homo sapiens
cagtaagctctttaa

SEQ ID NO: 888949 - DNA, 15 bp, Homo sapiens
agtaagctctttaag

SEQ ID NO: 888950 - DNA, 15 bp, Homo sapiens
gtaagctctttaagc

SEQ ID NO: 888951 - DNA, 15 bp, Homo sapiens
taagctctttaagcg

SEQ ID NO: 888952 - DNA, 15 bp, Homo sapiens
aagctctttaagcga

SEQ ID NO: 888953 - DNA, 15 bp, Homo sapiens
agctctttaagcgaa

SEQ ID NO: 888954 - DNA, 15 bp, Homo sapiens
gctctttaagcgaat

SEQ ID NO: 888955 - DNA, 15 bp, Homo sapiens
ctctttaagcgaatt

SEQ ID NO: 888956 - DNA, 15 bp, Homo sapiens
tctttaagcgaattc

SEQ ID NO: 888957 - DNA, 15 bp, Homo sapiens
ctttaagcgaattct

SEQ ID NO: 888958 - DNA, 15 bp, Homo sapiens
tttaagcgaattctt

SEQ ID NO: 888959 - DNA, 15 bp, Homo sapiens
ttaagcgaattcttt

SEQ ID NO: 888960 - DNA, 15 bp, Homo sapiens
taagcgaattctttt

SEQ ID NO: 888961 - DNA, 15 bp, Homo sapiens
aagcgaattcttttt

SEQ ID NO: 888962 - DNA, 15 bp, Homo sapiens
agcgaattctttttt

SEQ ID NO: 888963 - DNA, 15 bp, Homo sapiens
gcgaattcttttttt

SEQ ID NO: 888964 - DNA, 15 bp, Homo sapiens
cgaattctttttttc

SEQ ID NO: 888965 - DNA, 15 bp, Homo sapiens
gaattctttttttct

SEQ ID NO: 888966 - DNA, 15 bp, Homo sapiens
aattctttttttctt

SEQ ID NO: 888967 - DNA, 15 bp, Homo sapiens
attctttttttcttt

SEQ ID NO: 888968 - DNA, 15 bp, Homo sapiens
gacggagtctcgctt

SEQ ID NO: 888969 - DNA, 15 bp, Homo sapiens
acggagtctcgcttt

SEQ ID NO: 888970 - DNA, 15 bp, Homo sapiens
cggagtctcgctttg

SEQ ID NO: 888971 - DNA, 15 bp, Homo sapiens
ggagtctcgctttgt

SEQ ID NO: 888972 - DNA, 15 bp, Homo sapiens
gagtctcgctttgtt

SEQ ID NO: 888973 - DNA, 15 bp, Homo sapiens
agtctcgctttgttg

SEQ ID NO: 888974 - DNA, 15 bp, Homo sapiens
gtctcgctttgttgc

SEQ ID NO: 888975 - DNA, 15 bp, Homo sapiens
tctcgctttgttgcc

SEQ ID NO: 888976 - DNA, 15 bp, Homo sapiens
ctcgctttgttgccc

SEQ ID NO: 888977 - DNA, 15 bp, Homo sapiens
tcgctttgttgccca

SEQ ID NO: 888978 - DNA, 15 bp, Homo sapiens
cgctttgttgcccag

SEQ ID NO: 888979 - DNA, 15 bp, Homo sapiens
gctttgttgcccagg

SEQ ID NO: 888980 - DNA, 15 bp, Homo sapiens
ctttgttgcccaggc

SEQ ID NO: 888981 - DNA, 15 bp, Homo sapiens
tttgttgcccaggct

SEQ ID NO: 888982 - DNA, 15 bp, Homo sapiens
attttcagctcctga

SEQ ID NO: 888983 - DNA, 15 bp, Homo sapiens
ttttcagctcctgat

SEQ ID NO: 888984 - DNA, 15 bp, Homo sapiens
tttcagctcctgatg

SEQ ID NO: 888985 - DNA, 15 bp, Homo sapiens
ttcagctcctgatgg

SEQ ID NO: 888986 - DNA, 15 bp, Homo sapiens
tcagctcctgatggt

SEQ ID NO: 888987 - DNA, 15 bp, Homo sapiens
cagctcctgatggtt

SEQ ID NO: 888988 - DNA, 15 bp, Homo sapiens
agctcctgatggttg

SEQ ID NO: 888989 - DNA, 15 bp, Homo sapiens
gctcctgatggttga

SEQ ID NO: 888990 - DNA, 15 bp, Homo sapiens
ctcctgatggttgaa

SEQ ID NO: 888991 - DNA, 15 bp, Homo sapiens
tcctgatggttgaac

SEQ ID NO: 888992 - DNA, 15 bp, Homo sapiens
cctgatggttgaaca

SEQ ID NO: 888993 - DNA, 15 bp, Homo sapiens
ctgatggttgaacac

SEQ ID NO: 888994 - DNA, 15 bp, Homo sapiens
tgatggttgaacact

SEQ ID NO: 888995 - DNA, 15 bp, Homo sapiens
gatggttgaacactt

SEQ ID NO: 888996 - DNA, 15 bp, Homo sapiens
atggttgaacacttg

SEQ ID NO: 888997 - DNA, 15 bp, Homo sapiens
tggttgaacacttgg

SEQ ID NO: 888998 - DNA, 15 bp, Homo sapiens
ggttgaacacttggc

SEQ ID NO: 888999 - DNA, 15 bp, Homo sapiens
gttgaacacttggct

SEQ ID NO: 889000 - DNA, 15 bp, Homo sapiens
ttgaacacttggctt

SEQ ID NO: 889001 - DNA, 15 bp, Homo sapiens
tgaacacttggcttg

SEQ ID NO: 889002 - DNA, 15 bp, Homo sapiens
gaacacttggcttgc

SEQ ID NO: 889003 - DNA, 15 bp, Homo sapiens
aacacttggcttgca

SEQ ID NO: 889004 - DNA, 15 bp, Homo sapiens
acacttggcttgcaa

SEQ ID NO: 889005 - DNA, 15 bp, Homo sapiens
cacttggcttgcaaa

SEQ ID NO: 889006 - DNA, 15 bp, Homo sapiens
acttggcttgcaaag

SEQ ID NO: 889007 - DNA, 15 bp, Homo sapiens
cttggcttgcaaagg

SEQ ID NO: 889008 - DNA, 15 bp, Homo sapiens
ttggcttgcaaaggc

SEQ ID NO: 889009 - DNA, 15 bp, Homo sapiens
tggcttgcaaaggct

SEQ ID NO: 889010 - DNA, 15 bp, Homo sapiens
ggcttgcaaaggctc

SEQ ID NO: 889011 - DNA, 15 bp, Homo sapiens
gcttgcaaaggctct

SEQ ID NO: 889012 - DNA, 15 bp, Homo sapiens
cttgcaaaggctctc

SEQ ID NO: 889013 - DNA, 15 bp, Homo sapiens
ttgcaaaggctctca

SEQ ID NO: 889014 - DNA, 15 bp, Homo sapiens
tgcaaaggctctcac

SEQ ID NO: 889015 - DNA, 15 bp, Homo sapiens
gcaaaggctctcacg

SEQ ID NO: 889016 - DNA, 15 bp, Homo sapiens
caaaggctctcacgg

SEQ ID NO: 889017 - DNA, 15 bp, Homo sapiens
aaaggctctcacggt

SEQ ID NO: 889018 - DNA, 15 bp, Homo sapiens
aaggctctcacggtg

SEQ ID NO: 889019 - DNA, 15 bp, Homo sapiens
aggctctcacggtgc

SEQ ID NO: 889020 - DNA, 15 bp, Homo sapiens
ggctctcacggtgcc

SEQ ID NO: 889021 - DNA, 15 bp, Homo sapiens
gctctcacggtgcca

SEQ ID NO: 889022 - DNA, 15 bp, Homo sapiens
ctctcacggtgccag

SEQ ID NO: 889023 - DNA, 15 bp, Homo sapiens
tctcacggtgccagt

SEQ ID NO: 889024 - DNA, 15 bp, Homo sapiens
ctcacggtgccagtg

SEQ ID NO: 889025 - DNA, 15 bp, Homo sapiens
tcacggtgccagtgt

SEQ ID NO: 889026 - DNA, 15 bp, Homo sapiens
cacggtgccagtgtg

SEQ ID NO: 889027 - DNA, 15 bp, Homo sapiens
acggtgccagtgtga

SEQ ID NO: 889028 - DNA, 15 bp, Homo sapiens
cggtgccagtgtgag

SEQ ID NO: 889029 - DNA, 15 bp, Homo sapiens
ggtgccagtgtgagc

SEQ ID NO: 889030 - DNA, 15 bp, Homo sapiens
gtgccagtgtgagcc

SEQ ID NO: 889031 - DNA, 15 bp, Homo sapiens
tgccagtgtgagcca

SEQ ID NO: 889032 - DNA, 15 bp, Homo sapiens
gccagtgtgagccag

SEQ ID NO: 889033 - DNA, 15 bp, Homo sapiens
ccagtgtgagccagc

SEQ ID NO: 889034 - DNA, 15 bp, Homo sapiens
cagtgtgagccagct

SEQ ID NO: 889035 - DNA, 15 bp, Homo sapiens
agtgtgagccagctg

SEQ ID NO: 889036 - DNA, 15 bp, Homo sapiens
gtgtgagccagctgc

SEQ ID NO: 889037 - DNA, 15 bp, Homo sapiens
tgtgagccagctgca

SEQ ID NO: 889038 - DNA, 15 bp, Homo sapiens
gtgagccagctgcag

SEQ ID NO: 889039 - DNA, 15 bp, Homo sapiens
tgagccagctgcagc

SEQ ID NO: 889040 - DNA, 15 bp, Homo sapiens
gagccagctgcagca

SEQ ID NO: 889041 - DNA, 15 bp, Homo sapiens
agccagctgcagcac

SEQ ID NO: 889042 - DNA, 15 bp, Homo sapiens
gccagctgcagcaca

SEQ ID NO: 889043 - DNA, 15 bp, Homo sapiens
ccagctgcagcacac

SEQ ID NO: 889044 - DNA, 15 bp, Homo sapiens
cagctgcagcacacc

SEQ ID NO: 889045 - DNA, 15 bp, Homo sapiens
agctgcagcacacct

SEQ ID NO: 889046 - DNA, 15 bp, Homo sapiens
gctgcagcacaccta

SEQ ID NO: 889047 - DNA, 15 bp, Homo sapiens
ctgcagcacacctag

SEQ ID NO: 889048 - DNA, 15 bp, Homo sapiens
tgcagcacacctagg

SEQ ID NO: 889049 - DNA, 15 bp, Homo sapiens
gcagcacacctaggg

SEQ ID NO: 889050 - DNA, 15 bp, Homo sapiens
cagcacacctaggga

SEQ ID NO: 889051 - DNA, 15 bp, Homo sapiens
agcacacctagggac

SEQ ID NO: 889052 - DNA, 15 bp, Homo sapiens
gcacacctagggaca

SEQ ID NO: 889053 - DNA, 15 bp, Homo sapiens
cacacctagggacac

SEQ ID NO: 889054 - DNA, 15 bp, Homo sapiens
acacctagggacacc

SEQ ID NO: 889055 - DNA, 15 bp, Homo sapiens
cacctagggacaccg

SEQ ID NO: 889056 - DNA, 15 bp, Homo sapiens
acctagggacaccga

SEQ ID NO: 889057 - DNA, 15 bp, Homo sapiens
cctagggacaccgat

SEQ ID NO: 889058 - DNA, 15 bp, Homo sapiens
ctagggacaccgatt

SEQ ID NO: 889059 - DNA, 15 bp, Homo sapiens
tagggacaccgattc

SEQ ID NO: 889060 - DNA, 15 bp, Homo sapiens
agggacaccgattca

SEQ ID NO: 889061 - DNA, 15 bp, Homo sapiens
gggacaccgattcac

SEQ ID NO: 889062 - DNA, 15 bp, Homo sapiens
ggacaccgattcaca

SEQ ID NO: 889063 - DNA, 15 bp, Homo sapiens
gacaccgattcacac

SEQ ID NO: 889064 - DNA, 15 bp, Homo sapiens
acaccgattcacaca

SEQ ID NO: 889065 - DNA, 15 bp, Homo sapiens
caccgattcacacag

SEQ ID NO: 889066 - DNA, 15 bp, Homo sapiens
accgattcacacagg

SEQ ID NO: 889067 - DNA, 15 bp, Homo sapiens
ccgattcacacagga

SEQ ID NO: 889068 - DNA, 15 bp, Homo sapiens
cgattcacacaggag

SEQ ID NO: 889069 - DNA, 15 bp, Homo sapiens
gattcacacaggagt

SEQ ID NO: 889070 - DNA, 15 bp, Homo sapiens
attcacacaggagtc

SEQ ID NO: 889071 - DNA, 15 bp, Homo sapiens
ttcacacaggagtct

SEQ ID NO: 889072 - DNA, 15 bp, Homo sapiens
tcacacaggagtcta

SEQ ID NO: 889073 - DNA, 15 bp, Homo sapiens
cacacaggagtctac

SEQ ID NO: 889074 - DNA, 15 bp, Homo sapiens
acacaggagtctacc

SEQ ID NO: 889075 - DNA, 15 bp, Homo sapiens
cacaggagtctacct

SEQ ID NO: 889076 - DNA, 15 bp, Homo sapiens
acaggagtctacctt

SEQ ID NO: 889077 - DNA, 15 bp, Homo sapiens
caggagtctaccttt

SEQ ID NO: 889078 - DNA, 15 bp, Homo sapiens
aggagtctacctttg

SEQ ID NO: 889079 - DNA, 15 bp, Homo sapiens
ggagtctacctttgc

SEQ ID NO: 889080 - DNA, 15 bp, Homo sapiens
gagtctacctttgct

SEQ ID NO: 889081 - DNA, 15 bp, Homo sapiens
agtctacctttgctg

SEQ ID NO: 889082 - DNA, 15 bp, Homo sapiens
gtctacctttgctgc

SEQ ID NO: 889083 - DNA, 15 bp, Homo sapiens
tctacctttgctgca

SEQ ID NO: 889084 - DNA, 15 bp, Homo sapiens
ctacctttgctgcag

SEQ ID NO: 889085 - DNA, 15 bp, Homo sapiens
tacctttgctgcagc

SEQ ID NO: 889086 - DNA, 15 bp, Homo sapiens
acctttgctgcagct

SEQ ID NO: 889087 - DNA, 15 bp, Homo sapiens
cctttgctgcagcta

SEQ ID NO: 889088 - DNA, 15 bp, Homo sapiens
ctttgctgcagctat

SEQ ID NO: 889089 - DNA, 15 bp, Homo sapiens
tttgctgcagctatt

SEQ ID NO: 889090 - DNA, 15 bp, Homo sapiens
ttgctgcagctattt

SEQ ID NO: 889091 - DNA, 15 bp, Homo sapiens
tgctgcagctatttt

SEQ ID NO: 889092 - DNA, 15 bp, Homo sapiens
gctgcagctatttta

SEQ ID NO: 889093 - DNA, 15 bp, Homo sapiens
ctgcagctattttag

SEQ ID NO: 889094 - DNA, 15 bp, Homo sapiens
tgcagctattttaga

SEQ ID NO: 889095 - DNA, 15 bp, Homo sapiens
gcagctattttagat

SEQ ID NO: 889096 - DNA, 15 bp, Homo sapiens
cagctattttagatg

SEQ ID NO: 889097 - DNA, 15 bp, Homo sapiens
agctattttagatga

SEQ ID NO: 889098 - DNA, 15 bp, Homo sapiens
gctattttagatgat

SEQ ID NO: 889099 - DNA, 15 bp, Homo sapiens
ctattttagatgata

SEQ ID NO: 889100 - DNA, 15 bp, Homo sapiens
tattttagatgataa

SEQ ID NO: 889101 - DNA, 15 bp, Homo sapiens
attttagatgataat

SEQ ID NO: 889102 - DNA, 15 bp, Homo sapiens
ttttagatgataatg

SEQ ID NO: 889103 - DNA, 15 bp, Homo sapiens
tttagatgataatga

SEQ ID NO: 889104 - DNA, 15 bp, Homo sapiens
ttagatgataatgat

SEQ ID NO: 889105 - DNA, 15 bp, Homo sapiens
tagatgataatgatg

SEQ ID NO: 889106 - DNA, 15 bp, Homo sapiens
agatgataatgatgg

SEQ ID NO: 889107 - DNA, 15 bp, Homo sapiens
gatgataatgatggc

SEQ ID NO: 889108 - DNA, 15 bp, Homo sapiens
atgataatgatggcc

SEQ ID NO: 889109 - DNA, 15 bp, Homo sapiens
tgataatgatggcca

SEQ ID NO: 889110 - DNA, 15 bp, Homo sapiens
gataatgatggccat

SEQ ID NO: 889111 - DNA, 15 bp, Homo sapiens
ataatgatggccatt

SEQ ID NO: 889112 - DNA, 15 bp, Homo sapiens
taatgatggccatta

SEQ ID NO: 889113 - DNA, 15 bp, Homo sapiens
aatgatggccattat

SEQ ID NO: 889114 - DNA, 15 bp, Homo sapiens
atgatggccattatc

SEQ ID NO: 889115 - DNA, 15 bp, Homo sapiens
tgatggccattatct

SEQ ID NO: 889116 - DNA, 15 bp, Homo sapiens
gatggccattatctg

SEQ ID NO: 889117 - DNA, 15 bp, Homo sapiens
atggccattatctgt

SEQ ID NO: 889118 - DNA, 15 bp, Homo sapiens
tggccattatctgtc

SEQ ID NO: 889119 - DNA, 15 bp, Homo sapiens
ggccattatctgtca

SEQ ID NO: 889120 - DNA, 15 bp, Homo sapiens
gccattatctgtcag

SEQ ID NO: 889121 - DNA, 15 bp, Homo sapiens
ccattatctgtcagg

SEQ ID NO: 889122 - DNA, 15 bp, Homo sapiens
cattatctgtcaggg

SEQ ID NO: 889123 - DNA, 15 bp, Homo sapiens
attatctgtcagggc

SEQ ID NO: 889124 - DNA, 15 bp, Homo sapiens
ttatctgtcagggcc

SEQ ID NO: 889125 - DNA, 15 bp, Homo sapiens
tatctgtcagggcca

SEQ ID NO: 889126 - DNA, 15 bp, Homo sapiens
atctgtcagggccac

SEQ ID NO: 889127 - DNA, 15 bp, Homo sapiens
tctgtcagggccact

SEQ ID NO: 889128 - DNA, 15 bp, Homo sapiens
ctgtcagggccactg

SEQ ID NO: 889129 - DNA, 15 bp, Homo sapiens
tgtcagggccactgc

SEQ ID NO: 889130 - DNA, 15 bp, Homo sapiens
gtcagggccactgcc

SEQ ID NO: 889131 - DNA, 15 bp, Homo sapiens
tcagggccactgccc

SEQ ID NO: 889132 - DNA, 15 bp, Homo sapiens
cagggccactgccca

SEQ ID NO: 889133 - DNA, 15 bp, Homo sapiens
agggccactgcccaa

SEQ ID NO: 889134 - DNA, 15 bp, Homo sapiens
gggccactgcccaag

SEQ ID NO: 889135 - DNA, 15 bp, Homo sapiens
ggccactgcccaagg

SEQ ID NO: 889136 - DNA, 15 bp, Homo sapiens
gccactgcccaaggc

SEQ ID NO: 889137 - DNA, 15 bp, Homo sapiens
ccactgcccaaggcc

SEQ ID NO: 889138 - DNA, 15 bp, Homo sapiens
cactgcccaaggcca

SEQ ID NO: 889139 - DNA, 15 bp, Homo sapiens
actgcccaaggccac

SEQ ID NO: 889140 - DNA, 15 bp, Homo sapiens
ctgcccaaggccaca

SEQ ID NO: 889141 - DNA, 15 bp, Homo sapiens
tgcccaaggccacag

SEQ ID NO: 889142 - DNA, 15 bp, Homo sapiens
gcccaaggccacagc

SEQ ID NO: 889143 - DNA, 15 bp, Homo sapiens
cccaaggccacagct

SEQ ID NO: 889144 - DNA, 15 bp, Homo sapiens
ccaaggccacagcta

SEQ ID NO: 889145 - DNA, 15 bp, Homo sapiens
caaggccacagctaa

SEQ ID NO: 889146 - DNA, 15 bp, Homo sapiens
aaggccacagctaag

SEQ ID NO: 889147 - DNA, 15 bp, Homo sapiens
aggccacagctaagc

SEQ ID NO: 889148 - DNA, 15 bp, Homo sapiens
ggccacagctaagca

SEQ ID NO: 889149 - DNA, 15 bp, Homo sapiens
gccacagctaagcag

SEQ ID NO: 889150 - DNA, 15 bp, Homo sapiens
ccacagctaagcaga

SEQ ID NO: 889151 - DNA, 15 bp, Homo sapiens
cacagctaagcagaa

SEQ ID NO: 889152 - DNA, 15 bp, Homo sapiens
acagctaagcagaag

SEQ ID NO: 889153 - DNA, 15 bp, Homo sapiens
cagctaagcagaagt

SEQ ID NO: 889154 - DNA, 15 bp, Homo sapiens
agctaagcagaagtg

SEQ ID NO: 889155 - DNA, 15 bp, Homo sapiens
gctaagcagaagtgg

SEQ ID NO: 889156 - DNA, 15 bp, Homo sapiens
ctaagcagaagtgga

SEQ ID NO: 889157 - DNA, 15 bp, Homo sapiens
taagcagaagtggaa

SEQ ID NO: 889158 - DNA, 15 bp, Homo sapiens
aagcagaagtggaaa

SEQ ID NO: 889159 - DNA, 15 bp, Homo sapiens
agcagaagtggaaac

SEQ ID NO: 889160 - DNA, 15 bp, Homo sapiens
gcagaagtggaaaca

SEQ ID NO: 889161 - DNA, 15 bp, Homo sapiens
cagaagtggaaacac

SEQ ID NO: 889162 - DNA, 15 bp, Homo sapiens
agaagtggaaacacc

SEQ ID NO: 889163 - DNA, 15 bp, Homo sapiens
gaagtggaaacaccc

SEQ ID NO: 889164 - DNA, 15 bp, Homo sapiens
aagtggaaacaccct

SEQ ID NO: 889165 - DNA, 15 bp, Homo sapiens
agtggaaacaccctc

SEQ ID NO: 889166 - DNA, 15 bp, Homo sapiens
gtggaaacaccctct

SEQ ID NO: 889167 - DNA, 15 bp, Homo sapiens
tggaaacaccctctt

SEQ ID NO: 889168 - DNA, 15 bp, Homo sapiens
ggaaacaccctcttc

SEQ ID NO: 889169 - DNA, 15 bp, Homo sapiens
gaaacaccctcttcg

SEQ ID NO: 889170 - DNA, 15 bp, Homo sapiens
aaacaccctcttcgt

SEQ ID NO: 889171 - DNA, 15 bp, Homo sapiens
aacaccctcttcgta

SEQ ID NO: 889172 - DNA, 15 bp, Homo sapiens
acaccctcttcgtag

SEQ ID NO: 889173 - DNA, 15 bp, Homo sapiens
caccctcttcgtagg

SEQ ID NO: 889174 - DNA, 15 bp, Homo sapiens
accctcttcgtaggt

SEQ ID NO: 889175 - DNA, 15 bp, Homo sapiens
ccctcttcgtaggtc

SEQ ID NO: 889176 - DNA, 15 bp, Homo sapiens
cctcttcgtaggtcc

SEQ ID NO: 889177 - DNA, 15 bp, Homo sapiens
ctcttcgtaggtccc

SEQ ID NO: 889178 - DNA, 15 bp, Homo sapiens
tcttcgtaggtccca

SEQ ID NO: 889179 - DNA, 15 bp, Homo sapiens
cttcgtaggtcccaa

SEQ ID NO: 889180 - DNA, 15 bp, Homo sapiens
ttcgtaggtcccaaa

SEQ ID NO: 889181 - DNA, 15 bp, Homo sapiens
tcgtaggtcccaaag

SEQ ID NO: 889182 - DNA, 15 bp, Homo sapiens
cgtaggtcccaaagt

SEQ ID NO: 889183 - DNA, 15 bp, Homo sapiens
gtaggtcccaaagtg

SEQ ID NO: 889184 - DNA, 15 bp, Homo sapiens
taggtcccaaagtgg

SEQ ID NO: 889185 - DNA, 15 bp, Homo sapiens
aggtcccaaagtggc

SEQ ID NO: 889186 - DNA, 15 bp, Homo sapiens
ggtcccaaagtggca

SEQ ID NO: 889187 - DNA, 15 bp, Homo sapiens
gtcccaaagtggcat

SEQ ID NO: 889188 - DNA, 15 bp, Homo sapiens
tcccaaagtggcatt

SEQ ID NO: 889189 - DNA, 15 bp, Homo sapiens
cccaaagtggcattt

SEQ ID NO: 889190 - DNA, 15 bp, Homo sapiens
ccaaagtggcatttc

SEQ ID NO: 889191 - DNA, 15 bp, Homo sapiens
caaagtggcatttct

SEQ ID NO: 889192 - DNA, 15 bp, Homo sapiens
aaagtggcatttctt

SEQ ID NO: 889193 - DNA, 15 bp, Homo sapiens
aagtggcatttcttg

SEQ ID NO: 889194 - DNA, 15 bp, Homo sapiens
agtggcatttcttgt

SEQ ID NO: 889195 - DNA, 15 bp, Homo sapiens
gtggcatttcttgtg

SEQ ID NO: 889196 - DNA, 15 bp, Homo sapiens
tggcatttcttgtgt

SEQ ID NO: 889197 - DNA, 15 bp, Homo sapiens
ggcatttcttgtgtt

SEQ ID NO: 889198 - DNA, 15 bp, Homo sapiens
gcatttcttgtgttc

SEQ ID NO: 889199 - DNA, 15 bp, Homo sapiens
catttcttgtgttct

SEQ ID NO: 889200 - DNA, 15 bp, Homo sapiens
atttcttgtgttctg

SEQ ID NO: 889201 - DNA, 15 bp, Homo sapiens
tttcttgtgttctga

SEQ ID NO: 889202 - DNA, 15 bp, Homo sapiens
ttcttgtgttctgag

SEQ ID NO: 889203 - DNA, 15 bp, Homo sapiens
tcttgtgttctgagt

SEQ ID NO: 889204 - DNA, 15 bp, Homo sapiens
cttgtgttctgagtc

SEQ ID NO: 889205 - DNA, 15 bp, Homo sapiens
ttgtgttctgagtcc

SEQ ID NO: 889206 - DNA, 15 bp, Homo sapiens
tgtgttctgagtccc

SEQ ID NO: 889207 - DNA, 15 bp, Homo sapiens
gtgttctgagtccca

SEQ ID NO: 889208 - DNA, 15 bp, Homo sapiens
tgttctgagtcccac

SEQ ID NO: 889209 - DNA, 15 bp, Homo sapiens
gttctgagtcccaca

SEQ ID NO: 889210 - DNA, 15 bp, Homo sapiens
ttctgagtcccacaa

SEQ ID NO: 889211 - DNA, 15 bp, Homo sapiens
tctgagtcccacaag

SEQ ID NO: 889212 - DNA, 15 bp, Homo sapiens
ctgagtcccacaagc

SEQ ID NO: 889213 - DNA, 15 bp, Homo sapiens
tgagtcccacaagcc

SEQ ID NO: 889214 - DNA, 15 bp, Homo sapiens
gagtcccacaagccc

SEQ ID NO: 889215 - DNA, 15 bp, Homo sapiens
agtcccacaagccct

SEQ ID NO: 889216 - DNA, 15 bp, Homo sapiens
gtcccacaagcccta

SEQ ID NO: 889217 - DNA, 15 bp, Homo sapiens
tcccacaagccctaa

SEQ ID NO: 889218 - DNA, 15 bp, Homo sapiens
cccacaagccctaac

SEQ ID NO: 889219 - DNA, 15 bp, Homo sapiens
ccacaagccctaaca

SEQ ID NO: 889220 - DNA, 15 bp, Homo sapiens
cacaagccctaacaa

SEQ ID NO: 889221 - DNA, 15 bp, Homo sapiens
acaagccctaacaac

SEQ ID NO: 889222 - DNA, 15 bp, Homo sapiens
caagccctaacaaca

SEQ ID NO: 889223 - DNA, 15 bp, Homo sapiens
aagccctaacaacag

SEQ ID NO: 889224 - DNA, 15 bp, Homo sapiens
agccctaacaacagc

SEQ ID NO: 889225 - DNA, 15 bp, Homo sapiens
gccctaacaacagct

SEQ ID NO: 889226 - DNA, 15 bp, Homo sapiens
ccctaacaacagctt

SEQ ID NO: 889227 - DNA, 15 bp, Homo sapiens
cctaacaacagcttt

SEQ ID NO: 889228 - DNA, 15 bp, Homo sapiens
ctaacaacagctttc

SEQ ID NO: 889229 - DNA, 15 bp, Homo sapiens
taacaacagctttct

SEQ ID NO: 889230 - DNA, 15 bp, Homo sapiens
aacaacagctttctc

SEQ ID NO: 889231 - DNA, 15 bp, Homo sapiens
acaacagctttctct

SEQ ID NO: 889232 - DNA, 15 bp, Homo sapiens
caacagctttctctc

SEQ ID NO: 889233 - DNA, 15 bp, Homo sapiens
aacagctttctctct

SEQ ID NO: 889234 - DNA, 15 bp, Homo sapiens
acagctttctctctc

SEQ ID NO: 889235 - DNA, 15 bp, Homo sapiens
cagctttctctctct

SEQ ID NO: 889236 - DNA, 15 bp, Homo sapiens
agctttctctctctt

SEQ ID NO: 889237 - DNA, 15 bp, Homo sapiens
gctttctctctcttg

SEQ ID NO: 889238 - DNA, 15 bp, Homo sapiens
ctttctctctcttgc

SEQ ID NO: 889239 - DNA, 15 bp, Homo sapiens
tttctctctcttgct

SEQ ID NO: 889240 - DNA, 15 bp, Homo sapiens
ttctctctcttgctc

SEQ ID NO: 889241 - DNA, 15 bp, Homo sapiens
tctctctcttgctct

SEQ ID NO: 889242 - DNA, 15 bp, Homo sapiens
ctctctcttgctctc

SEQ ID NO: 889243 - DNA, 15 bp, Homo sapiens
tctctcttgctctct

SEQ ID NO: 889244 - DNA, 15 bp, Homo sapiens
ctctcttgctctctc

SEQ ID NO: 889245 - DNA, 15 bp, Homo sapiens
tctcttgctctctct

SEQ ID NO: 889246 - DNA, 15 bp, Homo sapiens
ctcttgctctctctc

SEQ ID NO: 889247 - DNA, 15 bp, Homo sapiens
tcttgctctctctca

SEQ ID NO: 889248 - DNA, 15 bp, Homo sapiens
cttgctctctctcac

SEQ ID NO: 889249 - DNA, 15 bp, Homo sapiens
ttgctctctctcact

SEQ ID NO: 889250 - DNA, 15 bp, Homo sapiens
tgctctctctcactc

SEQ ID NO: 889251 - DNA, 15 bp, Homo sapiens
gctctctctcactca

SEQ ID NO: 889252 - DNA, 15 bp, Homo sapiens
ctctctctcactcac

SEQ ID NO: 889253 - DNA, 15 bp, Homo sapiens
tctctctcactcact

SEQ ID NO: 889254 - DNA, 15 bp, Homo sapiens
ctctctcactcacta

SEQ ID NO: 889255 - DNA, 15 bp, Homo sapiens
tctctcactcactaa

SEQ ID NO: 889256 - DNA, 15 bp, Homo sapiens
ctctcactcactaag

SEQ ID NO: 889257 - DNA, 15 bp, Homo sapiens
tctcactcactaagg

SEQ ID NO: 889258 - DNA, 15 bp, Homo sapiens
ctcactcactaaggc

SEQ ID NO: 889259 - DNA, 15 bp, Homo sapiens
tcactcactaaggct

SEQ ID NO: 889260 - DNA, 15 bp, Homo sapiens
cactcactaaggctc

SEQ ID NO: 889261 - DNA, 15 bp, Homo sapiens
actcactaaggctca

SEQ ID NO: 889262 - DNA, 15 bp, Homo sapiens
ctcactaaggctcaa

SEQ ID NO: 889263 - DNA, 15 bp, Homo sapiens
tcactaaggctcaag

SEQ ID NO: 889264 - DNA, 15 bp, Homo sapiens
cactaaggctcaagt

SEQ ID NO: 889265 - DNA, 15 bp, Homo sapiens
actaaggctcaagtc

SEQ ID NO: 889266 - DNA, 15 bp, Homo sapiens
ctaaggctcaagtca

SEQ ID NO: 889267 - DNA, 15 bp, Homo sapiens
taaggctcaagtcag

SEQ ID NO: 889268 - DNA, 15 bp, Homo sapiens
aaggctcaagtcagg

SEQ ID NO: 889269 - DNA, 15 bp, Homo sapiens
aggctcaagtcaggc

SEQ ID NO: 889270 - DNA, 15 bp, Homo sapiens
ggctcaagtcaggcc

SEQ ID NO: 889271 - DNA, 15 bp, Homo sapiens
gctcaagtcaggcct

SEQ ID NO: 889272 - DNA, 15 bp, Homo sapiens
ctcaagtcaggcctg

SEQ ID NO: 889273 - DNA, 15 bp, Homo sapiens
tcaagtcaggcctgg

SEQ ID NO: 889274 - DNA, 15 bp, Homo sapiens
caagtcaggcctggg

SEQ ID NO: 889275 - DNA, 15 bp, Homo sapiens
aagtcaggcctggga

SEQ ID NO: 889276 - DNA, 15 bp, Homo sapiens
agtcaggcctgggac

SEQ ID NO: 889277 - DNA, 15 bp, Homo sapiens
gtcaggcctgggaca

SEQ ID NO: 889278 - DNA, 15 bp, Homo sapiens
tcaggcctgggacag

SEQ ID NO: 889279 - DNA, 15 bp, Homo sapiens
caggcctgggacagg

SEQ ID NO: 889280 - DNA, 15 bp, Homo sapiens
aggcctgggacaggg

SEQ ID NO: 889281 - DNA, 15 bp, Homo sapiens
ggcctgggacagggt

SEQ ID NO: 889282 - DNA, 15 bp, Homo sapiens
gcctgggacagggtt

SEQ ID NO: 889283 - DNA, 15 bp, Homo sapiens
cctgggacagggttg

SEQ ID NO: 889284 - DNA, 15 bp, Homo sapiens
ctgggacagggttga

SEQ ID NO: 889285 - DNA, 15 bp, Homo sapiens
tgggacagggttgag

SEQ ID NO: 889286 - DNA, 15 bp, Homo sapiens
gggacagggttgagc

SEQ ID NO: 889287 - DNA, 15 bp, Homo sapiens
ggacagggttgagca

SEQ ID NO: 889288 - DNA, 15 bp, Homo sapiens
gacagggttgagcaa

SEQ ID NO: 889289 - DNA, 15 bp, Homo sapiens
acagggttgagcaat

SEQ ID NO: 889290 - DNA, 15 bp, Homo sapiens
cagggttgagcaatt

SEQ ID NO: 889291 - DNA, 15 bp, Homo sapiens
agggttgagcaattg

SEQ ID NO: 889292 - DNA, 15 bp, Homo sapiens
gggttgagcaattgc

SEQ ID NO: 889293 - DNA, 15 bp, Homo sapiens
ggttgagcaattgcc

SEQ ID NO: 889294 - DNA, 15 bp, Homo sapiens
gttgagcaattgcca

SEQ ID NO: 889295 - DNA, 15 bp, Homo sapiens
ttgagcaattgccaa

SEQ ID NO: 889296 - DNA, 15 bp, Homo sapiens
tgagcaattgccaac

SEQ ID NO: 889297 - DNA, 15 bp, Homo sapiens
gagcaattgccaacc

SEQ ID NO: 889298 - DNA, 15 bp, Homo sapiens
agcaattgccaacct

SEQ ID NO: 889299 - DNA, 15 bp, Homo sapiens
gcaattgccaacctg

SEQ ID NO: 889300 - DNA, 15 bp, Homo sapiens
caattgccaacctgt

SEQ ID NO: 889301 - DNA, 15 bp, Homo sapiens
aattgccaacctgtc

SEQ ID NO: 889302 - DNA, 15 bp, Homo sapiens
attgccaacctgtca

SEQ ID NO: 889303 - DNA, 15 bp, Homo sapiens
ttgccaacctgtcac

SEQ ID NO: 889304 - DNA, 15 bp, Homo sapiens
tgccaacctgtcacc

SEQ ID NO: 889305 - DNA, 15 bp, Homo sapiens
gccaacctgtcacca

SEQ ID NO: 889306 - DNA, 15 bp, Homo sapiens
ccaacctgtcaccat

SEQ ID NO: 889307 - DNA, 15 bp, Homo sapiens
caacctgtcaccatc

SEQ ID NO: 889308 - DNA, 15 bp, Homo sapiens
aacctgtcaccatct

SEQ ID NO: 889309 - DNA, 15 bp, Homo sapiens
acctgtcaccatctc

SEQ ID NO: 889310 - DNA, 15 bp, Homo sapiens
cctgtcaccatctcc

SEQ ID NO: 889311 - DNA, 15 bp, Homo sapiens
ctgtcaccatctccc

SEQ ID NO: 889312 - DNA, 15 bp, Homo sapiens
tgtcaccatctccca

SEQ ID NO: 889313 - DNA, 15 bp, Homo sapiens
gtcaccatctcccac

SEQ ID NO: 889314 - DNA, 15 bp, Homo sapiens
tcaccatctcccact

SEQ ID NO: 889315 - DNA, 15 bp, Homo sapiens
caccatctcccactt

SEQ ID NO: 889316 - DNA, 15 bp, Homo sapiens
accatctcccacttc

SEQ ID NO: 889317 - DNA, 15 bp, Homo sapiens
ccatctcccacttct

SEQ ID NO: 889318 - DNA, 15 bp, Homo sapiens
catctcccacttcta

SEQ ID NO: 889319 - DNA, 15 bp, Homo sapiens
atctcccacttctat

SEQ ID NO: 889320 - DNA, 15 bp, Homo sapiens
tctcccacttctatg

SEQ ID NO: 889321 - DNA, 15 bp, Homo sapiens
ctcccacttctatga

SEQ ID NO: 889322 - DNA, 15 bp, Homo sapiens
tcccacttctatgat

SEQ ID NO: 889323 - DNA, 15 bp, Homo sapiens
cccacttctatgatg

SEQ ID NO: 889324 - DNA, 15 bp, Homo sapiens
ccacttctatgatgt

SEQ ID NO: 889325 - DNA, 15 bp, Homo sapiens
cacttctatgatgtt

SEQ ID NO: 889326 - DNA, 15 bp, Homo sapiens
acttctatgatgttg

SEQ ID NO: 889327 - DNA, 15 bp, Homo sapiens
cttctatgatgttgc

SEQ ID NO: 889328 - DNA, 15 bp, Homo sapiens
ttctatgatgttgcc

SEQ ID NO: 889329 - DNA, 15 bp, Homo sapiens
tctatgatgttgcca

SEQ ID NO: 889330 - DNA, 15 bp, Homo sapiens
ctatgatgttgccat

SEQ ID NO: 889331 - DNA, 15 bp, Homo sapiens
tatgatgttgccatc

SEQ ID NO: 889332 - DNA, 15 bp, Homo sapiens
atgatgttgccatct

SEQ ID NO: 889333 - DNA, 15 bp, Homo sapiens
tgatgttgccatctc

SEQ ID NO: 889334 - DNA, 15 bp, Homo sapiens
gatgttgccatctct

SEQ ID NO: 889335 - DNA, 15 bp, Homo sapiens
atgttgccatctcta

SEQ ID NO: 889336 - DNA, 15 bp, Homo sapiens
tgttgccatctctat

SEQ ID NO: 889337 - DNA, 15 bp, Homo sapiens
gttgccatctctatc

SEQ ID NO: 889338 - DNA, 15 bp, Homo sapiens
ttgccatctctatcc

SEQ ID NO: 889339 - DNA, 15 bp, Homo sapiens
tgccatctctatcca

SEQ ID NO: 889340 - DNA, 15 bp, Homo sapiens
gccatctctatccac

SEQ ID NO: 889341 - DNA, 15 bp, Homo sapiens
ccatctctatccacc

SEQ ID NO: 889342 - DNA, 15 bp, Homo sapiens
catctctatccacct

SEQ ID NO: 889343 - DNA, 15 bp, Homo sapiens
atctctatccacctg

SEQ ID NO: 889344 - DNA, 15 bp, Homo sapiens
tctctatccacctgt

SEQ ID NO: 889345 - DNA, 15 bp, Homo sapiens
ctctatccacctgtt

SEQ ID NO: 889346 - DNA, 15 bp, Homo sapiens
tctatccacctgttc

SEQ ID NO: 889347 - DNA, 15 bp, Homo sapiens
ctatccacctgttct

SEQ ID NO: 889348 - DNA, 15 bp, Homo sapiens
tatccacctgttctg

SEQ ID NO: 889349 - DNA, 15 bp, Homo sapiens
atccacctgttctgg

SEQ ID NO: 889350 - DNA, 15 bp, Homo sapiens
tccacctgttctggt

SEQ ID NO: 889351 - DNA, 15 bp, Homo sapiens
ccacctgttctggtc

SEQ ID NO: 889352 - DNA, 15 bp, Homo sapiens
cacctgttctggtcc

SEQ ID NO: 889353 - DNA, 15 bp, Homo sapiens
acctgttctggtccc

SEQ ID NO: 889354 - DNA, 15 bp, Homo sapiens
cctgttctggtcccc

SEQ ID NO: 889355 - DNA, 15 bp, Homo sapiens
ctgttctggtcccca

SEQ ID NO: 889356 - DNA, 15 bp, Homo sapiens
tgttctggtccccaa

SEQ ID NO: 889357 - DNA, 15 bp, Homo sapiens
gttctggtccccaaa

SEQ ID NO: 889358 - DNA, 15 bp, Homo sapiens
ttctggtccccaaac

SEQ ID NO: 889359 - DNA, 15 bp, Homo sapiens
tctggtccccaaact

SEQ ID NO: 889360 - DNA, 15 bp, Homo sapiens
ctggtccccaaactt

SEQ ID NO: 889361 - DNA, 15 bp, Homo sapiens
tggtccccaaacttt

SEQ ID NO: 889362 - DNA, 15 bp, Homo sapiens
ggtccccaaactttg

SEQ ID NO: 889363 - DNA, 15 bp, Homo sapiens
gtccccaaactttgt

SEQ ID NO: 889364 - DNA, 15 bp, Homo sapiens
tccccaaactttgtg

SEQ ID NO: 889365 - DNA, 15 bp, Homo sapiens
ccccaaactttgtgc

SEQ ID NO: 889366 - DNA, 15 bp, Homo sapiens
cccaaactttgtgct

SEQ ID NO: 889367 - DNA, 15 bp, Homo sapiens
ccaaactttgtgctt

SEQ ID NO: 889368 - DNA, 15 bp, Homo sapiens
caaactttgtgctta

SEQ ID NO: 889369 - DNA, 15 bp, Homo sapiens
aaactttgtgcttat

SEQ ID NO: 889370 - DNA, 15 bp, Homo sapiens
aactttgtgcttata

SEQ ID NO: 889371 - DNA, 15 bp, Homo sapiens
actttgtgcttatag

SEQ ID NO: 889372 - DNA, 15 bp, Homo sapiens
ctttgtgcttataga

SEQ ID NO: 889373 - DNA, 15 bp, Homo sapiens
tttgtgcttatagat

SEQ ID NO: 889374 - DNA, 15 bp, Homo sapiens
ttgtgcttatagata

SEQ ID NO: 889375 - DNA, 15 bp, Homo sapiens
tgtgcttatagatac

SEQ ID NO: 889376 - DNA, 15 bp, Homo sapiens
gtgcttatagataca

SEQ ID NO: 889377 - DNA, 15 bp, Homo sapiens
tgcttatagatacag

SEQ ID NO: 889378 - DNA, 15 bp, Homo sapiens
gcttatagatacagt

SEQ ID NO: 889379 - DNA, 15 bp, Homo sapiens
cttatagatacagtc

SEQ ID NO: 889380 - DNA, 15 bp, Homo sapiens
ttatagatacagtct

SEQ ID NO: 889381 - DNA, 15 bp, Homo sapiens
tatagatacagtctc

SEQ ID NO: 889382 - DNA, 15 bp, Homo sapiens
atagatacagtctcc

SEQ ID NO: 889383 - DNA, 15 bp, Homo sapiens
tagatacagtctccc

SEQ ID NO: 889384 - DNA, 15 bp, Homo sapiens
agatacagtctccct

SEQ ID NO: 889385 - DNA, 15 bp, Homo sapiens
gatacagtctccctt

SEQ ID NO: 889386 - DNA, 15 bp, Homo sapiens
atacagtctccctta

SEQ ID NO: 889387 - DNA, 15 bp, Homo sapiens
tacagtctcccttat

SEQ ID NO: 889388 - DNA, 15 bp, Homo sapiens
acagtctcccttata

SEQ ID NO: 889389 - DNA, 15 bp, Homo sapiens
cagtctcccttatac

SEQ ID NO: 889390 - DNA, 15 bp, Homo sapiens
agtctcccttatacc

SEQ ID NO: 889391 - DNA, 15 bp, Homo sapiens
gtctcccttatacct

SEQ ID NO: 889392 - DNA, 15 bp, Homo sapiens
tctcccttatacctg

SEQ ID NO: 889393 - DNA, 15 bp, Homo sapiens
ctcccttatacctgt

SEQ ID NO: 889394 - DNA, 15 bp, Homo sapiens
tcccttatacctgtc

SEQ ID NO: 889395 - DNA, 15 bp, Homo sapiens
cccttatacctgtcc

SEQ ID NO: 889396 - DNA, 15 bp, Homo sapiens
ccttatacctgtcca

SEQ ID NO: 889397 - DNA, 15 bp, Homo sapiens
cttatacctgtccat

SEQ ID NO: 889398 - DNA, 15 bp, Homo sapiens
ttatacctgtccatt

SEQ ID NO: 889399 - DNA, 15 bp, Homo sapiens
tatacctgtccattc

SEQ ID NO: 889400 - DNA, 15 bp, Homo sapiens
atacctgtccattca

SEQ ID NO: 889401 - DNA, 15 bp, Homo sapiens
tacctgtccattcat

SEQ ID NO: 889402 - DNA, 15 bp, Homo sapiens
acctgtccattcatg

SEQ ID NO: 889403 - DNA, 15 bp, Homo sapiens
cctgtccattcatga

SEQ ID NO: 889404 - DNA, 15 bp, Homo sapiens
ctgtccattcatgaa

SEQ ID NO: 889405 - DNA, 15 bp, Homo sapiens
tgtccattcatgaaa

SEQ ID NO: 889406 - DNA, 15 bp, Homo sapiens
gtccattcatgaaaa

SEQ ID NO: 889407 - DNA, 15 bp, Homo sapiens
tccattcatgaaaaa

SEQ ID NO: 889408 - DNA, 15 bp, Homo sapiens
ccattcatgaaaaat

SEQ ID NO: 889409 - DNA, 15 bp, Homo sapiens
cattcatgaaaaatg

SEQ ID NO: 889410 - DNA, 15 bp, Homo sapiens
attcatgaaaaatga

SEQ ID NO: 889411 - DNA, 15 bp, Homo sapiens
ttcatgaaaaatgac

SEQ ID NO: 889412 - DNA, 15 bp, Homo sapiens
tcatgaaaaatgaca

SEQ ID NO: 889413 - DNA, 15 bp, Homo sapiens
catgaaaaatgacat

SEQ ID NO: 889414 - DNA, 15 bp, Homo sapiens
atgaaaaatgacatc

SEQ ID NO: 889415 - DNA, 15 bp, Homo sapiens
tgaaaaatgacatct

SEQ ID NO: 889416 - DNA, 15 bp, Homo sapiens
gaaaaatgacatctg

SEQ ID NO: 889417 - DNA, 15 bp, Homo sapiens
aaaaatgacatctgg

SEQ ID NO: 889418 - DNA, 15 bp, Homo sapiens
aaaatgacatctggg

SEQ ID NO: 889419 - DNA, 15 bp, Homo sapiens
aaatgacatctgggc

SEQ ID NO: 889420 - DNA, 15 bp, Homo sapiens
aatgacatctgggca

SEQ ID NO: 889421 - DNA, 15 bp, Homo sapiens
atgacatctgggcat

SEQ ID NO: 889422 - DNA, 15 bp, Homo sapiens
tgacatctgggcatg

SEQ ID NO: 889423 - DNA, 15 bp, Homo sapiens
gacatctgggcatgg

SEQ ID NO: 889424 - DNA, 15 bp, Homo sapiens
acatctgggcatggg

SEQ ID NO: 889425 - DNA, 15 bp, Homo sapiens
catctgggcatgggt

SEQ ID NO: 889426 - DNA, 15 bp, Homo sapiens
atctgggcatgggtg

SEQ ID NO: 889427 - DNA, 15 bp, Homo sapiens
tctgggcatgggtgt

SEQ ID NO: 889428 - DNA, 15 bp, Homo sapiens
ctgggcatgggtgtg

SEQ ID NO: 889429 - DNA, 15 bp, Homo sapiens
tgggcatgggtgtgg

SEQ ID NO: 889430 - DNA, 15 bp, Homo sapiens
gggcatgggtgtggt

SEQ ID NO: 889431 - DNA, 15 bp, Homo sapiens
ggcatgggtgtggtt

SEQ ID NO: 889432 - DNA, 15 bp, Homo sapiens
gcatgggtgtggttc

SEQ ID NO: 889433 - DNA, 15 bp, Homo sapiens
catgggtgtggttca

SEQ ID NO: 889434 - DNA, 15 bp, Homo sapiens
atgggtgtggttcag

SEQ ID NO: 889435 - DNA, 15 bp, Homo sapiens
tgggtgtggttcagg

SEQ ID NO: 889436 - DNA, 15 bp, Homo sapiens
gggtgtggttcaggg

SEQ ID NO: 889437 - DNA, 15 bp, Homo sapiens
ggtgtggttcagggg

SEQ ID NO: 889438 - DNA, 15 bp, Homo sapiens
gtgtggttcaggggt

SEQ ID NO: 889439 - DNA, 15 bp, Homo sapiens
tgtggttcaggggta

SEQ ID NO: 889440 - DNA, 15 bp, Homo sapiens
gtggttcaggggtag

SEQ ID NO: 889441 - DNA, 15 bp, Homo sapiens
tggttcaggggtaga

SEQ ID NO: 889442 - DNA, 15 bp, Homo sapiens
ggttcaggggtagag

SEQ ID NO: 889443 - DNA, 15 bp, Homo sapiens
gttcaggggtagaga

SEQ ID NO: 889444 - DNA, 15 bp, Homo sapiens
ttcaggggtagagaa

SEQ ID NO: 889445 - DNA, 15 bp, Homo sapiens
tcaggggtagagaat

SEQ ID NO: 889446 - DNA, 15 bp, Homo sapiens
caggggtagagaata

SEQ ID NO: 889447 - DNA, 15 bp, Homo sapiens
aggggtagagaataa

SEQ ID NO: 889448 - DNA, 15 bp, Homo sapiens
ggggtagagaataaa

SEQ ID NO: 889449 - DNA, 15 bp, Homo sapiens
gggtagagaataaaa

SEQ ID NO: 889450 - DNA, 15 bp, Homo sapiens
ggtagagaataaaac

SEQ ID NO: 889451 - DNA, 15 bp, Homo sapiens
gtagagaataaaaca

SEQ ID NO: 889452 - DNA, 15 bp, Homo sapiens
tagagaataaaacag

SEQ ID NO: 889453 - DNA, 15 bp, Homo sapiens
agagaataaaacagg

SEQ ID NO: 889454 - DNA, 15 bp, Homo sapiens
gagaataaaacaggt

SEQ ID NO: 889455 - DNA, 15 bp, Homo sapiens
agaataaaacaggtc

SEQ ID NO: 889456 - DNA, 15 bp, Homo sapiens
gaataaaacaggtct

SEQ ID NO: 889457 - DNA, 15 bp, Homo sapiens
aataaaacaggtctg

SEQ ID NO: 889458 - DNA, 15 bp, Homo sapiens
ataaaacaggtctgc

SEQ ID NO: 889459 - DNA, 15 bp, Homo sapiens
taaaacaggtctgcc

SEQ ID NO: 889460 - DNA, 15 bp, Homo sapiens
aaaacaggtctgccc

SEQ ID NO: 889461 - DNA, 15 bp, Homo sapiens
aaacaggtctgccca

SEQ ID NO: 889462 - DNA, 15 bp, Homo sapiens
aacaggtctgcccat

SEQ ID NO: 889463 - DNA, 15 bp, Homo sapiens
acaggtctgcccata

SEQ ID NO: 889464 - DNA, 15 bp, Homo sapiens
caggtctgcccatag

SEQ ID NO: 889465 - DNA, 15 bp, Homo sapiens
aggtctgcccatagc

SEQ ID NO: 889466 - DNA, 15 bp, Homo sapiens
ggtctgcccatagca

SEQ ID NO: 889467 - DNA, 15 bp, Homo sapiens
gtctgcccatagcag

SEQ ID NO: 889468 - DNA, 15 bp, Homo sapiens
tctgcccatagcaga

SEQ ID NO: 889469 - DNA, 15 bp, Homo sapiens
ctgcccatagcagag

SEQ ID NO: 889470 - DNA, 15 bp, Homo sapiens
tgcccatagcagagg

SEQ ID NO: 889471 - DNA, 15 bp, Homo sapiens
gcccatagcagaggc

SEQ ID NO: 889472 - DNA, 15 bp, Homo sapiens
cccatagcagaggcg

SEQ ID NO: 889473 - DNA, 15 bp, Homo sapiens
ccatagcagaggcgg

SEQ ID NO: 889474 - DNA, 15 bp, Homo sapiens
catagcagaggcgga

SEQ ID NO: 889475 - DNA, 15 bp, Homo sapiens
atagcagaggcggac

SEQ ID NO: 889476 - DNA, 15 bp, Homo sapiens
tagcagaggcggact

SEQ ID NO: 889477 - DNA, 15 bp, Homo sapiens
agcagaggcggactc

SEQ ID NO: 889478 - DNA, 15 bp, Homo sapiens
gcagaggcggactct

SEQ ID NO: 889479 - DNA, 15 bp, Homo sapiens
cagaggcggactctg

SEQ ID NO: 889480 - DNA, 15 bp, Homo sapiens
agaggcggactctgc

SEQ ID NO: 889481 - DNA, 15 bp, Homo sapiens
gaggcggactctgcc

SEQ ID NO: 889482 - DNA, 15 bp, Homo sapiens
aggcggactctgcct

SEQ ID NO: 889483 - DNA, 15 bp, Homo sapiens
ggcggactctgcctt

SEQ ID NO: 889484 - DNA, 15 bp, Homo sapiens
gcggactctgccttc

SEQ ID NO: 889485 - DNA, 15 bp, Homo sapiens
cggactctgccttcc

SEQ ID NO: 889486 - DNA, 15 bp, Homo sapiens
ggactctgccttccg

SEQ ID NO: 889487 - DNA, 15 bp, Homo sapiens
gactctgccttccgc

SEQ ID NO: 889488 - DNA, 15 bp, Homo sapiens
actctgccttccgct

SEQ ID NO: 889489 - DNA, 15 bp, Homo sapiens
ctctgccttccgcta

SEQ ID NO: 889490 - DNA, 15 bp, Homo sapiens
tctgccttccgctaa

SEQ ID NO: 889491 - DNA, 15 bp, Homo sapiens
ctgccttccgctaaa

SEQ ID NO: 889492 - DNA, 15 bp, Homo sapiens
tgccttccgctaaac

SEQ ID NO: 889493 - DNA, 15 bp, Homo sapiens
gccttccgctaaaca

SEQ ID NO: 889494 - DNA, 15 bp, Homo sapiens
ccttccgctaaacac

SEQ ID NO: 889495 - DNA, 15 bp, Homo sapiens
cttccgctaaacaca

SEQ ID NO: 889496 - DNA, 15 bp, Homo sapiens
ttccgctaaacacaa

SEQ ID NO: 889497 - DNA, 15 bp, Homo sapiens
tccgctaaacacaaa

SEQ ID NO: 889498 - DNA, 15 bp, Homo sapiens
ccgctaaacacaaac

SEQ ID NO: 889499 - DNA, 15 bp, Homo sapiens
cgctaaacacaaaca

SEQ ID NO: 889500 - DNA, 15 bp, Homo sapiens
gctaaacacaaacaa

SEQ ID NO: 889501 - DNA, 15 bp, Homo sapiens
ctaaacacaaacaag

SEQ ID NO: 889502 - DNA, 15 bp, Homo sapiens
taaacacaaacaagc

SEQ ID NO: 889503 - DNA, 15 bp, Homo sapiens
aaacacaaacaagca

SEQ ID NO: 889504 - DNA, 15 bp, Homo sapiens
aacacaaacaagcat

SEQ ID NO: 889505 - DNA, 15 bp, Homo sapiens
acacaaacaagcatg

SEQ ID NO: 889506 - DNA, 15 bp, Homo sapiens
cacaaacaagcatgc

SEQ ID NO: 889507 - DNA, 15 bp, Homo sapiens
acaaacaagcatgca

SEQ ID NO: 889508 - DNA, 15 bp, Homo sapiens
caaacaagcatgcag

SEQ ID NO: 889509 - DNA, 15 bp, Homo sapiens
aaacaagcatgcagg

SEQ ID NO: 889510 - DNA, 15 bp, Homo sapiens
aacaagcatgcaggg

SEQ ID NO: 889511 - DNA, 15 bp, Homo sapiens
acaagcatgcaggga

SEQ ID NO: 889512 - DNA, 15 bp, Homo sapiens
caagcatgcagggaa

SEQ ID NO: 889513 - DNA, 15 bp, Homo sapiens
aagcatgcagggaag

SEQ ID NO: 889514 - DNA, 15 bp, Homo sapiens
agcatgcagggaagc

SEQ ID NO: 889515 - DNA, 15 bp, Homo sapiens
gcatgcagggaagca

SEQ ID NO: 889516 - DNA, 15 bp, Homo sapiens
catgcagggaagcaa

SEQ ID NO: 889517 - DNA, 15 bp, Homo sapiens
atgcagggaagcaag

SEQ ID NO: 889518 - DNA, 15 bp, Homo sapiens
tgcagggaagcaagt

SEQ ID NO: 889519 - DNA, 15 bp, Homo sapiens
gcagggaagcaagta

SEQ ID NO: 889520 - DNA, 15 bp, Homo sapiens
cagggaagcaagtac

SEQ ID NO: 889521 - DNA, 15 bp, Homo sapiens
agggaagcaagtacc

SEQ ID NO: 889522 - DNA, 15 bp, Homo sapiens
gggaagcaagtaccc

SEQ ID NO: 889523 - DNA, 15 bp, Homo sapiens
ggaagcaagtaccct

SEQ ID NO: 889524 - DNA, 15 bp, Homo sapiens
gaagcaagtaccctt

SEQ ID NO: 889525 - DNA, 15 bp, Homo sapiens
aagcaagtacccttc

SEQ ID NO: 889526 - DNA, 15 bp, Homo sapiens
agcaagtacccttct

SEQ ID NO: 889527 - DNA, 15 bp, Homo sapiens
gcaagtacccttctt

SEQ ID NO: 889528 - DNA, 15 bp, Homo sapiens
caagtacccttctta

SEQ ID NO: 889529 - DNA, 15 bp, Homo sapiens
aagtacccttcttaa

SEQ ID NO: 889530 - DNA, 15 bp, Homo sapiens
agtacccttcttaaa

SEQ ID NO: 889531 - DNA, 15 bp, Homo sapiens
gtacccttcttaaat

SEQ ID NO: 889532 - DNA, 15 bp, Homo sapiens
tacccttcttaaata

SEQ ID NO: 889533 - DNA, 15 bp, Homo sapiens
acccttcttaaatat

SEQ ID NO: 889534 - DNA, 15 bp, Homo sapiens
cccttcttaaatatc

SEQ ID NO: 889535 - DNA, 15 bp, Homo sapiens
ccttcttaaatatct

SEQ ID NO: 889536 - DNA, 15 bp, Homo sapiens
cttcttaaatatctg

SEQ ID NO: 889537 - DNA, 15 bp, Homo sapiens
ttcttaaatatctga

SEQ ID NO: 889538 - DNA, 15 bp, Homo sapiens
tcttaaatatctgac

SEQ ID NO: 889539 - DNA, 15 bp, Homo sapiens
cttaaatatctgaca

SEQ ID NO: 889540 - DNA, 15 bp, Homo sapiens
ttaaatatctgacaa

SEQ ID NO: 889541 - DNA, 15 bp, Homo sapiens
taaatatctgacaac

SEQ ID NO: 889542 - DNA, 15 bp, Homo sapiens
aaatatctgacaaca

SEQ ID NO: 889543 - DNA, 15 bp, Homo sapiens
aatatctgacaacat

SEQ ID NO: 889544 - DNA, 15 bp, Homo sapiens
atatctgacaacatg

SEQ ID NO: 889545 - DNA, 15 bp, Homo sapiens
tatctgacaacatgg

SEQ ID NO: 889546 - DNA, 15 bp, Homo sapiens
atctgacaacatggc

SEQ ID NO: 889547 - DNA, 15 bp, Homo sapiens
tctgacaacatggct

SEQ ID NO: 889548 - DNA, 15 bp, Homo sapiens
ctgacaacatggctt

SEQ ID NO: 889549 - DNA, 15 bp, Homo sapiens
tgacaacatggcttt

SEQ ID NO: 889550 - DNA, 15 bp, Homo sapiens
gacaacatggctttg

SEQ ID NO: 889551 - DNA, 15 bp, Homo sapiens
acaacatggctttga

SEQ ID NO: 889552 - DNA, 15 bp, Homo sapiens
caacatggctttgat

SEQ ID NO: 889553 - DNA, 15 bp, Homo sapiens
aacatggctttgatg

SEQ ID NO: 889554 - DNA, 15 bp, Homo sapiens
acatggctttgatga

SEQ ID NO: 889555 - DNA, 15 bp, Homo sapiens
catggctttgatgaa

SEQ ID NO: 889556 - DNA, 15 bp, Homo sapiens
atggctttgatgaaa

SEQ ID NO: 889557 - DNA, 15 bp, Homo sapiens
tggctttgatgaaat

SEQ ID NO: 889558 - DNA, 15 bp, Homo sapiens
ggctttgatgaaatc

SEQ ID NO: 889559 - DNA, 15 bp, Homo sapiens
gctttgatgaaatct

SEQ ID NO: 889560 - DNA, 15 bp, Homo sapiens
ctttgatgaaatcta

SEQ ID NO: 889561 - DNA, 15 bp, Homo sapiens
tttgatgaaatctat

SEQ ID NO: 889562 - DNA, 15 bp, Homo sapiens
ttgatgaaatctatc

SEQ ID NO: 889563 - DNA, 15 bp, Homo sapiens
tgatgaaatctatcc

SEQ ID NO: 889564 - DNA, 15 bp, Homo sapiens
gatgaaatctatccc

SEQ ID NO: 889565 - DNA, 15 bp, Homo sapiens
atgaaatctatcccg

SEQ ID NO: 889566 - DNA, 15 bp, Homo sapiens
tgaaatctatcccga

SEQ ID NO: 889567 - DNA, 15 bp, Homo sapiens
gaaatctatcccgac

SEQ ID NO: 889568 - DNA, 15 bp, Homo sapiens
aaatctatcccgact

SEQ ID NO: 889569 - DNA, 15 bp, Homo sapiens
aatctatcccgactt

SEQ ID NO: 889570 - DNA, 15 bp, Homo sapiens
atctatcccgactta

SEQ ID NO: 889571 - DNA, 15 bp, Homo sapiens
tctatcccgacttag

SEQ ID NO: 889572 - DNA, 15 bp, Homo sapiens
ctatcccgacttagc

SEQ ID NO: 889573 - DNA, 15 bp, Homo sapiens
tatcccgacttagcc

SEQ ID NO: 889574 - DNA, 15 bp, Homo sapiens
atcccgacttagcca

SEQ ID NO: 889575 - DNA, 15 bp, Homo sapiens
tcccgacttagccat

SEQ ID NO: 889576 - DNA, 15 bp, Homo sapiens
cccgacttagccata

SEQ ID NO: 889577 - DNA, 15 bp, Homo sapiens
ccgacttagccataa

SEQ ID NO: 889578 - DNA, 15 bp, Homo sapiens
cgacttagccataac

SEQ ID NO: 889579 - DNA, 15 bp, Homo sapiens
gacttagccataacc

SEQ ID NO: 889580 - DNA, 15 bp, Homo sapiens
acttagccataacct

SEQ ID NO: 889581 - DNA, 15 bp, Homo sapiens
cttagccataaccta

SEQ ID NO: 889582 - DNA, 15 bp, Homo sapiens
ttagccataacctag

SEQ ID NO: 889583 - DNA, 15 bp, Homo sapiens
tagccataacctaga

SEQ ID NO: 889584 - DNA, 15 bp, Homo sapiens
agccataacctagaa

SEQ ID NO: 889585 - DNA, 15 bp, Homo sapiens
gccataacctagaaa

SEQ ID NO: 889586 - DNA, 15 bp, Homo sapiens
ccataacctagaaaa

SEQ ID NO: 889587 - DNA, 15 bp, Homo sapiens
cataacctagaaaac

SEQ ID NO: 889588 - DNA, 15 bp, Homo sapiens
ataacctagaaaact

SEQ ID NO: 889589 - DNA, 15 bp, Homo sapiens
taacctagaaaactg

SEQ ID NO: 889590 - DNA, 15 bp, Homo sapiens
aacctagaaaactgt

SEQ ID NO: 889591 - DNA, 15 bp, Homo sapiens
acctagaaaactgta

SEQ ID NO: 889592 - DNA, 15 bp, Homo sapiens
cctagaaaactgtat

SEQ ID NO: 889593 - DNA, 15 bp, Homo sapiens
ctagaaaactgtata

SEQ ID NO: 889594 - DNA, 15 bp, Homo sapiens
tagaaaactgtatag

SEQ ID NO: 889595 - DNA, 15 bp, Homo sapiens
agaaaactgtatagc

SEQ ID NO: 889596 - DNA, 15 bp, Homo sapiens
gaaaactgtatagcc

SEQ ID NO: 889597 - DNA, 15 bp, Homo sapiens
aaaactgtatagcct

SEQ ID NO: 889598 - DNA, 15 bp, Homo sapiens
aaactgtatagcctt

SEQ ID NO: 889599 - DNA, 15 bp, Homo sapiens
aactgtatagccttt

SEQ ID NO: 889600 - DNA, 15 bp, Homo sapiens
actgtatagcctttc

SEQ ID NO: 889601 - DNA, 15 bp, Homo sapiens
ctgtatagcctttct

SEQ ID NO: 889602 - DNA, 15 bp, Homo sapiens
tgtatagcctttcta

SEQ ID NO: 889603 - DNA, 15 bp, Homo sapiens
gtatagcctttctag

SEQ ID NO: 889604 - DNA, 15 bp, Homo sapiens
tatagcctttctaga

SEQ ID NO: 889605 - DNA, 15 bp, Homo sapiens
atagcctttctagaa

SEQ ID NO: 889606 - DNA, 15 bp, Homo sapiens
tagcctttctagaaa

SEQ ID NO: 889607 - DNA, 15 bp, Homo sapiens
agcctttctagaaaa

SEQ ID NO: 889608 - DNA, 15 bp, Homo sapiens
gcctttctagaaaaa

SEQ ID NO: 889609 - DNA, 15 bp, Homo sapiens
cctttctagaaaaat

SEQ ID NO: 889610 - DNA, 15 bp, Homo sapiens
ctttctagaaaaatg

SEQ ID NO: 889611 - DNA, 15 bp, Homo sapiens
tttctagaaaaatgt

SEQ ID NO: 889612 - DNA, 15 bp, Homo sapiens
ttctagaaaaatgtt

SEQ ID NO: 889613 - DNA, 15 bp, Homo sapiens
tctagaaaaatgttt

SEQ ID NO: 889614 - DNA, 15 bp, Homo sapiens
ctagaaaaatgtttt

SEQ ID NO: 889615 - DNA, 15 bp, Homo sapiens
tagaaaaatgttttt

SEQ ID NO: 889616 - DNA, 15 bp, Homo sapiens
agaaaaatgtttttg

SEQ ID NO: 889617 - DNA, 15 bp, Homo sapiens
gaaaaatgtttttga

SEQ ID NO: 889618 - DNA, 15 bp, Homo sapiens
aaaaatgtttttgaa

SEQ ID NO: 889619 - DNA, 15 bp, Homo sapiens
aaaatgtttttgaaa

SEQ ID NO: 889620 - DNA, 15 bp, Homo sapiens
aaatgtttttgaaat

SEQ ID NO: 889621 - DNA, 15 bp, Homo sapiens
aatgtttttgaaatg

SEQ ID NO: 889622 - DNA, 15 bp, Homo sapiens
atgtttttgaaatgc

SEQ ID NO: 889623 - DNA, 15 bp, Homo sapiens
tgtttttgaaatgct

SEQ ID NO: 889624 - DNA, 15 bp, Homo sapiens
gtttttgaaatgctc

SEQ ID NO: 889625 - DNA, 15 bp, Homo sapiens
tttttgaaatgctca

SEQ ID NO: 889626 - DNA, 15 bp, Homo sapiens
ttttgaaatgctcag

SEQ ID NO: 889627 - DNA, 15 bp, Homo sapiens
tttgaaatgctcagc

SEQ ID NO: 889628 - DNA, 15 bp, Homo sapiens
ttgaaatgctcagca

SEQ ID NO: 889629 - DNA, 15 bp, Homo sapiens
tgaaatgctcagcat

SEQ ID NO: 889630 - DNA, 15 bp, Homo sapiens
gaaatgctcagcatc

SEQ ID NO: 889631 - DNA, 15 bp, Homo sapiens
aaatgctcagcatca

SEQ ID NO: 889632 - DNA, 15 bp, Homo sapiens
aatgctcagcatcac

SEQ ID NO: 889633 - DNA, 15 bp, Homo sapiens
atgctcagcatcact

SEQ ID NO: 889634 - DNA, 15 bp, Homo sapiens
tgctcagcatcacta

SEQ ID NO: 889635 - DNA, 15 bp, Homo sapiens
gctcagcatcactaa

SEQ ID NO: 889636 - DNA, 15 bp, Homo sapiens
ctcagcatcactaat

SEQ ID NO: 889637 - DNA, 15 bp, Homo sapiens
tcagcatcactaatc

SEQ ID NO: 889638 - DNA, 15 bp, Homo sapiens
cagcatcactaatca

SEQ ID NO: 889639 - DNA, 15 bp, Homo sapiens
agcatcactaatcat

SEQ ID NO: 889640 - DNA, 15 bp, Homo sapiens
gcatcactaatcatc

SEQ ID NO: 889641 - DNA, 15 bp, Homo sapiens
catcactaatcatca

SEQ ID NO: 889642 - DNA, 15 bp, Homo sapiens
atcactaatcatcag

SEQ ID NO: 889643 - DNA, 15 bp, Homo sapiens
tcactaatcatcaga

SEQ ID NO: 889644 - DNA, 15 bp, Homo sapiens
cactaatcatcagag

SEQ ID NO: 889645 - DNA, 15 bp, Homo sapiens
actaatcatcagaga

SEQ ID NO: 889646 - DNA, 15 bp, Homo sapiens
ctaatcatcagagaa

SEQ ID NO: 889647 - DNA, 15 bp, Homo sapiens
taatcatcagagaaa

SEQ ID NO: 889648 - DNA, 15 bp, Homo sapiens
aatcatcagagaaat

SEQ ID NO: 889649 - DNA, 15 bp, Homo sapiens
atcatcagagaaatg

SEQ ID NO: 889650 - DNA, 15 bp, Homo sapiens
tcatcagagaaatgc

SEQ ID NO: 889651 - DNA, 15 bp, Homo sapiens
catcagagaaatgca

SEQ ID NO: 889652 - DNA, 15 bp, Homo sapiens
atcagagaaatgcaa

SEQ ID NO: 889653 - DNA, 15 bp, Homo sapiens
tcagagaaatgcaaa

SEQ ID NO: 889654 - DNA, 15 bp, Homo sapiens
cagagaaatgcaaat

SEQ ID NO: 889655 - DNA, 15 bp, Homo sapiens
agagaaatgcaaatt

SEQ ID NO: 889656 - DNA, 15 bp, Homo sapiens
gagaaatgcaaatta

SEQ ID NO: 889657 - DNA, 15 bp, Homo sapiens
agaaatgcaaattaa

SEQ ID NO: 889658 - DNA, 15 bp, Homo sapiens
gaaatgcaaattaaa

SEQ ID NO: 889659 - DNA, 15 bp, Homo sapiens
aaatgcaaattaaac

SEQ ID NO: 889660 - DNA, 15 bp, Homo sapiens
aatgcaaattaaacc

SEQ ID NO: 889661 - DNA, 15 bp, Homo sapiens
atgcaaattaaacca

SEQ ID NO: 889662 - DNA, 15 bp, Homo sapiens
tgcaaattaaaccac

SEQ ID NO: 889663 - DNA, 15 bp, Homo sapiens
gcaaattaaaccaca

SEQ ID NO: 889664 - DNA, 15 bp, Homo sapiens
caaattaaaccacaa

SEQ ID NO: 889665 - DNA, 15 bp, Homo sapiens
aaattaaaccacaat

SEQ ID NO: 889666 - DNA, 15 bp, Homo sapiens
aattaaaccacaatg

SEQ ID NO: 889667 - DNA, 15 bp, Homo sapiens
attaaaccacaatga

SEQ ID NO: 889668 - DNA, 15 bp, Homo sapiens
ttaaaccacaatgag

SEQ ID NO: 889669 - DNA, 15 bp, Homo sapiens
taaaccacaatgaga

SEQ ID NO: 889670 - DNA, 15 bp, Homo sapiens
aaaccacaatgagat

SEQ ID NO: 889671 - DNA, 15 bp, Homo sapiens
aaccacaatgagatg

SEQ ID NO: 889672 - DNA, 15 bp, Homo sapiens
accacaatgagatgt

SEQ ID NO: 889673 - DNA, 15 bp, Homo sapiens
ccacaatgagatgtc

SEQ ID NO: 889674 - DNA, 15 bp, Homo sapiens
cacaatgagatgtca

SEQ ID NO: 889675 - DNA, 15 bp, Homo sapiens
acaatgagatgtcac

SEQ ID NO: 889676 - DNA, 15 bp, Homo sapiens
caatgagatgtcacc

SEQ ID NO: 889677 - DNA, 15 bp, Homo sapiens
aatgagatgtcacct

SEQ ID NO: 889678 - DNA, 15 bp, Homo sapiens
atgagatgtcacctc

SEQ ID NO: 889679 - DNA, 15 bp, Homo sapiens
tgagatgtcacctcg

SEQ ID NO: 889680 - DNA, 15 bp, Homo sapiens
gagatgtcacctcgt

SEQ ID NO: 889681 - DNA, 15 bp, Homo sapiens
agatgtcacctcgta

SEQ ID NO: 889682 - DNA, 15 bp, Homo sapiens
gatgtcacctcgtac

SEQ ID NO: 889683 - DNA, 15 bp, Homo sapiens
atgtcacctcgtacc

SEQ ID NO: 889684 - DNA, 15 bp, Homo sapiens
tgtcacctcgtacca

SEQ ID NO: 889685 - DNA, 15 bp, Homo sapiens
gtcacctcgtaccag

SEQ ID NO: 889686 - DNA, 15 bp, Homo sapiens
tcacctcgtaccagt

SEQ ID NO: 889687 - DNA, 15 bp, Homo sapiens
cacctcgtaccagtc

SEQ ID NO: 889688 - DNA, 15 bp, Homo sapiens
acctcgtaccagtca

SEQ ID NO: 889689 - DNA, 15 bp, Homo sapiens
cctcgtaccagtcag

SEQ ID NO: 889690 - DNA, 15 bp, Homo sapiens
ctcgtaccagtcaga

SEQ ID NO: 889691 - DNA, 15 bp, Homo sapiens
tcgtaccagtcagaa

SEQ ID NO: 889692 - DNA, 15 bp, Homo sapiens
cgtaccagtcagaat

SEQ ID NO: 889693 - DNA, 15 bp, Homo sapiens
gtaccagtcagaata

SEQ ID NO: 889694 - DNA, 15 bp, Homo sapiens
taccagtcagaatag

SEQ ID NO: 889695 - DNA, 15 bp, Homo sapiens
accagtcagaatagc

SEQ ID NO: 889696 - DNA, 15 bp, Homo sapiens
ccagtcagaatagct

SEQ ID NO: 889697 - DNA, 15 bp, Homo sapiens
cagtcagaatagcta

SEQ ID NO: 889698 - DNA, 15 bp, Homo sapiens
agtcagaatagctat

SEQ ID NO: 889699 - DNA, 15 bp, Homo sapiens
gtcagaatagctatt

SEQ ID NO: 889700 - DNA, 15 bp, Homo sapiens
tcagaatagctatta

SEQ ID NO: 889701 - DNA, 15 bp, Homo sapiens
cagaatagctattac

SEQ ID NO: 889702 - DNA, 15 bp, Homo sapiens
agaatagctattact

SEQ ID NO: 889703 - DNA, 15 bp, Homo sapiens
gaatagctattacta

SEQ ID NO: 889704 - DNA, 15 bp, Homo sapiens
aatagctattactaa

SEQ ID NO: 889705 - DNA, 15 bp, Homo sapiens
atagctattactaaa

SEQ ID NO: 889706 - DNA, 15 bp, Homo sapiens
tagctattactaaaa

SEQ ID NO: 889707 - DNA, 15 bp, Homo sapiens
agctattactaaaaa

SEQ ID NO: 889708 - DNA, 15 bp, Homo sapiens
gctattactaaaaag

SEQ ID NO: 889709 - DNA, 15 bp, Homo sapiens
ctattactaaaaagt

SEQ ID NO: 889710 - DNA, 15 bp, Homo sapiens
tattactaaaaagta

SEQ ID NO: 889711 - DNA, 15 bp, Homo sapiens
attactaaaaagtaa

SEQ ID NO: 889712 - DNA, 15 bp, Homo sapiens
ttactaaaaagtaaa

SEQ ID NO: 889713 - DNA, 15 bp, Homo sapiens
tactaaaaagtaaaa

SEQ ID NO: 889714 - DNA, 15 bp, Homo sapiens
actaaaaagtaaaaa

SEQ ID NO: 889715 - DNA, 15 bp, Homo sapiens
ctaaaaagtaaaaaa

SEQ ID NO: 889716 - DNA, 15 bp, Homo sapiens
taaaaagtaaaaaaa

SEQ ID NO: 889717 - DNA, 15 bp, Homo sapiens
aaaaagtaaaaaaat

SEQ ID NO: 889718 - DNA, 15 bp, Homo sapiens
aaaagtaaaaaaata

SEQ ID NO: 889719 - DNA, 15 bp, Homo sapiens
aaagtaaaaaaataa

SEQ ID NO: 889720 - DNA, 15 bp, Homo sapiens
aagtaaaaaaataac

SEQ ID NO: 889721 - DNA, 15 bp, Homo sapiens
agtaaaaaaataaca

SEQ ID NO: 889722 - DNA, 15 bp, Homo sapiens
gtaaaaaaataacag

SEQ ID NO: 889723 - DNA, 15 bp, Homo sapiens
taaaaaaataacaga

SEQ ID NO: 889724 - DNA, 15 bp, Homo sapiens
aaaaaaataacagat

SEQ ID NO: 889725 - DNA, 15 bp, Homo sapiens
aaaaaataacagatg

SEQ ID NO: 889726 - DNA, 15 bp, Homo sapiens
aaaaataacagatgc

SEQ ID NO: 889727 - DNA, 15 bp, Homo sapiens
aaaataacagatgct

SEQ ID NO: 889728 - DNA, 15 bp, Homo sapiens
aaataacagatgctg

SEQ ID NO: 889729 - DNA, 15 bp, Homo sapiens
aataacagatgctgg

SEQ ID NO: 889730 - DNA, 15 bp, Homo sapiens
ataacagatgctggc

SEQ ID NO: 889731 - DNA, 15 bp, Homo sapiens
taacagatgctggca

SEQ ID NO: 889732 - DNA, 15 bp, Homo sapiens
aacagatgctggcaa

SEQ ID NO: 889733 - DNA, 15 bp, Homo sapiens
acagatgctggcaag

SEQ ID NO: 889734 - DNA, 15 bp, Homo sapiens
cagatgctggcaagg

SEQ ID NO: 889735 - DNA, 15 bp, Homo sapiens
agatgctggcaaggc

SEQ ID NO: 889736 - DNA, 15 bp, Homo sapiens
gatgctggcaaggct

SEQ ID NO: 889737 - DNA, 15 bp, Homo sapiens
atgctggcaaggctg

SEQ ID NO: 889738 - DNA, 15 bp, Homo sapiens
tgctggcaaggctgc

SEQ ID NO: 889739 - DNA, 15 bp, Homo sapiens
gctggcaaggctgca

SEQ ID NO: 889740 - DNA, 15 bp, Homo sapiens
ctggcaaggctgcag

SEQ ID NO: 889741 - DNA, 15 bp, Homo sapiens
tggcaaggctgcaga

SEQ ID NO: 889742 - DNA, 15 bp, Homo sapiens
ggcaaggctgcagag

SEQ ID NO: 889743 - DNA, 15 bp, Homo sapiens
gcaaggctgcagaga

SEQ ID NO: 889744 - DNA, 15 bp, Homo sapiens
caaggctgcagagaa

SEQ ID NO: 889745 - DNA, 15 bp, Homo sapiens
aaggctgcagagaaa

SEQ ID NO: 889746 - DNA, 15 bp, Homo sapiens
aggctgcagagaaaa

SEQ ID NO: 889747 - DNA, 15 bp, Homo sapiens
ggctgcagagaaaag

SEQ ID NO: 889748 - DNA, 15 bp, Homo sapiens
gctgcagagaaaagg

SEQ ID NO: 889749 - DNA, 15 bp, Homo sapiens
ctgcagagaaaaggg

SEQ ID NO: 889750 - DNA, 15 bp, Homo sapiens
tgcagagaaaaggga

SEQ ID NO: 889751 - DNA, 15 bp, Homo sapiens
gcagagaaaagggaa

SEQ ID NO: 889752 - DNA, 15 bp, Homo sapiens
cagagaaaagggaat

SEQ ID NO: 889753 - DNA, 15 bp, Homo sapiens
agagaaaagggaatg

SEQ ID NO: 889754 - DNA, 15 bp, Homo sapiens
gagaaaagggaatgc

SEQ ID NO: 889755 - DNA, 15 bp, Homo sapiens
agaaaagggaatgct

SEQ ID NO: 889756 - DNA, 15 bp, Homo sapiens
gaaaagggaatgctt

SEQ ID NO: 889757 - DNA, 15 bp, Homo sapiens
aaaagggaatgcttt

SEQ ID NO: 889758 - DNA, 15 bp, Homo sapiens
aaagggaatgctttt

SEQ ID NO: 889759 - DNA, 15 bp, Homo sapiens
aagggaatgctttta

SEQ ID NO: 889760 - DNA, 15 bp, Homo sapiens
agggaatgcttttac

SEQ ID NO: 889761 - DNA, 15 bp, Homo sapiens
gggaatgcttttaca

SEQ ID NO: 889762 - DNA, 15 bp, Homo sapiens
ggaatgcttttacac

SEQ ID NO: 889763 - DNA, 15 bp, Homo sapiens
gaatgcttttacact

SEQ ID NO: 889764 - DNA, 15 bp, Homo sapiens
aatgcttttacactg

SEQ ID NO: 889765 - DNA, 15 bp, Homo sapiens
atgcttttacactgt

SEQ ID NO: 889766 - DNA, 15 bp, Homo sapiens
tgcttttacactgtt

SEQ ID NO: 889767 - DNA, 15 bp, Homo sapiens
gcttttacactgttg

SEQ ID NO: 889768 - DNA, 15 bp, Homo sapiens
cttttacactgttgg

SEQ ID NO: 889769 - DNA, 15 bp, Homo sapiens
ttttacactgttggt

SEQ ID NO: 889770 - DNA, 15 bp, Homo sapiens
tttacactgttggtg

SEQ ID NO: 889771 - DNA, 15 bp, Homo sapiens
ttacactgttggtgg

SEQ ID NO: 889772 - DNA, 15 bp, Homo sapiens
tacactgttggtgga

SEQ ID NO: 889773 - DNA, 15 bp, Homo sapiens
acactgttggtggaa

SEQ ID NO: 889774 - DNA, 15 bp, Homo sapiens
cactgttggtggaaa

SEQ ID NO: 889775 - DNA, 15 bp, Homo sapiens
actgttggtggaaat

SEQ ID NO: 889776 - DNA, 15 bp, Homo sapiens
ctgttggtggaaata

SEQ ID NO: 889777 - DNA, 15 bp, Homo sapiens
tgttggtggaaatat

SEQ ID NO: 889778 - DNA, 15 bp, Homo sapiens
gttggtggaaatata

SEQ ID NO: 889779 - DNA, 15 bp, Homo sapiens
ttggtggaaatataa

SEQ ID NO: 889780 - DNA, 15 bp, Homo sapiens
tggtggaaatataaa

SEQ ID NO: 889781 - DNA, 15 bp, Homo sapiens
ggtggaaatataaat

SEQ ID NO: 889782 - DNA, 15 bp, Homo sapiens
gtggaaatataaatt

SEQ ID NO: 889783 - DNA, 15 bp, Homo sapiens
tggaaatataaatta

SEQ ID NO: 889784 - DNA, 15 bp, Homo sapiens
ggaaatataaattaa

SEQ ID NO: 889785 - DNA, 15 bp, Homo sapiens
gaaatataaattaat

SEQ ID NO: 889786 - DNA, 15 bp, Homo sapiens
aaatataaattaatt

SEQ ID NO: 889787 - DNA, 15 bp, Homo sapiens
aatataaattaattt

SEQ ID NO: 889788 - DNA, 15 bp, Homo sapiens
atataaattaattta

SEQ ID NO: 889789 - DNA, 15 bp, Homo sapiens
tataaattaatttag

SEQ ID NO: 889790 - DNA, 15 bp, Homo sapiens
ataaattaatttagc

SEQ ID NO: 889791 - DNA, 15 bp, Homo sapiens
taaattaatttagcc

SEQ ID NO: 889792 - DNA, 15 bp, Homo sapiens
aaattaatttagccc

SEQ ID NO: 889793 - DNA, 15 bp, Homo sapiens
aattaatttagcccc

SEQ ID NO: 889794 - DNA, 15 bp, Homo sapiens
attaatttagcccct

SEQ ID NO: 889795 - DNA, 15 bp, Homo sapiens
ttaatttagcccctg

SEQ ID NO: 889796 - DNA, 15 bp, Homo sapiens
taatttagcccctgt

SEQ ID NO: 889797 - DNA, 15 bp, Homo sapiens
aatttagcccctgtg

SEQ ID NO: 889798 - DNA, 15 bp, Homo sapiens
atttagcccctgtgg

SEQ ID NO: 889799 - DNA, 15 bp, Homo sapiens
tttagcccctgtgga

SEQ ID NO: 889800 - DNA, 15 bp, Homo sapiens
ttagcccctgtggaa

SEQ ID NO: 889801 - DNA, 15 bp, Homo sapiens
tagcccctgtggaaa

SEQ ID NO: 889802 - DNA, 15 bp, Homo sapiens
agcccctgtggaaag

SEQ ID NO: 889803 - DNA, 15 bp, Homo sapiens
gcccctgtggaaagc

SEQ ID NO: 889804 - DNA, 15 bp, Homo sapiens
cccctgtggaaagca

SEQ ID NO: 889805 - DNA, 15 bp, Homo sapiens
ccctgtggaaagcac

SEQ ID NO: 889806 - DNA, 15 bp, Homo sapiens
cctgtggaaagcact

SEQ ID NO: 889807 - DNA, 15 bp, Homo sapiens
ctgtggaaagcactt

SEQ ID NO: 889808 - DNA, 15 bp, Homo sapiens
tgtggaaagcacttt

SEQ ID NO: 889809 - DNA, 15 bp, Homo sapiens
gtggaaagcactttg

SEQ ID NO: 889810 - DNA, 15 bp, Homo sapiens
tggaaagcactttgg

SEQ ID NO: 889811 - DNA, 15 bp, Homo sapiens
ggaaagcactttgga

SEQ ID NO: 889812 - DNA, 15 bp, Homo sapiens
gaaagcactttggag

SEQ ID NO: 889813 - DNA, 15 bp, Homo sapiens
aaagcactttggaga

SEQ ID NO: 889814 - DNA, 15 bp, Homo sapiens
aagcactttggagat

SEQ ID NO: 889815 - DNA, 15 bp, Homo sapiens
agcactttggagatt

SEQ ID NO: 889816 - DNA, 15 bp, Homo sapiens
gcactttggagattt

SEQ ID NO: 889817 - DNA, 15 bp, Homo sapiens
cactttggagatttc

SEQ ID NO: 889818 - DNA, 15 bp, Homo sapiens
actttggagatttct

SEQ ID NO: 889819 - DNA, 15 bp, Homo sapiens
ctttggagatttctt

SEQ ID NO: 889820 - DNA, 15 bp, Homo sapiens
tttggagatttctta

SEQ ID NO: 889821 - DNA, 15 bp, Homo sapiens
ttggagatttcttaa

SEQ ID NO: 889822 - DNA, 15 bp, Homo sapiens
tggagatttcttaaa

SEQ ID NO: 889823 - DNA, 15 bp, Homo sapiens
ggagatttcttaaat

SEQ ID NO: 889824 - DNA, 15 bp, Homo sapiens
gagatttcttaaata

SEQ ID NO: 889825 - DNA, 15 bp, Homo sapiens
agatttcttaaataa

SEQ ID NO: 889826 - DNA, 15 bp, Homo sapiens
gatttcttaaataac

SEQ ID NO: 889827 - DNA, 15 bp, Homo sapiens
atttcttaaataact

SEQ ID NO: 889828 - DNA, 15 bp, Homo sapiens
tttcttaaataacta

SEQ ID NO: 889829 - DNA, 15 bp, Homo sapiens
ttcttaaataactaa

SEQ ID NO: 889830 - DNA, 15 bp, Homo sapiens
tcttaaataactaaa

SEQ ID NO: 889831 - DNA, 15 bp, Homo sapiens
cttaaataactaaaa

SEQ ID NO: 889832 - DNA, 15 bp, Homo sapiens
ttaaataactaaaaa

SEQ ID NO: 889833 - DNA, 15 bp, Homo sapiens
taaataactaaaaat

SEQ ID NO: 889834 - DNA, 15 bp, Homo sapiens
aaataactaaaaata

SEQ ID NO: 889835 - DNA, 15 bp, Homo sapiens
aataactaaaaatag

SEQ ID NO: 889836 - DNA, 15 bp, Homo sapiens
ataactaaaaataga

SEQ ID NO: 889837 - DNA, 15 bp, Homo sapiens
taactaaaaatagaa

SEQ ID NO: 889838 - DNA, 15 bp, Homo sapiens
aactaaaaatagaac

SEQ ID NO: 889839 - DNA, 15 bp, Homo sapiens
actaaaaatagaacc

SEQ ID NO: 889840 - DNA, 15 bp, Homo sapiens
ctaaaaatagaacca

SEQ ID NO: 889841 - DNA, 15 bp, Homo sapiens
taaaaatagaaccat

SEQ ID NO: 889842 - DNA, 15 bp, Homo sapiens
aaaaatagaaccatc

SEQ ID NO: 889843 - DNA, 15 bp, Homo sapiens
aaaatagaaccatca

SEQ ID NO: 889844 - DNA, 15 bp, Homo sapiens
aaatagaaccatcat

SEQ ID NO: 889845 - DNA, 15 bp, Homo sapiens
aatagaaccatcatt

SEQ ID NO: 889846 - DNA, 15 bp, Homo sapiens
atagaaccatcattt

SEQ ID NO: 889847 - DNA, 15 bp, Homo sapiens
tagaaccatcatttg

SEQ ID NO: 889848 - DNA, 15 bp, Homo sapiens
agaaccatcatttga

SEQ ID NO: 889849 - DNA, 15 bp, Homo sapiens
gaaccatcatttgac

SEQ ID NO: 889850 - DNA, 15 bp, Homo sapiens
aaccatcatttgacc

SEQ ID NO: 889851 - DNA, 15 bp, Homo sapiens
accatcatttgaccc

SEQ ID NO: 889852 - DNA, 15 bp, Homo sapiens
ccatcatttgaccca

SEQ ID NO: 889853 - DNA, 15 bp, Homo sapiens
catcatttgacccag

SEQ ID NO: 889854 - DNA, 15 bp, Homo sapiens
atcatttgacccagc

SEQ ID NO: 889855 - DNA, 15 bp, Homo sapiens
tcatttgacccagca

SEQ ID NO: 889856 - DNA, 15 bp, Homo sapiens
catttgacccagcaa

SEQ ID NO: 889857 - DNA, 15 bp, Homo sapiens
atttgacccagcaat

SEQ ID NO: 889858 - DNA, 15 bp, Homo sapiens
tttgacccagcaatc

SEQ ID NO: 889859 - DNA, 15 bp, Homo sapiens
ttgacccagcaatcc

SEQ ID NO: 889860 - DNA, 15 bp, Homo sapiens
tgacccagcaatccc

SEQ ID NO: 889861 - DNA, 15 bp, Homo sapiens
gacccagcaatccca

SEQ ID NO: 889862 - DNA, 15 bp, Homo sapiens
acccagcaatcccac

SEQ ID NO: 889863 - DNA, 15 bp, Homo sapiens
cccagcaatcccact

SEQ ID NO: 889864 - DNA, 15 bp, Homo sapiens
ccagcaatcccactg

SEQ ID NO: 889865 - DNA, 15 bp, Homo sapiens
cagcaatcccactgc

SEQ ID NO: 889866 - DNA, 15 bp, Homo sapiens
agcaatcccactgct

SEQ ID NO: 889867 - DNA, 15 bp, Homo sapiens
gcaatcccactgctg

SEQ ID NO: 889868 - DNA, 15 bp, Homo sapiens
caatcccactgctgg

SEQ ID NO: 889869 - DNA, 15 bp, Homo sapiens
aatcccactgctgga

SEQ ID NO: 889870 - DNA, 15 bp, Homo sapiens
atcccactgctggat

SEQ ID NO: 889871 - DNA, 15 bp, Homo sapiens
tcccactgctggatg

SEQ ID NO: 889872 - DNA, 15 bp, Homo sapiens
cccactgctggatgc

SEQ ID NO: 889873 - DNA, 15 bp, Homo sapiens
ccactgctggatgca

SEQ ID NO: 889874 - DNA, 15 bp, Homo sapiens
cactgctggatgcat

SEQ ID NO: 889875 - DNA, 15 bp, Homo sapiens
actgctggatgcata

SEQ ID NO: 889876 - DNA, 15 bp, Homo sapiens
ctgctggatgcatac

SEQ ID NO: 889877 - DNA, 15 bp, Homo sapiens
tgctggatgcataca

SEQ ID NO: 889878 - DNA, 15 bp, Homo sapiens
gctggatgcatacac

SEQ ID NO: 889879 - DNA, 15 bp, Homo sapiens
ctggatgcatacaca

SEQ ID NO: 889880 - DNA, 15 bp, Homo sapiens
tggatgcatacacaa

SEQ ID NO: 889881 - DNA, 15 bp, Homo sapiens
ggatgcatacacaaa

SEQ ID NO: 889882 - DNA, 15 bp, Homo sapiens
gatgcatacacaaag

SEQ ID NO: 889883 - DNA, 15 bp, Homo sapiens
atgcatacacaaagg

SEQ ID NO: 889884 - DNA, 15 bp, Homo sapiens
tgcatacacaaagga

SEQ ID NO: 889885 - DNA, 15 bp, Homo sapiens
gcatacacaaaggaa

SEQ ID NO: 889886 - DNA, 15 bp, Homo sapiens
catacacaaaggaaa

SEQ ID NO: 889887 - DNA, 15 bp, Homo sapiens
atacacaaaggaaaa

SEQ ID NO: 889888 - DNA, 15 bp, Homo sapiens
tacacaaaggaaaat

SEQ ID NO: 889889 - DNA, 15 bp, Homo sapiens
acacaaaggaaaata

SEQ ID NO: 889890 - DNA, 15 bp, Homo sapiens
cacaaaggaaaataa

SEQ ID NO: 889891 - DNA, 15 bp, Homo sapiens
acaaaggaaaataaa

SEQ ID NO: 889892 - DNA, 15 bp, Homo sapiens
caaaggaaaataaag

SEQ ID NO: 889893 - DNA, 15 bp, Homo sapiens
aaaggaaaataaagt

SEQ ID NO: 889894 - DNA, 15 bp, Homo sapiens
aaggaaaataaagta

SEQ ID NO: 889895 - DNA, 15 bp, Homo sapiens
aggaaaataaagtat

SEQ ID NO: 889896 - DNA, 15 bp, Homo sapiens
ggaaaataaagtatt

SEQ ID NO: 889897 - DNA, 15 bp, Homo sapiens
gaaaataaagtattc

SEQ ID NO: 889898 - DNA, 15 bp, Homo sapiens
aaaataaagtattct

SEQ ID NO: 889899 - DNA, 15 bp, Homo sapiens
aaataaagtattcta

SEQ ID NO: 889900 - DNA, 15 bp, Homo sapiens
aataaagtattctac

SEQ ID NO: 889901 - DNA, 15 bp, Homo sapiens
ataaagtattctacc

SEQ ID NO: 889902 - DNA, 15 bp, Homo sapiens
taaagtattctacca

SEQ ID NO: 889903 - DNA, 15 bp, Homo sapiens
aaagtattctaccat

SEQ ID NO: 889904 - DNA, 15 bp, Homo sapiens
aagtattctaccata

SEQ ID NO: 889905 - DNA, 15 bp, Homo sapiens
agtattctaccataa

SEQ ID NO: 889906 - DNA, 15 bp, Homo sapiens
gtattctaccataaa

SEQ ID NO: 889907 - DNA, 15 bp, Homo sapiens
tattctaccataaag

SEQ ID NO: 889908 - DNA, 15 bp, Homo sapiens
attctaccataaaga

SEQ ID NO: 889909 - DNA, 15 bp, Homo sapiens
ttctaccataaagag

SEQ ID NO: 889910 - DNA, 15 bp, Homo sapiens
tctaccataaagaga

SEQ ID NO: 889911 - DNA, 15 bp, Homo sapiens
ctaccataaagagac

SEQ ID NO: 889912 - DNA, 15 bp, Homo sapiens
taccataaagagacc

SEQ ID NO: 889913 - DNA, 15 bp, Homo sapiens
accataaagagacct

SEQ ID NO: 889914 - DNA, 15 bp, Homo sapiens
ccataaagagacctg

SEQ ID NO: 889915 - DNA, 15 bp, Homo sapiens
cataaagagacctgc

SEQ ID NO: 889916 - DNA, 15 bp, Homo sapiens
ataaagagacctgca

SEQ ID NO: 889917 - DNA, 15 bp, Homo sapiens
taaagagacctgcac

SEQ ID NO: 889918 - DNA, 15 bp, Homo sapiens
aaagagacctgcact

SEQ ID NO: 889919 - DNA, 15 bp, Homo sapiens
aagagacctgcactt

SEQ ID NO: 889920 - DNA, 15 bp, Homo sapiens
agagacctgcacttg

SEQ ID NO: 889921 - DNA, 15 bp, Homo sapiens
gagacctgcacttgt

SEQ ID NO: 889922 - DNA, 15 bp, Homo sapiens
agacctgcacttgta

SEQ ID NO: 889923 - DNA, 15 bp, Homo sapiens
gacctgcacttgtac

SEQ ID NO: 889924 - DNA, 15 bp, Homo sapiens
acctgcacttgtaca

SEQ ID NO: 889925 - DNA, 15 bp, Homo sapiens
cctgcacttgtacat

SEQ ID NO: 889926 - DNA, 15 bp, Homo sapiens
ctgcacttgtacatt

SEQ ID NO: 889927 - DNA, 15 bp, Homo sapiens
tgcacttgtacattt

SEQ ID NO: 889928 - DNA, 15 bp, Homo sapiens
gcacttgtacattta

SEQ ID NO: 889929 - DNA, 15 bp, Homo sapiens
cacttgtacatttat

SEQ ID NO: 889930 - DNA, 15 bp, Homo sapiens
acttgtacatttatt

SEQ ID NO: 889931 - DNA, 15 bp, Homo sapiens
cttgtacatttattg

SEQ ID NO: 889932 - DNA, 15 bp, Homo sapiens
ttgtacatttattgc

SEQ ID NO: 889933 - DNA, 15 bp, Homo sapiens
tgtacatttattgcc

SEQ ID NO: 889934 - DNA, 15 bp, Homo sapiens
gtacatttattgccg

SEQ ID NO: 889935 - DNA, 15 bp, Homo sapiens
tacatttattgccgc

SEQ ID NO: 889936 - DNA, 15 bp, Homo sapiens
acatttattgccgca

SEQ ID NO: 889937 - DNA, 15 bp, Homo sapiens
catttattgccgcac

SEQ ID NO: 889938 - DNA, 15 bp, Homo sapiens
atttattgccgcact

SEQ ID NO: 889939 - DNA, 15 bp, Homo sapiens
tttattgccgcacta

SEQ ID NO: 889940 - DNA, 15 bp, Homo sapiens
ttattgccgcactat

SEQ ID NO: 889941 - DNA, 15 bp, Homo sapiens
tattgccgcactatt

SEQ ID NO: 889942 - DNA, 15 bp, Homo sapiens
attgccgcactattc

SEQ ID NO: 889943 - DNA, 15 bp, Homo sapiens
ttgccgcactattca

SEQ ID NO: 889944 - DNA, 15 bp, Homo sapiens
tgccgcactattcac

SEQ ID NO: 889945 - DNA, 15 bp, Homo sapiens
gccgcactattcaca

SEQ ID NO: 889946 - DNA, 15 bp, Homo sapiens
ccgcactattcacaa

SEQ ID NO: 889947 - DNA, 15 bp, Homo sapiens
cgcactattcacaat

SEQ ID NO: 889948 - DNA, 15 bp, Homo sapiens
gcactattcacaata

SEQ ID NO: 889949 - DNA, 15 bp, Homo sapiens
cactattcacaatag

SEQ ID NO: 889950 - DNA, 15 bp, Homo sapiens
actattcacaatagc

SEQ ID NO: 889951 - DNA, 15 bp, Homo sapiens
ctattcacaatagca

SEQ ID NO: 889952 - DNA, 15 bp, Homo sapiens
tattcacaatagcaa

SEQ ID NO: 889953 - DNA, 15 bp, Homo sapiens
attcacaatagcaaa

SEQ ID NO: 889954 - DNA, 15 bp, Homo sapiens
ttcacaatagcaaag

SEQ ID NO: 889955 - DNA, 15 bp, Homo sapiens
tcacaatagcaaagg

SEQ ID NO: 889956 - DNA, 15 bp, Homo sapiens
cacaatagcaaaggt

SEQ ID NO: 889957 - DNA, 15 bp, Homo sapiens
acaatagcaaaggtg

SEQ ID NO: 889958 - DNA, 15 bp, Homo sapiens
caatagcaaaggtgt

SEQ ID NO: 889959 - DNA, 15 bp, Homo sapiens
aatagcaaaggtgtg

SEQ ID NO: 889960 - DNA, 15 bp, Homo sapiens
atagcaaaggtgtgg

SEQ ID NO: 889961 - DNA, 15 bp, Homo sapiens
tagcaaaggtgtgga

SEQ ID NO: 889962 - DNA, 15 bp, Homo sapiens
agcaaaggtgtggaa

SEQ ID NO: 889963 - DNA, 15 bp, Homo sapiens
gcaaaggtgtggaaa

SEQ ID NO: 889964 - DNA, 15 bp, Homo sapiens
caaaggtgtggaaac

SEQ ID NO: 889965 - DNA, 15 bp, Homo sapiens
aaaggtgtggaaaca

SEQ ID NO: 889966 - DNA, 15 bp, Homo sapiens
aaggtgtggaaacaa

SEQ ID NO: 889967 - DNA, 15 bp, Homo sapiens
aggtgtggaaacaac

SEQ ID NO: 889968 - DNA, 15 bp, Homo sapiens
ggtgtggaaacaacc

SEQ ID NO: 889969 - DNA, 15 bp, Homo sapiens
gtgtggaaacaacct

SEQ ID NO: 889970 - DNA, 15 bp, Homo sapiens
tgtggaaacaacctt

SEQ ID NO: 889971 - DNA, 15 bp, Homo sapiens
gtggaaacaaccttg

SEQ ID NO: 889972 - DNA, 15 bp, Homo sapiens
tggaaacaaccttgg

SEQ ID NO: 889973 - DNA, 15 bp, Homo sapiens
ggaaacaaccttggt

SEQ ID NO: 889974 - DNA, 15 bp, Homo sapiens
gaaacaaccttggtg

SEQ ID NO: 889975 - DNA, 15 bp, Homo sapiens
aaacaaccttggtgc

SEQ ID NO: 889976 - DNA, 15 bp, Homo sapiens
aacaaccttggtgcc

SEQ ID NO: 889977 - DNA, 15 bp, Homo sapiens
acaaccttggtgccc

SEQ ID NO: 889978 - DNA, 15 bp, Homo sapiens
caaccttggtgccca

SEQ ID NO: 889979 - DNA, 15 bp, Homo sapiens
aaccttggtgcccaa

SEQ ID NO: 889980 - DNA, 15 bp, Homo sapiens
accttggtgcccaac

SEQ ID NO: 889981 - DNA, 15 bp, Homo sapiens
ccttggtgcccaaca

SEQ ID NO: 889982 - DNA, 15 bp, Homo sapiens
cttggtgcccaacaa

SEQ ID NO: 889983 - DNA, 15 bp, Homo sapiens
ttggtgcccaacaac

SEQ ID NO: 889984 - DNA, 15 bp, Homo sapiens
tggtgcccaacaaca

SEQ ID NO: 889985 - DNA, 15 bp, Homo sapiens
ggtgcccaacaacag

SEQ ID NO: 889986 - DNA, 15 bp, Homo sapiens
gtgcccaacaacagc

SEQ ID NO: 889987 - DNA, 15 bp, Homo sapiens
tgcccaacaacagca

SEQ ID NO: 889988 - DNA, 15 bp, Homo sapiens
gcccaacaacagcag

SEQ ID NO: 889989 - DNA, 15 bp, Homo sapiens
cccaacaacagcaga

SEQ ID NO: 889990 - DNA, 15 bp, Homo sapiens
ccaacaacagcagat

SEQ ID NO: 889991 - DNA, 15 bp, Homo sapiens
caacaacagcagatt

SEQ ID NO: 889992 - DNA, 15 bp, Homo sapiens
aacaacagcagatta

SEQ ID NO: 889993 - DNA, 15 bp, Homo sapiens
acaacagcagattag

SEQ ID NO: 889994 - DNA, 15 bp, Homo sapiens
caacagcagattaga

SEQ ID NO: 889995 - DNA, 15 bp, Homo sapiens
aacagcagattagat

SEQ ID NO: 889996 - DNA, 15 bp, Homo sapiens
acagcagattagata

SEQ ID NO: 889997 - DNA, 15 bp, Homo sapiens
cagcagattagataa

SEQ ID NO: 889998 - DNA, 15 bp, Homo sapiens
agcagattagataaa

SEQ ID NO: 889999 - DNA, 15 bp, Homo sapiens
gcagattagataaag

SEQ ID NO: 890000 - DNA, 15 bp, Homo sapiens
cagattagataaaga

SEQ ID NO: 890001 - DNA, 15 bp, Homo sapiens
agattagataaagac

SEQ ID NO: 890002 - DNA, 15 bp, Homo sapiens
gattagataaagaca

SEQ ID NO: 890003 - DNA, 15 bp, Homo sapiens
attagataaagacag

SEQ ID NO: 890004 - DNA, 15 bp, Homo sapiens
ttagataaagacagt

SEQ ID NO: 890005 - DNA, 15 bp, Homo sapiens
tagataaagacagtg

SEQ ID NO: 890006 - DNA, 15 bp, Homo sapiens
agataaagacagtgt

SEQ ID NO: 890007 - DNA, 15 bp, Homo sapiens
gataaagacagtgtg

SEQ ID NO: 890008 - DNA, 15 bp, Homo sapiens
ataaagacagtgtgc

SEQ ID NO: 890009 - DNA, 15 bp, Homo sapiens
taaagacagtgtgct

SEQ ID NO: 890010 - DNA, 15 bp, Homo sapiens
aaagacagtgtgcta

SEQ ID NO: 890011 - DNA, 15 bp, Homo sapiens
aagacagtgtgctac

SEQ ID NO: 890012 - DNA, 15 bp, Homo sapiens
agacagtgtgctacg

SEQ ID NO: 890013 - DNA, 15 bp, Homo sapiens
gacagtgtgctacgt

SEQ ID NO: 890014 - DNA, 15 bp, Homo sapiens
acagtgtgctacgta

SEQ ID NO: 890015 - DNA, 15 bp, Homo sapiens
cagtgtgctacgtat

SEQ ID NO: 890016 - DNA, 15 bp, Homo sapiens
agtgtgctacgtata

SEQ ID NO: 890017 - DNA, 15 bp, Homo sapiens
gtgtgctacgtatac

SEQ ID NO: 890018 - DNA, 15 bp, Homo sapiens
tgtgctacgtataca

SEQ ID NO: 890019 - DNA, 15 bp, Homo sapiens
gtgctacgtatacac

SEQ ID NO: 890020 - DNA, 15 bp, Homo sapiens
tgctacgtatacacc

SEQ ID NO: 890021 - DNA, 15 bp, Homo sapiens
gctacgtatacacct

SEQ ID NO: 890022 - DNA, 15 bp, Homo sapiens
ctacgtatacacctt

SEQ ID NO: 890023 - DNA, 15 bp, Homo sapiens
tacgtatacaccttg

SEQ ID NO: 890024 - DNA, 15 bp, Homo sapiens
acgtatacaccttgg

SEQ ID NO: 890025 - DNA, 15 bp, Homo sapiens
cgtatacaccttgga

SEQ ID NO: 890026 - DNA, 15 bp, Homo sapiens
gtatacaccttggaa

SEQ ID NO: 890027 - DNA, 15 bp, Homo sapiens
tatacaccttggaat

SEQ ID NO: 890028 - DNA, 15 bp, Homo sapiens
atacaccttggaata

SEQ ID NO: 890029 - DNA, 15 bp, Homo sapiens
tacaccttggaatat

SEQ ID NO: 890030 - DNA, 15 bp, Homo sapiens
acaccttggaatatt

SEQ ID NO: 890031 - DNA, 15 bp, Homo sapiens
caccttggaatatta

SEQ ID NO: 890032 - DNA, 15 bp, Homo sapiens
accttggaatattac

SEQ ID NO: 890033 - DNA, 15 bp, Homo sapiens
ccttggaatattaca

SEQ ID NO: 890034 - DNA, 15 bp, Homo sapiens
cttggaatattacac

SEQ ID NO: 890035 - DNA, 15 bp, Homo sapiens
ttggaatattacaca

SEQ ID NO: 890036 - DNA, 15 bp, Homo sapiens
tggaatattacacag

SEQ ID NO: 890037 - DNA, 15 bp, Homo sapiens
ggaatattacacagc

SEQ ID NO: 890038 - DNA, 15 bp, Homo sapiens
gaatattacacagcc

SEQ ID NO: 890039 - DNA, 15 bp, Homo sapiens
aatattacacagcca

SEQ ID NO: 890040 - DNA, 15 bp, Homo sapiens
atattacacagccat

SEQ ID NO: 890041 - DNA, 15 bp, Homo sapiens
tattacacagccata

SEQ ID NO: 890042 - DNA, 15 bp, Homo sapiens
attacacagccataa

SEQ ID NO: 890043 - DNA, 15 bp, Homo sapiens
ttacacagccataac

SEQ ID NO: 890044 - DNA, 15 bp, Homo sapiens
tacacagccataaca

SEQ ID NO: 890045 - DNA, 15 bp, Homo sapiens
acacagccataacaa

SEQ ID NO: 890046 - DNA, 15 bp, Homo sapiens
cacagccataacaaa

SEQ ID NO: 890047 - DNA, 15 bp, Homo sapiens
acagccataacaaag

SEQ ID NO: 890048 - DNA, 15 bp, Homo sapiens
cagccataacaaagg

SEQ ID NO: 890049 - DNA, 15 bp, Homo sapiens
agccataacaaagga

SEQ ID NO: 890050 - DNA, 15 bp, Homo sapiens
gccataacaaaggat

SEQ ID NO: 890051 - DNA, 15 bp, Homo sapiens
ccataacaaaggatg

SEQ ID NO: 890052 - DNA, 15 bp, Homo sapiens
cataacaaaggatga

SEQ ID NO: 890053 - DNA, 15 bp, Homo sapiens
ataacaaaggatgaa

SEQ ID NO: 890054 - DNA, 15 bp, Homo sapiens
taacaaaggatgaaa

SEQ ID NO: 890055 - DNA, 15 bp, Homo sapiens
aacaaaggatgaaat

SEQ ID NO: 890056 - DNA, 15 bp, Homo sapiens
acaaaggatgaaatc

SEQ ID NO: 890057 - DNA, 15 bp, Homo sapiens
caaaggatgaaatca

SEQ ID NO: 890058 - DNA, 15 bp, Homo sapiens
aaaggatgaaatcat

SEQ ID NO: 890059 - DNA, 15 bp, Homo sapiens
aaggatgaaatcatg

SEQ ID NO: 890060 - DNA, 15 bp, Homo sapiens
aggatgaaatcatgt

SEQ ID NO: 890061 - DNA, 15 bp, Homo sapiens
ggatgaaatcatgtc

SEQ ID NO: 890062 - DNA, 15 bp, Homo sapiens
gatgaaatcatgtcc

SEQ ID NO: 890063 - DNA, 15 bp, Homo sapiens
atgaaatcatgtcct

SEQ ID NO: 890064 - DNA, 15 bp, Homo sapiens
tgaaatcatgtcctt

SEQ ID NO: 890065 - DNA, 15 bp, Homo sapiens
gaaatcatgtccttt

SEQ ID NO: 890066 - DNA, 15 bp, Homo sapiens
aaatcatgtccttta

SEQ ID NO: 890067 - DNA, 15 bp, Homo sapiens
aatcatgtcctttac

SEQ ID NO: 890068 - DNA, 15 bp, Homo sapiens
atcatgtcctttaca

SEQ ID NO: 890069 - DNA, 15 bp, Homo sapiens
tcatgtcctttacag

SEQ ID NO: 890070 - DNA, 15 bp, Homo sapiens
catgtcctttacagc

SEQ ID NO: 890071 - DNA, 15 bp, Homo sapiens
atgtcctttacagca

SEQ ID NO: 890072 - DNA, 15 bp, Homo sapiens
tgtcctttacagcaa

SEQ ID NO: 890073 - DNA, 15 bp, Homo sapiens
gtcctttacagcaag

SEQ ID NO: 890074 - DNA, 15 bp, Homo sapiens
tcctttacagcaaga

SEQ ID NO: 890075 - DNA, 15 bp, Homo sapiens
cctttacagcaagat

SEQ ID NO: 890076 - DNA, 15 bp, Homo sapiens
ctttacagcaagatg

SEQ ID NO: 890077 - DNA, 15 bp, Homo sapiens
tttacagcaagatgg

SEQ ID NO: 890078 - DNA, 15 bp, Homo sapiens
ttacagcaagatgga

SEQ ID NO: 890079 - DNA, 15 bp, Homo sapiens
tacagcaagatggat

SEQ ID NO: 890080 - DNA, 15 bp, Homo sapiens
acagcaagatggata

SEQ ID NO: 890081 - DNA, 15 bp, Homo sapiens
cagcaagatggatac

SEQ ID NO: 890082 - DNA, 15 bp, Homo sapiens
agcaagatggataca

SEQ ID NO: 890083 - DNA, 15 bp, Homo sapiens
gcaagatggatacag

SEQ ID NO: 890084 - DNA, 15 bp, Homo sapiens
caagatggatacagc

SEQ ID NO: 890085 - DNA, 15 bp, Homo sapiens
aagatggatacagct

SEQ ID NO: 890086 - DNA, 15 bp, Homo sapiens
agatggatacagctg

SEQ ID NO: 890087 - DNA, 15 bp, Homo sapiens
gatggatacagctgg

SEQ ID NO: 890088 - DNA, 15 bp, Homo sapiens
atggatacagctgga

SEQ ID NO: 890089 - DNA, 15 bp, Homo sapiens
tggatacagctggag

SEQ ID NO: 890090 - DNA, 15 bp, Homo sapiens
ggatacagctggagg

SEQ ID NO: 890091 - DNA, 15 bp, Homo sapiens
gatacagctggaggc

SEQ ID NO: 890092 - DNA, 15 bp, Homo sapiens
atacagctggaggcc

SEQ ID NO: 890093 - DNA, 15 bp, Homo sapiens
tacagctggaggcca

SEQ ID NO: 890094 - DNA, 15 bp, Homo sapiens
acagctggaggccat

SEQ ID NO: 890095 - DNA, 15 bp, Homo sapiens
cagctggaggccatt

SEQ ID NO: 890096 - DNA, 15 bp, Homo sapiens
agctggaggccatta

SEQ ID NO: 890097 - DNA, 15 bp, Homo sapiens
gctggaggccattat

SEQ ID NO: 890098 - DNA, 15 bp, Homo sapiens
ctggaggccattatg

SEQ ID NO: 890099 - DNA, 15 bp, Homo sapiens
tggaggccattatgc

SEQ ID NO: 890100 - DNA, 15 bp, Homo sapiens
ggaggccattatgct

SEQ ID NO: 890101 - DNA, 15 bp, Homo sapiens
gaggccattatgcta

SEQ ID NO: 890102 - DNA, 15 bp, Homo sapiens
aggccattatgctaa

SEQ ID NO: 890103 - DNA, 15 bp, Homo sapiens
ggccattatgctaag

SEQ ID NO: 890104 - DNA, 15 bp, Homo sapiens
gccattatgctaagc

SEQ ID NO: 890105 - DNA, 15 bp, Homo sapiens
ccattatgctaagca

SEQ ID NO: 890106 - DNA, 15 bp, Homo sapiens
cattatgctaagcaa

SEQ ID NO: 890107 - DNA, 15 bp, Homo sapiens
attatgctaagcaaa

SEQ ID NO: 890108 - DNA, 15 bp, Homo sapiens
ttatgctaagcaaat

SEQ ID NO: 890109 - DNA, 15 bp, Homo sapiens
tatgctaagcaaatt

SEQ ID NO: 890110 - DNA, 15 bp, Homo sapiens
atgctaagcaaatta

SEQ ID NO: 890111 - DNA, 15 bp, Homo sapiens
tgctaagcaaattaa

SEQ ID NO: 890112 - DNA, 15 bp, Homo sapiens
gctaagcaaattaat

SEQ ID NO: 890113 - DNA, 15 bp, Homo sapiens
ctaagcaaattaatg

SEQ ID NO: 890114 - DNA, 15 bp, Homo sapiens
taagcaaattaatgc

SEQ ID NO: 890115 - DNA, 15 bp, Homo sapiens
aagcaaattaatgcg

SEQ ID NO: 890116 - DNA, 15 bp, Homo sapiens
agcaaattaatgcgg

SEQ ID NO: 890117 - DNA, 15 bp, Homo sapiens
gcaaattaatgcgga

SEQ ID NO: 890118 - DNA, 15 bp, Homo sapiens
caaattaatgcggaa

SEQ ID NO: 890119 - DNA, 15 bp, Homo sapiens
aaattaatgcggaaa

SEQ ID NO: 890120 - DNA, 15 bp, Homo sapiens
aattaatgcggaaac

SEQ ID NO: 890121 - DNA, 15 bp, Homo sapiens
attaatgcggaaaca

SEQ ID NO: 890122 - DNA, 15 bp, Homo sapiens
ttaatgcggaaacag

SEQ ID NO: 890123 - DNA, 15 bp, Homo sapiens
taatgcggaaacaga

SEQ ID NO: 890124 - DNA, 15 bp, Homo sapiens
aatgcggaaacagaa

SEQ ID NO: 890125 - DNA, 15 bp, Homo sapiens
atgcggaaacagaaa

SEQ ID NO: 890126 - DNA, 15 bp, Homo sapiens
tgcggaaacagaaaa

SEQ ID NO: 890127 - DNA, 15 bp, Homo sapiens
gcggaaacagaaaac

SEQ ID NO: 890128 - DNA, 15 bp, Homo sapiens
cggaaacagaaaacc

SEQ ID NO: 890129 - DNA, 15 bp, Homo sapiens
ggaaacagaaaacca

SEQ ID NO: 890130 - DNA, 15 bp, Homo sapiens
gaaacagaaaaccaa

SEQ ID NO: 890131 - DNA, 15 bp, Homo sapiens
aaacagaaaaccaaa

SEQ ID NO: 890132 - DNA, 15 bp, Homo sapiens
aacagaaaaccaaat

SEQ ID NO: 890133 - DNA, 15 bp, Homo sapiens
acagaaaaccaaata

SEQ ID NO: 890134 - DNA, 15 bp, Homo sapiens
cagaaaaccaaatat

SEQ ID NO: 890135 - DNA, 15 bp, Homo sapiens
agaaaaccaaatatc

SEQ ID NO: 890136 - DNA, 15 bp, Homo sapiens
gaaaaccaaatatca

SEQ ID NO: 890137 - DNA, 15 bp, Homo sapiens
aaaaccaaatatcac

SEQ ID NO: 890138 - DNA, 15 bp, Homo sapiens
aaaccaaatatcaca

SEQ ID NO: 890139 - DNA, 15 bp, Homo sapiens
aaccaaatatcacat

SEQ ID NO: 890140 - DNA, 15 bp, Homo sapiens
accaaatatcacatg

SEQ ID NO: 890141 - DNA, 15 bp, Homo sapiens
ccaaatatcacatgt

SEQ ID NO: 890142 - DNA, 15 bp, Homo sapiens
caaatatcacatgtt

SEQ ID NO: 890143 - DNA, 15 bp, Homo sapiens
aaatatcacatgttc

SEQ ID NO: 890144 - DNA, 15 bp, Homo sapiens
aatatcacatgttct

SEQ ID NO: 890145 - DNA, 15 bp, Homo sapiens
atatcacatgttctc

SEQ ID NO: 890146 - DNA, 15 bp, Homo sapiens
tatcacatgttctca

SEQ ID NO: 890147 - DNA, 15 bp, Homo sapiens
atcacatgttctcac

SEQ ID NO: 890148 - DNA, 15 bp, Homo sapiens
tcacatgttctcact

SEQ ID NO: 890149 - DNA, 15 bp, Homo sapiens
cacatgttctcactt

SEQ ID NO: 890150 - DNA, 15 bp, Homo sapiens
acatgttctcacttc

SEQ ID NO: 890151 - DNA, 15 bp, Homo sapiens
catgttctcacttct

SEQ ID NO: 890152 - DNA, 15 bp, Homo sapiens
atgttctcacttcta

SEQ ID NO: 890153 - DNA, 15 bp, Homo sapiens
tgttctcacttctaa

SEQ ID NO: 890154 - DNA, 15 bp, Homo sapiens
gttctcacttctaag

SEQ ID NO: 890155 - DNA, 15 bp, Homo sapiens
ttctcacttctaagt

SEQ ID NO: 890156 - DNA, 15 bp, Homo sapiens
tctcacttctaagtg

SEQ ID NO: 890157 - DNA, 15 bp, Homo sapiens
ctcacttctaagtgg

SEQ ID NO: 890158 - DNA, 15 bp, Homo sapiens
tcacttctaagtggg

SEQ ID NO: 890159 - DNA, 15 bp, Homo sapiens
cacttctaagtggga

SEQ ID NO: 890160 - DNA, 15 bp, Homo sapiens
acttctaagtgggag

SEQ ID NO: 890161 - DNA, 15 bp, Homo sapiens
cttctaagtgggagc

SEQ ID NO: 890162 - DNA, 15 bp, Homo sapiens
ttctaagtgggagct

SEQ ID NO: 890163 - DNA, 15 bp, Homo sapiens
tctaagtgggagcta

SEQ ID NO: 890164 - DNA, 15 bp, Homo sapiens
ctaagtgggagctaa

SEQ ID NO: 890165 - DNA, 15 bp, Homo sapiens
taagtgggagctaat

SEQ ID NO: 890166 - DNA, 15 bp, Homo sapiens
aagtgggagctaatc

SEQ ID NO: 890167 - DNA, 15 bp, Homo sapiens
agtgggagctaatcc

SEQ ID NO: 890168 - DNA, 15 bp, Homo sapiens
gtgggagctaatccc

SEQ ID NO: 890169 - DNA, 15 bp, Homo sapiens
tgggagctaatcccc

SEQ ID NO: 890170 - DNA, 15 bp, Homo sapiens
gggagctaatccccg

SEQ ID NO: 890171 - DNA, 15 bp, Homo sapiens
ggagctaatccccgg

SEQ ID NO: 890172 - DNA, 15 bp, Homo sapiens
gagctaatccccggg

SEQ ID NO: 890173 - DNA, 15 bp, Homo sapiens
agctaatccccgggt

SEQ ID NO: 890174 - DNA, 15 bp, Homo sapiens
gctaatccccgggta

SEQ ID NO: 890175 - DNA, 15 bp, Homo sapiens
ctaatccccgggtag

SEQ ID NO: 890176 - DNA, 15 bp, Homo sapiens
taatccccgggtaga

SEQ ID NO: 890177 - DNA, 15 bp, Homo sapiens
aatccccgggtagac

SEQ ID NO: 890178 - DNA, 15 bp, Homo sapiens
atccccgggtagaca

SEQ ID NO: 890179 - DNA, 15 bp, Homo sapiens
tccccgggtagacac

SEQ ID NO: 890180 - DNA, 15 bp, Homo sapiens
ccccgggtagacaca

SEQ ID NO: 890181 - DNA, 15 bp, Homo sapiens
cccgggtagacacag

SEQ ID NO: 890182 - DNA, 15 bp, Homo sapiens
ccgggtagacacaga

SEQ ID NO: 890183 - DNA, 15 bp, Homo sapiens
cgggtagacacagac

SEQ ID NO: 890184 - DNA, 15 bp, Homo sapiens
gggtagacacagaca

SEQ ID NO: 890185 - DNA, 15 bp, Homo sapiens
ggtagacacagacat

SEQ ID NO: 890186 - DNA, 15 bp, Homo sapiens
gtagacacagacata

SEQ ID NO: 890187 - DNA, 15 bp, Homo sapiens
tagacacagacataa

SEQ ID NO: 890188 - DNA, 15 bp, Homo sapiens
agacacagacataaa

SEQ ID NO: 890189 - DNA, 15 bp, Homo sapiens
gacacagacataaag

SEQ ID NO: 890190 - DNA, 15 bp, Homo sapiens
acacagacataaaga

SEQ ID NO: 890191 - DNA, 15 bp, Homo sapiens
cacagacataaagac

SEQ ID NO: 890192 - DNA, 15 bp, Homo sapiens
acagacataaagaca

SEQ ID NO: 890193 - DNA, 15 bp, Homo sapiens
cagacataaagacag

SEQ ID NO: 890194 - DNA, 15 bp, Homo sapiens
agacataaagacagg

SEQ ID NO: 890195 - DNA, 15 bp, Homo sapiens
gacataaagacagga

SEQ ID NO: 890196 - DNA, 15 bp, Homo sapiens
acataaagacaggaa

SEQ ID NO: 890197 - DNA, 15 bp, Homo sapiens
cataaagacaggaat

SEQ ID NO: 890198 - DNA, 15 bp, Homo sapiens
ataaagacaggaata

SEQ ID NO: 890199 - DNA, 15 bp, Homo sapiens
taaagacaggaataa

SEQ ID NO: 890200 - DNA, 15 bp, Homo sapiens
aaagacaggaataat

SEQ ID NO: 890201 - DNA, 15 bp, Homo sapiens
aagacaggaataata

SEQ ID NO: 890202 - DNA, 15 bp, Homo sapiens
agacaggaataatag

SEQ ID NO: 890203 - DNA, 15 bp, Homo sapiens
gacaggaataataga

SEQ ID NO: 890204 - DNA, 15 bp, Homo sapiens
acaggaataatagat

SEQ ID NO: 890205 - DNA, 15 bp, Homo sapiens
caggaataatagata

SEQ ID NO: 890206 - DNA, 15 bp, Homo sapiens
aggaataatagatac

SEQ ID NO: 890207 - DNA, 15 bp, Homo sapiens
ggaataatagatact

SEQ ID NO: 890208 - DNA, 15 bp, Homo sapiens
gaataatagatactg

SEQ ID NO: 890209 - DNA, 15 bp, Homo sapiens
aataatagatactgg

SEQ ID NO: 890210 - DNA, 15 bp, Homo sapiens
ataatagatactggg

SEQ ID NO: 890211 - DNA, 15 bp, Homo sapiens
taatagatactgggg

SEQ ID NO: 890212 - DNA, 15 bp, Homo sapiens
aatagatactgggga

SEQ ID NO: 890213 - DNA, 15 bp, Homo sapiens
atagatactggggac

SEQ ID NO: 890214 - DNA, 15 bp, Homo sapiens
tagatactggggact

SEQ ID NO: 890215 - DNA, 15 bp, Homo sapiens
agatactggggactc

SEQ ID NO: 890216 - DNA, 15 bp, Homo sapiens
gatactggggactcc

SEQ ID NO: 890217 - DNA, 15 bp, Homo sapiens
atactggggactcca

SEQ ID NO: 890218 - DNA, 15 bp, Homo sapiens
tactggggactccaa

SEQ ID NO: 890219 - DNA, 15 bp, Homo sapiens
actggggactccaaa

SEQ ID NO: 890220 - DNA, 15 bp, Homo sapiens
ctggggactccaaaa

SEQ ID NO: 890221 - DNA, 15 bp, Homo sapiens
tggggactccaaaag

SEQ ID NO: 890222 - DNA, 15 bp, Homo sapiens
ggggactccaaaagg

SEQ ID NO: 890223 - DNA, 15 bp, Homo sapiens
gggactccaaaagga

SEQ ID NO: 890224 - DNA, 15 bp, Homo sapiens
ggactccaaaaggaa

SEQ ID NO: 890225 - DNA, 15 bp, Homo sapiens
gactccaaaaggaag

SEQ ID NO: 890226 - DNA, 15 bp, Homo sapiens
actccaaaaggaagg

SEQ ID NO: 890227 - DNA, 15 bp, Homo sapiens
ctccaaaaggaagga

SEQ ID NO: 890228 - DNA, 15 bp, Homo sapiens
tccaaaaggaaggag

SEQ ID NO: 890229 - DNA, 15 bp, Homo sapiens
ccaaaaggaaggagg

SEQ ID NO: 890230 - DNA, 15 bp, Homo sapiens
caaaaggaaggaggg

SEQ ID NO: 890231 - DNA, 15 bp, Homo sapiens
aaaaggaaggaggga

SEQ ID NO: 890232 - DNA, 15 bp, Homo sapiens
aaaggaaggagggag

SEQ ID NO: 890233 - DNA, 15 bp, Homo sapiens
aaggaaggagggagt

SEQ ID NO: 890234 - DNA, 15 bp, Homo sapiens
aggaaggagggagtg

SEQ ID NO: 890235 - DNA, 15 bp, Homo sapiens
ggaaggagggagtgg

SEQ ID NO: 890236 - DNA, 15 bp, Homo sapiens
gaaggagggagtggg

SEQ ID NO: 890237 - DNA, 15 bp, Homo sapiens
aaggagggagtgggg

SEQ ID NO: 890238 - DNA, 15 bp, Homo sapiens
aggagggagtggggc

SEQ ID NO: 890239 - DNA, 15 bp, Homo sapiens
ggagggagtggggca

SEQ ID NO: 890240 - DNA, 15 bp, Homo sapiens
gagggagtggggcaa

SEQ ID NO: 890241 - DNA, 15 bp, Homo sapiens
agggagtggggcaaa

SEQ ID NO: 890242 - DNA, 15 bp, Homo sapiens
gggagtggggcaaag

SEQ ID NO: 890243 - DNA, 15 bp, Homo sapiens
ggagtggggcaaagg

SEQ ID NO: 890244 - DNA, 15 bp, Homo sapiens
gagtggggcaaaggc

SEQ ID NO: 890245 - DNA, 15 bp, Homo sapiens
agtggggcaaaggct

SEQ ID NO: 890246 - DNA, 15 bp, Homo sapiens
gtggggcaaaggctg

SEQ ID NO: 890247 - DNA, 15 bp, Homo sapiens
tggggcaaaggctga

SEQ ID NO: 890248 - DNA, 15 bp, Homo sapiens
ggggcaaaggctgaa

SEQ ID NO: 890249 - DNA, 15 bp, Homo sapiens
gggcaaaggctgaaa

SEQ ID NO: 890250 - DNA, 15 bp, Homo sapiens
ggcaaaggctgaaaa

SEQ ID NO: 890251 - DNA, 15 bp, Homo sapiens
gcaaaggctgaaaat

SEQ ID NO: 890252 - DNA, 15 bp, Homo sapiens
caaaggctgaaaatc

SEQ ID NO: 890253 - DNA, 15 bp, Homo sapiens
aaaggctgaaaatct

SEQ ID NO: 890254 - DNA, 15 bp, Homo sapiens
aaggctgaaaatctt

SEQ ID NO: 890255 - DNA, 15 bp, Homo sapiens
aggctgaaaatcttc

SEQ ID NO: 890256 - DNA, 15 bp, Homo sapiens
ggctgaaaatcttct

SEQ ID NO: 890257 - DNA, 15 bp, Homo sapiens
gctgaaaatcttctt

SEQ ID NO: 890258 - DNA, 15 bp, Homo sapiens
ctgaaaatcttcttt

SEQ ID NO: 890259 - DNA, 15 bp, Homo sapiens
tgaaaatcttctttt

SEQ ID NO: 890260 - DNA, 15 bp, Homo sapiens
gaaaatcttcttttt

SEQ ID NO: 890261 - DNA, 15 bp, Homo sapiens
aaaatcttctttttg

SEQ ID NO: 890262 - DNA, 15 bp, Homo sapiens
aaatcttctttttgg

SEQ ID NO: 890263 - DNA, 15 bp, Homo sapiens
aatcttctttttggg

SEQ ID NO: 890264 - DNA, 15 bp, Homo sapiens
atcttctttttgggt

SEQ ID NO: 890265 - DNA, 15 bp, Homo sapiens
tcttctttttgggta

SEQ ID NO: 890266 - DNA, 15 bp, Homo sapiens
cttctttttgggtac

SEQ ID NO: 890267 - DNA, 15 bp, Homo sapiens
ttctttttgggtact

SEQ ID NO: 890268 - DNA, 15 bp, Homo sapiens
tctttttgggtacta

SEQ ID NO: 890269 - DNA, 15 bp, Homo sapiens
ctttttgggtactat

SEQ ID NO: 890270 - DNA, 15 bp, Homo sapiens
tttttgggtactatg

SEQ ID NO: 890271 - DNA, 15 bp, Homo sapiens
ttttgggtactatgt

SEQ ID NO: 890272 - DNA, 15 bp, Homo sapiens
tttgggtactatgtt

SEQ ID NO: 890273 - DNA, 15 bp, Homo sapiens
ttgggtactatgttc

SEQ ID NO: 890274 - DNA, 15 bp, Homo sapiens
tgggtactatgttca

SEQ ID NO: 890275 - DNA, 15 bp, Homo sapiens
gggtactatgttcac

SEQ ID NO: 890276 - DNA, 15 bp, Homo sapiens
ggtactatgttcact

SEQ ID NO: 890277 - DNA, 15 bp, Homo sapiens
gtactatgttcactc

SEQ ID NO: 890278 - DNA, 15 bp, Homo sapiens
tactatgttcactct

SEQ ID NO: 890279 - DNA, 15 bp, Homo sapiens
actatgttcactcta

SEQ ID NO: 890280 - DNA, 15 bp, Homo sapiens
ctatgttcactctat

SEQ ID NO: 890281 - DNA, 15 bp, Homo sapiens
tatgttcactctatc

SEQ ID NO: 890282 - DNA, 15 bp, Homo sapiens
atgttcactctatca

SEQ ID NO: 890283 - DNA, 15 bp, Homo sapiens
tgttcactctatcag

SEQ ID NO: 890284 - DNA, 15 bp, Homo sapiens
gttcactctatcagt

SEQ ID NO: 890285 - DNA, 15 bp, Homo sapiens
ttcactctatcagtg

SEQ ID NO: 890286 - DNA, 15 bp, Homo sapiens
tcactctatcagtga

SEQ ID NO: 890287 - DNA, 15 bp, Homo sapiens
cactctatcagtgat

SEQ ID NO: 890288 - DNA, 15 bp, Homo sapiens
actctatcagtgatg

SEQ ID NO: 890289 - DNA, 15 bp, Homo sapiens
ctctatcagtgatgg

SEQ ID NO: 890290 - DNA, 15 bp, Homo sapiens
tctatcagtgatggg

SEQ ID NO: 890291 - DNA, 15 bp, Homo sapiens
ctatcagtgatggga

SEQ ID NO: 890292 - DNA, 15 bp, Homo sapiens
tatcagtgatgggat

SEQ ID NO: 890293 - DNA, 15 bp, Homo sapiens
atcagtgatgggatc

SEQ ID NO: 890294 - DNA, 15 bp, Homo sapiens
tcagtgatgggatca

SEQ ID NO: 890295 - DNA, 15 bp, Homo sapiens
cagtgatgggatcaa

SEQ ID NO: 890296 - DNA, 15 bp, Homo sapiens
agtgatgggatcaat

SEQ ID NO: 890297 - DNA, 15 bp, Homo sapiens
gtgatgggatcaata

SEQ ID NO: 890298 - DNA, 15 bp, Homo sapiens
tgatgggatcaatag

SEQ ID NO: 890299 - DNA, 15 bp, Homo sapiens
gatgggatcaataga

SEQ ID NO: 890300 - DNA, 15 bp, Homo sapiens
atgggatcaatagaa

SEQ ID NO: 890301 - DNA, 15 bp, Homo sapiens
tgggatcaatagaag

SEQ ID NO: 890302 - DNA, 15 bp, Homo sapiens
gggatcaatagaagc

SEQ ID NO: 890303 - DNA, 15 bp, Homo sapiens
ggatcaatagaagct

SEQ ID NO: 890304 - DNA, 15 bp, Homo sapiens
gatcaatagaagctc

SEQ ID NO: 890305 - DNA, 15 bp, Homo sapiens
atcaatagaagctca

SEQ ID NO: 890306 - DNA, 15 bp, Homo sapiens
tcaatagaagctcaa

SEQ ID NO: 890307 - DNA, 15 bp, Homo sapiens
caatagaagctcaaa

SEQ ID NO: 890308 - DNA, 15 bp, Homo sapiens
aatagaagctcaaac

SEQ ID NO: 890309 - DNA, 15 bp, Homo sapiens
atagaagctcaaacg

SEQ ID NO: 890310 - DNA, 15 bp, Homo sapiens
tagaagctcaaacgt

SEQ ID NO: 890311 - DNA, 15 bp, Homo sapiens
agaagctcaaacgtc

SEQ ID NO: 890312 - DNA, 15 bp, Homo sapiens
gaagctcaaacgtca

SEQ ID NO: 890313 - DNA, 15 bp, Homo sapiens
aagctcaaacgtcag

SEQ ID NO: 890314 - DNA, 15 bp, Homo sapiens
agctcaaacgtcagc

SEQ ID NO: 890315 - DNA, 15 bp, Homo sapiens
gctcaaacgtcagca

SEQ ID NO: 890316 - DNA, 15 bp, Homo sapiens
ctcaaacgtcagcat

SEQ ID NO: 890317 - DNA, 15 bp, Homo sapiens
tcaaacgtcagcatc

SEQ ID NO: 890318 - DNA, 15 bp, Homo sapiens
caaacgtcagcatca

SEQ ID NO: 890319 - DNA, 15 bp, Homo sapiens
aaacgtcagcatcac

SEQ ID NO: 890320 - DNA, 15 bp, Homo sapiens
aacgtcagcatcacg

SEQ ID NO: 890321 - DNA, 15 bp, Homo sapiens
acgtcagcatcacgc

SEQ ID NO: 890322 - DNA, 15 bp, Homo sapiens
cgtcagcatcacgca

SEQ ID NO: 890323 - DNA, 15 bp, Homo sapiens
gtcagcatcacgcat

SEQ ID NO: 890324 - DNA, 15 bp, Homo sapiens
tcagcatcacgcatt

SEQ ID NO: 890325 - DNA, 15 bp, Homo sapiens
cagcatcacgcatta

SEQ ID NO: 890326 - DNA, 15 bp, Homo sapiens
agcatcacgcattac

SEQ ID NO: 890327 - DNA, 15 bp, Homo sapiens
gcatcacgcattaca

SEQ ID NO: 890328 - DNA, 15 bp, Homo sapiens
catcacgcattacac

SEQ ID NO: 890329 - DNA, 15 bp, Homo sapiens
atcacgcattacacc

SEQ ID NO: 890330 - DNA, 15 bp, Homo sapiens
tcacgcattacaccc

SEQ ID NO: 890331 - DNA, 15 bp, Homo sapiens
cacgcattacaccct

SEQ ID NO: 890332 - DNA, 15 bp, Homo sapiens
acgcattacaccctc

SEQ ID NO: 890333 - DNA, 15 bp, Homo sapiens
cgcattacaccctca

SEQ ID NO: 890334 - DNA, 15 bp, Homo sapiens
gcattacaccctcac

SEQ ID NO: 890335 - DNA, 15 bp, Homo sapiens
cattacaccctcaca

SEQ ID NO: 890336 - DNA, 15 bp, Homo sapiens
attacaccctcacaa

SEQ ID NO: 890337 - DNA, 15 bp, Homo sapiens
ttacaccctcacaac

SEQ ID NO: 890338 - DNA, 15 bp, Homo sapiens
tacaccctcacaaca

SEQ ID NO: 890339 - DNA, 15 bp, Homo sapiens
acaccctcacaacaa

SEQ ID NO: 890340 - DNA, 15 bp, Homo sapiens
caccctcacaacaaa

SEQ ID NO: 890341 - DNA, 15 bp, Homo sapiens
accctcacaacaaac

SEQ ID NO: 890342 - DNA, 15 bp, Homo sapiens
ccctcacaacaaacc

SEQ ID NO: 890343 - DNA, 15 bp, Homo sapiens
cctcacaacaaacct

SEQ ID NO: 890344 - DNA, 15 bp, Homo sapiens
ctcacaacaaacctg

SEQ ID NO: 890345 - DNA, 15 bp, Homo sapiens
tcacaacaaacctgc

SEQ ID NO: 890346 - DNA, 15 bp, Homo sapiens
cacaacaaacctgca

SEQ ID NO: 890347 - DNA, 15 bp, Homo sapiens
acaacaaacctgcac

SEQ ID NO: 890348 - DNA, 15 bp, Homo sapiens
caacaaacctgcacg

SEQ ID NO: 890349 - DNA, 15 bp, Homo sapiens
aacaaacctgcacgt

SEQ ID NO: 890350 - DNA, 15 bp, Homo sapiens
acaaacctgcacgtg

SEQ ID NO: 890351 - DNA, 15 bp, Homo sapiens
caaacctgcacgtgt

SEQ ID NO: 890352 - DNA, 15 bp, Homo sapiens
aaacctgcacgtgta

SEQ ID NO: 890353 - DNA, 15 bp, Homo sapiens
aacctgcacgtgtat

SEQ ID NO: 890354 - DNA, 15 bp, Homo sapiens
acctgcacgtgtatc

SEQ ID NO: 890355 - DNA, 15 bp, Homo sapiens
cctgcacgtgtatcc

SEQ ID NO: 890356 - DNA, 15 bp, Homo sapiens
ctgcacgtgtatccc

SEQ ID NO: 890357 - DNA, 15 bp, Homo sapiens
tgcacgtgtatcccc

SEQ ID NO: 890358 - DNA, 15 bp, Homo sapiens
gcacgtgtatccccc

SEQ ID NO: 890359 - DNA, 15 bp, Homo sapiens
cacgtgtatcccccg

SEQ ID NO: 890360 - DNA, 15 bp, Homo sapiens
acgtgtatcccccga

SEQ ID NO: 890361 - DNA, 15 bp, Homo sapiens
cgtgtatcccccgaa

SEQ ID NO: 890362 - DNA, 15 bp, Homo sapiens
gtgtatcccccgaat

SEQ ID NO: 890363 - DNA, 15 bp, Homo sapiens
tgtatcccccgaatc

SEQ ID NO: 890364 - DNA, 15 bp, Homo sapiens
gtatcccccgaatct

SEQ ID NO: 890365 - DNA, 15 bp, Homo sapiens
tatcccccgaatcta

SEQ ID NO: 890366 - DNA, 15 bp, Homo sapiens
atcccccgaatctat

SEQ ID NO: 890367 - DNA, 15 bp, Homo sapiens
tcccccgaatctata

SEQ ID NO: 890368 - DNA, 15 bp, Homo sapiens
cccccgaatctataa

SEQ ID NO: 890369 - DNA, 15 bp, Homo sapiens
ccccgaatctataat

SEQ ID NO: 890370 - DNA, 15 bp, Homo sapiens
cccgaatctataatt

SEQ ID NO: 890371 - DNA, 15 bp, Homo sapiens
ccgaatctataatta

SEQ ID NO: 890372 - DNA, 15 bp, Homo sapiens
cgaatctataattaa

SEQ ID NO: 890373 - DNA, 15 bp, Homo sapiens
gaatctataattaaa

SEQ ID NO: 890374 - DNA, 15 bp, Homo sapiens
aatctataattaaaa

SEQ ID NO: 890375 - DNA, 15 bp, Homo sapiens
atctataattaaaat

SEQ ID NO: 890376 - DNA, 15 bp, Homo sapiens
tctataattaaaatt

SEQ ID NO: 890377 - DNA, 15 bp, Homo sapiens
ctataattaaaattc

SEQ ID NO: 890378 - DNA, 15 bp, Homo sapiens
tataattaaaattca

SEQ ID NO: 890379 - DNA, 15 bp, Homo sapiens
ataattaaaattcaa

SEQ ID NO: 890380 - DNA, 15 bp, Homo sapiens
taattaaaattcaag

SEQ ID NO: 890381 - DNA, 15 bp, Homo sapiens
aattaaaattcaaga

SEQ ID NO: 890382 - DNA, 15 bp, Homo sapiens
attaaaattcaagaa

SEQ ID NO: 890383 - DNA, 15 bp, Homo sapiens
ttaaaattcaagaaa

SEQ ID NO: 890384 - DNA, 15 bp, Homo sapiens
taaaattcaagaaag

SEQ ID NO: 890385 - DNA, 15 bp, Homo sapiens
aaaattcaagaaaga

SEQ ID NO: 890386 - DNA, 15 bp, Homo sapiens
aaattcaagaaagaa

SEQ ID NO: 890387 - DNA, 15 bp, Homo sapiens
aattcaagaaagaaa

SEQ ID NO: 890388 - DNA, 15 bp, Homo sapiens
attcaagaaagaaaa

SEQ ID NO: 890389 - DNA, 15 bp, Homo sapiens
ttcaagaaagaaaag

SEQ ID NO: 890390 - DNA, 15 bp, Homo sapiens
tcaagaaagaaaagt

SEQ ID NO: 890391 - DNA, 15 bp, Homo sapiens
caagaaagaaaagtg

SEQ ID NO: 890392 - DNA, 15 bp, Homo sapiens
aagaaagaaaagtgt

SEQ ID NO: 890393 - DNA, 15 bp, Homo sapiens
agaaagaaaagtgtt

SEQ ID NO: 890394 - DNA, 15 bp, Homo sapiens
gaaagaaaagtgttt

SEQ ID NO: 890395 - DNA, 15 bp, Homo sapiens
aaagaaaagtgtttt

SEQ ID NO: 890396 - DNA, 15 bp, Homo sapiens
aagaaaagtgtttta

SEQ ID NO: 890397 - DNA, 15 bp, Homo sapiens
agaaaagtgttttat

SEQ ID NO: 890398 - DNA, 15 bp, Homo sapiens
gaaaagtgttttatg

SEQ ID NO: 890399 - DNA, 15 bp, Homo sapiens
aaaagtgttttatgt

SEQ ID NO: 890400 - DNA, 15 bp, Homo sapiens
aaagtgttttatgta

SEQ ID NO: 890401 - DNA, 15 bp, Homo sapiens
aagtgttttatgtac

SEQ ID NO: 890402 - DNA, 15 bp, Homo sapiens
agtgttttatgtaca

SEQ ID NO: 890403 - DNA, 15 bp, Homo sapiens
gtgttttatgtacaa

SEQ ID NO: 890404 - DNA, 15 bp, Homo sapiens
tgttttatgtacaac

SEQ ID NO: 890405 - DNA, 15 bp, Homo sapiens
gttttatgtacaact

SEQ ID NO: 890406 - DNA, 15 bp, Homo sapiens
ttttatgtacaactg

SEQ ID NO: 890407 - DNA, 15 bp, Homo sapiens
tttatgtacaactgt

SEQ ID NO: 890408 - DNA, 15 bp, Homo sapiens
ttatgtacaactgtg

SEQ ID NO: 890409 - DNA, 15 bp, Homo sapiens
tatgtacaactgtga

SEQ ID NO: 890410 - DNA, 15 bp, Homo sapiens
atgtacaactgtgaa

SEQ ID NO: 890411 - DNA, 15 bp, Homo sapiens
tgtacaactgtgaaa

SEQ ID NO: 890412 - DNA, 15 bp, Homo sapiens
gtacaactgtgaaac

SEQ ID NO: 890413 - DNA, 15 bp, Homo sapiens
tacaactgtgaaact

SEQ ID NO: 890414 - DNA, 15 bp, Homo sapiens
acaactgtgaaacta

SEQ ID NO: 890415 - DNA, 15 bp, Homo sapiens
caactgtgaaactat

SEQ ID NO: 890416 - DNA, 15 bp, Homo sapiens
aactgtgaaactata

SEQ ID NO: 890417 - DNA, 15 bp, Homo sapiens
actgtgaaactataa

SEQ ID NO: 890418 - DNA, 15 bp, Homo sapiens
ctgtgaaactataat

SEQ ID NO: 890419 - DNA, 15 bp, Homo sapiens
tgtgaaactataata

SEQ ID NO: 890420 - DNA, 15 bp, Homo sapiens
gtgaaactataatat

SEQ ID NO: 890421 - DNA, 15 bp, Homo sapiens
tgaaactataatata

SEQ ID NO: 890422 - DNA, 15 bp, Homo sapiens
gaaactataatatat

SEQ ID NO: 890423 - DNA, 15 bp, Homo sapiens
aaactataatatatc

SEQ ID NO: 890424 - DNA, 15 bp, Homo sapiens
aactataatatatca

SEQ ID NO: 890425 - DNA, 15 bp, Homo sapiens
actataatatatcaa

SEQ ID NO: 890426 - DNA, 15 bp, Homo sapiens
ctataatatatcaat

SEQ ID NO: 890427 - DNA, 15 bp, Homo sapiens
tataatatatcaatt

SEQ ID NO: 890428 - DNA, 15 bp, Homo sapiens
ataatatatcaattt

SEQ ID NO: 890429 - DNA, 15 bp, Homo sapiens
taatatatcaattta

SEQ ID NO: 890430 - DNA, 15 bp, Homo sapiens
aatatatcaatttaa

SEQ ID NO: 890431 - DNA, 15 bp, Homo sapiens
atatatcaatttaaa

SEQ ID NO: 890432 - DNA, 15 bp, Homo sapiens
tatatcaatttaaag

SEQ ID NO: 890433 - DNA, 15 bp, Homo sapiens
atatcaatttaaaga

SEQ ID NO: 890434 - DNA, 15 bp, Homo sapiens
tatcaatttaaagaa

SEQ ID NO: 890435 - DNA, 15 bp, Homo sapiens
atcaatttaaagaag

SEQ ID NO: 890436 - DNA, 15 bp, Homo sapiens
tcaatttaaagaaga

SEQ ID NO: 890437 - DNA, 15 bp, Homo sapiens
caatttaaagaagaa

SEQ ID NO: 890438 - DNA, 15 bp, Homo sapiens
aatttaaagaagaaa

SEQ ID NO: 890439 - DNA, 15 bp, Homo sapiens
atttaaagaagaaaa

SEQ ID NO: 890440 - DNA, 15 bp, Homo sapiens
tttaaagaagaaaaa

SEQ ID NO: 890441 - DNA, 15 bp, Homo sapiens
ttaaagaagaaaaat

SEQ ID NO: 890442 - DNA, 15 bp, Homo sapiens
taaagaagaaaaatg

SEQ ID NO: 890443 - DNA, 15 bp, Homo sapiens
aaagaagaaaaatgt

SEQ ID NO: 890444 - DNA, 15 bp, Homo sapiens
aagaagaaaaatgtt

SEQ ID NO: 890445 - DNA, 15 bp, Homo sapiens
agaagaaaaatgttt

SEQ ID NO: 890446 - DNA, 15 bp, Homo sapiens
gaagaaaaatgtttc

SEQ ID NO: 890447 - DNA, 15 bp, Homo sapiens
aagaaaaatgtttca

SEQ ID NO: 890448 - DNA, 15 bp, Homo sapiens
agaaaaatgtttcat

SEQ ID NO: 890449 - DNA, 15 bp, Homo sapiens
gaaaaatgtttcatg

SEQ ID NO: 890450 - DNA, 15 bp, Homo sapiens
aaaaatgtttcatgg

SEQ ID NO: 890451 - DNA, 15 bp, Homo sapiens
aaaatgtttcatggc

SEQ ID NO: 890452 - DNA, 15 bp, Homo sapiens
aaatgtttcatggca

SEQ ID NO: 890453 - DNA, 15 bp, Homo sapiens
aatgtttcatggcat

SEQ ID NO: 890454 - DNA, 15 bp, Homo sapiens
atgtttcatggcatg

SEQ ID NO: 890455 - DNA, 15 bp, Homo sapiens
tgtttcatggcatgg

SEQ ID NO: 890456 - DNA, 15 bp, Homo sapiens
gtttcatggcatggg

SEQ ID NO: 890457 - DNA, 15 bp, Homo sapiens
tttcatggcatggga

SEQ ID NO: 890458 - DNA, 15 bp, Homo sapiens
ttcatggcatgggaa

SEQ ID NO: 890459 - DNA, 15 bp, Homo sapiens
tcatggcatgggaaa

SEQ ID NO: 890460 - DNA, 15 bp, Homo sapiens
catggcatgggaaaa

SEQ ID NO: 890461 - DNA, 15 bp, Homo sapiens
atggcatgggaaaat

SEQ ID NO: 890462 - DNA, 15 bp, Homo sapiens
tggcatgggaaaatg

SEQ ID NO: 890463 - DNA, 15 bp, Homo sapiens
ggcatgggaaaatga

SEQ ID NO: 890464 - DNA, 15 bp, Homo sapiens
gcatgggaaaatgat

SEQ ID NO: 890465 - DNA, 15 bp, Homo sapiens
catgggaaaatgatt

SEQ ID NO: 890466 - DNA, 15 bp, Homo sapiens
atgggaaaatgatta

SEQ ID NO: 890467 - DNA, 15 bp, Homo sapiens
tgggaaaatgattat

SEQ ID NO: 890468 - DNA, 15 bp, Homo sapiens
gggaaaatgattata

SEQ ID NO: 890469 - DNA, 15 bp, Homo sapiens
ggaaaatgattataa

SEQ ID NO: 890470 - DNA, 15 bp, Homo sapiens
gaaaatgattataat

SEQ ID NO: 890471 - DNA, 15 bp, Homo sapiens
aaaatgattataata

SEQ ID NO: 890472 - DNA, 15 bp, Homo sapiens
aaatgattataatat

SEQ ID NO: 890473 - DNA, 15 bp, Homo sapiens
aatgattataatatt

SEQ ID NO: 890474 - DNA, 15 bp, Homo sapiens
atgattataatattc

SEQ ID NO: 890475 - DNA, 15 bp, Homo sapiens
tgattataatattct

SEQ ID NO: 890476 - DNA, 15 bp, Homo sapiens
gattataatattctg

SEQ ID NO: 890477 - DNA, 15 bp, Homo sapiens
attataatattctgt

SEQ ID NO: 890478 - DNA, 15 bp, Homo sapiens
ttataatattctgtt

SEQ ID NO: 890479 - DNA, 15 bp, Homo sapiens
tataatattctgtta

SEQ ID NO: 890480 - DNA, 15 bp, Homo sapiens
ataatattctgttat

SEQ ID NO: 890481 - DNA, 15 bp, Homo sapiens
taatattctgttatg

SEQ ID NO: 890482 - DNA, 15 bp, Homo sapiens
aatattctgttatgt

SEQ ID NO: 890483 - DNA, 15 bp, Homo sapiens
atattctgttatgta

SEQ ID NO: 890484 - DNA, 15 bp, Homo sapiens
tattctgttatgtaa

SEQ ID NO: 890485 - DNA, 15 bp, Homo sapiens
attctgttatgtaaa

SEQ ID NO: 890486 - DNA, 15 bp, Homo sapiens
ttctgttatgtaaaa

SEQ ID NO: 890487 - DNA, 15 bp, Homo sapiens
tctgttatgtaaaaa

SEQ ID NO: 890488 - DNA, 15 bp, Homo sapiens
ctgttatgtaaaaaa

SEQ ID NO: 890489 - DNA, 15 bp, Homo sapiens
tgttatgtaaaaaag

SEQ ID NO: 890490 - DNA, 15 bp, Homo sapiens
gttatgtaaaaaagc

SEQ ID NO: 890491 - DNA, 15 bp, Homo sapiens
ttatgtaaaaaagcg

SEQ ID NO: 890492 - DNA, 15 bp, Homo sapiens
tatgtaaaaaagcga

SEQ ID NO: 890493 - DNA, 15 bp, Homo sapiens
atgtaaaaaagcgag

SEQ ID NO: 890494 - DNA, 15 bp, Homo sapiens
tgtaaaaaagcgaga

SEQ ID NO: 890495 - DNA, 15 bp, Homo sapiens
gtaaaaaagcgagag

SEQ ID NO: 890496 - DNA, 15 bp, Homo sapiens
taaaaaagcgagaga

SEQ ID NO: 890497 - DNA, 15 bp, Homo sapiens
aaaaaagcgagagat

SEQ ID NO: 890498 - DNA, 15 bp, Homo sapiens
aaaaagcgagagatt

SEQ ID NO: 890499 - DNA, 15 bp, Homo sapiens
aaaagcgagagattt

SEQ ID NO: 890500 - DNA, 15 bp, Homo sapiens
aaagcgagagatttt

SEQ ID NO: 890501 - DNA, 15 bp, Homo sapiens
aagcgagagattttt

SEQ ID NO: 890502 - DNA, 15 bp, Homo sapiens
agcgagagatttttt

SEQ ID NO: 890503 - DNA, 15 bp, Homo sapiens
gcgagagattttttt

SEQ ID NO: 890504 - DNA, 15 bp, Homo sapiens
cgagagatttttttt

SEQ ID NO: 890505 - DNA, 15 bp, Homo sapiens
gagagattttttttc

SEQ ID NO: 890506 - DNA, 15 bp, Homo sapiens
agagattttttttcc

SEQ ID NO: 890507 - DNA, 15 bp, Homo sapiens
gagattttttttccc

SEQ ID NO: 890508 - DNA, 15 bp, Homo sapiens
agattttttttcccg

SEQ ID NO: 890509 - DNA, 15 bp, Homo sapiens
gattttttttcccga

SEQ ID NO: 890510 - DNA, 15 bp, Homo sapiens
attttttttcccgaa

SEQ ID NO: 890511 - DNA, 15 bp, Homo sapiens
ttttttttcccgaaa

SEQ ID NO: 890512 - DNA, 15 bp, Homo sapiens
tttttttcccgaaaa

SEQ ID NO: 890513 - DNA, 15 bp, Homo sapiens
ttttttcccgaaaac

SEQ ID NO: 890514 - DNA, 15 bp, Homo sapiens
tttttcccgaaaacc

SEQ ID NO: 890515 - DNA, 15 bp, Homo sapiens
ttttcccgaaaacca

SEQ ID NO: 890516 - DNA, 15 bp, Homo sapiens
tttcccgaaaaccaa

SEQ ID NO: 890517 - DNA, 15 bp, Homo sapiens
ttcccgaaaaccaaa

SEQ ID NO: 890518 - DNA, 15 bp, Homo sapiens
tcccgaaaaccaaag

SEQ ID NO: 890519 - DNA, 15 bp, Homo sapiens
cccgaaaaccaaagc

SEQ ID NO: 890520 - DNA, 15 bp, Homo sapiens
ccgaaaaccaaagca

SEQ ID NO: 890521 - DNA, 15 bp, Homo sapiens
cgaaaaccaaagcac

SEQ ID NO: 890522 - DNA, 15 bp, Homo sapiens
gaaaaccaaagcacg

SEQ ID NO: 890523 - DNA, 15 bp, Homo sapiens
aaaaccaaagcacga

SEQ ID NO: 890524 - DNA, 15 bp, Homo sapiens
aaaccaaagcacgat

SEQ ID NO: 890525 - DNA, 15 bp, Homo sapiens
aaccaaagcacgatg

SEQ ID NO: 890526 - DNA, 15 bp, Homo sapiens
accaaagcacgatga

SEQ ID NO: 890527 - DNA, 15 bp, Homo sapiens
ccaaagcacgatgac

SEQ ID NO: 890528 - DNA, 15 bp, Homo sapiens
caaagcacgatgaca

SEQ ID NO: 890529 - DNA, 15 bp, Homo sapiens
aaagcacgatgacaa

SEQ ID NO: 890530 - DNA, 15 bp, Homo sapiens
aagcacgatgacaac

SEQ ID NO: 890531 - DNA, 15 bp, Homo sapiens
agcacgatgacaaca

SEQ ID NO: 890532 - DNA, 15 bp, Homo sapiens
gcacgatgacaacaa

SEQ ID NO: 890533 - DNA, 15 bp, Homo sapiens
cacgatgacaacaaa

SEQ ID NO: 890534 - DNA, 15 bp, Homo sapiens
acgatgacaacaaaa

SEQ ID NO: 890535 - DNA, 15 bp, Homo sapiens
cgatgacaacaaaac

SEQ ID NO: 890536 - DNA, 15 bp, Homo sapiens
gatgacaacaaaacc

SEQ ID NO: 890537 - DNA, 15 bp, Homo sapiens
atgacaacaaaaccg

SEQ ID NO: 890538 - DNA, 15 bp, Homo sapiens
tgacaacaaaaccgc

SEQ ID NO: 890539 - DNA, 15 bp, Homo sapiens
gacaacaaaaccgca

SEQ ID NO: 890540 - DNA, 15 bp, Homo sapiens
acaacaaaaccgcaa

SEQ ID NO: 890541 - DNA, 15 bp, Homo sapiens
caacaaaaccgcaag

SEQ ID NO: 890542 - DNA, 15 bp, Homo sapiens
aacaaaaccgcaaga

SEQ ID NO: 890543 - DNA, 15 bp, Homo sapiens
acaaaaccgcaagat

SEQ ID NO: 890544 - DNA, 15 bp, Homo sapiens
caaaaccgcaagatc

SEQ ID NO: 890545 - DNA, 15 bp, Homo sapiens
aaaaccgcaagatct

SEQ ID NO: 890546 - DNA, 15 bp, Homo sapiens
aaaccgcaagatctt

SEQ ID NO: 890547 - DNA, 15 bp, Homo sapiens
aaccgcaagatcttt

SEQ ID NO: 890548 - DNA, 15 bp, Homo sapiens
accgcaagatctttg

SEQ ID NO: 890549 - DNA, 15 bp, Homo sapiens
ccgcaagatctttgt

SEQ ID NO: 890550 - DNA, 15 bp, Homo sapiens
cgcaagatctttgtt

SEQ ID NO: 890551 - DNA, 15 bp, Homo sapiens
gcaagatctttgttt

SEQ ID NO: 890552 - DNA, 15 bp, Homo sapiens
caagatctttgttta

SEQ ID NO: 890553 - DNA, 15 bp, Homo sapiens
aagatctttgtttat

SEQ ID NO: 890554 - DNA, 15 bp, Homo sapiens
agatctttgtttatt

SEQ ID NO: 890555 - DNA, 15 bp, Homo sapiens
gatctttgtttattc

SEQ ID NO: 890556 - DNA, 15 bp, Homo sapiens
atctttgtttattcc

SEQ ID NO: 890557 - DNA, 15 bp, Homo sapiens
tctttgtttattcct

SEQ ID NO: 890558 - DNA, 15 bp, Homo sapiens
ctttgtttattcctc

SEQ ID NO: 890559 - DNA, 15 bp, Homo sapiens
tttgtttattcctcc

SEQ ID NO: 890560 - DNA, 15 bp, Homo sapiens
ttgtttattcctcct

SEQ ID NO: 890561 - DNA, 15 bp, Homo sapiens
tgtttattcctcctg

SEQ ID NO: 890562 - DNA, 15 bp, Homo sapiens
gtttattcctcctgg

SEQ ID NO: 890563 - DNA, 15 bp, Homo sapiens
tttattcctcctggc

SEQ ID NO: 890564 - DNA, 15 bp, Homo sapiens
ttattcctcctggcg

SEQ ID NO: 890565 - DNA, 15 bp, Homo sapiens
tattcctcctggcgc

SEQ ID NO: 890566 - DNA, 15 bp, Homo sapiens
attcctcctggcgct

SEQ ID NO: 890567 - DNA, 15 bp, Homo sapiens
ttcctcctggcgcta

SEQ ID NO: 890568 - DNA, 15 bp, Homo sapiens
tcctcctggcgctag

SEQ ID NO: 890569 - DNA, 15 bp, Homo sapiens
cctcctggcgctaga

SEQ ID NO: 890570 - DNA, 15 bp, Homo sapiens
ctcctggcgctagag

SEQ ID NO: 890571 - DNA, 15 bp, Homo sapiens
tcctggcgctagaga

SEQ ID NO: 890572 - DNA, 15 bp, Homo sapiens
cctggcgctagagat

SEQ ID NO: 890573 - DNA, 15 bp, Homo sapiens
ctggcgctagagatg

SEQ ID NO: 890574 - DNA, 15 bp, Homo sapiens
tggcgctagagatgc

SEQ ID NO: 890575 - DNA, 15 bp, Homo sapiens
ggcgctagagatgcg

SEQ ID NO: 890576 - DNA, 15 bp, Homo sapiens
gcgctagagatgcgg

SEQ ID NO: 890577 - DNA, 15 bp, Homo sapiens
cgctagagatgcggc

SEQ ID NO: 890578 - DNA, 15 bp, Homo sapiens
gctagagatgcggca

SEQ ID NO: 890579 - DNA, 15 bp, Homo sapiens
ctagagatgcggcag

SEQ ID NO: 890580 - DNA, 15 bp, Homo sapiens
tagagatgcggcagt

SEQ ID NO: 890581 - DNA, 15 bp, Homo sapiens
agagatgcggcagtg

SEQ ID NO: 890582 - DNA, 15 bp, Homo sapiens
gagatgcggcagtga

SEQ ID NO: 890583 - DNA, 15 bp, Homo sapiens
agatgcggcagtgaa

SEQ ID NO: 890584 - DNA, 15 bp, Homo sapiens
gatgcggcagtgaat

SEQ ID NO: 890585 - DNA, 15 bp, Homo sapiens
atgcggcagtgaata

SEQ ID NO: 890586 - DNA, 15 bp, Homo sapiens
tgcggcagtgaataa

SEQ ID NO: 890587 - DNA, 15 bp, Homo sapiens
gcggcagtgaataag

SEQ ID NO: 890588 - DNA, 15 bp, Homo sapiens
cggcagtgaataaga

SEQ ID NO: 890589 - DNA, 15 bp, Homo sapiens
ggcagtgaataagaa

SEQ ID NO: 890590 - DNA, 15 bp, Homo sapiens
gcagtgaataagaac

SEQ ID NO: 890591 - DNA, 15 bp, Homo sapiens
cagtgaataagaacg

SEQ ID NO: 890592 - DNA, 15 bp, Homo sapiens
agtgaataagaacgg

SEQ ID NO: 890593 - DNA, 15 bp, Homo sapiens
gtgaataagaacggt

SEQ ID NO: 890594 - DNA, 15 bp, Homo sapiens
tgaataagaacggtt

SEQ ID NO: 890595 - DNA, 15 bp, Homo sapiens
gaataagaacggttc

SEQ ID NO: 890596 - DNA, 15 bp, Homo sapiens
aataagaacggttcc

SEQ ID NO: 890597 - DNA, 15 bp, Homo sapiens
ataagaacggttcca

SEQ ID NO: 890598 - DNA, 15 bp, Homo sapiens
taagaacggttccag

SEQ ID NO: 890599 - DNA, 15 bp, Homo sapiens
aagaacggttccagt

SEQ ID NO: 890600 - DNA, 15 bp, Homo sapiens
agaacggttccagtc

SEQ ID NO: 890601 - DNA, 15 bp, Homo sapiens
gaacggttccagtcc

SEQ ID NO: 890602 - DNA, 15 bp, Homo sapiens
aacggttccagtccc

SEQ ID NO: 890603 - DNA, 15 bp, Homo sapiens
acggttccagtccct

SEQ ID NO: 890604 - DNA, 15 bp, Homo sapiens
cggttccagtccctg

SEQ ID NO: 890605 - DNA, 15 bp, Homo sapiens
ggttccagtccctga

SEQ ID NO: 890606 - DNA, 15 bp, Homo sapiens
gttccagtccctgat

SEQ ID NO: 890607 - DNA, 15 bp, Homo sapiens
ttccagtccctgatt

SEQ ID NO: 890608 - DNA, 15 bp, Homo sapiens
tccagtccctgattt

SEQ ID NO: 890609 - DNA, 15 bp, Homo sapiens
ccagtccctgatttt

SEQ ID NO: 890610 - DNA, 15 bp, Homo sapiens
cagtccctgatttta

SEQ ID NO: 890611 - DNA, 15 bp, Homo sapiens
agtccctgattttag

SEQ ID NO: 890612 - DNA, 15 bp, Homo sapiens
gtccctgattttaga

SEQ ID NO: 890613 - DNA, 15 bp, Homo sapiens
tccctgattttagag

SEQ ID NO: 890614 - DNA, 15 bp, Homo sapiens
ccctgattttagaga

SEQ ID NO: 890615 - DNA, 15 bp, Homo sapiens
cctgattttagagag

SEQ ID NO: 890616 - DNA, 15 bp, Homo sapiens
ctgattttagagagc

SEQ ID NO: 890617 - DNA, 15 bp, Homo sapiens
tgattttagagagct

SEQ ID NO: 890618 - DNA, 15 bp, Homo sapiens
gattttagagagctt

SEQ ID NO: 890619 - DNA, 15 bp, Homo sapiens
attttagagagctta

SEQ ID NO: 890620 - DNA, 15 bp, Homo sapiens
ttttagagagcttac

SEQ ID NO: 890621 - DNA, 15 bp, Homo sapiens
tttagagagcttacc

SEQ ID NO: 890622 - DNA, 15 bp, Homo sapiens
ttagagagcttaccc

SEQ ID NO: 890623 - DNA, 15 bp, Homo sapiens
tagagagcttaccct

SEQ ID NO: 890624 - DNA, 15 bp, Homo sapiens
agagagcttaccctt

SEQ ID NO: 890625 - DNA, 15 bp, Homo sapiens
gagagcttacccttg

SEQ ID NO: 890626 - DNA, 15 bp, Homo sapiens
agagcttacccttgg

SEQ ID NO: 890627 - DNA, 15 bp, Homo sapiens
gagcttacccttggg

SEQ ID NO: 890628 - DNA, 15 bp, Homo sapiens
agcttacccttgggt

SEQ ID NO: 890629 - DNA, 15 bp, Homo sapiens
gcttacccttgggtt

SEQ ID NO: 890630 - DNA, 15 bp, Homo sapiens
cttacccttgggtta

SEQ ID NO: 890631 - DNA, 15 bp, Homo sapiens
ttacccttgggttag

SEQ ID NO: 890632 - DNA, 15 bp, Homo sapiens
tacccttgggttagg

SEQ ID NO: 890633 - DNA, 15 bp, Homo sapiens
acccttgggttagga

SEQ ID NO: 890634 - DNA, 15 bp, Homo sapiens
cccttgggttaggag

SEQ ID NO: 890635 - DNA, 15 bp, Homo sapiens
ccttgggttaggaga

SEQ ID NO: 890636 - DNA, 15 bp, Homo sapiens
cttgggttaggagac

SEQ ID NO: 890637 - DNA, 15 bp, Homo sapiens
ttgggttaggagaca

SEQ ID NO: 890638 - DNA, 15 bp, Homo sapiens
tgggttaggagacat

SEQ ID NO: 890639 - DNA, 15 bp, Homo sapiens
gggttaggagacatg

SEQ ID NO: 890640 - DNA, 15 bp, Homo sapiens
ggttaggagacatgt

SEQ ID NO: 890641 - DNA, 15 bp, Homo sapiens
gttaggagacatgtt

SEQ ID NO: 890642 - DNA, 15 bp, Homo sapiens
ttaggagacatgtta

SEQ ID NO: 890643 - DNA, 15 bp, Homo sapiens
taggagacatgttaa

SEQ ID NO: 890644 - DNA, 15 bp, Homo sapiens
aggagacatgttaat

SEQ ID NO: 890645 - DNA, 15 bp, Homo sapiens
ggagacatgttaatg

SEQ ID NO: 890646 - DNA, 15 bp, Homo sapiens
gagacatgttaatgg

SEQ ID NO: 890647 - DNA, 15 bp, Homo sapiens
agacatgttaatgga

SEQ ID NO: 890648 - DNA, 15 bp, Homo sapiens
gacatgttaatggag

SEQ ID NO: 890649 - DNA, 15 bp, Homo sapiens
acatgttaatggagg

SEQ ID NO: 890650 - DNA, 15 bp, Homo sapiens
catgttaatggagga

SEQ ID NO: 890651 - DNA, 15 bp, Homo sapiens
atgttaatggaggat

SEQ ID NO: 890652 - DNA, 15 bp, Homo sapiens
tgttaatggaggatg

SEQ ID NO: 890653 - DNA, 15 bp, Homo sapiens
gttaatggaggatgc

SEQ ID NO: 890654 - DNA, 15 bp, Homo sapiens
ttaatggaggatgca

SEQ ID NO: 890655 - DNA, 15 bp, Homo sapiens
taatggaggatgcac

SEQ ID NO: 890656 - DNA, 15 bp, Homo sapiens
aatggaggatgcaca

SEQ ID NO: 890657 - DNA, 15 bp, Homo sapiens
atggaggatgcacat

SEQ ID NO: 890658 - DNA, 15 bp, Homo sapiens
tggaggatgcacatg

SEQ ID NO: 890659 - DNA, 15 bp, Homo sapiens
ggaggatgcacatga

SEQ ID NO: 890660 - DNA, 15 bp, Homo sapiens
gaggatgcacatgaa

SEQ ID NO: 890661 - DNA, 15 bp, Homo sapiens
aggatgcacatgaat

SEQ ID NO: 890662 - DNA, 15 bp, Homo sapiens
ggatgcacatgaata

SEQ ID NO: 890663 - DNA, 15 bp, Homo sapiens
gatgcacatgaataa

SEQ ID NO: 890664 - DNA, 15 bp, Homo sapiens
atgcacatgaataaa

SEQ ID NO: 890665 - DNA, 15 bp, Homo sapiens
tgcacatgaataaat

SEQ ID NO: 890666 - DNA, 15 bp, Homo sapiens
gcacatgaataaatg

SEQ ID NO: 890667 - DNA, 15 bp, Homo sapiens
cacatgaataaatgt

SEQ ID NO: 890668 - DNA, 15 bp, Homo sapiens
acatgaataaatgtt

SEQ ID NO: 890669 - DNA, 15 bp, Homo sapiens
catgaataaatgtta

SEQ ID NO: 890670 - DNA, 15 bp, Homo sapiens
atgaataaatgttaa

SEQ ID NO: 890671 - DNA, 15 bp, Homo sapiens
tgaataaatgttaaa

SEQ ID NO: 890672 - DNA, 15 bp, Homo sapiens
gaataaatgttaaat

SEQ ID NO: 890673 - DNA, 15 bp, Homo sapiens
aataaatgttaaatt

SEQ ID NO: 890674 - DNA, 15 bp, Homo sapiens
ataaatgttaaatta

SEQ ID NO: 890675 - DNA, 15 bp, Homo sapiens
taaatgttaaattac

SEQ ID NO: 890676 - DNA, 15 bp, Homo sapiens
aaatgttaaattaca

SEQ ID NO: 890677 - DNA, 15 bp, Homo sapiens
aatgttaaattacag

SEQ ID NO: 890678 - DNA, 15 bp, Homo sapiens
atgttaaattacagg

SEQ ID NO: 890679 - DNA, 15 bp, Homo sapiens
tgttaaattacaggc

SEQ ID NO: 890680 - DNA, 15 bp, Homo sapiens
gttaaattacaggcg

SEQ ID NO: 890681 - DNA, 15 bp, Homo sapiens
ttaaattacaggcgg

SEQ ID NO: 890682 - DNA, 15 bp, Homo sapiens
taaattacaggcgga

SEQ ID NO: 890683 - DNA, 15 bp, Homo sapiens
aaattacaggcggag

SEQ ID NO: 890684 - DNA, 15 bp, Homo sapiens
aattacaggcggagg

SEQ ID NO: 890685 - DNA, 15 bp, Homo sapiens
attacaggcggagga

SEQ ID NO: 890686 - DNA, 15 bp, Homo sapiens
ttacaggcggaggaa

SEQ ID NO: 890687 - DNA, 15 bp, Homo sapiens
tacaggcggaggaag

SEQ ID NO: 890688 - DNA, 15 bp, Homo sapiens
acaggcggaggaagt

SEQ ID NO: 890689 - DNA, 15 bp, Homo sapiens
caggcggaggaagtg

SEQ ID NO: 890690 - DNA, 15 bp, Homo sapiens
aggcggaggaagtgt

SEQ ID NO: 890691 - DNA, 15 bp, Homo sapiens
ggcggaggaagtgtt

SEQ ID NO: 890692 - DNA, 15 bp, Homo sapiens
gcggaggaagtgttc

SEQ ID NO: 890693 - DNA, 15 bp, Homo sapiens
cggaggaagtgttct

SEQ ID NO: 890694 - DNA, 15 bp, Homo sapiens
ggaggaagtgttctg

SEQ ID NO: 890695 - DNA, 15 bp, Homo sapiens
gaggaagtgttctgc

SEQ ID NO: 890696 - DNA, 15 bp, Homo sapiens
aggaagtgttctgca

SEQ ID NO: 890697 - DNA, 15 bp, Homo sapiens
ggaagtgttctgcag

SEQ ID NO: 890698 - DNA, 15 bp, Homo sapiens
gaagtgttctgcaga

SEQ ID NO: 890699 - DNA, 15 bp, Homo sapiens
aagtgttctgcagaa

SEQ ID NO: 890700 - DNA, 15 bp, Homo sapiens
agtgttctgcagaag

SEQ ID NO: 890701 - DNA, 15 bp, Homo sapiens
gtgttctgcagaaga

SEQ ID NO: 890702 - DNA, 15 bp, Homo sapiens
tgttctgcagaagag

SEQ ID NO: 890703 - DNA, 15 bp, Homo sapiens
gttctgcagaagagg

SEQ ID NO: 890704 - DNA, 15 bp, Homo sapiens
ttctgcagaagaggc

SEQ ID NO: 890705 - DNA, 15 bp, Homo sapiens
tctgcagaagaggca

SEQ ID NO: 890706 - DNA, 15 bp, Homo sapiens
ctgcagaagaggcat

SEQ ID NO: 890707 - DNA, 15 bp, Homo sapiens
tgcagaagaggcatg

SEQ ID NO: 890708 - DNA, 15 bp, Homo sapiens
gcagaagaggcatgc

SEQ ID NO: 890709 - DNA, 15 bp, Homo sapiens
cagaagaggcatgcg

SEQ ID NO: 890710 - DNA, 15 bp, Homo sapiens
agaagaggcatgcgg

SEQ ID NO: 890711 - DNA, 15 bp, Homo sapiens
gaagaggcatgcggt

SEQ ID NO: 890712 - DNA, 15 bp, Homo sapiens
aagaggcatgcggtg

SEQ ID NO: 890713 - DNA, 15 bp, Homo sapiens
agaggcatgcggtgc

SEQ ID NO: 890714 - DNA, 15 bp, Homo sapiens
gaggcatgcggtgct

SEQ ID NO: 890715 - DNA, 15 bp, Homo sapiens
aggcatgcggtgctc

SEQ ID NO: 890716 - DNA, 15 bp, Homo sapiens
ggcatgcggtgctcc

SEQ ID NO: 890717 - DNA, 15 bp, Homo sapiens
gcatgcggtgctccc

SEQ ID NO: 890718 - DNA, 15 bp, Homo sapiens
catgcggtgctccca

SEQ ID NO: 890719 - DNA, 15 bp, Homo sapiens
atgcggtgctcccag

SEQ ID NO: 890720 - DNA, 15 bp, Homo sapiens
tgcggtgctcccagc

SEQ ID NO: 890721 - DNA, 15 bp, Homo sapiens
gcggtgctcccagca

SEQ ID NO: 890722 - DNA, 15 bp, Homo sapiens
cggtgctcccagcat

SEQ ID NO: 890723 - DNA, 15 bp, Homo sapiens
ggtgctcccagcatg

SEQ ID NO: 890724 - DNA, 15 bp, Homo sapiens
gtgctcccagcatgc

SEQ ID NO: 890725 - DNA, 15 bp, Homo sapiens
tgctcccagcatgcg

SEQ ID NO: 890726 - DNA, 15 bp, Homo sapiens
gctcccagcatgcgg

SEQ ID NO: 890727 - DNA, 15 bp, Homo sapiens
ctcccagcatgcgga

SEQ ID NO: 890728 - DNA, 15 bp, Homo sapiens
tcccagcatgcggaa

SEQ ID NO: 890729 - DNA, 15 bp, Homo sapiens
cccagcatgcggaag

SEQ ID NO: 890730 - DNA, 15 bp, Homo sapiens
ccagcatgcggaagc

SEQ ID NO: 890731 - DNA, 15 bp, Homo sapiens
cagcatgcggaagca

SEQ ID NO: 890732 - DNA, 15 bp, Homo sapiens
agcatgcggaagcag

SEQ ID NO: 890733 - DNA, 15 bp, Homo sapiens
gcatgcggaagcaga

SEQ ID NO: 890734 - DNA, 15 bp, Homo sapiens
catgcggaagcagag

SEQ ID NO: 890735 - DNA, 15 bp, Homo sapiens
atgcggaagcagagc

SEQ ID NO: 890736 - DNA, 15 bp, Homo sapiens
tgcggaagcagagct

SEQ ID NO: 890737 - DNA, 15 bp, Homo sapiens
gcggaagcagagctt

SEQ ID NO: 890738 - DNA, 15 bp, Homo sapiens
cggaagcagagcttc

SEQ ID NO: 890739 - DNA, 15 bp, Homo sapiens
ggaagcagagcttcc

SEQ ID NO: 890740 - DNA, 15 bp, Homo sapiens
gaagcagagcttccg

SEQ ID NO: 890741 - DNA, 15 bp, Homo sapiens
aagcagagcttccgc

SEQ ID NO: 890742 - DNA, 15 bp, Homo sapiens
agcagagcttccgcc

SEQ ID NO: 890743 - DNA, 15 bp, Homo sapiens
gcagagcttccgcct

SEQ ID NO: 890744 - DNA, 15 bp, Homo sapiens
cagagcttccgcctg

SEQ ID NO: 890745 - DNA, 15 bp, Homo sapiens
agagcttccgcctgg

SEQ ID NO: 890746 - DNA, 15 bp, Homo sapiens
gagcttccgcctggc

SEQ ID NO: 890747 - DNA, 15 bp, Homo sapiens
agcttccgcctggcc

SEQ ID NO: 890748 - DNA, 15 bp, Homo sapiens
gcttccgcctggccc

SEQ ID NO: 890749 - DNA, 15 bp, Homo sapiens
cttccgcctggccca

SEQ ID NO: 890750 - DNA, 15 bp, Homo sapiens
ttccgcctggcccag

SEQ ID NO: 890751 - DNA, 15 bp, Homo sapiens
tccgcctggcccagg

SEQ ID NO: 890752 - DNA, 15 bp, Homo sapiens
ccgcctggcccagga

SEQ ID NO: 890753 - DNA, 15 bp, Homo sapiens
cgcctggcccaggag

SEQ ID NO: 890754 - DNA, 15 bp, Homo sapiens
gcctggcccaggagg

SEQ ID NO: 890755 - DNA, 15 bp, Homo sapiens
cctggcccaggaggc

SEQ ID NO: 890756 - DNA, 15 bp, Homo sapiens
ctggcccaggaggcg

SEQ ID NO: 890757 - DNA, 15 bp, Homo sapiens
tggcccaggaggcgc

SEQ ID NO: 890758 - DNA, 15 bp, Homo sapiens
ggcccaggaggcgcg

SEQ ID NO: 890759 - DNA, 15 bp, Homo sapiens
gcccaggaggcgcgg

SEQ ID NO: 890760 - DNA, 15 bp, Homo sapiens
cccaggaggcgcgga

SEQ ID NO: 890761 - DNA, 15 bp, Homo sapiens
ccaggaggcgcggag

SEQ ID NO: 890762 - DNA, 15 bp, Homo sapiens
caggaggcgcggaga

SEQ ID NO: 890763 - DNA, 15 bp, Homo sapiens
aggaggcgcggagag

SEQ ID NO: 890764 - DNA, 15 bp, Homo sapiens
ggaggcgcggagagt

SEQ ID NO: 890765 - DNA, 15 bp, Homo sapiens
gaggcgcggagagtg

SEQ ID NO: 890766 - DNA, 15 bp, Homo sapiens
aggcgcggagagtgg

SEQ ID NO: 890767 - DNA, 15 bp, Homo sapiens
ggcgcggagagtggc

SEQ ID NO: 890768 - DNA, 15 bp, Homo sapiens
gcgcggagagtggct

SEQ ID NO: 890769 - DNA, 15 bp, Homo sapiens
cgcggagagtggcta

SEQ ID NO: 890770 - DNA, 15 bp, Homo sapiens
gcggagagtggctaa

SEQ ID NO: 890771 - DNA, 15 bp, Homo sapiens
cggagagtggctaag

SEQ ID NO: 890772 - DNA, 15 bp, Homo sapiens
ggagagtggctaagg

SEQ ID NO: 890773 - DNA, 15 bp, Homo sapiens
gagagtggctaaggg

SEQ ID NO: 890774 - DNA, 15 bp, Homo sapiens
agagtggctaagggg

SEQ ID NO: 890775 - DNA, 15 bp, Homo sapiens
gagtggctaaggggc

SEQ ID NO: 890776 - DNA, 15 bp, Homo sapiens
agtggctaaggggct

SEQ ID NO: 890777 - DNA, 15 bp, Homo sapiens
gtggctaaggggctg

SEQ ID NO: 890778 - DNA, 15 bp, Homo sapiens
tggctaaggggctgg

SEQ ID NO: 890779 - DNA, 15 bp, Homo sapiens
ggctaaggggctggg

SEQ ID NO: 890780 - DNA, 15 bp, Homo sapiens
gctaaggggctgggg

SEQ ID NO: 890781 - DNA, 15 bp, Homo sapiens
ctaaggggctggggg

SEQ ID NO: 890782 - DNA, 15 bp, Homo sapiens
taaggggctgggggc

SEQ ID NO: 890783 - DNA, 15 bp, Homo sapiens
aaggggctgggggcg

SEQ ID NO: 890784 - DNA, 15 bp, Homo sapiens
aggggctgggggcga

SEQ ID NO: 890785 - DNA, 15 bp, Homo sapiens
ggggctgggggcgag

SEQ ID NO: 890786 - DNA, 15 bp, Homo sapiens
gggctgggggcgagg

SEQ ID NO: 890787 - DNA, 15 bp, Homo sapiens
ggctgggggcgaggg

SEQ ID NO: 890788 - DNA, 15 bp, Homo sapiens
gctgggggcgaggga

SEQ ID NO: 890789 - DNA, 15 bp, Homo sapiens
ctgggggcgagggaa

SEQ ID NO: 890790 - DNA, 15 bp, Homo sapiens
tgggggcgagggaag

SEQ ID NO: 890791 - DNA, 15 bp, Homo sapiens
gggggcgagggaagg

SEQ ID NO: 890792 - DNA, 15 bp, Homo sapiens
ggggcgagggaaggc

SEQ ID NO: 890793 - DNA, 15 bp, Homo sapiens
gggcgagggaaggcc

SEQ ID NO: 890794 - DNA, 15 bp, Homo sapiens
ggcgagggaaggccc

SEQ ID NO: 890795 - DNA, 15 bp, Homo sapiens
gcgagggaaggcccc

SEQ ID NO: 890796 - DNA, 15 bp, Homo sapiens
cgagggaaggcccca

SEQ ID NO: 890797 - DNA, 15 bp, Homo sapiens
gagggaaggccccag

SEQ ID NO: 890798 - DNA, 15 bp, Homo sapiens
agggaaggccccagc

SEQ ID NO: 890799 - DNA, 15 bp, Homo sapiens
gggaaggccccagcg

SEQ ID NO: 890800 - DNA, 15 bp, Homo sapiens
ggaaggccccagcgg

SEQ ID NO: 890801 - DNA, 15 bp, Homo sapiens
gaaggccccagcggg

SEQ ID NO: 890802 - DNA, 15 bp, Homo sapiens
aaggccccagcgggg

SEQ ID NO: 890803 - DNA, 15 bp, Homo sapiens
aggccccagcgggga

SEQ ID NO: 890804 - DNA, 15 bp, Homo sapiens
ggccccagcggggag

SEQ ID NO: 890805 - DNA, 15 bp, Homo sapiens
gccccagcggggagt

SEQ ID NO: 890806 - DNA, 15 bp, Homo sapiens
ccccagcggggagtc

SEQ ID NO: 890807 - DNA, 15 bp, Homo sapiens
cccagcggggagtcc

SEQ ID NO: 890808 - DNA, 15 bp, Homo sapiens
ccagcggggagtcct

SEQ ID NO: 890809 - DNA, 15 bp, Homo sapiens
cagcggggagtcctg

SEQ ID NO: 890810 - DNA, 15 bp, Homo sapiens
agcggggagtcctgt

SEQ ID NO: 890811 - DNA, 15 bp, Homo sapiens
gcggggagtcctgtg

SEQ ID NO: 890812 - DNA, 15 bp, Homo sapiens
cggggagtcctgtgg

SEQ ID NO: 890813 - DNA, 15 bp, Homo sapiens
ggggagtcctgtgga

SEQ ID NO: 890814 - DNA, 15 bp, Homo sapiens
gggagtcctgtggaa

SEQ ID NO: 890815 - DNA, 15 bp, Homo sapiens
ggagtcctgtggaag

SEQ ID NO: 890816 - DNA, 15 bp, Homo sapiens
gagtcctgtggaaga

SEQ ID NO: 890817 - DNA, 15 bp, Homo sapiens
agtcctgtggaagag

SEQ ID NO: 890818 - DNA, 15 bp, Homo sapiens
gtcctgtggaagagg

SEQ ID NO: 890819 - DNA, 15 bp, Homo sapiens
tcctgtggaagagga

SEQ ID NO: 890820 - DNA, 15 bp, Homo sapiens
cctgtggaagaggaa

SEQ ID NO: 890821 - DNA, 15 bp, Homo sapiens
ctgtggaagaggaag

SEQ ID NO: 890822 - DNA, 15 bp, Homo sapiens
tgtggaagaggaaga

SEQ ID NO: 890823 - DNA, 15 bp, Homo sapiens
gtggaagaggaagag

SEQ ID NO: 890824 - DNA, 15 bp, Homo sapiens
tggaagaggaagagc

SEQ ID NO: 890825 - DNA, 15 bp, Homo sapiens
ggaagaggaagagct

SEQ ID NO: 890826 - DNA, 15 bp, Homo sapiens
gaagaggaagagctg

SEQ ID NO: 890827 - DNA, 15 bp, Homo sapiens
aagaggaagagctgg

SEQ ID NO: 890828 - DNA, 15 bp, Homo sapiens
agaggaagagctggc

SEQ ID NO: 890829 - DNA, 15 bp, Homo sapiens
gaggaagagctggcc

SEQ ID NO: 890830 - DNA, 15 bp, Homo sapiens
aggaagagctggcca

SEQ ID NO: 890831 - DNA, 15 bp, Homo sapiens
ggaagagctggccag

SEQ ID NO: 890832 - DNA, 15 bp, Homo sapiens
gaagagctggccagg

SEQ ID NO: 890833 - DNA, 15 bp, Homo sapiens
aagagctggccagga

SEQ ID NO: 890834 - DNA, 15 bp, Homo sapiens
agagctggccaggag

SEQ ID NO: 890835 - DNA, 15 bp, Homo sapiens
gagctggccaggagg

SEQ ID NO: 890836 - DNA, 15 bp, Homo sapiens
agctggccaggaggc

SEQ ID NO: 890837 - DNA, 15 bp, Homo sapiens
gctggccaggaggca

SEQ ID NO: 890838 - DNA, 15 bp, Homo sapiens
ctggccaggaggcaa

SEQ ID NO: 890839 - DNA, 15 bp, Homo sapiens
tggccaggaggcaag

SEQ ID NO: 890840 - DNA, 15 bp, Homo sapiens
ggccaggaggcaagg

SEQ ID NO: 890841 - DNA, 15 bp, Homo sapiens
gccaggaggcaagga

SEQ ID NO: 890842 - DNA, 15 bp, Homo sapiens
ccaggaggcaaggac

SEQ ID NO: 890843 - DNA, 15 bp, Homo sapiens
caggaggcaaggaca

SEQ ID NO: 890844 - DNA, 15 bp, Homo sapiens
aggaggcaaggacag

SEQ ID NO: 890845 - DNA, 15 bp, Homo sapiens
ggaggcaaggacaga

SEQ ID NO: 890846 - DNA, 15 bp, Homo sapiens
gaggcaaggacagag

SEQ ID NO: 890847 - DNA, 15 bp, Homo sapiens
aggcaaggacagagg

SEQ ID NO: 890848 - DNA, 15 bp, Homo sapiens
ggcaaggacagagga

SEQ ID NO: 890849 - DNA, 15 bp, Homo sapiens
gcaaggacagaggag

SEQ ID NO: 890850 - DNA, 15 bp, Homo sapiens
caaggacagaggaga

SEQ ID NO: 890851 - DNA, 15 bp, Homo sapiens
aaggacagaggagac

SEQ ID NO: 890852 - DNA, 15 bp, Homo sapiens
aggacagaggagaca

SEQ ID NO: 890853 - DNA, 15 bp, Homo sapiens
ggacagaggagacat

SEQ ID NO: 890854 - DNA, 15 bp, Homo sapiens
gacagaggagacatg

SEQ ID NO: 890855 - DNA, 15 bp, Homo sapiens
acagaggagacatgt

SEQ ID NO: 890856 - DNA, 15 bp, Homo sapiens
cagaggagacatgtg

SEQ ID NO: 890857 - DNA, 15 bp, Homo sapiens
agaggagacatgtgc

SEQ ID NO: 890858 - DNA, 15 bp, Homo sapiens
gaggagacatgtgcc

SEQ ID NO: 890859 - DNA, 15 bp, Homo sapiens
aggagacatgtgcca

SEQ ID NO: 890860 - DNA, 15 bp, Homo sapiens
ggagacatgtgccat

SEQ ID NO: 890861 - DNA, 15 bp, Homo sapiens
gagacatgtgccatg

SEQ ID NO: 890862 - DNA, 15 bp, Homo sapiens
agacatgtgccatgg

SEQ ID NO: 890863 - DNA, 15 bp, Homo sapiens
gacatgtgccatgga

SEQ ID NO: 890864 - DNA, 15 bp, Homo sapiens
acatgtgccatggaa

SEQ ID NO: 890865 - DNA, 15 bp, Homo sapiens
catgtgccatggaag

SEQ ID NO: 890866 - DNA, 15 bp, Homo sapiens
atgtgccatggaagg

SEQ ID NO: 890867 - DNA, 15 bp, Homo sapiens
tgtgccatggaagga

SEQ ID NO: 890868 - DNA, 15 bp, Homo sapiens
gtgccatggaaggag

SEQ ID NO: 890869 - DNA, 15 bp, Homo sapiens
tgccatggaaggaga

SEQ ID NO: 890870 - DNA, 15 bp, Homo sapiens
gccatggaaggagag

SEQ ID NO: 890871 - DNA, 15 bp, Homo sapiens
ccatggaaggagagg

SEQ ID NO: 890872 - DNA, 15 bp, Homo sapiens
catggaaggagaggg

SEQ ID NO: 890873 - DNA, 15 bp, Homo sapiens
atggaaggagagggc

SEQ ID NO: 890874 - DNA, 15 bp, Homo sapiens
tggaaggagagggca

SEQ ID NO: 890875 - DNA, 15 bp, Homo sapiens
ggaaggagagggcac

SEQ ID NO: 890876 - DNA, 15 bp, Homo sapiens
gaaggagagggcaca

SEQ ID NO: 890877 - DNA, 15 bp, Homo sapiens
aaggagagggcacat

SEQ ID NO: 890878 - DNA, 15 bp, Homo sapiens
aggagagggcacatg

SEQ ID NO: 890879 - DNA, 15 bp, Homo sapiens
ggagagggcacatgc

SEQ ID NO: 890880 - DNA, 15 bp, Homo sapiens
gagagggcacatgct

SEQ ID NO: 890881 - DNA, 15 bp, Homo sapiens
agagggcacatgctt

SEQ ID NO: 890882 - DNA, 15 bp, Homo sapiens
gagggcacatgcttc

SEQ ID NO: 890883 - DNA, 15 bp, Homo sapiens
agggcacatgcttcc

SEQ ID NO: 890884 - DNA, 15 bp, Homo sapiens
gggcacatgcttcct

SEQ ID NO: 890885 - DNA, 15 bp, Homo sapiens
ggcacatgcttcctt

SEQ ID NO: 890886 - DNA, 15 bp, Homo sapiens
gcacatgcttccttt

SEQ ID NO: 890887 - DNA, 15 bp, Homo sapiens
cacatgcttccttta

SEQ ID NO: 890888 - DNA, 15 bp, Homo sapiens
acatgcttcctttat

SEQ ID NO: 890889 - DNA, 15 bp, Homo sapiens
catgcttcctttatg

SEQ ID NO: 890890 - DNA, 15 bp, Homo sapiens
atgcttcctttatgt

SEQ ID NO: 890891 - DNA, 15 bp, Homo sapiens
tgcttcctttatgtg

SEQ ID NO: 890892 - DNA, 15 bp, Homo sapiens
gcttcctttatgtgt

SEQ ID NO: 890893 - DNA, 15 bp, Homo sapiens
cttcctttatgtgtg

SEQ ID NO: 890894 - DNA, 15 bp, Homo sapiens
ttcctttatgtgtgt

SEQ ID NO: 890895 - DNA, 15 bp, Homo sapiens
tcctttatgtgtgtt

SEQ ID NO: 890896 - DNA, 15 bp, Homo sapiens
cctttatgtgtgttg

SEQ ID NO: 890897 - DNA, 15 bp, Homo sapiens
ctttatgtgtgttga

SEQ ID NO: 890898 - DNA, 15 bp, Homo sapiens
tttatgtgtgttgaa

SEQ ID NO: 890899 - DNA, 15 bp, Homo sapiens
ttatgtgtgttgaaa

SEQ ID NO: 890900 - DNA, 15 bp, Homo sapiens
tatgtgtgttgaaaa

SEQ ID NO: 890901 - DNA, 15 bp, Homo sapiens
atgtgtgttgaaaag

SEQ ID NO: 890902 - DNA, 15 bp, Homo sapiens
tgtgtgttgaaaagg

SEQ ID NO: 890903 - DNA, 15 bp, Homo sapiens
gtgtgttgaaaaggc

SEQ ID NO: 890904 - DNA, 15 bp, Homo sapiens
tgtgttgaaaaggcc

SEQ ID NO: 890905 - DNA, 15 bp, Homo sapiens
gtgttgaaaaggcca

SEQ ID NO: 890906 - DNA, 15 bp, Homo sapiens
tgttgaaaaggccac

SEQ ID NO: 890907 - DNA, 15 bp, Homo sapiens
gttgaaaaggccacc

SEQ ID NO: 890908 - DNA, 15 bp, Homo sapiens
ttgaaaaggccacca

SEQ ID NO: 890909 - DNA, 15 bp, Homo sapiens
tgaaaaggccaccac

SEQ ID NO: 890910 - DNA, 15 bp, Homo sapiens
gaaaaggccaccacc

SEQ ID NO: 890911 - DNA, 15 bp, Homo sapiens
aaaaggccaccacca

SEQ ID NO: 890912 - DNA, 15 bp, Homo sapiens
aaaggccaccaccac

SEQ ID NO: 890913 - DNA, 15 bp, Homo sapiens
aaggccaccaccact

SEQ ID NO: 890914 - DNA, 15 bp, Homo sapiens
aggccaccaccactc

SEQ ID NO: 890915 - DNA, 15 bp, Homo sapiens
ggccaccaccactct

SEQ ID NO: 890916 - DNA, 15 bp, Homo sapiens
gccaccaccactctt

SEQ ID NO: 890917 - DNA, 15 bp, Homo sapiens
ccaccaccactctta

SEQ ID NO: 890918 - DNA, 15 bp, Homo sapiens
caccaccactcttac

SEQ ID NO: 890919 - DNA, 15 bp, Homo sapiens
accaccactcttaca

SEQ ID NO: 890920 - DNA, 15 bp, Homo sapiens
ccaccactcttacag

SEQ ID NO: 890921 - DNA, 15 bp, Homo sapiens
caccactcttacagc

SEQ ID NO: 890922 - DNA, 15 bp, Homo sapiens
accactcttacagca

SEQ ID NO: 890923 - DNA, 15 bp, Homo sapiens
ccactcttacagcaa

SEQ ID NO: 890924 - DNA, 15 bp, Homo sapiens
cactcttacagcaac

SEQ ID NO: 890925 - DNA, 15 bp, Homo sapiens
actcttacagcaact

SEQ ID NO: 890926 - DNA, 15 bp, Homo sapiens
ctcttacagcaactc

SEQ ID NO: 890927 - DNA, 15 bp, Homo sapiens
tcttacagcaactct

SEQ ID NO: 890928 - DNA, 15 bp, Homo sapiens
cttacagcaactctc

SEQ ID NO: 890929 - DNA, 15 bp, Homo sapiens
ttacagcaactctct

SEQ ID NO: 890930 - DNA, 15 bp, Homo sapiens
tacagcaactctctc

SEQ ID NO: 890931 - DNA, 15 bp, Homo sapiens
acagcaactctctct

SEQ ID NO: 890932 - DNA, 15 bp, Homo sapiens
cagcaactctctctg

SEQ ID NO: 890933 - DNA, 15 bp, Homo sapiens
agcaactctctctga

SEQ ID NO: 890934 - DNA, 15 bp, Homo sapiens
gcaactctctctgag

SEQ ID NO: 890935 - DNA, 15 bp, Homo sapiens
caactctctctgagc

SEQ ID NO: 890936 - DNA, 15 bp, Homo sapiens
aactctctctgagca

SEQ ID NO: 890937 - DNA, 15 bp, Homo sapiens
actctctctgagcag

SEQ ID NO: 890938 - DNA, 15 bp, Homo sapiens
ctctctctgagcagt

SEQ ID NO: 890939 - DNA, 15 bp, Homo sapiens
tctctctgagcagtg

SEQ ID NO: 890940 - DNA, 15 bp, Homo sapiens
ctctctgagcagtga

SEQ ID NO: 890941 - DNA, 15 bp, Homo sapiens
tctctgagcagtgag

SEQ ID NO: 890942 - DNA, 15 bp, Homo sapiens
ctctgagcagtgagg

SEQ ID NO: 890943 - DNA, 15 bp, Homo sapiens
tctgagcagtgaggc

SEQ ID NO: 890944 - DNA, 15 bp, Homo sapiens
ctgagcagtgaggct

SEQ ID NO: 890945 - DNA, 15 bp, Homo sapiens
tgagcagtgaggcta

SEQ ID NO: 890946 - DNA, 15 bp, Homo sapiens
gagcagtgaggctaa

SEQ ID NO: 890947 - DNA, 15 bp, Homo sapiens
agcagtgaggctaac

SEQ ID NO: 890948 - DNA, 15 bp, Homo sapiens
gcagtgaggctaaca

SEQ ID NO: 890949 - DNA, 15 bp, Homo sapiens
cagtgaggctaacac

SEQ ID NO: 890950 - DNA, 15 bp, Homo sapiens
agtgaggctaacact

SEQ ID NO: 890951 - DNA, 15 bp, Homo sapiens
gtgaggctaacactg

SEQ ID NO: 890952 - DNA, 15 bp, Homo sapiens
tgaggctaacactgt

SEQ ID NO: 890953 - DNA, 15 bp, Homo sapiens
gaggctaacactgta

SEQ ID NO: 890954 - DNA, 15 bp, Homo sapiens
aggctaacactgtac

SEQ ID NO: 890955 - DNA, 15 bp, Homo sapiens
ggctaacactgtacc

SEQ ID NO: 890956 - DNA, 15 bp, Homo sapiens
gctaacactgtacct

SEQ ID NO: 890957 - DNA, 15 bp, Homo sapiens
ctaacactgtacctc

SEQ ID NO: 890958 - DNA, 15 bp, Homo sapiens
taacactgtacctca

SEQ ID NO: 890959 - DNA, 15 bp, Homo sapiens
aacactgtacctcat

SEQ ID NO: 890960 - DNA, 15 bp, Homo sapiens
acactgtacctcatc

SEQ ID NO: 890961 - DNA, 15 bp, Homo sapiens
cactgtacctcatct

SEQ ID NO: 890962 - DNA, 15 bp, Homo sapiens
actgtacctcatctt

SEQ ID NO: 890963 - DNA, 15 bp, Homo sapiens
ctgtacctcatcttc

SEQ ID NO: 890964 - DNA, 15 bp, Homo sapiens
tgtacctcatcttct

SEQ ID NO: 890965 - DNA, 15 bp, Homo sapiens
gtacctcatcttctc

SEQ ID NO: 890966 - DNA, 15 bp, Homo sapiens
tacctcatcttctcc

SEQ ID NO: 890967 - DNA, 15 bp, Homo sapiens
acctcatcttctccc

SEQ ID NO: 890968 - DNA, 15 bp, Homo sapiens
cctcatcttctccct

SEQ ID NO: 890969 - DNA, 15 bp, Homo sapiens
ctcatcttctccctg

SEQ ID NO: 890970 - DNA, 15 bp, Homo sapiens
tcatcttctccctgc

SEQ ID NO: 890971 - DNA, 15 bp, Homo sapiens
catcttctccctgca

SEQ ID NO: 890972 - DNA, 15 bp, Homo sapiens
atcttctccctgcac

SEQ ID NO: 890973 - DNA, 15 bp, Homo sapiens
tcttctccctgcact

SEQ ID NO: 890974 - DNA, 15 bp, Homo sapiens
cttctccctgcactt

SEQ ID NO: 890975 - DNA, 15 bp, Homo sapiens
ttctccctgcacttc

SEQ ID NO: 890976 - DNA, 15 bp, Homo sapiens
tctccctgcacttcc

SEQ ID NO: 890977 - DNA, 15 bp, Homo sapiens
ctccctgcacttcca

SEQ ID NO: 890978 - DNA, 15 bp, Homo sapiens
tccctgcacttccac

SEQ ID NO: 890979 - DNA, 15 bp, Homo sapiens
ccctgcacttccaca

SEQ ID NO: 890980 - DNA, 15 bp, Homo sapiens
cctgcacttccacat

SEQ ID NO: 890981 - DNA, 15 bp, Homo sapiens
ctgcacttccacatc

SEQ ID NO: 890982 - DNA, 15 bp, Homo sapiens
tgcacttccacatca

SEQ ID NO: 890983 - DNA, 15 bp, Homo sapiens
gcacttccacatcat

SEQ ID NO: 890984 - DNA, 15 bp, Homo sapiens
cacttccacatcatg

SEQ ID NO: 890985 - DNA, 15 bp, Homo sapiens
acttccacatcatgc

SEQ ID NO: 890986 - DNA, 15 bp, Homo sapiens
cttccacatcatgcc

SEQ ID NO: 890987 - DNA, 15 bp, Homo sapiens
ttccacatcatgcca

SEQ ID NO: 890988 - DNA, 15 bp, Homo sapiens
tccacatcatgccac

SEQ ID NO: 890989 - DNA, 15 bp, Homo sapiens
ccacatcatgccact

SEQ ID NO: 890990 - DNA, 15 bp, Homo sapiens
cacatcatgccactt

SEQ ID NO: 890991 - DNA, 15 bp, Homo sapiens
acatcatgccacttt

SEQ ID NO: 890992 - DNA, 15 bp, Homo sapiens
catcatgccactttc

SEQ ID NO: 890993 - DNA, 15 bp, Homo sapiens
atcatgccactttcc

SEQ ID NO: 890994 - DNA, 15 bp, Homo sapiens
tcatgccactttccc

SEQ ID NO: 890995 - DNA, 15 bp, Homo sapiens
catgccactttccca

SEQ ID NO: 890996 - DNA, 15 bp, Homo sapiens
atgccactttcccac

SEQ ID NO: 890997 - DNA, 15 bp, Homo sapiens
tgccactttcccaca

SEQ ID NO: 890998 - DNA, 15 bp, Homo sapiens
gccactttcccacag

SEQ ID NO: 890999 - DNA, 15 bp, Homo sapiens
ccactttcccacaga

SEQ ID NO: 891000 - DNA, 15 bp, Homo sapiens
cactttcccacagag

SEQ ID NO: 891001 - DNA, 15 bp, Homo sapiens
actttcccacagagc

SEQ ID NO: 891002 - DNA, 15 bp, Homo sapiens
ctttcccacagagct

SEQ ID NO: 891003 - DNA, 15 bp, Homo sapiens
tttcccacagagctg

SEQ ID NO: 891004 - DNA, 15 bp, Homo sapiens
ttcccacagagctgg

SEQ ID NO: 891005 - DNA, 15 bp, Homo sapiens
tcccacagagctggg

SEQ ID NO: 891006 - DNA, 15 bp, Homo sapiens
cccacagagctggga

SEQ ID NO: 891007 - DNA, 15 bp, Homo sapiens
ccacagagctgggat

SEQ ID NO: 891008 - DNA, 15 bp, Homo sapiens
cacagagctgggatg

SEQ ID NO: 891009 - DNA, 15 bp, Homo sapiens
acagagctgggatga

SEQ ID NO: 891010 - DNA, 15 bp, Homo sapiens
cagagctgggatgat

SEQ ID NO: 891011 - DNA, 15 bp, Homo sapiens
agagctgggatgatt

SEQ ID NO: 891012 - DNA, 15 bp, Homo sapiens
gagctgggatgattt

SEQ ID NO: 891013 - DNA, 15 bp, Homo sapiens
agctgggatgatttg

SEQ ID NO: 891014 - DNA, 15 bp, Homo sapiens
gctgggatgatttgc

SEQ ID NO: 891015 - DNA, 15 bp, Homo sapiens
ctgggatgatttgca

SEQ ID NO: 891016 - DNA, 15 bp, Homo sapiens
tgggatgatttgcac

SEQ ID NO: 891017 - DNA, 15 bp, Homo sapiens
gggatgatttgcact

SEQ ID NO: 891018 - DNA, 15 bp, Homo sapiens
ggatgatttgcacta

SEQ ID NO: 891019 - DNA, 15 bp, Homo sapiens
gatgatttgcactaa

SEQ ID NO: 891020 - DNA, 15 bp, Homo sapiens
atgatttgcactaag

SEQ ID NO: 891021 - DNA, 15 bp, Homo sapiens
tgatttgcactaagg

SEQ ID NO: 891022 - DNA, 15 bp, Homo sapiens
gatttgcactaagga

SEQ ID NO: 891023 - DNA, 15 bp, Homo sapiens
atttgcactaaggaa

SEQ ID NO: 891024 - DNA, 15 bp, Homo sapiens
tttgcactaaggaaa

SEQ ID NO: 891025 - DNA, 15 bp, Homo sapiens
ttgcactaaggaaaa

SEQ ID NO: 891026 - DNA, 15 bp, Homo sapiens
tgcactaaggaaaaa

SEQ ID NO: 891027 - DNA, 15 bp, Homo sapiens
gcactaaggaaaaag

SEQ ID NO: 891028 - DNA, 15 bp, Homo sapiens
cactaaggaaaaagc

SEQ ID NO: 891029 - DNA, 15 bp, Homo sapiens
actaaggaaaaagca

SEQ ID NO: 891030 - DNA, 15 bp, Homo sapiens
ctaaggaaaaagcat

SEQ ID NO: 891031 - DNA, 15 bp, Homo sapiens
taaggaaaaagcatt

SEQ ID NO: 891032 - DNA, 15 bp, Homo sapiens
aaggaaaaagcattt

SEQ ID NO: 891033 - DNA, 15 bp, Homo sapiens
aggaaaaagcatttt

SEQ ID NO: 891034 - DNA, 15 bp, Homo sapiens
ggaaaaagcattttt

SEQ ID NO: 891035 - DNA, 15 bp, Homo sapiens
gaaaaagcatttttt

SEQ ID NO: 891036 - DNA, 15 bp, Homo sapiens
aaaaagcattttttt

SEQ ID NO: 891037 - DNA, 15 bp, Homo sapiens
aaaagcattttttta

SEQ ID NO: 891038 - DNA, 15 bp, Homo sapiens
aaagcatttttttaa

SEQ ID NO: 891039 - DNA, 15 bp, Homo sapiens
aagcatttttttaaa

SEQ ID NO: 891040 - DNA, 15 bp, Homo sapiens
agcatttttttaaaa

SEQ ID NO: 891041 - DNA, 15 bp, Homo sapiens
gcatttttttaaaaa

SEQ ID NO: 891042 - DNA, 15 bp, Homo sapiens
catttttttaaaaaa

SEQ ID NO: 891043 - DNA, 15 bp, Homo sapiens
atttttttaaaaaaa

SEQ ID NO: 891044 - DNA, 15 bp, Homo sapiens
tttttttaaaaaaac

SEQ ID NO: 891045 - DNA, 15 bp, Homo sapiens
ttttttaaaaaaacc

SEQ ID NO: 891046 - DNA, 15 bp, Homo sapiens
tttttaaaaaaacca

SEQ ID NO: 891047 - DNA, 15 bp, Homo sapiens
ttttaaaaaaaccaa

SEQ ID NO: 891048 - DNA, 15 bp, Homo sapiens
tttaaaaaaaccaac

SEQ ID NO: 891049 - DNA, 15 bp, Homo sapiens
ttaaaaaaaccaacc

SEQ ID NO: 891050 - DNA, 15 bp, Homo sapiens
taaaaaaaccaacct

SEQ ID NO: 891051 - DNA, 15 bp, Homo sapiens
aaaaaaaccaacctt

SEQ ID NO: 891052 - DNA, 15 bp, Homo sapiens
aaaaaaccaacctta

SEQ ID NO: 891053 - DNA, 15 bp, Homo sapiens
aaaaaccaaccttac

SEQ ID NO: 891054 - DNA, 15 bp, Homo sapiens
aaaaccaaccttacc

SEQ ID NO: 891055 - DNA, 15 bp, Homo sapiens
aaaccaaccttacca

SEQ ID NO: 891056 - DNA, 15 bp, Homo sapiens
aaccaaccttaccac

SEQ ID NO: 891057 - DNA, 15 bp, Homo sapiens
accaaccttaccaca

SEQ ID NO: 891058 - DNA, 15 bp, Homo sapiens
ccaaccttaccacac

SEQ ID NO: 891059 - DNA, 15 bp, Homo sapiens
caaccttaccacaca

SEQ ID NO: 891060 - DNA, 15 bp, Homo sapiens
aaccttaccacacag

SEQ ID NO: 891061 - DNA, 15 bp, Homo sapiens
accttaccacacaga

SEQ ID NO: 891062 - DNA, 15 bp, Homo sapiens
ccttaccacacagac

SEQ ID NO: 891063 - DNA, 15 bp, Homo sapiens
cttaccacacagaca

SEQ ID NO: 891064 - DNA, 15 bp, Homo sapiens
ttaccacacagacag

SEQ ID NO: 891065 - DNA, 15 bp, Homo sapiens
taccacacagacaga

SEQ ID NO: 891066 - DNA, 15 bp, Homo sapiens
accacacagacagac

SEQ ID NO: 891067 - DNA, 15 bp, Homo sapiens
ccacacagacagaca

SEQ ID NO: 891068 - DNA, 15 bp, Homo sapiens
cacacagacagacag

SEQ ID NO: 891069 - DNA, 15 bp, Homo sapiens
acacagacagacagc

SEQ ID NO: 891070 - DNA, 15 bp, Homo sapiens
cacagacagacagca

SEQ ID NO: 891071 - DNA, 15 bp, Homo sapiens
acagacagacagcag

SEQ ID NO: 891072 - DNA, 15 bp, Homo sapiens
cagacagacagcagg

SEQ ID NO: 891073 - DNA, 15 bp, Homo sapiens
agacagacagcaggg

SEQ ID NO: 891074 - DNA, 15 bp, Homo sapiens
gacagacagcagggc

SEQ ID NO: 891075 - DNA, 15 bp, Homo sapiens
acagacagcagggct

SEQ ID NO: 891076 - DNA, 15 bp, Homo sapiens
cagacagcagggctg

SEQ ID NO: 891077 - DNA, 15 bp, Homo sapiens
agacagcagggctgt

SEQ ID NO: 891078 - DNA, 15 bp, Homo sapiens
gacagcagggctgtt

SEQ ID NO: 891079 - DNA, 15 bp, Homo sapiens
acagcagggctgttt

SEQ ID NO: 891080 - DNA, 15 bp, Homo sapiens
cagcagggctgttta

SEQ ID NO: 891081 - DNA, 15 bp, Homo sapiens
agcagggctgtttat

SEQ ID NO: 891082 - DNA, 15 bp, Homo sapiens
gcagggctgtttatt

SEQ ID NO: 891083 - DNA, 15 bp, Homo sapiens
cagggctgtttattt

SEQ ID NO: 891084 - DNA, 15 bp, Homo sapiens
agggctgtttattta

SEQ ID NO: 891085 - DNA, 15 bp, Homo sapiens
gggctgtttatttat

SEQ ID NO: 891086 - DNA, 15 bp, Homo sapiens
ggctgtttatttatt

SEQ ID NO: 891087 - DNA, 15 bp, Homo sapiens
gctgtttatttattt

SEQ ID NO: 891088 - DNA, 15 bp, Homo sapiens
ctgtttatttattta

SEQ ID NO: 891089 - DNA, 15 bp, Homo sapiens
tgtttatttatttat

SEQ ID NO: 891090 - DNA, 15 bp, Homo sapiens
gtttatttatttatg

SEQ ID NO: 891091 - DNA, 15 bp, Homo sapiens
tttatttatttatgc

SEQ ID NO: 891092 - DNA, 15 bp, Homo sapiens
ttatttatttatgct

SEQ ID NO: 891093 - DNA, 15 bp, Homo sapiens
tatttatttatgctc

SEQ ID NO: 891094 - DNA, 15 bp, Homo sapiens
atttatttatgctcc

SEQ ID NO: 891095 - DNA, 15 bp, Homo sapiens
tttatttatgctcct

SEQ ID NO: 891096 - DNA, 15 bp, Homo sapiens
ttatttatgctcctc

SEQ ID NO: 891097 - DNA, 15 bp, Homo sapiens
tatttatgctcctct

SEQ ID NO: 891098 - DNA, 15 bp, Homo sapiens
atttatgctcctctt

SEQ ID NO: 891099 - DNA, 15 bp, Homo sapiens
tttatgctcctcttt

SEQ ID NO: 891100 - DNA, 15 bp, Homo sapiens
ttatgctcctctttg

SEQ ID NO: 891101 - DNA, 15 bp, Homo sapiens
tatgctcctctttgt

SEQ ID NO: 891102 - DNA, 15 bp, Homo sapiens
atgctcctctttgtc

SEQ ID NO: 891103 - DNA, 15 bp, Homo sapiens
tgctcctctttgtct

SEQ ID NO: 891104 - DNA, 15 bp, Homo sapiens
gctcctctttgtctc

SEQ ID NO: 891105 - DNA, 15 bp, Homo sapiens
ctcctctttgtctca

SEQ ID NO: 891106 - DNA, 15 bp, Homo sapiens
tcctctttgtctcaa

SEQ ID NO: 891107 - DNA, 15 bp, Homo sapiens
cctctttgtctcaaa

SEQ ID NO: 891108 - DNA, 15 bp, Homo sapiens
ctctttgtctcaaag

SEQ ID NO: 891109 - DNA, 15 bp, Homo sapiens
tctttgtctcaaaga

SEQ ID NO: 891110 - DNA, 15 bp, Homo sapiens
ctttgtctcaaagag

SEQ ID NO: 891111 - DNA, 15 bp, Homo sapiens
tttgtctcaaagagg

SEQ ID NO: 891112 - DNA, 15 bp, Homo sapiens
ttgtctcaaagagga

SEQ ID NO: 891113 - DNA, 15 bp, Homo sapiens
tgtctcaaagaggat

SEQ ID NO: 891114 - DNA, 15 bp, Homo sapiens
gtctcaaagaggatt

SEQ ID NO: 891115 - DNA, 15 bp, Homo sapiens
tctcaaagaggattt

SEQ ID NO: 891116 - DNA, 15 bp, Homo sapiens
ctcaaagaggatttt

SEQ ID NO: 891117 - DNA, 15 bp, Homo sapiens
tcaaagaggattttc

SEQ ID NO: 891118 - DNA, 15 bp, Homo sapiens
caaagaggattttca

SEQ ID NO: 891119 - DNA, 15 bp, Homo sapiens
aaagaggattttcaa

SEQ ID NO: 891120 - DNA, 15 bp, Homo sapiens
aagaggattttcaag

SEQ ID NO: 891121 - DNA, 15 bp, Homo sapiens
aagggaccgtgtctg

SEQ ID NO: 891122 - DNA, 15 bp, Homo sapiens
agggaccgtgtctga

SEQ ID NO: 891123 - DNA, 15 bp, Homo sapiens
gggaccgtgtctgag

SEQ ID NO: 891124 - DNA, 15 bp, Homo sapiens
ggaccgtgtctgagt

SEQ ID NO: 891125 - DNA, 15 bp, Homo sapiens
gaccgtgtctgagtc

SEQ ID NO: 891126 - DNA, 15 bp, Homo sapiens
accgtgtctgagtca

SEQ ID NO: 891127 - DNA, 15 bp, Homo sapiens
ccgtgtctgagtcac

SEQ ID NO: 891128 - DNA, 15 bp, Homo sapiens
cgtgtctgagtcacc

SEQ ID NO: 891129 - DNA, 15 bp, Homo sapiens
gtgtctgagtcacct

SEQ ID NO: 891130 - DNA, 15 bp, Homo sapiens
tgtctgagtcacctc

SEQ ID NO: 891131 - DNA, 15 bp, Homo sapiens
gtctgagtcacctcg

SEQ ID NO: 891132 - DNA, 15 bp, Homo sapiens
tctgagtcacctcgg

SEQ ID NO: 891133 - DNA, 15 bp, Homo sapiens
ctgagtcacctcggc

SEQ ID NO: 891134 - DNA, 15 bp, Homo sapiens
tgagtcacctcggca

SEQ ID NO: 891135 - DNA, 15 bp, Homo sapiens
gagtcacctcggcac

SEQ ID NO: 891136 - DNA, 15 bp, Homo sapiens
agtcacctcggcaca

SEQ ID NO: 891137 - DNA, 15 bp, Homo sapiens
gtcacctcggcacag

SEQ ID NO: 891138 - DNA, 15 bp, Homo sapiens
tcacctcggcacagt

SEQ ID NO: 891139 - DNA, 15 bp, Homo sapiens
cacctcggcacagtg

SEQ ID NO: 891140 - DNA, 15 bp, Homo sapiens
acctcggcacagtgg

SEQ ID NO: 891141 - DNA, 15 bp, Homo sapiens
cctcggcacagtggt

SEQ ID NO: 891142 - DNA, 15 bp, Homo sapiens
ctcggcacagtggtg

SEQ ID NO: 891143 - DNA, 15 bp, Homo sapiens
tcggcacagtggtgt

SEQ ID NO: 891144 - DNA, 15 bp, Homo sapiens
cggcacagtggtgta

SEQ ID NO: 891145 - DNA, 15 bp, Homo sapiens
ggcacagtggtgtat

SEQ ID NO: 891146 - DNA, 15 bp, Homo sapiens
gcacagtggtgtatc

SEQ ID NO: 891147 - DNA, 15 bp, Homo sapiens
cacagtggtgtatcc

SEQ ID NO: 891148 - DNA, 15 bp, Homo sapiens
acagtggtgtatcca

SEQ ID NO: 891149 - DNA, 15 bp, Homo sapiens
cagtggtgtatccag

SEQ ID NO: 891150 - DNA, 15 bp, Homo sapiens
agtggtgtatccaga

SEQ ID NO: 891151 - DNA, 15 bp, Homo sapiens
gtggtgtatccagag

SEQ ID NO: 891152 - DNA, 15 bp, Homo sapiens
tggtgtatccagagc

SEQ ID NO: 891153 - DNA, 15 bp, Homo sapiens
ggtgtatccagagcc

SEQ ID NO: 891154 - DNA, 15 bp, Homo sapiens
gtgtatccagagcct

SEQ ID NO: 891155 - DNA, 15 bp, Homo sapiens
tgtatccagagcctc

SEQ ID NO: 891156 - DNA, 15 bp, Homo sapiens
gtatccagagcctct

SEQ ID NO: 891157 - DNA, 15 bp, Homo sapiens
tatccagagcctctg

SEQ ID NO: 891158 - DNA, 15 bp, Homo sapiens
atccagagcctctgc

SEQ ID NO: 891159 - DNA, 15 bp, Homo sapiens
tccagagcctctgca

SEQ ID NO: 891160 - DNA, 15 bp, Homo sapiens
ccagagcctctgcat

SEQ ID NO: 891161 - DNA, 15 bp, Homo sapiens
cagagcctctgcata

SEQ ID NO: 891162 - DNA, 15 bp, Homo sapiens
agagcctctgcatag

SEQ ID NO: 891163 - DNA, 15 bp, Homo sapiens
gagcctctgcatagc

SEQ ID NO: 891164 - DNA, 15 bp, Homo sapiens
agcctctgcatagca

SEQ ID NO: 891165 - DNA, 15 bp, Homo sapiens
gcctctgcatagcaa

SEQ ID NO: 891166 - DNA, 15 bp, Homo sapiens
cctctgcatagcaag

SEQ ID NO: 891167 - DNA, 15 bp, Homo sapiens
ctctgcatagcaagt

SEQ ID NO: 891168 - DNA, 15 bp, Homo sapiens
tctgcatagcaagtg

SEQ ID NO: 891169 - DNA, 15 bp, Homo sapiens
ctgcatagcaagtgc

SEQ ID NO: 891170 - DNA, 15 bp, Homo sapiens
tgcatagcaagtgct

SEQ ID NO: 891171 - DNA, 15 bp, Homo sapiens
gcatagcaagtgctg

SEQ ID NO: 891172 - DNA, 15 bp, Homo sapiens
catagcaagtgctgg

SEQ ID NO: 891173 - DNA, 15 bp, Homo sapiens
atagcaagtgctggg

SEQ ID NO: 891174 - DNA, 15 bp, Homo sapiens
tagcaagtgctggga

SEQ ID NO: 891175 - DNA, 15 bp, Homo sapiens
agcaagtgctgggat

SEQ ID NO: 891176 - DNA, 15 bp, Homo sapiens
gcaagtgctgggatg

SEQ ID NO: 891177 - DNA, 15 bp, Homo sapiens
caagtgctgggatgt

SEQ ID NO: 891178 - DNA, 15 bp, Homo sapiens
aagtgctgggatgtc

SEQ ID NO: 891179 - DNA, 15 bp, Homo sapiens
agtgctgggatgtct

SEQ ID NO: 891180 - DNA, 15 bp, Homo sapiens
gtgctgggatgtctg

SEQ ID NO: 891181 - DNA, 15 bp, Homo sapiens
tgctgggatgtctgt

SEQ ID NO: 891182 - DNA, 15 bp, Homo sapiens
gctgggatgtctgtg

SEQ ID NO: 891183 - DNA, 15 bp, Homo sapiens
ctgggatgtctgtga

SEQ ID NO: 891184 - DNA, 15 bp, Homo sapiens
tgggatgtctgtgaa

SEQ ID NO: 891185 - DNA, 15 bp, Homo sapiens
gggatgtctgtgaac

SEQ ID NO: 891186 - DNA, 15 bp, Homo sapiens
ggatgtctgtgaacg

SEQ ID NO: 891187 - DNA, 15 bp, Homo sapiens
gatgtctgtgaacgc

SEQ ID NO: 891188 - DNA, 15 bp, Homo sapiens
atgtctgtgaacgca

SEQ ID NO: 891189 - DNA, 15 bp, Homo sapiens
tgtctgtgaacgcac

SEQ ID NO: 891190 - DNA, 15 bp, Homo sapiens
gtctgtgaacgcaca

SEQ ID NO: 891191 - DNA, 15 bp, Homo sapiens
tctgtgaacgcacag

SEQ ID NO: 891192 - DNA, 15 bp, Homo sapiens
ctgtgaacgcacagc

SEQ ID NO: 891193 - DNA, 15 bp, Homo sapiens
tgtgaacgcacagct

SEQ ID NO: 891194 - DNA, 15 bp, Homo sapiens
gtgaacgcacagctt

SEQ ID NO: 891195 - DNA, 15 bp, Homo sapiens
tgaacgcacagcttc

SEQ ID NO: 891196 - DNA, 15 bp, Homo sapiens
gaacgcacagcttcg

SEQ ID NO: 891197 - DNA, 15 bp, Homo sapiens
aacgcacagcttcgc

SEQ ID NO: 891198 - DNA, 15 bp, Homo sapiens
acgcacagcttcgct

SEQ ID NO: 891199 - DNA, 15 bp, Homo sapiens
cgcacagcttcgcta

SEQ ID NO: 891200 - DNA, 15 bp, Homo sapiens
gcacagcttcgctag

SEQ ID NO: 891201 - DNA, 15 bp, Homo sapiens
cacagcttcgctagg

SEQ ID NO: 891202 - DNA, 15 bp, Homo sapiens
acagcttcgctagga

SEQ ID NO: 891203 - DNA, 15 bp, Homo sapiens
cagcttcgctaggac

SEQ ID NO: 891204 - DNA, 15 bp, Homo sapiens
agcttcgctaggact

SEQ ID NO: 891205 - DNA, 15 bp, Homo sapiens
gcttcgctaggactg

SEQ ID NO: 891206 - DNA, 15 bp, Homo sapiens
cttcgctaggactga

SEQ ID NO: 891207 - DNA, 15 bp, Homo sapiens
ttcgctaggactgag

SEQ ID NO: 891208 - DNA, 15 bp, Homo sapiens
tcgctaggactgaga

SEQ ID NO: 891209 - DNA, 15 bp, Homo sapiens
cgctaggactgagag

SEQ ID NO: 891210 - DNA, 15 bp, Homo sapiens
gctaggactgagagt

SEQ ID NO: 891211 - DNA, 15 bp, Homo sapiens
ctaggactgagagtg

SEQ ID NO: 891212 - DNA, 15 bp, Homo sapiens
taggactgagagtga

SEQ ID NO: 891213 - DNA, 15 bp, Homo sapiens
aggactgagagtgac

SEQ ID NO: 891214 - DNA, 15 bp, Homo sapiens
ggactgagagtgact

SEQ ID NO: 891215 - DNA, 15 bp, Homo sapiens
gactgagagtgacta

SEQ ID NO: 891216 - DNA, 15 bp, Homo sapiens
actgagagtgactaa

SEQ ID NO: 891217 - DNA, 15 bp, Homo sapiens
ctgagagtgactaac

SEQ ID NO: 891218 - DNA, 15 bp, Homo sapiens
tgagagtgactaaca

SEQ ID NO: 891219 - DNA, 15 bp, Homo sapiens
gagagtgactaacac

SEQ ID NO: 891220 - DNA, 15 bp, Homo sapiens
agagtgactaacacc

SEQ ID NO: 891221 - DNA, 15 bp, Homo sapiens
gagtgactaacaccc

SEQ ID NO: 891222 - DNA, 15 bp, Homo sapiens
agtgactaacaccca

SEQ ID NO: 891223 - DNA, 15 bp, Homo sapiens
gtgactaacacccat

SEQ ID NO: 891224 - DNA, 15 bp, Homo sapiens
tgactaacacccatc

SEQ ID NO: 891225 - DNA, 15 bp, Homo sapiens
gactaacacccatcc

SEQ ID NO: 891226 - DNA, 15 bp, Homo sapiens
actaacacccatccc

SEQ ID NO: 891227 - DNA, 15 bp, Homo sapiens
ctaacacccatccct

SEQ ID NO: 891228 - DNA, 15 bp, Homo sapiens
taacacccatccctg

SEQ ID NO: 891229 - DNA, 15 bp, Homo sapiens
aacacccatccctgc

SEQ ID NO: 891230 - DNA, 15 bp, Homo sapiens
acacccatccctgca

SEQ ID NO: 891231 - DNA, 15 bp, Homo sapiens
cacccatccctgcag

SEQ ID NO: 891232 - DNA, 15 bp, Homo sapiens
acccatccctgcagc

SEQ ID NO: 891233 - DNA, 15 bp, Homo sapiens
cccatccctgcagca

SEQ ID NO: 891234 - DNA, 15 bp, Homo sapiens
ccatccctgcagcac

SEQ ID NO: 891235 - DNA, 15 bp, Homo sapiens
catccctgcagcact

SEQ ID NO: 891236 - DNA, 15 bp, Homo sapiens
atccctgcagcactc

SEQ ID NO: 891237 - DNA, 15 bp, Homo sapiens
tccctgcagcactca

SEQ ID NO: 891238 - DNA, 15 bp, Homo sapiens
ccctgcagcactcag

SEQ ID NO: 891239 - DNA, 15 bp, Homo sapiens
cctgcagcactcaga

SEQ ID NO: 891240 - DNA, 15 bp, Homo sapiens
ctgcagcactcagag

SEQ ID NO: 891241 - DNA, 15 bp, Homo sapiens
tgcagcactcagaga

SEQ ID NO: 891242 - DNA, 15 bp, Homo sapiens
gcagcactcagagag

SEQ ID NO: 891243 - DNA, 15 bp, Homo sapiens
cagcactcagagagg

SEQ ID NO: 891244 - DNA, 15 bp, Homo sapiens
agcactcagagaggc

SEQ ID NO: 891245 - DNA, 15 bp, Homo sapiens
gcactcagagaggca

SEQ ID NO: 891246 - DNA, 15 bp, Homo sapiens
cactcagagaggcac

SEQ ID NO: 891247 - DNA, 15 bp, Homo sapiens
actcagagaggcaca

SEQ ID NO: 891248 - DNA, 15 bp, Homo sapiens
ctcagagaggcacac

SEQ ID NO: 891249 - DNA, 15 bp, Homo sapiens
tcagagaggcacaca

SEQ ID NO: 891250 - DNA, 15 bp, Homo sapiens
cagagaggcacacac

SEQ ID NO: 891251 - DNA, 15 bp, Homo sapiens
agagaggcacacaca

SEQ ID NO: 891252 - DNA, 15 bp, Homo sapiens
gagaggcacacacag

SEQ ID NO: 891253 - DNA, 15 bp, Homo sapiens
agaggcacacacagg

SEQ ID NO: 891254 - DNA, 15 bp, Homo sapiens
gaggcacacacaggg

SEQ ID NO: 891255 - DNA, 15 bp, Homo sapiens
aggcacacacagggg

SEQ ID NO: 891256 - DNA, 15 bp, Homo sapiens
ggcacacacaggggc

SEQ ID NO: 891257 - DNA, 15 bp, Homo sapiens
gcacacacaggggct

SEQ ID NO: 891258 - DNA, 15 bp, Homo sapiens
cacacacaggggctc

SEQ ID NO: 891259 - DNA, 15 bp, Homo sapiens
acacacaggggctca

SEQ ID NO: 891260 - DNA, 15 bp, Homo sapiens
cacacaggggctcaa

SEQ ID NO: 891261 - DNA, 15 bp, Homo sapiens
acacaggggctcaag

SEQ ID NO: 891262 - DNA, 15 bp, Homo sapiens
cacaggggctcaaga

SEQ ID NO: 891263 - DNA, 15 bp, Homo sapiens
acaggggctcaagac

SEQ ID NO: 891264 - DNA, 15 bp, Homo sapiens
caggggctcaagact

SEQ ID NO: 891265 - DNA, 15 bp, Homo sapiens
aggggctcaagactc

SEQ ID NO: 891266 - DNA, 15 bp, Homo sapiens
ggggctcaagactca

SEQ ID NO: 891267 - DNA, 15 bp, Homo sapiens
gggctcaagactcag

SEQ ID NO: 891268 - DNA, 15 bp, Homo sapiens
ggctcaagactcagt

SEQ ID NO: 891269 - DNA, 15 bp, Homo sapiens
gctcaagactcagtt

SEQ ID NO: 891270 - DNA, 15 bp, Homo sapiens
ctcaagactcagttg

SEQ ID NO: 891271 - DNA, 15 bp, Homo sapiens
tcaagactcagttgc

SEQ ID NO: 891272 - DNA, 15 bp, Homo sapiens
caagactcagttgcc

SEQ ID NO: 891273 - DNA, 15 bp, Homo sapiens
aagactcagttgcca

SEQ ID NO: 891274 - DNA, 15 bp, Homo sapiens
agactcagttgccaa

SEQ ID NO: 891275 - DNA, 15 bp, Homo sapiens
gactcagttgccaat

SEQ ID NO: 891276 - DNA, 15 bp, Homo sapiens
actcagttgccaatt

SEQ ID NO: 891277 - DNA, 15 bp, Homo sapiens
ctcagttgccaattt

SEQ ID NO: 891278 - DNA, 15 bp, Homo sapiens
tcagttgccaatttg

SEQ ID NO: 891279 - DNA, 15 bp, Homo sapiens
cagttgccaatttga

SEQ ID NO: 891280 - DNA, 15 bp, Homo sapiens
agttgccaatttgat

SEQ ID NO: 891281 - DNA, 15 bp, Homo sapiens
gttgccaatttgatt

SEQ ID NO: 891282 - DNA, 15 bp, Homo sapiens
ttgccaatttgattt

SEQ ID NO: 891283 - DNA, 15 bp, Homo sapiens
tgccaatttgattta

SEQ ID NO: 891284 - DNA, 15 bp, Homo sapiens
gccaatttgatttat

SEQ ID NO: 891285 - DNA, 15 bp, Homo sapiens
ccaatttgatttatg

SEQ ID NO: 891286 - DNA, 15 bp, Homo sapiens
caatttgatttatgg

SEQ ID NO: 891287 - DNA, 15 bp, Homo sapiens
aatttgatttatggg

SEQ ID NO: 891288 - DNA, 15 bp, Homo sapiens
atttgatttatggga

SEQ ID NO: 891289 - DNA, 15 bp, Homo sapiens
tttgatttatgggac

SEQ ID NO: 891290 - DNA, 15 bp, Homo sapiens
ttgatttatgggact

SEQ ID NO: 891291 - DNA, 15 bp, Homo sapiens
tgatttatgggactt

SEQ ID NO: 891292 - DNA, 15 bp, Homo sapiens
gatttatgggactta

SEQ ID NO: 891293 - DNA, 15 bp, Homo sapiens
atttatgggacttat

SEQ ID NO: 891294 - DNA, 15 bp, Homo sapiens
tttatgggacttatt

SEQ ID NO: 891295 - DNA, 15 bp, Homo sapiens
ttatgggacttatta

SEQ ID NO: 891296 - DNA, 15 bp, Homo sapiens
tatgggacttattat

SEQ ID NO: 891297 - DNA, 15 bp, Homo sapiens
atgggacttattatc

SEQ ID NO: 891298 - DNA, 15 bp, Homo sapiens
tgggacttattatcc

SEQ ID NO: 891299 - DNA, 15 bp, Homo sapiens
gggacttattatccc

SEQ ID NO: 891300 - DNA, 15 bp, Homo sapiens
ggacttattatccca

SEQ ID NO: 891301 - DNA, 15 bp, Homo sapiens
gacttattatcccaa

SEQ ID NO: 891302 - DNA, 15 bp, Homo sapiens
acttattatcccaag

SEQ ID NO: 891303 - DNA, 15 bp, Homo sapiens
cttattatcccaagt

SEQ ID NO: 891304 - DNA, 15 bp, Homo sapiens
ttattatcccaagtg

SEQ ID NO: 891305 - DNA, 15 bp, Homo sapiens
tattatcccaagtgt

SEQ ID NO: 891306 - DNA, 15 bp, Homo sapiens
attatcccaagtgtc

SEQ ID NO: 891307 - DNA, 15 bp, Homo sapiens
ttatcccaagtgtca

SEQ ID NO: 891308 - DNA, 15 bp, Homo sapiens
tatcccaagtgtcag

SEQ ID NO: 891309 - DNA, 15 bp, Homo sapiens
atcccaagtgtcagc

SEQ ID NO: 891310 - DNA, 15 bp, Homo sapiens
tcccaagtgtcagca

SEQ ID NO: 891311 - DNA, 15 bp, Homo sapiens
cccaagtgtcagcag

SEQ ID NO: 891312 - DNA, 15 bp, Homo sapiens
ccaagtgtcagcaga

SEQ ID NO: 891313 - DNA, 15 bp, Homo sapiens
caagtgtcagcagag

SEQ ID NO: 891314 - DNA, 15 bp, Homo sapiens
aagtgtcagcagaga

SEQ ID NO: 891315 - DNA, 15 bp, Homo sapiens
agtgtcagcagagag

SEQ ID NO: 891316 - DNA, 15 bp, Homo sapiens
gtgtcagcagagagg

SEQ ID NO: 891317 - DNA, 15 bp, Homo sapiens
tgtcagcagagagga

SEQ ID NO: 891318 - DNA, 15 bp, Homo sapiens
gtcagcagagaggag

SEQ ID NO: 891319 - DNA, 15 bp, Homo sapiens
tcagcagagaggaga

SEQ ID NO: 891320 - DNA, 15 bp, Homo sapiens
cagcagagaggagat

SEQ ID NO: 891321 - DNA, 15 bp, Homo sapiens
agcagagaggagata

SEQ ID NO: 891322 - DNA, 15 bp, Homo sapiens
gcagagaggagatat

SEQ ID NO: 891323 - DNA, 15 bp, Homo sapiens
cagagaggagatatt

SEQ ID NO: 891324 - DNA, 15 bp, Homo sapiens
agagaggagatattg

SEQ ID NO: 891325 - DNA, 15 bp, Homo sapiens
gagaggagatattga

SEQ ID NO: 891326 - DNA, 15 bp, Homo sapiens
agaggagatattgat

SEQ ID NO: 891327 - DNA, 15 bp, Homo sapiens
gaggagatattgatt

SEQ ID NO: 891328 - DNA, 15 bp, Homo sapiens
aggagatattgattc

SEQ ID NO: 891329 - DNA, 15 bp, Homo sapiens
ggagatattgattca

SEQ ID NO: 891330 - DNA, 15 bp, Homo sapiens
gagatattgattcag

SEQ ID NO: 891331 - DNA, 15 bp, Homo sapiens
agatattgattcaga

SEQ ID NO: 891332 - DNA, 15 bp, Homo sapiens
gatattgattcagaa

SEQ ID NO: 891333 - DNA, 15 bp, Homo sapiens
atattgattcagaaa

SEQ ID NO: 891334 - DNA, 15 bp, Homo sapiens
tattgattcagaaag

SEQ ID NO: 891335 - DNA, 15 bp, Homo sapiens
attgattcagaaaga

SEQ ID NO: 891336 - DNA, 15 bp, Homo sapiens
ttgattcagaaagac

SEQ ID NO: 891337 - DNA, 15 bp, Homo sapiens
tgattcagaaagact

SEQ ID NO: 891338 - DNA, 15 bp, Homo sapiens
gattcagaaagactt

SEQ ID NO: 891339 - DNA, 15 bp, Homo sapiens
attcagaaagactta

SEQ ID NO: 891340 - DNA, 15 bp, Homo sapiens
ttcagaaagacttaa

SEQ ID NO: 891341 - DNA, 15 bp, Homo sapiens
tcagaaagacttaaa

SEQ ID NO: 891342 - DNA, 15 bp, Homo sapiens
cagaaagacttaaat

SEQ ID NO: 891343 - DNA, 15 bp, Homo sapiens
agaaagacttaaata

SEQ ID NO: 891344 - DNA, 15 bp, Homo sapiens
gaaagacttaaataa

SEQ ID NO: 891345 - DNA, 15 bp, Homo sapiens
aaagacttaaataaa

SEQ ID NO: 891346 - DNA, 15 bp, Homo sapiens
aagacttaaataaac

SEQ ID NO: 891347 - DNA, 15 bp, Homo sapiens
agacttaaataaaca

SEQ ID NO: 891348 - DNA, 15 bp, Homo sapiens
gacttaaataaacaa

SEQ ID NO: 891349 - DNA, 15 bp, Homo sapiens
acttaaataaacaag

SEQ ID NO: 891350 - DNA, 15 bp, Homo sapiens
cttaaataaacaagc

SEQ ID NO: 891351 - DNA, 15 bp, Homo sapiens
ttaaataaacaagca

SEQ ID NO: 891352 - DNA, 15 bp, Homo sapiens
taaataaacaagcag

SEQ ID NO: 891353 - DNA, 15 bp, Homo sapiens
aaataaacaagcagg

SEQ ID NO: 891354 - DNA, 15 bp, Homo sapiens
aataaacaagcaggt

SEQ ID NO: 891355 - DNA, 15 bp, Homo sapiens
ataaacaagcaggtg

SEQ ID NO: 891356 - DNA, 15 bp, Homo sapiens
taaacaagcaggtgc

SEQ ID NO: 891357 - DNA, 15 bp, Homo sapiens
aaacaagcaggtgca

SEQ ID NO: 891358 - DNA, 15 bp, Homo sapiens
aacaagcaggtgcat

SEQ ID NO: 891359 - DNA, 15 bp, Homo sapiens
acaagcaggtgcata

SEQ ID NO: 891360 - DNA, 15 bp, Homo sapiens
caagcaggtgcataa

SEQ ID NO: 891361 - DNA, 15 bp, Homo sapiens
aagcaggtgcataat

SEQ ID NO: 891362 - DNA, 15 bp, Homo sapiens
agcaggtgcataatc

SEQ ID NO: 891363 - DNA, 15 bp, Homo sapiens
gcaggtgcataatcc

SEQ ID NO: 891364 - DNA, 15 bp, Homo sapiens
caggtgcataatcca

SEQ ID NO: 891365 - DNA, 15 bp, Homo sapiens
aggtgcataatccag

SEQ ID NO: 891366 - DNA, 15 bp, Homo sapiens
ggtgcataatccaga

SEQ ID NO: 891367 - DNA, 15 bp, Homo sapiens
gtgcataatccagag

SEQ ID NO: 891368 - DNA, 15 bp, Homo sapiens
tgcataatccagaga

SEQ ID NO: 891369 - DNA, 15 bp, Homo sapiens
gcataatccagagag

SEQ ID NO: 891370 - DNA, 15 bp, Homo sapiens
cataatccagagagg

SEQ ID NO: 891371 - DNA, 15 bp, Homo sapiens
ataatccagagaggg

SEQ ID NO: 891372 - DNA, 15 bp, Homo sapiens
taatccagagagggg

SEQ ID NO: 891373 - DNA, 15 bp, Homo sapiens
aatccagagaggggt

SEQ ID NO: 891374 - DNA, 15 bp, Homo sapiens
atccagagaggggta

SEQ ID NO: 891375 - DNA, 15 bp, Homo sapiens
tccagagaggggtac

SEQ ID NO: 891376 - DNA, 15 bp, Homo sapiens
ccagagaggggtaca

SEQ ID NO: 891377 - DNA, 15 bp, Homo sapiens
cagagaggggtacag

SEQ ID NO: 891378 - DNA, 15 bp, Homo sapiens
agagaggggtacaga

SEQ ID NO: 891379 - DNA, 15 bp, Homo sapiens
gagaggggtacagac

SEQ ID NO: 891380 - DNA, 15 bp, Homo sapiens
agaggggtacagact

SEQ ID NO: 891381 - DNA, 15 bp, Homo sapiens
gaggggtacagactg

SEQ ID NO: 891382 - DNA, 15 bp, Homo sapiens
aggggtacagactga

SEQ ID NO: 891383 - DNA, 15 bp, Homo sapiens
ggggtacagactgag

SEQ ID NO: 891384 - DNA, 15 bp, Homo sapiens
gggtacagactgagc

SEQ ID NO: 891385 - DNA, 15 bp, Homo sapiens
ggtacagactgagct

SEQ ID NO: 891386 - DNA, 15 bp, Homo sapiens
gtacagactgagctg

SEQ ID NO: 891387 - DNA, 15 bp, Homo sapiens
tacagactgagctga

SEQ ID NO: 891388 - DNA, 15 bp, Homo sapiens
acagactgagctgag

SEQ ID NO: 891389 - DNA, 15 bp, Homo sapiens
cagactgagctgagg

SEQ ID NO: 891390 - DNA, 15 bp, Homo sapiens
agactgagctgaggg

SEQ ID NO: 891391 - DNA, 15 bp, Homo sapiens
gactgagctgagggt

SEQ ID NO: 891392 - DNA, 15 bp, Homo sapiens
actgagctgagggtg

SEQ ID NO: 891393 - DNA, 15 bp, Homo sapiens
ctgagctgagggtgt

SEQ ID NO: 891394 - DNA, 15 bp, Homo sapiens
tgagctgagggtgtc

SEQ ID NO: 891395 - DNA, 15 bp, Homo sapiens
gagctgagggtgtct

SEQ ID NO: 891396 - DNA, 15 bp, Homo sapiens
agctgagggtgtctg

SEQ ID NO: 891397 - DNA, 15 bp, Homo sapiens
gctgagggtgtctgg

SEQ ID NO: 891398 - DNA, 15 bp, Homo sapiens
ctgagggtgtctgga

SEQ ID NO: 891399 - DNA, 15 bp, Homo sapiens
tgagggtgtctggaa

SEQ ID NO: 891400 - DNA, 15 bp, Homo sapiens
gagggtgtctggaaa

SEQ ID NO: 891401 - DNA, 15 bp, Homo sapiens
agggtgtctggaaag

SEQ ID NO: 891402 - DNA, 15 bp, Homo sapiens
gggtgtctggaaagc

SEQ ID NO: 891403 - DNA, 15 bp, Homo sapiens
ggtgtctggaaagca

SEQ ID NO: 891404 - DNA, 15 bp, Homo sapiens
gtgtctggaaagcag

SEQ ID NO: 891405 - DNA, 15 bp, Homo sapiens
tgtctggaaagcagt

SEQ ID NO: 891406 - DNA, 15 bp, Homo sapiens
gtctggaaagcagtg

SEQ ID NO: 891407 - DNA, 15 bp, Homo sapiens
tctggaaagcagtgg

SEQ ID NO: 891408 - DNA, 15 bp, Homo sapiens
ctggaaagcagtgga

SEQ ID NO: 891409 - DNA, 15 bp, Homo sapiens
tggaaagcagtggaa

SEQ ID NO: 891410 - DNA, 15 bp, Homo sapiens
ggaaagcagtggaag

SEQ ID NO: 891411 - DNA, 15 bp, Homo sapiens
gaaagcagtggaagc

SEQ ID NO: 891412 - DNA, 15 bp, Homo sapiens
aaagcagtggaagca

SEQ ID NO: 891413 - DNA, 15 bp, Homo sapiens
aagcagtggaagcag

SEQ ID NO: 891414 - DNA, 15 bp, Homo sapiens
agcagtggaagcaga

SEQ ID NO: 891415 - DNA, 15 bp, Homo sapiens
gcagtggaagcagac

SEQ ID NO: 891416 - DNA, 15 bp, Homo sapiens
cagtggaagcagaca

SEQ ID NO: 891417 - DNA, 15 bp, Homo sapiens
agtggaagcagacat

SEQ ID NO: 891418 - DNA, 15 bp, Homo sapiens
gtggaagcagacatc

SEQ ID NO: 891419 - DNA, 15 bp, Homo sapiens
tggaagcagacatca

SEQ ID NO: 891420 - DNA, 15 bp, Homo sapiens
ggaagcagacatcat

SEQ ID NO: 891421 - DNA, 15 bp, Homo sapiens
gaagcagacatcatg

SEQ ID NO: 891422 - DNA, 15 bp, Homo sapiens
aagcagacatcatga

SEQ ID NO: 891423 - DNA, 15 bp, Homo sapiens
agcagacatcatgaa

SEQ ID NO: 891424 - DNA, 15 bp, Homo sapiens
gcagacatcatgaag

SEQ ID NO: 891425 - DNA, 15 bp, Homo sapiens
cagacatcatgaaga

SEQ ID NO: 891426 - DNA, 15 bp, Homo sapiens
agacatcatgaagaa

SEQ ID NO: 891427 - DNA, 15 bp, Homo sapiens
gacatcatgaagaaa

SEQ ID NO: 891428 - DNA, 15 bp, Homo sapiens
acatcatgaagaaac

SEQ ID NO: 891429 - DNA, 15 bp, Homo sapiens
catcatgaagaaacc

SEQ ID NO: 891430 - DNA, 15 bp, Homo sapiens
atcatgaagaaacct

SEQ ID NO: 891431 - DNA, 15 bp, Homo sapiens
tcatgaagaaacctg

SEQ ID NO: 891432 - DNA, 15 bp, Homo sapiens
catgaagaaacctgg

SEQ ID NO: 891433 - DNA, 15 bp, Homo sapiens
atgaagaaacctggg

SEQ ID NO: 891434 - DNA, 15 bp, Homo sapiens
tgaagaaacctgggg

SEQ ID NO: 891435 - DNA, 15 bp, Homo sapiens
gaagaaacctggggt

SEQ ID NO: 891436 - DNA, 15 bp, Homo sapiens
aagaaacctggggtc

SEQ ID NO: 891437 - DNA, 15 bp, Homo sapiens
agaaacctggggtct

SEQ ID NO: 891438 - DNA, 15 bp, Homo sapiens
gaaacctggggtctc

SEQ ID NO: 891439 - DNA, 15 bp, Homo sapiens
aaacctggggtctct

SEQ ID NO: 891440 - DNA, 15 bp, Homo sapiens
aacctggggtctctt

SEQ ID NO: 891441 - DNA, 15 bp, Homo sapiens
acctggggtctcttg

SEQ ID NO: 891442 - DNA, 15 bp, Homo sapiens
cctggggtctcttga

SEQ ID NO: 891443 - DNA, 15 bp, Homo sapiens
ctggggtctcttgaa

SEQ ID NO: 891444 - DNA, 15 bp, Homo sapiens
tggggtctcttgaaa

SEQ ID NO: 891445 - DNA, 15 bp, Homo sapiens
ggggtctcttgaaaa

SEQ ID NO: 891446 - DNA, 15 bp, Homo sapiens
gggtctcttgaaaac

SEQ ID NO: 891447 - DNA, 15 bp, Homo sapiens
ggtctcttgaaaact

SEQ ID NO: 891448 - DNA, 15 bp, Homo sapiens
gtctcttgaaaactg

SEQ ID NO: 891449 - DNA, 15 bp, Homo sapiens
tctcttgaaaactgc

SEQ ID NO: 891450 - DNA, 15 bp, Homo sapiens
ctcttgaaaactgct

SEQ ID NO: 891451 - DNA, 15 bp, Homo sapiens
tcttgaaaactgctc

SEQ ID NO: 891452 - DNA, 15 bp, Homo sapiens
cttgaaaactgctcc

SEQ ID NO: 891453 - DNA, 15 bp, Homo sapiens
ttgaaaactgctccc

SEQ ID NO: 891454 - DNA, 15 bp, Homo sapiens
tgaaaactgctccca

SEQ ID NO: 891455 - DNA, 15 bp, Homo sapiens
gaaaactgctcccaa

SEQ ID NO: 891456 - DNA, 15 bp, Homo sapiens
aaaactgctcccaag

SEQ ID NO: 891457 - DNA, 15 bp, Homo sapiens
aaactgctcccaagg

SEQ ID NO: 891458 - DNA, 15 bp, Homo sapiens
aactgctcccaaggg

SEQ ID NO: 891459 - DNA, 15 bp, Homo sapiens
actgctcccaaggga

SEQ ID NO: 891460 - DNA, 15 bp, Homo sapiens
ctgctcccaagggag

SEQ ID NO: 891461 - DNA, 15 bp, Homo sapiens
tgctcccaagggagt

SEQ ID NO: 891462 - DNA, 15 bp, Homo sapiens
gctcccaagggagtc

SEQ ID NO: 891463 - DNA, 15 bp, Homo sapiens
ctcccaagggagtca

SEQ ID NO: 891464 - DNA, 15 bp, Homo sapiens
tcccaagggagtcat

SEQ ID NO: 891465 - DNA, 15 bp, Homo sapiens
cccaagggagtcatg

SEQ ID NO: 891466 - DNA, 15 bp, Homo sapiens
ccaagggagtcatgg

SEQ ID NO: 891467 - DNA, 15 bp, Homo sapiens
caagggagtcatggg

SEQ ID NO: 891468 - DNA, 15 bp, Homo sapiens
aagggagtcatgggg

SEQ ID NO: 891469 - DNA, 15 bp, Homo sapiens
agggagtcatggggt

SEQ ID NO: 891470 - DNA, 15 bp, Homo sapiens
gggagtcatggggtg

SEQ ID NO: 891471 - DNA, 15 bp, Homo sapiens
ggagtcatggggtga

SEQ ID NO: 891472 - DNA, 15 bp, Homo sapiens
gagtcatggggtgac

SEQ ID NO: 891473 - DNA, 15 bp, Homo sapiens
agtcatggggtgaca

SEQ ID NO: 891474 - DNA, 15 bp, Homo sapiens
gtcatggggtgacag

SEQ ID NO: 891475 - DNA, 15 bp, Homo sapiens
tcatggggtgacaga

SEQ ID NO: 891476 - DNA, 15 bp, Homo sapiens
catggggtgacagag

SEQ ID NO: 891477 - DNA, 15 bp, Homo sapiens
atggggtgacagagg

SEQ ID NO: 891478 - DNA, 15 bp, Homo sapiens
tggggtgacagaggg

SEQ ID NO: 891479 - DNA, 15 bp, Homo sapiens
ggggtgacagagggg

SEQ ID NO: 891480 - DNA, 15 bp, Homo sapiens
gggtgacagaggggc

SEQ ID NO: 891481 - DNA, 15 bp, Homo sapiens
ggtgacagaggggca

SEQ ID NO: 891482 - DNA, 15 bp, Homo sapiens
gtgacagaggggcag

SEQ ID NO: 891483 - DNA, 15 bp, Homo sapiens
tgacagaggggcagg

SEQ ID NO: 891484 - DNA, 15 bp, Homo sapiens
gacagaggggcaggg

SEQ ID NO: 891485 - DNA, 15 bp, Homo sapiens
acagaggggcaggga

SEQ ID NO: 891486 - DNA, 15 bp, Homo sapiens
cagaggggcagggac

SEQ ID NO: 891487 - DNA, 15 bp, Homo sapiens
agaggggcagggacg

SEQ ID NO: 891488 - DNA, 15 bp, Homo sapiens
gaggggcagggacgg

SEQ ID NO: 891489 - DNA, 15 bp, Homo sapiens
aggggcagggacggg

SEQ ID NO: 891490 - DNA, 15 bp, Homo sapiens
ggggcagggacgggc

SEQ ID NO: 891491 - DNA, 15 bp, Homo sapiens
gggcagggacgggct

SEQ ID NO: 891492 - DNA, 15 bp, Homo sapiens
ggcagggacgggctg

SEQ ID NO: 891493 - DNA, 15 bp, Homo sapiens
gcagggacgggctgt

SEQ ID NO: 891494 - DNA, 15 bp, Homo sapiens
cagggacgggctgtg

SEQ ID NO: 891495 - DNA, 15 bp, Homo sapiens
agggacgggctgtgg

SEQ ID NO: 891496 - DNA, 15 bp, Homo sapiens
gggacgggctgtgga

SEQ ID NO: 891497 - DNA, 15 bp, Homo sapiens
ggacgggctgtggag

SEQ ID NO: 891498 - DNA, 15 bp, Homo sapiens
gacgggctgtggagt

SEQ ID NO: 891499 - DNA, 15 bp, Homo sapiens
acgggctgtggagtc

SEQ ID NO: 891500 - DNA, 15 bp, Homo sapiens
cgggctgtggagtca

SEQ ID NO: 891501 - DNA, 15 bp, Homo sapiens
gggctgtggagtcag

SEQ ID NO: 891502 - DNA, 15 bp, Homo sapiens
ggctgtggagtcagc

SEQ ID NO: 891503 - DNA, 15 bp, Homo sapiens
gctgtggagtcagcg

SEQ ID NO: 891504 - DNA, 15 bp, Homo sapiens
ctgtggagtcagcgg

SEQ ID NO: 891505 - DNA, 15 bp, Homo sapiens
tgtggagtcagcggg

SEQ ID NO: 891506 - DNA, 15 bp, Homo sapiens
gtggagtcagcgggc

SEQ ID NO: 891507 - DNA, 15 bp, Homo sapiens
tggagtcagcgggca

SEQ ID NO: 891508 - DNA, 15 bp, Homo sapiens
ggagtcagcgggcac

SEQ ID NO: 891509 - DNA, 15 bp, Homo sapiens
gagtcagcgggcaca

SEQ ID NO: 891510 - DNA, 15 bp, Homo sapiens
agtcagcgggcacag

SEQ ID NO: 891511 - DNA, 15 bp, Homo sapiens
gtcagcgggcacagg

SEQ ID NO: 891512 - DNA, 15 bp, Homo sapiens
tcagcgggcacaggt

SEQ ID NO: 891513 - DNA, 15 bp, Homo sapiens
cagcgggcacaggtg

SEQ ID NO: 891514 - DNA, 15 bp, Homo sapiens
agcgggcacaggtgc

SEQ ID NO: 891515 - DNA, 15 bp, Homo sapiens
gcgggcacaggtgca

SEQ ID NO: 891516 - DNA, 15 bp, Homo sapiens
cgggcacaggtgcac

SEQ ID NO: 891517 - DNA, 15 bp, Homo sapiens
gggcacaggtgcact

SEQ ID NO: 891518 - DNA, 15 bp, Homo sapiens
ggcacaggtgcactc

SEQ ID NO: 891519 - DNA, 15 bp, Homo sapiens
gcacaggtgcactcc

SEQ ID NO: 891520 - DNA, 15 bp, Homo sapiens
cacaggtgcactcca

SEQ ID NO: 891521 - DNA, 15 bp, Homo sapiens
acaggtgcactccag

SEQ ID NO: 891522 - DNA, 15 bp, Homo sapiens
caggtgcactccagg

SEQ ID NO: 891523 - DNA, 15 bp, Homo sapiens
aggtgcactccaggc

SEQ ID NO: 891524 - DNA, 15 bp, Homo sapiens
ggtgcactccaggct

SEQ ID NO: 891525 - DNA, 15 bp, Homo sapiens
gtgcactccaggctc

SEQ ID NO: 891526 - DNA, 15 bp, Homo sapiens
tgcactccaggctcc

SEQ ID NO: 891527 - DNA, 15 bp, Homo sapiens
gcactccaggctcca

SEQ ID NO: 891528 - DNA, 15 bp, Homo sapiens
cactccaggctccat

SEQ ID NO: 891529 - DNA, 15 bp, Homo sapiens
actccaggctccatc

SEQ ID NO: 891530 - DNA, 15 bp, Homo sapiens
ctccaggctccatca

SEQ ID NO: 891531 - DNA, 15 bp, Homo sapiens
tccaggctccatcac

SEQ ID NO: 891532 - DNA, 15 bp, Homo sapiens
ccaggctccatcaca

SEQ ID NO: 891533 - DNA, 15 bp, Homo sapiens
caggctccatcacat

SEQ ID NO: 891534 - DNA, 15 bp, Homo sapiens
aggctccatcacatc

SEQ ID NO: 891535 - DNA, 15 bp, Homo sapiens
ggctccatcacatca

SEQ ID NO: 891536 - DNA, 15 bp, Homo sapiens
gctccatcacatcac

SEQ ID NO: 891537 - DNA, 15 bp, Homo sapiens
ctccatcacatcaca

SEQ ID NO: 891538 - DNA, 15 bp, Homo sapiens
tccatcacatcacac

SEQ ID NO: 891539 - DNA, 15 bp, Homo sapiens
ccatcacatcacacg

SEQ ID NO: 891540 - DNA, 15 bp, Homo sapiens
catcacatcacacgc

SEQ ID NO: 891541 - DNA, 15 bp, Homo sapiens
atcacatcacacgct

SEQ ID NO: 891542 - DNA, 15 bp, Homo sapiens
tcacatcacacgcta

SEQ ID NO: 891543 - DNA, 15 bp, Homo sapiens
cacatcacacgctag

SEQ ID NO: 891544 - DNA, 15 bp, Homo sapiens
acatcacacgctagg

SEQ ID NO: 891545 - DNA, 15 bp, Homo sapiens
catcacacgctaggg

SEQ ID NO: 891546 - DNA, 15 bp, Homo sapiens
atcacacgctagggg

SEQ ID NO: 891547 - DNA, 15 bp, Homo sapiens
tcacacgctaggggc

SEQ ID NO: 891548 - DNA, 15 bp, Homo sapiens
cacacgctaggggcg

SEQ ID NO: 891549 - DNA, 15 bp, Homo sapiens
acacgctaggggcgt

SEQ ID NO: 891550 - DNA, 15 bp, Homo sapiens
cacgctaggggcgtg

SEQ ID NO: 891551 - DNA, 15 bp, Homo sapiens
acgctaggggcgtga

SEQ ID NO: 891552 - DNA, 15 bp, Homo sapiens
cgctaggggcgtgac

SEQ ID NO: 891553 - DNA, 15 bp, Homo sapiens
gctaggggcgtgacc

SEQ ID NO: 891554 - DNA, 15 bp, Homo sapiens
ctaggggcgtgacct

SEQ ID NO: 891555 - DNA, 15 bp, Homo sapiens
taggggcgtgacctt

SEQ ID NO: 891556 - DNA, 15 bp, Homo sapiens
aggggcgtgaccttg

SEQ ID NO: 891557 - DNA, 15 bp, Homo sapiens
ggggcgtgaccttgg

SEQ ID NO: 891558 - DNA, 15 bp, Homo sapiens
gggcgtgaccttggg

SEQ ID NO: 891559 - DNA, 15 bp, Homo sapiens
ggcgtgaccttggga

SEQ ID NO: 891560 - DNA, 15 bp, Homo sapiens
gcgtgaccttgggaa

SEQ ID NO: 891561 - DNA, 15 bp, Homo sapiens
cgtgaccttgggaaa

SEQ ID NO: 891562 - DNA, 15 bp, Homo sapiens
gtgaccttgggaaaa

SEQ ID NO: 891563 - DNA, 15 bp, Homo sapiens
tgaccttgggaaaat

SEQ ID NO: 891564 - DNA, 15 bp, Homo sapiens
gaccttgggaaaatc

SEQ ID NO: 891565 - DNA, 15 bp, Homo sapiens
accttgggaaaatca

SEQ ID NO: 891566 - DNA, 15 bp, Homo sapiens
ccttgggaaaatcac

SEQ ID NO: 891567 - DNA, 15 bp, Homo sapiens
cttgggaaaatcact

SEQ ID NO: 891568 - DNA, 15 bp, Homo sapiens
ttgggaaaatcactt

SEQ ID NO: 891569 - DNA, 15 bp, Homo sapiens
tgggaaaatcacttt

SEQ ID NO: 891570 - DNA, 15 bp, Homo sapiens
gggaaaatcactttg

SEQ ID NO: 891571 - DNA, 15 bp, Homo sapiens
ggaaaatcactttgc

SEQ ID NO: 891572 - DNA, 15 bp, Homo sapiens
gaaaatcactttgcc

SEQ ID NO: 891573 - DNA, 15 bp, Homo sapiens
aaaatcactttgcct

SEQ ID NO: 891574 - DNA, 15 bp, Homo sapiens
aaatcactttgcctt

SEQ ID NO: 891575 - DNA, 15 bp, Homo sapiens
aatcactttgccttg

SEQ ID NO: 891576 - DNA, 15 bp, Homo sapiens
atcactttgccttgt

SEQ ID NO: 891577 - DNA, 15 bp, Homo sapiens
tcactttgccttgtg

SEQ ID NO: 891578 - DNA, 15 bp, Homo sapiens
cactttgccttgtgc

SEQ ID NO: 891579 - DNA, 15 bp, Homo sapiens
actttgccttgtgct

SEQ ID NO: 891580 - DNA, 15 bp, Homo sapiens
ctttgccttgtgctt

SEQ ID NO: 891581 - DNA, 15 bp, Homo sapiens
tttgccttgtgcttt

SEQ ID NO: 891582 - DNA, 15 bp, Homo sapiens
ttgccttgtgctttt

SEQ ID NO: 891583 - DNA, 15 bp, Homo sapiens
tgccttgtgctttta

SEQ ID NO: 891584 - DNA, 15 bp, Homo sapiens
gccttgtgcttttac

SEQ ID NO: 891585 - DNA, 15 bp, Homo sapiens
ccttgtgcttttaca

SEQ ID NO: 891586 - DNA, 15 bp, Homo sapiens
cttgtgcttttacag

SEQ ID NO: 891587 - DNA, 15 bp, Homo sapiens
ttgtgcttttacaga

SEQ ID NO: 891588 - DNA, 15 bp, Homo sapiens
tgtgcttttacagaa

SEQ ID NO: 891589 - DNA, 15 bp, Homo sapiens
gtgcttttacagaaa

SEQ ID NO: 891590 - DNA, 15 bp, Homo sapiens
tgcttttacagaaag

SEQ ID NO: 891591 - DNA, 15 bp, Homo sapiens
gcttttacagaaaga

SEQ ID NO: 891592 - DNA, 15 bp, Homo sapiens
cttttacagaaagaa

SEQ ID NO: 891593 - DNA, 15 bp, Homo sapiens
ttttacagaaagaac

SEQ ID NO: 891594 - DNA, 15 bp, Homo sapiens
tttacagaaagaaca

SEQ ID NO: 891595 - DNA, 15 bp, Homo sapiens
ttacagaaagaacaa

SEQ ID NO: 891596 - DNA, 15 bp, Homo sapiens
tacagaaagaacaag

SEQ ID NO: 891597 - DNA, 15 bp, Homo sapiens
acagaaagaacaagg

SEQ ID NO: 891598 - DNA, 15 bp, Homo sapiens
cagaaagaacaaggc

SEQ ID NO: 891599 - DNA, 15 bp, Homo sapiens
agaaagaacaaggcc

SEQ ID NO: 891600 - DNA, 15 bp, Homo sapiens
gaaagaacaaggcct

SEQ ID NO: 891601 - DNA, 15 bp, Homo sapiens
aaagaacaaggcctt

SEQ ID NO: 891602 - DNA, 15 bp, Homo sapiens
aagaacaaggccttt

SEQ ID NO: 891603 - DNA, 15 bp, Homo sapiens
agaacaaggcctttt

SEQ ID NO: 891604 - DNA, 15 bp, Homo sapiens
gaacaaggccttttg

SEQ ID NO: 891605 - DNA, 15 bp, Homo sapiens
aacaaggccttttgt

SEQ ID NO: 891606 - DNA, 15 bp, Homo sapiens
acaaggccttttgtg

SEQ ID NO: 891607 - DNA, 15 bp, Homo sapiens
caaggccttttgtgg

SEQ ID NO: 891608 - DNA, 15 bp, Homo sapiens
aaggccttttgtggg

SEQ ID NO: 891609 - DNA, 15 bp, Homo sapiens
aggccttttgtgggg

SEQ ID NO: 891610 - DNA, 15 bp, Homo sapiens
ggccttttgtggggg

SEQ ID NO: 891611 - DNA, 15 bp, Homo sapiens
gccttttgtggggga

SEQ ID NO: 891612 - DNA, 15 bp, Homo sapiens
ccttttgtgggggat

SEQ ID NO: 891613 - DNA, 15 bp, Homo sapiens
cttttgtgggggatt

SEQ ID NO: 891614 - DNA, 15 bp, Homo sapiens
ttttgtgggggattg

SEQ ID NO: 891615 - DNA, 15 bp, Homo sapiens
tttgtgggggattgt

SEQ ID NO: 891616 - DNA, 15 bp, Homo sapiens
ttgtgggggattgtg

SEQ ID NO: 891617 - DNA, 15 bp, Homo sapiens
tgtgggggattgtgg

SEQ ID NO: 891618 - DNA, 15 bp, Homo sapiens
gtgggggattgtgga

SEQ ID NO: 891619 - DNA, 15 bp, Homo sapiens
tgggggattgtggag

SEQ ID NO: 891620 - DNA, 15 bp, Homo sapiens
gggggattgtggaga

SEQ ID NO: 891621 - DNA, 15 bp, Homo sapiens
ggggattgtggagag

SEQ ID NO: 891622 - DNA, 15 bp, Homo sapiens
gggattgtggagagg

SEQ ID NO: 891623 - DNA, 15 bp, Homo sapiens
ggattgtggagagga

SEQ ID NO: 891624 - DNA, 15 bp, Homo sapiens
gattgtggagaggaa

SEQ ID NO: 891625 - DNA, 15 bp, Homo sapiens
attgtggagaggaat

SEQ ID NO: 891626 - DNA, 15 bp, Homo sapiens
ttgtggagaggaatg

SEQ ID NO: 891627 - DNA, 15 bp, Homo sapiens
tgtggagaggaatgt

SEQ ID NO: 891628 - DNA, 15 bp, Homo sapiens
gtggagaggaatgtc

SEQ ID NO: 891629 - DNA, 15 bp, Homo sapiens
tggagaggaatgtcc

SEQ ID NO: 891630 - DNA, 15 bp, Homo sapiens
ggagaggaatgtcca

SEQ ID NO: 891631 - DNA, 15 bp, Homo sapiens
gagaggaatgtccat

SEQ ID NO: 891632 - DNA, 15 bp, Homo sapiens
agaggaatgtccatg

SEQ ID NO: 891633 - DNA, 15 bp, Homo sapiens
gaggaatgtccatgt

SEQ ID NO: 891634 - DNA, 15 bp, Homo sapiens
aggaatgtccatgtg

SEQ ID NO: 891635 - DNA, 15 bp, Homo sapiens
ggaatgtccatgtgt

SEQ ID NO: 891636 - DNA, 15 bp, Homo sapiens
gaatgtccatgtgta

SEQ ID NO: 891637 - DNA, 15 bp, Homo sapiens
aatgtccatgtgtat

SEQ ID NO: 891638 - DNA, 15 bp, Homo sapiens
atgtccatgtgtatg

SEQ ID NO: 891639 - DNA, 15 bp, Homo sapiens
tgtccatgtgtatgt

SEQ ID NO: 891640 - DNA, 15 bp, Homo sapiens
gtccatgtgtatgtg

SEQ ID NO: 891641 - DNA, 15 bp, Homo sapiens
tccatgtgtatgtgt

SEQ ID NO: 891642 - DNA, 15 bp, Homo sapiens
ccatgtgtatgtgta

SEQ ID NO: 891643 - DNA, 15 bp, Homo sapiens
catgtgtatgtgtat

SEQ ID NO: 891644 - DNA, 15 bp, Homo sapiens
atgtgtatgtgtatg

SEQ ID NO: 891645 - DNA, 15 bp, Homo sapiens
tgtgtatgtgtatgt

SEQ ID NO: 891646 - DNA, 15 bp, Homo sapiens
gtgtatgtgtatgtg

SEQ ID NO: 891647 - DNA, 15 bp, Homo sapiens
tgtatgtgtatgtgt

SEQ ID NO: 891648 - DNA, 15 bp, Homo sapiens
gtatgtgtatgtgta

SEQ ID NO: 891649 - DNA, 15 bp, Homo sapiens
tatgtgtatgtgtat

SEQ ID NO: 891650 - DNA, 15 bp, Homo sapiens
gtgtatgtgtatgta

SEQ ID NO: 891651 - DNA, 15 bp, Homo sapiens
tgtatgtgtatgtat

SEQ ID NO: 891652 - DNA, 15 bp, Homo sapiens
gtatgtgtatgtatt

SEQ ID NO: 891653 - DNA, 15 bp, Homo sapiens
tatgtgtatgtattg

SEQ ID NO: 891654 - DNA, 15 bp, Homo sapiens
atgtgtatgtattgc

SEQ ID NO: 891655 - DNA, 15 bp, Homo sapiens
tgtgtatgtattgca

SEQ ID NO: 891656 - DNA, 15 bp, Homo sapiens
gtgtatgtattgcat

SEQ ID NO: 891657 - DNA, 15 bp, Homo sapiens
tgtatgtattgcata

SEQ ID NO: 891658 - DNA, 15 bp, Homo sapiens
gtatgtattgcatat

SEQ ID NO: 891659 - DNA, 15 bp, Homo sapiens
tatgtattgcatatc

SEQ ID NO: 891660 - DNA, 15 bp, Homo sapiens
atgtattgcatatct

SEQ ID NO: 891661 - DNA, 15 bp, Homo sapiens
tgtattgcatatcta

SEQ ID NO: 891662 - DNA, 15 bp, Homo sapiens
gtattgcatatctat

SEQ ID NO: 891663 - DNA, 15 bp, Homo sapiens
tattgcatatctatg

SEQ ID NO: 891664 - DNA, 15 bp, Homo sapiens
attgcatatctatgt

SEQ ID NO: 891665 - DNA, 15 bp, Homo sapiens
ttgcatatctatgtg

SEQ ID NO: 891666 - DNA, 15 bp, Homo sapiens
tgcatatctatgtgg

SEQ ID NO: 891667 - DNA, 15 bp, Homo sapiens
gcatatctatgtggt

SEQ ID NO: 891668 - DNA, 15 bp, Homo sapiens
catatctatgtggtc

SEQ ID NO: 891669 - DNA, 15 bp, Homo sapiens
atatctatgtggtca

SEQ ID NO: 891670 - DNA, 15 bp, Homo sapiens
tatctatgtggtcat

SEQ ID NO: 891671 - DNA, 15 bp, Homo sapiens
atctatgtggtcatt

SEQ ID NO: 891672 - DNA, 15 bp, Homo sapiens
tctatgtggtcattc

SEQ ID NO: 891673 - DNA, 15 bp, Homo sapiens
ctatgtggtcattcc

SEQ ID NO: 891674 - DNA, 15 bp, Homo sapiens
tatgtggtcattccc

SEQ ID NO: 891675 - DNA, 15 bp, Homo sapiens
atgtggtcattccct

SEQ ID NO: 891676 - DNA, 15 bp, Homo sapiens
tgtggtcattccctg

SEQ ID NO: 891677 - DNA, 15 bp, Homo sapiens
gtggtcattccctgg

SEQ ID NO: 891678 - DNA, 15 bp, Homo sapiens
tggtcattccctggt

SEQ ID NO: 891679 - DNA, 15 bp, Homo sapiens
ggtcattccctggta

SEQ ID NO: 891680 - DNA, 15 bp, Homo sapiens
gtcattccctggtac

SEQ ID NO: 891681 - DNA, 15 bp, Homo sapiens
tcattccctggtaca

SEQ ID NO: 891682 - DNA, 15 bp, Homo sapiens
cattccctggtacat

SEQ ID NO: 891683 - DNA, 15 bp, Homo sapiens
attccctggtacata

SEQ ID NO: 891684 - DNA, 15 bp, Homo sapiens
ttccctggtacatag

SEQ ID NO: 891685 - DNA, 15 bp, Homo sapiens
tccctggtacatagt

SEQ ID NO: 891686 - DNA, 15 bp, Homo sapiens
ccctggtacatagta

SEQ ID NO: 891687 - DNA, 15 bp, Homo sapiens
cctggtacatagtag

SEQ ID NO: 891688 - DNA, 15 bp, Homo sapiens
ctggtacatagtagg

SEQ ID NO: 891689 - DNA, 15 bp, Homo sapiens
tggtacatagtaggt

SEQ ID NO: 891690 - DNA, 15 bp, Homo sapiens
ggtacatagtaggtg

SEQ ID NO: 891691 - DNA, 15 bp, Homo sapiens
gtacatagtaggtgc

SEQ ID NO: 891692 - DNA, 15 bp, Homo sapiens
tacatagtaggtgct

SEQ ID NO: 891693 - DNA, 15 bp, Homo sapiens
acatagtaggtgctt

SEQ ID NO: 891694 - DNA, 15 bp, Homo sapiens
catagtaggtgcttc

SEQ ID NO: 891695 - DNA, 15 bp, Homo sapiens
atagtaggtgcttca

SEQ ID NO: 891696 - DNA, 15 bp, Homo sapiens
tagtaggtgcttcat

SEQ ID NO: 891697 - DNA, 15 bp, Homo sapiens
agtaggtgcttcata

SEQ ID NO: 891698 - DNA, 15 bp, Homo sapiens
gtaggtgcttcataa

SEQ ID NO: 891699 - DNA, 15 bp, Homo sapiens
taggtgcttcataaa

SEQ ID NO: 891700 - DNA, 15 bp, Homo sapiens
aggtgcttcataaac

SEQ ID NO: 891701 - DNA, 15 bp, Homo sapiens
ggtgcttcataaaca

SEQ ID NO: 891702 - DNA, 15 bp, Homo sapiens
gtgcttcataaacaa

SEQ ID NO: 891703 - DNA, 15 bp, Homo sapiens
tgcttcataaacaaa

SEQ ID NO: 891704 - DNA, 15 bp, Homo sapiens
gcttcataaacaaaa

SEQ ID NO: 891705 - DNA, 15 bp, Homo sapiens
cttcataaacaaaaa

SEQ ID NO: 891706 - DNA, 15 bp, Homo sapiens
ttcataaacaaaaat

SEQ ID NO: 891707 - DNA, 15 bp, Homo sapiens
tcataaacaaaaata

SEQ ID NO: 891708 - DNA, 15 bp, Homo sapiens
cataaacaaaaatac

SEQ ID NO: 891709 - DNA, 15 bp, Homo sapiens
ataaacaaaaatacc

SEQ ID NO: 891710 - DNA, 15 bp, Homo sapiens
taaacaaaaataccc

SEQ ID NO: 891711 - DNA, 15 bp, Homo sapiens
aaacaaaaataccct

SEQ ID NO: 891712 - DNA, 15 bp, Homo sapiens
aacaaaaataccctc

SEQ ID NO: 891713 - DNA, 15 bp, Homo sapiens
acaaaaataccctcc

SEQ ID NO: 891714 - DNA, 15 bp, Homo sapiens
caaaaataccctccc

SEQ ID NO: 891715 - DNA, 15 bp, Homo sapiens
aaaaataccctccca

SEQ ID NO: 891716 - DNA, 15 bp, Homo sapiens
aaaataccctcccat

SEQ ID NO: 891717 - DNA, 15 bp, Homo sapiens
aaataccctcccata

SEQ ID NO: 891718 - DNA, 15 bp, Homo sapiens
aataccctcccatat

SEQ ID NO: 891719 - DNA, 15 bp, Homo sapiens
ataccctcccatatc

SEQ ID NO: 891720 - DNA, 15 bp, Homo sapiens
taccctcccatatca

SEQ ID NO: 891721 - DNA, 15 bp, Homo sapiens
accctcccatatcac

SEQ ID NO: 891722 - DNA, 15 bp, Homo sapiens
ccctcccatatcact

SEQ ID NO: 891723 - DNA, 15 bp, Homo sapiens
cctcccatatcactg

SEQ ID NO: 891724 - DNA, 15 bp, Homo sapiens
ctcccatatcactgc

SEQ ID NO: 891725 - DNA, 15 bp, Homo sapiens
tcccatatcactgcc

SEQ ID NO: 891726 - DNA, 15 bp, Homo sapiens
cccatatcactgccc

SEQ ID NO: 891727 - DNA, 15 bp, Homo sapiens
ccatatcactgccct

SEQ ID NO: 891728 - DNA, 15 bp, Homo sapiens
catatcactgccctt

SEQ ID NO: 891729 - DNA, 15 bp, Homo sapiens
atatcactgcccttc

SEQ ID NO: 891730 - DNA, 15 bp, Homo sapiens
tatcactgcccttct

SEQ ID NO: 891731 - DNA, 15 bp, Homo sapiens
atcactgcccttcta

SEQ ID NO: 891732 - DNA, 15 bp, Homo sapiens
tcactgcccttctat

SEQ ID NO: 891733 - DNA, 15 bp, Homo sapiens
cactgcccttctatt

SEQ ID NO: 891734 - DNA, 15 bp, Homo sapiens
actgcccttctattc

SEQ ID NO: 891735 - DNA, 15 bp, Homo sapiens
ctgcccttctattcc

SEQ ID NO: 891736 - DNA, 15 bp, Homo sapiens
tgcccttctattcca

SEQ ID NO: 891737 - DNA, 15 bp, Homo sapiens
gcccttctattccat

SEQ ID NO: 891738 - DNA, 15 bp, Homo sapiens
cccttctattccatt

SEQ ID NO: 891739 - DNA, 15 bp, Homo sapiens
ccttctattccattt

SEQ ID NO: 891740 - DNA, 15 bp, Homo sapiens
cttctattccatttg

SEQ ID NO: 891741 - DNA, 15 bp, Homo sapiens
ttctattccatttgt

SEQ ID NO: 891742 - DNA, 15 bp, Homo sapiens
tctattccatttgtg

SEQ ID NO: 891743 - DNA, 15 bp, Homo sapiens
ctattccatttgtgc

SEQ ID NO: 891744 - DNA, 15 bp, Homo sapiens
tattccatttgtgcc

SEQ ID NO: 891745 - DNA, 15 bp, Homo sapiens
attccatttgtgcca

SEQ ID NO: 891746 - DNA, 15 bp, Homo sapiens
ttccatttgtgccat

SEQ ID NO: 891747 - DNA, 15 bp, Homo sapiens
tccatttgtgccata

SEQ ID NO: 891748 - DNA, 15 bp, Homo sapiens
ccatttgtgccatag

SEQ ID NO: 891749 - DNA, 15 bp, Homo sapiens
catttgtgccatagt

SEQ ID NO: 891750 - DNA, 15 bp, Homo sapiens
atttgtgccatagtg

SEQ ID NO: 891751 - DNA, 15 bp, Homo sapiens
tttgtgccatagtgt

SEQ ID NO: 891752 - DNA, 15 bp, Homo sapiens
ttgtgccatagtgtg

SEQ ID NO: 891753 - DNA, 15 bp, Homo sapiens
tgtgccatagtgtgt

SEQ ID NO: 891754 - DNA, 15 bp, Homo sapiens
gtgccatagtgtgtg

SEQ ID NO: 891755 - DNA, 15 bp, Homo sapiens
tgccatagtgtgtga

SEQ ID NO: 891756 - DNA, 15 bp, Homo sapiens
gccatagtgtgtgac

SEQ ID NO: 891757 - DNA, 15 bp, Homo sapiens
ccatagtgtgtgacc

SEQ ID NO: 891758 - DNA, 15 bp, Homo sapiens
catagtgtgtgacct

SEQ ID NO: 891759 - DNA, 15 bp, Homo sapiens
atagtgtgtgaccta

SEQ ID NO: 891760 - DNA, 15 bp, Homo sapiens
tagtgtgtgacctaa

SEQ ID NO: 891761 - DNA, 15 bp, Homo sapiens
agtgtgtgacctaag

SEQ ID NO: 891762 - DNA, 15 bp, Homo sapiens
gtgtgtgacctaaga

SEQ ID NO: 891763 - DNA, 15 bp, Homo sapiens
tgtgtgacctaagag

SEQ ID NO: 891764 - DNA, 15 bp, Homo sapiens
gtgtgacctaagagt

SEQ ID NO: 891765 - DNA, 15 bp, Homo sapiens
tgtgacctaagagta

SEQ ID NO: 891766 - DNA, 15 bp, Homo sapiens
gtgacctaagagtag

SEQ ID NO: 891767 - DNA, 15 bp, Homo sapiens
tgacctaagagtaga

SEQ ID NO: 891768 - DNA, 15 bp, Homo sapiens
gacctaagagtagat

SEQ ID NO: 891769 - DNA, 15 bp, Homo sapiens
acctaagagtagata

SEQ ID NO: 891770 - DNA, 15 bp, Homo sapiens
cctaagagtagataa

SEQ ID NO: 891771 - DNA, 15 bp, Homo sapiens
ctaagagtagataaa

SEQ ID NO: 891772 - DNA, 15 bp, Homo sapiens
taagagtagataaag

SEQ ID NO: 891773 - DNA, 15 bp, Homo sapiens
aagagtagataaagc

SEQ ID NO: 891774 - DNA, 15 bp, Homo sapiens
agagtagataaagca

SEQ ID NO: 891775 - DNA, 15 bp, Homo sapiens
gagtagataaagcac

SEQ ID NO: 891776 - DNA, 15 bp, Homo sapiens
agtagataaagcact

SEQ ID NO: 891777 - DNA, 15 bp, Homo sapiens
gtagataaagcactt

SEQ ID NO: 891778 - DNA, 15 bp, Homo sapiens
tagataaagcacttt

SEQ ID NO: 891779 - DNA, 15 bp, Homo sapiens
agataaagcactttt

SEQ ID NO: 891780 - DNA, 15 bp, Homo sapiens
gataaagcacttttt

SEQ ID NO: 891781 - DNA, 15 bp, Homo sapiens
ataaagcactttttt

SEQ ID NO: 891782 - DNA, 15 bp, Homo sapiens
taaagcacttttttt

SEQ ID NO: 891783 - DNA, 15 bp, Homo sapiens
aaagcactttttttg

SEQ ID NO: 891784 - DNA, 15 bp, Homo sapiens
aagcactttttttgt

SEQ ID NO: 891785 - DNA, 15 bp, Homo sapiens
agcactttttttgtt

SEQ ID NO: 891786 - DNA, 15 bp, Homo sapiens
gcactttttttgttt

SEQ ID NO: 891787 - DNA, 15 bp, Homo sapiens
cactttttttgtttg

SEQ ID NO: 891788 - DNA, 15 bp, Homo sapiens
actttttttgtttgt

SEQ ID NO: 891789 - DNA, 15 bp, Homo sapiens
ctttttttgtttgtt

SEQ ID NO: 891790 - DNA, 15 bp, Homo sapiens
tttttttgtttgttt

SEQ ID NO: 891791 - DNA, 15 bp, Homo sapiens
ttttttgtttgtttg

SEQ ID NO: 891792 - DNA, 15 bp, Homo sapiens
tttttgtttgtttgt

SEQ ID NO: 891793 - DNA, 15 bp, Homo sapiens
ttttgtttgtttgtt

SEQ ID NO: 891794 - DNA, 15 bp, Homo sapiens
tttgtttgtttgttt

SEQ ID NO: 891795 - DNA, 15 bp, Homo sapiens
ttgtttgtttgtttt

SEQ ID NO: 891796 - DNA, 15 bp, Homo sapiens
tgtttgtttgttttg

SEQ ID NO: 891797 - DNA, 15 bp, Homo sapiens
gtttgtttgttttgg

SEQ ID NO: 891798 - DNA, 15 bp, Homo sapiens
tttgtttgttttggt

SEQ ID NO: 891799 - DNA, 15 bp, Homo sapiens
ttgtttgttttggtt

SEQ ID NO: 891800 - DNA, 15 bp, Homo sapiens
tgtttgttttggttt

SEQ ID NO: 891801 - DNA, 15 bp, Homo sapiens
gtttgttttggttta

SEQ ID NO: 891802 - DNA, 15 bp, Homo sapiens
tttgttttggtttag

SEQ ID NO: 891803 - DNA, 15 bp, Homo sapiens
ttgttttggtttaga

SEQ ID NO: 891804 - DNA, 15 bp, Homo sapiens
tgttttggtttagat

SEQ ID NO: 891805 - DNA, 15 bp, Homo sapiens
gttttggtttagatg

SEQ ID NO: 891806 - DNA, 15 bp, Homo sapiens
ttttggtttagatgg

SEQ ID NO: 891807 - DNA, 15 bp, Homo sapiens
tttggtttagatgga

SEQ ID NO: 891808 - DNA, 15 bp, Homo sapiens
ttggtttagatggag

SEQ ID NO: 891809 - DNA, 15 bp, Homo sapiens
tggtttagatggagt

SEQ ID NO: 891810 - DNA, 15 bp, Homo sapiens
ggtttagatggagtc

SEQ ID NO: 891811 - DNA, 15 bp, Homo sapiens
gtttagatggagtct

SEQ ID NO: 891812 - DNA, 15 bp, Homo sapiens
tttagatggagtctc

SEQ ID NO: 891813 - DNA, 15 bp, Homo sapiens
ttagatggagtctca

SEQ ID NO: 891814 - DNA, 15 bp, Homo sapiens
tagatggagtctcac

SEQ ID NO: 891815 - DNA, 15 bp, Homo sapiens
agatggagtctcact

SEQ ID NO: 891816 - DNA, 15 bp, Homo sapiens
gatggagtctcactc

SEQ ID NO: 891817 - DNA, 15 bp, Homo sapiens
atggagtctcactct

SEQ ID NO: 891818 - DNA, 15 bp, Homo sapiens
tggagtctcactctg

SEQ ID NO: 891819 - DNA, 15 bp, Homo sapiens
ggagtctcactctgt

SEQ ID NO: 891820 - DNA, 15 bp, Homo sapiens
gagtctcactctgtc

SEQ ID NO: 891821 - DNA, 15 bp, Homo sapiens
agtctcactctgtcg

SEQ ID NO: 891822 - DNA, 15 bp, Homo sapiens
gtctcactctgtcgc

SEQ ID NO: 891823 - DNA, 15 bp, Homo sapiens
tctcactctgtcgcc

SEQ ID NO: 891824 - DNA, 15 bp, Homo sapiens
ctcactctgtcgccc

SEQ ID NO: 891825 - DNA, 15 bp, Homo sapiens
tcactctgtcgccca

SEQ ID NO: 891826 - DNA, 15 bp, Homo sapiens
cactctgtcgcccag

SEQ ID NO: 891827 - DNA, 15 bp, Homo sapiens
actctgtcgcccagg

SEQ ID NO: 891828 - DNA, 15 bp, Homo sapiens
ctctgtcgcccaggc

SEQ ID NO: 891829 - DNA, 15 bp, Homo sapiens
tctgtcgcccaggct

SEQ ID NO: 891830 - DNA, 15 bp, Homo sapiens
ctgtcgcccaggctg

SEQ ID NO: 891831 - DNA, 15 bp, Homo sapiens
tgtcgcccaggctgg

SEQ ID NO: 891832 - DNA, 15 bp, Homo sapiens
gtcgcccaggctgga

SEQ ID NO: 891833 - DNA, 15 bp, Homo sapiens
tcgcccaggctggag

SEQ ID NO: 891834 - DNA, 15 bp, Homo sapiens
cgcccaggctggagt

SEQ ID NO: 891835 - DNA, 15 bp, Homo sapiens
gcccaggctggagta

SEQ ID NO: 891836 - DNA, 15 bp, Homo sapiens
cccaggctggagtac

SEQ ID NO: 891837 - DNA, 15 bp, Homo sapiens
ccaggctggagtaca

SEQ ID NO: 891838 - DNA, 15 bp, Homo sapiens
caggctggagtacag

SEQ ID NO: 891839 - DNA, 15 bp, Homo sapiens
aggctggagtacagt

SEQ ID NO: 891840 - DNA, 15 bp, Homo sapiens
ggctggagtacagtg

SEQ ID NO: 891841 - DNA, 15 bp, Homo sapiens
gctggagtacagtgg

SEQ ID NO: 891842 - DNA, 15 bp, Homo sapiens
ctggagtacagtggc

SEQ ID NO: 891843 - DNA, 15 bp, Homo sapiens
tggagtacagtggct

SEQ ID NO: 891844 - DNA, 15 bp, Homo sapiens
ggagtacagtggctc

SEQ ID NO: 891845 - DNA, 15 bp, Homo sapiens
gagtacagtggctca

SEQ ID NO: 891846 - DNA, 15 bp, Homo sapiens
agtacagtggctcaa

SEQ ID NO: 891847 - DNA, 15 bp, Homo sapiens
gtacagtggctcaat

SEQ ID NO: 891848 - DNA, 15 bp, Homo sapiens
tacagtggctcaatc

SEQ ID NO: 891849 - DNA, 15 bp, Homo sapiens
acagtggctcaatct

SEQ ID NO: 891850 - DNA, 15 bp, Homo sapiens
cagtggctcaatctc

SEQ ID NO: 891851 - DNA, 15 bp, Homo sapiens
agtggctcaatctca

SEQ ID NO: 891852 - DNA, 15 bp, Homo sapiens
gtggctcaatctcag

SEQ ID NO: 891853 - DNA, 15 bp, Homo sapiens
tggctcaatctcagc

SEQ ID NO: 891854 - DNA, 15 bp, Homo sapiens
ggctcaatctcagct

SEQ ID NO: 891855 - DNA, 15 bp, Homo sapiens
gctcaatctcagctc

SEQ ID NO: 891856 - DNA, 15 bp, Homo sapiens
ctcaatctcagctca

SEQ ID NO: 891857 - DNA, 15 bp, Homo sapiens
tcaatctcagctcac

SEQ ID NO: 891858 - DNA, 15 bp, Homo sapiens
caatctcagctcact

SEQ ID NO: 891859 - DNA, 15 bp, Homo sapiens
aatctcagctcactg

SEQ ID NO: 891860 - DNA, 15 bp, Homo sapiens
atctcagctcactgc

SEQ ID NO: 891861 - DNA, 15 bp, Homo sapiens
tctcagctcactgcg

SEQ ID NO: 891862 - DNA, 15 bp, Homo sapiens
ctcagctcactgcga

SEQ ID NO: 891863 - DNA, 15 bp, Homo sapiens
tcagctcactgcgac

SEQ ID NO: 891864 - DNA, 15 bp, Homo sapiens
cagctcactgcgacc

SEQ ID NO: 891865 - DNA, 15 bp, Homo sapiens
agctcactgcgacct

SEQ ID NO: 891866 - DNA, 15 bp, Homo sapiens
gctcactgcgacctc

SEQ ID NO: 891867 - DNA, 15 bp, Homo sapiens
ctcactgcgacctcc

SEQ ID NO: 891868 - DNA, 15 bp, Homo sapiens
tcactgcgacctccg

SEQ ID NO: 891869 - DNA, 15 bp, Homo sapiens
cactgcgacctccgc

SEQ ID NO: 891870 - DNA, 15 bp, Homo sapiens
actgcgacctccgcc

SEQ ID NO: 891871 - DNA, 15 bp, Homo sapiens
ctgcgacctccgcct

SEQ ID NO: 891872 - DNA, 15 bp, Homo sapiens
tgcgacctccgcctc

SEQ ID NO: 891873 - DNA, 15 bp, Homo sapiens
gcgacctccgcctcc

SEQ ID NO: 891874 - DNA, 15 bp, Homo sapiens
cgacctccgcctcct

SEQ ID NO: 891875 - DNA, 15 bp, Homo sapiens
gacctccgcctcctg

SEQ ID NO: 891876 - DNA, 15 bp, Homo sapiens
acctccgcctcctgg

SEQ ID NO: 891877 - DNA, 15 bp, Homo sapiens
cctccgcctcctgga

SEQ ID NO: 891878 - DNA, 15 bp, Homo sapiens
ctccgcctcctggat

SEQ ID NO: 891879 - DNA, 15 bp, Homo sapiens
tccgcctcctggatt

SEQ ID NO: 891880 - DNA, 15 bp, Homo sapiens
ccgcctcctggattc

SEQ ID NO: 891881 - DNA, 15 bp, Homo sapiens
cgcctcctggattca

SEQ ID NO: 891882 - DNA, 15 bp, Homo sapiens
gcctcctggattcaa

SEQ ID NO: 891883 - DNA, 15 bp, Homo sapiens
cctcctggattcaag

SEQ ID NO: 891884 - DNA, 15 bp, Homo sapiens
ctcctggattcaagt

SEQ ID NO: 891885 - DNA, 15 bp, Homo sapiens
tcctggattcaagtg

SEQ ID NO: 891886 - DNA, 15 bp, Homo sapiens
cctggattcaagtga

SEQ ID NO: 891887 - DNA, 15 bp, Homo sapiens
ctggattcaagtgat

SEQ ID NO: 891888 - DNA, 15 bp, Homo sapiens
tggattcaagtgatt

SEQ ID NO: 891889 - DNA, 15 bp, Homo sapiens
ggattcaagtgattt

SEQ ID NO: 891890 - DNA, 15 bp, Homo sapiens
gattcaagtgatttt

SEQ ID NO: 891891 - DNA, 15 bp, Homo sapiens
attcaagtgattttc

SEQ ID NO: 891892 - DNA, 15 bp, Homo sapiens
ttcaagtgattttca

SEQ ID NO: 891893 - DNA, 15 bp, Homo sapiens
tcaagtgattttcat

SEQ ID NO: 891894 - DNA, 15 bp, Homo sapiens
caagtgattttcatg

SEQ ID NO: 891895 - DNA, 15 bp, Homo sapiens
aagtgattttcatgc

SEQ ID NO: 891896 - DNA, 15 bp, Homo sapiens
agtgattttcatgcc

SEQ ID NO: 891897 - DNA, 15 bp, Homo sapiens
gtgattttcatgcct

SEQ ID NO: 891898 - DNA, 15 bp, Homo sapiens
tgattttcatgcctc

SEQ ID NO: 891899 - DNA, 15 bp, Homo sapiens
gattttcatgcctcg

SEQ ID NO: 891900 - DNA, 15 bp, Homo sapiens
attttcatgcctcgg

SEQ ID NO: 891901 - DNA, 15 bp, Homo sapiens
ttttcatgcctcggc

SEQ ID NO: 891902 - DNA, 15 bp, Homo sapiens
tttcatgcctcggct

SEQ ID NO: 891903 - DNA, 15 bp, Homo sapiens
ttcatgcctcggctt

SEQ ID NO: 891904 - DNA, 15 bp, Homo sapiens
tcatgcctcggcttc

SEQ ID NO: 891905 - DNA, 15 bp, Homo sapiens
catgcctcggcttcc

SEQ ID NO: 891906 - DNA, 15 bp, Homo sapiens
atgcctcggcttccc

SEQ ID NO: 891907 - DNA, 15 bp, Homo sapiens
tgcctcggcttccca

SEQ ID NO: 891908 - DNA, 15 bp, Homo sapiens
gcctcggcttcccag

SEQ ID NO: 891909 - DNA, 15 bp, Homo sapiens
cctcggcttcccaga

SEQ ID NO: 891910 - DNA, 15 bp, Homo sapiens
ctcggcttcccagaa

SEQ ID NO: 891911 - DNA, 15 bp, Homo sapiens
tcggcttcccagaat

SEQ ID NO: 891912 - DNA, 15 bp, Homo sapiens
cggcttcccagaata

SEQ ID NO: 891913 - DNA, 15 bp, Homo sapiens
ggcttcccagaatag

SEQ ID NO: 891914 - DNA, 15 bp, Homo sapiens
gcttcccagaatagc

SEQ ID NO: 891915 - DNA, 15 bp, Homo sapiens
cttcccagaatagct

SEQ ID NO: 891916 - DNA, 15 bp, Homo sapiens
ttcccagaatagctg

SEQ ID NO: 891917 - DNA, 15 bp, Homo sapiens
tcccagaatagctgg

SEQ ID NO: 891918 - DNA, 15 bp, Homo sapiens
cccagaatagctggg

SEQ ID NO: 891919 - DNA, 15 bp, Homo sapiens
ccagaatagctggga

SEQ ID NO: 891920 - DNA, 15 bp, Homo sapiens
cagaatagctgggat

SEQ ID NO: 891921 - DNA, 15 bp, Homo sapiens
agaatagctgggatt

SEQ ID NO: 891922 - DNA, 15 bp, Homo sapiens
gaatagctgggatta

SEQ ID NO: 891923 - DNA, 15 bp, Homo sapiens
aatagctgggattat

SEQ ID NO: 891924 - DNA, 15 bp, Homo sapiens
atagctgggattata

SEQ ID NO: 891925 - DNA, 15 bp, Homo sapiens
tagctgggattatag

SEQ ID NO: 891926 - DNA, 15 bp, Homo sapiens
agctgggattatagg

SEQ ID NO: 891927 - DNA, 15 bp, Homo sapiens
gctgggattataggc

SEQ ID NO: 891928 - DNA, 15 bp, Homo sapiens
ctgggattataggca

SEQ ID NO: 891929 - DNA, 15 bp, Homo sapiens
tgggattataggcac

SEQ ID NO: 891930 - DNA, 15 bp, Homo sapiens
gggattataggcacc

SEQ ID NO: 891931 - DNA, 15 bp, Homo sapiens
ggattataggcacct

SEQ ID NO: 891932 - DNA, 15 bp, Homo sapiens
gattataggcacctg

SEQ ID NO: 891933 - DNA, 15 bp, Homo sapiens
attataggcacctgc

SEQ ID NO: 891934 - DNA, 15 bp, Homo sapiens
ttataggcacctgcc

SEQ ID NO: 891935 - DNA, 15 bp, Homo sapiens
tataggcacctgcca

SEQ ID NO: 891936 - DNA, 15 bp, Homo sapiens
ataggcacctgccat

SEQ ID NO: 891937 - DNA, 15 bp, Homo sapiens
taggcacctgccatc

SEQ ID NO: 891938 - DNA, 15 bp, Homo sapiens
aggcacctgccatcg

SEQ ID NO: 891939 - DNA, 15 bp, Homo sapiens
ggcacctgccatcgt

SEQ ID NO: 891940 - DNA, 15 bp, Homo sapiens
gcacctgccatcgtg

SEQ ID NO: 891941 - DNA, 15 bp, Homo sapiens
cacctgccatcgtgc

SEQ ID NO: 891942 - DNA, 15 bp, Homo sapiens
acctgccatcgtgcc

SEQ ID NO: 891943 - DNA, 15 bp, Homo sapiens
cctgccatcgtgccc

SEQ ID NO: 891944 - DNA, 15 bp, Homo sapiens
ctgccatcgtgccca

SEQ ID NO: 891945 - DNA, 15 bp, Homo sapiens
tgccatcgtgcccag

SEQ ID NO: 891946 - DNA, 15 bp, Homo sapiens
gccatcgtgcccagc

SEQ ID NO: 891947 - DNA, 15 bp, Homo sapiens
ccatcgtgcccagct

SEQ ID NO: 891948 - DNA, 15 bp, Homo sapiens
catcgtgcccagcta

SEQ ID NO: 891949 - DNA, 15 bp, Homo sapiens
atcgtgcccagctaa

SEQ ID NO: 891950 - DNA, 15 bp, Homo sapiens
tcgtgcccagctaat

SEQ ID NO: 891951 - DNA, 15 bp, Homo sapiens
cgtgcccagctaatt

SEQ ID NO: 891952 - DNA, 15 bp, Homo sapiens
gtgcccagctaattt

SEQ ID NO: 891953 - DNA, 15 bp, Homo sapiens
tgcccagctaatttt

SEQ ID NO: 891954 - DNA, 15 bp, Homo sapiens
gcccagctaattttt

SEQ ID NO: 891955 - DNA, 15 bp, Homo sapiens
cccagctaatttttg

SEQ ID NO: 891956 - DNA, 15 bp, Homo sapiens
ccagctaatttttgt

SEQ ID NO: 891957 - DNA, 15 bp, Homo sapiens
cagctaatttttgta

SEQ ID NO: 891958 - DNA, 15 bp, Homo sapiens
agctaatttttgtat

SEQ ID NO: 891959 - DNA, 15 bp, Homo sapiens
gctaatttttgtatt

SEQ ID NO: 891960 - DNA, 15 bp, Homo sapiens
ctaatttttgtattt

SEQ ID NO: 891961 - DNA, 15 bp, Homo sapiens
taatttttgtatttt

SEQ ID NO: 891962 - DNA, 15 bp, Homo sapiens
aatttttgtattttt

SEQ ID NO: 891963 - DNA, 15 bp, Homo sapiens
atttttgtattttta

SEQ ID NO: 891964 - DNA, 15 bp, Homo sapiens
tttttgtatttttag

SEQ ID NO: 891965 - DNA, 15 bp, Homo sapiens
ttttgtatttttagt

SEQ ID NO: 891966 - DNA, 15 bp, Homo sapiens
tttgtatttttagta

SEQ ID NO: 891967 - DNA, 15 bp, Homo sapiens
ttgtatttttagtag

SEQ ID NO: 891968 - DNA, 15 bp, Homo sapiens
tgtatttttagtaga

SEQ ID NO: 891969 - DNA, 15 bp, Homo sapiens
gtatttttagtagaa

SEQ ID NO: 891970 - DNA, 15 bp, Homo sapiens
tatttttagtagaaa

SEQ ID NO: 891971 - DNA, 15 bp, Homo sapiens
atttttagtagaaac

SEQ ID NO: 891972 - DNA, 15 bp, Homo sapiens
tttttagtagaaacg

SEQ ID NO: 891973 - DNA, 15 bp, Homo sapiens
ttttagtagaaacgg

SEQ ID NO: 891974 - DNA, 15 bp, Homo sapiens
tttagtagaaacggg

SEQ ID NO: 891975 - DNA, 15 bp, Homo sapiens
ttagtagaaacgggg

SEQ ID NO: 891976 - DNA, 15 bp, Homo sapiens
tagtagaaacggggt

SEQ ID NO: 891977 - DNA, 15 bp, Homo sapiens
agtagaaacggggtt

SEQ ID NO: 891978 - DNA, 15 bp, Homo sapiens
gtagaaacggggttt

SEQ ID NO: 891979 - DNA, 15 bp, Homo sapiens
tagaaacggggtttc

SEQ ID NO: 891980 - DNA, 15 bp, Homo sapiens
agaaacggggtttcg

SEQ ID NO: 891981 - DNA, 15 bp, Homo sapiens
gaaacggggtttcgc

SEQ ID NO: 891982 - DNA, 15 bp, Homo sapiens
aaacggggtttcgcc

SEQ ID NO: 891983 - DNA, 15 bp, Homo sapiens
aacggggtttcgcca

SEQ ID NO: 891984 - DNA, 15 bp, Homo sapiens
acggggtttcgccat

SEQ ID NO: 891985 - DNA, 15 bp, Homo sapiens
cggggtttcgccatg

SEQ ID NO: 891986 - DNA, 15 bp, Homo sapiens
ggggtttcgccatgt

SEQ ID NO: 891987 - DNA, 15 bp, Homo sapiens
gggtttcgccatgtt

SEQ ID NO: 891988 - DNA, 15 bp, Homo sapiens
ggtttcgccatgttg

SEQ ID NO: 891989 - DNA, 15 bp, Homo sapiens
gtttcgccatgttgg

SEQ ID NO: 891990 - DNA, 15 bp, Homo sapiens
tttcgccatgttggc

SEQ ID NO: 891991 - DNA, 15 bp, Homo sapiens
ttcgccatgttggcc

SEQ ID NO: 891992 - DNA, 15 bp, Homo sapiens
tcgccatgttggcca

SEQ ID NO: 891993 - DNA, 15 bp, Homo sapiens
cgccatgttggccag

SEQ ID NO: 891994 - DNA, 15 bp, Homo sapiens
gccatgttggccagg

SEQ ID NO: 891995 - DNA, 15 bp, Homo sapiens
ccatgttggccaggc

SEQ ID NO: 891996 - DNA, 15 bp, Homo sapiens
catgttggccaggct

SEQ ID NO: 891997 - DNA, 15 bp, Homo sapiens
atgttggccaggctg

SEQ ID NO: 891998 - DNA, 15 bp, Homo sapiens
tgttggccaggctgg

SEQ ID NO: 891999 - DNA, 15 bp, Homo sapiens
gttggccaggctggt

SEQ ID NO: 892000 - DNA, 15 bp, Homo sapiens
ttggccaggctggtc

SEQ ID NO: 892001 - DNA, 15 bp, Homo sapiens
tggccaggctggtct

SEQ ID NO: 892002 - DNA, 15 bp, Homo sapiens
ggccaggctggtctc

SEQ ID NO: 892003 - DNA, 15 bp, Homo sapiens
gccaggctggtctcg

SEQ ID NO: 892004 - DNA, 15 bp, Homo sapiens
ccaggctggtctcga

SEQ ID NO: 892005 - DNA, 15 bp, Homo sapiens
caggctggtctcgaa

SEQ ID NO: 892006 - DNA, 15 bp, Homo sapiens
aggctggtctcgaac

SEQ ID NO: 892007 - DNA, 15 bp, Homo sapiens
ggctggtctcgaact

SEQ ID NO: 892008 - DNA, 15 bp, Homo sapiens
gctggtctcgaacta

SEQ ID NO: 892009 - DNA, 15 bp, Homo sapiens
ctggtctcgaactac

SEQ ID NO: 892010 - DNA, 15 bp, Homo sapiens
tggtctcgaactact

SEQ ID NO: 892011 - DNA, 15 bp, Homo sapiens
ggtctcgaactactg

SEQ ID NO: 892012 - DNA, 15 bp, Homo sapiens
gtctcgaactactgg

SEQ ID NO: 892013 - DNA, 15 bp, Homo sapiens
tctcgaactactggc

SEQ ID NO: 892014 - DNA, 15 bp, Homo sapiens
ctcgaactactggcc

SEQ ID NO: 892015 - DNA, 15 bp, Homo sapiens
tcgaactactggcct

SEQ ID NO: 892016 - DNA, 15 bp, Homo sapiens
cgaactactggcctc

SEQ ID NO: 892017 - DNA, 15 bp, Homo sapiens
gaactactggcctca

SEQ ID NO: 892018 - DNA, 15 bp, Homo sapiens
aactactggcctcaa

SEQ ID NO: 892019 - DNA, 15 bp, Homo sapiens
actactggcctcaaa

SEQ ID NO: 892020 - DNA, 15 bp, Homo sapiens
ctactggcctcaaat

SEQ ID NO: 892021 - DNA, 15 bp, Homo sapiens
tactggcctcaaatg

SEQ ID NO: 892022 - DNA, 15 bp, Homo sapiens
actggcctcaaatga

SEQ ID NO: 892023 - DNA, 15 bp, Homo sapiens
ctggcctcaaatgaa

SEQ ID NO: 892024 - DNA, 15 bp, Homo sapiens
tggcctcaaatgaac

SEQ ID NO: 892025 - DNA, 15 bp, Homo sapiens
ggcctcaaatgaacc

SEQ ID NO: 892026 - DNA, 15 bp, Homo sapiens
gcctcaaatgaaccg

SEQ ID NO: 892027 - DNA, 15 bp, Homo sapiens
cctcaaatgaaccgc

SEQ ID NO: 892028 - DNA, 15 bp, Homo sapiens
ctcaaatgaaccgcc

SEQ ID NO: 892029 - DNA, 15 bp, Homo sapiens
tcaaatgaaccgcct

SEQ ID NO: 892030 - DNA, 15 bp, Homo sapiens
caaatgaaccgcctg

SEQ ID NO: 892031 - DNA, 15 bp, Homo sapiens
aaatgaaccgcctgc

SEQ ID NO: 892032 - DNA, 15 bp, Homo sapiens
aatgaaccgcctgcc

SEQ ID NO: 892033 - DNA, 15 bp, Homo sapiens
atgaaccgcctgcct

SEQ ID NO: 892034 - DNA, 15 bp, Homo sapiens
tgaaccgcctgcctt

SEQ ID NO: 892035 - DNA, 15 bp, Homo sapiens
gaaccgcctgccttg

SEQ ID NO: 892036 - DNA, 15 bp, Homo sapiens
aaccgcctgccttgg

SEQ ID NO: 892037 - DNA, 15 bp, Homo sapiens
accgcctgccttggt

SEQ ID NO: 892038 - DNA, 15 bp, Homo sapiens
ccgcctgccttggtc

SEQ ID NO: 892039 - DNA, 15 bp, Homo sapiens
cgcctgccttggtct

SEQ ID NO: 892040 - DNA, 15 bp, Homo sapiens
gcctgccttggtctc

SEQ ID NO: 892041 - DNA, 15 bp, Homo sapiens
cctgccttggtctcg

SEQ ID NO: 892042 - DNA, 15 bp, Homo sapiens
ctgccttggtctcga

SEQ ID NO: 892043 - DNA, 15 bp, Homo sapiens
tgccttggtctcgaa

SEQ ID NO: 892044 - DNA, 15 bp, Homo sapiens
gccttggtctcgaaa

SEQ ID NO: 892045 - DNA, 15 bp, Homo sapiens
ccttggtctcgaaaa

SEQ ID NO: 892046 - DNA, 15 bp, Homo sapiens
cttggtctcgaaaag

SEQ ID NO: 892047 - DNA, 15 bp, Homo sapiens
ttggtctcgaaaagt

SEQ ID NO: 892048 - DNA, 15 bp, Homo sapiens
tggtctcgaaaagtg

SEQ ID NO: 892049 - DNA, 15 bp, Homo sapiens
ggtctcgaaaagtgc

SEQ ID NO: 892050 - DNA, 15 bp, Homo sapiens
gtctcgaaaagtgct

SEQ ID NO: 892051 - DNA, 15 bp, Homo sapiens
tctcgaaaagtgcta

SEQ ID NO: 892052 - DNA, 15 bp, Homo sapiens
ctcgaaaagtgctag

SEQ ID NO: 892053 - DNA, 15 bp, Homo sapiens
tcgaaaagtgctagg

SEQ ID NO: 892054 - DNA, 15 bp, Homo sapiens
cgaaaagtgctagga

SEQ ID NO: 892055 - DNA, 15 bp, Homo sapiens
gaaaagtgctaggat

SEQ ID NO: 892056 - DNA, 15 bp, Homo sapiens
aaaagtgctaggatt

SEQ ID NO: 892057 - DNA, 15 bp, Homo sapiens
aaagtgctaggatta

SEQ ID NO: 892058 - DNA, 15 bp, Homo sapiens
aagtgctaggattac

SEQ ID NO: 892059 - DNA, 15 bp, Homo sapiens
agtgctaggattaca

SEQ ID NO: 892060 - DNA, 15 bp, Homo sapiens
gtgctaggattacag

SEQ ID NO: 892061 - DNA, 15 bp, Homo sapiens
tgctaggattacagg

SEQ ID NO: 892062 - DNA, 15 bp, Homo sapiens
gctaggattacaggc

SEQ ID NO: 892063 - DNA, 15 bp, Homo sapiens
ctaggattacaggca

SEQ ID NO: 892064 - DNA, 15 bp, Homo sapiens
taggattacaggcat

SEQ ID NO: 892065 - DNA, 15 bp, Homo sapiens
aggattacaggcatg

SEQ ID NO: 892066 - DNA, 15 bp, Homo sapiens
ggattacaggcatga

SEQ ID NO: 892067 - DNA, 15 bp, Homo sapiens
gattacaggcatgag

SEQ ID NO: 892068 - DNA, 15 bp, Homo sapiens
attacaggcatgagc

SEQ ID NO: 892069 - DNA, 15 bp, Homo sapiens
ttacaggcatgagcc

SEQ ID NO: 892070 - DNA, 15 bp, Homo sapiens
tacaggcatgagcca

SEQ ID NO: 892071 - DNA, 15 bp, Homo sapiens
acaggcatgagccac

SEQ ID NO: 892072 - DNA, 15 bp, Homo sapiens
caggcatgagccacc

SEQ ID NO: 892073 - DNA, 15 bp, Homo sapiens
aggcatgagccacca

SEQ ID NO: 892074 - DNA, 15 bp, Homo sapiens
ggcatgagccaccat

SEQ ID NO: 892075 - DNA, 15 bp, Homo sapiens
gcatgagccaccatg

SEQ ID NO: 892076 - DNA, 15 bp, Homo sapiens
catgagccaccatgc

SEQ ID NO: 892077 - DNA, 15 bp, Homo sapiens
atgagccaccatgcc

SEQ ID NO: 892078 - DNA, 15 bp, Homo sapiens
tgagccaccatgccc

SEQ ID NO: 892079 - DNA, 15 bp, Homo sapiens
gagccaccatgccct

SEQ ID NO: 892080 - DNA, 15 bp, Homo sapiens
agccaccatgcccta

SEQ ID NO: 892081 - DNA, 15 bp, Homo sapiens
gccaccatgccctac

SEQ ID NO: 892082 - DNA, 15 bp, Homo sapiens
ccaccatgccctacc

SEQ ID NO: 892083 - DNA, 15 bp, Homo sapiens
caccatgccctacct

SEQ ID NO: 892084 - DNA, 15 bp, Homo sapiens
accatgccctaccta

SEQ ID NO: 892085 - DNA, 15 bp, Homo sapiens
ccatgccctacctag

SEQ ID NO: 892086 - DNA, 15 bp, Homo sapiens
catgccctacctaga

SEQ ID NO: 892087 - DNA, 15 bp, Homo sapiens
atgccctacctagat

SEQ ID NO: 892088 - DNA, 15 bp, Homo sapiens
tgccctacctagata

SEQ ID NO: 892089 - DNA, 15 bp, Homo sapiens
gccctacctagataa

SEQ ID NO: 892090 - DNA, 15 bp, Homo sapiens
ccctacctagataaa

SEQ ID NO: 892091 - DNA, 15 bp, Homo sapiens
cctacctagataaag

SEQ ID NO: 892092 - DNA, 15 bp, Homo sapiens
ctacctagataaagc

SEQ ID NO: 892093 - DNA, 15 bp, Homo sapiens
tacctagataaagca

SEQ ID NO: 892094 - DNA, 15 bp, Homo sapiens
acctagataaagcat

SEQ ID NO: 892095 - DNA, 15 bp, Homo sapiens
cctagataaagcatt

SEQ ID NO: 892096 - DNA, 15 bp, Homo sapiens
ctagataaagcattt

SEQ ID NO: 892097 - DNA, 15 bp, Homo sapiens
tagataaagcatttc

SEQ ID NO: 892098 - DNA, 15 bp, Homo sapiens
agataaagcatttct

SEQ ID NO: 892099 - DNA, 15 bp, Homo sapiens
gataaagcatttcta

SEQ ID NO: 892100 - DNA, 15 bp, Homo sapiens
ataaagcatttctaa

SEQ ID NO: 892101 - DNA, 15 bp, Homo sapiens
taaagcatttctaaa

SEQ ID NO: 892102 - DNA, 15 bp, Homo sapiens
aaagcatttctaaac

SEQ ID NO: 892103 - DNA, 15 bp, Homo sapiens
aagcatttctaaact

SEQ ID NO: 892104 - DNA, 15 bp, Homo sapiens
agcatttctaaactc

SEQ ID NO: 892105 - DNA, 15 bp, Homo sapiens
gcatttctaaactct

SEQ ID NO: 892106 - DNA, 15 bp, Homo sapiens
catttctaaactctc

SEQ ID NO: 892107 - DNA, 15 bp, Homo sapiens
atttctaaactctcc

SEQ ID NO: 892108 - DNA, 15 bp, Homo sapiens
tttctaaactctcct

SEQ ID NO: 892109 - DNA, 15 bp, Homo sapiens
ttctaaactctcctg

SEQ ID NO: 892110 - DNA, 15 bp, Homo sapiens
tctaaactctcctgt

SEQ ID NO: 892111 - DNA, 15 bp, Homo sapiens
ctaaactctcctgta

SEQ ID NO: 892112 - DNA, 15 bp, Homo sapiens
taaactctcctgtaa

SEQ ID NO: 892113 - DNA, 15 bp, Homo sapiens
aaactctcctgtaac

SEQ ID NO: 892114 - DNA, 15 bp, Homo sapiens
aactctcctgtaaca

SEQ ID NO: 892115 - DNA, 15 bp, Homo sapiens
actctcctgtaacac

SEQ ID NO: 892116 - DNA, 15 bp, Homo sapiens
ctctcctgtaacact

SEQ ID NO: 892117 - DNA, 15 bp, Homo sapiens
tctcctgtaacactc

SEQ ID NO: 892118 - DNA, 15 bp, Homo sapiens
ctcctgtaacactcc

SEQ ID NO: 892119 - DNA, 15 bp, Homo sapiens
tcctgtaacactcca

SEQ ID NO: 892120 - DNA, 15 bp, Homo sapiens
cctgtaacactccat

SEQ ID NO: 892121 - DNA, 15 bp, Homo sapiens
ctgtaacactccata

SEQ ID NO: 892122 - DNA, 15 bp, Homo sapiens
tgtaacactccatat

SEQ ID NO: 892123 - DNA, 15 bp, Homo sapiens
gtaacactccatata

SEQ ID NO: 892124 - DNA, 15 bp, Homo sapiens
taacactccatatag

SEQ ID NO: 892125 - DNA, 15 bp, Homo sapiens
aacactccatatagc

SEQ ID NO: 892126 - DNA, 15 bp, Homo sapiens
acactccatatagca

SEQ ID NO: 892127 - DNA, 15 bp, Homo sapiens
cactccatatagcaa

SEQ ID NO: 892128 - DNA, 15 bp, Homo sapiens
actccatatagcaat

SEQ ID NO: 892129 - DNA, 15 bp, Homo sapiens
ctccatatagcaatc

SEQ ID NO: 892130 - DNA, 15 bp, Homo sapiens
tccatatagcaatct

SEQ ID NO: 892131 - DNA, 15 bp, Homo sapiens
ccatatagcaatctc

SEQ ID NO: 892132 - DNA, 15 bp, Homo sapiens
catatagcaatctca

SEQ ID NO: 892133 - DNA, 15 bp, Homo sapiens
atatagcaatctcag

SEQ ID NO: 892134 - DNA, 15 bp, Homo sapiens
tatagcaatctcagg

SEQ ID NO: 892135 - DNA, 15 bp, Homo sapiens
atagcaatctcaggt

SEQ ID NO: 892136 - DNA, 15 bp, Homo sapiens
tagcaatctcaggtg

SEQ ID NO: 892137 - DNA, 15 bp, Homo sapiens
agcaatctcaggtgt

SEQ ID NO: 892138 - DNA, 15 bp, Homo sapiens
gcaatctcaggtgtt

SEQ ID NO: 892139 - DNA, 15 bp, Homo sapiens
caatctcaggtgttt

SEQ ID NO: 892140 - DNA, 15 bp, Homo sapiens
aatctcaggtgtttt

SEQ ID NO: 892141 - DNA, 15 bp, Homo sapiens
atctcaggtgtttta

SEQ ID NO: 892142 - DNA, 15 bp, Homo sapiens
tctcaggtgttttaa

SEQ ID NO: 892143 - DNA, 15 bp, Homo sapiens
ctcaggtgttttaat

SEQ ID NO: 892144 - DNA, 15 bp, Homo sapiens
tcaggtgttttaatt

SEQ ID NO: 892145 - DNA, 15 bp, Homo sapiens
caggtgttttaattc

SEQ ID NO: 892146 - DNA, 15 bp, Homo sapiens
aggtgttttaattct

SEQ ID NO: 892147 - DNA, 15 bp, Homo sapiens
ggtgttttaattctc

SEQ ID NO: 892148 - DNA, 15 bp, Homo sapiens
gtgttttaattctca

SEQ ID NO: 892149 - DNA, 15 bp, Homo sapiens
tgttttaattctcac

SEQ ID NO: 892150 - DNA, 15 bp, Homo sapiens
gttttaattctcact

SEQ ID NO: 892151 - DNA, 15 bp, Homo sapiens
ttttaattctcactg

SEQ ID NO: 892152 - DNA, 15 bp, Homo sapiens
tttaattctcactgg

SEQ ID NO: 892153 - DNA, 15 bp, Homo sapiens
ttaattctcactggt

SEQ ID NO: 892154 - DNA, 15 bp, Homo sapiens
taattctcactggtt

SEQ ID NO: 892155 - DNA, 15 bp, Homo sapiens
aattctcactggttt

SEQ ID NO: 892156 - DNA, 15 bp, Homo sapiens
attctcactggttta

SEQ ID NO: 892157 - DNA, 15 bp, Homo sapiens
ttctcactggtttaa

SEQ ID NO: 892158 - DNA, 15 bp, Homo sapiens
tctcactggtttaat

SEQ ID NO: 892159 - DNA, 15 bp, Homo sapiens
ctcactggtttaatc

SEQ ID NO: 892160 - DNA, 15 bp, Homo sapiens
tcactggtttaatcc

SEQ ID NO: 892161 - DNA, 15 bp, Homo sapiens
cactggtttaatcct

SEQ ID NO: 892162 - DNA, 15 bp, Homo sapiens
actggtttaatccta

SEQ ID NO: 892163 - DNA, 15 bp, Homo sapiens
ctggtttaatcctac

SEQ ID NO: 892164 - DNA, 15 bp, Homo sapiens
tggtttaatcctacc

SEQ ID NO: 892165 - DNA, 15 bp, Homo sapiens
ggtttaatcctacca

SEQ ID NO: 892166 - DNA, 15 bp, Homo sapiens
gtttaatcctaccac

SEQ ID NO: 892167 - DNA, 15 bp, Homo sapiens
tttaatcctaccact

SEQ ID NO: 892168 - DNA, 15 bp, Homo sapiens
ttaatcctaccacta

SEQ ID NO: 892169 - DNA, 15 bp, Homo sapiens
taatcctaccactat

SEQ ID NO: 892170 - DNA, 15 bp, Homo sapiens
aatcctaccactatc

SEQ ID NO: 892171 - DNA, 15 bp, Homo sapiens
atcctaccactatca

SEQ ID NO: 892172 - DNA, 15 bp, Homo sapiens
tcctaccactatcac

SEQ ID NO: 892173 - DNA, 15 bp, Homo sapiens
cctaccactatcacc

SEQ ID NO: 892174 - DNA, 15 bp, Homo sapiens
ctaccactatcacca

SEQ ID NO: 892175 - DNA, 15 bp, Homo sapiens
taccactatcaccag

SEQ ID NO: 892176 - DNA, 15 bp, Homo sapiens
accactatcaccagc

SEQ ID NO: 892177 - DNA, 15 bp, Homo sapiens
ccactatcaccagca

SEQ ID NO: 892178 - DNA, 15 bp, Homo sapiens
cactatcaccagcaa

SEQ ID NO: 892179 - DNA, 15 bp, Homo sapiens
actatcaccagcaac

SEQ ID NO: 892180 - DNA, 15 bp, Homo sapiens
ctatcaccagcaact

SEQ ID NO: 892181 - DNA, 15 bp, Homo sapiens
tatcaccagcaactg

SEQ ID NO: 892182 - DNA, 15 bp, Homo sapiens
atcaccagcaactgt

SEQ ID NO: 892183 - DNA, 15 bp, Homo sapiens
tcaccagcaactgta

SEQ ID NO: 892184 - DNA, 15 bp, Homo sapiens
caccagcaactgtaa

SEQ ID NO: 892185 - DNA, 15 bp, Homo sapiens
accagcaactgtaac

SEQ ID NO: 892186 - DNA, 15 bp, Homo sapiens
ccagcaactgtaaca

SEQ ID NO: 892187 - DNA, 15 bp, Homo sapiens
cagcaactgtaacag

SEQ ID NO: 892188 - DNA, 15 bp, Homo sapiens
agcaactgtaacagt

SEQ ID NO: 892189 - DNA, 15 bp, Homo sapiens
gcaactgtaacagtc

SEQ ID NO: 892190 - DNA, 15 bp, Homo sapiens
caactgtaacagtcc

SEQ ID NO: 892191 - DNA, 15 bp, Homo sapiens
aactgtaacagtccc

SEQ ID NO: 892192 - DNA, 15 bp, Homo sapiens
actgtaacagtcccc

SEQ ID NO: 892193 - DNA, 15 bp, Homo sapiens
ctgtaacagtccccc

SEQ ID NO: 892194 - DNA, 15 bp, Homo sapiens
tgtaacagtccccct

SEQ ID NO: 892195 - DNA, 15 bp, Homo sapiens
gtaacagtccccctt

SEQ ID NO: 892196 - DNA, 15 bp, Homo sapiens
taacagtcccccttt

SEQ ID NO: 892197 - DNA, 15 bp, Homo sapiens
aacagtccccctttg

SEQ ID NO: 892198 - DNA, 15 bp, Homo sapiens
acagtccccctttga

SEQ ID NO: 892199 - DNA, 15 bp, Homo sapiens
cagtccccctttgaa

SEQ ID NO: 892200 - DNA, 15 bp, Homo sapiens
agtccccctttgaaa

SEQ ID NO: 892201 - DNA, 15 bp, Homo sapiens
gtccccctttgaaat

SEQ ID NO: 892202 - DNA, 15 bp, Homo sapiens
tccccctttgaaatc

SEQ ID NO: 892203 - DNA, 15 bp, Homo sapiens
ccccctttgaaatca

SEQ ID NO: 892204 - DNA, 15 bp, Homo sapiens
cccctttgaaatcac

SEQ ID NO: 892205 - DNA, 15 bp, Homo sapiens
ccctttgaaatcact

SEQ ID NO: 892206 - DNA, 15 bp, Homo sapiens
cctttgaaatcactt

SEQ ID NO: 892207 - DNA, 15 bp, Homo sapiens
ctttgaaatcacttg

SEQ ID NO: 892208 - DNA, 15 bp, Homo sapiens
tttgaaatcacttgc

SEQ ID NO: 892209 - DNA, 15 bp, Homo sapiens
ttgaaatcacttgca

SEQ ID NO: 892210 - DNA, 15 bp, Homo sapiens
tgaaatcacttgcaa

SEQ ID NO: 892211 - DNA, 15 bp, Homo sapiens
gaaatcacttgcaag

SEQ ID NO: 892212 - DNA, 15 bp, Homo sapiens
aaatcacttgcaagt

SEQ ID NO: 892213 - DNA, 15 bp, Homo sapiens
aatcacttgcaagtg

SEQ ID NO: 892214 - DNA, 15 bp, Homo sapiens
atcacttgcaagtgt

SEQ ID NO: 892215 - DNA, 15 bp, Homo sapiens
tcacttgcaagtgtg

SEQ ID NO: 892216 - DNA, 15 bp, Homo sapiens
cacttgcaagtgtgt

SEQ ID NO: 892217 - DNA, 15 bp, Homo sapiens
acttgcaagtgtgtt

SEQ ID NO: 892218 - DNA, 15 bp, Homo sapiens
cttgcaagtgtgttc

SEQ ID NO: 892219 - DNA, 15 bp, Homo sapiens
ttgcaagtgtgttcc

SEQ ID NO: 892220 - DNA, 15 bp, Homo sapiens
tgcaagtgtgttcca

SEQ ID NO: 892221 - DNA, 15 bp, Homo sapiens
gcaagtgtgttccag

SEQ ID NO: 892222 - DNA, 15 bp, Homo sapiens
caagtgtgttccagt

SEQ ID NO: 892223 - DNA, 15 bp, Homo sapiens
aagtgtgttccagtt

SEQ ID NO: 892224 - DNA, 15 bp, Homo sapiens
agtgtgttccagtta

SEQ ID NO: 892225 - DNA, 15 bp, Homo sapiens
gtgtgttccagttac

SEQ ID NO: 892226 - DNA, 15 bp, Homo sapiens
tgtgttccagttact

SEQ ID NO: 892227 - DNA, 15 bp, Homo sapiens
gtgttccagttacta

SEQ ID NO: 892228 - DNA, 15 bp, Homo sapiens
tgttccagttactat

SEQ ID NO: 892229 - DNA, 15 bp, Homo sapiens
gttccagttactatg

SEQ ID NO: 892230 - DNA, 15 bp, Homo sapiens
ttccagttactatga

SEQ ID NO: 892231 - DNA, 15 bp, Homo sapiens
tccagttactatgac

SEQ ID NO: 892232 - DNA, 15 bp, Homo sapiens
ccagttactatgact

SEQ ID NO: 892233 - DNA, 15 bp, Homo sapiens
cagttactatgactg

SEQ ID NO: 892234 - DNA, 15 bp, Homo sapiens
agttactatgactgc

SEQ ID NO: 892235 - DNA, 15 bp, Homo sapiens
gttactatgactgca

SEQ ID NO: 892236 - DNA, 15 bp, Homo sapiens
ttactatgactgcat

SEQ ID NO: 892237 - DNA, 15 bp, Homo sapiens
tactatgactgcata

SEQ ID NO: 892238 - DNA, 15 bp, Homo sapiens
actatgactgcataa

SEQ ID NO: 892239 - DNA, 15 bp, Homo sapiens
ctatgactgcataac

SEQ ID NO: 892240 - DNA, 15 bp, Homo sapiens
tatgactgcataaca

SEQ ID NO: 892241 - DNA, 15 bp, Homo sapiens
atgactgcataacaa

SEQ ID NO: 892242 - DNA, 15 bp, Homo sapiens
tgactgcataacaaa

SEQ ID NO: 892243 - DNA, 15 bp, Homo sapiens
gactgcataacaaat

SEQ ID NO: 892244 - DNA, 15 bp, Homo sapiens
actgcataacaaatt

SEQ ID NO: 892245 - DNA, 15 bp, Homo sapiens
ctgcataacaaatta

SEQ ID NO: 892246 - DNA, 15 bp, Homo sapiens
tgcataacaaattac

SEQ ID NO: 892247 - DNA, 15 bp, Homo sapiens
gcataacaaattacc

SEQ ID NO: 892248 - DNA, 15 bp, Homo sapiens
cataacaaattaccc

SEQ ID NO: 892249 - DNA, 15 bp, Homo sapiens
ataacaaattacccc

SEQ ID NO: 892250 - DNA, 15 bp, Homo sapiens
taacaaattacccca

SEQ ID NO: 892251 - DNA, 15 bp, Homo sapiens
aacaaattaccccaa

SEQ ID NO: 892252 - DNA, 15 bp, Homo sapiens
acaaattaccccaaa

SEQ ID NO: 892253 - DNA, 15 bp, Homo sapiens
caaattaccccaaaa

SEQ ID NO: 892254 - DNA, 15 bp, Homo sapiens
aaattaccccaaaac

SEQ ID NO: 892255 - DNA, 15 bp, Homo sapiens
aattaccccaaaacg

SEQ ID NO: 892256 - DNA, 15 bp, Homo sapiens
attaccccaaaacgc

SEQ ID NO: 892257 - DNA, 15 bp, Homo sapiens
ttaccccaaaacgca

SEQ ID NO: 892258 - DNA, 15 bp, Homo sapiens
taccccaaaacgcag

SEQ ID NO: 892259 - DNA, 15 bp, Homo sapiens
accccaaaacgcagg

SEQ ID NO: 892260 - DNA, 15 bp, Homo sapiens
ccccaaaacgcaggg

SEQ ID NO: 892261 - DNA, 15 bp, Homo sapiens
cccaaaacgcagggg

SEQ ID NO: 892262 - DNA, 15 bp, Homo sapiens
ccaaaacgcaggggc

SEQ ID NO: 892263 - DNA, 15 bp, Homo sapiens
caaaacgcaggggca

SEQ ID NO: 892264 - DNA, 15 bp, Homo sapiens
aaaacgcaggggcat

SEQ ID NO: 892265 - DNA, 15 bp, Homo sapiens
aaacgcaggggcatg

SEQ ID NO: 892266 - DNA, 15 bp, Homo sapiens
aacgcaggggcatga

SEQ ID NO: 892267 - DNA, 15 bp, Homo sapiens
acgcaggggcatgaa

SEQ ID NO: 892268 - DNA, 15 bp, Homo sapiens
cgcaggggcatgaaa

SEQ ID NO: 892269 - DNA, 15 bp, Homo sapiens
gcaggggcatgaaac

SEQ ID NO: 892270 - DNA, 15 bp, Homo sapiens
caggggcatgaaaca

SEQ ID NO: 892271 - DNA, 15 bp, Homo sapiens
aggggcatgaaacat

SEQ ID NO: 892272 - DNA, 15 bp, Homo sapiens
ggggcatgaaacatt

SEQ ID NO: 892273 - DNA, 15 bp, Homo sapiens
gggcatgaaacatta

SEQ ID NO: 892274 - DNA, 15 bp, Homo sapiens
ggcatgaaacattag

SEQ ID NO: 892275 - DNA, 15 bp, Homo sapiens
gcatgaaacattagt

SEQ ID NO: 892276 - DNA, 15 bp, Homo sapiens
catgaaacattagtt

SEQ ID NO: 892277 - DNA, 15 bp, Homo sapiens
atgaaacattagttt

SEQ ID NO: 892278 - DNA, 15 bp, Homo sapiens
tgaaacattagtttt

SEQ ID NO: 892279 - DNA, 15 bp, Homo sapiens
gaaacattagttttt

SEQ ID NO: 892280 - DNA, 15 bp, Homo sapiens
aaacattagtttttt

SEQ ID NO: 892281 - DNA, 15 bp, Homo sapiens
aacattagttttttt

SEQ ID NO: 892282 - DNA, 15 bp, Homo sapiens
acattagtttttttc

SEQ ID NO: 892283 - DNA, 15 bp, Homo sapiens
cattagtttttttct

SEQ ID NO: 892284 - DNA, 15 bp, Homo sapiens
attagtttttttctt

SEQ ID NO: 892285 - DNA, 15 bp, Homo sapiens
ttagtttttttcttc

SEQ ID NO: 892286 - DNA, 15 bp, Homo sapiens
tagtttttttcttct

SEQ ID NO: 892287 - DNA, 15 bp, Homo sapiens
agtttttttcttctc

SEQ ID NO: 892288 - DNA, 15 bp, Homo sapiens
gtttttttcttctcg

SEQ ID NO: 892289 - DNA, 15 bp, Homo sapiens
tttttttcttctcgt

SEQ ID NO: 892290 - DNA, 15 bp, Homo sapiens
ttttttcttctcgtg

SEQ ID NO: 892291 - DNA, 15 bp, Homo sapiens
tttttcttctcgtgg

SEQ ID NO: 892292 - DNA, 15 bp, Homo sapiens
ttttcttctcgtgga

SEQ ID NO: 892293 - DNA, 15 bp, Homo sapiens
tttcttctcgtggat

SEQ ID NO: 892294 - DNA, 15 bp, Homo sapiens
ttcttctcgtggatt

SEQ ID NO: 892295 - DNA, 15 bp, Homo sapiens
tcttctcgtggattt

SEQ ID NO: 892296 - DNA, 15 bp, Homo sapiens
cttctcgtggatttt

SEQ ID NO: 892297 - DNA, 15 bp, Homo sapiens
ttctcgtggattttg

SEQ ID NO: 892298 - DNA, 15 bp, Homo sapiens
tctcgtggattttgt

SEQ ID NO: 892299 - DNA, 15 bp, Homo sapiens
ctcgtggattttgtg

SEQ ID NO: 892300 - DNA, 15 bp, Homo sapiens
tcgtggattttgtgg

SEQ ID NO: 892301 - DNA, 15 bp, Homo sapiens
cgtggattttgtggc

SEQ ID NO: 892302 - DNA, 15 bp, Homo sapiens
gtggattttgtggct

SEQ ID NO: 892303 - DNA, 15 bp, Homo sapiens
tggattttgtggctc

SEQ ID NO: 892304 - DNA, 15 bp, Homo sapiens
ggattttgtggctct

SEQ ID NO: 892305 - DNA, 15 bp, Homo sapiens
gattttgtggctctg

SEQ ID NO: 892306 - DNA, 15 bp, Homo sapiens
attttgtggctctgg

SEQ ID NO: 892307 - DNA, 15 bp, Homo sapiens
ttttgtggctctgga

SEQ ID NO: 892308 - DNA, 15 bp, Homo sapiens
tttgtggctctggaa

SEQ ID NO: 892309 - DNA, 15 bp, Homo sapiens
ttgtggctctggaat

SEQ ID NO: 892310 - DNA, 15 bp, Homo sapiens
tgtggctctggaatt

SEQ ID NO: 892311 - DNA, 15 bp, Homo sapiens
gtggctctggaattc

SEQ ID NO: 892312 - DNA, 15 bp, Homo sapiens
tggctctggaattca

SEQ ID NO: 892313 - DNA, 15 bp, Homo sapiens
ggctctggaattcag

SEQ ID NO: 892314 - DNA, 15 bp, Homo sapiens
gctctggaattcaga

SEQ ID NO: 892315 - DNA, 15 bp, Homo sapiens
ctctggaattcagag

SEQ ID NO: 892316 - DNA, 15 bp, Homo sapiens
tctggaattcagaga

SEQ ID NO: 892317 - DNA, 15 bp, Homo sapiens
ctggaattcagagag

SEQ ID NO: 892318 - DNA, 15 bp, Homo sapiens
tggaattcagagaga

SEQ ID NO: 892319 - DNA, 15 bp, Homo sapiens
ggaattcagagagag

SEQ ID NO: 892320 - DNA, 15 bp, Homo sapiens
gaattcagagagagc

SEQ ID NO: 892321 - DNA, 15 bp, Homo sapiens
aattcagagagagca

SEQ ID NO: 892322 - DNA, 15 bp, Homo sapiens
attcagagagagcac

SEQ ID NO: 892323 - DNA, 15 bp, Homo sapiens
ttcagagagagcaca

SEQ ID NO: 892324 - DNA, 15 bp, Homo sapiens
tcagagagagcacag

SEQ ID NO: 892325 - DNA, 15 bp, Homo sapiens
cagagagagcacaga

SEQ ID NO: 892326 - DNA, 15 bp, Homo sapiens
agagagagcacagag

SEQ ID NO: 892327 - DNA, 15 bp, Homo sapiens
gagagagcacagagc

SEQ ID NO: 892328 - DNA, 15 bp, Homo sapiens
agagagcacagagca

SEQ ID NO: 892329 - DNA, 15 bp, Homo sapiens
gagagcacagagcag

SEQ ID NO: 892330 - DNA, 15 bp, Homo sapiens
agagcacagagcagg

SEQ ID NO: 892331 - DNA, 15 bp, Homo sapiens
gagcacagagcaggt

SEQ ID NO: 892332 - DNA, 15 bp, Homo sapiens
agcacagagcaggtg

SEQ ID NO: 892333 - DNA, 15 bp, Homo sapiens
gcacagagcaggtgg

SEQ ID NO: 892334 - DNA, 15 bp, Homo sapiens
cacagagcaggtggg

SEQ ID NO: 892335 - DNA, 15 bp, Homo sapiens
acagagcaggtgggc

SEQ ID NO: 892336 - DNA, 15 bp, Homo sapiens
cagagcaggtgggct

SEQ ID NO: 892337 - DNA, 15 bp, Homo sapiens
agagcaggtgggctg

SEQ ID NO: 892338 - DNA, 15 bp, Homo sapiens
gagcaggtgggctgt

SEQ ID NO: 892339 - DNA, 15 bp, Homo sapiens
agcaggtgggctgtc

SEQ ID NO: 892340 - DNA, 15 bp, Homo sapiens
gcaggtgggctgtct

SEQ ID NO: 892341 - DNA, 15 bp, Homo sapiens
caggtgggctgtctc

SEQ ID NO: 892342 - DNA, 15 bp, Homo sapiens
aggtgggctgtctct

SEQ ID NO: 892343 - DNA, 15 bp, Homo sapiens
ggtgggctgtctctg

SEQ ID NO: 892344 - DNA, 15 bp, Homo sapiens
gtgggctgtctctgc

SEQ ID NO: 892345 - DNA, 15 bp, Homo sapiens
tgggctgtctctgct

SEQ ID NO: 892346 - DNA, 15 bp, Homo sapiens
gggctgtctctgctc

SEQ ID NO: 892347 - DNA, 15 bp, Homo sapiens
ggctgtctctgctcc

SEQ ID NO: 892348 - DNA, 15 bp, Homo sapiens
gctgtctctgctcca

SEQ ID NO: 892349 - DNA, 15 bp, Homo sapiens
ctgtctctgctccac

SEQ ID NO: 892350 - DNA, 15 bp, Homo sapiens
tgtctctgctccaca

SEQ ID NO: 892351 - DNA, 15 bp, Homo sapiens
gtctctgctccacat

SEQ ID NO: 892352 - DNA, 15 bp, Homo sapiens
tctctgctccacatt

SEQ ID NO: 892353 - DNA, 15 bp, Homo sapiens
ctctgctccacattc

SEQ ID NO: 892354 - DNA, 15 bp, Homo sapiens
tctgctccacattct

SEQ ID NO: 892355 - DNA, 15 bp, Homo sapiens
ctgctccacattctc

SEQ ID NO: 892356 - DNA, 15 bp, Homo sapiens
tgctccacattctct

SEQ ID NO: 892357 - DNA, 15 bp, Homo sapiens
gctccacattctctg

SEQ ID NO: 892358 - DNA, 15 bp, Homo sapiens
ctccacattctctga

SEQ ID NO: 892359 - DNA, 15 bp, Homo sapiens
tccacattctctgag

SEQ ID NO: 892360 - DNA, 15 bp, Homo sapiens
ccacattctctgagg

SEQ ID NO: 892361 - DNA, 15 bp, Homo sapiens
cacattctctgaggc

SEQ ID NO: 892362 - DNA, 15 bp, Homo sapiens
acattctctgaggcc

SEQ ID NO: 892363 - DNA, 15 bp, Homo sapiens
cattctctgaggcct

SEQ ID NO: 892364 - DNA, 15 bp, Homo sapiens
attctctgaggcctc

SEQ ID NO: 892365 - DNA, 15 bp, Homo sapiens
ttctctgaggcctca

SEQ ID NO: 892366 - DNA, 15 bp, Homo sapiens
tctctgaggcctcag

SEQ ID NO: 892367 - DNA, 15 bp, Homo sapiens
ctctgaggcctcagc

SEQ ID NO: 892368 - DNA, 15 bp, Homo sapiens
tctgaggcctcagct

SEQ ID NO: 892369 - DNA, 15 bp, Homo sapiens
ctgaggcctcagctg

SEQ ID NO: 892370 - DNA, 15 bp, Homo sapiens
tgaggcctcagctgg

SEQ ID NO: 892371 - DNA, 15 bp, Homo sapiens
gaggcctcagctggg

SEQ ID NO: 892372 - DNA, 15 bp, Homo sapiens
aggcctcagctggga

SEQ ID NO: 892373 - DNA, 15 bp, Homo sapiens
ggcctcagctgggag

SEQ ID NO: 892374 - DNA, 15 bp, Homo sapiens
gcctcagctgggagg

SEQ ID NO: 892375 - DNA, 15 bp, Homo sapiens
cctcagctgggaggc

SEQ ID NO: 892376 - DNA, 15 bp, Homo sapiens
ctcagctgggaggct

SEQ ID NO: 892377 - DNA, 15 bp, Homo sapiens
tcagctgggaggctg

SEQ ID NO: 892378 - DNA, 15 bp, Homo sapiens
cagctgggaggctgg

SEQ ID NO: 892379 - DNA, 15 bp, Homo sapiens
agctgggaggctggc

SEQ ID NO: 892380 - DNA, 15 bp, Homo sapiens
gctgggaggctggca

SEQ ID NO: 892381 - DNA, 15 bp, Homo sapiens
ctgggaggctggcag

SEQ ID NO: 892382 - DNA, 15 bp, Homo sapiens
tgggaggctggcagg

SEQ ID NO: 892383 - DNA, 15 bp, Homo sapiens
gggaggctggcaggc

SEQ ID NO: 892384 - DNA, 15 bp, Homo sapiens
ggaggctggcaggct

SEQ ID NO: 892385 - DNA, 15 bp, Homo sapiens
gaggctggcaggctg

SEQ ID NO: 892386 - DNA, 15 bp, Homo sapiens
aggctggcaggctgg

SEQ ID NO: 892387 - DNA, 15 bp, Homo sapiens
ggctggcaggctggg

SEQ ID NO: 892388 - DNA, 15 bp, Homo sapiens
gctggcaggctgggg

SEQ ID NO: 892389 - DNA, 15 bp, Homo sapiens
ctggcaggctggggg

SEQ ID NO: 892390 - DNA, 15 bp, Homo sapiens
tggcaggctgggggc

SEQ ID NO: 892391 - DNA, 15 bp, Homo sapiens
ggcaggctgggggct

SEQ ID NO: 892392 - DNA, 15 bp, Homo sapiens
gcaggctgggggctg

SEQ ID NO: 892393 - DNA, 15 bp, Homo sapiens
caggctgggggctgg

SEQ ID NO: 892394 - DNA, 15 bp, Homo sapiens
aggctgggggctgga

SEQ ID NO: 892395 - DNA, 15 bp, Homo sapiens
ggctgggggctggaa

SEQ ID NO: 892396 - DNA, 15 bp, Homo sapiens
gctgggggctggaac

SEQ ID NO: 892397 - DNA, 15 bp, Homo sapiens
ctgggggctggaact

SEQ ID NO: 892398 - DNA, 15 bp, Homo sapiens
tgggggctggaactg

SEQ ID NO: 892399 - DNA, 15 bp, Homo sapiens
gggggctggaactgt

SEQ ID NO: 892400 - DNA, 15 bp, Homo sapiens
ggggctggaactgtc

SEQ ID NO: 892401 - DNA, 15 bp, Homo sapiens
gggctggaactgtct

SEQ ID NO: 892402 - DNA, 15 bp, Homo sapiens
ggctggaactgtctg

SEQ ID NO: 892403 - DNA, 15 bp, Homo sapiens
gctggaactgtctgc

SEQ ID NO: 892404 - DNA, 15 bp, Homo sapiens
ctggaactgtctgca

SEQ ID NO: 892405 - DNA, 15 bp, Homo sapiens
tggaactgtctgcag

SEQ ID NO: 892406 - DNA, 15 bp, Homo sapiens
ggaactgtctgcagg

SEQ ID NO: 892407 - DNA, 15 bp, Homo sapiens
gaactgtctgcaggc

SEQ ID NO: 892408 - DNA, 15 bp, Homo sapiens
aactgtctgcaggct

SEQ ID NO: 892409 - DNA, 15 bp, Homo sapiens
actgtctgcaggctt

SEQ ID NO: 892410 - DNA, 15 bp, Homo sapiens
ctgtctgcaggcttg

SEQ ID NO: 892411 - DNA, 15 bp, Homo sapiens
tgtctgcaggcttgt

SEQ ID NO: 892412 - DNA, 15 bp, Homo sapiens
gtctgcaggcttgtt

SEQ ID NO: 892413 - DNA, 15 bp, Homo sapiens
tctgcaggcttgttc

SEQ ID NO: 892414 - DNA, 15 bp, Homo sapiens
ctgcaggcttgttct

SEQ ID NO: 892415 - DNA, 15 bp, Homo sapiens
tgcaggcttgttctc

SEQ ID NO: 892416 - DNA, 15 bp, Homo sapiens
gcaggcttgttctct

SEQ ID NO: 892417 - DNA, 15 bp, Homo sapiens
caggcttgttctctc

SEQ ID NO: 892418 - DNA, 15 bp, Homo sapiens
aggcttgttctctcc

SEQ ID NO: 892419 - DNA, 15 bp, Homo sapiens
ggcttgttctctccc

SEQ ID NO: 892420 - DNA, 15 bp, Homo sapiens
gcttgttctctccca

SEQ ID NO: 892421 - DNA, 15 bp, Homo sapiens
cttgttctctcccat

SEQ ID NO: 892422 - DNA, 15 bp, Homo sapiens
ttgttctctcccatg

SEQ ID NO: 892423 - DNA, 15 bp, Homo sapiens
tgttctctcccatgc

SEQ ID NO: 892424 - DNA, 15 bp, Homo sapiens
gttctctcccatgcc

SEQ ID NO: 892425 - DNA, 15 bp, Homo sapiens
ttctctcccatgccc

SEQ ID NO: 892426 - DNA, 15 bp, Homo sapiens
tctctcccatgcccg

SEQ ID NO: 892427 - DNA, 15 bp, Homo sapiens
ctctcccatgcccgg

SEQ ID NO: 892428 - DNA, 15 bp, Homo sapiens
tctcccatgcccggt

SEQ ID NO: 892429 - DNA, 15 bp, Homo sapiens
ctcccatgcccggtg

SEQ ID NO: 892430 - DNA, 15 bp, Homo sapiens
tcccatgcccggtga

SEQ ID NO: 892431 - DNA, 15 bp, Homo sapiens
cccatgcccggtgag

SEQ ID NO: 892432 - DNA, 15 bp, Homo sapiens
ccatgcccggtgaga

SEQ ID NO: 892433 - DNA, 15 bp, Homo sapiens
catgcccggtgagat

SEQ ID NO: 892434 - DNA, 15 bp, Homo sapiens
atgcccggtgagatt

SEQ ID NO: 892435 - DNA, 15 bp, Homo sapiens
tgcccggtgagattt

SEQ ID NO: 892436 - DNA, 15 bp, Homo sapiens
gcccggtgagatttg

SEQ ID NO: 892437 - DNA, 15 bp, Homo sapiens
cccggtgagatttgc

SEQ ID NO: 892438 - DNA, 15 bp, Homo sapiens
ccggtgagatttgct

SEQ ID NO: 892439 - DNA, 15 bp, Homo sapiens
cggtgagatttgcta

SEQ ID NO: 892440 - DNA, 15 bp, Homo sapiens
ggtgagatttgctag

SEQ ID NO: 892441 - DNA, 15 bp, Homo sapiens
gtgagatttgctagc

SEQ ID NO: 892442 - DNA, 15 bp, Homo sapiens
tgagatttgctagct

SEQ ID NO: 892443 - DNA, 15 bp, Homo sapiens
gagatttgctagctg

SEQ ID NO: 892444 - DNA, 15 bp, Homo sapiens
agatttgctagctgt

SEQ ID NO: 892445 - DNA, 15 bp, Homo sapiens
gatttgctagctgtt

SEQ ID NO: 892446 - DNA, 15 bp, Homo sapiens
atttgctagctgttg

SEQ ID NO: 892447 - DNA, 15 bp, Homo sapiens
tttgctagctgttgg

SEQ ID NO: 892448 - DNA, 15 bp, Homo sapiens
ttgctagctgttggc

SEQ ID NO: 892449 - DNA, 15 bp, Homo sapiens
tgctagctgttggct

SEQ ID NO: 892450 - DNA, 15 bp, Homo sapiens
gctagctgttggctg

SEQ ID NO: 892451 - DNA, 15 bp, Homo sapiens
ctagctgttggctga

SEQ ID NO: 892452 - DNA, 15 bp, Homo sapiens
tagctgttggctgag

SEQ ID NO: 892453 - DNA, 15 bp, Homo sapiens
agctgttggctgaga

SEQ ID NO: 892454 - DNA, 15 bp, Homo sapiens
gctgttggctgagat

SEQ ID NO: 892455 - DNA, 15 bp, Homo sapiens
ctgttggctgagatc

SEQ ID NO: 892456 - DNA, 15 bp, Homo sapiens
tgttggctgagatct

SEQ ID NO: 892457 - DNA, 15 bp, Homo sapiens
gttggctgagatctg

SEQ ID NO: 892458 - DNA, 15 bp, Homo sapiens
ttggctgagatctga

SEQ ID NO: 892459 - DNA, 15 bp, Homo sapiens
tggctgagatctgag

SEQ ID NO: 892460 - DNA, 15 bp, Homo sapiens
ggctgagatctgagc

SEQ ID NO: 892461 - DNA, 15 bp, Homo sapiens
gctgagatctgagct

SEQ ID NO: 892462 - DNA, 15 bp, Homo sapiens
ctgagatctgagctg

SEQ ID NO: 892463 - DNA, 15 bp, Homo sapiens
tgagatctgagctga

SEQ ID NO: 892464 - DNA, 15 bp, Homo sapiens
gagatctgagctgag

SEQ ID NO: 892465 - DNA, 15 bp, Homo sapiens
agatctgagctgagg

SEQ ID NO: 892466 - DNA, 15 bp, Homo sapiens
gatctgagctgaggc

SEQ ID NO: 892467 - DNA, 15 bp, Homo sapiens
atctgagctgaggct

SEQ ID NO: 892468 - DNA, 15 bp, Homo sapiens
tctgagctgaggctg

SEQ ID NO: 892469 - DNA, 15 bp, Homo sapiens
ctgagctgaggctgt

SEQ ID NO: 892470 - DNA, 15 bp, Homo sapiens
tgagctgaggctgtc

SEQ ID NO: 892471 - DNA, 15 bp, Homo sapiens
gagctgaggctgtca

SEQ ID NO: 892472 - DNA, 15 bp, Homo sapiens
agctgaggctgtcag

SEQ ID NO: 892473 - DNA, 15 bp, Homo sapiens
gctgaggctgtcagc

SEQ ID NO: 892474 - DNA, 15 bp, Homo sapiens
ctgaggctgtcagct

SEQ ID NO: 892475 - DNA, 15 bp, Homo sapiens
tgaggctgtcagctg

SEQ ID NO: 892476 - DNA, 15 bp, Homo sapiens
gaggctgtcagctgg

SEQ ID NO: 892477 - DNA, 15 bp, Homo sapiens
aggctgtcagctgga

SEQ ID NO: 892478 - DNA, 15 bp, Homo sapiens
ggctgtcagctggag

SEQ ID NO: 892479 - DNA, 15 bp, Homo sapiens
gctgtcagctggagc

SEQ ID NO: 892480 - DNA, 15 bp, Homo sapiens
ctgtcagctggagca

SEQ ID NO: 892481 - DNA, 15 bp, Homo sapiens
tgtcagctggagcac

SEQ ID NO: 892482 - DNA, 15 bp, Homo sapiens
gtcagctggagcacg

SEQ ID NO: 892483 - DNA, 15 bp, Homo sapiens
tcagctggagcacgg

SEQ ID NO: 892484 - DNA, 15 bp, Homo sapiens
cagctggagcacggg

SEQ ID NO: 892485 - DNA, 15 bp, Homo sapiens
agctggagcacgggg

SEQ ID NO: 892486 - DNA, 15 bp, Homo sapiens
gctggagcacggggc

SEQ ID NO: 892487 - DNA, 15 bp, Homo sapiens
ctggagcacggggcc

SEQ ID NO: 892488 - DNA, 15 bp, Homo sapiens
tggagcacggggcct

SEQ ID NO: 892489 - DNA, 15 bp, Homo sapiens
ggagcacggggcctc

SEQ ID NO: 892490 - DNA, 15 bp, Homo sapiens
gagcacggggcctcg

SEQ ID NO: 892491 - DNA, 15 bp, Homo sapiens
agcacggggcctcgg

SEQ ID NO: 892492 - DNA, 15 bp, Homo sapiens
gcacggggcctcggc

SEQ ID NO: 892493 - DNA, 15 bp, Homo sapiens
cacggggcctcggct

SEQ ID NO: 892494 - DNA, 15 bp, Homo sapiens
acggggcctcggctt

SEQ ID NO: 892495 - DNA, 15 bp, Homo sapiens
cggggcctcggcttc

SEQ ID NO: 892496 - DNA, 15 bp, Homo sapiens
ggggcctcggcttcc

SEQ ID NO: 892497 - DNA, 15 bp, Homo sapiens
gggcctcggcttcct

SEQ ID NO: 892498 - DNA, 15 bp, Homo sapiens
ggcctcggcttccta

SEQ ID NO: 892499 - DNA, 15 bp, Homo sapiens
gcctcggcttcctac

SEQ ID NO: 892500 - DNA, 15 bp, Homo sapiens
cctcggcttcctaca

SEQ ID NO: 892501 - DNA, 15 bp, Homo sapiens
ctcggcttcctacaa

SEQ ID NO: 892502 - DNA, 15 bp, Homo sapiens
tcggcttcctacaac

SEQ ID NO: 892503 - DNA, 15 bp, Homo sapiens
cggcttcctacaaca

SEQ ID NO: 892504 - DNA, 15 bp, Homo sapiens
ggcttcctacaacat

SEQ ID NO: 892505 - DNA, 15 bp, Homo sapiens
gcttcctacaacatg

SEQ ID NO: 892506 - DNA, 15 bp, Homo sapiens
cttcctacaacatgg

SEQ ID NO: 892507 - DNA, 15 bp, Homo sapiens
ttcctacaacatggt

SEQ ID NO: 892508 - DNA, 15 bp, Homo sapiens
tcctacaacatggtg

SEQ ID NO: 892509 - DNA, 15 bp, Homo sapiens
cctacaacatggtgg

SEQ ID NO: 892510 - DNA, 15 bp, Homo sapiens
ctacaacatggtggc

SEQ ID NO: 892511 - DNA, 15 bp, Homo sapiens
tacaacatggtggct

SEQ ID NO: 892512 - DNA, 15 bp, Homo sapiens
acaacatggtggctg

SEQ ID NO: 892513 - DNA, 15 bp, Homo sapiens
caacatggtggctgg

SEQ ID NO: 892514 - DNA, 15 bp, Homo sapiens
aacatggtggctggt

SEQ ID NO: 892515 - DNA, 15 bp, Homo sapiens
acatggtggctggtt

SEQ ID NO: 892516 - DNA, 15 bp, Homo sapiens
catggtggctggttc

SEQ ID NO: 892517 - DNA, 15 bp, Homo sapiens
atggtggctggttcc

SEQ ID NO: 892518 - DNA, 15 bp, Homo sapiens
tggtggctggttccc

SEQ ID NO: 892519 - DNA, 15 bp, Homo sapiens
ggtggctggttccca

SEQ ID NO: 892520 - DNA, 15 bp, Homo sapiens
gtggctggttcccag

SEQ ID NO: 892521 - DNA, 15 bp, Homo sapiens
tggctggttcccagg

SEQ ID NO: 892522 - DNA, 15 bp, Homo sapiens
ggctggttcccaggt

SEQ ID NO: 892523 - DNA, 15 bp, Homo sapiens
gctggttcccaggta

SEQ ID NO: 892524 - DNA, 15 bp, Homo sapiens
ctggttcccaggtac

SEQ ID NO: 892525 - DNA, 15 bp, Homo sapiens
tggttcccaggtaca

SEQ ID NO: 892526 - DNA, 15 bp, Homo sapiens
ggttcccaggtacat

SEQ ID NO: 892527 - DNA, 15 bp, Homo sapiens
gttcccaggtacatg

SEQ ID NO: 892528 - DNA, 15 bp, Homo sapiens
ttcccaggtacatgt

SEQ ID NO: 892529 - DNA, 15 bp, Homo sapiens
tcccaggtacatgtc

SEQ ID NO: 892530 - DNA, 15 bp, Homo sapiens
cccaggtacatgtcc

SEQ ID NO: 892531 - DNA, 15 bp, Homo sapiens
ccaggtacatgtccc

SEQ ID NO: 892532 - DNA, 15 bp, Homo sapiens
caggtacatgtcccg

SEQ ID NO: 892533 - DNA, 15 bp, Homo sapiens
aggtacatgtcccga

SEQ ID NO: 892534 - DNA, 15 bp, Homo sapiens
ggtacatgtcccgag

SEQ ID NO: 892535 - DNA, 15 bp, Homo sapiens
gtacatgtcccgaga

SEQ ID NO: 892536 - DNA, 15 bp, Homo sapiens
tacatgtcccgagag

SEQ ID NO: 892537 - DNA, 15 bp, Homo sapiens
acatgtcccgagagc

SEQ ID NO: 892538 - DNA, 15 bp, Homo sapiens
catgtcccgagagcg

SEQ ID NO: 892539 - DNA, 15 bp, Homo sapiens
atgtcccgagagcgt

SEQ ID NO: 892540 - DNA, 15 bp, Homo sapiens
tgtcccgagagcgtg

SEQ ID NO: 892541 - DNA, 15 bp, Homo sapiens
gtcccgagagcgtgt

SEQ ID NO: 892542 - DNA, 15 bp, Homo sapiens
tcccgagagcgtgtg

SEQ ID NO: 892543 - DNA, 15 bp, Homo sapiens
cccgagagcgtgtgg

SEQ ID NO: 892544 - DNA, 15 bp, Homo sapiens
ccgagagcgtgtggg

SEQ ID NO: 892545 - DNA, 15 bp, Homo sapiens
cgagagcgtgtgggg

SEQ ID NO: 892546 - DNA, 15 bp, Homo sapiens
gagagcgtgtggggg

SEQ ID NO: 892547 - DNA, 15 bp, Homo sapiens
agagcgtgtgggggg

SEQ ID NO: 892548 - DNA, 15 bp, Homo sapiens
gagcgtgtgggggga

SEQ ID NO: 892549 - DNA, 15 bp, Homo sapiens
agcgtgtggggggaa

SEQ ID NO: 892550 - DNA, 15 bp, Homo sapiens
gcgtgtggggggaac

SEQ ID NO: 892551 - DNA, 15 bp, Homo sapiens
cgtgtggggggaact

SEQ ID NO: 892552 - DNA, 15 bp, Homo sapiens
gtgtggggggaactc

SEQ ID NO: 892553 - DNA, 15 bp, Homo sapiens
tgtggggggaactcg

SEQ ID NO: 892554 - DNA, 15 bp, Homo sapiens
gtggggggaactcga

SEQ ID NO: 892555 - DNA, 15 bp, Homo sapiens
tggggggaactcgag

SEQ ID NO: 892556 - DNA, 15 bp, Homo sapiens
ggggggaactcgagc

SEQ ID NO: 892557 - DNA, 15 bp, Homo sapiens
gggggaactcgagcc

SEQ ID NO: 892558 - DNA, 15 bp, Homo sapiens
ggggaactcgagccc

SEQ ID NO: 892559 - DNA, 15 bp, Homo sapiens
gggaactcgagcccc

SEQ ID NO: 892560 - DNA, 15 bp, Homo sapiens
ggaactcgagccccc

SEQ ID NO: 892561 - DNA, 15 bp, Homo sapiens
gaactcgagcccccg

SEQ ID NO: 892562 - DNA, 15 bp, Homo sapiens
aactcgagcccccgt

SEQ ID NO: 892563 - DNA, 15 bp, Homo sapiens
actcgagcccccgtc

SEQ ID NO: 892564 - DNA, 15 bp, Homo sapiens
ctcgagcccccgtct

SEQ ID NO: 892565 - DNA, 15 bp, Homo sapiens
tcgagcccccgtcta

SEQ ID NO: 892566 - DNA, 15 bp, Homo sapiens
cgagcccccgtctat

SEQ ID NO: 892567 - DNA, 15 bp, Homo sapiens
gagcccccgtctatg

SEQ ID NO: 892568 - DNA, 15 bp, Homo sapiens
agcccccgtctatga

SEQ ID NO: 892569 - DNA, 15 bp, Homo sapiens
gcccccgtctatgac

SEQ ID NO: 892570 - DNA, 15 bp, Homo sapiens
cccccgtctatgact

SEQ ID NO: 892571 - DNA, 15 bp, Homo sapiens
ccccgtctatgactt

SEQ ID NO: 892572 - DNA, 15 bp, Homo sapiens
cccgtctatgactta

SEQ ID NO: 892573 - DNA, 15 bp, Homo sapiens
ccgtctatgacttag

SEQ ID NO: 892574 - DNA, 15 bp, Homo sapiens
cgtctatgacttagc

SEQ ID NO: 892575 - DNA, 15 bp, Homo sapiens
gtctatgacttagcc

SEQ ID NO: 892576 - DNA, 15 bp, Homo sapiens
tctatgacttagcct

SEQ ID NO: 892577 - DNA, 15 bp, Homo sapiens
ctatgacttagcctt

SEQ ID NO: 892578 - DNA, 15 bp, Homo sapiens
tatgacttagccttg

SEQ ID NO: 892579 - DNA, 15 bp, Homo sapiens
atgacttagccttga

SEQ ID NO: 892580 - DNA, 15 bp, Homo sapiens
tgacttagccttgaa

SEQ ID NO: 892581 - DNA, 15 bp, Homo sapiens
gacttagccttgaac

SEQ ID NO: 892582 - DNA, 15 bp, Homo sapiens
acttagccttgaaca

SEQ ID NO: 892583 - DNA, 15 bp, Homo sapiens
cttagccttgaacat

SEQ ID NO: 892584 - DNA, 15 bp, Homo sapiens
ttagccttgaacatc

SEQ ID NO: 892585 - DNA, 15 bp, Homo sapiens
tagccttgaacatcg

SEQ ID NO: 892586 - DNA, 15 bp, Homo sapiens
agccttgaacatcgt

SEQ ID NO: 892587 - DNA, 15 bp, Homo sapiens
gccttgaacatcgtg

SEQ ID NO: 892588 - DNA, 15 bp, Homo sapiens
ccttgaacatcgtgc

SEQ ID NO: 892589 - DNA, 15 bp, Homo sapiens
cttgaacatcgtgct

SEQ ID NO: 892590 - DNA, 15 bp, Homo sapiens
ttgaacatcgtgctg

SEQ ID NO: 892591 - DNA, 15 bp, Homo sapiens
tgaacatcgtgctgt

SEQ ID NO: 892592 - DNA, 15 bp, Homo sapiens
gaacatcgtgctgtg

SEQ ID NO: 892593 - DNA, 15 bp, Homo sapiens
aacatcgtgctgtgt

SEQ ID NO: 892594 - DNA, 15 bp, Homo sapiens
acatcgtgctgtgtc

SEQ ID NO: 892595 - DNA, 15 bp, Homo sapiens
catcgtgctgtgtcc

SEQ ID NO: 892596 - DNA, 15 bp, Homo sapiens
atcgtgctgtgtcct

SEQ ID NO: 892597 - DNA, 15 bp, Homo sapiens
tcgtgctgtgtcctt

SEQ ID NO: 892598 - DNA, 15 bp, Homo sapiens
cgtgctgtgtccttc

SEQ ID NO: 892599 - DNA, 15 bp, Homo sapiens
gtgctgtgtccttct

SEQ ID NO: 892600 - DNA, 15 bp, Homo sapiens
tgctgtgtccttcta

SEQ ID NO: 892601 - DNA, 15 bp, Homo sapiens
gctgtgtccttctac

SEQ ID NO: 892602 - DNA, 15 bp, Homo sapiens
ctgtgtccttctacc

SEQ ID NO: 892603 - DNA, 15 bp, Homo sapiens
tgtgtccttctacca

SEQ ID NO: 892604 - DNA, 15 bp, Homo sapiens
gtgtccttctaccat

SEQ ID NO: 892605 - DNA, 15 bp, Homo sapiens
tgtccttctaccata

SEQ ID NO: 892606 - DNA, 15 bp, Homo sapiens
gtccttctaccatat

SEQ ID NO: 892607 - DNA, 15 bp, Homo sapiens
tccttctaccatatt

SEQ ID NO: 892608 - DNA, 15 bp, Homo sapiens
ccttctaccatattc

SEQ ID NO: 892609 - DNA, 15 bp, Homo sapiens
cttctaccatattct

SEQ ID NO: 892610 - DNA, 15 bp, Homo sapiens
ttctaccatattcta

SEQ ID NO: 892611 - DNA, 15 bp, Homo sapiens
tctaccatattctac

SEQ ID NO: 892612 - DNA, 15 bp, Homo sapiens
ctaccatattctact

SEQ ID NO: 892613 - DNA, 15 bp, Homo sapiens
taccatattctacta

SEQ ID NO: 892614 - DNA, 15 bp, Homo sapiens
accatattctactat

SEQ ID NO: 892615 - DNA, 15 bp, Homo sapiens
ccatattctactatt

SEQ ID NO: 892616 - DNA, 15 bp, Homo sapiens
catattctactattg

SEQ ID NO: 892617 - DNA, 15 bp, Homo sapiens
atattctactattga

SEQ ID NO: 892618 - DNA, 15 bp, Homo sapiens
tattctactattgag

SEQ ID NO: 892619 - DNA, 15 bp, Homo sapiens
attctactattgagg

SEQ ID NO: 892620 - DNA, 15 bp, Homo sapiens
ttctactattgaggc

SEQ ID NO: 892621 - DNA, 15 bp, Homo sapiens
tctactattgaggcc

SEQ ID NO: 892622 - DNA, 15 bp, Homo sapiens
ctactattgaggccc

SEQ ID NO: 892623 - DNA, 15 bp, Homo sapiens
tactattgaggccct

SEQ ID NO: 892624 - DNA, 15 bp, Homo sapiens
actattgaggccctt

SEQ ID NO: 892625 - DNA, 15 bp, Homo sapiens
ctattgaggccctta

SEQ ID NO: 892626 - DNA, 15 bp, Homo sapiens
tattgaggcccttac

SEQ ID NO: 892627 - DNA, 15 bp, Homo sapiens
attgaggcccttacg

SEQ ID NO: 892628 - DNA, 15 bp, Homo sapiens
ttgaggcccttacga

SEQ ID NO: 892629 - DNA, 15 bp, Homo sapiens
tgaggcccttacgaa

SEQ ID NO: 892630 - DNA, 15 bp, Homo sapiens
gaggcccttacgaag

SEQ ID NO: 892631 - DNA, 15 bp, Homo sapiens
aggcccttacgaagc

SEQ ID NO: 892632 - DNA, 15 bp, Homo sapiens
ggcccttacgaagct

SEQ ID NO: 892633 - DNA, 15 bp, Homo sapiens
gcccttacgaagctc

SEQ ID NO: 892634 - DNA, 15 bp, Homo sapiens
cccttacgaagctcc

SEQ ID NO: 892635 - DNA, 15 bp, Homo sapiens
ccttacgaagctcca

SEQ ID NO: 892636 - DNA, 15 bp, Homo sapiens
cttacgaagctccac

SEQ ID NO: 892637 - DNA, 15 bp, Homo sapiens
ttacgaagctccacc

SEQ ID NO: 892638 - DNA, 15 bp, Homo sapiens
tacgaagctccaccc

SEQ ID NO: 892639 - DNA, 15 bp, Homo sapiens
acgaagctccaccca

SEQ ID NO: 892640 - DNA, 15 bp, Homo sapiens
cgaagctccacccag

SEQ ID NO: 892641 - DNA, 15 bp, Homo sapiens
gaagctccacccagg

SEQ ID NO: 892642 - DNA, 15 bp, Homo sapiens
aagctccacccaggg

SEQ ID NO: 892643 - DNA, 15 bp, Homo sapiens
agctccacccagggt

SEQ ID NO: 892644 - DNA, 15 bp, Homo sapiens
gctccacccagggtg

SEQ ID NO: 892645 - DNA, 15 bp, Homo sapiens
ctccacccagggtga

SEQ ID NO: 892646 - DNA, 15 bp, Homo sapiens
tccacccagggtgaa

SEQ ID NO: 892647 - DNA, 15 bp, Homo sapiens
ccacccagggtgaag

SEQ ID NO: 892648 - DNA, 15 bp, Homo sapiens
cacccagggtgaagg

SEQ ID NO: 892649 - DNA, 15 bp, Homo sapiens
acccagggtgaaggg

SEQ ID NO: 892650 - DNA, 15 bp, Homo sapiens
cccagggtgaagggg

SEQ ID NO: 892651 - DNA, 15 bp, Homo sapiens
ccagggtgaagggga

SEQ ID NO: 892652 - DNA, 15 bp, Homo sapiens
cagggtgaaggggaa

SEQ ID NO: 892653 - DNA, 15 bp, Homo sapiens
agggtgaaggggaag

SEQ ID NO: 892654 - DNA, 15 bp, Homo sapiens
gggtgaaggggaaga

SEQ ID NO: 892655 - DNA, 15 bp, Homo sapiens
ggtgaaggggaagag

SEQ ID NO: 892656 - DNA, 15 bp, Homo sapiens
gtgaaggggaagaga

SEQ ID NO: 892657 - DNA, 15 bp, Homo sapiens
tgaaggggaagagac

SEQ ID NO: 892658 - DNA, 15 bp, Homo sapiens
gaaggggaagagaca

SEQ ID NO: 892659 - DNA, 15 bp, Homo sapiens
aaggggaagagacat

SEQ ID NO: 892660 - DNA, 15 bp, Homo sapiens
aggggaagagacatc

SEQ ID NO: 892661 - DNA, 15 bp, Homo sapiens
ggggaagagacatca

SEQ ID NO: 892662 - DNA, 15 bp, Homo sapiens
gggaagagacatcaa

SEQ ID NO: 892663 - DNA, 15 bp, Homo sapiens
ggaagagacatcaat

SEQ ID NO: 892664 - DNA, 15 bp, Homo sapiens
gaagagacatcaatg

SEQ ID NO: 892665 - DNA, 15 bp, Homo sapiens
aagagacatcaatgc

SEQ ID NO: 892666 - DNA, 15 bp, Homo sapiens
agagacatcaatgcc

SEQ ID NO: 892667 - DNA, 15 bp, Homo sapiens
gagacatcaatgccc

SEQ ID NO: 892668 - DNA, 15 bp, Homo sapiens
agacatcaatgcccc

SEQ ID NO: 892669 - DNA, 15 bp, Homo sapiens
gacatcaatgcccct

SEQ ID NO: 892670 - DNA, 15 bp, Homo sapiens
acatcaatgcccctc

SEQ ID NO: 892671 - DNA, 15 bp, Homo sapiens
catcaatgcccctct

SEQ ID NO: 892672 - DNA, 15 bp, Homo sapiens
atcaatgcccctctt

SEQ ID NO: 892673 - DNA, 15 bp, Homo sapiens
tcaatgcccctcttg

SEQ ID NO: 892674 - DNA, 15 bp, Homo sapiens
caatgcccctcttga

SEQ ID NO: 892675 - DNA, 15 bp, Homo sapiens
aatgcccctcttgat

SEQ ID NO: 892676 - DNA, 15 bp, Homo sapiens
atgcccctcttgatg

SEQ ID NO: 892677 - DNA, 15 bp, Homo sapiens
tgcccctcttgatgg

SEQ ID NO: 892678 - DNA, 15 bp, Homo sapiens
gcccctcttgatggt

SEQ ID NO: 892679 - DNA, 15 bp, Homo sapiens
cccctcttgatggtg

SEQ ID NO: 892680 - DNA, 15 bp, Homo sapiens
ccctcttgatggtgg

SEQ ID NO: 892681 - DNA, 15 bp, Homo sapiens
cctcttgatggtgga

SEQ ID NO: 892682 - DNA, 15 bp, Homo sapiens
ctcttgatggtggag

SEQ ID NO: 892683 - DNA, 15 bp, Homo sapiens
tcttgatggtggagt

SEQ ID NO: 892684 - DNA, 15 bp, Homo sapiens
cttgatggtggagtg

SEQ ID NO: 892685 - DNA, 15 bp, Homo sapiens
ttgatggtggagtgt

SEQ ID NO: 892686 - DNA, 15 bp, Homo sapiens
tgatggtggagtgtt

SEQ ID NO: 892687 - DNA, 15 bp, Homo sapiens
gatggtggagtgttg

SEQ ID NO: 892688 - DNA, 15 bp, Homo sapiens
atggtggagtgttga

SEQ ID NO: 892689 - DNA, 15 bp, Homo sapiens
tggtggagtgttgat

SEQ ID NO: 892690 - DNA, 15 bp, Homo sapiens
ggtggagtgttgatg

SEQ ID NO: 892691 - DNA, 15 bp, Homo sapiens
gtggagtgttgatgc

SEQ ID NO: 892692 - DNA, 15 bp, Homo sapiens
tggagtgttgatgcc

SEQ ID NO: 892693 - DNA, 15 bp, Homo sapiens
ggagtgttgatgcca

SEQ ID NO: 892694 - DNA, 15 bp, Homo sapiens
gagtgttgatgccac

SEQ ID NO: 892695 - DNA, 15 bp, Homo sapiens
agtgttgatgccaca

SEQ ID NO: 892696 - DNA, 15 bp, Homo sapiens
gtgttgatgccacac

SEQ ID NO: 892697 - DNA, 15 bp, Homo sapiens
tgttgatgccacact

SEQ ID NO: 892698 - DNA, 15 bp, Homo sapiens
gttgatgccacactg

SEQ ID NO: 892699 - DNA, 15 bp, Homo sapiens
ttgatgccacactgt

SEQ ID NO: 892700 - DNA, 15 bp, Homo sapiens
tgatgccacactgtg

SEQ ID NO: 892701 - DNA, 15 bp, Homo sapiens
gatgccacactgtga

SEQ ID NO: 892702 - DNA, 15 bp, Homo sapiens
atgccacactgtgaa

SEQ ID NO: 892703 - DNA, 15 bp, Homo sapiens
tgccacactgtgaaa

SEQ ID NO: 892704 - DNA, 15 bp, Homo sapiens
gccacactgtgaaaa

SEQ ID NO: 892705 - DNA, 15 bp, Homo sapiens
ccacactgtgaaaag

SEQ ID NO: 892706 - DNA, 15 bp, Homo sapiens
cacactgtgaaaagg

SEQ ID NO: 892707 - DNA, 15 bp, Homo sapiens
acactgtgaaaaggg

SEQ ID NO: 892708 - DNA, 15 bp, Homo sapiens
cactgtgaaaagggc

SEQ ID NO: 892709 - DNA, 15 bp, Homo sapiens
actgtgaaaagggca

SEQ ID NO: 892710 - DNA, 15 bp, Homo sapiens
ctgtgaaaagggcac

SEQ ID NO: 892711 - DNA, 15 bp, Homo sapiens
tgtgaaaagggcaca

SEQ ID NO: 892712 - DNA, 15 bp, Homo sapiens
gtgaaaagggcacat

SEQ ID NO: 892713 - DNA, 15 bp, Homo sapiens
tgaaaagggcacatg

SEQ ID NO: 892714 - DNA, 15 bp, Homo sapiens
gaaaagggcacatgg

SEQ ID NO: 892715 - DNA, 15 bp, Homo sapiens
aaaagggcacatgga

SEQ ID NO: 892716 - DNA, 15 bp, Homo sapiens
aaagggcacatggaa

SEQ ID NO: 892717 - DNA, 15 bp, Homo sapiens
aagggcacatggaat

SEQ ID NO: 892718 - DNA, 15 bp, Homo sapiens
agggcacatggaatg

SEQ ID NO: 892719 - DNA, 15 bp, Homo sapiens
gggcacatggaatgg

SEQ ID NO: 892720 - DNA, 15 bp, Homo sapiens
ggcacatggaatggg

SEQ ID NO: 892721 - DNA, 15 bp, Homo sapiens
gcacatggaatggga

SEQ ID NO: 892722 - DNA, 15 bp, Homo sapiens
cacatggaatgggaa

SEQ ID NO: 892723 - DNA, 15 bp, Homo sapiens
acatggaatgggaag

SEQ ID NO: 892724 - DNA, 15 bp, Homo sapiens
catggaatgggaagt

SEQ ID NO: 892725 - DNA, 15 bp, Homo sapiens
atggaatgggaagta

SEQ ID NO: 892726 - DNA, 15 bp, Homo sapiens
tggaatgggaagtat

SEQ ID NO: 892727 - DNA, 15 bp, Homo sapiens
ggaatgggaagtatt

SEQ ID NO: 892728 - DNA, 15 bp, Homo sapiens
gaatgggaagtattt

SEQ ID NO: 892729 - DNA, 15 bp, Homo sapiens
aatgggaagtatttg

SEQ ID NO: 892730 - DNA, 15 bp, Homo sapiens
atgggaagtatttgg

SEQ ID NO: 892731 - DNA, 15 bp, Homo sapiens
tgggaagtatttggt

SEQ ID NO: 892732 - DNA, 15 bp, Homo sapiens
gggaagtatttggtg

SEQ ID NO: 892733 - DNA, 15 bp, Homo sapiens
ggaagtatttggtgt

SEQ ID NO: 892734 - DNA, 15 bp, Homo sapiens
gaagtatttggtgtg

SEQ ID NO: 892735 - DNA, 15 bp, Homo sapiens
aagtatttggtgtga

SEQ ID NO: 892736 - DNA, 15 bp, Homo sapiens
agtatttggtgtgac

SEQ ID NO: 892737 - DNA, 15 bp, Homo sapiens
gtatttggtgtgacc

SEQ ID NO: 892738 - DNA, 15 bp, Homo sapiens
tatttggtgtgacca

SEQ ID NO: 892739 - DNA, 15 bp, Homo sapiens
atttggtgtgaccat

SEQ ID NO: 892740 - DNA, 15 bp, Homo sapiens
tttggtgtgaccatc

SEQ ID NO: 892741 - DNA, 15 bp, Homo sapiens
ttggtgtgaccatct

SEQ ID NO: 892742 - DNA, 15 bp, Homo sapiens
tggtgtgaccatctt

SEQ ID NO: 892743 - DNA, 15 bp, Homo sapiens
ggtgtgaccatcttt

SEQ ID NO: 892744 - DNA, 15 bp, Homo sapiens
gtgtgaccatctttg

SEQ ID NO: 892745 - DNA, 15 bp, Homo sapiens
tgtgaccatctttgg

SEQ ID NO: 892746 - DNA, 15 bp, Homo sapiens
gtgaccatctttgga

SEQ ID NO: 892747 - DNA, 15 bp, Homo sapiens
tgaccatctttggaa

SEQ ID NO: 892748 - DNA, 15 bp, Homo sapiens
gaccatctttggaaa

SEQ ID NO: 892749 - DNA, 15 bp, Homo sapiens
accatctttggaaag

SEQ ID NO: 892750 - DNA, 15 bp, Homo sapiens
ccatctttggaaagg

SEQ ID NO: 892751 - DNA, 15 bp, Homo sapiens
catctttggaaagga

SEQ ID NO: 892752 - DNA, 15 bp, Homo sapiens
atctttggaaaggac

SEQ ID NO: 892753 - DNA, 15 bp, Homo sapiens
tctttggaaaggaca

SEQ ID NO: 892754 - DNA, 15 bp, Homo sapiens
ctttggaaaggacaa

SEQ ID NO: 892755 - DNA, 15 bp, Homo sapiens
tttggaaaggacaat

SEQ ID NO: 892756 - DNA, 15 bp, Homo sapiens
ttggaaaggacaatc

SEQ ID NO: 892757 - DNA, 15 bp, Homo sapiens
tggaaaggacaatct

SEQ ID NO: 892758 - DNA, 15 bp, Homo sapiens
ggaaaggacaatctc

SEQ ID NO: 892759 - DNA, 15 bp, Homo sapiens
gaaaggacaatctcc

SEQ ID NO: 892760 - DNA, 15 bp, Homo sapiens
aaaggacaatctcca

SEQ ID NO: 892761 - DNA, 15 bp, Homo sapiens
aaggacaatctccat

SEQ ID NO: 892762 - DNA, 15 bp, Homo sapiens
aggacaatctccata

SEQ ID NO: 892763 - DNA, 15 bp, Homo sapiens
ggacaatctccatac

SEQ ID NO: 892764 - DNA, 15 bp, Homo sapiens
gacaatctccatact

SEQ ID NO: 892765 - DNA, 15 bp, Homo sapiens
acaatctccatacta

SEQ ID NO: 892766 - DNA, 15 bp, Homo sapiens
caatctccatactat

SEQ ID NO: 892767 - DNA, 15 bp, Homo sapiens
aatctccatactatg

SEQ ID NO: 892768 - DNA, 15 bp, Homo sapiens
atctccatactatgt

SEQ ID NO: 892769 - DNA, 15 bp, Homo sapiens
tctccatactatgtg

SEQ ID NO: 892770 - DNA, 15 bp, Homo sapiens
ctccatactatgtgt

SEQ ID NO: 892771 - DNA, 15 bp, Homo sapiens
tccatactatgtgtc

SEQ ID NO: 892772 - DNA, 15 bp, Homo sapiens
ccatactatgtgtca

SEQ ID NO: 892773 - DNA, 15 bp, Homo sapiens
catactatgtgtcag

SEQ ID NO: 892774 - DNA, 15 bp, Homo sapiens
atactatgtgtcagg

SEQ ID NO: 892775 - DNA, 15 bp, Homo sapiens
tactatgtgtcaggt

SEQ ID NO: 892776 - DNA, 15 bp, Homo sapiens
actatgtgtcaggta

SEQ ID NO: 892777 - DNA, 15 bp, Homo sapiens
ctatgtgtcaggtag

SEQ ID NO: 892778 - DNA, 15 bp, Homo sapiens
tatgtgtcaggtagc

SEQ ID NO: 892779 - DNA, 15 bp, Homo sapiens
atgtgtcaggtagct

SEQ ID NO: 892780 - DNA, 15 bp, Homo sapiens
tgtgtcaggtagctt

SEQ ID NO: 892781 - DNA, 15 bp, Homo sapiens
gtgtcaggtagctta

SEQ ID NO: 892782 - DNA, 15 bp, Homo sapiens
tgtcaggtagcttag

SEQ ID NO: 892783 - DNA, 15 bp, Homo sapiens
gtcaggtagcttagg

SEQ ID NO: 892784 - DNA, 15 bp, Homo sapiens
tcaggtagcttaggt

SEQ ID NO: 892785 - DNA, 15 bp, Homo sapiens
caggtagcttaggtg

SEQ ID NO: 892786 - DNA, 15 bp, Homo sapiens
aggtagcttaggtga

SEQ ID NO: 892787 - DNA, 15 bp, Homo sapiens
ggtagcttaggtgat

SEQ ID NO: 892788 - DNA, 15 bp, Homo sapiens
gtagcttaggtgatc

SEQ ID NO: 892789 - DNA, 15 bp, Homo sapiens
tagcttaggtgatct

SEQ ID NO: 892790 - DNA, 15 bp, Homo sapiens
agcttaggtgatctc

SEQ ID NO: 892791 - DNA, 15 bp, Homo sapiens
gcttaggtgatctct

SEQ ID NO: 892792 - DNA, 15 bp, Homo sapiens
cttaggtgatctctc

SEQ ID NO: 892793 - DNA, 15 bp, Homo sapiens
ttaggtgatctctca

SEQ ID NO: 892794 - DNA, 15 bp, Homo sapiens
taggtgatctctcat

SEQ ID NO: 892795 - DNA, 15 bp, Homo sapiens
aggtgatctctcatt

SEQ ID NO: 892796 - DNA, 15 bp, Homo sapiens
ggtgatctctcattc

SEQ ID NO: 892797 - DNA, 15 bp, Homo sapiens
gtgatctctcattcc

SEQ ID NO: 892798 - DNA, 15 bp, Homo sapiens
tgatctctcattcct

SEQ ID NO: 892799 - DNA, 15 bp, Homo sapiens
gatctctcattcctc

SEQ ID NO: 892800 - DNA, 15 bp, Homo sapiens
atctctcattcctca

SEQ ID NO: 892801 - DNA, 15 bp, Homo sapiens
tctctcattcctcaa

SEQ ID NO: 892802 - DNA, 15 bp, Homo sapiens
ctctcattcctcaaa

SEQ ID NO: 892803 - DNA, 15 bp, Homo sapiens
tctcattcctcaaaa

SEQ ID NO: 892804 - DNA, 15 bp, Homo sapiens
ctcattcctcaaaaa

SEQ ID NO: 892805 - DNA, 15 bp, Homo sapiens
tcattcctcaaaaac

SEQ ID NO: 892806 - DNA, 15 bp, Homo sapiens
cattcctcaaaaaca

SEQ ID NO: 892807 - DNA, 15 bp, Homo sapiens
attcctcaaaaacac

SEQ ID NO: 892808 - DNA, 15 bp, Homo sapiens
ttcctcaaaaacact

SEQ ID NO: 892809 - DNA, 15 bp, Homo sapiens
tcctcaaaaacactg

SEQ ID NO: 892810 - DNA, 15 bp, Homo sapiens
cctcaaaaacactga

SEQ ID NO: 892811 - DNA, 15 bp, Homo sapiens
ctcaaaaacactgag

SEQ ID NO: 892812 - DNA, 15 bp, Homo sapiens
tcaaaaacactgagg

SEQ ID NO: 892813 - DNA, 15 bp, Homo sapiens
caaaaacactgaggg

SEQ ID NO: 892814 - DNA, 15 bp, Homo sapiens
aaaaacactgagggg

SEQ ID NO: 892815 - DNA, 15 bp, Homo sapiens
aaaacactgaggggc

SEQ ID NO: 892816 - DNA, 15 bp, Homo sapiens
aaacactgaggggct

SEQ ID NO: 892817 - DNA, 15 bp, Homo sapiens
aacactgaggggcta

SEQ ID NO: 892818 - DNA, 15 bp, Homo sapiens
acactgaggggctag

SEQ ID NO: 892819 - DNA, 15 bp, Homo sapiens
cactgaggggctagg

SEQ ID NO: 892820 - DNA, 15 bp, Homo sapiens
actgaggggctaggt

SEQ ID NO: 892821 - DNA, 15 bp, Homo sapiens
ctgaggggctaggta

SEQ ID NO: 892822 - DNA, 15 bp, Homo sapiens
tgaggggctaggtat

SEQ ID NO: 892823 - DNA, 15 bp, Homo sapiens
gaggggctaggtata

SEQ ID NO: 892824 - DNA, 15 bp, Homo sapiens
aggggctaggtataa

SEQ ID NO: 892825 - DNA, 15 bp, Homo sapiens
ggggctaggtataat

SEQ ID NO: 892826 - DNA, 15 bp, Homo sapiens
gggctaggtataatt

SEQ ID NO: 892827 - DNA, 15 bp, Homo sapiens
ggctaggtataatta

SEQ ID NO: 892828 - DNA, 15 bp, Homo sapiens
gctaggtataattat

SEQ ID NO: 892829 - DNA, 15 bp, Homo sapiens
ctaggtataattatc

SEQ ID NO: 892830 - DNA, 15 bp, Homo sapiens
taggtataattatct

SEQ ID NO: 892831 - DNA, 15 bp, Homo sapiens
aggtataattatctc

SEQ ID NO: 892832 - DNA, 15 bp, Homo sapiens
ggtataattatctct

SEQ ID NO: 892833 - DNA, 15 bp, Homo sapiens
gtataattatctcta

SEQ ID NO: 892834 - DNA, 15 bp, Homo sapiens
tataattatctctat

SEQ ID NO: 892835 - DNA, 15 bp, Homo sapiens
ataattatctctatt

SEQ ID NO: 892836 - DNA, 15 bp, Homo sapiens
taattatctctattt

SEQ ID NO: 892837 - DNA, 15 bp, Homo sapiens
aattatctctatttt

SEQ ID NO: 892838 - DNA, 15 bp, Homo sapiens
attatctctatttta

SEQ ID NO: 892839 - DNA, 15 bp, Homo sapiens
ttatctctattttag

SEQ ID NO: 892840 - DNA, 15 bp, Homo sapiens
tatctctattttaga

SEQ ID NO: 892841 - DNA, 15 bp, Homo sapiens
atctctattttagag

SEQ ID NO: 892842 - DNA, 15 bp, Homo sapiens
tctctattttagaga

SEQ ID NO: 892843 - DNA, 15 bp, Homo sapiens
ctctattttagagac

SEQ ID NO: 892844 - DNA, 15 bp, Homo sapiens
tctattttagagaca

SEQ ID NO: 892845 - DNA, 15 bp, Homo sapiens
ctattttagagacag

SEQ ID NO: 892846 - DNA, 15 bp, Homo sapiens
tattttagagacaga

SEQ ID NO: 892847 - DNA, 15 bp, Homo sapiens
attttagagacagac

SEQ ID NO: 892848 - DNA, 15 bp, Homo sapiens
ttttagagacagaca

SEQ ID NO: 892849 - DNA, 15 bp, Homo sapiens
tttagagacagacaa

SEQ ID NO: 892850 - DNA, 15 bp, Homo sapiens
ttagagacagacaaa

SEQ ID NO: 892851 - DNA, 15 bp, Homo sapiens
tagagacagacaaac

SEQ ID NO: 892852 - DNA, 15 bp, Homo sapiens
agagacagacaaact

SEQ ID NO: 892853 - DNA, 15 bp, Homo sapiens
gagacagacaaactg

SEQ ID NO: 892854 - DNA, 15 bp, Homo sapiens
agacagacaaactga

SEQ ID NO: 892855 - DNA, 15 bp, Homo sapiens
gacagacaaactgaa

SEQ ID NO: 892856 - DNA, 15 bp, Homo sapiens
acagacaaactgaag

SEQ ID NO: 892857 - DNA, 15 bp, Homo sapiens
cagacaaactgaagc

SEQ ID NO: 892858 - DNA, 15 bp, Homo sapiens
agacaaactgaagct

SEQ ID NO: 892859 - DNA, 15 bp, Homo sapiens
gacaaactgaagctt

SEQ ID NO: 892860 - DNA, 15 bp, Homo sapiens
acaaactgaagctta

SEQ ID NO: 892861 - DNA, 15 bp, Homo sapiens
caaactgaagcttag

SEQ ID NO: 892862 - DNA, 15 bp, Homo sapiens
aaactgaagcttaga

SEQ ID NO: 892863 - DNA, 15 bp, Homo sapiens
aactgaagcttagag

SEQ ID NO: 892864 - DNA, 15 bp, Homo sapiens
actgaagcttagaga

SEQ ID NO: 892865 - DNA, 15 bp, Homo sapiens
ctgaagcttagagag

SEQ ID NO: 892866 - DNA, 15 bp, Homo sapiens
tgaagcttagagagg

SEQ ID NO: 892867 - DNA, 15 bp, Homo sapiens
gaagcttagagaggc

SEQ ID NO: 892868 - DNA, 15 bp, Homo sapiens
aagcttagagaggca

SEQ ID NO: 892869 - DNA, 15 bp, Homo sapiens
agcttagagaggcaa

SEQ ID NO: 892870 - DNA, 15 bp, Homo sapiens
gcttagagaggcaaa

SEQ ID NO: 892871 - DNA, 15 bp, Homo sapiens
cttagagaggcaaag

SEQ ID NO: 892872 - DNA, 15 bp, Homo sapiens
ttagagaggcaaagt

SEQ ID NO: 892873 - DNA, 15 bp, Homo sapiens
tagagaggcaaagta

SEQ ID NO: 892874 - DNA, 15 bp, Homo sapiens
agagaggcaaagtaa

SEQ ID NO: 892875 - DNA, 15 bp, Homo sapiens
gagaggcaaagtaac

SEQ ID NO: 892876 - DNA, 15 bp, Homo sapiens
agaggcaaagtaact

SEQ ID NO: 892877 - DNA, 15 bp, Homo sapiens
gaggcaaagtaactt

SEQ ID NO: 892878 - DNA, 15 bp, Homo sapiens
aggcaaagtaacttg

SEQ ID NO: 892879 - DNA, 15 bp, Homo sapiens
ggcaaagtaacttgc

SEQ ID NO: 892880 - DNA, 15 bp, Homo sapiens
gcaaagtaacttgct

SEQ ID NO: 892881 - DNA, 15 bp, Homo sapiens
caaagtaacttgctt

SEQ ID NO: 892882 - DNA, 15 bp, Homo sapiens
aaagtaacttgcttg

SEQ ID NO: 892883 - DNA, 15 bp, Homo sapiens
aagtaacttgcttgg

SEQ ID NO: 892884 - DNA, 15 bp, Homo sapiens
agtaacttgcttggg

SEQ ID NO: 892885 - DNA, 15 bp, Homo sapiens
gtaacttgcttgggc

SEQ ID NO: 892886 - DNA, 15 bp, Homo sapiens
taacttgcttgggca

SEQ ID NO: 892887 - DNA, 15 bp, Homo sapiens
aacttgcttgggcaa

SEQ ID NO: 892888 - DNA, 15 bp, Homo sapiens
acttgcttgggcaat

SEQ ID NO: 892889 - DNA, 15 bp, Homo sapiens
cttgcttgggcaatt

SEQ ID NO: 892890 - DNA, 15 bp, Homo sapiens
ttgcttgggcaattt

SEQ ID NO: 892891 - DNA, 15 bp, Homo sapiens
tgcttgggcaattta

SEQ ID NO: 892892 - DNA, 15 bp, Homo sapiens
gcttgggcaatttat

SEQ ID NO: 892893 - DNA, 15 bp, Homo sapiens
cttgggcaatttatt

SEQ ID NO: 892894 - DNA, 15 bp, Homo sapiens
ttgggcaatttattt

SEQ ID NO: 892895 - DNA, 15 bp, Homo sapiens
tgggcaatttatttc

SEQ ID NO: 892896 - DNA, 15 bp, Homo sapiens
gggcaatttatttca

SEQ ID NO: 892897 - DNA, 15 bp, Homo sapiens
ggcaatttatttcac

SEQ ID NO: 892898 - DNA, 15 bp, Homo sapiens
gcaatttatttcacc

SEQ ID NO: 892899 - DNA, 15 bp, Homo sapiens
caatttatttcacct

SEQ ID NO: 892900 - DNA, 15 bp, Homo sapiens
aatttatttcacctc

SEQ ID NO: 892901 - DNA, 15 bp, Homo sapiens
atttatttcacctct

SEQ ID NO: 892902 - DNA, 15 bp, Homo sapiens
tttatttcacctctc

SEQ ID NO: 892903 - DNA, 15 bp, Homo sapiens
ttatttcacctctct

SEQ ID NO: 892904 - DNA, 15 bp, Homo sapiens
tatttcacctctctg

SEQ ID NO: 892905 - DNA, 15 bp, Homo sapiens
atttcacctctctga

SEQ ID NO: 892906 - DNA, 15 bp, Homo sapiens
tttcacctctctgag

SEQ ID NO: 892907 - DNA, 15 bp, Homo sapiens
ttcacctctctgagg

SEQ ID NO: 892908 - DNA, 15 bp, Homo sapiens
tcacctctctgaggc

SEQ ID NO: 892909 - DNA, 15 bp, Homo sapiens
cacctctctgaggct

SEQ ID NO: 892910 - DNA, 15 bp, Homo sapiens
acctctctgaggctc

SEQ ID NO: 892911 - DNA, 15 bp, Homo sapiens
cctctctgaggctca

SEQ ID NO: 892912 - DNA, 15 bp, Homo sapiens
ctctctgaggctcag

SEQ ID NO: 892913 - DNA, 15 bp, Homo sapiens
tctctgaggctcagt

SEQ ID NO: 892914 - DNA, 15 bp, Homo sapiens
ctctgaggctcagtt

SEQ ID NO: 892915 - DNA, 15 bp, Homo sapiens
tctgaggctcagtta

SEQ ID NO: 892916 - DNA, 15 bp, Homo sapiens
ctgaggctcagttac

SEQ ID NO: 892917 - DNA, 15 bp, Homo sapiens
tgaggctcagttact

SEQ ID NO: 892918 - DNA, 15 bp, Homo sapiens
gaggctcagttactc

SEQ ID NO: 892919 - DNA, 15 bp, Homo sapiens
aggctcagttactcc

SEQ ID NO: 892920 - DNA, 15 bp, Homo sapiens
ggctcagttactccc

SEQ ID NO: 892921 - DNA, 15 bp, Homo sapiens
gctcagttactccct

SEQ ID NO: 892922 - DNA, 15 bp, Homo sapiens
ctcagttactccctc

SEQ ID NO: 892923 - DNA, 15 bp, Homo sapiens
tcagttactccctct

SEQ ID NO: 892924 - DNA, 15 bp, Homo sapiens
cagttactccctcta

SEQ ID NO: 892925 - DNA, 15 bp, Homo sapiens
agttactccctctat

SEQ ID NO: 892926 - DNA, 15 bp, Homo sapiens
gttactccctctatc

SEQ ID NO: 892927 - DNA, 15 bp, Homo sapiens
ttactccctctatca

SEQ ID NO: 892928 - DNA, 15 bp, Homo sapiens
tactccctctatcaa

SEQ ID NO: 892929 - DNA, 15 bp, Homo sapiens
actccctctatcaaa

SEQ ID NO: 892930 - DNA, 15 bp, Homo sapiens
ctccctctatcaaat

SEQ ID NO: 892931 - DNA, 15 bp, Homo sapiens
tccctctatcaaatg

SEQ ID NO: 892932 - DNA, 15 bp, Homo sapiens
ccctctatcaaatgg

SEQ ID NO: 892933 - DNA, 15 bp, Homo sapiens
cctctatcaaatggg

SEQ ID NO: 892934 - DNA, 15 bp, Homo sapiens
ctctatcaaatgggt

SEQ ID NO: 892935 - DNA, 15 bp, Homo sapiens
tctatcaaatgggta

SEQ ID NO: 892936 - DNA, 15 bp, Homo sapiens
ctatcaaatgggtag

SEQ ID NO: 892937 - DNA, 15 bp, Homo sapiens
tatcaaatgggtaga

SEQ ID NO: 892938 - DNA, 15 bp, Homo sapiens
atcaaatgggtagaa

SEQ ID NO: 892939 - DNA, 15 bp, Homo sapiens
tcaaatgggtagaaa

SEQ ID NO: 892940 - DNA, 15 bp, Homo sapiens
caaatgggtagaaaa

SEQ ID NO: 892941 - DNA, 15 bp, Homo sapiens
aaatgggtagaaaaa

SEQ ID NO: 892942 - DNA, 15 bp, Homo sapiens
aatgggtagaaaaat

SEQ ID NO: 892943 - DNA, 15 bp, Homo sapiens
atgggtagaaaaatc

SEQ ID NO: 892944 - DNA, 15 bp, Homo sapiens
tgggtagaaaaatct

SEQ ID NO: 892945 - DNA, 15 bp, Homo sapiens
gggtagaaaaatctc

SEQ ID NO: 892946 - DNA, 15 bp, Homo sapiens
ggtagaaaaatctcc

SEQ ID NO: 892947 - DNA, 15 bp, Homo sapiens
gtagaaaaatctcca

SEQ ID NO: 892948 - DNA, 15 bp, Homo sapiens
tagaaaaatctccac

SEQ ID NO: 892949 - DNA, 15 bp, Homo sapiens
agaaaaatctccacc

SEQ ID NO: 892950 - DNA, 15 bp, Homo sapiens
gaaaaatctccacct

SEQ ID NO: 892951 - DNA, 15 bp, Homo sapiens
aaaaatctccacctc

SEQ ID NO: 892952 - DNA, 15 bp, Homo sapiens
aaaatctccacctca

SEQ ID NO: 892953 - DNA, 15 bp, Homo sapiens
aaatctccacctcag

SEQ ID NO: 892954 - DNA, 15 bp, Homo sapiens
aatctccacctcagt

SEQ ID NO: 892955 - DNA, 15 bp, Homo sapiens
atctccacctcagtg

SEQ ID NO: 892956 - DNA, 15 bp, Homo sapiens
tctccacctcagtgg

SEQ ID NO: 892957 - DNA, 15 bp, Homo sapiens
ctccacctcagtggt

SEQ ID NO: 892958 - DNA, 15 bp, Homo sapiens
tccacctcagtggtc

SEQ ID NO: 892959 - DNA, 15 bp, Homo sapiens
ccacctcagtggtct

SEQ ID NO: 892960 - DNA, 15 bp, Homo sapiens
cacctcagtggtcta

SEQ ID NO: 892961 - DNA, 15 bp, Homo sapiens
acctcagtggtctat

SEQ ID NO: 892962 - DNA, 15 bp, Homo sapiens
cctcagtggtctatt

SEQ ID NO: 892963 - DNA, 15 bp, Homo sapiens
ctcagtggtctattg

SEQ ID NO: 892964 - DNA, 15 bp, Homo sapiens
tcagtggtctattgt

SEQ ID NO: 892965 - DNA, 15 bp, Homo sapiens
cagtggtctattgtg

SEQ ID NO: 892966 - DNA, 15 bp, Homo sapiens
agtggtctattgtga

SEQ ID NO: 892967 - DNA, 15 bp, Homo sapiens
gtggtctattgtgag

SEQ ID NO: 892968 - DNA, 15 bp, Homo sapiens
tggtctattgtgagc

SEQ ID NO: 892969 - DNA, 15 bp, Homo sapiens
ggtctattgtgagcc

SEQ ID NO: 892970 - DNA, 15 bp, Homo sapiens
gtctattgtgagcct

SEQ ID NO: 892971 - DNA, 15 bp, Homo sapiens
tctattgtgagccta

SEQ ID NO: 892972 - DNA, 15 bp, Homo sapiens
ctattgtgagcctat

SEQ ID NO: 892973 - DNA, 15 bp, Homo sapiens
tattgtgagcctatt

SEQ ID NO: 892974 - DNA, 15 bp, Homo sapiens
attgtgagcctattg

SEQ ID NO: 892975 - DNA, 15 bp, Homo sapiens
ttgtgagcctattgt

SEQ ID NO: 892976 - DNA, 15 bp, Homo sapiens
tgtgagcctattgtg

SEQ ID NO: 892977 - DNA, 15 bp, Homo sapiens
gtgagcctattgtgc

SEQ ID NO: 892978 - DNA, 15 bp, Homo sapiens
tgagcctattgtgct

SEQ ID NO: 892979 - DNA, 15 bp, Homo sapiens
gagcctattgtgcta

SEQ ID NO: 892980 - DNA, 15 bp, Homo sapiens
agcctattgtgctag

SEQ ID NO: 892981 - DNA, 15 bp, Homo sapiens
gcctattgtgctagt

SEQ ID NO: 892982 - DNA, 15 bp, Homo sapiens
cctattgtgctagta

SEQ ID NO: 892983 - DNA, 15 bp, Homo sapiens
ctattgtgctagtac

SEQ ID NO: 892984 - DNA, 15 bp, Homo sapiens
tattgtgctagtacc

SEQ ID NO: 892985 - DNA, 15 bp, Homo sapiens
attgtgctagtacct

SEQ ID NO: 892986 - DNA, 15 bp, Homo sapiens
ttgtgctagtacctt

SEQ ID NO: 892987 - DNA, 15 bp, Homo sapiens
tgtgctagtacctta

SEQ ID NO: 892988 - DNA, 15 bp, Homo sapiens
gtgctagtaccttaa

SEQ ID NO: 892989 - DNA, 15 bp, Homo sapiens
tgctagtaccttaag

SEQ ID NO: 892990 - DNA, 15 bp, Homo sapiens
gctagtaccttaaga

SEQ ID NO: 892991 - DNA, 15 bp, Homo sapiens
ctagtaccttaagaa

SEQ ID NO: 892992 - DNA, 15 bp, Homo sapiens
tagtaccttaagaag

SEQ ID NO: 892993 - DNA, 15 bp, Homo sapiens
agtaccttaagaagc

SEQ ID NO: 892994 - DNA, 15 bp, Homo sapiens
gtaccttaagaagct

SEQ ID NO: 892995 - DNA, 15 bp, Homo sapiens
taccttaagaagctg

SEQ ID NO: 892996 - DNA, 15 bp, Homo sapiens
accttaagaagctgt

SEQ ID NO: 892997 - DNA, 15 bp, Homo sapiens
ccttaagaagctgtt

SEQ ID NO: 892998 - DNA, 15 bp, Homo sapiens
cttaagaagctgttg

SEQ ID NO: 892999 - DNA, 15 bp, Homo sapiens
ttaagaagctgttgg

SEQ ID NO: 893000 - DNA, 15 bp, Homo sapiens
taagaagctgttgga

SEQ ID NO: 893001 - DNA, 15 bp, Homo sapiens
aagaagctgttggaa

SEQ ID NO: 893002 - DNA, 15 bp, Homo sapiens
agaagctgttggaag

SEQ ID NO: 893003 - DNA, 15 bp, Homo sapiens
gaagctgttggaaga

SEQ ID NO: 893004 - DNA, 15 bp, Homo sapiens
aagctgttggaagag

SEQ ID NO: 893005 - DNA, 15 bp, Homo sapiens
agctgttggaagagt

SEQ ID NO: 893006 - DNA, 15 bp, Homo sapiens
gctgttggaagagtc

SEQ ID NO: 893007 - DNA, 15 bp, Homo sapiens
ctgttggaagagtca

SEQ ID NO: 893008 - DNA, 15 bp, Homo sapiens
tgttggaagagtcag

SEQ ID NO: 893009 - DNA, 15 bp, Homo sapiens
gttggaagagtcaga

SEQ ID NO: 893010 - DNA, 15 bp, Homo sapiens
ttggaagagtcagag

SEQ ID NO: 893011 - DNA, 15 bp, Homo sapiens
tggaagagtcagaga

SEQ ID NO: 893012 - DNA, 15 bp, Homo sapiens
ggaagagtcagagaa

SEQ ID NO: 893013 - DNA, 15 bp, Homo sapiens
gaagagtcagagaag

SEQ ID NO: 893014 - DNA, 15 bp, Homo sapiens
aagagtcagagaaga

SEQ ID NO: 893015 - DNA, 15 bp, Homo sapiens
agagtcagagaagat

SEQ ID NO: 893016 - DNA, 15 bp, Homo sapiens
gagtcagagaagata

SEQ ID NO: 893017 - DNA, 15 bp, Homo sapiens
agtcagagaagatat

SEQ ID NO: 893018 - DNA, 15 bp, Homo sapiens
gtcagagaagatatt

SEQ ID NO: 893019 - DNA, 15 bp, Homo sapiens
tcagagaagatattt

SEQ ID NO: 893020 - DNA, 15 bp, Homo sapiens
cagagaagatatttt

SEQ ID NO: 893021 - DNA, 15 bp, Homo sapiens
agagaagatattttg

SEQ ID NO: 893022 - DNA, 15 bp, Homo sapiens
gagaagatattttgt

SEQ ID NO: 893023 - DNA, 15 bp, Homo sapiens
agaagatattttgtg

SEQ ID NO: 893024 - DNA, 15 bp, Homo sapiens
gaagatattttgtga

SEQ ID NO: 893025 - DNA, 15 bp, Homo sapiens
aagatattttgtgat

SEQ ID NO: 893026 - DNA, 15 bp, Homo sapiens
agatattttgtgatc

SEQ ID NO: 893027 - DNA, 15 bp, Homo sapiens
gatattttgtgatct

SEQ ID NO: 893028 - DNA, 15 bp, Homo sapiens
atattttgtgatctc

SEQ ID NO: 893029 - DNA, 15 bp, Homo sapiens
tattttgtgatctct

SEQ ID NO: 893030 - DNA, 15 bp, Homo sapiens
attttgtgatctctg

SEQ ID NO: 893031 - DNA, 15 bp, Homo sapiens
ttttgtgatctctga

SEQ ID NO: 893032 - DNA, 15 bp, Homo sapiens
tttgtgatctctgac

SEQ ID NO: 893033 - DNA, 15 bp, Homo sapiens
ttgtgatctctgaca

SEQ ID NO: 893034 - DNA, 15 bp, Homo sapiens
tgtgatctctgacac

SEQ ID NO: 893035 - DNA, 15 bp, Homo sapiens
gtgatctctgacacc

SEQ ID NO: 893036 - DNA, 15 bp, Homo sapiens
tgatctctgacaccc

SEQ ID NO: 893037 - DNA, 15 bp, Homo sapiens
gatctctgacacccc

SEQ ID NO: 893038 - DNA, 15 bp, Homo sapiens
atctctgacaccccg

SEQ ID NO: 893039 - DNA, 15 bp, Homo sapiens
tctctgacaccccgt

SEQ ID NO: 893040 - DNA, 15 bp, Homo sapiens
ctctgacaccccgta

SEQ ID NO: 893041 - DNA, 15 bp, Homo sapiens
tctgacaccccgtac

SEQ ID NO: 893042 - DNA, 15 bp, Homo sapiens
ctgacaccccgtact

SEQ ID NO: 893043 - DNA, 15 bp, Homo sapiens
tgacaccccgtacta

SEQ ID NO: 893044 - DNA, 15 bp, Homo sapiens
gacaccccgtactaa

SEQ ID NO: 893045 - DNA, 15 bp, Homo sapiens
acaccccgtactaat

SEQ ID NO: 893046 - DNA, 15 bp, Homo sapiens
caccccgtactaatg

SEQ ID NO: 893047 - DNA, 15 bp, Homo sapiens
accccgtactaatgc

SEQ ID NO: 893048 - DNA, 15 bp, Homo sapiens
ccccgtactaatgca

SEQ ID NO: 893049 - DNA, 15 bp, Homo sapiens
cccgtactaatgcaa

SEQ ID NO: 893050 - DNA, 15 bp, Homo sapiens
ccgtactaatgcaaa

SEQ ID NO: 893051 - DNA, 15 bp, Homo sapiens
cgtactaatgcaaac

SEQ ID NO: 893052 - DNA, 15 bp, Homo sapiens
gtactaatgcaaacc

SEQ ID NO: 893053 - DNA, 15 bp, Homo sapiens
tactaatgcaaaccg

SEQ ID NO: 893054 - DNA, 15 bp, Homo sapiens
actaatgcaaaccgt

SEQ ID NO: 893055 - DNA, 15 bp, Homo sapiens
ctaatgcaaaccgtc

SEQ ID NO: 893056 - DNA, 15 bp, Homo sapiens
taatgcaaaccgtca

SEQ ID NO: 893057 - DNA, 15 bp, Homo sapiens
aatgcaaaccgtcaa

SEQ ID NO: 893058 - DNA, 15 bp, Homo sapiens
atgcaaaccgtcaat

SEQ ID NO: 893059 - DNA, 15 bp, Homo sapiens
tgcaaaccgtcaata

SEQ ID NO: 893060 - DNA, 15 bp, Homo sapiens
gcaaaccgtcaatat

SEQ ID NO: 893061 - DNA, 15 bp, Homo sapiens
caaaccgtcaatatt

SEQ ID NO: 893062 - DNA, 15 bp, Homo sapiens
aaaccgtcaatattt

SEQ ID NO: 893063 - DNA, 15 bp, Homo sapiens
aaccgtcaatattta

SEQ ID NO: 893064 - DNA, 15 bp, Homo sapiens
accgtcaatatttat

SEQ ID NO: 893065 - DNA, 15 bp, Homo sapiens
ccgtcaatatttatt

SEQ ID NO: 893066 - DNA, 15 bp, Homo sapiens
cgtcaatatttattg

SEQ ID NO: 893067 - DNA, 15 bp, Homo sapiens
gtcaatatttattgt

SEQ ID NO: 893068 - DNA, 15 bp, Homo sapiens
tcaatatttattgtt

SEQ ID NO: 893069 - DNA, 15 bp, Homo sapiens
caatatttattgttg

SEQ ID NO: 893070 - DNA, 15 bp, Homo sapiens
aatatttattgttgc

SEQ ID NO: 893071 - DNA, 15 bp, Homo sapiens
atatttattgttgca

SEQ ID NO: 893072 - DNA, 15 bp, Homo sapiens
tatttattgttgcag

SEQ ID NO: 893073 - DNA, 15 bp, Homo sapiens
atttattgttgcagc

SEQ ID NO: 893074 - DNA, 15 bp, Homo sapiens
tttattgttgcagca

SEQ ID NO: 893075 - DNA, 15 bp, Homo sapiens
ttattgttgcagcat

SEQ ID NO: 893076 - DNA, 15 bp, Homo sapiens
tattgttgcagcatt

SEQ ID NO: 893077 - DNA, 15 bp, Homo sapiens
attgttgcagcattg

SEQ ID NO: 893078 - DNA, 15 bp, Homo sapiens
ttgttgcagcattgt

SEQ ID NO: 893079 - DNA, 15 bp, Homo sapiens
tgttgcagcattgtt

SEQ ID NO: 893080 - DNA, 15 bp, Homo sapiens
gttgcagcattgtta

SEQ ID NO: 893081 - DNA, 15 bp, Homo sapiens
ttgcagcattgttat

SEQ ID NO: 893082 - DNA, 15 bp, Homo sapiens
tgcagcattgttatt

SEQ ID NO: 893083 - DNA, 15 bp, Homo sapiens
gcagcattgttattt

SEQ ID NO: 893084 - DNA, 15 bp, Homo sapiens
cagcattgttatttt

SEQ ID NO: 893085 - DNA, 15 bp, Homo sapiens
agcattgttattttc

SEQ ID NO: 893086 - DNA, 15 bp, Homo sapiens
gcattgttattttct

SEQ ID NO: 893087 - DNA, 15 bp, Homo sapiens
cattgttattttctt

SEQ ID NO: 893088 - DNA, 15 bp, Homo sapiens
attgttattttcttg

SEQ ID NO: 893089 - DNA, 15 bp, Homo sapiens
ttgttattttcttgc

SEQ ID NO: 893090 - DNA, 15 bp, Homo sapiens
tgttattttcttgcc

SEQ ID NO: 893091 - DNA, 15 bp, Homo sapiens
gttattttcttgccc

SEQ ID NO: 893092 - DNA, 15 bp, Homo sapiens
ttattttcttgccct

SEQ ID NO: 893093 - DNA, 15 bp, Homo sapiens
tattttcttgccctc

SEQ ID NO: 893094 - DNA, 15 bp, Homo sapiens
attttcttgccctcc

SEQ ID NO: 893095 - DNA, 15 bp, Homo sapiens
ttttcttgccctcca

SEQ ID NO: 893096 - DNA, 15 bp, Homo sapiens
tttcttgccctccac

SEQ ID NO: 893097 - DNA, 15 bp, Homo sapiens
ttcttgccctccacc

SEQ ID NO: 893098 - DNA, 15 bp, Homo sapiens
tcttgccctccacct

SEQ ID NO: 893099 - DNA, 15 bp, Homo sapiens
cttgccctccacctg

SEQ ID NO: 893100 - DNA, 15 bp, Homo sapiens
ttgccctccacctgt

SEQ ID NO: 893101 - DNA, 15 bp, Homo sapiens
tgccctccacctgta

SEQ ID NO: 893102 - DNA, 15 bp, Homo sapiens
gccctccacctgtag

SEQ ID NO: 893103 - DNA, 15 bp, Homo sapiens
ccctccacctgtagc

SEQ ID NO: 893104 - DNA, 15 bp, Homo sapiens
cctccacctgtagcc

SEQ ID NO: 893105 - DNA, 15 bp, Homo sapiens
ctccacctgtagcca

SEQ ID NO: 893106 - DNA, 15 bp, Homo sapiens
tccacctgtagccat

SEQ ID NO: 893107 - DNA, 15 bp, Homo sapiens
ccacctgtagccatc

SEQ ID NO: 893108 - DNA, 15 bp, Homo sapiens
cacctgtagccatct

SEQ ID NO: 893109 - DNA, 15 bp, Homo sapiens
acctgtagccatctg

SEQ ID NO: 893110 - DNA, 15 bp, Homo sapiens
cctgtagccatctgt

SEQ ID NO: 893111 - DNA, 15 bp, Homo sapiens
ctgtagccatctgtc

SEQ ID NO: 893112 - DNA, 15 bp, Homo sapiens
tgtagccatctgtca

SEQ ID NO: 893113 - DNA, 15 bp, Homo sapiens
gtagccatctgtcac

SEQ ID NO: 893114 - DNA, 15 bp, Homo sapiens
tagccatctgtcaca

SEQ ID NO: 893115 - DNA, 15 bp, Homo sapiens
agccatctgtcacac

SEQ ID NO: 893116 - DNA, 15 bp, Homo sapiens
gccatctgtcacaca

SEQ ID NO: 893117 - DNA, 15 bp, Homo sapiens
ccatctgtcacacac

SEQ ID NO: 893118 - DNA, 15 bp, Homo sapiens
catctgtcacacaca

SEQ ID NO: 893119 - DNA, 15 bp, Homo sapiens
atctgtcacacacaa

SEQ ID NO: 893120 - DNA, 15 bp, Homo sapiens
tctgtcacacacaac

SEQ ID NO: 893121 - DNA, 15 bp, Homo sapiens
ctgtcacacacaacc

SEQ ID NO: 893122 - DNA, 15 bp, Homo sapiens
tgtcacacacaaccc

SEQ ID NO: 893123 - DNA, 15 bp, Homo sapiens
gtcacacacaacccc

SEQ ID NO: 893124 - DNA, 15 bp, Homo sapiens
tcacacacaaccccg

SEQ ID NO: 893125 - DNA, 15 bp, Homo sapiens
cacacacaaccccgc

SEQ ID NO: 893126 - DNA, 15 bp, Homo sapiens
acacacaaccccgca

SEQ ID NO: 893127 - DNA, 15 bp, Homo sapiens
cacacaaccccgcag

SEQ ID NO: 893128 - DNA, 15 bp, Homo sapiens
acacaaccccgcagc

SEQ ID NO: 893129 - DNA, 15 bp, Homo sapiens
cacaaccccgcagcc

SEQ ID NO: 893130 - DNA, 15 bp, Homo sapiens
acaaccccgcagcca

SEQ ID NO: 893131 - DNA, 15 bp, Homo sapiens
caaccccgcagccag

SEQ ID NO: 893132 - DNA, 15 bp, Homo sapiens
aaccccgcagccagc

SEQ ID NO: 893133 - DNA, 15 bp, Homo sapiens
accccgcagccagca

SEQ ID NO: 893134 - DNA, 15 bp, Homo sapiens
ccccgcagccagcaa

SEQ ID NO: 893135 - DNA, 15 bp, Homo sapiens
cccgcagccagcaaa

SEQ ID NO: 893136 - DNA, 15 bp, Homo sapiens
ccgcagccagcaaag

SEQ ID NO: 893137 - DNA, 15 bp, Homo sapiens
cgcagccagcaaagg

SEQ ID NO: 893138 - DNA, 15 bp, Homo sapiens
gcagccagcaaagga

SEQ ID NO: 893139 - DNA, 15 bp, Homo sapiens
cagccagcaaaggac

SEQ ID NO: 893140 - DNA, 15 bp, Homo sapiens
agccagcaaaggacc

SEQ ID NO: 893141 - DNA, 15 bp, Homo sapiens
gccagcaaaggacct

SEQ ID NO: 893142 - DNA, 15 bp, Homo sapiens
ccagcaaaggacctg

SEQ ID NO: 893143 - DNA, 15 bp, Homo sapiens
cagcaaaggacctgg

SEQ ID NO: 893144 - DNA, 15 bp, Homo sapiens
agcaaaggacctggg

SEQ ID NO: 893145 - DNA, 15 bp, Homo sapiens
gcaaaggacctgggt

SEQ ID NO: 893146 - DNA, 15 bp, Homo sapiens
caaaggacctgggtt

SEQ ID NO: 893147 - DNA, 15 bp, Homo sapiens
aaaggacctgggttt

SEQ ID NO: 893148 - DNA, 15 bp, Homo sapiens
aaggacctgggtttt

SEQ ID NO: 893149 - DNA, 15 bp, Homo sapiens
aggacctgggttttc

SEQ ID NO: 893150 - DNA, 15 bp, Homo sapiens
ggacctgggttttca

SEQ ID NO: 893151 - DNA, 15 bp, Homo sapiens
gacctgggttttcac

SEQ ID NO: 893152 - DNA, 15 bp, Homo sapiens
acctgggttttcacc

SEQ ID NO: 893153 - DNA, 15 bp, Homo sapiens
cctgggttttcaccc

SEQ ID NO: 893154 - DNA, 15 bp, Homo sapiens
ctgggttttcaccca

SEQ ID NO: 893155 - DNA, 15 bp, Homo sapiens
tgggttttcacccac

SEQ ID NO: 893156 - DNA, 15 bp, Homo sapiens
gggttttcacccaca

SEQ ID NO: 893157 - DNA, 15 bp, Homo sapiens
ggttttcacccacaa

SEQ ID NO: 893158 - DNA, 15 bp, Homo sapiens
gttttcacccacaaa

SEQ ID NO: 893159 - DNA, 15 bp, Homo sapiens
ttttcacccacaaac

SEQ ID NO: 893160 - DNA, 15 bp, Homo sapiens
tttcacccacaaacc

SEQ ID NO: 893161 - DNA, 15 bp, Homo sapiens
ttcacccacaaaccc

SEQ ID NO: 893162 - DNA, 15 bp, Homo sapiens
tcacccacaaaccct

SEQ ID NO: 893163 - DNA, 15 bp, Homo sapiens
cacccacaaaccctc

SEQ ID NO: 893164 - DNA, 15 bp, Homo sapiens
acccacaaaccctcg

SEQ ID NO: 893165 - DNA, 15 bp, Homo sapiens
cccacaaaccctcga

SEQ ID NO: 893166 - DNA, 15 bp, Homo sapiens
ccacaaaccctcgag

SEQ ID NO: 893167 - DNA, 15 bp, Homo sapiens
cacaaaccctcgagg

SEQ ID NO: 893168 - DNA, 15 bp, Homo sapiens
acaaaccctcgagga

SEQ ID NO: 893169 - DNA, 15 bp, Homo sapiens
caaaccctcgaggac

SEQ ID NO: 893170 - DNA, 15 bp, Homo sapiens
aaaccctcgaggaca

SEQ ID NO: 893171 - DNA, 15 bp, Homo sapiens
aaccctcgaggacag

SEQ ID NO: 893172 - DNA, 15 bp, Homo sapiens
accctcgaggacagg

SEQ ID NO: 893173 - DNA, 15 bp, Homo sapiens
ccctcgaggacaggg

SEQ ID NO: 893174 - DNA, 15 bp, Homo sapiens
cctcgaggacagggc

SEQ ID NO: 893175 - DNA, 15 bp, Homo sapiens
ctcgaggacagggct

SEQ ID NO: 893176 - DNA, 15 bp, Homo sapiens
tcgaggacagggctt

SEQ ID NO: 893177 - DNA, 15 bp, Homo sapiens
cgaggacagggcttg

SEQ ID NO: 893178 - DNA, 15 bp, Homo sapiens
gaggacagggcttgt

SEQ ID NO: 893179 - DNA, 15 bp, Homo sapiens
aggacagggcttgtc

SEQ ID NO: 893180 - DNA, 15 bp, Homo sapiens
ggacagggcttgtca

SEQ ID NO: 893181 - DNA, 15 bp, Homo sapiens
gacagggcttgtcaa

SEQ ID NO: 893182 - DNA, 15 bp, Homo sapiens
acagggcttgtcaat

SEQ ID NO: 893183 - DNA, 15 bp, Homo sapiens
cagggcttgtcaatg

SEQ ID NO: 893184 - DNA, 15 bp, Homo sapiens
agggcttgtcaatgc

SEQ ID NO: 893185 - DNA, 15 bp, Homo sapiens
gggcttgtcaatgcc

SEQ ID NO: 893186 - DNA, 15 bp, Homo sapiens
ggcttgtcaatgcct

SEQ ID NO: 893187 - DNA, 15 bp, Homo sapiens
gcttgtcaatgcctt

SEQ ID NO: 893188 - DNA, 15 bp, Homo sapiens
cttgtcaatgccttt

SEQ ID NO: 893189 - DNA, 15 bp, Homo sapiens
ttgtcaatgcctttt

SEQ ID NO: 893190 - DNA, 15 bp, Homo sapiens
tgtcaatgccttttg

SEQ ID NO: 893191 - DNA, 15 bp, Homo sapiens
gtcaatgccttttgg

SEQ ID NO: 893192 - DNA, 15 bp, Homo sapiens
tcaatgccttttggt

SEQ ID NO: 893193 - DNA, 15 bp, Homo sapiens
caatgccttttggtt

SEQ ID NO: 893194 - DNA, 15 bp, Homo sapiens
aatgccttttggttg

SEQ ID NO: 893195 - DNA, 15 bp, Homo sapiens
atgccttttggttgt

SEQ ID NO: 893196 - DNA, 15 bp, Homo sapiens
tgccttttggttgtg

SEQ ID NO: 893197 - DNA, 15 bp, Homo sapiens
gccttttggttgtgg

SEQ ID NO: 893198 - DNA, 15 bp, Homo sapiens
ccttttggttgtggc

SEQ ID NO: 893199 - DNA, 15 bp, Homo sapiens
cttttggttgtggct

SEQ ID NO: 893200 - DNA, 15 bp, Homo sapiens
ttttggttgtggctc

SEQ ID NO: 893201 - DNA, 15 bp, Homo sapiens
tttggttgtggctca

SEQ ID NO: 893202 - DNA, 15 bp, Homo sapiens
ttggttgtggctcat

SEQ ID NO: 893203 - DNA, 15 bp, Homo sapiens
tggttgtggctcatt

SEQ ID NO: 893204 - DNA, 15 bp, Homo sapiens
ggttgtggctcattt

SEQ ID NO: 893205 - DNA, 15 bp, Homo sapiens
gttgtggctcattta

SEQ ID NO: 893206 - DNA, 15 bp, Homo sapiens
ttgtggctcatttag

SEQ ID NO: 893207 - DNA, 15 bp, Homo sapiens
tgtggctcatttagg

SEQ ID NO: 893208 - DNA, 15 bp, Homo sapiens
gtggctcatttaggg

SEQ ID NO: 893209 - DNA, 15 bp, Homo sapiens
tggctcatttagggg

SEQ ID NO: 893210 - DNA, 15 bp, Homo sapiens
ggctcatttaggggg

SEQ ID NO: 893211 - DNA, 15 bp, Homo sapiens
gctcatttaggggga

SEQ ID NO: 893212 - DNA, 15 bp, Homo sapiens
ctcatttagggggag

SEQ ID NO: 893213 - DNA, 15 bp, Homo sapiens
tcatttagggggagc

SEQ ID NO: 893214 - DNA, 15 bp, Homo sapiens
catttagggggagca

SEQ ID NO: 893215 - DNA, 15 bp, Homo sapiens
atttagggggagcag

SEQ ID NO: 893216 - DNA, 15 bp, Homo sapiens
tttagggggagcaga

SEQ ID NO: 893217 - DNA, 15 bp, Homo sapiens
ttagggggagcagaa

SEQ ID NO: 893218 - DNA, 15 bp, Homo sapiens
tagggggagcagaag

SEQ ID NO: 893219 - DNA, 15 bp, Homo sapiens
agggggagcagaaga

SEQ ID NO: 893220 - DNA, 15 bp, Homo sapiens
gggggagcagaagac

SEQ ID NO: 893221 - DNA, 15 bp, Homo sapiens
ggggagcagaagacc

SEQ ID NO: 893222 - DNA, 15 bp, Homo sapiens
gggagcagaagaccc

SEQ ID NO: 893223 - DNA, 15 bp, Homo sapiens
ggagcagaagacccc

SEQ ID NO: 893224 - DNA, 15 bp, Homo sapiens
gagcagaagacccca

SEQ ID NO: 893225 - DNA, 15 bp, Homo sapiens
agcagaagaccccac

SEQ ID NO: 893226 - DNA, 15 bp, Homo sapiens
gcagaagaccccacg

SEQ ID NO: 893227 - DNA, 15 bp, Homo sapiens
cagaagaccccacgg

SEQ ID NO: 893228 - DNA, 15 bp, Homo sapiens
agaagaccccacggc

SEQ ID NO: 893229 - DNA, 15 bp, Homo sapiens
gaagaccccacggcc

SEQ ID NO: 893230 - DNA, 15 bp, Homo sapiens
aagaccccacggccc

SEQ ID NO: 893231 - DNA, 15 bp, Homo sapiens
agaccccacggcccc

SEQ ID NO: 893232 - DNA, 15 bp, Homo sapiens
gaccccacggccccc

SEQ ID NO: 893233 - DNA, 15 bp, Homo sapiens
accccacggcccccc

SEQ ID NO: 893234 - DNA, 15 bp, Homo sapiens
ccccacggcccccct

SEQ ID NO: 893235 - DNA, 15 bp, Homo sapiens
cccacggcccccctt

SEQ ID NO: 893236 - DNA, 15 bp, Homo sapiens
ccacggccccccttc

SEQ ID NO: 893237 - DNA, 15 bp, Homo sapiens
cacggccccccttcc

SEQ ID NO: 893238 - DNA, 15 bp, Homo sapiens
acggccccccttccc

SEQ ID NO: 893239 - DNA, 15 bp, Homo sapiens
cggccccccttccct

SEQ ID NO: 893240 - DNA, 15 bp, Homo sapiens
ggccccccttccctg

SEQ ID NO: 893241 - DNA, 15 bp, Homo sapiens
gccccccttccctgt

SEQ ID NO: 893242 - DNA, 15 bp, Homo sapiens
ccccccttccctgtt

SEQ ID NO: 893243 - DNA, 15 bp, Homo sapiens
cccccttccctgttt

SEQ ID NO: 893244 - DNA, 15 bp, Homo sapiens
ccccttccctgtttg

SEQ ID NO: 893245 - DNA, 15 bp, Homo sapiens
cccttccctgtttgt

SEQ ID NO: 893246 - DNA, 15 bp, Homo sapiens
ccttccctgtttgtt

SEQ ID NO: 893247 - DNA, 15 bp, Homo sapiens
cttccctgtttgttc

SEQ ID NO: 893248 - DNA, 15 bp, Homo sapiens
ttccctgtttgttcc

SEQ ID NO: 893249 - DNA, 15 bp, Homo sapiens
tccctgtttgttccc

SEQ ID NO: 893250 - DNA, 15 bp, Homo sapiens
ccctgtttgttccca

SEQ ID NO: 893251 - DNA, 15 bp, Homo sapiens
cctgtttgttcccac

SEQ ID NO: 893252 - DNA, 15 bp, Homo sapiens
ctgtttgttcccacc

SEQ ID NO: 893253 - DNA, 15 bp, Homo sapiens
tgtttgttcccacct

SEQ ID NO: 893254 - DNA, 15 bp, Homo sapiens
gtttgttcccacctt

SEQ ID NO: 893255 - DNA, 15 bp, Homo sapiens
tttgttcccaccttc

SEQ ID NO: 893256 - DNA, 15 bp, Homo sapiens
ttgttcccaccttcc

SEQ ID NO: 893257 - DNA, 15 bp, Homo sapiens
tgttcccaccttccc

SEQ ID NO: 893258 - DNA, 15 bp, Homo sapiens
gttcccaccttccct

SEQ ID NO: 893259 - DNA, 15 bp, Homo sapiens
ttcccaccttccctt

SEQ ID NO: 893260 - DNA, 15 bp, Homo sapiens
tcccaccttcccttg

SEQ ID NO: 893261 - DNA, 15 bp, Homo sapiens
cccaccttcccttgg

SEQ ID NO: 893262 - DNA, 15 bp, Homo sapiens
ccaccttcccttggg

SEQ ID NO: 893263 - DNA, 15 bp, Homo sapiens
caccttcccttggga

SEQ ID NO: 893264 - DNA, 15 bp, Homo sapiens
accttcccttgggaa

SEQ ID NO: 893265 - DNA, 15 bp, Homo sapiens
ccttcccttgggaag

SEQ ID NO: 893266 - DNA, 15 bp, Homo sapiens
cttcccttgggaaga

SEQ ID NO: 893267 - DNA, 15 bp, Homo sapiens
ttcccttgggaagaa

SEQ ID NO: 893268 - DNA, 15 bp, Homo sapiens
tcccttgggaagaat

SEQ ID NO: 893269 - DNA, 15 bp, Homo sapiens
cccttgggaagaatg

SEQ ID NO: 893270 - DNA, 15 bp, Homo sapiens
ccttgggaagaatgc

SEQ ID NO: 893271 - DNA, 15 bp, Homo sapiens
cttgggaagaatgct

SEQ ID NO: 893272 - DNA, 15 bp, Homo sapiens
ttgggaagaatgcta

SEQ ID NO: 893273 - DNA, 15 bp, Homo sapiens
tgggaagaatgctaa

SEQ ID NO: 893274 - DNA, 15 bp, Homo sapiens
gggaagaatgctaaa

SEQ ID NO: 893275 - DNA, 15 bp, Homo sapiens
ggaagaatgctaaag

SEQ ID NO: 893276 - DNA, 15 bp, Homo sapiens
gaagaatgctaaagt

SEQ ID NO: 893277 - DNA, 15 bp, Homo sapiens
aagaatgctaaagtt

SEQ ID NO: 893278 - DNA, 15 bp, Homo sapiens
agaatgctaaagttt

SEQ ID NO: 893279 - DNA, 15 bp, Homo sapiens
gaatgctaaagtttg

SEQ ID NO: 893280 - DNA, 15 bp, Homo sapiens
aatgctaaagtttgt

SEQ ID NO: 893281 - DNA, 15 bp, Homo sapiens
atgctaaagtttgtt

SEQ ID NO: 893282 - DNA, 15 bp, Homo sapiens
tgctaaagtttgttt

SEQ ID NO: 893283 - DNA, 15 bp, Homo sapiens
gctaaagtttgttta

SEQ ID NO: 893284 - DNA, 15 bp, Homo sapiens
ctaaagtttgtttat

SEQ ID NO: 893285 - DNA, 15 bp, Homo sapiens
taaagtttgtttatg

SEQ ID NO: 893286 - DNA, 15 bp, Homo sapiens
aaagtttgtttatga

SEQ ID NO: 893287 - DNA, 15 bp, Homo sapiens
aagtttgtttatgat

SEQ ID NO: 893288 - DNA, 15 bp, Homo sapiens
agtttgtttatgatt

SEQ ID NO: 893289 - DNA, 15 bp, Homo sapiens
gtttgtttatgattt

SEQ ID NO: 893290 - DNA, 15 bp, Homo sapiens
tttgtttatgatttc

SEQ ID NO: 893291 - DNA, 15 bp, Homo sapiens
ttgtttatgatttcc

SEQ ID NO: 893292 - DNA, 15 bp, Homo sapiens
tgtttatgatttcca

SEQ ID NO: 893293 - DNA, 15 bp, Homo sapiens
gtttatgatttccaa

SEQ ID NO: 893294 - DNA, 15 bp, Homo sapiens
tttatgatttccaaa

SEQ ID NO: 893295 - DNA, 15 bp, Homo sapiens
ttatgatttccaaat

SEQ ID NO: 893296 - DNA, 15 bp, Homo sapiens
tatgatttccaaata

SEQ ID NO: 893297 - DNA, 15 bp, Homo sapiens
atgatttccaaataa

SEQ ID NO: 893298 - DNA, 15 bp, Homo sapiens
tgatttccaaataat

SEQ ID NO: 893299 - DNA, 15 bp, Homo sapiens
gatttccaaataata

SEQ ID NO: 893300 - DNA, 15 bp, Homo sapiens
atttccaaataatat

SEQ ID NO: 893301 - DNA, 15 bp, Homo sapiens
tttccaaataatatg

SEQ ID NO: 893302 - DNA, 15 bp, Homo sapiens
ttccaaataatatgt

SEQ ID NO: 893303 - DNA, 15 bp, Homo sapiens
tccaaataatatgta

SEQ ID NO: 893304 - DNA, 15 bp, Homo sapiens
ccaaataatatgtag

SEQ ID NO: 893305 - DNA, 15 bp, Homo sapiens
caaataatatgtagc

SEQ ID NO: 893306 - DNA, 15 bp, Homo sapiens
aaataatatgtagcc

SEQ ID NO: 893307 - DNA, 15 bp, Homo sapiens
aataatatgtagccc

SEQ ID NO: 893308 - DNA, 15 bp, Homo sapiens
ataatatgtagccct

SEQ ID NO: 893309 - DNA, 15 bp, Homo sapiens
taatatgtagccctt

SEQ ID NO: 893310 - DNA, 15 bp, Homo sapiens
aatatgtagccctta

SEQ ID NO: 893311 - DNA, 15 bp, Homo sapiens
atatgtagcccttaa

SEQ ID NO: 893312 - DNA, 15 bp, Homo sapiens
tatgtagcccttaat

SEQ ID NO: 893313 - DNA, 15 bp, Homo sapiens
atgtagcccttaata

SEQ ID NO: 893314 - DNA, 15 bp, Homo sapiens
tgtagcccttaataa

SEQ ID NO: 893315 - DNA, 15 bp, Homo sapiens
gtagcccttaataac

SEQ ID NO: 893316 - DNA, 15 bp, Homo sapiens
tagcccttaataact

SEQ ID NO: 893317 - DNA, 15 bp, Homo sapiens
agcccttaataactt

SEQ ID NO: 893318 - DNA, 15 bp, Homo sapiens
gcccttaataactta

SEQ ID NO: 893319 - DNA, 15 bp, Homo sapiens
cccttaataacttat

SEQ ID NO: 893320 - DNA, 15 bp, Homo sapiens
ccttaataacttatt

SEQ ID NO: 893321 - DNA, 15 bp, Homo sapiens
cttaataacttattc

SEQ ID NO: 893322 - DNA, 15 bp, Homo sapiens
ttaataacttattca

SEQ ID NO: 893323 - DNA, 15 bp, Homo sapiens
taataacttattcag

SEQ ID NO: 893324 - DNA, 15 bp, Homo sapiens
aataacttattcaga

SEQ ID NO: 893325 - DNA, 15 bp, Homo sapiens
ataacttattcagag

SEQ ID NO: 893326 - DNA, 15 bp, Homo sapiens
taacttattcagagt

SEQ ID NO: 893327 - DNA, 15 bp, Homo sapiens
aacttattcagagta

SEQ ID NO: 893328 - DNA, 15 bp, Homo sapiens
acttattcagagtat

SEQ ID NO: 893329 - DNA, 15 bp, Homo sapiens
cttattcagagtatc

SEQ ID NO: 893330 - DNA, 15 bp, Homo sapiens
ttattcagagtatca

SEQ ID NO: 893331 - DNA, 15 bp, Homo sapiens
tattcagagtatcac

SEQ ID NO: 893332 - DNA, 15 bp, Homo sapiens
attcagagtatcacg

SEQ ID NO: 893333 - DNA, 15 bp, Homo sapiens
ttcagagtatcacga

SEQ ID NO: 893334 - DNA, 15 bp, Homo sapiens
tcagagtatcacgag

SEQ ID NO: 893335 - DNA, 15 bp, Homo sapiens
cagagtatcacgagc

SEQ ID NO: 893336 - DNA, 15 bp, Homo sapiens
agagtatcacgagca

SEQ ID NO: 893337 - DNA, 15 bp, Homo sapiens
gagtatcacgagcaa

SEQ ID NO: 893338 - DNA, 15 bp, Homo sapiens
agtatcacgagcaag

SEQ ID NO: 893339 - DNA, 15 bp, Homo sapiens
gtatcacgagcaagg

SEQ ID NO: 893340 - DNA, 15 bp, Homo sapiens
tatcacgagcaagga

SEQ ID NO: 893341 - DNA, 15 bp, Homo sapiens
atcacgagcaaggag

SEQ ID NO: 893342 - DNA, 15 bp, Homo sapiens
tcacgagcaaggagc

SEQ ID NO: 893343 - DNA, 15 bp, Homo sapiens
cacgagcaaggagcc

SEQ ID NO: 893344 - DNA, 15 bp, Homo sapiens
acgagcaaggagccc

SEQ ID NO: 893345 - DNA, 15 bp, Homo sapiens
cgagcaaggagccct

SEQ ID NO: 893346 - DNA, 15 bp, Homo sapiens
gagcaaggagccctt

SEQ ID NO: 893347 - DNA, 15 bp, Homo sapiens
agcaaggagcccttc

SEQ ID NO: 893348 - DNA, 15 bp, Homo sapiens
gcaaggagcccttcg

SEQ ID NO: 893349 - DNA, 15 bp, Homo sapiens
caaggagcccttcgg

SEQ ID NO: 893350 - DNA, 15 bp, Homo sapiens
aaggagcccttcggt

SEQ ID NO: 893351 - DNA, 15 bp, Homo sapiens
aggagcccttcggtt

SEQ ID NO: 893352 - DNA, 15 bp, Homo sapiens
ggagcccttcggtta

SEQ ID NO: 893353 - DNA, 15 bp, Homo sapiens
gagcccttcggttat

SEQ ID NO: 893354 - DNA, 15 bp, Homo sapiens
agcccttcggttata

SEQ ID NO: 893355 - DNA, 15 bp, Homo sapiens
gcccttcggttatac

SEQ ID NO: 893356 - DNA, 15 bp, Homo sapiens
cccttcggttatact

SEQ ID NO: 893357 - DNA, 15 bp, Homo sapiens
ccttcggttatactc

SEQ ID NO: 893358 - DNA, 15 bp, Homo sapiens
cttcggttatactca

SEQ ID NO: 893359 - DNA, 15 bp, Homo sapiens
ttcggttatactcat

SEQ ID NO: 893360 - DNA, 15 bp, Homo sapiens
tcggttatactcata

SEQ ID NO: 893361 - DNA, 15 bp, Homo sapiens
cggttatactcataa

SEQ ID NO: 893362 - DNA, 15 bp, Homo sapiens
ggttatactcataaa

SEQ ID NO: 893363 - DNA, 15 bp, Homo sapiens
gttatactcataaat

SEQ ID NO: 893364 - DNA, 15 bp, Homo sapiens
ttatactcataaatg

SEQ ID NO: 893365 - DNA, 15 bp, Homo sapiens
tatactcataaatgg

SEQ ID NO: 893366 - DNA, 15 bp, Homo sapiens
atactcataaatggc

SEQ ID NO: 893367 - DNA, 15 bp, Homo sapiens
tactcataaatggca

SEQ ID NO: 893368 - DNA, 15 bp, Homo sapiens
actcataaatggcag

SEQ ID NO: 893369 - DNA, 15 bp, Homo sapiens
ctcataaatggcagc

SEQ ID NO: 893370 - DNA, 15 bp, Homo sapiens
tcataaatggcagcc

SEQ ID NO: 893371 - DNA, 15 bp, Homo sapiens
cataaatggcagcct

SEQ ID NO: 893372 - DNA, 15 bp, Homo sapiens
ataaatggcagcctg

SEQ ID NO: 893373 - DNA, 15 bp, Homo sapiens
taaatggcagcctgt

SEQ ID NO: 893374 - DNA, 15 bp, Homo sapiens
aaatggcagcctgtt

SEQ ID NO: 893375 - DNA, 15 bp, Homo sapiens
aatggcagcctgttg

SEQ ID NO: 893376 - DNA, 15 bp, Homo sapiens
atggcagcctgttgc

SEQ ID NO: 893377 - DNA, 15 bp, Homo sapiens
tggcagcctgttgca

SEQ ID NO: 893378 - DNA, 15 bp, Homo sapiens
ggcagcctgttgcac

SEQ ID NO: 893379 - DNA, 15 bp, Homo sapiens
gcagcctgttgcact

SEQ ID NO: 893380 - DNA, 15 bp, Homo sapiens
cagcctgttgcactg

SEQ ID NO: 893381 - DNA, 15 bp, Homo sapiens
agcctgttgcactgt

SEQ ID NO: 893382 - DNA, 15 bp, Homo sapiens
gcctgttgcactgtg

SEQ ID NO: 893383 - DNA, 15 bp, Homo sapiens
cctgttgcactgtgt

SEQ ID NO: 893384 - DNA, 15 bp, Homo sapiens
ctgttgcactgtgta

SEQ ID NO: 893385 - DNA, 15 bp, Homo sapiens
tgttgcactgtgtat

SEQ ID NO: 893386 - DNA, 15 bp, Homo sapiens
gttgcactgtgtatc

SEQ ID NO: 893387 - DNA, 15 bp, Homo sapiens
ttgcactgtgtatct

SEQ ID NO: 893388 - DNA, 15 bp, Homo sapiens
tgcactgtgtatctc

SEQ ID NO: 893389 - DNA, 15 bp, Homo sapiens
gcactgtgtatctct

SEQ ID NO: 893390 - DNA, 15 bp, Homo sapiens
cactgtgtatctctc

SEQ ID NO: 893391 - DNA, 15 bp, Homo sapiens
actgtgtatctctcc

SEQ ID NO: 893392 - DNA, 15 bp, Homo sapiens
ctgtgtatctctccc

SEQ ID NO: 893393 - DNA, 15 bp, Homo sapiens
tgtgtatctctcccc

SEQ ID NO: 893394 - DNA, 15 bp, Homo sapiens
gtgtatctctccccc

SEQ ID NO: 893395 - DNA, 15 bp, Homo sapiens
tgtatctctccccca

SEQ ID NO: 893396 - DNA, 15 bp, Homo sapiens
gtatctctcccccag

SEQ ID NO: 893397 - DNA, 15 bp, Homo sapiens
tatctctcccccagg

SEQ ID NO: 893398 - DNA, 15 bp, Homo sapiens
atctctcccccaggg

SEQ ID NO: 893399 - DNA, 15 bp, Homo sapiens
tctctcccccaggga

SEQ ID NO: 893400 - DNA, 15 bp, Homo sapiens
ctctcccccagggaa

SEQ ID NO: 893401 - DNA, 15 bp, Homo sapiens
tctcccccagggaag

SEQ ID NO: 893402 - DNA, 15 bp, Homo sapiens
ctcccccagggaagc

SEQ ID NO: 893403 - DNA, 15 bp, Homo sapiens
tcccccagggaagca

SEQ ID NO: 893404 - DNA, 15 bp, Homo sapiens
cccccagggaagcag

SEQ ID NO: 893405 - DNA, 15 bp, Homo sapiens
aagttgtcattggat

SEQ ID NO: 893406 - DNA, 15 bp, Homo sapiens
agttgtcattggatg

SEQ ID NO: 893407 - DNA, 15 bp, Homo sapiens
gttgtcattggatgt

SEQ ID NO: 893408 - DNA, 15 bp, Homo sapiens
ttgtcattggatgtc

SEQ ID NO: 893409 - DNA, 15 bp, Homo sapiens
tgtcattggatgtca

SEQ ID NO: 893410 - DNA, 15 bp, Homo sapiens
gtcattggatgtcac

SEQ ID NO: 893411 - DNA, 15 bp, Homo sapiens
tcattggatgtcacc

SEQ ID NO: 893412 - DNA, 15 bp, Homo sapiens
cattggatgtcacct

SEQ ID NO: 893413 - DNA, 15 bp, Homo sapiens
attggatgtcacctc

SEQ ID NO: 893414 - DNA, 15 bp, Homo sapiens
ttggatgtcacctct

SEQ ID NO: 893415 - DNA, 15 bp, Homo sapiens
tggatgtcacctctg

SEQ ID NO: 893416 - DNA, 15 bp, Homo sapiens
ggatgtcacctctgc

SEQ ID NO: 893417 - DNA, 15 bp, Homo sapiens
gatgtcacctctgcc

SEQ ID NO: 893418 - DNA, 15 bp, Homo sapiens
atgtcacctctgccg

SEQ ID NO: 893419 - DNA, 15 bp, Homo sapiens
tgtcacctctgccga

SEQ ID NO: 893420 - DNA, 15 bp, Homo sapiens
gtcacctctgccgat

SEQ ID NO: 893421 - DNA, 15 bp, Homo sapiens
tcacctctgccgatc

SEQ ID NO: 893422 - DNA, 15 bp, Homo sapiens
cacctctgccgatcg

SEQ ID NO: 893423 - DNA, 15 bp, Homo sapiens
acctctgccgatcga

SEQ ID NO: 893424 - DNA, 15 bp, Homo sapiens
cctctgccgatcgat

SEQ ID NO: 893425 - DNA, 15 bp, Homo sapiens
ctctgccgatcgata

SEQ ID NO: 893426 - DNA, 15 bp, Homo sapiens
tctgccgatcgatag

SEQ ID NO: 893427 - DNA, 15 bp, Homo sapiens
ctgccgatcgatagg

SEQ ID NO: 893428 - DNA, 15 bp, Homo sapiens
tgccgatcgataggg

SEQ ID NO: 893429 - DNA, 15 bp, Homo sapiens
gccgatcgatagggg

SEQ ID NO: 893430 - DNA, 15 bp, Homo sapiens
ccgatcgatagggga

SEQ ID NO: 893431 - DNA, 15 bp, Homo sapiens
cgatcgataggggag

SEQ ID NO: 893432 - DNA, 15 bp, Homo sapiens
gatcgataggggagg

SEQ ID NO: 893433 - DNA, 15 bp, Homo sapiens
atcgataggggaggt

SEQ ID NO: 893434 - DNA, 15 bp, Homo sapiens
tcgataggggaggtg

SEQ ID NO: 893435 - DNA, 15 bp, Homo sapiens
cgataggggaggtgg

SEQ ID NO: 893436 - DNA, 15 bp, Homo sapiens
gataggggaggtgga

SEQ ID NO: 893437 - DNA, 15 bp, Homo sapiens
ataggggaggtggac

SEQ ID NO: 893438 - DNA, 15 bp, Homo sapiens
taggggaggtggacc

SEQ ID NO: 893439 - DNA, 15 bp, Homo sapiens
aggggaggtggacca

SEQ ID NO: 893440 - DNA, 15 bp, Homo sapiens
ggggaggtggaccag

SEQ ID NO: 893441 - DNA, 15 bp, Homo sapiens
gggaggtggaccagc

SEQ ID NO: 893442 - DNA, 15 bp, Homo sapiens
ggaggtggaccagct

SEQ ID NO: 893443 - DNA, 15 bp, Homo sapiens
gaggtggaccagctc

SEQ ID NO: 893444 - DNA, 15 bp, Homo sapiens
aggtggaccagctca

SEQ ID NO: 893445 - DNA, 15 bp, Homo sapiens
ggtggaccagctcac

SEQ ID NO: 893446 - DNA, 15 bp, Homo sapiens
gtggaccagctcact

SEQ ID NO: 893447 - DNA, 15 bp, Homo sapiens
tggaccagctcactg

SEQ ID NO: 893448 - DNA, 15 bp, Homo sapiens
ggaccagctcactgg

SEQ ID NO: 893449 - DNA, 15 bp, Homo sapiens
gaccagctcactggg

SEQ ID NO: 893450 - DNA, 15 bp, Homo sapiens
accagctcactggga

SEQ ID NO: 893451 - DNA, 15 bp, Homo sapiens
ccagctcactgggaa

SEQ ID NO: 893452 - DNA, 15 bp, Homo sapiens
cagctcactgggaag

SEQ ID NO: 893453 - DNA, 15 bp, Homo sapiens
agctcactgggaagg

SEQ ID NO: 893454 - DNA, 15 bp, Homo sapiens
gctcactgggaaggt

SEQ ID NO: 893455 - DNA, 15 bp, Homo sapiens
ctcactgggaaggtg

SEQ ID NO: 893456 - DNA, 15 bp, Homo sapiens
tcactgggaaggtgt

SEQ ID NO: 893457 - DNA, 15 bp, Homo sapiens
cactgggaaggtgtg

SEQ ID NO: 893458 - DNA, 15 bp, Homo sapiens
actgggaaggtgtga

SEQ ID NO: 893459 - DNA, 15 bp, Homo sapiens
ctgggaaggtgtgat

SEQ ID NO: 893460 - DNA, 15 bp, Homo sapiens
tgggaaggtgtgatg

SEQ ID NO: 893461 - DNA, 15 bp, Homo sapiens
gggaaggtgtgatgg

SEQ ID NO: 893462 - DNA, 15 bp, Homo sapiens
ggaaggtgtgatggg

SEQ ID NO: 893463 - DNA, 15 bp, Homo sapiens
gaaggtgtgatgggt

SEQ ID NO: 893464 - DNA, 15 bp, Homo sapiens
aaggtgtgatgggta

SEQ ID NO: 893465 - DNA, 15 bp, Homo sapiens
aggtgtgatgggtat

SEQ ID NO: 893466 - DNA, 15 bp, Homo sapiens
ggtgtgatgggtatc

SEQ ID NO: 893467 - DNA, 15 bp, Homo sapiens
gtgtgatgggtatcc

SEQ ID NO: 893468 - DNA, 15 bp, Homo sapiens
tgtgatgggtatccg

SEQ ID NO: 893469 - DNA, 15 bp, Homo sapiens
gtgatgggtatccgt

SEQ ID NO: 893470 - DNA, 15 bp, Homo sapiens
tgatgggtatccgtg

SEQ ID NO: 893471 - DNA, 15 bp, Homo sapiens
gatgggtatccgtgg

SEQ ID NO: 893472 - DNA, 15 bp, Homo sapiens
atgggtatccgtggt

SEQ ID NO: 893473 - DNA, 15 bp, Homo sapiens
tgggtatccgtggtg

SEQ ID NO: 893474 - DNA, 15 bp, Homo sapiens
gggtatccgtggtgc

SEQ ID NO: 893475 - DNA, 15 bp, Homo sapiens
ggtatccgtggtgcc

SEQ ID NO: 893476 - DNA, 15 bp, Homo sapiens
gtatccgtggtgcct

SEQ ID NO: 893477 - DNA, 15 bp, Homo sapiens
tatccgtggtgcctg

SEQ ID NO: 893478 - DNA, 15 bp, Homo sapiens
atccgtggtgcctga

SEQ ID NO: 893479 - DNA, 15 bp, Homo sapiens
tccgtggtgcctgac

SEQ ID NO: 893480 - DNA, 15 bp, Homo sapiens
ccgtggtgcctgacc

SEQ ID NO: 893481 - DNA, 15 bp, Homo sapiens
cgtggtgcctgaccc

SEQ ID NO: 893482 - DNA, 15 bp, Homo sapiens
gtggtgcctgaccct

SEQ ID NO: 893483 - DNA, 15 bp, Homo sapiens
tggtgcctgaccctg

SEQ ID NO: 893484 - DNA, 15 bp, Homo sapiens
ggtgcctgaccctgg

SEQ ID NO: 893485 - DNA, 15 bp, Homo sapiens
gtgcctgaccctggt

SEQ ID NO: 893486 - DNA, 15 bp, Homo sapiens
tgcctgaccctggtc

SEQ ID NO: 893487 - DNA, 15 bp, Homo sapiens
gcctgaccctggtct

SEQ ID NO: 893488 - DNA, 15 bp, Homo sapiens
cctgaccctggtctc

SEQ ID NO: 893489 - DNA, 15 bp, Homo sapiens
ctgaccctggtctct

SEQ ID NO: 893490 - DNA, 15 bp, Homo sapiens
tgaccctggtctctt

SEQ ID NO: 893491 - DNA, 15 bp, Homo sapiens
gaccctggtctcttc

SEQ ID NO: 893492 - DNA, 15 bp, Homo sapiens
accctggtctcttcc

SEQ ID NO: 893493 - DNA, 15 bp, Homo sapiens
ccctggtctcttccc

SEQ ID NO: 893494 - DNA, 15 bp, Homo sapiens
cctggtctcttccct

SEQ ID NO: 893495 - DNA, 15 bp, Homo sapiens
ctggtctcttccctt

SEQ ID NO: 893496 - DNA, 15 bp, Homo sapiens
tggtctcttcccttt

SEQ ID NO: 893497 - DNA, 15 bp, Homo sapiens
ggtctcttcccttta

SEQ ID NO: 893498 - DNA, 15 bp, Homo sapiens
gtctcttccctttag

SEQ ID NO: 893499 - DNA, 15 bp, Homo sapiens
tctcttccctttagc

SEQ ID NO: 893500 - DNA, 15 bp, Homo sapiens
ctcttccctttagcg

SEQ ID NO: 893501 - DNA, 15 bp, Homo sapiens
tcttccctttagcgg

SEQ ID NO: 893502 - DNA, 15 bp, Homo sapiens
cttccctttagcgga

SEQ ID NO: 893503 - DNA, 15 bp, Homo sapiens
ttccctttagcggag

SEQ ID NO: 893504 - DNA, 15 bp, Homo sapiens
tccctttagcggaga

SEQ ID NO: 893505 - DNA, 15 bp, Homo sapiens
ccctttagcggagat

SEQ ID NO: 893506 - DNA, 15 bp, Homo sapiens
cctttagcggagatg

SEQ ID NO: 893507 - DNA, 15 bp, Homo sapiens
ctttagcggagatgc

SEQ ID NO: 893508 - DNA, 15 bp, Homo sapiens
tttagcggagatgcc

SEQ ID NO: 893509 - DNA, 15 bp, Homo sapiens
ttagcggagatgccc

SEQ ID NO: 893510 - DNA, 15 bp, Homo sapiens
tagcggagatgcccg

SEQ ID NO: 893511 - DNA, 15 bp, Homo sapiens
agcggagatgcccgg

SEQ ID NO: 893512 - DNA, 15 bp, Homo sapiens
gcggagatgcccggg

SEQ ID NO: 893513 - DNA, 15 bp, Homo sapiens
cggagatgcccgggt

SEQ ID NO: 893514 - DNA, 15 bp, Homo sapiens
ggagatgcccgggta

SEQ ID NO: 893515 - DNA, 15 bp, Homo sapiens
gagatgcccgggtat

SEQ ID NO: 893516 - DNA, 15 bp, Homo sapiens
agatgcccgggtatg

SEQ ID NO: 893517 - DNA, 15 bp, Homo sapiens
gatgcccgggtatga

SEQ ID NO: 893518 - DNA, 15 bp, Homo sapiens
atgcccgggtatgag

SEQ ID NO: 893519 - DNA, 15 bp, Homo sapiens
tgcccgggtatgagg

SEQ ID NO: 893520 - DNA, 15 bp, Homo sapiens
gcccgggtatgaggg

SEQ ID NO: 893521 - DNA, 15 bp, Homo sapiens
cccgggtatgagggc

SEQ ID NO: 893522 - DNA, 15 bp, Homo sapiens
ccgggtatgagggca

SEQ ID NO: 893523 - DNA, 15 bp, Homo sapiens
cgggtatgagggcag

SEQ ID NO: 893524 - DNA, 15 bp, Homo sapiens
gggtatgagggcagc

SEQ ID NO: 893525 - DNA, 15 bp, Homo sapiens
ggtatgagggcagcc

SEQ ID NO: 893526 - DNA, 15 bp, Homo sapiens
gtatgagggcagcct

SEQ ID NO: 893527 - DNA, 15 bp, Homo sapiens
tatgagggcagcctg

SEQ ID NO: 893528 - DNA, 15 bp, Homo sapiens
atgagggcagcctgg

SEQ ID NO: 893529 - DNA, 15 bp, Homo sapiens
tgagggcagcctggc

SEQ ID NO: 893530 - DNA, 15 bp, Homo sapiens
gagggcagcctggct

SEQ ID NO: 893531 - DNA, 15 bp, Homo sapiens
agggcagcctggcta

SEQ ID NO: 893532 - DNA, 15 bp, Homo sapiens
gggcagcctggctaa

SEQ ID NO: 893533 - DNA, 15 bp, Homo sapiens
ggcagcctggctaag

SEQ ID NO: 893534 - DNA, 15 bp, Homo sapiens
gcagcctggctaagg

SEQ ID NO: 893535 - DNA, 15 bp, Homo sapiens
cagcctggctaaggg

SEQ ID NO: 893536 - DNA, 15 bp, Homo sapiens
agcctggctaagggg

SEQ ID NO: 893537 - DNA, 15 bp, Homo sapiens
gcctggctaagggga

SEQ ID NO: 893538 - DNA, 15 bp, Homo sapiens
cctggctaaggggag

SEQ ID NO: 893539 - DNA, 15 bp, Homo sapiens
ctggctaaggggagg

SEQ ID NO: 893540 - DNA, 15 bp, Homo sapiens
tggctaaggggaggg

SEQ ID NO: 893541 - DNA, 15 bp, Homo sapiens
ggctaaggggaggga

SEQ ID NO: 893542 - DNA, 15 bp, Homo sapiens
gctaaggggagggag

SEQ ID NO: 893543 - DNA, 15 bp, Homo sapiens
ctaaggggagggagt

SEQ ID NO: 893544 - DNA, 15 bp, Homo sapiens
taaggggagggagtc

SEQ ID NO: 893545 - DNA, 15 bp, Homo sapiens
aaggggagggagtca

SEQ ID NO: 893546 - DNA, 15 bp, Homo sapiens
aggggagggagtcaa

SEQ ID NO: 893547 - DNA, 15 bp, Homo sapiens
ggggagggagtcaag

SEQ ID NO: 893548 - DNA, 15 bp, Homo sapiens
gggagggagtcaaga

SEQ ID NO: 893549 - DNA, 15 bp, Homo sapiens
ggagggagtcaagaa

SEQ ID NO: 893550 - DNA, 15 bp, Homo sapiens
gagggagtcaagaat

SEQ ID NO: 893551 - DNA, 15 bp, Homo sapiens
agggagtcaagaatc

SEQ ID NO: 893552 - DNA, 15 bp, Homo sapiens
gggagtcaagaatct

SEQ ID NO: 893553 - DNA, 15 bp, Homo sapiens
ggagtcaagaatctc

SEQ ID NO: 893554 - DNA, 15 bp, Homo sapiens
gagtcaagaatctct

SEQ ID NO: 893555 - DNA, 15 bp, Homo sapiens
agtcaagaatctctg

SEQ ID NO: 893556 - DNA, 15 bp, Homo sapiens
gtcaagaatctctga

SEQ ID NO: 893557 - DNA, 15 bp, Homo sapiens
tcaagaatctctgaa

SEQ ID NO: 893558 - DNA, 15 bp, Homo sapiens
caagaatctctgaat

SEQ ID NO: 893559 - DNA, 15 bp, Homo sapiens
aagaatctctgaata

SEQ ID NO: 893560 - DNA, 15 bp, Homo sapiens
agaatctctgaatat

SEQ ID NO: 893561 - DNA, 15 bp, Homo sapiens
gaatctctgaatatt

SEQ ID NO: 893562 - DNA, 15 bp, Homo sapiens
aatctctgaatattt

SEQ ID NO: 893563 - DNA, 15 bp, Homo sapiens
atctctgaatatttg

SEQ ID NO: 893564 - DNA, 15 bp, Homo sapiens
tctctgaatatttga

SEQ ID NO: 893565 - DNA, 15 bp, Homo sapiens
ctctgaatatttgaa

SEQ ID NO: 893566 - DNA, 15 bp, Homo sapiens
tctgaatatttgaaa

SEQ ID NO: 893567 - DNA, 15 bp, Homo sapiens
ctgaatatttgaaac

SEQ ID NO: 893568 - DNA, 15 bp, Homo sapiens
tgaatatttgaaaca

SEQ ID NO: 893569 - DNA, 15 bp, Homo sapiens
gaatatttgaaacag

SEQ ID NO: 893570 - DNA, 15 bp, Homo sapiens
aatatttgaaacagt

SEQ ID NO: 893571 - DNA, 15 bp, Homo sapiens
atatttgaaacagtc

SEQ ID NO: 893572 - DNA, 15 bp, Homo sapiens
tatttgaaacagtct

SEQ ID NO: 893573 - DNA, 15 bp, Homo sapiens
atttgaaacagtcta

SEQ ID NO: 893574 - DNA, 15 bp, Homo sapiens
tttgaaacagtctag

SEQ ID NO: 893575 - DNA, 15 bp, Homo sapiens
ttgaaacagtctagt

SEQ ID NO: 893576 - DNA, 15 bp, Homo sapiens
tgaaacagtctagta

SEQ ID NO: 893577 - DNA, 15 bp, Homo sapiens
gaaacagtctagtag

SEQ ID NO: 893578 - DNA, 15 bp, Homo sapiens
aaacagtctagtagt

SEQ ID NO: 893579 - DNA, 15 bp, Homo sapiens
aacagtctagtagtt

SEQ ID NO: 893580 - DNA, 15 bp, Homo sapiens
acagtctagtagtta

SEQ ID NO: 893581 - DNA, 15 bp, Homo sapiens
cagtctagtagttaa

SEQ ID NO: 893582 - DNA, 15 bp, Homo sapiens
agtctagtagttaag

SEQ ID NO: 893583 - DNA, 15 bp, Homo sapiens
gtctagtagttaaga

SEQ ID NO: 893584 - DNA, 15 bp, Homo sapiens
tctagtagttaagag

SEQ ID NO: 893585 - DNA, 15 bp, Homo sapiens
ctagtagttaagaga

SEQ ID NO: 893586 - DNA, 15 bp, Homo sapiens
tagtagttaagagac

SEQ ID NO: 893587 - DNA, 15 bp, Homo sapiens
agtagttaagagacg

SEQ ID NO: 893588 - DNA, 15 bp, Homo sapiens
gtagttaagagacgc

SEQ ID NO: 893589 - DNA, 15 bp, Homo sapiens
tagttaagagacgcc

SEQ ID NO: 893590 - DNA, 15 bp, Homo sapiens
agttaagagacgcct

SEQ ID NO: 893591 - DNA, 15 bp, Homo sapiens
gttaagagacgcctg

SEQ ID NO: 893592 - DNA, 15 bp, Homo sapiens
ttaagagacgcctga

SEQ ID NO: 893593 - DNA, 15 bp, Homo sapiens
taagagacgcctgag

SEQ ID NO: 893594 - DNA, 15 bp, Homo sapiens
aagagacgcctgagc

SEQ ID NO: 893595 - DNA, 15 bp, Homo sapiens
agagacgcctgagca

SEQ ID NO: 893596 - DNA, 15 bp, Homo sapiens
gagacgcctgagcag

SEQ ID NO: 893597 - DNA, 15 bp, Homo sapiens
agacgcctgagcaga

SEQ ID NO: 893598 - DNA, 15 bp, Homo sapiens
gacgcctgagcagaa

SEQ ID NO: 893599 - DNA, 15 bp, Homo sapiens
acgcctgagcagaaa

SEQ ID NO: 893600 - DNA, 15 bp, Homo sapiens
cgcctgagcagaaaa

SEQ ID NO: 893601 - DNA, 15 bp, Homo sapiens
gcctgagcagaaaat

SEQ ID NO: 893602 - DNA, 15 bp, Homo sapiens
cctgagcagaaaata

SEQ ID NO: 893603 - DNA, 15 bp, Homo sapiens
ctgagcagaaaatag

SEQ ID NO: 893604 - DNA, 15 bp, Homo sapiens
tgagcagaaaataga

SEQ ID NO: 893605 - DNA, 15 bp, Homo sapiens
gagcagaaaatagag

SEQ ID NO: 893606 - DNA, 15 bp, Homo sapiens
agcagaaaatagagc

SEQ ID NO: 893607 - DNA, 15 bp, Homo sapiens
gcagaaaatagagca

SEQ ID NO: 893608 - DNA, 15 bp, Homo sapiens
cagaaaatagagcac

SEQ ID NO: 893609 - DNA, 15 bp, Homo sapiens
agaaaatagagcact

SEQ ID NO: 893610 - DNA, 15 bp, Homo sapiens
gaaaatagagcactt

SEQ ID NO: 893611 - DNA, 15 bp, Homo sapiens
aaaatagagcacttt

SEQ ID NO: 893612 - DNA, 15 bp, Homo sapiens
aaatagagcactttg

SEQ ID NO: 893613 - DNA, 15 bp, Homo sapiens
aatagagcactttgc

SEQ ID NO: 893614 - DNA, 15 bp, Homo sapiens
atagagcactttgca

SEQ ID NO: 893615 - DNA, 15 bp, Homo sapiens
tagagcactttgcag

SEQ ID NO: 893616 - DNA, 15 bp, Homo sapiens
agagcactttgcaga

SEQ ID NO: 893617 - DNA, 15 bp, Homo sapiens
gagcactttgcagaa

SEQ ID NO: 893618 - DNA, 15 bp, Homo sapiens
agcactttgcagaaa

SEQ ID NO: 893619 - DNA, 15 bp, Homo sapiens
gcactttgcagaaaa

SEQ ID NO: 893620 - DNA, 15 bp, Homo sapiens
cactttgcagaaaat

SEQ ID NO: 893621 - DNA, 15 bp, Homo sapiens
actttgcagaaaatc

SEQ ID NO: 893622 - DNA, 15 bp, Homo sapiens
ctttgcagaaaatct

SEQ ID NO: 893623 - DNA, 15 bp, Homo sapiens
tttgcagaaaatctc

SEQ ID NO: 893624 - DNA, 15 bp, Homo sapiens
ttgcagaaaatctct

SEQ ID NO: 893625 - DNA, 15 bp, Homo sapiens
tgcagaaaatctctt

SEQ ID NO: 893626 - DNA, 15 bp, Homo sapiens
gcagaaaatctcttt

SEQ ID NO: 893627 - DNA, 15 bp, Homo sapiens
cagaaaatctctttg

SEQ ID NO: 893628 - DNA, 15 bp, Homo sapiens
agaaaatctctttgg

SEQ ID NO: 893629 - DNA, 15 bp, Homo sapiens
gaaaatctctttgga

SEQ ID NO: 893630 - DNA, 15 bp, Homo sapiens
aaaatctctttggac

SEQ ID NO: 893631 - DNA, 15 bp, Homo sapiens
aaatctctttggact

SEQ ID NO: 893632 - DNA, 15 bp, Homo sapiens
aatctctttggacta

SEQ ID NO: 893633 - DNA, 15 bp, Homo sapiens
atctctttggactaa

SEQ ID NO: 893634 - DNA, 15 bp, Homo sapiens
tctctttggactaag

SEQ ID NO: 893635 - DNA, 15 bp, Homo sapiens
ctctttggactaagg

SEQ ID NO: 893636 - DNA, 15 bp, Homo sapiens
tctttggactaaggc

SEQ ID NO: 893637 - DNA, 15 bp, Homo sapiens
ctttggactaaggcc

SEQ ID NO: 893638 - DNA, 15 bp, Homo sapiens
tttggactaaggcct

SEQ ID NO: 893639 - DNA, 15 bp, Homo sapiens
ttggactaaggcctg

SEQ ID NO: 893640 - DNA, 15 bp, Homo sapiens
tggactaaggcctgt

SEQ ID NO: 893641 - DNA, 15 bp, Homo sapiens
ggactaaggcctgtc

SEQ ID NO: 893642 - DNA, 15 bp, Homo sapiens
gactaaggcctgtca

SEQ ID NO: 893643 - DNA, 15 bp, Homo sapiens
actaaggcctgtcac

SEQ ID NO: 893644 - DNA, 15 bp, Homo sapiens
ctaaggcctgtcacc

SEQ ID NO: 893645 - DNA, 15 bp, Homo sapiens
taaggcctgtcaccc

SEQ ID NO: 893646 - DNA, 15 bp, Homo sapiens
aaggcctgtcacccg

SEQ ID NO: 893647 - DNA, 15 bp, Homo sapiens
aggcctgtcacccgg

SEQ ID NO: 893648 - DNA, 15 bp, Homo sapiens
ggcctgtcacccgga

SEQ ID NO: 893649 - DNA, 15 bp, Homo sapiens
gcctgtcacccggac

SEQ ID NO: 893650 - DNA, 15 bp, Homo sapiens
cctgtcacccggaca

SEQ ID NO: 893651 - DNA, 15 bp, Homo sapiens
ctgtcacccggacac

SEQ ID NO: 893652 - DNA, 15 bp, Homo sapiens
tgtcacccggacact

SEQ ID NO: 893653 - DNA, 15 bp, Homo sapiens
gtcacccggacactg

SEQ ID NO: 893654 - DNA, 15 bp, Homo sapiens
tcacccggacactgg

SEQ ID NO: 893655 - DNA, 15 bp, Homo sapiens
cacccggacactggc

SEQ ID NO: 893656 - DNA, 15 bp, Homo sapiens
acccggacactggct

SEQ ID NO: 893657 - DNA, 15 bp, Homo sapiens
cccggacactggcta

SEQ ID NO: 893658 - DNA, 15 bp, Homo sapiens
ccggacactggctaa

SEQ ID NO: 893659 - DNA, 15 bp, Homo sapiens
cggacactggctaat

SEQ ID NO: 893660 - DNA, 15 bp, Homo sapiens
ggacactggctaatt

SEQ ID NO: 893661 - DNA, 15 bp, Homo sapiens
gacactggctaatta

SEQ ID NO: 893662 - DNA, 15 bp, Homo sapiens
acactggctaattaa

SEQ ID NO: 893663 - DNA, 15 bp, Homo sapiens
cactggctaattaaa

SEQ ID NO: 893664 - DNA, 15 bp, Homo sapiens
actggctaattaaac

SEQ ID NO: 893665 - DNA, 15 bp, Homo sapiens
ctggctaattaaaca

SEQ ID NO: 893666 - DNA, 15 bp, Homo sapiens
tggctaattaaacaa

SEQ ID NO: 893667 - DNA, 15 bp, Homo sapiens
ggctaattaaacaaa

SEQ ID NO: 893668 - DNA, 15 bp, Homo sapiens
gctaattaaacaaac

SEQ ID NO: 893669 - DNA, 15 bp, Homo sapiens
ctaattaaacaaaca

SEQ ID NO: 893670 - DNA, 15 bp, Homo sapiens
taattaaacaaacaa

SEQ ID NO: 893671 - DNA, 15 bp, Homo sapiens
aattaaacaaacaaa

SEQ ID NO: 893672 - DNA, 15 bp, Homo sapiens
attaaacaaacaaaa

SEQ ID NO: 893673 - DNA, 15 bp, Homo sapiens
ttaaacaaacaaaaa

SEQ ID NO: 893674 - DNA, 15 bp, Homo sapiens
taaacaaacaaaaac

SEQ ID NO: 893675 - DNA, 15 bp, Homo sapiens
aaacaaacaaaaacc

SEQ ID NO: 893676 - DNA, 15 bp, Homo sapiens
aacaaacaaaaacca

SEQ ID NO: 893677 - DNA, 15 bp, Homo sapiens
acaaacaaaaaccat

SEQ ID NO: 893678 - DNA, 15 bp, Homo sapiens
caaacaaaaaccata

SEQ ID NO: 893679 - DNA, 15 bp, Homo sapiens
aaacaaaaaccataa

SEQ ID NO: 893680 - DNA, 15 bp, Homo sapiens
aacaaaaaccataat

SEQ ID NO: 893681 - DNA, 15 bp, Homo sapiens
acaaaaaccataata

SEQ ID NO: 893682 - DNA, 15 bp, Homo sapiens
caaaaaccataatat

SEQ ID NO: 893683 - DNA, 15 bp, Homo sapiens
aaaaaccataatatg

SEQ ID NO: 893684 - DNA, 15 bp, Homo sapiens
aaaaccataatatgt

SEQ ID NO: 893685 - DNA, 15 bp, Homo sapiens
aaaccataatatgtt

SEQ ID NO: 893686 - DNA, 15 bp, Homo sapiens
aaccataatatgttt

SEQ ID NO: 893687 - DNA, 15 bp, Homo sapiens
accataatatgttta

SEQ ID NO: 893688 - DNA, 15 bp, Homo sapiens
ccataatatgtttat

SEQ ID NO: 893689 - DNA, 15 bp, Homo sapiens
cataatatgtttatt

SEQ ID NO: 893690 - DNA, 15 bp, Homo sapiens
ataatatgtttatta

SEQ ID NO: 893691 - DNA, 15 bp, Homo sapiens
taatatgtttattac

SEQ ID NO: 893692 - DNA, 15 bp, Homo sapiens
aatatgtttattact

SEQ ID NO: 893693 - DNA, 15 bp, Homo sapiens
atatgtttattactt

SEQ ID NO: 893694 - DNA, 15 bp, Homo sapiens
tatgtttattacttt

SEQ ID NO: 893695 - DNA, 15 bp, Homo sapiens
atgtttattacttta

SEQ ID NO: 893696 - DNA, 15 bp, Homo sapiens
tgtttattactttag

SEQ ID NO: 893697 - DNA, 15 bp, Homo sapiens
gtttattactttagg

SEQ ID NO: 893698 - DNA, 15 bp, Homo sapiens
tttattactttaggg

SEQ ID NO: 893699 - DNA, 15 bp, Homo sapiens
ttattactttaggga

SEQ ID NO: 893700 - DNA, 15 bp, Homo sapiens
tattactttagggac

SEQ ID NO: 893701 - DNA, 15 bp, Homo sapiens
attactttagggacc

SEQ ID NO: 893702 - DNA, 15 bp, Homo sapiens
ttactttagggacct

SEQ ID NO: 893703 - DNA, 15 bp, Homo sapiens
tactttagggacctg

SEQ ID NO: 893704 - DNA, 15 bp, Homo sapiens
actttagggacctgg

SEQ ID NO: 893705 - DNA, 15 bp, Homo sapiens
ctttagggacctggc

SEQ ID NO: 893706 - DNA, 15 bp, Homo sapiens
tttagggacctggca

SEQ ID NO: 893707 - DNA, 15 bp, Homo sapiens
ttagggacctggcaa

SEQ ID NO: 893708 - DNA, 15 bp, Homo sapiens
tagggacctggcaag

SEQ ID NO: 893709 - DNA, 15 bp, Homo sapiens
agggacctggcaagg

SEQ ID NO: 893710 - DNA, 15 bp, Homo sapiens
gggacctggcaagga

SEQ ID NO: 893711 - DNA, 15 bp, Homo sapiens
ggacctggcaaggag

SEQ ID NO: 893712 - DNA, 15 bp, Homo sapiens
gacctggcaaggaga

SEQ ID NO: 893713 - DNA, 15 bp, Homo sapiens
acctggcaaggagaa

SEQ ID NO: 893714 - DNA, 15 bp, Homo sapiens
cctggcaaggagaat

SEQ ID NO: 893715 - DNA, 15 bp, Homo sapiens
ctggcaaggagaata

SEQ ID NO: 893716 - DNA, 15 bp, Homo sapiens
tggcaaggagaataa

SEQ ID NO: 893717 - DNA, 15 bp, Homo sapiens
ggcaaggagaataaa

SEQ ID NO: 893718 - DNA, 15 bp, Homo sapiens
gcaaggagaataaag

SEQ ID NO: 893719 - DNA, 15 bp, Homo sapiens
caaggagaataaagt

SEQ ID NO: 893720 - DNA, 15 bp, Homo sapiens
aaggagaataaagtc

SEQ ID NO: 893721 - DNA, 15 bp, Homo sapiens
aggagaataaagtcc

SEQ ID NO: 893722 - DNA, 15 bp, Homo sapiens
ggagaataaagtccc

SEQ ID NO: 893723 - DNA, 15 bp, Homo sapiens
gagaataaagtcccc

SEQ ID NO: 893724 - DNA, 15 bp, Homo sapiens
agaataaagtccccc

SEQ ID NO: 893725 - DNA, 15 bp, Homo sapiens
gaataaagtccccct

SEQ ID NO: 893726 - DNA, 15 bp, Homo sapiens
aataaagtccccctg

SEQ ID NO: 893727 - DNA, 15 bp, Homo sapiens
ataaagtccccctga

SEQ ID NO: 893728 - DNA, 15 bp, Homo sapiens
taaagtccccctgat

SEQ ID NO: 893729 - DNA, 15 bp, Homo sapiens
aaagtccccctgata

SEQ ID NO: 893730 - DNA, 15 bp, Homo sapiens
aagtccccctgatat

SEQ ID NO: 893731 - DNA, 15 bp, Homo sapiens
agtccccctgatatc

SEQ ID NO: 893732 - DNA, 15 bp, Homo sapiens
gtccccctgatatct

SEQ ID NO: 893733 - DNA, 15 bp, Homo sapiens
tccccctgatatctg

SEQ ID NO: 893734 - DNA, 15 bp, Homo sapiens
ccccctgatatctgg

SEQ ID NO: 893735 - DNA, 15 bp, Homo sapiens
cccctgatatctggc

SEQ ID NO: 893736 - DNA, 15 bp, Homo sapiens
ccctgatatctggct

SEQ ID NO: 893737 - DNA, 15 bp, Homo sapiens
cctgatatctggcta

SEQ ID NO: 893738 - DNA, 15 bp, Homo sapiens
ctgatatctggctaa

SEQ ID NO: 893739 - DNA, 15 bp, Homo sapiens
tgatatctggctaaa

SEQ ID NO: 893740 - DNA, 15 bp, Homo sapiens
gatatctggctaaaa

SEQ ID NO: 893741 - DNA, 15 bp, Homo sapiens
atatctggctaaaat

SEQ ID NO: 893742 - DNA, 15 bp, Homo sapiens
tatctggctaaaatt

SEQ ID NO: 893743 - DNA, 15 bp, Homo sapiens
atctggctaaaattt

SEQ ID NO: 893744 - DNA, 15 bp, Homo sapiens
tctggctaaaatttc

SEQ ID NO: 893745 - DNA, 15 bp, Homo sapiens
ctggctaaaatttcc

SEQ ID NO: 893746 - DNA, 15 bp, Homo sapiens
tggctaaaatttccc

SEQ ID NO: 893747 - DNA, 15 bp, Homo sapiens
ggctaaaatttcccc

SEQ ID NO: 893748 - DNA, 15 bp, Homo sapiens
gctaaaatttcccct

SEQ ID NO: 893749 - DNA, 15 bp, Homo sapiens
ctaaaatttccccta

SEQ ID NO: 893750 - DNA, 15 bp, Homo sapiens
taaaatttcccctaa

SEQ ID NO: 893751 - DNA, 15 bp, Homo sapiens
aaaatttcccctaaa

SEQ ID NO: 893752 - DNA, 15 bp, Homo sapiens
aaatttcccctaaat

SEQ ID NO: 893753 - DNA, 15 bp, Homo sapiens
aatttcccctaaatt

SEQ ID NO: 893754 - DNA, 15 bp, Homo sapiens
atttcccctaaattc

SEQ ID NO: 893755 - DNA, 15 bp, Homo sapiens
tttcccctaaattcc

SEQ ID NO: 893756 - DNA, 15 bp, Homo sapiens
ttcccctaaattccc

SEQ ID NO: 893757 - DNA, 15 bp, Homo sapiens
tcccctaaattcccc

SEQ ID NO: 893758 - DNA, 15 bp, Homo sapiens
cccctaaattcccct

SEQ ID NO: 893759 - DNA, 15 bp, Homo sapiens
ccctaaattccccta

SEQ ID NO: 893760 - DNA, 15 bp, Homo sapiens
cctaaattcccctaa

SEQ ID NO: 893761 - DNA, 15 bp, Homo sapiens
ctaaattcccctaaa

SEQ ID NO: 893762 - DNA, 15 bp, Homo sapiens
taaattcccctaaaa

SEQ ID NO: 893763 - DNA, 15 bp, Homo sapiens
aaattcccctaaaat

SEQ ID NO: 893764 - DNA, 15 bp, Homo sapiens
aattcccctaaaatt

SEQ ID NO: 893765 - DNA, 15 bp, Homo sapiens
attcccctaaaattt

SEQ ID NO: 893766 - DNA, 15 bp, Homo sapiens
ttcccctaaaatttc

SEQ ID NO: 893767 - DNA, 15 bp, Homo sapiens
tcccctaaaatttcc

SEQ ID NO: 893768 - DNA, 15 bp, Homo sapiens
cccctaaaatttccc

SEQ ID NO: 893769 - DNA, 15 bp, Homo sapiens
ccctaaaatttcccc

SEQ ID NO: 893770 - DNA, 15 bp, Homo sapiens
cctaaaatttcccct

SEQ ID NO: 893771 - DNA, 15 bp, Homo sapiens
aaatttcccctaaaa

SEQ ID NO: 893772 - DNA, 15 bp, Homo sapiens
aatttcccctaaaat

SEQ ID NO: 893773 - DNA, 15 bp, Homo sapiens
atttcccctaaaatg

SEQ ID NO: 893774 - DNA, 15 bp, Homo sapiens
tttcccctaaaatgg

SEQ ID NO: 893775 - DNA, 15 bp, Homo sapiens
ttcccctaaaatgga

SEQ ID NO: 893776 - DNA, 15 bp, Homo sapiens
tcccctaaaatggag

SEQ ID NO: 893777 - DNA, 15 bp, Homo sapiens
cccctaaaatggagg

SEQ ID NO: 893778 - DNA, 15 bp, Homo sapiens
ccctaaaatggagga

SEQ ID NO: 893779 - DNA, 15 bp, Homo sapiens
cctaaaatggaggat

SEQ ID NO: 893780 - DNA, 15 bp, Homo sapiens
ctaaaatggaggatt

SEQ ID NO: 893781 - DNA, 15 bp, Homo sapiens
taaaatggaggatta

SEQ ID NO: 893782 - DNA, 15 bp, Homo sapiens
aaaatggaggattac

SEQ ID NO: 893783 - DNA, 15 bp, Homo sapiens
aaatggaggattaca

SEQ ID NO: 893784 - DNA, 15 bp, Homo sapiens
aatggaggattacat

SEQ ID NO: 893785 - DNA, 15 bp, Homo sapiens
atggaggattacatt

SEQ ID NO: 893786 - DNA, 15 bp, Homo sapiens
tggaggattacattg

SEQ ID NO: 893787 - DNA, 15 bp, Homo sapiens
ggaggattacattga

SEQ ID NO: 893788 - DNA, 15 bp, Homo sapiens
gaggattacattgat

SEQ ID NO: 893789 - DNA, 15 bp, Homo sapiens
aggattacattgata

SEQ ID NO: 893790 - DNA, 15 bp, Homo sapiens
ggattacattgatag

SEQ ID NO: 893791 - DNA, 15 bp, Homo sapiens
gattacattgatagc

SEQ ID NO: 893792 - DNA, 15 bp, Homo sapiens
attacattgatagct

SEQ ID NO: 893793 - DNA, 15 bp, Homo sapiens
ttacattgatagctt

SEQ ID NO: 893794 - DNA, 15 bp, Homo sapiens
tacattgatagcttc

SEQ ID NO: 893795 - DNA, 15 bp, Homo sapiens
acattgatagcttcc

SEQ ID NO: 893796 - DNA, 15 bp, Homo sapiens
cattgatagcttcct

SEQ ID NO: 893797 - DNA, 15 bp, Homo sapiens
attgatagcttcctg

SEQ ID NO: 893798 - DNA, 15 bp, Homo sapiens
ttgatagcttcctgg

SEQ ID NO: 893799 - DNA, 15 bp, Homo sapiens
tgatagcttcctggt

SEQ ID NO: 893800 - DNA, 15 bp, Homo sapiens
gatagcttcctggta

SEQ ID NO: 893801 - DNA, 15 bp, Homo sapiens
atagcttcctggtat

SEQ ID NO: 893802 - DNA, 15 bp, Homo sapiens
tagcttcctggtatt

SEQ ID NO: 893803 - DNA, 15 bp, Homo sapiens
agcttcctggtattt

SEQ ID NO: 893804 - DNA, 15 bp, Homo sapiens
gcttcctggtatttt

SEQ ID NO: 893805 - DNA, 15 bp, Homo sapiens
cttcctggtattttt

SEQ ID NO: 893806 - DNA, 15 bp, Homo sapiens
ttcctggtatttttg

SEQ ID NO: 893807 - DNA, 15 bp, Homo sapiens
tcctggtatttttgg

SEQ ID NO: 893808 - DNA, 15 bp, Homo sapiens
cctggtatttttggt

SEQ ID NO: 893809 - DNA, 15 bp, Homo sapiens
ctggtatttttggta

SEQ ID NO: 893810 - DNA, 15 bp, Homo sapiens
tggtatttttggtag

SEQ ID NO: 893811 - DNA, 15 bp, Homo sapiens
ggtatttttggtaga

SEQ ID NO: 893812 - DNA, 15 bp, Homo sapiens
gtatttttggtagaa

SEQ ID NO: 893813 - DNA, 15 bp, Homo sapiens
tatttttggtagaaa

SEQ ID NO: 893814 - DNA, 15 bp, Homo sapiens
atttttggtagaaat

SEQ ID NO: 893815 - DNA, 15 bp, Homo sapiens
tttttggtagaaatg

SEQ ID NO: 893816 - DNA, 15 bp, Homo sapiens
ttttggtagaaatgg

SEQ ID NO: 893817 - DNA, 15 bp, Homo sapiens
tttggtagaaatgga

SEQ ID NO: 893818 - DNA, 15 bp, Homo sapiens
ttggtagaaatggac

SEQ ID NO: 893819 - DNA, 15 bp, Homo sapiens
tggtagaaatggact

SEQ ID NO: 893820 - DNA, 15 bp, Homo sapiens
ggtagaaatggactc

SEQ ID NO: 893821 - DNA, 15 bp, Homo sapiens
gtagaaatggactct

SEQ ID NO: 893822 - DNA, 15 bp, Homo sapiens
tagaaatggactctg

SEQ ID NO: 893823 - DNA, 15 bp, Homo sapiens
agaaatggactctgg

SEQ ID NO: 893824 - DNA, 15 bp, Homo sapiens
gaaatggactctggt

SEQ ID NO: 893825 - DNA, 15 bp, Homo sapiens
aaatggactctggtt

SEQ ID NO: 893826 - DNA, 15 bp, Homo sapiens
aatggactctggtta

SEQ ID NO: 893827 - DNA, 15 bp, Homo sapiens
atggactctggttac

SEQ ID NO: 893828 - DNA, 15 bp, Homo sapiens
tggactctggttact

SEQ ID NO: 893829 - DNA, 15 bp, Homo sapiens
ggactctggttactt

SEQ ID NO: 893830 - DNA, 15 bp, Homo sapiens
gactctggttacttt

SEQ ID NO: 893831 - DNA, 15 bp, Homo sapiens
actctggttacttta

SEQ ID NO: 893832 - DNA, 15 bp, Homo sapiens
ctctggttactttaa

SEQ ID NO: 893833 - DNA, 15 bp, Homo sapiens
tctggttactttaaa

SEQ ID NO: 893834 - DNA, 15 bp, Homo sapiens
ctggttactttaaac

SEQ ID NO: 893835 - DNA, 15 bp, Homo sapiens
tggttactttaaaca

SEQ ID NO: 893836 - DNA, 15 bp, Homo sapiens
ggttactttaaacaa

SEQ ID NO: 893837 - DNA, 15 bp, Homo sapiens
gttactttaaacaaa

SEQ ID NO: 893838 - DNA, 15 bp, Homo sapiens
ttactttaaacaaat

SEQ ID NO: 893839 - DNA, 15 bp, Homo sapiens
tactttaaacaaata

SEQ ID NO: 893840 - DNA, 15 bp, Homo sapiens
actttaaacaaataa

SEQ ID NO: 893841 - DNA, 15 bp, Homo sapiens
ctttaaacaaataaa

SEQ ID NO: 893842 - DNA, 15 bp, Homo sapiens
tttaaacaaataaaa

SEQ ID NO: 893843 - DNA, 15 bp, Homo sapiens
ttaaacaaataaaaa

SEQ ID NO: 893844 - DNA, 15 bp, Homo sapiens
taaacaaataaaaac

SEQ ID NO: 893845 - DNA, 15 bp, Homo sapiens
aaacaaataaaaaca

SEQ ID NO: 893846 - DNA, 15 bp, Homo sapiens
aacaaataaaaacaa

SEQ ID NO: 893847 - DNA, 15 bp, Homo sapiens
acaaataaaaacaac

SEQ ID NO: 893848 - DNA, 15 bp, Homo sapiens
caaataaaaacaaca

SEQ ID NO: 893849 - DNA, 15 bp, Homo sapiens
aaataaaaacaacag

SEQ ID NO: 893850 - DNA, 15 bp, Homo sapiens
aataaaaacaacagc

SEQ ID NO: 893851 - DNA, 15 bp, Homo sapiens
ataaaaacaacagca

SEQ ID NO: 893852 - DNA, 15 bp, Homo sapiens
taaaaacaacagcaa

SEQ ID NO: 893853 - DNA, 15 bp, Homo sapiens
aaaaacaacagcaaa

SEQ ID NO: 893854 - DNA, 15 bp, Homo sapiens
aaaacaacagcaaat

SEQ ID NO: 893855 - DNA, 15 bp, Homo sapiens
aaacaacagcaaata

SEQ ID NO: 893856 - DNA, 15 bp, Homo sapiens
aacaacagcaaataa

SEQ ID NO: 893857 - DNA, 15 bp, Homo sapiens
acaacagcaaataaa

SEQ ID NO: 893858 - DNA, 15 bp, Homo sapiens
caacagcaaataaat

SEQ ID NO: 893859 - DNA, 15 bp, Homo sapiens
aacagcaaataaatt

SEQ ID NO: 893860 - DNA, 15 bp, Homo sapiens
acagcaaataaattt

SEQ ID NO: 893861 - DNA, 15 bp, Homo sapiens
cagcaaataaattta

SEQ ID NO: 893862 - DNA, 15 bp, Homo sapiens
agcaaataaatttac

SEQ ID NO: 893863 - DNA, 15 bp, Homo sapiens
gcaaataaatttacc

SEQ ID NO: 893864 - DNA, 15 bp, Homo sapiens
caaataaatttacca

SEQ ID NO: 893865 - DNA, 15 bp, Homo sapiens
aaataaatttaccag

SEQ ID NO: 893866 - DNA, 15 bp, Homo sapiens
aataaatttaccaga

SEQ ID NO: 893867 - DNA, 15 bp, Homo sapiens
ataaatttaccagag

SEQ ID NO: 893868 - DNA, 15 bp, Homo sapiens
taaatttaccagagg

SEQ ID NO: 893869 - DNA, 15 bp, Homo sapiens
aaatttaccagaggc

SEQ ID NO: 893870 - DNA, 15 bp, Homo sapiens
aatttaccagaggct

SEQ ID NO: 893871 - DNA, 15 bp, Homo sapiens
atttaccagaggctc

SEQ ID NO: 893872 - DNA, 15 bp, Homo sapiens
tttaccagaggctct

SEQ ID NO: 893873 - DNA, 15 bp, Homo sapiens
ttaccagaggctcta

SEQ ID NO: 893874 - DNA, 15 bp, Homo sapiens
taccagaggctctag

SEQ ID NO: 893875 - DNA, 15 bp, Homo sapiens
accagaggctctagg

SEQ ID NO: 893876 - DNA, 15 bp, Homo sapiens
ccagaggctctagga

SEQ ID NO: 893877 - DNA, 15 bp, Homo sapiens
cagaggctctaggac

SEQ ID NO: 893878 - DNA, 15 bp, Homo sapiens
agaggctctaggaca

SEQ ID NO: 893879 - DNA, 15 bp, Homo sapiens
gaggctctaggacag

SEQ ID NO: 893880 - DNA, 15 bp, Homo sapiens
aggctctaggacagc

SEQ ID NO: 893881 - DNA, 15 bp, Homo sapiens
ggctctaggacagct

SEQ ID NO: 893882 - DNA, 15 bp, Homo sapiens
gctctaggacagctt

SEQ ID NO: 893883 - DNA, 15 bp, Homo sapiens
ctctaggacagcttg

SEQ ID NO: 893884 - DNA, 15 bp, Homo sapiens
tctaggacagcttgc

SEQ ID NO: 893885 - DNA, 15 bp, Homo sapiens
ctaggacagcttgcg

SEQ ID NO: 893886 - DNA, 15 bp, Homo sapiens
taggacagcttgcgg

SEQ ID NO: 893887 - DNA, 15 bp, Homo sapiens
aggacagcttgcgga

SEQ ID NO: 893888 - DNA, 15 bp, Homo sapiens
ggacagcttgcggaa

SEQ ID NO: 893889 - DNA, 15 bp, Homo sapiens
gacagcttgcggaac

SEQ ID NO: 893890 - DNA, 15 bp, Homo sapiens
acagcttgcggaacc

SEQ ID NO: 893891 - DNA, 15 bp, Homo sapiens
cagcttgcggaacca

SEQ ID NO: 893892 - DNA, 15 bp, Homo sapiens
agcttgcggaaccat

SEQ ID NO: 893893 - DNA, 15 bp, Homo sapiens
gcttgcggaaccatg

SEQ ID NO: 893894 - DNA, 15 bp, Homo sapiens
cttgcggaaccatgg

SEQ ID NO: 893895 - DNA, 15 bp, Homo sapiens
ttgcggaaccatggg

SEQ ID NO: 893896 - DNA, 15 bp, Homo sapiens
tgcggaaccatggga

SEQ ID NO: 893897 - DNA, 15 bp, Homo sapiens
gcggaaccatgggaa

SEQ ID NO: 893898 - DNA, 15 bp, Homo sapiens
cggaaccatgggaaa

SEQ ID NO: 893899 - DNA, 15 bp, Homo sapiens
ggaaccatgggaaat

SEQ ID NO: 893900 - DNA, 15 bp, Homo sapiens
gaaccatgggaaatc

SEQ ID NO: 893901 - DNA, 15 bp, Homo sapiens
aaccatgggaaatca

SEQ ID NO: 893902 - DNA, 15 bp, Homo sapiens
accatgggaaatcac

SEQ ID NO: 893903 - DNA, 15 bp, Homo sapiens
ccatgggaaatcacg

SEQ ID NO: 893904 - DNA, 15 bp, Homo sapiens
catgggaaatcacgc

SEQ ID NO: 893905 - DNA, 15 bp, Homo sapiens
atgggaaatcacgcg

SEQ ID NO: 893906 - DNA, 15 bp, Homo sapiens
tgggaaatcacgcgg

SEQ ID NO: 893907 - DNA, 15 bp, Homo sapiens
gggaaatcacgcggg

SEQ ID NO: 893908 - DNA, 15 bp, Homo sapiens
ggaaatcacgcgggg

SEQ ID NO: 893909 - DNA, 15 bp, Homo sapiens
gaaatcacgcgggga

SEQ ID NO: 893910 - DNA, 15 bp, Homo sapiens
aaatcacgcggggac

SEQ ID NO: 893911 - DNA, 15 bp, Homo sapiens
aatcacgcggggacc

SEQ ID NO: 893912 - DNA, 15 bp, Homo sapiens
atcacgcggggacca

SEQ ID NO: 893913 - DNA, 15 bp, Homo sapiens
tcacgcggggaccat

SEQ ID NO: 893914 - DNA, 15 bp, Homo sapiens
cacgcggggaccatg

SEQ ID NO: 893915 - DNA, 15 bp, Homo sapiens
acgcggggaccatgg

SEQ ID NO: 893916 - DNA, 15 bp, Homo sapiens
cgcggggaccatggc

SEQ ID NO: 893917 - DNA, 15 bp, Homo sapiens
gcggggaccatggct

SEQ ID NO: 893918 - DNA, 15 bp, Homo sapiens
cggggaccatggctg

SEQ ID NO: 893919 - DNA, 15 bp, Homo sapiens
ggggaccatggctgg

SEQ ID NO: 893920 - DNA, 15 bp, Homo sapiens
gggaccatggctggg

SEQ ID NO: 893921 - DNA, 15 bp, Homo sapiens
ggaccatggctgggc

SEQ ID NO: 893922 - DNA, 15 bp, Homo sapiens
gaccatggctgggca

SEQ ID NO: 893923 - DNA, 15 bp, Homo sapiens
accatggctgggcat

SEQ ID NO: 893924 - DNA, 15 bp, Homo sapiens
ccatggctgggcatc

SEQ ID NO: 893925 - DNA, 15 bp, Homo sapiens
catggctgggcatct

SEQ ID NO: 893926 - DNA, 15 bp, Homo sapiens
atggctgggcatctc

SEQ ID NO: 893927 - DNA, 15 bp, Homo sapiens
tggctgggcatctct

SEQ ID NO: 893928 - DNA, 15 bp, Homo sapiens
ggctgggcatctctg

SEQ ID NO: 893929 - DNA, 15 bp, Homo sapiens
gctgggcatctctgt

SEQ ID NO: 893930 - DNA, 15 bp, Homo sapiens
ctgggcatctctgtg

SEQ ID NO: 893931 - DNA, 15 bp, Homo sapiens
tgggcatctctgtgg

SEQ ID NO: 893932 - DNA, 15 bp, Homo sapiens
gggcatctctgtggc

SEQ ID NO: 893933 - DNA, 15 bp, Homo sapiens
ggcatctctgtggct

SEQ ID NO: 893934 - DNA, 15 bp, Homo sapiens
gcatctctgtggctc

SEQ ID NO: 893935 - DNA, 15 bp, Homo sapiens
catctctgtggctcc

SEQ ID NO: 893936 - DNA, 15 bp, Homo sapiens
atctctgtggctcca

SEQ ID NO: 893937 - DNA, 15 bp, Homo sapiens
tctctgtggctccag

SEQ ID NO: 893938 - DNA, 15 bp, Homo sapiens
ctctgtggctccagg

SEQ ID NO: 893939 - DNA, 15 bp, Homo sapiens
tctgtggctccaggc

SEQ ID NO: 893940 - DNA, 15 bp, Homo sapiens
ctgtggctccaggcg

SEQ ID NO: 893941 - DNA, 15 bp, Homo sapiens
tgtggctccaggcgg

SEQ ID NO: 893942 - DNA, 15 bp, Homo sapiens
gtggctccaggcggc

SEQ ID NO: 893943 - DNA, 15 bp, Homo sapiens
tggctccaggcggca

SEQ ID NO: 893944 - DNA, 15 bp, Homo sapiens
ggctccaggcggcat

SEQ ID NO: 893945 - DNA, 15 bp, Homo sapiens
gctccaggcggcata

SEQ ID NO: 893946 - DNA, 15 bp, Homo sapiens
ctccaggcggcatag

SEQ ID NO: 893947 - DNA, 15 bp, Homo sapiens
tccaggcggcataga

SEQ ID NO: 893948 - DNA, 15 bp, Homo sapiens
ccaggcggcatagat

SEQ ID NO: 893949 - DNA, 15 bp, Homo sapiens
caggcggcatagatt

SEQ ID NO: 893950 - DNA, 15 bp, Homo sapiens
aggcggcatagattg

SEQ ID NO: 893951 - DNA, 15 bp, Homo sapiens
ggcggcatagattga

SEQ ID NO: 893952 - DNA, 15 bp, Homo sapiens
gcggcatagattgag

SEQ ID NO: 893953 - DNA, 15 bp, Homo sapiens
cggcatagattgagg

SEQ ID NO: 893954 - DNA, 15 bp, Homo sapiens
ggcatagattgaggg

SEQ ID NO: 893955 - DNA, 15 bp, Homo sapiens
gcatagattgagggg

SEQ ID NO: 893956 - DNA, 15 bp, Homo sapiens
catagattgaggggc

SEQ ID NO: 893957 - DNA, 15 bp, Homo sapiens
atagattgaggggct

SEQ ID NO: 893958 - DNA, 15 bp, Homo sapiens
tagattgaggggctg

SEQ ID NO: 893959 - DNA, 15 bp, Homo sapiens
agattgaggggctgt

SEQ ID NO: 893960 - DNA, 15 bp, Homo sapiens
gattgaggggctgtt

SEQ ID NO: 893961 - DNA, 15 bp, Homo sapiens
attgaggggctgttt

SEQ ID NO: 893962 - DNA, 15 bp, Homo sapiens
ttgaggggctgtttc

SEQ ID NO: 893963 - DNA, 15 bp, Homo sapiens
tgaggggctgtttct

SEQ ID NO: 893964 - DNA, 15 bp, Homo sapiens
gaggggctgtttctt

SEQ ID NO: 893965 - DNA, 15 bp, Homo sapiens
aggggctgtttcttg

SEQ ID NO: 893966 - DNA, 15 bp, Homo sapiens
ggggctgtttcttga

SEQ ID NO: 893967 - DNA, 15 bp, Homo sapiens
gggctgtttcttgaa

SEQ ID NO: 893968 - DNA, 15 bp, Homo sapiens
ggctgtttcttgaag

SEQ ID NO: 893969 - DNA, 15 bp, Homo sapiens
gctgtttcttgaagt

SEQ ID NO: 893970 - DNA, 15 bp, Homo sapiens
ctgtttcttgaagtc

SEQ ID NO: 893971 - DNA, 15 bp, Homo sapiens
tgtttcttgaagtct

SEQ ID NO: 893972 - DNA, 15 bp, Homo sapiens
gtttcttgaagtctt

SEQ ID NO: 893973 - DNA, 15 bp, Homo sapiens
tttcttgaagtcttt

SEQ ID NO: 893974 - DNA, 15 bp, Homo sapiens
ttcttgaagtctttg

SEQ ID NO: 893975 - DNA, 15 bp, Homo sapiens
tcttgaagtctttgt

SEQ ID NO: 893976 - DNA, 15 bp, Homo sapiens
cttgaagtctttgtc

SEQ ID NO: 893977 - DNA, 15 bp, Homo sapiens
ttgaagtctttgtca

SEQ ID NO: 893978 - DNA, 15 bp, Homo sapiens
tgaagtctttgtcaa

SEQ ID NO: 893979 - DNA, 15 bp, Homo sapiens
gaagtctttgtcaag

SEQ ID NO: 893980 - DNA, 15 bp, Homo sapiens
aagtctttgtcaaga

SEQ ID NO: 893981 - DNA, 15 bp, Homo sapiens
agtctttgtcaagac

SEQ ID NO: 893982 - DNA, 15 bp, Homo sapiens
gtctttgtcaagact

SEQ ID NO: 893983 - DNA, 15 bp, Homo sapiens
tctttgtcaagactc

SEQ ID NO: 893984 - DNA, 15 bp, Homo sapiens
ctttgtcaagactca

SEQ ID NO: 893985 - DNA, 15 bp, Homo sapiens
tttgtcaagactcac

SEQ ID NO: 893986 - DNA, 15 bp, Homo sapiens
ttgtcaagactcaca

SEQ ID NO: 893987 - DNA, 15 bp, Homo sapiens
tgtcaagactcacac

SEQ ID NO: 893988 - DNA, 15 bp, Homo sapiens
gtcaagactcacact

SEQ ID NO: 893989 - DNA, 15 bp, Homo sapiens
tcaagactcacactc

SEQ ID NO: 893990 - DNA, 15 bp, Homo sapiens
caagactcacactcc

SEQ ID NO: 893991 - DNA, 15 bp, Homo sapiens
aagactcacactcct

SEQ ID NO: 893992 - DNA, 15 bp, Homo sapiens
agactcacactcctg

SEQ ID NO: 893993 - DNA, 15 bp, Homo sapiens
gactcacactcctgg

SEQ ID NO: 893994 - DNA, 15 bp, Homo sapiens
actcacactcctggg

SEQ ID NO: 893995 - DNA, 15 bp, Homo sapiens
ctcacactcctgggg

SEQ ID NO: 893996 - DNA, 15 bp, Homo sapiens
tcacactcctggggg

SEQ ID NO: 893997 - DNA, 15 bp, Homo sapiens
cacactcctggggga

SEQ ID NO: 893998 - DNA, 15 bp, Homo sapiens
acactcctgggggag

SEQ ID NO: 893999 - DNA, 15 bp, Homo sapiens
cactcctgggggagc

SEQ ID NO: 894000 - DNA, 15 bp, Homo sapiens
actcctgggggagcg

SEQ ID NO: 894001 - DNA, 15 bp, Homo sapiens
ctcctgggggagcga

SEQ ID NO: 894002 - DNA, 15 bp, Homo sapiens
tcctgggggagcgat

SEQ ID NO: 894003 - DNA, 15 bp, Homo sapiens
cctgggggagcgatc

SEQ ID NO: 894004 - DNA, 15 bp, Homo sapiens
ctgggggagcgatca

SEQ ID NO: 894005 - DNA, 15 bp, Homo sapiens
tgggggagcgatcag

SEQ ID NO: 894006 - DNA, 15 bp, Homo sapiens
gggggagcgatcagg

SEQ ID NO: 894007 - DNA, 15 bp, Homo sapiens
ggggagcgatcagga

SEQ ID NO: 894008 - DNA, 15 bp, Homo sapiens
gggagcgatcaggag

SEQ ID NO: 894009 - DNA, 15 bp, Homo sapiens
ggagcgatcaggagc

SEQ ID NO: 894010 - DNA, 15 bp, Homo sapiens
gagcgatcaggagcc

SEQ ID NO: 894011 - DNA, 15 bp, Homo sapiens
agcgatcaggagcct

SEQ ID NO: 894012 - DNA, 15 bp, Homo sapiens
gcgatcaggagccta

SEQ ID NO: 894013 - DNA, 15 bp, Homo sapiens
cgatcaggagcctag

SEQ ID NO: 894014 - DNA, 15 bp, Homo sapiens
gatcaggagcctagc

SEQ ID NO: 894015 - DNA, 15 bp, Homo sapiens
atcaggagcctagca

SEQ ID NO: 894016 - DNA, 15 bp, Homo sapiens
tcaggagcctagcag

SEQ ID NO: 894017 - DNA, 15 bp, Homo sapiens
caggagcctagcagg

SEQ ID NO: 894018 - DNA, 15 bp, Homo sapiens
aggagcctagcaggg

SEQ ID NO: 894019 - DNA, 15 bp, Homo sapiens
ggagcctagcagggg

SEQ ID NO: 894020 - DNA, 15 bp, Homo sapiens
gagcctagcagggga

SEQ ID NO: 894021 - DNA, 15 bp, Homo sapiens
agcctagcaggggag

SEQ ID NO: 894022 - DNA, 15 bp, Homo sapiens
gcctagcaggggagg

SEQ ID NO: 894023 - DNA, 15 bp, Homo sapiens
cctagcaggggaggg

SEQ ID NO: 894024 - DNA, 15 bp, Homo sapiens
ctagcaggggagggt

SEQ ID NO: 894025 - DNA, 15 bp, Homo sapiens
tagcaggggagggtg

SEQ ID NO: 894026 - DNA, 15 bp, Homo sapiens
agcaggggagggtgg

SEQ ID NO: 894027 - DNA, 15 bp, Homo sapiens
gcaggggagggtgga

SEQ ID NO: 894028 - DNA, 15 bp, Homo sapiens
caggggagggtggaa

SEQ ID NO: 894029 - DNA, 15 bp, Homo sapiens
aggggagggtggaat

SEQ ID NO: 894030 - DNA, 15 bp, Homo sapiens
ggggagggtggaatc

SEQ ID NO: 894031 - DNA, 15 bp, Homo sapiens
gggagggtggaatct

SEQ ID NO: 894032 - DNA, 15 bp, Homo sapiens
ggagggtggaatctt

SEQ ID NO: 894033 - DNA, 15 bp, Homo sapiens
gagggtggaatcttt

SEQ ID NO: 894034 - DNA, 15 bp, Homo sapiens
agggtggaatctttg

SEQ ID NO: 894035 - DNA, 15 bp, Homo sapiens
gggtggaatctttgc

SEQ ID NO: 894036 - DNA, 15 bp, Homo sapiens
ggtggaatctttgct

SEQ ID NO: 894037 - DNA, 15 bp, Homo sapiens
gtggaatctttgctt

SEQ ID NO: 894038 - DNA, 15 bp, Homo sapiens
tggaatctttgcttg

SEQ ID NO: 894039 - DNA, 15 bp, Homo sapiens
ggaatctttgcttgc

SEQ ID NO: 894040 - DNA, 15 bp, Homo sapiens
gaatctttgcttgca

SEQ ID NO: 894041 - DNA, 15 bp, Homo sapiens
aatctttgcttgcat

SEQ ID NO: 894042 - DNA, 15 bp, Homo sapiens
atctttgcttgcatt

SEQ ID NO: 894043 - DNA, 15 bp, Homo sapiens
tctttgcttgcattg

SEQ ID NO: 894044 - DNA, 15 bp, Homo sapiens
ctttgcttgcattgg

SEQ ID NO: 894045 - DNA, 15 bp, Homo sapiens
tttgcttgcattggg

SEQ ID NO: 894046 - DNA, 15 bp, Homo sapiens
ttgcttgcattgggg

SEQ ID NO: 894047 - DNA, 15 bp, Homo sapiens
tgcttgcattggggt

SEQ ID NO: 894048 - DNA, 15 bp, Homo sapiens
gcttgcattggggtg

SEQ ID NO: 894049 - DNA, 15 bp, Homo sapiens
cttgcattggggtgg

SEQ ID NO: 894050 - DNA, 15 bp, Homo sapiens
ttgcattggggtgga

SEQ ID NO: 894051 - DNA, 15 bp, Homo sapiens
tgcattggggtggag

SEQ ID NO: 894052 - DNA, 15 bp, Homo sapiens
gcattggggtggagt

SEQ ID NO: 894053 - DNA, 15 bp, Homo sapiens
cattggggtggagtc

SEQ ID NO: 894054 - DNA, 15 bp, Homo sapiens
attggggtggagtca

SEQ ID NO: 894055 - DNA, 15 bp, Homo sapiens
ttggggtggagtcaa

SEQ ID NO: 894056 - DNA, 15 bp, Homo sapiens
tggggtggagtcaat

SEQ ID NO: 894057 - DNA, 15 bp, Homo sapiens
ggggtggagtcaatg

SEQ ID NO: 894058 - DNA, 15 bp, Homo sapiens
gggtggagtcaatgt

SEQ ID NO: 894059 - DNA, 15 bp, Homo sapiens
ggtggagtcaatgtc

SEQ ID NO: 894060 - DNA, 15 bp, Homo sapiens
gtggagtcaatgtcc

SEQ ID NO: 894061 - DNA, 15 bp, Homo sapiens
tggagtcaatgtcca

SEQ ID NO: 894062 - DNA, 15 bp, Homo sapiens
ggagtcaatgtccag

SEQ ID NO: 894063 - DNA, 15 bp, Homo sapiens
gagtcaatgtccagg

SEQ ID NO: 894064 - DNA, 15 bp, Homo sapiens
agtcaatgtccaggg

SEQ ID NO: 894065 - DNA, 15 bp, Homo sapiens
gtcaatgtccagggg

SEQ ID NO: 894066 - DNA, 15 bp, Homo sapiens
tcaatgtccagggga

SEQ ID NO: 894067 - DNA, 15 bp, Homo sapiens
caatgtccaggggaa

SEQ ID NO: 894068 - DNA, 15 bp, Homo sapiens
aatgtccaggggaaa

SEQ ID NO: 894069 - DNA, 15 bp, Homo sapiens
atgtccaggggaaaa

SEQ ID NO: 894070 - DNA, 15 bp, Homo sapiens
tgtccaggggaaaaa

SEQ ID NO: 894071 - DNA, 15 bp, Homo sapiens
gtccaggggaaaaac

SEQ ID NO: 894072 - DNA, 15 bp, Homo sapiens
tccaggggaaaaaca

SEQ ID NO: 894073 - DNA, 15 bp, Homo sapiens
ccaggggaaaaacaa

SEQ ID NO: 894074 - DNA, 15 bp, Homo sapiens
caggggaaaaacaag

SEQ ID NO: 894075 - DNA, 15 bp, Homo sapiens
aggggaaaaacaagg

SEQ ID NO: 894076 - DNA, 15 bp, Homo sapiens
ggggaaaaacaagga

SEQ ID NO: 894077 - DNA, 15 bp, Homo sapiens
gggaaaaacaaggag

SEQ ID NO: 894078 - DNA, 15 bp, Homo sapiens
ggaaaaacaaggagt

SEQ ID NO: 894079 - DNA, 15 bp, Homo sapiens
gaaaaacaaggagtt

SEQ ID NO: 894080 - DNA, 15 bp, Homo sapiens
aaaaacaaggagttg

SEQ ID NO: 894081 - DNA, 15 bp, Homo sapiens
aaaacaaggagttgc

SEQ ID NO: 894082 - DNA, 15 bp, Homo sapiens
aaacaaggagttgct

SEQ ID NO: 894083 - DNA, 15 bp, Homo sapiens
aacaaggagttgctg

SEQ ID NO: 894084 - DNA, 15 bp, Homo sapiens
acaaggagttgctgc

SEQ ID NO: 894085 - DNA, 15 bp, Homo sapiens
caaggagttgctgcc

SEQ ID NO: 894086 - DNA, 15 bp, Homo sapiens
aaggagttgctgcct

SEQ ID NO: 894087 - DNA, 15 bp, Homo sapiens
aggagttgctgccta

SEQ ID NO: 894088 - DNA, 15 bp, Homo sapiens
ggagttgctgcctaa

SEQ ID NO: 894089 - DNA, 15 bp, Homo sapiens
gagttgctgcctaaa

SEQ ID NO: 894090 - DNA, 15 bp, Homo sapiens
agttgctgcctaaag

SEQ ID NO: 894091 - DNA, 15 bp, Homo sapiens
gttgctgcctaaaga

SEQ ID NO: 894092 - DNA, 15 bp, Homo sapiens
ttgctgcctaaagaa

SEQ ID NO: 894093 - DNA, 15 bp, Homo sapiens
tgctgcctaaagaaa

SEQ ID NO: 894094 - DNA, 15 bp, Homo sapiens
gctgcctaaagaaag

SEQ ID NO: 894095 - DNA, 15 bp, Homo sapiens
ctgcctaaagaaaga

SEQ ID NO: 894096 - DNA, 15 bp, Homo sapiens
tgcctaaagaaagag

SEQ ID NO: 894097 - DNA, 15 bp, Homo sapiens
gcctaaagaaagagg

SEQ ID NO: 894098 - DNA, 15 bp, Homo sapiens
cctaaagaaagagga

SEQ ID NO: 894099 - DNA, 15 bp, Homo sapiens
ctaaagaaagaggag

SEQ ID NO: 894100 - DNA, 15 bp, Homo sapiens
taaagaaagaggaga

SEQ ID NO: 894101 - DNA, 15 bp, Homo sapiens
aaagaaagaggagag

SEQ ID NO: 894102 - DNA, 15 bp, Homo sapiens
aagaaagaggagaga

SEQ ID NO: 894103 - DNA, 15 bp, Homo sapiens
agaaagaggagagaa

SEQ ID NO: 894104 - DNA, 15 bp, Homo sapiens
gaaagaggagagaag

SEQ ID NO: 894105 - DNA, 15 bp, Homo sapiens
aaagaggagagaagg

SEQ ID NO: 894106 - DNA, 15 bp, Homo sapiens
aagaggagagaagga

SEQ ID NO: 894107 - DNA, 15 bp, Homo sapiens
agaggagagaaggaa

SEQ ID NO: 894108 - DNA, 15 bp, Homo sapiens
gaggagagaaggaaa

SEQ ID NO: 894109 - DNA, 15 bp, Homo sapiens
aggagagaaggaaag

SEQ ID NO: 894110 - DNA, 15 bp, Homo sapiens
ggagagaaggaaagc

SEQ ID NO: 894111 - DNA, 15 bp, Homo sapiens
gagagaaggaaagca

SEQ ID NO: 894112 - DNA, 15 bp, Homo sapiens
agagaaggaaagcaa

SEQ ID NO: 894113 - DNA, 15 bp, Homo sapiens
gagaaggaaagcaac

SEQ ID NO: 894114 - DNA, 15 bp, Homo sapiens
agaaggaaagcaacc

SEQ ID NO: 894115 - DNA, 15 bp, Homo sapiens
gaaggaaagcaacca

SEQ ID NO: 894116 - DNA, 15 bp, Homo sapiens
aaggaaagcaaccac

SEQ ID NO: 894117 - DNA, 15 bp, Homo sapiens
aggaaagcaaccacc

SEQ ID NO: 894118 - DNA, 15 bp, Homo sapiens
ggaaagcaaccacca

SEQ ID NO: 894119 - DNA, 15 bp, Homo sapiens
gaaagcaaccaccag

SEQ ID NO: 894120 - DNA, 15 bp, Homo sapiens
aaagcaaccaccagc

SEQ ID NO: 894121 - DNA, 15 bp, Homo sapiens
aagcaaccaccagca

SEQ ID NO: 894122 - DNA, 15 bp, Homo sapiens
agcaaccaccagcag

SEQ ID NO: 894123 - DNA, 15 bp, Homo sapiens
gcaaccaccagcaga

SEQ ID NO: 894124 - DNA, 15 bp, Homo sapiens
caaccaccagcagaa

SEQ ID NO: 894125 - DNA, 15 bp, Homo sapiens
aaccaccagcagaat

SEQ ID NO: 894126 - DNA, 15 bp, Homo sapiens
accaccagcagaatg

SEQ ID NO: 894127 - DNA, 15 bp, Homo sapiens
ccaccagcagaatgt

SEQ ID NO: 894128 - DNA, 15 bp, Homo sapiens
caccagcagaatgtg

SEQ ID NO: 894129 - DNA, 15 bp, Homo sapiens
accagcagaatgtgc

SEQ ID NO: 894130 - DNA, 15 bp, Homo sapiens
ccagcagaatgtgcc

SEQ ID NO: 894131 - DNA, 15 bp, Homo sapiens
cagcagaatgtgccc

SEQ ID NO: 894132 - DNA, 15 bp, Homo sapiens
agcagaatgtgccca

SEQ ID NO: 894133 - DNA, 15 bp, Homo sapiens
gcagaatgtgcccat

SEQ ID NO: 894134 - DNA, 15 bp, Homo sapiens
cagaatgtgcccatt

SEQ ID NO: 894135 - DNA, 15 bp, Homo sapiens
agaatgtgcccattc

SEQ ID NO: 894136 - DNA, 15 bp, Homo sapiens
gaatgtgcccattct

SEQ ID NO: 894137 - DNA, 15 bp, Homo sapiens
aatgtgcccattctg

SEQ ID NO: 894138 - DNA, 15 bp, Homo sapiens
atgtgcccattctgc

SEQ ID NO: 894139 - DNA, 15 bp, Homo sapiens
tgtgcccattctgct

SEQ ID NO: 894140 - DNA, 15 bp, Homo sapiens
gtgcccattctgctt

SEQ ID NO: 894141 - DNA, 15 bp, Homo sapiens
tgcccattctgcttt

SEQ ID NO: 894142 - DNA, 15 bp, Homo sapiens
gcccattctgctttg

SEQ ID NO: 894143 - DNA, 15 bp, Homo sapiens
cccattctgctttgt

SEQ ID NO: 894144 - DNA, 15 bp, Homo sapiens
ccattctgctttgtc

SEQ ID NO: 894145 - DNA, 15 bp, Homo sapiens
cattctgctttgtcc

SEQ ID NO: 894146 - DNA, 15 bp, Homo sapiens
attctgctttgtccc

SEQ ID NO: 894147 - DNA, 15 bp, Homo sapiens
ttctgctttgtccca

SEQ ID NO: 894148 - DNA, 15 bp, Homo sapiens
tctgctttgtcccag

SEQ ID NO: 894149 - DNA, 15 bp, Homo sapiens
ctgctttgtcccagg

SEQ ID NO: 894150 - DNA, 15 bp, Homo sapiens
tgctttgtcccaggt

SEQ ID NO: 894151 - DNA, 15 bp, Homo sapiens
gctttgtcccaggtg

SEQ ID NO: 894152 - DNA, 15 bp, Homo sapiens
ctttgtcccaggtgg

SEQ ID NO: 894153 - DNA, 15 bp, Homo sapiens
tttgtcccaggtggc

SEQ ID NO: 894154 - DNA, 15 bp, Homo sapiens
ttgtcccaggtggct

SEQ ID NO: 894155 - DNA, 15 bp, Homo sapiens
tgtcccaggtggctt

SEQ ID NO: 894156 - DNA, 15 bp, Homo sapiens
gtcccaggtggcttc

SEQ ID NO: 894157 - DNA, 15 bp, Homo sapiens
tcccaggtggcttca

SEQ ID NO: 894158 - DNA, 15 bp, Homo sapiens
cccaggtggcttcaa

SEQ ID NO: 894159 - DNA, 15 bp, Homo sapiens
ccaggtggcttcaag

SEQ ID NO: 894160 - DNA, 15 bp, Homo sapiens
caggtggcttcaagc

SEQ ID NO: 894161 - DNA, 15 bp, Homo sapiens
aggtggcttcaagcc

SEQ ID NO: 894162 - DNA, 15 bp, Homo sapiens
ggtggcttcaagccc

SEQ ID NO: 894163 - DNA, 15 bp, Homo sapiens
gtggcttcaagccct

SEQ ID NO: 894164 - DNA, 15 bp, Homo sapiens
tggcttcaagccctg

SEQ ID NO: 894165 - DNA, 15 bp, Homo sapiens
ggcttcaagccctga

SEQ ID NO: 894166 - DNA, 15 bp, Homo sapiens
gcttcaagccctgaa

SEQ ID NO: 894167 - DNA, 15 bp, Homo sapiens
cttcaagccctgaaa

SEQ ID NO: 894168 - DNA, 15 bp, Homo sapiens
ttcaagccctgaaat

SEQ ID NO: 894169 - DNA, 15 bp, Homo sapiens
tcaagccctgaaata

SEQ ID NO: 894170 - DNA, 15 bp, Homo sapiens
caagccctgaaataa

SEQ ID NO: 894171 - DNA, 15 bp, Homo sapiens
aagccctgaaataag

SEQ ID NO: 894172 - DNA, 15 bp, Homo sapiens
agccctgaaataaga

SEQ ID NO: 894173 - DNA, 15 bp, Homo sapiens
gccctgaaataagaa

SEQ ID NO: 894174 - DNA, 15 bp, Homo sapiens
ccctgaaataagaaa

SEQ ID NO: 894175 - DNA, 15 bp, Homo sapiens
cctgaaataagaaag

SEQ ID NO: 894176 - DNA, 15 bp, Homo sapiens
ctgaaataagaaagc

SEQ ID NO: 894177 - DNA, 15 bp, Homo sapiens
tgaaataagaaagca

SEQ ID NO: 894178 - DNA, 15 bp, Homo sapiens
gaaataagaaagcag

SEQ ID NO: 894179 - DNA, 15 bp, Homo sapiens
aaataagaaagcagt

SEQ ID NO: 894180 - DNA, 15 bp, Homo sapiens
aataagaaagcagtc

SEQ ID NO: 894181 - DNA, 15 bp, Homo sapiens
ataagaaagcagtcg

SEQ ID NO: 894182 - DNA, 15 bp, Homo sapiens
taagaaagcagtcgc

SEQ ID NO: 894183 - DNA, 15 bp, Homo sapiens
aagaaagcagtcgct

SEQ ID NO: 894184 - DNA, 15 bp, Homo sapiens
agaaagcagtcgctg

SEQ ID NO: 894185 - DNA, 15 bp, Homo sapiens
gaaagcagtcgctga

SEQ ID NO: 894186 - DNA, 15 bp, Homo sapiens
aaagcagtcgctgag

SEQ ID NO: 894187 - DNA, 15 bp, Homo sapiens
aagcagtcgctgagg

SEQ ID NO: 894188 - DNA, 15 bp, Homo sapiens
agcagtcgctgaggc

SEQ ID NO: 894189 - DNA, 15 bp, Homo sapiens
gcagtcgctgaggcc

SEQ ID NO: 894190 - DNA, 15 bp, Homo sapiens
cagtcgctgaggcca

SEQ ID NO: 894191 - DNA, 15 bp, Homo sapiens
agtcgctgaggccac

SEQ ID NO: 894192 - DNA, 15 bp, Homo sapiens
gtcgctgaggccacc

SEQ ID NO: 894193 - DNA, 15 bp, Homo sapiens
tcgctgaggccacca

SEQ ID NO: 894194 - DNA, 15 bp, Homo sapiens
cgctgaggccaccat

SEQ ID NO: 894195 - DNA, 15 bp, Homo sapiens
gctgaggccaccatg

SEQ ID NO: 894196 - DNA, 15 bp, Homo sapiens
ctgaggccaccatga

SEQ ID NO: 894197 - DNA, 15 bp, Homo sapiens
tgaggccaccatgat

SEQ ID NO: 894198 - DNA, 15 bp, Homo sapiens
gaggccaccatgatg

SEQ ID NO: 894199 - DNA, 15 bp, Homo sapiens
aggccaccatgatgc

SEQ ID NO: 894200 - DNA, 15 bp, Homo sapiens
ggccaccatgatgcc

SEQ ID NO: 894201 - DNA, 15 bp, Homo sapiens
gccaccatgatgcct

SEQ ID NO: 894202 - DNA, 15 bp, Homo sapiens
ccaccatgatgcctt

SEQ ID NO: 894203 - DNA, 15 bp, Homo sapiens
caccatgatgccttc

SEQ ID NO: 894204 - DNA, 15 bp, Homo sapiens
accatgatgccttct

SEQ ID NO: 894205 - DNA, 15 bp, Homo sapiens
ccatgatgccttctt

SEQ ID NO: 894206 - DNA, 15 bp, Homo sapiens
catgatgccttcttt

SEQ ID NO: 894207 - DNA, 15 bp, Homo sapiens
atgatgccttctttc

SEQ ID NO: 894208 - DNA, 15 bp, Homo sapiens
tgatgccttctttct

SEQ ID NO: 894209 - DNA, 15 bp, Homo sapiens
gatgccttctttctt

SEQ ID NO: 894210 - DNA, 15 bp, Homo sapiens
atgccttctttcttc

SEQ ID NO: 894211 - DNA, 15 bp, Homo sapiens
tgccttctttcttct

SEQ ID NO: 894212 - DNA, 15 bp, Homo sapiens
gccttctttcttctt

SEQ ID NO: 894213 - DNA, 15 bp, Homo sapiens
ccttctttcttcttt

SEQ ID NO: 894214 - DNA, 15 bp, Homo sapiens
cttctttcttctttc

SEQ ID NO: 894215 - DNA, 15 bp, Homo sapiens
ttctttcttctttct

SEQ ID NO: 894216 - DNA, 15 bp, Homo sapiens
tctttcttctttctt

SEQ ID NO: 894217 - DNA, 15 bp, Homo sapiens
ctttcttctttcttt

SEQ ID NO: 894218 - DNA, 15 bp, Homo sapiens
tttcttctttctttg

SEQ ID NO: 894219 - DNA, 15 bp, Homo sapiens
ttcttctttctttgc

SEQ ID NO: 894220 - DNA, 15 bp, Homo sapiens
tcttctttctttgct

SEQ ID NO: 894221 - DNA, 15 bp, Homo sapiens
cttctttctttgctt

SEQ ID NO: 894222 - DNA, 15 bp, Homo sapiens
ttctttctttgcttg

SEQ ID NO: 894223 - DNA, 15 bp, Homo sapiens
tctttctttgcttga

SEQ ID NO: 894224 - DNA, 15 bp, Homo sapiens
ctttctttgcttgaa

SEQ ID NO: 894225 - DNA, 15 bp, Homo sapiens
tttctttgcttgaag

SEQ ID NO: 894226 - DNA, 15 bp, Homo sapiens
ttctttgcttgaagt

SEQ ID NO: 894227 - DNA, 15 bp, Homo sapiens
tctttgcttgaagta

SEQ ID NO: 894228 - DNA, 15 bp, Homo sapiens
ctttgcttgaagtag

SEQ ID NO: 894229 - DNA, 15 bp, Homo sapiens
tttgcttgaagtagg

SEQ ID NO: 894230 - DNA, 15 bp, Homo sapiens
ttgcttgaagtaggg

SEQ ID NO: 894231 - DNA, 15 bp, Homo sapiens
tgcttgaagtagggg

SEQ ID NO: 894232 - DNA, 15 bp, Homo sapiens
gcttgaagtagggga

SEQ ID NO: 894233 - DNA, 15 bp, Homo sapiens
cttgaagtaggggaa

SEQ ID NO: 894234 - DNA, 15 bp, Homo sapiens
ttgaagtaggggaat

SEQ ID NO: 894235 - DNA, 15 bp, Homo sapiens
tgaagtaggggaatg

SEQ ID NO: 894236 - DNA, 15 bp, Homo sapiens
gaagtaggggaatgt

SEQ ID NO: 894237 - DNA, 15 bp, Homo sapiens
aagtaggggaatgtt

SEQ ID NO: 894238 - DNA, 15 bp, Homo sapiens
agtaggggaatgttc

SEQ ID NO: 894239 - DNA, 15 bp, Homo sapiens
gtaggggaatgttcc

SEQ ID NO: 894240 - DNA, 15 bp, Homo sapiens
taggggaatgttcct

SEQ ID NO: 894241 - DNA, 15 bp, Homo sapiens
aggggaatgttcctt

SEQ ID NO: 894242 - DNA, 15 bp, Homo sapiens
ggggaatgttcctta

SEQ ID NO: 894243 - DNA, 15 bp, Homo sapiens
gggaatgttccttac

SEQ ID NO: 894244 - DNA, 15 bp, Homo sapiens
ggaatgttccttaca

SEQ ID NO: 894245 - DNA, 15 bp, Homo sapiens
gaatgttccttacaa

SEQ ID NO: 894246 - DNA, 15 bp, Homo sapiens
aatgttccttacaaa

SEQ ID NO: 894247 - DNA, 15 bp, Homo sapiens
atgttccttacaaaa

SEQ ID NO: 894248 - DNA, 15 bp, Homo sapiens
tgttccttacaaaaa

SEQ ID NO: 894249 - DNA, 15 bp, Homo sapiens
gttccttacaaaaaa

SEQ ID NO: 894250 - DNA, 15 bp, Homo sapiens
ttccttacaaaaaaa

SEQ ID NO: 894251 - DNA, 15 bp, Homo sapiens
tccttacaaaaaaaa

SEQ ID NO: 894252 - DNA, 15 bp, Homo sapiens
ccttacaaaaaaaaa

SEQ ID NO: 894253 - DNA, 15 bp, Homo sapiens
cttacaaaaaaaaaa

SEQ ID NO: 894254 - DNA, 15 bp, Homo sapiens
ttacaaaaaaaaaaa

SEQ ID NO: 894255 - DNA, 15 bp, Homo sapiens
tacaaaaaaaaaaaa

SEQ ID NO: 894256 - DNA, 15 bp, Homo sapiens
acaaaaaaaaaaaac

SEQ ID NO: 894257 - DNA, 15 bp, Homo sapiens
caaaaaaaaaaaaca

SEQ ID NO: 894258 - DNA, 15 bp, Homo sapiens
aaaaaaaaaaaacac

SEQ ID NO: 894259 - DNA, 15 bp, Homo sapiens
aaaaaaaaaaacacc

SEQ ID NO: 894260 - DNA, 15 bp, Homo sapiens
aaaaaaaaaacaccg

SEQ ID NO: 894261 - DNA, 15 bp, Homo sapiens
aaaaaaaaacaccgg

SEQ ID NO: 894262 - DNA, 15 bp, Homo sapiens
aaaaaaaacaccgga

SEQ ID NO: 894263 - DNA, 15 bp, Homo sapiens
aaaaaaacaccggaa

SEQ ID NO: 894264 - DNA, 15 bp, Homo sapiens
aaaaaacaccggaat

SEQ ID NO: 894265 - DNA, 15 bp, Homo sapiens
aaaaacaccggaata

SEQ ID NO: 894266 - DNA, 15 bp, Homo sapiens
aaaacaccggaatat

SEQ ID NO: 894267 - DNA, 15 bp, Homo sapiens
aaacaccggaatatg

SEQ ID NO: 894268 - DNA, 15 bp, Homo sapiens
aacaccggaatatgg

SEQ ID NO: 894269 - DNA, 15 bp, Homo sapiens
acaccggaatatggt

SEQ ID NO: 894270 - DNA, 15 bp, Homo sapiens
caccggaatatggta

SEQ ID NO: 894271 - DNA, 15 bp, Homo sapiens
accggaatatggtaa

SEQ ID NO: 894272 - DNA, 15 bp, Homo sapiens
ccggaatatggtaaa

SEQ ID NO: 894273 - DNA, 15 bp, Homo sapiens
cggaatatggtaaac

SEQ ID NO: 894274 - DNA, 15 bp, Homo sapiens
ggaatatggtaaacc

SEQ ID NO: 894275 - DNA, 15 bp, Homo sapiens
gaatatggtaaacct

SEQ ID NO: 894276 - DNA, 15 bp, Homo sapiens
aatatggtaaacctc

SEQ ID NO: 894277 - DNA, 15 bp, Homo sapiens
atatggtaaacctcc

SEQ ID NO: 894278 - DNA, 15 bp, Homo sapiens
tatggtaaacctcct

SEQ ID NO: 894279 - DNA, 15 bp, Homo sapiens
atggtaaacctcctg

SEQ ID NO: 894280 - DNA, 15 bp, Homo sapiens
tggtaaacctcctgc

SEQ ID NO: 894281 - DNA, 15 bp, Homo sapiens
ggtaaacctcctgcc

SEQ ID NO: 894282 - DNA, 15 bp, Homo sapiens
gtaaacctcctgcct

SEQ ID NO: 894283 - DNA, 15 bp, Homo sapiens
taaacctcctgcctc

SEQ ID NO: 894284 - DNA, 15 bp, Homo sapiens
aaacctcctgcctct

SEQ ID NO: 894285 - DNA, 15 bp, Homo sapiens
aacctcctgcctctc

SEQ ID NO: 894286 - DNA, 15 bp, Homo sapiens
acctcctgcctctcc

SEQ ID NO: 894287 - DNA, 15 bp, Homo sapiens
cctcctgcctctcct

SEQ ID NO: 894288 - DNA, 15 bp, Homo sapiens
ctcctgcctctcctg

SEQ ID NO: 894289 - DNA, 15 bp, Homo sapiens
tcctgcctctcctga

SEQ ID NO: 894290 - DNA, 15 bp, Homo sapiens
cctgcctctcctgac

SEQ ID NO: 894291 - DNA, 15 bp, Homo sapiens
ctgcctctcctgaca

SEQ ID NO: 894292 - DNA, 15 bp, Homo sapiens
tgcctctcctgacaa

SEQ ID NO: 894293 - DNA, 15 bp, Homo sapiens
gcctctcctgacaac

SEQ ID NO: 894294 - DNA, 15 bp, Homo sapiens
cctctcctgacaacc

SEQ ID NO: 894295 - DNA, 15 bp, Homo sapiens
ctctcctgacaacct

SEQ ID NO: 894296 - DNA, 15 bp, Homo sapiens
tctcctgacaacctg

SEQ ID NO: 894297 - DNA, 15 bp, Homo sapiens
ctcctgacaacctgc

SEQ ID NO: 894298 - DNA, 15 bp, Homo sapiens
tcctgacaacctgca

SEQ ID NO: 894299 - DNA, 15 bp, Homo sapiens
cctgacaacctgcag

SEQ ID NO: 894300 - DNA, 15 bp, Homo sapiens
ctgacaacctgcagc

SEQ ID NO: 894301 - DNA, 15 bp, Homo sapiens
tgacaacctgcagct

SEQ ID NO: 894302 - DNA, 15 bp, Homo sapiens
gacaacctgcagctg

SEQ ID NO: 894303 - DNA, 15 bp, Homo sapiens
acaacctgcagctgc

SEQ ID NO: 894304 - DNA, 15 bp, Homo sapiens
caacctgcagctgcc

SEQ ID NO: 894305 - DNA, 15 bp, Homo sapiens
aacctgcagctgcct

SEQ ID NO: 894306 - DNA, 15 bp, Homo sapiens
acctgcagctgcctt

SEQ ID NO: 894307 - DNA, 15 bp, Homo sapiens
cctgcagctgccttc

SEQ ID NO: 894308 - DNA, 15 bp, Homo sapiens
ctgcagctgccttct

SEQ ID NO: 894309 - DNA, 15 bp, Homo sapiens
tgcagctgccttctg

SEQ ID NO: 894310 - DNA, 15 bp, Homo sapiens
gcagctgccttctgg

SEQ ID NO: 894311 - DNA, 15 bp, Homo sapiens
cagctgccttctggg

SEQ ID NO: 894312 - DNA, 15 bp, Homo sapiens
agctgccttctgggg

SEQ ID NO: 894313 - DNA, 15 bp, Homo sapiens
gctgccttctggggc

SEQ ID NO: 894314 - DNA, 15 bp, Homo sapiens
ctgccttctggggcc

SEQ ID NO: 894315 - DNA, 15 bp, Homo sapiens
tgccttctggggccc

SEQ ID NO: 894316 - DNA, 15 bp, Homo sapiens
gccttctggggccct

SEQ ID NO: 894317 - DNA, 15 bp, Homo sapiens
ccttctggggccctc

SEQ ID NO: 894318 - DNA, 15 bp, Homo sapiens
cttctggggccctcc

SEQ ID NO: 894319 - DNA, 15 bp, Homo sapiens
ttctggggccctcct

SEQ ID NO: 894320 - DNA, 15 bp, Homo sapiens
tctggggccctcctc

SEQ ID NO: 894321 - DNA, 15 bp, Homo sapiens
ctggggccctcctct

SEQ ID NO: 894322 - DNA, 15 bp, Homo sapiens
tggggccctcctctc

SEQ ID NO: 894323 - DNA, 15 bp, Homo sapiens
ggggccctcctctcc

SEQ ID NO: 894324 - DNA, 15 bp, Homo sapiens
gggccctcctctcct

SEQ ID NO: 894325 - DNA, 15 bp, Homo sapiens
ggccctcctctcctt

SEQ ID NO: 894326 - DNA, 15 bp, Homo sapiens
gccctcctctccttt

SEQ ID NO: 894327 - DNA, 15 bp, Homo sapiens
ccctcctctcctttc

SEQ ID NO: 894328 - DNA, 15 bp, Homo sapiens
cctcctctcctttcc

SEQ ID NO: 894329 - DNA, 15 bp, Homo sapiens
ctcctctcctttccc

SEQ ID NO: 894330 - DNA, 15 bp, Homo sapiens
tcctctcctttccct

SEQ ID NO: 894331 - DNA, 15 bp, Homo sapiens
cctctcctttccctg

SEQ ID NO: 894332 - DNA, 15 bp, Homo sapiens
ctctcctttccctgc

SEQ ID NO: 894333 - DNA, 15 bp, Homo sapiens
tctcctttccctgcc

SEQ ID NO: 894334 - DNA, 15 bp, Homo sapiens
ctcctttccctgcct

SEQ ID NO: 894335 - DNA, 15 bp, Homo sapiens
tcctttccctgcctg

SEQ ID NO: 894336 - DNA, 15 bp, Homo sapiens
cctttccctgcctgt

SEQ ID NO: 894337 - DNA, 15 bp, Homo sapiens
ctttccctgcctgtg

SEQ ID NO: 894338 - DNA, 15 bp, Homo sapiens
tttccctgcctgtgc

SEQ ID NO: 894339 - DNA, 15 bp, Homo sapiens
ttccctgcctgtgcc

SEQ ID NO: 894340 - DNA, 15 bp, Homo sapiens
tccctgcctgtgccc

SEQ ID NO: 894341 - DNA, 15 bp, Homo sapiens
ccctgcctgtgcccg

SEQ ID NO: 894342 - DNA, 15 bp, Homo sapiens
cctgcctgtgcccgg

SEQ ID NO: 894343 - DNA, 15 bp, Homo sapiens
ctgcctgtgcccggc

SEQ ID NO: 894344 - DNA, 15 bp, Homo sapiens
tgcctgtgcccggcc

SEQ ID NO: 894345 - DNA, 15 bp, Homo sapiens
gcctgtgcccggccc

SEQ ID NO: 894346 - DNA, 15 bp, Homo sapiens
cctgtgcccggccca

SEQ ID NO: 894347 - DNA, 15 bp, Homo sapiens
ctgtgcccggcccag

SEQ ID NO: 894348 - DNA, 15 bp, Homo sapiens
tgtgcccggcccagc

SEQ ID NO: 894349 - DNA, 15 bp, Homo sapiens
gtgcccggcccagct

SEQ ID NO: 894350 - DNA, 15 bp, Homo sapiens
tgcccggcccagcta

SEQ ID NO: 894351 - DNA, 15 bp, Homo sapiens
gcccggcccagctag

SEQ ID NO: 894352 - DNA, 15 bp, Homo sapiens
cccggcccagctagc

SEQ ID NO: 894353 - DNA, 15 bp, Homo sapiens
ccggcccagctagcc

SEQ ID NO: 894354 - DNA, 15 bp, Homo sapiens
cggcccagctagccc

SEQ ID NO: 894355 - DNA, 15 bp, Homo sapiens
ggcccagctagccct

SEQ ID NO: 894356 - DNA, 15 bp, Homo sapiens
gcccagctagccctg

SEQ ID NO: 894357 - DNA, 15 bp, Homo sapiens
cccagctagccctgc

SEQ ID NO: 894358 - DNA, 15 bp, Homo sapiens
ccagctagccctgcc

SEQ ID NO: 894359 - DNA, 15 bp, Homo sapiens
cagctagccctgcca

SEQ ID NO: 894360 - DNA, 15 bp, Homo sapiens
agctagccctgccac

SEQ ID NO: 894361 - DNA, 15 bp, Homo sapiens
gctagccctgccaca

SEQ ID NO: 894362 - DNA, 15 bp, Homo sapiens
ctagccctgccacag

SEQ ID NO: 894363 - DNA, 15 bp, Homo sapiens
tagccctgccacaga

SEQ ID NO: 894364 - DNA, 15 bp, Homo sapiens
agccctgccacagaa

SEQ ID NO: 894365 - DNA, 15 bp, Homo sapiens
gccctgccacagaac

SEQ ID NO: 894366 - DNA, 15 bp, Homo sapiens
ccctgccacagaact

SEQ ID NO: 894367 - DNA, 15 bp, Homo sapiens
cctgccacagaactg

SEQ ID NO: 894368 - DNA, 15 bp, Homo sapiens
ctgccacagaactgt

SEQ ID NO: 894369 - DNA, 15 bp, Homo sapiens
tgccacagaactgtt

SEQ ID NO: 894370 - DNA, 15 bp, Homo sapiens
gccacagaactgttt

SEQ ID NO: 894371 - DNA, 15 bp, Homo sapiens
ccacagaactgtttc

SEQ ID NO: 894372 - DNA, 15 bp, Homo sapiens
cacagaactgtttct

SEQ ID NO: 894373 - DNA, 15 bp, Homo sapiens
acagaactgtttctg

SEQ ID NO: 894374 - DNA, 15 bp, Homo sapiens
cagaactgtttctgg

SEQ ID NO: 894375 - DNA, 15 bp, Homo sapiens
agaactgtttctggg

SEQ ID NO: 894376 - DNA, 15 bp, Homo sapiens
gaactgtttctgggc

SEQ ID NO: 894377 - DNA, 15 bp, Homo sapiens
aactgtttctgggca

SEQ ID NO: 894378 - DNA, 15 bp, Homo sapiens
actgtttctgggcag

SEQ ID NO: 894379 - DNA, 15 bp, Homo sapiens
ctgtttctgggcaga

SEQ ID NO: 894380 - DNA, 15 bp, Homo sapiens
tgtttctgggcagaa

SEQ ID NO: 894381 - DNA, 15 bp, Homo sapiens
gtttctgggcagaaa

SEQ ID NO: 894382 - DNA, 15 bp, Homo sapiens
tttctgggcagaaat

SEQ ID NO: 894383 - DNA, 15 bp, Homo sapiens
ttctgggcagaaata

SEQ ID NO: 894384 - DNA, 15 bp, Homo sapiens
tctgggcagaaatac

SEQ ID NO: 894385 - DNA, 15 bp, Homo sapiens
ctgggcagaaatact

SEQ ID NO: 894386 - DNA, 15 bp, Homo sapiens
tgggcagaaatactc

SEQ ID NO: 894387 - DNA, 15 bp, Homo sapiens
gggcagaaatactcc

SEQ ID NO: 894388 - DNA, 15 bp, Homo sapiens
ggcagaaatactcca

SEQ ID NO: 894389 - DNA, 15 bp, Homo sapiens
gcagaaatactccaa

SEQ ID NO: 894390 - DNA, 15 bp, Homo sapiens
cagaaatactccaag

SEQ ID NO: 894391 - DNA, 15 bp, Homo sapiens
agaaatactccaagt

SEQ ID NO: 894392 - DNA, 15 bp, Homo sapiens
gaaatactccaagta

SEQ ID NO: 894393 - DNA, 15 bp, Homo sapiens
aaatactccaagtat

SEQ ID NO: 894394 - DNA, 15 bp, Homo sapiens
aatactccaagtatc

SEQ ID NO: 894395 - DNA, 15 bp, Homo sapiens
atactccaagtatcc

SEQ ID NO: 894396 - DNA, 15 bp, Homo sapiens
tactccaagtatccc

SEQ ID NO: 894397 - DNA, 15 bp, Homo sapiens
actccaagtatccct

SEQ ID NO: 894398 - DNA, 15 bp, Homo sapiens
ctccaagtatccctg

SEQ ID NO: 894399 - DNA, 15 bp, Homo sapiens
tccaagtatccctgt

SEQ ID NO: 894400 - DNA, 15 bp, Homo sapiens
ccaagtatccctgtg

SEQ ID NO: 894401 - DNA, 15 bp, Homo sapiens
caagtatccctgtga

SEQ ID NO: 894402 - DNA, 15 bp, Homo sapiens
aagtatccctgtgag

SEQ ID NO: 894403 - DNA, 15 bp, Homo sapiens
agtatccctgtgaga

SEQ ID NO: 894404 - DNA, 15 bp, Homo sapiens
gtatccctgtgagat

SEQ ID NO: 894405 - DNA, 15 bp, Homo sapiens
tatccctgtgagata

SEQ ID NO: 894406 - DNA, 15 bp, Homo sapiens
atccctgtgagataa

SEQ ID NO: 894407 - DNA, 15 bp, Homo sapiens
tccctgtgagataag

SEQ ID NO: 894408 - DNA, 15 bp, Homo sapiens
ccctgtgagataagt

SEQ ID NO: 894409 - DNA, 15 bp, Homo sapiens
cctgtgagataagtg

SEQ ID NO: 894410 - DNA, 15 bp, Homo sapiens
ctgtgagataagtgc

SEQ ID NO: 894411 - DNA, 15 bp, Homo sapiens
tgtgagataagtgcc

SEQ ID NO: 894412 - DNA, 15 bp, Homo sapiens
gtgagataagtgccg

SEQ ID NO: 894413 - DNA, 15 bp, Homo sapiens
tgagataagtgccgt

SEQ ID NO: 894414 - DNA, 15 bp, Homo sapiens
gagataagtgccgtg

SEQ ID NO: 894415 - DNA, 15 bp, Homo sapiens
agataagtgccgtgg

SEQ ID NO: 894416 - DNA, 15 bp, Homo sapiens
gataagtgccgtgga

SEQ ID NO: 894417 - DNA, 15 bp, Homo sapiens
ataagtgccgtggaa

SEQ ID NO: 894418 - DNA, 15 bp, Homo sapiens
taagtgccgtggaag

SEQ ID NO: 894419 - DNA, 15 bp, Homo sapiens
aagtgccgtggaagg

SEQ ID NO: 894420 - DNA, 15 bp, Homo sapiens
agtgccgtggaagga

SEQ ID NO: 894421 - DNA, 15 bp, Homo sapiens
gtgccgtggaaggag

SEQ ID NO: 894422 - DNA, 15 bp, Homo sapiens
tgccgtggaaggagg

SEQ ID NO: 894423 - DNA, 15 bp, Homo sapiens
gccgtggaaggaggt

SEQ ID NO: 894424 - DNA, 15 bp, Homo sapiens
ccgtggaaggaggtg

SEQ ID NO: 894425 - DNA, 15 bp, Homo sapiens
cgtggaaggaggtgc

SEQ ID NO: 894426 - DNA, 15 bp, Homo sapiens
gtggaaggaggtgca

SEQ ID NO: 894427 - DNA, 15 bp, Homo sapiens
tggaaggaggtgcat

SEQ ID NO: 894428 - DNA, 15 bp, Homo sapiens
ggaaggaggtgcatg

SEQ ID NO: 894429 - DNA, 15 bp, Homo sapiens
gaaggaggtgcatgg

SEQ ID NO: 894430 - DNA, 15 bp, Homo sapiens
aaggaggtgcatgga

SEQ ID NO: 894431 - DNA, 15 bp, Homo sapiens
aggaggtgcatggat

SEQ ID NO: 894432 - DNA, 15 bp, Homo sapiens
ggaggtgcatggatg

SEQ ID NO: 894433 - DNA, 15 bp, Homo sapiens
gaggtgcatggatga

SEQ ID NO: 894434 - DNA, 15 bp, Homo sapiens
aggtgcatggatgat

SEQ ID NO: 894435 - DNA, 15 bp, Homo sapiens
ggtgcatggatgatg

SEQ ID NO: 894436 - DNA, 15 bp, Homo sapiens
gtgcatggatgatgc

SEQ ID NO: 894437 - DNA, 15 bp, Homo sapiens
tgcatggatgatgca

SEQ ID NO: 894438 - DNA, 15 bp, Homo sapiens
gcatggatgatgcac

SEQ ID NO: 894439 - DNA, 15 bp, Homo sapiens
catggatgatgcaca

SEQ ID NO: 894440 - DNA, 15 bp, Homo sapiens
atggatgatgcacat

SEQ ID NO: 894441 - DNA, 15 bp, Homo sapiens
tggatgatgcacatg

SEQ ID NO: 894442 - DNA, 15 bp, Homo sapiens
ggatgatgcacatgt

SEQ ID NO: 894443 - DNA, 15 bp, Homo sapiens
gatgatgcacatgta

SEQ ID NO: 894444 - DNA, 15 bp, Homo sapiens
atgatgcacatgtac

SEQ ID NO: 894445 - DNA, 15 bp, Homo sapiens
tgatgcacatgtact

SEQ ID NO: 894446 - DNA, 15 bp, Homo sapiens
gatgcacatgtactg

SEQ ID NO: 894447 - DNA, 15 bp, Homo sapiens
atgcacatgtactgc

SEQ ID NO: 894448 - DNA, 15 bp, Homo sapiens
tgcacatgtactgct

SEQ ID NO: 894449 - DNA, 15 bp, Homo sapiens
gcacatgtactgctc

SEQ ID NO: 894450 - DNA, 15 bp, Homo sapiens
cacatgtactgctcg

SEQ ID NO: 894451 - DNA, 15 bp, Homo sapiens
acatgtactgctcgc

SEQ ID NO: 894452 - DNA, 15 bp, Homo sapiens
catgtactgctcgct

SEQ ID NO: 894453 - DNA, 15 bp, Homo sapiens
atgtactgctcgctc

SEQ ID NO: 894454 - DNA, 15 bp, Homo sapiens
tgtactgctcgctca

SEQ ID NO: 894455 - DNA, 15 bp, Homo sapiens
gtactgctcgctcac

SEQ ID NO: 894456 - DNA, 15 bp, Homo sapiens
tactgctcgctcacc

SEQ ID NO: 894457 - DNA, 15 bp, Homo sapiens
actgctcgctcaccg

SEQ ID NO: 894458 - DNA, 15 bp, Homo sapiens
ctgctcgctcaccgc

SEQ ID NO: 894459 - DNA, 15 bp, Homo sapiens
tgctcgctcaccgca

SEQ ID NO: 894460 - DNA, 15 bp, Homo sapiens
gctcgctcaccgcat

SEQ ID NO: 894461 - DNA, 15 bp, Homo sapiens
ctcgctcaccgcatg

SEQ ID NO: 894462 - DNA, 15 bp, Homo sapiens
tcgctcaccgcatgg

SEQ ID NO: 894463 - DNA, 15 bp, Homo sapiens
cgctcaccgcatggg

SEQ ID NO: 894464 - DNA, 15 bp, Homo sapiens
gctcaccgcatggga

SEQ ID NO: 894465 - DNA, 15 bp, Homo sapiens
ctcaccgcatgggac

SEQ ID NO: 894466 - DNA, 15 bp, Homo sapiens
tcaccgcatgggacc

SEQ ID NO: 894467 - DNA, 15 bp, Homo sapiens
caccgcatgggacct

SEQ ID NO: 894468 - DNA, 15 bp, Homo sapiens
accgcatgggaccta

SEQ ID NO: 894469 - DNA, 15 bp, Homo sapiens
ccgcatgggacctat

SEQ ID NO: 894470 - DNA, 15 bp, Homo sapiens
cgcatgggacctatg

SEQ ID NO: 894471 - DNA, 15 bp, Homo sapiens
gcatgggacctatga

SEQ ID NO: 894472 - DNA, 15 bp, Homo sapiens
catgggacctatgac

SEQ ID NO: 894473 - DNA, 15 bp, Homo sapiens
atgggacctatgact

SEQ ID NO: 894474 - DNA, 15 bp, Homo sapiens
tgggacctatgactg

SEQ ID NO: 894475 - DNA, 15 bp, Homo sapiens
gggacctatgactgt

SEQ ID NO: 894476 - DNA, 15 bp, Homo sapiens
ggacctatgactgtt

SEQ ID NO: 894477 - DNA, 15 bp, Homo sapiens
gacctatgactgttg

SEQ ID NO: 894478 - DNA, 15 bp, Homo sapiens
acctatgactgttgt

SEQ ID NO: 894479 - DNA, 15 bp, Homo sapiens
cctatgactgttgta

SEQ ID NO: 894480 - DNA, 15 bp, Homo sapiens
ctatgactgttgtag

SEQ ID NO: 894481 - DNA, 15 bp, Homo sapiens
tatgactgttgtagc

SEQ ID NO: 894482 - DNA, 15 bp, Homo sapiens
atgactgttgtagca

SEQ ID NO: 894483 - DNA, 15 bp, Homo sapiens
tgactgttgtagcaa

SEQ ID NO: 894484 - DNA, 15 bp, Homo sapiens
gactgttgtagcaaa

SEQ ID NO: 894485 - DNA, 15 bp, Homo sapiens
actgttgtagcaaat

SEQ ID NO: 894486 - DNA, 15 bp, Homo sapiens
ctgttgtagcaaatg

SEQ ID NO: 894487 - DNA, 15 bp, Homo sapiens
tgttgtagcaaatga

SEQ ID NO: 894488 - DNA, 15 bp, Homo sapiens
gttgtagcaaatgat

SEQ ID NO: 894489 - DNA, 15 bp, Homo sapiens
ttgtagcaaatgatc

SEQ ID NO: 894490 - DNA, 15 bp, Homo sapiens
tgtagcaaatgatca

SEQ ID NO: 894491 - DNA, 15 bp, Homo sapiens
gtagcaaatgatcat

SEQ ID NO: 894492 - DNA, 15 bp, Homo sapiens
tagcaaatgatcata

SEQ ID NO: 894493 - DNA, 15 bp, Homo sapiens
agcaaatgatcataa

SEQ ID NO: 894494 - DNA, 15 bp, Homo sapiens
gcaaatgatcataaa

SEQ ID NO: 894495 - DNA, 15 bp, Homo sapiens
caaatgatcataaac

SEQ ID NO: 894496 - DNA, 15 bp, Homo sapiens
aaatgatcataaacc

SEQ ID NO: 894497 - DNA, 15 bp, Homo sapiens
aatgatcataaacct

SEQ ID NO: 894498 - DNA, 15 bp, Homo sapiens
atgatcataaacctg

SEQ ID NO: 894499 - DNA, 15 bp, Homo sapiens
tgatcataaacctga

SEQ ID NO: 894500 - DNA, 15 bp, Homo sapiens
gatcataaacctgac

SEQ ID NO: 894501 - DNA, 15 bp, Homo sapiens
atcataaacctgacg

SEQ ID NO: 894502 - DNA, 15 bp, Homo sapiens
tcataaacctgacgg

SEQ ID NO: 894503 - DNA, 15 bp, Homo sapiens
cataaacctgacggc

SEQ ID NO: 894504 - DNA, 15 bp, Homo sapiens
ataaacctgacggcc

SEQ ID NO: 894505 - DNA, 15 bp, Homo sapiens
taaacctgacggcct

SEQ ID NO: 894506 - DNA, 15 bp, Homo sapiens
aaacctgacggcctc

SEQ ID NO: 894507 - DNA, 15 bp, Homo sapiens
aacctgacggcctca

SEQ ID NO: 894508 - DNA, 15 bp, Homo sapiens
acctgacggcctcaa

SEQ ID NO: 894509 - DNA, 15 bp, Homo sapiens
cctgacggcctcaaa

SEQ ID NO: 894510 - DNA, 15 bp, Homo sapiens
ctgacggcctcaaac

SEQ ID NO: 894511 - DNA, 15 bp, Homo sapiens
tgacggcctcaaacg

SEQ ID NO: 894512 - DNA, 15 bp, Homo sapiens
gacggcctcaaacga

SEQ ID NO: 894513 - DNA, 15 bp, Homo sapiens
acggcctcaaacgac

SEQ ID NO: 894514 - DNA, 15 bp, Homo sapiens
cggcctcaaacgaca

SEQ ID NO: 894515 - DNA, 15 bp, Homo sapiens
ggcctcaaacgacag

SEQ ID NO: 894516 - DNA, 15 bp, Homo sapiens
gcctcaaacgacaga

SEQ ID NO: 894517 - DNA, 15 bp, Homo sapiens
cctcaaacgacagaa

SEQ ID NO: 894518 - DNA, 15 bp, Homo sapiens
ctcaaacgacagaaa

SEQ ID NO: 894519 - DNA, 15 bp, Homo sapiens
tcaaacgacagaaat

SEQ ID NO: 894520 - DNA, 15 bp, Homo sapiens
caaacgacagaaatt

SEQ ID NO: 894521 - DNA, 15 bp, Homo sapiens
aaacgacagaaattt

SEQ ID NO: 894522 - DNA, 15 bp, Homo sapiens
aacgacagaaatttc

SEQ ID NO: 894523 - DNA, 15 bp, Homo sapiens
acgacagaaatttca

SEQ ID NO: 894524 - DNA, 15 bp, Homo sapiens
cgacagaaatttcac

SEQ ID NO: 894525 - DNA, 15 bp, Homo sapiens
gacagaaatttcacc

SEQ ID NO: 894526 - DNA, 15 bp, Homo sapiens
acagaaatttcacca

SEQ ID NO: 894527 - DNA, 15 bp, Homo sapiens
cagaaatttcaccag

SEQ ID NO: 894528 - DNA, 15 bp, Homo sapiens
agaaatttcaccaga

SEQ ID NO: 894529 - DNA, 15 bp, Homo sapiens
gaaatttcaccagaa

SEQ ID NO: 894530 - DNA, 15 bp, Homo sapiens
aaatttcaccagaag

SEQ ID NO: 894531 - DNA, 15 bp, Homo sapiens
aatttcaccagaagt

SEQ ID NO: 894532 - DNA, 15 bp, Homo sapiens
atttcaccagaagtc

SEQ ID NO: 894533 - DNA, 15 bp, Homo sapiens
tttcaccagaagtcc

SEQ ID NO: 894534 - DNA, 15 bp, Homo sapiens
ttcaccagaagtcca

SEQ ID NO: 894535 - DNA, 15 bp, Homo sapiens
tcaccagaagtccaa

SEQ ID NO: 894536 - DNA, 15 bp, Homo sapiens
caccagaagtccaaa

SEQ ID NO: 894537 - DNA, 15 bp, Homo sapiens
accagaagtccaaaa

SEQ ID NO: 894538 - DNA, 15 bp, Homo sapiens
ccagaagtccaaaat

SEQ ID NO: 894539 - DNA, 15 bp, Homo sapiens
cagaagtccaaaatc

SEQ ID NO: 894540 - DNA, 15 bp, Homo sapiens
agaagtccaaaatca

SEQ ID NO: 894541 - DNA, 15 bp, Homo sapiens
gaagtccaaaatcac

SEQ ID NO: 894542 - DNA, 15 bp, Homo sapiens
aagtccaaaatcacc

SEQ ID NO: 894543 - DNA, 15 bp, Homo sapiens
agtccaaaatcacca

SEQ ID NO: 894544 - DNA, 15 bp, Homo sapiens
gtccaaaatcaccaa

SEQ ID NO: 894545 - DNA, 15 bp, Homo sapiens
tccaaaatcaccaag

SEQ ID NO: 894546 - DNA, 15 bp, Homo sapiens
ccaaaatcaccaagg

SEQ ID NO: 894547 - DNA, 15 bp, Homo sapiens
caaaatcaccaaggt

SEQ ID NO: 894548 - DNA, 15 bp, Homo sapiens
aaaatcaccaaggtg

SEQ ID NO: 894549 - DNA, 15 bp, Homo sapiens
aaatcaccaaggtgt

SEQ ID NO: 894550 - DNA, 15 bp, Homo sapiens
aatcaccaaggtgtc

SEQ ID NO: 894551 - DNA, 15 bp, Homo sapiens
atcaccaaggtgtct

SEQ ID NO: 894552 - DNA, 15 bp, Homo sapiens
tcaccaaggtgtctg

SEQ ID NO: 894553 - DNA, 15 bp, Homo sapiens
caccaaggtgtctgc

SEQ ID NO: 894554 - DNA, 15 bp, Homo sapiens
accaaggtgtctgca

SEQ ID NO: 894555 - DNA, 15 bp, Homo sapiens
ccaaggtgtctgcag

SEQ ID NO: 894556 - DNA, 15 bp, Homo sapiens
caaggtgtctgcagg

SEQ ID NO: 894557 - DNA, 15 bp, Homo sapiens
aaggtgtctgcaggc

SEQ ID NO: 894558 - DNA, 15 bp, Homo sapiens
aggtgtctgcaggct

SEQ ID NO: 894559 - DNA, 15 bp, Homo sapiens
ggtgtctgcaggctg

SEQ ID NO: 894560 - DNA, 15 bp, Homo sapiens
gtgtctgcaggctgc

SEQ ID NO: 894561 - DNA, 15 bp, Homo sapiens
tgtctgcaggctgca

SEQ ID NO: 894562 - DNA, 15 bp, Homo sapiens
gtctgcaggctgcac

SEQ ID NO: 894563 - DNA, 15 bp, Homo sapiens
tctgcaggctgcact

SEQ ID NO: 894564 - DNA, 15 bp, Homo sapiens
ctgcaggctgcactc

SEQ ID NO: 894565 - DNA, 15 bp, Homo sapiens
tgcaggctgcactcc

SEQ ID NO: 894566 - DNA, 15 bp, Homo sapiens
gcaggctgcactccc

SEQ ID NO: 894567 - DNA, 15 bp, Homo sapiens
caggctgcactccct

SEQ ID NO: 894568 - DNA, 15 bp, Homo sapiens
aggctgcactccctg

SEQ ID NO: 894569 - DNA, 15 bp, Homo sapiens
ggctgcactccctgc

SEQ ID NO: 894570 - DNA, 15 bp, Homo sapiens
gctgcactccctgca

SEQ ID NO: 894571 - DNA, 15 bp, Homo sapiens
ctgcactccctgcag

SEQ ID NO: 894572 - DNA, 15 bp, Homo sapiens
tgcactccctgcagt

SEQ ID NO: 894573 - DNA, 15 bp, Homo sapiens
gcactccctgcagtg

SEQ ID NO: 894574 - DNA, 15 bp, Homo sapiens
cactccctgcagtgg

SEQ ID NO: 894575 - DNA, 15 bp, Homo sapiens
actccctgcagtggc

SEQ ID NO: 894576 - DNA, 15 bp, Homo sapiens
ctccctgcagtggcc

SEQ ID NO: 894577 - DNA, 15 bp, Homo sapiens
tccctgcagtggccg

SEQ ID NO: 894578 - DNA, 15 bp, Homo sapiens
ccctgcagtggccgt

SEQ ID NO: 894579 - DNA, 15 bp, Homo sapiens
cctgcagtggccgtg

SEQ ID NO: 894580 - DNA, 15 bp, Homo sapiens
ctgcagtggccgtgg

SEQ ID NO: 894581 - DNA, 15 bp, Homo sapiens
tgcagtggccgtggg

SEQ ID NO: 894582 - DNA, 15 bp, Homo sapiens
gcagtggccgtgggg

SEQ ID NO: 894583 - DNA, 15 bp, Homo sapiens
cagtggccgtggggg

SEQ ID NO: 894584 - DNA, 15 bp, Homo sapiens
agtggccgtggggga

SEQ ID NO: 894585 - DNA, 15 bp, Homo sapiens
gtggccgtgggggat

SEQ ID NO: 894586 - DNA, 15 bp, Homo sapiens
tggccgtgggggatg

SEQ ID NO: 894587 - DNA, 15 bp, Homo sapiens
ggccgtgggggatga

SEQ ID NO: 894588 - DNA, 15 bp, Homo sapiens
gccgtgggggatgag

SEQ ID NO: 894589 - DNA, 15 bp, Homo sapiens
ccgtgggggatgagc

SEQ ID NO: 894590 - DNA, 15 bp, Homo sapiens
cgtgggggatgagcc

SEQ ID NO: 894591 - DNA, 15 bp, Homo sapiens
gtgggggatgagcca

SEQ ID NO: 894592 - DNA, 15 bp, Homo sapiens
tgggggatgagccat

SEQ ID NO: 894593 - DNA, 15 bp, Homo sapiens
gggggatgagccatt

SEQ ID NO: 894594 - DNA, 15 bp, Homo sapiens
ggggatgagccattg

SEQ ID NO: 894595 - DNA, 15 bp, Homo sapiens
gggatgagccattgt

SEQ ID NO: 894596 - DNA, 15 bp, Homo sapiens
ggatgagccattgtt

SEQ ID NO: 894597 - DNA, 15 bp, Homo sapiens
gatgagccattgttc

SEQ ID NO: 894598 - DNA, 15 bp, Homo sapiens
atgagccattgttcc

SEQ ID NO: 894599 - DNA, 15 bp, Homo sapiens
tgagccattgttcct

SEQ ID NO: 894600 - DNA, 15 bp, Homo sapiens
gagccattgttcctt

SEQ ID NO: 894601 - DNA, 15 bp, Homo sapiens
agccattgttccttg

SEQ ID NO: 894602 - DNA, 15 bp, Homo sapiens
gccattgttccttgc

SEQ ID NO: 894603 - DNA, 15 bp, Homo sapiens
ccattgttccttgcc

SEQ ID NO: 894604 - DNA, 15 bp, Homo sapiens
cattgttccttgccc

SEQ ID NO: 894605 - DNA, 15 bp, Homo sapiens
attgttccttgcccc

SEQ ID NO: 894606 - DNA, 15 bp, Homo sapiens
ttgttccttgccccc

SEQ ID NO: 894607 - DNA, 15 bp, Homo sapiens
tgttccttgcccccg

SEQ ID NO: 894608 - DNA, 15 bp, Homo sapiens
gttccttgcccccgc

SEQ ID NO: 894609 - DNA, 15 bp, Homo sapiens
ttccttgcccccgcc

SEQ ID NO: 894610 - DNA, 15 bp, Homo sapiens
tccttgcccccgcca

SEQ ID NO: 894611 - DNA, 15 bp, Homo sapiens
ccttgcccccgccag

SEQ ID NO: 894612 - DNA, 15 bp, Homo sapiens
cttgcccccgccagc

SEQ ID NO: 894613 - DNA, 15 bp, Homo sapiens
ttgcccccgccagct

SEQ ID NO: 894614 - DNA, 15 bp, Homo sapiens
tgcccccgccagctt

SEQ ID NO: 894615 - DNA, 15 bp, Homo sapiens
gcccccgccagcttc

SEQ ID NO: 894616 - DNA, 15 bp, Homo sapiens
cccccgccagcttct

SEQ ID NO: 894617 - DNA, 15 bp, Homo sapiens
ccccgccagcttctg

SEQ ID NO: 894618 - DNA, 15 bp, Homo sapiens
cccgccagcttctga

SEQ ID NO: 894619 - DNA, 15 bp, Homo sapiens
ccgccagcttctgac

SEQ ID NO: 894620 - DNA, 15 bp, Homo sapiens
cgccagcttctgacg

SEQ ID NO: 894621 - DNA, 15 bp, Homo sapiens
gccagcttctgacgc

SEQ ID NO: 894622 - DNA, 15 bp, Homo sapiens
ccagcttctgacgca

SEQ ID NO: 894623 - DNA, 15 bp, Homo sapiens
cagcttctgacgcac

SEQ ID NO: 894624 - DNA, 15 bp, Homo sapiens
agcttctgacgcact

SEQ ID NO: 894625 - DNA, 15 bp, Homo sapiens
gcttctgacgcactc

SEQ ID NO: 894626 - DNA, 15 bp, Homo sapiens
cttctgacgcactcc

SEQ ID NO: 894627 - DNA, 15 bp, Homo sapiens
ttctgacgcactcct

SEQ ID NO: 894628 - DNA, 15 bp, Homo sapiens
tctgacgcactcctt

SEQ ID NO: 894629 - DNA, 15 bp, Homo sapiens
ctgacgcactccttg

SEQ ID NO: 894630 - DNA, 15 bp, Homo sapiens
tgacgcactccttgg

SEQ ID NO: 894631 - DNA, 15 bp, Homo sapiens
gacgcactccttggc

SEQ ID NO: 894632 - DNA, 15 bp, Homo sapiens
acgcactccttggcc

SEQ ID NO: 894633 - DNA, 15 bp, Homo sapiens
cgcactccttggcct

SEQ ID NO: 894634 - DNA, 15 bp, Homo sapiens
gcactccttggcctg

SEQ ID NO: 894635 - DNA, 15 bp, Homo sapiens
cactccttggcctgt

SEQ ID NO: 894636 - DNA, 15 bp, Homo sapiens
actccttggcctgtg

SEQ ID NO: 894637 - DNA, 15 bp, Homo sapiens
ctccttggcctgtgg

SEQ ID NO: 894638 - DNA, 15 bp, Homo sapiens
tccttggcctgtggt

SEQ ID NO: 894639 - DNA, 15 bp, Homo sapiens
ccttggcctgtggtc

SEQ ID NO: 894640 - DNA, 15 bp, Homo sapiens
cttggcctgtggtca

SEQ ID NO: 894641 - DNA, 15 bp, Homo sapiens
ttggcctgtggtcac

SEQ ID NO: 894642 - DNA, 15 bp, Homo sapiens
tggcctgtggtcaca

SEQ ID NO: 894643 - DNA, 15 bp, Homo sapiens
ggcctgtggtcacat

SEQ ID NO: 894644 - DNA, 15 bp, Homo sapiens
gcctgtggtcacatc

SEQ ID NO: 894645 - DNA, 15 bp, Homo sapiens
cctgtggtcacatca

SEQ ID NO: 894646 - DNA, 15 bp, Homo sapiens
ctgtggtcacatcac

SEQ ID NO: 894647 - DNA, 15 bp, Homo sapiens
tgtggtcacatcact

SEQ ID NO: 894648 - DNA, 15 bp, Homo sapiens
gtggtcacatcactc

SEQ ID NO: 894649 - DNA, 15 bp, Homo sapiens
tggtcacatcactct

SEQ ID NO: 894650 - DNA, 15 bp, Homo sapiens
ggtcacatcactcta

SEQ ID NO: 894651 - DNA, 15 bp, Homo sapiens
gtcacatcactctaa

SEQ ID NO: 894652 - DNA, 15 bp, Homo sapiens
tcacatcactctaat

SEQ ID NO: 894653 - DNA, 15 bp, Homo sapiens
cacatcactctaatt

SEQ ID NO: 894654 - DNA, 15 bp, Homo sapiens
acatcactctaattg

SEQ ID NO: 894655 - DNA, 15 bp, Homo sapiens
catcactctaattgc

SEQ ID NO: 894656 - DNA, 15 bp, Homo sapiens
atcactctaattgct

SEQ ID NO: 894657 - DNA, 15 bp, Homo sapiens
tcactctaattgctg

SEQ ID NO: 894658 - DNA, 15 bp, Homo sapiens
cactctaattgctgt

SEQ ID NO: 894659 - DNA, 15 bp, Homo sapiens
actctaattgctgtc

SEQ ID NO: 894660 - DNA, 15 bp, Homo sapiens
ctctaattgctgtct

SEQ ID NO: 894661 - DNA, 15 bp, Homo sapiens
tctaattgctgtctc

SEQ ID NO: 894662 - DNA, 15 bp, Homo sapiens
ctaattgctgtctcc

SEQ ID NO: 894663 - DNA, 15 bp, Homo sapiens
taattgctgtctccc

SEQ ID NO: 894664 - DNA, 15 bp, Homo sapiens
aattgctgtctccct

SEQ ID NO: 894665 - DNA, 15 bp, Homo sapiens
attgctgtctccctg

SEQ ID NO: 894666 - DNA, 15 bp, Homo sapiens
ttgctgtctccctgg

SEQ ID NO: 894667 - DNA, 15 bp, Homo sapiens
tgctgtctccctggt

SEQ ID NO: 894668 - DNA, 15 bp, Homo sapiens
gctgtctccctggtc

SEQ ID NO: 894669 - DNA, 15 bp, Homo sapiens
ctgtctccctggtca

SEQ ID NO: 894670 - DNA, 15 bp, Homo sapiens
tgtctccctggtcat

SEQ ID NO: 894671 - DNA, 15 bp, Homo sapiens
gtctccctggtcata

SEQ ID NO: 894672 - DNA, 15 bp, Homo sapiens
tctccctggtcatat

SEQ ID NO: 894673 - DNA, 15 bp, Homo sapiens
ctccctggtcatatc

SEQ ID NO: 894674 - DNA, 15 bp, Homo sapiens
tccctggtcatatca

SEQ ID NO: 894675 - DNA, 15 bp, Homo sapiens
ccctggtcatatcac

SEQ ID NO: 894676 - DNA, 15 bp, Homo sapiens
cctggtcatatcacc

SEQ ID NO: 894677 - DNA, 15 bp, Homo sapiens
ctggtcatatcacct

SEQ ID NO: 894678 - DNA, 15 bp, Homo sapiens
tggtcatatcacctt

SEQ ID NO: 894679 - DNA, 15 bp, Homo sapiens
ggtcatatcacctta

SEQ ID NO: 894680 - DNA, 15 bp, Homo sapiens
gtcatatcaccttag

SEQ ID NO: 894681 - DNA, 15 bp, Homo sapiens
tcatatcaccttagc

SEQ ID NO: 894682 - DNA, 15 bp, Homo sapiens
catatcaccttagct

SEQ ID NO: 894683 - DNA, 15 bp, Homo sapiens
atatcaccttagctt

SEQ ID NO: 894684 - DNA, 15 bp, Homo sapiens
tatcaccttagcttt

SEQ ID NO: 894685 - DNA, 15 bp, Homo sapiens
atcaccttagctttc

SEQ ID NO: 894686 - DNA, 15 bp, Homo sapiens
tcaccttagctttct

SEQ ID NO: 894687 - DNA, 15 bp, Homo sapiens
caccttagctttctc

SEQ ID NO: 894688 - DNA, 15 bp, Homo sapiens
accttagctttctca

SEQ ID NO: 894689 - DNA, 15 bp, Homo sapiens
ccttagctttctcat

SEQ ID NO: 894690 - DNA, 15 bp, Homo sapiens
cttagctttctcatc

SEQ ID NO: 894691 - DNA, 15 bp, Homo sapiens
ttagctttctcatct

SEQ ID NO: 894692 - DNA, 15 bp, Homo sapiens
tagctttctcatctg

SEQ ID NO: 894693 - DNA, 15 bp, Homo sapiens
agctttctcatctgt

SEQ ID NO: 894694 - DNA, 15 bp, Homo sapiens
gctttctcatctgtt

SEQ ID NO: 894695 - DNA, 15 bp, Homo sapiens
ctttctcatctgttt

SEQ ID NO: 894696 - DNA, 15 bp, Homo sapiens
tttctcatctgttta

SEQ ID NO: 894697 - DNA, 15 bp, Homo sapiens
ttctcatctgtttaa

SEQ ID NO: 894698 - DNA, 15 bp, Homo sapiens
tctcatctgtttaat

SEQ ID NO: 894699 - DNA, 15 bp, Homo sapiens
ctcatctgtttaatc

SEQ ID NO: 894700 - DNA, 15 bp, Homo sapiens
tcatctgtttaatct

SEQ ID NO: 894701 - DNA, 15 bp, Homo sapiens
catctgtttaatctc

SEQ ID NO: 894702 - DNA, 15 bp, Homo sapiens
atctgtttaatctcc

SEQ ID NO: 894703 - DNA, 15 bp, Homo sapiens
tctgtttaatctccc

SEQ ID NO: 894704 - DNA, 15 bp, Homo sapiens
ctgtttaatctccct

SEQ ID NO: 894705 - DNA, 15 bp, Homo sapiens
tgtttaatctccctt

SEQ ID NO: 894706 - DNA, 15 bp, Homo sapiens
gtttaatctcccttc

SEQ ID NO: 894707 - DNA, 15 bp, Homo sapiens
tttaatctcccttca

SEQ ID NO: 894708 - DNA, 15 bp, Homo sapiens
ttaatctcccttcac

SEQ ID NO: 894709 - DNA, 15 bp, Homo sapiens
taatctcccttcact

SEQ ID NO: 894710 - DNA, 15 bp, Homo sapiens
aatctcccttcactt

SEQ ID NO: 894711 - DNA, 15 bp, Homo sapiens
atctcccttcacttc

SEQ ID NO: 894712 - DNA, 15 bp, Homo sapiens
tctcccttcacttcc

SEQ ID NO: 894713 - DNA, 15 bp, Homo sapiens
ctcccttcacttccc

SEQ ID NO: 894714 - DNA, 15 bp, Homo sapiens
tcccttcacttccct

SEQ ID NO: 894715 - DNA, 15 bp, Homo sapiens
cccttcacttccctc

SEQ ID NO: 894716 - DNA, 15 bp, Homo sapiens
ccttcacttccctct

SEQ ID NO: 894717 - DNA, 15 bp, Homo sapiens
cttcacttccctctt

SEQ ID NO: 894718 - DNA, 15 bp, Homo sapiens
ttcacttccctctta

SEQ ID NO: 894719 - DNA, 15 bp, Homo sapiens
tcacttccctcttat

SEQ ID NO: 894720 - DNA, 15 bp, Homo sapiens
cacttccctcttatt

SEQ ID NO: 894721 - DNA, 15 bp, Homo sapiens
acttccctcttatta

SEQ ID NO: 894722 - DNA, 15 bp, Homo sapiens
cttccctcttattag

SEQ ID NO: 894723 - DNA, 15 bp, Homo sapiens
ttccctcttattagg

SEQ ID NO: 894724 - DNA, 15 bp, Homo sapiens
tccctcttattagga

SEQ ID NO: 894725 - DNA, 15 bp, Homo sapiens
ccctcttattaggac

SEQ ID NO: 894726 - DNA, 15 bp, Homo sapiens
cctcttattaggacc

SEQ ID NO: 894727 - DNA, 15 bp, Homo sapiens
ctcttattaggaccc

SEQ ID NO: 894728 - DNA, 15 bp, Homo sapiens
tcttattaggaccct

SEQ ID NO: 894729 - DNA, 15 bp, Homo sapiens
cttattaggaccctt

SEQ ID NO: 894730 - DNA, 15 bp, Homo sapiens
ttattaggacccttg

SEQ ID NO: 894731 - DNA, 15 bp, Homo sapiens
tattaggacccttgg

SEQ ID NO: 894732 - DNA, 15 bp, Homo sapiens
attaggacccttggg

SEQ ID NO: 894733 - DNA, 15 bp, Homo sapiens
ttaggacccttggga

SEQ ID NO: 894734 - DNA, 15 bp, Homo sapiens
taggacccttgggat

SEQ ID NO: 894735 - DNA, 15 bp, Homo sapiens
aggacccttgggatt

SEQ ID NO: 894736 - DNA, 15 bp, Homo sapiens
ggacccttgggatta

SEQ ID NO: 894737 - DNA, 15 bp, Homo sapiens
gacccttgggattac

SEQ ID NO: 894738 - DNA, 15 bp, Homo sapiens
acccttgggattaca

SEQ ID NO: 894739 - DNA, 15 bp, Homo sapiens
cccttgggattacat

SEQ ID NO: 894740 - DNA, 15 bp, Homo sapiens
ccttgggattacatt

SEQ ID NO: 894741 - DNA, 15 bp, Homo sapiens
cttgggattacattt

SEQ ID NO: 894742 - DNA, 15 bp, Homo sapiens
ttgggattacattta

SEQ ID NO: 894743 - DNA, 15 bp, Homo sapiens
tgggattacatttag

SEQ ID NO: 894744 - DNA, 15 bp, Homo sapiens
gggattacatttagg

SEQ ID NO: 894745 - DNA, 15 bp, Homo sapiens
ggattacatttagga

SEQ ID NO: 894746 - DNA, 15 bp, Homo sapiens
gattacatttaggag

SEQ ID NO: 894747 - DNA, 15 bp, Homo sapiens
attacatttaggagc

SEQ ID NO: 894748 - DNA, 15 bp, Homo sapiens
ttacatttaggagct

SEQ ID NO: 894749 - DNA, 15 bp, Homo sapiens
tacatttaggagcta

SEQ ID NO: 894750 - DNA, 15 bp, Homo sapiens
acatttaggagctac

SEQ ID NO: 894751 - DNA, 15 bp, Homo sapiens
catttaggagctaca

SEQ ID NO: 894752 - DNA, 15 bp, Homo sapiens
atttaggagctacat

SEQ ID NO: 894753 - DNA, 15 bp, Homo sapiens
tttaggagctacatg

SEQ ID NO: 894754 - DNA, 15 bp, Homo sapiens
ttaggagctacatgg

SEQ ID NO: 894755 - DNA, 15 bp, Homo sapiens
taggagctacatgga

SEQ ID NO: 894756 - DNA, 15 bp, Homo sapiens
aggagctacatggat

SEQ ID NO: 894757 - DNA, 15 bp, Homo sapiens
ggagctacatggata

SEQ ID NO: 894758 - DNA, 15 bp, Homo sapiens
gagctacatggataa

SEQ ID NO: 894759 - DNA, 15 bp, Homo sapiens
agctacatggataat

SEQ ID NO: 894760 - DNA, 15 bp, Homo sapiens
gctacatggataatc

SEQ ID NO: 894761 - DNA, 15 bp, Homo sapiens
ctacatggataatcc

SEQ ID NO: 894762 - DNA, 15 bp, Homo sapiens
tacatggataatcca

SEQ ID NO: 894763 - DNA, 15 bp, Homo sapiens
acatggataatccaa

SEQ ID NO: 894764 - DNA, 15 bp, Homo sapiens
catggataatccaat

SEQ ID NO: 894765 - DNA, 15 bp, Homo sapiens
atggataatccaata

SEQ ID NO: 894766 - DNA, 15 bp, Homo sapiens
tggataatccaatat

SEQ ID NO: 894767 - DNA, 15 bp, Homo sapiens
ggataatccaatatt

SEQ ID NO: 894768 - DNA, 15 bp, Homo sapiens
gataatccaatattg

SEQ ID NO: 894769 - DNA, 15 bp, Homo sapiens
ataatccaatattgt

SEQ ID NO: 894770 - DNA, 15 bp, Homo sapiens
taatccaatattgtc

SEQ ID NO: 894771 - DNA, 15 bp, Homo sapiens
aatccaatattgtct

SEQ ID NO: 894772 - DNA, 15 bp, Homo sapiens
atccaatattgtctc

SEQ ID NO: 894773 - DNA, 15 bp, Homo sapiens
tccaatattgtctcc

SEQ ID NO: 894774 - DNA, 15 bp, Homo sapiens
ccaatattgtctccc

SEQ ID NO: 894775 - DNA, 15 bp, Homo sapiens
caatattgtctcccc

SEQ ID NO: 894776 - DNA, 15 bp, Homo sapiens
aatattgtctcccca

SEQ ID NO: 894777 - DNA, 15 bp, Homo sapiens
atattgtctccccat

SEQ ID NO: 894778 - DNA, 15 bp, Homo sapiens
tattgtctccccatt

SEQ ID NO: 894779 - DNA, 15 bp, Homo sapiens
attgtctccccattt

SEQ ID NO: 894780 - DNA, 15 bp, Homo sapiens
ttgtctccccatttc

SEQ ID NO: 894781 - DNA, 15 bp, Homo sapiens
tgtctccccatttca

SEQ ID NO: 894782 - DNA, 15 bp, Homo sapiens
gtctccccatttcaa

SEQ ID NO: 894783 - DNA, 15 bp, Homo sapiens
tctccccatttcaag

SEQ ID NO: 894784 - DNA, 15 bp, Homo sapiens
ctccccatttcaaga

SEQ ID NO: 894785 - DNA, 15 bp, Homo sapiens
tccccatttcaagag

SEQ ID NO: 894786 - DNA, 15 bp, Homo sapiens
ccccatttcaagagc

SEQ ID NO: 894787 - DNA, 15 bp, Homo sapiens
cccatttcaagagcc

SEQ ID NO: 894788 - DNA, 15 bp, Homo sapiens
ccatttcaagagcct

SEQ ID NO: 894789 - DNA, 15 bp, Homo sapiens
catttcaagagcctt

SEQ ID NO: 894790 - DNA, 15 bp, Homo sapiens
atttcaagagccttt

SEQ ID NO: 894791 - DNA, 15 bp, Homo sapiens
tttcaagagccttta

SEQ ID NO: 894792 - DNA, 15 bp, Homo sapiens
ttcaagagcctttat

SEQ ID NO: 894793 - DNA, 15 bp, Homo sapiens
tcaagagcctttatc

SEQ ID NO: 894794 - DNA, 15 bp, Homo sapiens
caagagcctttatct

SEQ ID NO: 894795 - DNA, 15 bp, Homo sapiens
aagagcctttatctt

SEQ ID NO: 894796 - DNA, 15 bp, Homo sapiens
agagcctttatcttt

SEQ ID NO: 894797 - DNA, 15 bp, Homo sapiens
gagcctttatctttt

SEQ ID NO: 894798 - DNA, 15 bp, Homo sapiens
agcctttatcttttt

SEQ ID NO: 894799 - DNA, 15 bp, Homo sapiens
gcctttatctttttt

SEQ ID NO: 894800 - DNA, 15 bp, Homo sapiens
cctttatcttttttt

SEQ ID NO: 894801 - DNA, 15 bp, Homo sapiens
ctttatctttttttg

SEQ ID NO: 894802 - DNA, 15 bp, Homo sapiens
tttatctttttttgt

SEQ ID NO: 894803 - DNA, 15 bp, Homo sapiens
ttatctttttttgtt

SEQ ID NO: 894804 - DNA, 15 bp, Homo sapiens
tatctttttttgttt

SEQ ID NO: 894805 - DNA, 15 bp, Homo sapiens
atctttttttgtttt

SEQ ID NO: 894806 - DNA, 15 bp, Homo sapiens
tctttttttgttttt

SEQ ID NO: 894807 - DNA, 15 bp, Homo sapiens
ctttttttgtttttt

SEQ ID NO: 894808 - DNA, 15 bp, Homo sapiens
tttttttgttttttg

SEQ ID NO: 894809 - DNA, 15 bp, Homo sapiens
ttttttgttttttgt

SEQ ID NO: 894810 - DNA, 15 bp, Homo sapiens
tttttgttttttgtt

SEQ ID NO: 894811 - DNA, 15 bp, Homo sapiens
ttttgttttttgttt

SEQ ID NO: 894812 - DNA, 15 bp, Homo sapiens
tttgttttttgtttt

SEQ ID NO: 894813 - DNA, 15 bp, Homo sapiens
ttgttttttgttttt

SEQ ID NO: 894814 - DNA, 15 bp, Homo sapiens
tgttttttgtttttt

SEQ ID NO: 894815 - DNA, 15 bp, Homo sapiens
gttttttgttttttt

SEQ ID NO: 894816 - DNA, 15 bp, Homo sapiens
ttttttgtttttttt

SEQ ID NO: 894817 - DNA, 15 bp, Homo sapiens
tttttgttttttttt

SEQ ID NO: 894818 - DNA, 15 bp, Homo sapiens
ttttgtttttttttt

SEQ ID NO: 894819 - DNA, 15 bp, Homo sapiens
ttgtttttttttttg

SEQ ID NO: 894820 - DNA, 15 bp, Homo sapiens
tgtttttttttttga

SEQ ID NO: 894821 - DNA, 15 bp, Homo sapiens
gtttttttttttgac

SEQ ID NO: 894822 - DNA, 15 bp, Homo sapiens
tttttttttttgacg

SEQ ID NO: 894823 - DNA, 15 bp, Homo sapiens
ttttttttttgacgg

SEQ ID NO: 894824 - DNA, 15 bp, Homo sapiens
tttttttttgacgga

SEQ ID NO: 894825 - DNA, 15 bp, Homo sapiens
ttttttttgacggag

SEQ ID NO: 894826 - DNA, 15 bp, Homo sapiens
tttttttgacggagt

SEQ ID NO: 894827 - DNA, 15 bp, Homo sapiens
ttttttgacggagtc

SEQ ID NO: 894828 - DNA, 15 bp, Homo sapiens
tttttgacggagtct

SEQ ID NO: 894829 - DNA, 15 bp, Homo sapiens
ttttgacggagtctt

SEQ ID NO: 894830 - DNA, 15 bp, Homo sapiens
tttgacggagtcttg

SEQ ID NO: 894831 - DNA, 15 bp, Homo sapiens
ttgacggagtcttgc

SEQ ID NO: 894832 - DNA, 15 bp, Homo sapiens
tgacggagtcttgct

SEQ ID NO: 894833 - DNA, 15 bp, Homo sapiens
gacggagtcttgctt

SEQ ID NO: 894834 - DNA, 15 bp, Homo sapiens
acggagtcttgcttt

SEQ ID NO: 894835 - DNA, 15 bp, Homo sapiens
cggagtcttgctttg

SEQ ID NO: 894836 - DNA, 15 bp, Homo sapiens
ggagtcttgctttgt

SEQ ID NO: 894837 - DNA, 15 bp, Homo sapiens
gagtcttgctttgtt

SEQ ID NO: 894838 - DNA, 15 bp, Homo sapiens
agtcttgctttgttg

SEQ ID NO: 894839 - DNA, 15 bp, Homo sapiens
gtcttgctttgttgc

SEQ ID NO: 894840 - DNA, 15 bp, Homo sapiens
tcttgctttgttgcc

SEQ ID NO: 894841 - DNA, 15 bp, Homo sapiens
cttgctttgttgccc

SEQ ID NO: 894842 - DNA, 15 bp, Homo sapiens
ttgctttgttgccca

SEQ ID NO: 894843 - DNA, 15 bp, Homo sapiens
tgctttgttgcccag

SEQ ID NO: 894844 - DNA, 15 bp, Homo sapiens
gctttgttgcccagg

SEQ ID NO: 894845 - DNA, 15 bp, Homo sapiens
ctttgttgcccaggc

SEQ ID NO: 894846 - DNA, 15 bp, Homo sapiens
tttgttgcccaggct

SEQ ID NO: 894847 - DNA, 15 bp, Homo sapiens
ttgttgcccaggctg

SEQ ID NO: 894848 - DNA, 15 bp, Homo sapiens
gttgcccaggctgga

SEQ ID NO: 894849 - DNA, 15 bp, Homo sapiens
ttgcccaggctggag

SEQ ID NO: 894850 - DNA, 15 bp, Homo sapiens
tgcccaggctggagt

SEQ ID NO: 894851 - DNA, 15 bp, Homo sapiens
gcccaggctggagtg

SEQ ID NO: 894852 - DNA, 15 bp, Homo sapiens
cccaggctggagtgc

SEQ ID NO: 894853 - DNA, 15 bp, Homo sapiens
ccaggctggagtgca

SEQ ID NO: 894854 - DNA, 15 bp, Homo sapiens
caggctggagtgcag

SEQ ID NO: 894855 - DNA, 15 bp, Homo sapiens
aggctggagtgcagt

SEQ ID NO: 894856 - DNA, 15 bp, Homo sapiens
ggctggagtgcagtg

SEQ ID NO: 894857 - DNA, 15 bp, Homo sapiens
gctggagtgcagtgg

SEQ ID NO: 894858 - DNA, 15 bp, Homo sapiens
ctggagtgcagtggc

SEQ ID NO: 894859 - DNA, 15 bp, Homo sapiens
tggagtgcagtggcg

SEQ ID NO: 894860 - DNA, 15 bp, Homo sapiens
ggagtgcagtggcgc

SEQ ID NO: 894861 - DNA, 15 bp, Homo sapiens
gagtgcagtggcgca

SEQ ID NO: 894862 - DNA, 15 bp, Homo sapiens
agtgcagtggcgcat

SEQ ID NO: 894863 - DNA, 15 bp, Homo sapiens
gtgcagtggcgcatc

SEQ ID NO: 894864 - DNA, 15 bp, Homo sapiens
tgcagtggcgcatct

SEQ ID NO: 894865 - DNA, 15 bp, Homo sapiens
gcagtggcgcatctc

SEQ ID NO: 894866 - DNA, 15 bp, Homo sapiens
cagtggcgcatctct

SEQ ID NO: 894867 - DNA, 15 bp, Homo sapiens
agtggcgcatctctg

SEQ ID NO: 894868 - DNA, 15 bp, Homo sapiens
gtggcgcatctctgc

SEQ ID NO: 894869 - DNA, 15 bp, Homo sapiens
tggcgcatctctgct

SEQ ID NO: 894870 - DNA, 15 bp, Homo sapiens
ggcgcatctctgctc

SEQ ID NO: 894871 - DNA, 15 bp, Homo sapiens
gcgcatctctgctca

SEQ ID NO: 894872 - DNA, 15 bp, Homo sapiens
cgcatctctgctcac

SEQ ID NO: 894873 - DNA, 15 bp, Homo sapiens
gcatctctgctcact

SEQ ID NO: 894874 - DNA, 15 bp, Homo sapiens
catctctgctcactg

SEQ ID NO: 894875 - DNA, 15 bp, Homo sapiens
atctctgctcactgc

SEQ ID NO: 894876 - DNA, 15 bp, Homo sapiens
tctctgctcactgca

SEQ ID NO: 894877 - DNA, 15 bp, Homo sapiens
ctctgctcactgcaa

SEQ ID NO: 894878 - DNA, 15 bp, Homo sapiens
tctgctcactgcaag

SEQ ID NO: 894879 - DNA, 15 bp, Homo sapiens
ctgctcactgcaagc

SEQ ID NO: 894880 - DNA, 15 bp, Homo sapiens
tgctcactgcaagct

SEQ ID NO: 894881 - DNA, 15 bp, Homo sapiens
gctcactgcaagctc

SEQ ID NO: 894882 - DNA, 15 bp, Homo sapiens
ctcactgcaagctcc

SEQ ID NO: 894883 - DNA, 15 bp, Homo sapiens
tcactgcaagctccg

SEQ ID NO: 894884 - DNA, 15 bp, Homo sapiens
cactgcaagctccgc

SEQ ID NO: 894885 - DNA, 15 bp, Homo sapiens
actgcaagctccgcc

SEQ ID NO: 894886 - DNA, 15 bp, Homo sapiens
ctgcaagctccgcct

SEQ ID NO: 894887 - DNA, 15 bp, Homo sapiens
tgcaagctccgcctc

SEQ ID NO: 894888 - DNA, 15 bp, Homo sapiens
gcaagctccgcctcc

SEQ ID NO: 894889 - DNA, 15 bp, Homo sapiens
caagctccgcctcct

SEQ ID NO: 894890 - DNA, 15 bp, Homo sapiens
aagctccgcctcctg

SEQ ID NO: 894891 - DNA, 15 bp, Homo sapiens
agctccgcctcctgg

SEQ ID NO: 894892 - DNA, 15 bp, Homo sapiens
gctccgcctcctggg

SEQ ID NO: 894893 - DNA, 15 bp, Homo sapiens
ctccgcctcctgggt

SEQ ID NO: 894894 - DNA, 15 bp, Homo sapiens
tccgcctcctgggtt

SEQ ID NO: 894895 - DNA, 15 bp, Homo sapiens
ccgcctcctgggttc

SEQ ID NO: 894896 - DNA, 15 bp, Homo sapiens
cgcctcctgggttca

SEQ ID NO: 894897 - DNA, 15 bp, Homo sapiens
gcctcctgggttcat

SEQ ID NO: 894898 - DNA, 15 bp, Homo sapiens
cctcctgggttcatg

SEQ ID NO: 894899 - DNA, 15 bp, Homo sapiens
ctcctgggttcatgc

SEQ ID NO: 894900 - DNA, 15 bp, Homo sapiens
tcctgggttcatgcc

SEQ ID NO: 894901 - DNA, 15 bp, Homo sapiens
cctgggttcatgcca

SEQ ID NO: 894902 - DNA, 15 bp, Homo sapiens
ctgggttcatgccat

SEQ ID NO: 894903 - DNA, 15 bp, Homo sapiens
tgggttcatgccatt

SEQ ID NO: 894904 - DNA, 15 bp, Homo sapiens
gggttcatgccattc

SEQ ID NO: 894905 - DNA, 15 bp, Homo sapiens
ggttcatgccattct

SEQ ID NO: 894906 - DNA, 15 bp, Homo sapiens
gttcatgccattctc

SEQ ID NO: 894907 - DNA, 15 bp, Homo sapiens
ttcatgccattctcc

SEQ ID NO: 894908 - DNA, 15 bp, Homo sapiens
tcatgccattctcct

SEQ ID NO: 894909 - DNA, 15 bp, Homo sapiens
catgccattctcctg

SEQ ID NO: 894910 - DNA, 15 bp, Homo sapiens
atgccattctcctgc

SEQ ID NO: 894911 - DNA, 15 bp, Homo sapiens
tgccattctcctgcc

SEQ ID NO: 894912 - DNA, 15 bp, Homo sapiens
gccattctcctgcct

SEQ ID NO: 894913 - DNA, 15 bp, Homo sapiens
ccattctcctgcctc

SEQ ID NO: 894914 - DNA, 15 bp, Homo sapiens
cattctcctgcctca

SEQ ID NO: 894915 - DNA, 15 bp, Homo sapiens
tgcctcagcctcccc

SEQ ID NO: 894916 - DNA, 15 bp, Homo sapiens
gcctcagcctcccct

SEQ ID NO: 894917 - DNA, 15 bp, Homo sapiens
cctcagcctcccctg

SEQ ID NO: 894918 - DNA, 15 bp, Homo sapiens
ctcagcctcccctgt

SEQ ID NO: 894919 - DNA, 15 bp, Homo sapiens
tcagcctcccctgta

SEQ ID NO: 894920 - DNA, 15 bp, Homo sapiens
cagcctcccctgtag

SEQ ID NO: 894921 - DNA, 15 bp, Homo sapiens
agcctcccctgtagc

SEQ ID NO: 894922 - DNA, 15 bp, Homo sapiens
gcctcccctgtagct

SEQ ID NO: 894923 - DNA, 15 bp, Homo sapiens
cctcccctgtagctg

SEQ ID NO: 894924 - DNA, 15 bp, Homo sapiens
ctcccctgtagctgg

SEQ ID NO: 894925 - DNA, 15 bp, Homo sapiens
tcccctgtagctggg

SEQ ID NO: 894926 - DNA, 15 bp, Homo sapiens
cccctgtagctggga

SEQ ID NO: 894927 - DNA, 15 bp, Homo sapiens
ccctgtagctgggac

SEQ ID NO: 894928 - DNA, 15 bp, Homo sapiens
cctgtagctgggact

SEQ ID NO: 894929 - DNA, 15 bp, Homo sapiens
ctgtagctgggacta

SEQ ID NO: 894930 - DNA, 15 bp, Homo sapiens
tgtagctgggactac

SEQ ID NO: 894931 - DNA, 15 bp, Homo sapiens
gtagctgggactact

SEQ ID NO: 894932 - DNA, 15 bp, Homo sapiens
tagctgggactactg

SEQ ID NO: 894933 - DNA, 15 bp, Homo sapiens
agctgggactactgg

SEQ ID NO: 894934 - DNA, 15 bp, Homo sapiens
gctgggactactggc

SEQ ID NO: 894935 - DNA, 15 bp, Homo sapiens
ctgggactactggct

SEQ ID NO: 894936 - DNA, 15 bp, Homo sapiens
tgggactactggctc

SEQ ID NO: 894937 - DNA, 15 bp, Homo sapiens
gggactactggctcc

SEQ ID NO: 894938 - DNA, 15 bp, Homo sapiens
ggactactggctccc

SEQ ID NO: 894939 - DNA, 15 bp, Homo sapiens
gactactggctccca

SEQ ID NO: 894940 - DNA, 15 bp, Homo sapiens
actactggctcccac

SEQ ID NO: 894941 - DNA, 15 bp, Homo sapiens
ctactggctcccacg

SEQ ID NO: 894942 - DNA, 15 bp, Homo sapiens
tactggctcccacga

SEQ ID NO: 894943 - DNA, 15 bp, Homo sapiens
actggctcccacgac

SEQ ID NO: 894944 - DNA, 15 bp, Homo sapiens
ctggctcccacgacc

SEQ ID NO: 894945 - DNA, 15 bp, Homo sapiens
tggctcccacgacca

SEQ ID NO: 894946 - DNA, 15 bp, Homo sapiens
ggctcccacgaccac

SEQ ID NO: 894947 - DNA, 15 bp, Homo sapiens
gctcccacgaccaca

SEQ ID NO: 894948 - DNA, 15 bp, Homo sapiens
ctcccacgaccacac

SEQ ID NO: 894949 - DNA, 15 bp, Homo sapiens
tcccacgaccacacc

SEQ ID NO: 894950 - DNA, 15 bp, Homo sapiens
cccacgaccacaccc

SEQ ID NO: 894951 - DNA, 15 bp, Homo sapiens
ccacgaccacacccg

SEQ ID NO: 894952 - DNA, 15 bp, Homo sapiens
cacgaccacacccgg

SEQ ID NO: 894953 - DNA, 15 bp, Homo sapiens
acgaccacacccggc

SEQ ID NO: 894954 - DNA, 15 bp, Homo sapiens
cgaccacacccggct

SEQ ID NO: 894955 - DNA, 15 bp, Homo sapiens
gaccacacccggcta

SEQ ID NO: 894956 - DNA, 15 bp, Homo sapiens
accacacccggctaa

SEQ ID NO: 894957 - DNA, 15 bp, Homo sapiens
ccacacccggctaat

SEQ ID NO: 894958 - DNA, 15 bp, Homo sapiens
cacacccggctaatt

SEQ ID NO: 894959 - DNA, 15 bp, Homo sapiens
acacccggctaattt

SEQ ID NO: 894960 - DNA, 15 bp, Homo sapiens
cacccggctaatttt

SEQ ID NO: 894961 - DNA, 15 bp, Homo sapiens
acccggctaattttt

SEQ ID NO: 894962 - DNA, 15 bp, Homo sapiens
cccggctaatttttt

SEQ ID NO: 894963 - DNA, 15 bp, Homo sapiens
ccggctaattttttg

SEQ ID NO: 894964 - DNA, 15 bp, Homo sapiens
cggctaattttttgt

SEQ ID NO: 894965 - DNA, 15 bp, Homo sapiens
ggctaattttttgta

SEQ ID NO: 894966 - DNA, 15 bp, Homo sapiens
gctaattttttgtat

SEQ ID NO: 894967 - DNA, 15 bp, Homo sapiens
ctaattttttgtatt

SEQ ID NO: 894968 - DNA, 15 bp, Homo sapiens
taattttttgtattt

SEQ ID NO: 894969 - DNA, 15 bp, Homo sapiens
aattttttgtatttt

SEQ ID NO: 894970 - DNA, 15 bp, Homo sapiens
attttttgtattttt

SEQ ID NO: 894971 - DNA, 15 bp, Homo sapiens
ttttttgtatttttt

SEQ ID NO: 894972 - DNA, 15 bp, Homo sapiens
tttttgtattttttt

SEQ ID NO: 894973 - DNA, 15 bp, Homo sapiens
ttttgtatttttttt

SEQ ID NO: 894974 - DNA, 15 bp, Homo sapiens
tttgtattttttttt

SEQ ID NO: 894975 - DNA, 15 bp, Homo sapiens
ttgtatttttttttt

SEQ ID NO: 894976 - DNA, 15 bp, Homo sapiens
tgtattttttttttt

SEQ ID NO: 894977 - DNA, 15 bp, Homo sapiens
gtatttttttttttt

SEQ ID NO: 894978 - DNA, 15 bp, Homo sapiens
tatttttttttttta

SEQ ID NO: 894979 - DNA, 15 bp, Homo sapiens
attttttttttttag

SEQ ID NO: 894980 - DNA, 15 bp, Homo sapiens
ttttttttttttagt

SEQ ID NO: 894981 - DNA, 15 bp, Homo sapiens
tttttttttttagta

SEQ ID NO: 894982 - DNA, 15 bp, Homo sapiens
ttttttttttagtag

SEQ ID NO: 894983 - DNA, 15 bp, Homo sapiens
tttttttttagtaga

SEQ ID NO: 894984 - DNA, 15 bp, Homo sapiens
ttttttttagtagag

SEQ ID NO: 894985 - DNA, 15 bp, Homo sapiens
tttttttagtagaga

SEQ ID NO: 894986 - DNA, 15 bp, Homo sapiens
ttttttagtagagat

SEQ ID NO: 894987 - DNA, 15 bp, Homo sapiens
agagatggggtttca

SEQ ID NO: 894988 - DNA, 15 bp, Homo sapiens
gagatggggtttcac

SEQ ID NO: 894989 - DNA, 15 bp, Homo sapiens
agatggggtttcacc

SEQ ID NO: 894990 - DNA, 15 bp, Homo sapiens
gatggggtttcacca

SEQ ID NO: 894991 - DNA, 15 bp, Homo sapiens
atggggtttcaccat

SEQ ID NO: 894992 - DNA, 15 bp, Homo sapiens
tggggtttcaccatg

SEQ ID NO: 894993 - DNA, 15 bp, Homo sapiens
ggggtttcaccatgt

SEQ ID NO: 894994 - DNA, 15 bp, Homo sapiens
gggtttcaccatgtt

SEQ ID NO: 894995 - DNA, 15 bp, Homo sapiens
ggtttcaccatgtta

SEQ ID NO: 894996 - DNA, 15 bp, Homo sapiens
gtttcaccatgttag

SEQ ID NO: 894997 - DNA, 15 bp, Homo sapiens
tttcaccatgttagc

SEQ ID NO: 894998 - DNA, 15 bp, Homo sapiens
ttcaccatgttagcc

SEQ ID NO: 894999 - DNA, 15 bp, Homo sapiens
tcaccatgttagcca

SEQ ID NO: 895000 - DNA, 15 bp, Homo sapiens
caccatgttagccag

SEQ ID NO: 895001 - DNA, 15 bp, Homo sapiens
accatgttagccagg

SEQ ID NO: 895002 - DNA, 15 bp, Homo sapiens
ccatgttagccagga

SEQ ID NO: 895003 - DNA, 15 bp, Homo sapiens
catgttagccaggat

SEQ ID NO: 895004 - DNA, 15 bp, Homo sapiens
atgttagccaggatg

SEQ ID NO: 895005 - DNA, 15 bp, Homo sapiens
tgttagccaggatgg

SEQ ID NO: 895006 - DNA, 15 bp, Homo sapiens
gttagccaggatggt

SEQ ID NO: 895007 - DNA, 15 bp, Homo sapiens
ttagccaggatggtc

SEQ ID NO: 895008 - DNA, 15 bp, Homo sapiens
tagccaggatggtct

SEQ ID NO: 895009 - DNA, 15 bp, Homo sapiens
agccaggatggtctt

SEQ ID NO: 895010 - DNA, 15 bp, Homo sapiens
gccaggatggtcttg

SEQ ID NO: 895011 - DNA, 15 bp, Homo sapiens
ccaggatggtcttga

SEQ ID NO: 895012 - DNA, 15 bp, Homo sapiens
caggatggtcttgat

SEQ ID NO: 895013 - DNA, 15 bp, Homo sapiens
aggatggtcttgatc

SEQ ID NO: 895014 - DNA, 15 bp, Homo sapiens
ggatggtcttgatct

SEQ ID NO: 895015 - DNA, 15 bp, Homo sapiens
gatggtcttgatctc

SEQ ID NO: 895016 - DNA, 15 bp, Homo sapiens
atggtcttgatctcc

SEQ ID NO: 895017 - DNA, 15 bp, Homo sapiens
tggtcttgatctcct

SEQ ID NO: 895018 - DNA, 15 bp, Homo sapiens
ggtcttgatctcctg

SEQ ID NO: 895019 - DNA, 15 bp, Homo sapiens
gtcttgatctcctga

SEQ ID NO: 895020 - DNA, 15 bp, Homo sapiens
tcttgatctcctgac

SEQ ID NO: 895021 - DNA, 15 bp, Homo sapiens
cttgatctcctgacc

SEQ ID NO: 895022 - DNA, 15 bp, Homo sapiens
ttgatctcctgacct

SEQ ID NO: 895023 - DNA, 15 bp, Homo sapiens
tgatctcctgacctc

SEQ ID NO: 895024 - DNA, 15 bp, Homo sapiens
gatctcctgacctca

SEQ ID NO: 895025 - DNA, 15 bp, Homo sapiens
atctcctgacctcat

SEQ ID NO: 895026 - DNA, 15 bp, Homo sapiens
tctcctgacctcatg

SEQ ID NO: 895027 - DNA, 15 bp, Homo sapiens
ctcctgacctcatga

SEQ ID NO: 895028 - DNA, 15 bp, Homo sapiens
tcctgacctcatgat

SEQ ID NO: 895029 - DNA, 15 bp, Homo sapiens
cctgacctcatgatc

SEQ ID NO: 895030 - DNA, 15 bp, Homo sapiens
ctgacctcatgatcc

SEQ ID NO: 895031 - DNA, 15 bp, Homo sapiens
tgacctcatgatccg

SEQ ID NO: 895032 - DNA, 15 bp, Homo sapiens
gacctcatgatccgc

SEQ ID NO: 895033 - DNA, 15 bp, Homo sapiens
acctcatgatccgcc

SEQ ID NO: 895034 - DNA, 15 bp, Homo sapiens
cctcatgatccgccc

SEQ ID NO: 895035 - DNA, 15 bp, Homo sapiens
ctcatgatccgccca

SEQ ID NO: 895036 - DNA, 15 bp, Homo sapiens
tcatgatccgcccac

SEQ ID NO: 895037 - DNA, 15 bp, Homo sapiens
catgatccgcccacc

SEQ ID NO: 895038 - DNA, 15 bp, Homo sapiens
atgatccgcccacct

SEQ ID NO: 895039 - DNA, 15 bp, Homo sapiens
tgatccgcccacctc

SEQ ID NO: 895040 - DNA, 15 bp, Homo sapiens
gatccgcccacctcg

SEQ ID NO: 895041 - DNA, 15 bp, Homo sapiens
atccgcccacctcgg

SEQ ID NO: 895042 - DNA, 15 bp, Homo sapiens
tccgcccacctcggt

SEQ ID NO: 895043 - DNA, 15 bp, Homo sapiens
ccgcccacctcggtc

SEQ ID NO: 895044 - DNA, 15 bp, Homo sapiens
cgcccacctcggtct

SEQ ID NO: 895045 - DNA, 15 bp, Homo sapiens
gcccacctcggtctc

SEQ ID NO: 895046 - DNA, 15 bp, Homo sapiens
cccacctcggtctcc

SEQ ID NO: 895047 - DNA, 15 bp, Homo sapiens
ccacctcggtctccg

SEQ ID NO: 895048 - DNA, 15 bp, Homo sapiens
cacctcggtctccga

SEQ ID NO: 895049 - DNA, 15 bp, Homo sapiens
acctcggtctccgaa

SEQ ID NO: 895050 - DNA, 15 bp, Homo sapiens
cctcggtctccgaaa

SEQ ID NO: 895051 - DNA, 15 bp, Homo sapiens
ctcggtctccgaaag

SEQ ID NO: 895052 - DNA, 15 bp, Homo sapiens
tcggtctccgaaagt

SEQ ID NO: 895053 - DNA, 15 bp, Homo sapiens
cggtctccgaaagtg

SEQ ID NO: 895054 - DNA, 15 bp, Homo sapiens
ggtctccgaaagtgc

SEQ ID NO: 895055 - DNA, 15 bp, Homo sapiens
gtctccgaaagtgct

SEQ ID NO: 895056 - DNA, 15 bp, Homo sapiens
tctccgaaagtgctg

SEQ ID NO: 895057 - DNA, 15 bp, Homo sapiens
ctccgaaagtgctgg

SEQ ID NO: 895058 - DNA, 15 bp, Homo sapiens
tccgaaagtgctggg

SEQ ID NO: 895059 - DNA, 15 bp, Homo sapiens
ccgaaagtgctggga

SEQ ID NO: 895060 - DNA, 15 bp, Homo sapiens
cgaaagtgctgggat

SEQ ID NO: 895061 - DNA, 15 bp, Homo sapiens
gaaagtgctgggatt

SEQ ID NO: 895062 - DNA, 15 bp, Homo sapiens
aaagtgctgggattt

SEQ ID NO: 895063 - DNA, 15 bp, Homo sapiens
aagtgctgggatttc

SEQ ID NO: 895064 - DNA, 15 bp, Homo sapiens
agtgctgggatttca

SEQ ID NO: 895065 - DNA, 15 bp, Homo sapiens
gtgctgggatttcag

SEQ ID NO: 895066 - DNA, 15 bp, Homo sapiens
tgctgggatttcagg

SEQ ID NO: 895067 - DNA, 15 bp, Homo sapiens
gctgggatttcaggc

SEQ ID NO: 895068 - DNA, 15 bp, Homo sapiens
ctgggatttcaggca

SEQ ID NO: 895069 - DNA, 15 bp, Homo sapiens
tgggatttcaggcat

SEQ ID NO: 895070 - DNA, 15 bp, Homo sapiens
gggatttcaggcatg

SEQ ID NO: 895071 - DNA, 15 bp, Homo sapiens
ggatttcaggcatga

SEQ ID NO: 895072 - DNA, 15 bp, Homo sapiens
gatttcaggcatgag

SEQ ID NO: 895073 - DNA, 15 bp, Homo sapiens
atttcaggcatgagc

SEQ ID NO: 895074 - DNA, 15 bp, Homo sapiens
tttcaggcatgagcc

SEQ ID NO: 895075 - DNA, 15 bp, Homo sapiens
ttcaggcatgagcca

SEQ ID NO: 895076 - DNA, 15 bp, Homo sapiens
tcaggcatgagccac

SEQ ID NO: 895077 - DNA, 15 bp, Homo sapiens
aggcatgagccaccg

SEQ ID NO: 895078 - DNA, 15 bp, Homo sapiens
ggcatgagccaccgc

SEQ ID NO: 895079 - DNA, 15 bp, Homo sapiens
gcatgagccaccgca

SEQ ID NO: 895080 - DNA, 15 bp, Homo sapiens
catgagccaccgcac

SEQ ID NO: 895081 - DNA, 15 bp, Homo sapiens
atgagccaccgcacc

SEQ ID NO: 895082 - DNA, 15 bp, Homo sapiens
tgagccaccgcacct

SEQ ID NO: 895083 - DNA, 15 bp, Homo sapiens
gagccaccgcacctg

SEQ ID NO: 895084 - DNA, 15 bp, Homo sapiens
agccaccgcacctgg

SEQ ID NO: 895085 - DNA, 15 bp, Homo sapiens
gccaccgcacctggc

SEQ ID NO: 895086 - DNA, 15 bp, Homo sapiens
ccaccgcacctggcc

SEQ ID NO: 895087 - DNA, 15 bp, Homo sapiens
caccgcacctggcct

SEQ ID NO: 895088 - DNA, 15 bp, Homo sapiens
accgcacctggcctt

SEQ ID NO: 895089 - DNA, 15 bp, Homo sapiens
ccgcacctggccttc

SEQ ID NO: 895090 - DNA, 15 bp, Homo sapiens
cgcacctggccttca

SEQ ID NO: 895091 - DNA, 15 bp, Homo sapiens
gcacctggccttcaa

SEQ ID NO: 895092 - DNA, 15 bp, Homo sapiens
cacctggccttcaag

SEQ ID NO: 895093 - DNA, 15 bp, Homo sapiens
acctggccttcaaga

SEQ ID NO: 895094 - DNA, 15 bp, Homo sapiens
cctggccttcaagag

SEQ ID NO: 895095 - DNA, 15 bp, Homo sapiens
ctggccttcaagagc

SEQ ID NO: 895096 - DNA, 15 bp, Homo sapiens
tggccttcaagagcc

SEQ ID NO: 895097 - DNA, 15 bp, Homo sapiens
ggccttcaagagcct

SEQ ID NO: 895098 - DNA, 15 bp, Homo sapiens
gccttcaagagcctt

SEQ ID NO: 895099 - DNA, 15 bp, Homo sapiens
ccttcaagagccttt

SEQ ID NO: 895100 - DNA, 15 bp, Homo sapiens
cttcaagagccttta

SEQ ID NO: 895101 - DNA, 15 bp, Homo sapiens
agagcctttatctta

SEQ ID NO: 895102 - DNA, 15 bp, Homo sapiens
gagcctttatcttaa

SEQ ID NO: 895103 - DNA, 15 bp, Homo sapiens
agcctttatcttaat

SEQ ID NO: 895104 - DNA, 15 bp, Homo sapiens
gcctttatcttaatc

SEQ ID NO: 895105 - DNA, 15 bp, Homo sapiens
cctttatcttaatca

SEQ ID NO: 895106 - DNA, 15 bp, Homo sapiens
ctttatcttaatcat

SEQ ID NO: 895107 - DNA, 15 bp, Homo sapiens
tttatcttaatcatt

SEQ ID NO: 895108 - DNA, 15 bp, Homo sapiens
ttatcttaatcattt

SEQ ID NO: 895109 - DNA, 15 bp, Homo sapiens
tatcttaatcatttc

SEQ ID NO: 895110 - DNA, 15 bp, Homo sapiens
atcttaatcatttct

SEQ ID NO: 895111 - DNA, 15 bp, Homo sapiens
tcttaatcatttctg

SEQ ID NO: 895112 - DNA, 15 bp, Homo sapiens
cttaatcatttctgc

SEQ ID NO: 895113 - DNA, 15 bp, Homo sapiens
ttaatcatttctgca

SEQ ID NO: 895114 - DNA, 15 bp, Homo sapiens
taatcatttctgcaa

SEQ ID NO: 895115 - DNA, 15 bp, Homo sapiens
aatcatttctgcaaa

SEQ ID NO: 895116 - DNA, 15 bp, Homo sapiens
atcatttctgcaaag

SEQ ID NO: 895117 - DNA, 15 bp, Homo sapiens
tcatttctgcaaagt

SEQ ID NO: 895118 - DNA, 15 bp, Homo sapiens
catttctgcaaagtc

SEQ ID NO: 895119 - DNA, 15 bp, Homo sapiens
atttctgcaaagtca

SEQ ID NO: 895120 - DNA, 15 bp, Homo sapiens
tttctgcaaagtcat

SEQ ID NO: 895121 - DNA, 15 bp, Homo sapiens
ttctgcaaagtcatt

SEQ ID NO: 895122 - DNA, 15 bp, Homo sapiens
tctgcaaagtcattg

SEQ ID NO: 895123 - DNA, 15 bp, Homo sapiens
ctgcaaagtcattgc

SEQ ID NO: 895124 - DNA, 15 bp, Homo sapiens
tgcaaagtcattgcc

SEQ ID NO: 895125 - DNA, 15 bp, Homo sapiens
gcaaagtcattgcca

SEQ ID NO: 895126 - DNA, 15 bp, Homo sapiens
caaagtcattgccac

SEQ ID NO: 895127 - DNA, 15 bp, Homo sapiens
aaagtcattgccaca

SEQ ID NO: 895128 - DNA, 15 bp, Homo sapiens
aagtcattgccacat

SEQ ID NO: 895129 - DNA, 15 bp, Homo sapiens
agtcattgccacata

SEQ ID NO: 895130 - DNA, 15 bp, Homo sapiens
gtcattgccacataa

SEQ ID NO: 895131 - DNA, 15 bp, Homo sapiens
tcattgccacataaa

SEQ ID NO: 895132 - DNA, 15 bp, Homo sapiens
cattgccacataaag

SEQ ID NO: 895133 - DNA, 15 bp, Homo sapiens
attgccacataaagt

SEQ ID NO: 895134 - DNA, 15 bp, Homo sapiens
ttgccacataaagta

SEQ ID NO: 895135 - DNA, 15 bp, Homo sapiens
tgccacataaagtaa

SEQ ID NO: 895136 - DNA, 15 bp, Homo sapiens
gccacataaagtaac

SEQ ID NO: 895137 - DNA, 15 bp, Homo sapiens
ccacataaagtaaca

SEQ ID NO: 895138 - DNA, 15 bp, Homo sapiens
cacataaagtaacat

SEQ ID NO: 895139 - DNA, 15 bp, Homo sapiens
acataaagtaacatt

SEQ ID NO: 895140 - DNA, 15 bp, Homo sapiens
cataaagtaacattg

SEQ ID NO: 895141 - DNA, 15 bp, Homo sapiens
ataaagtaacattga

SEQ ID NO: 895142 - DNA, 15 bp, Homo sapiens
taaagtaacattgat

SEQ ID NO: 895143 - DNA, 15 bp, Homo sapiens
aaagtaacattgata

SEQ ID NO: 895144 - DNA, 15 bp, Homo sapiens
aagtaacattgatag

SEQ ID NO: 895145 - DNA, 15 bp, Homo sapiens
agtaacattgatagc

SEQ ID NO: 895146 - DNA, 15 bp, Homo sapiens
gtaacattgatagct

SEQ ID NO: 895147 - DNA, 15 bp, Homo sapiens
taacattgatagctt

SEQ ID NO: 895148 - DNA, 15 bp, Homo sapiens
aacattgatagcttc

SEQ ID NO: 895149 - DNA, 15 bp, Homo sapiens
cattgatagcttcca

SEQ ID NO: 895150 - DNA, 15 bp, Homo sapiens
attgatagcttccag

SEQ ID NO: 895151 - DNA, 15 bp, Homo sapiens
ttgatagcttccaga

SEQ ID NO: 895152 - DNA, 15 bp, Homo sapiens
tgatagcttccagag

SEQ ID NO: 895153 - DNA, 15 bp, Homo sapiens
gatagcttccagaga

SEQ ID NO: 895154 - DNA, 15 bp, Homo sapiens
atagcttccagagac

SEQ ID NO: 895155 - DNA, 15 bp, Homo sapiens
tagcttccagagact

SEQ ID NO: 895156 - DNA, 15 bp, Homo sapiens
agcttccagagacta

SEQ ID NO: 895157 - DNA, 15 bp, Homo sapiens
gcttccagagactag

SEQ ID NO: 895158 - DNA, 15 bp, Homo sapiens
cttccagagactaga

SEQ ID NO: 895159 - DNA, 15 bp, Homo sapiens
ttccagagactagaa

SEQ ID NO: 895160 - DNA, 15 bp, Homo sapiens
tccagagactagaac

SEQ ID NO: 895161 - DNA, 15 bp, Homo sapiens
ccagagactagaaca

SEQ ID NO: 895162 - DNA, 15 bp, Homo sapiens
cagagactagaacat

SEQ ID NO: 895163 - DNA, 15 bp, Homo sapiens
agagactagaacata

SEQ ID NO: 895164 - DNA, 15 bp, Homo sapiens
gagactagaacatag

SEQ ID NO: 895165 - DNA, 15 bp, Homo sapiens
agactagaacataga

SEQ ID NO: 895166 - DNA, 15 bp, Homo sapiens
gactagaacatagac

SEQ ID NO: 895167 - DNA, 15 bp, Homo sapiens
actagaacatagaca

SEQ ID NO: 895168 - DNA, 15 bp, Homo sapiens
ctagaacatagacat

SEQ ID NO: 895169 - DNA, 15 bp, Homo sapiens
tagaacatagacatc

SEQ ID NO: 895170 - DNA, 15 bp, Homo sapiens
agaacatagacatct

SEQ ID NO: 895171 - DNA, 15 bp, Homo sapiens
gaacatagacatctt

SEQ ID NO: 895172 - DNA, 15 bp, Homo sapiens
aacatagacatcttg

SEQ ID NO: 895173 - DNA, 15 bp, Homo sapiens
acatagacatcttgg

SEQ ID NO: 895174 - DNA, 15 bp, Homo sapiens
catagacatcttggg

SEQ ID NO: 895175 - DNA, 15 bp, Homo sapiens
atagacatcttgggg

SEQ ID NO: 895176 - DNA, 15 bp, Homo sapiens
tagacatcttggggg

SEQ ID NO: 895177 - DNA, 15 bp, Homo sapiens
agacatcttgggggg

SEQ ID NO: 895178 - DNA, 15 bp, Homo sapiens
gacatcttggggggc

SEQ ID NO: 895179 - DNA, 15 bp, Homo sapiens
acatcttggggggcc

SEQ ID NO: 895180 - DNA, 15 bp, Homo sapiens
catcttggggggcca

SEQ ID NO: 895181 - DNA, 15 bp, Homo sapiens
atcttggggggccat

SEQ ID NO: 895182 - DNA, 15 bp, Homo sapiens
tcttggggggccatt

SEQ ID NO: 895183 - DNA, 15 bp, Homo sapiens
cttggggggccatta

SEQ ID NO: 895184 - DNA, 15 bp, Homo sapiens
ttggggggccattac

SEQ ID NO: 895185 - DNA, 15 bp, Homo sapiens
tggggggccattact

SEQ ID NO: 895186 - DNA, 15 bp, Homo sapiens
ggggggccattactg

SEQ ID NO: 895187 - DNA, 15 bp, Homo sapiens
gggggccattactga

SEQ ID NO: 895188 - DNA, 15 bp, Homo sapiens
ggggccattactgag

SEQ ID NO: 895189 - DNA, 15 bp, Homo sapiens
gggccattactgagc

SEQ ID NO: 895190 - DNA, 15 bp, Homo sapiens
ggccattactgagcc

SEQ ID NO: 895191 - DNA, 15 bp, Homo sapiens
gccattactgagcct

SEQ ID NO: 895192 - DNA, 15 bp, Homo sapiens
ccattactgagccta

SEQ ID NO: 895193 - DNA, 15 bp, Homo sapiens
cattactgagcctat

SEQ ID NO: 895194 - DNA, 15 bp, Homo sapiens
attactgagcctatt

SEQ ID NO: 895195 - DNA, 15 bp, Homo sapiens
ttactgagcctatta

SEQ ID NO: 895196 - DNA, 15 bp, Homo sapiens
tactgagcctattac

SEQ ID NO: 895197 - DNA, 15 bp, Homo sapiens
actgagcctattaca

SEQ ID NO: 895198 - DNA, 15 bp, Homo sapiens
ctgagcctattacat

SEQ ID NO: 895199 - DNA, 15 bp, Homo sapiens
tgagcctattacata

SEQ ID NO: 895200 - DNA, 15 bp, Homo sapiens
gagcctattacatac

SEQ ID NO: 895201 - DNA, 15 bp, Homo sapiens
agcctattacatact

SEQ ID NO: 895202 - DNA, 15 bp, Homo sapiens
gcctattacatactg

SEQ ID NO: 895203 - DNA, 15 bp, Homo sapiens
cctattacatactgt

SEQ ID NO: 895204 - DNA, 15 bp, Homo sapiens
ctattacatactgtg

SEQ ID NO: 895205 - DNA, 15 bp, Homo sapiens
tattacatactgtgt

SEQ ID NO: 895206 - DNA, 15 bp, Homo sapiens
attacatactgtgtg

SEQ ID NO: 895207 - DNA, 15 bp, Homo sapiens
ttacatactgtgtga

SEQ ID NO: 895208 - DNA, 15 bp, Homo sapiens
tacatactgtgtgac

SEQ ID NO: 895209 - DNA, 15 bp, Homo sapiens
acatactgtgtgacc

SEQ ID NO: 895210 - DNA, 15 bp, Homo sapiens
catactgtgtgacct

SEQ ID NO: 895211 - DNA, 15 bp, Homo sapiens
atactgtgtgaccta

SEQ ID NO: 895212 - DNA, 15 bp, Homo sapiens
tactgtgtgacctag

SEQ ID NO: 895213 - DNA, 15 bp, Homo sapiens
actgtgtgacctagg

SEQ ID NO: 895214 - DNA, 15 bp, Homo sapiens
ctgtgtgacctaggg

SEQ ID NO: 895215 - DNA, 15 bp, Homo sapiens
tgtgtgacctagggc

SEQ ID NO: 895216 - DNA, 15 bp, Homo sapiens
gtgtgacctagggca

SEQ ID NO: 895217 - DNA, 15 bp, Homo sapiens
tgtgacctagggcaa

SEQ ID NO: 895218 - DNA, 15 bp, Homo sapiens
gtgacctagggcaag

SEQ ID NO: 895219 - DNA, 15 bp, Homo sapiens
tgacctagggcaagt

SEQ ID NO: 895220 - DNA, 15 bp, Homo sapiens
gacctagggcaagtc

SEQ ID NO: 895221 - DNA, 15 bp, Homo sapiens
acctagggcaagtca

SEQ ID NO: 895222 - DNA, 15 bp, Homo sapiens
cctagggcaagtcac

SEQ ID NO: 895223 - DNA, 15 bp, Homo sapiens
ctagggcaagtcact

SEQ ID NO: 895224 - DNA, 15 bp, Homo sapiens
tagggcaagtcactt

SEQ ID NO: 895225 - DNA, 15 bp, Homo sapiens
agggcaagtcacttt

SEQ ID NO: 895226 - DNA, 15 bp, Homo sapiens
gggcaagtcacttta

SEQ ID NO: 895227 - DNA, 15 bp, Homo sapiens
ggcaagtcactttac

SEQ ID NO: 895228 - DNA, 15 bp, Homo sapiens
gcaagtcactttacc

SEQ ID NO: 895229 - DNA, 15 bp, Homo sapiens
caagtcactttacct

SEQ ID NO: 895230 - DNA, 15 bp, Homo sapiens
aagtcactttacctc

SEQ ID NO: 895231 - DNA, 15 bp, Homo sapiens
agtcactttacctct

SEQ ID NO: 895232 - DNA, 15 bp, Homo sapiens
gtcactttacctctc

SEQ ID NO: 895233 - DNA, 15 bp, Homo sapiens
tcactttacctctct

SEQ ID NO: 895234 - DNA, 15 bp, Homo sapiens
cactttacctctctg

SEQ ID NO: 895235 - DNA, 15 bp, Homo sapiens
actttacctctctga

SEQ ID NO: 895236 - DNA, 15 bp, Homo sapiens
ctttacctctctgag

SEQ ID NO: 895237 - DNA, 15 bp, Homo sapiens
tttacctctctgagc

SEQ ID NO: 895238 - DNA, 15 bp, Homo sapiens
ttacctctctgagcc

SEQ ID NO: 895239 - DNA, 15 bp, Homo sapiens
tacctctctgagccg

SEQ ID NO: 895240 - DNA, 15 bp, Homo sapiens
acctctctgagccgt

SEQ ID NO: 895241 - DNA, 15 bp, Homo sapiens
cctctctgagccgta

SEQ ID NO: 895242 - DNA, 15 bp, Homo sapiens
ctctctgagccgtag

SEQ ID NO: 895243 - DNA, 15 bp, Homo sapiens
tctctgagccgtagg

SEQ ID NO: 895244 - DNA, 15 bp, Homo sapiens
ctctgagccgtaggt

SEQ ID NO: 895245 - DNA, 15 bp, Homo sapiens
tctgagccgtaggtc

SEQ ID NO: 895246 - DNA, 15 bp, Homo sapiens
ctgagccgtaggtct

SEQ ID NO: 895247 - DNA, 15 bp, Homo sapiens
tgagccgtaggtctt

SEQ ID NO: 895248 - DNA, 15 bp, Homo sapiens
gagccgtaggtcttt

SEQ ID NO: 895249 - DNA, 15 bp, Homo sapiens
agccgtaggtctttt

SEQ ID NO: 895250 - DNA, 15 bp, Homo sapiens
gccgtaggtctttta

SEQ ID NO: 895251 - DNA, 15 bp, Homo sapiens
ccgtaggtcttttat

SEQ ID NO: 895252 - DNA, 15 bp, Homo sapiens
cgtaggtcttttatc

SEQ ID NO: 895253 - DNA, 15 bp, Homo sapiens
gtaggtcttttatct

SEQ ID NO: 895254 - DNA, 15 bp, Homo sapiens
taggtcttttatctg

SEQ ID NO: 895255 - DNA, 15 bp, Homo sapiens
aggtcttttatctgc

SEQ ID NO: 895256 - DNA, 15 bp, Homo sapiens
ggtcttttatctgca

SEQ ID NO: 895257 - DNA, 15 bp, Homo sapiens
gtcttttatctgcaa

SEQ ID NO: 895258 - DNA, 15 bp, Homo sapiens
tcttttatctgcaat

SEQ ID NO: 895259 - DNA, 15 bp, Homo sapiens
cttttatctgcaatt

SEQ ID NO: 895260 - DNA, 15 bp, Homo sapiens
ttttatctgcaattg

SEQ ID NO: 895261 - DNA, 15 bp, Homo sapiens
tttatctgcaattgc

SEQ ID NO: 895262 - DNA, 15 bp, Homo sapiens
ttatctgcaattgcc

SEQ ID NO: 895263 - DNA, 15 bp, Homo sapiens
tatctgcaattgcct

SEQ ID NO: 895264 - DNA, 15 bp, Homo sapiens
atctgcaattgcctc

SEQ ID NO: 895265 - DNA, 15 bp, Homo sapiens
tctgcaattgcctct

SEQ ID NO: 895266 - DNA, 15 bp, Homo sapiens
ctgcaattgcctctc

SEQ ID NO: 895267 - DNA, 15 bp, Homo sapiens
tgcaattgcctctca

SEQ ID NO: 895268 - DNA, 15 bp, Homo sapiens
gcaattgcctctcaa

SEQ ID NO: 895269 - DNA, 15 bp, Homo sapiens
caattgcctctcaat

SEQ ID NO: 895270 - DNA, 15 bp, Homo sapiens
aattgcctctcaatt

SEQ ID NO: 895271 - DNA, 15 bp, Homo sapiens
attgcctctcaattg

SEQ ID NO: 895272 - DNA, 15 bp, Homo sapiens
ttgcctctcaattgc

SEQ ID NO: 895273 - DNA, 15 bp, Homo sapiens
tgcctctcaattgca

SEQ ID NO: 895274 - DNA, 15 bp, Homo sapiens
gcctctcaattgcac

SEQ ID NO: 895275 - DNA, 15 bp, Homo sapiens
cctctcaattgcaca

SEQ ID NO: 895276 - DNA, 15 bp, Homo sapiens
ctctcaattgcacag

SEQ ID NO: 895277 - DNA, 15 bp, Homo sapiens
tctcaattgcacagg

SEQ ID NO: 895278 - DNA, 15 bp, Homo sapiens
ctcaattgcacaggg

SEQ ID NO: 895279 - DNA, 15 bp, Homo sapiens
tcaattgcacaggga

SEQ ID NO: 895280 - DNA, 15 bp, Homo sapiens
caattgcacagggaa

SEQ ID NO: 895281 - DNA, 15 bp, Homo sapiens
aattgcacagggaag

SEQ ID NO: 895282 - DNA, 15 bp, Homo sapiens
attgcacagggaagg

SEQ ID NO: 895283 - DNA, 15 bp, Homo sapiens
ttgcacagggaaggc

SEQ ID NO: 895284 - DNA, 15 bp, Homo sapiens
tgcacagggaaggct

SEQ ID NO: 895285 - DNA, 15 bp, Homo sapiens
gcacagggaaggctt

SEQ ID NO: 895286 - DNA, 15 bp, Homo sapiens
cacagggaaggctta

SEQ ID NO: 895287 - DNA, 15 bp, Homo sapiens
acagggaaggcttac

SEQ ID NO: 895288 - DNA, 15 bp, Homo sapiens
cagggaaggcttaca

SEQ ID NO: 895289 - DNA, 15 bp, Homo sapiens
agggaaggcttacat

SEQ ID NO: 895290 - DNA, 15 bp, Homo sapiens
gggaaggcttacatg

SEQ ID NO: 895291 - DNA, 15 bp, Homo sapiens
ggaaggcttacatgg

SEQ ID NO: 895292 - DNA, 15 bp, Homo sapiens
gaaggcttacatggg

SEQ ID NO: 895293 - DNA, 15 bp, Homo sapiens
aaggcttacatgggg

SEQ ID NO: 895294 - DNA, 15 bp, Homo sapiens
aggcttacatggggt

SEQ ID NO: 895295 - DNA, 15 bp, Homo sapiens
ggcttacatggggtc

SEQ ID NO: 895296 - DNA, 15 bp, Homo sapiens
gcttacatggggtcc

SEQ ID NO: 895297 - DNA, 15 bp, Homo sapiens
cttacatggggtcca

SEQ ID NO: 895298 - DNA, 15 bp, Homo sapiens
ttacatggggtccaa

SEQ ID NO: 895299 - DNA, 15 bp, Homo sapiens
tacatggggtccaaa

SEQ ID NO: 895300 - DNA, 15 bp, Homo sapiens
acatggggtccaaaa

SEQ ID NO: 895301 - DNA, 15 bp, Homo sapiens
catggggtccaaaaa

SEQ ID NO: 895302 - DNA, 15 bp, Homo sapiens
atggggtccaaaaag

SEQ ID NO: 895303 - DNA, 15 bp, Homo sapiens
tggggtccaaaaagc

SEQ ID NO: 895304 - DNA, 15 bp, Homo sapiens
ggggtccaaaaagca

SEQ ID NO: 895305 - DNA, 15 bp, Homo sapiens
gggtccaaaaagcaa

SEQ ID NO: 895306 - DNA, 15 bp, Homo sapiens
ggtccaaaaagcaag

SEQ ID NO: 895307 - DNA, 15 bp, Homo sapiens
gtccaaaaagcaaga

SEQ ID NO: 895308 - DNA, 15 bp, Homo sapiens
tccaaaaagcaagac

SEQ ID NO: 895309 - DNA, 15 bp, Homo sapiens
ccaaaaagcaagact

SEQ ID NO: 895310 - DNA, 15 bp, Homo sapiens
caaaaagcaagactt

SEQ ID NO: 895311 - DNA, 15 bp, Homo sapiens
aaaaagcaagacttc

SEQ ID NO: 895312 - DNA, 15 bp, Homo sapiens
aaaagcaagacttct

SEQ ID NO: 895313 - DNA, 15 bp, Homo sapiens
aaagcaagacttctg

SEQ ID NO: 895314 - DNA, 15 bp, Homo sapiens
aagcaagacttctgg

SEQ ID NO: 895315 - DNA, 15 bp, Homo sapiens
agcaagacttctgga

SEQ ID NO: 895316 - DNA, 15 bp, Homo sapiens
gcaagacttctggaa

SEQ ID NO: 895317 - DNA, 15 bp, Homo sapiens
caagacttctggaag

SEQ ID NO: 895318 - DNA, 15 bp, Homo sapiens
aagacttctggaagt

SEQ ID NO: 895319 - DNA, 15 bp, Homo sapiens
agacttctggaagtt

SEQ ID NO: 895320 - DNA, 15 bp, Homo sapiens
gacttctggaagttg

SEQ ID NO: 895321 - DNA, 15 bp, Homo sapiens
acttctggaagttgc

SEQ ID NO: 895322 - DNA, 15 bp, Homo sapiens
cttctggaagttgca

SEQ ID NO: 895323 - DNA, 15 bp, Homo sapiens
ttctggaagttgcaa

SEQ ID NO: 895324 - DNA, 15 bp, Homo sapiens
tctggaagttgcaaa

SEQ ID NO: 895325 - DNA, 15 bp, Homo sapiens
ctggaagttgcaaag

SEQ ID NO: 895326 - DNA, 15 bp, Homo sapiens
tggaagttgcaaagc

SEQ ID NO: 895327 - DNA, 15 bp, Homo sapiens
ggaagttgcaaagct

SEQ ID NO: 895328 - DNA, 15 bp, Homo sapiens
gaagttgcaaagctc

SEQ ID NO: 895329 - DNA, 15 bp, Homo sapiens
aagttgcaaagctcc

SEQ ID NO: 895330 - DNA, 15 bp, Homo sapiens
agttgcaaagctcca

SEQ ID NO: 895331 - DNA, 15 bp, Homo sapiens
gttgcaaagctccaa

SEQ ID NO: 895332 - DNA, 15 bp, Homo sapiens
ttgcaaagctccaaa

SEQ ID NO: 895333 - DNA, 15 bp, Homo sapiens
tgcaaagctccaaat

SEQ ID NO: 895334 - DNA, 15 bp, Homo sapiens
gcaaagctccaaata

SEQ ID NO: 895335 - DNA, 15 bp, Homo sapiens
caaagctccaaatat

SEQ ID NO: 895336 - DNA, 15 bp, Homo sapiens
aaagctccaaatata

SEQ ID NO: 895337 - DNA, 15 bp, Homo sapiens
aagctccaaatataa

SEQ ID NO: 895338 - DNA, 15 bp, Homo sapiens
agctccaaatataaa

SEQ ID NO: 895339 - DNA, 15 bp, Homo sapiens
gctccaaatataaac

SEQ ID NO: 895340 - DNA, 15 bp, Homo sapiens
ctccaaatataaaca

SEQ ID NO: 895341 - DNA, 15 bp, Homo sapiens
tccaaatataaacaa

SEQ ID NO: 895342 - DNA, 15 bp, Homo sapiens
ccaaatataaacaag

SEQ ID NO: 895343 - DNA, 15 bp, Homo sapiens
caaatataaacaaga

SEQ ID NO: 895344 - DNA, 15 bp, Homo sapiens
aaatataaacaagag

SEQ ID NO: 895345 - DNA, 15 bp, Homo sapiens
aatataaacaagagt

SEQ ID NO: 895346 - DNA, 15 bp, Homo sapiens
atataaacaagagtg

SEQ ID NO: 895347 - DNA, 15 bp, Homo sapiens
tataaacaagagtga

SEQ ID NO: 895348 - DNA, 15 bp, Homo sapiens
ataaacaagagtgat

SEQ ID NO: 895349 - DNA, 15 bp, Homo sapiens
taaacaagagtgata

SEQ ID NO: 895350 - DNA, 15 bp, Homo sapiens
aaacaagagtgatat

SEQ ID NO: 895351 - DNA, 15 bp, Homo sapiens
aacaagagtgatatt

SEQ ID NO: 895352 - DNA, 15 bp, Homo sapiens
acaagagtgatatta

SEQ ID NO: 895353 - DNA, 15 bp, Homo sapiens
caagagtgatattaa

SEQ ID NO: 895354 - DNA, 15 bp, Homo sapiens
aagagtgatattaat

SEQ ID NO: 895355 - DNA, 15 bp, Homo sapiens
agagtgatattaata

SEQ ID NO: 895356 - DNA, 15 bp, Homo sapiens
gagtgatattaatag

SEQ ID NO: 895357 - DNA, 15 bp, Homo sapiens
agtgatattaatagt

SEQ ID NO: 895358 - DNA, 15 bp, Homo sapiens
gtgatattaatagtt

SEQ ID NO: 895359 - DNA, 15 bp, Homo sapiens
tgatattaatagttg

SEQ ID NO: 895360 - DNA, 15 bp, Homo sapiens
gatattaatagttga

SEQ ID NO: 895361 - DNA, 15 bp, Homo sapiens
atattaatagttgag

SEQ ID NO: 895362 - DNA, 15 bp, Homo sapiens
tattaatagttgagt

SEQ ID NO: 895363 - DNA, 15 bp, Homo sapiens
attaatagttgagta

SEQ ID NO: 895364 - DNA, 15 bp, Homo sapiens
ttaatagttgagtac

SEQ ID NO: 895365 - DNA, 15 bp, Homo sapiens
taatagttgagtacc

SEQ ID NO: 895366 - DNA, 15 bp, Homo sapiens
aatagttgagtacct

SEQ ID NO: 895367 - DNA, 15 bp, Homo sapiens
atagttgagtacctt

SEQ ID NO: 895368 - DNA, 15 bp, Homo sapiens
tagttgagtaccttc

SEQ ID NO: 895369 - DNA, 15 bp, Homo sapiens
agttgagtaccttcc

SEQ ID NO: 895370 - DNA, 15 bp, Homo sapiens
gttgagtaccttccc

SEQ ID NO: 895371 - DNA, 15 bp, Homo sapiens
ttgagtaccttcccc

SEQ ID NO: 895372 - DNA, 15 bp, Homo sapiens
tgagtaccttcccct

SEQ ID NO: 895373 - DNA, 15 bp, Homo sapiens
gagtaccttcccctc

SEQ ID NO: 895374 - DNA, 15 bp, Homo sapiens
agtaccttcccctct

SEQ ID NO: 895375 - DNA, 15 bp, Homo sapiens
gtaccttcccctctc

SEQ ID NO: 895376 - DNA, 15 bp, Homo sapiens
taccttcccctctca

SEQ ID NO: 895377 - DNA, 15 bp, Homo sapiens
accttcccctctcac

SEQ ID NO: 895378 - DNA, 15 bp, Homo sapiens
ccttcccctctcacc

SEQ ID NO: 895379 - DNA, 15 bp, Homo sapiens
cttcccctctcacct

SEQ ID NO: 895380 - DNA, 15 bp, Homo sapiens
ttcccctctcacctg

SEQ ID NO: 895381 - DNA, 15 bp, Homo sapiens
tcccctctcacctgt

SEQ ID NO: 895382 - DNA, 15 bp, Homo sapiens
cccctctcacctgtc

SEQ ID NO: 895383 - DNA, 15 bp, Homo sapiens
ccctctcacctgtcc

SEQ ID NO: 895384 - DNA, 15 bp, Homo sapiens
cctctcacctgtcct

SEQ ID NO: 895385 - DNA, 15 bp, Homo sapiens
ctctcacctgtcctc

SEQ ID NO: 895386 - DNA, 15 bp, Homo sapiens
tctcacctgtcctct

SEQ ID NO: 895387 - DNA, 15 bp, Homo sapiens
ctcacctgtcctctc

SEQ ID NO: 895388 - DNA, 15 bp, Homo sapiens
tcacctgtcctctct

SEQ ID NO: 895389 - DNA, 15 bp, Homo sapiens
cacctgtcctctctt

SEQ ID NO: 895390 - DNA, 15 bp, Homo sapiens
acctgtcctctcttt

SEQ ID NO: 895391 - DNA, 15 bp, Homo sapiens
cctgtcctctctttc

SEQ ID NO: 895392 - DNA, 15 bp, Homo sapiens
ctgtcctctctttct

SEQ ID NO: 895393 - DNA, 15 bp, Homo sapiens
tgtcctctctttctg

SEQ ID NO: 895394 - DNA, 15 bp, Homo sapiens
gtcctctctttctgt

SEQ ID NO: 895395 - DNA, 15 bp, Homo sapiens
tcctctctttctgtg

SEQ ID NO: 895396 - DNA, 15 bp, Homo sapiens
cctctctttctgtgg

SEQ ID NO: 895397 - DNA, 15 bp, Homo sapiens
ctctctttctgtgga

SEQ ID NO: 895398 - DNA, 15 bp, Homo sapiens
tctctttctgtggat

SEQ ID NO: 895399 - DNA, 15 bp, Homo sapiens
ctctttctgtggatc

SEQ ID NO: 895400 - DNA, 15 bp, Homo sapiens
tctttctgtggatca

SEQ ID NO: 895401 - DNA, 15 bp, Homo sapiens
ctttctgtggatcac

SEQ ID NO: 895402 - DNA, 15 bp, Homo sapiens
tttctgtggatcacc

SEQ ID NO: 895403 - DNA, 15 bp, Homo sapiens
ttctgtggatcacct

SEQ ID NO: 895404 - DNA, 15 bp, Homo sapiens
tctgtggatcacctg

SEQ ID NO: 895405 - DNA, 15 bp, Homo sapiens
ctgtggatcacctgt

SEQ ID NO: 895406 - DNA, 15 bp, Homo sapiens
tgtggatcacctgtg

SEQ ID NO: 895407 - DNA, 15 bp, Homo sapiens
gtggatcacctgtga

SEQ ID NO: 895408 - DNA, 15 bp, Homo sapiens
tggatcacctgtgaa

SEQ ID NO: 895409 - DNA, 15 bp, Homo sapiens
ggatcacctgtgaac

SEQ ID NO: 895410 - DNA, 15 bp, Homo sapiens
gatcacctgtgaact

SEQ ID NO: 895411 - DNA, 15 bp, Homo sapiens
atcacctgtgaactg

SEQ ID NO: 895412 - DNA, 15 bp, Homo sapiens
tcacctgtgaactgg

SEQ ID NO: 895413 - DNA, 15 bp, Homo sapiens
cacctgtgaactggg

SEQ ID NO: 895414 - DNA, 15 bp, Homo sapiens
acctgtgaactgggc

SEQ ID NO: 895415 - DNA, 15 bp, Homo sapiens
cctgtgaactgggct

SEQ ID NO: 895416 - DNA, 15 bp, Homo sapiens
ctgtgaactgggctg

SEQ ID NO: 895417 - DNA, 15 bp, Homo sapiens
tgtgaactgggctga

SEQ ID NO: 895418 - DNA, 15 bp, Homo sapiens
gtgaactgggctgat

SEQ ID NO: 895419 - DNA, 15 bp, Homo sapiens
tgaactgggctgatc

SEQ ID NO: 895420 - DNA, 15 bp, Homo sapiens
gaactgggctgatct

SEQ ID NO: 895421 - DNA, 15 bp, Homo sapiens
aactgggctgatctc

SEQ ID NO: 895422 - DNA, 15 bp, Homo sapiens
actgggctgatctca

SEQ ID NO: 895423 - DNA, 15 bp, Homo sapiens
ctgggctgatctcac

SEQ ID NO: 895424 - DNA, 15 bp, Homo sapiens
tgggctgatctcact

SEQ ID NO: 895425 - DNA, 15 bp, Homo sapiens
gggctgatctcactt

SEQ ID NO: 895426 - DNA, 15 bp, Homo sapiens
ggctgatctcacttc

SEQ ID NO: 895427 - DNA, 15 bp, Homo sapiens
gctgatctcacttct

SEQ ID NO: 895428 - DNA, 15 bp, Homo sapiens
ctgatctcacttctg

SEQ ID NO: 895429 - DNA, 15 bp, Homo sapiens
tgatctcacttctgt

SEQ ID NO: 895430 - DNA, 15 bp, Homo sapiens
gatctcacttctgtt

SEQ ID NO: 895431 - DNA, 15 bp, Homo sapiens
atctcacttctgttt

SEQ ID NO: 895432 - DNA, 15 bp, Homo sapiens
tctcacttctgtttg

SEQ ID NO: 895433 - DNA, 15 bp, Homo sapiens
ctcacttctgtttgc

SEQ ID NO: 895434 - DNA, 15 bp, Homo sapiens
tcacttctgtttgct

SEQ ID NO: 895435 - DNA, 15 bp, Homo sapiens
cacttctgtttgctt

SEQ ID NO: 895436 - DNA, 15 bp, Homo sapiens
acttctgtttgcttc

SEQ ID NO: 895437 - DNA, 15 bp, Homo sapiens
cttctgtttgcttct

SEQ ID NO: 895438 - DNA, 15 bp, Homo sapiens
ttctgtttgcttctg

SEQ ID NO: 895439 - DNA, 15 bp, Homo sapiens
tctgtttgcttctgt

SEQ ID NO: 895440 - DNA, 15 bp, Homo sapiens
ctgtttgcttctgtg

SEQ ID NO: 895441 - DNA, 15 bp, Homo sapiens
tgtttgcttctgtgg

SEQ ID NO: 895442 - DNA, 15 bp, Homo sapiens
gtttgcttctgtgga

SEQ ID NO: 895443 - DNA, 15 bp, Homo sapiens
tttgcttctgtggac

SEQ ID NO: 895444 - DNA, 15 bp, Homo sapiens
ttgcttctgtggacc

SEQ ID NO: 895445 - DNA, 15 bp, Homo sapiens
tgcttctgtggacct

SEQ ID NO: 895446 - DNA, 15 bp, Homo sapiens
gcttctgtggaccta

SEQ ID NO: 895447 - DNA, 15 bp, Homo sapiens
cttctgtggacctag

SEQ ID NO: 895448 - DNA, 15 bp, Homo sapiens
ttctgtggacctaga

SEQ ID NO: 895449 - DNA, 15 bp, Homo sapiens
tctgtggacctagaa

SEQ ID NO: 895450 - DNA, 15 bp, Homo sapiens
ctgtggacctagaaa

SEQ ID NO: 895451 - DNA, 15 bp, Homo sapiens
tgtggacctagaaat

SEQ ID NO: 895452 - DNA, 15 bp, Homo sapiens
gtggacctagaaatg

SEQ ID NO: 895453 - DNA, 15 bp, Homo sapiens
tggacctagaaatga

SEQ ID NO: 895454 - DNA, 15 bp, Homo sapiens
ggacctagaaatgat

SEQ ID NO: 895455 - DNA, 15 bp, Homo sapiens
gacctagaaatgatc

SEQ ID NO: 895456 - DNA, 15 bp, Homo sapiens
acctagaaatgatca

SEQ ID NO: 895457 - DNA, 15 bp, Homo sapiens
cctagaaatgatcac

SEQ ID NO: 895458 - DNA, 15 bp, Homo sapiens
ctagaaatgatcact

SEQ ID NO: 895459 - DNA, 15 bp, Homo sapiens
tagaaatgatcactg

SEQ ID NO: 895460 - DNA, 15 bp, Homo sapiens
agaaatgatcactgc

SEQ ID NO: 895461 - DNA, 15 bp, Homo sapiens
gaaatgatcactgcc

SEQ ID NO: 895462 - DNA, 15 bp, Homo sapiens
aaatgatcactgccc

SEQ ID NO: 895463 - DNA, 15 bp, Homo sapiens
aatgatcactgcccc

SEQ ID NO: 895464 - DNA, 15 bp, Homo sapiens
atgatcactgccccc

SEQ ID NO: 895465 - DNA, 15 bp, Homo sapiens
tgatcactgccccca

SEQ ID NO: 895466 - DNA, 15 bp, Homo sapiens
gatcactgcccccag

SEQ ID NO: 895467 - DNA, 15 bp, Homo sapiens
atcactgcccccagt

SEQ ID NO: 895468 - DNA, 15 bp, Homo sapiens
tcactgcccccagtg

SEQ ID NO: 895469 - DNA, 15 bp, Homo sapiens
cactgcccccagtga

SEQ ID NO: 895470 - DNA, 15 bp, Homo sapiens
actgcccccagtgaa

SEQ ID NO: 895471 - DNA, 15 bp, Homo sapiens
ctgcccccagtgaat

SEQ ID NO: 895472 - DNA, 15 bp, Homo sapiens
tgcccccagtgaata

SEQ ID NO: 895473 - DNA, 15 bp, Homo sapiens
gcccccagtgaatat

SEQ ID NO: 895474 - DNA, 15 bp, Homo sapiens
cccccagtgaatatg

SEQ ID NO: 895475 - DNA, 15 bp, Homo sapiens
ccccagtgaatatgg

SEQ ID NO: 895476 - DNA, 15 bp, Homo sapiens
cccagtgaatatggt

SEQ ID NO: 895477 - DNA, 15 bp, Homo sapiens
ccagtgaatatggtg

SEQ ID NO: 895478 - DNA, 15 bp, Homo sapiens
cagtgaatatggtga

SEQ ID NO: 895479 - DNA, 15 bp, Homo sapiens
agtgaatatggtgaa

SEQ ID NO: 895480 - DNA, 15 bp, Homo sapiens
gtgaatatggtgaag

SEQ ID NO: 895481 - DNA, 15 bp, Homo sapiens
tgaatatggtgaaga

SEQ ID NO: 895482 - DNA, 15 bp, Homo sapiens
gaatatggtgaagaa

SEQ ID NO: 895483 - DNA, 15 bp, Homo sapiens
aatatggtgaagaag

SEQ ID NO: 895484 - DNA, 15 bp, Homo sapiens
atatggtgaagaagc

SEQ ID NO: 895485 - DNA, 15 bp, Homo sapiens
tatggtgaagaagct

SEQ ID NO: 895486 - DNA, 15 bp, Homo sapiens
atggtgaagaagctg

SEQ ID NO: 895487 - DNA, 15 bp, Homo sapiens
tggtgaagaagctgg

SEQ ID NO: 895488 - DNA, 15 bp, Homo sapiens
ggtgaagaagctggt

SEQ ID NO: 895489 - DNA, 15 bp, Homo sapiens
gtgaagaagctggtg

SEQ ID NO: 895490 - DNA, 15 bp, Homo sapiens
tgaagaagctggtga

SEQ ID NO: 895491 - DNA, 15 bp, Homo sapiens
gaagaagctggtgat

SEQ ID NO: 895492 - DNA, 15 bp, Homo sapiens
aagaagctggtgatg

SEQ ID NO: 895493 - DNA, 15 bp, Homo sapiens
agaagctggtgatgg

SEQ ID NO: 895494 - DNA, 15 bp, Homo sapiens
gaagctggtgatggc

SEQ ID NO: 895495 - DNA, 15 bp, Homo sapiens
aagctggtgatggcc

SEQ ID NO: 895496 - DNA, 15 bp, Homo sapiens
agctggtgatggccc

SEQ ID NO: 895497 - DNA, 15 bp, Homo sapiens
gctggtgatggccca

SEQ ID NO: 895498 - DNA, 15 bp, Homo sapiens
ctggtgatggcccag

SEQ ID NO: 895499 - DNA, 15 bp, Homo sapiens
tggtgatggcccaga

SEQ ID NO: 895500 - DNA, 15 bp, Homo sapiens
ggtgatggcccagaa

SEQ ID NO: 895501 - DNA, 15 bp, Homo sapiens
gtgatggcccagaag

SEQ ID NO: 895502 - DNA, 15 bp, Homo sapiens
tgatggcccagaagc

SEQ ID NO: 895503 - DNA, 15 bp, Homo sapiens
gatggcccagaagcg

SEQ ID NO: 895504 - DNA, 15 bp, Homo sapiens
atggcccagaagcgg

SEQ ID NO: 895505 - DNA, 15 bp, Homo sapiens
tggcccagaagcggg

SEQ ID NO: 895506 - DNA, 15 bp, Homo sapiens
ggcccagaagcgggg

SEQ ID NO: 895507 - DNA, 15 bp, Homo sapiens
gcccagaagcgggga

SEQ ID NO: 895508 - DNA, 15 bp, Homo sapiens
cccagaagcggggag

SEQ ID NO: 895509 - DNA, 15 bp, Homo sapiens
ccagaagcggggaga

SEQ ID NO: 895510 - DNA, 15 bp, Homo sapiens
cagaagcggggagag

SEQ ID NO: 895511 - DNA, 15 bp, Homo sapiens
agaagcggggagaga

SEQ ID NO: 895512 - DNA, 15 bp, Homo sapiens
gaagcggggagagac

SEQ ID NO: 895513 - DNA, 15 bp, Homo sapiens
aagcggggagagaca

SEQ ID NO: 895514 - DNA, 15 bp, Homo sapiens
agcggggagagacac

SEQ ID NO: 895515 - DNA, 15 bp, Homo sapiens
gcggggagagacacg

SEQ ID NO: 895516 - DNA, 15 bp, Homo sapiens
cggggagagacacga

SEQ ID NO: 895517 - DNA, 15 bp, Homo sapiens
ggggagagacacgag

SEQ ID NO: 895518 - DNA, 15 bp, Homo sapiens
gggagagacacgagc

SEQ ID NO: 895519 - DNA, 15 bp, Homo sapiens
ggagagacacgagcc

SEQ ID NO: 895520 - DNA, 15 bp, Homo sapiens
gagagacacgagccc

SEQ ID NO: 895521 - DNA, 15 bp, Homo sapiens
agagacacgagccct

SEQ ID NO: 895522 - DNA, 15 bp, Homo sapiens
gagacacgagccctt

SEQ ID NO: 895523 - DNA, 15 bp, Homo sapiens
agacacgagcccttt

SEQ ID NO: 895524 - DNA, 15 bp, Homo sapiens
gacacgagccctttg

SEQ ID NO: 895525 - DNA, 15 bp, Homo sapiens
acacgagccctttgc

SEQ ID NO: 895526 - DNA, 15 bp, Homo sapiens
cacgagccctttgcc

SEQ ID NO: 895527 - DNA, 15 bp, Homo sapiens
acgagccctttgcct

SEQ ID NO: 895528 - DNA, 15 bp, Homo sapiens
cgagccctttgcctg

SEQ ID NO: 895529 - DNA, 15 bp, Homo sapiens
gagccctttgcctgg

SEQ ID NO: 895530 - DNA, 15 bp, Homo sapiens
agccctttgcctggg

SEQ ID NO: 895531 - DNA, 15 bp, Homo sapiens
gccctttgcctgggt

SEQ ID NO: 895532 - DNA, 15 bp, Homo sapiens
ccctttgcctgggtg

SEQ ID NO: 895533 - DNA, 15 bp, Homo sapiens
cctttgcctgggtgt

SEQ ID NO: 895534 - DNA, 15 bp, Homo sapiens
ctttgcctgggtgta

SEQ ID NO: 895535 - DNA, 15 bp, Homo sapiens
tttgcctgggtgtaa

SEQ ID NO: 895536 - DNA, 15 bp, Homo sapiens
ttgcctgggtgtaac

SEQ ID NO: 895537 - DNA, 15 bp, Homo sapiens
tgcctgggtgtaacc

SEQ ID NO: 895538 - DNA, 15 bp, Homo sapiens
gcctgggtgtaacca

SEQ ID NO: 895539 - DNA, 15 bp, Homo sapiens
cctgggtgtaaccat

SEQ ID NO: 895540 - DNA, 15 bp, Homo sapiens
ctgggtgtaaccatg

SEQ ID NO: 895541 - DNA, 15 bp, Homo sapiens
tgggtgtaaccatgg

SEQ ID NO: 895542 - DNA, 15 bp, Homo sapiens
gggtgtaaccatggt

SEQ ID NO: 895543 - DNA, 15 bp, Homo sapiens
ggtgtaaccatggtg

SEQ ID NO: 895544 - DNA, 15 bp, Homo sapiens
gtgtaaccatggtgg

SEQ ID NO: 895545 - DNA, 15 bp, Homo sapiens
tgtaaccatggtggt

SEQ ID NO: 895546 - DNA, 15 bp, Homo sapiens
gtaaccatggtggtg

SEQ ID NO: 895547 - DNA, 15 bp, Homo sapiens
taaccatggtggtgt

SEQ ID NO: 895548 - DNA, 15 bp, Homo sapiens
aaccatggtggtgtg

SEQ ID NO: 895549 - DNA, 15 bp, Homo sapiens
accatggtggtgtgt

SEQ ID NO: 895550 - DNA, 15 bp, Homo sapiens
ccatggtggtgtgtg

SEQ ID NO: 895551 - DNA, 15 bp, Homo sapiens
catggtggtgtgtgc

SEQ ID NO: 895552 - DNA, 15 bp, Homo sapiens
atggtggtgtgtgcc

SEQ ID NO: 895553 - DNA, 15 bp, Homo sapiens
tggtggtgtgtgccg

SEQ ID NO: 895554 - DNA, 15 bp, Homo sapiens
ggtggtgtgtgccgt

SEQ ID NO: 895555 - DNA, 15 bp, Homo sapiens
gtggtgtgtgccgtc

SEQ ID NO: 895556 - DNA, 15 bp, Homo sapiens
tggtgtgtgccgtca

SEQ ID NO: 895557 - DNA, 15 bp, Homo sapiens
ggtgtgtgccgtcat

SEQ ID NO: 895558 - DNA, 15 bp, Homo sapiens
gtgtgtgccgtcatc

SEQ ID NO: 895559 - DNA, 15 bp, Homo sapiens
tgtgtgccgtcatca

SEQ ID NO: 895560 - DNA, 15 bp, Homo sapiens
gtgtgccgtcatcac

SEQ ID NO: 895561 - DNA, 15 bp, Homo sapiens
tgtgccgtcatcacc

SEQ ID NO: 895562 - DNA, 15 bp, Homo sapiens
gtgccgtcatcacct

SEQ ID NO: 895563 - DNA, 15 bp, Homo sapiens
tgccgtcatcaccta

SEQ ID NO: 895564 - DNA, 15 bp, Homo sapiens
gccgtcatcacctac

SEQ ID NO: 895565 - DNA, 15 bp, Homo sapiens
ccgtcatcacctact

SEQ ID NO: 895566 - DNA, 15 bp, Homo sapiens
cgtcatcacctacta

SEQ ID NO: 895567 - DNA, 15 bp, Homo sapiens
gtcatcacctactac

SEQ ID NO: 895568 - DNA, 15 bp, Homo sapiens
tcatcacctactaca

SEQ ID NO: 895569 - DNA, 15 bp, Homo sapiens
catcacctactacat

SEQ ID NO: 895570 - DNA, 15 bp, Homo sapiens
atcacctactacatc

SEQ ID NO: 895571 - DNA, 15 bp, Homo sapiens
tcacctactacatcc

SEQ ID NO: 895572 - DNA, 15 bp, Homo sapiens
cacctactacatcct

SEQ ID NO: 895573 - DNA, 15 bp, Homo sapiens
acctactacatcctg

SEQ ID NO: 895574 - DNA, 15 bp, Homo sapiens
cctactacatcctgg

SEQ ID NO: 895575 - DNA, 15 bp, Homo sapiens
ctactacatcctggt

SEQ ID NO: 895576 - DNA, 15 bp, Homo sapiens
tactacatcctggtc

SEQ ID NO: 895577 - DNA, 15 bp, Homo sapiens
actacatcctggtca

SEQ ID NO: 895578 - DNA, 15 bp, Homo sapiens
ctacatcctggtcac

SEQ ID NO: 895579 - DNA, 15 bp, Homo sapiens
tacatcctggtcacg

SEQ ID NO: 895580 - DNA, 15 bp, Homo sapiens
acatcctggtcacga

SEQ ID NO: 895581 - DNA, 15 bp, Homo sapiens
catcctggtcacgac

SEQ ID NO: 895582 - DNA, 15 bp, Homo sapiens
atcctggtcacgact

SEQ ID NO: 895583 - DNA, 15 bp, Homo sapiens
tcctggtcacgactg

SEQ ID NO: 895584 - DNA, 15 bp, Homo sapiens
cctggtcacgactgt

SEQ ID NO: 895585 - DNA, 15 bp, Homo sapiens
ctggtcacgactgtg

SEQ ID NO: 895586 - DNA, 15 bp, Homo sapiens
tggtcacgactgtgc

SEQ ID NO: 895587 - DNA, 15 bp, Homo sapiens
ggtcacgactgtgct

SEQ ID NO: 895588 - DNA, 15 bp, Homo sapiens
gtcacgactgtgctg

SEQ ID NO: 895589 - DNA, 15 bp, Homo sapiens
tcacgactgtgctgc

SEQ ID NO: 895590 - DNA, 15 bp, Homo sapiens
cacgactgtgctgcc

SEQ ID NO: 895591 - DNA, 15 bp, Homo sapiens
acgactgtgctgccc

SEQ ID NO: 895592 - DNA, 15 bp, Homo sapiens
cgactgtgctgcccc

SEQ ID NO: 895593 - DNA, 15 bp, Homo sapiens
gactgtgctgcccct

SEQ ID NO: 895594 - DNA, 15 bp, Homo sapiens
actgtgctgcccctc

SEQ ID NO: 895595 - DNA, 15 bp, Homo sapiens
ctgtgctgcccctct

SEQ ID NO: 895596 - DNA, 15 bp, Homo sapiens
tgtgctgcccctcta

SEQ ID NO: 895597 - DNA, 15 bp, Homo sapiens
gtgctgcccctctac

SEQ ID NO: 895598 - DNA, 15 bp, Homo sapiens
tgctgcccctctacc

SEQ ID NO: 895599 - DNA, 15 bp, Homo sapiens
gctgcccctctacca

SEQ ID NO: 895600 - DNA, 15 bp, Homo sapiens
ctgcccctctaccag

SEQ ID NO: 895601 - DNA, 15 bp, Homo sapiens
tgcccctctaccaga

SEQ ID NO: 895602 - DNA, 15 bp, Homo sapiens
gcccctctaccagaa

SEQ ID NO: 895603 - DNA, 15 bp, Homo sapiens
cccctctaccagaaa

SEQ ID NO: 895604 - DNA, 15 bp, Homo sapiens
ccctctaccagaaaa

SEQ ID NO: 895605 - DNA, 15 bp, Homo sapiens
cctctaccagaaaag

SEQ ID NO: 895606 - DNA, 15 bp, Homo sapiens
ctctaccagaaaagg

SEQ ID NO: 895607 - DNA, 15 bp, Homo sapiens
tctaccagaaaaggt

SEQ ID NO: 895608 - DNA, 15 bp, Homo sapiens
ctaccagaaaaggta

SEQ ID NO: 895609 - DNA, 15 bp, Homo sapiens
taccagaaaaggtac

SEQ ID NO: 895610 - DNA, 15 bp, Homo sapiens
accagaaaaggtact

SEQ ID NO: 895611 - DNA, 15 bp, Homo sapiens
ccagaaaaggtactg

SEQ ID NO: 895612 - DNA, 15 bp, Homo sapiens
cagaaaaggtactga

SEQ ID NO: 895613 - DNA, 15 bp, Homo sapiens
agaaaaggtactgag

SEQ ID NO: 895614 - DNA, 15 bp, Homo sapiens
gaaaaggtactgagc

SEQ ID NO: 895615 - DNA, 15 bp, Homo sapiens
aaaaggtactgagct

SEQ ID NO: 895616 - DNA, 15 bp, Homo sapiens
aaaggtactgagctc

SEQ ID NO: 895617 - DNA, 15 bp, Homo sapiens
aaggtactgagctct

SEQ ID NO: 895618 - DNA, 15 bp, Homo sapiens
aggtactgagctctc

SEQ ID NO: 895619 - DNA, 15 bp, Homo sapiens
ggtactgagctctcc

SEQ ID NO: 895620 - DNA, 15 bp, Homo sapiens
gtactgagctctccc

SEQ ID NO: 895621 - DNA, 15 bp, Homo sapiens
tactgagctctcccg

SEQ ID NO: 895622 - DNA, 15 bp, Homo sapiens
actgagctctcccgg

SEQ ID NO: 895623 - DNA, 15 bp, Homo sapiens
ctgagctctcccggc

SEQ ID NO: 895624 - DNA, 15 bp, Homo sapiens
tgagctctcccggcc

SEQ ID NO: 895625 - DNA, 15 bp, Homo sapiens
gagctctcccggcct

SEQ ID NO: 895626 - DNA, 15 bp, Homo sapiens
agctctcccggcctg

SEQ ID NO: 895627 - DNA, 15 bp, Homo sapiens
gctctcccggcctgc

SEQ ID NO: 895628 - DNA, 15 bp, Homo sapiens
ctctcccggcctgcc

SEQ ID NO: 895629 - DNA, 15 bp, Homo sapiens
tctcccggcctgccc

SEQ ID NO: 895630 - DNA, 15 bp, Homo sapiens
ctcccggcctgccca

SEQ ID NO: 895631 - DNA, 15 bp, Homo sapiens
tcccggcctgcccac

SEQ ID NO: 895632 - DNA, 15 bp, Homo sapiens
cccggcctgcccacc

SEQ ID NO: 895633 - DNA, 15 bp, Homo sapiens
ccggcctgcccaccc

SEQ ID NO: 895634 - DNA, 15 bp, Homo sapiens
cggcctgcccacccc

SEQ ID NO: 895635 - DNA, 15 bp, Homo sapiens
ggcctgcccaccccc

SEQ ID NO: 895636 - DNA, 15 bp, Homo sapiens
gcctgcccacccccc

SEQ ID NO: 895637 - DNA, 15 bp, Homo sapiens
cctgcccacccccca

SEQ ID NO: 895638 - DNA, 15 bp, Homo sapiens
ctgcccaccccccaa

SEQ ID NO: 895639 - DNA, 15 bp, Homo sapiens
tgcccaccccccaac

SEQ ID NO: 895640 - DNA, 15 bp, Homo sapiens
gcccaccccccaacc

SEQ ID NO: 895641 - DNA, 15 bp, Homo sapiens
cccaccccccaaccc

SEQ ID NO: 895642 - DNA, 15 bp, Homo sapiens
ccaccccccaaccct

SEQ ID NO: 895643 - DNA, 15 bp, Homo sapiens
caccccccaaccctc

SEQ ID NO: 895644 - DNA, 15 bp, Homo sapiens
accccccaaccctct

SEQ ID NO: 895645 - DNA, 15 bp, Homo sapiens
ccccccaaccctctc

SEQ ID NO: 895646 - DNA, 15 bp, Homo sapiens
cccccaaccctctcc

SEQ ID NO: 895647 - DNA, 15 bp, Homo sapiens
ccccaaccctctcct

SEQ ID NO: 895648 - DNA, 15 bp, Homo sapiens
cccaaccctctccta

SEQ ID NO: 895649 - DNA, 15 bp, Homo sapiens
ccaaccctctcctaa

SEQ ID NO: 895650 - DNA, 15 bp, Homo sapiens
caaccctctcctaag

SEQ ID NO: 895651 - DNA, 15 bp, Homo sapiens
aaccctctcctaagg

SEQ ID NO: 895652 - DNA, 15 bp, Homo sapiens
accctctcctaaggg

SEQ ID NO: 895653 - DNA, 15 bp, Homo sapiens
ccctctcctaagggt

SEQ ID NO: 895654 - DNA, 15 bp, Homo sapiens
cctctcctaagggtc

SEQ ID NO: 895655 - DNA, 15 bp, Homo sapiens
ctctcctaagggtct

SEQ ID NO: 895656 - DNA, 15 bp, Homo sapiens
tctcctaagggtctg

SEQ ID NO: 895657 - DNA, 15 bp, Homo sapiens
ctcctaagggtctgg

SEQ ID NO: 895658 - DNA, 15 bp, Homo sapiens
tcctaagggtctggc

SEQ ID NO: 895659 - DNA, 15 bp, Homo sapiens
cctaagggtctggca

SEQ ID NO: 895660 - DNA, 15 bp, Homo sapiens
ctaagggtctggcat

SEQ ID NO: 895661 - DNA, 15 bp, Homo sapiens
taagggtctggcatc

SEQ ID NO: 895662 - DNA, 15 bp, Homo sapiens
aagggtctggcatct

SEQ ID NO: 895663 - DNA, 15 bp, Homo sapiens
agggtctggcatctg

SEQ ID NO: 895664 - DNA, 15 bp, Homo sapiens
gggtctggcatctgt

SEQ ID NO: 895665 - DNA, 15 bp, Homo sapiens
ggtctggcatctgta

SEQ ID NO: 895666 - DNA, 15 bp, Homo sapiens
gtctggcatctgtaa

SEQ ID NO: 895667 - DNA, 15 bp, Homo sapiens
tctggcatctgtaag

SEQ ID NO: 895668 - DNA, 15 bp, Homo sapiens
ctggcatctgtaagg

SEQ ID NO: 895669 - DNA, 15 bp, Homo sapiens
tggcatctgtaagga

SEQ ID NO: 895670 - DNA, 15 bp, Homo sapiens
ggcatctgtaaggaa

SEQ ID NO: 895671 - DNA, 15 bp, Homo sapiens
gcatctgtaaggaac

SEQ ID NO: 895672 - DNA, 15 bp, Homo sapiens
catctgtaaggaacc

SEQ ID NO: 895673 - DNA, 15 bp, Homo sapiens
atctgtaaggaaccc

SEQ ID NO: 895674 - DNA, 15 bp, Homo sapiens
tctgtaaggaaccct

SEQ ID NO: 895675 - DNA, 15 bp, Homo sapiens
ctgtaaggaaccctg

SEQ ID NO: 895676 - DNA, 15 bp, Homo sapiens
tgtaaggaaccctgg

SEQ ID NO: 895677 - DNA, 15 bp, Homo sapiens
gtaaggaaccctggc

SEQ ID NO: 895678 - DNA, 15 bp, Homo sapiens
taaggaaccctggcc

SEQ ID NO: 895679 - DNA, 15 bp, Homo sapiens
aaggaaccctggcct

SEQ ID NO: 895680 - DNA, 15 bp, Homo sapiens
aggaaccctggcctt

SEQ ID NO: 895681 - DNA, 15 bp, Homo sapiens
ggaaccctggccttc

SEQ ID NO: 895682 - DNA, 15 bp, Homo sapiens
gaaccctggccttct

SEQ ID NO: 895683 - DNA, 15 bp, Homo sapiens
aaccctggccttcta

SEQ ID NO: 895684 - DNA, 15 bp, Homo sapiens
accctggccttctac

SEQ ID NO: 895685 - DNA, 15 bp, Homo sapiens
ccctggccttctact

SEQ ID NO: 895686 - DNA, 15 bp, Homo sapiens
cctggccttctactc

SEQ ID NO: 895687 - DNA, 15 bp, Homo sapiens
ctggccttctactca

SEQ ID NO: 895688 - DNA, 15 bp, Homo sapiens
tggccttctactcac

SEQ ID NO: 895689 - DNA, 15 bp, Homo sapiens
ggccttctactcacc

SEQ ID NO: 895690 - DNA, 15 bp, Homo sapiens
gccttctactcaccc

SEQ ID NO: 895691 - DNA, 15 bp, Homo sapiens
ccttctactcacccc

SEQ ID NO: 895692 - DNA, 15 bp, Homo sapiens
cttctactcacccct

SEQ ID NO: 895693 - DNA, 15 bp, Homo sapiens
ttctactcacccctc

SEQ ID NO: 895694 - DNA, 15 bp, Homo sapiens
tctactcacccctct

SEQ ID NO: 895695 - DNA, 15 bp, Homo sapiens
ctactcacccctctc

SEQ ID NO: 895696 - DNA, 15 bp, Homo sapiens
tactcacccctctcc

SEQ ID NO: 895697 - DNA, 15 bp, Homo sapiens
actcacccctctcct

SEQ ID NO: 895698 - DNA, 15 bp, Homo sapiens
ctcacccctctcctt

SEQ ID NO: 895699 - DNA, 15 bp, Homo sapiens
tcacccctctccttg

SEQ ID NO: 895700 - DNA, 15 bp, Homo sapiens
cacccctctccttga

SEQ ID NO: 895701 - DNA, 15 bp, Homo sapiens
acccctctccttgac

SEQ ID NO: 895702 - DNA, 15 bp, Homo sapiens
cccctctccttgacc

SEQ ID NO: 895703 - DNA, 15 bp, Homo sapiens
ccctctccttgaccc

SEQ ID NO: 895704 - DNA, 15 bp, Homo sapiens
cctctccttgaccct

SEQ ID NO: 895705 - DNA, 15 bp, Homo sapiens
ctctccttgaccctc

SEQ ID NO: 895706 - DNA, 15 bp, Homo sapiens
tctccttgaccctca

SEQ ID NO: 895707 - DNA, 15 bp, Homo sapiens
ctccttgaccctcat

SEQ ID NO: 895708 - DNA, 15 bp, Homo sapiens
tccttgaccctcatt

SEQ ID NO: 895709 - DNA, 15 bp, Homo sapiens
ccttgaccctcattc

SEQ ID NO: 895710 - DNA, 15 bp, Homo sapiens
cttgaccctcattca

SEQ ID NO: 895711 - DNA, 15 bp, Homo sapiens
ttgaccctcattcaa

SEQ ID NO: 895712 - DNA, 15 bp, Homo sapiens
tgaccctcattcaag

SEQ ID NO: 895713 - DNA, 15 bp, Homo sapiens
gaccctcattcaagg

SEQ ID NO: 895714 - DNA, 15 bp, Homo sapiens
accctcattcaaggc

SEQ ID NO: 895715 - DNA, 15 bp, Homo sapiens
ccctcattcaaggca

SEQ ID NO: 895716 - DNA, 15 bp, Homo sapiens
cctcattcaaggcag

SEQ ID NO: 895717 - DNA, 15 bp, Homo sapiens
ctcattcaaggcagc

SEQ ID NO: 895718 - DNA, 15 bp, Homo sapiens
tcattcaaggcagca

SEQ ID NO: 895719 - DNA, 15 bp, Homo sapiens
cattcaaggcagcag

SEQ ID NO: 895720 - DNA, 15 bp, Homo sapiens
attcaaggcagcagg

SEQ ID NO: 895721 - DNA, 15 bp, Homo sapiens
ttcaaggcagcaggg

SEQ ID NO: 895722 - DNA, 15 bp, Homo sapiens
tcaaggcagcagggt

SEQ ID NO: 895723 - DNA, 15 bp, Homo sapiens
caaggcagcagggtc

SEQ ID NO: 895724 - DNA, 15 bp, Homo sapiens
aaggcagcagggtca

SEQ ID NO: 895725 - DNA, 15 bp, Homo sapiens
aggcagcagggtcaa

SEQ ID NO: 895726 - DNA, 15 bp, Homo sapiens
ggcagcagggtcaag

SEQ ID NO: 895727 - DNA, 15 bp, Homo sapiens
gcagcagggtcaaga

SEQ ID NO: 895728 - DNA, 15 bp, Homo sapiens
cagcagggtcaagac

SEQ ID NO: 895729 - DNA, 15 bp, Homo sapiens
agcagggtcaagacg

SEQ ID NO: 895730 - DNA, 15 bp, Homo sapiens
gcagggtcaagacga

SEQ ID NO: 895731 - DNA, 15 bp, Homo sapiens
cagggtcaagacgat

SEQ ID NO: 895732 - DNA, 15 bp, Homo sapiens
agggtcaagacgatg

SEQ ID NO: 895733 - DNA, 15 bp, Homo sapiens
gggtcaagacgatgc

SEQ ID NO: 895734 - DNA, 15 bp, Homo sapiens
ggtcaagacgatgct

SEQ ID NO: 895735 - DNA, 15 bp, Homo sapiens
gtcaagacgatgctc

SEQ ID NO: 895736 - DNA, 15 bp, Homo sapiens
tcaagacgatgctca

SEQ ID NO: 895737 - DNA, 15 bp, Homo sapiens
caagacgatgctcat

SEQ ID NO: 895738 - DNA, 15 bp, Homo sapiens
aagacgatgctcatt

SEQ ID NO: 895739 - DNA, 15 bp, Homo sapiens
agacgatgctcattc

SEQ ID NO: 895740 - DNA, 15 bp, Homo sapiens
gacgatgctcattct

SEQ ID NO: 895741 - DNA, 15 bp, Homo sapiens
acgatgctcattctt

SEQ ID NO: 895742 - DNA, 15 bp, Homo sapiens
cgatgctcattctta

SEQ ID NO: 895743 - DNA, 15 bp, Homo sapiens
gatgctcattcttag

SEQ ID NO: 895744 - DNA, 15 bp, Homo sapiens
atgctcattcttagg

SEQ ID NO: 895745 - DNA, 15 bp, Homo sapiens
tgctcattcttaggt

SEQ ID NO: 895746 - DNA, 15 bp, Homo sapiens
gctcattcttaggtt

SEQ ID NO: 895747 - DNA, 15 bp, Homo sapiens
ctcattcttaggttc

SEQ ID NO: 895748 - DNA, 15 bp, Homo sapiens
tcattcttaggttct

SEQ ID NO: 895749 - DNA, 15 bp, Homo sapiens
cattcttaggttcta

SEQ ID NO: 895750 - DNA, 15 bp, Homo sapiens
attcttaggttctag

SEQ ID NO: 895751 - DNA, 15 bp, Homo sapiens
ttcttaggttctagg

SEQ ID NO: 895752 - DNA, 15 bp, Homo sapiens
tcttaggttctaggg

SEQ ID NO: 895753 - DNA, 15 bp, Homo sapiens
cttaggttctagggt

SEQ ID NO: 895754 - DNA, 15 bp, Homo sapiens
ttaggttctagggtt

SEQ ID NO: 895755 - DNA, 15 bp, Homo sapiens
taggttctagggttc

SEQ ID NO: 895756 - DNA, 15 bp, Homo sapiens
aggttctagggttca

SEQ ID NO: 895757 - DNA, 15 bp, Homo sapiens
ggttctagggttcaa

SEQ ID NO: 895758 - DNA, 15 bp, Homo sapiens
gttctagggttcaag

SEQ ID NO: 895759 - DNA, 15 bp, Homo sapiens
ttctagggttcaagt

SEQ ID NO: 895760 - DNA, 15 bp, Homo sapiens
tctagggttcaagtg

SEQ ID NO: 895761 - DNA, 15 bp, Homo sapiens
ctagggttcaagtgc

SEQ ID NO: 895762 - DNA, 15 bp, Homo sapiens
tagggttcaagtgca

SEQ ID NO: 895763 - DNA, 15 bp, Homo sapiens
agggttcaagtgcag

SEQ ID NO: 895764 - DNA, 15 bp, Homo sapiens
gggttcaagtgcagg

SEQ ID NO: 895765 - DNA, 15 bp, Homo sapiens
ggttcaagtgcaggg

SEQ ID NO: 895766 - DNA, 15 bp, Homo sapiens
gttcaagtgcaggga

SEQ ID NO: 895767 - DNA, 15 bp, Homo sapiens
ttcaagtgcagggaa

SEQ ID NO: 895768 - DNA, 15 bp, Homo sapiens
tcaagtgcagggaag

SEQ ID NO: 895769 - DNA, 15 bp, Homo sapiens
caagtgcagggaagg

SEQ ID NO: 895770 - DNA, 15 bp, Homo sapiens
aagtgcagggaaggt

SEQ ID NO: 895771 - DNA, 15 bp, Homo sapiens
agtgcagggaaggta

SEQ ID NO: 895772 - DNA, 15 bp, Homo sapiens
gtgcagggaaggtag

SEQ ID NO: 895773 - DNA, 15 bp, Homo sapiens
tgcagggaaggtagg

SEQ ID NO: 895774 - DNA, 15 bp, Homo sapiens
gcagggaaggtagga

SEQ ID NO: 895775 - DNA, 15 bp, Homo sapiens
cagggaaggtaggat

SEQ ID NO: 895776 - DNA, 15 bp, Homo sapiens
agggaaggtaggatg

SEQ ID NO: 895777 - DNA, 15 bp, Homo sapiens
gggaaggtaggatga

SEQ ID NO: 895778 - DNA, 15 bp, Homo sapiens
ggaaggtaggatgaa

SEQ ID NO: 895779 - DNA, 15 bp, Homo sapiens
gaaggtaggatgaac

SEQ ID NO: 895780 - DNA, 15 bp, Homo sapiens
aaggtaggatgaact

SEQ ID NO: 895781 - DNA, 15 bp, Homo sapiens
aggtaggatgaactg

SEQ ID NO: 895782 - DNA, 15 bp, Homo sapiens
ggtaggatgaactga

SEQ ID NO: 895783 - DNA, 15 bp, Homo sapiens
gtaggatgaactgag

SEQ ID NO: 895784 - DNA, 15 bp, Homo sapiens
taggatgaactgagc

SEQ ID NO: 895785 - DNA, 15 bp, Homo sapiens
aggatgaactgagcc

SEQ ID NO: 895786 - DNA, 15 bp, Homo sapiens
ggatgaactgagccc

SEQ ID NO: 895787 - DNA, 15 bp, Homo sapiens
gatgaactgagcccc

SEQ ID NO: 895788 - DNA, 15 bp, Homo sapiens
atgaactgagcccca

SEQ ID NO: 895789 - DNA, 15 bp, Homo sapiens
tgaactgagccccac

SEQ ID NO: 895790 - DNA, 15 bp, Homo sapiens
gaactgagccccact

SEQ ID NO: 895791 - DNA, 15 bp, Homo sapiens
aactgagccccactg

SEQ ID NO: 895792 - DNA, 15 bp, Homo sapiens
actgagccccactgg

SEQ ID NO: 895793 - DNA, 15 bp, Homo sapiens
ctgagccccactggt

SEQ ID NO: 895794 - DNA, 15 bp, Homo sapiens
tgagccccactggtc

SEQ ID NO: 895795 - DNA, 15 bp, Homo sapiens
gagccccactggtct

SEQ ID NO: 895796 - DNA, 15 bp, Homo sapiens
agccccactggtctg

SEQ ID NO: 895797 - DNA, 15 bp, Homo sapiens
gccccactggtctga

SEQ ID NO: 895798 - DNA, 15 bp, Homo sapiens
ccccactggtctgag

SEQ ID NO: 895799 - DNA, 15 bp, Homo sapiens
cccactggtctgaga

SEQ ID NO: 895800 - DNA, 15 bp, Homo sapiens
ccactggtctgagat

SEQ ID NO: 895801 - DNA, 15 bp, Homo sapiens
cactggtctgagatt

SEQ ID NO: 895802 - DNA, 15 bp, Homo sapiens
actggtctgagattc

SEQ ID NO: 895803 - DNA, 15 bp, Homo sapiens
ctggtctgagattct

SEQ ID NO: 895804 - DNA, 15 bp, Homo sapiens
tggtctgagattcta

SEQ ID NO: 895805 - DNA, 15 bp, Homo sapiens
ggtctgagattctag

SEQ ID NO: 895806 - DNA, 15 bp, Homo sapiens
gtctgagattctagg

SEQ ID NO: 895807 - DNA, 15 bp, Homo sapiens
tctgagattctagga

SEQ ID NO: 895808 - DNA, 15 bp, Homo sapiens
ctgagattctaggac

SEQ ID NO: 895809 - DNA, 15 bp, Homo sapiens
tgagattctaggacc

SEQ ID NO: 895810 - DNA, 15 bp, Homo sapiens
gagattctaggacct

SEQ ID NO: 895811 - DNA, 15 bp, Homo sapiens
agattctaggacctg

SEQ ID NO: 895812 - DNA, 15 bp, Homo sapiens
gattctaggacctgg

SEQ ID NO: 895813 - DNA, 15 bp, Homo sapiens
attctaggacctggt

SEQ ID NO: 895814 - DNA, 15 bp, Homo sapiens
ttctaggacctggtg

SEQ ID NO: 895815 - DNA, 15 bp, Homo sapiens
tctaggacctggtgg

SEQ ID NO: 895816 - DNA, 15 bp, Homo sapiens
ctaggacctggtggt

SEQ ID NO: 895817 - DNA, 15 bp, Homo sapiens
taggacctggtggta

SEQ ID NO: 895818 - DNA, 15 bp, Homo sapiens
aggacctggtggtaa

SEQ ID NO: 895819 - DNA, 15 bp, Homo sapiens
ggacctggtggtaac

SEQ ID NO: 895820 - DNA, 15 bp, Homo sapiens
gacctggtggtaaca

SEQ ID NO: 895821 - DNA, 15 bp, Homo sapiens
acctggtggtaacag

SEQ ID NO: 895822 - DNA, 15 bp, Homo sapiens
cctggtggtaacaga

SEQ ID NO: 895823 - DNA, 15 bp, Homo sapiens
ctggtggtaacagac

SEQ ID NO: 895824 - DNA, 15 bp, Homo sapiens
tggtggtaacagaca

SEQ ID NO: 895825 - DNA, 15 bp, Homo sapiens
ggtggtaacagacac

SEQ ID NO: 895826 - DNA, 15 bp, Homo sapiens
gtggtaacagacaca

SEQ ID NO: 895827 - DNA, 15 bp, Homo sapiens
tggtaacagacacat

SEQ ID NO: 895828 - DNA, 15 bp, Homo sapiens
ggtaacagacacatg

SEQ ID NO: 895829 - DNA, 15 bp, Homo sapiens
gtaacagacacatga

SEQ ID NO: 895830 - DNA, 15 bp, Homo sapiens
taacagacacatgat

SEQ ID NO: 895831 - DNA, 15 bp, Homo sapiens
aacagacacatgatc

SEQ ID NO: 895832 - DNA, 15 bp, Homo sapiens
acagacacatgatct

SEQ ID NO: 895833 - DNA, 15 bp, Homo sapiens
cagacacatgatcta

SEQ ID NO: 895834 - DNA, 15 bp, Homo sapiens
agacacatgatctag

SEQ ID NO: 895835 - DNA, 15 bp, Homo sapiens
gacacatgatctagg

SEQ ID NO: 895836 - DNA, 15 bp, Homo sapiens
acacatgatctagga

SEQ ID NO: 895837 - DNA, 15 bp, Homo sapiens
cacatgatctaggac

SEQ ID NO: 895838 - DNA, 15 bp, Homo sapiens
acatgatctaggacg

SEQ ID NO: 895839 - DNA, 15 bp, Homo sapiens
catgatctaggacgt

SEQ ID NO: 895840 - DNA, 15 bp, Homo sapiens
atgatctaggacgtg

SEQ ID NO: 895841 - DNA, 15 bp, Homo sapiens
tgatctaggacgtgg

SEQ ID NO: 895842 - DNA, 15 bp, Homo sapiens
gatctaggacgtggt

SEQ ID NO: 895843 - DNA, 15 bp, Homo sapiens
atctaggacgtggtg

SEQ ID NO: 895844 - DNA, 15 bp, Homo sapiens
tctaggacgtggtgg

SEQ ID NO: 895845 - DNA, 15 bp, Homo sapiens
ctaggacgtggtggt

SEQ ID NO: 895846 - DNA, 15 bp, Homo sapiens
taggacgtggtggta

SEQ ID NO: 895847 - DNA, 15 bp, Homo sapiens
aggacgtggtggtaa

SEQ ID NO: 895848 - DNA, 15 bp, Homo sapiens
ggacgtggtggtaac

SEQ ID NO: 895849 - DNA, 15 bp, Homo sapiens
gacgtggtggtaaca

SEQ ID NO: 895850 - DNA, 15 bp, Homo sapiens
acgtggtggtaacag

SEQ ID NO: 895851 - DNA, 15 bp, Homo sapiens
cgtggtggtaacaga

SEQ ID NO: 895852 - DNA, 15 bp, Homo sapiens
gtggtggtaacagac

SEQ ID NO: 895853 - DNA, 15 bp, Homo sapiens
aacagacacatgatg

SEQ ID NO: 895854 - DNA, 15 bp, Homo sapiens
acagacacatgatgc

SEQ ID NO: 895855 - DNA, 15 bp, Homo sapiens
cagacacatgatgcc

SEQ ID NO: 895856 - DNA, 15 bp, Homo sapiens
agacacatgatgccc

SEQ ID NO: 895857 - DNA, 15 bp, Homo sapiens
gacacatgatgccct

SEQ ID NO: 895858 - DNA, 15 bp, Homo sapiens
acacatgatgccctt

SEQ ID NO: 895859 - DNA, 15 bp, Homo sapiens
cacatgatgcccttc

SEQ ID NO: 895860 - DNA, 15 bp, Homo sapiens
acatgatgcccttct

SEQ ID NO: 895861 - DNA, 15 bp, Homo sapiens
catgatgcccttctc

SEQ ID NO: 895862 - DNA, 15 bp, Homo sapiens
atgatgcccttctca

SEQ ID NO: 895863 - DNA, 15 bp, Homo sapiens
tgatgcccttctcag

SEQ ID NO: 895864 - DNA, 15 bp, Homo sapiens
gatgcccttctcaga

SEQ ID NO: 895865 - DNA, 15 bp, Homo sapiens
atgcccttctcagaa

SEQ ID NO: 895866 - DNA, 15 bp, Homo sapiens
tgcccttctcagaag

SEQ ID NO: 895867 - DNA, 15 bp, Homo sapiens
gcccttctcagaaga

SEQ ID NO: 895868 - DNA, 15 bp, Homo sapiens
cccttctcagaagaa

SEQ ID NO: 895869 - DNA, 15 bp, Homo sapiens
ccttctcagaagaaa

SEQ ID NO: 895870 - DNA, 15 bp, Homo sapiens
cttctcagaagaaat

SEQ ID NO: 895871 - DNA, 15 bp, Homo sapiens
ttctcagaagaaata

SEQ ID NO: 895872 - DNA, 15 bp, Homo sapiens
tctcagaagaaatag

SEQ ID NO: 895873 - DNA, 15 bp, Homo sapiens
ctcagaagaaatagc

SEQ ID NO: 895874 - DNA, 15 bp, Homo sapiens
tcagaagaaatagca

SEQ ID NO: 895875 - DNA, 15 bp, Homo sapiens
cagaagaaatagcaa

SEQ ID NO: 895876 - DNA, 15 bp, Homo sapiens
agaagaaatagcaaa

SEQ ID NO: 895877 - DNA, 15 bp, Homo sapiens
gaagaaatagcaaag

SEQ ID NO: 895878 - DNA, 15 bp, Homo sapiens
aagaaatagcaaaga

SEQ ID NO: 895879 - DNA, 15 bp, Homo sapiens
agaaatagcaaagaa

SEQ ID NO: 895880 - DNA, 15 bp, Homo sapiens
gaaatagcaaagaat

SEQ ID NO: 895881 - DNA, 15 bp, Homo sapiens
aaatagcaaagaatc

SEQ ID NO: 895882 - DNA, 15 bp, Homo sapiens
aatagcaaagaatca

SEQ ID NO: 895883 - DNA, 15 bp, Homo sapiens
atagcaaagaatcag

SEQ ID NO: 895884 - DNA, 15 bp, Homo sapiens
tagcaaagaatcaga

SEQ ID NO: 895885 - DNA, 15 bp, Homo sapiens
agcaaagaatcagag

SEQ ID NO: 895886 - DNA, 15 bp, Homo sapiens
gcaaagaatcagagc

SEQ ID NO: 895887 - DNA, 15 bp, Homo sapiens
caaagaatcagagca

SEQ ID NO: 895888 - DNA, 15 bp, Homo sapiens
aaagaatcagagcaa

SEQ ID NO: 895889 - DNA, 15 bp, Homo sapiens
aagaatcagagcaaa

SEQ ID NO: 895890 - DNA, 15 bp, Homo sapiens
agaatcagagcaaag

SEQ ID NO: 895891 - DNA, 15 bp, Homo sapiens
gaatcagagcaaagg

SEQ ID NO: 895892 - DNA, 15 bp, Homo sapiens
aatcagagcaaaggt

SEQ ID NO: 895893 - DNA, 15 bp, Homo sapiens
atcagagcaaaggtt

SEQ ID NO: 895894 - DNA, 15 bp, Homo sapiens
tcagagcaaaggttc

SEQ ID NO: 895895 - DNA, 15 bp, Homo sapiens
cagagcaaaggttcc

SEQ ID NO: 895896 - DNA, 15 bp, Homo sapiens
agagcaaaggttcca

SEQ ID NO: 895897 - DNA, 15 bp, Homo sapiens
gagcaaaggttccag

SEQ ID NO: 895898 - DNA, 15 bp, Homo sapiens
agcaaaggttccagt

SEQ ID NO: 895899 - DNA, 15 bp, Homo sapiens
gcaaaggttccagtg

SEQ ID NO: 895900 - DNA, 15 bp, Homo sapiens
caaaggttccagtgc

SEQ ID NO: 895901 - DNA, 15 bp, Homo sapiens
aaaggttccagtgca

SEQ ID NO: 895902 - DNA, 15 bp, Homo sapiens
aaggttccagtgcaa

SEQ ID NO: 895903 - DNA, 15 bp, Homo sapiens
aggttccagtgcaag

SEQ ID NO: 895904 - DNA, 15 bp, Homo sapiens
ggttccagtgcaagt

SEQ ID NO: 895905 - DNA, 15 bp, Homo sapiens
gttccagtgcaagtt

SEQ ID NO: 895906 - DNA, 15 bp, Homo sapiens
ttccagtgcaagttt

SEQ ID NO: 895907 - DNA, 15 bp, Homo sapiens
tccagtgcaagtttg

SEQ ID NO: 895908 - DNA, 15 bp, Homo sapiens
ccagtgcaagtttga

SEQ ID NO: 895909 - DNA, 15 bp, Homo sapiens
cagtgcaagtttgat

SEQ ID NO: 895910 - DNA, 15 bp, Homo sapiens
agtgcaagtttgatc

SEQ ID NO: 895911 - DNA, 15 bp, Homo sapiens
gtgcaagtttgatcc

SEQ ID NO: 895912 - DNA, 15 bp, Homo sapiens
tgcaagtttgatccc

SEQ ID NO: 895913 - DNA, 15 bp, Homo sapiens
gcaagtttgatccca

SEQ ID NO: 895914 - DNA, 15 bp, Homo sapiens
caagtttgatcccag

SEQ ID NO: 895915 - DNA, 15 bp, Homo sapiens
aagtttgatcccagg

SEQ ID NO: 895916 - DNA, 15 bp, Homo sapiens
agtttgatcccagga

SEQ ID NO: 895917 - DNA, 15 bp, Homo sapiens
gtttgatcccaggag

SEQ ID NO: 895918 - DNA, 15 bp, Homo sapiens
tttgatcccaggagg

SEQ ID NO: 895919 - DNA, 15 bp, Homo sapiens
ttgatcccaggagga

SEQ ID NO: 895920 - DNA, 15 bp, Homo sapiens
tgatcccaggaggaa

SEQ ID NO: 895921 - DNA, 15 bp, Homo sapiens
gatcccaggaggaat

SEQ ID NO: 895922 - DNA, 15 bp, Homo sapiens
atcccaggaggaatc

SEQ ID NO: 895923 - DNA, 15 bp, Homo sapiens
tcccaggaggaatca

SEQ ID NO: 895924 - DNA, 15 bp, Homo sapiens
cccaggaggaatcag

SEQ ID NO: 895925 - DNA, 15 bp, Homo sapiens
ccaggaggaatcaga

SEQ ID NO: 895926 - DNA, 15 bp, Homo sapiens
caggaggaatcagag

SEQ ID NO: 895927 - DNA, 15 bp, Homo sapiens
aggaggaatcagaga

SEQ ID NO: 895928 - DNA, 15 bp, Homo sapiens
ggaggaatcagagaa

SEQ ID NO: 895929 - DNA, 15 bp, Homo sapiens
gaggaatcagagaat

SEQ ID NO: 895930 - DNA, 15 bp, Homo sapiens
aggaatcagagaatt

SEQ ID NO: 895931 - DNA, 15 bp, Homo sapiens
ggaatcagagaattg

SEQ ID NO: 895932 - DNA, 15 bp, Homo sapiens
gaatcagagaattgc

SEQ ID NO: 895933 - DNA, 15 bp, Homo sapiens
aatcagagaattgca

SEQ ID NO: 895934 - DNA, 15 bp, Homo sapiens
atcagagaattgcag

SEQ ID NO: 895935 - DNA, 15 bp, Homo sapiens
tcagagaattgcaga

SEQ ID NO: 895936 - DNA, 15 bp, Homo sapiens
cagagaattgcagat

SEQ ID NO: 895937 - DNA, 15 bp, Homo sapiens
agagaattgcagatg

SEQ ID NO: 895938 - DNA, 15 bp, Homo sapiens
gagaattgcagatgt

SEQ ID NO: 895939 - DNA, 15 bp, Homo sapiens
agaattgcagatgtt

SEQ ID NO: 895940 - DNA, 15 bp, Homo sapiens
gaattgcagatgttt

SEQ ID NO: 895941 - DNA, 15 bp, Homo sapiens
aattgcagatgttta

SEQ ID NO: 895942 - DNA, 15 bp, Homo sapiens
attgcagatgtttac

SEQ ID NO: 895943 - DNA, 15 bp, Homo sapiens
ttgcagatgtttaca

SEQ ID NO: 895944 - DNA, 15 bp, Homo sapiens
tgcagatgtttacag

SEQ ID NO: 895945 - DNA, 15 bp, Homo sapiens
gcagatgtttacagc

SEQ ID NO: 895946 - DNA, 15 bp, Homo sapiens
cagatgtttacagct

SEQ ID NO: 895947 - DNA, 15 bp, Homo sapiens
agatgtttacagctc

SEQ ID NO: 895948 - DNA, 15 bp, Homo sapiens
gatgtttacagctca

SEQ ID NO: 895949 - DNA, 15 bp, Homo sapiens
atgtttacagctcag

SEQ ID NO: 895950 - DNA, 15 bp, Homo sapiens
tgtttacagctcagc

SEQ ID NO: 895951 - DNA, 15 bp, Homo sapiens
gtttacagctcagct

SEQ ID NO: 895952 - DNA, 15 bp, Homo sapiens
tttacagctcagctg

SEQ ID NO: 895953 - DNA, 15 bp, Homo sapiens
ttacagctcagctgc

SEQ ID NO: 895954 - DNA, 15 bp, Homo sapiens
tacagctcagctgca

SEQ ID NO: 895955 - DNA, 15 bp, Homo sapiens
acagctcagctgcat

SEQ ID NO: 895956 - DNA, 15 bp, Homo sapiens
cagctcagctgcata

SEQ ID NO: 895957 - DNA, 15 bp, Homo sapiens
agctcagctgcataa

SEQ ID NO: 895958 - DNA, 15 bp, Homo sapiens
gctcagctgcataat

SEQ ID NO: 895959 - DNA, 15 bp, Homo sapiens
ctcagctgcataatt

SEQ ID NO: 895960 - DNA, 15 bp, Homo sapiens
tcagctgcataattc

SEQ ID NO: 895961 - DNA, 15 bp, Homo sapiens
cagctgcataattct

SEQ ID NO: 895962 - DNA, 15 bp, Homo sapiens
agctgcataattctc

SEQ ID NO: 895963 - DNA, 15 bp, Homo sapiens
gctgcataattctct

SEQ ID NO: 895964 - DNA, 15 bp, Homo sapiens
ctgcataattctctc

SEQ ID NO: 895965 - DNA, 15 bp, Homo sapiens
tgcataattctctcc

SEQ ID NO: 895966 - DNA, 15 bp, Homo sapiens
gcataattctctccc

SEQ ID NO: 895967 - DNA, 15 bp, Homo sapiens
cataattctctcccc

SEQ ID NO: 895968 - DNA, 15 bp, Homo sapiens
ataattctctcccct

SEQ ID NO: 895969 - DNA, 15 bp, Homo sapiens
taattctctcccctc

SEQ ID NO: 895970 - DNA, 15 bp, Homo sapiens
aattctctcccctct

SEQ ID NO: 895971 - DNA, 15 bp, Homo sapiens
attctctcccctctg

SEQ ID NO: 895972 - DNA, 15 bp, Homo sapiens
ttctctcccctctga

SEQ ID NO: 895973 - DNA, 15 bp, Homo sapiens
tctctcccctctgaa

SEQ ID NO: 895974 - DNA, 15 bp, Homo sapiens
ctctcccctctgaag

SEQ ID NO: 895975 - DNA, 15 bp, Homo sapiens
tctcccctctgaagc

SEQ ID NO: 895976 - DNA, 15 bp, Homo sapiens
ctcccctctgaagcc

SEQ ID NO: 895977 - DNA, 15 bp, Homo sapiens
tcccctctgaagcct

SEQ ID NO: 895978 - DNA, 15 bp, Homo sapiens
cccctctgaagcctc

SEQ ID NO: 895979 - DNA, 15 bp, Homo sapiens
ccctctgaagcctcc

SEQ ID NO: 895980 - DNA, 15 bp, Homo sapiens
cctctgaagcctccc

SEQ ID NO: 895981 - DNA, 15 bp, Homo sapiens
ctctgaagcctccct

SEQ ID NO: 895982 - DNA, 15 bp, Homo sapiens
tctgaagcctccctg

SEQ ID NO: 895983 - DNA, 15 bp, Homo sapiens
ctgaagcctccctgt

SEQ ID NO: 895984 - DNA, 15 bp, Homo sapiens
tgaagcctccctgtc

SEQ ID NO: 895985 - DNA, 15 bp, Homo sapiens
gaagcctccctgtca

SEQ ID NO: 895986 - DNA, 15 bp, Homo sapiens
aagcctccctgtcag

SEQ ID NO: 895987 - DNA, 15 bp, Homo sapiens
agcctccctgtcagg

SEQ ID NO: 895988 - DNA, 15 bp, Homo sapiens
gcctccctgtcaggt

SEQ ID NO: 895989 - DNA, 15 bp, Homo sapiens
cctccctgtcaggtg

SEQ ID NO: 895990 - DNA, 15 bp, Homo sapiens
ctccctgtcaggtgg

SEQ ID NO: 895991 - DNA, 15 bp, Homo sapiens
tccctgtcaggtggg

SEQ ID NO: 895992 - DNA, 15 bp, Homo sapiens
ccctgtcaggtgggc

SEQ ID NO: 895993 - DNA, 15 bp, Homo sapiens
cctgtcaggtgggca

SEQ ID NO: 895994 - DNA, 15 bp, Homo sapiens
ctgtcaggtgggcat

SEQ ID NO: 895995 - DNA, 15 bp, Homo sapiens
tgtcaggtgggcatc

SEQ ID NO: 895996 - DNA, 15 bp, Homo sapiens
gtcaggtgggcatcc

SEQ ID NO: 895997 - DNA, 15 bp, Homo sapiens
tcaggtgggcatcca

SEQ ID NO: 895998 - DNA, 15 bp, Homo sapiens
caggtgggcatccag

SEQ ID NO: 895999 - DNA, 15 bp, Homo sapiens
aggtgggcatccagc

SEQ ID NO: 896000 - DNA, 15 bp, Homo sapiens
ggtgggcatccagcc

SEQ ID NO: 896001 - DNA, 15 bp, Homo sapiens
gtgggcatccagcct

SEQ ID NO: 896002 - DNA, 15 bp, Homo sapiens
tgggcatccagcctc

SEQ ID NO: 896003 - DNA, 15 bp, Homo sapiens
gggcatccagcctcc

SEQ ID NO: 896004 - DNA, 15 bp, Homo sapiens
ggcatccagcctcct

SEQ ID NO: 896005 - DNA, 15 bp, Homo sapiens
gcatccagcctcctg

SEQ ID NO: 896006 - DNA, 15 bp, Homo sapiens
catccagcctcctga

SEQ ID NO: 896007 - DNA, 15 bp, Homo sapiens
atccagcctcctgat

SEQ ID NO: 896008 - DNA, 15 bp, Homo sapiens
tccagcctcctgatg

SEQ ID NO: 896009 - DNA, 15 bp, Homo sapiens
ccagcctcctgatga

SEQ ID NO: 896010 - DNA, 15 bp, Homo sapiens
cagcctcctgatgaa

SEQ ID NO: 896011 - DNA, 15 bp, Homo sapiens
agcctcctgatgaat

SEQ ID NO: 896012 - DNA, 15 bp, Homo sapiens
gcctcctgatgaata

SEQ ID NO: 896013 - DNA, 15 bp, Homo sapiens
cctcctgatgaatac

SEQ ID NO: 896014 - DNA, 15 bp, Homo sapiens
ctcctgatgaatacc

SEQ ID NO: 896015 - DNA, 15 bp, Homo sapiens
tcctgatgaatacct

SEQ ID NO: 896016 - DNA, 15 bp, Homo sapiens
cctgatgaatacctc

SEQ ID NO: 896017 - DNA, 15 bp, Homo sapiens
ctgatgaatacctca

SEQ ID NO: 896018 - DNA, 15 bp, Homo sapiens
tgatgaatacctcaa

SEQ ID NO: 896019 - DNA, 15 bp, Homo sapiens
gatgaatacctcaag

SEQ ID NO: 896020 - DNA, 15 bp, Homo sapiens
atgaatacctcaaga

SEQ ID NO: 896021 - DNA, 15 bp, Homo sapiens
tgaatacctcaagag

SEQ ID NO: 896022 - DNA, 15 bp, Homo sapiens
gaatacctcaagaga

SEQ ID NO: 896023 - DNA, 15 bp, Homo sapiens
aatacctcaagagac

SEQ ID NO: 896024 - DNA, 15 bp, Homo sapiens
atacctcaagagacg

SEQ ID NO: 896025 - DNA, 15 bp, Homo sapiens
tacctcaagagacgg

SEQ ID NO: 896026 - DNA, 15 bp, Homo sapiens
acctcaagagacggg

SEQ ID NO: 896027 - DNA, 15 bp, Homo sapiens
cctcaagagacgggg

SEQ ID NO: 896028 - DNA, 15 bp, Homo sapiens
ctcaagagacgggga

SEQ ID NO: 896029 - DNA, 15 bp, Homo sapiens
tcaagagacggggag

SEQ ID NO: 896030 - DNA, 15 bp, Homo sapiens
caagagacggggagc

SEQ ID NO: 896031 - DNA, 15 bp, Homo sapiens
aagagacggggagct

SEQ ID NO: 896032 - DNA, 15 bp, Homo sapiens
agagacggggagctc

SEQ ID NO: 896033 - DNA, 15 bp, Homo sapiens
gagacggggagctcc

SEQ ID NO: 896034 - DNA, 15 bp, Homo sapiens
agacggggagctcct

SEQ ID NO: 896035 - DNA, 15 bp, Homo sapiens
gacggggagctcctt

SEQ ID NO: 896036 - DNA, 15 bp, Homo sapiens
acggggagctccttg

SEQ ID NO: 896037 - DNA, 15 bp, Homo sapiens
cggggagctccttgc

SEQ ID NO: 896038 - DNA, 15 bp, Homo sapiens
ggggagctccttgcc

SEQ ID NO: 896039 - DNA, 15 bp, Homo sapiens
gggagctccttgcct

SEQ ID NO: 896040 - DNA, 15 bp, Homo sapiens
ggagctccttgcctc

SEQ ID NO: 896041 - DNA, 15 bp, Homo sapiens
gagctccttgcctca

SEQ ID NO: 896042 - DNA, 15 bp, Homo sapiens
agctccttgcctcac

SEQ ID NO: 896043 - DNA, 15 bp, Homo sapiens
gctccttgcctcact

SEQ ID NO: 896044 - DNA, 15 bp, Homo sapiens
ctccttgcctcactg

SEQ ID NO: 896045 - DNA, 15 bp, Homo sapiens
tccttgcctcactga

SEQ ID NO: 896046 - DNA, 15 bp, Homo sapiens
ccttgcctcactgaa

SEQ ID NO: 896047 - DNA, 15 bp, Homo sapiens
cttgcctcactgaac

SEQ ID NO: 896048 - DNA, 15 bp, Homo sapiens
ttgcctcactgaaca

SEQ ID NO: 896049 - DNA, 15 bp, Homo sapiens
tgcctcactgaacat

SEQ ID NO: 896050 - DNA, 15 bp, Homo sapiens
gcctcactgaacata

SEQ ID NO: 896051 - DNA, 15 bp, Homo sapiens
cctcactgaacatac

SEQ ID NO: 896052 - DNA, 15 bp, Homo sapiens
ctcactgaacataca

SEQ ID NO: 896053 - DNA, 15 bp, Homo sapiens
tcactgaacatacat

SEQ ID NO: 896054 - DNA, 15 bp, Homo sapiens
cactgaacatacatt

SEQ ID NO: 896055 - DNA, 15 bp, Homo sapiens
actgaacatacattt

SEQ ID NO: 896056 - DNA, 15 bp, Homo sapiens
ctgaacatacatttc

SEQ ID NO: 896057 - DNA, 15 bp, Homo sapiens
tgaacatacatttca

SEQ ID NO: 896058 - DNA, 15 bp, Homo sapiens
gaacatacatttcat

SEQ ID NO: 896059 - DNA, 15 bp, Homo sapiens
aacatacatttcatg

SEQ ID NO: 896060 - DNA, 15 bp, Homo sapiens
acatacatttcatgt

SEQ ID NO: 896061 - DNA, 15 bp, Homo sapiens
catacatttcatgtt

SEQ ID NO: 896062 - DNA, 15 bp, Homo sapiens
atacatttcatgttt

SEQ ID NO: 896063 - DNA, 15 bp, Homo sapiens
tacatttcatgtttg

SEQ ID NO: 896064 - DNA, 15 bp, Homo sapiens
acatttcatgtttga

SEQ ID NO: 896065 - DNA, 15 bp, Homo sapiens
catttcatgtttgag

SEQ ID NO: 896066 - DNA, 15 bp, Homo sapiens
atttcatgtttgagg

SEQ ID NO: 896067 - DNA, 15 bp, Homo sapiens
tttcatgtttgaggt

SEQ ID NO: 896068 - DNA, 15 bp, Homo sapiens
ttcatgtttgaggtt

SEQ ID NO: 896069 - DNA, 15 bp, Homo sapiens
tcatgtttgaggttt

SEQ ID NO: 896070 - DNA, 15 bp, Homo sapiens
catgtttgaggtttt

SEQ ID NO: 896071 - DNA, 15 bp, Homo sapiens
atgtttgaggttttc

SEQ ID NO: 896072 - DNA, 15 bp, Homo sapiens
tgtttgaggttttct

SEQ ID NO: 896073 - DNA, 15 bp, Homo sapiens
gtttgaggttttctg

SEQ ID NO: 896074 - DNA, 15 bp, Homo sapiens
tttgaggttttctga

SEQ ID NO: 896075 - DNA, 15 bp, Homo sapiens
ttgaggttttctgat

SEQ ID NO: 896076 - DNA, 15 bp, Homo sapiens
tgaggttttctgatg

SEQ ID NO: 896077 - DNA, 15 bp, Homo sapiens
gaggttttctgatgt

SEQ ID NO: 896078 - DNA, 15 bp, Homo sapiens
aggttttctgatgtg

SEQ ID NO: 896079 - DNA, 15 bp, Homo sapiens
ggttttctgatgtgt

SEQ ID NO: 896080 - DNA, 15 bp, Homo sapiens
gttttctgatgtgtc

SEQ ID NO: 896081 - DNA, 15 bp, Homo sapiens
ttttctgatgtgtct

SEQ ID NO: 896082 - DNA, 15 bp, Homo sapiens
tttctgatgtgtctg

SEQ ID NO: 896083 - DNA, 15 bp, Homo sapiens
ttctgatgtgtctgc

SEQ ID NO: 896084 - DNA, 15 bp, Homo sapiens
tctgatgtgtctgca

SEQ ID NO: 896085 - DNA, 15 bp, Homo sapiens
ctgatgtgtctgcat

SEQ ID NO: 896086 - DNA, 15 bp, Homo sapiens
tgatgtgtctgcatt

SEQ ID NO: 896087 - DNA, 15 bp, Homo sapiens
gatgtgtctgcattg

SEQ ID NO: 896088 - DNA, 15 bp, Homo sapiens
atgtgtctgcattga

SEQ ID NO: 896089 - DNA, 15 bp, Homo sapiens
tgtgtctgcattgag

SEQ ID NO: 896090 - DNA, 15 bp, Homo sapiens
gtgtctgcattgagc

SEQ ID NO: 896091 - DNA, 15 bp, Homo sapiens
tgtctgcattgagcc

SEQ ID NO: 896092 - DNA, 15 bp, Homo sapiens
gtctgcattgagcca

SEQ ID NO: 896093 - DNA, 15 bp, Homo sapiens
tctgcattgagccag

SEQ ID NO: 896094 - DNA, 15 bp, Homo sapiens
ctgcattgagccagc

SEQ ID NO: 896095 - DNA, 15 bp, Homo sapiens
tgcattgagccagca

SEQ ID NO: 896096 - DNA, 15 bp, Homo sapiens
gcattgagccagcat

SEQ ID NO: 896097 - DNA, 15 bp, Homo sapiens
cattgagccagcatc

SEQ ID NO: 896098 - DNA, 15 bp, Homo sapiens
attgagccagcatct

SEQ ID NO: 896099 - DNA, 15 bp, Homo sapiens
ttgagccagcatctg

SEQ ID NO: 896100 - DNA, 15 bp, Homo sapiens
tgagccagcatctgc

SEQ ID NO: 896101 - DNA, 15 bp, Homo sapiens
gagccagcatctgct

SEQ ID NO: 896102 - DNA, 15 bp, Homo sapiens
agccagcatctgctt

SEQ ID NO: 896103 - DNA, 15 bp, Homo sapiens
gccagcatctgcttc

SEQ ID NO: 896104 - DNA, 15 bp, Homo sapiens
ccagcatctgcttcc

SEQ ID NO: 896105 - DNA, 15 bp, Homo sapiens
cagcatctgcttccc

SEQ ID NO: 896106 - DNA, 15 bp, Homo sapiens
agcatctgcttccct

SEQ ID NO: 896107 - DNA, 15 bp, Homo sapiens
gcatctgcttccctg

SEQ ID NO: 896108 - DNA, 15 bp, Homo sapiens
catctgcttccctga

SEQ ID NO: 896109 - DNA, 15 bp, Homo sapiens
atctgcttccctgaa

SEQ ID NO: 896110 - DNA, 15 bp, Homo sapiens
tctgcttccctgaag

SEQ ID NO: 896111 - DNA, 15 bp, Homo sapiens
ctgcttccctgaagt

SEQ ID NO: 896112 - DNA, 15 bp, Homo sapiens
tgcttccctgaagtt

SEQ ID NO: 896113 - DNA, 15 bp, Homo sapiens
gcttccctgaagttc

SEQ ID NO: 896114 - DNA, 15 bp, Homo sapiens
cttccctgaagttct

SEQ ID NO: 896115 - DNA, 15 bp, Homo sapiens
ttccctgaagttctg

SEQ ID NO: 896116 - DNA, 15 bp, Homo sapiens
tccctgaagttctgc

SEQ ID NO: 896117 - DNA, 15 bp, Homo sapiens
ccctgaagttctgct

SEQ ID NO: 896118 - DNA, 15 bp, Homo sapiens
cctgaagttctgctc

SEQ ID NO: 896119 - DNA, 15 bp, Homo sapiens
ctgaagttctgctca

SEQ ID NO: 896120 - DNA, 15 bp, Homo sapiens
tgaagttctgctcag

SEQ ID NO: 896121 - DNA, 15 bp, Homo sapiens
gaagttctgctcagg

SEQ ID NO: 896122 - DNA, 15 bp, Homo sapiens
aagttctgctcagga

SEQ ID NO: 896123 - DNA, 15 bp, Homo sapiens
agttctgctcaggaa

SEQ ID NO: 896124 - DNA, 15 bp, Homo sapiens
gttctgctcaggaat

SEQ ID NO: 896125 - DNA, 15 bp, Homo sapiens
ttctgctcaggaatc

SEQ ID NO: 896126 - DNA, 15 bp, Homo sapiens
tctgctcaggaatct

SEQ ID NO: 896127 - DNA, 15 bp, Homo sapiens
ctgctcaggaatctc

SEQ ID NO: 896128 - DNA, 15 bp, Homo sapiens
tgctcaggaatctca

SEQ ID NO: 896129 - DNA, 15 bp, Homo sapiens
gctcaggaatctcag

SEQ ID NO: 896130 - DNA, 15 bp, Homo sapiens
ctcaggaatctcaga

SEQ ID NO: 896131 - DNA, 15 bp, Homo sapiens
tcaggaatctcagag

SEQ ID NO: 896132 - DNA, 15 bp, Homo sapiens
caggaatctcagaga

SEQ ID NO: 896133 - DNA, 15 bp, Homo sapiens
aggaatctcagagaa

SEQ ID NO: 896134 - DNA, 15 bp, Homo sapiens
ggaatctcagagaat

SEQ ID NO: 896135 - DNA, 15 bp, Homo sapiens
gaatctcagagaatg

SEQ ID NO: 896136 - DNA, 15 bp, Homo sapiens
aatctcagagaatgg

SEQ ID NO: 896137 - DNA, 15 bp, Homo sapiens
atctcagagaatggt

SEQ ID NO: 896138 - DNA, 15 bp, Homo sapiens
tctcagagaatggtc

SEQ ID NO: 896139 - DNA, 15 bp, Homo sapiens
ctcagagaatggtcc

SEQ ID NO: 896140 - DNA, 15 bp, Homo sapiens
tcagagaatggtcca

SEQ ID NO: 896141 - DNA, 15 bp, Homo sapiens
cagagaatggtccat

SEQ ID NO: 896142 - DNA, 15 bp, Homo sapiens
agagaatggtccatg

SEQ ID NO: 896143 - DNA, 15 bp, Homo sapiens
gagaatggtccatgc

SEQ ID NO: 896144 - DNA, 15 bp, Homo sapiens
agaatggtccatgcc

SEQ ID NO: 896145 - DNA, 15 bp, Homo sapiens
gaatggtccatgccc

SEQ ID NO: 896146 - DNA, 15 bp, Homo sapiens
aatggtccatgccct

SEQ ID NO: 896147 - DNA, 15 bp, Homo sapiens
atggtccatgccctt

SEQ ID NO: 896148 - DNA, 15 bp, Homo sapiens
tggtccatgcccttg

SEQ ID NO: 896149 - DNA, 15 bp, Homo sapiens
ggtccatgcccttgc

SEQ ID NO: 896150 - DNA, 15 bp, Homo sapiens
gtccatgcccttgct

SEQ ID NO: 896151 - DNA, 15 bp, Homo sapiens
tccatgcccttgctc

SEQ ID NO: 896152 - DNA, 15 bp, Homo sapiens
ccatgcccttgctcc

SEQ ID NO: 896153 - DNA, 15 bp, Homo sapiens
catgcccttgctcca

SEQ ID NO: 896154 - DNA, 15 bp, Homo sapiens
atgcccttgctccat

SEQ ID NO: 896155 - DNA, 15 bp, Homo sapiens
tgcccttgctccatg

SEQ ID NO: 896156 - DNA, 15 bp, Homo sapiens
gcccttgctccatga

SEQ ID NO: 896157 - DNA, 15 bp, Homo sapiens
cccttgctccatgac

SEQ ID NO: 896158 - DNA, 15 bp, Homo sapiens
ccttgctccatgaca

SEQ ID NO: 896159 - DNA, 15 bp, Homo sapiens
cttgctccatgacat

SEQ ID NO: 896160 - DNA, 15 bp, Homo sapiens
ttgctccatgacata

SEQ ID NO: 896161 - DNA, 15 bp, Homo sapiens
tgctccatgacatat

SEQ ID NO: 896162 - DNA, 15 bp, Homo sapiens
gctccatgacatatc

SEQ ID NO: 896163 - DNA, 15 bp, Homo sapiens
ctccatgacatatca

SEQ ID NO: 896164 - DNA, 15 bp, Homo sapiens
tccatgacatatcaa

SEQ ID NO: 896165 - DNA, 15 bp, Homo sapiens
ccatgacatatcaac

SEQ ID NO: 896166 - DNA, 15 bp, Homo sapiens
catgacatatcaacc

SEQ ID NO: 896167 - DNA, 15 bp, Homo sapiens
atgacatatcaacca

SEQ ID NO: 896168 - DNA, 15 bp, Homo sapiens
tgacatatcaaccac

SEQ ID NO: 896169 - DNA, 15 bp, Homo sapiens
gacatatcaaccact

SEQ ID NO: 896170 - DNA, 15 bp, Homo sapiens
acatatcaaccactt

SEQ ID NO: 896171 - DNA, 15 bp, Homo sapiens
catatcaaccacttg

SEQ ID NO: 896172 - DNA, 15 bp, Homo sapiens
atatcaaccacttga

SEQ ID NO: 896173 - DNA, 15 bp, Homo sapiens
tatcaaccacttgag

SEQ ID NO: 896174 - DNA, 15 bp, Homo sapiens
atcaaccacttgaga

SEQ ID NO: 896175 - DNA, 15 bp, Homo sapiens
tcaaccacttgagat

SEQ ID NO: 896176 - DNA, 15 bp, Homo sapiens
caaccacttgagatt

SEQ ID NO: 896177 - DNA, 15 bp, Homo sapiens
aaccacttgagattt

SEQ ID NO: 896178 - DNA, 15 bp, Homo sapiens
accacttgagatttt

SEQ ID NO: 896179 - DNA, 15 bp, Homo sapiens
ccacttgagatttta

SEQ ID NO: 896180 - DNA, 15 bp, Homo sapiens
cacttgagattttaa

SEQ ID NO: 896181 - DNA, 15 bp, Homo sapiens
acttgagattttaag

SEQ ID NO: 896182 - DNA, 15 bp, Homo sapiens
cttgagattttaagg

SEQ ID NO: 896183 - DNA, 15 bp, Homo sapiens
ttgagattttaagga

SEQ ID NO: 896184 - DNA, 15 bp, Homo sapiens
tgagattttaaggaa

SEQ ID NO: 896185 - DNA, 15 bp, Homo sapiens
gagattttaaggaaa

SEQ ID NO: 896186 - DNA, 15 bp, Homo sapiens
agattttaaggaaaa

SEQ ID NO: 896187 - DNA, 15 bp, Homo sapiens
gattttaaggaaaag

SEQ ID NO: 896188 - DNA, 15 bp, Homo sapiens
attttaaggaaaagc

SEQ ID NO: 896189 - DNA, 15 bp, Homo sapiens
ttttaaggaaaagct

SEQ ID NO: 896190 - DNA, 15 bp, Homo sapiens
tttaaggaaaagctg

SEQ ID NO: 896191 - DNA, 15 bp, Homo sapiens
ttaaggaaaagctgt

SEQ ID NO: 896192 - DNA, 15 bp, Homo sapiens
taaggaaaagctgtg

SEQ ID NO: 896193 - DNA, 15 bp, Homo sapiens
aaggaaaagctgtga

SEQ ID NO: 896194 - DNA, 15 bp, Homo sapiens
aggaaaagctgtgaa

SEQ ID NO: 896195 - DNA, 15 bp, Homo sapiens
ggaaaagctgtgaat

SEQ ID NO: 896196 - DNA, 15 bp, Homo sapiens
gaaaagctgtgaatt

SEQ ID NO: 896197 - DNA, 15 bp, Homo sapiens
aaaagctgtgaattc

SEQ ID NO: 896198 - DNA, 15 bp, Homo sapiens
aaagctgtgaattcc

SEQ ID NO: 896199 - DNA, 15 bp, Homo sapiens
aagctgtgaattcct

SEQ ID NO: 896200 - DNA, 15 bp, Homo sapiens
agctgtgaattccta

SEQ ID NO: 896201 - DNA, 15 bp, Homo sapiens
gctgtgaattcctaa

SEQ ID NO: 896202 - DNA, 15 bp, Homo sapiens
ctgtgaattcctaat

SEQ ID NO: 896203 - DNA, 15 bp, Homo sapiens
tgtgaattcctaatt

SEQ ID NO: 896204 - DNA, 15 bp, Homo sapiens
gtgaattcctaattc

SEQ ID NO: 896205 - DNA, 15 bp, Homo sapiens
tgaattcctaattcg

SEQ ID NO: 896206 - DNA, 15 bp, Homo sapiens
gaattcctaattcgt

SEQ ID NO: 896207 - DNA, 15 bp, Homo sapiens
aattcctaattcgtg

SEQ ID NO: 896208 - DNA, 15 bp, Homo sapiens
attcctaattcgtgt

SEQ ID NO: 896209 - DNA, 15 bp, Homo sapiens
ttcctaattcgtgtt

SEQ ID NO: 896210 - DNA, 15 bp, Homo sapiens
tcctaattcgtgttc

SEQ ID NO: 896211 - DNA, 15 bp, Homo sapiens
cctaattcgtgttct

SEQ ID NO: 896212 - DNA, 15 bp, Homo sapiens
ctaattcgtgttcta

SEQ ID NO: 896213 - DNA, 15 bp, Homo sapiens
taattcgtgttctat

SEQ ID NO: 896214 - DNA, 15 bp, Homo sapiens
aattcgtgttctatt

SEQ ID NO: 896215 - DNA, 15 bp, Homo sapiens
attcgtgttctattt

SEQ ID NO: 896216 - DNA, 15 bp, Homo sapiens
ttcgtgttctatttg

SEQ ID NO: 896217 - DNA, 15 bp, Homo sapiens
tcgtgttctatttgg

SEQ ID NO: 896218 - DNA, 15 bp, Homo sapiens
cgtgttctatttgga

SEQ ID NO: 896219 - DNA, 15 bp, Homo sapiens
gtgttctatttggaa

SEQ ID NO: 896220 - DNA, 15 bp, Homo sapiens
tgttctatttggaac

SEQ ID NO: 896221 - DNA, 15 bp, Homo sapiens
gttctatttggaaca

SEQ ID NO: 896222 - DNA, 15 bp, Homo sapiens
ttctatttggaacaa

SEQ ID NO: 896223 - DNA, 15 bp, Homo sapiens
tctatttggaacaaa

SEQ ID NO: 896224 - DNA, 15 bp, Homo sapiens
ctatttggaacaaag

SEQ ID NO: 896225 - DNA, 15 bp, Homo sapiens
tatttggaacaaaga

SEQ ID NO: 896226 - DNA, 15 bp, Homo sapiens
atttggaacaaagac

SEQ ID NO: 896227 - DNA, 15 bp, Homo sapiens
tttggaacaaagaca

SEQ ID NO: 896228 - DNA, 15 bp, Homo sapiens
ttggaacaaagacac

SEQ ID NO: 896229 - DNA, 15 bp, Homo sapiens
tggaacaaagacact

SEQ ID NO: 896230 - DNA, 15 bp, Homo sapiens
ggaacaaagacactc

SEQ ID NO: 896231 - DNA, 15 bp, Homo sapiens
gaacaaagacactca

SEQ ID NO: 896232 - DNA, 15 bp, Homo sapiens
aacaaagacactcag

SEQ ID NO: 896233 - DNA, 15 bp, Homo sapiens
acaaagacactcagt

SEQ ID NO: 896234 - DNA, 15 bp, Homo sapiens
caaagacactcagtt

SEQ ID NO: 896235 - DNA, 15 bp, Homo sapiens
aaagacactcagttc

SEQ ID NO: 896236 - DNA, 15 bp, Homo sapiens
aagacactcagttcc

SEQ ID NO: 896237 - DNA, 15 bp, Homo sapiens
agacactcagttccc

SEQ ID NO: 896238 - DNA, 15 bp, Homo sapiens
gacactcagttcccc

SEQ ID NO: 896239 - DNA, 15 bp, Homo sapiens
acactcagttccccc

SEQ ID NO: 896240 - DNA, 15 bp, Homo sapiens
cactcagttccccca

SEQ ID NO: 896241 - DNA, 15 bp, Homo sapiens
actcagttcccccag

SEQ ID NO: 896242 - DNA, 15 bp, Homo sapiens
ctcagttcccccagc

SEQ ID NO: 896243 - DNA, 15 bp, Homo sapiens
tcagttcccccagcc

SEQ ID NO: 896244 - DNA, 15 bp, Homo sapiens
cagttcccccagcct

SEQ ID NO: 896245 - DNA, 15 bp, Homo sapiens
agttcccccagcctg

SEQ ID NO: 896246 - DNA, 15 bp, Homo sapiens
gttcccccagcctgt

SEQ ID NO: 896247 - DNA, 15 bp, Homo sapiens
ttcccccagcctgtc

SEQ ID NO: 896248 - DNA, 15 bp, Homo sapiens
tcccccagcctgtcc

SEQ ID NO: 896249 - DNA, 15 bp, Homo sapiens
cccccagcctgtcct

SEQ ID NO: 896250 - DNA, 15 bp, Homo sapiens
ccccagcctgtcctt

SEQ ID NO: 896251 - DNA, 15 bp, Homo sapiens
cccagcctgtcctta

SEQ ID NO: 896252 - DNA, 15 bp, Homo sapiens
ccagcctgtccttag

SEQ ID NO: 896253 - DNA, 15 bp, Homo sapiens
cagcctgtccttagg

SEQ ID NO: 896254 - DNA, 15 bp, Homo sapiens
agcctgtccttagga

SEQ ID NO: 896255 - DNA, 15 bp, Homo sapiens
gcctgtccttaggat

SEQ ID NO: 896256 - DNA, 15 bp, Homo sapiens
cctgtccttaggata

SEQ ID NO: 896257 - DNA, 15 bp, Homo sapiens
ctgtccttaggataa

SEQ ID NO: 896258 - DNA, 15 bp, Homo sapiens
tgtccttaggataag

SEQ ID NO: 896259 - DNA, 15 bp, Homo sapiens
gtccttaggataagt

SEQ ID NO: 896260 - DNA, 15 bp, Homo sapiens
tccttaggataagtc

SEQ ID NO: 896261 - DNA, 15 bp, Homo sapiens
ccttaggataagtct

SEQ ID NO: 896262 - DNA, 15 bp, Homo sapiens
cttaggataagtctc

SEQ ID NO: 896263 - DNA, 15 bp, Homo sapiens
ttaggataagtctca

SEQ ID NO: 896264 - DNA, 15 bp, Homo sapiens
taggataagtctcag

SEQ ID NO: 896265 - DNA, 15 bp, Homo sapiens
aggataagtctcaga

SEQ ID NO: 896266 - DNA, 15 bp, Homo sapiens
ggataagtctcagac

SEQ ID NO: 896267 - DNA, 15 bp, Homo sapiens
gataagtctcagacc

SEQ ID NO: 896268 - DNA, 15 bp, Homo sapiens
ataagtctcagacct

SEQ ID NO: 896269 - DNA, 15 bp, Homo sapiens
taagtctcagacctg

SEQ ID NO: 896270 - DNA, 15 bp, Homo sapiens
aagtctcagacctgt

SEQ ID NO: 896271 - DNA, 15 bp, Homo sapiens
agtctcagacctgtg

SEQ ID NO: 896272 - DNA, 15 bp, Homo sapiens
gtctcagacctgtgc

SEQ ID NO: 896273 - DNA, 15 bp, Homo sapiens
tctcagacctgtgct

SEQ ID NO: 896274 - DNA, 15 bp, Homo sapiens
ctcagacctgtgctc

SEQ ID NO: 896275 - DNA, 15 bp, Homo sapiens
tcagacctgtgctct

SEQ ID NO: 896276 - DNA, 15 bp, Homo sapiens
cagacctgtgctctg

SEQ ID NO: 896277 - DNA, 15 bp, Homo sapiens
agacctgtgctctgg

SEQ ID NO: 896278 - DNA, 15 bp, Homo sapiens
gacctgtgctctggg

SEQ ID NO: 896279 - DNA, 15 bp, Homo sapiens
acctgtgctctgggc

SEQ ID NO: 896280 - DNA, 15 bp, Homo sapiens
cctgtgctctgggca

SEQ ID NO: 896281 - DNA, 15 bp, Homo sapiens
ctgtgctctgggcac

SEQ ID NO: 896282 - DNA, 15 bp, Homo sapiens
tgtgctctgggcacg

SEQ ID NO: 896283 - DNA, 15 bp, Homo sapiens
gtgctctgggcacgt

SEQ ID NO: 896284 - DNA, 15 bp, Homo sapiens
tgctctgggcacgtt

SEQ ID NO: 896285 - DNA, 15 bp, Homo sapiens
gctctgggcacgttc

SEQ ID NO: 896286 - DNA, 15 bp, Homo sapiens
ctctgggcacgttcc

SEQ ID NO: 896287 - DNA, 15 bp, Homo sapiens
tctgggcacgttcca

SEQ ID NO: 896288 - DNA, 15 bp, Homo sapiens
ctgggcacgttccag

SEQ ID NO: 896289 - DNA, 15 bp, Homo sapiens
tgggcacgttccagc

SEQ ID NO: 896290 - DNA, 15 bp, Homo sapiens
gggcacgttccagca

SEQ ID NO: 896291 - DNA, 15 bp, Homo sapiens
ggcacgttccagcag

SEQ ID NO: 896292 - DNA, 15 bp, Homo sapiens
gcacgttccagcagc

SEQ ID NO: 896293 - DNA, 15 bp, Homo sapiens
cacgttccagcagct

SEQ ID NO: 896294 - DNA, 15 bp, Homo sapiens
acgttccagcagctg

SEQ ID NO: 896295 - DNA, 15 bp, Homo sapiens
cgttccagcagctga

SEQ ID NO: 896296 - DNA, 15 bp, Homo sapiens
taggactcaagagga

SEQ ID NO: 896297 - DNA, 15 bp, Homo sapiens
aggactcaagaggag

SEQ ID NO: 896298 - DNA, 15 bp, Homo sapiens
ggactcaagaggaga

SEQ ID NO: 896299 - DNA, 15 bp, Homo sapiens
gactcaagaggagag

SEQ ID NO: 896300 - DNA, 15 bp, Homo sapiens
actcaagaggagaga

SEQ ID NO: 896301 - DNA, 15 bp, Homo sapiens
ctcaagaggagagag

SEQ ID NO: 896302 - DNA, 15 bp, Homo sapiens
tcaagaggagagagc

SEQ ID NO: 896303 - DNA, 15 bp, Homo sapiens
caagaggagagagct

SEQ ID NO: 896304 - DNA, 15 bp, Homo sapiens
aagaggagagagctc

SEQ ID NO: 896305 - DNA, 15 bp, Homo sapiens
agaggagagagctca

SEQ ID NO: 896306 - DNA, 15 bp, Homo sapiens
gaggagagagctcat

SEQ ID NO: 896307 - DNA, 15 bp, Homo sapiens
aggagagagctcatg

SEQ ID NO: 896308 - DNA, 15 bp, Homo sapiens
ggagagagctcatgc

SEQ ID NO: 896309 - DNA, 15 bp, Homo sapiens
gagagagctcatgca

SEQ ID NO: 896310 - DNA, 15 bp, Homo sapiens
agagagctcatgcat

SEQ ID NO: 896311 - DNA, 15 bp, Homo sapiens
gagagctcatgcatg

SEQ ID NO: 896312 - DNA, 15 bp, Homo sapiens
agagctcatgcatga

SEQ ID NO: 896313 - DNA, 15 bp, Homo sapiens
gagctcatgcatgaa

SEQ ID NO: 896314 - DNA, 15 bp, Homo sapiens
agctcatgcatgaac

SEQ ID NO: 896315 - DNA, 15 bp, Homo sapiens
gctcatgcatgaaca

SEQ ID NO: 896316 - DNA, 15 bp, Homo sapiens
ctcatgcatgaacag

SEQ ID NO: 896317 - DNA, 15 bp, Homo sapiens
tcatgcatgaacagt

SEQ ID NO: 896318 - DNA, 15 bp, Homo sapiens
catgcatgaacagtg

SEQ ID NO: 896319 - DNA, 15 bp, Homo sapiens
atgcatgaacagtgc

SEQ ID NO: 896320 - DNA, 15 bp, Homo sapiens
tgcatgaacagtgcc

SEQ ID NO: 896321 - DNA, 15 bp, Homo sapiens
gcatgaacagtgcct

SEQ ID NO: 896322 - DNA, 15 bp, Homo sapiens
catgaacagtgccta

SEQ ID NO: 896323 - DNA, 15 bp, Homo sapiens
atgaacagtgcctag

SEQ ID NO: 896324 - DNA, 15 bp, Homo sapiens
tgaacagtgcctagc

SEQ ID NO: 896325 - DNA, 15 bp, Homo sapiens
gaacagtgcctagca

SEQ ID NO: 896326 - DNA, 15 bp, Homo sapiens
aacagtgcctagcag

SEQ ID NO: 896327 - DNA, 15 bp, Homo sapiens
acagtgcctagcagg

SEQ ID NO: 896328 - DNA, 15 bp, Homo sapiens
cagtgcctagcaggg

SEQ ID NO: 896329 - DNA, 15 bp, Homo sapiens
agtgcctagcaggga

SEQ ID NO: 896330 - DNA, 15 bp, Homo sapiens
gtgcctagcagggaa

SEQ ID NO: 896331 - DNA, 15 bp, Homo sapiens
tgcctagcagggaag

SEQ ID NO: 896332 - DNA, 15 bp, Homo sapiens
gcctagcagggaaga

SEQ ID NO: 896333 - DNA, 15 bp, Homo sapiens
cctagcagggaagaa

SEQ ID NO: 896334 - DNA, 15 bp, Homo sapiens
ctagcagggaagaat

SEQ ID NO: 896335 - DNA, 15 bp, Homo sapiens
tagcagggaagaatt

SEQ ID NO: 896336 - DNA, 15 bp, Homo sapiens
agcagggaagaattg

SEQ ID NO: 896337 - DNA, 15 bp, Homo sapiens
gcagggaagaattgg

SEQ ID NO: 896338 - DNA, 15 bp, Homo sapiens
cagggaagaattggc

SEQ ID NO: 896339 - DNA, 15 bp, Homo sapiens
agggaagaattggca

SEQ ID NO: 896340 - DNA, 15 bp, Homo sapiens
gggaagaattggcac

SEQ ID NO: 896341 - DNA, 15 bp, Homo sapiens
ggaagaattggcacc

SEQ ID NO: 896342 - DNA, 15 bp, Homo sapiens
gaagaattggcaccg

SEQ ID NO: 896343 - DNA, 15 bp, Homo sapiens
aagaattggcaccgg

SEQ ID NO: 896344 - DNA, 15 bp, Homo sapiens
agaattggcaccggg

SEQ ID NO: 896345 - DNA, 15 bp, Homo sapiens
gaattggcaccgggg

SEQ ID NO: 896346 - DNA, 15 bp, Homo sapiens
aattggcaccgggga

SEQ ID NO: 896347 - DNA, 15 bp, Homo sapiens
attggcaccggggag

SEQ ID NO: 896348 - DNA, 15 bp, Homo sapiens
ttggcaccggggaga

SEQ ID NO: 896349 - DNA, 15 bp, Homo sapiens
tggcaccggggagaa

SEQ ID NO: 896350 - DNA, 15 bp, Homo sapiens
ggcaccggggagaag

SEQ ID NO: 896351 - DNA, 15 bp, Homo sapiens
gcaccggggagaaga

SEQ ID NO: 896352 - DNA, 15 bp, Homo sapiens
caccggggagaagaa

SEQ ID NO: 896353 - DNA, 15 bp, Homo sapiens
accggggagaagaac

SEQ ID NO: 896354 - DNA, 15 bp, Homo sapiens
ccggggagaagaaca

SEQ ID NO: 896355 - DNA, 15 bp, Homo sapiens
cggggagaagaacag

SEQ ID NO: 896356 - DNA, 15 bp, Homo sapiens
ggggagaagaacaga

SEQ ID NO: 896357 - DNA, 15 bp, Homo sapiens
gggagaagaacagag

SEQ ID NO: 896358 - DNA, 15 bp, Homo sapiens
ggagaagaacagagg

SEQ ID NO: 896359 - DNA, 15 bp, Homo sapiens
gagaagaacagagga

SEQ ID NO: 896360 - DNA, 15 bp, Homo sapiens
agaagaacagaggaa

SEQ ID NO: 896361 - DNA, 15 bp, Homo sapiens
gaagaacagaggaag

SEQ ID NO: 896362 - DNA, 15 bp, Homo sapiens
aagaacagaggaagt

SEQ ID NO: 896363 - DNA, 15 bp, Homo sapiens
agaacagaggaagtt

SEQ ID NO: 896364 - DNA, 15 bp, Homo sapiens
gaacagaggaagtta

SEQ ID NO: 896365 - DNA, 15 bp, Homo sapiens
aacagaggaagttac

SEQ ID NO: 896366 - DNA, 15 bp, Homo sapiens
acagaggaagttaca

SEQ ID NO: 896367 - DNA, 15 bp, Homo sapiens
cagaggaagttacag

SEQ ID NO: 896368 - DNA, 15 bp, Homo sapiens
agaggaagttacagg

SEQ ID NO: 896369 - DNA, 15 bp, Homo sapiens
gaggaagttacaggg

SEQ ID NO: 896370 - DNA, 15 bp, Homo sapiens
aggaagttacagggg

SEQ ID NO: 896371 - DNA, 15 bp, Homo sapiens
ggaagttacaggggt

SEQ ID NO: 896372 - DNA, 15 bp, Homo sapiens
gaagttacaggggtt

SEQ ID NO: 896373 - DNA, 15 bp, Homo sapiens
aagttacaggggtta

SEQ ID NO: 896374 - DNA, 15 bp, Homo sapiens
agttacaggggttag

SEQ ID NO: 896375 - DNA, 15 bp, Homo sapiens
gttacaggggttaga

SEQ ID NO: 896376 - DNA, 15 bp, Homo sapiens
ttacaggggttagag

SEQ ID NO: 896377 - DNA, 15 bp, Homo sapiens
tacaggggttagagg

SEQ ID NO: 896378 - DNA, 15 bp, Homo sapiens
acaggggttagagga

SEQ ID NO: 896379 - DNA, 15 bp, Homo sapiens
caggggttagaggag

SEQ ID NO: 896380 - DNA, 15 bp, Homo sapiens
aggggttagaggagg

SEQ ID NO: 896381 - DNA, 15 bp, Homo sapiens
ggggttagaggaggg

SEQ ID NO: 896382 - DNA, 15 bp, Homo sapiens
gggttagaggagggg

SEQ ID NO: 896383 - DNA, 15 bp, Homo sapiens
ggttagaggaggggg

SEQ ID NO: 896384 - DNA, 15 bp, Homo sapiens
gttagaggaggggga

SEQ ID NO: 896385 - DNA, 15 bp, Homo sapiens
ttagaggagggggat

SEQ ID NO: 896386 - DNA, 15 bp, Homo sapiens
tagaggagggggatg

SEQ ID NO: 896387 - DNA, 15 bp, Homo sapiens
agaggagggggatgt

SEQ ID NO: 896388 - DNA, 15 bp, Homo sapiens
gaggagggggatgtt

SEQ ID NO: 896389 - DNA, 15 bp, Homo sapiens
aggagggggatgttt

SEQ ID NO: 896390 - DNA, 15 bp, Homo sapiens
ggagggggatgtttt

SEQ ID NO: 896391 - DNA, 15 bp, Homo sapiens
gagggggatgttttc

SEQ ID NO: 896392 - DNA, 15 bp, Homo sapiens
agggggatgttttcc

SEQ ID NO: 896393 - DNA, 15 bp, Homo sapiens
gggggatgttttcca

SEQ ID NO: 896394 - DNA, 15 bp, Homo sapiens
ggggatgttttccag

SEQ ID NO: 896395 - DNA, 15 bp, Homo sapiens
gggatgttttccagc

SEQ ID NO: 896396 - DNA, 15 bp, Homo sapiens
ggatgttttccagct

SEQ ID NO: 896397 - DNA, 15 bp, Homo sapiens
gatgttttccagctg

SEQ ID NO: 896398 - DNA, 15 bp, Homo sapiens
atgttttccagctga

SEQ ID NO: 896399 - DNA, 15 bp, Homo sapiens
tgttttccagctgac

SEQ ID NO: 896400 - DNA, 15 bp, Homo sapiens
gttttccagctgaca

SEQ ID NO: 896401 - DNA, 15 bp, Homo sapiens
ttttccagctgacaa

SEQ ID NO: 896402 - DNA, 15 bp, Homo sapiens
tttccagctgacaat

SEQ ID NO: 896403 - DNA, 15 bp, Homo sapiens
ttccagctgacaatg

SEQ ID NO: 896404 - DNA, 15 bp, Homo sapiens
tccagctgacaatga

SEQ ID NO: 896405 - DNA, 15 bp, Homo sapiens
ccagctgacaatgat

SEQ ID NO: 896406 - DNA, 15 bp, Homo sapiens
cagctgacaatgatg

SEQ ID NO: 896407 - DNA, 15 bp, Homo sapiens
agctgacaatgatgg

SEQ ID NO: 896408 - DNA, 15 bp, Homo sapiens
gctgacaatgatggg

SEQ ID NO: 896409 - DNA, 15 bp, Homo sapiens
ctgacaatgatgggg

SEQ ID NO: 896410 - DNA, 15 bp, Homo sapiens
tgacaatgatggggg

SEQ ID NO: 896411 - DNA, 15 bp, Homo sapiens
gacaatgatgggggt

SEQ ID NO: 896412 - DNA, 15 bp, Homo sapiens
acaatgatgggggta

SEQ ID NO: 896413 - DNA, 15 bp, Homo sapiens
caatgatgggggtat

SEQ ID NO: 896414 - DNA, 15 bp, Homo sapiens
aatgatgggggtatc

SEQ ID NO: 896415 - DNA, 15 bp, Homo sapiens
atgatgggggtatca

SEQ ID NO: 896416 - DNA, 15 bp, Homo sapiens
tgatgggggtatcag

SEQ ID NO: 896417 - DNA, 15 bp, Homo sapiens
gatgggggtatcaga

SEQ ID NO: 896418 - DNA, 15 bp, Homo sapiens
atgggggtatcagaa

SEQ ID NO: 896419 - DNA, 15 bp, Homo sapiens
tgggggtatcagaaa

SEQ ID NO: 896420 - DNA, 15 bp, Homo sapiens
gggggtatcagaaag

SEQ ID NO: 896421 - DNA, 15 bp, Homo sapiens
ggggtatcagaaagg

SEQ ID NO: 896422 - DNA, 15 bp, Homo sapiens
gggtatcagaaaggc

SEQ ID NO: 896423 - DNA, 15 bp, Homo sapiens
ggtatcagaaaggct

SEQ ID NO: 896424 - DNA, 15 bp, Homo sapiens
gtatcagaaaggctc

SEQ ID NO: 896425 - DNA, 15 bp, Homo sapiens
tatcagaaaggctct

SEQ ID NO: 896426 - DNA, 15 bp, Homo sapiens
atcagaaaggctctt

SEQ ID NO: 896427 - DNA, 15 bp, Homo sapiens
tcagaaaggctcttg

SEQ ID NO: 896428 - DNA, 15 bp, Homo sapiens
cagaaaggctcttgg

SEQ ID NO: 896429 - DNA, 15 bp, Homo sapiens
agaaaggctcttggt

SEQ ID NO: 896430 - DNA, 15 bp, Homo sapiens
gaaaggctcttggtg

SEQ ID NO: 896431 - DNA, 15 bp, Homo sapiens
aaaggctcttggtga

SEQ ID NO: 896432 - DNA, 15 bp, Homo sapiens
aaggctcttggtgag

SEQ ID NO: 896433 - DNA, 15 bp, Homo sapiens
aggctcttggtgaga

SEQ ID NO: 896434 - DNA, 15 bp, Homo sapiens
ggctcttggtgagat

SEQ ID NO: 896435 - DNA, 15 bp, Homo sapiens
gctcttggtgagatt

SEQ ID NO: 896436 - DNA, 15 bp, Homo sapiens
ctcttggtgagattg

SEQ ID NO: 896437 - DNA, 15 bp, Homo sapiens
tcttggtgagattgc

SEQ ID NO: 896438 - DNA, 15 bp, Homo sapiens
cttggtgagattgca

SEQ ID NO: 896439 - DNA, 15 bp, Homo sapiens
ttggtgagattgcac

SEQ ID NO: 896440 - DNA, 15 bp, Homo sapiens
tggtgagattgcacc

SEQ ID NO: 896441 - DNA, 15 bp, Homo sapiens
ggtgagattgcacca

SEQ ID NO: 896442 - DNA, 15 bp, Homo sapiens
gtgagattgcaccat

SEQ ID NO: 896443 - DNA, 15 bp, Homo sapiens
tgagattgcaccatt

SEQ ID NO: 896444 - DNA, 15 bp, Homo sapiens
gagattgcaccattg

SEQ ID NO: 896445 - DNA, 15 bp, Homo sapiens
agattgcaccattgc

SEQ ID NO: 896446 - DNA, 15 bp, Homo sapiens
gattgcaccattgca

SEQ ID NO: 896447 - DNA, 15 bp, Homo sapiens
attgcaccattgcac

SEQ ID NO: 896448 - DNA, 15 bp, Homo sapiens
ttgcaccattgcact

SEQ ID NO: 896449 - DNA, 15 bp, Homo sapiens
tgcaccattgcactc

SEQ ID NO: 896450 - DNA, 15 bp, Homo sapiens
gcaccattgcactcc

SEQ ID NO: 896451 - DNA, 15 bp, Homo sapiens
caccattgcactcca

SEQ ID NO: 896452 - DNA, 15 bp, Homo sapiens
accattgcactccag

SEQ ID NO: 896453 - DNA, 15 bp, Homo sapiens
ccattgcactccagc

SEQ ID NO: 896454 - DNA, 15 bp, Homo sapiens
cattgcactccagcc

SEQ ID NO: 896455 - DNA, 15 bp, Homo sapiens
attgcactccagcct

SEQ ID NO: 896456 - DNA, 15 bp, Homo sapiens
ttgcactccagcctg

SEQ ID NO: 896457 - DNA, 15 bp, Homo sapiens
tgcactccagcctgg

SEQ ID NO: 896458 - DNA, 15 bp, Homo sapiens
gcactccagcctggc

SEQ ID NO: 896459 - DNA, 15 bp, Homo sapiens
cactccagcctggca

SEQ ID NO: 896460 - DNA, 15 bp, Homo sapiens
actccagcctggcaa

SEQ ID NO: 896461 - DNA, 15 bp, Homo sapiens
ctccagcctggcaac

SEQ ID NO: 896462 - DNA, 15 bp, Homo sapiens
tccagcctggcaaca

SEQ ID NO: 896463 - DNA, 15 bp, Homo sapiens
ccagcctggcaacaa

SEQ ID NO: 896464 - DNA, 15 bp, Homo sapiens
cagcctggcaacaag

SEQ ID NO: 896465 - DNA, 15 bp, Homo sapiens
agcctggcaacaaga

SEQ ID NO: 896466 - DNA, 15 bp, Homo sapiens
gcctggcaacaagag

SEQ ID NO: 896467 - DNA, 15 bp, Homo sapiens
cctggcaacaagagt

SEQ ID NO: 896468 - DNA, 15 bp, Homo sapiens
ctggcaacaagagtg

SEQ ID NO: 896469 - DNA, 15 bp, Homo sapiens
tggcaacaagagtga

SEQ ID NO: 896470 - DNA, 15 bp, Homo sapiens
ggcaacaagagtgaa

SEQ ID NO: 896471 - DNA, 15 bp, Homo sapiens
gcaacaagagtgaaa

SEQ ID NO: 896472 - DNA, 15 bp, Homo sapiens
caacaagagtgaaac

SEQ ID NO: 896473 - DNA, 15 bp, Homo sapiens
aacaagagtgaaact

SEQ ID NO: 896474 - DNA, 15 bp, Homo sapiens
acaagagtgaaactc

SEQ ID NO: 896475 - DNA, 15 bp, Homo sapiens
caagagtgaaactcc

SEQ ID NO: 896476 - DNA, 15 bp, Homo sapiens
aagagtgaaactcca

SEQ ID NO: 896477 - DNA, 15 bp, Homo sapiens
agagtgaaactccat

SEQ ID NO: 896478 - DNA, 15 bp, Homo sapiens
gagtgaaactccatc

SEQ ID NO: 896479 - DNA, 15 bp, Homo sapiens
agtgaaactccatct

SEQ ID NO: 896480 - DNA, 15 bp, Homo sapiens
gtgaaactccatctc

SEQ ID NO: 896481 - DNA, 15 bp, Homo sapiens
tgaaactccatctca

SEQ ID NO: 896482 - DNA, 15 bp, Homo sapiens
gaaactccatctcaa

SEQ ID NO: 896483 - DNA, 15 bp, Homo sapiens
aaactccatctcaaa

SEQ ID NO: 896484 - DNA, 15 bp, Homo sapiens
aactccatctcaaaa

SEQ ID NO: 896485 - DNA, 15 bp, Homo sapiens
actccatctcaaaaa

SEQ ID NO: 896486 - DNA, 15 bp, Homo sapiens
ctccatctcaaaaaa

SEQ ID NO: 896487 - DNA, 15 bp, Homo sapiens
tccatctcaaaaaaa

SEQ ID NO: 896488 - DNA, 15 bp, Homo sapiens
ccatctcaaaaaaaa

SEQ ID NO: 896489 - DNA, 15 bp, Homo sapiens
catctcaaaaaaaaa

SEQ ID NO: 896490 - DNA, 15 bp, Homo sapiens
atctcaaaaaaaaaa

SEQ ID NO: 896491 - DNA, 15 bp, Homo sapiens
tctcaaaaaaaaaaa

SEQ ID NO: 896492 - DNA, 15 bp, Homo sapiens
ctcaaaaaaaaaaaa

SEQ ID NO: 896493 - DNA, 15 bp, Homo sapiens
tcaaaaaaaaaaaaa

SEQ ID NO: 896494 - DNA, 15 bp, Homo sapiens
caaaaaaaaaaaaaa

SEQ ID NO: 896495 - DNA, 15 bp, Homo sapiens
aaaaaaaaaaaaaaa

SEQ ID NO: 896496 - DNA, 15 bp, Homo sapiens
aaaaaaaaaaaaaag

SEQ ID NO: 896497 - DNA, 15 bp, Homo sapiens
aaaaaaaaaaaaaga

SEQ ID NO: 896498 - DNA, 15 bp, Homo sapiens
aaaaaaaaaaaagaa

SEQ ID NO: 896499 - DNA, 15 bp, Homo sapiens
aaaaaaaaaaagaaa

SEQ ID NO: 896500 - DNA, 15 bp, Homo sapiens
aaaaaaaaaagaaag

SEQ ID NO: 896501 - DNA, 15 bp, Homo sapiens
aaaaaaaaagaaagg

SEQ ID NO: 896502 - DNA, 15 bp, Homo sapiens
aaaaaaaagaaaggc

SEQ ID NO: 896503 - DNA, 15 bp, Homo sapiens
aaaaaaagaaaggct

SEQ ID NO: 896504 - DNA, 15 bp, Homo sapiens
aaaaaagaaaggctc

SEQ ID NO: 896505 - DNA, 15 bp, Homo sapiens
aaaaagaaaggctct

SEQ ID NO: 896506 - DNA, 15 bp, Homo sapiens
aaaagaaaggctctt

SEQ ID NO: 896507 - DNA, 15 bp, Homo sapiens
aaagaaaggctcttg

SEQ ID NO: 896508 - DNA, 15 bp, Homo sapiens
aagaaaggctcttgg

SEQ ID NO: 896509 - DNA, 15 bp, Homo sapiens
agaaaggctcttgga

SEQ ID NO: 896510 - DNA, 15 bp, Homo sapiens
gaaaggctcttggat

SEQ ID NO: 896511 - DNA, 15 bp, Homo sapiens
aaaggctcttggatt

SEQ ID NO: 896512 - DNA, 15 bp, Homo sapiens
aaggctcttggatta

SEQ ID NO: 896513 - DNA, 15 bp, Homo sapiens
aggctcttggattag

SEQ ID NO: 896514 - DNA, 15 bp, Homo sapiens
ggctcttggattagg

SEQ ID NO: 896515 - DNA, 15 bp, Homo sapiens
gctcttggattaggc

SEQ ID NO: 896516 - DNA, 15 bp, Homo sapiens
ctcttggattaggct

SEQ ID NO: 896517 - DNA, 15 bp, Homo sapiens
tcttggattaggctt

SEQ ID NO: 896518 - DNA, 15 bp, Homo sapiens
cttggattaggcttt

SEQ ID NO: 896519 - DNA, 15 bp, Homo sapiens
ttggattaggctttt

SEQ ID NO: 896520 - DNA, 15 bp, Homo sapiens
tggattaggctttta

SEQ ID NO: 896521 - DNA, 15 bp, Homo sapiens
ggattaggcttttaa

SEQ ID NO: 896522 - DNA, 15 bp, Homo sapiens
gattaggcttttaac

SEQ ID NO: 896523 - DNA, 15 bp, Homo sapiens
attaggcttttaaca

SEQ ID NO: 896524 - DNA, 15 bp, Homo sapiens
ttaggcttttaacat

SEQ ID NO: 896525 - DNA, 15 bp, Homo sapiens
taggcttttaacatc

SEQ ID NO: 896526 - DNA, 15 bp, Homo sapiens
aggcttttaacatca

SEQ ID NO: 896527 - DNA, 15 bp, Homo sapiens
ggcttttaacatcag

SEQ ID NO: 896528 - DNA, 15 bp, Homo sapiens
gcttttaacatcagg

SEQ ID NO: 896529 - DNA, 15 bp, Homo sapiens
cttttaacatcaggc

SEQ ID NO: 896530 - DNA, 15 bp, Homo sapiens
ttttaacatcaggca

SEQ ID NO: 896531 - DNA, 15 bp, Homo sapiens
tttaacatcaggcag

SEQ ID NO: 896532 - DNA, 15 bp, Homo sapiens
ttaacatcaggcagg

SEQ ID NO: 896533 - DNA, 15 bp, Homo sapiens
taacatcaggcaggc

SEQ ID NO: 896534 - DNA, 15 bp, Homo sapiens
aacatcaggcaggcg

SEQ ID NO: 896535 - DNA, 15 bp, Homo sapiens
acatcaggcaggcgc

SEQ ID NO: 896536 - DNA, 15 bp, Homo sapiens
catcaggcaggcgca

SEQ ID NO: 896537 - DNA, 15 bp, Homo sapiens
atcaggcaggcgcag

SEQ ID NO: 896538 - DNA, 15 bp, Homo sapiens
tcaggcaggcgcagg

SEQ ID NO: 896539 - DNA, 15 bp, Homo sapiens
caggcaggcgcagga

SEQ ID NO: 896540 - DNA, 15 bp, Homo sapiens
aggcaggcgcaggat

SEQ ID NO: 896541 - DNA, 15 bp, Homo sapiens
ggcaggcgcaggatg

SEQ ID NO: 896542 - DNA, 15 bp, Homo sapiens
gcaggcgcaggatgc

SEQ ID NO: 896543 - DNA, 15 bp, Homo sapiens
caggcgcaggatgca

SEQ ID NO: 896544 - DNA, 15 bp, Homo sapiens
aggcgcaggatgcaa

SEQ ID NO: 896545 - DNA, 15 bp, Homo sapiens
ggcgcaggatgcaag

SEQ ID NO: 896546 - DNA, 15 bp, Homo sapiens
gcgcaggatgcaagg

SEQ ID NO: 896547 - DNA, 15 bp, Homo sapiens
cgcaggatgcaaggc

SEQ ID NO: 896548 - DNA, 15 bp, Homo sapiens
gcaggatgcaaggca

SEQ ID NO: 896549 - DNA, 15 bp, Homo sapiens
caggatgcaaggcat

SEQ ID NO: 896550 - DNA, 15 bp, Homo sapiens
aggatgcaaggcata

SEQ ID NO: 896551 - DNA, 15 bp, Homo sapiens
ggatgcaaggcatag

SEQ ID NO: 896552 - DNA, 15 bp, Homo sapiens
gatgcaaggcataga

SEQ ID NO: 896553 - DNA, 15 bp, Homo sapiens
atgcaaggcatagag

SEQ ID NO: 896554 - DNA, 15 bp, Homo sapiens
tgcaaggcatagaga

SEQ ID NO: 896555 - DNA, 15 bp, Homo sapiens
gcaaggcatagagaa

SEQ ID NO: 896556 - DNA, 15 bp, Homo sapiens
caaggcatagagaat

SEQ ID NO: 896557 - DNA, 15 bp, Homo sapiens
aaggcatagagaatg

SEQ ID NO: 896558 - DNA, 15 bp, Homo sapiens
aggcatagagaatga

SEQ ID NO: 896559 - DNA, 15 bp, Homo sapiens
ggcatagagaatgag

SEQ ID NO: 896560 - DNA, 15 bp, Homo sapiens
gcatagagaatgagg

SEQ ID NO: 896561 - DNA, 15 bp, Homo sapiens
catagagaatgaggt

SEQ ID NO: 896562 - DNA, 15 bp, Homo sapiens
atagagaatgaggtg

SEQ ID NO: 896563 - DNA, 15 bp, Homo sapiens
tagagaatgaggtga

SEQ ID NO: 896564 - DNA, 15 bp, Homo sapiens
agagaatgaggtgat

SEQ ID NO: 896565 - DNA, 15 bp, Homo sapiens
gagaatgaggtgata

SEQ ID NO: 896566 - DNA, 15 bp, Homo sapiens
agaatgaggtgatat

SEQ ID NO: 896567 - DNA, 15 bp, Homo sapiens
gaatgaggtgatata

SEQ ID NO: 896568 - DNA, 15 bp, Homo sapiens
aatgaggtgatatag

SEQ ID NO: 896569 - DNA, 15 bp, Homo sapiens
atgaggtgatatagg

SEQ ID NO: 896570 - DNA, 15 bp, Homo sapiens
tgaggtgatatagga

SEQ ID NO: 896571 - DNA, 15 bp, Homo sapiens
gaggtgatataggaa

SEQ ID NO: 896572 - DNA, 15 bp, Homo sapiens
aggtgatataggaag

SEQ ID NO: 896573 - DNA, 15 bp, Homo sapiens
ggtgatataggaagc

SEQ ID NO: 896574 - DNA, 15 bp, Homo sapiens
gtgatataggaagcg

SEQ ID NO: 896575 - DNA, 15 bp, Homo sapiens
tgatataggaagcgg

SEQ ID NO: 896576 - DNA, 15 bp, Homo sapiens
gatataggaagcggg

SEQ ID NO: 896577 - DNA, 15 bp, Homo sapiens
atataggaagcgggt

SEQ ID NO: 896578 - DNA, 15 bp, Homo sapiens
tataggaagcgggta

SEQ ID NO: 896579 - DNA, 15 bp, Homo sapiens
ataggaagcgggtat

SEQ ID NO: 896580 - DNA, 15 bp, Homo sapiens
taggaagcgggtatg

SEQ ID NO: 896581 - DNA, 15 bp, Homo sapiens
aggaagcgggtatgc

SEQ ID NO: 896582 - DNA, 15 bp, Homo sapiens
ggaagcgggtatgcc

SEQ ID NO: 896583 - DNA, 15 bp, Homo sapiens
gaagcgggtatgcct

SEQ ID NO: 896584 - DNA, 15 bp, Homo sapiens
aagcgggtatgccta

SEQ ID NO: 896585 - DNA, 15 bp, Homo sapiens
agcgggtatgcctat

SEQ ID NO: 896586 - DNA, 15 bp, Homo sapiens
gcgggtatgcctata

SEQ ID NO: 896587 - DNA, 15 bp, Homo sapiens
cgggtatgcctatag

SEQ ID NO: 896588 - DNA, 15 bp, Homo sapiens
gggtatgcctatagg

SEQ ID NO: 896589 - DNA, 15 bp, Homo sapiens
ggtatgcctatagga

SEQ ID NO: 896590 - DNA, 15 bp, Homo sapiens
gtatgcctataggac

SEQ ID NO: 896591 - DNA, 15 bp, Homo sapiens
tatgcctataggacg

SEQ ID NO: 896592 - DNA, 15 bp, Homo sapiens
atgcctataggacga

SEQ ID NO: 896593 - DNA, 15 bp, Homo sapiens
tgcctataggacgag

SEQ ID NO: 896594 - DNA, 15 bp, Homo sapiens
gcctataggacgagg

SEQ ID NO: 896595 - DNA, 15 bp, Homo sapiens
cctataggacgaggc

SEQ ID NO: 896596 - DNA, 15 bp, Homo sapiens
ctataggacgaggca

SEQ ID NO: 896597 - DNA, 15 bp, Homo sapiens
tataggacgaggcat

SEQ ID NO: 896598 - DNA, 15 bp, Homo sapiens
ataggacgaggcatg

SEQ ID NO: 896599 - DNA, 15 bp, Homo sapiens
taggacgaggcatgg

SEQ ID NO: 896600 - DNA, 15 bp, Homo sapiens
aggacgaggcatggc

SEQ ID NO: 896601 - DNA, 15 bp, Homo sapiens
ggacgaggcatggcg

SEQ ID NO: 896602 - DNA, 15 bp, Homo sapiens
gacgaggcatggcgg

SEQ ID NO: 896603 - DNA, 15 bp, Homo sapiens
acgaggcatggcgga

SEQ ID NO: 896604 - DNA, 15 bp, Homo sapiens
cgaggcatggcggag

SEQ ID NO: 896605 - DNA, 15 bp, Homo sapiens
gaggcatggcggagg

SEQ ID NO: 896606 - DNA, 15 bp, Homo sapiens
aggcatggcggaggg

SEQ ID NO: 896607 - DNA, 15 bp, Homo sapiens
ggcatggcggaggga

SEQ ID NO: 896608 - DNA, 15 bp, Homo sapiens
gcatggcggagggaa

SEQ ID NO: 896609 - DNA, 15 bp, Homo sapiens
catggcggagggaag

SEQ ID NO: 896610 - DNA, 15 bp, Homo sapiens
atggcggagggaagg

SEQ ID NO: 896611 - DNA, 15 bp, Homo sapiens
tggcggagggaaggg

SEQ ID NO: 896612 - DNA, 15 bp, Homo sapiens
ggcggagggaagggc

SEQ ID NO: 896613 - DNA, 15 bp, Homo sapiens
gcggagggaagggct

SEQ ID NO: 896614 - DNA, 15 bp, Homo sapiens
cggagggaagggcta

SEQ ID NO: 896615 - DNA, 15 bp, Homo sapiens
ggagggaagggctag

SEQ ID NO: 896616 - DNA, 15 bp, Homo sapiens
gagggaagggctagg

SEQ ID NO: 896617 - DNA, 15 bp, Homo sapiens
agggaagggctaggt

SEQ ID NO: 896618 - DNA, 15 bp, Homo sapiens
gggaagggctaggtg

SEQ ID NO: 896619 - DNA, 15 bp, Homo sapiens
ggaagggctaggtgg

SEQ ID NO: 896620 - DNA, 15 bp, Homo sapiens
gaagggctaggtgga

SEQ ID NO: 896621 - DNA, 15 bp, Homo sapiens
aagggctaggtggag

SEQ ID NO: 896622 - DNA, 15 bp, Homo sapiens
agggctaggtggaga

SEQ ID NO: 896623 - DNA, 15 bp, Homo sapiens
gggctaggtggagac

SEQ ID NO: 896624 - DNA, 15 bp, Homo sapiens
ggctaggtggagaca

SEQ ID NO: 896625 - DNA, 15 bp, Homo sapiens
gctaggtggagacag

SEQ ID NO: 896626 - DNA, 15 bp, Homo sapiens
ctaggtggagacagg

SEQ ID NO: 896627 - DNA, 15 bp, Homo sapiens
taggtggagacaggg

SEQ ID NO: 896628 - DNA, 15 bp, Homo sapiens
aggtggagacaggga

SEQ ID NO: 896629 - DNA, 15 bp, Homo sapiens
ggtggagacagggat

SEQ ID NO: 896630 - DNA, 15 bp, Homo sapiens
gtggagacagggatc

SEQ ID NO: 896631 - DNA, 15 bp, Homo sapiens
tggagacagggatca

SEQ ID NO: 896632 - DNA, 15 bp, Homo sapiens
ggagacagggatcag

SEQ ID NO: 896633 - DNA, 15 bp, Homo sapiens
gagacagggatcaga

SEQ ID NO: 896634 - DNA, 15 bp, Homo sapiens
agacagggatcagag

SEQ ID NO: 896635 - DNA, 15 bp, Homo sapiens
gacagggatcagagg

SEQ ID NO: 896636 - DNA, 15 bp, Homo sapiens
acagggatcagaggg

SEQ ID NO: 896637 - DNA, 15 bp, Homo sapiens
cagggatcagagggc

SEQ ID NO: 896638 - DNA, 15 bp, Homo sapiens
agggatcagagggct

SEQ ID NO: 896639 - DNA, 15 bp, Homo sapiens
gggatcagagggctg

SEQ ID NO: 896640 - DNA, 15 bp, Homo sapiens
ggatcagagggctga

SEQ ID NO: 896641 - DNA, 15 bp, Homo sapiens
gatcagagggctgac

SEQ ID NO: 896642 - DNA, 15 bp, Homo sapiens
atcagagggctgact

SEQ ID NO: 896643 - DNA, 15 bp, Homo sapiens
tcagagggctgacta

SEQ ID NO: 896644 - DNA, 15 bp, Homo sapiens
cagagggctgactac

SEQ ID NO: 896645 - DNA, 15 bp, Homo sapiens
agagggctgactaca

SEQ ID NO: 896646 - DNA, 15 bp, Homo sapiens
gagggctgactacag

SEQ ID NO: 896647 - DNA, 15 bp, Homo sapiens
agggctgactacaga

SEQ ID NO: 896648 - DNA, 15 bp, Homo sapiens
gggctgactacagaa

SEQ ID NO: 896649 - DNA, 15 bp, Homo sapiens
ggctgactacagaaa

SEQ ID NO: 896650 - DNA, 15 bp, Homo sapiens
gctgactacagaaaa

SEQ ID NO: 896651 - DNA, 15 bp, Homo sapiens
ctgactacagaaaat

SEQ ID NO: 896652 - DNA, 15 bp, Homo sapiens
tgactacagaaaatg

SEQ ID NO: 896653 - DNA, 15 bp, Homo sapiens
gactacagaaaatga

SEQ ID NO: 896654 - DNA, 15 bp, Homo sapiens
actacagaaaatgac

SEQ ID NO: 896655 - DNA, 15 bp, Homo sapiens
ctacagaaaatgacc

SEQ ID NO: 896656 - DNA, 15 bp, Homo sapiens
tacagaaaatgaccc

SEQ ID NO: 896657 - DNA, 15 bp, Homo sapiens
acagaaaatgaccca

SEQ ID NO: 896658 - DNA, 15 bp, Homo sapiens
cagaaaatgacccat

SEQ ID NO: 896659 - DNA, 15 bp, Homo sapiens
agaaaatgacccatg

SEQ ID NO: 896660 - DNA, 15 bp, Homo sapiens
gaaaatgacccatga

SEQ ID NO: 896661 - DNA, 15 bp, Homo sapiens
aaaatgacccatgat

SEQ ID NO: 896662 - DNA, 15 bp, Homo sapiens
aaatgacccatgatg

SEQ ID NO: 896663 - DNA, 15 bp, Homo sapiens
aatgacccatgatgg

SEQ ID NO: 896664 - DNA, 15 bp, Homo sapiens
atgacccatgatggg

SEQ ID NO: 896665 - DNA, 15 bp, Homo sapiens
tgacccatgatgggg

SEQ ID NO: 896666 - DNA, 15 bp, Homo sapiens
gacccatgatggggt

SEQ ID NO: 896667 - DNA, 15 bp, Homo sapiens
acccatgatggggtg

SEQ ID NO: 896668 - DNA, 15 bp, Homo sapiens
cccatgatggggtgt

SEQ ID NO: 896669 - DNA, 15 bp, Homo sapiens
ccatgatggggtgta

SEQ ID NO: 896670 - DNA, 15 bp, Homo sapiens
catgatggggtgtat

SEQ ID NO: 896671 - DNA, 15 bp, Homo sapiens
atgatggggtgtatg

SEQ ID NO: 896672 - DNA, 15 bp, Homo sapiens
tgatggggtgtatgc

SEQ ID NO: 896673 - DNA, 15 bp, Homo sapiens
gatggggtgtatgca

SEQ ID NO: 896674 - DNA, 15 bp, Homo sapiens
atggggtgtatgcag

SEQ ID NO: 896675 - DNA, 15 bp, Homo sapiens
tggggtgtatgcagc

SEQ ID NO: 896676 - DNA, 15 bp, Homo sapiens
ggggtgtatgcagct

SEQ ID NO: 896677 - DNA, 15 bp, Homo sapiens
gggtgtatgcagctg

SEQ ID NO: 896678 - DNA, 15 bp, Homo sapiens
ggtgtatgcagctgg

SEQ ID NO: 896679 - DNA, 15 bp, Homo sapiens
gtgtatgcagctgga

SEQ ID NO: 896680 - DNA, 15 bp, Homo sapiens
tgtatgcagctggaa

SEQ ID NO: 896681 - DNA, 15 bp, Homo sapiens
gtatgcagctggaaa

SEQ ID NO: 896682 - DNA, 15 bp, Homo sapiens
tatgcagctggaaaa

SEQ ID NO: 896683 - DNA, 15 bp, Homo sapiens
atgcagctggaaaag

SEQ ID NO: 896684 - DNA, 15 bp, Homo sapiens
tgcagctggaaaagg

SEQ ID NO: 896685 - DNA, 15 bp, Homo sapiens
gcagctggaaaaggc

SEQ ID NO: 896686 - DNA, 15 bp, Homo sapiens
cagctggaaaaggct

SEQ ID NO: 896687 - DNA, 15 bp, Homo sapiens
agctggaaaaggctg

SEQ ID NO: 896688 - DNA, 15 bp, Homo sapiens
gctggaaaaggctgt

SEQ ID NO: 896689 - DNA, 15 bp, Homo sapiens
ctggaaaaggctgtc

SEQ ID NO: 896690 - DNA, 15 bp, Homo sapiens
tggaaaaggctgtca

SEQ ID NO: 896691 - DNA, 15 bp, Homo sapiens
ggaaaaggctgtcag

SEQ ID NO: 896692 - DNA, 15 bp, Homo sapiens
gaaaaggctgtcagg

SEQ ID NO: 896693 - DNA, 15 bp, Homo sapiens
aaaaggctgtcaggg

SEQ ID NO: 896694 - DNA, 15 bp, Homo sapiens
aaaggctgtcagggc

SEQ ID NO: 896695 - DNA, 15 bp, Homo sapiens
aaggctgtcagggca

SEQ ID NO: 896696 - DNA, 15 bp, Homo sapiens
aggctgtcagggcag

SEQ ID NO: 896697 - DNA, 15 bp, Homo sapiens
ggctgtcagggcaga

SEQ ID NO: 896698 - DNA, 15 bp, Homo sapiens
gctgtcagggcagac

SEQ ID NO: 896699 - DNA, 15 bp, Homo sapiens
ctgtcagggcagact

SEQ ID NO: 896700 - DNA, 15 bp, Homo sapiens
tgtcagggcagacta

SEQ ID NO: 896701 - DNA, 15 bp, Homo sapiens
gtcagggcagactaa

SEQ ID NO: 896702 - DNA, 15 bp, Homo sapiens
tcagggcagactaag

SEQ ID NO: 896703 - DNA, 15 bp, Homo sapiens
cagggcagactaagg

SEQ ID NO: 896704 - DNA, 15 bp, Homo sapiens
agggcagactaaggt

SEQ ID NO: 896705 - DNA, 15 bp, Homo sapiens
gggcagactaaggtc

SEQ ID NO: 896706 - DNA, 15 bp, Homo sapiens
ggcagactaaggtct

SEQ ID NO: 896707 - DNA, 15 bp, Homo sapiens
gcagactaaggtctg

SEQ ID NO: 896708 - DNA, 15 bp, Homo sapiens
cagactaaggtctgt

SEQ ID NO: 896709 - DNA, 15 bp, Homo sapiens
agactaaggtctgtt

SEQ ID NO: 896710 - DNA, 15 bp, Homo sapiens
gactaaggtctgttc

SEQ ID NO: 896711 - DNA, 15 bp, Homo sapiens
actaaggtctgttcc

SEQ ID NO: 896712 - DNA, 15 bp, Homo sapiens
ctaaggtctgttccc

SEQ ID NO: 896713 - DNA, 15 bp, Homo sapiens
taaggtctgttccca

SEQ ID NO: 896714 - DNA, 15 bp, Homo sapiens
aaggtctgttcccag

SEQ ID NO: 896715 - DNA, 15 bp, Homo sapiens
aggtctgttcccaga

SEQ ID NO: 896716 - DNA, 15 bp, Homo sapiens
ggtctgttcccagag

SEQ ID NO: 896717 - DNA, 15 bp, Homo sapiens
gtctgttcccagagg

SEQ ID NO: 896718 - DNA, 15 bp, Homo sapiens
tctgttcccagaggc

SEQ ID NO: 896719 - DNA, 15 bp, Homo sapiens
ctgttcccagaggcc

SEQ ID NO: 896720 - DNA, 15 bp, Homo sapiens
tgttcccagaggcct

SEQ ID NO: 896721 - DNA, 15 bp, Homo sapiens
gttcccagaggcctt

SEQ ID NO: 896722 - DNA, 15 bp, Homo sapiens
ttcccagaggccttt

SEQ ID NO: 896723 - DNA, 15 bp, Homo sapiens
tcccagaggcctttg

SEQ ID NO: 896724 - DNA, 15 bp, Homo sapiens
cccagaggcctttga

SEQ ID NO: 896725 - DNA, 15 bp, Homo sapiens
ccagaggcctttgat

SEQ ID NO: 896726 - DNA, 15 bp, Homo sapiens
cagaggcctttgatc

SEQ ID NO: 896727 - DNA, 15 bp, Homo sapiens
agaggcctttgatca

SEQ ID NO: 896728 - DNA, 15 bp, Homo sapiens
gaggcctttgatcac

SEQ ID NO: 896729 - DNA, 15 bp, Homo sapiens
aggcctttgatcacc

SEQ ID NO: 896730 - DNA, 15 bp, Homo sapiens
ggcctttgatcacca

SEQ ID NO: 896731 - DNA, 15 bp, Homo sapiens
gcctttgatcaccac

SEQ ID NO: 896732 - DNA, 15 bp, Homo sapiens
cctttgatcaccaca

SEQ ID NO: 896733 - DNA, 15 bp, Homo sapiens
ctttgatcaccacaa

SEQ ID NO: 896734 - DNA, 15 bp, Homo sapiens
tttgatcaccacaat

SEQ ID NO: 896735 - DNA, 15 bp, Homo sapiens
ttgatcaccacaata

SEQ ID NO: 896736 - DNA, 15 bp, Homo sapiens
tgatcaccacaatat

SEQ ID NO: 896737 - DNA, 15 bp, Homo sapiens
gatcaccacaatatg

SEQ ID NO: 896738 - DNA, 15 bp, Homo sapiens
atcaccacaatatgg

SEQ ID NO: 896739 - DNA, 15 bp, Homo sapiens
tcaccacaatatgga

SEQ ID NO: 896740 - DNA, 15 bp, Homo sapiens
caccacaatatggaa

SEQ ID NO: 896741 - DNA, 15 bp, Homo sapiens
accacaatatggaat

SEQ ID NO: 896742 - DNA, 15 bp, Homo sapiens
ccacaatatggaatt

SEQ ID NO: 896743 - DNA, 15 bp, Homo sapiens
cacaatatggaatta

SEQ ID NO: 896744 - DNA, 15 bp, Homo sapiens
acaatatggaattaa

SEQ ID NO: 896745 - DNA, 15 bp, Homo sapiens
caatatggaattaaa

SEQ ID NO: 896746 - DNA, 15 bp, Homo sapiens
aatatggaattaaaa

SEQ ID NO: 896747 - DNA, 15 bp, Homo sapiens
atatggaattaaaat

SEQ ID NO: 896748 - DNA, 15 bp, Homo sapiens
tatggaattaaaatg

SEQ ID NO: 896749 - DNA, 15 bp, Homo sapiens
atggaattaaaatgt

SEQ ID NO: 896750 - DNA, 15 bp, Homo sapiens
tggaattaaaatgtg

SEQ ID NO: 896751 - DNA, 15 bp, Homo sapiens
ggaattaaaatgtga

SEQ ID NO: 896752 - DNA, 15 bp, Homo sapiens
gaattaaaatgtgag

SEQ ID NO: 896753 - DNA, 15 bp, Homo sapiens
aattaaaatgtgagt

SEQ ID NO: 896754 - DNA, 15 bp, Homo sapiens
attaaaatgtgagtg

SEQ ID NO: 896755 - DNA, 15 bp, Homo sapiens
ttaaaatgtgagtgt

SEQ ID NO: 896756 - DNA, 15 bp, Homo sapiens
taaaatgtgagtgtg

SEQ ID NO: 896757 - DNA, 15 bp, Homo sapiens
aaaatgtgagtgtgt

SEQ ID NO: 896758 - DNA, 15 bp, Homo sapiens
aaatgtgagtgtgta

SEQ ID NO: 896759 - DNA, 15 bp, Homo sapiens
aatgtgagtgtgtat

SEQ ID NO: 896760 - DNA, 15 bp, Homo sapiens
atgtgagtgtgtatg

SEQ ID NO: 896761 - DNA, 15 bp, Homo sapiens
tgtgagtgtgtatgt

SEQ ID NO: 896762 - DNA, 15 bp, Homo sapiens
gtgagtgtgtatgtc

SEQ ID NO: 896763 - DNA, 15 bp, Homo sapiens
tgagtgtgtatgtct

SEQ ID NO: 896764 - DNA, 15 bp, Homo sapiens
gagtgtgtatgtctc

SEQ ID NO: 896765 - DNA, 15 bp, Homo sapiens
agtgtgtatgtctca

SEQ ID NO: 896766 - DNA, 15 bp, Homo sapiens
gtgtgtatgtctcaa

SEQ ID NO: 896767 - DNA, 15 bp, Homo sapiens
tgtgtatgtctcaag

SEQ ID NO: 896768 - DNA, 15 bp, Homo sapiens
gtgtatgtctcaaga

SEQ ID NO: 896769 - DNA, 15 bp, Homo sapiens
tgtatgtctcaagat

SEQ ID NO: 896770 - DNA, 15 bp, Homo sapiens
gtatgtctcaagata

SEQ ID NO: 896771 - DNA, 15 bp, Homo sapiens
tatgtctcaagatat

SEQ ID NO: 896772 - DNA, 15 bp, Homo sapiens
atgtctcaagatatg

SEQ ID NO: 896773 - DNA, 15 bp, Homo sapiens
tgtctcaagatatgt

SEQ ID NO: 896774 - DNA, 15 bp, Homo sapiens
gtctcaagatatgtc

SEQ ID NO: 896775 - DNA, 15 bp, Homo sapiens
tctcaagatatgtca

SEQ ID NO: 896776 - DNA, 15 bp, Homo sapiens
ctcaagatatgtcaa

SEQ ID NO: 896777 - DNA, 15 bp, Homo sapiens
tcaagatatgtcaac

SEQ ID NO: 896778 - DNA, 15 bp, Homo sapiens
caagatatgtcaact

SEQ ID NO: 896779 - DNA, 15 bp, Homo sapiens
aagatatgtcaactt

SEQ ID NO: 896780 - DNA, 15 bp, Homo sapiens
agatatgtcaacttt

SEQ ID NO: 896781 - DNA, 15 bp, Homo sapiens
gatatgtcaactttg

SEQ ID NO: 896782 - DNA, 15 bp, Homo sapiens
atatgtcaactttgg

SEQ ID NO: 896783 - DNA, 15 bp, Homo sapiens
tatgtcaactttggc

SEQ ID NO: 896784 - DNA, 15 bp, Homo sapiens
atgtcaactttggct

SEQ ID NO: 896785 - DNA, 15 bp, Homo sapiens
tgtcaactttggcta

SEQ ID NO: 896786 - DNA, 15 bp, Homo sapiens
gtcaactttggctat

SEQ ID NO: 896787 - DNA, 15 bp, Homo sapiens
tcaactttggctatg

SEQ ID NO: 896788 - DNA, 15 bp, Homo sapiens
caactttggctatgc

SEQ ID NO: 896789 - DNA, 15 bp, Homo sapiens
aactttggctatgca

SEQ ID NO: 896790 - DNA, 15 bp, Homo sapiens
actttggctatgcat

SEQ ID NO: 896791 - DNA, 15 bp, Homo sapiens
ctttggctatgcatt

SEQ ID NO: 896792 - DNA, 15 bp, Homo sapiens
tttggctatgcatta

SEQ ID NO: 896793 - DNA, 15 bp, Homo sapiens
ttggctatgcattag

SEQ ID NO: 896794 - DNA, 15 bp, Homo sapiens
tggctatgcattaga

SEQ ID NO: 896795 - DNA, 15 bp, Homo sapiens
ggctatgcattagaa

SEQ ID NO: 896796 - DNA, 15 bp, Homo sapiens
gctatgcattagaac

SEQ ID NO: 896797 - DNA, 15 bp, Homo sapiens
ctatgcattagaacc

SEQ ID NO: 896798 - DNA, 15 bp, Homo sapiens
tatgcattagaaccc

SEQ ID NO: 896799 - DNA, 15 bp, Homo sapiens
atgcattagaaccct

SEQ ID NO: 896800 - DNA, 15 bp, Homo sapiens
tgcattagaaccctg

SEQ ID NO: 896801 - DNA, 15 bp, Homo sapiens
gcattagaaccctgt

SEQ ID NO: 896802 - DNA, 15 bp, Homo sapiens
cattagaaccctgta

SEQ ID NO: 896803 - DNA, 15 bp, Homo sapiens
attagaaccctgtaa

SEQ ID NO: 896804 - DNA, 15 bp, Homo sapiens
ttagaaccctgtaag

SEQ ID NO: 896805 - DNA, 15 bp, Homo sapiens
tagaaccctgtaaga

SEQ ID NO: 896806 - DNA, 15 bp, Homo sapiens
agaaccctgtaagag

SEQ ID NO: 896807 - DNA, 15 bp, Homo sapiens
gaaccctgtaagagt

SEQ ID NO: 896808 - DNA, 15 bp, Homo sapiens
aaccctgtaagagtc

SEQ ID NO: 896809 - DNA, 15 bp, Homo sapiens
accctgtaagagtct

SEQ ID NO: 896810 - DNA, 15 bp, Homo sapiens
ccctgtaagagtctt

SEQ ID NO: 896811 - DNA, 15 bp, Homo sapiens
cctgtaagagtctta

SEQ ID NO: 896812 - DNA, 15 bp, Homo sapiens
ctgtaagagtcttaa

SEQ ID NO: 896813 - DNA, 15 bp, Homo sapiens
tgtaagagtcttaaa

SEQ ID NO: 896814 - DNA, 15 bp, Homo sapiens
gtaagagtcttaaaa

SEQ ID NO: 896815 - DNA, 15 bp, Homo sapiens
taagagtcttaaaaa

SEQ ID NO: 896816 - DNA, 15 bp, Homo sapiens
aagagtcttaaaaaa

SEQ ID NO: 896817 - DNA, 15 bp, Homo sapiens
agagtcttaaaaaac

SEQ ID NO: 896818 - DNA, 15 bp, Homo sapiens
gagtcttaaaaaaca

SEQ ID NO: 896819 - DNA, 15 bp, Homo sapiens
agtcttaaaaaacaa

SEQ ID NO: 896820 - DNA, 15 bp, Homo sapiens
gtcttaaaaaacaaa

SEQ ID NO: 896821 - DNA, 15 bp, Homo sapiens
tcttaaaaaacaaaa

SEQ ID NO: 896822 - DNA, 15 bp, Homo sapiens
cttaaaaaacaaaac

SEQ ID NO: 896823 - DNA, 15 bp, Homo sapiens
ttaaaaaacaaaact

SEQ ID NO: 896824 - DNA, 15 bp, Homo sapiens
taaaaaacaaaacta

SEQ ID NO: 896825 - DNA, 15 bp, Homo sapiens
aaaaaacaaaactag

SEQ ID NO: 896826 - DNA, 15 bp, Homo sapiens
aaaaacaaaactagg

SEQ ID NO: 896827 - DNA, 15 bp, Homo sapiens
aaaacaaaactaggg

SEQ ID NO: 896828 - DNA, 15 bp, Homo sapiens
aaacaaaactagggt

SEQ ID NO: 896829 - DNA, 15 bp, Homo sapiens
aacaaaactagggtc

SEQ ID NO: 896830 - DNA, 15 bp, Homo sapiens
acaaaactagggtcc

SEQ ID NO: 896831 - DNA, 15 bp, Homo sapiens
caaaactagggtcca

SEQ ID NO: 896832 - DNA, 15 bp, Homo sapiens
aaaactagggtccaa

SEQ ID NO: 896833 - DNA, 15 bp, Homo sapiens
aaactagggtccaac

SEQ ID NO: 896834 - DNA, 15 bp, Homo sapiens
aactagggtccaaca

SEQ ID NO: 896835 - DNA, 15 bp, Homo sapiens
actagggtccaacac

SEQ ID NO: 896836 - DNA, 15 bp, Homo sapiens
ctagggtccaacact

SEQ ID NO: 896837 - DNA, 15 bp, Homo sapiens
tagggtccaacacta

SEQ ID NO: 896838 - DNA, 15 bp, Homo sapiens
agggtccaacactag

SEQ ID NO: 896839 - DNA, 15 bp, Homo sapiens
gggtccaacactaga

SEQ ID NO: 896840 - DNA, 15 bp, Homo sapiens
ggtccaacactagac

SEQ ID NO: 896841 - DNA, 15 bp, Homo sapiens
gtccaacactagaca

SEQ ID NO: 896842 - DNA, 15 bp, Homo sapiens
tccaacactagacat

SEQ ID NO: 896843 - DNA, 15 bp, Homo sapiens
ccaacactagacata

SEQ ID NO: 896844 - DNA, 15 bp, Homo sapiens
caacactagacatat

SEQ ID NO: 896845 - DNA, 15 bp, Homo sapiens
aacactagacatatc

SEQ ID NO: 896846 - DNA, 15 bp, Homo sapiens
acactagacatatca

SEQ ID NO: 896847 - DNA, 15 bp, Homo sapiens
cactagacatatcaa

SEQ ID NO: 896848 - DNA, 15 bp, Homo sapiens
actagacatatcaag

SEQ ID NO: 896849 - DNA, 15 bp, Homo sapiens
ctagacatatcaagg

SEQ ID NO: 896850 - DNA, 15 bp, Homo sapiens
tagacatatcaaggt

SEQ ID NO: 896851 - DNA, 15 bp, Homo sapiens
agacatatcaaggtg

SEQ ID NO: 896852 - DNA, 15 bp, Homo sapiens
gacatatcaaggtgg

SEQ ID NO: 896853 - DNA, 15 bp, Homo sapiens
acatatcaaggtgga

SEQ ID NO: 896854 - DNA, 15 bp, Homo sapiens
catatcaaggtggaa

SEQ ID NO: 896855 - DNA, 15 bp, Homo sapiens
atatcaaggtggaat

SEQ ID NO: 896856 - DNA, 15 bp, Homo sapiens
tatcaaggtggaatc

SEQ ID NO: 896857 - DNA, 15 bp, Homo sapiens
atcaaggtggaatct

SEQ ID NO: 896858 - DNA, 15 bp, Homo sapiens
tcaaggtggaatctc

SEQ ID NO: 896859 - DNA, 15 bp, Homo sapiens
caaggtggaatctct

SEQ ID NO: 896860 - DNA, 15 bp, Homo sapiens
aaggtggaatctctg

SEQ ID NO: 896861 - DNA, 15 bp, Homo sapiens
aggtggaatctctgg

SEQ ID NO: 896862 - DNA, 15 bp, Homo sapiens
ggtggaatctctggt

SEQ ID NO: 896863 - DNA, 15 bp, Homo sapiens
gtggaatctctggtc

SEQ ID NO: 896864 - DNA, 15 bp, Homo sapiens
tggaatctctggtca

SEQ ID NO: 896865 - DNA, 15 bp, Homo sapiens
ggaatctctggtcag

SEQ ID NO: 896866 - DNA, 15 bp, Homo sapiens
gaatctctggtcaga

SEQ ID NO: 896867 - DNA, 15 bp, Homo sapiens
aatctctggtcagag

SEQ ID NO: 896868 - DNA, 15 bp, Homo sapiens
atctctggtcagaga

SEQ ID NO: 896869 - DNA, 15 bp, Homo sapiens
tctctggtcagagat

SEQ ID NO: 896870 - DNA, 15 bp, Homo sapiens
ctctggtcagagatc

SEQ ID NO: 896871 - DNA, 15 bp, Homo sapiens
tctggtcagagatcc

SEQ ID NO: 896872 - DNA, 15 bp, Homo sapiens
ctggtcagagatcca

SEQ ID NO: 896873 - DNA, 15 bp, Homo sapiens
tggtcagagatccat

SEQ ID NO: 896874 - DNA, 15 bp, Homo sapiens
ggtcagagatccatt

SEQ ID NO: 896875 - DNA, 15 bp, Homo sapiens
gtcagagatccattc

SEQ ID NO: 896876 - DNA, 15 bp, Homo sapiens
tcagagatccattca

SEQ ID NO: 896877 - DNA, 15 bp, Homo sapiens
cagagatccattcat

SEQ ID NO: 896878 - DNA, 15 bp, Homo sapiens
agagatccattcatg

SEQ ID NO: 896879 - DNA, 15 bp, Homo sapiens
gagatccattcatgg

SEQ ID NO: 896880 - DNA, 15 bp, Homo sapiens
agatccattcatgga

SEQ ID NO: 896881 - DNA, 15 bp, Homo sapiens
gatccattcatggag

SEQ ID NO: 896882 - DNA, 15 bp, Homo sapiens
atccattcatggagc

SEQ ID NO: 896883 - DNA, 15 bp, Homo sapiens
tccattcatggagct

SEQ ID NO: 896884 - DNA, 15 bp, Homo sapiens
ccattcatggagctc

SEQ ID NO: 896885 - DNA, 15 bp, Homo sapiens
cattcatggagctcc

SEQ ID NO: 896886 - DNA, 15 bp, Homo sapiens
attcatggagctccc

SEQ ID NO: 896887 - DNA, 15 bp, Homo sapiens
ttcatggagctccca

SEQ ID NO: 896888 - DNA, 15 bp, Homo sapiens
tcatggagctcccaa

SEQ ID NO: 896889 - DNA, 15 bp, Homo sapiens
catggagctcccaag

SEQ ID NO: 896890 - DNA, 15 bp, Homo sapiens
atggagctcccaagg

SEQ ID NO: 896891 - DNA, 15 bp, Homo sapiens
tggagctcccaaggt

SEQ ID NO: 896892 - DNA, 15 bp, Homo sapiens
ggagctcccaaggtg

SEQ ID NO: 896893 - DNA, 15 bp, Homo sapiens
gagctcccaaggtga

SEQ ID NO: 896894 - DNA, 15 bp, Homo sapiens
agctcccaaggtgat

SEQ ID NO: 896895 - DNA, 15 bp, Homo sapiens
gctcccaaggtgatt

SEQ ID NO: 896896 - DNA, 15 bp, Homo sapiens
ctcccaaggtgattc

SEQ ID NO: 896897 - DNA, 15 bp, Homo sapiens
tcccaaggtgattct

SEQ ID NO: 896898 - DNA, 15 bp, Homo sapiens
cccaaggtgattcta

SEQ ID NO: 896899 - DNA, 15 bp, Homo sapiens
ccaaggtgattctaa

SEQ ID NO: 896900 - DNA, 15 bp, Homo sapiens
caaggtgattctaag

SEQ ID NO: 896901 - DNA, 15 bp, Homo sapiens
aaggtgattctaagg

SEQ ID NO: 896902 - DNA, 15 bp, Homo sapiens
aggtgattctaaggt

SEQ ID NO: 896903 - DNA, 15 bp, Homo sapiens
ggtgattctaaggtt

SEQ ID NO: 896904 - DNA, 15 bp, Homo sapiens
gtgattctaaggttg

SEQ ID NO: 896905 - DNA, 15 bp, Homo sapiens
tgattctaaggttgg

SEQ ID NO: 896906 - DNA, 15 bp, Homo sapiens
gattctaaggttgga

SEQ ID NO: 896907 - DNA, 15 bp, Homo sapiens
attctaaggttggaa

SEQ ID NO: 896908 - DNA, 15 bp, Homo sapiens
ttctaaggttggaaa

SEQ ID NO: 896909 - DNA, 15 bp, Homo sapiens
tctaaggttggaaat

SEQ ID NO: 896910 - DNA, 15 bp, Homo sapiens
ctaaggttggaaatt

SEQ ID NO: 896911 - DNA, 15 bp, Homo sapiens
taaggttggaaatta

SEQ ID NO: 896912 - DNA, 15 bp, Homo sapiens
aaggttggaaattat

SEQ ID NO: 896913 - DNA, 15 bp, Homo sapiens
aggttggaaattatt

SEQ ID NO: 896914 - DNA, 15 bp, Homo sapiens
ggttggaaattattg

SEQ ID NO: 896915 - DNA, 15 bp, Homo sapiens
gttggaaattattgc

SEQ ID NO: 896916 - DNA, 15 bp, Homo sapiens
ttggaaattattgct

SEQ ID NO: 896917 - DNA, 15 bp, Homo sapiens
tggaaattattgctg

SEQ ID NO: 896918 - DNA, 15 bp, Homo sapiens
ggaaattattgctgt

SEQ ID NO: 896919 - DNA, 15 bp, Homo sapiens
gaaattattgctgtt

SEQ ID NO: 896920 - DNA, 15 bp, Homo sapiens
aaattattgctgttg

SEQ ID NO: 896921 - DNA, 15 bp, Homo sapiens
aattattgctgttgg

SEQ ID NO: 896922 - DNA, 15 bp, Homo sapiens
attattgctgttggc

SEQ ID NO: 896923 - DNA, 15 bp, Homo sapiens
ttattgctgttggca

SEQ ID NO: 896924 - DNA, 15 bp, Homo sapiens
tattgctgttggcaa

SEQ ID NO: 896925 - DNA, 15 bp, Homo sapiens
attgctgttggcaat

SEQ ID NO: 896926 - DNA, 15 bp, Homo sapiens
ttgctgttggcaatg

SEQ ID NO: 896927 - DNA, 15 bp, Homo sapiens
tgctgttggcaatgg

SEQ ID NO: 896928 - DNA, 15 bp, Homo sapiens
gctgttggcaatggg

SEQ ID NO: 896929 - DNA, 15 bp, Homo sapiens
ctgttggcaatggga

SEQ ID NO: 896930 - DNA, 15 bp, Homo sapiens
tgttggcaatgggaa

SEQ ID NO: 896931 - DNA, 15 bp, Homo sapiens
gttggcaatgggaat

SEQ ID NO: 896932 - DNA, 15 bp, Homo sapiens
ttggcaatgggaatc

SEQ ID NO: 896933 - DNA, 15 bp, Homo sapiens
tggcaatgggaatct

SEQ ID NO: 896934 - DNA, 15 bp, Homo sapiens
ggcaatgggaatctt

SEQ ID NO: 896935 - DNA, 15 bp, Homo sapiens
gcaatgggaatcttt

SEQ ID NO: 896936 - DNA, 15 bp, Homo sapiens
caatgggaatcttta

SEQ ID NO: 896937 - DNA, 15 bp, Homo sapiens
aatgggaatctttag

SEQ ID NO: 896938 - DNA, 15 bp, Homo sapiens
atgggaatctttagg

SEQ ID NO: 896939 - DNA, 15 bp, Homo sapiens
tgggaatctttaggg

SEQ ID NO: 896940 - DNA, 15 bp, Homo sapiens
gggaatctttagggc

SEQ ID NO: 896941 - DNA, 15 bp, Homo sapiens
ggaatctttagggca

SEQ ID NO: 896942 - DNA, 15 bp, Homo sapiens
gaatctttagggcat

SEQ ID NO: 896943 - DNA, 15 bp, Homo sapiens
aatctttagggcatg

SEQ ID NO: 896944 - DNA, 15 bp, Homo sapiens
atctttagggcatga

SEQ ID NO: 896945 - DNA, 15 bp, Homo sapiens
tctttagggcatgat

SEQ ID NO: 896946 - DNA, 15 bp, Homo sapiens
ctttagggcatgatc

SEQ ID NO: 896947 - DNA, 15 bp, Homo sapiens
tttagggcatgatca

SEQ ID NO: 896948 - DNA, 15 bp, Homo sapiens
ttagggcatgatcag

SEQ ID NO: 896949 - DNA, 15 bp, Homo sapiens
tagggcatgatcaga

SEQ ID NO: 896950 - DNA, 15 bp, Homo sapiens
agggcatgatcagag

SEQ ID NO: 896951 - DNA, 15 bp, Homo sapiens
gggcatgatcagagt

SEQ ID NO: 896952 - DNA, 15 bp, Homo sapiens
ggcatgatcagagtt

SEQ ID NO: 896953 - DNA, 15 bp, Homo sapiens
gcatgatcagagttt

SEQ ID NO: 896954 - DNA, 15 bp, Homo sapiens
catgatcagagtttc

SEQ ID NO: 896955 - DNA, 15 bp, Homo sapiens
atgatcagagtttca

SEQ ID NO: 896956 - DNA, 15 bp, Homo sapiens
tgatcagagtttcag

SEQ ID NO: 896957 - DNA, 15 bp, Homo sapiens
gatcagagtttcaga

SEQ ID NO: 896958 - DNA, 15 bp, Homo sapiens
atcagagtttcagag

SEQ ID NO: 896959 - DNA, 15 bp, Homo sapiens
tcagagtttcagagt

SEQ ID NO: 896960 - DNA, 15 bp, Homo sapiens
cagagtttcagagtt

SEQ ID NO: 896961 - DNA, 15 bp, Homo sapiens
agagtttcagagttg

SEQ ID NO: 896962 - DNA, 15 bp, Homo sapiens
gagtttcagagttgg

SEQ ID NO: 896963 - DNA, 15 bp, Homo sapiens
agtttcagagttggg

SEQ ID NO: 896964 - DNA, 15 bp, Homo sapiens
gtttcagagttgggc

SEQ ID NO: 896965 - DNA, 15 bp, Homo sapiens
tttcagagttgggct

SEQ ID NO: 896966 - DNA, 15 bp, Homo sapiens
ttcagagttgggctg

SEQ ID NO: 896967 - DNA, 15 bp, Homo sapiens
tcagagttgggctgg

SEQ ID NO: 896968 - DNA, 15 bp, Homo sapiens
cagagttgggctggg

SEQ ID NO: 896969 - DNA, 15 bp, Homo sapiens
agagttgggctggga

SEQ ID NO: 896970 - DNA, 15 bp, Homo sapiens
gagttgggctgggaa

SEQ ID NO: 896971 - DNA, 15 bp, Homo sapiens
agttgggctgggaag

SEQ ID NO: 896972 - DNA, 15 bp, Homo sapiens
gttgggctgggaaga

SEQ ID NO: 896973 - DNA, 15 bp, Homo sapiens
ttgggctgggaagat

SEQ ID NO: 896974 - DNA, 15 bp, Homo sapiens
tgggctgggaagatg

SEQ ID NO: 896975 - DNA, 15 bp, Homo sapiens
gggctgggaagatgg

SEQ ID NO: 896976 - DNA, 15 bp, Homo sapiens
ggctgggaagatgga

SEQ ID NO: 896977 - DNA, 15 bp, Homo sapiens
gctgggaagatggag

SEQ ID NO: 896978 - DNA, 15 bp, Homo sapiens
ctgggaagatggagc

SEQ ID NO: 896979 - DNA, 15 bp, Homo sapiens
tgggaagatggagcc

SEQ ID NO: 896980 - DNA, 15 bp, Homo sapiens
gggaagatggagcct

SEQ ID NO: 896981 - DNA, 15 bp, Homo sapiens
ggaagatggagccta

SEQ ID NO: 896982 - DNA, 15 bp, Homo sapiens
gaagatggagcctac

SEQ ID NO: 896983 - DNA, 15 bp, Homo sapiens
aagatggagcctaca

SEQ ID NO: 896984 - DNA, 15 bp, Homo sapiens
agatggagcctacag

SEQ ID NO: 896985 - DNA, 15 bp, Homo sapiens
gatggagcctacagg

SEQ ID NO: 896986 - DNA, 15 bp, Homo sapiens
atggagcctacaggt

SEQ ID NO: 896987 - DNA, 15 bp, Homo sapiens
tggagcctacaggtg

SEQ ID NO: 896988 - DNA, 15 bp, Homo sapiens
ggagcctacaggtgt

SEQ ID NO: 896989 - DNA, 15 bp, Homo sapiens
gagcctacaggtgtg

SEQ ID NO: 896990 - DNA, 15 bp, Homo sapiens
agcctacaggtgtgt

SEQ ID NO: 896991 - DNA, 15 bp, Homo sapiens
gcctacaggtgtgtg

SEQ ID NO: 896992 - DNA, 15 bp, Homo sapiens
cctacaggtgtgtgg

SEQ ID NO: 896993 - DNA, 15 bp, Homo sapiens
ctacaggtgtgtggg

SEQ ID NO: 896994 - DNA, 15 bp, Homo sapiens
tacaggtgtgtgggt

SEQ ID NO: 896995 - DNA, 15 bp, Homo sapiens
acaggtgtgtgggtc

SEQ ID NO: 896996 - DNA, 15 bp, Homo sapiens
caggtgtgtgggtcc

SEQ ID NO: 896997 - DNA, 15 bp, Homo sapiens
aggtgtgtgggtcca

SEQ ID NO: 896998 - DNA, 15 bp, Homo sapiens
ggtgtgtgggtccag

SEQ ID NO: 896999 - DNA, 15 bp, Homo sapiens
gtgtgtgggtccagt

SEQ ID NO: 897000 - DNA, 15 bp, Homo sapiens
tgtgtgggtccagtt

SEQ ID NO: 897001 - DNA, 15 bp, Homo sapiens
gtgtgggtccagtta

SEQ ID NO: 897002 - DNA, 15 bp, Homo sapiens
tgtgggtccagttac

SEQ ID NO: 897003 - DNA, 15 bp, Homo sapiens
gtgggtccagttact

SEQ ID NO: 897004 - DNA, 15 bp, Homo sapiens
tgggtccagttacta

SEQ ID NO: 897005 - DNA, 15 bp, Homo sapiens
gggtccagttactag

SEQ ID NO: 897006 - DNA, 15 bp, Homo sapiens
ggtccagttactaga

SEQ ID NO: 897007 - DNA, 15 bp, Homo sapiens
gtccagttactagac

SEQ ID NO: 897008 - DNA, 15 bp, Homo sapiens
tccagttactagaca

SEQ ID NO: 897009 - DNA, 15 bp, Homo sapiens
ccagttactagacag

SEQ ID NO: 897010 - DNA, 15 bp, Homo sapiens
cagttactagacaga

SEQ ID NO: 897011 - DNA, 15 bp, Homo sapiens
agttactagacagag

SEQ ID NO: 897012 - DNA, 15 bp, Homo sapiens
gttactagacagagg

SEQ ID NO: 897013 - DNA, 15 bp, Homo sapiens
ttactagacagagga

SEQ ID NO: 897014 - DNA, 15 bp, Homo sapiens
tactagacagaggag

SEQ ID NO: 897015 - DNA, 15 bp, Homo sapiens
actagacagaggagc

SEQ ID NO: 897016 - DNA, 15 bp, Homo sapiens
ctagacagaggagcc

SEQ ID NO: 897017 - DNA, 15 bp, Homo sapiens
tagacagaggagcca

SEQ ID NO: 897018 - DNA, 15 bp, Homo sapiens
agacagaggagccaa

SEQ ID NO: 897019 - DNA, 15 bp, Homo sapiens
gacagaggagccaag

SEQ ID NO: 897020 - DNA, 15 bp, Homo sapiens
acagaggagccaagg

SEQ ID NO: 897021 - DNA, 15 bp, Homo sapiens
cagaggagccaaggc

SEQ ID NO: 897022 - DNA, 15 bp, Homo sapiens
agaggagccaaggcc

SEQ ID NO: 897023 - DNA, 15 bp, Homo sapiens
gaggagccaaggccg

SEQ ID NO: 897024 - DNA, 15 bp, Homo sapiens
aggagccaaggccgc

SEQ ID NO: 897025 - DNA, 15 bp, Homo sapiens
ggagccaaggccgca

SEQ ID NO: 897026 - DNA, 15 bp, Homo sapiens
gagccaaggccgcag

SEQ ID NO: 897027 - DNA, 15 bp, Homo sapiens
agccaaggccgcagc

SEQ ID NO: 897028 - DNA, 15 bp, Homo sapiens
gccaaggccgcagca

SEQ ID NO: 897029 - DNA, 15 bp, Homo sapiens
ccaaggccgcagcaa

SEQ ID NO: 897030 - DNA, 15 bp, Homo sapiens
caaggccgcagcaag

SEQ ID NO: 897031 - DNA, 15 bp, Homo sapiens
aaggccgcagcaagc

SEQ ID NO: 897032 - DNA, 15 bp, Homo sapiens
aggccgcagcaagca

SEQ ID NO: 897033 - DNA, 15 bp, Homo sapiens
ggccgcagcaagcac

SEQ ID NO: 897034 - DNA, 15 bp, Homo sapiens
gccgcagcaagcact

SEQ ID NO: 897035 - DNA, 15 bp, Homo sapiens
ccgcagcaagcactc

SEQ ID NO: 897036 - DNA, 15 bp, Homo sapiens
cgcagcaagcactca

SEQ ID NO: 897037 - DNA, 15 bp, Homo sapiens
gcagcaagcactcac

SEQ ID NO: 897038 - DNA, 15 bp, Homo sapiens
cagcaagcactcacg

SEQ ID NO: 897039 - DNA, 15 bp, Homo sapiens
agcaagcactcacga

SEQ ID NO: 897040 - DNA, 15 bp, Homo sapiens
gcaagcactcacgac

SEQ ID NO: 897041 - DNA, 15 bp, Homo sapiens
caagcactcacgacc

SEQ ID NO: 897042 - DNA, 15 bp, Homo sapiens
aagcactcacgacca

SEQ ID NO: 897043 - DNA, 15 bp, Homo sapiens
agcactcacgaccaa

SEQ ID NO: 897044 - DNA, 15 bp, Homo sapiens
gcactcacgaccaag

SEQ ID NO: 897045 - DNA, 15 bp, Homo sapiens
cactcacgaccaaga

SEQ ID NO: 897046 - DNA, 15 bp, Homo sapiens
actcacgaccaagat

SEQ ID NO: 897047 - DNA, 15 bp, Homo sapiens
ctcacgaccaagatg

SEQ ID NO: 897048 - DNA, 15 bp, Homo sapiens
tcacgaccaagatgt

SEQ ID NO: 897049 - DNA, 15 bp, Homo sapiens
cacgaccaagatgtg

SEQ ID NO: 897050 - DNA, 15 bp, Homo sapiens
acgaccaagatgtgg

SEQ ID NO: 897051 - DNA, 15 bp, Homo sapiens
cgaccaagatgtggc

SEQ ID NO: 897052 - DNA, 15 bp, Homo sapiens
gaccaagatgtggcc

SEQ ID NO: 897053 - DNA, 15 bp, Homo sapiens
accaagatgtggcct

SEQ ID NO: 897054 - DNA, 15 bp, Homo sapiens
ccaagatgtggcctg

SEQ ID NO: 897055 - DNA, 15 bp, Homo sapiens
caagatgtggcctgc

SEQ ID NO: 897056 - DNA, 15 bp, Homo sapiens
aagatgtggcctgca

SEQ ID NO: 897057 - DNA, 15 bp, Homo sapiens
agatgtggcctgcag

SEQ ID NO: 897058 - DNA, 15 bp, Homo sapiens
gatgtggcctgcagc

SEQ ID NO: 897059 - DNA, 15 bp, Homo sapiens
atgtggcctgcagca

SEQ ID NO: 897060 - DNA, 15 bp, Homo sapiens
tgtggcctgcagcag

SEQ ID NO: 897061 - DNA, 15 bp, Homo sapiens
gtggcctgcagcagg

SEQ ID NO: 897062 - DNA, 15 bp, Homo sapiens
tggcctgcagcaggg

SEQ ID NO: 897063 - DNA, 15 bp, Homo sapiens
ggcctgcagcagggg

SEQ ID NO: 897064 - DNA, 15 bp, Homo sapiens
gcctgcagcagggga

SEQ ID NO: 897065 - DNA, 15 bp, Homo sapiens
cctgcagcaggggag

SEQ ID NO: 897066 - DNA, 15 bp, Homo sapiens
ctgcagcaggggaga

SEQ ID NO: 897067 - DNA, 15 bp, Homo sapiens
tgcagcaggggagat

SEQ ID NO: 897068 - DNA, 15 bp, Homo sapiens
gcagcaggggagatg

SEQ ID NO: 897069 - DNA, 15 bp, Homo sapiens
cagcaggggagatgc

SEQ ID NO: 897070 - DNA, 15 bp, Homo sapiens
agcaggggagatgct

SEQ ID NO: 897071 - DNA, 15 bp, Homo sapiens
gcaggggagatgctg

SEQ ID NO: 897072 - DNA, 15 bp, Homo sapiens
caggggagatgctga

SEQ ID NO: 897073 - DNA, 15 bp, Homo sapiens
aggggagatgctgac

SEQ ID NO: 897074 - DNA, 15 bp, Homo sapiens
ggggagatgctgaca

SEQ ID NO: 897075 - DNA, 15 bp, Homo sapiens
gggagatgctgacag

SEQ ID NO: 897076 - DNA, 15 bp, Homo sapiens
ggagatgctgacagt

SEQ ID NO: 897077 - DNA, 15 bp, Homo sapiens
gagatgctgacagtc

SEQ ID NO: 897078 - DNA, 15 bp, Homo sapiens
agatgctgacagtcc

SEQ ID NO: 897079 - DNA, 15 bp, Homo sapiens
gatgctgacagtccg

SEQ ID NO: 897080 - DNA, 15 bp, Homo sapiens
atgctgacagtccgg

SEQ ID NO: 897081 - DNA, 15 bp, Homo sapiens
tgctgacagtccgga

SEQ ID NO: 897082 - DNA, 15 bp, Homo sapiens
gctgacagtccggac

SEQ ID NO: 897083 - DNA, 15 bp, Homo sapiens
ctgacagtccggact

SEQ ID NO: 897084 - DNA, 15 bp, Homo sapiens
tgacagtccggactt

SEQ ID NO: 897085 - DNA, 15 bp, Homo sapiens
gacagtccggacttg

SEQ ID NO: 897086 - DNA, 15 bp, Homo sapiens
acagtccggacttga

SEQ ID NO: 897087 - DNA, 15 bp, Homo sapiens
cagtccggacttgat

SEQ ID NO: 897088 - DNA, 15 bp, Homo sapiens
agtccggacttgatg

SEQ ID NO: 897089 - DNA, 15 bp, Homo sapiens
gtccggacttgatgg

SEQ ID NO: 897090 - DNA, 15 bp, Homo sapiens
tccggacttgatggc

SEQ ID NO: 897091 - DNA, 15 bp, Homo sapiens
ccggacttgatggct

SEQ ID NO: 897092 - DNA, 15 bp, Homo sapiens
cggacttgatggctg

SEQ ID NO: 897093 - DNA, 15 bp, Homo sapiens
ggacttgatggctga

SEQ ID NO: 897094 - DNA, 15 bp, Homo sapiens
gacttgatggctgat

SEQ ID NO: 897095 - DNA, 15 bp, Homo sapiens
acttgatggctgatg

SEQ ID NO: 897096 - DNA, 15 bp, Homo sapiens
cttgatggctgatgg

SEQ ID NO: 897097 - DNA, 15 bp, Homo sapiens
ttgatggctgatggg

SEQ ID NO: 897098 - DNA, 15 bp, Homo sapiens
tgatggctgatggga

SEQ ID NO: 897099 - DNA, 15 bp, Homo sapiens
gatggctgatgggac

SEQ ID NO: 897100 - DNA, 15 bp, Homo sapiens
atggctgatgggacg

SEQ ID NO: 897101 - DNA, 15 bp, Homo sapiens
tggctgatgggacgg

SEQ ID NO: 897102 - DNA, 15 bp, Homo sapiens
ggctgatgggacggg

SEQ ID NO: 897103 - DNA, 15 bp, Homo sapiens
gctgatgggacggga

SEQ ID NO: 897104 - DNA, 15 bp, Homo sapiens
ctgatgggacgggaa

SEQ ID NO: 897105 - DNA, 15 bp, Homo sapiens
tgatgggacgggaag

SEQ ID NO: 897106 - DNA, 15 bp, Homo sapiens
gatgggacgggaagg

SEQ ID NO: 897107 - DNA, 15 bp, Homo sapiens
atgggacgggaaggg

SEQ ID NO: 897108 - DNA, 15 bp, Homo sapiens
tgggacgggaagggg

SEQ ID NO: 897109 - DNA, 15 bp, Homo sapiens
gggacgggaaggggc

SEQ ID NO: 897110 - DNA, 15 bp, Homo sapiens
ggacgggaaggggca

SEQ ID NO: 897111 - DNA, 15 bp, Homo sapiens
gacgggaaggggcag

SEQ ID NO: 897112 - DNA, 15 bp, Homo sapiens
acgggaaggggcagg

SEQ ID NO: 897113 - DNA, 15 bp, Homo sapiens
cgggaaggggcaggg

SEQ ID NO: 897114 - DNA, 15 bp, Homo sapiens
gggaaggggcagggt

SEQ ID NO: 897115 - DNA, 15 bp, Homo sapiens
ggaaggggcagggtg

SEQ ID NO: 897116 - DNA, 15 bp, Homo sapiens
gaaggggcagggtgc

SEQ ID NO: 897117 - DNA, 15 bp, Homo sapiens
aaggggcagggtgcc

SEQ ID NO: 897118 - DNA, 15 bp, Homo sapiens
aggggcagggtgcct

SEQ ID NO: 897119 - DNA, 15 bp, Homo sapiens
ggggcagggtgcctg

SEQ ID NO: 897120 - DNA, 15 bp, Homo sapiens
gggcagggtgcctgg

SEQ ID NO: 897121 - DNA, 15 bp, Homo sapiens
ggcagggtgcctggg

SEQ ID NO: 897122 - DNA, 15 bp, Homo sapiens
gcagggtgcctggga

SEQ ID NO: 897123 - DNA, 15 bp, Homo sapiens
cagggtgcctgggat

SEQ ID NO: 897124 - DNA, 15 bp, Homo sapiens
agggtgcctgggatg

SEQ ID NO: 897125 - DNA, 15 bp, Homo sapiens
gggtgcctgggatgg

SEQ ID NO: 897126 - DNA, 15 bp, Homo sapiens
ggtgcctgggatggg

SEQ ID NO: 897127 - DNA, 15 bp, Homo sapiens
gtgcctgggatgggg

SEQ ID NO: 897128 - DNA, 15 bp, Homo sapiens
tgcctgggatggggc

SEQ ID NO: 897129 - DNA, 15 bp, Homo sapiens
gcctgggatggggcg

SEQ ID NO: 897130 - DNA, 15 bp, Homo sapiens
cctgggatggggcgt

SEQ ID NO: 897131 - DNA, 15 bp, Homo sapiens
ctgggatggggcgtg

SEQ ID NO: 897132 - DNA, 15 bp, Homo sapiens
tgggatggggcgtgg

SEQ ID NO: 897133 - DNA, 15 bp, Homo sapiens
gggatggggcgtgga

SEQ ID NO: 897134 - DNA, 15 bp, Homo sapiens
ggatggggcgtggag

SEQ ID NO: 897135 - DNA, 15 bp, Homo sapiens
gatggggcgtggagg

SEQ ID NO: 897136 - DNA, 15 bp, Homo sapiens
atggggcgtggaggc

SEQ ID NO: 897137 - DNA, 15 bp, Homo sapiens
tggggcgtggaggct

SEQ ID NO: 897138 - DNA, 15 bp, Homo sapiens
ggggcgtggaggctg

SEQ ID NO: 897139 - DNA, 15 bp, Homo sapiens
gggcgtggaggctgg

SEQ ID NO: 897140 - DNA, 15 bp, Homo sapiens
ggcgtggaggctggg

SEQ ID NO: 897141 - DNA, 15 bp, Homo sapiens
gcgtggaggctgggg

SEQ ID NO: 897142 - DNA, 15 bp, Homo sapiens
cgtggaggctggggg

SEQ ID NO: 897143 - DNA, 15 bp, Homo sapiens
gtggaggctggggga

SEQ ID NO: 897144 - DNA, 15 bp, Homo sapiens
tggaggctgggggat

SEQ ID NO: 897145 - DNA, 15 bp, Homo sapiens
ggaggctgggggatc

SEQ ID NO: 897146 - DNA, 15 bp, Homo sapiens
gaggctgggggatct

SEQ ID NO: 897147 - DNA, 15 bp, Homo sapiens
aggctgggggatctt

SEQ ID NO: 897148 - DNA, 15 bp, Homo sapiens
ggctgggggatcttg

SEQ ID NO: 897149 - DNA, 15 bp, Homo sapiens
gctgggggatcttga

SEQ ID NO: 897150 - DNA, 15 bp, Homo sapiens
ctgggggatcttgag

SEQ ID NO: 897151 - DNA, 15 bp, Homo sapiens
tgggggatcttgaga

SEQ ID NO: 897152 - DNA, 15 bp, Homo sapiens
gggggatcttgagag

SEQ ID NO: 897153 - DNA, 15 bp, Homo sapiens
ggggatcttgagagt

SEQ ID NO: 897154 - DNA, 15 bp, Homo sapiens
gggatcttgagagtg

SEQ ID NO: 897155 - DNA, 15 bp, Homo sapiens
ggatcttgagagtgc

SEQ ID NO: 897156 - DNA, 15 bp, Homo sapiens
gatcttgagagtgct

SEQ ID NO: 897157 - DNA, 15 bp, Homo sapiens
atcttgagagtgctg

SEQ ID NO: 897158 - DNA, 15 bp, Homo sapiens
tcttgagagtgctga

SEQ ID NO: 897159 - DNA, 15 bp, Homo sapiens
cttgagagtgctgaa

SEQ ID NO: 897160 - DNA, 15 bp, Homo sapiens
ttgagagtgctgaag

SEQ ID NO: 897161 - DNA, 15 bp, Homo sapiens
tgagagtgctgaagg

SEQ ID NO: 897162 - DNA, 15 bp, Homo sapiens
gagagtgctgaaggt

SEQ ID NO: 897163 - DNA, 15 bp, Homo sapiens
agagtgctgaaggtc

SEQ ID NO: 897164 - DNA, 15 bp, Homo sapiens
gagtgctgaaggtca

SEQ ID NO: 897165 - DNA, 15 bp, Homo sapiens
agtgctgaaggtcaa

SEQ ID NO: 897166 - DNA, 15 bp, Homo sapiens
gtgctgaaggtcaat

SEQ ID NO: 897167 - DNA, 15 bp, Homo sapiens
tgctgaaggtcaatg

SEQ ID NO: 897168 - DNA, 15 bp, Homo sapiens
gctgaaggtcaatga

SEQ ID NO: 897169 - DNA, 15 bp, Homo sapiens
ctgaaggtcaatgag

SEQ ID NO: 897170 - DNA, 15 bp, Homo sapiens
tgaaggtcaatgaga

SEQ ID NO: 897171 - DNA, 15 bp, Homo sapiens
gaaggtcaatgagaa

SEQ ID NO: 897172 - DNA, 15 bp, Homo sapiens
aaggtcaatgagaag

SEQ ID NO: 897173 - DNA, 15 bp, Homo sapiens
aggtcaatgagaagt

SEQ ID NO: 897174 - DNA, 15 bp, Homo sapiens
ggtcaatgagaagtg

SEQ ID NO: 897175 - DNA, 15 bp, Homo sapiens
gtcaatgagaagtgg

SEQ ID NO: 897176 - DNA, 15 bp, Homo sapiens
tcaatgagaagtggg

SEQ ID NO: 897177 - DNA, 15 bp, Homo sapiens
caatgagaagtgggt

SEQ ID NO: 897178 - DNA, 15 bp, Homo sapiens
aatgagaagtgggtc

SEQ ID NO: 897179 - DNA, 15 bp, Homo sapiens
atgagaagtgggtct

SEQ ID NO: 897180 - DNA, 15 bp, Homo sapiens
tgagaagtgggtctg

SEQ ID NO: 897181 - DNA, 15 bp, Homo sapiens
gagaagtgggtctgg

SEQ ID NO: 897182 - DNA, 15 bp, Homo sapiens
agaagtgggtctggg

SEQ ID NO: 897183 - DNA, 15 bp, Homo sapiens
gaagtgggtctgggc

SEQ ID NO: 897184 - DNA, 15 bp, Homo sapiens
aagtgggtctgggca

SEQ ID NO: 897185 - DNA, 15 bp, Homo sapiens
agtgggtctgggcag

SEQ ID NO: 897186 - DNA, 15 bp, Homo sapiens
gtgggtctgggcagt

SEQ ID NO: 897187 - DNA, 15 bp, Homo sapiens
tgggtctgggcagtg

SEQ ID NO: 897188 - DNA, 15 bp, Homo sapiens
gggtctgggcagtgc

SEQ ID NO: 897189 - DNA, 15 bp, Homo sapiens
ggtctgggcagtgca

SEQ ID NO: 897190 - DNA, 15 bp, Homo sapiens
gtctgggcagtgcag

SEQ ID NO: 897191 - DNA, 15 bp, Homo sapiens
tctgggcagtgcagg

SEQ ID NO: 897192 - DNA, 15 bp, Homo sapiens
ctgggcagtgcagga

SEQ ID NO: 897193 - DNA, 15 bp, Homo sapiens
tgggcagtgcaggat

SEQ ID NO: 897194 - DNA, 15 bp, Homo sapiens
gggcagtgcaggatg

SEQ ID NO: 897195 - DNA, 15 bp, Homo sapiens
ggcagtgcaggatgg

SEQ ID NO: 897196 - DNA, 15 bp, Homo sapiens
gcagtgcaggatggt

SEQ ID NO: 897197 - DNA, 15 bp, Homo sapiens
cagtgcaggatggtc

SEQ ID NO: 897198 - DNA, 15 bp, Homo sapiens
agtgcaggatggtca

SEQ ID NO: 897199 - DNA, 15 bp, Homo sapiens
gtgcaggatggtcag

SEQ ID NO: 897200 - DNA, 15 bp, Homo sapiens
tgcaggatggtcagg

SEQ ID NO: 897201 - DNA, 15 bp, Homo sapiens
gcaggatggtcaggt

SEQ ID NO: 897202 - DNA, 15 bp, Homo sapiens
caggatggtcaggtg

SEQ ID NO: 897203 - DNA, 15 bp, Homo sapiens
aggatggtcaggtgt

SEQ ID NO: 897204 - DNA, 15 bp, Homo sapiens
ggatggtcaggtgtt

SEQ ID NO: 897205 - DNA, 15 bp, Homo sapiens
gatggtcaggtgttc

SEQ ID NO: 897206 - DNA, 15 bp, Homo sapiens
atggtcaggtgttct

SEQ ID NO: 897207 - DNA, 15 bp, Homo sapiens
tggtcaggtgttctg

SEQ ID NO: 897208 - DNA, 15 bp, Homo sapiens
ggtcaggtgttctgt

SEQ ID NO: 897209 - DNA, 15 bp, Homo sapiens
gtcaggtgttctgtc

SEQ ID NO: 897210 - DNA, 15 bp, Homo sapiens
tcaggtgttctgtca

SEQ ID NO: 897211 - DNA, 15 bp, Homo sapiens
caggtgttctgtcat

SEQ ID NO: 897212 - DNA, 15 bp, Homo sapiens
aggtgttctgtcatc

SEQ ID NO: 897213 - DNA, 15 bp, Homo sapiens
ggtgttctgtcatcg

SEQ ID NO: 897214 - DNA, 15 bp, Homo sapiens
gtgttctgtcatcgc

SEQ ID NO: 897215 - DNA, 15 bp, Homo sapiens
tgttctgtcatcgct

SEQ ID NO: 897216 - DNA, 15 bp, Homo sapiens
gttctgtcatcgcta

SEQ ID NO: 897217 - DNA, 15 bp, Homo sapiens
ttctgtcatcgctag

SEQ ID NO: 897218 - DNA, 15 bp, Homo sapiens
tctgtcatcgctagt

SEQ ID NO: 897219 - DNA, 15 bp, Homo sapiens
ctgtcatcgctagta

SEQ ID NO: 897220 - DNA, 15 bp, Homo sapiens
tgtcatcgctagtat

SEQ ID NO: 897221 - DNA, 15 bp, Homo sapiens
gtcatcgctagtatg

SEQ ID NO: 897222 - DNA, 15 bp, Homo sapiens
tcatcgctagtatga

SEQ ID NO: 897223 - DNA, 15 bp, Homo sapiens
catcgctagtatgac

SEQ ID NO: 897224 - DNA, 15 bp, Homo sapiens
atcgctagtatgact

SEQ ID NO: 897225 - DNA, 15 bp, Homo sapiens
tcgctagtatgactc

SEQ ID NO: 897226 - DNA, 15 bp, Homo sapiens
cgctagtatgactcg

SEQ ID NO: 897227 - DNA, 15 bp, Homo sapiens
gctagtatgactcgg

SEQ ID NO: 897228 - DNA, 15 bp, Homo sapiens
ctagtatgactcggc

SEQ ID NO: 897229 - DNA, 15 bp, Homo sapiens
tagtatgactcggcc

SEQ ID NO: 897230 - DNA, 15 bp, Homo sapiens
agtatgactcggccc

SEQ ID NO: 897231 - DNA, 15 bp, Homo sapiens
gtatgactcggcccc

SEQ ID NO: 897232 - DNA, 15 bp, Homo sapiens
tatgactcggcccca

SEQ ID NO: 897233 - DNA, 15 bp, Homo sapiens
atgactcggccccac

SEQ ID NO: 897234 - DNA, 15 bp, Homo sapiens
tgactcggccccacc

SEQ ID NO: 897235 - DNA, 15 bp, Homo sapiens
gactcggccccaccc

SEQ ID NO: 897236 - DNA, 15 bp, Homo sapiens
actcggccccacccg

SEQ ID NO: 897237 - DNA, 15 bp, Homo sapiens
ctcggccccacccgg

SEQ ID NO: 897238 - DNA, 15 bp, Homo sapiens
tcggccccacccggt

SEQ ID NO: 897239 - DNA, 15 bp, Homo sapiens
cggccccacccggtg

SEQ ID NO: 897240 - DNA, 15 bp, Homo sapiens
ggccccacccggtgg

SEQ ID NO: 897241 - DNA, 15 bp, Homo sapiens
gccccacccggtgga

SEQ ID NO: 897242 - DNA, 15 bp, Homo sapiens
ccccacccggtggag

SEQ ID NO: 897243 - DNA, 15 bp, Homo sapiens
cccacccggtggaga

SEQ ID NO: 897244 - DNA, 15 bp, Homo sapiens
ccacccggtggagag

SEQ ID NO: 897245 - DNA, 15 bp, Homo sapiens
cacccggtggagaga

SEQ ID NO: 897246 - DNA, 15 bp, Homo sapiens
acccggtggagagag

SEQ ID NO: 897247 - DNA, 15 bp, Homo sapiens
cccggtggagagagg

SEQ ID NO: 897248 - DNA, 15 bp, Homo sapiens
ccggtggagagaggt

SEQ ID NO: 897249 - DNA, 15 bp, Homo sapiens
cggtggagagaggtc

SEQ ID NO: 897250 - DNA, 15 bp, Homo sapiens
ggtggagagaggtct

SEQ ID NO: 897251 - DNA, 15 bp, Homo sapiens
gtggagagaggtctc

SEQ ID NO: 897252 - DNA, 15 bp, Homo sapiens
tggagagaggtctca

SEQ ID NO: 897253 - DNA, 15 bp, Homo sapiens
ggagagaggtctcag

SEQ ID NO: 897254 - DNA, 15 bp, Homo sapiens
gagagaggtctcagg

SEQ ID NO: 897255 - DNA, 15 bp, Homo sapiens
agagaggtctcaggg

SEQ ID NO: 897256 - DNA, 15 bp, Homo sapiens
gagaggtctcagggc

SEQ ID NO: 897257 - DNA, 15 bp, Homo sapiens
agaggtctcagggcc

SEQ ID NO: 897258 - DNA, 15 bp, Homo sapiens
gaggtctcagggccc

SEQ ID NO: 897259 - DNA, 15 bp, Homo sapiens
aggtctcagggccca

SEQ ID NO: 897260 - DNA, 15 bp, Homo sapiens
ggtctcagggcccac

SEQ ID NO: 897261 - DNA, 15 bp, Homo sapiens
gtctcagggcccact

SEQ ID NO: 897262 - DNA, 15 bp, Homo sapiens
tctcagggcccactg

SEQ ID NO: 897263 - DNA, 15 bp, Homo sapiens
ctcagggcccactgg

SEQ ID NO: 897264 - DNA, 15 bp, Homo sapiens
tcagggcccactgga

SEQ ID NO: 897265 - DNA, 15 bp, Homo sapiens
cagggcccactggag

SEQ ID NO: 897266 - DNA, 15 bp, Homo sapiens
agggcccactggagg

SEQ ID NO: 897267 - DNA, 15 bp, Homo sapiens
gggcccactggaggc

SEQ ID NO: 897268 - DNA, 15 bp, Homo sapiens
ggcccactggaggca

SEQ ID NO: 897269 - DNA, 15 bp, Homo sapiens
gcccactggaggcag

SEQ ID NO: 897270 - DNA, 15 bp, Homo sapiens
cccactggaggcagc

SEQ ID NO: 897271 - DNA, 15 bp, Homo sapiens
ccactggaggcagct

SEQ ID NO: 897272 - DNA, 15 bp, Homo sapiens
cactggaggcagctc

SEQ ID NO: 897273 - DNA, 15 bp, Homo sapiens
actggaggcagctcc

SEQ ID NO: 897274 - DNA, 15 bp, Homo sapiens
ctggaggcagctcct

SEQ ID NO: 897275 - DNA, 15 bp, Homo sapiens
tggaggcagctccta

SEQ ID NO: 897276 - DNA, 15 bp, Homo sapiens
ggaggcagctcctac

SEQ ID NO: 897277 - DNA, 15 bp, Homo sapiens
gaggcagctcctacc

SEQ ID NO: 897278 - DNA, 15 bp, Homo sapiens
aggcagctcctaccc

SEQ ID NO: 897279 - DNA, 15 bp, Homo sapiens
ggcagctcctaccca

SEQ ID NO: 897280 - DNA, 15 bp, Homo sapiens
gcagctcctacccat

SEQ ID NO: 897281 - DNA, 15 bp, Homo sapiens
cagctcctacccatg

SEQ ID NO: 897282 - DNA, 15 bp, Homo sapiens
agctcctacccatga

SEQ ID NO: 897283 - DNA, 15 bp, Homo sapiens
gctcctacccatgac

SEQ ID NO: 897284 - DNA, 15 bp, Homo sapiens
ctcctacccatgacc

SEQ ID NO: 897285 - DNA, 15 bp, Homo sapiens
tcctacccatgaccc

SEQ ID NO: 897286 - DNA, 15 bp, Homo sapiens
cctacccatgacccc

SEQ ID NO: 897287 - DNA, 15 bp, Homo sapiens
ctacccatgacccct

SEQ ID NO: 897288 - DNA, 15 bp, Homo sapiens
tacccatgacccctg

SEQ ID NO: 897289 - DNA, 15 bp, Homo sapiens
acccatgacccctgc

SEQ ID NO: 897290 - DNA, 15 bp, Homo sapiens
cccatgacccctgcc

SEQ ID NO: 897291 - DNA, 15 bp, Homo sapiens
ccatgacccctgcct

SEQ ID NO: 897292 - DNA, 15 bp, Homo sapiens
catgacccctgcctc

SEQ ID NO: 897293 - DNA, 15 bp, Homo sapiens
atgacccctgcctct

SEQ ID NO: 897294 - DNA, 15 bp, Homo sapiens
tgacccctgcctctg

SEQ ID NO: 897295 - DNA, 15 bp, Homo sapiens
gacccctgcctctgc

SEQ ID NO: 897296 - DNA, 15 bp, Homo sapiens
acccctgcctctgcg

SEQ ID NO: 897297 - DNA, 15 bp, Homo sapiens
cccctgcctctgcgt

SEQ ID NO: 897298 - DNA, 15 bp, Homo sapiens
ccctgcctctgcgtt

SEQ ID NO: 897299 - DNA, 15 bp, Homo sapiens
cctgcctctgcgttg

SEQ ID NO: 897300 - DNA, 15 bp, Homo sapiens
ctgcctctgcgttgg

SEQ ID NO: 897301 - DNA, 15 bp, Homo sapiens
tgcctctgcgttggc

SEQ ID NO: 897302 - DNA, 15 bp, Homo sapiens
gcctctgcgttggca

SEQ ID NO: 897303 - DNA, 15 bp, Homo sapiens
cctctgcgttggcat

SEQ ID NO: 897304 - DNA, 15 bp, Homo sapiens
ctctgcgttggcatt

SEQ ID NO: 897305 - DNA, 15 bp, Homo sapiens
tctgcgttggcattc

SEQ ID NO: 897306 - DNA, 15 bp, Homo sapiens
ctgcgttggcattca

SEQ ID NO: 897307 - DNA, 15 bp, Homo sapiens
tgcgttggcattcag

SEQ ID NO: 897308 - DNA, 15 bp, Homo sapiens
gcgttggcattcagt

SEQ ID NO: 897309 - DNA, 15 bp, Homo sapiens
cgttggcattcagta

SEQ ID NO: 897310 - DNA, 15 bp, Homo sapiens
gttggcattcagtag

SEQ ID NO: 897311 - DNA, 15 bp, Homo sapiens
ttggcattcagtagc

SEQ ID NO: 897312 - DNA, 15 bp, Homo sapiens
tggcattcagtagcc

SEQ ID NO: 897313 - DNA, 15 bp, Homo sapiens
ggcattcagtagccc

SEQ ID NO: 897314 - DNA, 15 bp, Homo sapiens
gcattcagtagccct

SEQ ID NO: 897315 - DNA, 15 bp, Homo sapiens
cattcagtagccctt

SEQ ID NO: 897316 - DNA, 15 bp, Homo sapiens
attcagtagcccttg

SEQ ID NO: 897317 - DNA, 15 bp, Homo sapiens
ttcagtagcccttga

SEQ ID NO: 897318 - DNA, 15 bp, Homo sapiens
tcagtagcccttgat

SEQ ID NO: 897319 - DNA, 15 bp, Homo sapiens
cagtagcccttgatt

SEQ ID NO: 897320 - DNA, 15 bp, Homo sapiens
agtagcccttgattt

SEQ ID NO: 897321 - DNA, 15 bp, Homo sapiens
gtagcccttgattta

SEQ ID NO: 897322 - DNA, 15 bp, Homo sapiens
tagcccttgatttat

SEQ ID NO: 897323 - DNA, 15 bp, Homo sapiens
agcccttgatttatc

SEQ ID NO: 897324 - DNA, 15 bp, Homo sapiens
gcccttgatttatcc

SEQ ID NO: 897325 - DNA, 15 bp, Homo sapiens
cccttgatttatccc

SEQ ID NO: 897326 - DNA, 15 bp, Homo sapiens
ccttgatttatccca

SEQ ID NO: 897327 - DNA, 15 bp, Homo sapiens
cttgatttatcccaa

SEQ ID NO: 897328 - DNA, 15 bp, Homo sapiens
ttgatttatcccaat

SEQ ID NO: 897329 - DNA, 15 bp, Homo sapiens
tgatttatcccaatg

SEQ ID NO: 897330 - DNA, 15 bp, Homo sapiens
gatttatcccaatgc

SEQ ID NO: 897331 - DNA, 15 bp, Homo sapiens
atttatcccaatgca

SEQ ID NO: 897332 - DNA, 15 bp, Homo sapiens
tttatcccaatgcaa

SEQ ID NO: 897333 - DNA, 15 bp, Homo sapiens
ttatcccaatgcaag

SEQ ID NO: 897334 - DNA, 15 bp, Homo sapiens
tatcccaatgcaaga

SEQ ID NO: 897335 - DNA, 15 bp, Homo sapiens
atcccaatgcaagaa

SEQ ID NO: 897336 - DNA, 15 bp, Homo sapiens
tcccaatgcaagaaa

SEQ ID NO: 897337 - DNA, 15 bp, Homo sapiens
cccaatgcaagaaac

SEQ ID NO: 897338 - DNA, 15 bp, Homo sapiens
ccaatgcaagaaaca

SEQ ID NO: 897339 - DNA, 15 bp, Homo sapiens
caatgcaagaaacaa

SEQ ID NO: 897340 - DNA, 15 bp, Homo sapiens
aatgcaagaaacaaa

SEQ ID NO: 897341 - DNA, 15 bp, Homo sapiens
atgcaagaaacaaat

SEQ ID NO: 897342 - DNA, 15 bp, Homo sapiens
tgcaagaaacaaatt

SEQ ID NO: 897343 - DNA, 15 bp, Homo sapiens
gcaagaaacaaattt

SEQ ID NO: 897344 - DNA, 15 bp, Homo sapiens
caagaaacaaatttt

SEQ ID NO: 897345 - DNA, 15 bp, Homo sapiens
aagaaacaaattttc

SEQ ID NO: 897346 - DNA, 15 bp, Homo sapiens
agaaacaaattttca

SEQ ID NO: 897347 - DNA, 15 bp, Homo sapiens
gaaacaaattttcaa

SEQ ID NO: 897348 - DNA, 15 bp, Homo sapiens
aaacaaattttcaat

SEQ ID NO: 897349 - DNA, 15 bp, Homo sapiens
aacaaattttcaata

SEQ ID NO: 897350 - DNA, 15 bp, Homo sapiens
acaaattttcaataa

SEQ ID NO: 897351 - DNA, 15 bp, Homo sapiens
caaattttcaataac

SEQ ID NO: 897352 - DNA, 15 bp, Homo sapiens
aaattttcaataact

SEQ ID NO: 897353 - DNA, 15 bp, Homo sapiens
aattttcaataactg

SEQ ID NO: 897354 - DNA, 15 bp, Homo sapiens
attttcaataactgg

SEQ ID NO: 897355 - DNA, 15 bp, Homo sapiens
ttttcaataactggt

SEQ ID NO: 897356 - DNA, 15 bp, Homo sapiens
tttcaataactggta

SEQ ID NO: 897357 - DNA, 15 bp, Homo sapiens
ttcaataactggtaa

SEQ ID NO: 897358 - DNA, 15 bp, Homo sapiens
tcaataactggtaac

SEQ ID NO: 897359 - DNA, 15 bp, Homo sapiens
caataactggtaaca

SEQ ID NO: 897360 - DNA, 15 bp, Homo sapiens
aataactggtaacat

SEQ ID NO: 897361 - DNA, 15 bp, Homo sapiens
ataactggtaacatt

SEQ ID NO: 897362 - DNA, 15 bp, Homo sapiens
taactggtaacattc

SEQ ID NO: 897363 - DNA, 15 bp, Homo sapiens
aactggtaacattct

SEQ ID NO: 897364 - DNA, 15 bp, Homo sapiens
actggtaacattctc

SEQ ID NO: 897365 - DNA, 15 bp, Homo sapiens
ctggtaacattctcc

SEQ ID NO: 897366 - DNA, 15 bp, Homo sapiens
tggtaacattctccg

SEQ ID NO: 897367 - DNA, 15 bp, Homo sapiens
ggtaacattctccgg

SEQ ID NO: 897368 - DNA, 15 bp, Homo sapiens
gtaacattctccggg

SEQ ID NO: 897369 - DNA, 15 bp, Homo sapiens
taacattctccggga

SEQ ID NO: 897370 - DNA, 15 bp, Homo sapiens
aacattctccgggag

SEQ ID NO: 897371 - DNA, 15 bp, Homo sapiens
acattctccgggagt

SEQ ID NO: 897372 - DNA, 15 bp, Homo sapiens
cattctccgggagtg

SEQ ID NO: 897373 - DNA, 15 bp, Homo sapiens
attctccgggagtga

SEQ ID NO: 897374 - DNA, 15 bp, Homo sapiens
ttctccgggagtgat

SEQ ID NO: 897375 - DNA, 15 bp, Homo sapiens
tctccgggagtgata

SEQ ID NO: 897376 - DNA, 15 bp, Homo sapiens
ctccgggagtgatat

SEQ ID NO: 897377 - DNA, 15 bp, Homo sapiens
tccgggagtgatatg

SEQ ID NO: 897378 - DNA, 15 bp, Homo sapiens
ccgggagtgatatgg

SEQ ID NO: 897379 - DNA, 15 bp, Homo sapiens
cgggagtgatatggg

SEQ ID NO: 897380 - DNA, 15 bp, Homo sapiens
gggagtgatatgggc

SEQ ID NO: 897381 - DNA, 15 bp, Homo sapiens
ggagtgatatgggcc

SEQ ID NO: 897382 - DNA, 15 bp, Homo sapiens
gagtgatatgggcca

SEQ ID NO: 897383 - DNA, 15 bp, Homo sapiens
agtgatatgggccag

SEQ ID NO: 897384 - DNA, 15 bp, Homo sapiens
gtgatatgggccaga

SEQ ID NO: 897385 - DNA, 15 bp, Homo sapiens
tgatatgggccagag

SEQ ID NO: 897386 - DNA, 15 bp, Homo sapiens
gatatgggccagagc

SEQ ID NO: 897387 - DNA, 15 bp, Homo sapiens
atatgggccagagca

SEQ ID NO: 897388 - DNA, 15 bp, Homo sapiens
tatgggccagagcag

SEQ ID NO: 897389 - DNA, 15 bp, Homo sapiens
atgggccagagcagg

SEQ ID NO: 897390 - DNA, 15 bp, Homo sapiens
tgggccagagcaggc

SEQ ID NO: 897391 - DNA, 15 bp, Homo sapiens
gggccagagcaggct

SEQ ID NO: 897392 - DNA, 15 bp, Homo sapiens
ggccagagcaggctg

SEQ ID NO: 897393 - DNA, 15 bp, Homo sapiens
gccagagcaggctgg

SEQ ID NO: 897394 - DNA, 15 bp, Homo sapiens
ccagagcaggctggt

SEQ ID NO: 897395 - DNA, 15 bp, Homo sapiens
cagagcaggctggtt

SEQ ID NO: 897396 - DNA, 15 bp, Homo sapiens
agagcaggctggttt

SEQ ID NO: 897397 - DNA, 15 bp, Homo sapiens
gagcaggctggtttt

SEQ ID NO: 897398 - DNA, 15 bp, Homo sapiens
agcaggctggttttc

SEQ ID NO: 897399 - DNA, 15 bp, Homo sapiens
gcaggctggttttca

SEQ ID NO: 897400 - DNA, 15 bp, Homo sapiens
caggctggttttcag

SEQ ID NO: 897401 - DNA, 15 bp, Homo sapiens
aggctggttttcagg

SEQ ID NO: 897402 - DNA, 15 bp, Homo sapiens
ggctggttttcaggc

SEQ ID NO: 897403 - DNA, 15 bp, Homo sapiens
gctggttttcaggct

SEQ ID NO: 897404 - DNA, 15 bp, Homo sapiens
ctggttttcaggctg

SEQ ID NO: 897405 - DNA, 15 bp, Homo sapiens
tggttttcaggctgc

SEQ ID NO: 897406 - DNA, 15 bp, Homo sapiens
ggttttcaggctgcc

SEQ ID NO: 897407 - DNA, 15 bp, Homo sapiens
gttttcaggctgcct

SEQ ID NO: 897408 - DNA, 15 bp, Homo sapiens
ttttcaggctgcctc

SEQ ID NO: 897409 - DNA, 15 bp, Homo sapiens
tttcaggctgcctcc

SEQ ID NO: 897410 - DNA, 15 bp, Homo sapiens
ttcaggctgcctccc

SEQ ID NO: 897411 - DNA, 15 bp, Homo sapiens
tcaggctgcctccct

SEQ ID NO: 897412 - DNA, 15 bp, Homo sapiens
caggctgcctccctg

SEQ ID NO: 897413 - DNA, 15 bp, Homo sapiens
aggctgcctccctgg

SEQ ID NO: 897414 - DNA, 15 bp, Homo sapiens
ggctgcctccctggt

SEQ ID NO: 897415 - DNA, 15 bp, Homo sapiens
gctgcctccctggtc

SEQ ID NO: 897416 - DNA, 15 bp, Homo sapiens
ctgcctccctggtcc

SEQ ID NO: 897417 - DNA, 15 bp, Homo sapiens
tgcctccctggtcct

SEQ ID NO: 897418 - DNA, 15 bp, Homo sapiens
gcctccctggtcctg

SEQ ID NO: 897419 - DNA, 15 bp, Homo sapiens
cctccctggtcctga

SEQ ID NO: 897420 - DNA, 15 bp, Homo sapiens
ctccctggtcctgag

SEQ ID NO: 897421 - DNA, 15 bp, Homo sapiens
tccctggtcctgaga

SEQ ID NO: 897422 - DNA, 15 bp, Homo sapiens
ccctggtcctgagat

SEQ ID NO: 897423 - DNA, 15 bp, Homo sapiens
cctggtcctgagatt

SEQ ID NO: 897424 - DNA, 15 bp, Homo sapiens
ctggtcctgagattg

SEQ ID NO: 897425 - DNA, 15 bp, Homo sapiens
tggtcctgagattgc

SEQ ID NO: 897426 - DNA, 15 bp, Homo sapiens
ggtcctgagattgcc

SEQ ID NO: 897427 - DNA, 15 bp, Homo sapiens
gtcctgagattgcca

SEQ ID NO: 897428 - DNA, 15 bp, Homo sapiens
tcctgagattgccag

SEQ ID NO: 897429 - DNA, 15 bp, Homo sapiens
cctgagattgccagc

SEQ ID NO: 897430 - DNA, 15 bp, Homo sapiens
ctgagattgccagct

SEQ ID NO: 897431 - DNA, 15 bp, Homo sapiens
tgagattgccagctc

SEQ ID NO: 897432 - DNA, 15 bp, Homo sapiens
gagattgccagctca

SEQ ID NO: 897433 - DNA, 15 bp, Homo sapiens
agattgccagctcag

SEQ ID NO: 897434 - DNA, 15 bp, Homo sapiens
gattgccagctcaga

SEQ ID NO: 897435 - DNA, 15 bp, Homo sapiens
attgccagctcagag

SEQ ID NO: 897436 - DNA, 15 bp, Homo sapiens
ttgccagctcagagg

SEQ ID NO: 897437 - DNA, 15 bp, Homo sapiens
tgccagctcagagga

SEQ ID NO: 897438 - DNA, 15 bp, Homo sapiens
gccagctcagaggag

SEQ ID NO: 897439 - DNA, 15 bp, Homo sapiens
ccagctcagaggagc

SEQ ID NO: 897440 - DNA, 15 bp, Homo sapiens
cagctcagaggagca

SEQ ID NO: 897441 - DNA, 15 bp, Homo sapiens
agctcagaggagcat

SEQ ID NO: 897442 - DNA, 15 bp, Homo sapiens
gctcagaggagcatc

SEQ ID NO: 897443 - DNA, 15 bp, Homo sapiens
ctcagaggagcatcc

SEQ ID NO: 897444 - DNA, 15 bp, Homo sapiens
tcagaggagcatccc

SEQ ID NO: 897445 - DNA, 15 bp, Homo sapiens
cagaggagcatcccc

SEQ ID NO: 897446 - DNA, 15 bp, Homo sapiens
agaggagcatcccct

SEQ ID NO: 897447 - DNA, 15 bp, Homo sapiens
gaggagcatcccctg

SEQ ID NO: 897448 - DNA, 15 bp, Homo sapiens
aggagcatcccctga

SEQ ID NO: 897449 - DNA, 15 bp, Homo sapiens
ggagcatcccctgaa

SEQ ID NO: 897450 - DNA, 15 bp, Homo sapiens
gagcatcccctgaat

SEQ ID NO: 897451 - DNA, 15 bp, Homo sapiens
agcatcccctgaatg

SEQ ID NO: 897452 - DNA, 15 bp, Homo sapiens
gcatcccctgaatga

SEQ ID NO: 897453 - DNA, 15 bp, Homo sapiens
catcccctgaatgaa

SEQ ID NO: 897454 - DNA, 15 bp, Homo sapiens
atcccctgaatgaac

SEQ ID NO: 897455 - DNA, 15 bp, Homo sapiens
tcccctgaatgaact

SEQ ID NO: 897456 - DNA, 15 bp, Homo sapiens
cccctgaatgaactg

SEQ ID NO: 897457 - DNA, 15 bp, Homo sapiens
ccctgaatgaactgt

SEQ ID NO: 897458 - DNA, 15 bp, Homo sapiens
cctgaatgaactgtc

SEQ ID NO: 897459 - DNA, 15 bp, Homo sapiens
ctgaatgaactgtca

SEQ ID NO: 897460 - DNA, 15 bp, Homo sapiens
tgaatgaactgtcag

SEQ ID NO: 897461 - DNA, 15 bp, Homo sapiens
gaatgaactgtcagc

SEQ ID NO: 897462 - DNA, 15 bp, Homo sapiens
aatgaactgtcagca

SEQ ID NO: 897463 - DNA, 15 bp, Homo sapiens
atgaactgtcagcag

SEQ ID NO: 897464 - DNA, 15 bp, Homo sapiens
tgaactgtcagcagg

SEQ ID NO: 897465 - DNA, 15 bp, Homo sapiens
gaactgtcagcagga

SEQ ID NO: 897466 - DNA, 15 bp, Homo sapiens
aactgtcagcaggat

SEQ ID NO: 897467 - DNA, 15 bp, Homo sapiens
actgtcagcaggatg

SEQ ID NO: 897468 - DNA, 15 bp, Homo sapiens
ctgtcagcaggatgt

SEQ ID NO: 897469 - DNA, 15 bp, Homo sapiens
tgtcagcaggatgtg

SEQ ID NO: 897470 - DNA, 15 bp, Homo sapiens
gtcagcaggatgtga

SEQ ID NO: 897471 - DNA, 15 bp, Homo sapiens
tcagcaggatgtgaa

SEQ ID NO: 897472 - DNA, 15 bp, Homo sapiens
cagcaggatgtgaag

SEQ ID NO: 897473 - DNA, 15 bp, Homo sapiens
agcaggatgtgaagg

SEQ ID NO: 897474 - DNA, 15 bp, Homo sapiens
gcaggatgtgaagga

SEQ ID NO: 897475 - DNA, 15 bp, Homo sapiens
caggatgtgaaggaa

SEQ ID NO: 897476 - DNA, 15 bp, Homo sapiens
aggatgtgaaggaag

SEQ ID NO: 897477 - DNA, 15 bp, Homo sapiens
ggatgtgaaggaagg

SEQ ID NO: 897478 - DNA, 15 bp, Homo sapiens
gatgtgaaggaagga

SEQ ID NO: 897479 - DNA, 15 bp, Homo sapiens
atgtgaaggaaggac

SEQ ID NO: 897480 - DNA, 15 bp, Homo sapiens
tgtgaaggaaggaca

SEQ ID NO: 897481 - DNA, 15 bp, Homo sapiens
gtgaaggaaggacat

SEQ ID NO: 897482 - DNA, 15 bp, Homo sapiens
tgaaggaaggacatg

SEQ ID NO: 897483 - DNA, 15 bp, Homo sapiens
gaaggaaggacatgc

SEQ ID NO: 897484 - DNA, 15 bp, Homo sapiens
aaggaaggacatgct

SEQ ID NO: 897485 - DNA, 15 bp, Homo sapiens
aggaaggacatgctg

SEQ ID NO: 897486 - DNA, 15 bp, Homo sapiens
ggaaggacatgctgg

SEQ ID NO: 897487 - DNA, 15 bp, Homo sapiens
gaaggacatgctgga

SEQ ID NO: 897488 - DNA, 15 bp, Homo sapiens
aaggacatgctggag

SEQ ID NO: 897489 - DNA, 15 bp, Homo sapiens
aggacatgctggagc

SEQ ID NO: 897490 - DNA, 15 bp, Homo sapiens
ggacatgctggagcc

SEQ ID NO: 897491 - DNA, 15 bp, Homo sapiens
gacatgctggagcca

SEQ ID NO: 897492 - DNA, 15 bp, Homo sapiens
acatgctggagccac

SEQ ID NO: 897493 - DNA, 15 bp, Homo sapiens
catgctggagccact

SEQ ID NO: 897494 - DNA, 15 bp, Homo sapiens
atgctggagccactg

SEQ ID NO: 897495 - DNA, 15 bp, Homo sapiens
tgctggagccactgc

SEQ ID NO: 897496 - DNA, 15 bp, Homo sapiens
gctggagccactgct

SEQ ID NO: 897497 - DNA, 15 bp, Homo sapiens
ctggagccactgctg

SEQ ID NO: 897498 - DNA, 15 bp, Homo sapiens
tggagccactgctgt

SEQ ID NO: 897499 - DNA, 15 bp, Homo sapiens
ggagccactgctgtc

SEQ ID NO: 897500 - DNA, 15 bp, Homo sapiens
gagccactgctgtcc

SEQ ID NO: 897501 - DNA, 15 bp, Homo sapiens
agccactgctgtcct

SEQ ID NO: 897502 - DNA, 15 bp, Homo sapiens
gccactgctgtcctc

SEQ ID NO: 897503 - DNA, 15 bp, Homo sapiens
ccactgctgtcctct

SEQ ID NO: 897504 - DNA, 15 bp, Homo sapiens
cactgctgtcctctc

SEQ ID NO: 897505 - DNA, 15 bp, Homo sapiens
actgctgtcctctcc

SEQ ID NO: 897506 - DNA, 15 bp, Homo sapiens
ctgctgtcctctccc

SEQ ID NO: 897507 - DNA, 15 bp, Homo sapiens
tgctgtcctctcccc

SEQ ID NO: 897508 - DNA, 15 bp, Homo sapiens
gctgtcctctcccct

SEQ ID NO: 897509 - DNA, 15 bp, Homo sapiens
ctgtcctctcccctg

SEQ ID NO: 897510 - DNA, 15 bp, Homo sapiens
tgtcctctcccctgc

SEQ ID NO: 897511 - DNA, 15 bp, Homo sapiens
gtcctctcccctgcc

SEQ ID NO: 897512 - DNA, 15 bp, Homo sapiens
tcctctcccctgccg

SEQ ID NO: 897513 - DNA, 15 bp, Homo sapiens
cctctcccctgccgc

SEQ ID NO: 897514 - DNA, 15 bp, Homo sapiens
ctctcccctgccgcc

SEQ ID NO: 897515 - DNA, 15 bp, Homo sapiens
tctcccctgccgccc

SEQ ID NO: 897516 - DNA, 15 bp, Homo sapiens
ctcccctgccgccca

SEQ ID NO: 897517 - DNA, 15 bp, Homo sapiens
tcccctgccgcccag

SEQ ID NO: 897518 - DNA, 15 bp, Homo sapiens
cccctgccgcccagg

SEQ ID NO: 897519 - DNA, 15 bp, Homo sapiens
ccctgccgcccaggc

SEQ ID NO: 897520 - DNA, 15 bp, Homo sapiens
cctgccgcccaggct

SEQ ID NO: 897521 - DNA, 15 bp, Homo sapiens
ctgccgcccaggctt

SEQ ID NO: 897522 - DNA, 15 bp, Homo sapiens
tgccgcccaggcttg

SEQ ID NO: 897523 - DNA, 15 bp, Homo sapiens
gccgcccaggcttga

SEQ ID NO: 897524 - DNA, 15 bp, Homo sapiens
ccgcccaggcttgac

SEQ ID NO: 897525 - DNA, 15 bp, Homo sapiens
cgcccaggcttgacc

SEQ ID NO: 897526 - DNA, 15 bp, Homo sapiens
gcccaggcttgacca

SEQ ID NO: 897527 - DNA, 15 bp, Homo sapiens
cccaggcttgaccag

SEQ ID NO: 897528 - DNA, 15 bp, Homo sapiens
ccaggcttgaccagg

SEQ ID NO: 897529 - DNA, 15 bp, Homo sapiens
caggcttgaccaggt

SEQ ID NO: 897530 - DNA, 15 bp, Homo sapiens
aggcttgaccaggtg

SEQ ID NO: 897531 - DNA, 15 bp, Homo sapiens
ggcttgaccaggtgt

SEQ ID NO: 897532 - DNA, 15 bp, Homo sapiens
gcttgaccaggtgtg

SEQ ID NO: 897533 - DNA, 15 bp, Homo sapiens
cttgaccaggtgtgg

SEQ ID NO: 897534 - DNA, 15 bp, Homo sapiens
ttgaccaggtgtggt

SEQ ID NO: 897535 - DNA, 15 bp, Homo sapiens
tgaccaggtgtggtg

SEQ ID NO: 897536 - DNA, 15 bp, Homo sapiens
gaccaggtgtggtgc

SEQ ID NO: 897537 - DNA, 15 bp, Homo sapiens
accaggtgtggtgct

SEQ ID NO: 897538 - DNA, 15 bp, Homo sapiens
ccaggtgtggtgctg

SEQ ID NO: 897539 - DNA, 15 bp, Homo sapiens
caggtgtggtgctga

SEQ ID NO: 897540 - DNA, 15 bp, Homo sapiens
aggtgtggtgctgat

SEQ ID NO: 897541 - DNA, 15 bp, Homo sapiens
ggtgtggtgctgata

SEQ ID NO: 897542 - DNA, 15 bp, Homo sapiens
gtgtggtgctgatag

SEQ ID NO: 897543 - DNA, 15 bp, Homo sapiens
tgtggtgctgatagc

SEQ ID NO: 897544 - DNA, 15 bp, Homo sapiens
gtggtgctgatagca

SEQ ID NO: 897545 - DNA, 15 bp, Homo sapiens
tggtgctgatagcag

SEQ ID NO: 897546 - DNA, 15 bp, Homo sapiens
ggtgctgatagcagg

SEQ ID NO: 897547 - DNA, 15 bp, Homo sapiens
gtgctgatagcaggc

SEQ ID NO: 897548 - DNA, 15 bp, Homo sapiens
tgctgatagcaggct

SEQ ID NO: 897549 - DNA, 15 bp, Homo sapiens
gctgatagcaggctg

SEQ ID NO: 897550 - DNA, 15 bp, Homo sapiens
ctgatagcaggctgc

SEQ ID NO: 897551 - DNA, 15 bp, Homo sapiens
tgatagcaggctgca

SEQ ID NO: 897552 - DNA, 15 bp, Homo sapiens
gatagcaggctgcag

SEQ ID NO: 897553 - DNA, 15 bp, Homo sapiens
atagcaggctgcagg

SEQ ID NO: 897554 - DNA, 15 bp, Homo sapiens
tagcaggctgcagga

SEQ ID NO: 897555 - DNA, 15 bp, Homo sapiens
agcaggctgcaggag

SEQ ID NO: 897556 - DNA, 15 bp, Homo sapiens
gcaggctgcaggagc

SEQ ID NO: 897557 - DNA, 15 bp, Homo sapiens
caggctgcaggagct

SEQ ID NO: 897558 - DNA, 15 bp, Homo sapiens
aggctgcaggagctg

SEQ ID NO: 897559 - DNA, 15 bp, Homo sapiens
ggctgcaggagctgg

SEQ ID NO: 897560 - DNA, 15 bp, Homo sapiens
gctgcaggagctggg

SEQ ID NO: 897561 - DNA, 15 bp, Homo sapiens
ctgcaggagctggga

SEQ ID NO: 897562 - DNA, 15 bp, Homo sapiens
tgcaggagctgggag

SEQ ID NO: 897563 - DNA, 15 bp, Homo sapiens
gcaggagctgggagg

SEQ ID NO: 897564 - DNA, 15 bp, Homo sapiens
caggagctgggagga

SEQ ID NO: 897565 - DNA, 15 bp, Homo sapiens
aggagctgggaggaa

SEQ ID NO: 897566 - DNA, 15 bp, Homo sapiens
ggagctgggaggaag

SEQ ID NO: 897567 - DNA, 15 bp, Homo sapiens
gagctgggaggaagc

SEQ ID NO: 897568 - DNA, 15 bp, Homo sapiens
agctgggaggaagca

SEQ ID NO: 897569 - DNA, 15 bp, Homo sapiens
gctgggaggaagcag

SEQ ID NO: 897570 - DNA, 15 bp, Homo sapiens
ctgggaggaagcagt

SEQ ID NO: 897571 - DNA, 15 bp, Homo sapiens
tgggaggaagcagtg

SEQ ID NO: 897572 - DNA, 15 bp, Homo sapiens
gggaggaagcagtgg

SEQ ID NO: 897573 - DNA, 15 bp, Homo sapiens
ggaggaagcagtgga

SEQ ID NO: 897574 - DNA, 15 bp, Homo sapiens
gaggaagcagtggaa

SEQ ID NO: 897575 - DNA, 15 bp, Homo sapiens
aggaagcagtggaaa

SEQ ID NO: 897576 - DNA, 15 bp, Homo sapiens
ggaagcagtggaaat

SEQ ID NO: 897577 - DNA, 15 bp, Homo sapiens
gaagcagtggaaatg

SEQ ID NO: 897578 - DNA, 15 bp, Homo sapiens
aagcagtggaaatgc

SEQ ID NO: 897579 - DNA, 15 bp, Homo sapiens
agcagtggaaatgcc

SEQ ID NO: 897580 - DNA, 15 bp, Homo sapiens
gcagtggaaatgccc

SEQ ID NO: 897581 - DNA, 15 bp, Homo sapiens
cagtggaaatgccct

SEQ ID NO: 897582 - DNA, 15 bp, Homo sapiens
agtggaaatgccctt

SEQ ID NO: 897583 - DNA, 15 bp, Homo sapiens
gtggaaatgcccttc

SEQ ID NO: 897584 - DNA, 15 bp, Homo sapiens
tggaaatgcccttcg

SEQ ID NO: 897585 - DNA, 15 bp, Homo sapiens
ggaaatgcccttcgt

SEQ ID NO: 897586 - DNA, 15 bp, Homo sapiens
gaaatgcccttcgtg

SEQ ID NO: 897587 - DNA, 15 bp, Homo sapiens
aaatgcccttcgtgt

SEQ ID NO: 897588 - DNA, 15 bp, Homo sapiens
aatgcccttcgtgtt

SEQ ID NO: 897589 - DNA, 15 bp, Homo sapiens
atgcccttcgtgttt

SEQ ID NO: 897590 - DNA, 15 bp, Homo sapiens
tgcccttcgtgtttt

SEQ ID NO: 897591 - DNA, 15 bp, Homo sapiens
gcccttcgtgttttt

SEQ ID NO: 897592 - DNA, 15 bp, Homo sapiens
cccttcgtgtttttg

SEQ ID NO: 897593 - DNA, 15 bp, Homo sapiens
ccttcgtgtttttgc

SEQ ID NO: 897594 - DNA, 15 bp, Homo sapiens
cttcgtgtttttgcc

SEQ ID NO: 897595 - DNA, 15 bp, Homo sapiens
ttcgtgtttttgcca

SEQ ID NO: 897596 - DNA, 15 bp, Homo sapiens
tcgtgtttttgccaa

SEQ ID NO: 897597 - DNA, 15 bp, Homo sapiens
cgtgtttttgccaag

SEQ ID NO: 897598 - DNA, 15 bp, Homo sapiens
gtgtttttgccaagc

SEQ ID NO: 897599 - DNA, 15 bp, Homo sapiens
tgtttttgccaagca

SEQ ID NO: 897600 - DNA, 15 bp, Homo sapiens
gtttttgccaagcag

SEQ ID NO: 897601 - DNA, 15 bp, Homo sapiens
tttttgccaagcagc

SEQ ID NO: 897602 - DNA, 15 bp, Homo sapiens
ttttgccaagcagct

SEQ ID NO: 897603 - DNA, 15 bp, Homo sapiens
tttgccaagcagctg

SEQ ID NO: 897604 - DNA, 15 bp, Homo sapiens
ttgccaagcagctgg

SEQ ID NO: 897605 - DNA, 15 bp, Homo sapiens
tgccaagcagctggg

SEQ ID NO: 897606 - DNA, 15 bp, Homo sapiens
gccaagcagctgggt

SEQ ID NO: 897607 - DNA, 15 bp, Homo sapiens
ccaagcagctgggtt

SEQ ID NO: 897608 - DNA, 15 bp, Homo sapiens
caagcagctgggttg

SEQ ID NO: 897609 - DNA, 15 bp, Homo sapiens
aagcagctgggttgt

SEQ ID NO: 897610 - DNA, 15 bp, Homo sapiens
agcagctgggttgtg

SEQ ID NO: 897611 - DNA, 15 bp, Homo sapiens
gcagctgggttgtgg

SEQ ID NO: 897612 - DNA, 15 bp, Homo sapiens
cagctgggttgtggg

SEQ ID NO: 897613 - DNA, 15 bp, Homo sapiens
agctgggttgtgggc

SEQ ID NO: 897614 - DNA, 15 bp, Homo sapiens
gctgggttgtgggct

SEQ ID NO: 897615 - DNA, 15 bp, Homo sapiens
ctgggttgtgggcta

SEQ ID NO: 897616 - DNA, 15 bp, Homo sapiens
tgggttgtgggctag

SEQ ID NO: 897617 - DNA, 15 bp, Homo sapiens
gggttgtgggctagc

SEQ ID NO: 897618 - DNA, 15 bp, Homo sapiens
ggttgtgggctagct

SEQ ID NO: 897619 - DNA, 15 bp, Homo sapiens
gttgtgggctagctg

SEQ ID NO: 897620 - DNA, 15 bp, Homo sapiens
ttgtgggctagctgc

SEQ ID NO: 897621 - DNA, 15 bp, Homo sapiens
tgtgggctagctgct

SEQ ID NO: 897622 - DNA, 15 bp, Homo sapiens
gtgggctagctgctc

SEQ ID NO: 897623 - DNA, 15 bp, Homo sapiens
tgggctagctgctcc

SEQ ID NO: 897624 - DNA, 15 bp, Homo sapiens
gggctagctgctcct

SEQ ID NO: 897625 - DNA, 15 bp, Homo sapiens
ggctagctgctcctt

SEQ ID NO: 897626 - DNA, 15 bp, Homo sapiens
gctagctgctccttc

SEQ ID NO: 897627 - DNA, 15 bp, Homo sapiens
ctagctgctccttcc

SEQ ID NO: 897628 - DNA, 15 bp, Homo sapiens
tagctgctccttccg

SEQ ID NO: 897629 - DNA, 15 bp, Homo sapiens
agctgctccttccgc

SEQ ID NO: 897630 - DNA, 15 bp, Homo sapiens
gctgctccttccgcc

SEQ ID NO: 897631 - DNA, 15 bp, Homo sapiens
ctgctccttccgcct

SEQ ID NO: 897632 - DNA, 15 bp, Homo sapiens
tgctccttccgccta

SEQ ID NO: 897633 - DNA, 15 bp, Homo sapiens
gctccttccgcctat

SEQ ID NO: 897634 - DNA, 15 bp, Homo sapiens
ctccttccgcctatg

SEQ ID NO: 897635 - DNA, 15 bp, Homo sapiens
tccttccgcctatgt

SEQ ID NO: 897636 - DNA, 15 bp, Homo sapiens
ccttccgcctatgtc

SEQ ID NO: 897637 - DNA, 15 bp, Homo sapiens
cttccgcctatgtcc

SEQ ID NO: 897638 - DNA, 15 bp, Homo sapiens
ttccgcctatgtcca

SEQ ID NO: 897639 - DNA, 15 bp, Homo sapiens
tccgcctatgtccat

SEQ ID NO: 897640 - DNA, 15 bp, Homo sapiens
ccgcctatgtccatc

SEQ ID NO: 897641 - DNA, 15 bp, Homo sapiens
cgcctatgtccatca

SEQ ID NO: 897642 - DNA, 15 bp, Homo sapiens
gcctatgtccatcat

SEQ ID NO: 897643 - DNA, 15 bp, Homo sapiens
cctatgtccatcata

SEQ ID NO: 897644 - DNA, 15 bp, Homo sapiens
ctatgtccatcatag

SEQ ID NO: 897645 - DNA, 15 bp, Homo sapiens
tatgtccatcatagg

SEQ ID NO: 897646 - DNA, 15 bp, Homo sapiens
atgtccatcataggg

SEQ ID NO: 897647 - DNA, 15 bp, Homo sapiens
tgtccatcatagggg

SEQ ID NO: 897648 - DNA, 15 bp, Homo sapiens
gtccatcataggggt

SEQ ID NO: 897649 - DNA, 15 bp, Homo sapiens
tccatcataggggtt

SEQ ID NO: 897650 - DNA, 15 bp, Homo sapiens
ccatcataggggttc

SEQ ID NO: 897651 - DNA, 15 bp, Homo sapiens
catcataggggttca

SEQ ID NO: 897652 - DNA, 15 bp, Homo sapiens
atcataggggttcaa

SEQ ID NO: 897653 - DNA, 15 bp, Homo sapiens
tcataggggttcaag

SEQ ID NO: 897654 - DNA, 15 bp, Homo sapiens
cataggggttcaagt

SEQ ID NO: 897655 - DNA, 15 bp, Homo sapiens
ataggggttcaagtg

SEQ ID NO: 897656 - DNA, 15 bp, Homo sapiens
taggggttcaagtgg

SEQ ID NO: 897657 - DNA, 15 bp, Homo sapiens
aggggttcaagtggc

SEQ ID NO: 897658 - DNA, 15 bp, Homo sapiens
ggggttcaagtggct

SEQ ID NO: 897659 - DNA, 15 bp, Homo sapiens
gggttcaagtggctg

SEQ ID NO: 897660 - DNA, 15 bp, Homo sapiens
ggttcaagtggctgg

SEQ ID NO: 897661 - DNA, 15 bp, Homo sapiens
gttcaagtggctggg

SEQ ID NO: 897662 - DNA, 15 bp, Homo sapiens
ttcaagtggctgggg

SEQ ID NO: 897663 - DNA, 15 bp, Homo sapiens
tcaagtggctggggc

SEQ ID NO: 897664 - DNA, 15 bp, Homo sapiens
caagtggctggggct

SEQ ID NO: 897665 - DNA, 15 bp, Homo sapiens
aagtggctggggctc

SEQ ID NO: 897666 - DNA, 15 bp, Homo sapiens
agtggctggggctcc

SEQ ID NO: 897667 - DNA, 15 bp, Homo sapiens
gtggctggggctcca

SEQ ID NO: 897668 - DNA, 15 bp, Homo sapiens
tggctggggctccag

SEQ ID NO: 897669 - DNA, 15 bp, Homo sapiens
ggctggggctccagg

SEQ ID NO: 897670 - DNA, 15 bp, Homo sapiens
gctggggctccaggc

SEQ ID NO: 897671 - DNA, 15 bp, Homo sapiens
ctggggctccaggct

SEQ ID NO: 897672 - DNA, 15 bp, Homo sapiens
tggggctccaggcta

SEQ ID NO: 897673 - DNA, 15 bp, Homo sapiens
ggggctccaggctag

SEQ ID NO: 897674 - DNA, 15 bp, Homo sapiens
gggctccaggctagc

SEQ ID NO: 897675 - DNA, 15 bp, Homo sapiens
ggctccaggctagct

SEQ ID NO: 897676 - DNA, 15 bp, Homo sapiens
gctccaggctagctg

SEQ ID NO: 897677 - DNA, 15 bp, Homo sapiens
ctccaggctagctgg

SEQ ID NO: 897678 - DNA, 15 bp, Homo sapiens
tccaggctagctggg

SEQ ID NO: 897679 - DNA, 15 bp, Homo sapiens
ccaggctagctgggt

SEQ ID NO: 897680 - DNA, 15 bp, Homo sapiens
caggctagctgggtg

SEQ ID NO: 897681 - DNA, 15 bp, Homo sapiens
aggctagctgggtgt

SEQ ID NO: 897682 - DNA, 15 bp, Homo sapiens
ggctagctgggtgtc

SEQ ID NO: 897683 - DNA, 15 bp, Homo sapiens
gctagctgggtgtcc

SEQ ID NO: 897684 - DNA, 15 bp, Homo sapiens
ctagctgggtgtcct

SEQ ID NO: 897685 - DNA, 15 bp, Homo sapiens
tagctgggtgtcctc

SEQ ID NO: 897686 - DNA, 15 bp, Homo sapiens
agctgggtgtcctct

SEQ ID NO: 897687 - DNA, 15 bp, Homo sapiens
gctgggtgtcctctg

SEQ ID NO: 897688 - DNA, 15 bp, Homo sapiens
ctgggtgtcctctgg

SEQ ID NO: 897689 - DNA, 15 bp, Homo sapiens
tgggtgtcctctgga

SEQ ID NO: 897690 - DNA, 15 bp, Homo sapiens
gggtgtcctctggaa

SEQ ID NO: 897691 - DNA, 15 bp, Homo sapiens
ggtgtcctctggaat

SEQ ID NO: 897692 - DNA, 15 bp, Homo sapiens
gtgtcctctggaatc

SEQ ID NO: 897693 - DNA, 15 bp, Homo sapiens
tgtcctctggaatca

SEQ ID NO: 897694 - DNA, 15 bp, Homo sapiens
gtcctctggaatcac

SEQ ID NO: 897695 - DNA, 15 bp, Homo sapiens
tcctctggaatcact

SEQ ID NO: 897696 - DNA, 15 bp, Homo sapiens
cctctggaatcactg

SEQ ID NO: 897697 - DNA, 15 bp, Homo sapiens
ctctggaatcactgt

SEQ ID NO: 897698 - DNA, 15 bp, Homo sapiens
tctggaatcactgtg

SEQ ID NO: 897699 - DNA, 15 bp, Homo sapiens
ctggaatcactgtga

SEQ ID NO: 897700 - DNA, 15 bp, Homo sapiens
tggaatcactgtgaa

SEQ ID NO: 897701 - DNA, 15 bp, Homo sapiens
ggaatcactgtgaag

SEQ ID NO: 897702 - DNA, 15 bp, Homo sapiens
gaatcactgtgaagg

SEQ ID NO: 897703 - DNA, 15 bp, Homo sapiens
aatcactgtgaaggg

SEQ ID NO: 897704 - DNA, 15 bp, Homo sapiens
atcactgtgaagggc

SEQ ID NO: 897705 - DNA, 15 bp, Homo sapiens
tcactgtgaagggcc

SEQ ID NO: 897706 - DNA, 15 bp, Homo sapiens
cactgtgaagggcca

SEQ ID NO: 897707 - DNA, 15 bp, Homo sapiens
actgtgaagggccaa

SEQ ID NO: 897708 - DNA, 15 bp, Homo sapiens
ctgtgaagggccaag

SEQ ID NO: 897709 - DNA, 15 bp, Homo sapiens
tgtgaagggccaaga

SEQ ID NO: 897710 - DNA, 15 bp, Homo sapiens
gtgaagggccaagaa

SEQ ID NO: 897711 - DNA, 15 bp, Homo sapiens
tgaagggccaagaag

SEQ ID NO: 897712 - DNA, 15 bp, Homo sapiens
gaagggccaagaaga

SEQ ID NO: 897713 - DNA, 15 bp, Homo sapiens
aagggccaagaagac

SEQ ID NO: 897714 - DNA, 15 bp, Homo sapiens
agggccaagaagact

SEQ ID NO: 897715 - DNA, 15 bp, Homo sapiens
gggccaagaagactc

SEQ ID NO: 897716 - DNA, 15 bp, Homo sapiens
ggccaagaagactct

SEQ ID NO: 897717 - DNA, 15 bp, Homo sapiens
gccaagaagactctc

SEQ ID NO: 897718 - DNA, 15 bp, Homo sapiens
ccaagaagactctca

SEQ ID NO: 897719 - DNA, 15 bp, Homo sapiens
caagaagactctcat

SEQ ID NO: 897720 - DNA, 15 bp, Homo sapiens
aagaagactctcatc

SEQ ID NO: 897721 - DNA, 15 bp, Homo sapiens
agaagactctcatcc

SEQ ID NO: 897722 - DNA, 15 bp, Homo sapiens
gaagactctcatccc

SEQ ID NO: 897723 - DNA, 15 bp, Homo sapiens
aagactctcatccca

SEQ ID NO: 897724 - DNA, 15 bp, Homo sapiens
agactctcatcccac

SEQ ID NO: 897725 - DNA, 15 bp, Homo sapiens
gactctcatcccacc

SEQ ID NO: 897726 - DNA, 15 bp, Homo sapiens
actctcatcccaccc

SEQ ID NO: 897727 - DNA, 15 bp, Homo sapiens
ctctcatcccaccct

SEQ ID NO: 897728 - DNA, 15 bp, Homo sapiens
tctcatcccaccctc

SEQ ID NO: 897729 - DNA, 15 bp, Homo sapiens
ctcatcccaccctcc

SEQ ID NO: 897730 - DNA, 15 bp, Homo sapiens
tcatcccaccctcca

SEQ ID NO: 897731 - DNA, 15 bp, Homo sapiens
catcccaccctccaa

SEQ ID NO: 897732 - DNA, 15 bp, Homo sapiens
atcccaccctccaac

SEQ ID NO: 897733 - DNA, 15 bp, Homo sapiens
tcccaccctccaact

SEQ ID NO: 897734 - DNA, 15 bp, Homo sapiens
cccaccctccaactc

SEQ ID NO: 897735 - DNA, 15 bp, Homo sapiens
ccaccctccaactct

SEQ ID NO: 897736 - DNA, 15 bp, Homo sapiens
caccctccaactctg

SEQ ID NO: 897737 - DNA, 15 bp, Homo sapiens
accctccaactctga

SEQ ID NO: 897738 - DNA, 15 bp, Homo sapiens
ccctccaactctgaa

SEQ ID NO: 897739 - DNA, 15 bp, Homo sapiens
cctccaactctgaag

SEQ ID NO: 897740 - DNA, 15 bp, Homo sapiens
ctccaactctgaagg

SEQ ID NO: 897741 - DNA, 15 bp, Homo sapiens
tccaactctgaaggt

SEQ ID NO: 897742 - DNA, 15 bp, Homo sapiens
ccaactctgaaggta

SEQ ID NO: 897743 - DNA, 15 bp, Homo sapiens
caactctgaaggtag

SEQ ID NO: 897744 - DNA, 15 bp, Homo sapiens
aactctgaaggtagg

SEQ ID NO: 897745 - DNA, 15 bp, Homo sapiens
actctgaaggtaggg

SEQ ID NO: 897746 - DNA, 15 bp, Homo sapiens
ctctgaaggtagggg

SEQ ID NO: 897747 - DNA, 15 bp, Homo sapiens
tctgaaggtaggggc

SEQ ID NO: 897748 - DNA, 15 bp, Homo sapiens
ctgaaggtaggggcc

SEQ ID NO: 897749 - DNA, 15 bp, Homo sapiens
tgaaggtaggggcca

SEQ ID NO: 897750 - DNA, 15 bp, Homo sapiens
gaaggtaggggccat

SEQ ID NO: 897751 - DNA, 15 bp, Homo sapiens
aaggtaggggccata

SEQ ID NO: 897752 - DNA, 15 bp, Homo sapiens
aggtaggggccatag

SEQ ID NO: 897753 - DNA, 15 bp, Homo sapiens
ggtaggggccatagt

SEQ ID NO: 897754 - DNA, 15 bp, Homo sapiens
gtaggggccatagtc

SEQ ID NO: 897755 - DNA, 15 bp, Homo sapiens
taggggccatagtct

SEQ ID NO: 897756 - DNA, 15 bp, Homo sapiens
aggggccatagtctg

SEQ ID NO: 897757 - DNA, 15 bp, Homo sapiens
ggggccatagtctgc

SEQ ID NO: 897758 - DNA, 15 bp, Homo sapiens
gggccatagtctgcc

SEQ ID NO: 897759 - DNA, 15 bp, Homo sapiens
ggccatagtctgccc

SEQ ID NO: 897760 - DNA, 15 bp, Homo sapiens
gccatagtctgccct

SEQ ID NO: 897761 - DNA, 15 bp, Homo sapiens
ccatagtctgccctc

SEQ ID NO: 897762 - DNA, 15 bp, Homo sapiens
catagtctgccctca

SEQ ID NO: 897763 - DNA, 15 bp, Homo sapiens
atagtctgccctcag

SEQ ID NO: 897764 - DNA, 15 bp, Homo sapiens
tagtctgccctcagc

SEQ ID NO: 897765 - DNA, 15 bp, Homo sapiens
agtctgccctcagct

SEQ ID NO: 897766 - DNA, 15 bp, Homo sapiens
gtctgccctcagctt

SEQ ID NO: 897767 - DNA, 15 bp, Homo sapiens
tctgccctcagcttt

SEQ ID NO: 897768 - DNA, 15 bp, Homo sapiens
ctgccctcagctttt

SEQ ID NO: 897769 - DNA, 15 bp, Homo sapiens
tgccctcagcttttc

SEQ ID NO: 897770 - DNA, 15 bp, Homo sapiens
gccctcagcttttcc

SEQ ID NO: 897771 - DNA, 15 bp, Homo sapiens
ccctcagcttttcct

SEQ ID NO: 897772 - DNA, 15 bp, Homo sapiens
cctcagcttttcctg

SEQ ID NO: 897773 - DNA, 15 bp, Homo sapiens
ctcagcttttcctgt

SEQ ID NO: 897774 - DNA, 15 bp, Homo sapiens
tcagcttttcctgtg

SEQ ID NO: 897775 - DNA, 15 bp, Homo sapiens
cagcttttcctgtga

SEQ ID NO: 897776 - DNA, 15 bp, Homo sapiens
agcttttcctgtgag

SEQ ID NO: 897777 - DNA, 15 bp, Homo sapiens
gcttttcctgtgagt

SEQ ID NO: 897778 - DNA, 15 bp, Homo sapiens
cttttcctgtgagtc

SEQ ID NO: 897779 - DNA, 15 bp, Homo sapiens
ttttcctgtgagtct

SEQ ID NO: 897780 - DNA, 15 bp, Homo sapiens
tttcctgtgagtctt

SEQ ID NO: 897781 - DNA, 15 bp, Homo sapiens
ttcctgtgagtctta

SEQ ID NO: 897782 - DNA, 15 bp, Homo sapiens
tcctgtgagtcttag

SEQ ID NO: 897783 - DNA, 15 bp, Homo sapiens
cctgtgagtcttagc

SEQ ID NO: 897784 - DNA, 15 bp, Homo sapiens
ctgtgagtcttagcc

SEQ ID NO: 897785 - DNA, 15 bp, Homo sapiens
tgtgagtcttagcct

SEQ ID NO: 897786 - DNA, 15 bp, Homo sapiens
gtgagtcttagcctg

SEQ ID NO: 897787 - DNA, 15 bp, Homo sapiens
tgagtcttagcctgg

SEQ ID NO: 897788 - DNA, 15 bp, Homo sapiens
gagtcttagcctgga

SEQ ID NO: 897789 - DNA, 15 bp, Homo sapiens
agtcttagcctggag

SEQ ID NO: 897790 - DNA, 15 bp, Homo sapiens
gtcttagcctggagc

SEQ ID NO: 897791 - DNA, 15 bp, Homo sapiens
tcttagcctggagca

SEQ ID NO: 897792 - DNA, 15 bp, Homo sapiens
cttagcctggagcag

SEQ ID NO: 897793 - DNA, 15 bp, Homo sapiens
ttagcctggagcagg

SEQ ID NO: 897794 - DNA, 15 bp, Homo sapiens
tagcctggagcaggt

SEQ ID NO: 897795 - DNA, 15 bp, Homo sapiens
agcctggagcaggtg

SEQ ID NO: 897796 - DNA, 15 bp, Homo sapiens
gcctggagcaggtga

SEQ ID NO: 897797 - DNA, 15 bp, Homo sapiens
cctggagcaggtgag

SEQ ID NO: 897798 - DNA, 15 bp, Homo sapiens
ctggagcaggtgagt

SEQ ID NO: 897799 - DNA, 15 bp, Homo sapiens
tggagcaggtgagtt

SEQ ID NO: 897800 - DNA, 15 bp, Homo sapiens
ggagcaggtgagttc

SEQ ID NO: 897801 - DNA, 15 bp, Homo sapiens
gagcaggtgagttct

SEQ ID NO: 897802 - DNA, 15 bp, Homo sapiens
agcaggtgagttcta

SEQ ID NO: 897803 - DNA, 15 bp, Homo sapiens
gcaggtgagttctaa

SEQ ID NO: 897804 - DNA, 15 bp, Homo sapiens
caggtgagttctaaa

SEQ ID NO: 897805 - DNA, 15 bp, Homo sapiens
aggtgagttctaaat

SEQ ID NO: 897806 - DNA, 15 bp, Homo sapiens
ggtgagttctaaatt

SEQ ID NO: 897807 - DNA, 15 bp, Homo sapiens
gtgagttctaaattc

SEQ ID NO: 897808 - DNA, 15 bp, Homo sapiens
tgagttctaaattcc

SEQ ID NO: 897809 - DNA, 15 bp, Homo sapiens
gagttctaaattccc

SEQ ID NO: 897810 - DNA, 15 bp, Homo sapiens
agttctaaattccct

SEQ ID NO: 897811 - DNA, 15 bp, Homo sapiens
gttctaaattccctc

SEQ ID NO: 897812 - DNA, 15 bp, Homo sapiens
ttctaaattccctcc

SEQ ID NO: 897813 - DNA, 15 bp, Homo sapiens
tctaaattccctccc

SEQ ID NO: 897814 - DNA, 15 bp, Homo sapiens
ctaaattccctccca

SEQ ID NO: 897815 - DNA, 15 bp, Homo sapiens
taaattccctcccat

SEQ ID NO: 897816 - DNA, 15 bp, Homo sapiens
aaattccctcccatt

SEQ ID NO: 897817 - DNA, 15 bp, Homo sapiens
aattccctcccattg

SEQ ID NO: 897818 - DNA, 15 bp, Homo sapiens
attccctcccattgt

SEQ ID NO: 897819 - DNA, 15 bp, Homo sapiens
ttccctcccattgtc

SEQ ID NO: 897820 - DNA, 15 bp, Homo sapiens
tccctcccattgtct

SEQ ID NO: 897821 - DNA, 15 bp, Homo sapiens
ccctcccattgtctg

SEQ ID NO: 897822 - DNA, 15 bp, Homo sapiens
cctcccattgtctgt

SEQ ID NO: 897823 - DNA, 15 bp, Homo sapiens
ctcccattgtctgtc

SEQ ID NO: 897824 - DNA, 15 bp, Homo sapiens
tcccattgtctgtcc

SEQ ID NO: 897825 - DNA, 15 bp, Homo sapiens
cccattgtctgtcct

SEQ ID NO: 897826 - DNA, 15 bp, Homo sapiens
ccattgtctgtcctg

SEQ ID NO: 897827 - DNA, 15 bp, Homo sapiens
cattgtctgtcctgg

SEQ ID NO: 897828 - DNA, 15 bp, Homo sapiens
attgtctgtcctggg

SEQ ID NO: 897829 - DNA, 15 bp, Homo sapiens
ttgtctgtcctgggg

SEQ ID NO: 897830 - DNA, 15 bp, Homo sapiens
tgtctgtcctgggga

SEQ ID NO: 897831 - DNA, 15 bp, Homo sapiens
gtctgtcctggggac

SEQ ID NO: 897832 - DNA, 15 bp, Homo sapiens
tctgtcctggggacc

SEQ ID NO: 897833 - DNA, 15 bp, Homo sapiens
ctgtcctggggacct

SEQ ID NO: 897834 - DNA, 15 bp, Homo sapiens
tgtcctggggacctt

SEQ ID NO: 897835 - DNA, 15 bp, Homo sapiens
gtcctggggacctta

SEQ ID NO: 897836 - DNA, 15 bp, Homo sapiens
tcctggggaccttac

SEQ ID NO: 897837 - DNA, 15 bp, Homo sapiens
cctggggaccttaca

SEQ ID NO: 897838 - DNA, 15 bp, Homo sapiens
ctggggaccttacac

SEQ ID NO: 897839 - DNA, 15 bp, Homo sapiens
tggggaccttacact

SEQ ID NO: 897840 - DNA, 15 bp, Homo sapiens
ggggaccttacactg

SEQ ID NO: 897841 - DNA, 15 bp, Homo sapiens
gggaccttacactgc

SEQ ID NO: 897842 - DNA, 15 bp, Homo sapiens
ggaccttacactgca

SEQ ID NO: 897843 - DNA, 15 bp, Homo sapiens
gaccttacactgcag

SEQ ID NO: 897844 - DNA, 15 bp, Homo sapiens
accttacactgcagg

SEQ ID NO: 897845 - DNA, 15 bp, Homo sapiens
ccttacactgcaggg

SEQ ID NO: 897846 - DNA, 15 bp, Homo sapiens
cttacactgcagggc

SEQ ID NO: 897847 - DNA, 15 bp, Homo sapiens
ttacactgcagggct

SEQ ID NO: 897848 - DNA, 15 bp, Homo sapiens
tacactgcagggctt

SEQ ID NO: 897849 - DNA, 15 bp, Homo sapiens
acactgcagggcttg

SEQ ID NO: 897850 - DNA, 15 bp, Homo sapiens
cactgcagggcttgg

SEQ ID NO: 897851 - DNA, 15 bp, Homo sapiens
actgcagggcttggg

SEQ ID NO: 897852 - DNA, 15 bp, Homo sapiens
ctgcagggcttggga

SEQ ID NO: 897853 - DNA, 15 bp, Homo sapiens
tgcagggcttgggaa

SEQ ID NO: 897854 - DNA, 15 bp, Homo sapiens
gcagggcttgggaaa

SEQ ID NO: 897855 - DNA, 15 bp, Homo sapiens
cagggcttgggaaaa

SEQ ID NO: 897856 - DNA, 15 bp, Homo sapiens
agggcttgggaaaaa

SEQ ID NO: 897857 - DNA, 15 bp, Homo sapiens
gggcttgggaaaaag

SEQ ID NO: 897858 - DNA, 15 bp, Homo sapiens
ggcttgggaaaaagc

SEQ ID NO: 897859 - DNA, 15 bp, Homo sapiens
gcttgggaaaaagct

SEQ ID NO: 897860 - DNA, 15 bp, Homo sapiens
cttgggaaaaagctg

SEQ ID NO: 897861 - DNA, 15 bp, Homo sapiens
ttgggaaaaagctgg

SEQ ID NO: 897862 - DNA, 15 bp, Homo sapiens
tgggaaaaagctggt

SEQ ID NO: 897863 - DNA, 15 bp, Homo sapiens
gggaaaaagctggtt

SEQ ID NO: 897864 - DNA, 15 bp, Homo sapiens
ggaaaaagctggttg

SEQ ID NO: 897865 - DNA, 15 bp, Homo sapiens
gaaaaagctggttgg

SEQ ID NO: 897866 - DNA, 15 bp, Homo sapiens
aaaaagctggttggt

SEQ ID NO: 897867 - DNA, 15 bp, Homo sapiens
aaaagctggttggtt

SEQ ID NO: 897868 - DNA, 15 bp, Homo sapiens
aaagctggttggttt

SEQ ID NO: 897869 - DNA, 15 bp, Homo sapiens
aagctggttggtttc

SEQ ID NO: 897870 - DNA, 15 bp, Homo sapiens
agctggttggtttca

SEQ ID NO: 897871 - DNA, 15 bp, Homo sapiens
gctggttggtttcag

SEQ ID NO: 897872 - DNA, 15 bp, Homo sapiens
ctggttggtttcaga

SEQ ID NO: 897873 - DNA, 15 bp, Homo sapiens
tggttggtttcagat

SEQ ID NO: 897874 - DNA, 15 bp, Homo sapiens
ggttggtttcagatc

SEQ ID NO: 897875 - DNA, 15 bp, Homo sapiens
gttggtttcagatca

SEQ ID NO: 897876 - DNA, 15 bp, Homo sapiens
ttggtttcagatcat

SEQ ID NO: 897877 - DNA, 15 bp, Homo sapiens
tggtttcagatcatt

SEQ ID NO: 897878 - DNA, 15 bp, Homo sapiens
ggtttcagatcattc

SEQ ID NO: 897879 - DNA, 15 bp, Homo sapiens
gtttcagatcattca

SEQ ID NO: 897880 - DNA, 15 bp, Homo sapiens
tttcagatcattcag

SEQ ID NO: 897881 - DNA, 15 bp, Homo sapiens
ttcagatcattcaga

SEQ ID NO: 897882 - DNA, 15 bp, Homo sapiens
tcagatcattcagat

SEQ ID NO: 897883 - DNA, 15 bp, Homo sapiens
cagatcattcagata

SEQ ID NO: 897884 - DNA, 15 bp, Homo sapiens
agatcattcagataa

SEQ ID NO: 897885 - DNA, 15 bp, Homo sapiens
gatcattcagataac

SEQ ID NO: 897886 - DNA, 15 bp, Homo sapiens
atcattcagataact

SEQ ID NO: 897887 - DNA, 15 bp, Homo sapiens
tcattcagataactc

SEQ ID NO: 897888 - DNA, 15 bp, Homo sapiens
cattcagataactca

SEQ ID NO: 897889 - DNA, 15 bp, Homo sapiens
attcagataactcag

SEQ ID NO: 897890 - DNA, 15 bp, Homo sapiens
ttcagataactcagg

SEQ ID NO: 897891 - DNA, 15 bp, Homo sapiens
tcagataactcaggc

SEQ ID NO: 897892 - DNA, 15 bp, Homo sapiens
cagataactcaggct

SEQ ID NO: 897893 - DNA, 15 bp, Homo sapiens
agataactcaggctt

SEQ ID NO: 897894 - DNA, 15 bp, Homo sapiens
gataactcaggctta

SEQ ID NO: 897895 - DNA, 15 bp, Homo sapiens
ataactcaggcttag

SEQ ID NO: 897896 - DNA, 15 bp, Homo sapiens
taactcaggcttagc

SEQ ID NO: 897897 - DNA, 15 bp, Homo sapiens
aactcaggcttagct

SEQ ID NO: 897898 - DNA, 15 bp, Homo sapiens
actcaggcttagctg

SEQ ID NO: 897899 - DNA, 15 bp, Homo sapiens
ctcaggcttagctgg

SEQ ID NO: 897900 - DNA, 15 bp, Homo sapiens
tcaggcttagctgga

SEQ ID NO: 897901 - DNA, 15 bp, Homo sapiens
caggcttagctggac

SEQ ID NO: 897902 - DNA, 15 bp, Homo sapiens
aggcttagctggacc

SEQ ID NO: 897903 - DNA, 15 bp, Homo sapiens
ggcttagctggaccc

SEQ ID NO: 897904 - DNA, 15 bp, Homo sapiens
gcttagctggaccca

SEQ ID NO: 897905 - DNA, 15 bp, Homo sapiens
cttagctggacccag

SEQ ID NO: 897906 - DNA, 15 bp, Homo sapiens
ttagctggacccagg

SEQ ID NO: 897907 - DNA, 15 bp, Homo sapiens
tagctggacccagga

SEQ ID NO: 897908 - DNA, 15 bp, Homo sapiens
agctggacccaggac

SEQ ID NO: 897909 - DNA, 15 bp, Homo sapiens
gctggacccaggaca

SEQ ID NO: 897910 - DNA, 15 bp, Homo sapiens
ctggacccaggacag

SEQ ID NO: 897911 - DNA, 15 bp, Homo sapiens
tggacccaggacagg

SEQ ID NO: 897912 - DNA, 15 bp, Homo sapiens
ggacccaggacagga

SEQ ID NO: 897913 - DNA, 15 bp, Homo sapiens
gacccaggacaggag

SEQ ID NO: 897914 - DNA, 15 bp, Homo sapiens
acccaggacaggaga

SEQ ID NO: 897915 - DNA, 15 bp, Homo sapiens
cccaggacaggagag

SEQ ID NO: 897916 - DNA, 15 bp, Homo sapiens
ccaggacaggagaga

SEQ ID NO: 897917 - DNA, 15 bp, Homo sapiens
caggacaggagagaa

SEQ ID NO: 897918 - DNA, 15 bp, Homo sapiens
aggacaggagagaaa

SEQ ID NO: 897919 - DNA, 15 bp, Homo sapiens
ggacaggagagaaag

SEQ ID NO: 897920 - DNA, 15 bp, Homo sapiens
gacaggagagaaagg

SEQ ID NO: 897921 - DNA, 15 bp, Homo sapiens
acaggagagaaagga

SEQ ID NO: 897922 - DNA, 15 bp, Homo sapiens
caggagagaaaggat

SEQ ID NO: 897923 - DNA, 15 bp, Homo sapiens
aggagagaaaggatg

SEQ ID NO: 897924 - DNA, 15 bp, Homo sapiens
ggagagaaaggatgc

SEQ ID NO: 897925 - DNA, 15 bp, Homo sapiens
gagagaaaggatgca

SEQ ID NO: 897926 - DNA, 15 bp, Homo sapiens
agagaaaggatgcat

SEQ ID NO: 897927 - DNA, 15 bp, Homo sapiens
gagaaaggatgcatt

SEQ ID NO: 897928 - DNA, 15 bp, Homo sapiens
agaaaggatgcattc

SEQ ID NO: 897929 - DNA, 15 bp, Homo sapiens
gaaaggatgcattca

SEQ ID NO: 897930 - DNA, 15 bp, Homo sapiens
aaaggatgcattcag

SEQ ID NO: 897931 - DNA, 15 bp, Homo sapiens
aaggatgcattcagg

SEQ ID NO: 897932 - DNA, 15 bp, Homo sapiens
aggatgcattcaggc

SEQ ID NO: 897933 - DNA, 15 bp, Homo sapiens
ggatgcattcaggcc

SEQ ID NO: 897934 - DNA, 15 bp, Homo sapiens
gatgcattcaggccc

SEQ ID NO: 897935 - DNA, 15 bp, Homo sapiens
atgcattcaggcccc

SEQ ID NO: 897936 - DNA, 15 bp, Homo sapiens
tgcattcaggccccg

SEQ ID NO: 897937 - DNA, 15 bp, Homo sapiens
gcattcaggccccgg

SEQ ID NO: 897938 - DNA, 15 bp, Homo sapiens
cattcaggccccggc

SEQ ID NO: 897939 - DNA, 15 bp, Homo sapiens
attcaggccccggct

SEQ ID NO: 897940 - DNA, 15 bp, Homo sapiens
ttcaggccccggctt

SEQ ID NO: 897941 - DNA, 15 bp, Homo sapiens
tcaggccccggcttc

SEQ ID NO: 897942 - DNA, 15 bp, Homo sapiens
caggccccggcttct

SEQ ID NO: 897943 - DNA, 15 bp, Homo sapiens
aggccccggcttctg

SEQ ID NO: 897944 - DNA, 15 bp, Homo sapiens
ggccccggcttctgg

SEQ ID NO: 897945 - DNA, 15 bp, Homo sapiens
gccccggcttctggg

SEQ ID NO: 897946 - DNA, 15 bp, Homo sapiens
ccccggcttctgggt

SEQ ID NO: 897947 - DNA, 15 bp, Homo sapiens
cccggcttctgggtt

SEQ ID NO: 897948 - DNA, 15 bp, Homo sapiens
ccggcttctgggttt

SEQ ID NO: 897949 - DNA, 15 bp, Homo sapiens
cggcttctgggtttg

SEQ ID NO: 897950 - DNA, 15 bp, Homo sapiens
ggcttctgggtttgg

SEQ ID NO: 897951 - DNA, 15 bp, Homo sapiens
gcttctgggtttggc

SEQ ID NO: 897952 - DNA, 15 bp, Homo sapiens
cttctgggtttggcc

SEQ ID NO: 897953 - DNA, 15 bp, Homo sapiens
ttctgggtttggcca

SEQ ID NO: 897954 - DNA, 15 bp, Homo sapiens
tctgggtttggccat

SEQ ID NO: 897955 - DNA, 15 bp, Homo sapiens
ctgggtttggccatg

SEQ ID NO: 897956 - DNA, 15 bp, Homo sapiens
tgggtttggccatga

SEQ ID NO: 897957 - DNA, 15 bp, Homo sapiens
gggtttggccatgaa

SEQ ID NO: 897958 - DNA, 15 bp, Homo sapiens
ggtttggccatgaag

SEQ ID NO: 897959 - DNA, 15 bp, Homo sapiens
gtttggccatgaaga

SEQ ID NO: 897960 - DNA, 15 bp, Homo sapiens
tttggccatgaagag

SEQ ID NO: 897961 - DNA, 15 bp, Homo sapiens
ttggccatgaagagt

SEQ ID NO: 897962 - DNA, 15 bp, Homo sapiens
tggccatgaagagtg

SEQ ID NO: 897963 - DNA, 15 bp, Homo sapiens
ggccatgaagagtga

SEQ ID NO: 897964 - DNA, 15 bp, Homo sapiens
gccatgaagagtgaa

SEQ ID NO: 897965 - DNA, 15 bp, Homo sapiens
ccatgaagagtgaat

SEQ ID NO: 897966 - DNA, 15 bp, Homo sapiens
catgaagagtgaatt

SEQ ID NO: 897967 - DNA, 15 bp, Homo sapiens
atgaagagtgaattc

SEQ ID NO: 897968 - DNA, 15 bp, Homo sapiens
tgaagagtgaattcc

SEQ ID NO: 897969 - DNA, 15 bp, Homo sapiens
gaagagtgaattcct

SEQ ID NO: 897970 - DNA, 15 bp, Homo sapiens
aagagtgaattcctg

SEQ ID NO: 897971 - DNA, 15 bp, Homo sapiens
agagtgaattcctgc

SEQ ID NO: 897972 - DNA, 15 bp, Homo sapiens
gagtgaattcctgcc

SEQ ID NO: 897973 - DNA, 15 bp, Homo sapiens
agtgaattcctgccc

SEQ ID NO: 897974 - DNA, 15 bp, Homo sapiens
gtgaattcctgccca

SEQ ID NO: 897975 - DNA, 15 bp, Homo sapiens
tgaattcctgcccag

SEQ ID NO: 897976 - DNA, 15 bp, Homo sapiens
gaattcctgcccagt

SEQ ID NO: 897977 - DNA, 15 bp, Homo sapiens
aattcctgcccagtg

SEQ ID NO: 897978 - DNA, 15 bp, Homo sapiens
attcctgcccagtgt

SEQ ID NO: 897979 - DNA, 15 bp, Homo sapiens
ttcctgcccagtgtc

SEQ ID NO: 897980 - DNA, 15 bp, Homo sapiens
tcctgcccagtgtct

SEQ ID NO: 897981 - DNA, 15 bp, Homo sapiens
cctgcccagtgtctt

SEQ ID NO: 897982 - DNA, 15 bp, Homo sapiens
ctgcccagtgtcttg

SEQ ID NO: 897983 - DNA, 15 bp, Homo sapiens
tgcccagtgtcttgc

SEQ ID NO: 897984 - DNA, 15 bp, Homo sapiens
gcccagtgtcttgcc

SEQ ID NO: 897985 - DNA, 15 bp, Homo sapiens
cccagtgtcttgcca

SEQ ID NO: 897986 - DNA, 15 bp, Homo sapiens
ccagtgtcttgccaa

SEQ ID NO: 897987 - DNA, 15 bp, Homo sapiens
cagtgtcttgccaaa

SEQ ID NO: 897988 - DNA, 15 bp, Homo sapiens
agtgtcttgccaaac

SEQ ID NO: 897989 - DNA, 15 bp, Homo sapiens
gtgtcttgccaaaca

SEQ ID NO: 897990 - DNA, 15 bp, Homo sapiens
tgtcttgccaaacag

SEQ ID NO: 897991 - DNA, 15 bp, Homo sapiens
gtcttgccaaacagg

SEQ ID NO: 897992 - DNA, 15 bp, Homo sapiens
tcttgccaaacaggc

SEQ ID NO: 897993 - DNA, 15 bp, Homo sapiens
cttgccaaacaggcc

SEQ ID NO: 897994 - DNA, 15 bp, Homo sapiens
ttgccaaacaggccc

SEQ ID NO: 897995 - DNA, 15 bp, Homo sapiens
tgccaaacaggccca

SEQ ID NO: 897996 - DNA, 15 bp, Homo sapiens
gccaaacaggcccag

SEQ ID NO: 897997 - DNA, 15 bp, Homo sapiens
ccaaacaggcccagc

SEQ ID NO: 897998 - DNA, 15 bp, Homo sapiens
caaacaggcccagca

SEQ ID NO: 897999 - DNA, 15 bp, Homo sapiens
aaacaggcccagcat

SEQ ID NO: 898000 - DNA, 15 bp, Homo sapiens
aacaggcccagcata

SEQ ID NO: 898001 - DNA, 15 bp, Homo sapiens
acaggcccagcataa

SEQ ID NO: 898002 - DNA, 15 bp, Homo sapiens
caggcccagcataaa

SEQ ID NO: 898003 - DNA, 15 bp, Homo sapiens
aggcccagcataaaa

SEQ ID NO: 898004 - DNA, 15 bp, Homo sapiens
ggcccagcataaaag

SEQ ID NO: 898005 - DNA, 15 bp, Homo sapiens
gcccagcataaaaga

SEQ ID NO: 898006 - DNA, 15 bp, Homo sapiens
cccagcataaaagat

SEQ ID NO: 898007 - DNA, 15 bp, Homo sapiens
ccagcataaaagatc

SEQ ID NO: 898008 - DNA, 15 bp, Homo sapiens
cagcataaaagatcc

SEQ ID NO: 898009 - DNA, 15 bp, Homo sapiens
agcataaaagatcca

SEQ ID NO: 898010 - DNA, 15 bp, Homo sapiens
gcataaaagatccag

SEQ ID NO: 898011 - DNA, 15 bp, Homo sapiens
cataaaagatccaga

SEQ ID NO: 898012 - DNA, 15 bp, Homo sapiens
ataaaagatccagag

SEQ ID NO: 898013 - DNA, 15 bp, Homo sapiens
taaaagatccagagg

SEQ ID NO: 898014 - DNA, 15 bp, Homo sapiens
aaaagatccagagga

SEQ ID NO: 898015 - DNA, 15 bp, Homo sapiens
aaagatccagaggaa

SEQ ID NO: 898016 - DNA, 15 bp, Homo sapiens
aagatccagaggaac

SEQ ID NO: 898017 - DNA, 15 bp, Homo sapiens
agatccagaggaacc

SEQ ID NO: 898018 - DNA, 15 bp, Homo sapiens
gatccagaggaaccc

SEQ ID NO: 898019 - DNA, 15 bp, Homo sapiens
atccagaggaaccct

SEQ ID NO: 898020 - DNA, 15 bp, Homo sapiens
tccagaggaaccctg

SEQ ID NO: 898021 - DNA, 15 bp, Homo sapiens
ccagaggaaccctga

SEQ ID NO: 898022 - DNA, 15 bp, Homo sapiens
cagaggaaccctgag

SEQ ID NO: 898023 - DNA, 15 bp, Homo sapiens
agaggaaccctgagc

SEQ ID NO: 898024 - DNA, 15 bp, Homo sapiens
gaggaaccctgagca

SEQ ID NO: 898025 - DNA, 15 bp, Homo sapiens
aggaaccctgagcag

SEQ ID NO: 898026 - DNA, 15 bp, Homo sapiens
ggaaccctgagcagg

SEQ ID NO: 898027 - DNA, 15 bp, Homo sapiens
gaaccctgagcaggc

SEQ ID NO: 898028 - DNA, 15 bp, Homo sapiens
aaccctgagcaggca

SEQ ID NO: 898029 - DNA, 15 bp, Homo sapiens
accctgagcaggcag

SEQ ID NO: 898030 - DNA, 15 bp, Homo sapiens
ccctgagcaggcaga

SEQ ID NO: 898031 - DNA, 15 bp, Homo sapiens
cctgagcaggcagag

SEQ ID NO: 898032 - DNA, 15 bp, Homo sapiens
ctgagcaggcagagg

SEQ ID NO: 898033 - DNA, 15 bp, Homo sapiens
tgagcaggcagagga

SEQ ID NO: 898034 - DNA, 15 bp, Homo sapiens
gagcaggcagaggat

SEQ ID NO: 898035 - DNA, 15 bp, Homo sapiens
agcaggcagaggata

SEQ ID NO: 898036 - DNA, 15 bp, Homo sapiens
gcaggcagaggatac

SEQ ID NO: 898037 - DNA, 15 bp, Homo sapiens
caggcagaggataca

SEQ ID NO: 898038 - DNA, 15 bp, Homo sapiens
aggcagaggatacac

SEQ ID NO: 898039 - DNA, 15 bp, Homo sapiens
ggcagaggatacact

SEQ ID NO: 898040 - DNA, 15 bp, Homo sapiens
gcagaggatacacta

SEQ ID NO: 898041 - DNA, 15 bp, Homo sapiens
cagaggatacactag

SEQ ID NO: 898042 - DNA, 15 bp, Homo sapiens
agaggatacactagg

SEQ ID NO: 898043 - DNA, 15 bp, Homo sapiens
gaggatacactaggc

SEQ ID NO: 898044 - DNA, 15 bp, Homo sapiens
aggatacactaggcc

SEQ ID NO: 898045 - DNA, 15 bp, Homo sapiens
ggatacactaggccc

SEQ ID NO: 898046 - DNA, 15 bp, Homo sapiens
gatacactaggccca

SEQ ID NO: 898047 - DNA, 15 bp, Homo sapiens
atacactaggcccag

SEQ ID NO: 898048 - DNA, 15 bp, Homo sapiens
tacactaggcccagg

SEQ ID NO: 898049 - DNA, 15 bp, Homo sapiens
acactaggcccagga

SEQ ID NO: 898050 - DNA, 15 bp, Homo sapiens
cactaggcccaggat

SEQ ID NO: 898051 - DNA, 15 bp, Homo sapiens
actaggcccaggatg

SEQ ID NO: 898052 - DNA, 15 bp, Homo sapiens
ctaggcccaggatgg

SEQ ID NO: 898053 - DNA, 15 bp, Homo sapiens
taggcccaggatgga

SEQ ID NO: 898054 - DNA, 15 bp, Homo sapiens
aggcccaggatggac

SEQ ID NO: 898055 - DNA, 15 bp, Homo sapiens
ggcccaggatggaca

SEQ ID NO: 898056 - DNA, 15 bp, Homo sapiens
gcccaggatggacag

SEQ ID NO: 898057 - DNA, 15 bp, Homo sapiens
cccaggatggacaga

SEQ ID NO: 898058 - DNA, 15 bp, Homo sapiens
ccaggatggacagaa

SEQ ID NO: 898059 - DNA, 15 bp, Homo sapiens
caggatggacagaag

SEQ ID NO: 898060 - DNA, 15 bp, Homo sapiens
aggatggacagaagc

SEQ ID NO: 898061 - DNA, 15 bp, Homo sapiens
ggatggacagaagcc

SEQ ID NO: 898062 - DNA, 15 bp, Homo sapiens
gatggacagaagcct

SEQ ID NO: 898063 - DNA, 15 bp, Homo sapiens
atggacagaagcctc

SEQ ID NO: 898064 - DNA, 15 bp, Homo sapiens
tggacagaagcctct

SEQ ID NO: 898065 - DNA, 15 bp, Homo sapiens
ggacagaagcctcta

SEQ ID NO: 898066 - DNA, 15 bp, Homo sapiens
gacagaagcctctac

SEQ ID NO: 898067 - DNA, 15 bp, Homo sapiens
acagaagcctctact

SEQ ID NO: 898068 - DNA, 15 bp, Homo sapiens
cagaagcctctactt

SEQ ID NO: 898069 - DNA, 15 bp, Homo sapiens
agaagcctctacttc

SEQ ID NO: 898070 - DNA, 15 bp, Homo sapiens
gaagcctctacttca

SEQ ID NO: 898071 - DNA, 15 bp, Homo sapiens
aagcctctacttcag

SEQ ID NO: 898072 - DNA, 15 bp, Homo sapiens
agcctctacttcaga

SEQ ID NO: 898073 - DNA, 15 bp, Homo sapiens
gcctctacttcagag

SEQ ID NO: 898074 - DNA, 15 bp, Homo sapiens
cctctacttcagagc

SEQ ID NO: 898075 - DNA, 15 bp, Homo sapiens
ctctacttcagagct

SEQ ID NO: 898076 - DNA, 15 bp, Homo sapiens
tctacttcagagctc

SEQ ID NO: 898077 - DNA, 15 bp, Homo sapiens
ctacttcagagctca

SEQ ID NO: 898078 - DNA, 15 bp, Homo sapiens
tacttcagagctcat

SEQ ID NO: 898079 - DNA, 15 bp, Homo sapiens
acttcagagctcatc

SEQ ID NO: 898080 - DNA, 15 bp, Homo sapiens
cttcagagctcatcc

SEQ ID NO: 898081 - DNA, 15 bp, Homo sapiens
ttcagagctcatcca

SEQ ID NO: 898082 - DNA, 15 bp, Homo sapiens
tcagagctcatccat

SEQ ID NO: 898083 - DNA, 15 bp, Homo sapiens
cagagctcatccata

SEQ ID NO: 898084 - DNA, 15 bp, Homo sapiens
agagctcatccatag

SEQ ID NO: 898085 - DNA, 15 bp, Homo sapiens
gagctcatccataga

SEQ ID NO: 898086 - DNA, 15 bp, Homo sapiens
agctcatccatagac

SEQ ID NO: 898087 - DNA, 15 bp, Homo sapiens
gctcatccatagacc

SEQ ID NO: 898088 - DNA, 15 bp, Homo sapiens
ctcatccatagacct

SEQ ID NO: 898089 - DNA, 15 bp, Homo sapiens
tcatccatagacctc

SEQ ID NO: 898090 - DNA, 15 bp, Homo sapiens
catccatagacctct

SEQ ID NO: 898091 - DNA, 15 bp, Homo sapiens
atccatagacctctt

SEQ ID NO: 898092 - DNA, 15 bp, Homo sapiens
tccatagacctcttt

SEQ ID NO: 898093 - DNA, 15 bp, Homo sapiens
ccatagacctctttt

SEQ ID NO: 898094 - DNA, 15 bp, Homo sapiens
catagacctcttttt

SEQ ID NO: 898095 - DNA, 15 bp, Homo sapiens
atagacctcttttta

SEQ ID NO: 898096 - DNA, 15 bp, Homo sapiens
tagacctctttttaa

SEQ ID NO: 898097 - DNA, 15 bp, Homo sapiens
agacctctttttaag

SEQ ID NO: 898098 - DNA, 15 bp, Homo sapiens
gacctctttttaaga

SEQ ID NO: 898099 - DNA, 15 bp, Homo sapiens
acctctttttaagaa

SEQ ID NO: 898100 - DNA, 15 bp, Homo sapiens
cctctttttaagaag

SEQ ID NO: 898101 - DNA, 15 bp, Homo sapiens
ctctttttaagaagg

SEQ ID NO: 898102 - DNA, 15 bp, Homo sapiens
tctttttaagaaggt

SEQ ID NO: 898103 - DNA, 15 bp, Homo sapiens
ctttttaagaaggta

SEQ ID NO: 898104 - DNA, 15 bp, Homo sapiens
tttttaagaaggtaa

SEQ ID NO: 898105 - DNA, 15 bp, Homo sapiens
ttttaagaaggtaaa

SEQ ID NO: 898106 - DNA, 15 bp, Homo sapiens
tttaagaaggtaaag

SEQ ID NO: 898107 - DNA, 15 bp, Homo sapiens
ttaagaaggtaaaga

SEQ ID NO: 898108 - DNA, 15 bp, Homo sapiens
taagaaggtaaagaa

SEQ ID NO: 898109 - DNA, 15 bp, Homo sapiens
aagaaggtaaagaag

SEQ ID NO: 898110 - DNA, 15 bp, Homo sapiens
agaaggtaaagaagg

SEQ ID NO: 898111 - DNA, 15 bp, Homo sapiens
gaaggtaaagaagga

SEQ ID NO: 898112 - DNA, 15 bp, Homo sapiens
aaggtaaagaaggag

SEQ ID NO: 898113 - DNA, 15 bp, Homo sapiens
aggtaaagaaggagc

SEQ ID NO: 898114 - DNA, 15 bp, Homo sapiens
ggtaaagaaggagct

SEQ ID NO: 898115 - DNA, 15 bp, Homo sapiens
gtaaagaaggagctg

SEQ ID NO: 898116 - DNA, 15 bp, Homo sapiens
taaagaaggagctgt

SEQ ID NO: 898117 - DNA, 15 bp, Homo sapiens
aaagaaggagctgtt

SEQ ID NO: 898118 - DNA, 15 bp, Homo sapiens
aagaaggagctgttg

SEQ ID NO: 898119 - DNA, 15 bp, Homo sapiens
agaaggagctgttgt

SEQ ID NO: 898120 - DNA, 15 bp, Homo sapiens
gaaggagctgttgtt

SEQ ID NO: 898121 - DNA, 15 bp, Homo sapiens
aaggagctgttgttg

SEQ ID NO: 898122 - DNA, 15 bp, Homo sapiens
aggagctgttgttgc

SEQ ID NO: 898123 - DNA, 15 bp, Homo sapiens
ggagctgttgttgca

SEQ ID NO: 898124 - DNA, 15 bp, Homo sapiens
gagctgttgttgcaa

SEQ ID NO: 898125 - DNA, 15 bp, Homo sapiens
agctgttgttgcaat

SEQ ID NO: 898126 - DNA, 15 bp, Homo sapiens
gctgttgttgcaatt

SEQ ID NO: 898127 - DNA, 15 bp, Homo sapiens
ctgttgttgcaattt

SEQ ID NO: 898128 - DNA, 15 bp, Homo sapiens
tgttgttgcaatttc

SEQ ID NO: 898129 - DNA, 15 bp, Homo sapiens
gttgttgcaatttca

SEQ ID NO: 898130 - DNA, 15 bp, Homo sapiens
ttgttgcaatttcat

SEQ ID NO: 898131 - DNA, 15 bp, Homo sapiens
tgttgcaatttcata

SEQ ID NO: 898132 - DNA, 15 bp, Homo sapiens
gttgcaatttcatag

SEQ ID NO: 898133 - DNA, 15 bp, Homo sapiens
ttgcaatttcataga

SEQ ID NO: 898134 - DNA, 15 bp, Homo sapiens
tgcaatttcatagat

SEQ ID NO: 898135 - DNA, 15 bp, Homo sapiens
gcaatttcatagata

SEQ ID NO: 898136 - DNA, 15 bp, Homo sapiens
caatttcatagataa

SEQ ID NO: 898137 - DNA, 15 bp, Homo sapiens
aatttcatagataag

SEQ ID NO: 898138 - DNA, 15 bp, Homo sapiens
atttcatagataagt

SEQ ID NO: 898139 - DNA, 15 bp, Homo sapiens
tttcatagataagtc

SEQ ID NO: 898140 - DNA, 15 bp, Homo sapiens
ttcatagataagtca

SEQ ID NO: 898141 - DNA, 15 bp, Homo sapiens
tcatagataagtcaa

SEQ ID NO: 898142 - DNA, 15 bp, Homo sapiens
catagataagtcaaa

SEQ ID NO: 898143 - DNA, 15 bp, Homo sapiens
atagataagtcaaaa

SEQ ID NO: 898144 - DNA, 15 bp, Homo sapiens
tagataagtcaaaac

SEQ ID NO: 898145 - DNA, 15 bp, Homo sapiens
agataagtcaaaaca

SEQ ID NO: 898146 - DNA, 15 bp, Homo sapiens
gataagtcaaaacat

SEQ ID NO: 898147 - DNA, 15 bp, Homo sapiens
ataagtcaaaacata

SEQ ID NO: 898148 - DNA, 15 bp, Homo sapiens
taagtcaaaacatat

SEQ ID NO: 898149 - DNA, 15 bp, Homo sapiens
aagtcaaaacatatt

SEQ ID NO: 898150 - DNA, 15 bp, Homo sapiens
agtcaaaacatatta

SEQ ID NO: 898151 - DNA, 15 bp, Homo sapiens
gtcaaaacatattat

SEQ ID NO: 898152 - DNA, 15 bp, Homo sapiens
tcaaaacatattatt

SEQ ID NO: 898153 - DNA, 15 bp, Homo sapiens
caaaacatattatta

SEQ ID NO: 898154 - DNA, 15 bp, Homo sapiens
aaaacatattattat

SEQ ID NO: 898155 - DNA, 15 bp, Homo sapiens
aaacatattattatt

SEQ ID NO: 898156 - DNA, 15 bp, Homo sapiens
aacatattattatta

SEQ ID NO: 898157 - DNA, 15 bp, Homo sapiens
acatattattattaa

SEQ ID NO: 898158 - DNA, 15 bp, Homo sapiens
catattattattaat

SEQ ID NO: 898159 - DNA, 15 bp, Homo sapiens
atattattattaata

SEQ ID NO: 898160 - DNA, 15 bp, Homo sapiens
tattattattaataa

SEQ ID NO: 898161 - DNA, 15 bp, Homo sapiens
attattattaataat

SEQ ID NO: 898162 - DNA, 15 bp, Homo sapiens
ttattattaataata

SEQ ID NO: 898163 - DNA, 15 bp, Homo sapiens
tattattaataatag

SEQ ID NO: 898164 - DNA, 15 bp, Homo sapiens
attattaataatagc

SEQ ID NO: 898165 - DNA, 15 bp, Homo sapiens
ttattaataatagca

SEQ ID NO: 898166 - DNA, 15 bp, Homo sapiens
tattaataatagcat

SEQ ID NO: 898167 - DNA, 15 bp, Homo sapiens
attaataatagcatc

SEQ ID NO: 898168 - DNA, 15 bp, Homo sapiens
ttaataatagcatct

SEQ ID NO: 898169 - DNA, 15 bp, Homo sapiens
taataatagcatctt

SEQ ID NO: 898170 - DNA, 15 bp, Homo sapiens
aataatagcatcttc

SEQ ID NO: 898171 - DNA, 15 bp, Homo sapiens
ataatagcatcttcc

SEQ ID NO: 898172 - DNA, 15 bp, Homo sapiens
taatagcatcttcca

SEQ ID NO: 898173 - DNA, 15 bp, Homo sapiens
aatagcatcttccac

SEQ ID NO: 898174 - DNA, 15 bp, Homo sapiens
atagcatcttccact

SEQ ID NO: 898175 - DNA, 15 bp, Homo sapiens
tagcatcttccactt

SEQ ID NO: 898176 - DNA, 15 bp, Homo sapiens
agcatcttccacttt

SEQ ID NO: 898177 - DNA, 15 bp, Homo sapiens
gcatcttccactttt

SEQ ID NO: 898178 - DNA, 15 bp, Homo sapiens
catcttccacttttt

SEQ ID NO: 898179 - DNA, 15 bp, Homo sapiens
atcttccactttttt

SEQ ID NO: 898180 - DNA, 15 bp, Homo sapiens
tcttccacttttttg

SEQ ID NO: 898181 - DNA, 15 bp, Homo sapiens
cttccacttttttga

SEQ ID NO: 898182 - DNA, 15 bp, Homo sapiens
ttccacttttttgag

SEQ ID NO: 898183 - DNA, 15 bp, Homo sapiens
tccacttttttgagt

SEQ ID NO: 898184 - DNA, 15 bp, Homo sapiens
ccacttttttgagtt

SEQ ID NO: 898185 - DNA, 15 bp, Homo sapiens
cacttttttgagttc

SEQ ID NO: 898186 - DNA, 15 bp, Homo sapiens
acttttttgagttct

SEQ ID NO: 898187 - DNA, 15 bp, Homo sapiens
cttttttgagttctt

SEQ ID NO: 898188 - DNA, 15 bp, Homo sapiens
ttttttgagttctta

SEQ ID NO: 898189 - DNA, 15 bp, Homo sapiens
tttttgagttcttat

SEQ ID NO: 898190 - DNA, 15 bp, Homo sapiens
ttttgagttcttatc

SEQ ID NO: 898191 - DNA, 15 bp, Homo sapiens
tttgagttcttatcg

SEQ ID NO: 898192 - DNA, 15 bp, Homo sapiens
ttgagttcttatcgt

SEQ ID NO: 898193 - DNA, 15 bp, Homo sapiens
tgagttcttatcgtg

SEQ ID NO: 898194 - DNA, 15 bp, Homo sapiens
gagttcttatcgtgt

SEQ ID NO: 898195 - DNA, 15 bp, Homo sapiens
agttcttatcgtgtg

SEQ ID NO: 898196 - DNA, 15 bp, Homo sapiens
gttcttatcgtgtgc

SEQ ID NO: 898197 - DNA, 15 bp, Homo sapiens
ttcttatcgtgtgct

SEQ ID NO: 898198 - DNA, 15 bp, Homo sapiens
tcttatcgtgtgctg

SEQ ID NO: 898199 - DNA, 15 bp, Homo sapiens
cttatcgtgtgctgg

SEQ ID NO: 898200 - DNA, 15 bp, Homo sapiens
ttatcgtgtgctggg

SEQ ID NO: 898201 - DNA, 15 bp, Homo sapiens
tatcgtgtgctgggc

SEQ ID NO: 898202 - DNA, 15 bp, Homo sapiens
atcgtgtgctgggct

SEQ ID NO: 898203 - DNA, 15 bp, Homo sapiens
tcgtgtgctgggctt

SEQ ID NO: 898204 - DNA, 15 bp, Homo sapiens
cgtgtgctgggcttc

SEQ ID NO: 898205 - DNA, 15 bp, Homo sapiens
gtgtgctgggcttct

SEQ ID NO: 898206 - DNA, 15 bp, Homo sapiens
tgtgctgggcttctg

SEQ ID NO: 898207 - DNA, 15 bp, Homo sapiens
gtgctgggcttctgt

SEQ ID NO: 898208 - DNA, 15 bp, Homo sapiens
tgctgggcttctgtg

SEQ ID NO: 898209 - DNA, 15 bp, Homo sapiens
gctgggcttctgtgc

SEQ ID NO: 898210 - DNA, 15 bp, Homo sapiens
ctgggcttctgtgct

SEQ ID NO: 898211 - DNA, 15 bp, Homo sapiens
tgggcttctgtgctc

SEQ ID NO: 898212 - DNA, 15 bp, Homo sapiens
gggcttctgtgctca

SEQ ID NO: 898213 - DNA, 15 bp, Homo sapiens
ggcttctgtgctcag

SEQ ID NO: 898214 - DNA, 15 bp, Homo sapiens
gcttctgtgctcagt

SEQ ID NO: 898215 - DNA, 15 bp, Homo sapiens
cttctgtgctcagtg

SEQ ID NO: 898216 - DNA, 15 bp, Homo sapiens
ttctgtgctcagtgc

SEQ ID NO: 898217 - DNA, 15 bp, Homo sapiens
tctgtgctcagtgct

SEQ ID NO: 898218 - DNA, 15 bp, Homo sapiens
ctgtgctcagtgctt

SEQ ID NO: 898219 - DNA, 15 bp, Homo sapiens
tgtgctcagtgcttt

SEQ ID NO: 898220 - DNA, 15 bp, Homo sapiens
gtgctcagtgcttta

SEQ ID NO: 898221 - DNA, 15 bp, Homo sapiens
tgctcagtgctttac

SEQ ID NO: 898222 - DNA, 15 bp, Homo sapiens
gctcagtgctttaca

SEQ ID NO: 898223 - DNA, 15 bp, Homo sapiens
ctcagtgctttacat

SEQ ID NO: 898224 - DNA, 15 bp, Homo sapiens
tcagtgctttacatg

SEQ ID NO: 898225 - DNA, 15 bp, Homo sapiens
cagtgctttacatgc

SEQ ID NO: 898226 - DNA, 15 bp, Homo sapiens
agtgctttacatgca

SEQ ID NO: 898227 - DNA, 15 bp, Homo sapiens
gtgctttacatgcat

SEQ ID NO: 898228 - DNA, 15 bp, Homo sapiens
tgctttacatgcatc

SEQ ID NO: 898229 - DNA, 15 bp, Homo sapiens
gctttacatgcatca

SEQ ID NO: 898230 - DNA, 15 bp, Homo sapiens
ctttacatgcatcat

SEQ ID NO: 898231 - DNA, 15 bp, Homo sapiens
tttacatgcatcatc

SEQ ID NO: 898232 - DNA, 15 bp, Homo sapiens
ttacatgcatcatct

SEQ ID NO: 898233 - DNA, 15 bp, Homo sapiens
tacatgcatcatctc

SEQ ID NO: 898234 - DNA, 15 bp, Homo sapiens
acatgcatcatctca

SEQ ID NO: 898235 - DNA, 15 bp, Homo sapiens
catgcatcatctcat

SEQ ID NO: 898236 - DNA, 15 bp, Homo sapiens
atgcatcatctcatt

SEQ ID NO: 898237 - DNA, 15 bp, Homo sapiens
tgcatcatctcattt

SEQ ID NO: 898238 - DNA, 15 bp, Homo sapiens
gcatcatctcattta

SEQ ID NO: 898239 - DNA, 15 bp, Homo sapiens
catcatctcatttaa

SEQ ID NO: 898240 - DNA, 15 bp, Homo sapiens
atcatctcatttaat

SEQ ID NO: 898241 - DNA, 15 bp, Homo sapiens
tcatctcatttaatc

SEQ ID NO: 898242 - DNA, 15 bp, Homo sapiens
catctcatttaatcc

SEQ ID NO: 898243 - DNA, 15 bp, Homo sapiens
atctcatttaatccc

SEQ ID NO: 898244 - DNA, 15 bp, Homo sapiens
tctcatttaatcccc

SEQ ID NO: 898245 - DNA, 15 bp, Homo sapiens
ctcatttaatcccca

SEQ ID NO: 898246 - DNA, 15 bp, Homo sapiens
tcatttaatccccat

SEQ ID NO: 898247 - DNA, 15 bp, Homo sapiens
catttaatccccatg

SEQ ID NO: 898248 - DNA, 15 bp, Homo sapiens
atttaatccccatga

SEQ ID NO: 898249 - DNA, 15 bp, Homo sapiens
tttaatccccatgac

SEQ ID NO: 898250 - DNA, 15 bp, Homo sapiens
ttaatccccatgaca

SEQ ID NO: 898251 - DNA, 15 bp, Homo sapiens
taatccccatgacag

SEQ ID NO: 898252 - DNA, 15 bp, Homo sapiens
aatccccatgacagt

SEQ ID NO: 898253 - DNA, 15 bp, Homo sapiens
atccccatgacagtt

SEQ ID NO: 898254 - DNA, 15 bp, Homo sapiens
tccccatgacagttc

SEQ ID NO: 898255 - DNA, 15 bp, Homo sapiens
ccccatgacagttct

SEQ ID NO: 898256 - DNA, 15 bp, Homo sapiens
cccatgacagttctc

SEQ ID NO: 898257 - DNA, 15 bp, Homo sapiens
ccatgacagttctcc

SEQ ID NO: 898258 - DNA, 15 bp, Homo sapiens
catgacagttctcct

SEQ ID NO: 898259 - DNA, 15 bp, Homo sapiens
atgacagttctccta

SEQ ID NO: 898260 - DNA, 15 bp, Homo sapiens
tgacagttctcctag

SEQ ID NO: 898261 - DNA, 15 bp, Homo sapiens
gacagttctcctagg

SEQ ID NO: 898262 - DNA, 15 bp, Homo sapiens
acagttctcctaggc

SEQ ID NO: 898263 - DNA, 15 bp, Homo sapiens
cagttctcctaggca

SEQ ID NO: 898264 - DNA, 15 bp, Homo sapiens
agttctcctaggcag

SEQ ID NO: 898265 - DNA, 15 bp, Homo sapiens
gttctcctaggcagg

SEQ ID NO: 898266 - DNA, 15 bp, Homo sapiens
ttctcctaggcaggt

SEQ ID NO: 898267 - DNA, 15 bp, Homo sapiens
tctcctaggcaggta

SEQ ID NO: 898268 - DNA, 15 bp, Homo sapiens
ctcctaggcaggtag

SEQ ID NO: 898269 - DNA, 15 bp, Homo sapiens
tcctaggcaggtagc

SEQ ID NO: 898270 - DNA, 15 bp, Homo sapiens
cctaggcaggtagcc

SEQ ID NO: 898271 - DNA, 15 bp, Homo sapiens
ctaggcaggtagcct

SEQ ID NO: 898272 - DNA, 15 bp, Homo sapiens
taggcaggtagcctc

SEQ ID NO: 898273 - DNA, 15 bp, Homo sapiens
aggcaggtagcctca

SEQ ID NO: 898274 - DNA, 15 bp, Homo sapiens
ggcaggtagcctcac

SEQ ID NO: 898275 - DNA, 15 bp, Homo sapiens
gcaggtagcctcaca

SEQ ID NO: 898276 - DNA, 15 bp, Homo sapiens
caggtagcctcacaa

SEQ ID NO: 898277 - DNA, 15 bp, Homo sapiens
aggtagcctcacaaa

SEQ ID NO: 898278 - DNA, 15 bp, Homo sapiens
ggtagcctcacaaac

SEQ ID NO: 898279 - DNA, 15 bp, Homo sapiens
gtagcctcacaaacc

SEQ ID NO: 898280 - DNA, 15 bp, Homo sapiens
tagcctcacaaaccc

SEQ ID NO: 898281 - DNA, 15 bp, Homo sapiens
agcctcacaaaccca

SEQ ID NO: 898282 - DNA, 15 bp, Homo sapiens
gcctcacaaacccat

SEQ ID NO: 898283 - DNA, 15 bp, Homo sapiens
cctcacaaacccatt

SEQ ID NO: 898284 - DNA, 15 bp, Homo sapiens
ctcacaaacccattt

SEQ ID NO: 898285 - DNA, 15 bp, Homo sapiens
tcacaaacccatttt

SEQ ID NO: 898286 - DNA, 15 bp, Homo sapiens
cacaaacccatttta

SEQ ID NO: 898287 - DNA, 15 bp, Homo sapiens
acaaacccattttac

SEQ ID NO: 898288 - DNA, 15 bp, Homo sapiens
caaacccattttaca

SEQ ID NO: 898289 - DNA, 15 bp, Homo sapiens
aaacccattttacaa

SEQ ID NO: 898290 - DNA, 15 bp, Homo sapiens
aacccattttacaag

SEQ ID NO: 898291 - DNA, 15 bp, Homo sapiens
acccattttacaagg

SEQ ID NO: 898292 - DNA, 15 bp, Homo sapiens
cccattttacaaggc

SEQ ID NO: 898293 - DNA, 15 bp, Homo sapiens
ccattttacaaggcc

SEQ ID NO: 898294 - DNA, 15 bp, Homo sapiens
cattttacaaggccc

SEQ ID NO: 898295 - DNA, 15 bp, Homo sapiens
attttacaaggccca

SEQ ID NO: 898296 - DNA, 15 bp, Homo sapiens
ttttacaaggcccag

SEQ ID NO: 898297 - DNA, 15 bp, Homo sapiens
tttacaaggcccagt

SEQ ID NO: 898298 - DNA, 15 bp, Homo sapiens
ttacaaggcccagtg

SEQ ID NO: 898299 - DNA, 15 bp, Homo sapiens
tacaaggcccagtga

SEQ ID NO: 898300 - DNA, 15 bp, Homo sapiens
acaaggcccagtgag

SEQ ID NO: 898301 - DNA, 15 bp, Homo sapiens
caaggcccagtgagg

SEQ ID NO: 898302 - DNA, 15 bp, Homo sapiens
aaggcccagtgaggt

SEQ ID NO: 898303 - DNA, 15 bp, Homo sapiens
aggcccagtgaggtt

SEQ ID NO: 898304 - DNA, 15 bp, Homo sapiens
ggcccagtgaggttg

SEQ ID NO: 898305 - DNA, 15 bp, Homo sapiens
gcccagtgaggttgt

SEQ ID NO: 898306 - DNA, 15 bp, Homo sapiens
cccagtgaggttgtg

SEQ ID NO: 898307 - DNA, 15 bp, Homo sapiens
ccagtgaggttgtgg

SEQ ID NO: 898308 - DNA, 15 bp, Homo sapiens
cagtgaggttgtggc

SEQ ID NO: 898309 - DNA, 15 bp, Homo sapiens
agtgaggttgtggca

SEQ ID NO: 898310 - DNA, 15 bp, Homo sapiens
gtgaggttgtggcag

SEQ ID NO: 898311 - DNA, 15 bp, Homo sapiens
tgaggttgtggcagt

SEQ ID NO: 898312 - DNA, 15 bp, Homo sapiens
gaggttgtggcagtt

SEQ ID NO: 898313 - DNA, 15 bp, Homo sapiens
aggttgtggcagttg

SEQ ID NO: 898314 - DNA, 15 bp, Homo sapiens
ggttgtggcagttgc

SEQ ID NO: 898315 - DNA, 15 bp, Homo sapiens
gttgtggcagttgcc

SEQ ID NO: 898316 - DNA, 15 bp, Homo sapiens
ttgtggcagttgcca

SEQ ID NO: 898317 - DNA, 15 bp, Homo sapiens
tgtggcagttgccaa

SEQ ID NO: 898318 - DNA, 15 bp, Homo sapiens
gtggcagttgccaag

SEQ ID NO: 898319 - DNA, 15 bp, Homo sapiens
tggcagttgccaagg

SEQ ID NO: 898320 - DNA, 15 bp, Homo sapiens
ggcagttgccaaggt

SEQ ID NO: 898321 - DNA, 15 bp, Homo sapiens
gcagttgccaaggtc

SEQ ID NO: 898322 - DNA, 15 bp, Homo sapiens
cagttgccaaggtca

SEQ ID NO: 898323 - DNA, 15 bp, Homo sapiens
agttgccaaggtcac

SEQ ID NO: 898324 - DNA, 15 bp, Homo sapiens
gttgccaaggtcaca

SEQ ID NO: 898325 - DNA, 15 bp, Homo sapiens
ttgccaaggtcacac

SEQ ID NO: 898326 - DNA, 15 bp, Homo sapiens
tgccaaggtcacaca

SEQ ID NO: 898327 - DNA, 15 bp, Homo sapiens
gccaaggtcacacag

SEQ ID NO: 898328 - DNA, 15 bp, Homo sapiens
ccaaggtcacacagc

SEQ ID NO: 898329 - DNA, 15 bp, Homo sapiens
caaggtcacacagct

SEQ ID NO: 898330 - DNA, 15 bp, Homo sapiens
aaggtcacacagctc

SEQ ID NO: 898331 - DNA, 15 bp, Homo sapiens
aggtcacacagctca

SEQ ID NO: 898332 - DNA, 15 bp, Homo sapiens
ggtcacacagctcag

SEQ ID NO: 898333 - DNA, 15 bp, Homo sapiens
gtcacacagctcaga

SEQ ID NO: 898334 - DNA, 15 bp, Homo sapiens
tcacacagctcagaa

SEQ ID NO: 898335 - DNA, 15 bp, Homo sapiens
cacacagctcagaac

SEQ ID NO: 898336 - DNA, 15 bp, Homo sapiens
acacagctcagaact

SEQ ID NO: 898337 - DNA, 15 bp, Homo sapiens
cacagctcagaactc

SEQ ID NO: 898338 - DNA, 15 bp, Homo sapiens
acagctcagaactca

SEQ ID NO: 898339 - DNA, 15 bp, Homo sapiens
cagctcagaactcag

SEQ ID NO: 898340 - DNA, 15 bp, Homo sapiens
agctcagaactcagg

SEQ ID NO: 898341 - DNA, 15 bp, Homo sapiens
gctcagaactcaggc

SEQ ID NO: 898342 - DNA, 15 bp, Homo sapiens
ctcagaactcaggcc

SEQ ID NO: 898343 - DNA, 15 bp, Homo sapiens
tcagaactcaggcct

SEQ ID NO: 898344 - DNA, 15 bp, Homo sapiens
cagaactcaggcctg

SEQ ID NO: 898345 - DNA, 15 bp, Homo sapiens
agaactcaggcctgt

SEQ ID NO: 898346 - DNA, 15 bp, Homo sapiens
gaactcaggcctgtc

SEQ ID NO: 898347 - DNA, 15 bp, Homo sapiens
aactcaggcctgtct

SEQ ID NO: 898348 - DNA, 15 bp, Homo sapiens
actcaggcctgtctg

SEQ ID NO: 898349 - DNA, 15 bp, Homo sapiens
ctcaggcctgtctga

SEQ ID NO: 898350 - DNA, 15 bp, Homo sapiens
tcaggcctgtctgac

SEQ ID NO: 898351 - DNA, 15 bp, Homo sapiens
caggcctgtctgact

SEQ ID NO: 898352 - DNA, 15 bp, Homo sapiens
aggcctgtctgactc

SEQ ID NO: 898353 - DNA, 15 bp, Homo sapiens
ggcctgtctgactcc

SEQ ID NO: 898354 - DNA, 15 bp, Homo sapiens
gcctgtctgactcca

SEQ ID NO: 898355 - DNA, 15 bp, Homo sapiens
cctgtctgactccat

SEQ ID NO: 898356 - DNA, 15 bp, Homo sapiens
ctgtctgactccata

SEQ ID NO: 898357 - DNA, 15 bp, Homo sapiens
tgtctgactccatag

SEQ ID NO: 898358 - DNA, 15 bp, Homo sapiens
gtctgactccatagc

SEQ ID NO: 898359 - DNA, 15 bp, Homo sapiens
tctgactccatagcc

SEQ ID NO: 898360 - DNA, 15 bp, Homo sapiens
ctgactccatagcca

SEQ ID NO: 898361 - DNA, 15 bp, Homo sapiens
tgactccatagccac

SEQ ID NO: 898362 - DNA, 15 bp, Homo sapiens
gactccatagccaca

SEQ ID NO: 898363 - DNA, 15 bp, Homo sapiens
actccatagccacac

SEQ ID NO: 898364 - DNA, 15 bp, Homo sapiens
ctccatagccacact

SEQ ID NO: 898365 - DNA, 15 bp, Homo sapiens
tccatagccacactg

SEQ ID NO: 898366 - DNA, 15 bp, Homo sapiens
ccatagccacactgc

SEQ ID NO: 898367 - DNA, 15 bp, Homo sapiens
catagccacactgct

SEQ ID NO: 898368 - DNA, 15 bp, Homo sapiens
atagccacactgcta

SEQ ID NO: 898369 - DNA, 15 bp, Homo sapiens
tagccacactgctat

SEQ ID NO: 898370 - DNA, 15 bp, Homo sapiens
agccacactgctatt

SEQ ID NO: 898371 - DNA, 15 bp, Homo sapiens
gccacactgctattt

SEQ ID NO: 898372 - DNA, 15 bp, Homo sapiens
ccacactgctattta

SEQ ID NO: 898373 - DNA, 15 bp, Homo sapiens
cacactgctatttaa

SEQ ID NO: 898374 - DNA, 15 bp, Homo sapiens
acactgctatttaag

SEQ ID NO: 898375 - DNA, 15 bp, Homo sapiens
cactgctatttaagg

SEQ ID NO: 898376 - DNA, 15 bp, Homo sapiens
actgctatttaagga

SEQ ID NO: 898377 - DNA, 15 bp, Homo sapiens
ctgctatttaaggag

SEQ ID NO: 898378 - DNA, 15 bp, Homo sapiens
tgctatttaaggagc

SEQ ID NO: 898379 - DNA, 15 bp, Homo sapiens
gctatttaaggagct

SEQ ID NO: 898380 - DNA, 15 bp, Homo sapiens
ctatttaaggagcta

SEQ ID NO: 898381 - DNA, 15 bp, Homo sapiens
tatttaaggagctag

SEQ ID NO: 898382 - DNA, 15 bp, Homo sapiens
atttaaggagctagg

SEQ ID NO: 898383 - DNA, 15 bp, Homo sapiens
tttaaggagctaggt

SEQ ID NO: 898384 - DNA, 15 bp, Homo sapiens
ttaaggagctaggtt

SEQ ID NO: 898385 - DNA, 15 bp, Homo sapiens
taaggagctaggtta

SEQ ID NO: 898386 - DNA, 15 bp, Homo sapiens
aaggagctaggttag

SEQ ID NO: 898387 - DNA, 15 bp, Homo sapiens
aggagctaggttagc

SEQ ID NO: 898388 - DNA, 15 bp, Homo sapiens
ggagctaggttagcc

SEQ ID NO: 898389 - DNA, 15 bp, Homo sapiens
gagctaggttagcca

SEQ ID NO: 898390 - DNA, 15 bp, Homo sapiens
agctaggttagccaa

SEQ ID NO: 898391 - DNA, 15 bp, Homo sapiens
gctaggttagccaag

SEQ ID NO: 898392 - DNA, 15 bp, Homo sapiens
ctaggttagccaagg

SEQ ID NO: 898393 - DNA, 15 bp, Homo sapiens
taggttagccaaggt

SEQ ID NO: 898394 - DNA, 15 bp, Homo sapiens
aggttagccaaggtc

SEQ ID NO: 898395 - DNA, 15 bp, Homo sapiens
ggttagccaaggtca

SEQ ID NO: 898396 - DNA, 15 bp, Homo sapiens
gttagccaaggtcac

SEQ ID NO: 898397 - DNA, 15 bp, Homo sapiens
ttagccaaggtcaca

SEQ ID NO: 898398 - DNA, 15 bp, Homo sapiens
tagccaaggtcacag

SEQ ID NO: 898399 - DNA, 15 bp, Homo sapiens
agccaaggtcacagt

SEQ ID NO: 898400 - DNA, 15 bp, Homo sapiens
gccaaggtcacagtc

SEQ ID NO: 898401 - DNA, 15 bp, Homo sapiens
ccaaggtcacagtca

SEQ ID NO: 898402 - DNA, 15 bp, Homo sapiens
caaggtcacagtcag

SEQ ID NO: 898403 - DNA, 15 bp, Homo sapiens
aaggtcacagtcaga

SEQ ID NO: 898404 - DNA, 15 bp, Homo sapiens
aggtcacagtcagag

SEQ ID NO: 898405 - DNA, 15 bp, Homo sapiens
ggtcacagtcagagg

SEQ ID NO: 898406 - DNA, 15 bp, Homo sapiens
gtcacagtcagaggc

SEQ ID NO: 898407 - DNA, 15 bp, Homo sapiens
tcacagtcagaggca

SEQ ID NO: 898408 - DNA, 15 bp, Homo sapiens
cacagtcagaggcat

SEQ ID NO: 898409 - DNA, 15 bp, Homo sapiens
acagtcagaggcatt

SEQ ID NO: 898410 - DNA, 15 bp, Homo sapiens
cagtcagaggcattg

SEQ ID NO: 898411 - DNA, 15 bp, Homo sapiens
agtcagaggcattgg

SEQ ID NO: 898412 - DNA, 15 bp, Homo sapiens
gtcagaggcattgga

SEQ ID NO: 898413 - DNA, 15 bp, Homo sapiens
tcagaggcattggag

SEQ ID NO: 898414 - DNA, 15 bp, Homo sapiens
cagaggcattggaga

SEQ ID NO: 898415 - DNA, 15 bp, Homo sapiens
agaggcattggagag

SEQ ID NO: 898416 - DNA, 15 bp, Homo sapiens
gaggcattggagaga

SEQ ID NO: 898417 - DNA, 15 bp, Homo sapiens
aggcattggagagac

SEQ ID NO: 898418 - DNA, 15 bp, Homo sapiens
ggcattggagagact

SEQ ID NO: 898419 - DNA, 15 bp, Homo sapiens
gcattggagagactc

SEQ ID NO: 898420 - DNA, 15 bp, Homo sapiens
cattggagagactca

SEQ ID NO: 898421 - DNA, 15 bp, Homo sapiens
attggagagactcag

SEQ ID NO: 898422 - DNA, 15 bp, Homo sapiens
ttggagagactcagg

SEQ ID NO: 898423 - DNA, 15 bp, Homo sapiens
tggagagactcaggc

SEQ ID NO: 898424 - DNA, 15 bp, Homo sapiens
ggagagactcaggcc

SEQ ID NO: 898425 - DNA, 15 bp, Homo sapiens
gagagactcaggcca

SEQ ID NO: 898426 - DNA, 15 bp, Homo sapiens
agagactcaggccag

SEQ ID NO: 898427 - DNA, 15 bp, Homo sapiens
gagactcaggccagg

SEQ ID NO: 898428 - DNA, 15 bp, Homo sapiens
agactcaggccaggc

SEQ ID NO: 898429 - DNA, 15 bp, Homo sapiens
gactcaggccaggcc

SEQ ID NO: 898430 - DNA, 15 bp, Homo sapiens
actcaggccaggccc

SEQ ID NO: 898431 - DNA, 15 bp, Homo sapiens
ctcaggccaggcccc

SEQ ID NO: 898432 - DNA, 15 bp, Homo sapiens
tcaggccaggccccc

SEQ ID NO: 898433 - DNA, 15 bp, Homo sapiens
caggccaggccccct

SEQ ID NO: 898434 - DNA, 15 bp, Homo sapiens
aggccaggccccctc

SEQ ID NO: 898435 - DNA, 15 bp, Homo sapiens
ggccaggccccctca

SEQ ID NO: 898436 - DNA, 15 bp, Homo sapiens
gccaggccccctcac

SEQ ID NO: 898437 - DNA, 15 bp, Homo sapiens
ccaggccccctcacc

SEQ ID NO: 898438 - DNA, 15 bp, Homo sapiens
caggccccctcaccg

SEQ ID NO: 898439 - DNA, 15 bp, Homo sapiens
aggccccctcaccgt

SEQ ID NO: 898440 - DNA, 15 bp, Homo sapiens
ggccccctcaccgtc

SEQ ID NO: 898441 - DNA, 15 bp, Homo sapiens
gccccctcaccgtca

SEQ ID NO: 898442 - DNA, 15 bp, Homo sapiens
ccccctcaccgtcag

SEQ ID NO: 898443 - DNA, 15 bp, Homo sapiens
cccctcaccgtcagc

SEQ ID NO: 898444 - DNA, 15 bp, Homo sapiens
ccctcaccgtcagct

SEQ ID NO: 898445 - DNA, 15 bp, Homo sapiens
cctcaccgtcagctc

SEQ ID NO: 898446 - DNA, 15 bp, Homo sapiens
ctcaccgtcagctca

SEQ ID NO: 898447 - DNA, 15 bp, Homo sapiens
tcaccgtcagctcag

SEQ ID NO: 898448 - DNA, 15 bp, Homo sapiens
caccgtcagctcagg

SEQ ID NO: 898449 - DNA, 15 bp, Homo sapiens
accgtcagctcagga

SEQ ID NO: 898450 - DNA, 15 bp, Homo sapiens
ccgtcagctcaggat

SEQ ID NO: 898451 - DNA, 15 bp, Homo sapiens
cgtcagctcaggatg

SEQ ID NO: 898452 - DNA, 15 bp, Homo sapiens
gtcagctcaggatgc

SEQ ID NO: 898453 - DNA, 15 bp, Homo sapiens
tcagctcaggatgct

SEQ ID NO: 898454 - DNA, 15 bp, Homo sapiens
cagctcaggatgctg

SEQ ID NO: 898455 - DNA, 15 bp, Homo sapiens
agctcaggatgctgg

SEQ ID NO: 898456 - DNA, 15 bp, Homo sapiens
gctcaggatgctgga

SEQ ID NO: 898457 - DNA, 15 bp, Homo sapiens
ctcaggatgctggat

SEQ ID NO: 898458 - DNA, 15 bp, Homo sapiens
tcaggatgctggatt

SEQ ID NO: 898459 - DNA, 15 bp, Homo sapiens
caggatgctggatta

SEQ ID NO: 898460 - DNA, 15 bp, Homo sapiens
aggatgctggattat

SEQ ID NO: 898461 - DNA, 15 bp, Homo sapiens
ggatgctggattata

SEQ ID NO: 898462 - DNA, 15 bp, Homo sapiens
gatgctggattatat

SEQ ID NO: 898463 - DNA, 15 bp, Homo sapiens
atgctggattatatg

SEQ ID NO: 898464 - DNA, 15 bp, Homo sapiens
tgctggattatatgc

SEQ ID NO: 898465 - DNA, 15 bp, Homo sapiens
gctggattatatgct

SEQ ID NO: 898466 - DNA, 15 bp, Homo sapiens
ctggattatatgcta

SEQ ID NO: 898467 - DNA, 15 bp, Homo sapiens
tggattatatgctac

SEQ ID NO: 898468 - DNA, 15 bp, Homo sapiens
ggattatatgctact

SEQ ID NO: 898469 - DNA, 15 bp, Homo sapiens
gattatatgctactg

SEQ ID NO: 898470 - DNA, 15 bp, Homo sapiens
attatatgctactga

SEQ ID NO: 898471 - DNA, 15 bp, Homo sapiens
ttatatgctactgag

SEQ ID NO: 898472 - DNA, 15 bp, Homo sapiens
tatatgctactgagg

SEQ ID NO: 898473 - DNA, 15 bp, Homo sapiens
atatgctactgagga

SEQ ID NO: 898474 - DNA, 15 bp, Homo sapiens
tatgctactgaggac

SEQ ID NO: 898475 - DNA, 15 bp, Homo sapiens
atgctactgaggacc

SEQ ID NO: 898476 - DNA, 15 bp, Homo sapiens
tgctactgaggacct

SEQ ID NO: 898477 - DNA, 15 bp, Homo sapiens
gctactgaggacctg

SEQ ID NO: 898478 - DNA, 15 bp, Homo sapiens
ctactgaggacctgg

SEQ ID NO: 898479 - DNA, 15 bp, Homo sapiens
tactgaggacctggc

SEQ ID NO: 898480 - DNA, 15 bp, Homo sapiens
actgaggacctggca

SEQ ID NO: 898481 - DNA, 15 bp, Homo sapiens
ctgaggacctggcag

SEQ ID NO: 898482 - DNA, 15 bp, Homo sapiens
tgaggacctggcagt

SEQ ID NO: 898483 - DNA, 15 bp, Homo sapiens
gaggacctggcagtg

SEQ ID NO: 898484 - DNA, 15 bp, Homo sapiens
aggacctggcagtgt

SEQ ID NO: 898485 - DNA, 15 bp, Homo sapiens
ggacctggcagtgtc

SEQ ID NO: 898486 - DNA, 15 bp, Homo sapiens
gacctggcagtgtcc

SEQ ID NO: 898487 - DNA, 15 bp, Homo sapiens
acctggcagtgtcca

SEQ ID NO: 898488 - DNA, 15 bp, Homo sapiens
cctggcagtgtccaa

SEQ ID NO: 898489 - DNA, 15 bp, Homo sapiens
ctggcagtgtccaac

SEQ ID NO: 898490 - DNA, 15 bp, Homo sapiens
tggcagtgtccaaca

SEQ ID NO: 898491 - DNA, 15 bp, Homo sapiens
ggcagtgtccaacag

SEQ ID NO: 898492 - DNA, 15 bp, Homo sapiens
gcagtgtccaacagc

SEQ ID NO: 898493 - DNA, 15 bp, Homo sapiens
cagtgtccaacagct

SEQ ID NO: 898494 - DNA, 15 bp, Homo sapiens
agtgtccaacagctc

SEQ ID NO: 898495 - DNA, 15 bp, Homo sapiens
gtgtccaacagctct

SEQ ID NO: 898496 - DNA, 15 bp, Homo sapiens
tgtccaacagctctg

SEQ ID NO: 898497 - DNA, 15 bp, Homo sapiens
gtccaacagctctga

SEQ ID NO: 898498 - DNA, 15 bp, Homo sapiens
tccaacagctctgaa

SEQ ID NO: 898499 - DNA, 15 bp, Homo sapiens
ccaacagctctgaat

SEQ ID NO: 898500 - DNA, 15 bp, Homo sapiens
caacagctctgaatg

SEQ ID NO: 898501 - DNA, 15 bp, Homo sapiens
aacagctctgaatgc

SEQ ID NO: 898502 - DNA, 15 bp, Homo sapiens
acagctctgaatgcc

SEQ ID NO: 898503 - DNA, 15 bp, Homo sapiens
cagctctgaatgcca

SEQ ID NO: 898504 - DNA, 15 bp, Homo sapiens
agctctgaatgccag

SEQ ID NO: 898505 - DNA, 15 bp, Homo sapiens
gctctgaatgccaga

SEQ ID NO: 898506 - DNA, 15 bp, Homo sapiens
ctctgaatgccagat

SEQ ID NO: 898507 - DNA, 15 bp, Homo sapiens
tctgaatgccagatt

SEQ ID NO: 898508 - DNA, 15 bp, Homo sapiens
ctgaatgccagattc

SEQ ID NO: 898509 - DNA, 15 bp, Homo sapiens
tgaatgccagattcc

SEQ ID NO: 898510 - DNA, 15 bp, Homo sapiens
gaatgccagattcct

SEQ ID NO: 898511 - DNA, 15 bp, Homo sapiens
aatgccagattcctg

SEQ ID NO: 898512 - DNA, 15 bp, Homo sapiens
atgccagattcctga

SEQ ID NO: 898513 - DNA, 15 bp, Homo sapiens
tgccagattcctgag

SEQ ID NO: 898514 - DNA, 15 bp, Homo sapiens
gccagattcctgagg

SEQ ID NO: 898515 - DNA, 15 bp, Homo sapiens
ccagattcctgagga

SEQ ID NO: 898516 - DNA, 15 bp, Homo sapiens
cagattcctgaggag

SEQ ID NO: 898517 - DNA, 15 bp, Homo sapiens
agattcctgaggagc

SEQ ID NO: 898518 - DNA, 15 bp, Homo sapiens
gattcctgaggagcc

SEQ ID NO: 898519 - DNA, 15 bp, Homo sapiens
attcctgaggagcca

SEQ ID NO: 898520 - DNA, 15 bp, Homo sapiens
ttcctgaggagccag

SEQ ID NO: 898521 - DNA, 15 bp, Homo sapiens
tcctgaggagccagc

SEQ ID NO: 898522 - DNA, 15 bp, Homo sapiens
cctgaggagccagcg

SEQ ID NO: 898523 - DNA, 15 bp, Homo sapiens
ctgaggagccagcgt

SEQ ID NO: 898524 - DNA, 15 bp, Homo sapiens
tgaggagccagcgtc

SEQ ID NO: 898525 - DNA, 15 bp, Homo sapiens
gaggagccagcgtct

SEQ ID NO: 898526 - DNA, 15 bp, Homo sapiens
aggagccagcgtctc

SEQ ID NO: 898527 - DNA, 15 bp, Homo sapiens
ggagccagcgtctcc

SEQ ID NO: 898528 - DNA, 15 bp, Homo sapiens
gagccagcgtctccc

SEQ ID NO: 898529 - DNA, 15 bp, Homo sapiens
agccagcgtctcccc

SEQ ID NO: 898530 - DNA, 15 bp, Homo sapiens
gccagcgtctcccca

SEQ ID NO: 898531 - DNA, 15 bp, Homo sapiens
ccagcgtctccccag

SEQ ID NO: 898532 - DNA, 15 bp, Homo sapiens
cagcgtctccccagc

SEQ ID NO: 898533 - DNA, 15 bp, Homo sapiens
agcgtctccccagcc

SEQ ID NO: 898534 - DNA, 15 bp, Homo sapiens
gcgtctccccagcct

SEQ ID NO: 898535 - DNA, 15 bp, Homo sapiens
cgtctccccagcctc

SEQ ID NO: 898536 - DNA, 15 bp, Homo sapiens
gtctccccagcctca

SEQ ID NO: 898537 - DNA, 15 bp, Homo sapiens
tctccccagcctcag

SEQ ID NO: 898538 - DNA, 15 bp, Homo sapiens
ctccccagcctcagc

SEQ ID NO: 898539 - DNA, 15 bp, Homo sapiens
tccccagcctcagct

SEQ ID NO: 898540 - DNA, 15 bp, Homo sapiens
ccccagcctcagcta

SEQ ID NO: 898541 - DNA, 15 bp, Homo sapiens
cccagcctcagctac

SEQ ID NO: 898542 - DNA, 15 bp, Homo sapiens
ccagcctcagctact

SEQ ID NO: 898543 - DNA, 15 bp, Homo sapiens
cagcctcagctactc

SEQ ID NO: 898544 - DNA, 15 bp, Homo sapiens
agcctcagctactcc

SEQ ID NO: 898545 - DNA, 15 bp, Homo sapiens
gcctcagctactccc

SEQ ID NO: 898546 - DNA, 15 bp, Homo sapiens
cctcagctactccct

SEQ ID NO: 898547 - DNA, 15 bp, Homo sapiens
ctcagctactccctg

SEQ ID NO: 898548 - DNA, 15 bp, Homo sapiens
tcagctactccctgg

SEQ ID NO: 898549 - DNA, 15 bp, Homo sapiens
cagctactccctggc

SEQ ID NO: 898550 - DNA, 15 bp, Homo sapiens
agctactccctggct

SEQ ID NO: 898551 - DNA, 15 bp, Homo sapiens
gctactccctggctg

SEQ ID NO: 898552 - DNA, 15 bp, Homo sapiens
ctactccctggctgg

SEQ ID NO: 898553 - DNA, 15 bp, Homo sapiens
tactccctggctggc

SEQ ID NO: 898554 - DNA, 15 bp, Homo sapiens
actccctggctggct

SEQ ID NO: 898555 - DNA, 15 bp, Homo sapiens
ctccctggctggctg

SEQ ID NO: 898556 - DNA, 15 bp, Homo sapiens
tccctggctggctgg

SEQ ID NO: 898557 - DNA, 15 bp, Homo sapiens
ccctggctggctggg

SEQ ID NO: 898558 - DNA, 15 bp, Homo sapiens
cctggctggctgggg

SEQ ID NO: 898559 - DNA, 15 bp, Homo sapiens
ctggctggctggggc

SEQ ID NO: 898560 - DNA, 15 bp, Homo sapiens
tggctggctggggcc

SEQ ID NO: 898561 - DNA, 15 bp, Homo sapiens
ggctggctggggccc

SEQ ID NO: 898562 - DNA, 15 bp, Homo sapiens
gctggctggggccct

SEQ ID NO: 898563 - DNA, 15 bp, Homo sapiens
ctggctggggcccta

SEQ ID NO: 898564 - DNA, 15 bp, Homo sapiens
tggctggggccctag

SEQ ID NO: 898565 - DNA, 15 bp, Homo sapiens
ggctggggccctaga

SEQ ID NO: 898566 - DNA, 15 bp, Homo sapiens
gctggggccctagat

SEQ ID NO: 898567 - DNA, 15 bp, Homo sapiens
ctggggccctagatc

SEQ ID NO: 898568 - DNA, 15 bp, Homo sapiens
tggggccctagatct

SEQ ID NO: 898569 - DNA, 15 bp, Homo sapiens
ggggccctagatctg

SEQ ID NO: 898570 - DNA, 15 bp, Homo sapiens
gggccctagatctga

SEQ ID NO: 898571 - DNA, 15 bp, Homo sapiens
ggccctagatctgag

SEQ ID NO: 898572 - DNA, 15 bp, Homo sapiens
gccctagatctgagt

SEQ ID NO: 898573 - DNA, 15 bp, Homo sapiens
ccctagatctgagtg

SEQ ID NO: 898574 - DNA, 15 bp, Homo sapiens
cctagatctgagtgc

SEQ ID NO: 898575 - DNA, 15 bp, Homo sapiens
ctagatctgagtgca

SEQ ID NO: 898576 - DNA, 15 bp, Homo sapiens
tagatctgagtgcag

SEQ ID NO: 898577 - DNA, 15 bp, Homo sapiens
agatctgagtgcagc

SEQ ID NO: 898578 - DNA, 15 bp, Homo sapiens
gatctgagtgcagca

SEQ ID NO: 898579 - DNA, 15 bp, Homo sapiens
atctgagtgcagcat

SEQ ID NO: 898580 - DNA, 15 bp, Homo sapiens
tctgagtgcagcatc

SEQ ID NO: 898581 - DNA, 15 bp, Homo sapiens
ctgagtgcagcatct

SEQ ID NO: 898582 - DNA, 15 bp, Homo sapiens
tgagtgcagcatctg

SEQ ID NO: 898583 - DNA, 15 bp, Homo sapiens
gagtgcagcatctgc

SEQ ID NO: 898584 - DNA, 15 bp, Homo sapiens
agtgcagcatctgca

SEQ ID NO: 898585 - DNA, 15 bp, Homo sapiens
gtgcagcatctgcat

SEQ ID NO: 898586 - DNA, 15 bp, Homo sapiens
tgcagcatctgcatt

SEQ ID NO: 898587 - DNA, 15 bp, Homo sapiens
gcagcatctgcattt

SEQ ID NO: 898588 - DNA, 15 bp, Homo sapiens
cagcatctgcatttc

SEQ ID NO: 898589 - DNA, 15 bp, Homo sapiens
agcatctgcatttcc

SEQ ID NO: 898590 - DNA, 15 bp, Homo sapiens
gcatctgcatttccc

SEQ ID NO: 898591 - DNA, 15 bp, Homo sapiens
catctgcatttccca

SEQ ID NO: 898592 - DNA, 15 bp, Homo sapiens
atctgcatttcccag

SEQ ID NO: 898593 - DNA, 15 bp, Homo sapiens
tctgcatttcccagg

SEQ ID NO: 898594 - DNA, 15 bp, Homo sapiens
ctgcatttcccaggc

SEQ ID NO: 898595 - DNA, 15 bp, Homo sapiens
tgcatttcccaggct

SEQ ID NO: 898596 - DNA, 15 bp, Homo sapiens
gcatttcccaggctg

SEQ ID NO: 898597 - DNA, 15 bp, Homo sapiens
catttcccaggctgt

SEQ ID NO: 898598 - DNA, 15 bp, Homo sapiens
atttcccaggctgtg

SEQ ID NO: 898599 - DNA, 15 bp, Homo sapiens
tttcccaggctgtga

SEQ ID NO: 898600 - DNA, 15 bp, Homo sapiens
ttcccaggctgtgag

SEQ ID NO: 898601 - DNA, 15 bp, Homo sapiens
tcccaggctgtgaga

SEQ ID NO: 898602 - DNA, 15 bp, Homo sapiens
cccaggctgtgagaa

SEQ ID NO: 898603 - DNA, 15 bp, Homo sapiens
ccaggctgtgagaac

SEQ ID NO: 898604 - DNA, 15 bp, Homo sapiens
caggctgtgagaact

SEQ ID NO: 898605 - DNA, 15 bp, Homo sapiens
aggctgtgagaacta

SEQ ID NO: 898606 - DNA, 15 bp, Homo sapiens
ggctgtgagaactac

SEQ ID NO: 898607 - DNA, 15 bp, Homo sapiens
gctgtgagaactaca

SEQ ID NO: 898608 - DNA, 15 bp, Homo sapiens
ctgtgagaactacag

SEQ ID NO: 898609 - DNA, 15 bp, Homo sapiens
tgtgagaactacagt

SEQ ID NO: 898610 - DNA, 15 bp, Homo sapiens
gtgagaactacagtg

SEQ ID NO: 898611 - DNA, 15 bp, Homo sapiens
tgagaactacagtgc

SEQ ID NO: 898612 - DNA, 15 bp, Homo sapiens
gagaactacagtgca

SEQ ID NO: 898613 - DNA, 15 bp, Homo sapiens
agaactacagtgcaa

SEQ ID NO: 898614 - DNA, 15 bp, Homo sapiens
gaactacagtgcaac

SEQ ID NO: 898615 - DNA, 15 bp, Homo sapiens
aactacagtgcaacc

SEQ ID NO: 898616 - DNA, 15 bp, Homo sapiens
actacagtgcaaccc

SEQ ID NO: 898617 - DNA, 15 bp, Homo sapiens
ctacagtgcaaccct

SEQ ID NO: 898618 - DNA, 15 bp, Homo sapiens
tacagtgcaaccctc

SEQ ID NO: 898619 - DNA, 15 bp, Homo sapiens
acagtgcaaccctcc

SEQ ID NO: 898620 - DNA, 15 bp, Homo sapiens
cagtgcaaccctcct

SEQ ID NO: 898621 - DNA, 15 bp, Homo sapiens
agtgcaaccctcctc

SEQ ID NO: 898622 - DNA, 15 bp, Homo sapiens
gtgcaaccctcctct

SEQ ID NO: 898623 - DNA, 15 bp, Homo sapiens
tgcaaccctcctctg

SEQ ID NO: 898624 - DNA, 15 bp, Homo sapiens
gcaaccctcctctgt

SEQ ID NO: 898625 - DNA, 15 bp, Homo sapiens
caaccctcctctgtg

SEQ ID NO: 898626 - DNA, 15 bp, Homo sapiens
aaccctcctctgtgt

SEQ ID NO: 898627 - DNA, 15 bp, Homo sapiens
accctcctctgtgtt

SEQ ID NO: 898628 - DNA, 15 bp, Homo sapiens
ccctcctctgtgttg

SEQ ID NO: 898629 - DNA, 15 bp, Homo sapiens
cctcctctgtgttgc

SEQ ID NO: 898630 - DNA, 15 bp, Homo sapiens
ctcctctgtgttgct

SEQ ID NO: 898631 - DNA, 15 bp, Homo sapiens
tcctctgtgttgctg

SEQ ID NO: 898632 - DNA, 15 bp, Homo sapiens
cctctgtgttgctgg

SEQ ID NO: 898633 - DNA, 15 bp, Homo sapiens
ctctgtgttgctgga

SEQ ID NO: 898634 - DNA, 15 bp, Homo sapiens
tctgtgttgctggag

SEQ ID NO: 898635 - DNA, 15 bp, Homo sapiens
ctgtgttgctggagt

SEQ ID NO: 898636 - DNA, 15 bp, Homo sapiens
tgtgttgctggagtg

SEQ ID NO: 898637 - DNA, 15 bp, Homo sapiens
gtgttgctggagtga

SEQ ID NO: 898638 - DNA, 15 bp, Homo sapiens
tgttgctggagtgaa

SEQ ID NO: 898639 - DNA, 15 bp, Homo sapiens
gttgctggagtgaat

SEQ ID NO: 898640 - DNA, 15 bp, Homo sapiens
ttgctggagtgaatg

SEQ ID NO: 898641 - DNA, 15 bp, Homo sapiens
tgctggagtgaatgc

SEQ ID NO: 898642 - DNA, 15 bp, Homo sapiens
gctggagtgaatgcc

SEQ ID NO: 898643 - DNA, 15 bp, Homo sapiens
ctggagtgaatgccc

SEQ ID NO: 898644 - DNA, 15 bp, Homo sapiens
tggagtgaatgccct

SEQ ID NO: 898645 - DNA, 15 bp, Homo sapiens
ggagtgaatgccctc

SEQ ID NO: 898646 - DNA, 15 bp, Homo sapiens
gagtgaatgccctca

SEQ ID NO: 898647 - DNA, 15 bp, Homo sapiens
agtgaatgccctcag

SEQ ID NO: 898648 - DNA, 15 bp, Homo sapiens
gtgaatgccctcagg

SEQ ID NO: 898649 - DNA, 15 bp, Homo sapiens
tgaatgccctcaggg

SEQ ID NO: 898650 - DNA, 15 bp, Homo sapiens
gaatgccctcagggc

SEQ ID NO: 898651 - DNA, 15 bp, Homo sapiens
aatgccctcagggca

SEQ ID NO: 898652 - DNA, 15 bp, Homo sapiens
atgccctcagggcag

SEQ ID NO: 898653 - DNA, 15 bp, Homo sapiens
tgccctcagggcagg

SEQ ID NO: 898654 - DNA, 15 bp, Homo sapiens
gccctcagggcaggc

SEQ ID NO: 898655 - DNA, 15 bp, Homo sapiens
ccctcagggcaggca

SEQ ID NO: 898656 - DNA, 15 bp, Homo sapiens
cctcagggcaggcag

SEQ ID NO: 898657 - DNA, 15 bp, Homo sapiens
ctcagggcaggcagc

SEQ ID NO: 898658 - DNA, 15 bp, Homo sapiens
tcagggcaggcagct

SEQ ID NO: 898659 - DNA, 15 bp, Homo sapiens
cagggcaggcagctt

SEQ ID NO: 898660 - DNA, 15 bp, Homo sapiens
agggcaggcagcttc

SEQ ID NO: 898661 - DNA, 15 bp, Homo sapiens
gggcaggcagcttcc

SEQ ID NO: 898662 - DNA, 15 bp, Homo sapiens
ggcaggcagcttcca

SEQ ID NO: 898663 - DNA, 15 bp, Homo sapiens
gcaggcagcttccag

SEQ ID NO: 898664 - DNA, 15 bp, Homo sapiens
caggcagcttccagg

SEQ ID NO: 898665 - DNA, 15 bp, Homo sapiens
aggcagcttccaggg

SEQ ID NO: 898666 - DNA, 15 bp, Homo sapiens
ggcagcttccagggt

SEQ ID NO: 898667 - DNA, 15 bp, Homo sapiens
gcagcttccagggtg

SEQ ID NO: 898668 - DNA, 15 bp, Homo sapiens
cagcttccagggtgg

SEQ ID NO: 898669 - DNA, 15 bp, Homo sapiens
agcttccagggtggc

SEQ ID NO: 898670 - DNA, 15 bp, Homo sapiens
gcttccagggtggca

SEQ ID NO: 898671 - DNA, 15 bp, Homo sapiens
cttccagggtggcac

SEQ ID NO: 898672 - DNA, 15 bp, Homo sapiens
ttccagggtggcacc

SEQ ID NO: 898673 - DNA, 15 bp, Homo sapiens
tccagggtggcacct

SEQ ID NO: 898674 - DNA, 15 bp, Homo sapiens
ccagggtggcacctc

SEQ ID NO: 898675 - DNA, 15 bp, Homo sapiens
cagggtggcacctca

SEQ ID NO: 898676 - DNA, 15 bp, Homo sapiens
agggtggcacctcat

SEQ ID NO: 898677 - DNA, 15 bp, Homo sapiens
gggtggcacctcata

SEQ ID NO: 898678 - DNA, 15 bp, Homo sapiens
ggtggcacctcatat

SEQ ID NO: 898679 - DNA, 15 bp, Homo sapiens
gtggcacctcatata

SEQ ID NO: 898680 - DNA, 15 bp, Homo sapiens
tggcacctcatataa

SEQ ID NO: 898681 - DNA, 15 bp, Homo sapiens
ggcacctcatataaa

SEQ ID NO: 898682 - DNA, 15 bp, Homo sapiens
gcacctcatataaat

SEQ ID NO: 898683 - DNA, 15 bp, Homo sapiens
cacctcatataaatc

SEQ ID NO: 898684 - DNA, 15 bp, Homo sapiens
acctcatataaatcc

SEQ ID NO: 898685 - DNA, 15 bp, Homo sapiens
cctcatataaatcca

SEQ ID NO: 898686 - DNA, 15 bp, Homo sapiens
ctcatataaatccag

SEQ ID NO: 898687 - DNA, 15 bp, Homo sapiens
tcatataaatccagg

SEQ ID NO: 898688 - DNA, 15 bp, Homo sapiens
catataaatccaggg

SEQ ID NO: 898689 - DNA, 15 bp, Homo sapiens
atataaatccaggga

SEQ ID NO: 898690 - DNA, 15 bp, Homo sapiens
tataaatccagggag

SEQ ID NO: 898691 - DNA, 15 bp, Homo sapiens
ataaatccagggagt

SEQ ID NO: 898692 - DNA, 15 bp, Homo sapiens
taaatccagggagtg

SEQ ID NO: 898693 - DNA, 15 bp, Homo sapiens
aaatccagggagtgg

SEQ ID NO: 898694 - DNA, 15 bp, Homo sapiens
aatccagggagtggc

SEQ ID NO: 898695 - DNA, 15 bp, Homo sapiens
atccagggagtggcc

SEQ ID NO: 898696 - DNA, 15 bp, Homo sapiens
tccagggagtggccg

SEQ ID NO: 898697 - DNA, 15 bp, Homo sapiens
ccagggagtggccga

SEQ ID NO: 898698 - DNA, 15 bp, Homo sapiens
cagggagtggccgag

SEQ ID NO: 898699 - DNA, 15 bp, Homo sapiens
agggagtggccgagg

SEQ ID NO: 898700 - DNA, 15 bp, Homo sapiens
gggagtggccgaggc

SEQ ID NO: 898701 - DNA, 15 bp, Homo sapiens
ggagtggccgaggcc

SEQ ID NO: 898702 - DNA, 15 bp, Homo sapiens
gagtggccgaggcct

SEQ ID NO: 898703 - DNA, 15 bp, Homo sapiens
agtggccgaggcctg

SEQ ID NO: 898704 - DNA, 15 bp, Homo sapiens
gtggccgaggcctgc

SEQ ID NO: 898705 - DNA, 15 bp, Homo sapiens
tggccgaggcctgca

SEQ ID NO: 898706 - DNA, 15 bp, Homo sapiens
ggccgaggcctgcaa

SEQ ID NO: 898707 - DNA, 15 bp, Homo sapiens
gccgaggcctgcaag

SEQ ID NO: 898708 - DNA, 15 bp, Homo sapiens
ccgaggcctgcaagg

SEQ ID NO: 898709 - DNA, 15 bp, Homo sapiens
cgaggcctgcaagga

SEQ ID NO: 898710 - DNA, 15 bp, Homo sapiens
gaggcctgcaaggaa

SEQ ID NO: 898711 - DNA, 15 bp, Homo sapiens
aggcctgcaaggaat

SEQ ID NO: 898712 - DNA, 15 bp, Homo sapiens
ggcctgcaaggaatc

SEQ ID NO: 898713 - DNA, 15 bp, Homo sapiens
gcctgcaaggaatct

SEQ ID NO: 898714 - DNA, 15 bp, Homo sapiens
cctgcaaggaatctg

SEQ ID NO: 898715 - DNA, 15 bp, Homo sapiens
ctgcaaggaatctgg

SEQ ID NO: 898716 - DNA, 15 bp, Homo sapiens
cctggcggcccagaa

SEQ ID NO: 898717 - DNA, 15 bp, Homo sapiens
ctggcggcccagaag

SEQ ID NO: 898718 - DNA, 15 bp, Homo sapiens
tggcggcccagaagt

SEQ ID NO: 898719 - DNA, 15 bp, Homo sapiens
ggcggcccagaagta

SEQ ID NO: 898720 - DNA, 15 bp, Homo sapiens
gcggcccagaagtag

SEQ ID NO: 898721 - DNA, 15 bp, Homo sapiens
cggcccagaagtaga

SEQ ID NO: 898722 - DNA, 15 bp, Homo sapiens
ggcccagaagtagag

SEQ ID NO: 898723 - DNA, 15 bp, Homo sapiens
gcccagaagtagagc

SEQ ID NO: 898724 - DNA, 15 bp, Homo sapiens
cccagaagtagagcc

SEQ ID NO: 898725 - DNA, 15 bp, Homo sapiens
ccagaagtagagcca

SEQ ID NO: 898726 - DNA, 15 bp, Homo sapiens
cagaagtagagccat

SEQ ID NO: 898727 - DNA, 15 bp, Homo sapiens
agaagtagagccatc

SEQ ID NO: 898728 - DNA, 15 bp, Homo sapiens
gaagtagagccatcc

SEQ ID NO: 898729 - DNA, 15 bp, Homo sapiens
aagtagagccatcca

SEQ ID NO: 898730 - DNA, 15 bp, Homo sapiens
agtagagccatccat

SEQ ID NO: 898731 - DNA, 15 bp, Homo sapiens
gtagagccatccatc

SEQ ID NO: 898732 - DNA, 15 bp, Homo sapiens
tagagccatccatcc

SEQ ID NO: 898733 - DNA, 15 bp, Homo sapiens
agagccatccatcca

SEQ ID NO: 898734 - DNA, 15 bp, Homo sapiens
gagccatccatccat

SEQ ID NO: 898735 - DNA, 15 bp, Homo sapiens
agccatccatccatg

SEQ ID NO: 898736 - DNA, 15 bp, Homo sapiens
gccatccatccatgc

SEQ ID NO: 898737 - DNA, 15 bp, Homo sapiens
ccatccatccatgcc

SEQ ID NO: 898738 - DNA, 15 bp, Homo sapiens
catccatccatgcca

SEQ ID NO: 898739 - DNA, 15 bp, Homo sapiens
atccatccatgccat

SEQ ID NO: 898740 - DNA, 15 bp, Homo sapiens
tccatccatgccata

SEQ ID NO: 898741 - DNA, 15 bp, Homo sapiens
ccatccatgccatac

SEQ ID NO: 898742 - DNA, 15 bp, Homo sapiens
catccatgccatacc

SEQ ID NO: 898743 - DNA, 15 bp, Homo sapiens
atccatgccatacca

SEQ ID NO: 898744 - DNA, 15 bp, Homo sapiens
tccatgccataccac

SEQ ID NO: 898745 - DNA, 15 bp, Homo sapiens
ccatgccataccact

SEQ ID NO: 898746 - DNA, 15 bp, Homo sapiens
catgccataccactt

SEQ ID NO: 898747 - DNA, 15 bp, Homo sapiens
atgccataccacttg

SEQ ID NO: 898748 - DNA, 15 bp, Homo sapiens
tgccataccacttgt

SEQ ID NO: 898749 - DNA, 15 bp, Homo sapiens
gccataccacttgtc

SEQ ID NO: 898750 - DNA, 15 bp, Homo sapiens
ccataccacttgtca

SEQ ID NO: 898751 - DNA, 15 bp, Homo sapiens
cataccacttgtcag

SEQ ID NO: 898752 - DNA, 15 bp, Homo sapiens
ataccacttgtcagg

SEQ ID NO: 898753 - DNA, 15 bp, Homo sapiens
taccacttgtcaggg

SEQ ID NO: 898754 - DNA, 15 bp, Homo sapiens
accacttgtcagggc

SEQ ID NO: 898755 - DNA, 15 bp, Homo sapiens
ccacttgtcagggca

SEQ ID NO: 898756 - DNA, 15 bp, Homo sapiens
cacttgtcagggcac

SEQ ID NO: 898757 - DNA, 15 bp, Homo sapiens
acttgtcagggcaca

SEQ ID NO: 898758 - DNA, 15 bp, Homo sapiens
cttgtcagggcacag

SEQ ID NO: 898759 - DNA, 15 bp, Homo sapiens
ttgtcagggcacagg

SEQ ID NO: 898760 - DNA, 15 bp, Homo sapiens
tgtcagggcacaggg

SEQ ID NO: 898761 - DNA, 15 bp, Homo sapiens
gtcagggcacagggg

SEQ ID NO: 898762 - DNA, 15 bp, Homo sapiens
tcagggcacagggga

SEQ ID NO: 898763 - DNA, 15 bp, Homo sapiens
cagggcacaggggac

SEQ ID NO: 898764 - DNA, 15 bp, Homo sapiens
agggcacaggggact

SEQ ID NO: 898765 - DNA, 15 bp, Homo sapiens
gggcacaggggactg

SEQ ID NO: 898766 - DNA, 15 bp, Homo sapiens
ggcacaggggactgg

SEQ ID NO: 898767 - DNA, 15 bp, Homo sapiens
gcacaggggactggc

SEQ ID NO: 898768 - DNA, 15 bp, Homo sapiens
cacaggggactggct

SEQ ID NO: 898769 - DNA, 15 bp, Homo sapiens
acaggggactggctg

SEQ ID NO: 898770 - DNA, 15 bp, Homo sapiens
caggggactggctgg

SEQ ID NO: 898771 - DNA, 15 bp, Homo sapiens
aggggactggctggg

SEQ ID NO: 898772 - DNA, 15 bp, Homo sapiens
ggggactggctgggc

SEQ ID NO: 898773 - DNA, 15 bp, Homo sapiens
gggactggctgggcc

SEQ ID NO: 898774 - DNA, 15 bp, Homo sapiens
ggactggctgggccc

SEQ ID NO: 898775 - DNA, 15 bp, Homo sapiens
gactggctgggcccc

SEQ ID NO: 898776 - DNA, 15 bp, Homo sapiens
actggctgggccccc

SEQ ID NO: 898777 - DNA, 15 bp, Homo sapiens
ctggctgggccccca

SEQ ID NO: 898778 - DNA, 15 bp, Homo sapiens
tggctgggcccccag

SEQ ID NO: 898779 - DNA, 15 bp, Homo sapiens
ggctgggcccccagg

SEQ ID NO: 898780 - DNA, 15 bp, Homo sapiens
gctgggcccccaggg

SEQ ID NO: 898781 - DNA, 15 bp, Homo sapiens
ctgggcccccagggc

SEQ ID NO: 898782 - DNA, 15 bp, Homo sapiens
tgggcccccagggct

SEQ ID NO: 898783 - DNA, 15 bp, Homo sapiens
gggcccccagggctg

SEQ ID NO: 898784 - DNA, 15 bp, Homo sapiens
ggcccccagggctgc

SEQ ID NO: 898785 - DNA, 15 bp, Homo sapiens
gcccccagggctgct

SEQ ID NO: 898786 - DNA, 15 bp, Homo sapiens
cccccagggctgctc

SEQ ID NO: 898787 - DNA, 15 bp, Homo sapiens
ccccagggctgctcc

SEQ ID NO: 898788 - DNA, 15 bp, Homo sapiens
cccagggctgctccc

SEQ ID NO: 898789 - DNA, 15 bp, Homo sapiens
ccagggctgctcccc

SEQ ID NO: 898790 - DNA, 15 bp, Homo sapiens
cagggctgctcccca

SEQ ID NO: 898791 - DNA, 15 bp, Homo sapiens
agggctgctccccac

SEQ ID NO: 898792 - DNA, 15 bp, Homo sapiens
gggctgctccccact

SEQ ID NO: 898793 - DNA, 15 bp, Homo sapiens
ggctgctccccactt

SEQ ID NO: 898794 - DNA, 15 bp, Homo sapiens
gctgctccccacttg

SEQ ID NO: 898795 - DNA, 15 bp, Homo sapiens
ctgctccccacttgc

SEQ ID NO: 898796 - DNA, 15 bp, Homo sapiens
tgctccccacttgca

SEQ ID NO: 898797 - DNA, 15 bp, Homo sapiens
gctccccacttgcag

SEQ ID NO: 898798 - DNA, 15 bp, Homo sapiens
ctccccacttgcagc

SEQ ID NO: 898799 - DNA, 15 bp, Homo sapiens
tccccacttgcagca

SEQ ID NO: 898800 - DNA, 15 bp, Homo sapiens
ccccacttgcagcac

SEQ ID NO: 898801 - DNA, 15 bp, Homo sapiens
cccacttgcagcaca

SEQ ID NO: 898802 - DNA, 15 bp, Homo sapiens
ccacttgcagcacaa

SEQ ID NO: 898803 - DNA, 15 bp, Homo sapiens
cacttgcagcacaat

SEQ ID NO: 898804 - DNA, 15 bp, Homo sapiens
acttgcagcacaatg

SEQ ID NO: 898805 - DNA, 15 bp, Homo sapiens
cttgcagcacaatgc

SEQ ID NO: 898806 - DNA, 15 bp, Homo sapiens
ttgcagcacaatgcc

SEQ ID NO: 898807 - DNA, 15 bp, Homo sapiens
tgcagcacaatgcct

SEQ ID NO: 898808 - DNA, 15 bp, Homo sapiens
gcagcacaatgcctt

SEQ ID NO: 898809 - DNA, 15 bp, Homo sapiens
cagcacaatgccttc

SEQ ID NO: 898810 - DNA, 15 bp, Homo sapiens
agcacaatgccttct

SEQ ID NO: 898811 - DNA, 15 bp, Homo sapiens
gcacaatgccttctc

SEQ ID NO: 898812 - DNA, 15 bp, Homo sapiens
cacaatgccttctcc

SEQ ID NO: 898813 - DNA, 15 bp, Homo sapiens
acaatgccttctcca

SEQ ID NO: 898814 - DNA, 15 bp, Homo sapiens
caatgccttctccac

SEQ ID NO: 898815 - DNA, 15 bp, Homo sapiens
aatgccttctccacc

SEQ ID NO: 898816 - DNA, 15 bp, Homo sapiens
atgccttctccacct

SEQ ID NO: 898817 - DNA, 15 bp, Homo sapiens
tgccttctccacctg

SEQ ID NO: 898818 - DNA, 15 bp, Homo sapiens
gccttctccacctgc

SEQ ID NO: 898819 - DNA, 15 bp, Homo sapiens
ccttctccacctgcc

SEQ ID NO: 898820 - DNA, 15 bp, Homo sapiens
cttctccacctgccc

SEQ ID NO: 898821 - DNA, 15 bp, Homo sapiens
ttctccacctgccct

SEQ ID NO: 898822 - DNA, 15 bp, Homo sapiens
tctccacctgccctc

SEQ ID NO: 898823 - DNA, 15 bp, Homo sapiens
ctccacctgccctcc

SEQ ID NO: 898824 - DNA, 15 bp, Homo sapiens
tccacctgccctccc

SEQ ID NO: 898825 - DNA, 15 bp, Homo sapiens
ccacctgccctccca

SEQ ID NO: 898826 - DNA, 15 bp, Homo sapiens
cacctgccctcccac

SEQ ID NO: 898827 - DNA, 15 bp, Homo sapiens
acctgccctcccact

SEQ ID NO: 898828 - DNA, 15 bp, Homo sapiens
cctgccctcccactc

SEQ ID NO: 898829 - DNA, 15 bp, Homo sapiens
ctgccctcccactct

SEQ ID NO: 898830 - DNA, 15 bp, Homo sapiens
tgccctcccactctt

SEQ ID NO: 898831 - DNA, 15 bp, Homo sapiens
gccctcccactcttc

SEQ ID NO: 898832 - DNA, 15 bp, Homo sapiens
ccctcccactcttcc

SEQ ID NO: 898833 - DNA, 15 bp, Homo sapiens
cctcccactcttcca

SEQ ID NO: 898834 - DNA, 15 bp, Homo sapiens
ctcccactcttccag

SEQ ID NO: 898835 - DNA, 15 bp, Homo sapiens
tcccactcttccagt

SEQ ID NO: 898836 - DNA, 15 bp, Homo sapiens
cccactcttccagtc

SEQ ID NO: 898837 - DNA, 15 bp, Homo sapiens
ccactcttccagtcc

SEQ ID NO: 898838 - DNA, 15 bp, Homo sapiens
cactcttccagtcca

SEQ ID NO: 898839 - DNA, 15 bp, Homo sapiens
actcttccagtccaa

SEQ ID NO: 898840 - DNA, 15 bp, Homo sapiens
ctcttccagtccaat

SEQ ID NO: 898841 - DNA, 15 bp, Homo sapiens
tcttccagtccaatc

SEQ ID NO: 898842 - DNA, 15 bp, Homo sapiens
cttccagtccaatcc

SEQ ID NO: 898843 - DNA, 15 bp, Homo sapiens
ttccagtccaatcca

SEQ ID NO: 898844 - DNA, 15 bp, Homo sapiens
tccagtccaatccac

SEQ ID NO: 898845 - DNA, 15 bp, Homo sapiens
ccagtccaatccacg

SEQ ID NO: 898846 - DNA, 15 bp, Homo sapiens
cagtccaatccacgc

SEQ ID NO: 898847 - DNA, 15 bp, Homo sapiens
agtccaatccacgct

SEQ ID NO: 898848 - DNA, 15 bp, Homo sapiens
gtccaatccacgctg

SEQ ID NO: 898849 - DNA, 15 bp, Homo sapiens
tccaatccacgctgt

SEQ ID NO: 898850 - DNA, 15 bp, Homo sapiens
ccaatccacgctgtc

SEQ ID NO: 898851 - DNA, 15 bp, Homo sapiens
caatccacgctgtct

SEQ ID NO: 898852 - DNA, 15 bp, Homo sapiens
aatccacgctgtctt

SEQ ID NO: 898853 - DNA, 15 bp, Homo sapiens
atccacgctgtcttc

SEQ ID NO: 898854 - DNA, 15 bp, Homo sapiens
tccacgctgtcttct

SEQ ID NO: 898855 - DNA, 15 bp, Homo sapiens
ccacgctgtcttctg

SEQ ID NO: 898856 - DNA, 15 bp, Homo sapiens
cacgctgtcttctgt

SEQ ID NO: 898857 - DNA, 15 bp, Homo sapiens
acgctgtcttctgtt

SEQ ID NO: 898858 - DNA, 15 bp, Homo sapiens
cgctgtcttctgttg

SEQ ID NO: 898859 - DNA, 15 bp, Homo sapiens
gctgtcttctgttgc

SEQ ID NO: 898860 - DNA, 15 bp, Homo sapiens
ctgtcttctgttgca

SEQ ID NO: 898861 - DNA, 15 bp, Homo sapiens
tgtcttctgttgcag

SEQ ID NO: 898862 - DNA, 15 bp, Homo sapiens
gtcttctgttgcagg

SEQ ID NO: 898863 - DNA, 15 bp, Homo sapiens
tcttctgttgcagga

SEQ ID NO: 898864 - DNA, 15 bp, Homo sapiens
cttctgttgcaggac

SEQ ID NO: 898865 - DNA, 15 bp, Homo sapiens
ttctgttgcaggact

SEQ ID NO: 898866 - DNA, 15 bp, Homo sapiens
tctgttgcaggacta

SEQ ID NO: 898867 - DNA, 15 bp, Homo sapiens
ctgttgcaggactaa

SEQ ID NO: 898868 - DNA, 15 bp, Homo sapiens
tgttgcaggactaac

SEQ ID NO: 898869 - DNA, 15 bp, Homo sapiens
gttgcaggactaacc

SEQ ID NO: 898870 - DNA, 15 bp, Homo sapiens
ttgcaggactaacct

SEQ ID NO: 898871 - DNA, 15 bp, Homo sapiens
tgcaggactaacctt

SEQ ID NO: 898872 - DNA, 15 bp, Homo sapiens
gcaggactaaccttt

SEQ ID NO: 898873 - DNA, 15 bp, Homo sapiens
caggactaacctttg

SEQ ID NO: 898874 - DNA, 15 bp, Homo sapiens
aggactaacctttga

SEQ ID NO: 898875 - DNA, 15 bp, Homo sapiens
ggactaacctttgag

SEQ ID NO: 898876 - DNA, 15 bp, Homo sapiens
gactaacctttgaga

SEQ ID NO: 898877 - DNA, 15 bp, Homo sapiens
actaacctttgagaa

SEQ ID NO: 898878 - DNA, 15 bp, Homo sapiens
ctaacctttgagaaa

SEQ ID NO: 898879 - DNA, 15 bp, Homo sapiens
taacctttgagaaat

SEQ ID NO: 898880 - DNA, 15 bp, Homo sapiens
aacctttgagaaatc

SEQ ID NO: 898881 - DNA, 15 bp, Homo sapiens
acctttgagaaatcc

SEQ ID NO: 898882 - DNA, 15 bp, Homo sapiens
cctttgagaaatcct

SEQ ID NO: 898883 - DNA, 15 bp, Homo sapiens
ctttgagaaatcctt

SEQ ID NO: 898884 - DNA, 15 bp, Homo sapiens
tttgagaaatccttt

SEQ ID NO: 898885 - DNA, 15 bp, Homo sapiens
ttgagaaatcctttt

SEQ ID NO: 898886 - DNA, 15 bp, Homo sapiens
tgagaaatccttttg

SEQ ID NO: 898887 - DNA, 15 bp, Homo sapiens
gagaaatccttttgt

SEQ ID NO: 898888 - DNA, 15 bp, Homo sapiens
agaaatccttttgtg

SEQ ID NO: 898889 - DNA, 15 bp, Homo sapiens
gaaatccttttgtga

SEQ ID NO: 898890 - DNA, 15 bp, Homo sapiens
aaatccttttgtgaa

SEQ ID NO: 898891 - DNA, 15 bp, Homo sapiens
aatccttttgtgaag

SEQ ID NO: 898892 - DNA, 15 bp, Homo sapiens
atccttttgtgaagt

SEQ ID NO: 898893 - DNA, 15 bp, Homo sapiens
tccttttgtgaagtc

SEQ ID NO: 898894 - DNA, 15 bp, Homo sapiens
ccttttgtgaagtca

SEQ ID NO: 898895 - DNA, 15 bp, Homo sapiens
cttttgtgaagtcat

SEQ ID NO: 898896 - DNA, 15 bp, Homo sapiens
ttttgtgaagtcatt

SEQ ID NO: 898897 - DNA, 15 bp, Homo sapiens
tttgtgaagtcattg

SEQ ID NO: 898898 - DNA, 15 bp, Homo sapiens
ttgtgaagtcattgc

SEQ ID NO: 898899 - DNA, 15 bp, Homo sapiens
tgtgaagtcattgcc

SEQ ID NO: 898900 - DNA, 15 bp, Homo sapiens
gtgaagtcattgcct

SEQ ID NO: 898901 - DNA, 15 bp, Homo sapiens
tgaagtcattgcctg

SEQ ID NO: 898902 - DNA, 15 bp, Homo sapiens
gaagtcattgcctgc

SEQ ID NO: 898903 - DNA, 15 bp, Homo sapiens
aagtcattgcctgct

SEQ ID NO: 898904 - DNA, 15 bp, Homo sapiens
agtcattgcctgctc

SEQ ID NO: 898905 - DNA, 15 bp, Homo sapiens
gtcattgcctgctca

SEQ ID NO: 898906 - DNA, 15 bp, Homo sapiens
tcattgcctgctcaa

SEQ ID NO: 898907 - DNA, 15 bp, Homo sapiens
cattgcctgctcaag

SEQ ID NO: 898908 - DNA, 15 bp, Homo sapiens
attgcctgctcaaga

SEQ ID NO: 898909 - DNA, 15 bp, Homo sapiens
ttgcctgctcaagaa

SEQ ID NO: 898910 - DNA, 15 bp, Homo sapiens
tgcctgctcaagaat

SEQ ID NO: 898911 - DNA, 15 bp, Homo sapiens
gcctgctcaagaatg

SEQ ID NO: 898912 - DNA, 15 bp, Homo sapiens
cctgctcaagaatgt

SEQ ID NO: 898913 - DNA, 15 bp, Homo sapiens
ctgctcaagaatgta

SEQ ID NO: 898914 - DNA, 15 bp, Homo sapiens
tgctcaagaatgtac

SEQ ID NO: 898915 - DNA, 15 bp, Homo sapiens
gctcaagaatgtaca

SEQ ID NO: 898916 - DNA, 15 bp, Homo sapiens
ctcaagaatgtacag

SEQ ID NO: 898917 - DNA, 15 bp, Homo sapiens
tcaagaatgtacagt

SEQ ID NO: 898918 - DNA, 15 bp, Homo sapiens
caagaatgtacagtg

SEQ ID NO: 898919 - DNA, 15 bp, Homo sapiens
aagaatgtacagtgg

SEQ ID NO: 898920 - DNA, 15 bp, Homo sapiens
agaatgtacagtggc

SEQ ID NO: 898921 - DNA, 15 bp, Homo sapiens
gaatgtacagtggct

SEQ ID NO: 898922 - DNA, 15 bp, Homo sapiens
aatgtacagtggctc

SEQ ID NO: 898923 - DNA, 15 bp, Homo sapiens
atgtacagtggctcc

SEQ ID NO: 898924 - DNA, 15 bp, Homo sapiens
tgtacagtggctccc

SEQ ID NO: 898925 - DNA, 15 bp, Homo sapiens
gtacagtggctcccc

SEQ ID NO: 898926 - DNA, 15 bp, Homo sapiens
tacagtggctcccca

SEQ ID NO: 898927 - DNA, 15 bp, Homo sapiens
acagtggctccccaa

SEQ ID NO: 898928 - DNA, 15 bp, Homo sapiens
cagtggctccccaat

SEQ ID NO: 898929 - DNA, 15 bp, Homo sapiens
agtggctccccaatg

SEQ ID NO: 898930 - DNA, 15 bp, Homo sapiens
gtggctccccaatgc

SEQ ID NO: 898931 - DNA, 15 bp, Homo sapiens
tggctccccaatgcc

SEQ ID NO: 898932 - DNA, 15 bp, Homo sapiens
ggctccccaatgcct

SEQ ID NO: 898933 - DNA, 15 bp, Homo sapiens
gctccccaatgcctt

SEQ ID NO: 898934 - DNA, 15 bp, Homo sapiens
ctccccaatgccttg

SEQ ID NO: 898935 - DNA, 15 bp, Homo sapiens
tccccaatgccttgg

SEQ ID NO: 898936 - DNA, 15 bp, Homo sapiens
ccccaatgccttgga

SEQ ID NO: 898937 - DNA, 15 bp, Homo sapiens
cccaatgccttggag

SEQ ID NO: 898938 - DNA, 15 bp, Homo sapiens
ccaatgccttggagg

SEQ ID NO: 898939 - DNA, 15 bp, Homo sapiens
caatgccttggaggc

SEQ ID NO: 898940 - DNA, 15 bp, Homo sapiens
aatgccttggaggcc

SEQ ID NO: 898941 - DNA, 15 bp, Homo sapiens
atgccttggaggcca

SEQ ID NO: 898942 - DNA, 15 bp, Homo sapiens
tgccttggaggccat

SEQ ID NO: 898943 - DNA, 15 bp, Homo sapiens
gccttggaggccata

SEQ ID NO: 898944 - DNA, 15 bp, Homo sapiens
ccttggaggccataa

SEQ ID NO: 898945 - DNA, 15 bp, Homo sapiens
cttggaggccataag

SEQ ID NO: 898946 - DNA, 15 bp, Homo sapiens
ttggaggccataagg

SEQ ID NO: 898947 - DNA, 15 bp, Homo sapiens
tggaggccataaggc

SEQ ID NO: 898948 - DNA, 15 bp, Homo sapiens
ggaggccataaggcc

SEQ ID NO: 898949 - DNA, 15 bp, Homo sapiens
gaggccataaggcca

SEQ ID NO: 898950 - DNA, 15 bp, Homo sapiens
aggccataaggccag

SEQ ID NO: 898951 - DNA, 15 bp, Homo sapiens
ggccataaggccagc

SEQ ID NO: 898952 - DNA, 15 bp, Homo sapiens
gccataaggccagcc

SEQ ID NO: 898953 - DNA, 15 bp, Homo sapiens
ccataaggccagcca

SEQ ID NO: 898954 - DNA, 15 bp, Homo sapiens
cataaggccagccag

SEQ ID NO: 898955 - DNA, 15 bp, Homo sapiens
ataaggccagccagt

SEQ ID NO: 898956 - DNA, 15 bp, Homo sapiens
taaggccagccagtt

SEQ ID NO: 898957 - DNA, 15 bp, Homo sapiens
aaggccagccagttc

SEQ ID NO: 898958 - DNA, 15 bp, Homo sapiens
aggccagccagttct

SEQ ID NO: 898959 - DNA, 15 bp, Homo sapiens
ggccagccagttcta

SEQ ID NO: 898960 - DNA, 15 bp, Homo sapiens
gccagccagttctag

SEQ ID NO: 898961 - DNA, 15 bp, Homo sapiens
ccagccagttctagc

SEQ ID NO: 898962 - DNA, 15 bp, Homo sapiens
cagccagttctagct

SEQ ID NO: 898963 - DNA, 15 bp, Homo sapiens
agccagttctagctc

SEQ ID NO: 898964 - DNA, 15 bp, Homo sapiens
gccagttctagctct

SEQ ID NO: 898965 - DNA, 15 bp, Homo sapiens
ccagttctagctctc

SEQ ID NO: 898966 - DNA, 15 bp, Homo sapiens
cagttctagctctct

SEQ ID NO: 898967 - DNA, 15 bp, Homo sapiens
agttctagctctcta

SEQ ID NO: 898968 - DNA, 15 bp, Homo sapiens
gttctagctctctat

SEQ ID NO: 898969 - DNA, 15 bp, Homo sapiens
ttctagctctctatt

SEQ ID NO: 898970 - DNA, 15 bp, Homo sapiens
tctagctctctatta

SEQ ID NO: 898971 - DNA, 15 bp, Homo sapiens
ctagctctctattac

SEQ ID NO: 898972 - DNA, 15 bp, Homo sapiens
tagctctctattacc

SEQ ID NO: 898973 - DNA, 15 bp, Homo sapiens
agctctctattacct

SEQ ID NO: 898974 - DNA, 15 bp, Homo sapiens
gctctctattacctg

SEQ ID NO: 898975 - DNA, 15 bp, Homo sapiens
ctctctattacctgt

SEQ ID NO: 898976 - DNA, 15 bp, Homo sapiens
tctctattacctgtc

SEQ ID NO: 898977 - DNA, 15 bp, Homo sapiens
ctctattacctgtcc

SEQ ID NO: 898978 - DNA, 15 bp, Homo sapiens
tctattacctgtccc

SEQ ID NO: 898979 - DNA, 15 bp, Homo sapiens
ctattacctgtcccc

SEQ ID NO: 898980 - DNA, 15 bp, Homo sapiens
tattacctgtcccca

SEQ ID NO: 898981 - DNA, 15 bp, Homo sapiens
attacctgtccccac

SEQ ID NO: 898982 - DNA, 15 bp, Homo sapiens
ttacctgtccccact

SEQ ID NO: 898983 - DNA, 15 bp, Homo sapiens
tacctgtccccactc

SEQ ID NO: 898984 - DNA, 15 bp, Homo sapiens
acctgtccccactca

SEQ ID NO: 898985 - DNA, 15 bp, Homo sapiens
cctgtccccactcaa

SEQ ID NO: 898986 - DNA, 15 bp, Homo sapiens
ctgtccccactcaac

SEQ ID NO: 898987 - DNA, 15 bp, Homo sapiens
tgtccccactcaact

SEQ ID NO: 898988 - DNA, 15 bp, Homo sapiens
gtccccactcaactg

SEQ ID NO: 898989 - DNA, 15 bp, Homo sapiens
tccccactcaactga

SEQ ID NO: 898990 - DNA, 15 bp, Homo sapiens
ccccactcaactgac

SEQ ID NO: 898991 - DNA, 15 bp, Homo sapiens
cccactcaactgact

SEQ ID NO: 898992 - DNA, 15 bp, Homo sapiens
ccactcaactgactc

SEQ ID NO: 898993 - DNA, 15 bp, Homo sapiens
cactcaactgactca

SEQ ID NO: 898994 - DNA, 15 bp, Homo sapiens
actcaactgactcat

SEQ ID NO: 898995 - DNA, 15 bp, Homo sapiens
ctcaactgactcata

SEQ ID NO: 898996 - DNA, 15 bp, Homo sapiens
tcaactgactcatac

SEQ ID NO: 898997 - DNA, 15 bp, Homo sapiens
caactgactcatacc

SEQ ID NO: 898998 - DNA, 15 bp, Homo sapiens
aactgactcatacct

SEQ ID NO: 898999 - DNA, 15 bp, Homo sapiens
actgactcatacctg

SEQ ID NO: 899000 - DNA, 15 bp, Homo sapiens
ctgactcatacctgt

SEQ ID NO: 899001 - DNA, 15 bp, Homo sapiens
tgactcatacctgtt

SEQ ID NO: 899002 - DNA, 15 bp, Homo sapiens
gactcatacctgttt

SEQ ID NO: 899003 - DNA, 15 bp, Homo sapiens
actcatacctgtttc

SEQ ID NO: 899004 - DNA, 15 bp, Homo sapiens
ctcatacctgtttcc

SEQ ID NO: 899005 - DNA, 15 bp, Homo sapiens
tcatacctgtttccg

SEQ ID NO: 899006 - DNA, 15 bp, Homo sapiens
catacctgtttccgg

SEQ ID NO: 899007 - DNA, 15 bp, Homo sapiens
atacctgtttccggc

SEQ ID NO: 899008 - DNA, 15 bp, Homo sapiens
tacctgtttccggct

SEQ ID NO: 899009 - DNA, 15 bp, Homo sapiens
acctgtttccggctg

SEQ ID NO: 899010 - DNA, 15 bp, Homo sapiens
cctgtttccggctgc

SEQ ID NO: 899011 - DNA, 15 bp, Homo sapiens
ctgtttccggctgca

SEQ ID NO: 899012 - DNA, 15 bp, Homo sapiens
tgtttccggctgcat

SEQ ID NO: 899013 - DNA, 15 bp, Homo sapiens
gtttccggctgcatc

SEQ ID NO: 899014 - DNA, 15 bp, Homo sapiens
tttccggctgcatca

SEQ ID NO: 899015 - DNA, 15 bp, Homo sapiens
ttccggctgcatcac

SEQ ID NO: 899016 - DNA, 15 bp, Homo sapiens
tccggctgcatcact

SEQ ID NO: 899017 - DNA, 15 bp, Homo sapiens
ccggctgcatcacta

SEQ ID NO: 899018 - DNA, 15 bp, Homo sapiens
cggctgcatcactat

SEQ ID NO: 899019 - DNA, 15 bp, Homo sapiens
ggctgcatcactatg

SEQ ID NO: 899020 - DNA, 15 bp, Homo sapiens
gctgcatcactatgt

SEQ ID NO: 899021 - DNA, 15 bp, Homo sapiens
ctgcatcactatgtg

SEQ ID NO: 899022 - DNA, 15 bp, Homo sapiens
tgcatcactatgtgc

SEQ ID NO: 899023 - DNA, 15 bp, Homo sapiens
gcatcactatgtgcc

SEQ ID NO: 899024 - DNA, 15 bp, Homo sapiens
catcactatgtgccc

SEQ ID NO: 899025 - DNA, 15 bp, Homo sapiens
atcactatgtgcccc

SEQ ID NO: 899026 - DNA, 15 bp, Homo sapiens
tcactatgtgcccca

SEQ ID NO: 899027 - DNA, 15 bp, Homo sapiens
cactatgtgccccac

SEQ ID NO: 899028 - DNA, 15 bp, Homo sapiens
actatgtgccccaca

SEQ ID NO: 899029 - DNA, 15 bp, Homo sapiens
ctatgtgccccacag

SEQ ID NO: 899030 - DNA, 15 bp, Homo sapiens
tatgtgccccacaga

SEQ ID NO: 899031 - DNA, 15 bp, Homo sapiens
atgtgccccacagag

SEQ ID NO: 899032 - DNA, 15 bp, Homo sapiens
tgtgccccacagaga

SEQ ID NO: 899033 - DNA, 15 bp, Homo sapiens
gtgccccacagagaa

SEQ ID NO: 899034 - DNA, 15 bp, Homo sapiens
tgccccacagagaac

SEQ ID NO: 899035 - DNA, 15 bp, Homo sapiens
gccccacagagaacg

SEQ ID NO: 899036 - DNA, 15 bp, Homo sapiens
ccccacagagaacga

SEQ ID NO: 899037 - DNA, 15 bp, Homo sapiens
cccacagagaacgat

SEQ ID NO: 899038 - DNA, 15 bp, Homo sapiens
ccacagagaacgatg

SEQ ID NO: 899039 - DNA, 15 bp, Homo sapiens
cacagagaacgatga

SEQ ID NO: 899040 - DNA, 15 bp, Homo sapiens
acagagaacgatgat

SEQ ID NO: 899041 - DNA, 15 bp, Homo sapiens
cagagaacgatgatc

SEQ ID NO: 899042 - DNA, 15 bp, Homo sapiens
agagaacgatgatcg

SEQ ID NO: 899043 - DNA, 15 bp, Homo sapiens
gagaacgatgatcgt

SEQ ID NO: 899044 - DNA, 15 bp, Homo sapiens
agaacgatgatcgtc

SEQ ID NO: 899045 - DNA, 15 bp, Homo sapiens
gaacgatgatcgtca

SEQ ID NO: 899046 - DNA, 15 bp, Homo sapiens
aacgatgatcgtcac

SEQ ID NO: 899047 - DNA, 15 bp, Homo sapiens
acgatgatcgtcacc

SEQ ID NO: 899048 - DNA, 15 bp, Homo sapiens
cgatgatcgtcacct

SEQ ID NO: 899049 - DNA, 15 bp, Homo sapiens
gatgatcgtcacctc

SEQ ID NO: 899050 - DNA, 15 bp, Homo sapiens
atgatcgtcacctct

SEQ ID NO: 899051 - DNA, 15 bp, Homo sapiens
tgatcgtcacctctg

SEQ ID NO: 899052 - DNA, 15 bp, Homo sapiens
gatcgtcacctctgt

SEQ ID NO: 899053 - DNA, 15 bp, Homo sapiens
atcgtcacctctgtg

SEQ ID NO: 899054 - DNA, 15 bp, Homo sapiens
tcgtcacctctgtgc

SEQ ID NO: 899055 - DNA, 15 bp, Homo sapiens
cgtcacctctgtgcc

SEQ ID NO: 899056 - DNA, 15 bp, Homo sapiens
gtcacctctgtgcct

SEQ ID NO: 899057 - DNA, 15 bp, Homo sapiens
tcacctctgtgcctg

SEQ ID NO: 899058 - DNA, 15 bp, Homo sapiens
cacctctgtgcctga

SEQ ID NO: 899059 - DNA, 15 bp, Homo sapiens
acctctgtgcctgag

SEQ ID NO: 899060 - DNA, 15 bp, Homo sapiens
cctctgtgcctgagt

SEQ ID NO: 899061 - DNA, 15 bp, Homo sapiens
ctctgtgcctgagtt

SEQ ID NO: 899062 - DNA, 15 bp, Homo sapiens
tctgtgcctgagttc

SEQ ID NO: 899063 - DNA, 15 bp, Homo sapiens
ctgtgcctgagttct

SEQ ID NO: 899064 - DNA, 15 bp, Homo sapiens
tgtgcctgagttctc

SEQ ID NO: 899065 - DNA, 15 bp, Homo sapiens
gtgcctgagttctcc

SEQ ID NO: 899066 - DNA, 15 bp, Homo sapiens
tgcctgagttctccc

SEQ ID NO: 899067 - DNA, 15 bp, Homo sapiens
gcctgagttctccct

SEQ ID NO: 899068 - DNA, 15 bp, Homo sapiens
cctgagttctccctg

SEQ ID NO: 899069 - DNA, 15 bp, Homo sapiens
ctgagttctccctgt

SEQ ID NO: 899070 - DNA, 15 bp, Homo sapiens
tgagttctccctgtt

SEQ ID NO: 899071 - DNA, 15 bp, Homo sapiens
gagttctccctgttg

SEQ ID NO: 899072 - DNA, 15 bp, Homo sapiens
agttctccctgttgt

SEQ ID NO: 899073 - DNA, 15 bp, Homo sapiens
gttctccctgttgtc

SEQ ID NO: 899074 - DNA, 15 bp, Homo sapiens
ttctccctgttgtct

SEQ ID NO: 899075 - DNA, 15 bp, Homo sapiens
tctccctgttgtctc

SEQ ID NO: 899076 - DNA, 15 bp, Homo sapiens
ctccctgttgtctca

SEQ ID NO: 899077 - DNA, 15 bp, Homo sapiens
tccctgttgtctcaa

SEQ ID NO: 899078 - DNA, 15 bp, Homo sapiens
ccctgttgtctcaaa

SEQ ID NO: 899079 - DNA, 15 bp, Homo sapiens
cctgttgtctcaaag

SEQ ID NO: 899080 - DNA, 15 bp, Homo sapiens
ctgttgtctcaaagc

SEQ ID NO: 899081 - DNA, 15 bp, Homo sapiens
tgttgtctcaaagcg

SEQ ID NO: 899082 - DNA, 15 bp, Homo sapiens
gttgtctcaaagcgg

SEQ ID NO: 899083 - DNA, 15 bp, Homo sapiens
ttgtctcaaagcggt

SEQ ID NO: 899084 - DNA, 15 bp, Homo sapiens
tgtctcaaagcggta

SEQ ID NO: 899085 - DNA, 15 bp, Homo sapiens
gtctcaaagcggtac

SEQ ID NO: 899086 - DNA, 15 bp, Homo sapiens
tctcaaagcggtacc

SEQ ID NO: 899087 - DNA, 15 bp, Homo sapiens
ctcaaagcggtaccc

SEQ ID NO: 899088 - DNA, 15 bp, Homo sapiens
tcaaagcggtaccca

SEQ ID NO: 899089 - DNA, 15 bp, Homo sapiens
caaagcggtacccat

SEQ ID NO: 899090 - DNA, 15 bp, Homo sapiens
aaagcggtacccatc

SEQ ID NO: 899091 - DNA, 15 bp, Homo sapiens
aagcggtacccatcc

SEQ ID NO: 899092 - DNA, 15 bp, Homo sapiens
agcggtacccatcct

SEQ ID NO: 899093 - DNA, 15 bp, Homo sapiens
gcggtacccatcctc

SEQ ID NO: 899094 - DNA, 15 bp, Homo sapiens
cggtacccatcctcc

SEQ ID NO: 899095 - DNA, 15 bp, Homo sapiens
ggtacccatcctccc

SEQ ID NO: 899096 - DNA, 15 bp, Homo sapiens
gtacccatcctcccc

SEQ ID NO: 899097 - DNA, 15 bp, Homo sapiens
tacccatcctccccc

SEQ ID NO: 899098 - DNA, 15 bp, Homo sapiens
acccatcctccccca

SEQ ID NO: 899099 - DNA, 15 bp, Homo sapiens
cccatcctcccccag

SEQ ID NO: 899100 - DNA, 15 bp, Homo sapiens
ccatcctcccccaga

SEQ ID NO: 899101 - DNA, 15 bp, Homo sapiens
catcctcccccagaa

SEQ ID NO: 899102 - DNA, 15 bp, Homo sapiens
atcctcccccagaag

SEQ ID NO: 899103 - DNA, 15 bp, Homo sapiens
tcctcccccagaagc

SEQ ID NO: 899104 - DNA, 15 bp, Homo sapiens
cctcccccagaagct

SEQ ID NO: 899105 - DNA, 15 bp, Homo sapiens
ctcccccagaagctg

SEQ ID NO: 899106 - DNA, 15 bp, Homo sapiens
tcccccagaagctgt

SEQ ID NO: 899107 - DNA, 15 bp, Homo sapiens
cccccagaagctgtc

SEQ ID NO: 899108 - DNA, 15 bp, Homo sapiens
ccccagaagctgtcc

SEQ ID NO: 899109 - DNA, 15 bp, Homo sapiens
cccagaagctgtccc

SEQ ID NO: 899110 - DNA, 15 bp, Homo sapiens
ccagaagctgtcccc

SEQ ID NO: 899111 - DNA, 15 bp, Homo sapiens
cagaagctgtcccca

SEQ ID NO: 899112 - DNA, 15 bp, Homo sapiens
agaagctgtccccag

SEQ ID NO: 899113 - DNA, 15 bp, Homo sapiens
gaagctgtccccagc

SEQ ID NO: 899114 - DNA, 15 bp, Homo sapiens
aagctgtccccagcg

SEQ ID NO: 899115 - DNA, 15 bp, Homo sapiens
agctgtccccagcga

SEQ ID NO: 899116 - DNA, 15 bp, Homo sapiens
gctgtccccagcgag

SEQ ID NO: 899117 - DNA, 15 bp, Homo sapiens
ctgtccccagcgagc

SEQ ID NO: 899118 - DNA, 15 bp, Homo sapiens
tgtccccagcgagcc

SEQ ID NO: 899119 - DNA, 15 bp, Homo sapiens
gtccccagcgagcct

SEQ ID NO: 899120 - DNA, 15 bp, Homo sapiens
tccccagcgagcctc

SEQ ID NO: 899121 - DNA, 15 bp, Homo sapiens
ccccagcgagcctcc

SEQ ID NO: 899122 - DNA, 15 bp, Homo sapiens
cccagcgagcctccc

SEQ ID NO: 899123 - DNA, 15 bp, Homo sapiens
ccagcgagcctccct

SEQ ID NO: 899124 - DNA, 15 bp, Homo sapiens
cagcgagcctccctt

SEQ ID NO: 899125 - DNA, 15 bp, Homo sapiens
agcgagcctcccttc

SEQ ID NO: 899126 - DNA, 15 bp, Homo sapiens
gcgagcctcccttct

SEQ ID NO: 899127 - DNA, 15 bp, Homo sapiens
cgagcctcccttctt

SEQ ID NO: 899128 - DNA, 15 bp, Homo sapiens
gagcctcccttcttt

SEQ ID NO: 899129 - DNA, 15 bp, Homo sapiens
agcctcccttctttg

SEQ ID NO: 899130 - DNA, 15 bp, Homo sapiens
gcctcccttctttgt

SEQ ID NO: 899131 - DNA, 15 bp, Homo sapiens
cctcccttctttgtt

SEQ ID NO: 899132 - DNA, 15 bp, Homo sapiens
ctcccttctttgttt

SEQ ID NO: 899133 - DNA, 15 bp, Homo sapiens
tcccttctttgtttg

SEQ ID NO: 899134 - DNA, 15 bp, Homo sapiens
cccttctttgtttga

SEQ ID NO: 899135 - DNA, 15 bp, Homo sapiens
ccttctttgtttgaa

SEQ ID NO: 899136 - DNA, 15 bp, Homo sapiens
cttctttgtttgaat

SEQ ID NO: 899137 - DNA, 15 bp, Homo sapiens
ttctttgtttgaatt

SEQ ID NO: 899138 - DNA, 15 bp, Homo sapiens
tctttgtttgaattc

SEQ ID NO: 899139 - DNA, 15 bp, Homo sapiens
ctttgtttgaattct

SEQ ID NO: 899140 - DNA, 15 bp, Homo sapiens
tttgtttgaattctc

SEQ ID NO: 899141 - DNA, 15 bp, Homo sapiens
ttgtttgaattctct

SEQ ID NO: 899142 - DNA, 15 bp, Homo sapiens
tgtttgaattctcta

SEQ ID NO: 899143 - DNA, 15 bp, Homo sapiens
gtttgaattctctaa

SEQ ID NO: 899144 - DNA, 15 bp, Homo sapiens
tttgaattctctaat

SEQ ID NO: 899145 - DNA, 15 bp, Homo sapiens
ttgaattctctaata

SEQ ID NO: 899146 - DNA, 15 bp, Homo sapiens
tgaattctctaataa

SEQ ID NO: 899147 - DNA, 15 bp, Homo sapiens
gaattctctaataag

SEQ ID NO: 899148 - DNA, 15 bp, Homo sapiens
aattctctaataaga

SEQ ID NO: 899149 - DNA, 15 bp, Homo sapiens
attctctaataagag

SEQ ID NO: 899150 - DNA, 15 bp, Homo sapiens
ttctctaataagagc

SEQ ID NO: 899151 - DNA, 15 bp, Homo sapiens
tctctaataagagca

SEQ ID NO: 899152 - DNA, 15 bp, Homo sapiens
ctctaataagagcaa

SEQ ID NO: 899153 - DNA, 15 bp, Homo sapiens
tctaataagagcaac

SEQ ID NO: 899154 - DNA, 15 bp, Homo sapiens
ctaataagagcaaca

SEQ ID NO: 899155 - DNA, 15 bp, Homo sapiens
taataagagcaacag

SEQ ID NO: 899156 - DNA, 15 bp, Homo sapiens
aataagagcaacagc

SEQ ID NO: 899157 - DNA, 15 bp, Homo sapiens
ataagagcaacagca

SEQ ID NO: 899158 - DNA, 15 bp, Homo sapiens
taagagcaacagcag

SEQ ID NO: 899159 - DNA, 15 bp, Homo sapiens
aagagcaacagcagc

SEQ ID NO: 899160 - DNA, 15 bp, Homo sapiens
agagcaacagcagct

SEQ ID NO: 899161 - DNA, 15 bp, Homo sapiens
gagcaacagcagctc

SEQ ID NO: 899162 - DNA, 15 bp, Homo sapiens
agcaacagcagctcc

SEQ ID NO: 899163 - DNA, 15 bp, Homo sapiens
gcaacagcagctccc

SEQ ID NO: 899164 - DNA, 15 bp, Homo sapiens
caacagcagctccca

SEQ ID NO: 899165 - DNA, 15 bp, Homo sapiens
aacagcagctcccat

SEQ ID NO: 899166 - DNA, 15 bp, Homo sapiens
acagcagctcccatt

SEQ ID NO: 899167 - DNA, 15 bp, Homo sapiens
cagcagctcccattt

SEQ ID NO: 899168 - DNA, 15 bp, Homo sapiens
agcagctcccatttc

SEQ ID NO: 899169 - DNA, 15 bp, Homo sapiens
gcagctcccatttct

SEQ ID NO: 899170 - DNA, 15 bp, Homo sapiens
cagctcccatttcta

SEQ ID NO: 899171 - DNA, 15 bp, Homo sapiens
agctcccatttctag

SEQ ID NO: 899172 - DNA, 15 bp, Homo sapiens
gctcccatttctaga

SEQ ID NO: 899173 - DNA, 15 bp, Homo sapiens
ctcccatttctagaa

SEQ ID NO: 899174 - DNA, 15 bp, Homo sapiens
tcccatttctagaac

SEQ ID NO: 899175 - DNA, 15 bp, Homo sapiens
cccatttctagaaca

SEQ ID NO: 899176 - DNA, 15 bp, Homo sapiens
ccatttctagaacac

SEQ ID NO: 899177 - DNA, 15 bp, Homo sapiens
catttctagaacaca

SEQ ID NO: 899178 - DNA, 15 bp, Homo sapiens
atttctagaacacat

SEQ ID NO: 899179 - DNA, 15 bp, Homo sapiens
tttctagaacacatt

SEQ ID NO: 899180 - DNA, 15 bp, Homo sapiens
ttctagaacacattt

SEQ ID NO: 899181 - DNA, 15 bp, Homo sapiens
tctagaacacattta

SEQ ID NO: 899182 - DNA, 15 bp, Homo sapiens
ctagaacacatttac

SEQ ID NO: 899183 - DNA, 15 bp, Homo sapiens
tagaacacatttaca

SEQ ID NO: 899184 - DNA, 15 bp, Homo sapiens
agaacacatttacag

SEQ ID NO: 899185 - DNA, 15 bp, Homo sapiens
gaacacatttacagt

SEQ ID NO: 899186 - DNA, 15 bp, Homo sapiens
aacacatttacagta

SEQ ID NO: 899187 - DNA, 15 bp, Homo sapiens
acacatttacagtat

SEQ ID NO: 899188 - DNA, 15 bp, Homo sapiens
cacatttacagtatt

SEQ ID NO: 899189 - DNA, 15 bp, Homo sapiens
acatttacagtatta

SEQ ID NO: 899190 - DNA, 15 bp, Homo sapiens
catttacagtattac

SEQ ID NO: 899191 - DNA, 15 bp, Homo sapiens
atttacagtattact

SEQ ID NO: 899192 - DNA, 15 bp, Homo sapiens
tttacagtattacta

SEQ ID NO: 899193 - DNA, 15 bp, Homo sapiens
ttacagtattactat

SEQ ID NO: 899194 - DNA, 15 bp, Homo sapiens
tacagtattactatt

SEQ ID NO: 899195 - DNA, 15 bp, Homo sapiens
acagtattactattt

SEQ ID NO: 899196 - DNA, 15 bp, Homo sapiens
cagtattactatttt

SEQ ID NO: 899197 - DNA, 15 bp, Homo sapiens
agtattactattttc

SEQ ID NO: 899198 - DNA, 15 bp, Homo sapiens
gtattactattttct

SEQ ID NO: 899199 - DNA, 15 bp, Homo sapiens
tattactattttcta

SEQ ID NO: 899200 - DNA, 15 bp, Homo sapiens
attactattttctag

SEQ ID NO: 899201 - DNA, 15 bp, Homo sapiens
ttactattttctagg

SEQ ID NO: 899202 - DNA, 15 bp, Homo sapiens
tactattttctagga

SEQ ID NO: 899203 - DNA, 15 bp, Homo sapiens
actattttctaggat

SEQ ID NO: 899204 - DNA, 15 bp, Homo sapiens
ctattttctaggata

SEQ ID NO: 899205 - DNA, 15 bp, Homo sapiens
tattttctaggatat

SEQ ID NO: 899206 - DNA, 15 bp, Homo sapiens
attttctaggatata

SEQ ID NO: 899207 - DNA, 15 bp, Homo sapiens
ttttctaggatataa

SEQ ID NO: 899208 - DNA, 15 bp, Homo sapiens
tttctaggatataaa

SEQ ID NO: 899209 - DNA, 15 bp, Homo sapiens
ttctaggatataaag

SEQ ID NO: 899210 - DNA, 15 bp, Homo sapiens
tctaggatataaagt

SEQ ID NO: 899211 - DNA, 15 bp, Homo sapiens
ctaggatataaagtg

SEQ ID NO: 899212 - DNA, 15 bp, Homo sapiens
taggatataaagtgc

SEQ ID NO: 899213 - DNA, 15 bp, Homo sapiens
aggatataaagtgcc

SEQ ID NO: 899214 - DNA, 15 bp, Homo sapiens
ggatataaagtgcca

SEQ ID NO: 899215 - DNA, 15 bp, Homo sapiens
gatataaagtgccat

SEQ ID NO: 899216 - DNA, 15 bp, Homo sapiens
atataaagtgccata

SEQ ID NO: 899217 - DNA, 15 bp, Homo sapiens
tataaagtgccatat

SEQ ID NO: 899218 - DNA, 15 bp, Homo sapiens
ataaagtgccatata

SEQ ID NO: 899219 - DNA, 15 bp, Homo sapiens
taaagtgccatatat

SEQ ID NO: 899220 - DNA, 15 bp, Homo sapiens
aaagtgccatatata

SEQ ID NO: 899221 - DNA, 15 bp, Homo sapiens
aagtgccatatatat

SEQ ID NO: 899222 - DNA, 15 bp, Homo sapiens
agtgccatatatatt

SEQ ID NO: 899223 - DNA, 15 bp, Homo sapiens
gtgccatatatattt

SEQ ID NO: 899224 - DNA, 15 bp, Homo sapiens
tgccatatatatttt

SEQ ID NO: 899225 - DNA, 15 bp, Homo sapiens
gccatatatattttt

SEQ ID NO: 899226 - DNA, 15 bp, Homo sapiens
ccatatatattttta

SEQ ID NO: 899227 - DNA, 15 bp, Homo sapiens
catatatatttttaa

SEQ ID NO: 899228 - DNA, 15 bp, Homo sapiens
atatatatttttaat

SEQ ID NO: 899229 - DNA, 15 bp, Homo sapiens
tatatatttttaatt

SEQ ID NO: 899230 - DNA, 15 bp, Homo sapiens
atatatttttaattc

SEQ ID NO: 899231 - DNA, 15 bp, Homo sapiens
tatatttttaattcc

SEQ ID NO: 899232 - DNA, 15 bp, Homo sapiens
atatttttaattcca

SEQ ID NO: 899233 - DNA, 15 bp, Homo sapiens
tatttttaattccaa

SEQ ID NO: 899234 - DNA, 15 bp, Homo sapiens
atttttaattccaat

SEQ ID NO: 899235 - DNA, 15 bp, Homo sapiens
tttttaattccaata

SEQ ID NO: 899236 - DNA, 15 bp, Homo sapiens
ttttaattccaatat

SEQ ID NO: 899237 - DNA, 15 bp, Homo sapiens
tttaattccaatatt

SEQ ID NO: 899238 - DNA, 15 bp, Homo sapiens
ttaattccaatatta

SEQ ID NO: 899239 - DNA, 15 bp, Homo sapiens
taattccaatattaa

SEQ ID NO: 899240 - DNA, 15 bp, Homo sapiens
aattccaatattaat

SEQ ID NO: 899241 - DNA, 15 bp, Homo sapiens
attccaatattaata

SEQ ID NO: 899242 - DNA, 15 bp, Homo sapiens
ttccaatattaataa

SEQ ID NO: 899243 - DNA, 15 bp, Homo sapiens
tccaatattaataaa

SEQ ID NO: 899244 - DNA, 15 bp, Homo sapiens
ccaatattaataaat

SEQ ID NO: 899245 - DNA, 15 bp, Homo sapiens
caatattaataaatg

SEQ ID NO: 899246 - DNA, 15 bp, Homo sapiens
aatattaataaatgt

SEQ ID NO: 899247 - DNA, 15 bp, Homo sapiens
atattaataaatgta

SEQ ID NO: 899248 - DNA, 15 bp, Homo sapiens
tattaataaatgtat

SEQ ID NO: 899249 - DNA, 15 bp, Homo sapiens
attaataaatgtatg

SEQ ID NO: 899250 - DNA, 15 bp, Homo sapiens
ttaataaatgtatgc

SEQ ID NO: 899251 - DNA, 15 bp, Homo sapiens
taataaatgtatgcc

SEQ ID NO: 899252 - DNA, 15 bp, Homo sapiens
aataaatgtatgcca

SEQ ID NO: 899253 - DNA, 15 bp, Homo sapiens
ataaatgtatgccaa

SEQ ID NO: 899254 - DNA, 15 bp, Homo sapiens
taaatgtatgccaaa

SEQ ID NO: 899255 - DNA, 15 bp, Homo sapiens
aaatgtatgccaaac

SEQ ID NO: 899256 - DNA, 15 bp, Homo sapiens
aatgtatgccaaaca

SEQ ID NO: 899257 - DNA, 15 bp, Homo sapiens
atgtatgccaaacaa

SEQ ID NO: 899258 - DNA, 15 bp, Homo sapiens
tgtatgccaaacaac

SEQ ID NO: 899259 - DNA, 15 bp, Homo sapiens
gtatgccaaacaaca

SEQ ID NO: 899260 - DNA, 15 bp, Homo sapiens
tatgccaaacaacaa

SEQ ID NO: 899261 - DNA, 15 bp, Homo sapiens
atgccaaacaacaat

SEQ ID NO: 899262 - DNA, 15 bp, Homo sapiens
tgccaaacaacaatc

SEQ ID NO: 899263 - DNA, 15 bp, Homo sapiens
gccaaacaacaatca

SEQ ID NO: 899264 - DNA, 15 bp, Homo sapiens
ccaaacaacaatcag

SEQ ID NO: 899265 - DNA, 15 bp, Homo sapiens
caaacaacaatcagc

SEQ ID NO: 899266 - DNA, 15 bp, Homo sapiens
aaacaacaatcagct

SEQ ID NO: 899267 - DNA, 15 bp, Homo sapiens
aacaacaatcagctg

SEQ ID NO: 899268 - DNA, 15 bp, Homo sapiens
acaacaatcagctgc

SEQ ID NO: 899269 - DNA, 15 bp, Homo sapiens
caacaatcagctgca

SEQ ID NO: 899270 - DNA, 15 bp, Homo sapiens
aacaatcagctgcaa

SEQ ID NO: 899271 - DNA, 15 bp, Homo sapiens
acaatcagctgcaag

SEQ ID NO: 899272 - DNA, 15 bp, Homo sapiens
caatcagctgcaagg

SEQ ID NO: 899273 - DNA, 15 bp, Homo sapiens
aatcagctgcaagga

SEQ ID NO: 899274 - DNA, 15 bp, Homo sapiens
atcagctgcaaggaa

SEQ ID NO: 899275 - DNA, 15 bp, Homo sapiens
tcagctgcaaggaaa

SEQ ID NO: 899276 - DNA, 15 bp, Homo sapiens
cagctgcaaggaaac

SEQ ID NO: 899277 - DNA, 15 bp, Homo sapiens
agctgcaaggaaaca

SEQ ID NO: 899278 - DNA, 15 bp, Homo sapiens
gctgcaaggaaacac

SEQ ID NO: 899279 - DNA, 15 bp, Homo sapiens
ctgcaaggaaacaca

SEQ ID NO: 899280 - DNA, 15 bp, Homo sapiens
tgcaaggaaacacat

SEQ ID NO: 899281 - DNA, 15 bp, Homo sapiens
gcaaggaaacacatg

SEQ ID NO: 899282 - DNA, 15 bp, Homo sapiens
caaggaaacacatga

SEQ ID NO: 899283 - DNA, 15 bp, Homo sapiens
aaggaaacacatgag

SEQ ID NO: 899284 - DNA, 15 bp, Homo sapiens
aggaaacacatgaga

SEQ ID NO: 899285 - DNA, 15 bp, Homo sapiens
ggaaacacatgagaa

SEQ ID NO: 899286 - DNA, 15 bp, Homo sapiens
gaaacacatgagaac

SEQ ID NO: 899287 - DNA, 15 bp, Homo sapiens
aaacacatgagaact

SEQ ID NO: 899288 - DNA, 15 bp, Homo sapiens
aacacatgagaactc

SEQ ID NO: 899289 - DNA, 15 bp, Homo sapiens
acacatgagaactca

SEQ ID NO: 899290 - DNA, 15 bp, Homo sapiens
cacatgagaactcat

SEQ ID NO: 899291 - DNA, 15 bp, Homo sapiens
acatgagaactcatc

SEQ ID NO: 899292 - DNA, 15 bp, Homo sapiens
catgagaactcatca

SEQ ID NO: 899293 - DNA, 15 bp, Homo sapiens
atgagaactcatcaa

SEQ ID NO: 899294 - DNA, 15 bp, Homo sapiens
tgagaactcatcaaa

SEQ ID NO: 899295 - DNA, 15 bp, Homo sapiens
gagaactcatcaaaa

SEQ ID NO: 899296 - DNA, 15 bp, Homo sapiens
agaactcatcaaaat

SEQ ID NO: 899297 - DNA, 15 bp, Homo sapiens
gaactcatcaaaatt

SEQ ID NO: 899298 - DNA, 15 bp, Homo sapiens
aactcatcaaaattt

SEQ ID NO: 899299 - DNA, 15 bp, Homo sapiens
actcatcaaaatttt

SEQ ID NO: 899300 - DNA, 15 bp, Homo sapiens
ctcatcaaaatttta

SEQ ID NO: 899301 - DNA, 15 bp, Homo sapiens
tcatcaaaattttag

SEQ ID NO: 899302 - DNA, 15 bp, Homo sapiens
catcaaaattttagc

SEQ ID NO: 899303 - DNA, 15 bp, Homo sapiens
atcaaaattttagcg

SEQ ID NO: 899304 - DNA, 15 bp, Homo sapiens
tcaaaattttagcgg

SEQ ID NO: 899305 - DNA, 15 bp, Homo sapiens
caaaattttagcggt

SEQ ID NO: 899306 - DNA, 15 bp, Homo sapiens
aaaattttagcggtg

SEQ ID NO: 899307 - DNA, 15 bp, Homo sapiens
aaattttagcggtgg

SEQ ID NO: 899308 - DNA, 15 bp, Homo sapiens
aattttagcggtggg

SEQ ID NO: 899309 - DNA, 15 bp, Homo sapiens
attttagcggtggga

SEQ ID NO: 899310 - DNA, 15 bp, Homo sapiens
ttttagcggtgggat

SEQ ID NO: 899311 - DNA, 15 bp, Homo sapiens
tttagcggtgggatg

SEQ ID NO: 899312 - DNA, 15 bp, Homo sapiens
ttagcggtgggatgg

SEQ ID NO: 899313 - DNA, 15 bp, Homo sapiens
tagcggtgggatggt

SEQ ID NO: 899314 - DNA, 15 bp, Homo sapiens
agcggtgggatggtg

SEQ ID NO: 899315 - DNA, 15 bp, Homo sapiens
gcggtgggatggtgg

SEQ ID NO: 899316 - DNA, 15 bp, Homo sapiens
cggtgggatggtggt

SEQ ID NO: 899317 - DNA, 15 bp, Homo sapiens
ggtgggatggtggtt

SEQ ID NO: 899318 - DNA, 15 bp, Homo sapiens
gtgggatggtggtta

SEQ ID NO: 899319 - DNA, 15 bp, Homo sapiens
tgggatggtggttaa

SEQ ID NO: 899320 - DNA, 15 bp, Homo sapiens
gggatggtggttaat

SEQ ID NO: 899321 - DNA, 15 bp, Homo sapiens
ggatggtggttaatt

SEQ ID NO: 899322 - DNA, 15 bp, Homo sapiens
gatggtggttaattt

SEQ ID NO: 899323 - DNA, 15 bp, Homo sapiens
atggtggttaatttc

SEQ ID NO: 899324 - DNA, 15 bp, Homo sapiens
tggtggttaatttct

SEQ ID NO: 899325 - DNA, 15 bp, Homo sapiens
ggtggttaatttctg

SEQ ID NO: 899326 - DNA, 15 bp, Homo sapiens
gtggttaatttctgt

SEQ ID NO: 899327 - DNA, 15 bp, Homo sapiens
tggttaatttctgtt

SEQ ID NO: 899328 - DNA, 15 bp, Homo sapiens
ggttaatttctgttt

SEQ ID NO: 899329 - DNA, 15 bp, Homo sapiens
gttaatttctgtttt

SEQ ID NO: 899330 - DNA, 15 bp, Homo sapiens
ttaatttctgttttc

SEQ ID NO: 899331 - DNA, 15 bp, Homo sapiens
taatttctgttttct

SEQ ID NO: 899332 - DNA, 15 bp, Homo sapiens
aatttctgttttctt

SEQ ID NO: 899333 - DNA, 15 bp, Homo sapiens
atttctgttttcttc

SEQ ID NO: 899334 - DNA, 15 bp, Homo sapiens
tttctgttttcttcc

SEQ ID NO: 899335 - DNA, 15 bp, Homo sapiens
ttctgttttcttcct

SEQ ID NO: 899336 - DNA, 15 bp, Homo sapiens
tctgttttcttcctt

SEQ ID NO: 899337 - DNA, 15 bp, Homo sapiens
ctgttttcttcctta

SEQ ID NO: 899338 - DNA, 15 bp, Homo sapiens
tgttttcttccttat

SEQ ID NO: 899339 - DNA, 15 bp, Homo sapiens
gttttcttccttatc

SEQ ID NO: 899340 - DNA, 15 bp, Homo sapiens
ttttcttccttatcc

SEQ ID NO: 899341 - DNA, 15 bp, Homo sapiens
tttcttccttatccc

SEQ ID NO: 899342 - DNA, 15 bp, Homo sapiens
ttcttccttatcccc

SEQ ID NO: 899343 - DNA, 15 bp, Homo sapiens
tcttccttatcccct

SEQ ID NO: 899344 - DNA, 15 bp, Homo sapiens
cttccttatcccctt

SEQ ID NO: 899345 - DNA, 15 bp, Homo sapiens
ttccttatccccttt

SEQ ID NO: 899346 - DNA, 15 bp, Homo sapiens
tccttatcccctttt

SEQ ID NO: 899347 - DNA, 15 bp, Homo sapiens
ccttatccccttttt

SEQ ID NO: 899348 - DNA, 15 bp, Homo sapiens
cttatccccttttta

SEQ ID NO: 899349 - DNA, 15 bp, Homo sapiens
ttatcccctttttat

SEQ ID NO: 899350 - DNA, 15 bp, Homo sapiens
tatcccctttttatt

SEQ ID NO: 899351 - DNA, 15 bp, Homo sapiens
atcccctttttattt

SEQ ID NO: 899352 - DNA, 15 bp, Homo sapiens
tcccctttttatttt

SEQ ID NO: 899353 - DNA, 15 bp, Homo sapiens
cccctttttattttt

SEQ ID NO: 899354 - DNA, 15 bp, Homo sapiens
ccctttttatttttg

SEQ ID NO: 899355 - DNA, 15 bp, Homo sapiens
cctttttatttttgc

SEQ ID NO: 899356 - DNA, 15 bp, Homo sapiens
ctttttatttttgct

SEQ ID NO: 899357 - DNA, 15 bp, Homo sapiens
tttttatttttgctg

SEQ ID NO: 899358 - DNA, 15 bp, Homo sapiens
ttttatttttgctgc

SEQ ID NO: 899359 - DNA, 15 bp, Homo sapiens
tttatttttgctgct

SEQ ID NO: 899360 - DNA, 15 bp, Homo sapiens
ttatttttgctgctt

SEQ ID NO: 899361 - DNA, 15 bp, Homo sapiens
tatttttgctgcttt

SEQ ID NO: 899362 - DNA, 15 bp, Homo sapiens
atttttgctgctttt

SEQ ID NO: 899363 - DNA, 15 bp, Homo sapiens
tttttgctgcttttc

SEQ ID NO: 899364 - DNA, 15 bp, Homo sapiens
ttttgctgcttttct

SEQ ID NO: 899365 - DNA, 15 bp, Homo sapiens
tttgctgcttttcta

SEQ ID NO: 899366 - DNA, 15 bp, Homo sapiens
ttgctgcttttctaa

SEQ ID NO: 899367 - DNA, 15 bp, Homo sapiens
tgctgcttttctaaa

SEQ ID NO: 899368 - DNA, 15 bp, Homo sapiens
gctgcttttctaaat

SEQ ID NO: 899369 - DNA, 15 bp, Homo sapiens
ctgcttttctaaatt

SEQ ID NO: 899370 - DNA, 15 bp, Homo sapiens
tgcttttctaaattt

SEQ ID NO: 899371 - DNA, 15 bp, Homo sapiens
gcttttctaaatttt

SEQ ID NO: 899372 - DNA, 15 bp, Homo sapiens
cttttctaaattttt

SEQ ID NO: 899373 - DNA, 15 bp, Homo sapiens
ttttctaaatttttg

SEQ ID NO: 899374 - DNA, 15 bp, Homo sapiens
tttctaaatttttga

SEQ ID NO: 899375 - DNA, 15 bp, Homo sapiens
ttctaaatttttgat

SEQ ID NO: 899376 - DNA, 15 bp, Homo sapiens
tctaaatttttgatt

SEQ ID NO: 899377 - DNA, 15 bp, Homo sapiens
ctaaatttttgatta

SEQ ID NO: 899378 - DNA, 15 bp, Homo sapiens
taaatttttgattat

SEQ ID NO: 899379 - DNA, 15 bp, Homo sapiens
aaatttttgattata

SEQ ID NO: 899380 - DNA, 15 bp, Homo sapiens
aatttttgattatag

SEQ ID NO: 899381 - DNA, 15 bp, Homo sapiens
atttttgattatagg

SEQ ID NO: 899382 - DNA, 15 bp, Homo sapiens
tttttgattatagga

SEQ ID NO: 899383 - DNA, 15 bp, Homo sapiens
ttttgattataggaa

SEQ ID NO: 899384 - DNA, 15 bp, Homo sapiens
tttgattataggaag

SEQ ID NO: 899385 - DNA, 15 bp, Homo sapiens
ttgattataggaagg

SEQ ID NO: 899386 - DNA, 15 bp, Homo sapiens
tgattataggaaggg

SEQ ID NO: 899387 - DNA, 15 bp, Homo sapiens
gattataggaagggt

SEQ ID NO: 899388 - DNA, 15 bp, Homo sapiens
attataggaagggtg

SEQ ID NO: 899389 - DNA, 15 bp, Homo sapiens
ttataggaagggtgt

SEQ ID NO: 899390 - DNA, 15 bp, Homo sapiens
tataggaagggtgtg

SEQ ID NO: 899391 - DNA, 15 bp, Homo sapiens
ataggaagggtgtgt

SEQ ID NO: 899392 - DNA, 15 bp, Homo sapiens
taggaagggtgtgtt

SEQ ID NO: 899393 - DNA, 15 bp, Homo sapiens
aggaagggtgtgttt

SEQ ID NO: 899394 - DNA, 15 bp, Homo sapiens
ggaagggtgtgtttc

SEQ ID NO: 899395 - DNA, 15 bp, Homo sapiens
gaagggtgtgtttcg

SEQ ID NO: 899396 - DNA, 15 bp, Homo sapiens
aagggtgtgtttcgt

SEQ ID NO: 899397 - DNA, 15 bp, Homo sapiens
agggtgtgtttcgtt

SEQ ID NO: 899398 - DNA, 15 bp, Homo sapiens
gggtgtgtttcgttt

SEQ ID NO: 899399 - DNA, 15 bp, Homo sapiens
ggtgtgtttcgtttg

SEQ ID NO: 899400 - DNA, 15 bp, Homo sapiens
gtgtgtttcgtttgc

SEQ ID NO: 899401 - DNA, 15 bp, Homo sapiens
tgtgtttcgtttgct

SEQ ID NO: 899402 - DNA, 15 bp, Homo sapiens
gtgtttcgtttgctt

SEQ ID NO: 899403 - DNA, 15 bp, Homo sapiens
tgtttcgtttgcttt

SEQ ID NO: 899404 - DNA, 15 bp, Homo sapiens
gtttcgtttgctttt

SEQ ID NO: 899405 - DNA, 15 bp, Homo sapiens
tttcgtttgctttta

SEQ ID NO: 899406 - DNA, 15 bp, Homo sapiens
ttcgtttgcttttaa

SEQ ID NO: 899407 - DNA, 15 bp, Homo sapiens
tcgtttgcttttaat

SEQ ID NO: 899408 - DNA, 15 bp, Homo sapiens
cgtttgcttttaatc

SEQ ID NO: 899409 - DNA, 15 bp, Homo sapiens
gtttgcttttaatca

SEQ ID NO: 899410 - DNA, 15 bp, Homo sapiens
tttgcttttaatcag

SEQ ID NO: 899411 - DNA, 15 bp, Homo sapiens
ttgcttttaatcaga

SEQ ID NO: 899412 - DNA, 15 bp, Homo sapiens
tgcttttaatcagaa

SEQ ID NO: 899413 - DNA, 15 bp, Homo sapiens
gcttttaatcagaaa

SEQ ID NO: 899414 - DNA, 15 bp, Homo sapiens
cttttaatcagaaaa

SEQ ID NO: 899415 - DNA, 15 bp, Homo sapiens
ttttaatcagaaaag

SEQ ID NO: 899416 - DNA, 15 bp, Homo sapiens
tttaatcagaaaagc

SEQ ID NO: 899417 - DNA, 15 bp, Homo sapiens
ttaatcagaaaagcc

SEQ ID NO: 899418 - DNA, 15 bp, Homo sapiens
taatcagaaaagcca

SEQ ID NO: 899419 - DNA, 15 bp, Homo sapiens
aatcagaaaagccat

SEQ ID NO: 899420 - DNA, 15 bp, Homo sapiens
atcagaaaagccatg

SEQ ID NO: 899421 - DNA, 15 bp, Homo sapiens
tcagaaaagccatgg

SEQ ID NO: 899422 - DNA, 15 bp, Homo sapiens
cagaaaagccatggt

SEQ ID NO: 899423 - DNA, 15 bp, Homo sapiens
agaaaagccatggta

SEQ ID NO: 899424 - DNA, 15 bp, Homo sapiens
gaaaagccatggtag

SEQ ID NO: 899425 - DNA, 15 bp, Homo sapiens
aaaagccatggtaga

SEQ ID NO: 899426 - DNA, 15 bp, Homo sapiens
aaagccatggtagat

SEQ ID NO: 899427 - DNA, 15 bp, Homo sapiens
aagccatggtagatg

SEQ ID NO: 899428 - DNA, 15 bp, Homo sapiens
agccatggtagatgc

SEQ ID NO: 899429 - DNA, 15 bp, Homo sapiens
gccatggtagatgcc

SEQ ID NO: 899430 - DNA, 15 bp, Homo sapiens
ccatggtagatgcca

SEQ ID NO: 899431 - DNA, 15 bp, Homo sapiens
catggtagatgccat

SEQ ID NO: 899432 - DNA, 15 bp, Homo sapiens
atggtagatgccatt

SEQ ID NO: 899433 - DNA, 15 bp, Homo sapiens
tggtagatgccattt

SEQ ID NO: 899434 - DNA, 15 bp, Homo sapiens
ggtagatgccatttt

SEQ ID NO: 899435 - DNA, 15 bp, Homo sapiens
gtagatgccattttg

SEQ ID NO: 899436 - DNA, 15 bp, Homo sapiens
tagatgccattttgg

SEQ ID NO: 899437 - DNA, 15 bp, Homo sapiens
agatgccattttgga

SEQ ID NO: 899438 - DNA, 15 bp, Homo sapiens
gatgccattttggaa

SEQ ID NO: 899439 - DNA, 15 bp, Homo sapiens
atgccattttggaaa

SEQ ID NO: 899440 - DNA, 15 bp, Homo sapiens
tgccattttggaaaa

SEQ ID NO: 899441 - DNA, 15 bp, Homo sapiens
gccattttggaaaag

SEQ ID NO: 899442 - DNA, 15 bp, Homo sapiens
ccattttggaaaagt

SEQ ID NO: 899443 - DNA, 15 bp, Homo sapiens
cattttggaaaagtt

SEQ ID NO: 899444 - DNA, 15 bp, Homo sapiens
attttggaaaagttg

SEQ ID NO: 899445 - DNA, 15 bp, Homo sapiens
ttttggaaaagttga

SEQ ID NO: 899446 - DNA, 15 bp, Homo sapiens
tttggaaaagttgaa

SEQ ID NO: 899447 - DNA, 15 bp, Homo sapiens
ttggaaaagttgaaa

SEQ ID NO: 899448 - DNA, 15 bp, Homo sapiens
tggaaaagttgaaag

SEQ ID NO: 899449 - DNA, 15 bp, Homo sapiens
ggaaaagttgaaaga

SEQ ID NO: 899450 - DNA, 15 bp, Homo sapiens
gaaaagttgaaagag

SEQ ID NO: 899451 - DNA, 15 bp, Homo sapiens
aaaagttgaaagagt

SEQ ID NO: 899452 - DNA, 15 bp, Homo sapiens
aaagttgaaagagtg

SEQ ID NO: 899453 - DNA, 15 bp, Homo sapiens
aagttgaaagagtgt

SEQ ID NO: 899454 - DNA, 15 bp, Homo sapiens
agttgaaagagtgtg

SEQ ID NO: 899455 - DNA, 15 bp, Homo sapiens
gttgaaagagtgtgt

SEQ ID NO: 899456 - DNA, 15 bp, Homo sapiens
ttgaaagagtgtgtc

SEQ ID NO: 899457 - DNA, 15 bp, Homo sapiens
tgaaagagtgtgtcc

SEQ ID NO: 899458 - DNA, 15 bp, Homo sapiens
gaaagagtgtgtccc

SEQ ID NO: 899459 - DNA, 15 bp, Homo sapiens
aaagagtgtgtcccc

SEQ ID NO: 899460 - DNA, 15 bp, Homo sapiens
aagagtgtgtccccc

SEQ ID NO: 899461 - DNA, 15 bp, Homo sapiens
agagtgtgtccccct

SEQ ID NO: 899462 - DNA, 15 bp, Homo sapiens
gagtgtgtccccctc

SEQ ID NO: 899463 - DNA, 15 bp, Homo sapiens
agtgtgtccccctca

SEQ ID NO: 899464 - DNA, 15 bp, Homo sapiens
gtgtgtccccctcac

SEQ ID NO: 899465 - DNA, 15 bp, Homo sapiens
tgtgtccccctcaca

SEQ ID NO: 899466 - DNA, 15 bp, Homo sapiens
gtgtccccctcacag

SEQ ID NO: 899467 - DNA, 15 bp, Homo sapiens
tgtccccctcacaga

SEQ ID NO: 899468 - DNA, 15 bp, Homo sapiens
gtccccctcacagaa

SEQ ID NO: 899469 - DNA, 15 bp, Homo sapiens
tccccctcacagaaa

SEQ ID NO: 899470 - DNA, 15 bp, Homo sapiens
ccccctcacagaaaa

SEQ ID NO: 899471 - DNA, 15 bp, Homo sapiens
cccctcacagaaaaa

SEQ ID NO: 899472 - DNA, 15 bp, Homo sapiens
ccctcacagaaaaag

SEQ ID NO: 899473 - DNA, 15 bp, Homo sapiens
cctcacagaaaaaga

SEQ ID NO: 899474 - DNA, 15 bp, Homo sapiens
ctcacagaaaaagat

SEQ ID NO: 899475 - DNA, 15 bp, Homo sapiens
tcacagaaaaagatg

SEQ ID NO: 899476 - DNA, 15 bp, Homo sapiens
cacagaaaaagatgg

SEQ ID NO: 899477 - DNA, 15 bp, Homo sapiens
acagaaaaagatgga

SEQ ID NO: 899478 - DNA, 15 bp, Homo sapiens
cagaaaaagatggaa

SEQ ID NO: 899479 - DNA, 15 bp, Homo sapiens
agaaaaagatggaag

SEQ ID NO: 899480 - DNA, 15 bp, Homo sapiens
gaaaaagatggaagt

SEQ ID NO: 899481 - DNA, 15 bp, Homo sapiens
aaaaagatggaagtg

SEQ ID NO: 899482 - DNA, 15 bp, Homo sapiens
aaaagatggaagtgg

SEQ ID NO: 899483 - DNA, 15 bp, Homo sapiens
aaagatggaagtggg

SEQ ID NO: 899484 - DNA, 15 bp, Homo sapiens
aagatggaagtgggt

SEQ ID NO: 899485 - DNA, 15 bp, Homo sapiens
agatggaagtgggtc

SEQ ID NO: 899486 - DNA, 15 bp, Homo sapiens
gatggaagtgggtct

SEQ ID NO: 899487 - DNA, 15 bp, Homo sapiens
atggaagtgggtctg

SEQ ID NO: 899488 - DNA, 15 bp, Homo sapiens
tggaagtgggtctgg

SEQ ID NO: 899489 - DNA, 15 bp, Homo sapiens
ggaagtgggtctggg

SEQ ID NO: 899490 - DNA, 15 bp, Homo sapiens
gaagtgggtctgggg

SEQ ID NO: 899491 - DNA, 15 bp, Homo sapiens
aagtgggtctgggga

SEQ ID NO: 899492 - DNA, 15 bp, Homo sapiens
agtgggtctggggac

SEQ ID NO: 899493 - DNA, 15 bp, Homo sapiens
gtgggtctggggacg

SEQ ID NO: 899494 - DNA, 15 bp, Homo sapiens
tgggtctggggacgg

SEQ ID NO: 899495 - DNA, 15 bp, Homo sapiens
gggtctggggacgga

SEQ ID NO: 899496 - DNA, 15 bp, Homo sapiens
ggtctggggacggag

SEQ ID NO: 899497 - DNA, 15 bp, Homo sapiens
gtctggggacggagt

SEQ ID NO: 899498 - DNA, 15 bp, Homo sapiens
tctggggacggagtt

SEQ ID NO: 899499 - DNA, 15 bp, Homo sapiens
ctggggacggagttg

SEQ ID NO: 899500 - DNA, 15 bp, Homo sapiens
tggggacggagttgg

SEQ ID NO: 899501 - DNA, 15 bp, Homo sapiens
ggggacggagttggg

SEQ ID NO: 899502 - DNA, 15 bp, Homo sapiens
gggacggagttgggt

SEQ ID NO: 899503 - DNA, 15 bp, Homo sapiens
ggacggagttgggtt

SEQ ID NO: 899504 - DNA, 15 bp, Homo sapiens
gacggagttgggttc

SEQ ID NO: 899505 - DNA, 15 bp, Homo sapiens
acggagttgggttcc

SEQ ID NO: 899506 - DNA, 15 bp, Homo sapiens
cggagttgggttcca

SEQ ID NO: 899507 - DNA, 15 bp, Homo sapiens
ggagttgggttccag

SEQ ID NO: 899508 - DNA, 15 bp, Homo sapiens
gagttgggttccagt

SEQ ID NO: 899509 - DNA, 15 bp, Homo sapiens
agttgggttccagtc

SEQ ID NO: 899510 - DNA, 15 bp, Homo sapiens
gttgggttccagtca

SEQ ID NO: 899511 - DNA, 15 bp, Homo sapiens
ttgggttccagtcag

SEQ ID NO: 899512 - DNA, 15 bp, Homo sapiens
tgggttccagtcaga

SEQ ID NO: 899513 - DNA, 15 bp, Homo sapiens
gggttccagtcagag

SEQ ID NO: 899514 - DNA, 15 bp, Homo sapiens
ggttccagtcagaga

SEQ ID NO: 899515 - DNA, 15 bp, Homo sapiens
gttccagtcagagac

SEQ ID NO: 899516 - DNA, 15 bp, Homo sapiens
ttccagtcagagaca

SEQ ID NO: 899517 - DNA, 15 bp, Homo sapiens
tccagtcagagacag

SEQ ID NO: 899518 - DNA, 15 bp, Homo sapiens
ccagtcagagacagg

SEQ ID NO: 899519 - DNA, 15 bp, Homo sapiens
cagtcagagacaggc

SEQ ID NO: 899520 - DNA, 15 bp, Homo sapiens
agtcagagacaggcc

SEQ ID NO: 899521 - DNA, 15 bp, Homo sapiens
gtcagagacaggcca

SEQ ID NO: 899522 - DNA, 15 bp, Homo sapiens
tcagagacaggccat

SEQ ID NO: 899523 - DNA, 15 bp, Homo sapiens
cagagacaggccatt

SEQ ID NO: 899524 - DNA, 15 bp, Homo sapiens
agagacaggccattc

SEQ ID NO: 899525 - DNA, 15 bp, Homo sapiens
gagacaggccattca

SEQ ID NO: 899526 - DNA, 15 bp, Homo sapiens
agacaggccattcag

SEQ ID NO: 899527 - DNA, 15 bp, Homo sapiens
gacaggccattcaga

SEQ ID NO: 899528 - DNA, 15 bp, Homo sapiens
acaggccattcagaa

SEQ ID NO: 899529 - DNA, 15 bp, Homo sapiens
caggccattcagaac

SEQ ID NO: 899530 - DNA, 15 bp, Homo sapiens
aggccattcagaaca

SEQ ID NO: 899531 - DNA, 15 bp, Homo sapiens
ggccattcagaacac

SEQ ID NO: 899532 - DNA, 15 bp, Homo sapiens
gccattcagaacaca

SEQ ID NO: 899533 - DNA, 15 bp, Homo sapiens
ccattcagaacacac

SEQ ID NO: 899534 - DNA, 15 bp, Homo sapiens
cattcagaacacaca

SEQ ID NO: 899535 - DNA, 15 bp, Homo sapiens
attcagaacacacaa

SEQ ID NO: 899536 - DNA, 15 bp, Homo sapiens
ttcagaacacacaat

SEQ ID NO: 899537 - DNA, 15 bp, Homo sapiens
tcagaacacacaatc

SEQ ID NO: 899538 - DNA, 15 bp, Homo sapiens
cagaacacacaatct

SEQ ID NO: 899539 - DNA, 15 bp, Homo sapiens
agaacacacaatctt

SEQ ID NO: 899540 - DNA, 15 bp, Homo sapiens
gaacacacaatctta

SEQ ID NO: 899541 - DNA, 15 bp, Homo sapiens
aacacacaatcttaa

SEQ ID NO: 899542 - DNA, 15 bp, Homo sapiens
acacacaatcttaaa

SEQ ID NO: 899543 - DNA, 15 bp, Homo sapiens
cacacaatcttaaaa

SEQ ID NO: 899544 - DNA, 15 bp, Homo sapiens
acacaatcttaaaaa

SEQ ID NO: 899545 - DNA, 15 bp, Homo sapiens
cacaatcttaaaaac

SEQ ID NO: 899546 - DNA, 15 bp, Homo sapiens
acaatcttaaaaacc

SEQ ID NO: 899547 - DNA, 15 bp, Homo sapiens
caatcttaaaaaccc

SEQ ID NO: 899548 - DNA, 15 bp, Homo sapiens
aatcttaaaaacccc

SEQ ID NO: 899549 - DNA, 15 bp, Homo sapiens
atcttaaaaacccct

SEQ ID NO: 899550 - DNA, 15 bp, Homo sapiens
tcttaaaaacccctc

SEQ ID NO: 899551 - DNA, 15 bp, Homo sapiens
cttaaaaacccctct

SEQ ID NO: 899552 - DNA, 15 bp, Homo sapiens
ttaaaaacccctctg

SEQ ID NO: 899553 - DNA, 15 bp, Homo sapiens
taaaaacccctctgg

SEQ ID NO: 899554 - DNA, 15 bp, Homo sapiens
aaaaacccctctggg

SEQ ID NO: 899555 - DNA, 15 bp, Homo sapiens
aaaacccctctgggc

SEQ ID NO: 899556 - DNA, 15 bp, Homo sapiens
aaacccctctgggcc

SEQ ID NO: 899557 - DNA, 15 bp, Homo sapiens
aacccctctgggccg

SEQ ID NO: 899558 - DNA, 15 bp, Homo sapiens
acccctctgggccgg

SEQ ID NO: 899559 - DNA, 15 bp, Homo sapiens
cccctctgggccggg

SEQ ID NO: 899560 - DNA, 15 bp, Homo sapiens
ccctctgggccgggc

SEQ ID NO: 899561 - DNA, 15 bp, Homo sapiens
cctctgggccgggcg

SEQ ID NO: 899562 - DNA, 15 bp, Homo sapiens
ctctgggccgggcgc

SEQ ID NO: 899563 - DNA, 15 bp, Homo sapiens
tctgggccgggcgcg

SEQ ID NO: 899564 - DNA, 15 bp, Homo sapiens
ctgggccgggcgcgg

SEQ ID NO: 899565 - DNA, 15 bp, Homo sapiens
tgggccgggcgcggt

SEQ ID NO: 899566 - DNA, 15 bp, Homo sapiens
gggccgggcgcggtg

SEQ ID NO: 899567 - DNA, 15 bp, Homo sapiens
ggccgggcgcggtgg

SEQ ID NO: 899568 - DNA, 15 bp, Homo sapiens
gccgggcgcggtggc

SEQ ID NO: 899569 - DNA, 15 bp, Homo sapiens
ccgggcgcggtggct

SEQ ID NO: 899570 - DNA, 15 bp, Homo sapiens
cgggcgcggtggctc

SEQ ID NO: 899571 - DNA, 15 bp, Homo sapiens
gggcgcggtggctca

SEQ ID NO: 899572 - DNA, 15 bp, Homo sapiens
ggcgcggtggctcac

SEQ ID NO: 899573 - DNA, 15 bp, Homo sapiens
gcgcggtggctcact

SEQ ID NO: 899574 - DNA, 15 bp, Homo sapiens
cgcggtggctcactc

SEQ ID NO: 899575 - DNA, 15 bp, Homo sapiens
gcggtggctcactcc

SEQ ID NO: 899576 - DNA, 15 bp, Homo sapiens
cggtggctcactcct

SEQ ID NO: 899577 - DNA, 15 bp, Homo sapiens
ggtggctcactcctg

SEQ ID NO: 899578 - DNA, 15 bp, Homo sapiens
gtggctcactcctgt

SEQ ID NO: 899579 - DNA, 15 bp, Homo sapiens
tggctcactcctgta

SEQ ID NO: 899580 - DNA, 15 bp, Homo sapiens
ggctcactcctgtaa

SEQ ID NO: 899581 - DNA, 15 bp, Homo sapiens
gctcactcctgtaat

SEQ ID NO: 899582 - DNA, 15 bp, Homo sapiens
ctcactcctgtaatc

SEQ ID NO: 899583 - DNA, 15 bp, Homo sapiens
tcactcctgtaatcc

SEQ ID NO: 899584 - DNA, 15 bp, Homo sapiens
cactcctgtaatccc

SEQ ID NO: 899585 - DNA, 15 bp, Homo sapiens
actcctgtaatccca

SEQ ID NO: 899586 - DNA, 15 bp, Homo sapiens
ctcctgtaatcccag

SEQ ID NO: 899587 - DNA, 15 bp, Homo sapiens
tcctgtaatcccagc

SEQ ID NO: 899588 - DNA, 15 bp, Homo sapiens
cctgtaatcccagca

SEQ ID NO: 899589 - DNA, 15 bp, Homo sapiens
ctgtaatcccagcac

SEQ ID NO: 899590 - DNA, 15 bp, Homo sapiens
tgtaatcccagcact

SEQ ID NO: 899591 - DNA, 15 bp, Homo sapiens
gtaatcccagcactt

SEQ ID NO: 899592 - DNA, 15 bp, Homo sapiens
taatcccagcacttt

SEQ ID NO: 899593 - DNA, 15 bp, Homo sapiens
aatcccagcactttg

SEQ ID NO: 899594 - DNA, 15 bp, Homo sapiens
atcccagcactttgg

SEQ ID NO: 899595 - DNA, 15 bp, Homo sapiens
tcccagcactttggg

SEQ ID NO: 899596 - DNA, 15 bp, Homo sapiens
cccagcactttggga

SEQ ID NO: 899597 - DNA, 15 bp, Homo sapiens
ccagcactttgggag

SEQ ID NO: 899598 - DNA, 15 bp, Homo sapiens
cagcactttgggagg

SEQ ID NO: 899599 - DNA, 15 bp, Homo sapiens
agcactttgggaggc

SEQ ID NO: 899600 - DNA, 15 bp, Homo sapiens
gcactttgggaggcc

SEQ ID NO: 899601 - DNA, 15 bp, Homo sapiens
cactttgggaggccg

SEQ ID NO: 899602 - DNA, 15 bp, Homo sapiens
actttgggaggccga

SEQ ID NO: 899603 - DNA, 15 bp, Homo sapiens
ctttgggaggccgag

SEQ ID NO: 899604 - DNA, 15 bp, Homo sapiens
tttgggaggccgagg

SEQ ID NO: 899605 - DNA, 15 bp, Homo sapiens
ttgggaggccgaggc

SEQ ID NO: 899606 - DNA, 15 bp, Homo sapiens
tgggaggccgaggct

SEQ ID NO: 899607 - DNA, 15 bp, Homo sapiens
gggaggccgaggctg

SEQ ID NO: 899608 - DNA, 15 bp, Homo sapiens
ggaggccgaggctgg

SEQ ID NO: 899609 - DNA, 15 bp, Homo sapiens
gaggccgaggctggt

SEQ ID NO: 899610 - DNA, 15 bp, Homo sapiens
aggccgaggctggtg

SEQ ID NO: 899611 - DNA, 15 bp, Homo sapiens
ggccgaggctggtgg

SEQ ID NO: 899612 - DNA, 15 bp, Homo sapiens
gccgaggctggtgga

SEQ ID NO: 899613 - DNA, 15 bp, Homo sapiens
ccgaggctggtggat

SEQ ID NO: 899614 - DNA, 15 bp, Homo sapiens
cgaggctggtggatc

SEQ ID NO: 899615 - DNA, 15 bp, Homo sapiens
gaggctggtggatca

SEQ ID NO: 899616 - DNA, 15 bp, Homo sapiens
aggctggtggatcac

SEQ ID NO: 899617 - DNA, 15 bp, Homo sapiens
ggctggtggatcacg

SEQ ID NO: 899618 - DNA, 15 bp, Homo sapiens
gctggtggatcacga

SEQ ID NO: 899619 - DNA, 15 bp, Homo sapiens
ctggtggatcacgag

SEQ ID NO: 899620 - DNA, 15 bp, Homo sapiens
tggtggatcacgagg

SEQ ID NO: 899621 - DNA, 15 bp, Homo sapiens
ggtggatcacgaggt

SEQ ID NO: 899622 - DNA, 15 bp, Homo sapiens
gtggatcacgaggtc

SEQ ID NO: 899623 - DNA, 15 bp, Homo sapiens
tggatcacgaggtca

SEQ ID NO: 899624 - DNA, 15 bp, Homo sapiens
ggatcacgaggtcag

SEQ ID NO: 899625 - DNA, 15 bp, Homo sapiens
gatcacgaggtcagg

SEQ ID NO: 899626 - DNA, 15 bp, Homo sapiens
atcacgaggtcagga

SEQ ID NO: 899627 - DNA, 15 bp, Homo sapiens
tcacgaggtcaggag

SEQ ID NO: 899628 - DNA, 15 bp, Homo sapiens
cacgaggtcaggaga

SEQ ID NO: 899629 - DNA, 15 bp, Homo sapiens
acgaggtcaggagat

SEQ ID NO: 899630 - DNA, 15 bp, Homo sapiens
cgaggtcaggagatc

SEQ ID NO: 899631 - DNA, 15 bp, Homo sapiens
gaggtcaggagatca

SEQ ID NO: 899632 - DNA, 15 bp, Homo sapiens
aggtcaggagatcaa

SEQ ID NO: 899633 - DNA, 15 bp, Homo sapiens
ggtcaggagatcaag

SEQ ID NO: 899634 - DNA, 15 bp, Homo sapiens
gtcaggagatcaaga

SEQ ID NO: 899635 - DNA, 15 bp, Homo sapiens
tcaggagatcaagac

SEQ ID NO: 899636 - DNA, 15 bp, Homo sapiens
caggagatcaagacc

SEQ ID NO: 899637 - DNA, 15 bp, Homo sapiens
aggagatcaagacca

SEQ ID NO: 899638 - DNA, 15 bp, Homo sapiens
ggagatcaagaccat

SEQ ID NO: 899639 - DNA, 15 bp, Homo sapiens
gagatcaagaccatc

SEQ ID NO: 899640 - DNA, 15 bp, Homo sapiens
agatcaagaccatcc

SEQ ID NO: 899641 - DNA, 15 bp, Homo sapiens
gatcaagaccatcct

SEQ ID NO: 899642 - DNA, 15 bp, Homo sapiens
atcaagaccatcctg

SEQ ID NO: 899643 - DNA, 15 bp, Homo sapiens
tcaagaccatcctgg

SEQ ID NO: 899644 - DNA, 15 bp, Homo sapiens
caagaccatcctggc

SEQ ID NO: 899645 - DNA, 15 bp, Homo sapiens
aagaccatcctggct

SEQ ID NO: 899646 - DNA, 15 bp, Homo sapiens
agaccatcctggcta

SEQ ID NO: 899647 - DNA, 15 bp, Homo sapiens
gaccatcctggctaa

SEQ ID NO: 899648 - DNA, 15 bp, Homo sapiens
accatcctggctaac

SEQ ID NO: 899649 - DNA, 15 bp, Homo sapiens
ccatcctggctaaca

SEQ ID NO: 899650 - DNA, 15 bp, Homo sapiens
catcctggctaacat

SEQ ID NO: 899651 - DNA, 15 bp, Homo sapiens
atcctggctaacatg

SEQ ID NO: 899652 - DNA, 15 bp, Homo sapiens
tcctggctaacatgg

SEQ ID NO: 899653 - DNA, 15 bp, Homo sapiens
cctggctaacatggt

SEQ ID NO: 899654 - DNA, 15 bp, Homo sapiens
ctggctaacatggtg

SEQ ID NO: 899655 - DNA, 15 bp, Homo sapiens
tggctaacatggtga

SEQ ID NO: 899656 - DNA, 15 bp, Homo sapiens
ggctaacatggtgaa

SEQ ID NO: 899657 - DNA, 15 bp, Homo sapiens
gctaacatggtgaaa

SEQ ID NO: 899658 - DNA, 15 bp, Homo sapiens
ctaacatggtgaaac

SEQ ID NO: 899659 - DNA, 15 bp, Homo sapiens
taacatggtgaaacc

SEQ ID NO: 899660 - DNA, 15 bp, Homo sapiens
aacatggtgaaaccc

SEQ ID NO: 899661 - DNA, 15 bp, Homo sapiens
acatggtgaaacccc

SEQ ID NO: 899662 - DNA, 15 bp, Homo sapiens
catggtgaaaccccg

SEQ ID NO: 899663 - DNA, 15 bp, Homo sapiens
atggtgaaaccccgt

SEQ ID NO: 899664 - DNA, 15 bp, Homo sapiens
tggtgaaaccccgtc

SEQ ID NO: 899665 - DNA, 15 bp, Homo sapiens
ggtgaaaccccgtct

SEQ ID NO: 899666 - DNA, 15 bp, Homo sapiens
gtgaaaccccgtctc

SEQ ID NO: 899667 - DNA, 15 bp, Homo sapiens
tgaaaccccgtctct

SEQ ID NO: 899668 - DNA, 15 bp, Homo sapiens
gaaaccccgtctcta

SEQ ID NO: 899669 - DNA, 15 bp, Homo sapiens
aaaccccgtctctac

SEQ ID NO: 899670 - DNA, 15 bp, Homo sapiens
aaccccgtctctact

SEQ ID NO: 899671 - DNA, 15 bp, Homo sapiens
accccgtctctacta

SEQ ID NO: 899672 - DNA, 15 bp, Homo sapiens
ccccgtctctactaa

SEQ ID NO: 899673 - DNA, 15 bp, Homo sapiens
cccgtctctactaaa

SEQ ID NO: 899674 - DNA, 15 bp, Homo sapiens
ccgtctctactaaaa

SEQ ID NO: 899675 - DNA, 15 bp, Homo sapiens
cgtctctactaaaaa

SEQ ID NO: 899676 - DNA, 15 bp, Homo sapiens
gtctctactaaaaat

SEQ ID NO: 899677 - DNA, 15 bp, Homo sapiens
tctctactaaaaata

SEQ ID NO: 899678 - DNA, 15 bp, Homo sapiens
ctctactaaaaatac

SEQ ID NO: 899679 - DNA, 15 bp, Homo sapiens
tctactaaaaataca

SEQ ID NO: 899680 - DNA, 15 bp, Homo sapiens
ctactaaaaatacaa

SEQ ID NO: 899681 - DNA, 15 bp, Homo sapiens
tactaaaaatacaaa

SEQ ID NO: 899682 - DNA, 15 bp, Homo sapiens
actaaaaatacaaaa

SEQ ID NO: 899683 - DNA, 15 bp, Homo sapiens
ctaaaaatacaaaaa

SEQ ID NO: 899684 - DNA, 15 bp, Homo sapiens
taaaaatacaaaaaa

SEQ ID NO: 899685 - DNA, 15 bp, Homo sapiens
aaaaatacaaaaaat

SEQ ID NO: 899686 - DNA, 15 bp, Homo sapiens
aaaatacaaaaaatt

SEQ ID NO: 899687 - DNA, 15 bp, Homo sapiens
aaatacaaaaaatta

SEQ ID NO: 899688 - DNA, 15 bp, Homo sapiens
aatacaaaaaattag

SEQ ID NO: 899689 - DNA, 15 bp, Homo sapiens
atacaaaaaattagc

SEQ ID NO: 899690 - DNA, 15 bp, Homo sapiens
tacaaaaaattagcc

SEQ ID NO: 899691 - DNA, 15 bp, Homo sapiens
acaaaaaattagcca

SEQ ID NO: 899692 - DNA, 15 bp, Homo sapiens
caaaaaattagccag

SEQ ID NO: 899693 - DNA, 15 bp, Homo sapiens
aaaaaattagccagg

SEQ ID NO: 899694 - DNA, 15 bp, Homo sapiens
aaaaattagccaggc

SEQ ID NO: 899695 - DNA, 15 bp, Homo sapiens
aaaattagccaggcg

SEQ ID NO: 899696 - DNA, 15 bp, Homo sapiens
aaattagccaggcgt

SEQ ID NO: 899697 - DNA, 15 bp, Homo sapiens
aattagccaggcgtg

SEQ ID NO: 899698 - DNA, 15 bp, Homo sapiens
attagccaggcgtgg

SEQ ID NO: 899699 - DNA, 15 bp, Homo sapiens
ttagccaggcgtggt

SEQ ID NO: 899700 - DNA, 15 bp, Homo sapiens
tagccaggcgtggtg

SEQ ID NO: 899701 - DNA, 15 bp, Homo sapiens
agccaggcgtggtgg

SEQ ID NO: 899702 - DNA, 15 bp, Homo sapiens
gccaggcgtggtggt

SEQ ID NO: 899703 - DNA, 15 bp, Homo sapiens
ccaggcgtggtggtg

SEQ ID NO: 899704 - DNA, 15 bp, Homo sapiens
caggcgtggtggtgg

SEQ ID NO: 899705 - DNA, 15 bp, Homo sapiens
aggcgtggtggtggg

SEQ ID NO: 899706 - DNA, 15 bp, Homo sapiens
ggcgtggtggtgggc

SEQ ID NO: 899707 - DNA, 15 bp, Homo sapiens
gcgtggtggtgggca

SEQ ID NO: 899708 - DNA, 15 bp, Homo sapiens
cgtggtggtgggcac

SEQ ID NO: 899709 - DNA, 15 bp, Homo sapiens
gtggtggtgggcacc

SEQ ID NO: 899710 - DNA, 15 bp, Homo sapiens
tggtggtgggcacct

SEQ ID NO: 899711 - DNA, 15 bp, Homo sapiens
ggtggtgggcacctg

SEQ ID NO: 899712 - DNA, 15 bp, Homo sapiens
gtggtgggcacctgt

SEQ ID NO: 899713 - DNA, 15 bp, Homo sapiens
tggtgggcacctgtg

SEQ ID NO: 899714 - DNA, 15 bp, Homo sapiens
ggtgggcacctgtgg

SEQ ID NO: 899715 - DNA, 15 bp, Homo sapiens
gtgggcacctgtggt

SEQ ID NO: 899716 - DNA, 15 bp, Homo sapiens
tgggcacctgtggtc

SEQ ID NO: 899717 - DNA, 15 bp, Homo sapiens
gggcacctgtggtcc

SEQ ID NO: 899718 - DNA, 15 bp, Homo sapiens
ggcacctgtggtccc

SEQ ID NO: 899719 - DNA, 15 bp, Homo sapiens
gcacctgtggtccca

SEQ ID NO: 899720 - DNA, 15 bp, Homo sapiens
cacctgtggtcccag

SEQ ID NO: 899721 - DNA, 15 bp, Homo sapiens
acctgtggtcccagc

SEQ ID NO: 899722 - DNA, 15 bp, Homo sapiens
cctgtggtcccagct

SEQ ID NO: 899723 - DNA, 15 bp, Homo sapiens
ctgtggtcccagcta

SEQ ID NO: 899724 - DNA, 15 bp, Homo sapiens
tgtggtcccagctac

SEQ ID NO: 899725 - DNA, 15 bp, Homo sapiens
gtggtcccagctact

SEQ ID NO: 899726 - DNA, 15 bp, Homo sapiens
tggtcccagctactc

SEQ ID NO: 899727 - DNA, 15 bp, Homo sapiens
ggtcccagctactca

SEQ ID NO: 899728 - DNA, 15 bp, Homo sapiens
gtcccagctactcag

SEQ ID NO: 899729 - DNA, 15 bp, Homo sapiens
tcccagctactcagg

SEQ ID NO: 899730 - DNA, 15 bp, Homo sapiens
cccagctactcagga

SEQ ID NO: 899731 - DNA, 15 bp, Homo sapiens
ccagctactcaggag

SEQ ID NO: 899732 - DNA, 15 bp, Homo sapiens
cagctactcaggagg

SEQ ID NO: 899733 - DNA, 15 bp, Homo sapiens
agctactcaggaggc

SEQ ID NO: 899734 - DNA, 15 bp, Homo sapiens
gctactcaggaggct

SEQ ID NO: 899735 - DNA, 15 bp, Homo sapiens
ctactcaggaggctg

SEQ ID NO: 899736 - DNA, 15 bp, Homo sapiens
tactcaggaggctga

SEQ ID NO: 899737 - DNA, 15 bp, Homo sapiens
actcaggaggctgag

SEQ ID NO: 899738 - DNA, 15 bp, Homo sapiens
ctcaggaggctgagg

SEQ ID NO: 899739 - DNA, 15 bp, Homo sapiens
tcaggaggctgaggc

SEQ ID NO: 899740 - DNA, 15 bp, Homo sapiens
caggaggctgaggca

SEQ ID NO: 899741 - DNA, 15 bp, Homo sapiens
aggaggctgaggcag

SEQ ID NO: 899742 - DNA, 15 bp, Homo sapiens
ggaggctgaggcagg

SEQ ID NO: 899743 - DNA, 15 bp, Homo sapiens
gaggctgaggcagga

SEQ ID NO: 899744 - DNA, 15 bp, Homo sapiens
aggctgaggcaggag

SEQ ID NO: 899745 - DNA, 15 bp, Homo sapiens
ggctgaggcaggaga

SEQ ID NO: 899746 - DNA, 15 bp, Homo sapiens
gctgaggcaggagaa

SEQ ID NO: 899747 - DNA, 15 bp, Homo sapiens
ctgaggcaggagaat

SEQ ID NO: 899748 - DNA, 15 bp, Homo sapiens
tgaggcaggagaatg

SEQ ID NO: 899749 - DNA, 15 bp, Homo sapiens
gaggcaggagaatgg

SEQ ID NO: 899750 - DNA, 15 bp, Homo sapiens
aggcaggagaatggc

SEQ ID NO: 899751 - DNA, 15 bp, Homo sapiens
ggcaggagaatggcg

SEQ ID NO: 899752 - DNA, 15 bp, Homo sapiens
gcaggagaatggcgt

SEQ ID NO: 899753 - DNA, 15 bp, Homo sapiens
caggagaatggcgtg

SEQ ID NO: 899754 - DNA, 15 bp, Homo sapiens
aggagaatggcgtga

SEQ ID NO: 899755 - DNA, 15 bp, Homo sapiens
ggagaatggcgtgaa

SEQ ID NO: 899756 - DNA, 15 bp, Homo sapiens
gagaatggcgtgaac

SEQ ID NO: 899757 - DNA, 15 bp, Homo sapiens
agaatggcgtgaacc

SEQ ID NO: 899758 - DNA, 15 bp, Homo sapiens
gaatggcgtgaaccc

SEQ ID NO: 899759 - DNA, 15 bp, Homo sapiens
aatggcgtgaacccg

SEQ ID NO: 899760 - DNA, 15 bp, Homo sapiens
atggcgtgaacccgg

SEQ ID NO: 899761 - DNA, 15 bp, Homo sapiens
tggcgtgaacccggg

SEQ ID NO: 899762 - DNA, 15 bp, Homo sapiens
ggcgtgaacccgggg

SEQ ID NO: 899763 - DNA, 15 bp, Homo sapiens
gcgtgaacccggggt

SEQ ID NO: 899764 - DNA, 15 bp, Homo sapiens
cgtgaacccggggtt

SEQ ID NO: 899765 - DNA, 15 bp, Homo sapiens
gtgaacccggggttc

SEQ ID NO: 899766 - DNA, 15 bp, Homo sapiens
tgaacccggggttcg

SEQ ID NO: 899767 - DNA, 15 bp, Homo sapiens
gaacccggggttcgg

SEQ ID NO: 899768 - DNA, 15 bp, Homo sapiens
aacccggggttcgga

SEQ ID NO: 899769 - DNA, 15 bp, Homo sapiens
acccggggttcggag

SEQ ID NO: 899770 - DNA, 15 bp, Homo sapiens
cccggggttcggagc

SEQ ID NO: 899771 - DNA, 15 bp, Homo sapiens
ccggggttcggagct

SEQ ID NO: 899772 - DNA, 15 bp, Homo sapiens
cggggttcggagctt

SEQ ID NO: 899773 - DNA, 15 bp, Homo sapiens
ggggttcggagcttg

SEQ ID NO: 899774 - DNA, 15 bp, Homo sapiens
gggttcggagcttgc

SEQ ID NO: 899775 - DNA, 15 bp, Homo sapiens
ggttcggagcttgca

SEQ ID NO: 899776 - DNA, 15 bp, Homo sapiens
gttcggagcttgcag

SEQ ID NO: 899777 - DNA, 15 bp, Homo sapiens
ttcggagcttgcagt

SEQ ID NO: 899778 - DNA, 15 bp, Homo sapiens
tcggagcttgcagtg

SEQ ID NO: 899779 - DNA, 15 bp, Homo sapiens
cggagcttgcagtga

SEQ ID NO: 899780 - DNA, 15 bp, Homo sapiens
ggagcttgcagtgag

SEQ ID NO: 899781 - DNA, 15 bp, Homo sapiens
gagcttgcagtgagc

SEQ ID NO: 899782 - DNA, 15 bp, Homo sapiens
agcttgcagtgagcc

SEQ ID NO: 899783 - DNA, 15 bp, Homo sapiens
gcttgcagtgagccg

SEQ ID NO: 899784 - DNA, 15 bp, Homo sapiens
cttgcagtgagccga

SEQ ID NO: 899785 - DNA, 15 bp, Homo sapiens
ttgcagtgagccgag

SEQ ID NO: 899786 - DNA, 15 bp, Homo sapiens
tgcagtgagccgaga

SEQ ID NO: 899787 - DNA, 15 bp, Homo sapiens
gcagtgagccgagat

SEQ ID NO: 899788 - DNA, 15 bp, Homo sapiens
cagtgagccgagatt

SEQ ID NO: 899789 - DNA, 15 bp, Homo sapiens
agtgagccgagattg

SEQ ID NO: 899790 - DNA, 15 bp, Homo sapiens
gtgagccgagattgt

SEQ ID NO: 899791 - DNA, 15 bp, Homo sapiens
tgagccgagattgtg

SEQ ID NO: 899792 - DNA, 15 bp, Homo sapiens
gagccgagattgtgc

SEQ ID NO: 899793 - DNA, 15 bp, Homo sapiens
agccgagattgtgcc

SEQ ID NO: 899794 - DNA, 15 bp, Homo sapiens
gccgagattgtgcca

SEQ ID NO: 899795 - DNA, 15 bp, Homo sapiens
ccgagattgtgccac

SEQ ID NO: 899796 - DNA, 15 bp, Homo sapiens
cgagattgtgccact

SEQ ID NO: 899797 - DNA, 15 bp, Homo sapiens
gagattgtgccactg

SEQ ID NO: 899798 - DNA, 15 bp, Homo sapiens
agattgtgccactgc

SEQ ID NO: 899799 - DNA, 15 bp, Homo sapiens
gattgtgccactgca

SEQ ID NO: 899800 - DNA, 15 bp, Homo sapiens
attgtgccactgcac

SEQ ID NO: 899801 - DNA, 15 bp, Homo sapiens
ttgtgccactgcact

SEQ ID NO: 899802 - DNA, 15 bp, Homo sapiens
tgtgccactgcactc

SEQ ID NO: 899803 - DNA, 15 bp, Homo sapiens
gtgccactgcactcc

SEQ ID NO: 899804 - DNA, 15 bp, Homo sapiens
tgccactgcactcca

SEQ ID NO: 899805 - DNA, 15 bp, Homo sapiens
gccactgcactccag

SEQ ID NO: 899806 - DNA, 15 bp, Homo sapiens
ccactgcactccagc

SEQ ID NO: 899807 - DNA, 15 bp, Homo sapiens
cactgcactccagcc

SEQ ID NO: 899808 - DNA, 15 bp, Homo sapiens
actgcactccagcct

SEQ ID NO: 899809 - DNA, 15 bp, Homo sapiens
ctgcactccagcctg

SEQ ID NO: 899810 - DNA, 15 bp, Homo sapiens
gcactccagcctggt

SEQ ID NO: 899811 - DNA, 15 bp, Homo sapiens
cactccagcctggtg

SEQ ID NO: 899812 - DNA, 15 bp, Homo sapiens
actccagcctggtga

SEQ ID NO: 899813 - DNA, 15 bp, Homo sapiens
ctccagcctggtgat

SEQ ID NO: 899814 - DNA, 15 bp, Homo sapiens
tccagcctggtgata

SEQ ID NO: 899815 - DNA, 15 bp, Homo sapiens
ccagcctggtgatag

SEQ ID NO: 899816 - DNA, 15 bp, Homo sapiens
cagcctggtgataga

SEQ ID NO: 899817 - DNA, 15 bp, Homo sapiens
agcctggtgatagaa

SEQ ID NO: 899818 - DNA, 15 bp, Homo sapiens
gcctggtgatagaac

SEQ ID NO: 899819 - DNA, 15 bp, Homo sapiens
cctggtgatagaaca

SEQ ID NO: 899820 - DNA, 15 bp, Homo sapiens
ctggtgatagaacaa

SEQ ID NO: 899821 - DNA, 15 bp, Homo sapiens
tggtgatagaacaag

SEQ ID NO: 899822 - DNA, 15 bp, Homo sapiens
ggtgatagaacaaga

SEQ ID NO: 899823 - DNA, 15 bp, Homo sapiens
gtgatagaacaagac

SEQ ID NO: 899824 - DNA, 15 bp, Homo sapiens
tgatagaacaagact

SEQ ID NO: 899825 - DNA, 15 bp, Homo sapiens
gatagaacaagactc

SEQ ID NO: 899826 - DNA, 15 bp, Homo sapiens
atagaacaagactcc

SEQ ID NO: 899827 - DNA, 15 bp, Homo sapiens
tagaacaagactccg

SEQ ID NO: 899828 - DNA, 15 bp, Homo sapiens
agaacaagactccgt

SEQ ID NO: 899829 - DNA, 15 bp, Homo sapiens
gaacaagactccgtc

SEQ ID NO: 899830 - DNA, 15 bp, Homo sapiens
aacaagactccgtct

SEQ ID NO: 899831 - DNA, 15 bp, Homo sapiens
acaagactccgtctc

SEQ ID NO: 899832 - DNA, 15 bp, Homo sapiens
caagactccgtctca

SEQ ID NO: 899833 - DNA, 15 bp, Homo sapiens
aagactccgtctcaa

SEQ ID NO: 899834 - DNA, 15 bp, Homo sapiens
agactccgtctcaaa

SEQ ID NO: 899835 - DNA, 15 bp, Homo sapiens
gactccgtctcaaaa

SEQ ID NO: 899836 - DNA, 15 bp, Homo sapiens
actccgtctcaaaaa

SEQ ID NO: 899837 - DNA, 15 bp, Homo sapiens
ctccgtctcaaaaaa

SEQ ID NO: 899838 - DNA, 15 bp, Homo sapiens
tccgtctcaaaaaaa

SEQ ID NO: 899839 - DNA, 15 bp, Homo sapiens
ccgtctcaaaaaaaa

SEQ ID NO: 899840 - DNA, 15 bp, Homo sapiens
cgtctcaaaaaaaaa

SEQ ID NO: 899841 - DNA, 15 bp, Homo sapiens
gtctcaaaaaaaaaa

SEQ ID NO: 899842 - DNA, 15 bp, Homo sapiens
tctcaaaaaaaaaac

SEQ ID NO: 899843 - DNA, 15 bp, Homo sapiens
ctcaaaaaaaaaaca

SEQ ID NO: 899844 - DNA, 15 bp, Homo sapiens
tcaaaaaaaaaacaa

SEQ ID NO: 899845 - DNA, 15 bp, Homo sapiens
caaaaaaaaaacaaa

SEQ ID NO: 899846 - DNA, 15 bp, Homo sapiens
aaaaaaaaaacaaaa

SEQ ID NO: 899847 - DNA, 15 bp, Homo sapiens
aaaaaaaaacaaaaa

SEQ ID NO: 899848 - DNA, 15 bp, Homo sapiens
aaaaaaaacaaaaaa

SEQ ID NO: 899849 - DNA, 15 bp, Homo sapiens
aaaaaaacaaaaaac

SEQ ID NO: 899850 - DNA, 15 bp, Homo sapiens
aaaaaacaaaaaaca

SEQ ID NO: 899851 - DNA, 15 bp, Homo sapiens
aaaaacaaaaaacaa

SEQ ID NO: 899852 - DNA, 15 bp, Homo sapiens
aaaacaaaaaacaaa

SEQ ID NO: 899853 - DNA, 15 bp, Homo sapiens
aaacaaaaaacaaaa

SEQ ID NO: 899854 - DNA, 15 bp, Homo sapiens
aacaaaaaacaaaaa

SEQ ID NO: 899855 - DNA, 15 bp, Homo sapiens
acaaaaaacaaaaaa

SEQ ID NO: 899856 - DNA, 15 bp, Homo sapiens
caaaaaacaaaaaat

SEQ ID NO: 899857 - DNA, 15 bp, Homo sapiens
aaaaaacaaaaaatg

SEQ ID NO: 899858 - DNA, 15 bp, Homo sapiens
aaaaacaaaaaatga

SEQ ID NO: 899859 - DNA, 15 bp, Homo sapiens
aaaacaaaaaatgaa

SEQ ID NO: 899860 - DNA, 15 bp, Homo sapiens
aaacaaaaaatgaaa

SEQ ID NO: 899861 - DNA, 15 bp, Homo sapiens
aacaaaaaatgaaaa

SEQ ID NO: 899862 - DNA, 15 bp, Homo sapiens
acaaaaaatgaaaaa

SEQ ID NO: 899863 - DNA, 15 bp, Homo sapiens
caaaaaatgaaaaac

SEQ ID NO: 899864 - DNA, 15 bp, Homo sapiens
aaaaaatgaaaaaca

SEQ ID NO: 899865 - DNA, 15 bp, Homo sapiens
aaaaatgaaaaacaa

SEQ ID NO: 899866 - DNA, 15 bp, Homo sapiens
aaaatgaaaaacaac

SEQ ID NO: 899867 - DNA, 15 bp, Homo sapiens
aaatgaaaaacaacc

SEQ ID NO: 899868 - DNA, 15 bp, Homo sapiens
aatgaaaaacaaccc

SEQ ID NO: 899869 - DNA, 15 bp, Homo sapiens
atgaaaaacaaccct

SEQ ID NO: 899870 - DNA, 15 bp, Homo sapiens
tgaaaaacaaccctc

SEQ ID NO: 899871 - DNA, 15 bp, Homo sapiens
gaaaaacaaccctct

SEQ ID NO: 899872 - DNA, 15 bp, Homo sapiens
aaaaacaaccctctg

SEQ ID NO: 899873 - DNA, 15 bp, Homo sapiens
aaaacaaccctctgg

SEQ ID NO: 899874 - DNA, 15 bp, Homo sapiens
aaacaaccctctgga

SEQ ID NO: 899875 - DNA, 15 bp, Homo sapiens
aacaaccctctggag

SEQ ID NO: 899876 - DNA, 15 bp, Homo sapiens
acaaccctctggagg

SEQ ID NO: 899877 - DNA, 15 bp, Homo sapiens
caaccctctggagga

SEQ ID NO: 899878 - DNA, 15 bp, Homo sapiens
aaccctctggaggaa

SEQ ID NO: 899879 - DNA, 15 bp, Homo sapiens
accctctggaggaaa

SEQ ID NO: 899880 - DNA, 15 bp, Homo sapiens
ccctctggaggaaag

SEQ ID NO: 899881 - DNA, 15 bp, Homo sapiens
cctctggaggaaagg

SEQ ID NO: 899882 - DNA, 15 bp, Homo sapiens
ctctggaggaaaggt

SEQ ID NO: 899883 - DNA, 15 bp, Homo sapiens
tctggaggaaaggtc

SEQ ID NO: 899884 - DNA, 15 bp, Homo sapiens
ctggaggaaaggtca

SEQ ID NO: 899885 - DNA, 15 bp, Homo sapiens
tggaggaaaggtcat

SEQ ID NO: 899886 - DNA, 15 bp, Homo sapiens
ggaggaaaggtcatg

SEQ ID NO: 899887 - DNA, 15 bp, Homo sapiens
gaggaaaggtcatga

SEQ ID NO: 899888 - DNA, 15 bp, Homo sapiens
aggaaaggtcatgat

SEQ ID NO: 899889 - DNA, 15 bp, Homo sapiens
ggaaaggtcatgata

SEQ ID NO: 899890 - DNA, 15 bp, Homo sapiens
gaaaggtcatgatat

SEQ ID NO: 899891 - DNA, 15 bp, Homo sapiens
aaaggtcatgatata

SEQ ID NO: 899892 - DNA, 15 bp, Homo sapiens
aaggtcatgatatag

SEQ ID NO: 899893 - DNA, 15 bp, Homo sapiens
aggtcatgatataga

SEQ ID NO: 899894 - DNA, 15 bp, Homo sapiens
ggtcatgatatagag

SEQ ID NO: 899895 - DNA, 15 bp, Homo sapiens
gtcatgatatagagg

SEQ ID NO: 899896 - DNA, 15 bp, Homo sapiens
tcatgatatagagga

SEQ ID NO: 899897 - DNA, 15 bp, Homo sapiens
catgatatagaggag

SEQ ID NO: 899898 - DNA, 15 bp, Homo sapiens
atgatatagaggagg

SEQ ID NO: 899899 - DNA, 15 bp, Homo sapiens
tgatatagaggagga

SEQ ID NO: 899900 - DNA, 15 bp, Homo sapiens
gatatagaggaggat

SEQ ID NO: 899901 - DNA, 15 bp, Homo sapiens
atatagaggaggatt

SEQ ID NO: 899902 - DNA, 15 bp, Homo sapiens
tatagaggaggattt

SEQ ID NO: 899903 - DNA, 15 bp, Homo sapiens
atagaggaggatttg

SEQ ID NO: 899904 - DNA, 15 bp, Homo sapiens
tagaggaggatttgt

SEQ ID NO: 899905 - DNA, 15 bp, Homo sapiens
agaggaggatttgtt

SEQ ID NO: 899906 - DNA, 15 bp, Homo sapiens
gaggaggatttgtta

SEQ ID NO: 899907 - DNA, 15 bp, Homo sapiens
aggaggatttgttat

SEQ ID NO: 899908 - DNA, 15 bp, Homo sapiens
ggaggatttgttatt

SEQ ID NO: 899909 - DNA, 15 bp, Homo sapiens
gaggatttgttattt

SEQ ID NO: 899910 - DNA, 15 bp, Homo sapiens
aggatttgttattta

SEQ ID NO: 899911 - DNA, 15 bp, Homo sapiens
ggatttgttatttaa

SEQ ID NO: 899912 - DNA, 15 bp, Homo sapiens
gatttgttatttaaa

SEQ ID NO: 899913 - DNA, 15 bp, Homo sapiens
atttgttatttaaat

SEQ ID NO: 899914 - DNA, 15 bp, Homo sapiens
tttgttatttaaatt

SEQ ID NO: 899915 - DNA, 15 bp, Homo sapiens
ttgttatttaaattg

SEQ ID NO: 899916 - DNA, 15 bp, Homo sapiens
tgttatttaaattga

SEQ ID NO: 899917 - DNA, 15 bp, Homo sapiens
gttatttaaattgag

SEQ ID NO: 899918 - DNA, 15 bp, Homo sapiens
ttatttaaattgagg

SEQ ID NO: 899919 - DNA, 15 bp, Homo sapiens
tatttaaattgaggg

SEQ ID NO: 899920 - DNA, 15 bp, Homo sapiens
atttaaattgagggt

SEQ ID NO: 899921 - DNA, 15 bp, Homo sapiens
tttaaattgagggta

SEQ ID NO: 899922 - DNA, 15 bp, Homo sapiens
ttaaattgagggtat

SEQ ID NO: 899923 - DNA, 15 bp, Homo sapiens
taaattgagggtatg

SEQ ID NO: 899924 - DNA, 15 bp, Homo sapiens
aaattgagggtatgg

SEQ ID NO: 899925 - DNA, 15 bp, Homo sapiens
aattgagggtatgga

SEQ ID NO: 899926 - DNA, 15 bp, Homo sapiens
attgagggtatggac

SEQ ID NO: 899927 - DNA, 15 bp, Homo sapiens
ttgagggtatggact

SEQ ID NO: 899928 - DNA, 15 bp, Homo sapiens
tgagggtatggactc

SEQ ID NO: 899929 - DNA, 15 bp, Homo sapiens
gagggtatggactct

SEQ ID NO: 899930 - DNA, 15 bp, Homo sapiens
agggtatggactctg

SEQ ID NO: 899931 - DNA, 15 bp, Homo sapiens
gggtatggactctgg

SEQ ID NO: 899932 - DNA, 15 bp, Homo sapiens
ggtatggactctggc

SEQ ID NO: 899933 - DNA, 15 bp, Homo sapiens
gtatggactctggca

SEQ ID NO: 899934 - DNA, 15 bp, Homo sapiens
tatggactctggcac

SEQ ID NO: 899935 - DNA, 15 bp, Homo sapiens
atggactctggcact

SEQ ID NO: 899936 - DNA, 15 bp, Homo sapiens
tggactctggcactg

SEQ ID NO: 899937 - DNA, 15 bp, Homo sapiens
ggactctggcactga

SEQ ID NO: 899938 - DNA, 15 bp, Homo sapiens
gactctggcactgag

SEQ ID NO: 899939 - DNA, 15 bp, Homo sapiens
actctggcactgagc

SEQ ID NO: 899940 - DNA, 15 bp, Homo sapiens
ctctggcactgagcc

SEQ ID NO: 899941 - DNA, 15 bp, Homo sapiens
tctggcactgagcct

SEQ ID NO: 899942 - DNA, 15 bp, Homo sapiens
ctggcactgagcctg

SEQ ID NO: 899943 - DNA, 15 bp, Homo sapiens
tggcactgagcctgc

SEQ ID NO: 899944 - DNA, 15 bp, Homo sapiens
ggcactgagcctgct

SEQ ID NO: 899945 - DNA, 15 bp, Homo sapiens
gcactgagcctgctg

SEQ ID NO: 899946 - DNA, 15 bp, Homo sapiens
cactgagcctgctgg

SEQ ID NO: 899947 - DNA, 15 bp, Homo sapiens
actgagcctgctggg

SEQ ID NO: 899948 - DNA, 15 bp, Homo sapiens
ctgagcctgctgggg

SEQ ID NO: 899949 - DNA, 15 bp, Homo sapiens
tgagcctgctgggga

SEQ ID NO: 899950 - DNA, 15 bp, Homo sapiens
gagcctgctggggaa

SEQ ID NO: 899951 - DNA, 15 bp, Homo sapiens
agcctgctggggaag

SEQ ID NO: 899952 - DNA, 15 bp, Homo sapiens
gcctgctggggaagc

SEQ ID NO: 899953 - DNA, 15 bp, Homo sapiens
cctgctggggaagcc

SEQ ID NO: 899954 - DNA, 15 bp, Homo sapiens
ctgctggggaagcct

SEQ ID NO: 899955 - DNA, 15 bp, Homo sapiens
tgctggggaagccta

SEQ ID NO: 899956 - DNA, 15 bp, Homo sapiens
gctggggaagcctat

SEQ ID NO: 899957 - DNA, 15 bp, Homo sapiens
ctggggaagcctatc

SEQ ID NO: 899958 - DNA, 15 bp, Homo sapiens
tggggaagcctatct

SEQ ID NO: 899959 - DNA, 15 bp, Homo sapiens
ggggaagcctatctc

SEQ ID NO: 899960 - DNA, 15 bp, Homo sapiens
gggaagcctatctca

SEQ ID NO: 899961 - DNA, 15 bp, Homo sapiens
ggaagcctatctcag

SEQ ID NO: 899962 - DNA, 15 bp, Homo sapiens
gaagcctatctcaga

SEQ ID NO: 899963 - DNA, 15 bp, Homo sapiens
aagcctatctcagat

SEQ ID NO: 899964 - DNA, 15 bp, Homo sapiens
agcctatctcagatt

SEQ ID NO: 899965 - DNA, 15 bp, Homo sapiens
gcctatctcagattt

SEQ ID NO: 899966 - DNA, 15 bp, Homo sapiens
cctatctcagatttg

SEQ ID NO: 899967 - DNA, 15 bp, Homo sapiens
ctatctcagatttga

SEQ ID NO: 899968 - DNA, 15 bp, Homo sapiens
tatctcagatttgaa

SEQ ID NO: 899969 - DNA, 15 bp, Homo sapiens
atctcagatttgaaa

SEQ ID NO: 899970 - DNA, 15 bp, Homo sapiens
tctcagatttgaaaa

SEQ ID NO: 899971 - DNA, 15 bp, Homo sapiens
ctcagatttgaaaag

SEQ ID NO: 899972 - DNA, 15 bp, Homo sapiens
tcagatttgaaaagg

SEQ ID NO: 899973 - DNA, 15 bp, Homo sapiens
cagatttgaaaaggg

SEQ ID NO: 899974 - DNA, 15 bp, Homo sapiens
agatttgaaaagggc

SEQ ID NO: 899975 - DNA, 15 bp, Homo sapiens
gatttgaaaagggca

SEQ ID NO: 899976 - DNA, 15 bp, Homo sapiens
atttgaaaagggcaa

SEQ ID NO: 899977 - DNA, 15 bp, Homo sapiens
tttgaaaagggcaaa

SEQ ID NO: 899978 - DNA, 15 bp, Homo sapiens
ttgaaaagggcaaaa

SEQ ID NO: 899979 - DNA, 15 bp, Homo sapiens
tgaaaagggcaaaat

SEQ ID NO: 899980 - DNA, 15 bp, Homo sapiens
gaaaagggcaaaatg

SEQ ID NO: 899981 - DNA, 15 bp, Homo sapiens
aaaagggcaaaatgg

SEQ ID NO: 899982 - DNA, 15 bp, Homo sapiens
aaagggcaaaatggg

SEQ ID NO: 899983 - DNA, 15 bp, Homo sapiens
aagggcaaaatggga

SEQ ID NO: 899984 - DNA, 15 bp, Homo sapiens
agggcaaaatgggaa

SEQ ID NO: 899985 - DNA, 15 bp, Homo sapiens
gggcaaaatgggaag

SEQ ID NO: 899986 - DNA, 15 bp, Homo sapiens
ggcaaaatgggaaga

SEQ ID NO: 899987 - DNA, 15 bp, Homo sapiens
gcaaaatgggaagaa

SEQ ID NO: 899988 - DNA, 15 bp, Homo sapiens
caaaatgggaagaag

SEQ ID NO: 899989 - DNA, 15 bp, Homo sapiens
aaaatgggaagaagc

SEQ ID NO: 899990 - DNA, 15 bp, Homo sapiens
aaatgggaagaagcc

SEQ ID NO: 899991 - DNA, 15 bp, Homo sapiens
aatgggaagaagcca

SEQ ID NO: 899992 - DNA, 15 bp, Homo sapiens
atgggaagaagccat

SEQ ID NO: 899993 - DNA, 15 bp, Homo sapiens
tgggaagaagccatc

SEQ ID NO: 899994 - DNA, 15 bp, Homo sapiens
gggaagaagccatca

SEQ ID NO: 899995 - DNA, 15 bp, Homo sapiens
ggaagaagccatcac

SEQ ID NO: 899996 - DNA, 15 bp, Homo sapiens
gaagaagccatcacc

SEQ ID NO: 899997 - DNA, 15 bp, Homo sapiens
aagaagccatcacct

SEQ ID NO: 899998 - DNA, 15 bp, Homo sapiens
agaagccatcacctt

SEQ ID NO: 899999 - DNA, 15 bp, Homo sapiens
gaagccatcaccttt

SEQ ID NO: 900000 - DNA, 15 bp, Homo sapiens
aagccatcaccttta

SEQ ID NO: 900001 - DNA, 15 bp, Homo sapiens
agccatcacctttac

SEQ ID NO: 900002 - DNA, 15 bp, Homo sapiens
gccatcacctttacc

SEQ ID NO: 900003 - DNA, 15 bp, Homo sapiens
ccatcacctttacca

SEQ ID NO: 900004 - DNA, 15 bp, Homo sapiens
catcacctttaccat

SEQ ID NO: 900005 - DNA, 15 bp, Homo sapiens
atcacctttaccatt

SEQ ID NO: 900006 - DNA, 15 bp, Homo sapiens
tcacctttaccattc

SEQ ID NO: 900007 - DNA, 15 bp, Homo sapiens
cacctttaccattcc

SEQ ID NO: 900008 - DNA, 15 bp, Homo sapiens
acctttaccattccc

SEQ ID NO: 900009 - DNA, 15 bp, Homo sapiens
cctttaccattccca

SEQ ID NO: 900010 - DNA, 15 bp, Homo sapiens
ctttaccattcccac

SEQ ID NO: 900011 - DNA, 15 bp, Homo sapiens
tttaccattcccact

SEQ ID NO: 900012 - DNA, 15 bp, Homo sapiens
ttaccattcccactc

SEQ ID NO: 900013 - DNA, 15 bp, Homo sapiens
taccattcccactcc

SEQ ID NO: 900014 - DNA, 15 bp, Homo sapiens
accattcccactcca

SEQ ID NO: 900015 - DNA, 15 bp, Homo sapiens
ccattcccactccag

SEQ ID NO: 900016 - DNA, 15 bp, Homo sapiens
cattcccactccagg

SEQ ID NO: 900017 - DNA, 15 bp, Homo sapiens
attcccactccagga

SEQ ID NO: 900018 - DNA, 15 bp, Homo sapiens
ttcccactccaggaa

SEQ ID NO: 900019 - DNA, 15 bp, Homo sapiens
tcccactccaggaag

SEQ ID NO: 900020 - DNA, 15 bp, Homo sapiens
cccactccaggaagt

SEQ ID NO: 900021 - DNA, 15 bp, Homo sapiens
ccactccaggaagtt

SEQ ID NO: 900022 - DNA, 15 bp, Homo sapiens
cactccaggaagttt

SEQ ID NO: 900023 - DNA, 15 bp, Homo sapiens
actccaggaagtttt

SEQ ID NO: 900024 - DNA, 15 bp, Homo sapiens
ctccaggaagttttc

SEQ ID NO: 900025 - DNA, 15 bp, Homo sapiens
tccaggaagttttcc

SEQ ID NO: 900026 - DNA, 15 bp, Homo sapiens
ccaggaagttttcct

SEQ ID NO: 900027 - DNA, 15 bp, Homo sapiens
caggaagttttccta

SEQ ID NO: 900028 - DNA, 15 bp, Homo sapiens
aggaagttttcctag

SEQ ID NO: 900029 - DNA, 15 bp, Homo sapiens
ggaagttttcctaga

SEQ ID NO: 900030 - DNA, 15 bp, Homo sapiens
gaagttttcctagaa

SEQ ID NO: 900031 - DNA, 15 bp, Homo sapiens
aagttttcctagaac

SEQ ID NO: 900032 - DNA, 15 bp, Homo sapiens
agttttcctagaacg

SEQ ID NO: 900033 - DNA, 15 bp, Homo sapiens
gttttcctagaacga

SEQ ID NO: 900034 - DNA, 15 bp, Homo sapiens
ttttcctagaacgat

SEQ ID NO: 900035 - DNA, 15 bp, Homo sapiens
tttcctagaacgatg

SEQ ID NO: 900036 - DNA, 15 bp, Homo sapiens
ttcctagaacgatga

SEQ ID NO: 900037 - DNA, 15 bp, Homo sapiens
tcctagaacgatgac

SEQ ID NO: 900038 - DNA, 15 bp, Homo sapiens
cctagaacgatgact

SEQ ID NO: 900039 - DNA, 15 bp, Homo sapiens
ctagaacgatgactg

SEQ ID NO: 900040 - DNA, 15 bp, Homo sapiens
tagaacgatgactgt

SEQ ID NO: 900041 - DNA, 15 bp, Homo sapiens
agaacgatgactgtc

SEQ ID NO: 900042 - DNA, 15 bp, Homo sapiens
gaacgatgactgtcc

SEQ ID NO: 900043 - DNA, 15 bp, Homo sapiens
aacgatgactgtcca

SEQ ID NO: 900044 - DNA, 15 bp, Homo sapiens
acgatgactgtccaa

SEQ ID NO: 900045 - DNA, 15 bp, Homo sapiens
cgatgactgtccaag

SEQ ID NO: 900046 - DNA, 15 bp, Homo sapiens
gatgactgtccaagt

SEQ ID NO: 900047 - DNA, 15 bp, Homo sapiens
atgactgtccaagtg

SEQ ID NO: 900048 - DNA, 15 bp, Homo sapiens
tgactgtccaagtgt

SEQ ID NO: 900049 - DNA, 15 bp, Homo sapiens
gactgtccaagtgtg

SEQ ID NO: 900050 - DNA, 15 bp, Homo sapiens
actgtccaagtgtgg

SEQ ID NO: 900051 - DNA, 15 bp, Homo sapiens
ctgtccaagtgtggt

SEQ ID NO: 900052 - DNA, 15 bp, Homo sapiens
tgtccaagtgtggtc

SEQ ID NO: 900053 - DNA, 15 bp, Homo sapiens
gtccaagtgtggtcc

SEQ ID NO: 900054 - DNA, 15 bp, Homo sapiens
tccaagtgtggtccc

SEQ ID NO: 900055 - DNA, 15 bp, Homo sapiens
ccaagtgtggtccct

SEQ ID NO: 900056 - DNA, 15 bp, Homo sapiens
caagtgtggtccctg

SEQ ID NO: 900057 - DNA, 15 bp, Homo sapiens
aagtgtggtccctgg

SEQ ID NO: 900058 - DNA, 15 bp, Homo sapiens
agtgtggtccctggg

SEQ ID NO: 900059 - DNA, 15 bp, Homo sapiens
gtgtggtccctgggc

SEQ ID NO: 900060 - DNA, 15 bp, Homo sapiens
tgtggtccctgggcc

SEQ ID NO: 900061 - DNA, 15 bp, Homo sapiens
gtggtccctgggcca

SEQ ID NO: 900062 - DNA, 15 bp, Homo sapiens
tggtccctgggccag

SEQ ID NO: 900063 - DNA, 15 bp, Homo sapiens
ggtccctgggccagc

SEQ ID NO: 900064 - DNA, 15 bp, Homo sapiens
gtccctgggccagca

SEQ ID NO: 900065 - DNA, 15 bp, Homo sapiens
tccctgggccagcag

SEQ ID NO: 900066 - DNA, 15 bp, Homo sapiens
ccctgggccagcagc

SEQ ID NO: 900067 - DNA, 15 bp, Homo sapiens
cctgggccagcagca

SEQ ID NO: 900068 - DNA, 15 bp, Homo sapiens
ctgggccagcagcat

SEQ ID NO: 900069 - DNA, 15 bp, Homo sapiens
tgggccagcagcatc

SEQ ID NO: 900070 - DNA, 15 bp, Homo sapiens
gggccagcagcatca

SEQ ID NO: 900071 - DNA, 15 bp, Homo sapiens
ggccagcagcatcag

SEQ ID NO: 900072 - DNA, 15 bp, Homo sapiens
gccagcagcatcagg

SEQ ID NO: 900073 - DNA, 15 bp, Homo sapiens
ccagcagcatcagga

SEQ ID NO: 900074 - DNA, 15 bp, Homo sapiens
cagcagcatcaggat

SEQ ID NO: 900075 - DNA, 15 bp, Homo sapiens
agcagcatcaggatc

SEQ ID NO: 900076 - DNA, 15 bp, Homo sapiens
gcagcatcaggatcc

SEQ ID NO: 900077 - DNA, 15 bp, Homo sapiens
cagcatcaggatcct

SEQ ID NO: 900078 - DNA, 15 bp, Homo sapiens
agcatcaggatcctg

SEQ ID NO: 900079 - DNA, 15 bp, Homo sapiens
gcatcaggatcctgt

SEQ ID NO: 900080 - DNA, 15 bp, Homo sapiens
catcaggatcctgtg

SEQ ID NO: 900081 - DNA, 15 bp, Homo sapiens
atcaggatcctgtgg

SEQ ID NO: 900082 - DNA, 15 bp, Homo sapiens
tcaggatcctgtggc

SEQ ID NO: 900083 - DNA, 15 bp, Homo sapiens
caggatcctgtggca

SEQ ID NO: 900084 - DNA, 15 bp, Homo sapiens
aggatcctgtggcag

SEQ ID NO: 900085 - DNA, 15 bp, Homo sapiens
ggatcctgtggcagc

SEQ ID NO: 900086 - DNA, 15 bp, Homo sapiens
gatcctgtggcagct

SEQ ID NO: 900087 - DNA, 15 bp, Homo sapiens
atcctgtggcagctt

SEQ ID NO: 900088 - DNA, 15 bp, Homo sapiens
tcctgtggcagcttg

SEQ ID NO: 900089 - DNA, 15 bp, Homo sapiens
cctgtggcagcttgt

SEQ ID NO: 900090 - DNA, 15 bp, Homo sapiens
ctgtggcagcttgtg

SEQ ID NO: 900091 - DNA, 15 bp, Homo sapiens
tgtggcagcttgtga

SEQ ID NO: 900092 - DNA, 15 bp, Homo sapiens
gtggcagcttgtgag

SEQ ID NO: 900093 - DNA, 15 bp, Homo sapiens
tggcagcttgtgaga

SEQ ID NO: 900094 - DNA, 15 bp, Homo sapiens
ggcagcttgtgagaa

SEQ ID NO: 900095 - DNA, 15 bp, Homo sapiens
gcagcttgtgagaaa

SEQ ID NO: 900096 - DNA, 15 bp, Homo sapiens
cagcttgtgagaaat

SEQ ID NO: 900097 - DNA, 15 bp, Homo sapiens
agcttgtgagaaatg

SEQ ID NO: 900098 - DNA, 15 bp, Homo sapiens
gcttgtgagaaatgc

SEQ ID NO: 900099 - DNA, 15 bp, Homo sapiens
cttgtgagaaatgca

SEQ ID NO: 900100 - DNA, 15 bp, Homo sapiens
ttgtgagaaatgcac

SEQ ID NO: 900101 - DNA, 15 bp, Homo sapiens
tgtgagaaatgcaca

SEQ ID NO: 900102 - DNA, 15 bp, Homo sapiens
gtgagaaatgcacac

SEQ ID NO: 900103 - DNA, 15 bp, Homo sapiens
tgagaaatgcacact

SEQ ID NO: 900104 - DNA, 15 bp, Homo sapiens
gagaaatgcacactc

SEQ ID NO: 900105 - DNA, 15 bp, Homo sapiens
agaaatgcacactct

SEQ ID NO: 900106 - DNA, 15 bp, Homo sapiens
gaaatgcacactctc

SEQ ID NO: 900107 - DNA, 15 bp, Homo sapiens
aaatgcacactctca

SEQ ID NO: 900108 - DNA, 15 bp, Homo sapiens
aatgcacactctcag

SEQ ID NO: 900109 - DNA, 15 bp, Homo sapiens
atgcacactctcagg

SEQ ID NO: 900110 - DNA, 15 bp, Homo sapiens
tgcacactctcaggc

SEQ ID NO: 900111 - DNA, 15 bp, Homo sapiens
gcacactctcaggcc

SEQ ID NO: 900112 - DNA, 15 bp, Homo sapiens
cacactctcaggccc

SEQ ID NO: 900113 - DNA, 15 bp, Homo sapiens
acactctcaggcccc

SEQ ID NO: 900114 - DNA, 15 bp, Homo sapiens
cactctcaggcccct

SEQ ID NO: 900115 - DNA, 15 bp, Homo sapiens
actctcaggcccctg

SEQ ID NO: 900116 - DNA, 15 bp, Homo sapiens
ctctcaggcccctgt

SEQ ID NO: 900117 - DNA, 15 bp, Homo sapiens
tctcaggcccctgtc

SEQ ID NO: 900118 - DNA, 15 bp, Homo sapiens
ctcaggcccctgtcc

SEQ ID NO: 900119 - DNA, 15 bp, Homo sapiens
tcaggcccctgtccc

SEQ ID NO: 900120 - DNA, 15 bp, Homo sapiens
caggcccctgtccca

SEQ ID NO: 900121 - DNA, 15 bp, Homo sapiens
aggcccctgtcccag

SEQ ID NO: 900122 - DNA, 15 bp, Homo sapiens
ggcccctgtcccagc

SEQ ID NO: 900123 - DNA, 15 bp, Homo sapiens
gcccctgtcccagcc

SEQ ID NO: 900124 - DNA, 15 bp, Homo sapiens
cccctgtcccagccc

SEQ ID NO: 900125 - DNA, 15 bp, Homo sapiens
ccctgtcccagcccc

SEQ ID NO: 900126 - DNA, 15 bp, Homo sapiens
cctgtcccagcccca

SEQ ID NO: 900127 - DNA, 15 bp, Homo sapiens
ctgtcccagccccac

SEQ ID NO: 900128 - DNA, 15 bp, Homo sapiens
tgtcccagccccacc

SEQ ID NO: 900129 - DNA, 15 bp, Homo sapiens
gtcccagccccacca

SEQ ID NO: 900130 - DNA, 15 bp, Homo sapiens
tcccagccccaccac

SEQ ID NO: 900131 - DNA, 15 bp, Homo sapiens
cccagccccaccacg

SEQ ID NO: 900132 - DNA, 15 bp, Homo sapiens
ccagccccaccacgc

SEQ ID NO: 900133 - DNA, 15 bp, Homo sapiens
cagccccaccacgcc

SEQ ID NO: 900134 - DNA, 15 bp, Homo sapiens
agccccaccacgcca

SEQ ID NO: 900135 - DNA, 15 bp, Homo sapiens
gccccaccacgccag

SEQ ID NO: 900136 - DNA, 15 bp, Homo sapiens
ccccaccacgccaga

SEQ ID NO: 900137 - DNA, 15 bp, Homo sapiens
cccaccacgccagaa

SEQ ID NO: 900138 - DNA, 15 bp, Homo sapiens
ccaccacgccagaag

SEQ ID NO: 900139 - DNA, 15 bp, Homo sapiens
caccacgccagaagc

SEQ ID NO: 900140 - DNA, 15 bp, Homo sapiens
accacgccagaagcc

SEQ ID NO: 900141 - DNA, 15 bp, Homo sapiens
ccacgccagaagccc

SEQ ID NO: 900142 - DNA, 15 bp, Homo sapiens
cacgccagaagccct

SEQ ID NO: 900143 - DNA, 15 bp, Homo sapiens
acgccagaagccctg

SEQ ID NO: 900144 - DNA, 15 bp, Homo sapiens
cgccagaagccctgc

SEQ ID NO: 900145 - DNA, 15 bp, Homo sapiens
gccagaagccctgca

SEQ ID NO: 900146 - DNA, 15 bp, Homo sapiens
ccagaagccctgcac

SEQ ID NO: 900147 - DNA, 15 bp, Homo sapiens
cagaagccctgcacg

SEQ ID NO: 900148 - DNA, 15 bp, Homo sapiens
agaagccctgcacgg

SEQ ID NO: 900149 - DNA, 15 bp, Homo sapiens
gaagccctgcacggg

SEQ ID NO: 900150 - DNA, 15 bp, Homo sapiens
aagccctgcacgggg

SEQ ID NO: 900151 - DNA, 15 bp, Homo sapiens
agccctgcacggggt

SEQ ID NO: 900152 - DNA, 15 bp, Homo sapiens
gccctgcacggggtg

SEQ ID NO: 900153 - DNA, 15 bp, Homo sapiens
ccctgcacggggtgg

SEQ ID NO: 900154 - DNA, 15 bp, Homo sapiens
cctgcacggggtggg

SEQ ID NO: 900155 - DNA, 15 bp, Homo sapiens
ctgcacggggtgggg

SEQ ID NO: 900156 - DNA, 15 bp, Homo sapiens
tgcacggggtggggg

SEQ ID NO: 900157 - DNA, 15 bp, Homo sapiens
gcacggggtgggggt

SEQ ID NO: 900158 - DNA, 15 bp, Homo sapiens
cacggggtgggggta

SEQ ID NO: 900159 - DNA, 15 bp, Homo sapiens
acggggtgggggtag

SEQ ID NO: 900160 - DNA, 15 bp, Homo sapiens
cggggtgggggtagc

SEQ ID NO: 900161 - DNA, 15 bp, Homo sapiens
ggggtgggggtagca

SEQ ID NO: 900162 - DNA, 15 bp, Homo sapiens
gggtgggggtagcaa

SEQ ID NO: 900163 - DNA, 15 bp, Homo sapiens
ggtgggggtagcaat

SEQ ID NO: 900164 - DNA, 15 bp, Homo sapiens
gtgggggtagcaatg

SEQ ID NO: 900165 - DNA, 15 bp, Homo sapiens
tgggggtagcaatgt

SEQ ID NO: 900166 - DNA, 15 bp, Homo sapiens
gggggtagcaatgtt

SEQ ID NO: 900167 - DNA, 15 bp, Homo sapiens
ggggtagcaatgttc

SEQ ID NO: 900168 - DNA, 15 bp, Homo sapiens
gggtagcaatgttct

SEQ ID NO: 900169 - DNA, 15 bp, Homo sapiens
ggtagcaatgttctg

SEQ ID NO: 900170 - DNA, 15 bp, Homo sapiens
gtagcaatgttctgt

SEQ ID NO: 900171 - DNA, 15 bp, Homo sapiens
tagcaatgttctgtg

SEQ ID NO: 900172 - DNA, 15 bp, Homo sapiens
agcaatgttctgtgt

SEQ ID NO: 900173 - DNA, 15 bp, Homo sapiens
gcaatgttctgtgtt

SEQ ID NO: 900174 - DNA, 15 bp, Homo sapiens
caatgttctgtgttc

SEQ ID NO: 900175 - DNA, 15 bp, Homo sapiens
aatgttctgtgttct

SEQ ID NO: 900176 - DNA, 15 bp, Homo sapiens
atgttctgtgttcta

SEQ ID NO: 900177 - DNA, 15 bp, Homo sapiens
tgttctgtgttctaa

SEQ ID NO: 900178 - DNA, 15 bp, Homo sapiens
gttctgtgttctaac

SEQ ID NO: 900179 - DNA, 15 bp, Homo sapiens
ttctgtgttctaaca

SEQ ID NO: 900180 - DNA, 15 bp, Homo sapiens
tctgtgttctaacaa

SEQ ID NO: 900181 - DNA, 15 bp, Homo sapiens
ctgtgttctaacaat

SEQ ID NO: 900182 - DNA, 15 bp, Homo sapiens
tgtgttctaacaatg

SEQ ID NO: 900183 - DNA, 15 bp, Homo sapiens
gtgttctaacaatgc

SEQ ID NO: 900184 - DNA, 15 bp, Homo sapiens
tgttctaacaatgcg

SEQ ID NO: 900185 - DNA, 15 bp, Homo sapiens
gttctaacaatgcgt

SEQ ID NO: 900186 - DNA, 15 bp, Homo sapiens
ttctaacaatgcgta

SEQ ID NO: 900187 - DNA, 15 bp, Homo sapiens
tctaacaatgcgtag

SEQ ID NO: 900188 - DNA, 15 bp, Homo sapiens
ctaacaatgcgtagg

SEQ ID NO: 900189 - DNA, 15 bp, Homo sapiens
taacaatgcgtaggg

SEQ ID NO: 900190 - DNA, 15 bp, Homo sapiens
aacaatgcgtagggg

SEQ ID NO: 900191 - DNA, 15 bp, Homo sapiens
acaatgcgtagggga

SEQ ID NO: 900192 - DNA, 15 bp, Homo sapiens
caatgcgtaggggat

SEQ ID NO: 900193 - DNA, 15 bp, Homo sapiens
aatgcgtaggggatt

SEQ ID NO: 900194 - DNA, 15 bp, Homo sapiens
atgcgtaggggattc

SEQ ID NO: 900195 - DNA, 15 bp, Homo sapiens
tgcgtaggggattct

SEQ ID NO: 900196 - DNA, 15 bp, Homo sapiens
gcgtaggggattctg

SEQ ID NO: 900197 - DNA, 15 bp, Homo sapiens
cgtaggggattctgt

SEQ ID NO: 900198 - DNA, 15 bp, Homo sapiens
gtaggggattctgtg

SEQ ID NO: 900199 - DNA, 15 bp, Homo sapiens
taggggattctgtgg

SEQ ID NO: 900200 - DNA, 15 bp, Homo sapiens
aggggattctgtggc

SEQ ID NO: 900201 - DNA, 15 bp, Homo sapiens
ggggattctgtggca

SEQ ID NO: 900202 - DNA, 15 bp, Homo sapiens
gggattctgtggcac

SEQ ID NO: 900203 - DNA, 15 bp, Homo sapiens
ggattctgtggcaca

SEQ ID NO: 900204 - DNA, 15 bp, Homo sapiens
gattctgtggcacac

SEQ ID NO: 900205 - DNA, 15 bp, Homo sapiens
attctgtggcacacc

SEQ ID NO: 900206 - DNA, 15 bp, Homo sapiens
ttctgtggcacacct

SEQ ID NO: 900207 - DNA, 15 bp, Homo sapiens
tctgtggcacacctc

SEQ ID NO: 900208 - DNA, 15 bp, Homo sapiens
ctgtggcacacctcg

SEQ ID NO: 900209 - DNA, 15 bp, Homo sapiens
tgtggcacacctcga

SEQ ID NO: 900210 - DNA, 15 bp, Homo sapiens
gtggcacacctcgag

SEQ ID NO: 900211 - DNA, 15 bp, Homo sapiens
tggcacacctcgagc

SEQ ID NO: 900212 - DNA, 15 bp, Homo sapiens
ggcacacctcgagcc

SEQ ID NO: 900213 - DNA, 15 bp, Homo sapiens
gcacacctcgagcca

SEQ ID NO: 900214 - DNA, 15 bp, Homo sapiens
cacacctcgagccag

SEQ ID NO: 900215 - DNA, 15 bp, Homo sapiens
acacctcgagccaga

SEQ ID NO: 900216 - DNA, 15 bp, Homo sapiens
cacctcgagccagag

SEQ ID NO: 900217 - DNA, 15 bp, Homo sapiens
acctcgagccagaga

SEQ ID NO: 900218 - DNA, 15 bp, Homo sapiens
cctcgagccagagaa

SEQ ID NO: 900219 - DNA, 15 bp, Homo sapiens
ctcgagccagagaac

SEQ ID NO: 900220 - DNA, 15 bp, Homo sapiens
tcgagccagagaact

SEQ ID NO: 900221 - DNA, 15 bp, Homo sapiens
cgagccagagaacta

SEQ ID NO: 900222 - DNA, 15 bp, Homo sapiens
gagccagagaactac

SEQ ID NO: 900223 - DNA, 15 bp, Homo sapiens
agccagagaactacc

SEQ ID NO: 900224 - DNA, 15 bp, Homo sapiens
gccagagaactaccg

SEQ ID NO: 900225 - DNA, 15 bp, Homo sapiens
ccagagaactaccgg

SEQ ID NO: 900226 - DNA, 15 bp, Homo sapiens
cagagaactaccggt

SEQ ID NO: 900227 - DNA, 15 bp, Homo sapiens
agagaactaccggtg

SEQ ID NO: 900228 - DNA, 15 bp, Homo sapiens
gagaactaccggtgt

SEQ ID NO: 900229 - DNA, 15 bp, Homo sapiens
agaactaccggtgta

SEQ ID NO: 900230 - DNA, 15 bp, Homo sapiens
gaactaccggtgtag

SEQ ID NO: 900231 - DNA, 15 bp, Homo sapiens
aactaccggtgtagg

SEQ ID NO: 900232 - DNA, 15 bp, Homo sapiens
actaccggtgtagga

SEQ ID NO: 900233 - DNA, 15 bp, Homo sapiens
ctaccggtgtaggaa

SEQ ID NO: 900234 - DNA, 15 bp, Homo sapiens
taccggtgtaggaag

SEQ ID NO: 900235 - DNA, 15 bp, Homo sapiens
accggtgtaggaagt

SEQ ID NO: 900236 - DNA, 15 bp, Homo sapiens
ccggtgtaggaagtg

SEQ ID NO: 900237 - DNA, 15 bp, Homo sapiens
cggtgtaggaagtga

SEQ ID NO: 900238 - DNA, 15 bp, Homo sapiens
ggtgtaggaagtgag

SEQ ID NO: 900239 - DNA, 15 bp, Homo sapiens
gtgtaggaagtgagc

SEQ ID NO: 900240 - DNA, 15 bp, Homo sapiens
tgtaggaagtgagcg

SEQ ID NO: 900241 - DNA, 15 bp, Homo sapiens
gtaggaagtgagcgt

SEQ ID NO: 900242 - DNA, 15 bp, Homo sapiens
taggaagtgagcgtc

SEQ ID NO: 900243 - DNA, 15 bp, Homo sapiens
aggaagtgagcgtcc

SEQ ID NO: 900244 - DNA, 15 bp, Homo sapiens
ggaagtgagcgtcct

SEQ ID NO: 900245 - DNA, 15 bp, Homo sapiens
gaagtgagcgtcctg

SEQ ID NO: 900246 - DNA, 15 bp, Homo sapiens
aagtgagcgtcctgt

SEQ ID NO: 900247 - DNA, 15 bp, Homo sapiens
agtgagcgtcctgtc

SEQ ID NO: 900248 - DNA, 15 bp, Homo sapiens
gtgagcgtcctgtcg

SEQ ID NO: 900249 - DNA, 15 bp, Homo sapiens
tgagcgtcctgtcgc

SEQ ID NO: 900250 - DNA, 15 bp, Homo sapiens
gagcgtcctgtcgcg

SEQ ID NO: 900251 - DNA, 15 bp, Homo sapiens
agcgtcctgtcgcga

SEQ ID NO: 900252 - DNA, 15 bp, Homo sapiens
gcgtcctgtcgcgag

SEQ ID NO: 900253 - DNA, 15 bp, Homo sapiens
cgtcctgtcgcgagg

SEQ ID NO: 900254 - DNA, 15 bp, Homo sapiens
gtcctgtcgcgagga

SEQ ID NO: 900255 - DNA, 15 bp, Homo sapiens
tcctgtcgcgaggat

SEQ ID NO: 900256 - DNA, 15 bp, Homo sapiens
cctgtcgcgaggatt

SEQ ID NO: 900257 - DNA, 15 bp, Homo sapiens
ctgtcgcgaggattt

SEQ ID NO: 900258 - DNA, 15 bp, Homo sapiens
tgtcgcgaggatttt

SEQ ID NO: 900259 - DNA, 15 bp, Homo sapiens
gtcgcgaggattttc

SEQ ID NO: 900260 - DNA, 15 bp, Homo sapiens
tcgcgaggattttca

SEQ ID NO: 900261 - DNA, 15 bp, Homo sapiens
cgcgaggattttcag

SEQ ID NO: 900262 - DNA, 15 bp, Homo sapiens
gcgaggattttcaga

SEQ ID NO: 900263 - DNA, 15 bp, Homo sapiens
cgaggattttcagag

SEQ ID NO: 900264 - DNA, 15 bp, Homo sapiens
gaggattttcagagc

SEQ ID NO: 900265 - DNA, 15 bp, Homo sapiens
aggattttcagagca

SEQ ID NO: 900266 - DNA, 15 bp, Homo sapiens
ggattttcagagcag

SEQ ID NO: 900267 - DNA, 15 bp, Homo sapiens
gattttcagagcagg

SEQ ID NO: 900268 - DNA, 15 bp, Homo sapiens
attttcagagcaggt

SEQ ID NO: 900269 - DNA, 15 bp, Homo sapiens
ttttcagagcaggtg

SEQ ID NO: 900270 - DNA, 15 bp, Homo sapiens
tttcagagcaggtga

SEQ ID NO: 900271 - DNA, 15 bp, Homo sapiens
ttcagagcaggtgag

SEQ ID NO: 900272 - DNA, 15 bp, Homo sapiens
tcagagcaggtgagt

SEQ ID NO: 900273 - DNA, 15 bp, Homo sapiens
cagagcaggtgagtg

SEQ ID NO: 900274 - DNA, 15 bp, Homo sapiens
agagcaggtgagtga

SEQ ID NO: 900275 - DNA, 15 bp, Homo sapiens
gagcaggtgagtgac

SEQ ID NO: 900276 - DNA, 15 bp, Homo sapiens
agcaggtgagtgacc

SEQ ID NO: 900277 - DNA, 15 bp, Homo sapiens
gcaggtgagtgacca

SEQ ID NO: 900278 - DNA, 15 bp, Homo sapiens
caggtgagtgaccat

SEQ ID NO: 900279 - DNA, 15 bp, Homo sapiens
aggtgagtgaccatt

SEQ ID NO: 900280 - DNA, 15 bp, Homo sapiens
ggtgagtgaccattc

SEQ ID NO: 900281 - DNA, 15 bp, Homo sapiens
gtgagtgaccattcg

SEQ ID NO: 900282 - DNA, 15 bp, Homo sapiens
tgagtgaccattcgg

SEQ ID NO: 900283 - DNA, 15 bp, Homo sapiens
gagtgaccattcggc

SEQ ID NO: 900284 - DNA, 15 bp, Homo sapiens
agtgaccattcggca

SEQ ID NO: 900285 - DNA, 15 bp, Homo sapiens
gtgaccattcggcag

SEQ ID NO: 900286 - DNA, 15 bp, Homo sapiens
tgaccattcggcagg

SEQ ID NO: 900287 - DNA, 15 bp, Homo sapiens
gaccattcggcaggg

SEQ ID NO: 900288 - DNA, 15 bp, Homo sapiens
accattcggcagggc

SEQ ID NO: 900289 - DNA, 15 bp, Homo sapiens
ccattcggcagggcc

SEQ ID NO: 900290 - DNA, 15 bp, Homo sapiens
cattcggcagggcca

SEQ ID NO: 900291 - DNA, 15 bp, Homo sapiens
attcggcagggccag

SEQ ID NO: 900292 - DNA, 15 bp, Homo sapiens
ttcggcagggccagt

SEQ ID NO: 900293 - DNA, 15 bp, Homo sapiens
tcggcagggccagtc

SEQ ID NO: 900294 - DNA, 15 bp, Homo sapiens
cggcagggccagtcc

SEQ ID NO: 900295 - DNA, 15 bp, Homo sapiens
ggcagggccagtcct

SEQ ID NO: 900296 - DNA, 15 bp, Homo sapiens
gcagggccagtcctg

SEQ ID NO: 900297 - DNA, 15 bp, Homo sapiens
cagggccagtcctga

SEQ ID NO: 900298 - DNA, 15 bp, Homo sapiens
agggccagtcctgag

SEQ ID NO: 900299 - DNA, 15 bp, Homo sapiens
gggccagtcctgagc

SEQ ID NO: 900300 - DNA, 15 bp, Homo sapiens
ggccagtcctgagct

SEQ ID NO: 900301 - DNA, 15 bp, Homo sapiens
gccagtcctgagctg

SEQ ID NO: 900302 - DNA, 15 bp, Homo sapiens
ccagtcctgagctgg

SEQ ID NO: 900303 - DNA, 15 bp, Homo sapiens
cagtcctgagctggg

SEQ ID NO: 900304 - DNA, 15 bp, Homo sapiens
agtcctgagctgggt

SEQ ID NO: 900305 - DNA, 15 bp, Homo sapiens
gtcctgagctgggtg

SEQ ID NO: 900306 - DNA, 15 bp, Homo sapiens
tcctgagctgggtgt

SEQ ID NO: 900307 - DNA, 15 bp, Homo sapiens
cctgagctgggtgtg

SEQ ID NO: 900308 - DNA, 15 bp, Homo sapiens
ctgagctgggtgtga

SEQ ID NO: 900309 - DNA, 15 bp, Homo sapiens
tgagctgggtgtgaa

SEQ ID NO: 900310 - DNA, 15 bp, Homo sapiens
gagctgggtgtgaag

SEQ ID NO: 900311 - DNA, 15 bp, Homo sapiens
agctgggtgtgaagt

SEQ ID NO: 900312 - DNA, 15 bp, Homo sapiens
gctgggtgtgaagtt

SEQ ID NO: 900313 - DNA, 15 bp, Homo sapiens
ctgggtgtgaagtta

SEQ ID NO: 900314 - DNA, 15 bp, Homo sapiens
tgggtgtgaagttag

SEQ ID NO: 900315 - DNA, 15 bp, Homo sapiens
gggtgtgaagttagg

SEQ ID NO: 900316 - DNA, 15 bp, Homo sapiens
ggtgtgaagttaggc

SEQ ID NO: 900317 - DNA, 15 bp, Homo sapiens
gtgtgaagttaggct

SEQ ID NO: 900318 - DNA, 15 bp, Homo sapiens
tgtgaagttaggctg

SEQ ID NO: 900319 - DNA, 15 bp, Homo sapiens
gtgaagttaggctgg

SEQ ID NO: 900320 - DNA, 15 bp, Homo sapiens
tgaagttaggctggt

SEQ ID NO: 900321 - DNA, 15 bp, Homo sapiens
gaagttaggctggtg

SEQ ID NO: 900322 - DNA, 15 bp, Homo sapiens
aagttaggctggtgt

SEQ ID NO: 900323 - DNA, 15 bp, Homo sapiens
agttaggctggtgtc

SEQ ID NO: 900324 - DNA, 15 bp, Homo sapiens
gttaggctggtgtct

SEQ ID NO: 900325 - DNA, 15 bp, Homo sapiens
ttaggctggtgtctg

SEQ ID NO: 900326 - DNA, 15 bp, Homo sapiens
taggctggtgtctga

SEQ ID NO: 900327 - DNA, 15 bp, Homo sapiens
aggctggtgtctgaa

SEQ ID NO: 900328 - DNA, 15 bp, Homo sapiens
ggctggtgtctgaag

SEQ ID NO: 900329 - DNA, 15 bp, Homo sapiens
gctggtgtctgaagt

SEQ ID NO: 900330 - DNA, 15 bp, Homo sapiens
ctggtgtctgaagtt

SEQ ID NO: 900331 - DNA, 15 bp, Homo sapiens
tggtgtctgaagttt

SEQ ID NO: 900332 - DNA, 15 bp, Homo sapiens
ggtgtctgaagtttc

SEQ ID NO: 900333 - DNA, 15 bp, Homo sapiens
gtgtctgaagtttct

SEQ ID NO: 900334 - DNA, 15 bp, Homo sapiens
tgtctgaagtttctt

SEQ ID NO: 900335 - DNA, 15 bp, Homo sapiens
gtctgaagtttcttc

SEQ ID NO: 900336 - DNA, 15 bp, Homo sapiens
tctgaagtttcttcc

SEQ ID NO: 900337 - DNA, 15 bp, Homo sapiens
ctgaagtttcttcca

SEQ ID NO: 900338 - DNA, 15 bp, Homo sapiens
tgaagtttcttccag

SEQ ID NO: 900339 - DNA, 15 bp, Homo sapiens
gaagtttcttccagt

SEQ ID NO: 900340 - DNA, 15 bp, Homo sapiens
aagtttcttccagtg

SEQ ID NO: 900341 - DNA, 15 bp, Homo sapiens
agtttcttccagtgt

SEQ ID NO: 900342 - DNA, 15 bp, Homo sapiens
gtttcttccagtgtt

SEQ ID NO: 900343 - DNA, 15 bp, Homo sapiens
tttcttccagtgttg

SEQ ID NO: 900344 - DNA, 15 bp, Homo sapiens
ttcttccagtgttgt

SEQ ID NO: 900345 - DNA, 15 bp, Homo sapiens
tcttccagtgttgtg

SEQ ID NO: 900346 - DNA, 15 bp, Homo sapiens
cttccagtgttgtga

SEQ ID NO: 900347 - DNA, 15 bp, Homo sapiens
ttccagtgttgtgag

SEQ ID NO: 900348 - DNA, 15 bp, Homo sapiens
tccagtgttgtgagt

SEQ ID NO: 900349 - DNA, 15 bp, Homo sapiens
ccagtgttgtgagtc

SEQ ID NO: 900350 - DNA, 15 bp, Homo sapiens
cagtgttgtgagtcc

SEQ ID NO: 900351 - DNA, 15 bp, Homo sapiens
agtgttgtgagtcca

SEQ ID NO: 900352 - DNA, 15 bp, Homo sapiens
gtgttgtgagtccaa

SEQ ID NO: 900353 - DNA, 15 bp, Homo sapiens
tgttgtgagtccaag

SEQ ID NO: 900354 - DNA, 15 bp, Homo sapiens
gttgtgagtccaaga

SEQ ID NO: 900355 - DNA, 15 bp, Homo sapiens
ttgtgagtccaagat

SEQ ID NO: 900356 - DNA, 15 bp, Homo sapiens
tgtgagtccaagatg

SEQ ID NO: 900357 - DNA, 15 bp, Homo sapiens
gtgagtccaagatgc

SEQ ID NO: 900358 - DNA, 15 bp, Homo sapiens
tgagtccaagatgca

SEQ ID NO: 900359 - DNA, 15 bp, Homo sapiens
gagtccaagatgcag

SEQ ID NO: 900360 - DNA, 15 bp, Homo sapiens
agtccaagatgcaga

SEQ ID NO: 900361 - DNA, 15 bp, Homo sapiens
gtccaagatgcagat

SEQ ID NO: 900362 - DNA, 15 bp, Homo sapiens
tccaagatgcagatc

SEQ ID NO: 900363 - DNA, 15 bp, Homo sapiens
ccaagatgcagatct

SEQ ID NO: 900364 - DNA, 15 bp, Homo sapiens
caagatgcagatctt

SEQ ID NO: 900365 - DNA, 15 bp, Homo sapiens
aagatgcagatcttg

SEQ ID NO: 900366 - DNA, 15 bp, Homo sapiens
agatgcagatcttgg

SEQ ID NO: 900367 - DNA, 15 bp, Homo sapiens
gatgcagatcttggg

SEQ ID NO: 900368 - DNA, 15 bp, Homo sapiens
atgcagatcttgggt

SEQ ID NO: 900369 - DNA, 15 bp, Homo sapiens
tgcagatcttgggtt

SEQ ID NO: 900370 - DNA, 15 bp, Homo sapiens
gcagatcttgggttt

SEQ ID NO: 900371 - DNA, 15 bp, Homo sapiens
cagatcttgggtttg

SEQ ID NO: 900372 - DNA, 15 bp, Homo sapiens
agatcttgggtttga

SEQ ID NO: 900373 - DNA, 15 bp, Homo sapiens
gatcttgggtttgaa

SEQ ID NO: 900374 - DNA, 15 bp, Homo sapiens
atcttgggtttgaat

SEQ ID NO: 900375 - DNA, 15 bp, Homo sapiens
tcttgggtttgaatc

SEQ ID NO: 900376 - DNA, 15 bp, Homo sapiens
cttgggtttgaatcc

SEQ ID NO: 900377 - DNA, 15 bp, Homo sapiens
ttgggtttgaatcct

SEQ ID NO: 900378 - DNA, 15 bp, Homo sapiens
tgggtttgaatcctg

SEQ ID NO: 900379 - DNA, 15 bp, Homo sapiens
gggtttgaatcctgt

SEQ ID NO: 900380 - DNA, 15 bp, Homo sapiens
ggtttgaatcctgtc

SEQ ID NO: 900381 - DNA, 15 bp, Homo sapiens
gtttgaatcctgtct

SEQ ID NO: 900382 - DNA, 15 bp, Homo sapiens
tttgaatcctgtctc

SEQ ID NO: 900383 - DNA, 15 bp, Homo sapiens
ttgaatcctgtctct

SEQ ID NO: 900384 - DNA, 15 bp, Homo sapiens
tgaatcctgtctcta

SEQ ID NO: 900385 - DNA, 15 bp, Homo sapiens
gaatcctgtctctac

SEQ ID NO: 900386 - DNA, 15 bp, Homo sapiens
aatcctgtctctact

SEQ ID NO: 900387 - DNA, 15 bp, Homo sapiens
atcctgtctctactc

SEQ ID NO: 900388 - DNA, 15 bp, Homo sapiens
tcctgtctctactct

SEQ ID NO: 900389 - DNA, 15 bp, Homo sapiens
cctgtctctactctg

SEQ ID NO: 900390 - DNA, 15 bp, Homo sapiens
ctgtctctactctgc

SEQ ID NO: 900391 - DNA, 15 bp, Homo sapiens
tgtctctactctgcc

SEQ ID NO: 900392 - DNA, 15 bp, Homo sapiens
gtctctactctgccc

SEQ ID NO: 900393 - DNA, 15 bp, Homo sapiens
tctctactctgcccg

SEQ ID NO: 900394 - DNA, 15 bp, Homo sapiens
ctctactctgcccga

SEQ ID NO: 900395 - DNA, 15 bp, Homo sapiens
tctactctgcccgat

SEQ ID NO: 900396 - DNA, 15 bp, Homo sapiens
ctactctgcccgatt

SEQ ID NO: 900397 - DNA, 15 bp, Homo sapiens
tactctgcccgattt

SEQ ID NO: 900398 - DNA, 15 bp, Homo sapiens
actctgcccgatttc

SEQ ID NO: 900399 - DNA, 15 bp, Homo sapiens
ctctgcccgatttca

SEQ ID NO: 900400 - DNA, 15 bp, Homo sapiens
tctgcccgatttcat

SEQ ID NO: 900401 - DNA, 15 bp, Homo sapiens
ctgcccgatttcatc

SEQ ID NO: 900402 - DNA, 15 bp, Homo sapiens
tgcccgatttcatct

SEQ ID NO: 900403 - DNA, 15 bp, Homo sapiens
gcccgatttcatctc

SEQ ID NO: 900404 - DNA, 15 bp, Homo sapiens
cccgatttcatctct

SEQ ID NO: 900405 - DNA, 15 bp, Homo sapiens
ccgatttcatctctt

SEQ ID NO: 900406 - DNA, 15 bp, Homo sapiens
cgatttcatctcttt

SEQ ID NO: 900407 - DNA, 15 bp, Homo sapiens
gatttcatctctttg

SEQ ID NO: 900408 - DNA, 15 bp, Homo sapiens
atttcatctctttga

SEQ ID NO: 900409 - DNA, 15 bp, Homo sapiens
tttcatctctttgat

SEQ ID NO: 900410 - DNA, 15 bp, Homo sapiens
ttcatctctttgatt

SEQ ID NO: 900411 - DNA, 15 bp, Homo sapiens
tcatctctttgattc

SEQ ID NO: 900412 - DNA, 15 bp, Homo sapiens
catctctttgattct

SEQ ID NO: 900413 - DNA, 15 bp, Homo sapiens
atctctttgattctt

SEQ ID NO: 900414 - DNA, 15 bp, Homo sapiens
tctctttgattctta

SEQ ID NO: 900415 - DNA, 15 bp, Homo sapiens
ctctttgattcttag

SEQ ID NO: 900416 - DNA, 15 bp, Homo sapiens
tctttgattcttagt

SEQ ID NO: 900417 - DNA, 15 bp, Homo sapiens
ctttgattcttagtt

SEQ ID NO: 900418 - DNA, 15 bp, Homo sapiens
tttgattcttagttt

SEQ ID NO: 900419 - DNA, 15 bp, Homo sapiens
ttgattcttagtttt

SEQ ID NO: 900420 - DNA, 15 bp, Homo sapiens
tgattcttagttttt

SEQ ID NO: 900421 - DNA, 15 bp, Homo sapiens
gattcttagtttttt

SEQ ID NO: 900422 - DNA, 15 bp, Homo sapiens
attcttagttttttc

SEQ ID NO: 900423 - DNA, 15 bp, Homo sapiens
ttcttagttttttca

SEQ ID NO: 900424 - DNA, 15 bp, Homo sapiens
tcttagttttttcat

SEQ ID NO: 900425 - DNA, 15 bp, Homo sapiens
cttagttttttcatc

SEQ ID NO: 900426 - DNA, 15 bp, Homo sapiens
ttagttttttcatct

SEQ ID NO: 900427 - DNA, 15 bp, Homo sapiens
tagttttttcatcta

SEQ ID NO: 900428 - DNA, 15 bp, Homo sapiens
agttttttcatctat

SEQ ID NO: 900429 - DNA, 15 bp, Homo sapiens
gttttttcatctata

SEQ ID NO: 900430 - DNA, 15 bp, Homo sapiens
ttttttcatctataa

SEQ ID NO: 900431 - DNA, 15 bp, Homo sapiens
tttttcatctataaa

SEQ ID NO: 900432 - DNA, 15 bp, Homo sapiens
ttttcatctataaaa

SEQ ID NO: 900433 - DNA, 15 bp, Homo sapiens
tttcatctataaaag

SEQ ID NO: 900434 - DNA, 15 bp, Homo sapiens
ttcatctataaaaga

SEQ ID NO: 900435 - DNA, 15 bp, Homo sapiens
tcatctataaaagaa

SEQ ID NO: 900436 - DNA, 15 bp, Homo sapiens
catctataaaagaag

SEQ ID NO: 900437 - DNA, 15 bp, Homo sapiens
atctataaaagaagg

SEQ ID NO: 900438 - DNA, 15 bp, Homo sapiens
tctataaaagaagga

SEQ ID NO: 900439 - DNA, 15 bp, Homo sapiens
ctataaaagaaggac

SEQ ID NO: 900440 - DNA, 15 bp, Homo sapiens
tataaaagaaggact

SEQ ID NO: 900441 - DNA, 15 bp, Homo sapiens
ataaaagaaggactc

SEQ ID NO: 900442 - DNA, 15 bp, Homo sapiens
taaaagaaggactct

SEQ ID NO: 900443 - DNA, 15 bp, Homo sapiens
aaaagaaggactctt

SEQ ID NO: 900444 - DNA, 15 bp, Homo sapiens
aaagaaggactcttt

SEQ ID NO: 900445 - DNA, 15 bp, Homo sapiens
aagaaggactctttc

SEQ ID NO: 900446 - DNA, 15 bp, Homo sapiens
agaaggactctttct

SEQ ID NO: 900447 - DNA, 15 bp, Homo sapiens
gaaggactctttctg

SEQ ID NO: 900448 - DNA, 15 bp, Homo sapiens
aaggactctttctgg

SEQ ID NO: 900449 - DNA, 15 bp, Homo sapiens
aggactctttctgga

SEQ ID NO: 900450 - DNA, 15 bp, Homo sapiens
ggactctttctggat

SEQ ID NO: 900451 - DNA, 15 bp, Homo sapiens
gactctttctggata

SEQ ID NO: 900452 - DNA, 15 bp, Homo sapiens
actctttctggatag

SEQ ID NO: 900453 - DNA, 15 bp, Homo sapiens
ctctttctggatagt

SEQ ID NO: 900454 - DNA, 15 bp, Homo sapiens
tctttctggatagtt

SEQ ID NO: 900455 - DNA, 15 bp, Homo sapiens
ctttctggatagttg

SEQ ID NO: 900456 - DNA, 15 bp, Homo sapiens
tttctggatagttgg

SEQ ID NO: 900457 - DNA, 15 bp, Homo sapiens
ttctggatagttggg

SEQ ID NO: 900458 - DNA, 15 bp, Homo sapiens
tctggatagttggga

SEQ ID NO: 900459 - DNA, 15 bp, Homo sapiens
ctggatagttgggag

SEQ ID NO: 900460 - DNA, 15 bp, Homo sapiens
tggatagttgggagg

SEQ ID NO: 900461 - DNA, 15 bp, Homo sapiens
ggatagttgggaggg

SEQ ID NO: 900462 - DNA, 15 bp, Homo sapiens
gatagttgggagggc

SEQ ID NO: 900463 - DNA, 15 bp, Homo sapiens
atagttgggagggct

SEQ ID NO: 900464 - DNA, 15 bp, Homo sapiens
tagttgggagggctg

SEQ ID NO: 900465 - DNA, 15 bp, Homo sapiens
agttgggagggctga

SEQ ID NO: 900466 - DNA, 15 bp, Homo sapiens
gttgggagggctgaa

SEQ ID NO: 900467 - DNA, 15 bp, Homo sapiens
ttgggagggctgaag

SEQ ID NO: 900468 - DNA, 15 bp, Homo sapiens
tgggagggctgaagg

SEQ ID NO: 900469 - DNA, 15 bp, Homo sapiens
gggagggctgaagga

SEQ ID NO: 900470 - DNA, 15 bp, Homo sapiens
ggagggctgaaggaa

SEQ ID NO: 900471 - DNA, 15 bp, Homo sapiens
gagggctgaaggaat

SEQ ID NO: 900472 - DNA, 15 bp, Homo sapiens
agggctgaaggaatg

SEQ ID NO: 900473 - DNA, 15 bp, Homo sapiens
gggctgaaggaatgt

SEQ ID NO: 900474 - DNA, 15 bp, Homo sapiens
ggctgaaggaatgtt

SEQ ID NO: 900475 - DNA, 15 bp, Homo sapiens
gctgaaggaatgttt

SEQ ID NO: 900476 - DNA, 15 bp, Homo sapiens
ctgaaggaatgtttg

SEQ ID NO: 900477 - DNA, 15 bp, Homo sapiens
tgaaggaatgtttga

SEQ ID NO: 900478 - DNA, 15 bp, Homo sapiens
gaaggaatgtttgac

SEQ ID NO: 900479 - DNA, 15 bp, Homo sapiens
aaggaatgtttgaca

SEQ ID NO: 900480 - DNA, 15 bp, Homo sapiens
aggaatgtttgacac

SEQ ID NO: 900481 - DNA, 15 bp, Homo sapiens
ggaatgtttgacaca

SEQ ID NO: 900482 - DNA, 15 bp, Homo sapiens
gaatgtttgacacat

SEQ ID NO: 900483 - DNA, 15 bp, Homo sapiens
aatgtttgacacatc

SEQ ID NO: 900484 - DNA, 15 bp, Homo sapiens
atgtttgacacatca

SEQ ID NO: 900485 - DNA, 15 bp, Homo sapiens
tgtttgacacatcat

SEQ ID NO: 900486 - DNA, 15 bp, Homo sapiens
gtttgacacatcata

SEQ ID NO: 900487 - DNA, 15 bp, Homo sapiens
tttgacacatcatag

SEQ ID NO: 900488 - DNA, 15 bp, Homo sapiens
ttgacacatcatagg

SEQ ID NO: 900489 - DNA, 15 bp, Homo sapiens
tgacacatcataggt

SEQ ID NO: 900490 - DNA, 15 bp, Homo sapiens
gacacatcataggtg

SEQ ID NO: 900491 - DNA, 15 bp, Homo sapiens
acacatcataggtgt

SEQ ID NO: 900492 - DNA, 15 bp, Homo sapiens
cacatcataggtgtt

SEQ ID NO: 900493 - DNA, 15 bp, Homo sapiens
acatcataggtgttt

SEQ ID NO: 900494 - DNA, 15 bp, Homo sapiens
catcataggtgttta

SEQ ID NO: 900495 - DNA, 15 bp, Homo sapiens
atcataggtgtttaa

SEQ ID NO: 900496 - DNA, 15 bp, Homo sapiens
tcataggtgtttaaa

SEQ ID NO: 900497 - DNA, 15 bp, Homo sapiens
cataggtgtttaaaa

SEQ ID NO: 900498 - DNA, 15 bp, Homo sapiens
ataggtgtttaaaat

SEQ ID NO: 900499 - DNA, 15 bp, Homo sapiens
taggtgtttaaaatg

SEQ ID NO: 900500 - DNA, 15 bp, Homo sapiens
aggtgtttaaaatgg

SEQ ID NO: 900501 - DNA, 15 bp, Homo sapiens
ggtgtttaaaatggc

SEQ ID NO: 900502 - DNA, 15 bp, Homo sapiens
gtgtttaaaatggca

SEQ ID NO: 900503 - DNA, 15 bp, Homo sapiens
tgtttaaaatggcaa

SEQ ID NO: 900504 - DNA, 15 bp, Homo sapiens
gtttaaaatggcaac

SEQ ID NO: 900505 - DNA, 15 bp, Homo sapiens
tttaaaatggcaact

SEQ ID NO: 900506 - DNA, 15 bp, Homo sapiens
ttaaaatggcaacta

SEQ ID NO: 900507 - DNA, 15 bp, Homo sapiens
taaaatggcaactat

SEQ ID NO: 900508 - DNA, 15 bp, Homo sapiens
aaaatggcaactata

SEQ ID NO: 900509 - DNA, 15 bp, Homo sapiens
aaatggcaactatag

SEQ ID NO: 900510 - DNA, 15 bp, Homo sapiens
aatggcaactatagt

SEQ ID NO: 900511 - DNA, 15 bp, Homo sapiens
atggcaactatagtt

SEQ ID NO: 900512 - DNA, 15 bp, Homo sapiens
tggcaactatagttt

SEQ ID NO: 900513 - DNA, 15 bp, Homo sapiens
ggcaactatagtttt

SEQ ID NO: 900514 - DNA, 15 bp, Homo sapiens
gcaactatagttttt

SEQ ID NO: 900515 - DNA, 15 bp, Homo sapiens
caactatagtttttt

SEQ ID NO: 900516 - DNA, 15 bp, Homo sapiens
aactatagttttttt

SEQ ID NO: 900517 - DNA, 15 bp, Homo sapiens
actatagtttttttt

SEQ ID NO: 900518 - DNA, 15 bp, Homo sapiens
ctatagttttttttg

SEQ ID NO: 900519 - DNA, 15 bp, Homo sapiens
tatagttttttttgt

SEQ ID NO: 900520 - DNA, 15 bp, Homo sapiens
atagttttttttgtt

SEQ ID NO: 900521 - DNA, 15 bp, Homo sapiens
tagttttttttgttt

SEQ ID NO: 900522 - DNA, 15 bp, Homo sapiens
agttttttttgtttg

SEQ ID NO: 900523 - DNA, 15 bp, Homo sapiens
gttttttttgtttgt

SEQ ID NO: 900524 - DNA, 15 bp, Homo sapiens
ttttttttgtttgtt

SEQ ID NO: 900525 - DNA, 15 bp, Homo sapiens
ttttttgtttgtttt

SEQ ID NO: 900526 - DNA, 15 bp, Homo sapiens
tttttgtttgttttg

SEQ ID NO: 900527 - DNA, 15 bp, Homo sapiens
ttttgtttgttttgt

SEQ ID NO: 900528 - DNA, 15 bp, Homo sapiens
tttgtttgttttgtg

SEQ ID NO: 900529 - DNA, 15 bp, Homo sapiens
ttgtttgttttgtgt

SEQ ID NO: 900530 - DNA, 15 bp, Homo sapiens
tgtttgttttgtgtg

SEQ ID NO: 900531 - DNA, 15 bp, Homo sapiens
gtttgttttgtgtgt

SEQ ID NO: 900532 - DNA, 15 bp, Homo sapiens
tttgttttgtgtgtg

SEQ ID NO: 900533 - DNA, 15 bp, Homo sapiens
ttgttttgtgtgtgt

SEQ ID NO: 900534 - DNA, 15 bp, Homo sapiens
tgttttgtgtgtgtg

SEQ ID NO: 900535 - DNA, 15 bp, Homo sapiens
gttttgtgtgtgtgt

SEQ ID NO: 900536 - DNA, 15 bp, Homo sapiens
ttttgtgtgtgtgtt

SEQ ID NO: 900537 - DNA, 15 bp, Homo sapiens
tttgtgtgtgtgttt

SEQ ID NO: 900538 - DNA, 15 bp, Homo sapiens
ttgtgtgtgtgtttt

SEQ ID NO: 900539 - DNA, 15 bp, Homo sapiens
tgtgtgtgtgttttt

SEQ ID NO: 900540 - DNA, 15 bp, Homo sapiens
gtgtgtgtgtttttt

SEQ ID NO: 900541 - DNA, 15 bp, Homo sapiens
tgtgtgtgttttttt

SEQ ID NO: 900542 - DNA, 15 bp, Homo sapiens
gtgtgtgtttttttc

SEQ ID NO: 900543 - DNA, 15 bp, Homo sapiens
tgtgtgtttttttct

SEQ ID NO: 900544 - DNA, 15 bp, Homo sapiens
gtgtgtttttttctt

SEQ ID NO: 900545 - DNA, 15 bp, Homo sapiens
tgtgtttttttctta

SEQ ID NO: 900546 - DNA, 15 bp, Homo sapiens
gtgtttttttcttaa

SEQ ID NO: 900547 - DNA, 15 bp, Homo sapiens
tgtttttttcttaac

SEQ ID NO: 900548 - DNA, 15 bp, Homo sapiens
gtttttttcttaact

SEQ ID NO: 900549 - DNA, 15 bp, Homo sapiens
tttttttcttaactt

SEQ ID NO: 900550 - DNA, 15 bp, Homo sapiens
ttttttcttaacttt

SEQ ID NO: 900551 - DNA, 15 bp, Homo sapiens
tttttcttaactttc

SEQ ID NO: 900552 - DNA, 15 bp, Homo sapiens
ttttcttaactttca

SEQ ID NO: 900553 - DNA, 15 bp, Homo sapiens
tttcttaactttcat

SEQ ID NO: 900554 - DNA, 15 bp, Homo sapiens
ttcttaactttcatt

SEQ ID NO: 900555 - DNA, 15 bp, Homo sapiens
tcttaactttcattt

SEQ ID NO: 900556 - DNA, 15 bp, Homo sapiens
cttaactttcatttt

SEQ ID NO: 900557 - DNA, 15 bp, Homo sapiens
ttaactttcatttta

SEQ ID NO: 900558 - DNA, 15 bp, Homo sapiens
taactttcattttaa

SEQ ID NO: 900559 - DNA, 15 bp, Homo sapiens
aactttcattttaag

SEQ ID NO: 900560 - DNA, 15 bp, Homo sapiens
actttcattttaagt

SEQ ID NO: 900561 - DNA, 15 bp, Homo sapiens
ctttcattttaagtt

SEQ ID NO: 900562 - DNA, 15 bp, Homo sapiens
tttcattttaagttg

SEQ ID NO: 900563 - DNA, 15 bp, Homo sapiens
ttcattttaagttgc

SEQ ID NO: 900564 - DNA, 15 bp, Homo sapiens
tcattttaagttgca

SEQ ID NO: 900565 - DNA, 15 bp, Homo sapiens
cattttaagttgcag

SEQ ID NO: 900566 - DNA, 15 bp, Homo sapiens
attttaagttgcagg

SEQ ID NO: 900567 - DNA, 15 bp, Homo sapiens
ttttaagttgcaggg

SEQ ID NO: 900568 - DNA, 15 bp, Homo sapiens
tttaagttgcagggt

SEQ ID NO: 900569 - DNA, 15 bp, Homo sapiens
ttaagttgcagggta

SEQ ID NO: 900570 - DNA, 15 bp, Homo sapiens
taagttgcagggtac

SEQ ID NO: 900571 - DNA, 15 bp, Homo sapiens
aagttgcagggtaca

SEQ ID NO: 900572 - DNA, 15 bp, Homo sapiens
agttgcagggtacac

SEQ ID NO: 900573 - DNA, 15 bp, Homo sapiens
gttgcagggtacacg

SEQ ID NO: 900574 - DNA, 15 bp, Homo sapiens
ttgcagggtacacgt

SEQ ID NO: 900575 - DNA, 15 bp, Homo sapiens
tgcagggtacacgtt

SEQ ID NO: 900576 - DNA, 15 bp, Homo sapiens
gcagggtacacgttc

SEQ ID NO: 900577 - DNA, 15 bp, Homo sapiens
cagggtacacgttca

SEQ ID NO: 900578 - DNA, 15 bp, Homo sapiens
agggtacacgttcag

SEQ ID NO: 900579 - DNA, 15 bp, Homo sapiens
gggtacacgttcagg

SEQ ID NO: 900580 - DNA, 15 bp, Homo sapiens
ggtacacgttcaggt

SEQ ID NO: 900581 - DNA, 15 bp, Homo sapiens
gtacacgttcaggtt

SEQ ID NO: 900582 - DNA, 15 bp, Homo sapiens
tacacgttcaggttt

SEQ ID NO: 900583 - DNA, 15 bp, Homo sapiens
acacgttcaggtttg

SEQ ID NO: 900584 - DNA, 15 bp, Homo sapiens
cacgttcaggtttgt

SEQ ID NO: 900585 - DNA, 15 bp, Homo sapiens
acgttcaggtttgtt

SEQ ID NO: 900586 - DNA, 15 bp, Homo sapiens
cgttcaggtttgtta

SEQ ID NO: 900587 - DNA, 15 bp, Homo sapiens
gttcaggtttgttac

SEQ ID NO: 900588 - DNA, 15 bp, Homo sapiens
ttcaggtttgttaca

SEQ ID NO: 900589 - DNA, 15 bp, Homo sapiens
tcaggtttgttacat

SEQ ID NO: 900590 - DNA, 15 bp, Homo sapiens
caggtttgttacata

SEQ ID NO: 900591 - DNA, 15 bp, Homo sapiens
aggtttgttacatag

SEQ ID NO: 900592 - DNA, 15 bp, Homo sapiens
ggtttgttacatagg

SEQ ID NO: 900593 - DNA, 15 bp, Homo sapiens
gtttgttacataggt

SEQ ID NO: 900594 - DNA, 15 bp, Homo sapiens
tttgttacataggta

SEQ ID NO: 900595 - DNA, 15 bp, Homo sapiens
ttgttacataggtac

SEQ ID NO: 900596 - DNA, 15 bp, Homo sapiens
tgttacataggtaca

SEQ ID NO: 900597 - DNA, 15 bp, Homo sapiens
gttacataggtacac

SEQ ID NO: 900598 - DNA, 15 bp, Homo sapiens
ttacataggtacact

SEQ ID NO: 900599 - DNA, 15 bp, Homo sapiens
tacataggtacactt

SEQ ID NO: 900600 - DNA, 15 bp, Homo sapiens
acataggtacacttg

SEQ ID NO: 900601 - DNA, 15 bp, Homo sapiens
cataggtacacttgt

SEQ ID NO: 900602 - DNA, 15 bp, Homo sapiens
ataggtacacttgtg

SEQ ID NO: 900603 - DNA, 15 bp, Homo sapiens
taggtacacttgtgt

SEQ ID NO: 900604 - DNA, 15 bp, Homo sapiens
aggtacacttgtgtc

SEQ ID NO: 900605 - DNA, 15 bp, Homo sapiens
ggtacacttgtgtca

SEQ ID NO: 900606 - DNA, 15 bp, Homo sapiens
gtacacttgtgtcaa

SEQ ID NO: 900607 - DNA, 15 bp, Homo sapiens
tacacttgtgtcaag

SEQ ID NO: 900608 - DNA, 15 bp, Homo sapiens
acacttgtgtcaagg

SEQ ID NO: 900609 - DNA, 15 bp, Homo sapiens
cacttgtgtcaaggg

SEQ ID NO: 900610 - DNA, 15 bp, Homo sapiens
acttgtgtcaaggga

SEQ ID NO: 900611 - DNA, 15 bp, Homo sapiens
cttgtgtcaagggag

SEQ ID NO: 900612 - DNA, 15 bp, Homo sapiens
ttgtgtcaagggagt

SEQ ID NO: 900613 - DNA, 15 bp, Homo sapiens
tgtgtcaagggagtt

SEQ ID NO: 900614 - DNA, 15 bp, Homo sapiens
gtgtcaagggagttt

SEQ ID NO: 900615 - DNA, 15 bp, Homo sapiens
tgtcaagggagtttg

SEQ ID NO: 900616 - DNA, 15 bp, Homo sapiens
gtcaagggagtttgt

SEQ ID NO: 900617 - DNA, 15 bp, Homo sapiens
tcaagggagtttgtt

SEQ ID NO: 900618 - DNA, 15 bp, Homo sapiens
caagggagtttgttg

SEQ ID NO: 900619 - DNA, 15 bp, Homo sapiens
aagggagtttgttgt

SEQ ID NO: 900620 - DNA, 15 bp, Homo sapiens
agggagtttgttgtg

SEQ ID NO: 900621 - DNA, 15 bp, Homo sapiens
gggagtttgttgtgc

SEQ ID NO: 900622 - DNA, 15 bp, Homo sapiens
ggagtttgttgtgca

SEQ ID NO: 900623 - DNA, 15 bp, Homo sapiens
gagtttgttgtgcag

SEQ ID NO: 900624 - DNA, 15 bp, Homo sapiens
agtttgttgtgcaga

SEQ ID NO: 900625 - DNA, 15 bp, Homo sapiens
gtttgttgtgcagat

SEQ ID NO: 900626 - DNA, 15 bp, Homo sapiens
tttgttgtgcagatt

SEQ ID NO: 900627 - DNA, 15 bp, Homo sapiens
ttgttgtgcagatta

SEQ ID NO: 900628 - DNA, 15 bp, Homo sapiens
tgttgtgcagattat

SEQ ID NO: 900629 - DNA, 15 bp, Homo sapiens
gttgtgcagattatt

SEQ ID NO: 900630 - DNA, 15 bp, Homo sapiens
ttgtgcagattattt

SEQ ID NO: 900631 - DNA, 15 bp, Homo sapiens
tgtgcagattatttc

SEQ ID NO: 900632 - DNA, 15 bp, Homo sapiens
gtgcagattatttca

SEQ ID NO: 900633 - DNA, 15 bp, Homo sapiens
tgcagattatttcat

SEQ ID NO: 900634 - DNA, 15 bp, Homo sapiens
gcagattatttcatc

SEQ ID NO: 900635 - DNA, 15 bp, Homo sapiens
cagattatttcatca

SEQ ID NO: 900636 - DNA, 15 bp, Homo sapiens
agattatttcatcac

SEQ ID NO: 900637 - DNA, 15 bp, Homo sapiens
gattatttcatcacc

SEQ ID NO: 900638 - DNA, 15 bp, Homo sapiens
attatttcatcaccc

SEQ ID NO: 900639 - DNA, 15 bp, Homo sapiens
ttatttcatcaccca

SEQ ID NO: 900640 - DNA, 15 bp, Homo sapiens
tatttcatcacccag

SEQ ID NO: 900641 - DNA, 15 bp, Homo sapiens
atttcatcacccagg

SEQ ID NO: 900642 - DNA, 15 bp, Homo sapiens
tttcatcacccaggt

SEQ ID NO: 900643 - DNA, 15 bp, Homo sapiens
ttcatcacccaggta

SEQ ID NO: 900644 - DNA, 15 bp, Homo sapiens
tcatcacccaggtat

SEQ ID NO: 900645 - DNA, 15 bp, Homo sapiens
catcacccaggtatt

SEQ ID NO: 900646 - DNA, 15 bp, Homo sapiens
atcacccaggtatta

SEQ ID NO: 900647 - DNA, 15 bp, Homo sapiens
tcacccaggtattaa

SEQ ID NO: 900648 - DNA, 15 bp, Homo sapiens
cacccaggtattaag

SEQ ID NO: 900649 - DNA, 15 bp, Homo sapiens
acccaggtattaagt

SEQ ID NO: 900650 - DNA, 15 bp, Homo sapiens
cccaggtattaagtc

SEQ ID NO: 900651 - DNA, 15 bp, Homo sapiens
ccaggtattaagtct

SEQ ID NO: 900652 - DNA, 15 bp, Homo sapiens
caggtattaagtcta

SEQ ID NO: 900653 - DNA, 15 bp, Homo sapiens
aggtattaagtctag

SEQ ID NO: 900654 - DNA, 15 bp, Homo sapiens
ggtattaagtctagt

SEQ ID NO: 900655 - DNA, 15 bp, Homo sapiens
gtattaagtctagta

SEQ ID NO: 900656 - DNA, 15 bp, Homo sapiens
tattaagtctagtac

SEQ ID NO: 900657 - DNA, 15 bp, Homo sapiens
attaagtctagtacc

SEQ ID NO: 900658 - DNA, 15 bp, Homo sapiens
ttaagtctagtaccc

SEQ ID NO: 900659 - DNA, 15 bp, Homo sapiens
taagtctagtaccca

SEQ ID NO: 900660 - DNA, 15 bp, Homo sapiens
aagtctagtacccat

SEQ ID NO: 900661 - DNA, 15 bp, Homo sapiens
agtctagtacccatt

SEQ ID NO: 900662 - DNA, 15 bp, Homo sapiens
gtctagtacccatta

SEQ ID NO: 900663 - DNA, 15 bp, Homo sapiens
tctagtacccattat

SEQ ID NO: 900664 - DNA, 15 bp, Homo sapiens
ctagtacccattatt

SEQ ID NO: 900665 - DNA, 15 bp, Homo sapiens
tagtacccattatta

SEQ ID NO: 900666 - DNA, 15 bp, Homo sapiens
agtacccattattaa

SEQ ID NO: 900667 - DNA, 15 bp, Homo sapiens
gtacccattattaaa

SEQ ID NO: 900668 - DNA, 15 bp, Homo sapiens
tacccattattaaag

SEQ ID NO: 900669 - DNA, 15 bp, Homo sapiens
acccattattaaaga

SEQ ID NO: 900670 - DNA, 15 bp, Homo sapiens
cccattattaaagaa

SEQ ID NO: 900671 - DNA, 15 bp, Homo sapiens
ccattattaaagaaa

SEQ ID NO: 900672 - DNA, 15 bp, Homo sapiens
cattattaaagaaaa

SEQ ID NO: 900673 - DNA, 15 bp, Homo sapiens
attattaaagaaaat

SEQ ID NO: 900674 - DNA, 15 bp, Homo sapiens
ttattaaagaaaatg

SEQ ID NO: 900675 - DNA, 15 bp, Homo sapiens
tattaaagaaaatgt

SEQ ID NO: 900676 - DNA, 15 bp, Homo sapiens
attaaagaaaatgtg

SEQ ID NO: 900677 - DNA, 15 bp, Homo sapiens
ttaaagaaaatgtgg

SEQ ID NO: 900678 - DNA, 15 bp, Homo sapiens
taaagaaaatgtggt

SEQ ID NO: 900679 - DNA, 15 bp, Homo sapiens
aaagaaaatgtggta

SEQ ID NO: 900680 - DNA, 15 bp, Homo sapiens
aagaaaatgtggtac

SEQ ID NO: 900681 - DNA, 15 bp, Homo sapiens
agaaaatgtggtacg

SEQ ID NO: 900682 - DNA, 15 bp, Homo sapiens
gaaaatgtggtacgt

SEQ ID NO: 900683 - DNA, 15 bp, Homo sapiens
aaaatgtggtacgta

SEQ ID NO: 900684 - DNA, 15 bp, Homo sapiens
aaatgtggtacgtat

SEQ ID NO: 900685 - DNA, 15 bp, Homo sapiens
aatgtggtacgtata

SEQ ID NO: 900686 - DNA, 15 bp, Homo sapiens
atgtggtacgtatac

SEQ ID NO: 900687 - DNA, 15 bp, Homo sapiens
tgtggtacgtatacg

SEQ ID NO: 900688 - DNA, 15 bp, Homo sapiens
gtggtacgtatacgt

SEQ ID NO: 900689 - DNA, 15 bp, Homo sapiens
tggtacgtatacgtc

SEQ ID NO: 900690 - DNA, 15 bp, Homo sapiens
ggtacgtatacgtca

SEQ ID NO: 900691 - DNA, 15 bp, Homo sapiens
gtacgtatacgtcat

SEQ ID NO: 900692 - DNA, 15 bp, Homo sapiens
tacgtatacgtcatg

SEQ ID NO: 900693 - DNA, 15 bp, Homo sapiens
acgtatacgtcatgg

SEQ ID NO: 900694 - DNA, 15 bp, Homo sapiens
cgtatacgtcatgga

SEQ ID NO: 900695 - DNA, 15 bp, Homo sapiens
gtatacgtcatggaa

SEQ ID NO: 900696 - DNA, 15 bp, Homo sapiens
tatacgtcatggaat

SEQ ID NO: 900697 - DNA, 15 bp, Homo sapiens
atacgtcatggaata

SEQ ID NO: 900698 - DNA, 15 bp, Homo sapiens
tacgtcatggaatat

SEQ ID NO: 900699 - DNA, 15 bp, Homo sapiens
acgtcatggaatatt

SEQ ID NO: 900700 - DNA, 15 bp, Homo sapiens
cgtcatggaatatta

SEQ ID NO: 900701 - DNA, 15 bp, Homo sapiens
gtcatggaatattat

SEQ ID NO: 900702 - DNA, 15 bp, Homo sapiens
tcatggaatattatg

SEQ ID NO: 900703 - DNA, 15 bp, Homo sapiens
catggaatattatgc

SEQ ID NO: 900704 - DNA, 15 bp, Homo sapiens
atggaatattatgca

SEQ ID NO: 900705 - DNA, 15 bp, Homo sapiens
tggaatattatgcag

SEQ ID NO: 900706 - DNA, 15 bp, Homo sapiens
ggaatattatgcagc

SEQ ID NO: 900707 - DNA, 15 bp, Homo sapiens
gaatattatgcagcc

SEQ ID NO: 900708 - DNA, 15 bp, Homo sapiens
aatattatgcagcca

SEQ ID NO: 900709 - DNA, 15 bp, Homo sapiens
atattatgcagccat

SEQ ID NO: 900710 - DNA, 15 bp, Homo sapiens
tattatgcagccata

SEQ ID NO: 900711 - DNA, 15 bp, Homo sapiens
attatgcagccataa

SEQ ID NO: 900712 - DNA, 15 bp, Homo sapiens
ttatgcagccataaa

SEQ ID NO: 900713 - DNA, 15 bp, Homo sapiens
tatgcagccataaaa

SEQ ID NO: 900714 - DNA, 15 bp, Homo sapiens
atgcagccataaaaa

SEQ ID NO: 900715 - DNA, 15 bp, Homo sapiens
tgcagccataaaaag

SEQ ID NO: 900716 - DNA, 15 bp, Homo sapiens
gcagccataaaaagg

SEQ ID NO: 900717 - DNA, 15 bp, Homo sapiens
cagccataaaaagga

SEQ ID NO: 900718 - DNA, 15 bp, Homo sapiens
agccataaaaaggaa

SEQ ID NO: 900719 - DNA, 15 bp, Homo sapiens
gccataaaaaggaag

SEQ ID NO: 900720 - DNA, 15 bp, Homo sapiens
ccataaaaaggaagg

SEQ ID NO: 900721 - DNA, 15 bp, Homo sapiens
cataaaaaggaagga

SEQ ID NO: 900722 - DNA, 15 bp, Homo sapiens
ataaaaaggaaggag

SEQ ID NO: 900723 - DNA, 15 bp, Homo sapiens
taaaaaggaaggaga

SEQ ID NO: 900724 - DNA, 15 bp, Homo sapiens
aaaaaggaaggagat

SEQ ID NO: 900725 - DNA, 15 bp, Homo sapiens
aaaaggaaggagatc

SEQ ID NO: 900726 - DNA, 15 bp, Homo sapiens
aaaggaaggagatca

SEQ ID NO: 900727 - DNA, 15 bp, Homo sapiens
aaggaaggagatcat

SEQ ID NO: 900728 - DNA, 15 bp, Homo sapiens
aggaaggagatcatg

SEQ ID NO: 900729 - DNA, 15 bp, Homo sapiens
ggaaggagatcatgt

SEQ ID NO: 900730 - DNA, 15 bp, Homo sapiens
gaaggagatcatgtc

SEQ ID NO: 900731 - DNA, 15 bp, Homo sapiens
aaggagatcatgtcc

SEQ ID NO: 900732 - DNA, 15 bp, Homo sapiens
aggagatcatgtcct

SEQ ID NO: 900733 - DNA, 15 bp, Homo sapiens
ggagatcatgtcctt

SEQ ID NO: 900734 - DNA, 15 bp, Homo sapiens
gagatcatgtccttt

SEQ ID NO: 900735 - DNA, 15 bp, Homo sapiens
agatcatgtcctttg

SEQ ID NO: 900736 - DNA, 15 bp, Homo sapiens
gatcatgtcctttgc

SEQ ID NO: 900737 - DNA, 15 bp, Homo sapiens
atcatgtcctttgca

SEQ ID NO: 900738 - DNA, 15 bp, Homo sapiens
tcatgtcctttgcag

SEQ ID NO: 900739 - DNA, 15 bp, Homo sapiens
catgtcctttgcagg

SEQ ID NO: 900740 - DNA, 15 bp, Homo sapiens
atgtcctttgcaggg

SEQ ID NO: 900741 - DNA, 15 bp, Homo sapiens
tgtcctttgcaggga

SEQ ID NO: 900742 - DNA, 15 bp, Homo sapiens
gtcctttgcagggac

SEQ ID NO: 900743 - DNA, 15 bp, Homo sapiens
tcctttgcagggaca

SEQ ID NO: 900744 - DNA, 15 bp, Homo sapiens
cctttgcagggacat

SEQ ID NO: 900745 - DNA, 15 bp, Homo sapiens
ctttgcagggacatg

SEQ ID NO: 900746 - DNA, 15 bp, Homo sapiens
tttgcagggacatgg

SEQ ID NO: 900747 - DNA, 15 bp, Homo sapiens
ttgcagggacatgga

SEQ ID NO: 900748 - DNA, 15 bp, Homo sapiens
tgcagggacatggat

SEQ ID NO: 900749 - DNA, 15 bp, Homo sapiens
gcagggacatggatg

SEQ ID NO: 900750 - DNA, 15 bp, Homo sapiens
cagggacatggatgg

SEQ ID NO: 900751 - DNA, 15 bp, Homo sapiens
agggacatggatgga

SEQ ID NO: 900752 - DNA, 15 bp, Homo sapiens
gggacatggatggag

SEQ ID NO: 900753 - DNA, 15 bp, Homo sapiens
ggacatggatggagc

SEQ ID NO: 900754 - DNA, 15 bp, Homo sapiens
gacatggatggagct

SEQ ID NO: 900755 - DNA, 15 bp, Homo sapiens
acatggatggagctg

SEQ ID NO: 900756 - DNA, 15 bp, Homo sapiens
catggatggagctgg

SEQ ID NO: 900757 - DNA, 15 bp, Homo sapiens
atggatggagctgga

SEQ ID NO: 900758 - DNA, 15 bp, Homo sapiens
tggatggagctggag

SEQ ID NO: 900759 - DNA, 15 bp, Homo sapiens
ggatggagctggagg

SEQ ID NO: 900760 - DNA, 15 bp, Homo sapiens
gatggagctggaggc

SEQ ID NO: 900761 - DNA, 15 bp, Homo sapiens
atggagctggaggcc

SEQ ID NO: 900762 - DNA, 15 bp, Homo sapiens
tggagctggaggcca

SEQ ID NO: 900763 - DNA, 15 bp, Homo sapiens
ggagctggaggccaa

SEQ ID NO: 900764 - DNA, 15 bp, Homo sapiens
gagctggaggccaaa

SEQ ID NO: 900765 - DNA, 15 bp, Homo sapiens
agctggaggccaaat

SEQ ID NO: 900766 - DNA, 15 bp, Homo sapiens
gctggaggccaaata

SEQ ID NO: 900767 - DNA, 15 bp, Homo sapiens
ctggaggccaaatat

SEQ ID NO: 900768 - DNA, 15 bp, Homo sapiens
tggaggccaaatatt

SEQ ID NO: 900769 - DNA, 15 bp, Homo sapiens
ggaggccaaatatta

SEQ ID NO: 900770 - DNA, 15 bp, Homo sapiens
gaggccaaatattat

SEQ ID NO: 900771 - DNA, 15 bp, Homo sapiens
aggccaaatattatc

SEQ ID NO: 900772 - DNA, 15 bp, Homo sapiens
ggccaaatattatcc

SEQ ID NO: 900773 - DNA, 15 bp, Homo sapiens
gccaaatattatcct

SEQ ID NO: 900774 - DNA, 15 bp, Homo sapiens
ccaaatattatcctt

SEQ ID NO: 900775 - DNA, 15 bp, Homo sapiens
caaatattatcctta

SEQ ID NO: 900776 - DNA, 15 bp, Homo sapiens
aaatattatccttag

SEQ ID NO: 900777 - DNA, 15 bp, Homo sapiens
aatattatccttagc

SEQ ID NO: 900778 - DNA, 15 bp, Homo sapiens
atattatccttagca

SEQ ID NO: 900779 - DNA, 15 bp, Homo sapiens
tattatccttagcaa

SEQ ID NO: 900780 - DNA, 15 bp, Homo sapiens
attatccttagcaaa

SEQ ID NO: 900781 - DNA, 15 bp, Homo sapiens
ttatccttagcaaac

SEQ ID NO: 900782 - DNA, 15 bp, Homo sapiens
tatccttagcaaact

SEQ ID NO: 900783 - DNA, 15 bp, Homo sapiens
atccttagcaaacta

SEQ ID NO: 900784 - DNA, 15 bp, Homo sapiens
tccttagcaaactaa

SEQ ID NO: 900785 - DNA, 15 bp, Homo sapiens
ccttagcaaactaac

SEQ ID NO: 900786 - DNA, 15 bp, Homo sapiens
cttagcaaactaaca

SEQ ID NO: 900787 - DNA, 15 bp, Homo sapiens
ttagcaaactaacac

SEQ ID NO: 900788 - DNA, 15 bp, Homo sapiens
tagcaaactaacaca

SEQ ID NO: 900789 - DNA, 15 bp, Homo sapiens
agcaaactaacacag

SEQ ID NO: 900790 - DNA, 15 bp, Homo sapiens
gcaaactaacacagg

SEQ ID NO: 900791 - DNA, 15 bp, Homo sapiens
caaactaacacaggg

SEQ ID NO: 900792 - DNA, 15 bp, Homo sapiens
aaactaacacaggga

SEQ ID NO: 900793 - DNA, 15 bp, Homo sapiens
aactaacacagggac

SEQ ID NO: 900794 - DNA, 15 bp, Homo sapiens
actaacacagggaca

SEQ ID NO: 900795 - DNA, 15 bp, Homo sapiens
ctaacacagggacac

SEQ ID NO: 900796 - DNA, 15 bp, Homo sapiens
taacacagggacaca

SEQ ID NO: 900797 - DNA, 15 bp, Homo sapiens
aacacagggacacaa

SEQ ID NO: 900798 - DNA, 15 bp, Homo sapiens
acacagggacacaaa

SEQ ID NO: 900799 - DNA, 15 bp, Homo sapiens
cacagggacacaaaa

SEQ ID NO: 900800 - DNA, 15 bp, Homo sapiens
acagggacacaaaac

SEQ ID NO: 900801 - DNA, 15 bp, Homo sapiens
cagggacacaaaact

SEQ ID NO: 900802 - DNA, 15 bp, Homo sapiens
agggacacaaaacta

SEQ ID NO: 900803 - DNA, 15 bp, Homo sapiens
gggacacaaaactaa

SEQ ID NO: 900804 - DNA, 15 bp, Homo sapiens
ggacacaaaactaaa

SEQ ID NO: 900805 - DNA, 15 bp, Homo sapiens
gacacaaaactaaat

SEQ ID NO: 900806 - DNA, 15 bp, Homo sapiens
acacaaaactaaata

SEQ ID NO: 900807 - DNA, 15 bp, Homo sapiens
cacaaaactaaatac

SEQ ID NO: 900808 - DNA, 15 bp, Homo sapiens
acaaaactaaatact

SEQ ID NO: 900809 - DNA, 15 bp, Homo sapiens
caaaactaaatactg

SEQ ID NO: 900810 - DNA, 15 bp, Homo sapiens
aaaactaaatactgt

SEQ ID NO: 900811 - DNA, 15 bp, Homo sapiens
aaactaaatactgta

SEQ ID NO: 900812 - DNA, 15 bp, Homo sapiens
aactaaatactgtat

SEQ ID NO: 900813 - DNA, 15 bp, Homo sapiens
actaaatactgtata

SEQ ID NO: 900814 - DNA, 15 bp, Homo sapiens
ctaaatactgtatat

SEQ ID NO: 900815 - DNA, 15 bp, Homo sapiens
taaatactgtatatt

SEQ ID NO: 900816 - DNA, 15 bp, Homo sapiens
aaatactgtatattc

SEQ ID NO: 900817 - DNA, 15 bp, Homo sapiens
aatactgtatattct

SEQ ID NO: 900818 - DNA, 15 bp, Homo sapiens
atactgtatattctc

SEQ ID NO: 900819 - DNA, 15 bp, Homo sapiens
tactgtatattctca

SEQ ID NO: 900820 - DNA, 15 bp, Homo sapiens
actgtatattctcac

SEQ ID NO: 900821 - DNA, 15 bp, Homo sapiens
ctgtatattctcact

SEQ ID NO: 900822 - DNA, 15 bp, Homo sapiens
tgtatattctcactt

SEQ ID NO: 900823 - DNA, 15 bp, Homo sapiens
gtatattctcactta

SEQ ID NO: 900824 - DNA, 15 bp, Homo sapiens
tatattctcacttat

SEQ ID NO: 900825 - DNA, 15 bp, Homo sapiens
atattctcacttata

SEQ ID NO: 900826 - DNA, 15 bp, Homo sapiens
tattctcacttataa

SEQ ID NO: 900827 - DNA, 15 bp, Homo sapiens
attctcacttataag

SEQ ID NO: 900828 - DNA, 15 bp, Homo sapiens
ttctcacttataagt

SEQ ID NO: 900829 - DNA, 15 bp, Homo sapiens
tctcacttataagtg

SEQ ID NO: 900830 - DNA, 15 bp, Homo sapiens
ctcacttataagtgg

SEQ ID NO: 900831 - DNA, 15 bp, Homo sapiens
tcacttataagtggg

SEQ ID NO: 900832 - DNA, 15 bp, Homo sapiens
cacttataagtggga

SEQ ID NO: 900833 - DNA, 15 bp, Homo sapiens
acttataagtgggag

SEQ ID NO: 900834 - DNA, 15 bp, Homo sapiens
cttataagtgggagc

SEQ ID NO: 900835 - DNA, 15 bp, Homo sapiens
ttataagtgggagct

SEQ ID NO: 900836 - DNA, 15 bp, Homo sapiens
tataagtgggagcta

SEQ ID NO: 900837 - DNA, 15 bp, Homo sapiens
ataagtgggagctaa

SEQ ID NO: 900838 - DNA, 15 bp, Homo sapiens
taagtgggagctaaa

SEQ ID NO: 900839 - DNA, 15 bp, Homo sapiens
aagtgggagctaaat

SEQ ID NO: 900840 - DNA, 15 bp, Homo sapiens
agtgggagctaaatg

SEQ ID NO: 900841 - DNA, 15 bp, Homo sapiens
gtgggagctaaatga

SEQ ID NO: 900842 - DNA, 15 bp, Homo sapiens
tgggagctaaatgat

SEQ ID NO: 900843 - DNA, 15 bp, Homo sapiens
gggagctaaatgatg

SEQ ID NO: 900844 - DNA, 15 bp, Homo sapiens
ggagctaaatgatga

SEQ ID NO: 900845 - DNA, 15 bp, Homo sapiens
gagctaaatgatgaa

SEQ ID NO: 900846 - DNA, 15 bp, Homo sapiens
agctaaatgatgaaa

SEQ ID NO: 900847 - DNA, 15 bp, Homo sapiens
gctaaatgatgaaaa

SEQ ID NO: 900848 - DNA, 15 bp, Homo sapiens
ctaaatgatgaaaac

SEQ ID NO: 900849 - DNA, 15 bp, Homo sapiens
taaatgatgaaaaca

SEQ ID NO: 900850 - DNA, 15 bp, Homo sapiens
aaatgatgaaaacac

SEQ ID NO: 900851 - DNA, 15 bp, Homo sapiens
aatgatgaaaacaca

SEQ ID NO: 900852 - DNA, 15 bp, Homo sapiens
atgatgaaaacacat

SEQ ID NO: 900853 - DNA, 15 bp, Homo sapiens
tgatgaaaacacatg

SEQ ID NO: 900854 - DNA, 15 bp, Homo sapiens
gatgaaaacacatgg

SEQ ID NO: 900855 - DNA, 15 bp, Homo sapiens
atgaaaacacatgga

SEQ ID NO: 900856 - DNA, 15 bp, Homo sapiens
tgaaaacacatggac

SEQ ID NO: 900857 - DNA, 15 bp, Homo sapiens
gaaaacacatggaca

SEQ ID NO: 900858 - DNA, 15 bp, Homo sapiens
aaaacacatggacac

SEQ ID NO: 900859 - DNA, 15 bp, Homo sapiens
aaacacatggacaca

SEQ ID NO: 900860 - DNA, 15 bp, Homo sapiens
aacacatggacacaa

SEQ ID NO: 900861 - DNA, 15 bp, Homo sapiens
acacatggacacaaa

SEQ ID NO: 900862 - DNA, 15 bp, Homo sapiens
cacatggacacaaag

SEQ ID NO: 900863 - DNA, 15 bp, Homo sapiens
acatggacacaaaga

SEQ ID NO: 900864 - DNA, 15 bp, Homo sapiens
catggacacaaagag

SEQ ID NO: 900865 - DNA, 15 bp, Homo sapiens
atggacacaaagagg

SEQ ID NO: 900866 - DNA, 15 bp, Homo sapiens
tggacacaaagaggg

SEQ ID NO: 900867 - DNA, 15 bp, Homo sapiens
ggacacaaagagggg

SEQ ID NO: 900868 - DNA, 15 bp, Homo sapiens
gacacaaagagggga

SEQ ID NO: 900869 - DNA, 15 bp, Homo sapiens
acacaaagaggggaa

SEQ ID NO: 900870 - DNA, 15 bp, Homo sapiens
cacaaagaggggaac

SEQ ID NO: 900871 - DNA, 15 bp, Homo sapiens
acaaagaggggaaca

SEQ ID NO: 900872 - DNA, 15 bp, Homo sapiens
caaagaggggaacaa

SEQ ID NO: 900873 - DNA, 15 bp, Homo sapiens
aaagaggggaacaac

SEQ ID NO: 900874 - DNA, 15 bp, Homo sapiens
aagaggggaacaaca

SEQ ID NO: 900875 - DNA, 15 bp, Homo sapiens
agaggggaacaacac

SEQ ID NO: 900876 - DNA, 15 bp, Homo sapiens
gaggggaacaacaca

SEQ ID NO: 900877 - DNA, 15 bp, Homo sapiens
aggggaacaacacac

SEQ ID NO: 900878 - DNA, 15 bp, Homo sapiens
ggggaacaacacaca

SEQ ID NO: 900879 - DNA, 15 bp, Homo sapiens
gggaacaacacacac

SEQ ID NO: 900880 - DNA, 15 bp, Homo sapiens
ggaacaacacacact

SEQ ID NO: 900881 - DNA, 15 bp, Homo sapiens
gaacaacacacactg

SEQ ID NO: 900882 - DNA, 15 bp, Homo sapiens
aacaacacacactga

SEQ ID NO: 900883 - DNA, 15 bp, Homo sapiens
acaacacacactgag

SEQ ID NO: 900884 - DNA, 15 bp, Homo sapiens
caacacacactgagg

SEQ ID NO: 900885 - DNA, 15 bp, Homo sapiens
aacacacactgaggc

SEQ ID NO: 900886 - DNA, 15 bp, Homo sapiens
acacacactgaggcc

SEQ ID NO: 900887 - DNA, 15 bp, Homo sapiens
cacacactgaggcct

SEQ ID NO: 900888 - DNA, 15 bp, Homo sapiens
acacactgaggccta

SEQ ID NO: 900889 - DNA, 15 bp, Homo sapiens
cacactgaggcctat

SEQ ID NO: 900890 - DNA, 15 bp, Homo sapiens
acactgaggcctatt

SEQ ID NO: 900891 - DNA, 15 bp, Homo sapiens
cactgaggcctattg

SEQ ID NO: 900892 - DNA, 15 bp, Homo sapiens
actgaggcctattgg

SEQ ID NO: 900893 - DNA, 15 bp, Homo sapiens
ctgaggcctattgga

SEQ ID NO: 900894 - DNA, 15 bp, Homo sapiens
tgaggcctattggag

SEQ ID NO: 900895 - DNA, 15 bp, Homo sapiens
gaggcctattggagg

SEQ ID NO: 900896 - DNA, 15 bp, Homo sapiens
aggcctattggaggg

SEQ ID NO: 900897 - DNA, 15 bp, Homo sapiens
ggcctattggagggc

SEQ ID NO: 900898 - DNA, 15 bp, Homo sapiens
gcctattggagggcg

SEQ ID NO: 900899 - DNA, 15 bp, Homo sapiens
cctattggagggcgg

SEQ ID NO: 900900 - DNA, 15 bp, Homo sapiens
ctattggagggcggg

SEQ ID NO: 900901 - DNA, 15 bp, Homo sapiens
tattggagggcggga

SEQ ID NO: 900902 - DNA, 15 bp, Homo sapiens
attggagggcgggag

SEQ ID NO: 900903 - DNA, 15 bp, Homo sapiens
ttggagggcgggagg

SEQ ID NO: 900904 - DNA, 15 bp, Homo sapiens
tggagggcgggaggt

SEQ ID NO: 900905 - DNA, 15 bp, Homo sapiens
ggagggcgggaggta

SEQ ID NO: 900906 - DNA, 15 bp, Homo sapiens
gagggcgggaggtag

SEQ ID NO: 900907 - DNA, 15 bp, Homo sapiens
agggcgggaggtagg

SEQ ID NO: 900908 - DNA, 15 bp, Homo sapiens
gggcgggaggtagga

SEQ ID NO: 900909 - DNA, 15 bp, Homo sapiens
ggcgggaggtaggag

SEQ ID NO: 900910 - DNA, 15 bp, Homo sapiens
gcgggaggtaggagg

SEQ ID NO: 900911 - DNA, 15 bp, Homo sapiens
cgggaggtaggagga

SEQ ID NO: 900912 - DNA, 15 bp, Homo sapiens
gggaggtaggaggag

SEQ ID NO: 900913 - DNA, 15 bp, Homo sapiens
ggaggtaggaggagg

SEQ ID NO: 900914 - DNA, 15 bp, Homo sapiens
gaggtaggaggaggg

SEQ ID NO: 900915 - DNA, 15 bp, Homo sapiens
aggtaggaggaggga

SEQ ID NO: 900916 - DNA, 15 bp, Homo sapiens
tttttcaaaaaaata

SEQ ID NO: 900917 - DNA, 15 bp, Homo sapiens
ttttcaaaaaaatat

SEQ ID NO: 900918 - DNA, 15 bp, Homo sapiens
tttcaaaaaaatatg

SEQ ID NO: 900919 - DNA, 15 bp, Homo sapiens
ttcaaaaaaatatgt

SEQ ID NO: 900920 - DNA, 15 bp, Homo sapiens
tcaaaaaaatatgtt

SEQ ID NO: 900921 - DNA, 15 bp, Homo sapiens
caaaaaaatatgtta

SEQ ID NO: 900922 - DNA, 15 bp, Homo sapiens
aaaaaaatatgttat

SEQ ID NO: 900923 - DNA, 15 bp, Homo sapiens
aaaaaatatgttatt

SEQ ID NO: 900924 - DNA, 15 bp, Homo sapiens
aaaaatatgttattt

SEQ ID NO: 900925 - DNA, 15 bp, Homo sapiens
aaaatatgttatttt

SEQ ID NO: 900926 - DNA, 15 bp, Homo sapiens
aaatatgttattttt

SEQ ID NO: 900927 - DNA, 15 bp, Homo sapiens
aatatgttatttttg

SEQ ID NO: 900928 - DNA, 15 bp, Homo sapiens
atatgttatttttgt

SEQ ID NO: 900929 - DNA, 15 bp, Homo sapiens
tatgttatttttgtt

SEQ ID NO: 900930 - DNA, 15 bp, Homo sapiens
atgttatttttgtta

SEQ ID NO: 900931 - DNA, 15 bp, Homo sapiens
tgttatttttgttag

SEQ ID NO: 900932 - DNA, 15 bp, Homo sapiens
gttatttttgttagc

SEQ ID NO: 900933 - DNA, 15 bp, Homo sapiens
ttatttttgttagca

SEQ ID NO: 900934 - DNA, 15 bp, Homo sapiens
tatttttgttagcaa

SEQ ID NO: 900935 - DNA, 15 bp, Homo sapiens
atttttgttagcaac

SEQ ID NO: 900936 - DNA, 15 bp, Homo sapiens
tttttgttagcaact

SEQ ID NO: 900937 - DNA, 15 bp, Homo sapiens
ttttgttagcaacta

SEQ ID NO: 900938 - DNA, 15 bp, Homo sapiens
tttgttagcaactaa

SEQ ID NO: 900939 - DNA, 15 bp, Homo sapiens
ttgttagcaactaat

SEQ ID NO: 900940 - DNA, 15 bp, Homo sapiens
tgttagcaactaatg

SEQ ID NO: 900941 - DNA, 15 bp, Homo sapiens
gttagcaactaatgg

SEQ ID NO: 900942 - DNA, 15 bp, Homo sapiens
ttagcaactaatgga

SEQ ID NO: 900943 - DNA, 15 bp, Homo sapiens
tagcaactaatggat

SEQ ID NO: 900944 - DNA, 15 bp, Homo sapiens
agcaactaatggatg

SEQ ID NO: 900945 - DNA, 15 bp, Homo sapiens
gcaactaatggatgt

SEQ ID NO: 900946 - DNA, 15 bp, Homo sapiens
caactaatggatgta

SEQ ID NO: 900947 - DNA, 15 bp, Homo sapiens
aactaatggatgtat

SEQ ID NO: 900948 - DNA, 15 bp, Homo sapiens
actaatggatgtatt

SEQ ID NO: 900949 - DNA, 15 bp, Homo sapiens
ctaatggatgtatta

SEQ ID NO: 900950 - DNA, 15 bp, Homo sapiens
taatggatgtattat

SEQ ID NO: 900951 - DNA, 15 bp, Homo sapiens
aatggatgtattatt

SEQ ID NO: 900952 - DNA, 15 bp, Homo sapiens
atggatgtattatta

SEQ ID NO: 900953 - DNA, 15 bp, Homo sapiens
tggatgtattattat

SEQ ID NO: 900954 - DNA, 15 bp, Homo sapiens
ggatgtattattatt

SEQ ID NO: 900955 - DNA, 15 bp, Homo sapiens
gatgtattattattt

SEQ ID NO: 900956 - DNA, 15 bp, Homo sapiens
atgtattattatttt

SEQ ID NO: 900957 - DNA, 15 bp, Homo sapiens
tgtattattatttta

SEQ ID NO: 900958 - DNA, 15 bp, Homo sapiens
gtattattattttaa

SEQ ID NO: 900959 - DNA, 15 bp, Homo sapiens
tattattattttaaa

SEQ ID NO: 900960 - DNA, 15 bp, Homo sapiens
attattattttaaaa

SEQ ID NO: 900961 - DNA, 15 bp, Homo sapiens
ttattattttaaaat

SEQ ID NO: 900962 - DNA, 15 bp, Homo sapiens
tattattttaaaata

SEQ ID NO: 900963 - DNA, 15 bp, Homo sapiens
attattttaaaataa

SEQ ID NO: 900964 - DNA, 15 bp, Homo sapiens
ttattttaaaataag

SEQ ID NO: 900965 - DNA, 15 bp, Homo sapiens
tattttaaaataagt

SEQ ID NO: 900966 - DNA, 15 bp, Homo sapiens
attttaaaataagta

SEQ ID NO: 900967 - DNA, 15 bp, Homo sapiens
ttttaaaataagtaa

SEQ ID NO: 900968 - DNA, 15 bp, Homo sapiens
tttaaaataagtaaa

SEQ ID NO: 900969 - DNA, 15 bp, Homo sapiens
ttaaaataagtaaat

SEQ ID NO: 900970 - DNA, 15 bp, Homo sapiens
taaaataagtaaatt

SEQ ID NO: 900971 - DNA, 15 bp, Homo sapiens
aaaataagtaaattc

SEQ ID NO: 900972 - DNA, 15 bp, Homo sapiens
aaataagtaaattca

SEQ ID NO: 900973 - DNA, 15 bp, Homo sapiens
aataagtaaattcaa

SEQ ID NO: 900974 - DNA, 15 bp, Homo sapiens
ataagtaaattcaaa

SEQ ID NO: 900975 - DNA, 15 bp, Homo sapiens
taagtaaattcaaat

SEQ ID NO: 900976 - DNA, 15 bp, Homo sapiens
aagtaaattcaaatt

SEQ ID NO: 900977 - DNA, 15 bp, Homo sapiens
agtaaattcaaatta

SEQ ID NO: 900978 - DNA, 15 bp, Homo sapiens
gtaaattcaaattaa

SEQ ID NO: 900979 - DNA, 15 bp, Homo sapiens
taaattcaaattaaa

SEQ ID NO: 900980 - DNA, 15 bp, Homo sapiens
aaattcaaattaaat

SEQ ID NO: 900981 - DNA, 15 bp, Homo sapiens
aattcaaattaaata

SEQ ID NO: 900982 - DNA, 15 bp, Homo sapiens
attcaaattaaatat

SEQ ID NO: 900983 - DNA, 15 bp, Homo sapiens
ttcaaattaaatatt

SEQ ID NO: 900984 - DNA, 15 bp, Homo sapiens
tcaaattaaatattt

SEQ ID NO: 900985 - DNA, 15 bp, Homo sapiens
caaattaaatatttt

SEQ ID NO: 900986 - DNA, 15 bp, Homo sapiens
aaattaaatattttt

SEQ ID NO: 900987 - DNA, 15 bp, Homo sapiens
aattaaatattttta

SEQ ID NO: 900988 - DNA, 15 bp, Homo sapiens
attaaatatttttac

SEQ ID NO: 900989 - DNA, 15 bp, Homo sapiens
ttaaatatttttacc

SEQ ID NO: 900990 - DNA, 15 bp, Homo sapiens
taaatatttttacca

SEQ ID NO: 900991 - DNA, 15 bp, Homo sapiens
aaatatttttaccat

SEQ ID NO: 900992 - DNA, 15 bp, Homo sapiens
aatatttttaccatt

SEQ ID NO: 900993 - DNA, 15 bp, Homo sapiens
atatttttaccattc

SEQ ID NO: 900994 - DNA, 15 bp, Homo sapiens
tatttttaccattct

SEQ ID NO: 900995 - DNA, 15 bp, Homo sapiens
atttttaccattctt

SEQ ID NO: 900996 - DNA, 15 bp, Homo sapiens
tttttaccattctta

SEQ ID NO: 900997 - DNA, 15 bp, Homo sapiens
ttttaccattcttag

SEQ ID NO: 900998 - DNA, 15 bp, Homo sapiens
tttaccattcttagt

SEQ ID NO: 900999 - DNA, 15 bp, Homo sapiens
ttaccattcttagtt

SEQ ID NO: 901000 - DNA, 15 bp, Homo sapiens
taccattcttagttc

SEQ ID NO: 901001 - DNA, 15 bp, Homo sapiens
accattcttagttct

SEQ ID NO: 901002 - DNA, 15 bp, Homo sapiens
ccattcttagttcta

SEQ ID NO: 901003 - DNA, 15 bp, Homo sapiens
cattcttagttctaa

SEQ ID NO: 901004 - DNA, 15 bp, Homo sapiens
attcttagttctaat

SEQ ID NO: 901005 - DNA, 15 bp, Homo sapiens
ttcttagttctaatc

SEQ ID NO: 901006 - DNA, 15 bp, Homo sapiens
tcttagttctaatct

SEQ ID NO: 901007 - DNA, 15 bp, Homo sapiens
cttagttctaatctc

SEQ ID NO: 901008 - DNA, 15 bp, Homo sapiens
ttagttctaatctct

SEQ ID NO: 901009 - DNA, 15 bp, Homo sapiens
tagttctaatctcta

SEQ ID NO: 901010 - DNA, 15 bp, Homo sapiens
agttctaatctctaa

SEQ ID NO: 901011 - DNA, 15 bp, Homo sapiens
gttctaatctctaaa

SEQ ID NO: 901012 - DNA, 15 bp, Homo sapiens
ttctaatctctaaaa

SEQ ID NO: 901013 - DNA, 15 bp, Homo sapiens
tctaatctctaaaat

SEQ ID NO: 901014 - DNA, 15 bp, Homo sapiens
ctaatctctaaaatg

SEQ ID NO: 901015 - DNA, 15 bp, Homo sapiens
taatctctaaaatgg

SEQ ID NO: 901016 - DNA, 15 bp, Homo sapiens
aatctctaaaatggt

SEQ ID NO: 901017 - DNA, 15 bp, Homo sapiens
atctctaaaatggta

SEQ ID NO: 901018 - DNA, 15 bp, Homo sapiens
tctctaaaatggtaa

SEQ ID NO: 901019 - DNA, 15 bp, Homo sapiens
ctctaaaatggtaac

SEQ ID NO: 901020 - DNA, 15 bp, Homo sapiens
tctaaaatggtaact

SEQ ID NO: 901021 - DNA, 15 bp, Homo sapiens
ctaaaatggtaactg

SEQ ID NO: 901022 - DNA, 15 bp, Homo sapiens
taaaatggtaactgt

SEQ ID NO: 901023 - DNA, 15 bp, Homo sapiens
aaaatggtaactgtt

SEQ ID NO: 901024 - DNA, 15 bp, Homo sapiens
aaatggtaactgtta

SEQ ID NO: 901025 - DNA, 15 bp, Homo sapiens
aatggtaactgttaa

SEQ ID NO: 901026 - DNA, 15 bp, Homo sapiens
atggtaactgttaat

SEQ ID NO: 901027 - DNA, 15 bp, Homo sapiens
tggtaactgttaata

SEQ ID NO: 901028 - DNA, 15 bp, Homo sapiens
ggtaactgttaatag

SEQ ID NO: 901029 - DNA, 15 bp, Homo sapiens
gtaactgttaataga

SEQ ID NO: 901030 - DNA, 15 bp, Homo sapiens
taactgttaatagat

SEQ ID NO: 901031 - DNA, 15 bp, Homo sapiens
aactgttaatagata

SEQ ID NO: 901032 - DNA, 15 bp, Homo sapiens
actgttaatagatat

SEQ ID NO: 901033 - DNA, 15 bp, Homo sapiens
ctgttaatagatata

SEQ ID NO: 901034 - DNA, 15 bp, Homo sapiens
tgttaatagatataa

SEQ ID NO: 901035 - DNA, 15 bp, Homo sapiens
gttaatagatataac

SEQ ID NO: 901036 - DNA, 15 bp, Homo sapiens
ttaatagatataacc

SEQ ID NO: 901037 - DNA, 15 bp, Homo sapiens
taatagatataaccc

SEQ ID NO: 901038 - DNA, 15 bp, Homo sapiens
aatagatataaccca

SEQ ID NO: 901039 - DNA, 15 bp, Homo sapiens
atagatataacccat

SEQ ID NO: 901040 - DNA, 15 bp, Homo sapiens
tagatataacccata

SEQ ID NO: 901041 - DNA, 15 bp, Homo sapiens
agatataacccatat

SEQ ID NO: 901042 - DNA, 15 bp, Homo sapiens
gatataacccatata

SEQ ID NO: 901043 - DNA, 15 bp, Homo sapiens
atataacccatatac

SEQ ID NO: 901044 - DNA, 15 bp, Homo sapiens
tataacccatataca

SEQ ID NO: 901045 - DNA, 15 bp, Homo sapiens
ataacccatatacac

SEQ ID NO: 901046 - DNA, 15 bp, Homo sapiens
taacccatatacacc

SEQ ID NO: 901047 - DNA, 15 bp, Homo sapiens
aacccatatacacca

SEQ ID NO: 901048 - DNA, 15 bp, Homo sapiens
acccatatacaccaa

SEQ ID NO: 901049 - DNA, 15 bp, Homo sapiens
cccatatacaccaaa

SEQ ID NO: 901050 - DNA, 15 bp, Homo sapiens
ccatatacaccaaag

SEQ ID NO: 901051 - DNA, 15 bp, Homo sapiens
catatacaccaaagc

SEQ ID NO: 901052 - DNA, 15 bp, Homo sapiens
atatacaccaaagct

SEQ ID NO: 901053 - DNA, 15 bp, Homo sapiens
tatacaccaaagctc

SEQ ID NO: 901054 - DNA, 15 bp, Homo sapiens
atacaccaaagctct

SEQ ID NO: 901055 - DNA, 15 bp, Homo sapiens
tacaccaaagctctt

SEQ ID NO: 901056 - DNA, 15 bp, Homo sapiens
acaccaaagctctta

SEQ ID NO: 901057 - DNA, 15 bp, Homo sapiens
caccaaagctcttag

SEQ ID NO: 901058 - DNA, 15 bp, Homo sapiens
accaaagctcttagg

SEQ ID NO: 901059 - DNA, 15 bp, Homo sapiens
ccaaagctcttagga

SEQ ID NO: 901060 - DNA, 15 bp, Homo sapiens
caaagctcttaggat

SEQ ID NO: 901061 - DNA, 15 bp, Homo sapiens
aaagctcttaggatc

SEQ ID NO: 901062 - DNA, 15 bp, Homo sapiens
aagctcttaggatcc

SEQ ID NO: 901063 - DNA, 15 bp, Homo sapiens
agctcttaggatcct

SEQ ID NO: 901064 - DNA, 15 bp, Homo sapiens
gctcttaggatcctt

SEQ ID NO: 901065 - DNA, 15 bp, Homo sapiens
ctcttaggatcctta

SEQ ID NO: 901066 - DNA, 15 bp, Homo sapiens
tcttaggatccttaa

SEQ ID NO: 901067 - DNA, 15 bp, Homo sapiens
cttaggatccttaat

SEQ ID NO: 901068 - DNA, 15 bp, Homo sapiens
ttaggatccttaata

SEQ ID NO: 901069 - DNA, 15 bp, Homo sapiens
taggatccttaatat

SEQ ID NO: 901070 - DNA, 15 bp, Homo sapiens
aggatccttaatatt

SEQ ID NO: 901071 - DNA, 15 bp, Homo sapiens
ggatccttaatattt

SEQ ID NO: 901072 - DNA, 15 bp, Homo sapiens
gatccttaatatttt

SEQ ID NO: 901073 - DNA, 15 bp, Homo sapiens
atccttaatattttt

SEQ ID NO: 901074 - DNA, 15 bp, Homo sapiens
tccttaatatttttt

SEQ ID NO: 901075 - DNA, 15 bp, Homo sapiens
ccttaatatttttta

SEQ ID NO: 901076 - DNA, 15 bp, Homo sapiens
cttaatattttttaa

SEQ ID NO: 901077 - DNA, 15 bp, Homo sapiens
ttaatattttttaag

SEQ ID NO: 901078 - DNA, 15 bp, Homo sapiens
taatattttttaagc

SEQ ID NO: 901079 - DNA, 15 bp, Homo sapiens
aatattttttaagca

SEQ ID NO: 901080 - DNA, 15 bp, Homo sapiens
atattttttaagcat

SEQ ID NO: 901081 - DNA, 15 bp, Homo sapiens
tattttttaagcatg

SEQ ID NO: 901082 - DNA, 15 bp, Homo sapiens
attttttaagcatgt

SEQ ID NO: 901083 - DNA, 15 bp, Homo sapiens
ttttttaagcatgta

SEQ ID NO: 901084 - DNA, 15 bp, Homo sapiens
tttttaagcatgtaa

SEQ ID NO: 901085 - DNA, 15 bp, Homo sapiens
ttttaagcatgtaaa

SEQ ID NO: 901086 - DNA, 15 bp, Homo sapiens
tttaagcatgtaaaa

SEQ ID NO: 901087 - DNA, 15 bp, Homo sapiens
ttaagcatgtaaaag

SEQ ID NO: 901088 - DNA, 15 bp, Homo sapiens
taagcatgtaaaagg

SEQ ID NO: 901089 - DNA, 15 bp, Homo sapiens
aagcatgtaaaaggg

SEQ ID NO: 901090 - DNA, 15 bp, Homo sapiens
agcatgtaaaagggt

SEQ ID NO: 901091 - DNA, 15 bp, Homo sapiens
gcatgtaaaagggtc

SEQ ID NO: 901092 - DNA, 15 bp, Homo sapiens
catgtaaaagggtcc

SEQ ID NO: 901093 - DNA, 15 bp, Homo sapiens
atgtaaaagggtcct

SEQ ID NO: 901094 - DNA, 15 bp, Homo sapiens
tgtaaaagggtcctg

SEQ ID NO: 901095 - DNA, 15 bp, Homo sapiens
gtaaaagggtcctga

SEQ ID NO: 901096 - DNA, 15 bp, Homo sapiens
taaaagggtcctgat

SEQ ID NO: 901097 - DNA, 15 bp, Homo sapiens
aaaagggtcctgatg

SEQ ID NO: 901098 - DNA, 15 bp, Homo sapiens
aaagggtcctgatga

SEQ ID NO: 901099 - DNA, 15 bp, Homo sapiens
aagggtcctgatgat

SEQ ID NO: 901100 - DNA, 15 bp, Homo sapiens
agggtcctgatgatg

SEQ ID NO: 901101 - DNA, 15 bp, Homo sapiens
gggtcctgatgatga

SEQ ID NO: 901102 - DNA, 15 bp, Homo sapiens
ggtcctgatgatgaa

SEQ ID NO: 901103 - DNA, 15 bp, Homo sapiens
gtcctgatgatgaaa

SEQ ID NO: 901104 - DNA, 15 bp, Homo sapiens
tcctgatgatgaaaa

SEQ ID NO: 901105 - DNA, 15 bp, Homo sapiens
cctgatgatgaaaag

SEQ ID NO: 901106 - DNA, 15 bp, Homo sapiens
ctgatgatgaaaagc

SEQ ID NO: 901107 - DNA, 15 bp, Homo sapiens
tgatgatgaaaagct

SEQ ID NO: 901108 - DNA, 15 bp, Homo sapiens
gatgatgaaaagctt

SEQ ID NO: 901109 - DNA, 15 bp, Homo sapiens
atgatgaaaagcttc

SEQ ID NO: 901110 - DNA, 15 bp, Homo sapiens
tgatgaaaagcttca

SEQ ID NO: 901111 - DNA, 15 bp, Homo sapiens
gatgaaaagcttcag

SEQ ID NO: 901112 - DNA, 15 bp, Homo sapiens
atgaaaagcttcaga

SEQ ID NO: 901113 - DNA, 15 bp, Homo sapiens
tgaaaagcttcagaa

SEQ ID NO: 901114 - DNA, 15 bp, Homo sapiens
gaaaagcttcagaac

SEQ ID NO: 901115 - DNA, 15 bp, Homo sapiens
aaaagcttcagaact

SEQ ID NO: 901116 - DNA, 15 bp, Homo sapiens
aaagcttcagaactg

SEQ ID NO: 901117 - DNA, 15 bp, Homo sapiens
aagcttcagaactgc

SEQ ID NO: 901118 - DNA, 15 bp, Homo sapiens
agcttcagaactgcc

SEQ ID NO: 901119 - DNA, 15 bp, Homo sapiens
gcttcagaactgcca

SEQ ID NO: 901120 - DNA, 15 bp, Homo sapiens
cttcagaactgccag

SEQ ID NO: 901121 - DNA, 15 bp, Homo sapiens
ttcagaactgccagc

SEQ ID NO: 901122 - DNA, 15 bp, Homo sapiens
tcagaactgccagcc

SEQ ID NO: 901123 - DNA, 15 bp, Homo sapiens
cagaactgccagcct

SEQ ID NO: 901124 - DNA, 15 bp, Homo sapiens
agaactgccagccta

SEQ ID NO: 901125 - DNA, 15 bp, Homo sapiens
gaactgccagcctag

SEQ ID NO: 901126 - DNA, 15 bp, Homo sapiens
aactgccagcctagt

SEQ ID NO: 901127 - DNA, 15 bp, Homo sapiens
actgccagcctagtg

SEQ ID NO: 901128 - DNA, 15 bp, Homo sapiens
ctgccagcctagtgc

SEQ ID NO: 901129 - DNA, 15 bp, Homo sapiens
tgccagcctagtgca

SEQ ID NO: 901130 - DNA, 15 bp, Homo sapiens
gccagcctagtgcat

SEQ ID NO: 901131 - DNA, 15 bp, Homo sapiens
ccagcctagtgcatc

SEQ ID NO: 901132 - DNA, 15 bp, Homo sapiens
cagcctagtgcatcc

SEQ ID NO: 901133 - DNA, 15 bp, Homo sapiens
agcctagtgcatcca

SEQ ID NO: 901134 - DNA, 15 bp, Homo sapiens
gcctagtgcatccag

SEQ ID NO: 901135 - DNA, 15 bp, Homo sapiens
cctagtgcatccaga

SEQ ID NO: 901136 - DNA, 15 bp, Homo sapiens
ctagtgcatccagag

SEQ ID NO: 901137 - DNA, 15 bp, Homo sapiens
tagtgcatccagaga

SEQ ID NO: 901138 - DNA, 15 bp, Homo sapiens
agtgcatccagagac

SEQ ID NO: 901139 - DNA, 15 bp, Homo sapiens
gtgcatccagagaca

SEQ ID NO: 901140 - DNA, 15 bp, Homo sapiens
tgcatccagagacaa

SEQ ID NO: 901141 - DNA, 15 bp, Homo sapiens
gcatccagagacaag

SEQ ID NO: 901142 - DNA, 15 bp, Homo sapiens
catccagagacaagg

SEQ ID NO: 901143 - DNA, 15 bp, Homo sapiens
atccagagacaaggc

SEQ ID NO: 901144 - DNA, 15 bp, Homo sapiens
tccagagacaaggcc

SEQ ID NO: 901145 - DNA, 15 bp, Homo sapiens
ccagagacaaggcct

SEQ ID NO: 901146 - DNA, 15 bp, Homo sapiens
cagagacaaggcctc

SEQ ID NO: 901147 - DNA, 15 bp, Homo sapiens
agagacaaggcctcc

SEQ ID NO: 901148 - DNA, 15 bp, Homo sapiens
gagacaaggcctcca

SEQ ID NO: 901149 - DNA, 15 bp, Homo sapiens
agacaaggcctccag

SEQ ID NO: 901150 - DNA, 15 bp, Homo sapiens
gacaaggcctccagg

SEQ ID NO: 901151 - DNA, 15 bp, Homo sapiens
acaaggcctccaggc

SEQ ID NO: 901152 - DNA, 15 bp, Homo sapiens
caaggcctccaggcc

SEQ ID NO: 901153 - DNA, 15 bp, Homo sapiens
aaggcctccaggccc

SEQ ID NO: 901154 - DNA, 15 bp, Homo sapiens
aggcctccaggcccc

SEQ ID NO: 901155 - DNA, 15 bp, Homo sapiens
ggcctccaggcccct

SEQ ID NO: 901156 - DNA, 15 bp, Homo sapiens
gcctccaggcccctc

SEQ ID NO: 901157 - DNA, 15 bp, Homo sapiens
cctccaggcccctcc

SEQ ID NO: 901158 - DNA, 15 bp, Homo sapiens
ctccaggcccctccc

SEQ ID NO: 901159 - DNA, 15 bp, Homo sapiens
tccaggcccctccca

SEQ ID NO: 901160 - DNA, 15 bp, Homo sapiens
ccaggcccctcccac

SEQ ID NO: 901161 - DNA, 15 bp, Homo sapiens
caggcccctcccaca

SEQ ID NO: 901162 - DNA, 15 bp, Homo sapiens
aggcccctcccacac

SEQ ID NO: 901163 - DNA, 15 bp, Homo sapiens
ggcccctcccacacc

SEQ ID NO: 901164 - DNA, 15 bp, Homo sapiens
gcccctcccacaccg

SEQ ID NO: 901165 - DNA, 15 bp, Homo sapiens
cccctcccacaccgt

SEQ ID NO: 901166 - DNA, 15 bp, Homo sapiens
ccctcccacaccgtg

SEQ ID NO: 901167 - DNA, 15 bp, Homo sapiens
cctcccacaccgtgc

SEQ ID NO: 901168 - DNA, 15 bp, Homo sapiens
ctcccacaccgtgcc

SEQ ID NO: 901169 - DNA, 15 bp, Homo sapiens
tcccacaccgtgccc

SEQ ID NO: 901170 - DNA, 15 bp, Homo sapiens
cccacaccgtgccct

SEQ ID NO: 901171 - DNA, 15 bp, Homo sapiens
ccacaccgtgccctg

SEQ ID NO: 901172 - DNA, 15 bp, Homo sapiens
cacaccgtgccctgt

SEQ ID NO: 901173 - DNA, 15 bp, Homo sapiens
acaccgtgccctgta

SEQ ID NO: 901174 - DNA, 15 bp, Homo sapiens
caccgtgccctgtag

SEQ ID NO: 901175 - DNA, 15 bp, Homo sapiens
accgtgccctgtaga

SEQ ID NO: 901176 - DNA, 15 bp, Homo sapiens
ccgtgccctgtagaa

SEQ ID NO: 901177 - DNA, 15 bp, Homo sapiens
cgtgccctgtagaaa

SEQ ID NO: 901178 - DNA, 15 bp, Homo sapiens
gtgccctgtagaaat

SEQ ID NO: 901179 - DNA, 15 bp, Homo sapiens
tgccctgtagaaatg

SEQ ID NO: 901180 - DNA, 15 bp, Homo sapiens
gccctgtagaaatgt

SEQ ID NO: 901181 - DNA, 15 bp, Homo sapiens
ccctgtagaaatgtg

SEQ ID NO: 901182 - DNA, 15 bp, Homo sapiens
cctgtagaaatgtga

SEQ ID NO: 901183 - DNA, 15 bp, Homo sapiens
ctgtagaaatgtgag

SEQ ID NO: 901184 - DNA, 15 bp, Homo sapiens
tgtagaaatgtgagg

SEQ ID NO: 901185 - DNA, 15 bp, Homo sapiens
gtagaaatgtgaggc

SEQ ID NO: 901186 - DNA, 15 bp, Homo sapiens
tagaaatgtgaggct

SEQ ID NO: 901187 - DNA, 15 bp, Homo sapiens
agaaatgtgaggctc

SEQ ID NO: 901188 - DNA, 15 bp, Homo sapiens
gaaatgtgaggctct

SEQ ID NO: 901189 - DNA, 15 bp, Homo sapiens
aaatgtgaggctctc

SEQ ID NO: 901190 - DNA, 15 bp, Homo sapiens
aatgtgaggctctcc

SEQ ID NO: 901191 - DNA, 15 bp, Homo sapiens
atgtgaggctctcca

SEQ ID NO: 901192 - DNA, 15 bp, Homo sapiens
tgtgaggctctccac

SEQ ID NO: 901193 - DNA, 15 bp, Homo sapiens
gtgaggctctccacc

SEQ ID NO: 901194 - DNA, 15 bp, Homo sapiens
tgaggctctccacca

SEQ ID NO: 901195 - DNA, 15 bp, Homo sapiens
gaggctctccaccag

SEQ ID NO: 901196 - DNA, 15 bp, Homo sapiens
aggctctccaccagg

SEQ ID NO: 901197 - DNA, 15 bp, Homo sapiens
ggctctccaccaggc

SEQ ID NO: 901198 - DNA, 15 bp, Homo sapiens
gctctccaccaggct

SEQ ID NO: 901199 - DNA, 15 bp, Homo sapiens
ctctccaccaggctc

SEQ ID NO: 901200 - DNA, 15 bp, Homo sapiens
tctccaccaggctcc

SEQ ID NO: 901201 - DNA, 15 bp, Homo sapiens
ctccaccaggctcca

SEQ ID NO: 901202 - DNA, 15 bp, Homo sapiens
tccaccaggctccat

SEQ ID NO: 901203 - DNA, 15 bp, Homo sapiens
ccaccaggctccatc

SEQ ID NO: 901204 - DNA, 15 bp, Homo sapiens
caccaggctccatca

SEQ ID NO: 901205 - DNA, 15 bp, Homo sapiens
accaggctccatcag

SEQ ID NO: 901206 - DNA, 15 bp, Homo sapiens
ccaggctccatcaga

SEQ ID NO: 901207 - DNA, 15 bp, Homo sapiens
caggctccatcagat

SEQ ID NO: 901208 - DNA, 15 bp, Homo sapiens
aggctccatcagatt

SEQ ID NO: 901209 - DNA, 15 bp, Homo sapiens
ggctccatcagattc

SEQ ID NO: 901210 - DNA, 15 bp, Homo sapiens
gctccatcagattcc

SEQ ID NO: 901211 - DNA, 15 bp, Homo sapiens
ctccatcagattccc

SEQ ID NO: 901212 - DNA, 15 bp, Homo sapiens
tccatcagattccca

SEQ ID NO: 901213 - DNA, 15 bp, Homo sapiens
ccatcagattcccac

SEQ ID NO: 901214 - DNA, 15 bp, Homo sapiens
catcagattcccact

SEQ ID NO: 901215 - DNA, 15 bp, Homo sapiens
atcagattcccactg

SEQ ID NO: 901216 - DNA, 15 bp, Homo sapiens
tcagattcccactgg

SEQ ID NO: 901217 - DNA, 15 bp, Homo sapiens
cagattcccactggg

SEQ ID NO: 901218 - DNA, 15 bp, Homo sapiens
agattcccactgggg

SEQ ID NO: 901219 - DNA, 15 bp, Homo sapiens
gattcccactggggg

SEQ ID NO: 901220 - DNA, 15 bp, Homo sapiens
attcccactgggggc

SEQ ID NO: 901221 - DNA, 15 bp, Homo sapiens
ttcccactgggggcc

SEQ ID NO: 901222 - DNA, 15 bp, Homo sapiens
tcccactgggggcca

SEQ ID NO: 901223 - DNA, 15 bp, Homo sapiens
cccactgggggccag

SEQ ID NO: 901224 - DNA, 15 bp, Homo sapiens
ccactgggggccagg

SEQ ID NO: 901225 - DNA, 15 bp, Homo sapiens
cactgggggccagga

SEQ ID NO: 901226 - DNA, 15 bp, Homo sapiens
actgggggccaggag

SEQ ID NO: 901227 - DNA, 15 bp, Homo sapiens
ctgggggccaggagg

SEQ ID NO: 901228 - DNA, 15 bp, Homo sapiens
tgggggccaggagga

SEQ ID NO: 901229 - DNA, 15 bp, Homo sapiens
gggggccaggaggag

SEQ ID NO: 901230 - DNA, 15 bp, Homo sapiens
ggggccaggaggagg

SEQ ID NO: 901231 - DNA, 15 bp, Homo sapiens
gggccaggaggaggg

SEQ ID NO: 901232 - DNA, 15 bp, Homo sapiens
ggccaggaggagggc

SEQ ID NO: 901233 - DNA, 15 bp, Homo sapiens
gccaggaggagggct

SEQ ID NO: 901234 - DNA, 15 bp, Homo sapiens
ccaggaggagggctt

SEQ ID NO: 901235 - DNA, 15 bp, Homo sapiens
caggaggagggcttt

SEQ ID NO: 901236 - DNA, 15 bp, Homo sapiens
aggaggagggcttta

SEQ ID NO: 901237 - DNA, 15 bp, Homo sapiens
ggaggagggctttag

SEQ ID NO: 901238 - DNA, 15 bp, Homo sapiens
gaggagggctttagt

SEQ ID NO: 901239 - DNA, 15 bp, Homo sapiens
aggagggctttagtt

SEQ ID NO: 901240 - DNA, 15 bp, Homo sapiens
ggagggctttagttt

SEQ ID NO: 901241 - DNA, 15 bp, Homo sapiens
gagggctttagtttt

SEQ ID NO: 901242 - DNA, 15 bp, Homo sapiens
agggctttagttttc

SEQ ID NO: 901243 - DNA, 15 bp, Homo sapiens
gggctttagttttct

SEQ ID NO: 901244 - DNA, 15 bp, Homo sapiens
ggctttagttttctc

SEQ ID NO: 901245 - DNA, 15 bp, Homo sapiens
gctttagttttctcc

SEQ ID NO: 901246 - DNA, 15 bp, Homo sapiens
ctttagttttctcca

SEQ ID NO: 901247 - DNA, 15 bp, Homo sapiens
tttagttttctccat

SEQ ID NO: 901248 - DNA, 15 bp, Homo sapiens
ttagttttctccatc

SEQ ID NO: 901249 - DNA, 15 bp, Homo sapiens
tagttttctccatca

SEQ ID NO: 901250 - DNA, 15 bp, Homo sapiens
agttttctccatcac

SEQ ID NO: 901251 - DNA, 15 bp, Homo sapiens
gttttctccatcacc

SEQ ID NO: 901252 - DNA, 15 bp, Homo sapiens
ttttctccatcacct

SEQ ID NO: 901253 - DNA, 15 bp, Homo sapiens
tttctccatcacctc

SEQ ID NO: 901254 - DNA, 15 bp, Homo sapiens
ttctccatcacctct

SEQ ID NO: 901255 - DNA, 15 bp, Homo sapiens
tctccatcacctctg

SEQ ID NO: 901256 - DNA, 15 bp, Homo sapiens
ctccatcacctctgg

SEQ ID NO: 901257 - DNA, 15 bp, Homo sapiens
tccatcacctctggc

SEQ ID NO: 901258 - DNA, 15 bp, Homo sapiens
ccatcacctctggct

SEQ ID NO: 901259 - DNA, 15 bp, Homo sapiens
catcacctctggctc

SEQ ID NO: 901260 - DNA, 15 bp, Homo sapiens
atcacctctggctcc

SEQ ID NO: 901261 - DNA, 15 bp, Homo sapiens
tcacctctggctccc

SEQ ID NO: 901262 - DNA, 15 bp, Homo sapiens
cacctctggctccca

SEQ ID NO: 901263 - DNA, 15 bp, Homo sapiens
acctctggctcccag

SEQ ID NO: 901264 - DNA, 15 bp, Homo sapiens
cctctggctcccaga

SEQ ID NO: 901265 - DNA, 15 bp, Homo sapiens
ctctggctcccagat

SEQ ID NO: 901266 - DNA, 15 bp, Homo sapiens
tctggctcccagatc

SEQ ID NO: 901267 - DNA, 15 bp, Homo sapiens
ctggctcccagatcc

SEQ ID NO: 901268 - DNA, 15 bp, Homo sapiens
tggctcccagatcct

SEQ ID NO: 901269 - DNA, 15 bp, Homo sapiens
ggctcccagatcctg

SEQ ID NO: 901270 - DNA, 15 bp, Homo sapiens
gctcccagatcctgt

SEQ ID NO: 901271 - DNA, 15 bp, Homo sapiens
ctcccagatcctgtc

SEQ ID NO: 901272 - DNA, 15 bp, Homo sapiens
tcccagatcctgtcc

SEQ ID NO: 901273 - DNA, 15 bp, Homo sapiens
cccagatcctgtccc

SEQ ID NO: 901274 - DNA, 15 bp, Homo sapiens
ccagatcctgtcccc

SEQ ID NO: 901275 - DNA, 15 bp, Homo sapiens
cagatcctgtccccc

SEQ ID NO: 901276 - DNA, 15 bp, Homo sapiens
agatcctgtccccca

SEQ ID NO: 901277 - DNA, 15 bp, Homo sapiens
gatcctgtcccccag

SEQ ID NO: 901278 - DNA, 15 bp, Homo sapiens
atcctgtcccccaga

SEQ ID NO: 901279 - DNA, 15 bp, Homo sapiens
tcctgtcccccagat

SEQ ID NO: 901280 - DNA, 15 bp, Homo sapiens
cctgtcccccagatg

SEQ ID NO: 901281 - DNA, 15 bp, Homo sapiens
ctgtcccccagatga

SEQ ID NO: 901282 - DNA, 15 bp, Homo sapiens
tgtcccccagatgag

SEQ ID NO: 901283 - DNA, 15 bp, Homo sapiens
gtcccccagatgagt

SEQ ID NO: 901284 - DNA, 15 bp, Homo sapiens
tcccccagatgagtc

SEQ ID NO: 901285 - DNA, 15 bp, Homo sapiens
cccccagatgagtca

SEQ ID NO: 901286 - DNA, 15 bp, Homo sapiens
ccccagatgagtcag

SEQ ID NO: 901287 - DNA, 15 bp, Homo sapiens
cccagatgagtcagt

SEQ ID NO: 901288 - DNA, 15 bp, Homo sapiens
ccagatgagtcagtt

SEQ ID NO: 901289 - DNA, 15 bp, Homo sapiens
cagatgagtcagttg

SEQ ID NO: 901290 - DNA, 15 bp, Homo sapiens
agatgagtcagttga

SEQ ID NO: 901291 - DNA, 15 bp, Homo sapiens
gatgagtcagttgat

SEQ ID NO: 901292 - DNA, 15 bp, Homo sapiens
atgagtcagttgatg

SEQ ID NO: 901293 - DNA, 15 bp, Homo sapiens
tgagtcagttgatgg

SEQ ID NO: 901294 - DNA, 15 bp, Homo sapiens
gagtcagttgatggg

SEQ ID NO: 901295 - DNA, 15 bp, Homo sapiens
agtcagttgatgggt

SEQ ID NO: 901296 - DNA, 15 bp, Homo sapiens
gtcagttgatgggtc

SEQ ID NO: 901297 - DNA, 15 bp, Homo sapiens
tcagttgatgggtca

SEQ ID NO: 901298 - DNA, 15 bp, Homo sapiens
cagttgatgggtcat

SEQ ID NO: 901299 - DNA, 15 bp, Homo sapiens
agttgatgggtcatc

SEQ ID NO: 901300 - DNA, 15 bp, Homo sapiens
gttgatgggtcatcc

SEQ ID NO: 901301 - DNA, 15 bp, Homo sapiens
ttgatgggtcatcct

SEQ ID NO: 901302 - DNA, 15 bp, Homo sapiens
tgatgggtcatcctc

SEQ ID NO: 901303 - DNA, 15 bp, Homo sapiens
gatgggtcatcctcc

SEQ ID NO: 901304 - DNA, 15 bp, Homo sapiens
atgggtcatcctcct

SEQ ID NO: 901305 - DNA, 15 bp, Homo sapiens
tgggtcatcctcctc

SEQ ID NO: 901306 - DNA, 15 bp, Homo sapiens
gggtcatcctcctct

SEQ ID NO: 901307 - DNA, 15 bp, Homo sapiens
ggtcatcctcctctc

SEQ ID NO: 901308 - DNA, 15 bp, Homo sapiens
gtcatcctcctctcc

SEQ ID NO: 901309 - DNA, 15 bp, Homo sapiens
tcatcctcctctcca

SEQ ID NO: 901310 - DNA, 15 bp, Homo sapiens
catcctcctctccac

SEQ ID NO: 901311 - DNA, 15 bp, Homo sapiens
atcctcctctccaca

SEQ ID NO: 901312 - DNA, 15 bp, Homo sapiens
tcctcctctccacag

SEQ ID NO: 901313 - DNA, 15 bp, Homo sapiens
cctcctctccacagt

SEQ ID NO: 901314 - DNA, 15 bp, Homo sapiens
ctcctctccacagtg

SEQ ID NO: 901315 - DNA, 15 bp, Homo sapiens
tcctctccacagtgc

SEQ ID NO: 901316 - DNA, 15 bp, Homo sapiens
cctctccacagtgct

SEQ ID NO: 901317 - DNA, 15 bp, Homo sapiens
ctctccacagtgctt

SEQ ID NO: 901318 - DNA, 15 bp, Homo sapiens
tctccacagtgcttt

SEQ ID NO: 901319 - DNA, 15 bp, Homo sapiens
ctccacagtgctttc

SEQ ID NO: 901320 - DNA, 15 bp, Homo sapiens
tccacagtgctttcc

SEQ ID NO: 901321 - DNA, 15 bp, Homo sapiens
ccacagtgctttcct

SEQ ID NO: 901322 - DNA, 15 bp, Homo sapiens
cacagtgctttcctg

SEQ ID NO: 901323 - DNA, 15 bp, Homo sapiens
acagtgctttcctgg

SEQ ID NO: 901324 - DNA, 15 bp, Homo sapiens
cagtgctttcctggt

SEQ ID NO: 901325 - DNA, 15 bp, Homo sapiens
agtgctttcctggtt

SEQ ID NO: 901326 - DNA, 15 bp, Homo sapiens
gtgctttcctggttc

SEQ ID NO: 901327 - DNA, 15 bp, Homo sapiens
tgctttcctggttct

SEQ ID NO: 901328 - DNA, 15 bp, Homo sapiens
gctttcctggttctt

SEQ ID NO: 901329 - DNA, 15 bp, Homo sapiens
ctttcctggttcttt

SEQ ID NO: 901330 - DNA, 15 bp, Homo sapiens
tttcctggttctttc

SEQ ID NO: 901331 - DNA, 15 bp, Homo sapiens
ttcctggttctttct

SEQ ID NO: 901332 - DNA, 15 bp, Homo sapiens
tcctggttctttctc

SEQ ID NO: 901333 - DNA, 15 bp, Homo sapiens
cctggttctttctca

SEQ ID NO: 901334 - DNA, 15 bp, Homo sapiens
ctggttctttctcat

SEQ ID NO: 901335 - DNA, 15 bp, Homo sapiens
tggttctttctcatg

SEQ ID NO: 901336 - DNA, 15 bp, Homo sapiens
ggttctttctcatgt

SEQ ID NO: 901337 - DNA, 15 bp, Homo sapiens
gttctttctcatgtc

SEQ ID NO: 901338 - DNA, 15 bp, Homo sapiens
ttctttctcatgtca

SEQ ID NO: 901339 - DNA, 15 bp, Homo sapiens
tctttctcatgtcac

SEQ ID NO: 901340 - DNA, 15 bp, Homo sapiens
ctttctcatgtcacc

SEQ ID NO: 901341 - DNA, 15 bp, Homo sapiens
tttctcatgtcacct

SEQ ID NO: 901342 - DNA, 15 bp, Homo sapiens
ttctcatgtcacctc

SEQ ID NO: 901343 - DNA, 15 bp, Homo sapiens
tctcatgtcacctct

SEQ ID NO: 901344 - DNA, 15 bp, Homo sapiens
ctcatgtcacctctg

SEQ ID NO: 901345 - DNA, 15 bp, Homo sapiens
tcatgtcacctctga

SEQ ID NO: 901346 - DNA, 15 bp, Homo sapiens
catgtcacctctgat

SEQ ID NO: 901347 - DNA, 15 bp, Homo sapiens
atgtcacctctgatg

SEQ ID NO: 901348 - DNA, 15 bp, Homo sapiens
tgtcacctctgatgc

SEQ ID NO: 901349 - DNA, 15 bp, Homo sapiens
gtcacctctgatgca

SEQ ID NO: 901350 - DNA, 15 bp, Homo sapiens
tcacctctgatgcag

SEQ ID NO: 901351 - DNA, 15 bp, Homo sapiens
cacctctgatgcaga

SEQ ID NO: 901352 - DNA, 15 bp, Homo sapiens
acctctgatgcagaa

SEQ ID NO: 901353 - DNA, 15 bp, Homo sapiens
cctctgatgcagaac

SEQ ID NO: 901354 - DNA, 15 bp, Homo sapiens
ctctgatgcagaact

SEQ ID NO: 901355 - DNA, 15 bp, Homo sapiens
tctgatgcagaactc

SEQ ID NO: 901356 - DNA, 15 bp, Homo sapiens
ctgatgcagaactca

SEQ ID NO: 901357 - DNA, 15 bp, Homo sapiens
tgatgcagaactcag

SEQ ID NO: 901358 - DNA, 15 bp, Homo sapiens
gatgcagaactcagc

SEQ ID NO: 901359 - DNA, 15 bp, Homo sapiens
atgcagaactcagct

SEQ ID NO: 901360 - DNA, 15 bp, Homo sapiens
tgcagaactcagctt

SEQ ID NO: 901361 - DNA, 15 bp, Homo sapiens
gcagaactcagcttc

SEQ ID NO: 901362 - DNA, 15 bp, Homo sapiens
cagaactcagcttct

SEQ ID NO: 901363 - DNA, 15 bp, Homo sapiens
agaactcagcttctt

SEQ ID NO: 901364 - DNA, 15 bp, Homo sapiens
gaactcagcttcttc

SEQ ID NO: 901365 - DNA, 15 bp, Homo sapiens
aactcagcttcttcc

SEQ ID NO: 901366 - DNA, 15 bp, Homo sapiens
actcagcttcttcct

SEQ ID NO: 901367 - DNA, 15 bp, Homo sapiens
ctcagcttcttccta

SEQ ID NO: 901368 - DNA, 15 bp, Homo sapiens
tcagcttcttcctag

SEQ ID NO: 901369 - DNA, 15 bp, Homo sapiens
cagcttcttcctagc

SEQ ID NO: 901370 - DNA, 15 bp, Homo sapiens
agcttcttcctagct

SEQ ID NO: 901371 - DNA, 15 bp, Homo sapiens
gcttcttcctagctt

SEQ ID NO: 901372 - DNA, 15 bp, Homo sapiens
cttcttcctagcttt

SEQ ID NO: 901373 - DNA, 15 bp, Homo sapiens
ttcttcctagctttg

SEQ ID NO: 901374 - DNA, 15 bp, Homo sapiens
tcttcctagctttgc

SEQ ID NO: 901375 - DNA, 15 bp, Homo sapiens
cttcctagctttgca

SEQ ID NO: 901376 - DNA, 15 bp, Homo sapiens
ttcctagctttgcac

SEQ ID NO: 901377 - DNA, 15 bp, Homo sapiens
tcctagctttgcaca

SEQ ID NO: 901378 - DNA, 15 bp, Homo sapiens
cctagctttgcacaa

SEQ ID NO: 901379 - DNA, 15 bp, Homo sapiens
ctagctttgcacaac

SEQ ID NO: 901380 - DNA, 15 bp, Homo sapiens
tagctttgcacaact

SEQ ID NO: 901381 - DNA, 15 bp, Homo sapiens
agctttgcacaactc

SEQ ID NO: 901382 - DNA, 15 bp, Homo sapiens
gctttgcacaactct

SEQ ID NO: 901383 - DNA, 15 bp, Homo sapiens
ctttgcacaactctc

SEQ ID NO: 901384 - DNA, 15 bp, Homo sapiens
tttgcacaactctcc

SEQ ID NO: 901385 - DNA, 15 bp, Homo sapiens
ttgcacaactctccc

SEQ ID NO: 901386 - DNA, 15 bp, Homo sapiens
tgcacaactctccct

SEQ ID NO: 901387 - DNA, 15 bp, Homo sapiens
gcacaactctccctc

SEQ ID NO: 901388 - DNA, 15 bp, Homo sapiens
cacaactctccctcc

SEQ ID NO: 901389 - DNA, 15 bp, Homo sapiens
acaactctccctccc

SEQ ID NO: 901390 - DNA, 15 bp, Homo sapiens
caactctccctcccc

SEQ ID NO: 901391 - DNA, 15 bp, Homo sapiens
aactctccctcccca

SEQ ID NO: 901392 - DNA, 15 bp, Homo sapiens
actctccctccccac

SEQ ID NO: 901393 - DNA, 15 bp, Homo sapiens
ctctccctccccact

SEQ ID NO: 901394 - DNA, 15 bp, Homo sapiens
tctccctccccactt

SEQ ID NO: 901395 - DNA, 15 bp, Homo sapiens
ctccctccccactta

SEQ ID NO: 901396 - DNA, 15 bp, Homo sapiens
tccctccccacttac

SEQ ID NO: 901397 - DNA, 15 bp, Homo sapiens
ccctccccacttaca

SEQ ID NO: 901398 - DNA, 15 bp, Homo sapiens
cctccccacttacat

SEQ ID NO: 901399 - DNA, 15 bp, Homo sapiens
ctccccacttacata

SEQ ID NO: 901400 - DNA, 15 bp, Homo sapiens
tccccacttacataa

SEQ ID NO: 901401 - DNA, 15 bp, Homo sapiens
ccccacttacataag

SEQ ID NO: 901402 - DNA, 15 bp, Homo sapiens
cccacttacataagt

SEQ ID NO: 901403 - DNA, 15 bp, Homo sapiens
ccacttacataagta

SEQ ID NO: 901404 - DNA, 15 bp, Homo sapiens
cacttacataagtac

SEQ ID NO: 901405 - DNA, 15 bp, Homo sapiens
acttacataagtaca

SEQ ID NO: 901406 - DNA, 15 bp, Homo sapiens
cttacataagtacat

SEQ ID NO: 901407 - DNA, 15 bp, Homo sapiens
ttacataagtacatt

SEQ ID NO: 901408 - DNA, 15 bp, Homo sapiens
tacataagtacattt

SEQ ID NO: 901409 - DNA, 15 bp, Homo sapiens
acataagtacatttt

SEQ ID NO: 901410 - DNA, 15 bp, Homo sapiens
cataagtacattttc

SEQ ID NO: 901411 - DNA, 15 bp, Homo sapiens
ataagtacattttca

SEQ ID NO: 901412 - DNA, 15 bp, Homo sapiens
taagtacattttcac

SEQ ID NO: 901413 - DNA, 15 bp, Homo sapiens
aagtacattttcacc

SEQ ID NO: 901414 - DNA, 15 bp, Homo sapiens
agtacattttcacca

SEQ ID NO: 901415 - DNA, 15 bp, Homo sapiens
gtacattttcaccag

SEQ ID NO: 901416 - DNA, 15 bp, Homo sapiens
tacattttcaccagc

SEQ ID NO: 901417 - DNA, 15 bp, Homo sapiens
acattttcaccagcc

SEQ ID NO: 901418 - DNA, 15 bp, Homo sapiens
cattttcaccagcca

SEQ ID NO: 901419 - DNA, 15 bp, Homo sapiens
attttcaccagccaa

SEQ ID NO: 901420 - DNA, 15 bp, Homo sapiens
ttttcaccagccaac

SEQ ID NO: 901421 - DNA, 15 bp, Homo sapiens
tttcaccagccaact

SEQ ID NO: 901422 - DNA, 15 bp, Homo sapiens
ttcaccagccaactt

SEQ ID NO: 901423 - DNA, 15 bp, Homo sapiens
tcaccagccaacttc

SEQ ID NO: 901424 - DNA, 15 bp, Homo sapiens
caccagccaacttcc

SEQ ID NO: 901425 - DNA, 15 bp, Homo sapiens
accagccaacttcct

SEQ ID NO: 901426 - DNA, 15 bp, Homo sapiens
ccagccaacttcctc

SEQ ID NO: 901427 - DNA, 15 bp, Homo sapiens
cagccaacttcctca

SEQ ID NO: 901428 - DNA, 15 bp, Homo sapiens
agccaacttcctcaa

SEQ ID NO: 901429 - DNA, 15 bp, Homo sapiens
gccaacttcctcaaa

SEQ ID NO: 901430 - DNA, 15 bp, Homo sapiens
ccaacttcctcaaag

SEQ ID NO: 901431 - DNA, 15 bp, Homo sapiens
caacttcctcaaagg

SEQ ID NO: 901432 - DNA, 15 bp, Homo sapiens
aacttcctcaaagga

SEQ ID NO: 901433 - DNA, 15 bp, Homo sapiens
acttcctcaaaggat

SEQ ID NO: 901434 - DNA, 15 bp, Homo sapiens
cttcctcaaaggatt

SEQ ID NO: 901435 - DNA, 15 bp, Homo sapiens
ttcctcaaaggattt

SEQ ID NO: 901436 - DNA, 15 bp, Homo sapiens
tcctcaaaggatttg

SEQ ID NO: 901437 - DNA, 15 bp, Homo sapiens
cctcaaaggatttgg

SEQ ID NO: 901438 - DNA, 15 bp, Homo sapiens
ctcaaaggatttggg

SEQ ID NO: 901439 - DNA, 15 bp, Homo sapiens
tcaaaggatttggga

SEQ ID NO: 901440 - DNA, 15 bp, Homo sapiens
caaaggatttgggag

SEQ ID NO: 901441 - DNA, 15 bp, Homo sapiens
aaaggatttgggaga

SEQ ID NO: 901442 - DNA, 15 bp, Homo sapiens
aaggatttgggagat

SEQ ID NO: 901443 - DNA, 15 bp, Homo sapiens
aggatttgggagatg

SEQ ID NO: 901444 - DNA, 15 bp, Homo sapiens
ggatttgggagatga

SEQ ID NO: 901445 - DNA, 15 bp, Homo sapiens
gatttgggagatgag

SEQ ID NO: 901446 - DNA, 15 bp, Homo sapiens
atttgggagatgaga

SEQ ID NO: 901447 - DNA, 15 bp, Homo sapiens
tttgggagatgagaa

SEQ ID NO: 901448 - DNA, 15 bp, Homo sapiens
ttgggagatgagaaa

SEQ ID NO: 901449 - DNA, 15 bp, Homo sapiens
tgggagatgagaaag

SEQ ID NO: 901450 - DNA, 15 bp, Homo sapiens
gggagatgagaaagg

SEQ ID NO: 901451 - DNA, 15 bp, Homo sapiens
ggagatgagaaaggg

SEQ ID NO: 901452 - DNA, 15 bp, Homo sapiens
gagatgagaaaggga

SEQ ID NO: 901453 - DNA, 15 bp, Homo sapiens
agatgagaaagggag

SEQ ID NO: 901454 - DNA, 15 bp, Homo sapiens
gatgagaaagggagg

SEQ ID NO: 901455 - DNA, 15 bp, Homo sapiens
atgagaaagggaggt

SEQ ID NO: 901456 - DNA, 15 bp, Homo sapiens
tgagaaagggaggta

SEQ ID NO: 901457 - DNA, 15 bp, Homo sapiens
gagaaagggaggtat

SEQ ID NO: 901458 - DNA, 15 bp, Homo sapiens
agaaagggaggtata

SEQ ID NO: 901459 - DNA, 15 bp, Homo sapiens
gaaagggaggtatat

SEQ ID NO: 901460 - DNA, 15 bp, Homo sapiens
aaagggaggtatatg

SEQ ID NO: 901461 - DNA, 15 bp, Homo sapiens
aagggaggtatatgg

SEQ ID NO: 901462 - DNA, 15 bp, Homo sapiens
agggaggtatatgga

SEQ ID NO: 901463 - DNA, 15 bp, Homo sapiens
gggaggtatatggaa

SEQ ID NO: 901464 - DNA, 15 bp, Homo sapiens
ggaggtatatggaag

SEQ ID NO: 901465 - DNA, 15 bp, Homo sapiens
gaggtatatggaagc

SEQ ID NO: 901466 - DNA, 15 bp, Homo sapiens
aggtatatggaagca

SEQ ID NO: 901467 - DNA, 15 bp, Homo sapiens
ggtatatggaagcaa

SEQ ID NO: 901468 - DNA, 15 bp, Homo sapiens
gtatatggaagcaaa

SEQ ID NO: 901469 - DNA, 15 bp, Homo sapiens
tatatggaagcaaag

SEQ ID NO: 901470 - DNA, 15 bp, Homo sapiens
atatggaagcaaagc

SEQ ID NO: 901471 - DNA, 15 bp, Homo sapiens
tatggaagcaaagcc

SEQ ID NO: 901472 - DNA, 15 bp, Homo sapiens
atggaagcaaagcca

SEQ ID NO: 901473 - DNA, 15 bp, Homo sapiens
tggaagcaaagccaa

SEQ ID NO: 901474 - DNA, 15 bp, Homo sapiens
ggaagcaaagccaac

SEQ ID NO: 901475 - DNA, 15 bp, Homo sapiens
gaagcaaagccaaca

SEQ ID NO: 901476 - DNA, 15 bp, Homo sapiens
aagcaaagccaacaa

SEQ ID NO: 901477 - DNA, 15 bp, Homo sapiens
agcaaagccaacaac

SEQ ID NO: 901478 - DNA, 15 bp, Homo sapiens
gcaaagccaacaact

SEQ ID NO: 901479 - DNA, 15 bp, Homo sapiens
caaagccaacaactc

SEQ ID NO: 901480 - DNA, 15 bp, Homo sapiens
aaagccaacaactct

SEQ ID NO: 901481 - DNA, 15 bp, Homo sapiens
aagccaacaactcta

SEQ ID NO: 901482 - DNA, 15 bp, Homo sapiens
agccaacaactctaa

SEQ ID NO: 901483 - DNA, 15 bp, Homo sapiens
gccaacaactctaaa

SEQ ID NO: 901484 - DNA, 15 bp, Homo sapiens
ccaacaactctaaac

SEQ ID NO: 901485 - DNA, 15 bp, Homo sapiens
caacaactctaaact

SEQ ID NO: 901486 - DNA, 15 bp, Homo sapiens
aacaactctaaactg

SEQ ID NO: 901487 - DNA, 15 bp, Homo sapiens
acaactctaaactga

SEQ ID NO: 901488 - DNA, 15 bp, Homo sapiens
caactctaaactgag

SEQ ID NO: 901489 - DNA, 15 bp, Homo sapiens
aactctaaactgagt

SEQ ID NO: 901490 - DNA, 15 bp, Homo sapiens
actctaaactgagta

SEQ ID NO: 901491 - DNA, 15 bp, Homo sapiens
ctctaaactgagtac

SEQ ID NO: 901492 - DNA, 15 bp, Homo sapiens
tctaaactgagtact

SEQ ID NO: 901493 - DNA, 15 bp, Homo sapiens
ctaaactgagtactg

SEQ ID NO: 901494 - DNA, 15 bp, Homo sapiens
taaactgagtactgg

SEQ ID NO: 901495 - DNA, 15 bp, Homo sapiens
aaactgagtactgga

SEQ ID NO: 901496 - DNA, 15 bp, Homo sapiens
aactgagtactggac

SEQ ID NO: 901497 - DNA, 15 bp, Homo sapiens
actgagtactggacc

SEQ ID NO: 901498 - DNA, 15 bp, Homo sapiens
ctgagtactggacca

SEQ ID NO: 901499 - DNA, 15 bp, Homo sapiens
tgagtactggaccac

SEQ ID NO: 901500 - DNA, 15 bp, Homo sapiens
gagtactggaccacg

SEQ ID NO: 901501 - DNA, 15 bp, Homo sapiens
agtactggaccacgt

SEQ ID NO: 901502 - DNA, 15 bp, Homo sapiens
gtactggaccacgtt

SEQ ID NO: 901503 - DNA, 15 bp, Homo sapiens
tactggaccacgttt

SEQ ID NO: 901504 - DNA, 15 bp, Homo sapiens
actggaccacgtttg

SEQ ID NO: 901505 - DNA, 15 bp, Homo sapiens
ctggaccacgtttgt

SEQ ID NO: 901506 - DNA, 15 bp, Homo sapiens
tggaccacgtttgtg

SEQ ID NO: 901507 - DNA, 15 bp, Homo sapiens
ggaccacgtttgtga

SEQ ID NO: 901508 - DNA, 15 bp, Homo sapiens
gaccacgtttgtgat

SEQ ID NO: 901509 - DNA, 15 bp, Homo sapiens
accacgtttgtgatt

SEQ ID NO: 901510 - DNA, 15 bp, Homo sapiens
ccacgtttgtgattc

SEQ ID NO: 901511 - DNA, 15 bp, Homo sapiens
cacgtttgtgattcc

SEQ ID NO: 901512 - DNA, 15 bp, Homo sapiens
acgtttgtgattcct

SEQ ID NO: 901513 - DNA, 15 bp, Homo sapiens
cgtttgtgattcctt

SEQ ID NO: 901514 - DNA, 15 bp, Homo sapiens
gtttgtgattccttc

SEQ ID NO: 901515 - DNA, 15 bp, Homo sapiens
tttgtgattccttcc

SEQ ID NO: 901516 - DNA, 15 bp, Homo sapiens
ttgtgattccttccc

SEQ ID NO: 901517 - DNA, 15 bp, Homo sapiens
tgtgattccttccca

SEQ ID NO: 901518 - DNA, 15 bp, Homo sapiens
gtgattccttcccag

SEQ ID NO: 901519 - DNA, 15 bp, Homo sapiens
tgattccttcccagg

SEQ ID NO: 901520 - DNA, 15 bp, Homo sapiens
gattccttcccaggc

SEQ ID NO: 901521 - DNA, 15 bp, Homo sapiens
attccttcccaggcc

SEQ ID NO: 901522 - DNA, 15 bp, Homo sapiens
ttccttcccaggcca

SEQ ID NO: 901523 - DNA, 15 bp, Homo sapiens
tccttcccaggccag

SEQ ID NO: 901524 - DNA, 15 bp, Homo sapiens
ccttcccaggccagc

SEQ ID NO: 901525 - DNA, 15 bp, Homo sapiens
cttcccaggccagct

SEQ ID NO: 901526 - DNA, 15 bp, Homo sapiens
ttcccaggccagctg

SEQ ID NO: 901527 - DNA, 15 bp, Homo sapiens
tcccaggccagctgc

SEQ ID NO: 901528 - DNA, 15 bp, Homo sapiens
cccaggccagctgca

SEQ ID NO: 901529 - DNA, 15 bp, Homo sapiens
ccaggccagctgcat

SEQ ID NO: 901530 - DNA, 15 bp, Homo sapiens
caggccagctgcatc

SEQ ID NO: 901531 - DNA, 15 bp, Homo sapiens
aggccagctgcatct

SEQ ID NO: 901532 - DNA, 15 bp, Homo sapiens
ggccagctgcatctc

SEQ ID NO: 901533 - DNA, 15 bp, Homo sapiens
gccagctgcatctcc

SEQ ID NO: 901534 - DNA, 15 bp, Homo sapiens
ccagctgcatctccc

SEQ ID NO: 901535 - DNA, 15 bp, Homo sapiens
cagctgcatctcccc

SEQ ID NO: 901536 - DNA, 15 bp, Homo sapiens
agctgcatctccccc

SEQ ID NO: 901537 - DNA, 15 bp, Homo sapiens
gctgcatctccccca

SEQ ID NO: 901538 - DNA, 15 bp, Homo sapiens
ctgcatctcccccag

SEQ ID NO: 901539 - DNA, 15 bp, Homo sapiens
tgcatctcccccagt

SEQ ID NO: 901540 - DNA, 15 bp, Homo sapiens
gcatctcccccagtt

SEQ ID NO: 901541 - DNA, 15 bp, Homo sapiens
catctcccccagttg

SEQ ID NO: 901542 - DNA, 15 bp, Homo sapiens
atctcccccagttgc

SEQ ID NO: 901543 - DNA, 15 bp, Homo sapiens
tctcccccagttgca

SEQ ID NO: 901544 - DNA, 15 bp, Homo sapiens
ctcccccagttgcag

SEQ ID NO: 901545 - DNA, 15 bp, Homo sapiens
tcccccagttgcaga

SEQ ID NO: 901546 - DNA, 15 bp, Homo sapiens
cccccagttgcagag

SEQ ID NO: 901547 - DNA, 15 bp, Homo sapiens
ccccagttgcagagt

SEQ ID NO: 901548 - DNA, 15 bp, Homo sapiens
cccagttgcagagtc

SEQ ID NO: 901549 - DNA, 15 bp, Homo sapiens
ccagttgcagagtca

SEQ ID NO: 901550 - DNA, 15 bp, Homo sapiens
cagttgcagagtcaa

SEQ ID NO: 901551 - DNA, 15 bp, Homo sapiens
agttgcagagtcaaa

SEQ ID NO: 901552 - DNA, 15 bp, Homo sapiens
gttgcagagtcaaaa

SEQ ID NO: 901553 - DNA, 15 bp, Homo sapiens
ttgcagagtcaaaag

SEQ ID NO: 901554 - DNA, 15 bp, Homo sapiens
tgcagagtcaaaagt

SEQ ID NO: 901555 - DNA, 15 bp, Homo sapiens
gcagagtcaaaagtg

SEQ ID NO: 901556 - DNA, 15 bp, Homo sapiens
cagagtcaaaagtgg

SEQ ID NO: 901557 - DNA, 15 bp, Homo sapiens
agagtcaaaagtggc

SEQ ID NO: 901558 - DNA, 15 bp, Homo sapiens
gagtcaaaagtggct

SEQ ID NO: 901559 - DNA, 15 bp, Homo sapiens
agtcaaaagtggctt

SEQ ID NO: 901560 - DNA, 15 bp, Homo sapiens
gtcaaaagtggctta

SEQ ID NO: 901561 - DNA, 15 bp, Homo sapiens
tcaaaagtggcttag

SEQ ID NO: 901562 - DNA, 15 bp, Homo sapiens
caaaagtggcttaga

SEQ ID NO: 901563 - DNA, 15 bp, Homo sapiens
aaaagtggcttagat

SEQ ID NO: 901564 - DNA, 15 bp, Homo sapiens
aaagtggcttagatg

SEQ ID NO: 901565 - DNA, 15 bp, Homo sapiens
aagtggcttagatgg

SEQ ID NO: 901566 - DNA, 15 bp, Homo sapiens
agtggcttagatgga

SEQ ID NO: 901567 - DNA, 15 bp, Homo sapiens
gtggcttagatggac

SEQ ID NO: 901568 - DNA, 15 bp, Homo sapiens
tggcttagatggact

SEQ ID NO: 901569 - DNA, 15 bp, Homo sapiens
ggcttagatggactc

SEQ ID NO: 901570 - DNA, 15 bp, Homo sapiens
gcttagatggactct

SEQ ID NO: 901571 - DNA, 15 bp, Homo sapiens
cttagatggactctg

SEQ ID NO: 901572 - DNA, 15 bp, Homo sapiens
ttagatggactctgt

SEQ ID NO: 901573 - DNA, 15 bp, Homo sapiens
tagatggactctgtt

SEQ ID NO: 901574 - DNA, 15 bp, Homo sapiens
agatggactctgttc

SEQ ID NO: 901575 - DNA, 15 bp, Homo sapiens
gatggactctgttct

SEQ ID NO: 901576 - DNA, 15 bp, Homo sapiens
atggactctgttctc

SEQ ID NO: 901577 - DNA, 15 bp, Homo sapiens
tggactctgttctcc

SEQ ID NO: 901578 - DNA, 15 bp, Homo sapiens
ggactctgttctccc

SEQ ID NO: 901579 - DNA, 15 bp, Homo sapiens
gactctgttctccca

SEQ ID NO: 901580 - DNA, 15 bp, Homo sapiens
actctgttctcccat

SEQ ID NO: 901581 - DNA, 15 bp, Homo sapiens
ctctgttctcccata

SEQ ID NO: 901582 - DNA, 15 bp, Homo sapiens
tctgttctcccataa

SEQ ID NO: 901583 - DNA, 15 bp, Homo sapiens
ctgttctcccataat

SEQ ID NO: 901584 - DNA, 15 bp, Homo sapiens
tgttctcccataatc

SEQ ID NO: 901585 - DNA, 15 bp, Homo sapiens
gttctcccataatct

SEQ ID NO: 901586 - DNA, 15 bp, Homo sapiens
ttctcccataatctc

SEQ ID NO: 901587 - DNA, 15 bp, Homo sapiens
tctcccataatctcc

SEQ ID NO: 901588 - DNA, 15 bp, Homo sapiens
ctcccataatctcca

SEQ ID NO: 901589 - DNA, 15 bp, Homo sapiens
tcccataatctccat

SEQ ID NO: 901590 - DNA, 15 bp, Homo sapiens
cccataatctccatc

SEQ ID NO: 901591 - DNA, 15 bp, Homo sapiens
ccataatctccatca

SEQ ID NO: 901592 - DNA, 15 bp, Homo sapiens
cataatctccatcat

SEQ ID NO: 901593 - DNA, 15 bp, Homo sapiens
ataatctccatcatt

SEQ ID NO: 901594 - DNA, 15 bp, Homo sapiens
taatctccatcattc

SEQ ID NO: 901595 - DNA, 15 bp, Homo sapiens
aatctccatcattcc

SEQ ID NO: 901596 - DNA, 15 bp, Homo sapiens
atctccatcattcca

SEQ ID NO: 901597 - DNA, 15 bp, Homo sapiens
tctccatcattccat

SEQ ID NO: 901598 - DNA, 15 bp, Homo sapiens
ctccatcattccata

SEQ ID NO: 901599 - DNA, 15 bp, Homo sapiens
tccatcattccatac

SEQ ID NO: 901600 - DNA, 15 bp, Homo sapiens
ccatcattccatacc

SEQ ID NO: 901601 - DNA, 15 bp, Homo sapiens
catcattccatacca

SEQ ID NO: 901602 - DNA, 15 bp, Homo sapiens
atcattccataccaa

SEQ ID NO: 901603 - DNA, 15 bp, Homo sapiens
tcattccataccaac

SEQ ID NO: 901604 - DNA, 15 bp, Homo sapiens
cattccataccaacc

SEQ ID NO: 901605 - DNA, 15 bp, Homo sapiens
attccataccaacct

SEQ ID NO: 901606 - DNA, 15 bp, Homo sapiens
ttccataccaacctc

SEQ ID NO: 901607 - DNA, 15 bp, Homo sapiens
tccataccaacctcc

SEQ ID NO: 901608 - DNA, 15 bp, Homo sapiens
ccataccaacctccc

SEQ ID NO: 901609 - DNA, 15 bp, Homo sapiens
cataccaacctcccc

SEQ ID NO: 901610 - DNA, 15 bp, Homo sapiens
ataccaacctcccct

SEQ ID NO: 901611 - DNA, 15 bp, Homo sapiens
taccaacctccccta

SEQ ID NO: 901612 - DNA, 15 bp, Homo sapiens
accaacctcccctat

SEQ ID NO: 901613 - DNA, 15 bp, Homo sapiens
ccaacctcccctatc

SEQ ID NO: 901614 - DNA, 15 bp, Homo sapiens
caacctcccctatcc

SEQ ID NO: 901615 - DNA, 15 bp, Homo sapiens
aacctcccctatccc

SEQ ID NO: 901616 - DNA, 15 bp, Homo sapiens
acctcccctatcccc

SEQ ID NO: 901617 - DNA, 15 bp, Homo sapiens
cctcccctatcccca

SEQ ID NO: 901618 - DNA, 15 bp, Homo sapiens
ctcccctatccccag

SEQ ID NO: 901619 - DNA, 15 bp, Homo sapiens
tcccctatccccagt

SEQ ID NO: 901620 - DNA, 15 bp, Homo sapiens
cccctatccccagta

SEQ ID NO: 901621 - DNA, 15 bp, Homo sapiens
ccctatccccagtac

SEQ ID NO: 901622 - DNA, 15 bp, Homo sapiens
cctatccccagtaca

SEQ ID NO: 901623 - DNA, 15 bp, Homo sapiens
ctatccccagtacac

SEQ ID NO: 901624 - DNA, 15 bp, Homo sapiens
tatccccagtacaca

SEQ ID NO: 901625 - DNA, 15 bp, Homo sapiens
atccccagtacacat

SEQ ID NO: 901626 - DNA, 15 bp, Homo sapiens
tccccagtacacata

SEQ ID NO: 901627 - DNA, 15 bp, Homo sapiens
ccccagtacacataa

SEQ ID NO: 901628 - DNA, 15 bp, Homo sapiens
cccagtacacataaa

SEQ ID NO: 901629 - DNA, 15 bp, Homo sapiens
ccagtacacataaaa

SEQ ID NO: 901630 - DNA, 15 bp, Homo sapiens
cagtacacataaaac

SEQ ID NO: 901631 - DNA, 15 bp, Homo sapiens
agtacacataaaaca

SEQ ID NO: 901632 - DNA, 15 bp, Homo sapiens
gtacacataaaacaa

SEQ ID NO: 901633 - DNA, 15 bp, Homo sapiens
tacacataaaacaaa

SEQ ID NO: 901634 - DNA, 15 bp, Homo sapiens
acacataaaacaaaa

SEQ ID NO: 901635 - DNA, 15 bp, Homo sapiens
cacataaaacaaaag

SEQ ID NO: 901636 - DNA, 15 bp, Homo sapiens
acataaaacaaaagc

SEQ ID NO: 901637 - DNA, 15 bp, Homo sapiens
cataaaacaaaagca

SEQ ID NO: 901638 - DNA, 15 bp, Homo sapiens
ataaaacaaaagcag

SEQ ID NO: 901639 - DNA, 15 bp, Homo sapiens
taaaacaaaagcagg

SEQ ID NO: 901640 - DNA, 15 bp, Homo sapiens
aaaacaaaagcaggg

SEQ ID NO: 901641 - DNA, 15 bp, Homo sapiens
aaacaaaagcagggg

SEQ ID NO: 901642 - DNA, 15 bp, Homo sapiens
aacaaaagcaggggc

SEQ ID NO: 901643 - DNA, 15 bp, Homo sapiens
acaaaagcaggggct

SEQ ID NO: 901644 - DNA, 15 bp, Homo sapiens
caaaagcaggggctt

SEQ ID NO: 901645 - DNA, 15 bp, Homo sapiens
aaaagcaggggcttg

SEQ ID NO: 901646 - DNA, 15 bp, Homo sapiens
aaagcaggggcttga

SEQ ID NO: 901647 - DNA, 15 bp, Homo sapiens
aagcaggggcttgag

SEQ ID NO: 901648 - DNA, 15 bp, Homo sapiens
agcaggggcttgaga

SEQ ID NO: 901649 - DNA, 15 bp, Homo sapiens
gcaggggcttgagag

SEQ ID NO: 901650 - DNA, 15 bp, Homo sapiens
caggggcttgagagg

SEQ ID NO: 901651 - DNA, 15 bp, Homo sapiens
aggggcttgagaggc

SEQ ID NO: 901652 - DNA, 15 bp, Homo sapiens
ggggcttgagaggca

SEQ ID NO: 901653 - DNA, 15 bp, Homo sapiens
gggcttgagaggcac

SEQ ID NO: 901654 - DNA, 15 bp, Homo sapiens
ggcttgagaggcaca

SEQ ID NO: 901655 - DNA, 15 bp, Homo sapiens
gcttgagaggcacat

SEQ ID NO: 901656 - DNA, 15 bp, Homo sapiens
cttgagaggcacatg

SEQ ID NO: 901657 - DNA, 15 bp, Homo sapiens
ttgagaggcacatga

SEQ ID NO: 901658 - DNA, 15 bp, Homo sapiens
tgagaggcacatgaa

SEQ ID NO: 901659 - DNA, 15 bp, Homo sapiens
gagaggcacatgaag

SEQ ID NO: 901660 - DNA, 15 bp, Homo sapiens
agaggcacatgaagc

SEQ ID NO: 901661 - DNA, 15 bp, Homo sapiens
gaggcacatgaagct

SEQ ID NO: 901662 - DNA, 15 bp, Homo sapiens
aggcacatgaagctt

SEQ ID NO: 901663 - DNA, 15 bp, Homo sapiens
ggcacatgaagcttt

SEQ ID NO: 901664 - DNA, 15 bp, Homo sapiens
gcacatgaagctttg

SEQ ID NO: 901665 - DNA, 15 bp, Homo sapiens
cacatgaagctttgg

SEQ ID NO: 901666 - DNA, 15 bp, Homo sapiens
acatgaagctttggg

SEQ ID NO: 901667 - DNA, 15 bp, Homo sapiens
catgaagctttggga

SEQ ID NO: 901668 - DNA, 15 bp, Homo sapiens
atgaagctttgggat

SEQ ID NO: 901669 - DNA, 15 bp, Homo sapiens
tgaagctttgggatg

SEQ ID NO: 901670 - DNA, 15 bp, Homo sapiens
gaagctttgggatgt

SEQ ID NO: 901671 - DNA, 15 bp, Homo sapiens
aagctttgggatgtg

SEQ ID NO: 901672 - DNA, 15 bp, Homo sapiens
agctttgggatgtgt

SEQ ID NO: 901673 - DNA, 15 bp, Homo sapiens
gctttgggatgtgtc

SEQ ID NO: 901674 - DNA, 15 bp, Homo sapiens
ctttgggatgtgtct

SEQ ID NO: 901675 - DNA, 15 bp, Homo sapiens
tttgggatgtgtctt

SEQ ID NO: 901676 - DNA, 15 bp, Homo sapiens
ttgggatgtgtcttc

SEQ ID NO: 901677 - DNA, 15 bp, Homo sapiens
tgggatgtgtcttct

SEQ ID NO: 901678 - DNA, 15 bp, Homo sapiens
gggatgtgtcttctg

SEQ ID NO: 901679 - DNA, 15 bp, Homo sapiens
ggatgtgtcttctgt

SEQ ID NO: 901680 - DNA, 15 bp, Homo sapiens
gatgtgtcttctgtc

SEQ ID NO: 901681 - DNA, 15 bp, Homo sapiens
atgtgtcttctgtcc

SEQ ID NO: 901682 - DNA, 15 bp, Homo sapiens
tgtgtcttctgtccc

SEQ ID NO: 901683 - DNA, 15 bp, Homo sapiens
gtgtcttctgtcccc

SEQ ID NO: 901684 - DNA, 15 bp, Homo sapiens
tgtcttctgtcccca

SEQ ID NO: 901685 - DNA, 15 bp, Homo sapiens
gtcttctgtccccac

SEQ ID NO: 901686 - DNA, 15 bp, Homo sapiens
tcttctgtccccacg

SEQ ID NO: 901687 - DNA, 15 bp, Homo sapiens
cttctgtccccacgc

SEQ ID NO: 901688 - DNA, 15 bp, Homo sapiens
ttctgtccccacgcc

SEQ ID NO: 901689 - DNA, 15 bp, Homo sapiens
tctgtccccacgccc

SEQ ID NO: 901690 - DNA, 15 bp, Homo sapiens
ctgtccccacgcccc

SEQ ID NO: 901691 - DNA, 15 bp, Homo sapiens
tgtccccacgcccca

SEQ ID NO: 901692 - DNA, 15 bp, Homo sapiens
gtccccacgccccat

SEQ ID NO: 901693 - DNA, 15 bp, Homo sapiens
tccccacgccccatg

SEQ ID NO: 901694 - DNA, 15 bp, Homo sapiens
ccccacgccccatga

SEQ ID NO: 901695 - DNA, 15 bp, Homo sapiens
cccacgccccatgag

SEQ ID NO: 901696 - DNA, 15 bp, Homo sapiens
ccacgccccatgaga

SEQ ID NO: 901697 - DNA, 15 bp, Homo sapiens
cacgccccatgagat

SEQ ID NO: 901698 - DNA, 15 bp, Homo sapiens
acgccccatgagatt

SEQ ID NO: 901699 - DNA, 15 bp, Homo sapiens
cgccccatgagattg

SEQ ID NO: 901700 - DNA, 15 bp, Homo sapiens
gccccatgagattgc

SEQ ID NO: 901701 - DNA, 15 bp, Homo sapiens
ccccatgagattgct

SEQ ID NO: 901702 - DNA, 15 bp, Homo sapiens
cccatgagattgctg

SEQ ID NO: 901703 - DNA, 15 bp, Homo sapiens
ccatgagattgctgc

SEQ ID NO: 901704 - DNA, 15 bp, Homo sapiens
catgagattgctgca

SEQ ID NO: 901705 - DNA, 15 bp, Homo sapiens
atgagattgctgcac

SEQ ID NO: 901706 - DNA, 15 bp, Homo sapiens
tgagattgctgcact

SEQ ID NO: 901707 - DNA, 15 bp, Homo sapiens
gagattgctgcactg

SEQ ID NO: 901708 - DNA, 15 bp, Homo sapiens
agattgctgcactga

SEQ ID NO: 901709 - DNA, 15 bp, Homo sapiens
gattgctgcactgag

SEQ ID NO: 901710 - DNA, 15 bp, Homo sapiens
attgctgcactgagt

SEQ ID NO: 901711 - DNA, 15 bp, Homo sapiens
ttgctgcactgagtc

SEQ ID NO: 901712 - DNA, 15 bp, Homo sapiens
tgctgcactgagtcc

SEQ ID NO: 901713 - DNA, 15 bp, Homo sapiens
gctgcactgagtcct

SEQ ID NO: 901714 - DNA, 15 bp, Homo sapiens
ctgcactgagtcctc

SEQ ID NO: 901715 - DNA, 15 bp, Homo sapiens
tgcactgagtcctcc

SEQ ID NO: 901716 - DNA, 15 bp, Homo sapiens
gcactgagtcctcct

SEQ ID NO: 901717 - DNA, 15 bp, Homo sapiens
cactgagtcctcctc

SEQ ID NO: 901718 - DNA, 15 bp, Homo sapiens
actgagtcctcctcc

SEQ ID NO: 901719 - DNA, 15 bp, Homo sapiens
ctgagtcctcctcct

SEQ ID NO: 901720 - DNA, 15 bp, Homo sapiens
tgagtcctcctcctg

SEQ ID NO: 901721 - DNA, 15 bp, Homo sapiens
gagtcctcctcctgt

SEQ ID NO: 901722 - DNA, 15 bp, Homo sapiens
agtcctcctcctgtg

SEQ ID NO: 901723 - DNA, 15 bp, Homo sapiens
gtcctcctcctgtgt

SEQ ID NO: 901724 - DNA, 15 bp, Homo sapiens
tcctcctcctgtgtc

SEQ ID NO: 901725 - DNA, 15 bp, Homo sapiens
cctcctcctgtgtca

SEQ ID NO: 901726 - DNA, 15 bp, Homo sapiens
ctcctcctgtgtcaa

SEQ ID NO: 901727 - DNA, 15 bp, Homo sapiens
tcctcctgtgtcaat

SEQ ID NO: 901728 - DNA, 15 bp, Homo sapiens
cctcctgtgtcaatt

SEQ ID NO: 901729 - DNA, 15 bp, Homo sapiens
ctcctgtgtcaattc

SEQ ID NO: 901730 - DNA, 15 bp, Homo sapiens
tcctgtgtcaattct

SEQ ID NO: 901731 - DNA, 15 bp, Homo sapiens
cctgtgtcaattctg

SEQ ID NO: 901732 - DNA, 15 bp, Homo sapiens
ctgtgtcaattctgg

SEQ ID NO: 901733 - DNA, 15 bp, Homo sapiens
tgtgtcaattctgga

SEQ ID NO: 901734 - DNA, 15 bp, Homo sapiens
gtgtcaattctggag

SEQ ID NO: 901735 - DNA, 15 bp, Homo sapiens
tgtcaattctggagc

SEQ ID NO: 901736 - DNA, 15 bp, Homo sapiens
gtcaattctggagcc

SEQ ID NO: 901737 - DNA, 15 bp, Homo sapiens
tcaattctggagccc

SEQ ID NO: 901738 - DNA, 15 bp, Homo sapiens
caattctggagcccc

SEQ ID NO: 901739 - DNA, 15 bp, Homo sapiens
aattctggagcccct

SEQ ID NO: 901740 - DNA, 15 bp, Homo sapiens
attctggagcccctt

SEQ ID NO: 901741 - DNA, 15 bp, Homo sapiens
ttctggagccccttt

SEQ ID NO: 901742 - DNA, 15 bp, Homo sapiens
tctggagcccctttt

SEQ ID NO: 901743 - DNA, 15 bp, Homo sapiens
ctggagcccctttta

SEQ ID NO: 901744 - DNA, 15 bp, Homo sapiens
tggagccccttttac

SEQ ID NO: 901745 - DNA, 15 bp, Homo sapiens
ggagccccttttact

SEQ ID NO: 901746 - DNA, 15 bp, Homo sapiens
gagccccttttactc

SEQ ID NO: 901747 - DNA, 15 bp, Homo sapiens
agccccttttactca

SEQ ID NO: 901748 - DNA, 15 bp, Homo sapiens
gccccttttactcaa

SEQ ID NO: 901749 - DNA, 15 bp, Homo sapiens
ccccttttactcaac

SEQ ID NO: 901750 - DNA, 15 bp, Homo sapiens
cccttttactcaact

SEQ ID NO: 901751 - DNA, 15 bp, Homo sapiens
ccttttactcaactc

SEQ ID NO: 901752 - DNA, 15 bp, Homo sapiens
cttttactcaactcc

SEQ ID NO: 901753 - DNA, 15 bp, Homo sapiens
ttttactcaactccc

SEQ ID NO: 901754 - DNA, 15 bp, Homo sapiens
tttactcaactcccc

SEQ ID NO: 901755 - DNA, 15 bp, Homo sapiens
ttactcaactcccct

SEQ ID NO: 901756 - DNA, 15 bp, Homo sapiens
tactcaactcccctt

SEQ ID NO: 901757 - DNA, 15 bp, Homo sapiens
actcaactccccttt

SEQ ID NO: 901758 - DNA, 15 bp, Homo sapiens
ctcaactcccctttg

SEQ ID NO: 901759 - DNA, 15 bp, Homo sapiens
tcaactcccctttga

SEQ ID NO: 901760 - DNA, 15 bp, Homo sapiens
caactcccctttgat

SEQ ID NO: 901761 - DNA, 15 bp, Homo sapiens
aactcccctttgatt

SEQ ID NO: 901762 - DNA, 15 bp, Homo sapiens
actcccctttgattc

SEQ ID NO: 901763 - DNA, 15 bp, Homo sapiens
ctcccctttgattcc

SEQ ID NO: 901764 - DNA, 15 bp, Homo sapiens
tcccctttgattccg

SEQ ID NO: 901765 - DNA, 15 bp, Homo sapiens
cccctttgattccgc

SEQ ID NO: 901766 - DNA, 15 bp, Homo sapiens
ccctttgattccgca

SEQ ID NO: 901767 - DNA, 15 bp, Homo sapiens
cctttgattccgcat

SEQ ID NO: 901768 - DNA, 15 bp, Homo sapiens
ctttgattccgcatg

SEQ ID NO: 901769 - DNA, 15 bp, Homo sapiens
tttgattccgcatgt

SEQ ID NO: 901770 - DNA, 15 bp, Homo sapiens
ttgattccgcatgtt

SEQ ID NO: 901771 - DNA, 15 bp, Homo sapiens
tgattccgcatgttc

SEQ ID NO: 901772 - DNA, 15 bp, Homo sapiens
gattccgcatgttca

SEQ ID NO: 901773 - DNA, 15 bp, Homo sapiens
attccgcatgttcaa

SEQ ID NO: 901774 - DNA, 15 bp, Homo sapiens
ttccgcatgttcaaa

SEQ ID NO: 901775 - DNA, 15 bp, Homo sapiens
tccgcatgttcaaat

SEQ ID NO: 901776 - DNA, 15 bp, Homo sapiens
ccgcatgttcaaata

SEQ ID NO: 901777 - DNA, 15 bp, Homo sapiens
cgcatgttcaaatac

SEQ ID NO: 901778 - DNA, 15 bp, Homo sapiens
gcatgttcaaataca

SEQ ID NO: 901779 - DNA, 15 bp, Homo sapiens
catgttcaaatacaa

SEQ ID NO: 901780 - DNA, 15 bp, Homo sapiens
atgttcaaatacaaa

SEQ ID NO: 901781 - DNA, 15 bp, Homo sapiens
tgttcaaatacaaac

SEQ ID NO: 901782 - DNA, 15 bp, Homo sapiens
gttcaaatacaaaca

SEQ ID NO: 901783 - DNA, 15 bp, Homo sapiens
ttcaaatacaaacac

SEQ ID NO: 901784 - DNA, 15 bp, Homo sapiens
tcaaatacaaacact

SEQ ID NO: 901785 - DNA, 15 bp, Homo sapiens
caaatacaaacactt

SEQ ID NO: 901786 - DNA, 15 bp, Homo sapiens
aaatacaaacacttg

SEQ ID NO: 901787 - DNA, 15 bp, Homo sapiens
aatacaaacacttgt

SEQ ID NO: 901788 - DNA, 15 bp, Homo sapiens
atacaaacacttgtt

SEQ ID NO: 901789 - DNA, 15 bp, Homo sapiens
tacaaacacttgttc

SEQ ID NO: 901790 - DNA, 15 bp, Homo sapiens
acaaacacttgttct

SEQ ID NO: 901791 - DNA, 15 bp, Homo sapiens
caaacacttgttctc

SEQ ID NO: 901792 - DNA, 15 bp, Homo sapiens
aaacacttgttctcc

SEQ ID NO: 901793 - DNA, 15 bp, Homo sapiens
aacacttgttctcca

SEQ ID NO: 901794 - DNA, 15 bp, Homo sapiens
acacttgttctccaa

SEQ ID NO: 901795 - DNA, 15 bp, Homo sapiens
cacttgttctccaag

SEQ ID NO: 901796 - DNA, 15 bp, Homo sapiens
acttgttctccaagt

SEQ ID NO: 901797 - DNA, 15 bp, Homo sapiens
cttgttctccaagtg

SEQ ID NO: 901798 - DNA, 15 bp, Homo sapiens
ttgttctccaagtgc

SEQ ID NO: 901799 - DNA, 15 bp, Homo sapiens
tgttctccaagtgcc

SEQ ID NO: 901800 - DNA, 15 bp, Homo sapiens
gttctccaagtgcca

SEQ ID NO: 901801 - DNA, 15 bp, Homo sapiens
ttctccaagtgccag

SEQ ID NO: 901802 - DNA, 15 bp, Homo sapiens
tctccaagtgccagt

SEQ ID NO: 901803 - DNA, 15 bp, Homo sapiens
ctccaagtgccagta

SEQ ID NO: 901804 - DNA, 15 bp, Homo sapiens
tccaagtgccagtaa

SEQ ID NO: 901805 - DNA, 15 bp, Homo sapiens
ccaagtgccagtaag

SEQ ID NO: 901806 - DNA, 15 bp, Homo sapiens
caagtgccagtaaga

SEQ ID NO: 901807 - DNA, 15 bp, Homo sapiens
aagtgccagtaagac

SEQ ID NO: 901808 - DNA, 15 bp, Homo sapiens
agtgccagtaagact

SEQ ID NO: 901809 - DNA, 15 bp, Homo sapiens
gtgccagtaagactt

SEQ ID NO: 901810 - DNA, 15 bp, Homo sapiens
tgccagtaagacttt

SEQ ID NO: 901811 - DNA, 15 bp, Homo sapiens
gccagtaagacttta

SEQ ID NO: 901812 - DNA, 15 bp, Homo sapiens
ccagtaagactttag

SEQ ID NO: 901813 - DNA, 15 bp, Homo sapiens
cagtaagactttaga

SEQ ID NO: 901814 - DNA, 15 bp, Homo sapiens
agtaagactttagag

SEQ ID NO: 901815 - DNA, 15 bp, Homo sapiens
gtaagactttagaga

SEQ ID NO: 901816 - DNA, 15 bp, Homo sapiens
taagactttagagat

SEQ ID NO: 901817 - DNA, 15 bp, Homo sapiens
aagactttagagatc

SEQ ID NO: 901818 - DNA, 15 bp, Homo sapiens
agactttagagatca

SEQ ID NO: 901819 - DNA, 15 bp, Homo sapiens
gactttagagatcat

SEQ ID NO: 901820 - DNA, 15 bp, Homo sapiens
actttagagatcatc

SEQ ID NO: 901821 - DNA, 15 bp, Homo sapiens
ctttagagatcatct

SEQ ID NO: 901822 - DNA, 15 bp, Homo sapiens
tttagagatcatcta

SEQ ID NO: 901823 - DNA, 15 bp, Homo sapiens
ttagagatcatctag

SEQ ID NO: 901824 - DNA, 15 bp, Homo sapiens
tagagatcatctagt

SEQ ID NO: 901825 - DNA, 15 bp, Homo sapiens
agagatcatctagtg

SEQ ID NO: 901826 - DNA, 15 bp, Homo sapiens
gagatcatctagtgc

SEQ ID NO: 901827 - DNA, 15 bp, Homo sapiens
agatcatctagtgct

SEQ ID NO: 901828 - DNA, 15 bp, Homo sapiens
gatcatctagtgctt

SEQ ID NO: 901829 - DNA, 15 bp, Homo sapiens
atcatctagtgcttc

SEQ ID NO: 901830 - DNA, 15 bp, Homo sapiens
tcatctagtgcttct

SEQ ID NO: 901831 - DNA, 15 bp, Homo sapiens
catctagtgcttctc

SEQ ID NO: 901832 - DNA, 15 bp, Homo sapiens
atctagtgcttctcc

SEQ ID NO: 901833 - DNA, 15 bp, Homo sapiens
tctagtgcttctcca

SEQ ID NO: 901834 - DNA, 15 bp, Homo sapiens
ctagtgcttctccac

SEQ ID NO: 901835 - DNA, 15 bp, Homo sapiens
tagtgcttctccact

SEQ ID NO: 901836 - DNA, 15 bp, Homo sapiens
agtgcttctccactt

SEQ ID NO: 901837 - DNA, 15 bp, Homo sapiens
gtgcttctccacttt

SEQ ID NO: 901838 - DNA, 15 bp, Homo sapiens
tgcttctccacttta

SEQ ID NO: 901839 - DNA, 15 bp, Homo sapiens
gcttctccactttat

SEQ ID NO: 901840 - DNA, 15 bp, Homo sapiens
cttctccactttata

SEQ ID NO: 901841 - DNA, 15 bp, Homo sapiens
ttctccactttatat

SEQ ID NO: 901842 - DNA, 15 bp, Homo sapiens
tctccactttatatt

SEQ ID NO: 901843 - DNA, 15 bp, Homo sapiens
ctccactttatattt

SEQ ID NO: 901844 - DNA, 15 bp, Homo sapiens
tccactttatatttg

SEQ ID NO: 901845 - DNA, 15 bp, Homo sapiens
ccactttatatttgg

SEQ ID NO: 901846 - DNA, 15 bp, Homo sapiens
cactttatatttggt

SEQ ID NO: 901847 - DNA, 15 bp, Homo sapiens
actttatatttggtg

SEQ ID NO: 901848 - DNA, 15 bp, Homo sapiens
ctttatatttggtgc

SEQ ID NO: 901849 - DNA, 15 bp, Homo sapiens
tttatatttggtgct

SEQ ID NO: 901850 - DNA, 15 bp, Homo sapiens
ttatatttggtgctt

SEQ ID NO: 901851 - DNA, 15 bp, Homo sapiens
tatatttggtgcttg

SEQ ID NO: 901852 - DNA, 15 bp, Homo sapiens
atatttggtgcttga

SEQ ID NO: 901853 - DNA, 15 bp, Homo sapiens
tatttggtgcttgaa

SEQ ID NO: 901854 - DNA, 15 bp, Homo sapiens
atttggtgcttgaac

SEQ ID NO: 901855 - DNA, 15 bp, Homo sapiens
tttggtgcttgaact

SEQ ID NO: 901856 - DNA, 15 bp, Homo sapiens
ttggtgcttgaactc

SEQ ID NO: 901857 - DNA, 15 bp, Homo sapiens
tggtgcttgaactct

SEQ ID NO: 901858 - DNA, 15 bp, Homo sapiens
ggtgcttgaactctc

SEQ ID NO: 901859 - DNA, 15 bp, Homo sapiens
gtgcttgaactctct

SEQ ID NO: 901860 - DNA, 15 bp, Homo sapiens
tgcttgaactctctg

SEQ ID NO: 901861 - DNA, 15 bp, Homo sapiens
gcttgaactctctgt

SEQ ID NO: 901862 - DNA, 15 bp, Homo sapiens
cttgaactctctgtt

SEQ ID NO: 901863 - DNA, 15 bp, Homo sapiens
ttgaactctctgttg

SEQ ID NO: 901864 - DNA, 15 bp, Homo sapiens
tgaactctctgttgt

SEQ ID NO: 901865 - DNA, 15 bp, Homo sapiens
gaactctctgttgtc

SEQ ID NO: 901866 - DNA, 15 bp, Homo sapiens
aactctctgttgtct

SEQ ID NO: 901867 - DNA, 15 bp, Homo sapiens
actctctgttgtctc

SEQ ID NO: 901868 - DNA, 15 bp, Homo sapiens
ctctctgttgtctca

SEQ ID NO: 901869 - DNA, 15 bp, Homo sapiens
tctctgttgtctcac

SEQ ID NO: 901870 - DNA, 15 bp, Homo sapiens
ctctgttgtctcaca

SEQ ID NO: 901871 - DNA, 15 bp, Homo sapiens
tctgttgtctcacag

SEQ ID NO: 901872 - DNA, 15 bp, Homo sapiens
ctgttgtctcacaga

SEQ ID NO: 901873 - DNA, 15 bp, Homo sapiens
tgttgtctcacagaa

SEQ ID NO: 901874 - DNA, 15 bp, Homo sapiens
gttgtctcacagaaa

SEQ ID NO: 901875 - DNA, 15 bp, Homo sapiens
ttgtctcacagaaag

SEQ ID NO: 901876 - DNA, 15 bp, Homo sapiens
tgtctcacagaaaga

SEQ ID NO: 901877 - DNA, 15 bp, Homo sapiens
gtctcacagaaagat

SEQ ID NO: 901878 - DNA, 15 bp, Homo sapiens
tctcacagaaagata

SEQ ID NO: 901879 - DNA, 15 bp, Homo sapiens
ctcacagaaagatat

SEQ ID NO: 901880 - DNA, 15 bp, Homo sapiens
tcacagaaagatatt

SEQ ID NO: 901881 - DNA, 15 bp, Homo sapiens
cacagaaagatattt

SEQ ID NO: 901882 - DNA, 15 bp, Homo sapiens
acagaaagatatttg

SEQ ID NO: 901883 - DNA, 15 bp, Homo sapiens
cagaaagatatttgg

SEQ ID NO: 901884 - DNA, 15 bp, Homo sapiens
agaaagatatttggt

SEQ ID NO: 901885 - DNA, 15 bp, Homo sapiens
gaaagatatttggtc

SEQ ID NO: 901886 - DNA, 15 bp, Homo sapiens
aaagatatttggtct

SEQ ID NO: 901887 - DNA, 15 bp, Homo sapiens
aagatatttggtctt

SEQ ID NO: 901888 - DNA, 15 bp, Homo sapiens
agatatttggtcttt

SEQ ID NO: 901889 - DNA, 15 bp, Homo sapiens
gatatttggtctttg

SEQ ID NO: 901890 - DNA, 15 bp, Homo sapiens
atatttggtctttgg

SEQ ID NO: 901891 - DNA, 15 bp, Homo sapiens
tatttggtctttggt

SEQ ID NO: 901892 - DNA, 15 bp, Homo sapiens
atttggtctttggta

SEQ ID NO: 901893 - DNA, 15 bp, Homo sapiens
tttggtctttggtac

SEQ ID NO: 901894 - DNA, 15 bp, Homo sapiens
ttggtctttggtaca

SEQ ID NO: 901895 - DNA, 15 bp, Homo sapiens
tggtctttggtacag

SEQ ID NO: 901896 - DNA, 15 bp, Homo sapiens
ggtctttggtacaga

SEQ ID NO: 901897 - DNA, 15 bp, Homo sapiens
gtctttggtacagag

SEQ ID NO: 901898 - DNA, 15 bp, Homo sapiens
tctttggtacagagg

SEQ ID NO: 901899 - DNA, 15 bp, Homo sapiens
ctttggtacagaggt

SEQ ID NO: 901900 - DNA, 15 bp, Homo sapiens
tttggtacagaggtc

SEQ ID NO: 901901 - DNA, 15 bp, Homo sapiens
ttggtacagaggtcc

SEQ ID NO: 901902 - DNA, 15 bp, Homo sapiens
tggtacagaggtcct

SEQ ID NO: 901903 - DNA, 15 bp, Homo sapiens
ggtacagaggtcctt

SEQ ID NO: 901904 - DNA, 15 bp, Homo sapiens
gtacagaggtccttt

SEQ ID NO: 901905 - DNA, 15 bp, Homo sapiens
tacagaggtccttta

SEQ ID NO: 901906 - DNA, 15 bp, Homo sapiens
acagaggtcctttag

SEQ ID NO: 901907 - DNA, 15 bp, Homo sapiens
cagaggtcctttagg

SEQ ID NO: 901908 - DNA, 15 bp, Homo sapiens
agaggtcctttaggg

SEQ ID NO: 901909 - DNA, 15 bp, Homo sapiens
gaggtcctttagggg

SEQ ID NO: 901910 - DNA, 15 bp, Homo sapiens
aggtcctttaggggc

SEQ ID NO: 901911 - DNA, 15 bp, Homo sapiens
ggtcctttaggggcg

SEQ ID NO: 901912 - DNA, 15 bp, Homo sapiens
gtcctttaggggcga

SEQ ID NO: 901913 - DNA, 15 bp, Homo sapiens
tcctttaggggcgat

SEQ ID NO: 901914 - DNA, 15 bp, Homo sapiens
cctttaggggcgata

SEQ ID NO: 901915 - DNA, 15 bp, Homo sapiens
ctttaggggcgatag

SEQ ID NO: 901916 - DNA, 15 bp, Homo sapiens
tttaggggcgatagg

SEQ ID NO: 901917 - DNA, 15 bp, Homo sapiens
ttaggggcgatagga

SEQ ID NO: 901918 - DNA, 15 bp, Homo sapiens
taggggcgataggag

SEQ ID NO: 901919 - DNA, 15 bp, Homo sapiens
aggggcgataggagt

SEQ ID NO: 901920 - DNA, 15 bp, Homo sapiens
ggggcgataggagtg

SEQ ID NO: 901921 - DNA, 15 bp, Homo sapiens
gggcgataggagtgt

SEQ ID NO: 901922 - DNA, 15 bp, Homo sapiens
ggcgataggagtgtc

SEQ ID NO: 901923 - DNA, 15 bp, Homo sapiens
gcgataggagtgtct

SEQ ID NO: 901924 - DNA, 15 bp, Homo sapiens
cgataggagtgtctt

SEQ ID NO: 901925 - DNA, 15 bp, Homo sapiens
gataggagtgtcttt

SEQ ID NO: 901926 - DNA, 15 bp, Homo sapiens
ataggagtgtctttt

SEQ ID NO: 901927 - DNA, 15 bp, Homo sapiens
taggagtgtcttttt

SEQ ID NO: 901928 - DNA, 15 bp, Homo sapiens
aggagtgtctttttt

SEQ ID NO: 901929 - DNA, 15 bp, Homo sapiens
ggagtgtcttttttc

SEQ ID NO: 901930 - DNA, 15 bp, Homo sapiens
gagtgtcttttttcc

SEQ ID NO: 901931 - DNA, 15 bp, Homo sapiens
agtgtcttttttcca

SEQ ID NO: 901932 - DNA, 15 bp, Homo sapiens
gtgtcttttttccag

SEQ ID NO: 901933 - DNA, 15 bp, Homo sapiens
tgtcttttttccagt

SEQ ID NO: 901934 - DNA, 15 bp, Homo sapiens
gtcttttttccagtg

SEQ ID NO: 901935 - DNA, 15 bp, Homo sapiens
tcttttttccagtga

SEQ ID NO: 901936 - DNA, 15 bp, Homo sapiens
cttttttccagtgag

SEQ ID NO: 901937 - DNA, 15 bp, Homo sapiens
ttttttccagtgaga

SEQ ID NO: 901938 - DNA, 15 bp, Homo sapiens
tttttccagtgagat

SEQ ID NO: 901939 - DNA, 15 bp, Homo sapiens
ttttccagtgagata

SEQ ID NO: 901940 - DNA, 15 bp, Homo sapiens
tttccagtgagataa

SEQ ID NO: 901941 - DNA, 15 bp, Homo sapiens
ttccagtgagataac

SEQ ID NO: 901942 - DNA, 15 bp, Homo sapiens
tccagtgagataact

SEQ ID NO: 901943 - DNA, 15 bp, Homo sapiens
ccagtgagataactc

SEQ ID NO: 901944 - DNA, 15 bp, Homo sapiens
cagtgagataactct

SEQ ID NO: 901945 - DNA, 15 bp, Homo sapiens
agtgagataactctt

SEQ ID NO: 901946 - DNA, 15 bp, Homo sapiens
gtgagataactcttg

SEQ ID NO: 901947 - DNA, 15 bp, Homo sapiens
tgagataactcttgg

SEQ ID NO: 901948 - DNA, 15 bp, Homo sapiens
gagataactcttggt

SEQ ID NO: 901949 - DNA, 15 bp, Homo sapiens
agataactcttggtg

SEQ ID NO: 901950 - DNA, 15 bp, Homo sapiens
gataactcttggtgg

SEQ ID NO: 901951 - DNA, 15 bp, Homo sapiens
ataactcttggtggg

SEQ ID NO: 901952 - DNA, 15 bp, Homo sapiens
taactcttggtgggc

SEQ ID NO: 901953 - DNA, 15 bp, Homo sapiens
aactcttggtgggcc

SEQ ID NO: 901954 - DNA, 15 bp, Homo sapiens
actcttggtgggcct

SEQ ID NO: 901955 - DNA, 15 bp, Homo sapiens
ctcttggtgggcctg

SEQ ID NO: 901956 - DNA, 15 bp, Homo sapiens
tcttggtgggcctgt

SEQ ID NO: 901957 - DNA, 15 bp, Homo sapiens
cttggtgggcctgta

SEQ ID NO: 901958 - DNA, 15 bp, Homo sapiens
ttggtgggcctgtaa

SEQ ID NO: 901959 - DNA, 15 bp, Homo sapiens
tggtgggcctgtaaa

SEQ ID NO: 901960 - DNA, 15 bp, Homo sapiens
ggtgggcctgtaaat

SEQ ID NO: 901961 - DNA, 15 bp, Homo sapiens
gtgggcctgtaaata

SEQ ID NO: 901962 - DNA, 15 bp, Homo sapiens
tgggcctgtaaatag

SEQ ID NO: 901963 - DNA, 15 bp, Homo sapiens
gggcctgtaaatagc

SEQ ID NO: 901964 - DNA, 15 bp, Homo sapiens
ggcctgtaaatagct

SEQ ID NO: 901965 - DNA, 15 bp, Homo sapiens
gcctgtaaatagctt

SEQ ID NO: 901966 - DNA, 15 bp, Homo sapiens
cctgtaaatagcttc

SEQ ID NO: 901967 - DNA, 15 bp, Homo sapiens
ctgtaaatagcttcg

SEQ ID NO: 901968 - DNA, 15 bp, Homo sapiens
tgtaaatagcttcgg

SEQ ID NO: 901969 - DNA, 15 bp, Homo sapiens
gtaaatagcttcggc

SEQ ID NO: 901970 - DNA, 15 bp, Homo sapiens
taaatagcttcggca

SEQ ID NO: 901971 - DNA, 15 bp, Homo sapiens
aaatagcttcggcat

SEQ ID NO: 901972 - DNA, 15 bp, Homo sapiens
aatagcttcggcatg

SEQ ID NO: 901973 - DNA, 15 bp, Homo sapiens
atagcttcggcatgg

SEQ ID NO: 901974 - DNA, 15 bp, Homo sapiens
tagcttcggcatggg

SEQ ID NO: 901975 - DNA, 15 bp, Homo sapiens
agcttcggcatggga

SEQ ID NO: 901976 - DNA, 15 bp, Homo sapiens
gcttcggcatgggag

SEQ ID NO: 901977 - DNA, 15 bp, Homo sapiens
cttcggcatgggagc

SEQ ID NO: 901978 - DNA, 15 bp, Homo sapiens
ttcggcatgggagct

SEQ ID NO: 901979 - DNA, 15 bp, Homo sapiens
tcggcatgggagctg

SEQ ID NO: 901980 - DNA, 15 bp, Homo sapiens
cggcatgggagctgc

SEQ ID NO: 901981 - DNA, 15 bp, Homo sapiens
ggcatgggagctgct

SEQ ID NO: 901982 - DNA, 15 bp, Homo sapiens
gcatgggagctgctt

SEQ ID NO: 901983 - DNA, 15 bp, Homo sapiens
catgggagctgcttg

SEQ ID NO: 901984 - DNA, 15 bp, Homo sapiens
atgggagctgcttgc

SEQ ID NO: 901985 - DNA, 15 bp, Homo sapiens
tgggagctgcttgcc

SEQ ID NO: 901986 - DNA, 15 bp, Homo sapiens
gggagctgcttgcca

SEQ ID NO: 901987 - DNA, 15 bp, Homo sapiens
ggagctgcttgccag

SEQ ID NO: 901988 - DNA, 15 bp, Homo sapiens
gagctgcttgccaga

SEQ ID NO: 901989 - DNA, 15 bp, Homo sapiens
agctgcttgccagaa

SEQ ID NO: 901990 - DNA, 15 bp, Homo sapiens
gctgcttgccagaag

SEQ ID NO: 901991 - DNA, 15 bp, Homo sapiens
ctgcttgccagaagg

SEQ ID NO: 901992 - DNA, 15 bp, Homo sapiens
tgcttgccagaagga

SEQ ID NO: 901993 - DNA, 15 bp, Homo sapiens
gcttgccagaaggac

SEQ ID NO: 901994 - DNA, 15 bp, Homo sapiens
cttgccagaaggacc

SEQ ID NO: 901995 - DNA, 15 bp, Homo sapiens
ttgccagaaggacca

SEQ ID NO: 901996 - DNA, 15 bp, Homo sapiens
tgccagaaggaccaa

SEQ ID NO: 901997 - DNA, 15 bp, Homo sapiens
gccagaaggaccaag

SEQ ID NO: 901998 - DNA, 15 bp, Homo sapiens
ccagaaggaccaagc

SEQ ID NO: 901999 - DNA, 15 bp, Homo sapiens
cagaaggaccaagcc

SEQ ID NO: 902000 - DNA, 15 bp, Homo sapiens
agaaggaccaagcca

SEQ ID NO: 902001 - DNA, 15 bp, Homo sapiens
gaaggaccaagccat

SEQ ID NO: 902002 - DNA, 15 bp, Homo sapiens
aaggaccaagccatg

SEQ ID NO: 902003 - DNA, 15 bp, Homo sapiens
aggaccaagccatga

SEQ ID NO: 902004 - DNA, 15 bp, Homo sapiens
ggaccaagccatgat

SEQ ID NO: 902005 - DNA, 15 bp, Homo sapiens
gaccaagccatgatt

SEQ ID NO: 902006 - DNA, 15 bp, Homo sapiens
accaagccatgatta

SEQ ID NO: 902007 - DNA, 15 bp, Homo sapiens
ccaagccatgattag

SEQ ID NO: 902008 - DNA, 15 bp, Homo sapiens
caagccatgattaga

SEQ ID NO: 902009 - DNA, 15 bp, Homo sapiens
aagccatgattagag

SEQ ID NO: 902010 - DNA, 15 bp, Homo sapiens
agccatgattagaga

SEQ ID NO: 902011 - DNA, 15 bp, Homo sapiens
gccatgattagagag

SEQ ID NO: 902012 - DNA, 15 bp, Homo sapiens
ccatgattagagagt

SEQ ID NO: 902013 - DNA, 15 bp, Homo sapiens
catgattagagagtt

SEQ ID NO: 902014 - DNA, 15 bp, Homo sapiens
atgattagagagtta

SEQ ID NO: 902015 - DNA, 15 bp, Homo sapiens
tgattagagagttag

SEQ ID NO: 902016 - DNA, 15 bp, Homo sapiens
gattagagagttaga

SEQ ID NO: 902017 - DNA, 15 bp, Homo sapiens
attagagagttagaa

SEQ ID NO: 902018 - DNA, 15 bp, Homo sapiens
ttagagagttagaac

SEQ ID NO: 902019 - DNA, 15 bp, Homo sapiens
tagagagttagaacc

SEQ ID NO: 902020 - DNA, 15 bp, Homo sapiens
agagagttagaacct

SEQ ID NO: 902021 - DNA, 15 bp, Homo sapiens
gagagttagaacctt

SEQ ID NO: 902022 - DNA, 15 bp, Homo sapiens
agagttagaaccttc

SEQ ID NO: 902023 - DNA, 15 bp, Homo sapiens
gagttagaaccttca

SEQ ID NO: 902024 - DNA, 15 bp, Homo sapiens
agttagaaccttcag

SEQ ID NO: 902025 - DNA, 15 bp, Homo sapiens
gttagaaccttcagc

SEQ ID NO: 902026 - DNA, 15 bp, Homo sapiens
ttagaaccttcagct

SEQ ID NO: 902027 - DNA, 15 bp, Homo sapiens
tagaaccttcagctc

SEQ ID NO: 902028 - DNA, 15 bp, Homo sapiens
agaaccttcagctct

SEQ ID NO: 902029 - DNA, 15 bp, Homo sapiens
gaaccttcagctcta

SEQ ID NO: 902030 - DNA, 15 bp, Homo sapiens
aaccttcagctctac

SEQ ID NO: 902031 - DNA, 15 bp, Homo sapiens
accttcagctctacc

SEQ ID NO: 902032 - DNA, 15 bp, Homo sapiens
ccttcagctctaccc

SEQ ID NO: 902033 - DNA, 15 bp, Homo sapiens
cttcagctctacccg

SEQ ID NO: 902034 - DNA, 15 bp, Homo sapiens
ttcagctctacccgg

SEQ ID NO: 902035 - DNA, 15 bp, Homo sapiens
tcagctctacccggc

SEQ ID NO: 902036 - DNA, 15 bp, Homo sapiens
cagctctacccggca

SEQ ID NO: 902037 - DNA, 15 bp, Homo sapiens
agctctacccggcaa

SEQ ID NO: 902038 - DNA, 15 bp, Homo sapiens
gctctacccggcaac

SEQ ID NO: 902039 - DNA, 15 bp, Homo sapiens
ctctacccggcaacc

SEQ ID NO: 902040 - DNA, 15 bp, Homo sapiens
tctacccggcaacct

SEQ ID NO: 902041 - DNA, 15 bp, Homo sapiens
ctacccggcaacctc

SEQ ID NO: 902042 - DNA, 15 bp, Homo sapiens
tacccggcaacctct

SEQ ID NO: 902043 - DNA, 15 bp, Homo sapiens
acccggcaacctctg

SEQ ID NO: 902044 - DNA, 15 bp, Homo sapiens
cccggcaacctctgc

SEQ ID NO: 902045 - DNA, 15 bp, Homo sapiens
ccggcaacctctgca

SEQ ID NO: 902046 - DNA, 15 bp, Homo sapiens
cggcaacctctgcag

SEQ ID NO: 902047 - DNA, 15 bp, Homo sapiens
ggcaacctctgcaga

SEQ ID NO: 902048 - DNA, 15 bp, Homo sapiens
gcaacctctgcagag

SEQ ID NO: 902049 - DNA, 15 bp, Homo sapiens
caacctctgcagagg

SEQ ID NO: 902050 - DNA, 15 bp, Homo sapiens
aacctctgcagaggg

SEQ ID NO: 902051 - DNA, 15 bp, Homo sapiens
acctctgcagaggga

SEQ ID NO: 902052 - DNA, 15 bp, Homo sapiens
cctctgcagagggaa

SEQ ID NO: 902053 - DNA, 15 bp, Homo sapiens
ctctgcagagggaag

SEQ ID NO: 902054 - DNA, 15 bp, Homo sapiens
tctgcagagggaaga

SEQ ID NO: 902055 - DNA, 15 bp, Homo sapiens
ctgcagagggaagag

SEQ ID NO: 902056 - DNA, 15 bp, Homo sapiens
tgcagagggaagagg

SEQ ID NO: 902057 - DNA, 15 bp, Homo sapiens
gcagagggaagaggg

SEQ ID NO: 902058 - DNA, 15 bp, Homo sapiens
cagagggaagagggg

SEQ ID NO: 902059 - DNA, 15 bp, Homo sapiens
agagggaagaggggc

SEQ ID NO: 902060 - DNA, 15 bp, Homo sapiens
gagggaagaggggct

SEQ ID NO: 902061 - DNA, 15 bp, Homo sapiens
agggaagaggggctg

SEQ ID NO: 902062 - DNA, 15 bp, Homo sapiens
gggaagaggggctgg

SEQ ID NO: 902063 - DNA, 15 bp, Homo sapiens
ggaagaggggctgga

SEQ ID NO: 902064 - DNA, 15 bp, Homo sapiens
gaagaggggctggag

SEQ ID NO: 902065 - DNA, 15 bp, Homo sapiens
aagaggggctggagg

SEQ ID NO: 902066 - DNA, 15 bp, Homo sapiens
agaggggctggaggt

SEQ ID NO: 902067 - DNA, 15 bp, Homo sapiens
gaggggctggaggtt

SEQ ID NO: 902068 - DNA, 15 bp, Homo sapiens
aggggctggaggttg

SEQ ID NO: 902069 - DNA, 15 bp, Homo sapiens
ggggctggaggttga

SEQ ID NO: 902070 - DNA, 15 bp, Homo sapiens
gggctggaggttgag

SEQ ID NO: 902071 - DNA, 15 bp, Homo sapiens
ggctggaggttgagt

SEQ ID NO: 902072 - DNA, 15 bp, Homo sapiens
gctggaggttgagtt

SEQ ID NO: 902073 - DNA, 15 bp, Homo sapiens
ctggaggttgagttt

SEQ ID NO: 902074 - DNA, 15 bp, Homo sapiens
tggaggttgagttta

SEQ ID NO: 902075 - DNA, 15 bp, Homo sapiens
ggaggttgagtttaa

SEQ ID NO: 902076 - DNA, 15 bp, Homo sapiens
gaggttgagtttaat

SEQ ID NO: 902077 - DNA, 15 bp, Homo sapiens
aggttgagtttaatc

SEQ ID NO: 902078 - DNA, 15 bp, Homo sapiens
ggttgagtttaatca

SEQ ID NO: 902079 - DNA, 15 bp, Homo sapiens
gttgagtttaatcac

SEQ ID NO: 902080 - DNA, 15 bp, Homo sapiens
ttgagtttaatcacc

SEQ ID NO: 902081 - DNA, 15 bp, Homo sapiens
tgagtttaatcacca

SEQ ID NO: 902082 - DNA, 15 bp, Homo sapiens
gagtttaatcaccaa

SEQ ID NO: 902083 - DNA, 15 bp, Homo sapiens
agtttaatcaccaat

SEQ ID NO: 902084 - DNA, 15 bp, Homo sapiens
gtttaatcaccaatg

SEQ ID NO: 902085 - DNA, 15 bp, Homo sapiens
tttaatcaccaatgg

SEQ ID NO: 902086 - DNA, 15 bp, Homo sapiens
ttaatcaccaatggc

SEQ ID NO: 902087 - DNA, 15 bp, Homo sapiens
taatcaccaatggcc

SEQ ID NO: 902088 - DNA, 15 bp, Homo sapiens
aatcaccaatggcca

SEQ ID NO: 902089 - DNA, 15 bp, Homo sapiens
atcaccaatggccag

SEQ ID NO: 902090 - DNA, 15 bp, Homo sapiens
tcaccaatggccagt

SEQ ID NO: 902091 - DNA, 15 bp, Homo sapiens
caccaatggccagtg

SEQ ID NO: 902092 - DNA, 15 bp, Homo sapiens
accaatggccagtgg

SEQ ID NO: 902093 - DNA, 15 bp, Homo sapiens
ccaatggccagtggt

SEQ ID NO: 902094 - DNA, 15 bp, Homo sapiens
caatggccagtggtt

SEQ ID NO: 902095 - DNA, 15 bp, Homo sapiens
aatggccagtggttt

SEQ ID NO: 902096 - DNA, 15 bp, Homo sapiens
atggccagtggttta

SEQ ID NO: 902097 - DNA, 15 bp, Homo sapiens
tggccagtggtttaa

SEQ ID NO: 902098 - DNA, 15 bp, Homo sapiens
ggccagtggtttaac

SEQ ID NO: 902099 - DNA, 15 bp, Homo sapiens
gccagtggtttaaca

SEQ ID NO: 902100 - DNA, 15 bp, Homo sapiens
ccagtggtttaacaa

SEQ ID NO: 902101 - DNA, 15 bp, Homo sapiens
cagtggtttaacaat

SEQ ID NO: 902102 - DNA, 15 bp, Homo sapiens
agtggtttaacaatc

SEQ ID NO: 902103 - DNA, 15 bp, Homo sapiens
gtggtttaacaatca

SEQ ID NO: 902104 - DNA, 15 bp, Homo sapiens
tggtttaacaatcat

SEQ ID NO: 902105 - DNA, 15 bp, Homo sapiens
ggtttaacaatcatg

SEQ ID NO: 902106 - DNA, 15 bp, Homo sapiens
gtttaacaatcatgc

SEQ ID NO: 902107 - DNA, 15 bp, Homo sapiens
tttaacaatcatgcc

SEQ ID NO: 902108 - DNA, 15 bp, Homo sapiens
ttaacaatcatgcct

SEQ ID NO: 902109 - DNA, 15 bp, Homo sapiens
taacaatcatgccta

SEQ ID NO: 902110 - DNA, 15 bp, Homo sapiens
aacaatcatgcctat

SEQ ID NO: 902111 - DNA, 15 bp, Homo sapiens
acaatcatgcctatg

SEQ ID NO: 902112 - DNA, 15 bp, Homo sapiens
caatcatgcctatgt

SEQ ID NO: 902113 - DNA, 15 bp, Homo sapiens
aatcatgcctatgta

SEQ ID NO: 902114 - DNA, 15 bp, Homo sapiens
atcatgcctatgtag

SEQ ID NO: 902115 - DNA, 15 bp, Homo sapiens
tcatgcctatgtagt

SEQ ID NO: 902116 - DNA, 15 bp, Homo sapiens
catgcctatgtagtg

SEQ ID NO: 902117 - DNA, 15 bp, Homo sapiens
atgcctatgtagtga

SEQ ID NO: 902118 - DNA, 15 bp, Homo sapiens
tgcctatgtagtgaa

SEQ ID NO: 902119 - DNA, 15 bp, Homo sapiens
gcctatgtagtgaaa

SEQ ID NO: 902120 - DNA, 15 bp, Homo sapiens
cctatgtagtgaaat

SEQ ID NO: 902121 - DNA, 15 bp, Homo sapiens
ctatgtagtgaaatc

SEQ ID NO: 902122 - DNA, 15 bp, Homo sapiens
tatgtagtgaaatct

SEQ ID NO: 902123 - DNA, 15 bp, Homo sapiens
atgtagtgaaatctt

SEQ ID NO: 902124 - DNA, 15 bp, Homo sapiens
tgtagtgaaatcttc

SEQ ID NO: 902125 - DNA, 15 bp, Homo sapiens
gtagtgaaatcttca

SEQ ID NO: 902126 - DNA, 15 bp, Homo sapiens
tagtgaaatcttcat

SEQ ID NO: 902127 - DNA, 15 bp, Homo sapiens
agtgaaatcttcata

SEQ ID NO: 902128 - DNA, 15 bp, Homo sapiens
gtgaaatcttcataa

SEQ ID NO: 902129 - DNA, 15 bp, Homo sapiens
tgaaatcttcataaa

SEQ ID NO: 902130 - DNA, 15 bp, Homo sapiens
gaaatcttcataaaa

SEQ ID NO: 902131 - DNA, 15 bp, Homo sapiens
aaatcttcataaaac

SEQ ID NO: 902132 - DNA, 15 bp, Homo sapiens
aatcttcataaaacc

SEQ ID NO: 902133 - DNA, 15 bp, Homo sapiens
atcttcataaaaccc

SEQ ID NO: 902134 - DNA, 15 bp, Homo sapiens
tcttcataaaacccc

SEQ ID NO: 902135 - DNA, 15 bp, Homo sapiens
cttcataaaaccccc

SEQ ID NO: 902136 - DNA, 15 bp, Homo sapiens
ttcataaaaccccct

SEQ ID NO: 902137 - DNA, 15 bp, Homo sapiens
tcataaaacccccta

SEQ ID NO: 902138 - DNA, 15 bp, Homo sapiens
cataaaaccccctaa

SEQ ID NO: 902139 - DNA, 15 bp, Homo sapiens
ataaaaccccctaaa

SEQ ID NO: 902140 - DNA, 15 bp, Homo sapiens
taaaaccccctaaat

SEQ ID NO: 902141 - DNA, 15 bp, Homo sapiens
aaaaccccctaaata

SEQ ID NO: 902142 - DNA, 15 bp, Homo sapiens
aaaccccctaaataa

SEQ ID NO: 902143 - DNA, 15 bp, Homo sapiens
aaccccctaaataat

SEQ ID NO: 902144 - DNA, 15 bp, Homo sapiens
accccctaaataata

SEQ ID NO: 902145 - DNA, 15 bp, Homo sapiens
ccccctaaataatag

SEQ ID NO: 902146 - DNA, 15 bp, Homo sapiens
cccctaaataatagg

SEQ ID NO: 902147 - DNA, 15 bp, Homo sapiens
ccctaaataataggg

SEQ ID NO: 902148 - DNA, 15 bp, Homo sapiens
cctaaataatagggt

SEQ ID NO: 902149 - DNA, 15 bp, Homo sapiens
ctaaataatagggtt

SEQ ID NO: 902150 - DNA, 15 bp, Homo sapiens
taaataatagggttt

SEQ ID NO: 902151 - DNA, 15 bp, Homo sapiens
aaataatagggtttg

SEQ ID NO: 902152 - DNA, 15 bp, Homo sapiens
aataatagggtttgg

SEQ ID NO: 902153 - DNA, 15 bp, Homo sapiens
ataatagggtttggg

SEQ ID NO: 902154 - DNA, 15 bp, Homo sapiens
taatagggtttgggg

SEQ ID NO: 902155 - DNA, 15 bp, Homo sapiens
aatagggtttggggg

SEQ ID NO: 902156 - DNA, 15 bp, Homo sapiens
atagggtttgggggg

SEQ ID NO: 902157 - DNA, 15 bp, Homo sapiens
tagggtttggggggc

SEQ ID NO: 902158 - DNA, 15 bp, Homo sapiens
agggtttggggggct

SEQ ID NO: 902159 - DNA, 15 bp, Homo sapiens
gggtttggggggctt

SEQ ID NO: 902160 - DNA, 15 bp, Homo sapiens
ggtttggggggcttc

SEQ ID NO: 902161 - DNA, 15 bp, Homo sapiens
gtttggggggcttct

SEQ ID NO: 902162 - DNA, 15 bp, Homo sapiens
tttggggggcttctg

SEQ ID NO: 902163 - DNA, 15 bp, Homo sapiens
ttggggggcttctgg

SEQ ID NO: 902164 - DNA, 15 bp, Homo sapiens
tggggggcttctggg

SEQ ID NO: 902165 - DNA, 15 bp, Homo sapiens
ggggggcttctgggt

SEQ ID NO: 902166 - DNA, 15 bp, Homo sapiens
gggggcttctgggtt

SEQ ID NO: 902167 - DNA, 15 bp, Homo sapiens
ggggcttctgggttg

SEQ ID NO: 902168 - DNA, 15 bp, Homo sapiens
gggcttctgggttgg

SEQ ID NO: 902169 - DNA, 15 bp, Homo sapiens
ggcttctgggttggt

SEQ ID NO: 902170 - DNA, 15 bp, Homo sapiens
gcttctgggttggtg

SEQ ID NO: 902171 - DNA, 15 bp, Homo sapiens
cttctgggttggtga

SEQ ID NO: 902172 - DNA, 15 bp, Homo sapiens
ttctgggttggtgaa

SEQ ID NO: 902173 - DNA, 15 bp, Homo sapiens
tctgggttggtgaac

SEQ ID NO: 902174 - DNA, 15 bp, Homo sapiens
ctgggttggtgaaca

SEQ ID NO: 902175 - DNA, 15 bp, Homo sapiens
tgggttggtgaacac

SEQ ID NO: 902176 - DNA, 15 bp, Homo sapiens
gggttggtgaacacg

SEQ ID NO: 902177 - DNA, 15 bp, Homo sapiens
ggttggtgaacacgt

SEQ ID NO: 902178 - DNA, 15 bp, Homo sapiens
gttggtgaacacgtc

SEQ ID NO: 902179 - DNA, 15 bp, Homo sapiens
ttggtgaacacgtca

SEQ ID NO: 902180 - DNA, 15 bp, Homo sapiens
tggtgaacacgtcaa

SEQ ID NO: 902181 - DNA, 15 bp, Homo sapiens
ggtgaacacgtcaag

SEQ ID NO: 902182 - DNA, 15 bp, Homo sapiens
gtgaacacgtcaagg

SEQ ID NO: 902183 - DNA, 15 bp, Homo sapiens
tgaacacgtcaaggt

SEQ ID NO: 902184 - DNA, 15 bp, Homo sapiens
gaacacgtcaaggtg

SEQ ID NO: 902185 - DNA, 15 bp, Homo sapiens
aacacgtcaaggtgc

SEQ ID NO: 902186 - DNA, 15 bp, Homo sapiens
acacgtcaaggtgct

SEQ ID NO: 902187 - DNA, 15 bp, Homo sapiens
cacgtcaaggtgctg

SEQ ID NO: 902188 - DNA, 15 bp, Homo sapiens
acgtcaaggtgctgg

SEQ ID NO: 902189 - DNA, 15 bp, Homo sapiens
cgtcaaggtgctggg

SEQ ID NO: 902190 - DNA, 15 bp, Homo sapiens
gtcaaggtgctggga

SEQ ID NO: 902191 - DNA, 15 bp, Homo sapiens
tcaaggtgctgggag

SEQ ID NO: 902192 - DNA, 15 bp, Homo sapiens
caaggtgctgggaga

SEQ ID NO: 902193 - DNA, 15 bp, Homo sapiens
aaggtgctgggagag

SEQ ID NO: 902194 - DNA, 15 bp, Homo sapiens
aggtgctgggagagg

SEQ ID NO: 902195 - DNA, 15 bp, Homo sapiens
ggtgctgggagaggg

SEQ ID NO: 902196 - DNA, 15 bp, Homo sapiens
gtgctgggagagggc

SEQ ID NO: 902197 - DNA, 15 bp, Homo sapiens
tgctgggagagggcc

SEQ ID NO: 902198 - DNA, 15 bp, Homo sapiens
gctgggagagggccc

SEQ ID NO: 902199 - DNA, 15 bp, Homo sapiens
ctgggagagggcccg

SEQ ID NO: 902200 - DNA, 15 bp, Homo sapiens
tgggagagggcccgg

SEQ ID NO: 902201 - DNA, 15 bp, Homo sapiens
gggagagggcccgga

SEQ ID NO: 902202 - DNA, 15 bp, Homo sapiens
ggagagggcccggaa

SEQ ID NO: 902203 - DNA, 15 bp, Homo sapiens
gagagggcccggaaa

SEQ ID NO: 902204 - DNA, 15 bp, Homo sapiens
agagggcccggaaac

SEQ ID NO: 902205 - DNA, 15 bp, Homo sapiens
gagggcccggaaact

SEQ ID NO: 902206 - DNA, 15 bp, Homo sapiens
agggcccggaaactc

SEQ ID NO: 902207 - DNA, 15 bp, Homo sapiens
gggcccggaaactct

SEQ ID NO: 902208 - DNA, 15 bp, Homo sapiens
ggcccggaaactctg

SEQ ID NO: 902209 - DNA, 15 bp, Homo sapiens
gcccggaaactctgc

SEQ ID NO: 902210 - DNA, 15 bp, Homo sapiens
cccggaaactctgca

SEQ ID NO: 902211 - DNA, 15 bp, Homo sapiens
ccggaaactctgcac

SEQ ID NO: 902212 - DNA, 15 bp, Homo sapiens
cggaaactctgcacc

SEQ ID NO: 902213 - DNA, 15 bp, Homo sapiens
ggaaactctgcacct

SEQ ID NO: 902214 - DNA, 15 bp, Homo sapiens
gaaactctgcacctc

SEQ ID NO: 902215 - DNA, 15 bp, Homo sapiens
aaactctgcacctcc

SEQ ID NO: 902216 - DNA, 15 bp, Homo sapiens
aactctgcacctcca

SEQ ID NO: 902217 - DNA, 15 bp, Homo sapiens
actctgcacctccac

SEQ ID NO: 902218 - DNA, 15 bp, Homo sapiens
ctctgcacctccacc

SEQ ID NO: 902219 - DNA, 15 bp, Homo sapiens
tctgcacctccaccc

SEQ ID NO: 902220 - DNA, 15 bp, Homo sapiens
ctgcacctccaccct

SEQ ID NO: 902221 - DNA, 15 bp, Homo sapiens
tgcacctccaccctg

SEQ ID NO: 902222 - DNA, 15 bp, Homo sapiens
gcacctccaccctgc

SEQ ID NO: 902223 - DNA, 15 bp, Homo sapiens
cacctccaccctgca

SEQ ID NO: 902224 - DNA, 15 bp, Homo sapiens
acctccaccctgcat

SEQ ID NO: 902225 - DNA, 15 bp, Homo sapiens
cctccaccctgcatc

SEQ ID NO: 902226 - DNA, 15 bp, Homo sapiens
ctccaccctgcatcc

SEQ ID NO: 902227 - DNA, 15 bp, Homo sapiens
tccaccctgcatccc

SEQ ID NO: 902228 - DNA, 15 bp, Homo sapiens
ccaccctgcatccct

SEQ ID NO: 902229 - DNA, 15 bp, Homo sapiens
caccctgcatccctc

SEQ ID NO: 902230 - DNA, 15 bp, Homo sapiens
accctgcatccctca

SEQ ID NO: 902231 - DNA, 15 bp, Homo sapiens
ccctgcatccctcat

SEQ ID NO: 902232 - DNA, 15 bp, Homo sapiens
cctgcatccctcata

SEQ ID NO: 902233 - DNA, 15 bp, Homo sapiens
ctgcatccctcatac

SEQ ID NO: 902234 - DNA, 15 bp, Homo sapiens
tgcatccctcatacc

SEQ ID NO: 902235 - DNA, 15 bp, Homo sapiens
gcatccctcatacct

SEQ ID NO: 902236 - DNA, 15 bp, Homo sapiens
catccctcatacctt

SEQ ID NO: 902237 - DNA, 15 bp, Homo sapiens
atccctcataccttg

SEQ ID NO: 902238 - DNA, 15 bp, Homo sapiens
tccctcataccttgc

SEQ ID NO: 902239 - DNA, 15 bp, Homo sapiens
ccctcataccttgcc

SEQ ID NO: 902240 - DNA, 15 bp, Homo sapiens
cctcataccttgccc

SEQ ID NO: 902241 - DNA, 15 bp, Homo sapiens
ctcataccttgccct

SEQ ID NO: 902242 - DNA, 15 bp, Homo sapiens
tcataccttgccctg

SEQ ID NO: 902243 - DNA, 15 bp, Homo sapiens
cataccttgccctgt

SEQ ID NO: 902244 - DNA, 15 bp, Homo sapiens
ataccttgccctgtg

SEQ ID NO: 902245 - DNA, 15 bp, Homo sapiens
taccttgccctgtgt

SEQ ID NO: 902246 - DNA, 15 bp, Homo sapiens
accttgccctgtgtg

SEQ ID NO: 902247 - DNA, 15 bp, Homo sapiens
ccttgccctgtgtgt

SEQ ID NO: 902248 - DNA, 15 bp, Homo sapiens
cttgccctgtgtgtc

SEQ ID NO: 902249 - DNA, 15 bp, Homo sapiens
ttgccctgtgtgtct

SEQ ID NO: 902250 - DNA, 15 bp, Homo sapiens
tgccctgtgtgtctc

SEQ ID NO: 902251 - DNA, 15 bp, Homo sapiens
gccctgtgtgtctct

SEQ ID NO: 902252 - DNA, 15 bp, Homo sapiens
ccctgtgtgtctctt

SEQ ID NO: 902253 - DNA, 15 bp, Homo sapiens
cctgtgtgtctcttc

SEQ ID NO: 902254 - DNA, 15 bp, Homo sapiens
ctgtgtgtctcttcc

SEQ ID NO: 902255 - DNA, 15 bp, Homo sapiens
tgtgtgtctcttccg

SEQ ID NO: 902256 - DNA, 15 bp, Homo sapiens
gtgtgtctcttccgt

SEQ ID NO: 902257 - DNA, 15 bp, Homo sapiens
tgtgtctcttccgtc

SEQ ID NO: 902258 - DNA, 15 bp, Homo sapiens
gtgtctcttccgtct

SEQ ID NO: 902259 - DNA, 15 bp, Homo sapiens
tgtctcttccgtctg

SEQ ID NO: 902260 - DNA, 15 bp, Homo sapiens
gtctcttccgtctgc

SEQ ID NO: 902261 - DNA, 15 bp, Homo sapiens
tctcttccgtctgcc

SEQ ID NO: 902262 - DNA, 15 bp, Homo sapiens
ctcttccgtctgcct

SEQ ID NO: 902263 - DNA, 15 bp, Homo sapiens
tcttccgtctgcctg

SEQ ID NO: 902264 - DNA, 15 bp, Homo sapiens
cttccgtctgcctgt

SEQ ID NO: 902265 - DNA, 15 bp, Homo sapiens
ttccgtctgcctgtt

SEQ ID NO: 902266 - DNA, 15 bp, Homo sapiens
tccgtctgcctgttt

SEQ ID NO: 902267 - DNA, 15 bp, Homo sapiens
ccgtctgcctgtttc

SEQ ID NO: 902268 - DNA, 15 bp, Homo sapiens
cgtctgcctgtttct

SEQ ID NO: 902269 - DNA, 15 bp, Homo sapiens
gtctgcctgtttctg

SEQ ID NO: 902270 - DNA, 15 bp, Homo sapiens
tctgcctgtttctga

SEQ ID NO: 902271 - DNA, 15 bp, Homo sapiens
ctgcctgtttctgag

SEQ ID NO: 902272 - DNA, 15 bp, Homo sapiens
tgcctgtttctgagt

SEQ ID NO: 902273 - DNA, 15 bp, Homo sapiens
gcctgtttctgagtt

SEQ ID NO: 902274 - DNA, 15 bp, Homo sapiens
cctgtttctgagtta

SEQ ID NO: 902275 - DNA, 15 bp, Homo sapiens
ctgtttctgagttat

SEQ ID NO: 902276 - DNA, 15 bp, Homo sapiens
tgtttctgagttata

SEQ ID NO: 902277 - DNA, 15 bp, Homo sapiens
gtttctgagttatat

SEQ ID NO: 902278 - DNA, 15 bp, Homo sapiens
tttctgagttatatc

SEQ ID NO: 902279 - DNA, 15 bp, Homo sapiens
ttctgagttatatcc

SEQ ID NO: 902280 - DNA, 15 bp, Homo sapiens
tctgagttatatcct

SEQ ID NO: 902281 - DNA, 15 bp, Homo sapiens
ctgagttatatcctc

SEQ ID NO: 902282 - DNA, 15 bp, Homo sapiens
tgagttatatcctct

SEQ ID NO: 902283 - DNA, 15 bp, Homo sapiens
gagttatatcctctg

SEQ ID NO: 902284 - DNA, 15 bp, Homo sapiens
agttatatcctctgt

SEQ ID NO: 902285 - DNA, 15 bp, Homo sapiens
gttatatcctctgta

SEQ ID NO: 902286 - DNA, 15 bp, Homo sapiens
ttatatcctctgtaa

SEQ ID NO: 902287 - DNA, 15 bp, Homo sapiens
tatatcctctgtaat

SEQ ID NO: 902288 - DNA, 15 bp, Homo sapiens
atatcctctgtaatc

SEQ ID NO: 902289 - DNA, 15 bp, Homo sapiens
tatcctctgtaatca

SEQ ID NO: 902290 - DNA, 15 bp, Homo sapiens
atcctctgtaatcaa

SEQ ID NO: 902291 - DNA, 15 bp, Homo sapiens
tcctctgtaatcaac

SEQ ID NO: 902292 - DNA, 15 bp, Homo sapiens
cctctgtaatcaaca

SEQ ID NO: 902293 - DNA, 15 bp, Homo sapiens
ctctgtaatcaacat

SEQ ID NO: 902294 - DNA, 15 bp, Homo sapiens
tctgtaatcaacatg

SEQ ID NO: 902295 - DNA, 15 bp, Homo sapiens
ctgtaatcaacatgt

SEQ ID NO: 902296 - DNA, 15 bp, Homo sapiens
tgtaatcaacatgta

SEQ ID NO: 902297 - DNA, 15 bp, Homo sapiens
gtaatcaacatgtaa

SEQ ID NO: 902298 - DNA, 15 bp, Homo sapiens
taatcaacatgtaat

SEQ ID NO: 902299 - DNA, 15 bp, Homo sapiens
aatcaacatgtaata

SEQ ID NO: 902300 - DNA, 15 bp, Homo sapiens
atcaacatgtaatag

SEQ ID NO: 902301 - DNA, 15 bp, Homo sapiens
tcaacatgtaatagt

SEQ ID NO: 902302 - DNA, 15 bp, Homo sapiens
caacatgtaatagta

SEQ ID NO: 902303 - DNA, 15 bp, Homo sapiens
aacatgtaatagtaa

SEQ ID NO: 902304 - DNA, 15 bp, Homo sapiens
acatgtaatagtaag

SEQ ID NO: 902305 - DNA, 15 bp, Homo sapiens
catgtaatagtaagt

SEQ ID NO: 902306 - DNA, 15 bp, Homo sapiens
atgtaatagtaagtg

SEQ ID NO: 902307 - DNA, 15 bp, Homo sapiens
tgtaatagtaagtgt

SEQ ID NO: 902308 - DNA, 15 bp, Homo sapiens
gtaatagtaagtgtc

SEQ ID NO: 902309 - DNA, 15 bp, Homo sapiens
taatagtaagtgtca

SEQ ID NO: 902310 - DNA, 15 bp, Homo sapiens
aatagtaagtgtcaa

SEQ ID NO: 902311 - DNA, 15 bp, Homo sapiens
atagtaagtgtcaat

SEQ ID NO: 902312 - DNA, 15 bp, Homo sapiens
tagtaagtgtcaata

SEQ ID NO: 902313 - DNA, 15 bp, Homo sapiens
agtaagtgtcaatag

SEQ ID NO: 902314 - DNA, 15 bp, Homo sapiens
gtaagtgtcaatagt

SEQ ID NO: 902315 - DNA, 15 bp, Homo sapiens
taagtgtcaatagta

SEQ ID NO: 902316 - DNA, 15 bp, Homo sapiens
aagtgtcaatagtaa

SEQ ID NO: 902317 - DNA, 15 bp, Homo sapiens
agtgtcaatagtaag

SEQ ID NO: 902318 - DNA, 15 bp, Homo sapiens
gtgtcaatagtaagt

SEQ ID NO: 902319 - DNA, 15 bp, Homo sapiens
tgtcaatagtaagta

SEQ ID NO: 902320 - DNA, 15 bp, Homo sapiens
gtcaatagtaagtaa

SEQ ID NO: 902321 - DNA, 15 bp, Homo sapiens
tcaatagtaagtaaa

SEQ ID NO: 902322 - DNA, 15 bp, Homo sapiens
caatagtaagtaaaa

SEQ ID NO: 902323 - DNA, 15 bp, Homo sapiens
aatagtaagtaaaat

SEQ ID NO: 902324 - DNA, 15 bp, Homo sapiens
atagtaagtaaaatg

SEQ ID NO: 902325 - DNA, 15 bp, Homo sapiens
tagtaagtaaaatgt

SEQ ID NO: 902326 - DNA, 15 bp, Homo sapiens
agtaagtaaaatgtt

SEQ ID NO: 902327 - DNA, 15 bp, Homo sapiens
gtaagtaaaatgttc

SEQ ID NO: 902328 - DNA, 15 bp, Homo sapiens
taagtaaaatgttct

SEQ ID NO: 902329 - DNA, 15 bp, Homo sapiens
aagtaaaatgttctt

SEQ ID NO: 902330 - DNA, 15 bp, Homo sapiens
agtaaaatgttcttt

SEQ ID NO: 902331 - DNA, 15 bp, Homo sapiens
gtaaaatgttctttt

SEQ ID NO: 902332 - DNA, 15 bp, Homo sapiens
taaaatgttcttttg

SEQ ID NO: 902333 - DNA, 15 bp, Homo sapiens
aaaatgttcttttga

SEQ ID NO: 902334 - DNA, 15 bp, Homo sapiens
aaatgttcttttgag

SEQ ID NO: 902335 - DNA, 15 bp, Homo sapiens
aatgttcttttgagt

SEQ ID NO: 902336 - DNA, 15 bp, Homo sapiens
atgttcttttgagtt

SEQ ID NO: 902337 - DNA, 15 bp, Homo sapiens
tgttcttttgagttc

SEQ ID NO: 902338 - DNA, 15 bp, Homo sapiens
gttcttttgagttct

SEQ ID NO: 902339 - DNA, 15 bp, Homo sapiens
ttcttttgagttctg

SEQ ID NO: 902340 - DNA, 15 bp, Homo sapiens
tcttttgagttctgt

SEQ ID NO: 902341 - DNA, 15 bp, Homo sapiens
cttttgagttctgtg

SEQ ID NO: 902342 - DNA, 15 bp, Homo sapiens
ttttgagttctgtgg

SEQ ID NO: 902343 - DNA, 15 bp, Homo sapiens
tttgagttctgtgga

SEQ ID NO: 902344 - DNA, 15 bp, Homo sapiens
ttgagttctgtggat

SEQ ID NO: 902345 - DNA, 15 bp, Homo sapiens
tgagttctgtggatc

SEQ ID NO: 902346 - DNA, 15 bp, Homo sapiens
gagttctgtggatca

SEQ ID NO: 902347 - DNA, 15 bp, Homo sapiens
agttctgtggatcac

SEQ ID NO: 902348 - DNA, 15 bp, Homo sapiens
gttctgtggatcact

SEQ ID NO: 902349 - DNA, 15 bp, Homo sapiens
ttctgtggatcactc

SEQ ID NO: 902350 - DNA, 15 bp, Homo sapiens
tctgtggatcactct

SEQ ID NO: 902351 - DNA, 15 bp, Homo sapiens
ctgtggatcactcta

SEQ ID NO: 902352 - DNA, 15 bp, Homo sapiens
tgtggatcactctag

SEQ ID NO: 902353 - DNA, 15 bp, Homo sapiens
gtggatcactctagt

SEQ ID NO: 902354 - DNA, 15 bp, Homo sapiens
tggatcactctagta

SEQ ID NO: 902355 - DNA, 15 bp, Homo sapiens
ggatcactctagtaa

SEQ ID NO: 902356 - DNA, 15 bp, Homo sapiens
gatcactctagtaaa

SEQ ID NO: 902357 - DNA, 15 bp, Homo sapiens
atcactctagtaaat

SEQ ID NO: 902358 - DNA, 15 bp, Homo sapiens
tcactctagtaaatt

SEQ ID NO: 902359 - DNA, 15 bp, Homo sapiens
cactctagtaaatta

SEQ ID NO: 902360 - DNA, 15 bp, Homo sapiens
actctagtaaattat

SEQ ID NO: 902361 - DNA, 15 bp, Homo sapiens
ctctagtaaattatt

SEQ ID NO: 902362 - DNA, 15 bp, Homo sapiens
tctagtaaattatta

SEQ ID NO: 902363 - DNA, 15 bp, Homo sapiens
ctagtaaattattat

SEQ ID NO: 902364 - DNA, 15 bp, Homo sapiens
tagtaaattattata

SEQ ID NO: 902365 - DNA, 15 bp, Homo sapiens
agtaaattattatat

SEQ ID NO: 902366 - DNA, 15 bp, Homo sapiens
gtaaattattatatc

SEQ ID NO: 902367 - DNA, 15 bp, Homo sapiens
taaattattatatcc

SEQ ID NO: 902368 - DNA, 15 bp, Homo sapiens
aaattattatatcct

SEQ ID NO: 902369 - DNA, 15 bp, Homo sapiens
aattattatatccta

SEQ ID NO: 902370 - DNA, 15 bp, Homo sapiens
attattatatcctat

SEQ ID NO: 902371 - DNA, 15 bp, Homo sapiens
ttattatatcctatc

SEQ ID NO: 902372 - DNA, 15 bp, Homo sapiens
tattatatcctatct

SEQ ID NO: 902373 - DNA, 15 bp, Homo sapiens
attatatcctatctg

SEQ ID NO: 902374 - DNA, 15 bp, Homo sapiens
ttatatcctatctgg

SEQ ID NO: 902375 - DNA, 15 bp, Homo sapiens
tatatcctatctgga

SEQ ID NO: 902376 - DNA, 15 bp, Homo sapiens
atatcctatctggag

SEQ ID NO: 902377 - DNA, 15 bp, Homo sapiens
tatcctatctggagg

SEQ ID NO: 902378 - DNA, 15 bp, Homo sapiens
atcctatctggaggt

SEQ ID NO: 902379 - DNA, 15 bp, Homo sapiens
tcctatctggaggtg

SEQ ID NO: 902380 - DNA, 15 bp, Homo sapiens
cctatctggaggtgt

SEQ ID NO: 902381 - DNA, 15 bp, Homo sapiens
ctatctggaggtgta

SEQ ID NO: 902382 - DNA, 15 bp, Homo sapiens
tatctggaggtgtag

SEQ ID NO: 902383 - DNA, 15 bp, Homo sapiens
atctggaggtgtagg

SEQ ID NO: 902384 - DNA, 15 bp, Homo sapiens
tctggaggtgtaggg

SEQ ID NO: 902385 - DNA, 15 bp, Homo sapiens
ctggaggtgtagggg

SEQ ID NO: 902386 - DNA, 15 bp, Homo sapiens
tggaggtgtagggga

SEQ ID NO: 902387 - DNA, 15 bp, Homo sapiens
ggaggtgtaggggag

SEQ ID NO: 902388 - DNA, 15 bp, Homo sapiens
gaggtgtaggggagg

SEQ ID NO: 902389 - DNA, 15 bp, Homo sapiens
aggtgtaggggaggt

SEQ ID NO: 902390 - DNA, 15 bp, Homo sapiens
ggtgtaggggaggtt

SEQ ID NO: 902391 - DNA, 15 bp, Homo sapiens
gtgtaggggaggttg

SEQ ID NO: 902392 - DNA, 15 bp, Homo sapiens
tgtaggggaggttgt

SEQ ID NO: 902393 - DNA, 15 bp, Homo sapiens
gtaggggaggttgta

SEQ ID NO: 902394 - DNA, 15 bp, Homo sapiens
taggggaggttgtag

SEQ ID NO: 902395 - DNA, 15 bp, Homo sapiens
aggggaggttgtagg

SEQ ID NO: 902396 - DNA, 15 bp, Homo sapiens
ggggaggttgtagga

SEQ ID NO: 902397 - DNA, 15 bp, Homo sapiens
gggaggttgtaggaa

SEQ ID NO: 902398 - DNA, 15 bp, Homo sapiens
ggaggttgtaggaat

SEQ ID NO: 902399 - DNA, 15 bp, Homo sapiens
gaggttgtaggaatg

SEQ ID NO: 902400 - DNA, 15 bp, Homo sapiens
aggttgtaggaatgt

SEQ ID NO: 902401 - DNA, 15 bp, Homo sapiens
ggttgtaggaatgtt

SEQ ID NO: 902402 - DNA, 15 bp, Homo sapiens
gttgtaggaatgttc

SEQ ID NO: 902403 - DNA, 15 bp, Homo sapiens
ttgtaggaatgttct

SEQ ID NO: 902404 - DNA, 15 bp, Homo sapiens
tgtaggaatgttctg

SEQ ID NO: 902405 - DNA, 15 bp, Homo sapiens
gtaggaatgttctgt

SEQ ID NO: 902406 - DNA, 15 bp, Homo sapiens
taggaatgttctgtc

SEQ ID NO: 902407 - DNA, 15 bp, Homo sapiens
aggaatgttctgtca

SEQ ID NO: 902408 - DNA, 15 bp, Homo sapiens
ggaatgttctgtcag

SEQ ID NO: 902409 - DNA, 15 bp, Homo sapiens
gaatgttctgtcagt

SEQ ID NO: 902410 - DNA, 15 bp, Homo sapiens
aatgttctgtcagtc

SEQ ID NO: 902411 - DNA, 15 bp, Homo sapiens
atgttctgtcagtca

SEQ ID NO: 902412 - DNA, 15 bp, Homo sapiens
tgttctgtcagtcag

SEQ ID NO: 902413 - DNA, 15 bp, Homo sapiens
gttctgtcagtcagg

SEQ ID NO: 902414 - DNA, 15 bp, Homo sapiens
ttctgtcagtcaggt

SEQ ID NO: 902415 - DNA, 15 bp, Homo sapiens
tctgtcagtcaggtg

SEQ ID NO: 902416 - DNA, 15 bp, Homo sapiens
ctgtcagtcaggtgg

SEQ ID NO: 902417 - DNA, 15 bp, Homo sapiens
tgtcagtcaggtgga

SEQ ID NO: 902418 - DNA, 15 bp, Homo sapiens
gtcagtcaggtggaa

SEQ ID NO: 902419 - DNA, 15 bp, Homo sapiens
tcagtcaggtggaag

SEQ ID NO: 902420 - DNA, 15 bp, Homo sapiens
cagtcaggtggaagt

SEQ ID NO: 902421 - DNA, 15 bp, Homo sapiens
agtcaggtggaagtg

SEQ ID NO: 902422 - DNA, 15 bp, Homo sapiens
gtcaggtggaagtgt

SEQ ID NO: 902423 - DNA, 15 bp, Homo sapiens
tcaggtggaagtgtg

SEQ ID NO: 902424 - DNA, 15 bp, Homo sapiens
caggtggaagtgtgg

SEQ ID NO: 902425 - DNA, 15 bp, Homo sapiens
aggtggaagtgtgga

SEQ ID NO: 902426 - DNA, 15 bp, Homo sapiens
ggtggaagtgtggat

SEQ ID NO: 902427 - DNA, 15 bp, Homo sapiens
gtggaagtgtggata

SEQ ID NO: 902428 - DNA, 15 bp, Homo sapiens
tggaagtgtggatag

SEQ ID NO: 902429 - DNA, 15 bp, Homo sapiens
ggaagtgtggatagt

SEQ ID NO: 902430 - DNA, 15 bp, Homo sapiens
gaagtgtggatagtc

SEQ ID NO: 902431 - DNA, 15 bp, Homo sapiens
aagtgtggatagtca

SEQ ID NO: 902432 - DNA, 15 bp, Homo sapiens
agtgtggatagtcag

SEQ ID NO: 902433 - DNA, 15 bp, Homo sapiens
gtgtggatagtcagg

SEQ ID NO: 902434 - DNA, 15 bp, Homo sapiens
tgtggatagtcagga

SEQ ID NO: 902435 - DNA, 15 bp, Homo sapiens
gtggatagtcaggac

SEQ ID NO: 902436 - DNA, 15 bp, Homo sapiens
tggatagtcaggaca

SEQ ID NO: 902437 - DNA, 15 bp, Homo sapiens
ggatagtcaggacac

SEQ ID NO: 902438 - DNA, 15 bp, Homo sapiens
gatagtcaggacacc

SEQ ID NO: 902439 - DNA, 15 bp, Homo sapiens
atagtcaggacaccc

SEQ ID NO: 902440 - DNA, 15 bp, Homo sapiens
tagtcaggacaccct

SEQ ID NO: 902441 - DNA, 15 bp, Homo sapiens
agtcaggacacccta

SEQ ID NO: 902442 - DNA, 15 bp, Homo sapiens
gtcaggacaccctat

SEQ ID NO: 902443 - DNA, 15 bp, Homo sapiens
tcaggacaccctatt

SEQ ID NO: 902444 - DNA, 15 bp, Homo sapiens
caggacaccctattg

SEQ ID NO: 902445 - DNA, 15 bp, Homo sapiens
aggacaccctattgg

SEQ ID NO: 902446 - DNA, 15 bp, Homo sapiens
ggacaccctattggt

SEQ ID NO: 902447 - DNA, 15 bp, Homo sapiens
gacaccctattggtg

SEQ ID NO: 902448 - DNA, 15 bp, Homo sapiens
acaccctattggtgg

SEQ ID NO: 902449 - DNA, 15 bp, Homo sapiens
caccctattggtggc

SEQ ID NO: 902450 - DNA, 15 bp, Homo sapiens
accctattggtggct

SEQ ID NO: 902451 - DNA, 15 bp, Homo sapiens
ccctattggtggctg

SEQ ID NO: 902452 - DNA, 15 bp, Homo sapiens
cctattggtggctgg

SEQ ID NO: 902453 - DNA, 15 bp, Homo sapiens
ctattggtggctggc

SEQ ID NO: 902454 - DNA, 15 bp, Homo sapiens
tattggtggctggca

SEQ ID NO: 902455 - DNA, 15 bp, Homo sapiens
attggtggctggcat

SEQ ID NO: 902456 - DNA, 15 bp, Homo sapiens
ttggtggctggcatt

SEQ ID NO: 902457 - DNA, 15 bp, Homo sapiens
tggtggctggcattt

SEQ ID NO: 902458 - DNA, 15 bp, Homo sapiens
ggtggctggcatttg

SEQ ID NO: 902459 - DNA, 15 bp, Homo sapiens
gtggctggcatttga

SEQ ID NO: 902460 - DNA, 15 bp, Homo sapiens
tggctggcatttgaa

SEQ ID NO: 902461 - DNA, 15 bp, Homo sapiens
ggctggcatttgaat

SEQ ID NO: 902462 - DNA, 15 bp, Homo sapiens
gctggcatttgaatg

SEQ ID NO: 902463 - DNA, 15 bp, Homo sapiens
ctggcatttgaatgg

SEQ ID NO: 902464 - DNA, 15 bp, Homo sapiens
tggcatttgaatggg

SEQ ID NO: 902465 - DNA, 15 bp, Homo sapiens
ggcatttgaatgggg

SEQ ID NO: 902466 - DNA, 15 bp, Homo sapiens
gcatttgaatggggg

SEQ ID NO: 902467 - DNA, 15 bp, Homo sapiens
catttgaatgggggc

SEQ ID NO: 902468 - DNA, 15 bp, Homo sapiens
atttgaatgggggca

SEQ ID NO: 902469 - DNA, 15 bp, Homo sapiens
tttgaatgggggcag

SEQ ID NO: 902470 - DNA, 15 bp, Homo sapiens
ttgaatgggggcagt

SEQ ID NO: 902471 - DNA, 15 bp, Homo sapiens
tgaatgggggcagtc

SEQ ID NO: 902472 - DNA, 15 bp, Homo sapiens
gaatgggggcagtct

SEQ ID NO: 902473 - DNA, 15 bp, Homo sapiens
aatgggggcagtctt

SEQ ID NO: 902474 - DNA, 15 bp, Homo sapiens
atgggggcagtcttg

SEQ ID NO: 902475 - DNA, 15 bp, Homo sapiens
tgggggcagtcttgt

SEQ ID NO: 902476 - DNA, 15 bp, Homo sapiens
gggggcagtcttgtg

SEQ ID NO: 902477 - DNA, 15 bp, Homo sapiens
ggggcagtcttgtgg

SEQ ID NO: 902478 - DNA, 15 bp, Homo sapiens
gggcagtcttgtggg

SEQ ID NO: 902479 - DNA, 15 bp, Homo sapiens
ggcagtcttgtggga

SEQ ID NO: 902480 - DNA, 15 bp, Homo sapiens
gcagtcttgtgggac

SEQ ID NO: 902481 - DNA, 15 bp, Homo sapiens
cagtcttgtgggact

SEQ ID NO: 902482 - DNA, 15 bp, Homo sapiens
agtcttgtgggactg

SEQ ID NO: 902483 - DNA, 15 bp, Homo sapiens
gtcttgtgggactga

SEQ ID NO: 902484 - DNA, 15 bp, Homo sapiens
tcttgtgggactgag

SEQ ID NO: 902485 - DNA, 15 bp, Homo sapiens
cttgtgggactgagt

SEQ ID NO: 902486 - DNA, 15 bp, Homo sapiens
ttgtgggactgagtt

SEQ ID NO: 902487 - DNA, 15 bp, Homo sapiens
tgtgggactgagttc

SEQ ID NO: 902488 - DNA, 15 bp, Homo sapiens
gtgggactgagttct

SEQ ID NO: 902489 - DNA, 15 bp, Homo sapiens
tgggactgagttctt

SEQ ID NO: 902490 - DNA, 15 bp, Homo sapiens
gggactgagttctta

SEQ ID NO: 902491 - DNA, 15 bp, Homo sapiens
ggactgagttcttaa

SEQ ID NO: 902492 - DNA, 15 bp, Homo sapiens
gactgagttcttaac

SEQ ID NO: 902493 - DNA, 15 bp, Homo sapiens
actgagttcttaacc

SEQ ID NO: 902494 - DNA, 15 bp, Homo sapiens
ctgagttcttaacct

SEQ ID NO: 902495 - DNA, 15 bp, Homo sapiens
tgagttcttaacctg

SEQ ID NO: 902496 - DNA, 15 bp, Homo sapiens
gagttcttaacctgt

SEQ ID NO: 902497 - DNA, 15 bp, Homo sapiens
agttcttaacctgtg

SEQ ID NO: 902498 - DNA, 15 bp, Homo sapiens
gttcttaacctgtgg

SEQ ID NO: 902499 - DNA, 15 bp, Homo sapiens
ttcttaacctgtggg

SEQ ID NO: 902500 - DNA, 15 bp, Homo sapiens
tcttaacctgtgggg

SEQ ID NO: 902501 - DNA, 15 bp, Homo sapiens
cttaacctgtggggt

SEQ ID NO: 902502 - DNA, 15 bp, Homo sapiens
ttaacctgtggggtc

SEQ ID NO: 902503 - DNA, 15 bp, Homo sapiens
taacctgtggggtct

SEQ ID NO: 902504 - DNA, 15 bp, Homo sapiens
aacctgtggggtctg

SEQ ID NO: 902505 - DNA, 15 bp, Homo sapiens
acctgtggggtctga

SEQ ID NO: 902506 - DNA, 15 bp, Homo sapiens
cctgtggggtctgag

SEQ ID NO: 902507 - DNA, 15 bp, Homo sapiens
ctgtggggtctgagc

SEQ ID NO: 902508 - DNA, 15 bp, Homo sapiens
tgtggggtctgagct

SEQ ID NO: 902509 - DNA, 15 bp, Homo sapiens
gtggggtctgagcta

SEQ ID NO: 902510 - DNA, 15 bp, Homo sapiens
tggggtctgagctaa

SEQ ID NO: 902511 - DNA, 15 bp, Homo sapiens
ggggtctgagctaac

SEQ ID NO: 902512 - DNA, 15 bp, Homo sapiens
gggtctgagctaact

SEQ ID NO: 902513 - DNA, 15 bp, Homo sapiens
ggtctgagctaactc

SEQ ID NO: 902514 - DNA, 15 bp, Homo sapiens
gtctgagctaactct

SEQ ID NO: 902515 - DNA, 15 bp, Homo sapiens
tctgagctaactctg

SEQ ID NO: 902516 - DNA, 15 bp, Homo sapiens
ctgagctaactctgg

SEQ ID NO: 902517 - DNA, 15 bp, Homo sapiens
tgagctaactctggg

SEQ ID NO: 902518 - DNA, 15 bp, Homo sapiens
gagctaactctgggt

SEQ ID NO: 902519 - DNA, 15 bp, Homo sapiens
agctaactctgggta

SEQ ID NO: 902520 - DNA, 15 bp, Homo sapiens
gctaactctgggtag

SEQ ID NO: 902521 - DNA, 15 bp, Homo sapiens
ctaactctgggtagt

SEQ ID NO: 902522 - DNA, 15 bp, Homo sapiens
taactctgggtagtt

SEQ ID NO: 902523 - DNA, 15 bp, Homo sapiens
aactctgggtagtta

SEQ ID NO: 902524 - DNA, 15 bp, Homo sapiens
actctgggtagttag

SEQ ID NO: 902525 - DNA, 15 bp, Homo sapiens
ctctgggtagttagt

SEQ ID NO: 902526 - DNA, 15 bp, Homo sapiens
tctgggtagttagtg

SEQ ID NO: 902527 - DNA, 15 bp, Homo sapiens
ctgggtagttagtgt

SEQ ID NO: 902528 - DNA, 15 bp, Homo sapiens
tgggtagttagtgtc

SEQ ID NO: 902529 - DNA, 15 bp, Homo sapiens
gggtagttagtgtca

SEQ ID NO: 902530 - DNA, 15 bp, Homo sapiens
ggtagttagtgtcag

SEQ ID NO: 902531 - DNA, 15 bp, Homo sapiens
gtagttagtgtcaga

SEQ ID NO: 902532 - DNA, 15 bp, Homo sapiens
tagttagtgtcagaa

SEQ ID NO: 902533 - DNA, 15 bp, Homo sapiens
agttagtgtcagaat

SEQ ID NO: 902534 - DNA, 15 bp, Homo sapiens
gttagtgtcagaatt

SEQ ID NO: 902535 - DNA, 15 bp, Homo sapiens
ttagtgtcagaattg

SEQ ID NO: 902536 - DNA, 15 bp, Homo sapiens
tagtgtcagaattga

SEQ ID NO: 902537 - DNA, 15 bp, Homo sapiens
agtgtcagaattgaa

SEQ ID NO: 902538 - DNA, 15 bp, Homo sapiens
gtgtcagaattgaat

SEQ ID NO: 902539 - DNA, 15 bp, Homo sapiens
tgtcagaattgaatt

SEQ ID NO: 902540 - DNA, 15 bp, Homo sapiens
gtcagaattgaatta

SEQ ID NO: 902541 - DNA, 15 bp, Homo sapiens
tcagaattgaattaa

SEQ ID NO: 902542 - DNA, 15 bp, Homo sapiens
cagaattgaattaaa

SEQ ID NO: 902543 - DNA, 15 bp, Homo sapiens
agaattgaattaaat

SEQ ID NO: 902544 - DNA, 15 bp, Homo sapiens
gaattgaattaaatt

SEQ ID NO: 902545 - DNA, 15 bp, Homo sapiens
aattgaattaaattg

SEQ ID NO: 902546 - DNA, 15 bp, Homo sapiens
attgaattaaattgt

SEQ ID NO: 902547 - DNA, 15 bp, Homo sapiens
ttgaattaaattgta

SEQ ID NO: 902548 - DNA, 15 bp, Homo sapiens
tgaattaaattgtag

SEQ ID NO: 902549 - DNA, 15 bp, Homo sapiens
gaattaaattgtagg

SEQ ID NO: 902550 - DNA, 15 bp, Homo sapiens
aattaaattgtagga

SEQ ID NO: 902551 - DNA, 15 bp, Homo sapiens
attaaattgtaggac

SEQ ID NO: 902552 - DNA, 15 bp, Homo sapiens
ttaaattgtaggaca

SEQ ID NO: 902553 - DNA, 15 bp, Homo sapiens
taaattgtaggacac

SEQ ID NO: 902554 - DNA, 15 bp, Homo sapiens
aaattgtaggacacc

SEQ ID NO: 902555 - DNA, 15 bp, Homo sapiens
aattgtaggacaccc

SEQ ID NO: 902556 - DNA, 15 bp, Homo sapiens
attgtaggacaccca

SEQ ID NO: 902557 - DNA, 15 bp, Homo sapiens
ttgtaggacacccag

SEQ ID NO: 902558 - DNA, 15 bp, Homo sapiens
tgtaggacacccagt

SEQ ID NO: 902559 - DNA, 15 bp, Homo sapiens
gtaggacacccagtt

SEQ ID NO: 902560 - DNA, 15 bp, Homo sapiens
taggacacccagttg

SEQ ID NO: 902561 - DNA, 15 bp, Homo sapiens
aggacacccagttgg

SEQ ID NO: 902562 - DNA, 15 bp, Homo sapiens
ggacacccagttggt

SEQ ID NO: 902563 - DNA, 15 bp, Homo sapiens
gacacccagttggtg

SEQ ID NO: 902564 - DNA, 15 bp, Homo sapiens
acacccagttggtgt

SEQ ID NO: 902565 - DNA, 15 bp, Homo sapiens
cacccagttggtgtc

SEQ ID NO: 902566 - DNA, 15 bp, Homo sapiens
acccagttggtgtcc

SEQ ID NO: 902567 - DNA, 15 bp, Homo sapiens
cccagttggtgtcca

SEQ ID NO: 902568 - DNA, 15 bp, Homo sapiens
ccagttggtgtccaa

SEQ ID NO: 902569 - DNA, 15 bp, Homo sapiens
cagttggtgtccaaa

SEQ ID NO: 902570 - DNA, 15 bp, Homo sapiens
agttggtgtccaaac

SEQ ID NO: 902571 - DNA, 15 bp, Homo sapiens
gttggtgtccaaact

SEQ ID NO: 902572 - DNA, 15 bp, Homo sapiens
ttggtgtccaaacta

SEQ ID NO: 902573 - DNA, 15 bp, Homo sapiens
tggtgtccaaactag

SEQ ID NO: 902574 - DNA, 15 bp, Homo sapiens
ggtgtccaaactagt

SEQ ID NO: 902575 - DNA, 15 bp, Homo sapiens
gtgtccaaactagtt

SEQ ID NO: 902576 - DNA, 15 bp, Homo sapiens
tgtccaaactagttg

SEQ ID NO: 902577 - DNA, 15 bp, Homo sapiens
gtccaaactagttgg

SEQ ID NO: 902578 - DNA, 15 bp, Homo sapiens
tccaaactagttggt

SEQ ID NO: 902579 - DNA, 15 bp, Homo sapiens
ccaaactagttggta

SEQ ID NO: 902580 - DNA, 15 bp, Homo sapiens
caaactagttggtat

SEQ ID NO: 902581 - DNA, 15 bp, Homo sapiens
aaactagttggtatc

SEQ ID NO: 902582 - DNA, 15 bp, Homo sapiens
aactagttggtatca

SEQ ID NO: 902583 - DNA, 15 bp, Homo sapiens
actagttggtatcag

SEQ ID NO: 902584 - DNA, 15 bp, Homo sapiens
ctagttggtatcagt

SEQ ID NO: 902585 - DNA, 15 bp, Homo sapiens
tagttggtatcagta

SEQ ID NO: 902586 - DNA, 15 bp, Homo sapiens
agttggtatcagtag

SEQ ID NO: 902587 - DNA, 15 bp, Homo sapiens
gttggtatcagtagg

SEQ ID NO: 902588 - DNA, 15 bp, Homo sapiens
ttggtatcagtaggg

SEQ ID NO: 902589 - DNA, 15 bp, Homo sapiens
tggtatcagtagggg

SEQ ID NO: 902590 - DNA, 15 bp, Homo sapiens
ggtatcagtaggggg

SEQ ID NO: 902591 - DNA, 15 bp, Homo sapiens
gtatcagtagggggg

SEQ ID NO: 902592 - DNA, 15 bp, Homo sapiens
tatcagtagggggga

SEQ ID NO: 902593 - DNA, 15 bp, Homo sapiens
atcagtaggggggaa

SEQ ID NO: 902594 - DNA, 15 bp, Homo sapiens
tcagtaggggggaag

SEQ ID NO: 902595 - DNA, 15 bp, Homo sapiens
cagtaggggggaaga

SEQ ID NO: 902596 - DNA, 15 bp, Homo sapiens
agtaggggggaagaa

SEQ ID NO: 902597 - DNA, 15 bp, Homo sapiens
gtaggggggaagaaa

SEQ ID NO: 902598 - DNA, 15 bp, Homo sapiens
taggggggaagaaaa

SEQ ID NO: 902599 - DNA, 15 bp, Homo sapiens
aggggggaagaaaac

SEQ ID NO: 902600 - DNA, 15 bp, Homo sapiens
ggggggaagaaaacc

SEQ ID NO: 902601 - DNA, 15 bp, Homo sapiens
gggggaagaaaaccc

SEQ ID NO: 902602 - DNA, 15 bp, Homo sapiens
ggggaagaaaaccct

SEQ ID NO: 902603 - DNA, 15 bp, Homo sapiens
gggaagaaaaccctc

SEQ ID NO: 902604 - DNA, 15 bp, Homo sapiens
ggaagaaaaccctct

SEQ ID NO: 902605 - DNA, 15 bp, Homo sapiens
gaagaaaaccctctt

SEQ ID NO: 902606 - DNA, 15 bp, Homo sapiens
aagaaaaccctctta

SEQ ID NO: 902607 - DNA, 15 bp, Homo sapiens
agaaaaccctcttac

SEQ ID NO: 902608 - DNA, 15 bp, Homo sapiens
gaaaaccctcttacg

SEQ ID NO: 902609 - DNA, 15 bp, Homo sapiens
aaaaccctcttacgt

SEQ ID NO: 902610 - DNA, 15 bp, Homo sapiens
aaaccctcttacgtg

SEQ ID NO: 902611 - DNA, 15 bp, Homo sapiens
aaccctcttacgtgg

SEQ ID NO: 902612 - DNA, 15 bp, Homo sapiens
accctcttacgtggt

SEQ ID NO: 902613 - DNA, 15 bp, Homo sapiens
ccctcttacgtggtg

SEQ ID NO: 902614 - DNA, 15 bp, Homo sapiens
cctcttacgtggtgt

SEQ ID NO: 902615 - DNA, 15 bp, Homo sapiens
ctcttacgtggtgtc

SEQ ID NO: 902616 - DNA, 15 bp, Homo sapiens
tcttacgtggtgtca

SEQ ID NO: 902617 - DNA, 15 bp, Homo sapiens
cttacgtggtgtcag

SEQ ID NO: 902618 - DNA, 15 bp, Homo sapiens
ttacgtggtgtcaga

SEQ ID NO: 902619 - DNA, 15 bp, Homo sapiens
tacgtggtgtcagaa

SEQ ID NO: 902620 - DNA, 15 bp, Homo sapiens
acgtggtgtcagaag

SEQ ID NO: 902621 - DNA, 15 bp, Homo sapiens
cgtggtgtcagaagt

SEQ ID NO: 902622 - DNA, 15 bp, Homo sapiens
gtggtgtcagaagta

SEQ ID NO: 902623 - DNA, 15 bp, Homo sapiens
tggtgtcagaagtat

SEQ ID NO: 902624 - DNA, 15 bp, Homo sapiens
ggtgtcagaagtatt

SEQ ID NO: 902625 - DNA, 15 bp, Homo sapiens
gtgtcagaagtattg

SEQ ID NO: 902626 - DNA, 15 bp, Homo sapiens
tgtcagaagtattgt

SEQ ID NO: 902627 - DNA, 15 bp, Homo sapiens
gtcagaagtattgtc

SEQ ID NO: 902628 - DNA, 15 bp, Homo sapiens
tcagaagtattgtcg

SEQ ID NO: 902629 - DNA, 15 bp, Homo sapiens
cagaagtattgtcgg

SEQ ID NO: 902630 - DNA, 15 bp, Homo sapiens
agaagtattgtcggg

SEQ ID NO: 902631 - DNA, 15 bp, Homo sapiens
gaagtattgtcgggg

SEQ ID NO: 902632 - DNA, 15 bp, Homo sapiens
aagtattgtcgggga

SEQ ID NO: 902633 - DNA, 15 bp, Homo sapiens
agtattgtcggggag

SEQ ID NO: 902634 - DNA, 15 bp, Homo sapiens
gtattgtcggggaga

SEQ ID NO: 902635 - DNA, 15 bp, Homo sapiens
tattgtcggggagaa

SEQ ID NO: 902636 - DNA, 15 bp, Homo sapiens
attgtcggggagaac

SEQ ID NO: 902637 - DNA, 15 bp, Homo sapiens
ttgtcggggagaaca

SEQ ID NO: 902638 - DNA, 15 bp, Homo sapiens
tgtcggggagaacac

SEQ ID NO: 902639 - DNA, 15 bp, Homo sapiens
gtcggggagaacaca

SEQ ID NO: 902640 - DNA, 15 bp, Homo sapiens
tcggggagaacacag

SEQ ID NO: 902641 - DNA, 15 bp, Homo sapiens
cggggagaacacagt

SEQ ID NO: 902642 - DNA, 15 bp, Homo sapiens
ggggagaacacagtc

SEQ ID NO: 902643 - DNA, 15 bp, Homo sapiens
gggagaacacagtca

SEQ ID NO: 902644 - DNA, 15 bp, Homo sapiens
ggagaacacagtcac

SEQ ID NO: 902645 - DNA, 15 bp, Homo sapiens
gagaacacagtcaca

SEQ ID NO: 902646 - DNA, 15 bp, Homo sapiens
agaacacagtcacac

SEQ ID NO: 902647 - DNA, 15 bp, Homo sapiens
gaacacagtcacact

SEQ ID NO: 902648 - DNA, 15 bp, Homo sapiens
aacacagtcacactc

SEQ ID NO: 902649 - DNA, 15 bp, Homo sapiens
acacagtcacactct

SEQ ID NO: 902650 - DNA, 15 bp, Homo sapiens
cacagtcacactctt

SEQ ID NO: 902651 - DNA, 15 bp, Homo sapiens
acagtcacactcttt

SEQ ID NO: 902652 - DNA, 15 bp, Homo sapiens
cagtcacactctttc

SEQ ID NO: 902653 - DNA, 15 bp, Homo sapiens
agtcacactctttct

SEQ ID NO: 902654 - DNA, 15 bp, Homo sapiens
gtcacactctttcta

SEQ ID NO: 902655 - DNA, 15 bp, Homo sapiens
tcacactctttctac

SEQ ID NO: 902656 - DNA, 15 bp, Homo sapiens
cacactctttctaca

SEQ ID NO: 902657 - DNA, 15 bp, Homo sapiens
acactctttctacaa

SEQ ID NO: 902658 - DNA, 15 bp, Homo sapiens
cactctttctacaat

SEQ ID NO: 902659 - DNA, 15 bp, Homo sapiens
actctttctacaata

SEQ ID NO: 902660 - DNA, 15 bp, Homo sapiens
ctctttctacaatag

SEQ ID NO: 902661 - DNA, 15 bp, Homo sapiens
tctttctacaatagt

SEQ ID NO: 902662 - DNA, 15 bp, Homo sapiens
ctttctacaatagtt

SEQ ID NO: 902663 - DNA, 15 bp, Homo sapiens
tttctacaatagttc

SEQ ID NO: 902664 - DNA, 15 bp, Homo sapiens
ttctacaatagttct

SEQ ID NO: 902665 - DNA, 15 bp, Homo sapiens
tctacaatagttctc

SEQ ID NO: 902666 - DNA, 15 bp, Homo sapiens
ctacaatagttctct

SEQ ID NO: 902667 - DNA, 15 bp, Homo sapiens
tacaatagttctctt

SEQ ID NO: 902668 - DNA, 15 bp, Homo sapiens
acaatagttctcttc

SEQ ID NO: 902669 - DNA, 15 bp, Homo sapiens
caatagttctcttca

SEQ ID NO: 902670 - DNA, 15 bp, Homo sapiens
aatagttctcttcaa

SEQ ID NO: 902671 - DNA, 15 bp, Homo sapiens
atagttctcttcaat

SEQ ID NO: 902672 - DNA, 15 bp, Homo sapiens
tagttctcttcaatg

SEQ ID NO: 902673 - DNA, 15 bp, Homo sapiens
agttctcttcaatga

SEQ ID NO: 902674 - DNA, 15 bp, Homo sapiens
gttctcttcaatgac

SEQ ID NO: 902675 - DNA, 15 bp, Homo sapiens
ttctcttcaatgaca

SEQ ID NO: 902676 - DNA, 15 bp, Homo sapiens
tctcttcaatgacaa

SEQ ID NO: 902677 - DNA, 15 bp, Homo sapiens
ctcttcaatgacaac

SEQ ID NO: 902678 - DNA, 15 bp, Homo sapiens
tcttcaatgacaacc

SEQ ID NO: 902679 - DNA, 15 bp, Homo sapiens
cttcaatgacaacct

SEQ ID NO: 902680 - DNA, 15 bp, Homo sapiens
ttcaatgacaacctg

SEQ ID NO: 902681 - DNA, 15 bp, Homo sapiens
tcaatgacaacctgc

SEQ ID NO: 902682 - DNA, 15 bp, Homo sapiens
caatgacaacctgca

SEQ ID NO: 902683 - DNA, 15 bp, Homo sapiens
aatgacaacctgcag

SEQ ID NO: 902684 - DNA, 15 bp, Homo sapiens
atgacaacctgcagc

SEQ ID NO: 902685 - DNA, 15 bp, Homo sapiens
tgacaacctgcagca

SEQ ID NO: 902686 - DNA, 15 bp, Homo sapiens
gacaacctgcagcaa

SEQ ID NO: 902687 - DNA, 15 bp, Homo sapiens
acaacctgcagcaac

SEQ ID NO: 902688 - DNA, 15 bp, Homo sapiens
caacctgcagcaaca

SEQ ID NO: 902689 - DNA, 15 bp, Homo sapiens
aacctgcagcaacac

SEQ ID NO: 902690 - DNA, 15 bp, Homo sapiens
acctgcagcaacacc

SEQ ID NO: 902691 - DNA, 15 bp, Homo sapiens
cctgcagcaacacct

SEQ ID NO: 902692 - DNA, 15 bp, Homo sapiens
ctgcagcaacacctc

SEQ ID NO: 902693 - DNA, 15 bp, Homo sapiens
tgcagcaacacctct

SEQ ID NO: 902694 - DNA, 15 bp, Homo sapiens
gcagcaacacctctt

SEQ ID NO: 902695 - DNA, 15 bp, Homo sapiens
cagcaacacctcttt

SEQ ID NO: 902696 - DNA, 15 bp, Homo sapiens
agcaacacctctttg

SEQ ID NO: 902697 - DNA, 15 bp, Homo sapiens
gcaacacctctttgg

SEQ ID NO: 902698 - DNA, 15 bp, Homo sapiens
caacacctctttgga

SEQ ID NO: 902699 - DNA, 15 bp, Homo sapiens
aacacctctttggat

SEQ ID NO: 902700 - DNA, 15 bp, Homo sapiens
acacctctttggatg

SEQ ID NO: 902701 - DNA, 15 bp, Homo sapiens
cacctctttggatga

SEQ ID NO: 902702 - DNA, 15 bp, Homo sapiens
acctctttggatgaa

SEQ ID NO: 902703 - DNA, 15 bp, Homo sapiens
cctctttggatgaat

SEQ ID NO: 902704 - DNA, 15 bp, Homo sapiens
ctctttggatgaata

SEQ ID NO: 902705 - DNA, 15 bp, Homo sapiens
tctttggatgaataa

SEQ ID NO: 902706 - DNA, 15 bp, Homo sapiens
ctttggatgaataac

SEQ ID NO: 902707 - DNA, 15 bp, Homo sapiens
tttggatgaataact

SEQ ID NO: 902708 - DNA, 15 bp, Homo sapiens
ttggatgaataactc

SEQ ID NO: 902709 - DNA, 15 bp, Homo sapiens
tggatgaataactca

SEQ ID NO: 902710 - DNA, 15 bp, Homo sapiens
ggatgaataactcac

SEQ ID NO: 902711 - DNA, 15 bp, Homo sapiens
gatgaataactcact

SEQ ID NO: 902712 - DNA, 15 bp, Homo sapiens
atgaataactcacta

SEQ ID NO: 902713 - DNA, 15 bp, Homo sapiens
tgaataactcactat

SEQ ID NO: 902714 - DNA, 15 bp, Homo sapiens
gaataactcactata

SEQ ID NO: 902715 - DNA, 15 bp, Homo sapiens
aataactcactatag

SEQ ID NO: 902716 - DNA, 15 bp, Homo sapiens
ataactcactatagc

SEQ ID NO: 902717 - DNA, 15 bp, Homo sapiens
taactcactatagca

SEQ ID NO: 902718 - DNA, 15 bp, Homo sapiens
aactcactatagcaa

SEQ ID NO: 902719 - DNA, 15 bp, Homo sapiens
actcactatagcaag

SEQ ID NO: 902720 - DNA, 15 bp, Homo sapiens
ctcactatagcaaga

SEQ ID NO: 902721 - DNA, 15 bp, Homo sapiens
tcactatagcaagat

SEQ ID NO: 902722 - DNA, 15 bp, Homo sapiens
cactatagcaagatg

SEQ ID NO: 902723 - DNA, 15 bp, Homo sapiens
actatagcaagatgg

SEQ ID NO: 902724 - DNA, 15 bp, Homo sapiens
ctatagcaagatgga

SEQ ID NO: 902725 - DNA, 15 bp, Homo sapiens
tatagcaagatggag

SEQ ID NO: 902726 - DNA, 15 bp, Homo sapiens
atagcaagatggagc

SEQ ID NO: 902727 - DNA, 15 bp, Homo sapiens
tagcaagatggagcc

SEQ ID NO: 902728 - DNA, 15 bp, Homo sapiens
agcaagatggagcca

SEQ ID NO: 902729 - DNA, 15 bp, Homo sapiens
gcaagatggagccac

SEQ ID NO: 902730 - DNA, 15 bp, Homo sapiens
caagatggagccact

SEQ ID NO: 902731 - DNA, 15 bp, Homo sapiens
aagatggagccactt

SEQ ID NO: 902732 - DNA, 15 bp, Homo sapiens
agatggagccacttt

SEQ ID NO: 902733 - DNA, 15 bp, Homo sapiens
gatggagccactttc

SEQ ID NO: 902734 - DNA, 15 bp, Homo sapiens
atggagccactttca

SEQ ID NO: 902735 - DNA, 15 bp, Homo sapiens
tggagccactttcat

SEQ ID NO: 902736 - DNA, 15 bp, Homo sapiens
ggagccactttcatt

SEQ ID NO: 902737 - DNA, 15 bp, Homo sapiens
gagccactttcattt

SEQ ID NO: 902738 - DNA, 15 bp, Homo sapiens
agccactttcatttg

SEQ ID NO: 902739 - DNA, 15 bp, Homo sapiens
gccactttcatttgg

SEQ ID NO: 902740 - DNA, 15 bp, Homo sapiens
ccactttcatttggg

SEQ ID NO: 902741 - DNA, 15 bp, Homo sapiens
cactttcatttgggc

SEQ ID NO: 902742 - DNA, 15 bp, Homo sapiens
actttcatttgggca

SEQ ID NO: 902743 - DNA, 15 bp, Homo sapiens
ctttcatttgggcat

SEQ ID NO: 902744 - DNA, 15 bp, Homo sapiens
tttcatttgggcata

SEQ ID NO: 902745 - DNA, 15 bp, Homo sapiens
ttcatttgggcatat

SEQ ID NO: 902746 - DNA, 15 bp, Homo sapiens
tcatttgggcatata

SEQ ID NO: 902747 - DNA, 15 bp, Homo sapiens
catttgggcatatat

SEQ ID NO: 902748 - DNA, 15 bp, Homo sapiens
atttgggcatatatt

SEQ ID NO: 902749 - DNA, 15 bp, Homo sapiens
tttgggcatatattt

SEQ ID NO: 902750 - DNA, 15 bp, Homo sapiens
ttgggcatatattta

SEQ ID NO: 902751 - DNA, 15 bp, Homo sapiens
tgggcatatatttag

SEQ ID NO: 902752 - DNA, 15 bp, Homo sapiens
gggcatatatttagc

SEQ ID NO: 902753 - DNA, 15 bp, Homo sapiens
ggcatatatttagct

SEQ ID NO: 902754 - DNA, 15 bp, Homo sapiens
gcatatatttagctg

SEQ ID NO: 902755 - DNA, 15 bp, Homo sapiens
catatatttagctga

SEQ ID NO: 902756 - DNA, 15 bp, Homo sapiens
atatatttagctgat

SEQ ID NO: 902757 - DNA, 15 bp, Homo sapiens
tatatttagctgatc

SEQ ID NO: 902758 - DNA, 15 bp, Homo sapiens
atatttagctgatca

SEQ ID NO: 902759 - DNA, 15 bp, Homo sapiens
tatttagctgatcac

SEQ ID NO: 902760 - DNA, 15 bp, Homo sapiens
atttagctgatcact

SEQ ID NO: 902761 - DNA, 15 bp, Homo sapiens
tttagctgatcactt

SEQ ID NO: 902762 - DNA, 15 bp, Homo sapiens
ttagctgatcacttg

SEQ ID NO: 902763 - DNA, 15 bp, Homo sapiens
tagctgatcacttgc

SEQ ID NO: 902764 - DNA, 15 bp, Homo sapiens
agctgatcacttgct

SEQ ID NO: 902765 - DNA, 15 bp, Homo sapiens
gctgatcacttgctg

SEQ ID NO: 902766 - DNA, 15 bp, Homo sapiens
ctgatcacttgctgt

SEQ ID NO: 902767 - DNA, 15 bp, Homo sapiens
tgatcacttgctgtg

SEQ ID NO: 902768 - DNA, 15 bp, Homo sapiens
gatcacttgctgtgc

SEQ ID NO: 902769 - DNA, 15 bp, Homo sapiens
atcacttgctgtgca

SEQ ID NO: 902770 - DNA, 15 bp, Homo sapiens
tcacttgctgtgcaa

SEQ ID NO: 902771 - DNA, 15 bp, Homo sapiens
cacttgctgtgcaag

SEQ ID NO: 902772 - DNA, 15 bp, Homo sapiens
acttgctgtgcaaga

SEQ ID NO: 902773 - DNA, 15 bp, Homo sapiens
cttgctgtgcaagaa

SEQ ID NO: 902774 - DNA, 15 bp, Homo sapiens
ttgctgtgcaagaat

SEQ ID NO: 902775 - DNA, 15 bp, Homo sapiens
tgctgtgcaagaatc

SEQ ID NO: 902776 - DNA, 15 bp, Homo sapiens
gctgtgcaagaatct

SEQ ID NO: 902777 - DNA, 15 bp, Homo sapiens
ctgtgcaagaatcta

SEQ ID NO: 902778 - DNA, 15 bp, Homo sapiens
tgtgcaagaatctat

SEQ ID NO: 902779 - DNA, 15 bp, Homo sapiens
gtgcaagaatctatc

SEQ ID NO: 902780 - DNA, 15 bp, Homo sapiens
tgcaagaatctatca

SEQ ID NO: 902781 - DNA, 15 bp, Homo sapiens
gcaagaatctatcat

SEQ ID NO: 902782 - DNA, 15 bp, Homo sapiens
caagaatctatcatt

SEQ ID NO: 902783 - DNA, 15 bp, Homo sapiens
aagaatctatcattc

SEQ ID NO: 902784 - DNA, 15 bp, Homo sapiens
agaatctatcattcc

SEQ ID NO: 902785 - DNA, 15 bp, Homo sapiens
gaatctatcattcct

SEQ ID NO: 902786 - DNA, 15 bp, Homo sapiens
aatctatcattccta

SEQ ID NO: 902787 - DNA, 15 bp, Homo sapiens
atctatcattcctaa

SEQ ID NO: 902788 - DNA, 15 bp, Homo sapiens
tctatcattcctaac

SEQ ID NO: 902789 - DNA, 15 bp, Homo sapiens
ctatcattcctaacg

SEQ ID NO: 902790 - DNA, 15 bp, Homo sapiens
tatcattcctaacgg

SEQ ID NO: 902791 - DNA, 15 bp, Homo sapiens
atcattcctaacggt

SEQ ID NO: 902792 - DNA, 15 bp, Homo sapiens
tcattcctaacggta

SEQ ID NO: 902793 - DNA, 15 bp, Homo sapiens
cattcctaacggtaa

SEQ ID NO: 902794 - DNA, 15 bp, Homo sapiens
attcctaacggtaat

SEQ ID NO: 902795 - DNA, 15 bp, Homo sapiens
ttcctaacggtaata

SEQ ID NO: 902796 - DNA, 15 bp, Homo sapiens
tcctaacggtaataa

SEQ ID NO: 902797 - DNA, 15 bp, Homo sapiens
cctaacggtaataag

SEQ ID NO: 902798 - DNA, 15 bp, Homo sapiens
ctaacggtaataagg

SEQ ID NO: 902799 - DNA, 15 bp, Homo sapiens
taacggtaataaggg

SEQ ID NO: 902800 - DNA, 15 bp, Homo sapiens
aacggtaataagggc

SEQ ID NO: 902801 - DNA, 15 bp, Homo sapiens
acggtaataagggct

SEQ ID NO: 902802 - DNA, 15 bp, Homo sapiens
cggtaataagggcta

SEQ ID NO: 902803 - DNA, 15 bp, Homo sapiens
ggtaataagggctag

SEQ ID NO: 902804 - DNA, 15 bp, Homo sapiens
gtaataagggctagc

SEQ ID NO: 902805 - DNA, 15 bp, Homo sapiens
taataagggctagca

SEQ ID NO: 902806 - DNA, 15 bp, Homo sapiens
aataagggctagcat

SEQ ID NO: 902807 - DNA, 15 bp, Homo sapiens
ataagggctagcatt

SEQ ID NO: 902808 - DNA, 15 bp, Homo sapiens
taagggctagcattt

SEQ ID NO: 902809 - DNA, 15 bp, Homo sapiens
aagggctagcatttg

SEQ ID NO: 902810 - DNA, 15 bp, Homo sapiens
agggctagcatttgt

SEQ ID NO: 902811 - DNA, 15 bp, Homo sapiens
gggctagcatttgtt

SEQ ID NO: 902812 - DNA, 15 bp, Homo sapiens
ggctagcatttgttg

SEQ ID NO: 902813 - DNA, 15 bp, Homo sapiens
gctagcatttgttga

SEQ ID NO: 902814 - DNA, 15 bp, Homo sapiens
ctagcatttgttgaa

SEQ ID NO: 902815 - DNA, 15 bp, Homo sapiens
tagcatttgttgaac

SEQ ID NO: 902816 - DNA, 15 bp, Homo sapiens
agcatttgttgaaca

SEQ ID NO: 902817 - DNA, 15 bp, Homo sapiens
gcatttgttgaacac

SEQ ID NO: 902818 - DNA, 15 bp, Homo sapiens
catttgttgaacacc

SEQ ID NO: 902819 - DNA, 15 bp, Homo sapiens
atttgttgaacacct

SEQ ID NO: 902820 - DNA, 15 bp, Homo sapiens
tttgttgaacaccta

SEQ ID NO: 902821 - DNA, 15 bp, Homo sapiens
ttgttgaacacctac

SEQ ID NO: 902822 - DNA, 15 bp, Homo sapiens
tgttgaacacctacc

SEQ ID NO: 902823 - DNA, 15 bp, Homo sapiens
gttgaacacctacct

SEQ ID NO: 902824 - DNA, 15 bp, Homo sapiens
ttgaacacctacctg

SEQ ID NO: 902825 - DNA, 15 bp, Homo sapiens
tgaacacctacctga

SEQ ID NO: 902826 - DNA, 15 bp, Homo sapiens
gaacacctacctgaa

SEQ ID NO: 902827 - DNA, 15 bp, Homo sapiens
aacacctacctgaat

SEQ ID NO: 902828 - DNA, 15 bp, Homo sapiens
acacctacctgaatg

SEQ ID NO: 902829 - DNA, 15 bp, Homo sapiens
cacctacctgaatgc

SEQ ID NO: 902830 - DNA, 15 bp, Homo sapiens
acctacctgaatgcc

SEQ ID NO: 902831 - DNA, 15 bp, Homo sapiens
cctacctgaatgcca

SEQ ID NO: 902832 - DNA, 15 bp, Homo sapiens
ctacctgaatgccag

SEQ ID NO: 902833 - DNA, 15 bp, Homo sapiens
tacctgaatgccagg

SEQ ID NO: 902834 - DNA, 15 bp, Homo sapiens
acctgaatgccagga

SEQ ID NO: 902835 - DNA, 15 bp, Homo sapiens
cctgaatgccaggat

SEQ ID NO: 902836 - DNA, 15 bp, Homo sapiens
ctgaatgccaggatc

SEQ ID NO: 902837 - DNA, 15 bp, Homo sapiens
tgaatgccaggatct

SEQ ID NO: 902838 - DNA, 15 bp, Homo sapiens
gaatgccaggatctt

SEQ ID NO: 902839 - DNA, 15 bp, Homo sapiens
aatgccaggatcttt

SEQ ID NO: 902840 - DNA, 15 bp, Homo sapiens
atgccaggatctttc

SEQ ID NO: 902841 - DNA, 15 bp, Homo sapiens
tgccaggatctttcc

SEQ ID NO: 902842 - DNA, 15 bp, Homo sapiens
gccaggatctttcca

SEQ ID NO: 902843 - DNA, 15 bp, Homo sapiens
ccaggatctttccag

SEQ ID NO: 902844 - DNA, 15 bp, Homo sapiens
caggatctttccagg

SEQ ID NO: 902845 - DNA, 15 bp, Homo sapiens
aggatctttccaggc

SEQ ID NO: 902846 - DNA, 15 bp, Homo sapiens
ggatctttccaggca

SEQ ID NO: 902847 - DNA, 15 bp, Homo sapiens
gatctttccaggcac

SEQ ID NO: 902848 - DNA, 15 bp, Homo sapiens
atctttccaggcaca

SEQ ID NO: 902849 - DNA, 15 bp, Homo sapiens
tctttccaggcacag

SEQ ID NO: 902850 - DNA, 15 bp, Homo sapiens
ctttccaggcacagc

SEQ ID NO: 902851 - DNA, 15 bp, Homo sapiens
tttccaggcacagct

SEQ ID NO: 902852 - DNA, 15 bp, Homo sapiens
ttccaggcacagctc

SEQ ID NO: 902853 - DNA, 15 bp, Homo sapiens
tccaggcacagctca

SEQ ID NO: 902854 - DNA, 15 bp, Homo sapiens
ccaggcacagctcat

SEQ ID NO: 902855 - DNA, 15 bp, Homo sapiens
caggcacagctcatt

SEQ ID NO: 902856 - DNA, 15 bp, Homo sapiens
aggcacagctcattg

SEQ ID NO: 902857 - DNA, 15 bp, Homo sapiens
ggcacagctcattga

SEQ ID NO: 902858 - DNA, 15 bp, Homo sapiens
gcacagctcattgaa

SEQ ID NO: 902859 - DNA, 15 bp, Homo sapiens
cacagctcattgaac

SEQ ID NO: 902860 - DNA, 15 bp, Homo sapiens
acagctcattgaaca

SEQ ID NO: 902861 - DNA, 15 bp, Homo sapiens
cagctcattgaacag

SEQ ID NO: 902862 - DNA, 15 bp, Homo sapiens
agctcattgaacagt

SEQ ID NO: 902863 - DNA, 15 bp, Homo sapiens
gctcattgaacagta

SEQ ID NO: 902864 - DNA, 15 bp, Homo sapiens
ctcattgaacagtaa

SEQ ID NO: 902865 - DNA, 15 bp, Homo sapiens
tcattgaacagtaac

SEQ ID NO: 902866 - DNA, 15 bp, Homo sapiens
cattgaacagtaaca

SEQ ID NO: 902867 - DNA, 15 bp, Homo sapiens
attgaacagtaacaa

SEQ ID NO: 902868 - DNA, 15 bp, Homo sapiens
ttgaacagtaacaac

SEQ ID NO: 902869 - DNA, 15 bp, Homo sapiens
tgaacagtaacaaca

SEQ ID NO: 902870 - DNA, 15 bp, Homo sapiens
gaacagtaacaacat

SEQ ID NO: 902871 - DNA, 15 bp, Homo sapiens
aacagtaacaacatc

SEQ ID NO: 902872 - DNA, 15 bp, Homo sapiens
acagtaacaacatcc

SEQ ID NO: 902873 - DNA, 15 bp, Homo sapiens
cagtaacaacatcct

SEQ ID NO: 902874 - DNA, 15 bp, Homo sapiens
agtaacaacatcctt

SEQ ID NO: 902875 - DNA, 15 bp, Homo sapiens
gtaacaacatccttt

SEQ ID NO: 902876 - DNA, 15 bp, Homo sapiens
taacaacatcctttg

SEQ ID NO: 902877 - DNA, 15 bp, Homo sapiens
aacaacatcctttga

SEQ ID NO: 902878 - DNA, 15 bp, Homo sapiens
acaacatcctttgag

SEQ ID NO: 902879 - DNA, 15 bp, Homo sapiens
caacatcctttgagg

SEQ ID NO: 902880 - DNA, 15 bp, Homo sapiens
aacatcctttgaggt

SEQ ID NO: 902881 - DNA, 15 bp, Homo sapiens
acatcctttgaggtt

SEQ ID NO: 902882 - DNA, 15 bp, Homo sapiens
catcctttgaggtta

SEQ ID NO: 902883 - DNA, 15 bp, Homo sapiens
atcctttgaggttat

SEQ ID NO: 902884 - DNA, 15 bp, Homo sapiens
tcctttgaggttatt

SEQ ID NO: 902885 - DNA, 15 bp, Homo sapiens
cctttgaggttatta

SEQ ID NO: 902886 - DNA, 15 bp, Homo sapiens
ctttgaggttattat

SEQ ID NO: 902887 - DNA, 15 bp, Homo sapiens
tttgaggttattatt

SEQ ID NO: 902888 - DNA, 15 bp, Homo sapiens
ttgaggttattatta

SEQ ID NO: 902889 - DNA, 15 bp, Homo sapiens
tgaggttattattag

SEQ ID NO: 902890 - DNA, 15 bp, Homo sapiens
gaggttattattagt

SEQ ID NO: 902891 - DNA, 15 bp, Homo sapiens
aggttattattagta

SEQ ID NO: 902892 - DNA, 15 bp, Homo sapiens
ggttattattagtat

SEQ ID NO: 902893 - DNA, 15 bp, Homo sapiens
gttattattagtatc

SEQ ID NO: 902894 - DNA, 15 bp, Homo sapiens
ttattattagtatct

SEQ ID NO: 902895 - DNA, 15 bp, Homo sapiens
tattattagtatctc

SEQ ID NO: 902896 - DNA, 15 bp, Homo sapiens
attattagtatctcc

SEQ ID NO: 902897 - DNA, 15 bp, Homo sapiens
ttattagtatctcca

SEQ ID NO: 902898 - DNA, 15 bp, Homo sapiens
tattagtatctccat

SEQ ID NO: 902899 - DNA, 15 bp, Homo sapiens
attagtatctccatt

SEQ ID NO: 902900 - DNA, 15 bp, Homo sapiens
ttagtatctccattt

SEQ ID NO: 902901 - DNA, 15 bp, Homo sapiens
tagtatctccatttc

SEQ ID NO: 902902 - DNA, 15 bp, Homo sapiens
agtatctccatttca

SEQ ID NO: 902903 - DNA, 15 bp, Homo sapiens
gtatctccatttcac

SEQ ID NO: 902904 - DNA, 15 bp, Homo sapiens
tatctccatttcacc

SEQ ID NO: 902905 - DNA, 15 bp, Homo sapiens
atctccatttcacca

SEQ ID NO: 902906 - DNA, 15 bp, Homo sapiens
tctccatttcaccaa

SEQ ID NO: 902907 - DNA, 15 bp, Homo sapiens
ctccatttcaccaat

SEQ ID NO: 902908 - DNA, 15 bp, Homo sapiens
tccatttcaccaatg

SEQ ID NO: 902909 - DNA, 15 bp, Homo sapiens
ccatttcaccaatga

SEQ ID NO: 902910 - DNA, 15 bp, Homo sapiens
catttcaccaatgag

SEQ ID NO: 902911 - DNA, 15 bp, Homo sapiens
atttcaccaatgagc

SEQ ID NO: 902912 - DNA, 15 bp, Homo sapiens
tttcaccaatgagcc

SEQ ID NO: 902913 - DNA, 15 bp, Homo sapiens
ttcaccaatgagcca

SEQ ID NO: 902914 - DNA, 15 bp, Homo sapiens
tcaccaatgagccaa

SEQ ID NO: 902915 - DNA, 15 bp, Homo sapiens
caccaatgagccaat

SEQ ID NO: 902916 - DNA, 15 bp, Homo sapiens
accaatgagccaatg

SEQ ID NO: 902917 - DNA, 15 bp, Homo sapiens
ccaatgagccaatgg

SEQ ID NO: 902918 - DNA, 15 bp, Homo sapiens
caatgagccaatgga

SEQ ID NO: 902919 - DNA, 15 bp, Homo sapiens
aatgagccaatggag

SEQ ID NO: 902920 - DNA, 15 bp, Homo sapiens
atgagccaatggagg

SEQ ID NO: 902921 - DNA, 15 bp, Homo sapiens
tgagccaatggaggc

SEQ ID NO: 902922 - DNA, 15 bp, Homo sapiens
gagccaatggaggca

SEQ ID NO: 902923 - DNA, 15 bp, Homo sapiens
agccaatggaggcac

SEQ ID NO: 902924 - DNA, 15 bp, Homo sapiens
gccaatggaggcaca

SEQ ID NO: 902925 - DNA, 15 bp, Homo sapiens
ccaatggaggcacaa

SEQ ID NO: 902926 - DNA, 15 bp, Homo sapiens
caatggaggcacaag

SEQ ID NO: 902927 - DNA, 15 bp, Homo sapiens
aatggaggcacaagg

SEQ ID NO: 902928 - DNA, 15 bp, Homo sapiens
atggaggcacaagga

SEQ ID NO: 902929 - DNA, 15 bp, Homo sapiens
tggaggcacaaggaa

SEQ ID NO: 902930 - DNA, 15 bp, Homo sapiens
ggaggcacaaggaaa

SEQ ID NO: 902931 - DNA, 15 bp, Homo sapiens
gaggcacaaggaaaa

SEQ ID NO: 902932 - DNA, 15 bp, Homo sapiens
aggcacaaggaaaag

SEQ ID NO: 902933 - DNA, 15 bp, Homo sapiens
ggcacaaggaaaaga

SEQ ID NO: 902934 - DNA, 15 bp, Homo sapiens
gcacaaggaaaagat

SEQ ID NO: 902935 - DNA, 15 bp, Homo sapiens
cacaaggaaaagatt

SEQ ID NO: 902936 - DNA, 15 bp, Homo sapiens
acaaggaaaagattt

SEQ ID NO: 902937 - DNA, 15 bp, Homo sapiens
caaggaaaagattta

SEQ ID NO: 902938 - DNA, 15 bp, Homo sapiens
aaggaaaagatttaa

SEQ ID NO: 902939 - DNA, 15 bp, Homo sapiens
aggaaaagatttaac

SEQ ID NO: 902940 - DNA, 15 bp, Homo sapiens
ggaaaagatttaact

SEQ ID NO: 902941 - DNA, 15 bp, Homo sapiens
gaaaagatttaactt

SEQ ID NO: 902942 - DNA, 15 bp, Homo sapiens
aaaagatttaacttg

SEQ ID NO: 902943 - DNA, 15 bp, Homo sapiens
aaagatttaacttgc

SEQ ID NO: 902944 - DNA, 15 bp, Homo sapiens
aagatttaacttgcc

SEQ ID NO: 902945 - DNA, 15 bp, Homo sapiens
agatttaacttgccc

SEQ ID NO: 902946 - DNA, 15 bp, Homo sapiens
gatttaacttgcccc

SEQ ID NO: 902947 - DNA, 15 bp, Homo sapiens
atttaacttgcccca

SEQ ID NO: 902948 - DNA, 15 bp, Homo sapiens
tttaacttgccccaa

SEQ ID NO: 902949 - DNA, 15 bp, Homo sapiens
ttaacttgccccaag

SEQ ID NO: 902950 - DNA, 15 bp, Homo sapiens
taacttgccccaagg

SEQ ID NO: 902951 - DNA, 15 bp, Homo sapiens
aacttgccccaaggc

SEQ ID NO: 902952 - DNA, 15 bp, Homo sapiens
acttgccccaaggca

SEQ ID NO: 902953 - DNA, 15 bp, Homo sapiens
cttgccccaaggcag

SEQ ID NO: 902954 - DNA, 15 bp, Homo sapiens
ttgccccaaggcaga

SEQ ID NO: 902955 - DNA, 15 bp, Homo sapiens
tgccccaaggcagaa

SEQ ID NO: 902956 - DNA, 15 bp, Homo sapiens
gccccaaggcagaag

SEQ ID NO: 902957 - DNA, 15 bp, Homo sapiens
ccccaaggcagaagt

SEQ ID NO: 902958 - DNA, 15 bp, Homo sapiens
cccaaggcagaagtt

SEQ ID NO: 902959 - DNA, 15 bp, Homo sapiens
ccaaggcagaagtta

SEQ ID NO: 902960 - DNA, 15 bp, Homo sapiens
caaggcagaagttag

SEQ ID NO: 902961 - DNA, 15 bp, Homo sapiens
aaggcagaagttagc

SEQ ID NO: 902962 - DNA, 15 bp, Homo sapiens
aggcagaagttagca

SEQ ID NO: 902963 - DNA, 15 bp, Homo sapiens
ggcagaagttagcaa

SEQ ID NO: 902964 - DNA, 15 bp, Homo sapiens
gcagaagttagcaaa

SEQ ID NO: 902965 - DNA, 15 bp, Homo sapiens
cagaagttagcaaat

SEQ ID NO: 902966 - DNA, 15 bp, Homo sapiens
agaagttagcaaata

SEQ ID NO: 902967 - DNA, 15 bp, Homo sapiens
gaagttagcaaatag

SEQ ID NO: 902968 - DNA, 15 bp, Homo sapiens
aagttagcaaatagc

SEQ ID NO: 902969 - DNA, 15 bp, Homo sapiens
agttagcaaatagca

SEQ ID NO: 902970 - DNA, 15 bp, Homo sapiens
gttagcaaatagcag

SEQ ID NO: 902971 - DNA, 15 bp, Homo sapiens
ttagcaaatagcaga

SEQ ID NO: 902972 - DNA, 15 bp, Homo sapiens
tagcaaatagcagag

SEQ ID NO: 902973 - DNA, 15 bp, Homo sapiens
agcaaatagcagagc

SEQ ID NO: 902974 - DNA, 15 bp, Homo sapiens
gcaaatagcagagct

SEQ ID NO: 902975 - DNA, 15 bp, Homo sapiens
caaatagcagagctg

SEQ ID NO: 902976 - DNA, 15 bp, Homo sapiens
aaatagcagagctgg

SEQ ID NO: 902977 - DNA, 15 bp, Homo sapiens
aatagcagagctgga

SEQ ID NO: 902978 - DNA, 15 bp, Homo sapiens
atagcagagctggaa

SEQ ID NO: 902979 - DNA, 15 bp, Homo sapiens
tagcagagctggaat

SEQ ID NO: 902980 - DNA, 15 bp, Homo sapiens
agcagagctggaatt

SEQ ID NO: 902981 - DNA, 15 bp, Homo sapiens
gcagagctggaattc

SEQ ID NO: 902982 - DNA, 15 bp, Homo sapiens
cagagctggaattca

SEQ ID NO: 902983 - DNA, 15 bp, Homo sapiens
agagctggaattcaa

SEQ ID NO: 902984 - DNA, 15 bp, Homo sapiens
gagctggaattcaaa

SEQ ID NO: 902985 - DNA, 15 bp, Homo sapiens
agctggaattcaaat

SEQ ID NO: 902986 - DNA, 15 bp, Homo sapiens
gctggaattcaaatc

SEQ ID NO: 902987 - DNA, 15 bp, Homo sapiens
ctggaattcaaatct

SEQ ID NO: 902988 - DNA, 15 bp, Homo sapiens
tggaattcaaatcta

SEQ ID NO: 902989 - DNA, 15 bp, Homo sapiens
ggaattcaaatctag

SEQ ID NO: 902990 - DNA, 15 bp, Homo sapiens
gaattcaaatctagg

SEQ ID NO: 902991 - DNA, 15 bp, Homo sapiens
aattcaaatctaggt

SEQ ID NO: 902992 - DNA, 15 bp, Homo sapiens
attcaaatctaggtg

SEQ ID NO: 902993 - DNA, 15 bp, Homo sapiens
ttcaaatctaggtgg

SEQ ID NO: 902994 - DNA, 15 bp, Homo sapiens
tcaaatctaggtggt

SEQ ID NO: 902995 - DNA, 15 bp, Homo sapiens
caaatctaggtggta

SEQ ID NO: 902996 - DNA, 15 bp, Homo sapiens
aaatctaggtggtat

SEQ ID NO: 902997 - DNA, 15 bp, Homo sapiens
aatctaggtggtatt

SEQ ID NO: 902998 - DNA, 15 bp, Homo sapiens
atctaggtggtattg

SEQ ID NO: 902999 - DNA, 15 bp, Homo sapiens
tctaggtggtattgc

SEQ ID NO: 903000 - DNA, 15 bp, Homo sapiens
ctaggtggtattgct

SEQ ID NO: 903001 - DNA, 15 bp, Homo sapiens
taggtggtattgctc

SEQ ID NO: 903002 - DNA, 15 bp, Homo sapiens
aggtggtattgctcc

SEQ ID NO: 903003 - DNA, 15 bp, Homo sapiens
ggtggtattgctcca

SEQ ID NO: 903004 - DNA, 15 bp, Homo sapiens
gtggtattgctccag

SEQ ID NO: 903005 - DNA, 15 bp, Homo sapiens
tggtattgctccaga

SEQ ID NO: 903006 - DNA, 15 bp, Homo sapiens
ggtattgctccagaa

SEQ ID NO: 903007 - DNA, 15 bp, Homo sapiens
gtattgctccagaaa

SEQ ID NO: 903008 - DNA, 15 bp, Homo sapiens
tattgctccagaaaa

SEQ ID NO: 903009 - DNA, 15 bp, Homo sapiens
attgctccagaaaac

SEQ ID NO: 903010 - DNA, 15 bp, Homo sapiens
ttgctccagaaaaca

SEQ ID NO: 903011 - DNA, 15 bp, Homo sapiens
tgctccagaaaacac

SEQ ID NO: 903012 - DNA, 15 bp, Homo sapiens
gctccagaaaacact

SEQ ID NO: 903013 - DNA, 15 bp, Homo sapiens
ctccagaaaacactc

SEQ ID NO: 903014 - DNA, 15 bp, Homo sapiens
tccagaaaacactct

SEQ ID NO: 903015 - DNA, 15 bp, Homo sapiens
ccagaaaacactcta

SEQ ID NO: 903016 - DNA, 15 bp, Homo sapiens
cagaaaacactctaa

SEQ ID NO: 903017 - DNA, 15 bp, Homo sapiens
agaaaacactctaac

SEQ ID NO: 903018 - DNA, 15 bp, Homo sapiens
gaaaacactctaacc

SEQ ID NO: 903019 - DNA, 15 bp, Homo sapiens
aaaacactctaacca

SEQ ID NO: 903020 - DNA, 15 bp, Homo sapiens
aaacactctaaccac

SEQ ID NO: 903021 - DNA, 15 bp, Homo sapiens
aacactctaaccact

SEQ ID NO: 903022 - DNA, 15 bp, Homo sapiens
acactctaaccactg

SEQ ID NO: 903023 - DNA, 15 bp, Homo sapiens
cactctaaccactgg

SEQ ID NO: 903024 - DNA, 15 bp, Homo sapiens
actctaaccactggg

SEQ ID NO: 903025 - DNA, 15 bp, Homo sapiens
ctctaaccactggga

SEQ ID NO: 903026 - DNA, 15 bp, Homo sapiens
tctaaccactgggaa

SEQ ID NO: 903027 - DNA, 15 bp, Homo sapiens
ctaaccactgggaat

SEQ ID NO: 903028 - DNA, 15 bp, Homo sapiens
taaccactgggaatc

SEQ ID NO: 903029 - DNA, 15 bp, Homo sapiens
aaccactgggaatcc

SEQ ID NO: 903030 - DNA, 15 bp, Homo sapiens
accactgggaatcct

SEQ ID NO: 903031 - DNA, 15 bp, Homo sapiens
ccactgggaatcctg

SEQ ID NO: 903032 - DNA, 15 bp, Homo sapiens
cactgggaatcctgt

SEQ ID NO: 903033 - DNA, 15 bp, Homo sapiens
actgggaatcctgtt

SEQ ID NO: 903034 - DNA, 15 bp, Homo sapiens
ctgggaatcctgttc

SEQ ID NO: 903035 - DNA, 15 bp, Homo sapiens
tgggaatcctgttct

SEQ ID NO: 903036 - DNA, 15 bp, Homo sapiens
gggaatcctgttctt

SEQ ID NO: 903037 - DNA, 15 bp, Homo sapiens
ggaatcctgttcttg

SEQ ID NO: 903038 - DNA, 15 bp, Homo sapiens
gaatcctgttcttgt

SEQ ID NO: 903039 - DNA, 15 bp, Homo sapiens
aatcctgttcttgtc

SEQ ID NO: 903040 - DNA, 15 bp, Homo sapiens
atcctgttcttgtct

SEQ ID NO: 903041 - DNA, 15 bp, Homo sapiens
tcctgttcttgtctt

SEQ ID NO: 903042 - DNA, 15 bp, Homo sapiens
cctgttcttgtcttt

SEQ ID NO: 903043 - DNA, 15 bp, Homo sapiens
ctgttcttgtcttta

SEQ ID NO: 903044 - DNA, 15 bp, Homo sapiens
tgttcttgtctttac

SEQ ID NO: 903045 - DNA, 15 bp, Homo sapiens
gttcttgtctttacc

SEQ ID NO: 903046 - DNA, 15 bp, Homo sapiens
ttcttgtctttaccc

SEQ ID NO: 903047 - DNA, 15 bp, Homo sapiens
tcttgtctttacccc

SEQ ID NO: 903048 - DNA, 15 bp, Homo sapiens
cttgtctttacccca

SEQ ID NO: 903049 - DNA, 15 bp, Homo sapiens
ttgtctttaccccat

SEQ ID NO: 903050 - DNA, 15 bp, Homo sapiens
tgtctttaccccata

SEQ ID NO: 903051 - DNA, 15 bp, Homo sapiens
gtctttaccccatat

SEQ ID NO: 903052 - DNA, 15 bp, Homo sapiens
tctttaccccatatc

SEQ ID NO: 903053 - DNA, 15 bp, Homo sapiens
ctttaccccatatca

SEQ ID NO: 903054 - DNA, 15 bp, Homo sapiens
tttaccccatatcaa

SEQ ID NO: 903055 - DNA, 15 bp, Homo sapiens
ttaccccatatcaaa

SEQ ID NO: 903056 - DNA, 15 bp, Homo sapiens
taccccatatcaaaa

SEQ ID NO: 903057 - DNA, 15 bp, Homo sapiens
accccatatcaaaag

SEQ ID NO: 903058 - DNA, 15 bp, Homo sapiens
ccccatatcaaaagt

SEQ ID NO: 903059 - DNA, 15 bp, Homo sapiens
cccatatcaaaagtg

SEQ ID NO: 903060 - DNA, 15 bp, Homo sapiens
ccatatcaaaagtgg

SEQ ID NO: 903061 - DNA, 15 bp, Homo sapiens
catatcaaaagtgga

SEQ ID NO: 903062 - DNA, 15 bp, Homo sapiens
atatcaaaagtggaa

SEQ ID NO: 903063 - DNA, 15 bp, Homo sapiens
tatcaaaagtggaaa

SEQ ID NO: 903064 - DNA, 15 bp, Homo sapiens
atcaaaagtggaaaa

SEQ ID NO: 903065 - DNA, 15 bp, Homo sapiens
tcaaaagtggaaaat

SEQ ID NO: 903066 - DNA, 15 bp, Homo sapiens
caaaagtggaaaatg

SEQ ID NO: 903067 - DNA, 15 bp, Homo sapiens
aaaagtggaaaatgc

SEQ ID NO: 903068 - DNA, 15 bp, Homo sapiens
aaagtggaaaatgcc

SEQ ID NO: 903069 - DNA, 15 bp, Homo sapiens
aagtggaaaatgcca

SEQ ID NO: 903070 - DNA, 15 bp, Homo sapiens
agtggaaaatgccaa

SEQ ID NO: 903071 - DNA, 15 bp, Homo sapiens
gtggaaaatgccaag

SEQ ID NO: 903072 - DNA, 15 bp, Homo sapiens
tggaaaatgccaagc

SEQ ID NO: 903073 - DNA, 15 bp, Homo sapiens
ggaaaatgccaagca

SEQ ID NO: 903074 - DNA, 15 bp, Homo sapiens
gaaaatgccaagcag

SEQ ID NO: 903075 - DNA, 15 bp, Homo sapiens
aaaatgccaagcagg

SEQ ID NO: 903076 - DNA, 15 bp, Homo sapiens
aaatgccaagcaggt

SEQ ID NO: 903077 - DNA, 15 bp, Homo sapiens
aatgccaagcaggtc

SEQ ID NO: 903078 - DNA, 15 bp, Homo sapiens
atgccaagcaggtca

SEQ ID NO: 903079 - DNA, 15 bp, Homo sapiens
tgccaagcaggtcaa

SEQ ID NO: 903080 - DNA, 15 bp, Homo sapiens
gccaagcaggtcaag

SEQ ID NO: 903081 - DNA, 15 bp, Homo sapiens
ccaagcaggtcaagg

SEQ ID NO: 903082 - DNA, 15 bp, Homo sapiens
caagcaggtcaaggt

SEQ ID NO: 903083 - DNA, 15 bp, Homo sapiens
aagcaggtcaaggtc

SEQ ID NO: 903084 - DNA, 15 bp, Homo sapiens
agcaggtcaaggtca

SEQ ID NO: 903085 - DNA, 15 bp, Homo sapiens
gcaggtcaaggtcaa

SEQ ID NO: 903086 - DNA, 15 bp, Homo sapiens
caggtcaaggtcaac

SEQ ID NO: 903087 - DNA, 15 bp, Homo sapiens
aggtcaaggtcaact

SEQ ID NO: 903088 - DNA, 15 bp, Homo sapiens
ggtcaaggtcaacta

SEQ ID NO: 903089 - DNA, 15 bp, Homo sapiens
gtcaaggtcaactat

SEQ ID NO: 903090 - DNA, 15 bp, Homo sapiens
tcaaggtcaactatt

SEQ ID NO: 903091 - DNA, 15 bp, Homo sapiens
caaggtcaactattg

SEQ ID NO: 903092 - DNA, 15 bp, Homo sapiens
aaggtcaactattga

SEQ ID NO: 903093 - DNA, 15 bp, Homo sapiens
aggtcaactattgag

SEQ ID NO: 903094 - DNA, 15 bp, Homo sapiens
ggtcaactattgaga

SEQ ID NO: 903095 - DNA, 15 bp, Homo sapiens
gtcaactattgagag

SEQ ID NO: 903096 - DNA, 15 bp, Homo sapiens
tcaactattgagagc

SEQ ID NO: 903097 - DNA, 15 bp, Homo sapiens
caactattgagagct

SEQ ID NO: 903098 - DNA, 15 bp, Homo sapiens
aactattgagagctt

SEQ ID NO: 903099 - DNA, 15 bp, Homo sapiens
actattgagagcttg

SEQ ID NO: 903100 - DNA, 15 bp, Homo sapiens
ctattgagagcttgt

SEQ ID NO: 903101 - DNA, 15 bp, Homo sapiens
tattgagagcttgtt

SEQ ID NO: 903102 - DNA, 15 bp, Homo sapiens
attgagagcttgtta

SEQ ID NO: 903103 - DNA, 15 bp, Homo sapiens
ttgagagcttgttag

SEQ ID NO: 903104 - DNA, 15 bp, Homo sapiens
tgagagcttgttaga

SEQ ID NO: 903105 - DNA, 15 bp, Homo sapiens
gagagcttgttagat

SEQ ID NO: 903106 - DNA, 15 bp, Homo sapiens
agagcttgttagatg

SEQ ID NO: 903107 - DNA, 15 bp, Homo sapiens
gagcttgttagatgc

SEQ ID NO: 903108 - DNA, 15 bp, Homo sapiens
agcttgttagatgct

SEQ ID NO: 903109 - DNA, 15 bp, Homo sapiens
gcttgttagatgctt

SEQ ID NO: 903110 - DNA, 15 bp, Homo sapiens
cttgttagatgcttc

SEQ ID NO: 903111 - DNA, 15 bp, Homo sapiens
ttgttagatgcttcc

SEQ ID NO: 903112 - DNA, 15 bp, Homo sapiens
tgttagatgcttcca

SEQ ID NO: 903113 - DNA, 15 bp, Homo sapiens
gttagatgcttccag

SEQ ID NO: 903114 - DNA, 15 bp, Homo sapiens
ttagatgcttccaga

SEQ ID NO: 903115 - DNA, 15 bp, Homo sapiens
tagatgcttccagat

SEQ ID NO: 903116 - DNA, 15 bp, Homo sapiens
agatgcttccagata

SEQ ID NO: 903117 - DNA, 15 bp, Homo sapiens
gatgcttccagatac

SEQ ID NO: 903118 - DNA, 15 bp, Homo sapiens
atgcttccagatacc

SEQ ID NO: 903119 - DNA, 15 bp, Homo sapiens
tgcttccagatacct

SEQ ID NO: 903120 - DNA, 15 bp, Homo sapiens
gcttccagatacctt

SEQ ID NO: 903121 - DNA, 15 bp, Homo sapiens
cttccagataccttt

SEQ ID NO: 903122 - DNA, 15 bp, Homo sapiens
ttccagatacctttc

SEQ ID NO: 903123 - DNA, 15 bp, Homo sapiens
tccagatacctttcc

SEQ ID NO: 903124 - DNA, 15 bp, Homo sapiens
ccagatacctttcca

SEQ ID NO: 903125 - DNA, 15 bp, Homo sapiens
cagatacctttccat

SEQ ID NO: 903126 - DNA, 15 bp, Homo sapiens
agatacctttccatc

SEQ ID NO: 903127 - DNA, 15 bp, Homo sapiens
gatacctttccatca

SEQ ID NO: 903128 - DNA, 15 bp, Homo sapiens
atacctttccatcac

SEQ ID NO: 903129 - DNA, 15 bp, Homo sapiens
tacctttccatcaca

SEQ ID NO: 903130 - DNA, 15 bp, Homo sapiens
acctttccatcacag

SEQ ID NO: 903131 - DNA, 15 bp, Homo sapiens
cctttccatcacaga

SEQ ID NO: 903132 - DNA, 15 bp, Homo sapiens
ctttccatcacagag

SEQ ID NO: 903133 - DNA, 15 bp, Homo sapiens
tttccatcacagagc

SEQ ID NO: 903134 - DNA, 15 bp, Homo sapiens
ttccatcacagagcc

SEQ ID NO: 903135 - DNA, 15 bp, Homo sapiens
tccatcacagagccc

SEQ ID NO: 903136 - DNA, 15 bp, Homo sapiens
ccatcacagagccca

SEQ ID NO: 903137 - DNA, 15 bp, Homo sapiens
catcacagagcccag

SEQ ID NO: 903138 - DNA, 15 bp, Homo sapiens
atcacagagcccagg

SEQ ID NO: 903139 - DNA, 15 bp, Homo sapiens
tcacagagcccaggc

SEQ ID NO: 903140 - DNA, 15 bp, Homo sapiens
cacagagcccaggct

SEQ ID NO: 903141 - DNA, 15 bp, Homo sapiens
acagagcccaggctc

SEQ ID NO: 903142 - DNA, 15 bp, Homo sapiens
cagagcccaggctct

SEQ ID NO: 903143 - DNA, 15 bp, Homo sapiens
agagcccaggctctc

SEQ ID NO: 903144 - DNA, 15 bp, Homo sapiens
gagcccaggctctca

SEQ ID NO: 903145 - DNA, 15 bp, Homo sapiens
agcccaggctctcaa

SEQ ID NO: 903146 - DNA, 15 bp, Homo sapiens
gcccaggctctcaat

SEQ ID NO: 903147 - DNA, 15 bp, Homo sapiens
cccaggctctcaatt

SEQ ID NO: 903148 - DNA, 15 bp, Homo sapiens
ccaggctctcaattg

SEQ ID NO: 903149 - DNA, 15 bp, Homo sapiens
caggctctcaattga

SEQ ID NO: 903150 - DNA, 15 bp, Homo sapiens
aggctctcaattgac

SEQ ID NO: 903151 - DNA, 15 bp, Homo sapiens
ggctctcaattgact

SEQ ID NO: 903152 - DNA, 15 bp, Homo sapiens
gctctcaattgactc

SEQ ID NO: 903153 - DNA, 15 bp, Homo sapiens
ctctcaattgactcc

SEQ ID NO: 903154 - DNA, 15 bp, Homo sapiens
tctcaattgactccc

SEQ ID NO: 903155 - DNA, 15 bp, Homo sapiens
ctcaattgactccct

SEQ ID NO: 903156 - DNA, 15 bp, Homo sapiens
tcaattgactccctg

SEQ ID NO: 903157 - DNA, 15 bp, Homo sapiens
caattgactccctgg

SEQ ID NO: 903158 - DNA, 15 bp, Homo sapiens
aattgactccctggg

SEQ ID NO: 903159 - DNA, 15 bp, Homo sapiens
attgactccctgggg

SEQ ID NO: 903160 - DNA, 15 bp, Homo sapiens
ttgactccctggggc

SEQ ID NO: 903161 - DNA, 15 bp, Homo sapiens
tgactccctggggcc

SEQ ID NO: 903162 - DNA, 15 bp, Homo sapiens
gactccctggggcca

SEQ ID NO: 903163 - DNA, 15 bp, Homo sapiens
actccctggggccac

SEQ ID NO: 903164 - DNA, 15 bp, Homo sapiens
ctccctggggccaca

SEQ ID NO: 903165 - DNA, 15 bp, Homo sapiens
tccctggggccacac

SEQ ID NO: 903166 - DNA, 15 bp, Homo sapiens
ccctggggccacacc

SEQ ID NO: 903167 - DNA, 15 bp, Homo sapiens
cctggggccacacct

SEQ ID NO: 903168 - DNA, 15 bp, Homo sapiens
ctggggccacacctc

SEQ ID NO: 903169 - DNA, 15 bp, Homo sapiens
tggggccacacctct

SEQ ID NO: 903170 - DNA, 15 bp, Homo sapiens
ggggccacacctctg

SEQ ID NO: 903171 - DNA, 15 bp, Homo sapiens
gggccacacctctga

SEQ ID NO: 903172 - DNA, 15 bp, Homo sapiens
ggccacacctctgaa

SEQ ID NO: 903173 - DNA, 15 bp, Homo sapiens
gccacacctctgaag

SEQ ID NO: 903174 - DNA, 15 bp, Homo sapiens
ccacacctctgaagt

SEQ ID NO: 903175 - DNA, 15 bp, Homo sapiens
cacacctctgaagtc

SEQ ID NO: 903176 - DNA, 15 bp, Homo sapiens
acacctctgaagtct

SEQ ID NO: 903177 - DNA, 15 bp, Homo sapiens
cacctctgaagtctc

SEQ ID NO: 903178 - DNA, 15 bp, Homo sapiens
acctctgaagtctca

SEQ ID NO: 903179 - DNA, 15 bp, Homo sapiens
cctctgaagtctcaa

SEQ ID NO: 903180 - DNA, 15 bp, Homo sapiens
ctctgaagtctcaat

SEQ ID NO: 903181 - DNA, 15 bp, Homo sapiens
tctgaagtctcaata

SEQ ID NO: 903182 - DNA, 15 bp, Homo sapiens
ctgaagtctcaatag

SEQ ID NO: 903183 - DNA, 15 bp, Homo sapiens
tgaagtctcaataga

SEQ ID NO: 903184 - DNA, 15 bp, Homo sapiens
gaagtctcaatagat

SEQ ID NO: 903185 - DNA, 15 bp, Homo sapiens
aagtctcaatagatg

SEQ ID NO: 903186 - DNA, 15 bp, Homo sapiens
agtctcaatagatgt

SEQ ID NO: 903187 - DNA, 15 bp, Homo sapiens
gtctcaatagatgtg

SEQ ID NO: 903188 - DNA, 15 bp, Homo sapiens
tctcaatagatgtgg

SEQ ID NO: 903189 - DNA, 15 bp, Homo sapiens
ctcaatagatgtggg

SEQ ID NO: 903190 - DNA, 15 bp, Homo sapiens
tcaatagatgtgggg

SEQ ID NO: 903191 - DNA, 15 bp, Homo sapiens
caatagatgtggggg

SEQ ID NO: 903192 - DNA, 15 bp, Homo sapiens
aatagatgtgggggt

SEQ ID NO: 903193 - DNA, 15 bp, Homo sapiens
atagatgtgggggtg

SEQ ID NO: 903194 - DNA, 15 bp, Homo sapiens
tagatgtgggggtga

SEQ ID NO: 903195 - DNA, 15 bp, Homo sapiens
agatgtgggggtgat

SEQ ID NO: 903196 - DNA, 15 bp, Homo sapiens
gatgtgggggtgatg

SEQ ID NO: 903197 - DNA, 15 bp, Homo sapiens
atgtgggggtgatgg

SEQ ID NO: 903198 - DNA, 15 bp, Homo sapiens
tgtgggggtgatggc

SEQ ID NO: 903199 - DNA, 15 bp, Homo sapiens
gtgggggtgatggcc

SEQ ID NO: 903200 - DNA, 15 bp, Homo sapiens
tgggggtgatggcca

SEQ ID NO: 903201 - DNA, 15 bp, Homo sapiens
gggggtgatggccaa

SEQ ID NO: 903202 - DNA, 15 bp, Homo sapiens
ggggtgatggccaag

SEQ ID NO: 903203 - DNA, 15 bp, Homo sapiens
gggtgatggccaagc

SEQ ID NO: 903204 - DNA, 15 bp, Homo sapiens
ggtgatggccaagca

SEQ ID NO: 903205 - DNA, 15 bp, Homo sapiens
gtgatggccaagcag

SEQ ID NO: 903206 - DNA, 15 bp, Homo sapiens
tgatggccaagcaga

SEQ ID NO: 903207 - DNA, 15 bp, Homo sapiens
gatggccaagcagaa

SEQ ID NO: 903208 - DNA, 15 bp, Homo sapiens
atggccaagcagaag

SEQ ID NO: 903209 - DNA, 15 bp, Homo sapiens
tggccaagcagaagg

SEQ ID NO: 903210 - DNA, 15 bp, Homo sapiens
ggccaagcagaagga

SEQ ID NO: 903211 - DNA, 15 bp, Homo sapiens
gccaagcagaaggat

SEQ ID NO: 903212 - DNA, 15 bp, Homo sapiens
ccaagcagaaggatc

SEQ ID NO: 903213 - DNA, 15 bp, Homo sapiens
caagcagaaggatct

SEQ ID NO: 903214 - DNA, 15 bp, Homo sapiens
aagcagaaggatctg

SEQ ID NO: 903215 - DNA, 15 bp, Homo sapiens
agcagaaggatctga

SEQ ID NO: 903216 - DNA, 15 bp, Homo sapiens
gcagaaggatctgaa

SEQ ID NO: 903217 - DNA, 15 bp, Homo sapiens
cagaaggatctgaaa

SEQ ID NO: 903218 - DNA, 15 bp, Homo sapiens
agaaggatctgaaaa

SEQ ID NO: 903219 - DNA, 15 bp, Homo sapiens
gaaggatctgaaaat

SEQ ID NO: 903220 - DNA, 15 bp, Homo sapiens
aaggatctgaaaatg

SEQ ID NO: 903221 - DNA, 15 bp, Homo sapiens
aggatctgaaaatgt

SEQ ID NO: 903222 - DNA, 15 bp, Homo sapiens
ggatctgaaaatgtc

SEQ ID NO: 903223 - DNA, 15 bp, Homo sapiens
gatctgaaaatgtcc

SEQ ID NO: 903224 - DNA, 15 bp, Homo sapiens
atctgaaaatgtccc

SEQ ID NO: 903225 - DNA, 15 bp, Homo sapiens
tctgaaaatgtccca

SEQ ID NO: 903226 - DNA, 15 bp, Homo sapiens
ctgaaaatgtcccac

SEQ ID NO: 903227 - DNA, 15 bp, Homo sapiens
tgaaaatgtcccaca

SEQ ID NO: 903228 - DNA, 15 bp, Homo sapiens
gaaaatgtcccacaa

SEQ ID NO: 903229 - DNA, 15 bp, Homo sapiens
aaaatgtcccacaaa

SEQ ID NO: 903230 - DNA, 15 bp, Homo sapiens
aaatgtcccacaaag

SEQ ID NO: 903231 - DNA, 15 bp, Homo sapiens
aatgtcccacaaagg

SEQ ID NO: 903232 - DNA, 15 bp, Homo sapiens
atgtcccacaaaggt

SEQ ID NO: 903233 - DNA, 15 bp, Homo sapiens
tgtcccacaaaggtt

SEQ ID NO: 903234 - DNA, 15 bp, Homo sapiens
gtcccacaaaggttc

SEQ ID NO: 903235 - DNA, 15 bp, Homo sapiens
tcccacaaaggttct

SEQ ID NO: 903236 - DNA, 15 bp, Homo sapiens
cccacaaaggttctg

SEQ ID NO: 903237 - DNA, 15 bp, Homo sapiens
ccacaaaggttctgc

SEQ ID NO: 903238 - DNA, 15 bp, Homo sapiens
cacaaaggttctgct

SEQ ID NO: 903239 - DNA, 15 bp, Homo sapiens
acaaaggttctgctg

SEQ ID NO: 903240 - DNA, 15 bp, Homo sapiens
caaaggttctgctgt

SEQ ID NO: 903241 - DNA, 15 bp, Homo sapiens
aaaggttctgctgtg

SEQ ID NO: 903242 - DNA, 15 bp, Homo sapiens
aaggttctgctgtgg

SEQ ID NO: 903243 - DNA, 15 bp, Homo sapiens
aggttctgctgtggg

SEQ ID NO: 903244 - DNA, 15 bp, Homo sapiens
ggttctgctgtgggc

SEQ ID NO: 903245 - DNA, 15 bp, Homo sapiens
gttctgctgtgggca

SEQ ID NO: 903246 - DNA, 15 bp, Homo sapiens
ttctgctgtgggcac

SEQ ID NO: 903247 - DNA, 15 bp, Homo sapiens
tctgctgtgggcact

SEQ ID NO: 903248 - DNA, 15 bp, Homo sapiens
ctgctgtgggcactg

SEQ ID NO: 903249 - DNA, 15 bp, Homo sapiens
tgctgtgggcactgc

SEQ ID NO: 903250 - DNA, 15 bp, Homo sapiens
gctgtgggcactgcc

SEQ ID NO: 903251 - DNA, 15 bp, Homo sapiens
ctgtgggcactgcca

SEQ ID NO: 903252 - DNA, 15 bp, Homo sapiens
tgtgggcactgccaa

SEQ ID NO: 903253 - DNA, 15 bp, Homo sapiens
gtgggcactgccaag

SEQ ID NO: 903254 - DNA, 15 bp, Homo sapiens
tgggcactgccaaga

SEQ ID NO: 903255 - DNA, 15 bp, Homo sapiens
gggcactgccaagac

SEQ ID NO: 903256 - DNA, 15 bp, Homo sapiens
ggcactgccaagaca

SEQ ID NO: 903257 - DNA, 15 bp, Homo sapiens
gcactgccaagacag

SEQ ID NO: 903258 - DNA, 15 bp, Homo sapiens
cactgccaagacaga

SEQ ID NO: 903259 - DNA, 15 bp, Homo sapiens
actgccaagacagac

SEQ ID NO: 903260 - DNA, 15 bp, Homo sapiens
ctgccaagacagaca

SEQ ID NO: 903261 - DNA, 15 bp, Homo sapiens
tgccaagacagacag

SEQ ID NO: 903262 - DNA, 15 bp, Homo sapiens
gccaagacagacagg

SEQ ID NO: 903263 - DNA, 15 bp, Homo sapiens
ccaagacagacagga

SEQ ID NO: 903264 - DNA, 15 bp, Homo sapiens
caagacagacaggac

SEQ ID NO: 903265 - DNA, 15 bp, Homo sapiens
aagacagacaggacc

SEQ ID NO: 903266 - DNA, 15 bp, Homo sapiens
agacagacaggacca

SEQ ID NO: 903267 - DNA, 15 bp, Homo sapiens
gacagacaggaccac

SEQ ID NO: 903268 - DNA, 15 bp, Homo sapiens
acagacaggaccacg

SEQ ID NO: 903269 - DNA, 15 bp, Homo sapiens
cagacaggaccacga

SEQ ID NO: 903270 - DNA, 15 bp, Homo sapiens
agacaggaccacgag

SEQ ID NO: 903271 - DNA, 15 bp, Homo sapiens
gacaggaccacgagg

SEQ ID NO: 903272 - DNA, 15 bp, Homo sapiens
acaggaccacgaggc

SEQ ID NO: 903273 - DNA, 15 bp, Homo sapiens
caggaccacgaggcc

SEQ ID NO: 903274 - DNA, 15 bp, Homo sapiens
aggaccacgaggcca

SEQ ID NO: 903275 - DNA, 15 bp, Homo sapiens
ggaccacgaggccag

SEQ ID NO: 903276 - DNA, 15 bp, Homo sapiens
gaccacgaggccagc

SEQ ID NO: 903277 - DNA, 15 bp, Homo sapiens
accacgaggccagct

SEQ ID NO: 903278 - DNA, 15 bp, Homo sapiens
ccacgaggccagctg

SEQ ID NO: 903279 - DNA, 15 bp, Homo sapiens
cacgaggccagctgg

SEQ ID NO: 903280 - DNA, 15 bp, Homo sapiens
acgaggccagctggc

SEQ ID NO: 903281 - DNA, 15 bp, Homo sapiens
cgaggccagctggca

SEQ ID NO: 903282 - DNA, 15 bp, Homo sapiens
gaggccagctggcac

SEQ ID NO: 903283 - DNA, 15 bp, Homo sapiens
aggccagctggcacc

SEQ ID NO: 903284 - DNA, 15 bp, Homo sapiens
ggccagctggcacct

SEQ ID NO: 903285 - DNA, 15 bp, Homo sapiens
gccagctggcacctg

SEQ ID NO: 903286 - DNA, 15 bp, Homo sapiens
ccagctggcacctgc

SEQ ID NO: 903287 - DNA, 15 bp, Homo sapiens
cagctggcacctgcc

SEQ ID NO: 903288 - DNA, 15 bp, Homo sapiens
agctggcacctgcct

SEQ ID NO: 903289 - DNA, 15 bp, Homo sapiens
gctggcacctgccta

SEQ ID NO: 903290 - DNA, 15 bp, Homo sapiens
ctggcacctgcctaa

SEQ ID NO: 903291 - DNA, 15 bp, Homo sapiens
tggcacctgcctaaa

SEQ ID NO: 903292 - DNA, 15 bp, Homo sapiens
ggcacctgcctaaat

SEQ ID NO: 903293 - DNA, 15 bp, Homo sapiens
gcacctgcctaaatc

SEQ ID NO: 903294 - DNA, 15 bp, Homo sapiens
cacctgcctaaatct

SEQ ID NO: 903295 - DNA, 15 bp, Homo sapiens
acctgcctaaatcta

SEQ ID NO: 903296 - DNA, 15 bp, Homo sapiens
cctgcctaaatctat

SEQ ID NO: 903297 - DNA, 15 bp, Homo sapiens
ctgcctaaatctatg

SEQ ID NO: 903298 - DNA, 15 bp, Homo sapiens
tgcctaaatctatgc

SEQ ID NO: 903299 - DNA, 15 bp, Homo sapiens
gcctaaatctatgct

SEQ ID NO: 903300 - DNA, 15 bp, Homo sapiens
cctaaatctatgctt

SEQ ID NO: 903301 - DNA, 15 bp, Homo sapiens
ctaaatctatgcttt

SEQ ID NO: 903302 - DNA, 15 bp, Homo sapiens
taaatctatgctttc

SEQ ID NO: 903303 - DNA, 15 bp, Homo sapiens
aaatctatgctttcc

SEQ ID NO: 903304 - DNA, 15 bp, Homo sapiens
aatctatgctttcca

SEQ ID NO: 903305 - DNA, 15 bp, Homo sapiens
atctatgctttccag

SEQ ID NO: 903306 - DNA, 15 bp, Homo sapiens
tctatgctttccagc

SEQ ID NO: 903307 - DNA, 15 bp, Homo sapiens
ctatgctttccagcc

SEQ ID NO: 903308 - DNA, 15 bp, Homo sapiens
tatgctttccagccc

SEQ ID NO: 903309 - DNA, 15 bp, Homo sapiens
atgctttccagccca

SEQ ID NO: 903310 - DNA, 15 bp, Homo sapiens
tgctttccagcccat

SEQ ID NO: 903311 - DNA, 15 bp, Homo sapiens
gctttccagcccata

SEQ ID NO: 903312 - DNA, 15 bp, Homo sapiens
ctttccagcccatag

SEQ ID NO: 903313 - DNA, 15 bp, Homo sapiens
tttccagcccatagc

SEQ ID NO: 903314 - DNA, 15 bp, Homo sapiens
ttccagcccatagct

SEQ ID NO: 903315 - DNA, 15 bp, Homo sapiens
tccagcccatagctc

SEQ ID NO: 903316 - DNA, 15 bp, Homo sapiens
ccagcccatagctca

SEQ ID NO: 903317 - DNA, 15 bp, Homo sapiens
cagcccatagctcat

SEQ ID NO: 903318 - DNA, 15 bp, Homo sapiens
agcccatagctcatc

SEQ ID NO: 903319 - DNA, 15 bp, Homo sapiens
gcccatagctcatca

SEQ ID NO: 903320 - DNA, 15 bp, Homo sapiens
cccatagctcatcac

SEQ ID NO: 903321 - DNA, 15 bp, Homo sapiens
ccatagctcatcaca

SEQ ID NO: 903322 - DNA, 15 bp, Homo sapiens
catagctcatcacac

SEQ ID NO: 903323 - DNA, 15 bp, Homo sapiens
atagctcatcacacg

SEQ ID NO: 903324 - DNA, 15 bp, Homo sapiens
tagctcatcacacgc

SEQ ID NO: 903325 - DNA, 15 bp, Homo sapiens
agctcatcacacgcc

SEQ ID NO: 903326 - DNA, 15 bp, Homo sapiens
gctcatcacacgccc

SEQ ID NO: 903327 - DNA, 15 bp, Homo sapiens
ctcatcacacgccca

SEQ ID NO: 903328 - DNA, 15 bp, Homo sapiens
tcatcacacgcccaa

SEQ ID NO: 903329 - DNA, 15 bp, Homo sapiens
catcacacgcccaac

SEQ ID NO: 903330 - DNA, 15 bp, Homo sapiens
atcacacgcccaact

SEQ ID NO: 903331 - DNA, 15 bp, Homo sapiens
tcacacgcccaactg

SEQ ID NO: 903332 - DNA, 15 bp, Homo sapiens
cacacgcccaactgg

SEQ ID NO: 903333 - DNA, 15 bp, Homo sapiens
acacgcccaactgga

SEQ ID NO: 903334 - DNA, 15 bp, Homo sapiens
cacgcccaactggaa

SEQ ID NO: 903335 - DNA, 15 bp, Homo sapiens
acgcccaactggaac

SEQ ID NO: 903336 - DNA, 15 bp, Homo sapiens
cgcccaactggaacc

SEQ ID NO: 903337 - DNA, 15 bp, Homo sapiens
gcccaactggaaccc

SEQ ID NO: 903338 - DNA, 15 bp, Homo sapiens
cccaactggaaccca

SEQ ID NO: 903339 - DNA, 15 bp, Homo sapiens
ccaactggaacccag

SEQ ID NO: 903340 - DNA, 15 bp, Homo sapiens
caactggaacccagg

SEQ ID NO: 903341 - DNA, 15 bp, Homo sapiens
aactggaacccaggc

SEQ ID NO: 903342 - DNA, 15 bp, Homo sapiens
actggaacccaggca

SEQ ID NO: 903343 - DNA, 15 bp, Homo sapiens
ctggaacccaggcac

SEQ ID NO: 903344 - DNA, 15 bp, Homo sapiens
tggaacccaggcaca

SEQ ID NO: 903345 - DNA, 15 bp, Homo sapiens
ggaacccaggcacac

SEQ ID NO: 903346 - DNA, 15 bp, Homo sapiens
gaacccaggcacacc

SEQ ID NO: 903347 - DNA, 15 bp, Homo sapiens
aacccaggcacacca

SEQ ID NO: 903348 - DNA, 15 bp, Homo sapiens
acccaggcacaccat

SEQ ID NO: 903349 - DNA, 15 bp, Homo sapiens
cccaggcacaccatg

SEQ ID NO: 903350 - DNA, 15 bp, Homo sapiens
ccaggcacaccatgg

SEQ ID NO: 903351 - DNA, 15 bp, Homo sapiens
caggcacaccatggt

SEQ ID NO: 903352 - DNA, 15 bp, Homo sapiens
aggcacaccatggtt

SEQ ID NO: 903353 - DNA, 15 bp, Homo sapiens
ggcacaccatggttg

SEQ ID NO: 903354 - DNA, 15 bp, Homo sapiens
gcacaccatggttgc

SEQ ID NO: 903355 - DNA, 15 bp, Homo sapiens
cacaccatggttgca

SEQ ID NO: 903356 - DNA, 15 bp, Homo sapiens
acaccatggttgcag

SEQ ID NO: 903357 - DNA, 15 bp, Homo sapiens
caccatggttgcagc

SEQ ID NO: 903358 - DNA, 15 bp, Homo sapiens
accatggttgcagcg

SEQ ID NO: 903359 - DNA, 15 bp, Homo sapiens
ccatggttgcagcga

SEQ ID NO: 903360 - DNA, 15 bp, Homo sapiens
catggttgcagcgat

SEQ ID NO: 903361 - DNA, 15 bp, Homo sapiens
atggttgcagcgatc

SEQ ID NO: 903362 - DNA, 15 bp, Homo sapiens
tggttgcagcgatcc

SEQ ID NO: 903363 - DNA, 15 bp, Homo sapiens
ggttgcagcgatcct

SEQ ID NO: 903364 - DNA, 15 bp, Homo sapiens
gttgcagcgatcctt

SEQ ID NO: 903365 - DNA, 15 bp, Homo sapiens
ttgcagcgatccttg

SEQ ID NO: 903366 - DNA, 15 bp, Homo sapiens
tgcagcgatccttga

SEQ ID NO: 903367 - DNA, 15 bp, Homo sapiens
gcagcgatccttgaa

SEQ ID NO: 903368 - DNA, 15 bp, Homo sapiens
cagcgatccttgaac

SEQ ID NO: 903369 - DNA, 15 bp, Homo sapiens
agcgatccttgaact

SEQ ID NO: 903370 - DNA, 15 bp, Homo sapiens
gcgatccttgaactg

SEQ ID NO: 903371 - DNA, 15 bp, Homo sapiens
cgatccttgaactgg

SEQ ID NO: 903372 - DNA, 15 bp, Homo sapiens
gatccttgaactggt

SEQ ID NO: 903373 - DNA, 15 bp, Homo sapiens
atccttgaactggtc

SEQ ID NO: 903374 - DNA, 15 bp, Homo sapiens
tccttgaactggtca

SEQ ID NO: 903375 - DNA, 15 bp, Homo sapiens
ccttgaactggtcac

SEQ ID NO: 903376 - DNA, 15 bp, Homo sapiens
cttgaactggtcact

SEQ ID NO: 903377 - DNA, 15 bp, Homo sapiens
ttgaactggtcacta

SEQ ID NO: 903378 - DNA, 15 bp, Homo sapiens
tgaactggtcactat

SEQ ID NO: 903379 - DNA, 15 bp, Homo sapiens
gaactggtcactatg

SEQ ID NO: 903380 - DNA, 15 bp, Homo sapiens
aactggtcactatgc

SEQ ID NO: 903381 - DNA, 15 bp, Homo sapiens
actggtcactatgca

SEQ ID NO: 903382 - DNA, 15 bp, Homo sapiens
ctggtcactatgcaa

SEQ ID NO: 903383 - DNA, 15 bp, Homo sapiens
tggtcactatgcaaa

SEQ ID NO: 903384 - DNA, 15 bp, Homo sapiens
ggtcactatgcaaaa

SEQ ID NO: 903385 - DNA, 15 bp, Homo sapiens
gtcactatgcaaaag

SEQ ID NO: 903386 - DNA, 15 bp, Homo sapiens
tcactatgcaaaagc

SEQ ID NO: 903387 - DNA, 15 bp, Homo sapiens
cactatgcaaaagca

SEQ ID NO: 903388 - DNA, 15 bp, Homo sapiens
actatgcaaaagcag

SEQ ID NO: 903389 - DNA, 15 bp, Homo sapiens
ctatgcaaaagcaga

SEQ ID NO: 903390 - DNA, 15 bp, Homo sapiens
tatgcaaaagcagaa

SEQ ID NO: 903391 - DNA, 15 bp, Homo sapiens
atgcaaaagcagaac

SEQ ID NO: 903392 - DNA, 15 bp, Homo sapiens
tgcaaaagcagaaca

SEQ ID NO: 903393 - DNA, 15 bp, Homo sapiens
gcaaaagcagaacag

SEQ ID NO: 903394 - DNA, 15 bp, Homo sapiens
caaaagcagaacaga

SEQ ID NO: 903395 - DNA, 15 bp, Homo sapiens
aaaagcagaacagaa

SEQ ID NO: 903396 - DNA, 15 bp, Homo sapiens
aaagcagaacagaag

SEQ ID NO: 903397 - DNA, 15 bp, Homo sapiens
aagcagaacagaagg

SEQ ID NO: 903398 - DNA, 15 bp, Homo sapiens
agcagaacagaaggg

SEQ ID NO: 903399 - DNA, 15 bp, Homo sapiens
gcagaacagaaggga

SEQ ID NO: 903400 - DNA, 15 bp, Homo sapiens
cagaacagaagggag

SEQ ID NO: 903401 - DNA, 15 bp, Homo sapiens
agaacagaagggaga

SEQ ID NO: 903402 - DNA, 15 bp, Homo sapiens
gaacagaagggagac

SEQ ID NO: 903403 - DNA, 15 bp, Homo sapiens
aacagaagggagact

SEQ ID NO: 903404 - DNA, 15 bp, Homo sapiens
acagaagggagactg

SEQ ID NO: 903405 - DNA, 15 bp, Homo sapiens
cagaagggagactgg

SEQ ID NO: 903406 - DNA, 15 bp, Homo sapiens
agaagggagactggt

SEQ ID NO: 903407 - DNA, 15 bp, Homo sapiens
gaagggagactggta

SEQ ID NO: 903408 - DNA, 15 bp, Homo sapiens
aagggagactggtac

SEQ ID NO: 903409 - DNA, 15 bp, Homo sapiens
agggagactggtaca

SEQ ID NO: 903410 - DNA, 15 bp, Homo sapiens
gggagactggtacac

SEQ ID NO: 903411 - DNA, 15 bp, Homo sapiens
ggagactggtacacc

SEQ ID NO: 903412 - DNA, 15 bp, Homo sapiens
gagactggtacaccg

SEQ ID NO: 903413 - DNA, 15 bp, Homo sapiens
agactggtacaccgg

SEQ ID NO: 903414 - DNA, 15 bp, Homo sapiens
gactggtacaccggc

SEQ ID NO: 903415 - DNA, 15 bp, Homo sapiens
actggtacaccggca

SEQ ID NO: 903416 - DNA, 15 bp, Homo sapiens
ctggtacaccggcac

SEQ ID NO: 903417 - DNA, 15 bp, Homo sapiens
tggtacaccggcaca

SEQ ID NO: 903418 - DNA, 15 bp, Homo sapiens
ggtacaccggcacag

SEQ ID NO: 903419 - DNA, 15 bp, Homo sapiens
gtacaccggcacagc

SEQ ID NO: 903420 - DNA, 15 bp, Homo sapiens
tacaccggcacagct

SEQ ID NO: 903421 - DNA, 15 bp, Homo sapiens
acaccggcacagctc

SEQ ID NO: 903422 - DNA, 15 bp, Homo sapiens
caccggcacagctcc

SEQ ID NO: 903423 - DNA, 15 bp, Homo sapiens
accggcacagctcct

SEQ ID NO: 903424 - DNA, 15 bp, Homo sapiens
ccggcacagctcctt

SEQ ID NO: 903425 - DNA, 15 bp, Homo sapiens
cggcacagctccttc

SEQ ID NO: 903426 - DNA, 15 bp, Homo sapiens
ggcacagctccttct

SEQ ID NO: 903427 - DNA, 15 bp, Homo sapiens
gcacagctccttctc

SEQ ID NO: 903428 - DNA, 15 bp, Homo sapiens
cacagctccttctca

SEQ ID NO: 903429 - DNA, 15 bp, Homo sapiens
acagctccttctcag

SEQ ID NO: 903430 - DNA, 15 bp, Homo sapiens
cagctccttctcagc

SEQ ID NO: 903431 - DNA, 15 bp, Homo sapiens
agctccttctcagca

SEQ ID NO: 903432 - DNA, 15 bp, Homo sapiens
gctccttctcagcaa

SEQ ID NO: 903433 - DNA, 15 bp, Homo sapiens
ctccttctcagcaaa

SEQ ID NO: 903434 - DNA, 15 bp, Homo sapiens
tccttctcagcaaat

SEQ ID NO: 903435 - DNA, 15 bp, Homo sapiens
ccttctcagcaaatg

SEQ ID NO: 903436 - DNA, 15 bp, Homo sapiens
cttctcagcaaatgc

SEQ ID NO: 903437 - DNA, 15 bp, Homo sapiens
ttctcagcaaatgca

SEQ ID NO: 903438 - DNA, 15 bp, Homo sapiens
tctcagcaaatgcac

SEQ ID NO: 903439 - DNA, 15 bp, Homo sapiens
ctcagcaaatgcacc

SEQ ID NO: 903440 - DNA, 15 bp, Homo sapiens
tcagcaaatgcaccc

SEQ ID NO: 903441 - DNA, 15 bp, Homo sapiens
cagcaaatgcacccg

SEQ ID NO: 903442 - DNA, 15 bp, Homo sapiens
agcaaatgcacccgc

SEQ ID NO: 903443 - DNA, 15 bp, Homo sapiens
gcaaatgcacccgcc

SEQ ID NO: 903444 - DNA, 15 bp, Homo sapiens
caaatgcacccgcct

SEQ ID NO: 903445 - DNA, 15 bp, Homo sapiens
aaatgcacccgcctc

SEQ ID NO: 903446 - DNA, 15 bp, Homo sapiens
aatgcacccgcctct

SEQ ID NO: 903447 - DNA, 15 bp, Homo sapiens
atgcacccgcctctc

SEQ ID NO: 903448 - DNA, 15 bp, Homo sapiens
tgcacccgcctctca

SEQ ID NO: 903449 - DNA, 15 bp, Homo sapiens
gcacccgcctctcat

SEQ ID NO: 903450 - DNA, 15 bp, Homo sapiens
cacccgcctctcatt

SEQ ID NO: 903451 - DNA, 15 bp, Homo sapiens
acccgcctctcattc

SEQ ID NO: 903452 - DNA, 15 bp, Homo sapiens
cccgcctctcattca

SEQ ID NO: 903453 - DNA, 15 bp, Homo sapiens
ccgcctctcattcat

SEQ ID NO: 903454 - DNA, 15 bp, Homo sapiens
cgcctctcattcatc

SEQ ID NO: 903455 - DNA, 15 bp, Homo sapiens
gcctctcattcatct

SEQ ID NO: 903456 - DNA, 15 bp, Homo sapiens
cctctcattcatctc

SEQ ID NO: 903457 - DNA, 15 bp, Homo sapiens
ctctcattcatctct

SEQ ID NO: 903458 - DNA, 15 bp, Homo sapiens
tctcattcatctcta

SEQ ID NO: 903459 - DNA, 15 bp, Homo sapiens
ctcattcatctctac

SEQ ID NO: 903460 - DNA, 15 bp, Homo sapiens
tcattcatctctact

SEQ ID NO: 903461 - DNA, 15 bp, Homo sapiens
cattcatctctactt

SEQ ID NO: 903462 - DNA, 15 bp, Homo sapiens
attcatctctacttt

SEQ ID NO: 903463 - DNA, 15 bp, Homo sapiens
ttcatctctactttc

SEQ ID NO: 903464 - DNA, 15 bp, Homo sapiens
tcatctctactttct

SEQ ID NO: 903465 - DNA, 15 bp, Homo sapiens
catctctactttctt

SEQ ID NO: 903466 - DNA, 15 bp, Homo sapiens
atctctactttcttt

SEQ ID NO: 903467 - DNA, 15 bp, Homo sapiens
tctctactttctttc

SEQ ID NO: 903468 - DNA, 15 bp, Homo sapiens
ctctactttctttca

SEQ ID NO: 903469 - DNA, 15 bp, Homo sapiens
tctactttctttcac

SEQ ID NO: 903470 - DNA, 15 bp, Homo sapiens
ctactttctttcaca

SEQ ID NO: 903471 - DNA, 15 bp, Homo sapiens
tactttctttcacaa

SEQ ID NO: 903472 - DNA, 15 bp, Homo sapiens
actttctttcacaag

SEQ ID NO: 903473 - DNA, 15 bp, Homo sapiens
ctttctttcacaagt

SEQ ID NO: 903474 - DNA, 15 bp, Homo sapiens
tttctttcacaagtg

SEQ ID NO: 903475 - DNA, 15 bp, Homo sapiens
ttctttcacaagtgt

SEQ ID NO: 903476 - DNA, 15 bp, Homo sapiens
tctttcacaagtgtt

SEQ ID NO: 903477 - DNA, 15 bp, Homo sapiens
ctttcacaagtgttc

SEQ ID NO: 903478 - DNA, 15 bp, Homo sapiens
tttcacaagtgttcc

SEQ ID NO: 903479 - DNA, 15 bp, Homo sapiens
ttcacaagtgttccc

SEQ ID NO: 903480 - DNA, 15 bp, Homo sapiens
tcacaagtgttccca

SEQ ID NO: 903481 - DNA, 15 bp, Homo sapiens
cacaagtgttcccaa

SEQ ID NO: 903482 - DNA, 15 bp, Homo sapiens
acaagtgttcccaaa

SEQ ID NO: 903483 - DNA, 15 bp, Homo sapiens
caagtgttcccaaac

SEQ ID NO: 903484 - DNA, 15 bp, Homo sapiens
aagtgttcccaaacc

SEQ ID NO: 903485 - DNA, 15 bp, Homo sapiens
agtgttcccaaacca

SEQ ID NO: 903486 - DNA, 15 bp, Homo sapiens
gtgttcccaaaccat

SEQ ID NO: 903487 - DNA, 15 bp, Homo sapiens
tgttcccaaaccatg

SEQ ID NO: 903488 - DNA, 15 bp, Homo sapiens
gttcccaaaccatgg

SEQ ID NO: 903489 - DNA, 15 bp, Homo sapiens
ttcccaaaccatggg

SEQ ID NO: 903490 - DNA, 15 bp, Homo sapiens
tcccaaaccatgggt

SEQ ID NO: 903491 - DNA, 15 bp, Homo sapiens
cccaaaccatgggtt

SEQ ID NO: 903492 - DNA, 15 bp, Homo sapiens
ccaaaccatgggttt

SEQ ID NO: 903493 - DNA, 15 bp, Homo sapiens
caaaccatgggttta

SEQ ID NO: 903494 - DNA, 15 bp, Homo sapiens
aaaccatgggtttaa

SEQ ID NO: 903495 - DNA, 15 bp, Homo sapiens
aaccatgggtttaat

SEQ ID NO: 903496 - DNA, 15 bp, Homo sapiens
accatgggtttaatc

SEQ ID NO: 903497 - DNA, 15 bp, Homo sapiens
ccatgggtttaatca

SEQ ID NO: 903498 - DNA, 15 bp, Homo sapiens
catgggtttaatcat

SEQ ID NO: 903499 - DNA, 15 bp, Homo sapiens
atgggtttaatcatg

SEQ ID NO: 903500 - DNA, 15 bp, Homo sapiens
tgggtttaatcatgc

SEQ ID NO: 903501 - DNA, 15 bp, Homo sapiens
gggtttaatcatgcg

SEQ ID NO: 903502 - DNA, 15 bp, Homo sapiens
ggtttaatcatgcgc

SEQ ID NO: 903503 - DNA, 15 bp, Homo sapiens
gtttaatcatgcgct

SEQ ID NO: 903504 - DNA, 15 bp, Homo sapiens
tttaatcatgcgctc

SEQ ID NO: 903505 - DNA, 15 bp, Homo sapiens
ttaatcatgcgctct

SEQ ID NO: 903506 - DNA, 15 bp, Homo sapiens
taatcatgcgctcta

SEQ ID NO: 903507 - DNA, 15 bp, Homo sapiens
aatcatgcgctctag

SEQ ID NO: 903508 - DNA, 15 bp, Homo sapiens
atcatgcgctctaga

SEQ ID NO: 903509 - DNA, 15 bp, Homo sapiens
tcatgcgctctagaa

SEQ ID NO: 903510 - DNA, 15 bp, Homo sapiens
catgcgctctagaat

SEQ ID NO: 903511 - DNA, 15 bp, Homo sapiens
atgcgctctagaatt

SEQ ID NO: 903512 - DNA, 15 bp, Homo sapiens
tgcgctctagaattt

SEQ ID NO: 903513 - DNA, 15 bp, Homo sapiens
gcgctctagaatttg

SEQ ID NO: 903514 - DNA, 15 bp, Homo sapiens
cgctctagaatttgt

SEQ ID NO: 903515 - DNA, 15 bp, Homo sapiens
gctctagaatttgtc

SEQ ID NO: 903516 - DNA, 15 bp, Homo sapiens
ctctagaatttgtcc

SEQ ID NO: 903517 - DNA, 15 bp, Homo sapiens
tctagaatttgtcca

SEQ ID NO: 903518 - DNA, 15 bp, Homo sapiens
ctagaatttgtccag

SEQ ID NO: 903519 - DNA, 15 bp, Homo sapiens
tagaatttgtccagg

SEQ ID NO: 903520 - DNA, 15 bp, Homo sapiens
agaatttgtccagga

SEQ ID NO: 903521 - DNA, 15 bp, Homo sapiens
gaatttgtccaggag

SEQ ID NO: 903522 - DNA, 15 bp, Homo sapiens
aatttgtccaggagt

SEQ ID NO: 903523 - DNA, 15 bp, Homo sapiens
atttgtccaggagtt

SEQ ID NO: 903524 - DNA, 15 bp, Homo sapiens
tttgtccaggagttg

SEQ ID NO: 903525 - DNA, 15 bp, Homo sapiens
ttgtccaggagttga

SEQ ID NO: 903526 - DNA, 15 bp, Homo sapiens
tgtccaggagttgac

SEQ ID NO: 903527 - DNA, 15 bp, Homo sapiens
gtccaggagttgaca

SEQ ID NO: 903528 - DNA, 15 bp, Homo sapiens
tccaggagttgacag

SEQ ID NO: 903529 - DNA, 15 bp, Homo sapiens
ccaggagttgacagc

SEQ ID NO: 903530 - DNA, 15 bp, Homo sapiens
caggagttgacagca

SEQ ID NO: 903531 - DNA, 15 bp, Homo sapiens
aggagttgacagcat

SEQ ID NO: 903532 - DNA, 15 bp, Homo sapiens
ggagttgacagcatg

SEQ ID NO: 903533 - DNA, 15 bp, Homo sapiens
gagttgacagcatgc

SEQ ID NO: 903534 - DNA, 15 bp, Homo sapiens
agttgacagcatgct

SEQ ID NO: 903535 - DNA, 15 bp, Homo sapiens
gttgacagcatgctt

SEQ ID NO: 903536 - DNA, 15 bp, Homo sapiens
ttgacagcatgcttg

SEQ ID NO: 903537 - DNA, 15 bp, Homo sapiens
tgacagcatgcttgc

SEQ ID NO: 903538 - DNA, 15 bp, Homo sapiens
gacagcatgcttgct

SEQ ID NO: 903539 - DNA, 15 bp, Homo sapiens
acagcatgcttgctt

SEQ ID NO: 903540 - DNA, 15 bp, Homo sapiens
cagcatgcttgctta

SEQ ID NO: 903541 - DNA, 15 bp, Homo sapiens
agcatgcttgcttac

SEQ ID NO: 903542 - DNA, 15 bp, Homo sapiens
gcatgcttgcttaca

SEQ ID NO: 903543 - DNA, 15 bp, Homo sapiens
catgcttgcttacat

SEQ ID NO: 903544 - DNA, 15 bp, Homo sapiens
atgcttgcttacata

SEQ ID NO: 903545 - DNA, 15 bp, Homo sapiens
tgcttgcttacatat

SEQ ID NO: 903546 - DNA, 15 bp, Homo sapiens
gcttgcttacatatt

SEQ ID NO: 903547 - DNA, 15 bp, Homo sapiens
cttgcttacatattg

SEQ ID NO: 903548 - DNA, 15 bp, Homo sapiens
ttgcttacatattgc

SEQ ID NO: 903549 - DNA, 15 bp, Homo sapiens
tgcttacatattgcc

SEQ ID NO: 903550 - DNA, 15 bp, Homo sapiens
gcttacatattgcct

SEQ ID NO: 903551 - DNA, 15 bp, Homo sapiens
cttacatattgcctc

SEQ ID NO: 903552 - DNA, 15 bp, Homo sapiens
ttacatattgcctca

SEQ ID NO: 903553 - DNA, 15 bp, Homo sapiens
tacatattgcctcag

SEQ ID NO: 903554 - DNA, 15 bp, Homo sapiens
acatattgcctcaga

SEQ ID NO: 903555 - DNA, 15 bp, Homo sapiens
catattgcctcagag

SEQ ID NO: 903556 - DNA, 15 bp, Homo sapiens
atattgcctcagagt

SEQ ID NO: 903557 - DNA, 15 bp, Homo sapiens
tattgcctcagagtc

SEQ ID NO: 903558 - DNA, 15 bp, Homo sapiens
attgcctcagagtcc

SEQ ID NO: 903559 - DNA, 15 bp, Homo sapiens
ttgcctcagagtcct

SEQ ID NO: 903560 - DNA, 15 bp, Homo sapiens
tgcctcagagtcctc

SEQ ID NO: 903561 - DNA, 15 bp, Homo sapiens
gcctcagagtcctct

SEQ ID NO: 903562 - DNA, 15 bp, Homo sapiens
cctcagagtcctctt

SEQ ID NO: 903563 - DNA, 15 bp, Homo sapiens
ctcagagtcctcttt

SEQ ID NO: 903564 - DNA, 15 bp, Homo sapiens
tcagagtcctctttt

SEQ ID NO: 903565 - DNA, 15 bp, Homo sapiens
cagagtcctctttta

SEQ ID NO: 903566 - DNA, 15 bp, Homo sapiens
agagtcctcttttac

SEQ ID NO: 903567 - DNA, 15 bp, Homo sapiens
gagtcctcttttact

SEQ ID NO: 903568 - DNA, 15 bp, Homo sapiens
agtcctcttttacta

SEQ ID NO: 903569 - DNA, 15 bp, Homo sapiens
gtcctcttttactat

SEQ ID NO: 903570 - DNA, 15 bp, Homo sapiens
tcctcttttactatc

SEQ ID NO: 903571 - DNA, 15 bp, Homo sapiens
cctcttttactatcg

SEQ ID NO: 903572 - DNA, 15 bp, Homo sapiens
ctcttttactatcgt

SEQ ID NO: 903573 - DNA, 15 bp, Homo sapiens
tcttttactatcgtt

SEQ ID NO: 903574 - DNA, 15 bp, Homo sapiens
cttttactatcgtta

SEQ ID NO: 903575 - DNA, 15 bp, Homo sapiens
ttttactatcgttaa

SEQ ID NO: 903576 - DNA, 15 bp, Homo sapiens
tttactatcgttaac

SEQ ID NO: 903577 - DNA, 15 bp, Homo sapiens
ttactatcgttaact

SEQ ID NO: 903578 - DNA, 15 bp, Homo sapiens
tactatcgttaacta

SEQ ID NO: 903579 - DNA, 15 bp, Homo sapiens
actatcgttaactaa

SEQ ID NO: 903580 - DNA, 15 bp, Homo sapiens
ctatcgttaactaaa

SEQ ID NO: 903581 - DNA, 15 bp, Homo sapiens
tatcgttaactaaac

SEQ ID NO: 903582 - DNA, 15 bp, Homo sapiens
atcgttaactaaact

SEQ ID NO: 903583 - DNA, 15 bp, Homo sapiens
tcgttaactaaactt

SEQ ID NO: 903584 - DNA, 15 bp, Homo sapiens
cgttaactaaactta

SEQ ID NO: 903585 - DNA, 15 bp, Homo sapiens
gttaactaaacttag

SEQ ID NO: 903586 - DNA, 15 bp, Homo sapiens
ttaactaaacttagg

SEQ ID NO: 903587 - DNA, 15 bp, Homo sapiens
taactaaacttaggc

SEQ ID NO: 903588 - DNA, 15 bp, Homo sapiens
aactaaacttaggcc

SEQ ID NO: 903589 - DNA, 15 bp, Homo sapiens
actaaacttaggcca

SEQ ID NO: 903590 - DNA, 15 bp, Homo sapiens
ctaaacttaggccat

SEQ ID NO: 903591 - DNA, 15 bp, Homo sapiens
taaacttaggccatg

SEQ ID NO: 903592 - DNA, 15 bp, Homo sapiens
aaacttaggccatgt

SEQ ID NO: 903593 - DNA, 15 bp, Homo sapiens
aacttaggccatgtc

SEQ ID NO: 903594 - DNA, 15 bp, Homo sapiens
acttaggccatgtca

SEQ ID NO: 903595 - DNA, 15 bp, Homo sapiens
cttaggccatgtcat

SEQ ID NO: 903596 - DNA, 15 bp, Homo sapiens
ttaggccatgtcata

SEQ ID NO: 903597 - DNA, 15 bp, Homo sapiens
taggccatgtcatac

SEQ ID NO: 903598 - DNA, 15 bp, Homo sapiens
aggccatgtcatacc

SEQ ID NO: 903599 - DNA, 15 bp, Homo sapiens
ggccatgtcatacct

SEQ ID NO: 903600 - DNA, 15 bp, Homo sapiens
gccatgtcatacctt

SEQ ID NO: 903601 - DNA, 15 bp, Homo sapiens
ccatgtcataccttc

SEQ ID NO: 903602 - DNA, 15 bp, Homo sapiens
catgtcataccttct

SEQ ID NO: 903603 - DNA, 15 bp, Homo sapiens
atgtcataccttctt

SEQ ID NO: 903604 - DNA, 15 bp, Homo sapiens
tgtcataccttcttg

SEQ ID NO: 903605 - DNA, 15 bp, Homo sapiens
gtcataccttcttgg

SEQ ID NO: 903606 - DNA, 15 bp, Homo sapiens
tcataccttcttggc

SEQ ID NO: 903607 - DNA, 15 bp, Homo sapiens
cataccttcttggca

SEQ ID NO: 903608 - DNA, 15 bp, Homo sapiens
ataccttcttggcac

SEQ ID NO: 903609 - DNA, 15 bp, Homo sapiens
taccttcttggcacc

SEQ ID NO: 903610 - DNA, 15 bp, Homo sapiens
accttcttggcacct

SEQ ID NO: 903611 - DNA, 15 bp, Homo sapiens
ccttcttggcaccta

SEQ ID NO: 903612 - DNA, 15 bp, Homo sapiens
cttcttggcacctaa

SEQ ID NO: 903613 - DNA, 15 bp, Homo sapiens
ttcttggcacctaac

SEQ ID NO: 903614 - DNA, 15 bp, Homo sapiens
tcttggcacctaact

SEQ ID NO: 903615 - DNA, 15 bp, Homo sapiens
cttggcacctaacta

SEQ ID NO: 903616 - DNA, 15 bp, Homo sapiens
ttggcacctaactaa

SEQ ID NO: 903617 - DNA, 15 bp, Homo sapiens
tggcacctaactaaa

SEQ ID NO: 903618 - DNA, 15 bp, Homo sapiens
ggcacctaactaaat

SEQ ID NO: 903619 - DNA, 15 bp, Homo sapiens
gcacctaactaaatt

SEQ ID NO: 903620 - DNA, 15 bp, Homo sapiens
cacctaactaaattt

SEQ ID NO: 903621 - DNA, 15 bp, Homo sapiens
acctaactaaatttt

SEQ ID NO: 903622 - DNA, 15 bp, Homo sapiens
cctaactaaattttc

SEQ ID NO: 903623 - DNA, 15 bp, Homo sapiens
ctaactaaattttct

SEQ ID NO: 903624 - DNA, 15 bp, Homo sapiens
taactaaattttctg

SEQ ID NO: 903625 - DNA, 15 bp, Homo sapiens
aactaaattttctgt

SEQ ID NO: 903626 - DNA, 15 bp, Homo sapiens
actaaattttctgtg

SEQ ID NO: 903627 - DNA, 15 bp, Homo sapiens
ctaaattttctgtgg

SEQ ID NO: 903628 - DNA, 15 bp, Homo sapiens
taaattttctgtggc

SEQ ID NO: 903629 - DNA, 15 bp, Homo sapiens
aaattttctgtggct

SEQ ID NO: 903630 - DNA, 15 bp, Homo sapiens
aattttctgtggctc

SEQ ID NO: 903631 - DNA, 15 bp, Homo sapiens
attttctgtggctcc

SEQ ID NO: 903632 - DNA, 15 bp, Homo sapiens
ttttctgtggctcca

SEQ ID NO: 903633 - DNA, 15 bp, Homo sapiens
tttctgtggctccac

SEQ ID NO: 903634 - DNA, 15 bp, Homo sapiens
ttctgtggctccact

SEQ ID NO: 903635 - DNA, 15 bp, Homo sapiens
tctgtggctccactg

SEQ ID NO: 903636 - DNA, 15 bp, Homo sapiens
ctgtggctccactgg

SEQ ID NO: 903637 - DNA, 15 bp, Homo sapiens
tgtggctccactggt

SEQ ID NO: 903638 - DNA, 15 bp, Homo sapiens
gtggctccactggtc

SEQ ID NO: 903639 - DNA, 15 bp, Homo sapiens
tggctccactggtca

SEQ ID NO: 903640 - DNA, 15 bp, Homo sapiens
ggctccactggtcat

SEQ ID NO: 903641 - DNA, 15 bp, Homo sapiens
gctccactggtcatg

SEQ ID NO: 903642 - DNA, 15 bp, Homo sapiens
ctccactggtcatga

SEQ ID NO: 903643 - DNA, 15 bp, Homo sapiens
tccactggtcatgat

SEQ ID NO: 903644 - DNA, 15 bp, Homo sapiens
ccactggtcatgatc

SEQ ID NO: 903645 - DNA, 15 bp, Homo sapiens
cactggtcatgatcc

SEQ ID NO: 903646 - DNA, 15 bp, Homo sapiens
actggtcatgatccc

SEQ ID NO: 903647 - DNA, 15 bp, Homo sapiens
ctggtcatgatccct

SEQ ID NO: 903648 - DNA, 15 bp, Homo sapiens
tggtcatgatccctc

SEQ ID NO: 903649 - DNA, 15 bp, Homo sapiens
ggtcatgatccctca

SEQ ID NO: 903650 - DNA, 15 bp, Homo sapiens
gtcatgatccctcat

SEQ ID NO: 903651 - DNA, 15 bp, Homo sapiens
tcatgatccctcatt

SEQ ID NO: 903652 - DNA, 15 bp, Homo sapiens
catgatccctcattc

SEQ ID NO: 903653 - DNA, 15 bp, Homo sapiens
atgatccctcattcc

SEQ ID NO: 903654 - DNA, 15 bp, Homo sapiens
tgatccctcattccc

SEQ ID NO: 903655 - DNA, 15 bp, Homo sapiens
gatccctcattcccc

SEQ ID NO: 903656 - DNA, 15 bp, Homo sapiens
atccctcattcccct

SEQ ID NO: 903657 - DNA, 15 bp, Homo sapiens
tccctcattcccctc

SEQ ID NO: 903658 - DNA, 15 bp, Homo sapiens
ccctcattcccctct

SEQ ID NO: 903659 - DNA, 15 bp, Homo sapiens
cctcattcccctctg

SEQ ID NO: 903660 - DNA, 15 bp, Homo sapiens
ctcattcccctctgt

SEQ ID NO: 903661 - DNA, 15 bp, Homo sapiens
tcattcccctctgtt

SEQ ID NO: 903662 - DNA, 15 bp, Homo sapiens
cattcccctctgttg

SEQ ID NO: 903663 - DNA, 15 bp, Homo sapiens
attcccctctgttgt

SEQ ID NO: 903664 - DNA, 15 bp, Homo sapiens
ttcccctctgttgtt

SEQ ID NO: 903665 - DNA, 15 bp, Homo sapiens
tcccctctgttgttt

SEQ ID NO: 903666 - DNA, 15 bp, Homo sapiens
cccctctgttgtttc

SEQ ID NO: 903667 - DNA, 15 bp, Homo sapiens
ccctctgttgtttct

SEQ ID NO: 903668 - DNA, 15 bp, Homo sapiens
cctctgttgtttctt

SEQ ID NO: 903669 - DNA, 15 bp, Homo sapiens
ctctgttgtttcttt

SEQ ID NO: 903670 - DNA, 15 bp, Homo sapiens
tctgttgtttctttc

SEQ ID NO: 903671 - DNA, 15 bp, Homo sapiens
ctgttgtttctttcc

SEQ ID NO: 903672 - DNA, 15 bp, Homo sapiens
tgttgtttctttcca

SEQ ID NO: 903673 - DNA, 15 bp, Homo sapiens
gttgtttctttccaa

SEQ ID NO: 903674 - DNA, 15 bp, Homo sapiens
ttgtttctttccaac

SEQ ID NO: 903675 - DNA, 15 bp, Homo sapiens
tgtttctttccaacc

SEQ ID NO: 903676 - DNA, 15 bp, Homo sapiens
gtttctttccaaccc

SEQ ID NO: 903677 - DNA, 15 bp, Homo sapiens
tttctttccaaccct

SEQ ID NO: 903678 - DNA, 15 bp, Homo sapiens
ttctttccaaccctt

SEQ ID NO: 903679 - DNA, 15 bp, Homo sapiens
tctttccaacccttc

SEQ ID NO: 903680 - DNA, 15 bp, Homo sapiens
ctttccaacccttct

SEQ ID NO: 903681 - DNA, 15 bp, Homo sapiens
tttccaacccttctg

SEQ ID NO: 903682 - DNA, 15 bp, Homo sapiens
ttccaacccttctga

SEQ ID NO: 903683 - DNA, 15 bp, Homo sapiens
tccaacccttctgaa

SEQ ID NO: 903684 - DNA, 15 bp, Homo sapiens
ccaacccttctgaat

SEQ ID NO: 903685 - DNA, 15 bp, Homo sapiens
caacccttctgaatt

SEQ ID NO: 903686 - DNA, 15 bp, Homo sapiens
aacccttctgaattg

SEQ ID NO: 903687 - DNA, 15 bp, Homo sapiens
acccttctgaattga

SEQ ID NO: 903688 - DNA, 15 bp, Homo sapiens
cccttctgaattgaa

SEQ ID NO: 903689 - DNA, 15 bp, Homo sapiens
ccttctgaattgaaa

SEQ ID NO: 903690 - DNA, 15 bp, Homo sapiens
cttctgaattgaaat

SEQ ID NO: 903691 - DNA, 15 bp, Homo sapiens
ttctgaattgaaatc

SEQ ID NO: 903692 - DNA, 15 bp, Homo sapiens
tctgaattgaaatcc

SEQ ID NO: 903693 - DNA, 15 bp, Homo sapiens
ctgaattgaaatccc

SEQ ID NO: 903694 - DNA, 15 bp, Homo sapiens
tgaattgaaatcccc

SEQ ID NO: 903695 - DNA, 15 bp, Homo sapiens
gaattgaaatcccct

SEQ ID NO: 903696 - DNA, 15 bp, Homo sapiens
aattgaaatcccctc

SEQ ID NO: 903697 - DNA, 15 bp, Homo sapiens
attgaaatcccctca

SEQ ID NO: 903698 - DNA, 15 bp, Homo sapiens
ttgaaatcccctcag

SEQ ID NO: 903699 - DNA, 15 bp, Homo sapiens
tgaaatcccctcagc

SEQ ID NO: 903700 - DNA, 15 bp, Homo sapiens
gaaatcccctcagcc

SEQ ID NO: 903701 - DNA, 15 bp, Homo sapiens
aaatcccctcagcca

SEQ ID NO: 903702 - DNA, 15 bp, Homo sapiens
aatcccctcagccac

SEQ ID NO: 903703 - DNA, 15 bp, Homo sapiens
atcccctcagccaca

SEQ ID NO: 903704 - DNA, 15 bp, Homo sapiens
tcccctcagccacaa

SEQ ID NO: 903705 - DNA, 15 bp, Homo sapiens
cccctcagccacaag

SEQ ID NO: 903706 - DNA, 15 bp, Homo sapiens
ccctcagccacaagc

SEQ ID NO: 903707 - DNA, 15 bp, Homo sapiens
cctcagccacaagcc

SEQ ID NO: 903708 - DNA, 15 bp, Homo sapiens
ctcagccacaagcca

SEQ ID NO: 903709 - DNA, 15 bp, Homo sapiens
tcagccacaagccag

SEQ ID NO: 903710 - DNA, 15 bp, Homo sapiens
cagccacaagccaga

SEQ ID NO: 903711 - DNA, 15 bp, Homo sapiens
agccacaagccagaa

SEQ ID NO: 903712 - DNA, 15 bp, Homo sapiens
gccacaagccagaac

SEQ ID NO: 903713 - DNA, 15 bp, Homo sapiens
ccacaagccagaacc

SEQ ID NO: 903714 - DNA, 15 bp, Homo sapiens
cacaagccagaaccc

SEQ ID NO: 903715 - DNA, 15 bp, Homo sapiens
acaagccagaacccc

SEQ ID NO: 903716 - DNA, 15 bp, Homo sapiens
caagccagaaccccg

SEQ ID NO: 903717 - DNA, 15 bp, Homo sapiens
aagccagaaccccgc

SEQ ID NO: 903718 - DNA, 15 bp, Homo sapiens
agccagaaccccgct

SEQ ID NO: 903719 - DNA, 15 bp, Homo sapiens
gccagaaccccgctg

SEQ ID NO: 903720 - DNA, 15 bp, Homo sapiens
ccagaaccccgctgg

SEQ ID NO: 903721 - DNA, 15 bp, Homo sapiens
cagaaccccgctggt

SEQ ID NO: 903722 - DNA, 15 bp, Homo sapiens
agaaccccgctggtt

SEQ ID NO: 903723 - DNA, 15 bp, Homo sapiens
gaaccccgctggttt

SEQ ID NO: 903724 - DNA, 15 bp, Homo sapiens
aaccccgctggtttg

SEQ ID NO: 903725 - DNA, 15 bp, Homo sapiens
accccgctggtttga

SEQ ID NO: 903726 - DNA, 15 bp, Homo sapiens
ccccgctggtttgaa

SEQ ID NO: 903727 - DNA, 15 bp, Homo sapiens
cccgctggtttgaag

SEQ ID NO: 903728 - DNA, 15 bp, Homo sapiens
ccgctggtttgaagc

SEQ ID NO: 903729 - DNA, 15 bp, Homo sapiens
cgctggtttgaagca

SEQ ID NO: 903730 - DNA, 15 bp, Homo sapiens
gctggtttgaagcag

SEQ ID NO: 903731 - DNA, 15 bp, Homo sapiens
ctggtttgaagcagt

SEQ ID NO: 903732 - DNA, 15 bp, Homo sapiens
tggtttgaagcagtc

SEQ ID NO: 903733 - DNA, 15 bp, Homo sapiens
ggtttgaagcagtct

SEQ ID NO: 903734 - DNA, 15 bp, Homo sapiens
gtttgaagcagtctg

SEQ ID NO: 903735 - DNA, 15 bp, Homo sapiens
tttgaagcagtctga

SEQ ID NO: 903736 - DNA, 15 bp, Homo sapiens
ttgaagcagtctgag

SEQ ID NO: 903737 - DNA, 15 bp, Homo sapiens
tgaagcagtctgagc

SEQ ID NO: 903738 - DNA, 15 bp, Homo sapiens
gaagcagtctgagct

SEQ ID NO: 903739 - DNA, 15 bp, Homo sapiens
aagcagtctgagctg

SEQ ID NO: 903740 - DNA, 15 bp, Homo sapiens
agcagtctgagctgt

SEQ ID NO: 903741 - DNA, 15 bp, Homo sapiens
gcagtctgagctgtg

SEQ ID NO: 903742 - DNA, 15 bp, Homo sapiens
cagtctgagctgtgg

SEQ ID NO: 903743 - DNA, 15 bp, Homo sapiens
agtctgagctgtggg

SEQ ID NO: 903744 - DNA, 15 bp, Homo sapiens
gtctgagctgtggga

SEQ ID NO: 903745 - DNA, 15 bp, Homo sapiens
tctgagctgtgggag

SEQ ID NO: 903746 - DNA, 15 bp, Homo sapiens
ctgagctgtgggagg

SEQ ID NO: 903747 - DNA, 15 bp, Homo sapiens
tgagctgtgggagga

SEQ ID NO: 903748 - DNA, 15 bp, Homo sapiens
gagctgtgggaggag

SEQ ID NO: 903749 - DNA, 15 bp, Homo sapiens
agctgtgggaggaga

SEQ ID NO: 903750 - DNA, 15 bp, Homo sapiens
gctgtgggaggagat

SEQ ID NO: 903751 - DNA, 15 bp, Homo sapiens
ctgtgggaggagatc

SEQ ID NO: 903752 - DNA, 15 bp, Homo sapiens
tgtgggaggagatcc

SEQ ID NO: 903753 - DNA, 15 bp, Homo sapiens
gtgggaggagatcct

SEQ ID NO: 903754 - DNA, 15 bp, Homo sapiens
tgggaggagatcctg

SEQ ID NO: 903755 - DNA, 15 bp, Homo sapiens
gggaggagatcctga

SEQ ID NO: 903756 - DNA, 15 bp, Homo sapiens
ggaggagatcctgac

SEQ ID NO: 903757 - DNA, 15 bp, Homo sapiens
gaggagatcctgacc

SEQ ID NO: 903758 - DNA, 15 bp, Homo sapiens
aggagatcctgacct

SEQ ID NO: 903759 - DNA, 15 bp, Homo sapiens
ggagatcctgacctc

SEQ ID NO: 903760 - DNA, 15 bp, Homo sapiens
gagatcctgacctca

SEQ ID NO: 903761 - DNA, 15 bp, Homo sapiens
agatcctgacctcac

SEQ ID NO: 903762 - DNA, 15 bp, Homo sapiens
gatcctgacctcaca

SEQ ID NO: 903763 - DNA, 15 bp, Homo sapiens
atcctgacctcacag

SEQ ID NO: 903764 - DNA, 15 bp, Homo sapiens
tcctgacctcacagg

SEQ ID NO: 903765 - DNA, 15 bp, Homo sapiens
cctgacctcacagga

SEQ ID NO: 903766 - DNA, 15 bp, Homo sapiens
ctgacctcacaggag

SEQ ID NO: 903767 - DNA, 15 bp, Homo sapiens
tgacctcacaggagc

SEQ ID NO: 903768 - DNA, 15 bp, Homo sapiens
gacctcacaggagcc

SEQ ID NO: 903769 - DNA, 15 bp, Homo sapiens
acctcacaggagcct

SEQ ID NO: 903770 - DNA, 15 bp, Homo sapiens
cctcacaggagcctc

SEQ ID NO: 903771 - DNA, 15 bp, Homo sapiens
ctcacaggagcctct

SEQ ID NO: 903772 - DNA, 15 bp, Homo sapiens
tcacaggagcctctc

SEQ ID NO: 903773 - DNA, 15 bp, Homo sapiens
cacaggagcctctca

SEQ ID NO: 903774 - DNA, 15 bp, Homo sapiens
acaggagcctctcag

SEQ ID NO: 903775 - DNA, 15 bp, Homo sapiens
caggagcctctcagc

SEQ ID NO: 903776 - DNA, 15 bp, Homo sapiens
aggagcctctcagcc

SEQ ID NO: 903777 - DNA, 15 bp, Homo sapiens
ggagcctctcagcca

SEQ ID NO: 903778 - DNA, 15 bp, Homo sapiens
gagcctctcagccat

SEQ ID NO: 903779 - DNA, 15 bp, Homo sapiens
agcctctcagccatg

SEQ ID NO: 903780 - DNA, 15 bp, Homo sapiens
gcctctcagccatgc

SEQ ID NO: 903781 - DNA, 15 bp, Homo sapiens
cctctcagccatgct

SEQ ID NO: 903782 - DNA, 15 bp, Homo sapiens
ctctcagccatgctg

SEQ ID NO: 903783 - DNA, 15 bp, Homo sapiens
tctcagccatgctgg

SEQ ID NO: 903784 - DNA, 15 bp, Homo sapiens
ctcagccatgctggg

SEQ ID NO: 903785 - DNA, 15 bp, Homo sapiens
tcagccatgctgggc

SEQ ID NO: 903786 - DNA, 15 bp, Homo sapiens
cagccatgctgggcc

SEQ ID NO: 903787 - DNA, 15 bp, Homo sapiens
agccatgctgggcca

SEQ ID NO: 903788 - DNA, 15 bp, Homo sapiens
gccatgctgggccat

SEQ ID NO: 903789 - DNA, 15 bp, Homo sapiens
ccatgctgggccatt

SEQ ID NO: 903790 - DNA, 15 bp, Homo sapiens
catgctgggccattg

SEQ ID NO: 903791 - DNA, 15 bp, Homo sapiens
atgctgggccattgc

SEQ ID NO: 903792 - DNA, 15 bp, Homo sapiens
tgctgggccattgcg

SEQ ID NO: 903793 - DNA, 15 bp, Homo sapiens
gctgggccattgcgc

SEQ ID NO: 903794 - DNA, 15 bp, Homo sapiens
ctgggccattgcgcc

SEQ ID NO: 903795 - DNA, 15 bp, Homo sapiens
tgggccattgcgccc

SEQ ID NO: 903796 - DNA, 15 bp, Homo sapiens
gggccattgcgccca

SEQ ID NO: 903797 - DNA, 15 bp, Homo sapiens
ggccattgcgcccag

SEQ ID NO: 903798 - DNA, 15 bp, Homo sapiens
gccattgcgcccagg

SEQ ID NO: 903799 - DNA, 15 bp, Homo sapiens
ccattgcgcccaggt

SEQ ID NO: 903800 - DNA, 15 bp, Homo sapiens
cattgcgcccaggtc

SEQ ID NO: 903801 - DNA, 15 bp, Homo sapiens
attgcgcccaggtct

SEQ ID NO: 903802 - DNA, 15 bp, Homo sapiens
ttgcgcccaggtctc

SEQ ID NO: 903803 - DNA, 15 bp, Homo sapiens
tgcgcccaggtctca

SEQ ID NO: 903804 - DNA, 15 bp, Homo sapiens
gcgcccaggtctcag

SEQ ID NO: 903805 - DNA, 15 bp, Homo sapiens
cgcccaggtctcagg

SEQ ID NO: 903806 - DNA, 15 bp, Homo sapiens
gcccaggtctcaggt

SEQ ID NO: 903807 - DNA, 15 bp, Homo sapiens
cccaggtctcaggtc

SEQ ID NO: 903808 - DNA, 15 bp, Homo sapiens
ccaggtctcaggtct

SEQ ID NO: 903809 - DNA, 15 bp, Homo sapiens
caggtctcaggtctc

SEQ ID NO: 903810 - DNA, 15 bp, Homo sapiens
aggtctcaggtctcc

SEQ ID NO: 903811 - DNA, 15 bp, Homo sapiens
ggtctcaggtctccc

SEQ ID NO: 903812 - DNA, 15 bp, Homo sapiens
gtctcaggtctccct

SEQ ID NO: 903813 - DNA, 15 bp, Homo sapiens
tctcaggtctccctc

SEQ ID NO: 903814 - DNA, 15 bp, Homo sapiens
ctcaggtctccctcc

SEQ ID NO: 903815 - DNA, 15 bp, Homo sapiens
tcaggtctccctcct

SEQ ID NO: 903816 - DNA, 15 bp, Homo sapiens
caggtctccctcctt

SEQ ID NO: 903817 - DNA, 15 bp, Homo sapiens
aggtctccctccttg

SEQ ID NO: 903818 - DNA, 15 bp, Homo sapiens
ggtctccctccttga

SEQ ID NO: 903819 - DNA, 15 bp, Homo sapiens
gtctccctccttgag

SEQ ID NO: 903820 - DNA, 15 bp, Homo sapiens
tctccctccttgagg

SEQ ID NO: 903821 - DNA, 15 bp, Homo sapiens
ctccctccttgaggg

SEQ ID NO: 903822 - DNA, 15 bp, Homo sapiens
tccctccttgaggga

SEQ ID NO: 903823 - DNA, 15 bp, Homo sapiens
ccctccttgagggac

SEQ ID NO: 903824 - DNA, 15 bp, Homo sapiens
cctccttgagggaca

SEQ ID NO: 903825 - DNA, 15 bp, Homo sapiens
ctccttgagggacag

SEQ ID NO: 903826 - DNA, 15 bp, Homo sapiens
tccttgagggacaga

SEQ ID NO: 903827 - DNA, 15 bp, Homo sapiens
ccttgagggacagat

SEQ ID NO: 903828 - DNA, 15 bp, Homo sapiens
cttgagggacagatg

SEQ ID NO: 903829 - DNA, 15 bp, Homo sapiens
ttgagggacagatgg

SEQ ID NO: 903830 - DNA, 15 bp, Homo sapiens
tgagggacagatggg

SEQ ID NO: 903831 - DNA, 15 bp, Homo sapiens
gagggacagatggga

SEQ ID NO: 903832 - DNA, 15 bp, Homo sapiens
agggacagatgggag

SEQ ID NO: 903833 - DNA, 15 bp, Homo sapiens
gggacagatgggagc

SEQ ID NO: 903834 - DNA, 15 bp, Homo sapiens
ggacagatgggagca

SEQ ID NO: 903835 - DNA, 15 bp, Homo sapiens
gacagatgggagcaa

SEQ ID NO: 903836 - DNA, 15 bp, Homo sapiens
acagatgggagcaaa

SEQ ID NO: 903837 - DNA, 15 bp, Homo sapiens
cagatgggagcaaaa

SEQ ID NO: 903838 - DNA, 15 bp, Homo sapiens
agatgggagcaaaaa

SEQ ID NO: 903839 - DNA, 15 bp, Homo sapiens
gatgggagcaaaaac

SEQ ID NO: 903840 - DNA, 15 bp, Homo sapiens
atgggagcaaaaaca

SEQ ID NO: 903841 - DNA, 15 bp, Homo sapiens
tgggagcaaaaacaa

SEQ ID NO: 903842 - DNA, 15 bp, Homo sapiens
gggagcaaaaacaac

SEQ ID NO: 903843 - DNA, 15 bp, Homo sapiens
ggagcaaaaacaaca

SEQ ID NO: 903844 - DNA, 15 bp, Homo sapiens
gagcaaaaacaacac

SEQ ID NO: 903845 - DNA, 15 bp, Homo sapiens
agcaaaaacaacacc

SEQ ID NO: 903846 - DNA, 15 bp, Homo sapiens
gcaaaaacaacaccc

SEQ ID NO: 903847 - DNA, 15 bp, Homo sapiens
caaaaacaacaccca

SEQ ID NO: 903848 - DNA, 15 bp, Homo sapiens
aaaaacaacacccaa

SEQ ID NO: 903849 - DNA, 15 bp, Homo sapiens
aaaacaacacccaaa

SEQ ID NO: 903850 - DNA, 15 bp, Homo sapiens
aaacaacacccaaaa

SEQ ID NO: 903851 - DNA, 15 bp, Homo sapiens
aacaacacccaaaag

SEQ ID NO: 903852 - DNA, 15 bp, Homo sapiens
acaacacccaaaaga

SEQ ID NO: 903853 - DNA, 15 bp, Homo sapiens
caacacccaaaagag

SEQ ID NO: 903854 - DNA, 15 bp, Homo sapiens
aacacccaaaagaga

SEQ ID NO: 903855 - DNA, 15 bp, Homo sapiens
acacccaaaagagaa

SEQ ID NO: 903856 - DNA, 15 bp, Homo sapiens
cacccaaaagagaag

SEQ ID NO: 903857 - DNA, 15 bp, Homo sapiens
acccaaaagagaagt

SEQ ID NO: 903858 - DNA, 15 bp, Homo sapiens
cccaaaagagaagta

SEQ ID NO: 903859 - DNA, 15 bp, Homo sapiens
ccaaaagagaagtag

SEQ ID NO: 903860 - DNA, 15 bp, Homo sapiens
caaaagagaagtaga

SEQ ID NO: 903861 - DNA, 15 bp, Homo sapiens
aaaagagaagtagat

SEQ ID NO: 903862 - DNA, 15 bp, Homo sapiens
aaagagaagtagata

SEQ ID NO: 903863 - DNA, 15 bp, Homo sapiens
aagagaagtagatat

SEQ ID NO: 903864 - DNA, 15 bp, Homo sapiens
agagaagtagatatt

SEQ ID NO: 903865 - DNA, 15 bp, Homo sapiens
gagaagtagatattg

SEQ ID NO: 903866 - DNA, 15 bp, Homo sapiens
agaagtagatattgt

SEQ ID NO: 903867 - DNA, 15 bp, Homo sapiens
gaagtagatattgtt

SEQ ID NO: 903868 - DNA, 15 bp, Homo sapiens
aagtagatattgtta

SEQ ID NO: 903869 - DNA, 15 bp, Homo sapiens
agtagatattgttag

SEQ ID NO: 903870 - DNA, 15 bp, Homo sapiens
gtagatattgttagc

SEQ ID NO: 903871 - DNA, 15 bp, Homo sapiens
tagatattgttagct

SEQ ID NO: 903872 - DNA, 15 bp, Homo sapiens
agatattgttagctc

SEQ ID NO: 903873 - DNA, 15 bp, Homo sapiens
gatattgttagctct

SEQ ID NO: 903874 - DNA, 15 bp, Homo sapiens
atattgttagctctt

SEQ ID NO: 903875 - DNA, 15 bp, Homo sapiens
tattgttagctcttc

SEQ ID NO: 903876 - DNA, 15 bp, Homo sapiens
attgttagctcttcc

SEQ ID NO: 903877 - DNA, 15 bp, Homo sapiens
ttgttagctcttcca

SEQ ID NO: 903878 - DNA, 15 bp, Homo sapiens
tgttagctcttccat

SEQ ID NO: 903879 - DNA, 15 bp, Homo sapiens
gttagctcttccatc

SEQ ID NO: 903880 - DNA, 15 bp, Homo sapiens
ttagctcttccatca

SEQ ID NO: 903881 - DNA, 15 bp, Homo sapiens
tagctcttccatcag

SEQ ID NO: 903882 - DNA, 15 bp, Homo sapiens
agctcttccatcaga

SEQ ID NO: 903883 - DNA, 15 bp, Homo sapiens
gctcttccatcagat

SEQ ID NO: 903884 - DNA, 15 bp, Homo sapiens
ctcttccatcagatc

SEQ ID NO: 903885 - DNA, 15 bp, Homo sapiens
tcttccatcagatca

SEQ ID NO: 903886 - DNA, 15 bp, Homo sapiens
cttccatcagatcat

SEQ ID NO: 903887 - DNA, 15 bp, Homo sapiens
ttccatcagatcatt

SEQ ID NO: 903888 - DNA, 15 bp, Homo sapiens
tccatcagatcattc

SEQ ID NO: 903889 - DNA, 15 bp, Homo sapiens
ccatcagatcattcg

SEQ ID NO: 903890 - DNA, 15 bp, Homo sapiens
catcagatcattcgc

SEQ ID NO: 903891 - DNA, 15 bp, Homo sapiens
atcagatcattcgcc

SEQ ID NO: 903892 - DNA, 15 bp, Homo sapiens
tcagatcattcgccc

SEQ ID NO: 903893 - DNA, 15 bp, Homo sapiens
cagatcattcgcccc

SEQ ID NO: 903894 - DNA, 15 bp, Homo sapiens
agatcattcgcccca

SEQ ID NO: 903895 - DNA, 15 bp, Homo sapiens
gatcattcgccccaa

SEQ ID NO: 903896 - DNA, 15 bp, Homo sapiens
atcattcgccccaag

SEQ ID NO: 903897 - DNA, 15 bp, Homo sapiens
tcattcgccccaagc

SEQ ID NO: 903898 - DNA, 15 bp, Homo sapiens
cattcgccccaagca

SEQ ID NO: 903899 - DNA, 15 bp, Homo sapiens
attcgccccaagcag

SEQ ID NO: 903900 - DNA, 15 bp, Homo sapiens
ttcgccccaagcagc

SEQ ID NO: 903901 - DNA, 15 bp, Homo sapiens
tcgccccaagcagcc

SEQ ID NO: 903902 - DNA, 15 bp, Homo sapiens
cgccccaagcagcct

SEQ ID NO: 903903 - DNA, 15 bp, Homo sapiens
gccccaagcagcctc

SEQ ID NO: 903904 - DNA, 15 bp, Homo sapiens
ccccaagcagcctca

SEQ ID NO: 903905 - DNA, 15 bp, Homo sapiens
cccaagcagcctcag

SEQ ID NO: 903906 - DNA, 15 bp, Homo sapiens
ccaagcagcctcagc

SEQ ID NO: 903907 - DNA, 15 bp, Homo sapiens
caagcagcctcagcc

SEQ ID NO: 903908 - DNA, 15 bp, Homo sapiens
aagcagcctcagcca

SEQ ID NO: 903909 - DNA, 15 bp, Homo sapiens
agcagcctcagccac

SEQ ID NO: 903910 - DNA, 15 bp, Homo sapiens
gcagcctcagccacc

SEQ ID NO: 903911 - DNA, 15 bp, Homo sapiens
cagcctcagccacca

SEQ ID NO: 903912 - DNA, 15 bp, Homo sapiens
agcctcagccaccat

SEQ ID NO: 903913 - DNA, 15 bp, Homo sapiens
gcctcagccaccatt

SEQ ID NO: 903914 - DNA, 15 bp, Homo sapiens
cctcagccaccattt

SEQ ID NO: 903915 - DNA, 15 bp, Homo sapiens
ctcagccaccattta

SEQ ID NO: 903916 - DNA, 15 bp, Homo sapiens
tcagccaccatttat

SEQ ID NO: 903917 - DNA, 15 bp, Homo sapiens
cagccaccatttatt

SEQ ID NO: 903918 - DNA, 15 bp, Homo sapiens
agccaccatttattt

SEQ ID NO: 903919 - DNA, 15 bp, Homo sapiens
gccaccatttatttt

SEQ ID NO: 903920 - DNA, 15 bp, Homo sapiens
ccaccatttattttc

SEQ ID NO: 903921 - DNA, 15 bp, Homo sapiens
caccatttattttca

SEQ ID NO: 903922 - DNA, 15 bp, Homo sapiens
accatttattttcac

SEQ ID NO: 903923 - DNA, 15 bp, Homo sapiens
ccatttattttcact

SEQ ID NO: 903924 - DNA, 15 bp, Homo sapiens
catttattttcactc

SEQ ID NO: 903925 - DNA, 15 bp, Homo sapiens
atttattttcactct

SEQ ID NO: 903926 - DNA, 15 bp, Homo sapiens
tttattttcactctc

SEQ ID NO: 903927 - DNA, 15 bp, Homo sapiens
ttattttcactctct

SEQ ID NO: 903928 - DNA, 15 bp, Homo sapiens
tattttcactctctc

SEQ ID NO: 903929 - DNA, 15 bp, Homo sapiens
attttcactctctca

SEQ ID NO: 903930 - DNA, 15 bp, Homo sapiens
ttttcactctctcag

SEQ ID NO: 903931 - DNA, 15 bp, Homo sapiens
tttcactctctcagg

SEQ ID NO: 903932 - DNA, 15 bp, Homo sapiens
ttcactctctcagga

SEQ ID NO: 903933 - DNA, 15 bp, Homo sapiens
tcactctctcaggac

SEQ ID NO: 903934 - DNA, 15 bp, Homo sapiens
cactctctcaggact

SEQ ID NO: 903935 - DNA, 15 bp, Homo sapiens
actctctcaggactt

SEQ ID NO: 903936 - DNA, 15 bp, Homo sapiens
ctctctcaggacttg

SEQ ID NO: 903937 - DNA, 15 bp, Homo sapiens
tctctcaggacttgt

SEQ ID NO: 903938 - DNA, 15 bp, Homo sapiens
ctctcaggacttgtt

SEQ ID NO: 903939 - DNA, 15 bp, Homo sapiens
tctcaggacttgttt

SEQ ID NO: 903940 - DNA, 15 bp, Homo sapiens
ctcaggacttgtttg

SEQ ID NO: 903941 - DNA, 15 bp, Homo sapiens
tcaggacttgtttga

SEQ ID NO: 903942 - DNA, 15 bp, Homo sapiens
caggacttgtttgaa

SEQ ID NO: 903943 - DNA, 15 bp, Homo sapiens
aggacttgtttgaaa

SEQ ID NO: 903944 - DNA, 15 bp, Homo sapiens
ggacttgtttgaaag

SEQ ID NO: 903945 - DNA, 15 bp, Homo sapiens
gacttgtttgaaagg

SEQ ID NO: 903946 - DNA, 15 bp, Homo sapiens
acttgtttgaaaggc

SEQ ID NO: 903947 - DNA, 15 bp, Homo sapiens
cttgtttgaaaggcc

SEQ ID NO: 903948 - DNA, 15 bp, Homo sapiens
ttgtttgaaaggcct

SEQ ID NO: 903949 - DNA, 15 bp, Homo sapiens
tgtttgaaaggcctt

SEQ ID NO: 903950 - DNA, 15 bp, Homo sapiens
gtttgaaaggccttt

SEQ ID NO: 903951 - DNA, 15 bp, Homo sapiens
tttgaaaggcctttt

SEQ ID NO: 903952 - DNA, 15 bp, Homo sapiens
ttgaaaggccttttt

SEQ ID NO: 903953 - DNA, 15 bp, Homo sapiens
tgaaaggcctttttc

SEQ ID NO: 903954 - DNA, 15 bp, Homo sapiens
gaaaggcctttttct

SEQ ID NO: 903955 - DNA, 15 bp, Homo sapiens
aaaggcctttttctc

SEQ ID NO: 903956 - DNA, 15 bp, Homo sapiens
aaggcctttttctca

SEQ ID NO: 903957 - DNA, 15 bp, Homo sapiens
aggcctttttctcat

SEQ ID NO: 903958 - DNA, 15 bp, Homo sapiens
ggcctttttctcatg

SEQ ID NO: 903959 - DNA, 15 bp, Homo sapiens
gcctttttctcatgc

SEQ ID NO: 903960 - DNA, 15 bp, Homo sapiens
cctttttctcatgct

SEQ ID NO: 903961 - DNA, 15 bp, Homo sapiens
ctttttctcatgctt

SEQ ID NO: 903962 - DNA, 15 bp, Homo sapiens
tttttctcatgctta

SEQ ID NO: 903963 - DNA, 15 bp, Homo sapiens
ttttctcatgcttac

SEQ ID NO: 903964 - DNA, 15 bp, Homo sapiens
tttctcatgcttaca

SEQ ID NO: 903965 - DNA, 15 bp, Homo sapiens
ttctcatgcttacaa

SEQ ID NO: 903966 - DNA, 15 bp, Homo sapiens
tctcatgcttacaat

SEQ ID NO: 903967 - DNA, 15 bp, Homo sapiens
ctcatgcttacaatt

SEQ ID NO: 903968 - DNA, 15 bp, Homo sapiens
tcatgcttacaattt

SEQ ID NO: 903969 - DNA, 15 bp, Homo sapiens
catgcttacaatttt

SEQ ID NO: 903970 - DNA, 15 bp, Homo sapiens
atgcttacaattttg

SEQ ID NO: 903971 - DNA, 15 bp, Homo sapiens
tgcttacaattttgg

SEQ ID NO: 903972 - DNA, 15 bp, Homo sapiens
gcttacaattttggt

SEQ ID NO: 903973 - DNA, 15 bp, Homo sapiens
cttacaattttggtg

SEQ ID NO: 903974 - DNA, 15 bp, Homo sapiens
ttacaattttggtgg

SEQ ID NO: 903975 - DNA, 15 bp, Homo sapiens
tacaattttggtggg

SEQ ID NO: 903976 - DNA, 15 bp, Homo sapiens
acaattttggtgggt

SEQ ID NO: 903977 - DNA, 15 bp, Homo sapiens
caattttggtgggta

SEQ ID NO: 903978 - DNA, 15 bp, Homo sapiens
aattttggtgggtaa

SEQ ID NO: 903979 - DNA, 15 bp, Homo sapiens
attttggtgggtaag

SEQ ID NO: 903980 - DNA, 15 bp, Homo sapiens
ttttggtgggtaaga

SEQ ID NO: 903981 - DNA, 15 bp, Homo sapiens
tttggtgggtaagat

SEQ ID NO: 903982 - DNA, 15 bp, Homo sapiens
ttggtgggtaagata

SEQ ID NO: 903983 - DNA, 15 bp, Homo sapiens
tggtgggtaagatac

SEQ ID NO: 903984 - DNA, 15 bp, Homo sapiens
ggtgggtaagataca

SEQ ID NO: 903985 - DNA, 15 bp, Homo sapiens
gtgggtaagatacag

SEQ ID NO: 903986 - DNA, 15 bp, Homo sapiens
tgggtaagatacagc

SEQ ID NO: 903987 - DNA, 15 bp, Homo sapiens
gggtaagatacagct

SEQ ID NO: 903988 - DNA, 15 bp, Homo sapiens
ggtaagatacagctg

SEQ ID NO: 903989 - DNA, 15 bp, Homo sapiens
gtaagatacagctga

SEQ ID NO: 903990 - DNA, 15 bp, Homo sapiens
taagatacagctgag

SEQ ID NO: 903991 - DNA, 15 bp, Homo sapiens
aagatacagctgagt

SEQ ID NO: 903992 - DNA, 15 bp, Homo sapiens
agatacagctgagta

SEQ ID NO: 903993 - DNA, 15 bp, Homo sapiens
gatacagctgagtat

SEQ ID NO: 903994 - DNA, 15 bp, Homo sapiens
atacagctgagtatg

SEQ ID NO: 903995 - DNA, 15 bp, Homo sapiens
tacagctgagtatgg

SEQ ID NO: 903996 - DNA, 15 bp, Homo sapiens
acagctgagtatggc

SEQ ID NO: 903997 - DNA, 15 bp, Homo sapiens
cagctgagtatggca

SEQ ID NO: 903998 - DNA, 15 bp, Homo sapiens
agctgagtatggcat

SEQ ID NO: 903999 - DNA, 15 bp, Homo sapiens
gctgagtatggcatt

SEQ ID NO: 904000 - DNA, 15 bp, Homo sapiens
ctgagtatggcatta

SEQ ID NO: 904001 - DNA, 15 bp, Homo sapiens
tgagtatggcattat

SEQ ID NO: 904002 - DNA, 15 bp, Homo sapiens
gagtatggcattatc

SEQ ID NO: 904003 - DNA, 15 bp, Homo sapiens
agtatggcattatcc

SEQ ID NO: 904004 - DNA, 15 bp, Homo sapiens
gtatggcattatcct

SEQ ID NO: 904005 - DNA, 15 bp, Homo sapiens
tatggcattatcctt

SEQ ID NO: 904006 - DNA, 15 bp, Homo sapiens
atggcattatcctta

SEQ ID NO: 904007 - DNA, 15 bp, Homo sapiens
tggcattatccttat

SEQ ID NO: 904008 - DNA, 15 bp, Homo sapiens
ggcattatccttatg

SEQ ID NO: 904009 - DNA, 15 bp, Homo sapiens
gcattatccttatgg

SEQ ID NO: 904010 - DNA, 15 bp, Homo sapiens
cattatccttatggc

SEQ ID NO: 904011 - DNA, 15 bp, Homo sapiens
attatccttatggcc

SEQ ID NO: 904012 - DNA, 15 bp, Homo sapiens
ttatccttatggccc

SEQ ID NO: 904013 - DNA, 15 bp, Homo sapiens
tatccttatggccct

SEQ ID NO: 904014 - DNA, 15 bp, Homo sapiens
atccttatggcccta

SEQ ID NO: 904015 - DNA, 15 bp, Homo sapiens
tccttatggccctaa

SEQ ID NO: 904016 - DNA, 15 bp, Homo sapiens
ccttatggccctaaa

SEQ ID NO: 904017 - DNA, 15 bp, Homo sapiens
cttatggccctaaat

SEQ ID NO: 904018 - DNA, 15 bp, Homo sapiens
ttatggccctaaatg

SEQ ID NO: 904019 - DNA, 15 bp, Homo sapiens
tatggccctaaatga

SEQ ID NO: 904020 - DNA, 15 bp, Homo sapiens
atggccctaaatgat

SEQ ID NO: 904021 - DNA, 15 bp, Homo sapiens
tggccctaaatgatg

SEQ ID NO: 904022 - DNA, 15 bp, Homo sapiens
ggccctaaatgatgt

SEQ ID NO: 904023 - DNA, 15 bp, Homo sapiens
gccctaaatgatgtt

SEQ ID NO: 904024 - DNA, 15 bp, Homo sapiens
ccctaaatgatgttt

SEQ ID NO: 904025 - DNA, 15 bp, Homo sapiens
cctaaatgatgtttt

SEQ ID NO: 904026 - DNA, 15 bp, Homo sapiens
ctaaatgatgttttt

SEQ ID NO: 904027 - DNA, 15 bp, Homo sapiens
taaatgatgtttttg

SEQ ID NO: 904028 - DNA, 15 bp, Homo sapiens
aaatgatgtttttgt

SEQ ID NO: 904029 - DNA, 15 bp, Homo sapiens
aatgatgtttttgta

SEQ ID NO: 904030 - DNA, 15 bp, Homo sapiens
atgatgtttttgtat

SEQ ID NO: 904031 - DNA, 15 bp, Homo sapiens
tgatgtttttgtatt

SEQ ID NO: 904032 - DNA, 15 bp, Homo sapiens
gatgtttttgtattt

SEQ ID NO: 904033 - DNA, 15 bp, Homo sapiens
atgtttttgtatttg

SEQ ID NO: 904034 - DNA, 15 bp, Homo sapiens
tgtttttgtatttgt

SEQ ID NO: 904035 - DNA, 15 bp, Homo sapiens
gtttttgtatttgtc

SEQ ID NO: 904036 - DNA, 15 bp, Homo sapiens
tttttgtatttgtct

SEQ ID NO: 904037 - DNA, 15 bp, Homo sapiens
ttttgtatttgtctt

SEQ ID NO: 904038 - DNA, 15 bp, Homo sapiens
tttgtatttgtcttt

SEQ ID NO: 904039 - DNA, 15 bp, Homo sapiens
ttgtatttgtctttg

SEQ ID NO: 904040 - DNA, 15 bp, Homo sapiens
tgtatttgtctttga

SEQ ID NO: 904041 - DNA, 15 bp, Homo sapiens
gtatttgtctttgag

SEQ ID NO: 904042 - DNA, 15 bp, Homo sapiens
tatttgtctttgaga

SEQ ID NO: 904043 - DNA, 15 bp, Homo sapiens
atttgtctttgagag

SEQ ID NO: 904044 - DNA, 15 bp, Homo sapiens
tttgtctttgagagg

SEQ ID NO: 904045 - DNA, 15 bp, Homo sapiens
ttgtctttgagaggg

SEQ ID NO: 904046 - DNA, 15 bp, Homo sapiens
tgtctttgagaggga

SEQ ID NO: 904047 - DNA, 15 bp, Homo sapiens
gtctttgagagggag

SEQ ID NO: 904048 - DNA, 15 bp, Homo sapiens
tctttgagagggagc

SEQ ID NO: 904049 - DNA, 15 bp, Homo sapiens
ctttgagagggagcc

SEQ ID NO: 904050 - DNA, 15 bp, Homo sapiens
tttgagagggagcct

SEQ ID NO: 904051 - DNA, 15 bp, Homo sapiens
ttgagagggagcctg

SEQ ID NO: 904052 - DNA, 15 bp, Homo sapiens
tgagagggagcctgc

SEQ ID NO: 904053 - DNA, 15 bp, Homo sapiens
gagagggagcctgca

SEQ ID NO: 904054 - DNA, 15 bp, Homo sapiens
agagggagcctgcag

SEQ ID NO: 904055 - DNA, 15 bp, Homo sapiens
gagggagcctgcagg

SEQ ID NO: 904056 - DNA, 15 bp, Homo sapiens
agggagcctgcaggg

SEQ ID NO: 904057 - DNA, 15 bp, Homo sapiens
gggagcctgcaggga

SEQ ID NO: 904058 - DNA, 15 bp, Homo sapiens
ggagcctgcagggag

SEQ ID NO: 904059 - DNA, 15 bp, Homo sapiens
gagcctgcagggaga

SEQ ID NO: 904060 - DNA, 15 bp, Homo sapiens
agcctgcagggagaa

SEQ ID NO: 904061 - DNA, 15 bp, Homo sapiens
gcctgcagggagaaa

SEQ ID NO: 904062 - DNA, 15 bp, Homo sapiens
cctgcagggagaaaa

SEQ ID NO: 904063 - DNA, 15 bp, Homo sapiens
ctgcagggagaaaag

SEQ ID NO: 904064 - DNA, 15 bp, Homo sapiens
tgcagggagaaaagc

SEQ ID NO: 904065 - DNA, 15 bp, Homo sapiens
gcagggagaaaagct

SEQ ID NO: 904066 - DNA, 15 bp, Homo sapiens
cagggagaaaagctc

SEQ ID NO: 904067 - DNA, 15 bp, Homo sapiens
agggagaaaagctca

SEQ ID NO: 904068 - DNA, 15 bp, Homo sapiens
gggagaaaagctcag

SEQ ID NO: 904069 - DNA, 15 bp, Homo sapiens
ggagaaaagctcagg

SEQ ID NO: 904070 - DNA, 15 bp, Homo sapiens
gagaaaagctcagga

SEQ ID NO: 904071 - DNA, 15 bp, Homo sapiens
agaaaagctcaggaa

SEQ ID NO: 904072 - DNA, 15 bp, Homo sapiens
gaaaagctcaggaaa

SEQ ID NO: 904073 - DNA, 15 bp, Homo sapiens
aaaagctcaggaaaa

SEQ ID NO: 904074 - DNA, 15 bp, Homo sapiens
aaagctcaggaaaac

SEQ ID NO: 904075 - DNA, 15 bp, Homo sapiens
aagctcaggaaaaca

SEQ ID NO: 904076 - DNA, 15 bp, Homo sapiens
agctcaggaaaacaa

SEQ ID NO: 904077 - DNA, 15 bp, Homo sapiens
gctcaggaaaacaag

SEQ ID NO: 904078 - DNA, 15 bp, Homo sapiens
ctcaggaaaacaaga

SEQ ID NO: 904079 - DNA, 15 bp, Homo sapiens
tcaggaaaacaagag

SEQ ID NO: 904080 - DNA, 15 bp, Homo sapiens
caggaaaacaagagt

SEQ ID NO: 904081 - DNA, 15 bp, Homo sapiens
aggaaaacaagagtt

SEQ ID NO: 904082 - DNA, 15 bp, Homo sapiens
ggaaaacaagagttt

SEQ ID NO: 904083 - DNA, 15 bp, Homo sapiens
gaaaacaagagtttg

SEQ ID NO: 904084 - DNA, 15 bp, Homo sapiens
aaaacaagagtttga

SEQ ID NO: 904085 - DNA, 15 bp, Homo sapiens
aaacaagagtttgaa

SEQ ID NO: 904086 - DNA, 15 bp, Homo sapiens
aacaagagtttgaat

SEQ ID NO: 904087 - DNA, 15 bp, Homo sapiens
acaagagtttgaatc

SEQ ID NO: 904088 - DNA, 15 bp, Homo sapiens
caagagtttgaatct

SEQ ID NO: 904089 - DNA, 15 bp, Homo sapiens
aagagtttgaatctg

SEQ ID NO: 904090 - DNA, 15 bp, Homo sapiens
agagtttgaatctgc

SEQ ID NO: 904091 - DNA, 15 bp, Homo sapiens
gagtttgaatctgcc

SEQ ID NO: 904092 - DNA, 15 bp, Homo sapiens
agtttgaatctgcct

SEQ ID NO: 904093 - DNA, 15 bp, Homo sapiens
gtttgaatctgcctt

SEQ ID NO: 904094 - DNA, 15 bp, Homo sapiens
tttgaatctgccttg

SEQ ID NO: 904095 - DNA, 15 bp, Homo sapiens
ttgaatctgccttgt

SEQ ID NO: 904096 - DNA, 15 bp, Homo sapiens
tgaatctgccttgtt

SEQ ID NO: 904097 - DNA, 15 bp, Homo sapiens
gaatctgccttgttc

SEQ ID NO: 904098 - DNA, 15 bp, Homo sapiens
aatctgccttgttca

SEQ ID NO: 904099 - DNA, 15 bp, Homo sapiens
atctgccttgttcat

SEQ ID NO: 904100 - DNA, 15 bp, Homo sapiens
tctgccttgttcatg

SEQ ID NO: 904101 - DNA, 15 bp, Homo sapiens
ctgccttgttcatga

SEQ ID NO: 904102 - DNA, 15 bp, Homo sapiens
tgccttgttcatgac

SEQ ID NO: 904103 - DNA, 15 bp, Homo sapiens
gccttgttcatgact

SEQ ID NO: 904104 - DNA, 15 bp, Homo sapiens
ccttgttcatgactt

SEQ ID NO: 904105 - DNA, 15 bp, Homo sapiens
cttgttcatgacttt

SEQ ID NO: 904106 - DNA, 15 bp, Homo sapiens
ttgttcatgactttg

SEQ ID NO: 904107 - DNA, 15 bp, Homo sapiens
tgttcatgactttgg

SEQ ID NO: 904108 - DNA, 15 bp, Homo sapiens
gttcatgactttggg

SEQ ID NO: 904109 - DNA, 15 bp, Homo sapiens
ttcatgactttgggc

SEQ ID NO: 904110 - DNA, 15 bp, Homo sapiens
tcatgactttgggca

SEQ ID NO: 904111 - DNA, 15 bp, Homo sapiens
catgactttgggcag

SEQ ID NO: 904112 - DNA, 15 bp, Homo sapiens
atgactttgggcagt

SEQ ID NO: 904113 - DNA, 15 bp, Homo sapiens
tgactttgggcagtt

SEQ ID NO: 904114 - DNA, 15 bp, Homo sapiens
gactttgggcagttt

SEQ ID NO: 904115 - DNA, 15 bp, Homo sapiens
actttgggcagttta

SEQ ID NO: 904116 - DNA, 15 bp, Homo sapiens
ctttgggcagtttat

SEQ ID NO: 904117 - DNA, 15 bp, Homo sapiens
tttgggcagtttatt

SEQ ID NO: 904118 - DNA, 15 bp, Homo sapiens
ttgggcagtttattt

SEQ ID NO: 904119 - DNA, 15 bp, Homo sapiens
tgggcagtttattta

SEQ ID NO: 904120 - DNA, 15 bp, Homo sapiens
gggcagtttatttaa

SEQ ID NO: 904121 - DNA, 15 bp, Homo sapiens
ggcagtttatttaat

SEQ ID NO: 904122 - DNA, 15 bp, Homo sapiens
gcagtttatttaatc

SEQ ID NO: 904123 - DNA, 15 bp, Homo sapiens
cagtttatttaatct

SEQ ID NO: 904124 - DNA, 15 bp, Homo sapiens
agtttatttaatctt

SEQ ID NO: 904125 - DNA, 15 bp, Homo sapiens
gtttatttaatcttc

SEQ ID NO: 904126 - DNA, 15 bp, Homo sapiens
tttatttaatcttcc

SEQ ID NO: 904127 - DNA, 15 bp, Homo sapiens
ttatttaatcttcct

SEQ ID NO: 904128 - DNA, 15 bp, Homo sapiens
tatttaatcttcctg

SEQ ID NO: 904129 - DNA, 15 bp, Homo sapiens
atttaatcttcctga

SEQ ID NO: 904130 - DNA, 15 bp, Homo sapiens
tttaatcttcctgaa

SEQ ID NO: 904131 - DNA, 15 bp, Homo sapiens
ttaatcttcctgaat

SEQ ID NO: 904132 - DNA, 15 bp, Homo sapiens
taatcttcctgaatc

SEQ ID NO: 904133 - DNA, 15 bp, Homo sapiens
aatcttcctgaatct

SEQ ID NO: 904134 - DNA, 15 bp, Homo sapiens
atcttcctgaatctc

SEQ ID NO: 904135 - DNA, 15 bp, Homo sapiens
tcttcctgaatctca

SEQ ID NO: 904136 - DNA, 15 bp, Homo sapiens
cttcctgaatctcag

SEQ ID NO: 904137 - DNA, 15 bp, Homo sapiens
ttcctgaatctcagt

SEQ ID NO: 904138 - DNA, 15 bp, Homo sapiens
tcctgaatctcagtt

SEQ ID NO: 904139 - DNA, 15 bp, Homo sapiens
cctgaatctcagttt

SEQ ID NO: 904140 - DNA, 15 bp, Homo sapiens
ctgaatctcagtttc

SEQ ID NO: 904141 - DNA, 15 bp, Homo sapiens
tgaatctcagtttcc

SEQ ID NO: 904142 - DNA, 15 bp, Homo sapiens
gaatctcagtttcct

SEQ ID NO: 904143 - DNA, 15 bp, Homo sapiens
aatctcagtttcctc

SEQ ID NO: 904144 - DNA, 15 bp, Homo sapiens
atctcagtttcctca

SEQ ID NO: 904145 - DNA, 15 bp, Homo sapiens
tctcagtttcctcaa

SEQ ID NO: 904146 - DNA, 15 bp, Homo sapiens
ctcagtttcctcaat

SEQ ID NO: 904147 - DNA, 15 bp, Homo sapiens
tcagtttcctcaatt

SEQ ID NO: 904148 - DNA, 15 bp, Homo sapiens
cagtttcctcaattg

SEQ ID NO: 904149 - DNA, 15 bp, Homo sapiens
agtttcctcaattgg

SEQ ID NO: 904150 - DNA, 15 bp, Homo sapiens
gtttcctcaattgga

SEQ ID NO: 904151 - DNA, 15 bp, Homo sapiens
tttcctcaattggaa

SEQ ID NO: 904152 - DNA, 15 bp, Homo sapiens
ttcctcaattggaaa

SEQ ID NO: 904153 - DNA, 15 bp, Homo sapiens
tcctcaattggaaag

SEQ ID NO: 904154 - DNA, 15 bp, Homo sapiens
cctcaattggaaagt

SEQ ID NO: 904155 - DNA, 15 bp, Homo sapiens
ctcaattggaaagtg

SEQ ID NO: 904156 - DNA, 15 bp, Homo sapiens
tcaattggaaagtga

SEQ ID NO: 904157 - DNA, 15 bp, Homo sapiens
caattggaaagtgag

SEQ ID NO: 904158 - DNA, 15 bp, Homo sapiens
aattggaaagtgagc

SEQ ID NO: 904159 - DNA, 15 bp, Homo sapiens
attggaaagtgagcc

SEQ ID NO: 904160 - DNA, 15 bp, Homo sapiens
ttggaaagtgagcct

SEQ ID NO: 904161 - DNA, 15 bp, Homo sapiens
tggaaagtgagcctc

SEQ ID NO: 904162 - DNA, 15 bp, Homo sapiens
ggaaagtgagcctca

SEQ ID NO: 904163 - DNA, 15 bp, Homo sapiens
gaaagtgagcctcac

SEQ ID NO: 904164 - DNA, 15 bp, Homo sapiens
aaagtgagcctcaca

SEQ ID NO: 904165 - DNA, 15 bp, Homo sapiens
aagtgagcctcacag

SEQ ID NO: 904166 - DNA, 15 bp, Homo sapiens
agtgagcctcacagt

SEQ ID NO: 904167 - DNA, 15 bp, Homo sapiens
gtgagcctcacagtg

SEQ ID NO: 904168 - DNA, 15 bp, Homo sapiens
tgagcctcacagtgt

SEQ ID NO: 904169 - DNA, 15 bp, Homo sapiens
gagcctcacagtgtt

SEQ ID NO: 904170 - DNA, 15 bp, Homo sapiens
agcctcacagtgttt

SEQ ID NO: 904171 - DNA, 15 bp, Homo sapiens
gcctcacagtgtttg

SEQ ID NO: 904172 - DNA, 15 bp, Homo sapiens
cctcacagtgtttgt

SEQ ID NO: 904173 - DNA, 15 bp, Homo sapiens
ctcacagtgtttgtt

SEQ ID NO: 904174 - DNA, 15 bp, Homo sapiens
tcacagtgtttgttt

SEQ ID NO: 904175 - DNA, 15 bp, Homo sapiens
cacagtgtttgtttt

SEQ ID NO: 904176 - DNA, 15 bp, Homo sapiens
acagtgtttgtttta

SEQ ID NO: 904177 - DNA, 15 bp, Homo sapiens
cagtgtttgttttac

SEQ ID NO: 904178 - DNA, 15 bp, Homo sapiens
agtgtttgttttaca

SEQ ID NO: 904179 - DNA, 15 bp, Homo sapiens
gtgtttgttttacag

SEQ ID NO: 904180 - DNA, 15 bp, Homo sapiens
tgtttgttttacagg

SEQ ID NO: 904181 - DNA, 15 bp, Homo sapiens
gtttgttttacaggg

SEQ ID NO: 904182 - DNA, 15 bp, Homo sapiens
tttgttttacagggt

SEQ ID NO: 904183 - DNA, 15 bp, Homo sapiens
ttgttttacagggtg

SEQ ID NO: 904184 - DNA, 15 bp, Homo sapiens
tgttttacagggtgc

SEQ ID NO: 904185 - DNA, 15 bp, Homo sapiens
gttttacagggtgca

SEQ ID NO: 904186 - DNA, 15 bp, Homo sapiens
ttttacagggtgcat

SEQ ID NO: 904187 - DNA, 15 bp, Homo sapiens
tttacagggtgcatt

SEQ ID NO: 904188 - DNA, 15 bp, Homo sapiens
ttacagggtgcattg

SEQ ID NO: 904189 - DNA, 15 bp, Homo sapiens
tacagggtgcattgt

SEQ ID NO: 904190 - DNA, 15 bp, Homo sapiens
acagggtgcattgta

SEQ ID NO: 904191 - DNA, 15 bp, Homo sapiens
cagggtgcattgtat

SEQ ID NO: 904192 - DNA, 15 bp, Homo sapiens
agggtgcattgtatc

SEQ ID NO: 904193 - DNA, 15 bp, Homo sapiens
gggtgcattgtatca

SEQ ID NO: 904194 - DNA, 15 bp, Homo sapiens
ggtgcattgtatcat

SEQ ID NO: 904195 - DNA, 15 bp, Homo sapiens
gtgcattgtatcatc

SEQ ID NO: 904196 - DNA, 15 bp, Homo sapiens
tgcattgtatcatca

SEQ ID NO: 904197 - DNA, 15 bp, Homo sapiens
gcattgtatcatcaa

SEQ ID NO: 904198 - DNA, 15 bp, Homo sapiens
cattgtatcatcaat

SEQ ID NO: 904199 - DNA, 15 bp, Homo sapiens
attgtatcatcaatc

SEQ ID NO: 904200 - DNA, 15 bp, Homo sapiens
ttgtatcatcaatca

SEQ ID NO: 904201 - DNA, 15 bp, Homo sapiens
tgtatcatcaatcat

SEQ ID NO: 904202 - DNA, 15 bp, Homo sapiens
gtatcatcaatcatg

SEQ ID NO: 904203 - DNA, 15 bp, Homo sapiens
tatcatcaatcatga

SEQ ID NO: 904204 - DNA, 15 bp, Homo sapiens
atcatcaatcatgaa

SEQ ID NO: 904205 - DNA, 15 bp, Homo sapiens
tcatcaatcatgaat

SEQ ID NO: 904206 - DNA, 15 bp, Homo sapiens
catcaatcatgaatg

SEQ ID NO: 904207 - DNA, 15 bp, Homo sapiens
atcaatcatgaatgt

SEQ ID NO: 904208 - DNA, 15 bp, Homo sapiens
tcaatcatgaatgtg

SEQ ID NO: 904209 - DNA, 15 bp, Homo sapiens
caatcatgaatgtga

SEQ ID NO: 904210 - DNA, 15 bp, Homo sapiens
aatcatgaatgtgaa

SEQ ID NO: 904211 - DNA, 15 bp, Homo sapiens
atcatgaatgtgaag

SEQ ID NO: 904212 - DNA, 15 bp, Homo sapiens
tcatgaatgtgaagt

SEQ ID NO: 904213 - DNA, 15 bp, Homo sapiens
catgaatgtgaagta

SEQ ID NO: 904214 - DNA, 15 bp, Homo sapiens
atgaatgtgaagtac

SEQ ID NO: 904215 - DNA, 15 bp, Homo sapiens
tgaatgtgaagtact

SEQ ID NO: 904216 - DNA, 15 bp, Homo sapiens
gaatgtgaagtactc

SEQ ID NO: 904217 - DNA, 15 bp, Homo sapiens
aatgtgaagtactca

SEQ ID NO: 904218 - DNA, 15 bp, Homo sapiens
atgtgaagtactcag

SEQ ID NO: 904219 - DNA, 15 bp, Homo sapiens
tgtgaagtactcagc

SEQ ID NO: 904220 - DNA, 15 bp, Homo sapiens
gtgaagtactcagca

SEQ ID NO: 904221 - DNA, 15 bp, Homo sapiens
tgaagtactcagcac

SEQ ID NO: 904222 - DNA, 15 bp, Homo sapiens
gaagtactcagcacg

SEQ ID NO: 904223 - DNA, 15 bp, Homo sapiens
aagtactcagcacgg

SEQ ID NO: 904224 - DNA, 15 bp, Homo sapiens
agtactcagcacggt

SEQ ID NO: 904225 - DNA, 15 bp, Homo sapiens
gtactcagcacggtg

SEQ ID NO: 904226 - DNA, 15 bp, Homo sapiens
tactcagcacggtgc

SEQ ID NO: 904227 - DNA, 15 bp, Homo sapiens
actcagcacggtgca

SEQ ID NO: 904228 - DNA, 15 bp, Homo sapiens
ctcagcacggtgcat

SEQ ID NO: 904229 - DNA, 15 bp, Homo sapiens
tcagcacggtgcata

SEQ ID NO: 904230 - DNA, 15 bp, Homo sapiens
cagcacggtgcataa

SEQ ID NO: 904231 - DNA, 15 bp, Homo sapiens
agcacggtgcataaa

SEQ ID NO: 904232 - DNA, 15 bp, Homo sapiens
gcacggtgcataaaa

SEQ ID NO: 904233 - DNA, 15 bp, Homo sapiens
cacggtgcataaaag

SEQ ID NO: 904234 - DNA, 15 bp, Homo sapiens
acggtgcataaaaga

SEQ ID NO: 904235 - DNA, 15 bp, Homo sapiens
cggtgcataaaagat

SEQ ID NO: 904236 - DNA, 15 bp, Homo sapiens
ggtgcataaaagatg

SEQ ID NO: 904237 - DNA, 15 bp, Homo sapiens
gtgcataaaagatgc

SEQ ID NO: 904238 - DNA, 15 bp, Homo sapiens
tgcataaaagatgct

SEQ ID NO: 904239 - DNA, 15 bp, Homo sapiens
gcataaaagatgctt

SEQ ID NO: 904240 - DNA, 15 bp, Homo sapiens
cataaaagatgcttc

SEQ ID NO: 904241 - DNA, 15 bp, Homo sapiens
ataaaagatgcttca

SEQ ID NO: 904242 - DNA, 15 bp, Homo sapiens
taaaagatgcttcac

SEQ ID NO: 904243 - DNA, 15 bp, Homo sapiens
aaaagatgcttcaca

SEQ ID NO: 904244 - DNA, 15 bp, Homo sapiens
aaagatgcttcacaa

SEQ ID NO: 904245 - DNA, 15 bp, Homo sapiens
aagatgcttcacaaa

SEQ ID NO: 904246 - DNA, 15 bp, Homo sapiens
agatgcttcacaaat

SEQ ID NO: 904247 - DNA, 15 bp, Homo sapiens
gatgcttcacaaatg

SEQ ID NO: 904248 - DNA, 15 bp, Homo sapiens
atgcttcacaaatgt

SEQ ID NO: 904249 - DNA, 15 bp, Homo sapiens
tgcttcacaaatgtc

SEQ ID NO: 904250 - DNA, 15 bp, Homo sapiens
gcttcacaaatgtct

SEQ ID NO: 904251 - DNA, 15 bp, Homo sapiens
cttcacaaatgtctg

SEQ ID NO: 904252 - DNA, 15 bp, Homo sapiens
ttcacaaatgtctgt

SEQ ID NO: 904253 - DNA, 15 bp, Homo sapiens
tcacaaatgtctgtt

SEQ ID NO: 904254 - DNA, 15 bp, Homo sapiens
cacaaatgtctgttc

SEQ ID NO: 904255 - DNA, 15 bp, Homo sapiens
acaaatgtctgttct

SEQ ID NO: 904256 - DNA, 15 bp, Homo sapiens
caaatgtctgttctc

SEQ ID NO: 904257 - DNA, 15 bp, Homo sapiens
aaatgtctgttctct

SEQ ID NO: 904258 - DNA, 15 bp, Homo sapiens
aatgtctgttctctc

SEQ ID NO: 904259 - DNA, 15 bp, Homo sapiens
atgtctgttctctct

SEQ ID NO: 904260 - DNA, 15 bp, Homo sapiens
tgtctgttctctctt

SEQ ID NO: 904261 - DNA, 15 bp, Homo sapiens
gtctgttctctcttc

SEQ ID NO: 904262 - DNA, 15 bp, Homo sapiens
tctgttctctcttca

SEQ ID NO: 904263 - DNA, 15 bp, Homo sapiens
ctgttctctcttcaa

SEQ ID NO: 904264 - DNA, 15 bp, Homo sapiens
tgttctctcttcaag

SEQ ID NO: 904265 - DNA, 15 bp, Homo sapiens
gttctctcttcaagt

SEQ ID NO: 904266 - DNA, 15 bp, Homo sapiens
ttctctcttcaagta

SEQ ID NO: 904267 - DNA, 15 bp, Homo sapiens
tctctcttcaagtaa

SEQ ID NO: 904268 - DNA, 15 bp, Homo sapiens
ctctcttcaagtaag

SEQ ID NO: 904269 - DNA, 15 bp, Homo sapiens
tctcttcaagtaagt

SEQ ID NO: 904270 - DNA, 15 bp, Homo sapiens
ctcttcaagtaagtg

SEQ ID NO: 904271 - DNA, 15 bp, Homo sapiens
tcttcaagtaagtgt

SEQ ID NO: 904272 - DNA, 15 bp, Homo sapiens
cttcaagtaagtgtg

SEQ ID NO: 904273 - DNA, 15 bp, Homo sapiens
ttcaagtaagtgtgt

SEQ ID NO: 904274 - DNA, 15 bp, Homo sapiens
tcaagtaagtgtgtc

SEQ ID NO: 904275 - DNA, 15 bp, Homo sapiens
caagtaagtgtgtct

SEQ ID NO: 904276 - DNA, 15 bp, Homo sapiens
aagtaagtgtgtctc

SEQ ID NO: 904277 - DNA, 15 bp, Homo sapiens
agtaagtgtgtctcc

SEQ ID NO: 904278 - DNA, 15 bp, Homo sapiens
gtaagtgtgtctcct

SEQ ID NO: 904279 - DNA, 15 bp, Homo sapiens
taagtgtgtctcctt

SEQ ID NO: 904280 - DNA, 15 bp, Homo sapiens
aagtgtgtctccttc

SEQ ID NO: 904281 - DNA, 15 bp, Homo sapiens
agtgtgtctccttca

SEQ ID NO: 904282 - DNA, 15 bp, Homo sapiens
gtgtgtctccttcaa

SEQ ID NO: 904283 - DNA, 15 bp, Homo sapiens
tgtgtctccttcaac

SEQ ID NO: 904284 - DNA, 15 bp, Homo sapiens
gtgtctccttcaacc

SEQ ID NO: 904285 - DNA, 15 bp, Homo sapiens
tgtctccttcaaccg

SEQ ID NO: 904286 - DNA, 15 bp, Homo sapiens
gtctccttcaaccga

SEQ ID NO: 904287 - DNA, 15 bp, Homo sapiens
tctccttcaaccgat

SEQ ID NO: 904288 - DNA, 15 bp, Homo sapiens
ctccttcaaccgata

SEQ ID NO: 904289 - DNA, 15 bp, Homo sapiens
tccttcaaccgataa

SEQ ID NO: 904290 - DNA, 15 bp, Homo sapiens
ccttcaaccgataat

SEQ ID NO: 904291 - DNA, 15 bp, Homo sapiens
cttcaaccgataatt

SEQ ID NO: 904292 - DNA, 15 bp, Homo sapiens
ttcaaccgataattc

SEQ ID NO: 904293 - DNA, 15 bp, Homo sapiens
tcaaccgataattca

SEQ ID NO: 904294 - DNA, 15 bp, Homo sapiens
caaccgataattcag

SEQ ID NO: 904295 - DNA, 15 bp, Homo sapiens
aaccgataattcaga

SEQ ID NO: 904296 - DNA, 15 bp, Homo sapiens
accgataattcagat

SEQ ID NO: 904297 - DNA, 15 bp, Homo sapiens
ccgataattcagatt

SEQ ID NO: 904298 - DNA, 15 bp, Homo sapiens
cgataattcagattc

SEQ ID NO: 904299 - DNA, 15 bp, Homo sapiens
gataattcagattct

SEQ ID NO: 904300 - DNA, 15 bp, Homo sapiens
ataattcagattctt

SEQ ID NO: 904301 - DNA, 15 bp, Homo sapiens
taattcagattcttt

SEQ ID NO: 904302 - DNA, 15 bp, Homo sapiens
aattcagattctttt

SEQ ID NO: 904303 - DNA, 15 bp, Homo sapiens
attcagattcttttc

SEQ ID NO: 904304 - DNA, 15 bp, Homo sapiens
ttcagattcttttcg

SEQ ID NO: 904305 - DNA, 15 bp, Homo sapiens
tcagattcttttcga

SEQ ID NO: 904306 - DNA, 15 bp, Homo sapiens
cagattcttttcgat

SEQ ID NO: 904307 - DNA, 15 bp, Homo sapiens
agattcttttcgatt

SEQ ID NO: 904308 - DNA, 15 bp, Homo sapiens
gattcttttcgattt

SEQ ID NO: 904309 - DNA, 15 bp, Homo sapiens
attcttttcgatttg

SEQ ID NO: 904310 - DNA, 15 bp, Homo sapiens
ttcttttcgatttgg

SEQ ID NO: 904311 - DNA, 15 bp, Homo sapiens
tcttttcgatttggg

SEQ ID NO: 904312 - DNA, 15 bp, Homo sapiens
cttttcgatttgggc

SEQ ID NO: 904313 - DNA, 15 bp, Homo sapiens
ttttcgatttgggct

SEQ ID NO: 904314 - DNA, 15 bp, Homo sapiens
tttcgatttgggctc

SEQ ID NO: 904315 - DNA, 15 bp, Homo sapiens
ttcgatttgggctca

SEQ ID NO: 904316 - DNA, 15 bp, Homo sapiens
tcgatttgggctcag

SEQ ID NO: 904317 - DNA, 15 bp, Homo sapiens
cgatttgggctcaga

SEQ ID NO: 904318 - DNA, 15 bp, Homo sapiens
gatttgggctcagag

SEQ ID NO: 904319 - DNA, 15 bp, Homo sapiens
atttgggctcagaga

SEQ ID NO: 904320 - DNA, 15 bp, Homo sapiens
tttgggctcagagaa

SEQ ID NO: 904321 - DNA, 15 bp, Homo sapiens
ttgggctcagagaac

SEQ ID NO: 904322 - DNA, 15 bp, Homo sapiens
tgggctcagagaact

SEQ ID NO: 904323 - DNA, 15 bp, Homo sapiens
gggctcagagaacta

SEQ ID NO: 904324 - DNA, 15 bp, Homo sapiens
ggctcagagaactac

SEQ ID NO: 904325 - DNA, 15 bp, Homo sapiens
gctcagagaactacc

SEQ ID NO: 904326 - DNA, 15 bp, Homo sapiens
ctcagagaactacct

SEQ ID NO: 904327 - DNA, 15 bp, Homo sapiens
tcagagaactacctc

SEQ ID NO: 904328 - DNA, 15 bp, Homo sapiens
cagagaactacctcc

SEQ ID NO: 904329 - DNA, 15 bp, Homo sapiens
agagaactacctcct

SEQ ID NO: 904330 - DNA, 15 bp, Homo sapiens
gagaactacctcctg

SEQ ID NO: 904331 - DNA, 15 bp, Homo sapiens
agaactacctcctgc

SEQ ID NO: 904332 - DNA, 15 bp, Homo sapiens
gaactacctcctgcc

SEQ ID NO: 904333 - DNA, 15 bp, Homo sapiens
aactacctcctgccg

SEQ ID NO: 904334 - DNA, 15 bp, Homo sapiens
actacctcctgccgt

SEQ ID NO: 904335 - DNA, 15 bp, Homo sapiens
ctacctcctgccgtc

SEQ ID NO: 904336 - DNA, 15 bp, Homo sapiens
tacctcctgccgtct

SEQ ID NO: 904337 - DNA, 15 bp, Homo sapiens
acctcctgccgtctt

SEQ ID NO: 904338 - DNA, 15 bp, Homo sapiens
cctcctgccgtcttt

SEQ ID NO: 904339 - DNA, 15 bp, Homo sapiens
ctcctgccgtctttt

SEQ ID NO: 904340 - DNA, 15 bp, Homo sapiens
tcctgccgtcttttt

SEQ ID NO: 904341 - DNA, 15 bp, Homo sapiens
cctgccgtctttttc

SEQ ID NO: 904342 - DNA, 15 bp, Homo sapiens
ctgccgtctttttct

SEQ ID NO: 904343 - DNA, 15 bp, Homo sapiens
tgccgtctttttctt

SEQ ID NO: 904344 - DNA, 15 bp, Homo sapiens
gccgtctttttctta

SEQ ID NO: 904345 - DNA, 15 bp, Homo sapiens
ccgtctttttcttac

SEQ ID NO: 904346 - DNA, 15 bp, Homo sapiens
cgtctttttcttact

SEQ ID NO: 904347 - DNA, 15 bp, Homo sapiens
gtctttttcttacta

SEQ ID NO: 904348 - DNA, 15 bp, Homo sapiens
tctttttcttactag

SEQ ID NO: 904349 - DNA, 15 bp, Homo sapiens
ctttttcttactagc

SEQ ID NO: 904350 - DNA, 15 bp, Homo sapiens
tttttcttactagca

SEQ ID NO: 904351 - DNA, 15 bp, Homo sapiens
ttttcttactagcaa

SEQ ID NO: 904352 - DNA, 15 bp, Homo sapiens
tttcttactagcaac

SEQ ID NO: 904353 - DNA, 15 bp, Homo sapiens
ttcttactagcaact

SEQ ID NO: 904354 - DNA, 15 bp, Homo sapiens
tcttactagcaactt

SEQ ID NO: 904355 - DNA, 15 bp, Homo sapiens
cttactagcaacttc

SEQ ID NO: 904356 - DNA, 15 bp, Homo sapiens
ttactagcaacttcc

SEQ ID NO: 904357 - DNA, 15 bp, Homo sapiens
tactagcaacttccc

SEQ ID NO: 904358 - DNA, 15 bp, Homo sapiens
actagcaacttcccg

SEQ ID NO: 904359 - DNA, 15 bp, Homo sapiens
ctagcaacttcccgc

SEQ ID NO: 904360 - DNA, 15 bp, Homo sapiens
tagcaacttcccgcc

SEQ ID NO: 904361 - DNA, 15 bp, Homo sapiens
agcaacttcccgcct

SEQ ID NO: 904362 - DNA, 15 bp, Homo sapiens
gcaacttcccgcctc

SEQ ID NO: 904363 - DNA, 15 bp, Homo sapiens
caacttcccgcctct

SEQ ID NO: 904364 - DNA, 15 bp, Homo sapiens
aacttcccgcctctc

SEQ ID NO: 904365 - DNA, 15 bp, Homo sapiens
acttcccgcctctct

SEQ ID NO: 904366 - DNA, 15 bp, Homo sapiens
cttcccgcctctctt

SEQ ID NO: 904367 - DNA, 15 bp, Homo sapiens
ttcccgcctctcttg

SEQ ID NO: 904368 - DNA, 15 bp, Homo sapiens
tcccgcctctcttgc

SEQ ID NO: 904369 - DNA, 15 bp, Homo sapiens
cccgcctctcttgct

SEQ ID NO: 904370 - DNA, 15 bp, Homo sapiens
ccgcctctcttgctt

SEQ ID NO: 904371 - DNA, 15 bp, Homo sapiens
cgcctctcttgcttg

SEQ ID NO: 904372 - DNA, 15 bp, Homo sapiens
gcctctcttgcttgt

SEQ ID NO: 904373 - DNA, 15 bp, Homo sapiens
cctctcttgcttgtg

SEQ ID NO: 904374 - DNA, 15 bp, Homo sapiens
ctctcttgcttgtgg

SEQ ID NO: 904375 - DNA, 15 bp, Homo sapiens
tctcttgcttgtggg

SEQ ID NO: 904376 - DNA, 15 bp, Homo sapiens
ctcttgcttgtgggc

SEQ ID NO: 904377 - DNA, 15 bp, Homo sapiens
tcttgcttgtgggcc

SEQ ID NO: 904378 - DNA, 15 bp, Homo sapiens
cttgcttgtgggcct

SEQ ID NO: 904379 - DNA, 15 bp, Homo sapiens
ttgcttgtgggcctg

SEQ ID NO: 904380 - DNA, 15 bp, Homo sapiens
tgcttgtgggcctga

SEQ ID NO: 904381 - DNA, 15 bp, Homo sapiens
gcttgtgggcctgat

SEQ ID NO: 904382 - DNA, 15 bp, Homo sapiens
cttgtgggcctgatt

SEQ ID NO: 904383 - DNA, 15 bp, Homo sapiens
ttgtgggcctgattg

SEQ ID NO: 904384 - DNA, 15 bp, Homo sapiens
tgtgggcctgattga

SEQ ID NO: 904385 - DNA, 15 bp, Homo sapiens
gtgggcctgattgat

SEQ ID NO: 904386 - DNA, 15 bp, Homo sapiens
tgggcctgattgatg

SEQ ID NO: 904387 - DNA, 15 bp, Homo sapiens
gggcctgattgatga

SEQ ID NO: 904388 - DNA, 15 bp, Homo sapiens
ggcctgattgatgac

SEQ ID NO: 904389 - DNA, 15 bp, Homo sapiens
gcctgattgatgact

SEQ ID NO: 904390 - DNA, 15 bp, Homo sapiens
cctgattgatgactg

SEQ ID NO: 904391 - DNA, 15 bp, Homo sapiens
ctgattgatgactgc

SEQ ID NO: 904392 - DNA, 15 bp, Homo sapiens
tgattgatgactgcc

SEQ ID NO: 904393 - DNA, 15 bp, Homo sapiens
gattgatgactgcct

SEQ ID NO: 904394 - DNA, 15 bp, Homo sapiens
attgatgactgcctc

SEQ ID NO: 904395 - DNA, 15 bp, Homo sapiens
ttgatgactgcctca

SEQ ID NO: 904396 - DNA, 15 bp, Homo sapiens
tgatgactgcctcac

SEQ ID NO: 904397 - DNA, 15 bp, Homo sapiens
gatgactgcctcacc

SEQ ID NO: 904398 - DNA, 15 bp, Homo sapiens
atgactgcctcacct

SEQ ID NO: 904399 - DNA, 15 bp, Homo sapiens
tgactgcctcacctc

SEQ ID NO: 904400 - DNA, 15 bp, Homo sapiens
gactgcctcacctcc

SEQ ID NO: 904401 - DNA, 15 bp, Homo sapiens
actgcctcacctccc

SEQ ID NO: 904402 - DNA, 15 bp, Homo sapiens
ctgcctcacctccct

SEQ ID NO: 904403 - DNA, 15 bp, Homo sapiens
tgcctcacctccctc

SEQ ID NO: 904404 - DNA, 15 bp, Homo sapiens
gcctcacctccctct

SEQ ID NO: 904405 - DNA, 15 bp, Homo sapiens
cctcacctccctctc

SEQ ID NO: 904406 - DNA, 15 bp, Homo sapiens
ctcacctccctctct

SEQ ID NO: 904407 - DNA, 15 bp, Homo sapiens
tcacctccctctctc

SEQ ID NO: 904408 - DNA, 15 bp, Homo sapiens
cacctccctctctct

SEQ ID NO: 904409 - DNA, 15 bp, Homo sapiens
acctccctctctctc

SEQ ID NO: 904410 - DNA, 15 bp, Homo sapiens
cctccctctctctct

SEQ ID NO: 904411 - DNA, 15 bp, Homo sapiens
ctccctctctctctc

SEQ ID NO: 904412 - DNA, 15 bp, Homo sapiens
tccctctctctctcc

SEQ ID NO: 904413 - DNA, 15 bp, Homo sapiens
ccctctctctctccc

SEQ ID NO: 904414 - DNA, 15 bp, Homo sapiens
cctctctctctcccc

SEQ ID NO: 904415 - DNA, 15 bp, Homo sapiens
ctctctctctcccct

SEQ ID NO: 904416 - DNA, 15 bp, Homo sapiens
tctctctctcccctc

SEQ ID NO: 904417 - DNA, 15 bp, Homo sapiens
ctctctctcccctct

SEQ ID NO: 904418 - DNA, 15 bp, Homo sapiens
tctctctcccctctt

SEQ ID NO: 904419 - DNA, 15 bp, Homo sapiens
ctctctcccctcttg

SEQ ID NO: 904420 - DNA, 15 bp, Homo sapiens
tctctcccctcttgc

SEQ ID NO: 904421 - DNA, 15 bp, Homo sapiens
ctctcccctcttgct

SEQ ID NO: 904422 - DNA, 15 bp, Homo sapiens
tctcccctcttgctt

SEQ ID NO: 904423 - DNA, 15 bp, Homo sapiens
ctcccctcttgcttc

SEQ ID NO: 904424 - DNA, 15 bp, Homo sapiens
tcccctcttgcttca

SEQ ID NO: 904425 - DNA, 15 bp, Homo sapiens
cccctcttgcttcat

SEQ ID NO: 904426 - DNA, 15 bp, Homo sapiens
ccctcttgcttcatt

SEQ ID NO: 904427 - DNA, 15 bp, Homo sapiens
cctcttgcttcattt

SEQ ID NO: 904428 - DNA, 15 bp, Homo sapiens
ctcttgcttcatttc

SEQ ID NO: 904429 - DNA, 15 bp, Homo sapiens
tcttgcttcatttct

SEQ ID NO: 904430 - DNA, 15 bp, Homo sapiens
cttgcttcatttcta

SEQ ID NO: 904431 - DNA, 15 bp, Homo sapiens
ttgcttcatttctag

SEQ ID NO: 904432 - DNA, 15 bp, Homo sapiens
tgcttcatttctagg

SEQ ID NO: 904433 - DNA, 15 bp, Homo sapiens
gcttcatttctaggg

SEQ ID NO: 904434 - DNA, 15 bp, Homo sapiens
cttcatttctagggg

SEQ ID NO: 904435 - DNA, 15 bp, Homo sapiens
ttcatttctaggggt

SEQ ID NO: 904436 - DNA, 15 bp, Homo sapiens
tcatttctaggggta

SEQ ID NO: 904437 - DNA, 15 bp, Homo sapiens
catttctaggggtac

SEQ ID NO: 904438 - DNA, 15 bp, Homo sapiens
atttctaggggtacc

SEQ ID NO: 904439 - DNA, 15 bp, Homo sapiens
tttctaggggtaccc

SEQ ID NO: 904440 - DNA, 15 bp, Homo sapiens
ttctaggggtaccct

SEQ ID NO: 904441 - DNA, 15 bp, Homo sapiens
tctaggggtaccctg

SEQ ID NO: 904442 - DNA, 15 bp, Homo sapiens
ctaggggtaccctga

SEQ ID NO: 904443 - DNA, 15 bp, Homo sapiens
taggggtaccctgac

SEQ ID NO: 904444 - DNA, 15 bp, Homo sapiens
aggggtaccctgact

SEQ ID NO: 904445 - DNA, 15 bp, Homo sapiens
ggggtaccctgactt

SEQ ID NO: 904446 - DNA, 15 bp, Homo sapiens
gggtaccctgactta

SEQ ID NO: 904447 - DNA, 15 bp, Homo sapiens
ggtaccctgacttaa

SEQ ID NO: 904448 - DNA, 15 bp, Homo sapiens
gtaccctgacttaac

SEQ ID NO: 904449 - DNA, 15 bp, Homo sapiens
taccctgacttaaca

SEQ ID NO: 904450 - DNA, 15 bp, Homo sapiens
accctgacttaacaa

SEQ ID NO: 904451 - DNA, 15 bp, Homo sapiens
ccctgacttaacaat

SEQ ID NO: 904452 - DNA, 15 bp, Homo sapiens
cctgacttaacaatt

SEQ ID NO: 904453 - DNA, 15 bp, Homo sapiens
ctgacttaacaattt

SEQ ID NO: 904454 - DNA, 15 bp, Homo sapiens
tgacttaacaatttt

SEQ ID NO: 904455 - DNA, 15 bp, Homo sapiens
gacttaacaattttg

SEQ ID NO: 904456 - DNA, 15 bp, Homo sapiens
acttaacaattttgg

SEQ ID NO: 904457 - DNA, 15 bp, Homo sapiens
cttaacaattttggc

SEQ ID NO: 904458 - DNA, 15 bp, Homo sapiens
ttaacaattttggcc

SEQ ID NO: 904459 - DNA, 15 bp, Homo sapiens
taacaattttggcca

SEQ ID NO: 904460 - DNA, 15 bp, Homo sapiens
aacaattttggccac

SEQ ID NO: 904461 - DNA, 15 bp, Homo sapiens
acaattttggccaca

SEQ ID NO: 904462 - DNA, 15 bp, Homo sapiens
caattttggccacaa

SEQ ID NO: 904463 - DNA, 15 bp, Homo sapiens
aattttggccacaaa

SEQ ID NO: 904464 - DNA, 15 bp, Homo sapiens
attttggccacaaac

SEQ ID NO: 904465 - DNA, 15 bp, Homo sapiens
ttttggccacaaaca

SEQ ID NO: 904466 - DNA, 15 bp, Homo sapiens
tttggccacaaacag

SEQ ID NO: 904467 - DNA, 15 bp, Homo sapiens
ttggccacaaacaga

SEQ ID NO: 904468 - DNA, 15 bp, Homo sapiens
tggccacaaacagac

SEQ ID NO: 904469 - DNA, 15 bp, Homo sapiens
ggccacaaacagact

SEQ ID NO: 904470 - DNA, 15 bp, Homo sapiens
gccacaaacagactg

SEQ ID NO: 904471 - DNA, 15 bp, Homo sapiens
ccacaaacagactgc

SEQ ID NO: 904472 - DNA, 15 bp, Homo sapiens
cacaaacagactgcc

SEQ ID NO: 904473 - DNA, 15 bp, Homo sapiens
acaaacagactgcct

SEQ ID NO: 904474 - DNA, 15 bp, Homo sapiens
caaacagactgccta

SEQ ID NO: 904475 - DNA, 15 bp, Homo sapiens
aaacagactgcctat

SEQ ID NO: 904476 - DNA, 15 bp, Homo sapiens
aacagactgcctatc

SEQ ID NO: 904477 - DNA, 15 bp, Homo sapiens
acagactgcctatct

SEQ ID NO: 904478 - DNA, 15 bp, Homo sapiens
cagactgcctatctt

SEQ ID NO: 904479 - DNA, 15 bp, Homo sapiens
agactgcctatcttt

SEQ ID NO: 904480 - DNA, 15 bp, Homo sapiens
gactgcctatctttg

SEQ ID NO: 904481 - DNA, 15 bp, Homo sapiens
actgcctatctttgc

SEQ ID NO: 904482 - DNA, 15 bp, Homo sapiens
ctgcctatctttgct

SEQ ID NO: 904483 - DNA, 15 bp, Homo sapiens
tgcctatctttgctt

SEQ ID NO: 904484 - DNA, 15 bp, Homo sapiens
gcctatctttgcttt

SEQ ID NO: 904485 - DNA, 15 bp, Homo sapiens
cctatctttgctttg

SEQ ID NO: 904486 - DNA, 15 bp, Homo sapiens
ctatctttgctttga

SEQ ID NO: 904487 - DNA, 15 bp, Homo sapiens
tatctttgctttgaa

SEQ ID NO: 904488 - DNA, 15 bp, Homo sapiens
atctttgctttgaac

SEQ ID NO: 904489 - DNA, 15 bp, Homo sapiens
tctttgctttgaact

SEQ ID NO: 904490 - DNA, 15 bp, Homo sapiens
ctttgctttgaactt

SEQ ID NO: 904491 - DNA, 15 bp, Homo sapiens
tttgctttgaacttc

SEQ ID NO: 904492 - DNA, 15 bp, Homo sapiens
ttgctttgaacttcc

SEQ ID NO: 904493 - DNA, 15 bp, Homo sapiens
tgctttgaacttccc

SEQ ID NO: 904494 - DNA, 15 bp, Homo sapiens
gctttgaacttccct

SEQ ID NO: 904495 - DNA, 15 bp, Homo sapiens
ctttgaacttccctg

SEQ ID NO: 904496 - DNA, 15 bp, Homo sapiens
tttgaacttccctga

SEQ ID NO: 904497 - DNA, 15 bp, Homo sapiens
ttgaacttccctgac

SEQ ID NO: 904498 - DNA, 15 bp, Homo sapiens
tgaacttccctgact

SEQ ID NO: 904499 - DNA, 15 bp, Homo sapiens
gaacttccctgactc

SEQ ID NO: 904500 - DNA, 15 bp, Homo sapiens
aacttccctgactct

SEQ ID NO: 904501 - DNA, 15 bp, Homo sapiens
acttccctgactcta

SEQ ID NO: 904502 - DNA, 15 bp, Homo sapiens
cttccctgactctac

SEQ ID NO: 904503 - DNA, 15 bp, Homo sapiens
ttccctgactctact

SEQ ID NO: 904504 - DNA, 15 bp, Homo sapiens
tccctgactctactt

SEQ ID NO: 904505 - DNA, 15 bp, Homo sapiens
ccctgactctacttg

SEQ ID NO: 904506 - DNA, 15 bp, Homo sapiens
cctgactctacttgt

SEQ ID NO: 904507 - DNA, 15 bp, Homo sapiens
ctgactctacttgta

SEQ ID NO: 904508 - DNA, 15 bp, Homo sapiens
tgactctacttgtat

SEQ ID NO: 904509 - DNA, 15 bp, Homo sapiens
gactctacttgtata

SEQ ID NO: 904510 - DNA, 15 bp, Homo sapiens
actctacttgtataa

SEQ ID NO: 904511 - DNA, 15 bp, Homo sapiens
ctctacttgtataaa

SEQ ID NO: 904512 - DNA, 15 bp, Homo sapiens
tctacttgtataaac

SEQ ID NO: 904513 - DNA, 15 bp, Homo sapiens
ctacttgtataaact

SEQ ID NO: 904514 - DNA, 15 bp, Homo sapiens
tacttgtataaactt

SEQ ID NO: 904515 - DNA, 15 bp, Homo sapiens
acttgtataaactta

SEQ ID NO: 904516 - DNA, 15 bp, Homo sapiens
cttgtataaacttaa

SEQ ID NO: 904517 - DNA, 15 bp, Homo sapiens
ttgtataaacttaat

SEQ ID NO: 904518 - DNA, 15 bp, Homo sapiens
tgtataaacttaatt

SEQ ID NO: 904519 - DNA, 15 bp, Homo sapiens
gtataaacttaattc

SEQ ID NO: 904520 - DNA, 15 bp, Homo sapiens
tataaacttaattcc

SEQ ID NO: 904521 - DNA, 15 bp, Homo sapiens
ataaacttaattcct

SEQ ID NO: 904522 - DNA, 15 bp, Homo sapiens
taaacttaattcctg

SEQ ID NO: 904523 - DNA, 15 bp, Homo sapiens
aaacttaattcctgg

SEQ ID NO: 904524 - DNA, 15 bp, Homo sapiens
aacttaattcctggg

SEQ ID NO: 904525 - DNA, 15 bp, Homo sapiens
acttaattcctgggg

SEQ ID NO: 904526 - DNA, 15 bp, Homo sapiens
cttaattcctgggga

SEQ ID NO: 904527 - DNA, 15 bp, Homo sapiens
ttaattcctggggaa

SEQ ID NO: 904528 - DNA, 15 bp, Homo sapiens
taattcctggggaaa

SEQ ID NO: 904529 - DNA, 15 bp, Homo sapiens
aattcctggggaaaa

SEQ ID NO: 904530 - DNA, 15 bp, Homo sapiens
attcctggggaaaaa

SEQ ID NO: 904531 - DNA, 15 bp, Homo sapiens
ttcctggggaaaaag

SEQ ID NO: 904532 - DNA, 15 bp, Homo sapiens
tcctggggaaaaagg

SEQ ID NO: 904533 - DNA, 15 bp, Homo sapiens
cctggggaaaaaggg

SEQ ID NO: 904534 - DNA, 15 bp, Homo sapiens
ctggggaaaaagggt

SEQ ID NO: 904535 - DNA, 15 bp, Homo sapiens
tggggaaaaagggtc

SEQ ID NO: 904536 - DNA, 15 bp, Homo sapiens
ggggaaaaagggtcc

SEQ ID NO: 904537 - DNA, 15 bp, Homo sapiens
gggaaaaagggtcct

SEQ ID NO: 904538 - DNA, 15 bp, Homo sapiens
ggaaaaagggtccta

SEQ ID NO: 904539 - DNA, 15 bp, Homo sapiens
gaaaaagggtcctac

SEQ ID NO: 904540 - DNA, 15 bp, Homo sapiens
aaaaagggtcctacc

SEQ ID NO: 904541 - DNA, 15 bp, Homo sapiens
aaaagggtcctaccc

SEQ ID NO: 904542 - DNA, 15 bp, Homo sapiens
aaagggtcctaccca

SEQ ID NO: 904543 - DNA, 15 bp, Homo sapiens
aagggtcctacccac

SEQ ID NO: 904544 - DNA, 15 bp, Homo sapiens
agggtcctacccaca

SEQ ID NO: 904545 - DNA, 15 bp, Homo sapiens
gggtcctacccacag

SEQ ID NO: 904546 - DNA, 15 bp, Homo sapiens
ggtcctacccacaga

SEQ ID NO: 904547 - DNA, 15 bp, Homo sapiens
gtcctacccacagag

SEQ ID NO: 904548 - DNA, 15 bp, Homo sapiens
tcctacccacagagg

SEQ ID NO: 904549 - DNA, 15 bp, Homo sapiens
cctacccacagaggc

SEQ ID NO: 904550 - DNA, 15 bp, Homo sapiens
ctacccacagaggcc

SEQ ID NO: 904551 - DNA, 15 bp, Homo sapiens
tacccacagaggccg

SEQ ID NO: 904552 - DNA, 15 bp, Homo sapiens
acccacagaggccgt

SEQ ID NO: 904553 - DNA, 15 bp, Homo sapiens
cccacagaggccgta

SEQ ID NO: 904554 - DNA, 15 bp, Homo sapiens
ccacagaggccgtat

SEQ ID NO: 904555 - DNA, 15 bp, Homo sapiens
cacagaggccgtatt

SEQ ID NO: 904556 - DNA, 15 bp, Homo sapiens
acagaggccgtattt

SEQ ID NO: 904557 - DNA, 15 bp, Homo sapiens
cagaggccgtatttc

SEQ ID NO: 904558 - DNA, 15 bp, Homo sapiens
agaggccgtatttct

SEQ ID NO: 904559 - DNA, 15 bp, Homo sapiens
gaggccgtatttctg

SEQ ID NO: 904560 - DNA, 15 bp, Homo sapiens
aggccgtatttctgc

SEQ ID NO: 904561 - DNA, 15 bp, Homo sapiens
ggccgtatttctgcc

SEQ ID NO: 904562 - DNA, 15 bp, Homo sapiens
gccgtatttctgcct

SEQ ID NO: 904563 - DNA, 15 bp, Homo sapiens
ccgtatttctgcctc

SEQ ID NO: 904564 - DNA, 15 bp, Homo sapiens
cgtatttctgcctca

SEQ ID NO: 904565 - DNA, 15 bp, Homo sapiens
gtatttctgcctcac

SEQ ID NO: 904566 - DNA, 15 bp, Homo sapiens
tatttctgcctcact

SEQ ID NO: 904567 - DNA, 15 bp, Homo sapiens
atttctgcctcactg

SEQ ID NO: 904568 - DNA, 15 bp, Homo sapiens
tttctgcctcactga

SEQ ID NO: 904569 - DNA, 15 bp, Homo sapiens
ttctgcctcactgaa

SEQ ID NO: 904570 - DNA, 15 bp, Homo sapiens
tctgcctcactgaac

SEQ ID NO: 904571 - DNA, 15 bp, Homo sapiens
ctgcctcactgaacc

SEQ ID NO: 904572 - DNA, 15 bp, Homo sapiens
tgcctcactgaacca

SEQ ID NO: 904573 - DNA, 15 bp, Homo sapiens
gcctcactgaaccat

SEQ ID NO: 904574 - DNA, 15 bp, Homo sapiens
cctcactgaaccatt

SEQ ID NO: 904575 - DNA, 15 bp, Homo sapiens
ctcactgaaccattc

SEQ ID NO: 904576 - DNA, 15 bp, Homo sapiens
tcactgaaccattcc

SEQ ID NO: 904577 - DNA, 15 bp, Homo sapiens
cactgaaccattcca

SEQ ID NO: 904578 - DNA, 15 bp, Homo sapiens
actgaaccattccaa

SEQ ID NO: 904579 - DNA, 15 bp, Homo sapiens
ctgaaccattccaat

SEQ ID NO: 904580 - DNA, 15 bp, Homo sapiens
tgaaccattccaatg

SEQ ID NO: 904581 - DNA, 15 bp, Homo sapiens
gaaccattccaatgg

SEQ ID NO: 904582 - DNA, 15 bp, Homo sapiens
aaccattccaatggt

SEQ ID NO: 904583 - DNA, 15 bp, Homo sapiens
accattccaatggtt

SEQ ID NO: 904584 - DNA, 15 bp, Homo sapiens
ccattccaatggttg

SEQ ID NO: 904585 - DNA, 15 bp, Homo sapiens
cattccaatggttga

SEQ ID NO: 904586 - DNA, 15 bp, Homo sapiens
attccaatggttgaa

SEQ ID NO: 904587 - DNA, 15 bp, Homo sapiens
ttccaatggttgaag

SEQ ID NO: 904588 - DNA, 15 bp, Homo sapiens
tccaatggttgaagg

SEQ ID NO: 904589 - DNA, 15 bp, Homo sapiens
ccaatggttgaagga

SEQ ID NO: 904590 - DNA, 15 bp, Homo sapiens
caatggttgaaggac

SEQ ID NO: 904591 - DNA, 15 bp, Homo sapiens
aatggttgaaggacc

SEQ ID NO: 904592 - DNA, 15 bp, Homo sapiens
atggttgaaggacca

SEQ ID NO: 904593 - DNA, 15 bp, Homo sapiens
tggttgaaggaccag

SEQ ID NO: 904594 - DNA, 15 bp, Homo sapiens
ggttgaaggaccagc

SEQ ID NO: 904595 - DNA, 15 bp, Homo sapiens
gttgaaggaccagct

SEQ ID NO: 904596 - DNA, 15 bp, Homo sapiens
ttgaaggaccagctt

SEQ ID NO: 904597 - DNA, 15 bp, Homo sapiens
tgaaggaccagcttc

SEQ ID NO: 904598 - DNA, 15 bp, Homo sapiens
gaaggaccagcttcc

SEQ ID NO: 904599 - DNA, 15 bp, Homo sapiens
aaggaccagcttcct

SEQ ID NO: 904600 - DNA, 15 bp, Homo sapiens
aggaccagcttcctt

SEQ ID NO: 904601 - DNA, 15 bp, Homo sapiens
ggaccagcttccttg

SEQ ID NO: 904602 - DNA, 15 bp, Homo sapiens
gaccagcttccttga

SEQ ID NO: 904603 - DNA, 15 bp, Homo sapiens
accagcttccttgag

SEQ ID NO: 904604 - DNA, 15 bp, Homo sapiens
ccagcttccttgaga

SEQ ID NO: 904605 - DNA, 15 bp, Homo sapiens
cagcttccttgagag

SEQ ID NO: 904606 - DNA, 15 bp, Homo sapiens
agcttccttgagagt

SEQ ID NO: 904607 - DNA, 15 bp, Homo sapiens
gcttccttgagagtc

SEQ ID NO: 904608 - DNA, 15 bp, Homo sapiens
cttccttgagagtcc

SEQ ID NO: 904609 - DNA, 15 bp, Homo sapiens
ttccttgagagtcca

SEQ ID NO: 904610 - DNA, 15 bp, Homo sapiens
tccttgagagtccac

SEQ ID NO: 904611 - DNA, 15 bp, Homo sapiens
ccttgagagtccact

SEQ ID NO: 904612 - DNA, 15 bp, Homo sapiens
cttgagagtccactt

SEQ ID NO: 904613 - DNA, 15 bp, Homo sapiens
ttgagagtccacttc

SEQ ID NO: 904614 - DNA, 15 bp, Homo sapiens
tgagagtccacttca

SEQ ID NO: 904615 - DNA, 15 bp, Homo sapiens
gagagtccacttcat

SEQ ID NO: 904616 - DNA, 15 bp, Homo sapiens
agagtccacttcatg

SEQ ID NO: 904617 - DNA, 15 bp, Homo sapiens
gagtccacttcatgg

SEQ ID NO: 904618 - DNA, 15 bp, Homo sapiens
agtccacttcatggg

SEQ ID NO: 904619 - DNA, 15 bp, Homo sapiens
gtccacttcatggga

SEQ ID NO: 904620 - DNA, 15 bp, Homo sapiens
tccacttcatgggag

SEQ ID NO: 904621 - DNA, 15 bp, Homo sapiens
ccacttcatgggaga

SEQ ID NO: 904622 - DNA, 15 bp, Homo sapiens
cacttcatgggagaa

SEQ ID NO: 904623 - DNA, 15 bp, Homo sapiens
acttcatgggagaat

SEQ ID NO: 904624 - DNA, 15 bp, Homo sapiens
cttcatgggagaatc

SEQ ID NO: 904625 - DNA, 15 bp, Homo sapiens
ttcatgggagaatca

SEQ ID NO: 904626 - DNA, 15 bp, Homo sapiens
tcatgggagaatcat

SEQ ID NO: 904627 - DNA, 15 bp, Homo sapiens
catgggagaatcatg

SEQ ID NO: 904628 - DNA, 15 bp, Homo sapiens
atgggagaatcatga

SEQ ID NO: 904629 - DNA, 15 bp, Homo sapiens
tgggagaatcatgac

SEQ ID NO: 904630 - DNA, 15 bp, Homo sapiens
gggagaatcatgacc

SEQ ID NO: 904631 - DNA, 15 bp, Homo sapiens
ggagaatcatgaccc

SEQ ID NO: 904632 - DNA, 15 bp, Homo sapiens
gagaatcatgacccg

SEQ ID NO: 904633 - DNA, 15 bp, Homo sapiens
agaatcatgacccgt

SEQ ID NO: 904634 - DNA, 15 bp, Homo sapiens
gaatcatgacccgtg

SEQ ID NO: 904635 - DNA, 15 bp, Homo sapiens
aatcatgacccgtga

SEQ ID NO: 904636 - DNA, 15 bp, Homo sapiens
atcatgacccgtgat

SEQ ID NO: 904637 - DNA, 15 bp, Homo sapiens
tcatgacccgtgata

SEQ ID NO: 904638 - DNA, 15 bp, Homo sapiens
catgacccgtgataa

SEQ ID NO: 904639 - DNA, 15 bp, Homo sapiens
atgacccgtgataat

SEQ ID NO: 904640 - DNA, 15 bp, Homo sapiens
tgacccgtgataata

SEQ ID NO: 904641 - DNA, 15 bp, Homo sapiens
gacccgtgataataa

SEQ ID NO: 904642 - DNA, 15 bp, Homo sapiens
acccgtgataataat

SEQ ID NO: 904643 - DNA, 15 bp, Homo sapiens
cccgtgataataata

SEQ ID NO: 904644 - DNA, 15 bp, Homo sapiens
ccgtgataataatag

SEQ ID NO: 904645 - DNA, 15 bp, Homo sapiens
cgtgataataatagg

SEQ ID NO: 904646 - DNA, 15 bp, Homo sapiens
gtgataataataggc

SEQ ID NO: 904647 - DNA, 15 bp, Homo sapiens
tgataataataggcc

SEQ ID NO: 904648 - DNA, 15 bp, Homo sapiens
gataataataggcct

SEQ ID NO: 904649 - DNA, 15 bp, Homo sapiens
ataataataggcctg

SEQ ID NO: 904650 - DNA, 15 bp, Homo sapiens
taataataggcctgg

SEQ ID NO: 904651 - DNA, 15 bp, Homo sapiens
aataataggcctggc

SEQ ID NO: 904652 - DNA, 15 bp, Homo sapiens
ataataggcctggcc

SEQ ID NO: 904653 - DNA, 15 bp, Homo sapiens
taataggcctggcca

SEQ ID NO: 904654 - DNA, 15 bp, Homo sapiens
aataggcctggccag

SEQ ID NO: 904655 - DNA, 15 bp, Homo sapiens
ataggcctggccaga

SEQ ID NO: 904656 - DNA, 15 bp, Homo sapiens
taggcctggccagaa

SEQ ID NO: 904657 - DNA, 15 bp, Homo sapiens
aggcctggccagaat

SEQ ID NO: 904658 - DNA, 15 bp, Homo sapiens
ggcctggccagaata

SEQ ID NO: 904659 - DNA, 15 bp, Homo sapiens
gcctggccagaataa

SEQ ID NO: 904660 - DNA, 15 bp, Homo sapiens
cctggccagaataat

SEQ ID NO: 904661 - DNA, 15 bp, Homo sapiens
ctggccagaataatc

SEQ ID NO: 904662 - DNA, 15 bp, Homo sapiens
tggccagaataatcc

SEQ ID NO: 904663 - DNA, 15 bp, Homo sapiens
ggccagaataatcct

SEQ ID NO: 904664 - DNA, 15 bp, Homo sapiens
gccagaataatcctt

SEQ ID NO: 904665 - DNA, 15 bp, Homo sapiens
ccagaataatccttc

SEQ ID NO: 904666 - DNA, 15 bp, Homo sapiens
cagaataatccttcc

SEQ ID NO: 904667 - DNA, 15 bp, Homo sapiens
agaataatccttcca

SEQ ID NO: 904668 - DNA, 15 bp, Homo sapiens
gaataatccttccag

SEQ ID NO: 904669 - DNA, 15 bp, Homo sapiens
aataatccttccagt

SEQ ID NO: 904670 - DNA, 15 bp, Homo sapiens
ataatccttccagtg

SEQ ID NO: 904671 - DNA, 15 bp, Homo sapiens
taatccttccagtgc

SEQ ID NO: 904672 - DNA, 15 bp, Homo sapiens
aatccttccagtgcg

SEQ ID NO: 904673 - DNA, 15 bp, Homo sapiens
atccttccagtgcga

SEQ ID NO: 904674 - DNA, 15 bp, Homo sapiens
tccttccagtgcgag

SEQ ID NO: 904675 - DNA, 15 bp, Homo sapiens
ccttccagtgcgagg

SEQ ID NO: 904676 - DNA, 15 bp, Homo sapiens
cttccagtgcgaggt

SEQ ID NO: 904677 - DNA, 15 bp, Homo sapiens
ttccagtgcgaggta

SEQ ID NO: 904678 - DNA, 15 bp, Homo sapiens
tccagtgcgaggtag

SEQ ID NO: 904679 - DNA, 15 bp, Homo sapiens
ccagtgcgaggtagg

SEQ ID NO: 904680 - DNA, 15 bp, Homo sapiens
cagtgcgaggtaggc

SEQ ID NO: 904681 - DNA, 15 bp, Homo sapiens
agtgcgaggtaggcc

SEQ ID NO: 904682 - DNA, 15 bp, Homo sapiens
gtgcgaggtaggcca

SEQ ID NO: 904683 - DNA, 15 bp, Homo sapiens
tgcgaggtaggccaa

SEQ ID NO: 904684 - DNA, 15 bp, Homo sapiens
gcgaggtaggccaac

SEQ ID NO: 904685 - DNA, 15 bp, Homo sapiens
cgaggtaggccaacc

SEQ ID NO: 904686 - DNA, 15 bp, Homo sapiens
gaggtaggccaacct

SEQ ID NO: 904687 - DNA, 15 bp, Homo sapiens
aggtaggccaacctc

SEQ ID NO: 904688 - DNA, 15 bp, Homo sapiens
ggtaggccaacctcc

SEQ ID NO: 904689 - DNA, 15 bp, Homo sapiens
gtaggccaacctcct

SEQ ID NO: 904690 - DNA, 15 bp, Homo sapiens
taggccaacctcctg

SEQ ID NO: 904691 - DNA, 15 bp, Homo sapiens
aggccaacctcctgg

SEQ ID NO: 904692 - DNA, 15 bp, Homo sapiens
ggccaacctcctggc

SEQ ID NO: 904693 - DNA, 15 bp, Homo sapiens
gccaacctcctggcc

SEQ ID NO: 904694 - DNA, 15 bp, Homo sapiens
ccaacctcctggccc

SEQ ID NO: 904695 - DNA, 15 bp, Homo sapiens
caacctcctggccca

SEQ ID NO: 904696 - DNA, 15 bp, Homo sapiens
aacctcctggcccag

SEQ ID NO: 904697 - DNA, 15 bp, Homo sapiens
acctcctggcccaga

SEQ ID NO: 904698 - DNA, 15 bp, Homo sapiens
cctcctggcccagaa

SEQ ID NO: 904699 - DNA, 15 bp, Homo sapiens
ctcctggcccagaaa

SEQ ID NO: 904700 - DNA, 15 bp, Homo sapiens
tcctggcccagaaat

SEQ ID NO: 904701 - DNA, 15 bp, Homo sapiens
cctggcccagaaatc

SEQ ID NO: 904702 - DNA, 15 bp, Homo sapiens
ctggcccagaaatca

SEQ ID NO: 904703 - DNA, 15 bp, Homo sapiens
tggcccagaaatcag

SEQ ID NO: 904704 - DNA, 15 bp, Homo sapiens
ggcccagaaatcagg

SEQ ID NO: 904705 - DNA, 15 bp, Homo sapiens
gcccagaaatcaggc

SEQ ID NO: 904706 - DNA, 15 bp, Homo sapiens
cccagaaatcaggct

SEQ ID NO: 904707 - DNA, 15 bp, Homo sapiens
ccagaaatcaggctt

SEQ ID NO: 904708 - DNA, 15 bp, Homo sapiens
cagaaatcaggctta

SEQ ID NO: 904709 - DNA, 15 bp, Homo sapiens
agaaatcaggcttaa

SEQ ID NO: 904710 - DNA, 15 bp, Homo sapiens
gaaatcaggcttaat

SEQ ID NO: 904711 - DNA, 15 bp, Homo sapiens
aaatcaggcttaatt

SEQ ID NO: 904712 - DNA, 15 bp, Homo sapiens
aatcaggcttaattg

SEQ ID NO: 904713 - DNA, 15 bp, Homo sapiens
atcaggcttaattgg

SEQ ID NO: 904714 - DNA, 15 bp, Homo sapiens
tcaggcttaattgga

SEQ ID NO: 904715 - DNA, 15 bp, Homo sapiens
caggcttaattggaa

SEQ ID NO: 904716 - DNA, 15 bp, Homo sapiens
aggcttaattggaaa

SEQ ID NO: 904717 - DNA, 15 bp, Homo sapiens
ggcttaattggaaat

SEQ ID NO: 904718 - DNA, 15 bp, Homo sapiens
gcttaattggaaatt

SEQ ID NO: 904719 - DNA, 15 bp, Homo sapiens
cttaattggaaatta

SEQ ID NO: 904720 - DNA, 15 bp, Homo sapiens
ttaattggaaattaa

SEQ ID NO: 904721 - DNA, 15 bp, Homo sapiens
taattggaaattaaa

SEQ ID NO: 904722 - DNA, 15 bp, Homo sapiens
aattggaaattaaat

SEQ ID NO: 904723 - DNA, 15 bp, Homo sapiens
attggaaattaaatt

SEQ ID NO: 904724 - DNA, 15 bp, Homo sapiens
ttggaaattaaattg

SEQ ID NO: 904725 - DNA, 15 bp, Homo sapiens
tggaaattaaattgc

SEQ ID NO: 904726 - DNA, 15 bp, Homo sapiens
ggaaattaaattgct

SEQ ID NO: 904727 - DNA, 15 bp, Homo sapiens
gaaattaaattgctt

SEQ ID NO: 904728 - DNA, 15 bp, Homo sapiens
aaattaaattgcttt

SEQ ID NO: 904729 - DNA, 15 bp, Homo sapiens
aattaaattgctttc

SEQ ID NO: 904730 - DNA, 15 bp, Homo sapiens
attaaattgctttcc

SEQ ID NO: 904731 - DNA, 15 bp, Homo sapiens
ttaaattgctttccc

SEQ ID NO: 904732 - DNA, 15 bp, Homo sapiens
taaattgctttccca

SEQ ID NO: 904733 - DNA, 15 bp, Homo sapiens
aaattgctttcccat

SEQ ID NO: 904734 - DNA, 15 bp, Homo sapiens
aattgctttcccatg

SEQ ID NO: 904735 - DNA, 15 bp, Homo sapiens
attgctttcccatgc

SEQ ID NO: 904736 - DNA, 15 bp, Homo sapiens
ttgctttcccatgcc

SEQ ID NO: 904737 - DNA, 15 bp, Homo sapiens
tgctttcccatgcca

SEQ ID NO: 904738 - DNA, 15 bp, Homo sapiens
gctttcccatgccaa

SEQ ID NO: 904739 - DNA, 15 bp, Homo sapiens
ctttcccatgccaac

SEQ ID NO: 904740 - DNA, 15 bp, Homo sapiens
tttcccatgccaact

SEQ ID NO: 904741 - DNA, 15 bp, Homo sapiens
ttcccatgccaactg

SEQ ID NO: 904742 - DNA, 15 bp, Homo sapiens
tcccatgccaactgc

SEQ ID NO: 904743 - DNA, 15 bp, Homo sapiens
cccatgccaactgca

SEQ ID NO: 904744 - DNA, 15 bp, Homo sapiens
ccatgccaactgcaa

SEQ ID NO: 904745 - DNA, 15 bp, Homo sapiens
catgccaactgcaag

SEQ ID NO: 904746 - DNA, 15 bp, Homo sapiens
atgccaactgcaaga

SEQ ID NO: 904747 - DNA, 15 bp, Homo sapiens
tgccaactgcaagac

SEQ ID NO: 904748 - DNA, 15 bp, Homo sapiens
gccaactgcaagacg

SEQ ID NO: 904749 - DNA, 15 bp, Homo sapiens
ccaactgcaagacgc

SEQ ID NO: 904750 - DNA, 15 bp, Homo sapiens
caactgcaagacgcc

SEQ ID NO: 904751 - DNA, 15 bp, Homo sapiens
aactgcaagacgcct

SEQ ID NO: 904752 - DNA, 15 bp, Homo sapiens
actgcaagacgccta

SEQ ID NO: 904753 - DNA, 15 bp, Homo sapiens
ctgcaagacgcctat

SEQ ID NO: 904754 - DNA, 15 bp, Homo sapiens
tgcaagacgcctata

SEQ ID NO: 904755 - DNA, 15 bp, Homo sapiens
gcaagacgcctatat

SEQ ID NO: 904756 - DNA, 15 bp, Homo sapiens
caagacgcctatatc

SEQ ID NO: 904757 - DNA, 15 bp, Homo sapiens
aagacgcctatatct

SEQ ID NO: 904758 - DNA, 15 bp, Homo sapiens
agacgcctatatcta

SEQ ID NO: 904759 - DNA, 15 bp, Homo sapiens
gacgcctatatctac

SEQ ID NO: 904760 - DNA, 15 bp, Homo sapiens
acgcctatatctaca

SEQ ID NO: 904761 - DNA, 15 bp, Homo sapiens
cgcctatatctacag

SEQ ID NO: 904762 - DNA, 15 bp, Homo sapiens
gcctatatctacagc

SEQ ID NO: 904763 - DNA, 15 bp, Homo sapiens
cctatatctacagct

SEQ ID NO: 904764 - DNA, 15 bp, Homo sapiens
ctatatctacagcta

SEQ ID NO: 904765 - DNA, 15 bp, Homo sapiens
tatatctacagctaa

SEQ ID NO: 904766 - DNA, 15 bp, Homo sapiens
atatctacagctaat

SEQ ID NO: 904767 - DNA, 15 bp, Homo sapiens
tatctacagctaatt

SEQ ID NO: 904768 - DNA, 15 bp, Homo sapiens
atctacagctaattt

SEQ ID NO: 904769 - DNA, 15 bp, Homo sapiens
tctacagctaattta

SEQ ID NO: 904770 - DNA, 15 bp, Homo sapiens
ctacagctaatttat

SEQ ID NO: 904771 - DNA, 15 bp, Homo sapiens
tacagctaatttatc

SEQ ID NO: 904772 - DNA, 15 bp, Homo sapiens
acagctaatttatca

SEQ ID NO: 904773 - DNA, 15 bp, Homo sapiens
cagctaatttatcaa

SEQ ID NO: 904774 - DNA, 15 bp, Homo sapiens
agctaatttatcaag

SEQ ID NO: 904775 - DNA, 15 bp, Homo sapiens
gctaatttatcaagg

SEQ ID NO: 904776 - DNA, 15 bp, Homo sapiens
ctaatttatcaaggt

SEQ ID NO: 904777 - DNA, 15 bp, Homo sapiens
taatttatcaaggtg

SEQ ID NO: 904778 - DNA, 15 bp, Homo sapiens
aatttatcaaggtga

SEQ ID NO: 904779 - DNA, 15 bp, Homo sapiens
atttatcaaggtgat

SEQ ID NO: 904780 - DNA, 15 bp, Homo sapiens
tttatcaaggtgatg

SEQ ID NO: 904781 - DNA, 15 bp, Homo sapiens
ttatcaaggtgatgc

SEQ ID NO: 904782 - DNA, 15 bp, Homo sapiens
tatcaaggtgatgcc

SEQ ID NO: 904783 - DNA, 15 bp, Homo sapiens
atcaaggtgatgcct

SEQ ID NO: 904784 - DNA, 15 bp, Homo sapiens
tcaaggtgatgcctt

SEQ ID NO: 904785 - DNA, 15 bp, Homo sapiens
caaggtgatgcctta

SEQ ID NO: 904786 - DNA, 15 bp, Homo sapiens
aaggtgatgccttat

SEQ ID NO: 904787 - DNA, 15 bp, Homo sapiens
aggtgatgccttatc

SEQ ID NO: 904788 - DNA, 15 bp, Homo sapiens
ggtgatgccttatct

SEQ ID NO: 904789 - DNA, 15 bp, Homo sapiens
gtgatgccttatctc

SEQ ID NO: 904790 - DNA, 15 bp, Homo sapiens
tgatgccttatctca

SEQ ID NO: 904791 - DNA, 15 bp, Homo sapiens
gatgccttatctcaa

SEQ ID NO: 904792 - DNA, 15 bp, Homo sapiens
atgccttatctcaag

SEQ ID NO: 904793 - DNA, 15 bp, Homo sapiens
tgccttatctcaagg

SEQ ID NO: 904794 - DNA, 15 bp, Homo sapiens
gccttatctcaagga

SEQ ID NO: 904795 - DNA, 15 bp, Homo sapiens
ccttatctcaaggaa

SEQ ID NO: 904796 - DNA, 15 bp, Homo sapiens
cttatctcaaggaag

SEQ ID NO: 904797 - DNA, 15 bp, Homo sapiens
ttatctcaaggaagc

SEQ ID NO: 904798 - DNA, 15 bp, Homo sapiens
tatctcaaggaagcc

SEQ ID NO: 904799 - DNA, 15 bp, Homo sapiens
atctcaaggaagccc

SEQ ID NO: 904800 - DNA, 15 bp, Homo sapiens
tctcaaggaagccca

SEQ ID NO: 904801 - DNA, 15 bp, Homo sapiens
ctcaaggaagcccat

SEQ ID NO: 904802 - DNA, 15 bp, Homo sapiens
tcaaggaagcccatg

SEQ ID NO: 904803 - DNA, 15 bp, Homo sapiens
caaggaagcccatgg

SEQ ID NO: 904804 - DNA, 15 bp, Homo sapiens
aaggaagcccatggg

SEQ ID NO: 904805 - DNA, 15 bp, Homo sapiens
aggaagcccatggga

SEQ ID NO: 904806 - DNA, 15 bp, Homo sapiens
ggaagcccatgggaa

SEQ ID NO: 904807 - DNA, 15 bp, Homo sapiens
gaagcccatgggaat

SEQ ID NO: 904808 - DNA, 15 bp, Homo sapiens
aagcccatgggaata

SEQ ID NO: 904809 - DNA, 15 bp, Homo sapiens
agcccatgggaatag

SEQ ID NO: 904810 - DNA, 15 bp, Homo sapiens
gcccatgggaataga

SEQ ID NO: 904811 - DNA, 15 bp, Homo sapiens
cccatgggaatagag

SEQ ID NO: 904812 - DNA, 15 bp, Homo sapiens
ccatgggaatagagt

SEQ ID NO: 904813 - DNA, 15 bp, Homo sapiens
catgggaatagagtg

SEQ ID NO: 904814 - DNA, 15 bp, Homo sapiens
atgggaatagagtgg

SEQ ID NO: 904815 - DNA, 15 bp, Homo sapiens
tgggaatagagtggc

SEQ ID NO: 904816 - DNA, 15 bp, Homo sapiens
gggaatagagtggct

SEQ ID NO: 904817 - DNA, 15 bp, Homo sapiens
ggaatagagtggctg

SEQ ID NO: 904818 - DNA, 15 bp, Homo sapiens
gaatagagtggctgc

SEQ ID NO: 904819 - DNA, 15 bp, Homo sapiens
aatagagtggctgca

SEQ ID NO: 904820 - DNA, 15 bp, Homo sapiens
atagagtggctgcat

SEQ ID NO: 904821 - DNA, 15 bp, Homo sapiens
tagagtggctgcatc

SEQ ID NO: 904822 - DNA, 15 bp, Homo sapiens
agagtggctgcatca

SEQ ID NO: 904823 - DNA, 15 bp, Homo sapiens
gagtggctgcatcag

SEQ ID NO: 904824 - DNA, 15 bp, Homo sapiens
agtggctgcatcagc

SEQ ID NO: 904825 - DNA, 15 bp, Homo sapiens
gtggctgcatcagca

SEQ ID NO: 904826 - DNA, 15 bp, Homo sapiens
tggctgcatcagcaa

SEQ ID NO: 904827 - DNA, 15 bp, Homo sapiens
ggctgcatcagcaaa

SEQ ID NO: 904828 - DNA, 15 bp, Homo sapiens
gctgcatcagcaaaa

SEQ ID NO: 904829 - DNA, 15 bp, Homo sapiens
ctgcatcagcaaaag

SEQ ID NO: 904830 - DNA, 15 bp, Homo sapiens
tgcatcagcaaaagt

SEQ ID NO: 904831 - DNA, 15 bp, Homo sapiens
gcatcagcaaaagtg

SEQ ID NO: 904832 - DNA, 15 bp, Homo sapiens
catcagcaaaagtgc

SEQ ID NO: 904833 - DNA, 15 bp, Homo sapiens
atcagcaaaagtgca

SEQ ID NO: 904834 - DNA, 15 bp, Homo sapiens
tcagcaaaagtgcaa

SEQ ID NO: 904835 - DNA, 15 bp, Homo sapiens
cagcaaaagtgcaaa

SEQ ID NO: 904836 - DNA, 15 bp, Homo sapiens
agcaaaagtgcaaac

SEQ ID NO: 904837 - DNA, 15 bp, Homo sapiens
gcaaaagtgcaaact

SEQ ID NO: 904838 - DNA, 15 bp, Homo sapiens
caaaagtgcaaactt

SEQ ID NO: 904839 - DNA, 15 bp, Homo sapiens
aaaagtgcaaacttg

SEQ ID NO: 904840 - DNA, 15 bp, Homo sapiens
aaagtgcaaacttgg

SEQ ID NO: 904841 - DNA, 15 bp, Homo sapiens
aagtgcaaacttggt

SEQ ID NO: 904842 - DNA, 15 bp, Homo sapiens
agtgcaaacttggtc

SEQ ID NO: 904843 - DNA, 15 bp, Homo sapiens
gtgcaaacttggtcc

SEQ ID NO: 904844 - DNA, 15 bp, Homo sapiens
tgcaaacttggtcct

SEQ ID NO: 904845 - DNA, 15 bp, Homo sapiens
gcaaacttggtcctg

SEQ ID NO: 904846 - DNA, 15 bp, Homo sapiens
caaacttggtcctga

SEQ ID NO: 904847 - DNA, 15 bp, Homo sapiens
aaacttggtcctgat

SEQ ID NO: 904848 - DNA, 15 bp, Homo sapiens
aacttggtcctgatg

SEQ ID NO: 904849 - DNA, 15 bp, Homo sapiens
acttggtcctgatga

SEQ ID NO: 904850 - DNA, 15 bp, Homo sapiens
cttggtcctgatgag

SEQ ID NO: 904851 - DNA, 15 bp, Homo sapiens
ttggtcctgatgaga

SEQ ID NO: 904852 - DNA, 15 bp, Homo sapiens
tggtcctgatgagaa

SEQ ID NO: 904853 - DNA, 15 bp, Homo sapiens
ggtcctgatgagaag

SEQ ID NO: 904854 - DNA, 15 bp, Homo sapiens
gtcctgatgagaaga

SEQ ID NO: 904855 - DNA, 15 bp, Homo sapiens
tcctgatgagaagag

SEQ ID NO: 904856 - DNA, 15 bp, Homo sapiens
cctgatgagaagagt

SEQ ID NO: 904857 - DNA, 15 bp, Homo sapiens
ctgatgagaagagtt

SEQ ID NO: 904858 - DNA, 15 bp, Homo sapiens
tgatgagaagagttt

SEQ ID NO: 904859 - DNA, 15 bp, Homo sapiens
gatgagaagagtttt

SEQ ID NO: 904860 - DNA, 15 bp, Homo sapiens
atgagaagagttttc

SEQ ID NO: 904861 - DNA, 15 bp, Homo sapiens
tgagaagagttttct

SEQ ID NO: 904862 - DNA, 15 bp, Homo sapiens
gagaagagttttctt

SEQ ID NO: 904863 - DNA, 15 bp, Homo sapiens
agaagagttttcttt

SEQ ID NO: 904864 - DNA, 15 bp, Homo sapiens
gaagagttttcttta

SEQ ID NO: 904865 - DNA, 15 bp, Homo sapiens
aagagttttctttaa

SEQ ID NO: 904866 - DNA, 15 bp, Homo sapiens
agagttttctttaaa

SEQ ID NO: 904867 - DNA, 15 bp, Homo sapiens
gagttttctttaaag

SEQ ID NO: 904868 - DNA, 15 bp, Homo sapiens
agttttctttaaagt

SEQ ID NO: 904869 - DNA, 15 bp, Homo sapiens
gttttctttaaagta

SEQ ID NO: 904870 - DNA, 15 bp, Homo sapiens
ttttctttaaagtac

SEQ ID NO: 904871 - DNA, 15 bp, Homo sapiens
tttctttaaagtaca

SEQ ID NO: 904872 - DNA, 15 bp, Homo sapiens
ttctttaaagtacag

SEQ ID NO: 904873 - DNA, 15 bp, Homo sapiens
tctttaaagtacagc

SEQ ID NO: 904874 - DNA, 15 bp, Homo sapiens
ctttaaagtacagct

SEQ ID NO: 904875 - DNA, 15 bp, Homo sapiens
tttaaagtacagctt

SEQ ID NO: 904876 - DNA, 15 bp, Homo sapiens
ttaaagtacagcttg

SEQ ID NO: 904877 - DNA, 15 bp, Homo sapiens
taaagtacagcttga

SEQ ID NO: 904878 - DNA, 15 bp, Homo sapiens
aaagtacagcttgaa

SEQ ID NO: 904879 - DNA, 15 bp, Homo sapiens
aagtacagcttgaac

SEQ ID NO: 904880 - DNA, 15 bp, Homo sapiens
agtacagcttgaacc

SEQ ID NO: 904881 - DNA, 15 bp, Homo sapiens
gtacagcttgaaccc

SEQ ID NO: 904882 - DNA, 15 bp, Homo sapiens
tacagcttgaaccct

SEQ ID NO: 904883 - DNA, 15 bp, Homo sapiens
acagcttgaaccctt

SEQ ID NO: 904884 - DNA, 15 bp, Homo sapiens
cagcttgaacccttt

SEQ ID NO: 904885 - DNA, 15 bp, Homo sapiens
agcttgaaccctttg

SEQ ID NO: 904886 - DNA, 15 bp, Homo sapiens
gcttgaaccctttga

SEQ ID NO: 904887 - DNA, 15 bp, Homo sapiens
cttgaaccctttgag

SEQ ID NO: 904888 - DNA, 15 bp, Homo sapiens
ttgaaccctttgaga

SEQ ID NO: 904889 - DNA, 15 bp, Homo sapiens
tgaaccctttgagat

SEQ ID NO: 904890 - DNA, 15 bp, Homo sapiens
gaaccctttgagatt

SEQ ID NO: 904891 - DNA, 15 bp, Homo sapiens
aaccctttgagattc

SEQ ID NO: 904892 - DNA, 15 bp, Homo sapiens
accctttgagattct

SEQ ID NO: 904893 - DNA, 15 bp, Homo sapiens
ccctttgagattctc

SEQ ID NO: 904894 - DNA, 15 bp, Homo sapiens
cctttgagattctca

SEQ ID NO: 904895 - DNA, 15 bp, Homo sapiens
ctttgagattctcat

SEQ ID NO: 904896 - DNA, 15 bp, Homo sapiens
tttgagattctcatt

SEQ ID NO: 904897 - DNA, 15 bp, Homo sapiens
ttgagattctcattt

SEQ ID NO: 904898 - DNA, 15 bp, Homo sapiens
tgagattctcatttg

SEQ ID NO: 904899 - DNA, 15 bp, Homo sapiens
gagattctcatttgg

SEQ ID NO: 904900 - DNA, 15 bp, Homo sapiens
agattctcatttggg

SEQ ID NO: 904901 - DNA, 15 bp, Homo sapiens
gattctcatttgggg

SEQ ID NO: 904902 - DNA, 15 bp, Homo sapiens
attctcatttggggt

SEQ ID NO: 904903 - DNA, 15 bp, Homo sapiens
ttctcatttggggtt

SEQ ID NO: 904904 - DNA, 15 bp, Homo sapiens
tctcatttggggttc

SEQ ID NO: 904905 - DNA, 15 bp, Homo sapiens
ctcatttggggttca

SEQ ID NO: 904906 - DNA, 15 bp, Homo sapiens
tcatttggggttcag

SEQ ID NO: 904907 - DNA, 15 bp, Homo sapiens
catttggggttcagt

SEQ ID NO: 904908 - DNA, 15 bp, Homo sapiens
atttggggttcagtg

SEQ ID NO: 904909 - DNA, 15 bp, Homo sapiens
tttggggttcagtgc

SEQ ID NO: 904910 - DNA, 15 bp, Homo sapiens
ttggggttcagtgca

SEQ ID NO: 904911 - DNA, 15 bp, Homo sapiens
tggggttcagtgcat

SEQ ID NO: 904912 - DNA, 15 bp, Homo sapiens
ggggttcagtgcatt

SEQ ID NO: 904913 - DNA, 15 bp, Homo sapiens
gggttcagtgcattt

SEQ ID NO: 904914 - DNA, 15 bp, Homo sapiens
ggttcagtgcattta

SEQ ID NO: 904915 - DNA, 15 bp, Homo sapiens
gttcagtgcatttaa

SEQ ID NO: 904916 - DNA, 15 bp, Homo sapiens
ttcagtgcatttaat

SEQ ID NO: 904917 - DNA, 15 bp, Homo sapiens
tcagtgcatttaatg

SEQ ID NO: 904918 - DNA, 15 bp, Homo sapiens
cagtgcatttaatgg

SEQ ID NO: 904919 - DNA, 15 bp, Homo sapiens
agtgcatttaatggc

SEQ ID NO: 904920 - DNA, 15 bp, Homo sapiens
gtgcatttaatggct

SEQ ID NO: 904921 - DNA, 15 bp, Homo sapiens
tgcatttaatggctt

SEQ ID NO: 904922 - DNA, 15 bp, Homo sapiens
gcatttaatggcttc

SEQ ID NO: 904923 - DNA, 15 bp, Homo sapiens
catttaatggcttct

SEQ ID NO: 904924 - DNA, 15 bp, Homo sapiens
atttaatggcttctt

SEQ ID NO: 904925 - DNA, 15 bp, Homo sapiens
tttaatggcttcttc

SEQ ID NO: 904926 - DNA, 15 bp, Homo sapiens
ttaatggcttcttcc

SEQ ID NO: 904927 - DNA, 15 bp, Homo sapiens
taatggcttcttccc

SEQ ID NO: 904928 - DNA, 15 bp, Homo sapiens
aatggcttcttcccc

SEQ ID NO: 904929 - DNA, 15 bp, Homo sapiens
atggcttcttccccc

SEQ ID NO: 904930 - DNA, 15 bp, Homo sapiens
tggcttcttccccct

SEQ ID NO: 904931 - DNA, 15 bp, Homo sapiens
ggcttcttccccctt

SEQ ID NO: 904932 - DNA, 15 bp, Homo sapiens
gcttcttcccccttg

SEQ ID NO: 904933 - DNA, 15 bp, Homo sapiens
cttcttcccccttgc

SEQ ID NO: 904934 - DNA, 15 bp, Homo sapiens
ttcttcccccttgcc

SEQ ID NO: 904935 - DNA, 15 bp, Homo sapiens
tcttcccccttgcca

SEQ ID NO: 904936 - DNA, 15 bp, Homo sapiens
cttcccccttgccag

SEQ ID NO: 904937 - DNA, 15 bp, Homo sapiens
ttcccccttgccagg

SEQ ID NO: 904938 - DNA, 15 bp, Homo sapiens
tcccccttgccaggc

SEQ ID NO: 904939 - DNA, 15 bp, Homo sapiens
cccccttgccaggct

SEQ ID NO: 904940 - DNA, 15 bp, Homo sapiens
ccccttgccaggctc

SEQ ID NO: 904941 - DNA, 15 bp, Homo sapiens
cccttgccaggctct

SEQ ID NO: 904942 - DNA, 15 bp, Homo sapiens
ccttgccaggctctg

SEQ ID NO: 904943 - DNA, 15 bp, Homo sapiens
cttgccaggctctgt

SEQ ID NO: 904944 - DNA, 15 bp, Homo sapiens
ttgccaggctctgtg

SEQ ID NO: 904945 - DNA, 15 bp, Homo sapiens
tgccaggctctgtgc

SEQ ID NO: 904946 - DNA, 15 bp, Homo sapiens
gccaggctctgtgcc

SEQ ID NO: 904947 - DNA, 15 bp, Homo sapiens
ccaggctctgtgcca

SEQ ID NO: 904948 - DNA, 15 bp, Homo sapiens
caggctctgtgccag

SEQ ID NO: 904949 - DNA, 15 bp, Homo sapiens
aggctctgtgccagg

SEQ ID NO: 904950 - DNA, 15 bp, Homo sapiens
ggctctgtgccaggg

SEQ ID NO: 904951 - DNA, 15 bp, Homo sapiens
gctctgtgccagggc

SEQ ID NO: 904952 - DNA, 15 bp, Homo sapiens
ctctgtgccagggcc

SEQ ID NO: 904953 - DNA, 15 bp, Homo sapiens
tctgtgccagggcct

SEQ ID NO: 904954 - DNA, 15 bp, Homo sapiens
ctgtgccagggcctg

SEQ ID NO: 904955 - DNA, 15 bp, Homo sapiens
tgtgccagggcctgg

SEQ ID NO: 904956 - DNA, 15 bp, Homo sapiens
gtgccagggcctgga

SEQ ID NO: 904957 - DNA, 15 bp, Homo sapiens
tgccagggcctggag

SEQ ID NO: 904958 - DNA, 15 bp, Homo sapiens
gccagggcctggagg

SEQ ID NO: 904959 - DNA, 15 bp, Homo sapiens
ccagggcctggaggt

SEQ ID NO: 904960 - DNA, 15 bp, Homo sapiens
cagggcctggaggta

SEQ ID NO: 904961 - DNA, 15 bp, Homo sapiens
agggcctggaggtat

SEQ ID NO: 904962 - DNA, 15 bp, Homo sapiens
gggcctggaggtatg

SEQ ID NO: 904963 - DNA, 15 bp, Homo sapiens
ggcctggaggtatgg

SEQ ID NO: 904964 - DNA, 15 bp, Homo sapiens
gcctggaggtatgga

SEQ ID NO: 904965 - DNA, 15 bp, Homo sapiens
cctggaggtatggat

SEQ ID NO: 904966 - DNA, 15 bp, Homo sapiens
ctggaggtatggata

SEQ ID NO: 904967 - DNA, 15 bp, Homo sapiens
tggaggtatggatac

SEQ ID NO: 904968 - DNA, 15 bp, Homo sapiens
ggaggtatggatacc

SEQ ID NO: 904969 - DNA, 15 bp, Homo sapiens
gaggtatggatacca

SEQ ID NO: 904970 - DNA, 15 bp, Homo sapiens
aggtatggataccag

SEQ ID NO: 904971 - DNA, 15 bp, Homo sapiens
ggtatggataccagc

SEQ ID NO: 904972 - DNA, 15 bp, Homo sapiens
gtatggataccagcg

SEQ ID NO: 904973 - DNA, 15 bp, Homo sapiens
tatggataccagcgg

SEQ ID NO: 904974 - DNA, 15 bp, Homo sapiens
atggataccagcggg

SEQ ID NO: 904975 - DNA, 15 bp, Homo sapiens
tggataccagcgggg

SEQ ID NO: 904976 - DNA, 15 bp, Homo sapiens
ggataccagcggggc

SEQ ID NO: 904977 - DNA, 15 bp, Homo sapiens
gataccagcggggca

SEQ ID NO: 904978 - DNA, 15 bp, Homo sapiens
tccacagaatcccct

SEQ ID NO: 904979 - DNA, 15 bp, Homo sapiens
ccacagaatcccctt

SEQ ID NO: 904980 - DNA, 15 bp, Homo sapiens
cacagaatccccttt

SEQ ID NO: 904981 - DNA, 15 bp, Homo sapiens
acagaatcccctttg

SEQ ID NO: 904982 - DNA, 15 bp, Homo sapiens
cagaatcccctttgc

SEQ ID NO: 904983 - DNA, 15 bp, Homo sapiens
agaatcccctttgca

SEQ ID NO: 904984 - DNA, 15 bp, Homo sapiens
gaatcccctttgcac

SEQ ID NO: 904985 - DNA, 15 bp, Homo sapiens
aatcccctttgcaca

SEQ ID NO: 904986 - DNA, 15 bp, Homo sapiens
atcccctttgcacac

SEQ ID NO: 904987 - DNA, 15 bp, Homo sapiens
tcccctttgcacacc

SEQ ID NO: 904988 - DNA, 15 bp, Homo sapiens
cccctttgcacacca

SEQ ID NO: 904989 - DNA, 15 bp, Homo sapiens
ccctttgcacaccat

SEQ ID NO: 904990 - DNA, 15 bp, Homo sapiens
cctttgcacaccatg

SEQ ID NO: 904991 - DNA, 15 bp, Homo sapiens
ctttgcacaccatgg

SEQ ID NO: 904992 - DNA, 15 bp, Homo sapiens
tttgcacaccatggt

SEQ ID NO: 904993 - DNA, 15 bp, Homo sapiens
ttgcacaccatggtg

SEQ ID NO: 904994 - DNA, 15 bp, Homo sapiens
tgcacaccatggtgt

SEQ ID NO: 904995 - DNA, 15 bp, Homo sapiens
gcacaccatggtgta

SEQ ID NO: 904996 - DNA, 15 bp, Homo sapiens
cacaccatggtgtag

SEQ ID NO: 904997 - DNA, 15 bp, Homo sapiens
acaccatggtgtaga

SEQ ID NO: 904998 - DNA, 15 bp, Homo sapiens
caccatggtgtagag

SEQ ID NO: 904999 - DNA, 15 bp, Homo sapiens
accatggtgtagaga

SEQ ID NO: 905000 - DNA, 15 bp, Homo sapiens
ccatggtgtagagag

SEQ ID NO: 905001 - DNA, 15 bp, Homo sapiens
catggtgtagagagg

SEQ ID NO: 905002 - DNA, 15 bp, Homo sapiens
atggtgtagagaggg

SEQ ID NO: 905003 - DNA, 15 bp, Homo sapiens
tggtgtagagagggc

SEQ ID NO: 905004 - DNA, 15 bp, Homo sapiens
ggtgtagagagggct

SEQ ID NO: 905005 - DNA, 15 bp, Homo sapiens
gtgtagagagggctc

SEQ ID NO: 905006 - DNA, 15 bp, Homo sapiens
tgtagagagggctct

SEQ ID NO: 905007 - DNA, 15 bp, Homo sapiens
gtagagagggctctt

SEQ ID NO: 905008 - DNA, 15 bp, Homo sapiens
tagagagggctctta

SEQ ID NO: 905009 - DNA, 15 bp, Homo sapiens
agagagggctcttat

SEQ ID NO: 905010 - DNA, 15 bp, Homo sapiens
gagagggctcttata

SEQ ID NO: 905011 - DNA, 15 bp, Homo sapiens
agagggctcttatag

SEQ ID NO: 905012 - DNA, 15 bp, Homo sapiens
gagggctcttataga

SEQ ID NO: 905013 - DNA, 15 bp, Homo sapiens
agggctcttatagaa

SEQ ID NO: 905014 - DNA, 15 bp, Homo sapiens
gggctcttatagaag

SEQ ID NO: 905015 - DNA, 15 bp, Homo sapiens
ggctcttatagaagg

SEQ ID NO: 905016 - DNA, 15 bp, Homo sapiens
gctcttatagaaggg

SEQ ID NO: 905017 - DNA, 15 bp, Homo sapiens
ctcttatagaagggg

SEQ ID NO: 905018 - DNA, 15 bp, Homo sapiens
tcttatagaagggga

SEQ ID NO: 905019 - DNA, 15 bp, Homo sapiens
cttatagaaggggaa

SEQ ID NO: 905020 - DNA, 15 bp, Homo sapiens
ttatagaaggggaag

SEQ ID NO: 905021 - DNA, 15 bp, Homo sapiens
tatagaaggggaagg

SEQ ID NO: 905022 - DNA, 15 bp, Homo sapiens
atagaaggggaagga

SEQ ID NO: 905023 - DNA, 15 bp, Homo sapiens
tagaaggggaaggaa

SEQ ID NO: 905024 - DNA, 15 bp, Homo sapiens
agaaggggaaggaaa

SEQ ID NO: 905025 - DNA, 15 bp, Homo sapiens
gaaggggaaggaaag

SEQ ID NO: 905026 - DNA, 15 bp, Homo sapiens
aaggggaaggaaaga

SEQ ID NO: 905027 - DNA, 15 bp, Homo sapiens
aggggaaggaaagag

SEQ ID NO: 905028 - DNA, 15 bp, Homo sapiens
ggggaaggaaagagc

SEQ ID NO: 905029 - DNA, 15 bp, Homo sapiens
gggaaggaaagagca

SEQ ID NO: 905030 - DNA, 15 bp, Homo sapiens
ggaaggaaagagcag

SEQ ID NO: 905031 - DNA, 15 bp, Homo sapiens
gaaggaaagagcagc

SEQ ID NO: 905032 - DNA, 15 bp, Homo sapiens
aaggaaagagcagct

SEQ ID NO: 905033 - DNA, 15 bp, Homo sapiens
aggaaagagcagctt

SEQ ID NO: 905034 - DNA, 15 bp, Homo sapiens
ggaaagagcagcttg

SEQ ID NO: 905035 - DNA, 15 bp, Homo sapiens
gaaagagcagcttgt

SEQ ID NO: 905036 - DNA, 15 bp, Homo sapiens
aaagagcagcttgtg

SEQ ID NO: 905037 - DNA, 15 bp, Homo sapiens
aagagcagcttgtga

SEQ ID NO: 905038 - DNA, 15 bp, Homo sapiens
agagcagcttgtgag

SEQ ID NO: 905039 - DNA, 15 bp, Homo sapiens
gagcagcttgtgagt

SEQ ID NO: 905040 - DNA, 15 bp, Homo sapiens
agcagcttgtgagtt

SEQ ID NO: 905041 - DNA, 15 bp, Homo sapiens
gcagcttgtgagttc

SEQ ID NO: 905042 - DNA, 15 bp, Homo sapiens
cagcttgtgagttct

SEQ ID NO: 905043 - DNA, 15 bp, Homo sapiens
agcttgtgagttctg

SEQ ID NO: 905044 - DNA, 15 bp, Homo sapiens
gcttgtgagttctga

SEQ ID NO: 905045 - DNA, 15 bp, Homo sapiens
cttgtgagttctgat

SEQ ID NO: 905046 - DNA, 15 bp, Homo sapiens
ttgtgagttctgatg

SEQ ID NO: 905047 - DNA, 15 bp, Homo sapiens
tgtgagttctgatgc

SEQ ID NO: 905048 - DNA, 15 bp, Homo sapiens
gtgagttctgatgct

SEQ ID NO: 905049 - DNA, 15 bp, Homo sapiens
tgagttctgatgctg

SEQ ID NO: 905050 - DNA, 15 bp, Homo sapiens
gagttctgatgctgc

SEQ ID NO: 905051 - DNA, 15 bp, Homo sapiens
agttctgatgctgcc

SEQ ID NO: 905052 - DNA, 15 bp, Homo sapiens
gttctgatgctgccc

SEQ ID NO: 905053 - DNA, 15 bp, Homo sapiens
ttctgatgctgcccg

SEQ ID NO: 905054 - DNA, 15 bp, Homo sapiens
tctgatgctgcccgt

SEQ ID NO: 905055 - DNA, 15 bp, Homo sapiens
ctgatgctgcccgtt

SEQ ID NO: 905056 - DNA, 15 bp, Homo sapiens
tgatgctgcccgttt

SEQ ID NO: 905057 - DNA, 15 bp, Homo sapiens
gatgctgcccgtttg

SEQ ID NO: 905058 - DNA, 15 bp, Homo sapiens
atgctgcccgtttgt

SEQ ID NO: 905059 - DNA, 15 bp, Homo sapiens
tgctgcccgtttgtt

SEQ ID NO: 905060 - DNA, 15 bp, Homo sapiens
gctgcccgtttgttt

SEQ ID NO: 905061 - DNA, 15 bp, Homo sapiens
ctgcccgtttgtttg

SEQ ID NO: 905062 - DNA, 15 bp, Homo sapiens
tgcccgtttgtttgt

SEQ ID NO: 905063 - DNA, 15 bp, Homo sapiens
gcccgtttgtttgta

SEQ ID NO: 905064 - DNA, 15 bp, Homo sapiens
cccgtttgtttgtag

SEQ ID NO: 905065 - DNA, 15 bp, Homo sapiens
ccgtttgtttgtaga

SEQ ID NO: 905066 - DNA, 15 bp, Homo sapiens
cgtttgtttgtagaa

SEQ ID NO: 905067 - DNA, 15 bp, Homo sapiens
gtttgtttgtagaat

SEQ ID NO: 905068 - DNA, 15 bp, Homo sapiens
tttgtttgtagaatc

SEQ ID NO: 905069 - DNA, 15 bp, Homo sapiens
ttgtttgtagaatcc

SEQ ID NO: 905070 - DNA, 15 bp, Homo sapiens
tgtttgtagaatcct

SEQ ID NO: 905071 - DNA, 15 bp, Homo sapiens
gtttgtagaatccta

SEQ ID NO: 905072 - DNA, 15 bp, Homo sapiens
tttgtagaatcctat

SEQ ID NO: 905073 - DNA, 15 bp, Homo sapiens
ttgtagaatcctatc

SEQ ID NO: 905074 - DNA, 15 bp, Homo sapiens
tgtagaatcctatca

SEQ ID NO: 905075 - DNA, 15 bp, Homo sapiens
gtagaatcctatcac

SEQ ID NO: 905076 - DNA, 15 bp, Homo sapiens
tagaatcctatcact

SEQ ID NO: 905077 - DNA, 15 bp, Homo sapiens
agaatcctatcactc

SEQ ID NO: 905078 - DNA, 15 bp, Homo sapiens
gaatcctatcactca

SEQ ID NO: 905079 - DNA, 15 bp, Homo sapiens
aatcctatcactcac

SEQ ID NO: 905080 - DNA, 15 bp, Homo sapiens
atcctatcactcaca

SEQ ID NO: 905081 - DNA, 15 bp, Homo sapiens
tcctatcactcacag

SEQ ID NO: 905082 - DNA, 15 bp, Homo sapiens
cctatcactcacagg

SEQ ID NO: 905083 - DNA, 15 bp, Homo sapiens
ctatcactcacaggc

SEQ ID NO: 905084 - DNA, 15 bp, Homo sapiens
tatcactcacaggca

SEQ ID NO: 905085 - DNA, 15 bp, Homo sapiens
atcactcacaggcat

SEQ ID NO: 905086 - DNA, 15 bp, Homo sapiens
tcactcacaggcatt

SEQ ID NO: 905087 - DNA, 15 bp, Homo sapiens
cactcacaggcattt

SEQ ID NO: 905088 - DNA, 15 bp, Homo sapiens
actcacaggcatttc

SEQ ID NO: 905089 - DNA, 15 bp, Homo sapiens
ctcacaggcatttct

SEQ ID NO: 905090 - DNA, 15 bp, Homo sapiens
tcacaggcatttcta

SEQ ID NO: 905091 - DNA, 15 bp, Homo sapiens
cacaggcatttctat

SEQ ID NO: 905092 - DNA, 15 bp, Homo sapiens
acaggcatttctatg

SEQ ID NO: 905093 - DNA, 15 bp, Homo sapiens
caggcatttctatga

SEQ ID NO: 905094 - DNA, 15 bp, Homo sapiens
aggcatttctatgat

SEQ ID NO: 905095 - DNA, 15 bp, Homo sapiens
ggcatttctatgatt

SEQ ID NO: 905096 - DNA, 15 bp, Homo sapiens
gcatttctatgattg

SEQ ID NO: 905097 - DNA, 15 bp, Homo sapiens
catttctatgattgg

SEQ ID NO: 905098 - DNA, 15 bp, Homo sapiens
atttctatgattgga

SEQ ID NO: 905099 - DNA, 15 bp, Homo sapiens
tttctatgattggaa

SEQ ID NO: 905100 - DNA, 15 bp, Homo sapiens
ttctatgattggaaa

SEQ ID NO: 905101 - DNA, 15 bp, Homo sapiens
tctatgattggaaat

SEQ ID NO: 905102 - DNA, 15 bp, Homo sapiens
ctatgattggaaatc

SEQ ID NO: 905103 - DNA, 15 bp, Homo sapiens
tatgattggaaatca

SEQ ID NO: 905104 - DNA, 15 bp, Homo sapiens
atgattggaaatcat

SEQ ID NO: 905105 - DNA, 15 bp, Homo sapiens
tgattggaaatcatt

SEQ ID NO: 905106 - DNA, 15 bp, Homo sapiens
gattggaaatcattt

SEQ ID NO: 905107 - DNA, 15 bp, Homo sapiens
attggaaatcattta

SEQ ID NO: 905108 - DNA, 15 bp, Homo sapiens
ttggaaatcatttac

SEQ ID NO: 905109 - DNA, 15 bp, Homo sapiens
tggaaatcatttaca

SEQ ID NO: 905110 - DNA, 15 bp, Homo sapiens
ggaaatcatttacaa

SEQ ID NO: 905111 - DNA, 15 bp, Homo sapiens
gaaatcatttacaaa

SEQ ID NO: 905112 - DNA, 15 bp, Homo sapiens
aaatcatttacaaaa

SEQ ID NO: 905113 - DNA, 15 bp, Homo sapiens
aatcatttacaaaat

SEQ ID NO: 905114 - DNA, 15 bp, Homo sapiens
atcatttacaaaatt

SEQ ID NO: 905115 - DNA, 15 bp, Homo sapiens
tcatttacaaaatta

SEQ ID NO: 905116 - DNA, 15 bp, Homo sapiens
catttacaaaattag

SEQ ID NO: 905117 - DNA, 15 bp, Homo sapiens
atttacaaaattagt

SEQ ID NO: 905118 - DNA, 15 bp, Homo sapiens
tttacaaaattagtc

SEQ ID NO: 905119 - DNA, 15 bp, Homo sapiens
ttacaaaattagtcc

SEQ ID NO: 905120 - DNA, 15 bp, Homo sapiens
tacaaaattagtcca

SEQ ID NO: 905121 - DNA, 15 bp, Homo sapiens
acaaaattagtccac

SEQ ID NO: 905122 - DNA, 15 bp, Homo sapiens
caaaattagtccaca

SEQ ID NO: 905123 - DNA, 15 bp, Homo sapiens
aaaattagtccacat

SEQ ID NO: 905124 - DNA, 15 bp, Homo sapiens
aaattagtccacata

SEQ ID NO: 905125 - DNA, 15 bp, Homo sapiens
aattagtccacatag

SEQ ID NO: 905126 - DNA, 15 bp, Homo sapiens
attagtccacatagg

SEQ ID NO: 905127 - DNA, 15 bp, Homo sapiens
ttagtccacatagga

SEQ ID NO: 905128 - DNA, 15 bp, Homo sapiens
tagtccacataggat

SEQ ID NO: 905129 - DNA, 15 bp, Homo sapiens
agtccacataggatt

SEQ ID NO: 905130 - DNA, 15 bp, Homo sapiens
gtccacataggattc

SEQ ID NO: 905131 - DNA, 15 bp, Homo sapiens
tccacataggattct

SEQ ID NO: 905132 - DNA, 15 bp, Homo sapiens
ccacataggattctt

SEQ ID NO: 905133 - DNA, 15 bp, Homo sapiens
cacataggattctta

SEQ ID NO: 905134 - DNA, 15 bp, Homo sapiens
acataggattcttac

SEQ ID NO: 905135 - DNA, 15 bp, Homo sapiens
cataggattcttact

SEQ ID NO: 905136 - DNA, 15 bp, Homo sapiens
ataggattcttacta

SEQ ID NO: 905137 - DNA, 15 bp, Homo sapiens
taggattcttactaa

SEQ ID NO: 905138 - DNA, 15 bp, Homo sapiens
aggattcttactaaa

SEQ ID NO: 905139 - DNA, 15 bp, Homo sapiens
ggattcttactaaag

SEQ ID NO: 905140 - DNA, 15 bp, Homo sapiens
gattcttactaaaga

SEQ ID NO: 905141 - DNA, 15 bp, Homo sapiens
attcttactaaagag

SEQ ID NO: 905142 - DNA, 15 bp, Homo sapiens
ttcttactaaagagg

SEQ ID NO: 905143 - DNA, 15 bp, Homo sapiens
tcttactaaagagga

SEQ ID NO: 905144 - DNA, 15 bp, Homo sapiens
cttactaaagaggat

SEQ ID NO: 905145 - DNA, 15 bp, Homo sapiens
ttactaaagaggatt

SEQ ID NO: 905146 - DNA, 15 bp, Homo sapiens
tactaaagaggattc

SEQ ID NO: 905147 - DNA, 15 bp, Homo sapiens
actaaagaggattca

SEQ ID NO: 905148 - DNA, 15 bp, Homo sapiens
ctaaagaggattcaa

SEQ ID NO: 905149 - DNA, 15 bp, Homo sapiens
taaagaggattcaat

SEQ ID NO: 905150 - DNA, 15 bp, Homo sapiens
aaagaggattcaatt

SEQ ID NO: 905151 - DNA, 15 bp, Homo sapiens
aagaggattcaattt

SEQ ID NO: 905152 - DNA, 15 bp, Homo sapiens
agaggattcaatttg

SEQ ID NO: 905153 - DNA, 15 bp, Homo sapiens
gaggattcaatttgg

SEQ ID NO: 905154 - DNA, 15 bp, Homo sapiens
aggattcaatttggg

SEQ ID NO: 905155 - DNA, 15 bp, Homo sapiens
ggattcaatttggga

SEQ ID NO: 905156 - DNA, 15 bp, Homo sapiens
gattcaatttgggaa

SEQ ID NO: 905157 - DNA, 15 bp, Homo sapiens
attcaatttgggaat

SEQ ID NO: 905158 - DNA, 15 bp, Homo sapiens
ttcaatttgggaatt

SEQ ID NO: 905159 - DNA, 15 bp, Homo sapiens
tcaatttgggaattt

SEQ ID NO: 905160 - DNA, 15 bp, Homo sapiens
caatttgggaatttc

SEQ ID NO: 905161 - DNA, 15 bp, Homo sapiens
aatttgggaatttct

SEQ ID NO: 905162 - DNA, 15 bp, Homo sapiens
atttgggaatttctc

SEQ ID NO: 905163 - DNA, 15 bp, Homo sapiens
tttgggaatttctcg

SEQ ID NO: 905164 - DNA, 15 bp, Homo sapiens
ttgggaatttctcga

SEQ ID NO: 905165 - DNA, 15 bp, Homo sapiens
tgggaatttctcgaa

SEQ ID NO: 905166 - DNA, 15 bp, Homo sapiens
gggaatttctcgaaa

SEQ ID NO: 905167 - DNA, 15 bp, Homo sapiens
ggaatttctcgaaat

SEQ ID NO: 905168 - DNA, 15 bp, Homo sapiens
gaatttctcgaaata

SEQ ID NO: 905169 - DNA, 15 bp, Homo sapiens
aatttctcgaaataa

SEQ ID NO: 905170 - DNA, 15 bp, Homo sapiens
atttctcgaaataaa

SEQ ID NO: 905171 - DNA, 15 bp, Homo sapiens
tttctcgaaataaag

SEQ ID NO: 905172 - DNA, 15 bp, Homo sapiens
ttctcgaaataaagc

SEQ ID NO: 905173 - DNA, 15 bp, Homo sapiens
tctcgaaataaagcc

SEQ ID NO: 905174 - DNA, 15 bp, Homo sapiens
ctcgaaataaagccc

SEQ ID NO: 905175 - DNA, 15 bp, Homo sapiens
tcgaaataaagccct

SEQ ID NO: 905176 - DNA, 15 bp, Homo sapiens
cgaaataaagccctt

SEQ ID NO: 905177 - DNA, 15 bp, Homo sapiens
gaaataaagccctta

SEQ ID NO: 905178 - DNA, 15 bp, Homo sapiens
aaataaagcccttac

SEQ ID NO: 905179 - DNA, 15 bp, Homo sapiens
aataaagcccttact

SEQ ID NO: 905180 - DNA, 15 bp, Homo sapiens
ataaagcccttacta

SEQ ID NO: 905181 - DNA, 15 bp, Homo sapiens
taaagcccttactac

SEQ ID NO: 905182 - DNA, 15 bp, Homo sapiens
aaagcccttactaca

SEQ ID NO: 905183 - DNA, 15 bp, Homo sapiens
aagcccttactacac

SEQ ID NO: 905184 - DNA, 15 bp, Homo sapiens
agcccttactacact

SEQ ID NO: 905185 - DNA, 15 bp, Homo sapiens
gcccttactacacta

SEQ ID NO: 905186 - DNA, 15 bp, Homo sapiens
cccttactacactat

SEQ ID NO: 905187 - DNA, 15 bp, Homo sapiens
ccttactacactatg

SEQ ID NO: 905188 - DNA, 15 bp, Homo sapiens
cttactacactatgt

SEQ ID NO: 905189 - DNA, 15 bp, Homo sapiens
ttactacactatgtg

SEQ ID NO: 905190 - DNA, 15 bp, Homo sapiens
tactacactatgtgt

SEQ ID NO: 905191 - DNA, 15 bp, Homo sapiens
actacactatgtgtg

SEQ ID NO: 905192 - DNA, 15 bp, Homo sapiens
ctacactatgtgtgt

SEQ ID NO: 905193 - DNA, 15 bp, Homo sapiens
tacactatgtgtgtc

SEQ ID NO: 905194 - DNA, 15 bp, Homo sapiens
acactatgtgtgtct

SEQ ID NO: 905195 - DNA, 15 bp, Homo sapiens
cactatgtgtgtctg

SEQ ID NO: 905196 - DNA, 15 bp, Homo sapiens
actatgtgtgtctgg

SEQ ID NO: 905197 - DNA, 15 bp, Homo sapiens
ctatgtgtgtctggg

SEQ ID NO: 905198 - DNA, 15 bp, Homo sapiens
tatgtgtgtctggga

SEQ ID NO: 905199 - DNA, 15 bp, Homo sapiens
atgtgtgtctgggaa

SEQ ID NO: 905200 - DNA, 15 bp, Homo sapiens
tgtgtgtctgggaat

SEQ ID NO: 905201 - DNA, 15 bp, Homo sapiens
gtgtgtctgggaatg

SEQ ID NO: 905202 - DNA, 15 bp, Homo sapiens
tgtgtctgggaatgt

SEQ ID NO: 905203 - DNA, 15 bp, Homo sapiens
gtgtctgggaatgtc

SEQ ID NO: 905204 - DNA, 15 bp, Homo sapiens
tgtctgggaatgtca

SEQ ID NO: 905205 - DNA, 15 bp, Homo sapiens
gtctgggaatgtcac

SEQ ID NO: 905206 - DNA, 15 bp, Homo sapiens
tctgggaatgtcact

SEQ ID NO: 905207 - DNA, 15 bp, Homo sapiens
ctgggaatgtcactg

SEQ ID NO: 905208 - DNA, 15 bp, Homo sapiens
tgggaatgtcactga

SEQ ID NO: 905209 - DNA, 15 bp, Homo sapiens
gggaatgtcactgac

SEQ ID NO: 905210 - DNA, 15 bp, Homo sapiens
ggaatgtcactgaca

SEQ ID NO: 905211 - DNA, 15 bp, Homo sapiens
gaatgtcactgacat

SEQ ID NO: 905212 - DNA, 15 bp, Homo sapiens
aatgtcactgacata

SEQ ID NO: 905213 - DNA, 15 bp, Homo sapiens
atgtcactgacatag

SEQ ID NO: 905214 - DNA, 15 bp, Homo sapiens
tgtcactgacatagt

SEQ ID NO: 905215 - DNA, 15 bp, Homo sapiens
gtcactgacatagtt

SEQ ID NO: 905216 - DNA, 15 bp, Homo sapiens
tcactgacatagttc

SEQ ID NO: 905217 - DNA, 15 bp, Homo sapiens
cactgacatagttca

SEQ ID NO: 905218 - DNA, 15 bp, Homo sapiens
actgacatagttcag

SEQ ID NO: 905219 - DNA, 15 bp, Homo sapiens
ctgacatagttcagg

SEQ ID NO: 905220 - DNA, 15 bp, Homo sapiens
tgacatagttcagga

SEQ ID NO: 905221 - DNA, 15 bp, Homo sapiens
gacatagttcaggac

SEQ ID NO: 905222 - DNA, 15 bp, Homo sapiens
acatagttcaggact

SEQ ID NO: 905223 - DNA, 15 bp, Homo sapiens
catagttcaggactt

SEQ ID NO: 905224 - DNA, 15 bp, Homo sapiens
atagttcaggacttc

SEQ ID NO: 905225 - DNA, 15 bp, Homo sapiens
tagttcaggacttca

SEQ ID NO: 905226 - DNA, 15 bp, Homo sapiens
agttcaggacttcat

SEQ ID NO: 905227 - DNA, 15 bp, Homo sapiens
gttcaggacttcata

SEQ ID NO: 905228 - DNA, 15 bp, Homo sapiens
ttcaggacttcataa

SEQ ID NO: 905229 - DNA, 15 bp, Homo sapiens
tcaggacttcataaa

SEQ ID NO: 905230 - DNA, 15 bp, Homo sapiens
caggacttcataaat

SEQ ID NO: 905231 - DNA, 15 bp, Homo sapiens
aggacttcataaata

SEQ ID NO: 905232 - DNA, 15 bp, Homo sapiens
ggacttcataaataa

SEQ ID NO: 905233 - DNA, 15 bp, Homo sapiens
gacttcataaataat

SEQ ID NO: 905234 - DNA, 15 bp, Homo sapiens
acttcataaataatg

SEQ ID NO: 905235 - DNA, 15 bp, Homo sapiens
cttcataaataatga

SEQ ID NO: 905236 - DNA, 15 bp, Homo sapiens
ttcataaataatgag

SEQ ID NO: 905237 - DNA, 15 bp, Homo sapiens
tcataaataatgagt

SEQ ID NO: 905238 - DNA, 15 bp, Homo sapiens
cataaataatgagtt

SEQ ID NO: 905239 - DNA, 15 bp, Homo sapiens
ataaataatgagttt

SEQ ID NO: 905240 - DNA, 15 bp, Homo sapiens
taaataatgagtttg

SEQ ID NO: 905241 - DNA, 15 bp, Homo sapiens
aaataatgagtttgg

SEQ ID NO: 905242 - DNA, 15 bp, Homo sapiens
aataatgagtttggt

SEQ ID NO: 905243 - DNA, 15 bp, Homo sapiens
ataatgagtttggtt

SEQ ID NO: 905244 - DNA, 15 bp, Homo sapiens
taatgagtttggttt

SEQ ID NO: 905245 - DNA, 15 bp, Homo sapiens
aatgagtttggtttt

SEQ ID NO: 905246 - DNA, 15 bp, Homo sapiens
atgagtttggttttg

SEQ ID NO: 905247 - DNA, 15 bp, Homo sapiens
tgagtttggttttgt

SEQ ID NO: 905248 - DNA, 15 bp, Homo sapiens
gagtttggttttgta

SEQ ID NO: 905249 - DNA, 15 bp, Homo sapiens
agtttggttttgtaa

SEQ ID NO: 905250 - DNA, 15 bp, Homo sapiens
gtttggttttgtaag

SEQ ID NO: 905251 - DNA, 15 bp, Homo sapiens
tttggttttgtaaga

SEQ ID NO: 905252 - DNA, 15 bp, Homo sapiens
ttggttttgtaagac

SEQ ID NO: 905253 - DNA, 15 bp, Homo sapiens
tggttttgtaagacg

SEQ ID NO: 905254 - DNA, 15 bp, Homo sapiens
ggttttgtaagacgt

SEQ ID NO: 905255 - DNA, 15 bp, Homo sapiens
gttttgtaagacgtt

SEQ ID NO: 905256 - DNA, 15 bp, Homo sapiens
ttttgtaagacgttt

SEQ ID NO: 905257 - DNA, 15 bp, Homo sapiens
tttgtaagacgtttg

SEQ ID NO: 905258 - DNA, 15 bp, Homo sapiens
ttgtaagacgtttga

SEQ ID NO: 905259 - DNA, 15 bp, Homo sapiens
tgtaagacgtttgaa

SEQ ID NO: 905260 - DNA, 15 bp, Homo sapiens
gtaagacgtttgaag

SEQ ID NO: 905261 - DNA, 15 bp, Homo sapiens
taagacgtttgaagt

SEQ ID NO: 905262 - DNA, 15 bp, Homo sapiens
aagacgtttgaagtc

SEQ ID NO: 905263 - DNA, 15 bp, Homo sapiens
agacgtttgaagtct

SEQ ID NO: 905264 - DNA, 15 bp, Homo sapiens
gacgtttgaagtctt

SEQ ID NO: 905265 - DNA, 15 bp, Homo sapiens
acgtttgaagtcttt

SEQ ID NO: 905266 - DNA, 15 bp, Homo sapiens
cgtttgaagtctttt

SEQ ID NO: 905267 - DNA, 15 bp, Homo sapiens
gtttgaagtcttttc

SEQ ID NO: 905268 - DNA, 15 bp, Homo sapiens
tttgaagtcttttcc

SEQ ID NO: 905269 - DNA, 15 bp, Homo sapiens
ttgaagtcttttcct

SEQ ID NO: 905270 - DNA, 15 bp, Homo sapiens
tgaagtcttttcctc

SEQ ID NO: 905271 - DNA, 15 bp, Homo sapiens
gaagtcttttcctca

SEQ ID NO: 905272 - DNA, 15 bp, Homo sapiens
aagtcttttcctcat

SEQ ID NO: 905273 - DNA, 15 bp, Homo sapiens
agtcttttcctcatt

SEQ ID NO: 905274 - DNA, 15 bp, Homo sapiens
gtcttttcctcattg

SEQ ID NO: 905275 - DNA, 15 bp, Homo sapiens
tcttttcctcattgg

SEQ ID NO: 905276 - DNA, 15 bp, Homo sapiens
cttttcctcattgga

SEQ ID NO: 905277 - DNA, 15 bp, Homo sapiens
ttttcctcattggat

SEQ ID NO: 905278 - DNA, 15 bp, Homo sapiens
tttcctcattggatt

SEQ ID NO: 905279 - DNA, 15 bp, Homo sapiens
ttcctcattggattt

SEQ ID NO: 905280 - DNA, 15 bp, Homo sapiens
tcctcattggatttt

SEQ ID NO: 905281 - DNA, 15 bp, Homo sapiens
cctcattggattttt

SEQ ID NO: 905282 - DNA, 15 bp, Homo sapiens
ctcattggatttttc

SEQ ID NO: 905283 - DNA, 15 bp, Homo sapiens
tcattggatttttca

SEQ ID NO: 905284 - DNA, 15 bp, Homo sapiens
cattggatttttcac

SEQ ID NO: 905285 - DNA, 15 bp, Homo sapiens
attggatttttcact

SEQ ID NO: 905286 - DNA, 15 bp, Homo sapiens
ttggatttttcactg

SEQ ID NO: 905287 - DNA, 15 bp, Homo sapiens
tggatttttcactgg

SEQ ID NO: 905288 - DNA, 15 bp, Homo sapiens
ggatttttcactgga

SEQ ID NO: 905289 - DNA, 15 bp, Homo sapiens
gatttttcactggaa

SEQ ID NO: 905290 - DNA, 15 bp, Homo sapiens
atttttcactggaaa

SEQ ID NO: 905291 - DNA, 15 bp, Homo sapiens
tttttcactggaaag

SEQ ID NO: 905292 - DNA, 15 bp, Homo sapiens
ttttcactggaaagc

SEQ ID NO: 905293 - DNA, 15 bp, Homo sapiens
tttcactggaaagct

SEQ ID NO: 905294 - DNA, 15 bp, Homo sapiens
ttcactggaaagctg

SEQ ID NO: 905295 - DNA, 15 bp, Homo sapiens
tcactggaaagctgg

SEQ ID NO: 905296 - DNA, 15 bp, Homo sapiens
cactggaaagctggt

SEQ ID NO: 905297 - DNA, 15 bp, Homo sapiens
actggaaagctggta

SEQ ID NO: 905298 - DNA, 15 bp, Homo sapiens
ctggaaagctggtaa

SEQ ID NO: 905299 - DNA, 15 bp, Homo sapiens
tggaaagctggtaaa

SEQ ID NO: 905300 - DNA, 15 bp, Homo sapiens
ggaaagctggtaaag

SEQ ID NO: 905301 - DNA, 15 bp, Homo sapiens
gaaagctggtaaagg

SEQ ID NO: 905302 - DNA, 15 bp, Homo sapiens
aaagctggtaaaggt

SEQ ID NO: 905303 - DNA, 15 bp, Homo sapiens
aagctggtaaaggtc

SEQ ID NO: 905304 - DNA, 15 bp, Homo sapiens
agctggtaaaggtca

SEQ ID NO: 905305 - DNA, 15 bp, Homo sapiens
gctggtaaaggtcaa

SEQ ID NO: 905306 - DNA, 15 bp, Homo sapiens
ctggtaaaggtcaag

SEQ ID NO: 905307 - DNA, 15 bp, Homo sapiens
tggtaaaggtcaagc

SEQ ID NO: 905308 - DNA, 15 bp, Homo sapiens
ggtaaaggtcaagca

SEQ ID NO: 905309 - DNA, 15 bp, Homo sapiens
gtaaaggtcaagcac

SEQ ID NO: 905310 - DNA, 15 bp, Homo sapiens
taaaggtcaagcacc

SEQ ID NO: 905311 - DNA, 15 bp, Homo sapiens
aaaggtcaagcacct

SEQ ID NO: 905312 - DNA, 15 bp, Homo sapiens
aaggtcaagcacctg

SEQ ID NO: 905313 - DNA, 15 bp, Homo sapiens
aggtcaagcacctga

SEQ ID NO: 905314 - DNA, 15 bp, Homo sapiens
ggtcaagcacctgac

SEQ ID NO: 905315 - DNA, 15 bp, Homo sapiens
gtcaagcacctgact

SEQ ID NO: 905316 - DNA, 15 bp, Homo sapiens
tcaagcacctgactc

SEQ ID NO: 905317 - DNA, 15 bp, Homo sapiens
caagcacctgactcc

SEQ ID NO: 905318 - DNA, 15 bp, Homo sapiens
aagcacctgactcca

SEQ ID NO: 905319 - DNA, 15 bp, Homo sapiens
agcacctgactccat

SEQ ID NO: 905320 - DNA, 15 bp, Homo sapiens
gcacctgactccata

SEQ ID NO: 905321 - DNA, 15 bp, Homo sapiens
cacctgactccataa

SEQ ID NO: 905322 - DNA, 15 bp, Homo sapiens
acctgactccataac

SEQ ID NO: 905323 - DNA, 15 bp, Homo sapiens
cctgactccataact

SEQ ID NO: 905324 - DNA, 15 bp, Homo sapiens
ctgactccataactc

SEQ ID NO: 905325 - DNA, 15 bp, Homo sapiens
tgactccataactca

SEQ ID NO: 905326 - DNA, 15 bp, Homo sapiens
gactccataactcat

SEQ ID NO: 905327 - DNA, 15 bp, Homo sapiens
actccataactcatc

SEQ ID NO: 905328 - DNA, 15 bp, Homo sapiens
ctccataactcatcc

SEQ ID NO: 905329 - DNA, 15 bp, Homo sapiens
tccataactcatcca

SEQ ID NO: 905330 - DNA, 15 bp, Homo sapiens
ccataactcatccac

SEQ ID NO: 905331 - DNA, 15 bp, Homo sapiens
cataactcatccaca

SEQ ID NO: 905332 - DNA, 15 bp, Homo sapiens
ataactcatccacaa

SEQ ID NO: 905333 - DNA, 15 bp, Homo sapiens
taactcatccacaaa

SEQ ID NO: 905334 - DNA, 15 bp, Homo sapiens
aactcatccacaaag

SEQ ID NO: 905335 - DNA, 15 bp, Homo sapiens
actcatccacaaagg

SEQ ID NO: 905336 - DNA, 15 bp, Homo sapiens
ctcatccacaaaggt

SEQ ID NO: 905337 - DNA, 15 bp, Homo sapiens
tcatccacaaaggta

SEQ ID NO: 905338 - DNA, 15 bp, Homo sapiens
catccacaaaggtaa

SEQ ID NO: 905339 - DNA, 15 bp, Homo sapiens
atccacaaaggtaaa

SEQ ID NO: 905340 - DNA, 15 bp, Homo sapiens
tccacaaaggtaaaa

SEQ ID NO: 905341 - DNA, 15 bp, Homo sapiens
ccacaaaggtaaaat

SEQ ID NO: 905342 - DNA, 15 bp, Homo sapiens
cacaaaggtaaaata

SEQ ID NO: 905343 - DNA, 15 bp, Homo sapiens
acaaaggtaaaatat

SEQ ID NO: 905344 - DNA, 15 bp, Homo sapiens
caaaggtaaaatatc

SEQ ID NO: 905345 - DNA, 15 bp, Homo sapiens
aaaggtaaaatatct

SEQ ID NO: 905346 - DNA, 15 bp, Homo sapiens
aaggtaaaatatctc

SEQ ID NO: 905347 - DNA, 15 bp, Homo sapiens
aggtaaaatatctct

SEQ ID NO: 905348 - DNA, 15 bp, Homo sapiens
ggtaaaatatctctc

SEQ ID NO: 905349 - DNA, 15 bp, Homo sapiens
gtaaaatatctctca

SEQ ID NO: 905350 - DNA, 15 bp, Homo sapiens
taaaatatctctcaa

SEQ ID NO: 905351 - DNA, 15 bp, Homo sapiens
aaaatatctctcaaa

SEQ ID NO: 905352 - DNA, 15 bp, Homo sapiens
aaatatctctcaaag

SEQ ID NO: 905353 - DNA, 15 bp, Homo sapiens
aatatctctcaaagt

SEQ ID NO: 905354 - DNA, 15 bp, Homo sapiens
atatctctcaaagta

SEQ ID NO: 905355 - DNA, 15 bp, Homo sapiens
tatctctcaaagtaa

SEQ ID NO: 905356 - DNA, 15 bp, Homo sapiens
atctctcaaagtaaa

SEQ ID NO: 905357 - DNA, 15 bp, Homo sapiens
tctctcaaagtaaaa

SEQ ID NO: 905358 - DNA, 15 bp, Homo sapiens
ctctcaaagtaaaac

SEQ ID NO: 905359 - DNA, 15 bp, Homo sapiens
tctcaaagtaaaact

SEQ ID NO: 905360 - DNA, 15 bp, Homo sapiens
ctcaaagtaaaactc

SEQ ID NO: 905361 - DNA, 15 bp, Homo sapiens
tcaaagtaaaactct

SEQ ID NO: 905362 - DNA, 15 bp, Homo sapiens
caaagtaaaactctg

SEQ ID NO: 905363 - DNA, 15 bp, Homo sapiens
aaagtaaaactctga

SEQ ID NO: 905364 - DNA, 15 bp, Homo sapiens
aagtaaaactctgag

SEQ ID NO: 905365 - DNA, 15 bp, Homo sapiens
agtaaaactctgaga

SEQ ID NO: 905366 - DNA, 15 bp, Homo sapiens
gtaaaactctgagaa

SEQ ID NO: 905367 - DNA, 15 bp, Homo sapiens
taaaactctgagaaa

SEQ ID NO: 905368 - DNA, 15 bp, Homo sapiens
aaaactctgagaaag

SEQ ID NO: 905369 - DNA, 15 bp, Homo sapiens
aaactctgagaaagt

SEQ ID NO: 905370 - DNA, 15 bp, Homo sapiens
aactctgagaaagtt

SEQ ID NO: 905371 - DNA, 15 bp, Homo sapiens
actctgagaaagtta

SEQ ID NO: 905372 - DNA, 15 bp, Homo sapiens
ctctgagaaagttaa

SEQ ID NO: 905373 - DNA, 15 bp, Homo sapiens
tctgagaaagttaaa

SEQ ID NO: 905374 - DNA, 15 bp, Homo sapiens
ctgagaaagttaaaa

SEQ ID NO: 905375 - DNA, 15 bp, Homo sapiens
tgagaaagttaaaaa

SEQ ID NO: 905376 - DNA, 15 bp, Homo sapiens
gagaaagttaaaaat

SEQ ID NO: 905377 - DNA, 15 bp, Homo sapiens
agaaagttaaaaata

SEQ ID NO: 905378 - DNA, 15 bp, Homo sapiens
gaaagttaaaaatag

SEQ ID NO: 905379 - DNA, 15 bp, Homo sapiens
aaagttaaaaatagc

SEQ ID NO: 905380 - DNA, 15 bp, Homo sapiens
aagttaaaaatagcc

SEQ ID NO: 905381 - DNA, 15 bp, Homo sapiens
agttaaaaatagcca

SEQ ID NO: 905382 - DNA, 15 bp, Homo sapiens
gttaaaaatagccag

SEQ ID NO: 905383 - DNA, 15 bp, Homo sapiens
ttaaaaatagccagc

SEQ ID NO: 905384 - DNA, 15 bp, Homo sapiens
taaaaatagccagca

SEQ ID NO: 905385 - DNA, 15 bp, Homo sapiens
aaaaatagccagcaa

SEQ ID NO: 905386 - DNA, 15 bp, Homo sapiens
aaaatagccagcaat

SEQ ID NO: 905387 - DNA, 15 bp, Homo sapiens
aaatagccagcaatt

SEQ ID NO: 905388 - DNA, 15 bp, Homo sapiens
aatagccagcaattc

SEQ ID NO: 905389 - DNA, 15 bp, Homo sapiens
atagccagcaattca

SEQ ID NO: 905390 - DNA, 15 bp, Homo sapiens
tagccagcaattcaa

SEQ ID NO: 905391 - DNA, 15 bp, Homo sapiens
agccagcaattcaaa

SEQ ID NO: 905392 - DNA, 15 bp, Homo sapiens
gccagcaattcaaat

SEQ ID NO: 905393 - DNA, 15 bp, Homo sapiens
ccagcaattcaaatg

SEQ ID NO: 905394 - DNA, 15 bp, Homo sapiens
cagcaattcaaatgc

SEQ ID NO: 905395 - DNA, 15 bp, Homo sapiens
agcaattcaaatgca

SEQ ID NO: 905396 - DNA, 15 bp, Homo sapiens
gcaattcaaatgcaa

SEQ ID NO: 905397 - DNA, 15 bp, Homo sapiens
caattcaaatgcaaa

SEQ ID NO: 905398 - DNA, 15 bp, Homo sapiens
aattcaaatgcaaat

SEQ ID NO: 905399 - DNA, 15 bp, Homo sapiens
attcaaatgcaaatc

SEQ ID NO: 905400 - DNA, 15 bp, Homo sapiens
ttcaaatgcaaatct

SEQ ID NO: 905401 - DNA, 15 bp, Homo sapiens
tcaaatgcaaatcta

SEQ ID NO: 905402 - DNA, 15 bp, Homo sapiens
caaatgcaaatctag

SEQ ID NO: 905403 - DNA, 15 bp, Homo sapiens
aaatgcaaatctaga

SEQ ID NO: 905404 - DNA, 15 bp, Homo sapiens
aatgcaaatctagaa

SEQ ID NO: 905405 - DNA, 15 bp, Homo sapiens
atgcaaatctagaat

SEQ ID NO: 905406 - DNA, 15 bp, Homo sapiens
tgcaaatctagaatc

SEQ ID NO: 905407 - DNA, 15 bp, Homo sapiens
gcaaatctagaatct

SEQ ID NO: 905408 - DNA, 15 bp, Homo sapiens
caaatctagaatctt

SEQ ID NO: 905409 - DNA, 15 bp, Homo sapiens
aaatctagaatcttt

SEQ ID NO: 905410 - DNA, 15 bp, Homo sapiens
aatctagaatctttc

SEQ ID NO: 905411 - DNA, 15 bp, Homo sapiens
atctagaatctttct

SEQ ID NO: 905412 - DNA, 15 bp, Homo sapiens
tctagaatctttctt

SEQ ID NO: 905413 - DNA, 15 bp, Homo sapiens
ctagaatctttcttg

SEQ ID NO: 905414 - DNA, 15 bp, Homo sapiens
tagaatctttcttgc

SEQ ID NO: 905415 - DNA, 15 bp, Homo sapiens
agaatctttcttgct

SEQ ID NO: 905416 - DNA, 15 bp, Homo sapiens
gaatctttcttgctt

SEQ ID NO: 905417 - DNA, 15 bp, Homo sapiens
aatctttcttgcttt

SEQ ID NO: 905418 - DNA, 15 bp, Homo sapiens
atctttcttgctttg

SEQ ID NO: 905419 - DNA, 15 bp, Homo sapiens
tctttcttgctttgc

SEQ ID NO: 905420 - DNA, 15 bp, Homo sapiens
ctttcttgctttgca

SEQ ID NO: 905421 - DNA, 15 bp, Homo sapiens
tttcttgctttgcat

SEQ ID NO: 905422 - DNA, 15 bp, Homo sapiens
ttcttgctttgcatc

SEQ ID NO: 905423 - DNA, 15 bp, Homo sapiens
tcttgctttgcatca

SEQ ID NO: 905424 - DNA, 15 bp, Homo sapiens
cttgctttgcatcag

SEQ ID NO: 905425 - DNA, 15 bp, Homo sapiens
ttgctttgcatcaga

SEQ ID NO: 905426 - DNA, 15 bp, Homo sapiens
tgctttgcatcagat

SEQ ID NO: 905427 - DNA, 15 bp, Homo sapiens
gctttgcatcagatg

SEQ ID NO: 905428 - DNA, 15 bp, Homo sapiens
ctttgcatcagatgc

SEQ ID NO: 905429 - DNA, 15 bp, Homo sapiens
tttgcatcagatgca

SEQ ID NO: 905430 - DNA, 15 bp, Homo sapiens
ttgcatcagatgcag

SEQ ID NO: 905431 - DNA, 15 bp, Homo sapiens
tgcatcagatgcaga

SEQ ID NO: 905432 - DNA, 15 bp, Homo sapiens
gcatcagatgcagag

SEQ ID NO: 905433 - DNA, 15 bp, Homo sapiens
catcagatgcagaga

SEQ ID NO: 905434 - DNA, 15 bp, Homo sapiens
atcagatgcagagaa

SEQ ID NO: 905435 - DNA, 15 bp, Homo sapiens
tcagatgcagagaat

SEQ ID NO: 905436 - DNA, 15 bp, Homo sapiens
cagatgcagagaatc

SEQ ID NO: 905437 - DNA, 15 bp, Homo sapiens
agatgcagagaatca

SEQ ID NO: 905438 - DNA, 15 bp, Homo sapiens
gatgcagagaatcat

SEQ ID NO: 905439 - DNA, 15 bp, Homo sapiens
atgcagagaatcatt

SEQ ID NO: 905440 - DNA, 15 bp, Homo sapiens
tgcagagaatcattc

SEQ ID NO: 905441 - DNA, 15 bp, Homo sapiens
gcagagaatcattcc

SEQ ID NO: 905442 - DNA, 15 bp, Homo sapiens
cagagaatcattccg

SEQ ID NO: 905443 - DNA, 15 bp, Homo sapiens
agagaatcattccgg

SEQ ID NO: 905444 - DNA, 15 bp, Homo sapiens
gagaatcattccgga

SEQ ID NO: 905445 - DNA, 15 bp, Homo sapiens
agaatcattccggac

SEQ ID NO: 905446 - DNA, 15 bp, Homo sapiens
gaatcattccggaca

SEQ ID NO: 905447 - DNA, 15 bp, Homo sapiens
aatcattccggacat

SEQ ID NO: 905448 - DNA, 15 bp, Homo sapiens
atcattccggacatg

SEQ ID NO: 905449 - DNA, 15 bp, Homo sapiens
tcattccggacatgc

SEQ ID NO: 905450 - DNA, 15 bp, Homo sapiens
cattccggacatgct

SEQ ID NO: 905451 - DNA, 15 bp, Homo sapiens
attccggacatgctg

SEQ ID NO: 905452 - DNA, 15 bp, Homo sapiens
ttccggacatgctgc

SEQ ID NO: 905453 - DNA, 15 bp, Homo sapiens
tccggacatgctgca

SEQ ID NO: 905454 - DNA, 15 bp, Homo sapiens
ccggacatgctgcat

SEQ ID NO: 905455 - DNA, 15 bp, Homo sapiens
cggacatgctgcata

SEQ ID NO: 905456 - DNA, 15 bp, Homo sapiens
ggacatgctgcataa

SEQ ID NO: 905457 - DNA, 15 bp, Homo sapiens
gacatgctgcataag

SEQ ID NO: 905458 - DNA, 15 bp, Homo sapiens
acatgctgcataagg

SEQ ID NO: 905459 - DNA, 15 bp, Homo sapiens
catgctgcataaggc

SEQ ID NO: 905460 - DNA, 15 bp, Homo sapiens
atgctgcataaggca

SEQ ID NO: 905461 - DNA, 15 bp, Homo sapiens
tgctgcataaggcac

SEQ ID NO: 905462 - DNA, 15 bp, Homo sapiens
gctgcataaggcact

SEQ ID NO: 905463 - DNA, 15 bp, Homo sapiens
ctgcataaggcactt

SEQ ID NO: 905464 - DNA, 15 bp, Homo sapiens
tgcataaggcacttt

SEQ ID NO: 905465 - DNA, 15 bp, Homo sapiens
gcataaggcacttta

SEQ ID NO: 905466 - DNA, 15 bp, Homo sapiens
cataaggcactttat

SEQ ID NO: 905467 - DNA, 15 bp, Homo sapiens
ataaggcactttatg

SEQ ID NO: 905468 - DNA, 15 bp, Homo sapiens
taaggcactttatga

SEQ ID NO: 905469 - DNA, 15 bp, Homo sapiens
aaggcactttatgag

SEQ ID NO: 905470 - DNA, 15 bp, Homo sapiens
aggcactttatgaga

SEQ ID NO: 905471 - DNA, 15 bp, Homo sapiens
ggcactttatgagaa

SEQ ID NO: 905472 - DNA, 15 bp, Homo sapiens
gcactttatgagaag

SEQ ID NO: 905473 - DNA, 15 bp, Homo sapiens
cactttatgagaagg

SEQ ID NO: 905474 - DNA, 15 bp, Homo sapiens
actttatgagaagga

SEQ ID NO: 905475 - DNA, 15 bp, Homo sapiens
ctttatgagaaggat

SEQ ID NO: 905476 - DNA, 15 bp, Homo sapiens
tttatgagaaggata

SEQ ID NO: 905477 - DNA, 15 bp, Homo sapiens
ttatgagaaggatag

SEQ ID NO: 905478 - DNA, 15 bp, Homo sapiens
tatgagaaggataga

SEQ ID NO: 905479 - DNA, 15 bp, Homo sapiens
atgagaaggatagag

SEQ ID NO: 905480 - DNA, 15 bp, Homo sapiens
tgagaaggatagaga

SEQ ID NO: 905481 - DNA, 15 bp, Homo sapiens
gagaaggatagagaa

SEQ ID NO: 905482 - DNA, 15 bp, Homo sapiens
agaaggatagagaag

SEQ ID NO: 905483 - DNA, 15 bp, Homo sapiens
gaaggatagagaagc

SEQ ID NO: 905484 - DNA, 15 bp, Homo sapiens
aaggatagagaagca

SEQ ID NO: 905485 - DNA, 15 bp, Homo sapiens
aggatagagaagcag

SEQ ID NO: 905486 - DNA, 15 bp, Homo sapiens
ggatagagaagcagt

SEQ ID NO: 905487 - DNA, 15 bp, Homo sapiens
gatagagaagcagtt

SEQ ID NO: 905488 - DNA, 15 bp, Homo sapiens
atagagaagcagttg

SEQ ID NO: 905489 - DNA, 15 bp, Homo sapiens
tagagaagcagttgg

SEQ ID NO: 905490 - DNA, 15 bp, Homo sapiens
agagaagcagttggt

SEQ ID NO: 905491 - DNA, 15 bp, Homo sapiens
gagaagcagttggta

SEQ ID NO: 905492 - DNA, 15 bp, Homo sapiens
agaagcagttggtaa

SEQ ID NO: 905493 - DNA, 15 bp, Homo sapiens
gaagcagttggtaaa

SEQ ID NO: 905494 - DNA, 15 bp, Homo sapiens
aagcagttggtaaat

SEQ ID NO: 905495 - DNA, 15 bp, Homo sapiens
agcagttggtaaatc

SEQ ID NO: 905496 - DNA, 15 bp, Homo sapiens
gcagttggtaaatct

SEQ ID NO: 905497 - DNA, 15 bp, Homo sapiens
cagttggtaaatctt

SEQ ID NO: 905498 - DNA, 15 bp, Homo sapiens
agttggtaaatcttg

SEQ ID NO: 905499 - DNA, 15 bp, Homo sapiens
gttggtaaatcttgc

SEQ ID NO: 905500 - DNA, 15 bp, Homo sapiens
ttggtaaatcttgct

SEQ ID NO: 905501 - DNA, 15 bp, Homo sapiens
tggtaaatcttgctc

SEQ ID NO: 905502 - DNA, 15 bp, Homo sapiens
ggtaaatcttgctcg

SEQ ID NO: 905503 - DNA, 15 bp, Homo sapiens
gtaaatcttgctcgt

SEQ ID NO: 905504 - DNA, 15 bp, Homo sapiens
taaatcttgctcgtg

SEQ ID NO: 905505 - DNA, 15 bp, Homo sapiens
aaatcttgctcgtga

SEQ ID NO: 905506 - DNA, 15 bp, Homo sapiens
aatcttgctcgtgag

SEQ ID NO: 905507 - DNA, 15 bp, Homo sapiens
atcttgctcgtgaga

SEQ ID NO: 905508 - DNA, 15 bp, Homo sapiens
tcttgctcgtgagat

SEQ ID NO: 905509 - DNA, 15 bp, Homo sapiens
cttgctcgtgagata

SEQ ID NO: 905510 - DNA, 15 bp, Homo sapiens
ttgctcgtgagataa

SEQ ID NO: 905511 - DNA, 15 bp, Homo sapiens
tgctcgtgagataat

SEQ ID NO: 905512 - DNA, 15 bp, Homo sapiens
gctcgtgagataatt

SEQ ID NO: 905513 - DNA, 15 bp, Homo sapiens
ctcgtgagataattc

SEQ ID NO: 905514 - DNA, 15 bp, Homo sapiens
tcgtgagataattct

SEQ ID NO: 905515 - DNA, 15 bp, Homo sapiens
cgtgagataattctt

SEQ ID NO: 905516 - DNA, 15 bp, Homo sapiens
gtgagataattcttg

SEQ ID NO: 905517 - DNA, 15 bp, Homo sapiens
tgagataattcttga

SEQ ID NO: 905518 - DNA, 15 bp, Homo sapiens
gagataattcttgaa

SEQ ID NO: 905519 - DNA, 15 bp, Homo sapiens
agataattcttgaat

SEQ ID NO: 905520 - DNA, 15 bp, Homo sapiens
gataattcttgaatg

SEQ ID NO: 905521 - DNA, 15 bp, Homo sapiens
ataattcttgaatgt

SEQ ID NO: 905522 - DNA, 15 bp, Homo sapiens
taattcttgaatgtc

SEQ ID NO: 905523 - DNA, 15 bp, Homo sapiens
aattcttgaatgtct

SEQ ID NO: 905524 - DNA, 15 bp, Homo sapiens
attcttgaatgtctt

SEQ ID NO: 905525 - DNA, 15 bp, Homo sapiens
ttcttgaatgtcttg

SEQ ID NO: 905526 - DNA, 15 bp, Homo sapiens
tcttgaatgtcttga

SEQ ID NO: 905527 - DNA, 15 bp, Homo sapiens
cttgaatgtcttgag

SEQ ID NO: 905528 - DNA, 15 bp, Homo sapiens
ttgaatgtcttgagt

SEQ ID NO: 905529 - DNA, 15 bp, Homo sapiens
tgaatgtcttgagtt

SEQ ID NO: 905530 - DNA, 15 bp, Homo sapiens
gaatgtcttgagttt

SEQ ID NO: 905531 - DNA, 15 bp, Homo sapiens
aatgtcttgagtttg

SEQ ID NO: 905532 - DNA, 15 bp, Homo sapiens
atgtcttgagtttgg

SEQ ID NO: 905533 - DNA, 15 bp, Homo sapiens
tgtcttgagtttggt

SEQ ID NO: 905534 - DNA, 15 bp, Homo sapiens
gtcttgagtttggtt

SEQ ID NO: 905535 - DNA, 15 bp, Homo sapiens
tcttgagtttggttt

SEQ ID NO: 905536 - DNA, 15 bp, Homo sapiens
cttgagtttggtttt

SEQ ID NO: 905537 - DNA, 15 bp, Homo sapiens
ttgagtttggttttg

SEQ ID NO: 905538 - DNA, 15 bp, Homo sapiens
tgagtttggttttgc

SEQ ID NO: 905539 - DNA, 15 bp, Homo sapiens
gagtttggttttgca

SEQ ID NO: 905540 - DNA, 15 bp, Homo sapiens
agtttggttttgcat

SEQ ID NO: 905541 - DNA, 15 bp, Homo sapiens
gtttggttttgcata

SEQ ID NO: 905542 - DNA, 15 bp, Homo sapiens
tttggttttgcataa

SEQ ID NO: 905543 - DNA, 15 bp, Homo sapiens
ttggttttgcataaa

SEQ ID NO: 905544 - DNA, 15 bp, Homo sapiens
tggttttgcataaac

SEQ ID NO: 905545 - DNA, 15 bp, Homo sapiens
ggttttgcataaaca

SEQ ID NO: 905546 - DNA, 15 bp, Homo sapiens
gttttgcataaacat

SEQ ID NO: 905547 - DNA, 15 bp, Homo sapiens
ttttgcataaacatc

SEQ ID NO: 905548 - DNA, 15 bp, Homo sapiens
tttgcataaacatct

SEQ ID NO: 905549 - DNA, 15 bp, Homo sapiens
ttgcataaacatctg

SEQ ID NO: 905550 - DNA, 15 bp, Homo sapiens
tgcataaacatctga

SEQ ID NO: 905551 - DNA, 15 bp, Homo sapiens
gcataaacatctgaa

SEQ ID NO: 905552 - DNA, 15 bp, Homo sapiens
cataaacatctgaaa

SEQ ID NO: 905553 - DNA, 15 bp, Homo sapiens
ataaacatctgaaaa

SEQ ID NO: 905554 - DNA, 15 bp, Homo sapiens
taaacatctgaaaat

SEQ ID NO: 905555 - DNA, 15 bp, Homo sapiens
aaacatctgaaaatt

SEQ ID NO: 905556 - DNA, 15 bp, Homo sapiens
aacatctgaaaattt

SEQ ID NO: 905557 - DNA, 15 bp, Homo sapiens
acatctgaaaatttt

SEQ ID NO: 905558 - DNA, 15 bp, Homo sapiens
catctgaaaatttta

SEQ ID NO: 905559 - DNA, 15 bp, Homo sapiens
atctgaaaattttag

SEQ ID NO: 905560 - DNA, 15 bp, Homo sapiens
tctgaaaattttaga

SEQ ID NO: 905561 - DNA, 15 bp, Homo sapiens
ctgaaaattttagac

SEQ ID NO: 905562 - DNA, 15 bp, Homo sapiens
tgaaaattttagact

SEQ ID NO: 905563 - DNA, 15 bp, Homo sapiens
gaaaattttagacta

SEQ ID NO: 905564 - DNA, 15 bp, Homo sapiens
aaaattttagactat

SEQ ID NO: 905565 - DNA, 15 bp, Homo sapiens
aaattttagactata

SEQ ID NO: 905566 - DNA, 15 bp, Homo sapiens
aattttagactatat

SEQ ID NO: 905567 - DNA, 15 bp, Homo sapiens
attttagactatatg

SEQ ID NO: 905568 - DNA, 15 bp, Homo sapiens
ttttagactatatga

SEQ ID NO: 905569 - DNA, 15 bp, Homo sapiens
tttagactatatgaa

SEQ ID NO: 905570 - DNA, 15 bp, Homo sapiens
ttagactatatgaag

SEQ ID NO: 905571 - DNA, 15 bp, Homo sapiens
tagactatatgaaga

SEQ ID NO: 905572 - DNA, 15 bp, Homo sapiens
agactatatgaagaa

SEQ ID NO: 905573 - DNA, 15 bp, Homo sapiens
gactatatgaagaat

SEQ ID NO: 905574 - DNA, 15 bp, Homo sapiens
actatatgaagaatg

SEQ ID NO: 905575 - DNA, 15 bp, Homo sapiens
ctatatgaagaatgt

SEQ ID NO: 905576 - DNA, 15 bp, Homo sapiens
tatatgaagaatgta

SEQ ID NO: 905577 - DNA, 15 bp, Homo sapiens
atatgaagaatgtat

SEQ ID NO: 905578 - DNA, 15 bp, Homo sapiens
tatgaagaatgtata

SEQ ID NO: 905579 - DNA, 15 bp, Homo sapiens
atgaagaatgtatag

SEQ ID NO: 905580 - DNA, 15 bp, Homo sapiens
tgaagaatgtatagt

SEQ ID NO: 905581 - DNA, 15 bp, Homo sapiens
gaagaatgtatagtc

SEQ ID NO: 905582 - DNA, 15 bp, Homo sapiens
aagaatgtatagtcc

SEQ ID NO: 905583 - DNA, 15 bp, Homo sapiens
agaatgtatagtccc

SEQ ID NO: 905584 - DNA, 15 bp, Homo sapiens
gaatgtatagtccca

SEQ ID NO: 905585 - DNA, 15 bp, Homo sapiens
aatgtatagtcccat

SEQ ID NO: 905586 - DNA, 15 bp, Homo sapiens
atgtatagtcccatc

SEQ ID NO: 905587 - DNA, 15 bp, Homo sapiens
tgtatagtcccatca

SEQ ID NO: 905588 - DNA, 15 bp, Homo sapiens
gtatagtcccatcaa

SEQ ID NO: 905589 - DNA, 15 bp, Homo sapiens
tatagtcccatcaaa

SEQ ID NO: 905590 - DNA, 15 bp, Homo sapiens
atagtcccatcaaat

SEQ ID NO: 905591 - DNA, 15 bp, Homo sapiens
tagtcccatcaaatt

SEQ ID NO: 905592 - DNA, 15 bp, Homo sapiens
agtcccatcaaattg

SEQ ID NO: 905593 - DNA, 15 bp, Homo sapiens
gtcccatcaaattga

SEQ ID NO: 905594 - DNA, 15 bp, Homo sapiens
tcccatcaaattgaa

SEQ ID NO: 905595 - DNA, 15 bp, Homo sapiens
cccatcaaattgaac

SEQ ID NO: 905596 - DNA, 15 bp, Homo sapiens
ccatcaaattgaact

SEQ ID NO: 905597 - DNA, 15 bp, Homo sapiens
catcaaattgaacta

SEQ ID NO: 905598 - DNA, 15 bp, Homo sapiens
atcaaattgaactaa

SEQ ID NO: 905599 - DNA, 15 bp, Homo sapiens
tcaaattgaactaaa

SEQ ID NO: 905600 - DNA, 15 bp, Homo sapiens
caaattgaactaaaa

SEQ ID NO: 905601 - DNA, 15 bp, Homo sapiens
aaattgaactaaaac

SEQ ID NO: 905602 - DNA, 15 bp, Homo sapiens
aattgaactaaaact

SEQ ID NO: 905603 - DNA, 15 bp, Homo sapiens
attgaactaaaactc

SEQ ID NO: 905604 - DNA, 15 bp, Homo sapiens
ttgaactaaaactcc

SEQ ID NO: 905605 - DNA, 15 bp, Homo sapiens
tgaactaaaactcct

SEQ ID NO: 905606 - DNA, 15 bp, Homo sapiens
gaactaaaactccta

SEQ ID NO: 905607 - DNA, 15 bp, Homo sapiens
aactaaaactcctac

SEQ ID NO: 905608 - DNA, 15 bp, Homo sapiens
actaaaactcctaca

SEQ ID NO: 905609 - DNA, 15 bp, Homo sapiens
ctaaaactcctacag

SEQ ID NO: 905610 - DNA, 15 bp, Homo sapiens
taaaactcctacaga

SEQ ID NO: 905611 - DNA, 15 bp, Homo sapiens
aaaactcctacagag

SEQ ID NO: 905612 - DNA, 15 bp, Homo sapiens
aaactcctacagagg

SEQ ID NO: 905613 - DNA, 15 bp, Homo sapiens
aactcctacagaggg

SEQ ID NO: 905614 - DNA, 15 bp, Homo sapiens
actcctacagaggga

SEQ ID NO: 905615 - DNA, 15 bp, Homo sapiens
ctcctacagagggat

SEQ ID NO: 905616 - DNA, 15 bp, Homo sapiens
tcctacagagggatt

SEQ ID NO: 905617 - DNA, 15 bp, Homo sapiens
cctacagagggattc

SEQ ID NO: 905618 - DNA, 15 bp, Homo sapiens
ctacagagggattct

SEQ ID NO: 905619 - DNA, 15 bp, Homo sapiens
tacagagggattcta

SEQ ID NO: 905620 - DNA, 15 bp, Homo sapiens
acagagggattctat

SEQ ID NO: 905621 - DNA, 15 bp, Homo sapiens
cagagggattctatt

SEQ ID NO: 905622 - DNA, 15 bp, Homo sapiens
agagggattctattt

SEQ ID NO: 905623 - DNA, 15 bp, Homo sapiens
gagggattctatttc

SEQ ID NO: 905624 - DNA, 15 bp, Homo sapiens
agggattctatttct

SEQ ID NO: 905625 - DNA, 15 bp, Homo sapiens
gggattctatttctg

SEQ ID NO: 905626 - DNA, 15 bp, Homo sapiens
ggattctatttctgt

SEQ ID NO: 905627 - DNA, 15 bp, Homo sapiens
gattctatttctgta

SEQ ID NO: 905628 - DNA, 15 bp, Homo sapiens
attctatttctgtag

SEQ ID NO: 905629 - DNA, 15 bp, Homo sapiens
ttctatttctgtaga

SEQ ID NO: 905630 - DNA, 15 bp, Homo sapiens
tctatttctgtagaa

SEQ ID NO: 905631 - DNA, 15 bp, Homo sapiens
ctatttctgtagaaa

SEQ ID NO: 905632 - DNA, 15 bp, Homo sapiens
tatttctgtagaaat

SEQ ID NO: 905633 - DNA, 15 bp, Homo sapiens
atttctgtagaaatt

SEQ ID NO: 905634 - DNA, 15 bp, Homo sapiens
tttctgtagaaattc

SEQ ID NO: 905635 - DNA, 15 bp, Homo sapiens
ttctgtagaaattct

SEQ ID NO: 905636 - DNA, 15 bp, Homo sapiens
tctgtagaaattctg

SEQ ID NO: 905637 - DNA, 15 bp, Homo sapiens
ctgtagaaattctgg

SEQ ID NO: 905638 - DNA, 15 bp, Homo sapiens
tgtagaaattctgga

SEQ ID NO: 905639 - DNA, 15 bp, Homo sapiens
gtagaaattctggaa

SEQ ID NO: 905640 - DNA, 15 bp, Homo sapiens
tagaaattctggaac

SEQ ID NO: 905641 - DNA, 15 bp, Homo sapiens
agaaattctggaact

SEQ ID NO: 905642 - DNA, 15 bp, Homo sapiens
gaaattctggaacta

SEQ ID NO: 905643 - DNA, 15 bp, Homo sapiens
aaattctggaactat

SEQ ID NO: 905644 - DNA, 15 bp, Homo sapiens
aattctggaactatt

SEQ ID NO: 905645 - DNA, 15 bp, Homo sapiens
attctggaactattg

SEQ ID NO: 905646 - DNA, 15 bp, Homo sapiens
ttctggaactattgg

SEQ ID NO: 905647 - DNA, 15 bp, Homo sapiens
tctggaactattggt

SEQ ID NO: 905648 - DNA, 15 bp, Homo sapiens
ctggaactattggtt

SEQ ID NO: 905649 - DNA, 15 bp, Homo sapiens
tggaactattggttg

SEQ ID NO: 905650 - DNA, 15 bp, Homo sapiens
ggaactattggttgt

SEQ ID NO: 905651 - DNA, 15 bp, Homo sapiens
gaactattggttgtc

SEQ ID NO: 905652 - DNA, 15 bp, Homo sapiens
aactattggttgtct

SEQ ID NO: 905653 - DNA, 15 bp, Homo sapiens
actattggttgtctc

SEQ ID NO: 905654 - DNA, 15 bp, Homo sapiens
ctattggttgtctct

SEQ ID NO: 905655 - DNA, 15 bp, Homo sapiens
tattggttgtctctg

SEQ ID NO: 905656 - DNA, 15 bp, Homo sapiens
attggttgtctctgg

SEQ ID NO: 905657 - DNA, 15 bp, Homo sapiens
ttggttgtctctgga

SEQ ID NO: 905658 - DNA, 15 bp, Homo sapiens
tggttgtctctggat

SEQ ID NO: 905659 - DNA, 15 bp, Homo sapiens
ggttgtctctggatt

SEQ ID NO: 905660 - DNA, 15 bp, Homo sapiens
gttgtctctggattg

SEQ ID NO: 905661 - DNA, 15 bp, Homo sapiens
ttgtctctggattgt

SEQ ID NO: 905662 - DNA, 15 bp, Homo sapiens
tgtctctggattgtt

SEQ ID NO: 905663 - DNA, 15 bp, Homo sapiens
gtctctggattgttt

SEQ ID NO: 905664 - DNA, 15 bp, Homo sapiens
tctctggattgtttg

SEQ ID NO: 905665 - DNA, 15 bp, Homo sapiens
ctctggattgtttgt

SEQ ID NO: 905666 - DNA, 15 bp, Homo sapiens
tctggattgtttgtt

SEQ ID NO: 905667 - DNA, 15 bp, Homo sapiens
ctggattgtttgttt

SEQ ID NO: 905668 - DNA, 15 bp, Homo sapiens
tggattgtttgtttg

SEQ ID NO: 905669 - DNA, 15 bp, Homo sapiens
ggattgtttgtttgt

SEQ ID NO: 905670 - DNA, 15 bp, Homo sapiens
gattgtttgtttgtt

SEQ ID NO: 905671 - DNA, 15 bp, Homo sapiens
attgtttgtttgttt

SEQ ID NO: 905672 - DNA, 15 bp, Homo sapiens
ttgtttgtttgtttc

SEQ ID NO: 905673 - DNA, 15 bp, Homo sapiens
tgtttgtttgtttcc

SEQ ID NO: 905674 - DNA, 15 bp, Homo sapiens
gtttgtttgtttcct

SEQ ID NO: 905675 - DNA, 15 bp, Homo sapiens
tttgtttgtttccta

SEQ ID NO: 905676 - DNA, 15 bp, Homo sapiens
ttgtttgtttcctac

SEQ ID NO: 905677 - DNA, 15 bp, Homo sapiens
tgtttgtttcctact

SEQ ID NO: 905678 - DNA, 15 bp, Homo sapiens
gtttgtttcctacta

SEQ ID NO: 905679 - DNA, 15 bp, Homo sapiens
tttgtttcctactat

SEQ ID NO: 905680 - DNA, 15 bp, Homo sapiens
ttgtttcctactata

SEQ ID NO: 905681 - DNA, 15 bp, Homo sapiens
tgtttcctactatat

SEQ ID NO: 905682 - DNA, 15 bp, Homo sapiens
gtttcctactatatt

SEQ ID NO: 905683 - DNA, 15 bp, Homo sapiens
tttcctactatattt

SEQ ID NO: 905684 - DNA, 15 bp, Homo sapiens
ttcctactatatttc

SEQ ID NO: 905685 - DNA, 15 bp, Homo sapiens
tcctactatatttca

SEQ ID NO: 905686 - DNA, 15 bp, Homo sapiens
cctactatatttcaa

SEQ ID NO: 905687 - DNA, 15 bp, Homo sapiens
ctactatatttcaaa

SEQ ID NO: 905688 - DNA, 15 bp, Homo sapiens
tactatatttcaaat

SEQ ID NO: 905689 - DNA, 15 bp, Homo sapiens
actatatttcaaatg

SEQ ID NO: 905690 - DNA, 15 bp, Homo sapiens
ctatatttcaaatga

SEQ ID NO: 905691 - DNA, 15 bp, Homo sapiens
tatatttcaaatgag

SEQ ID NO: 905692 - DNA, 15 bp, Homo sapiens
atatttcaaatgagg

SEQ ID NO: 905693 - DNA, 15 bp, Homo sapiens
tatttcaaatgagga

SEQ ID NO: 905694 - DNA, 15 bp, Homo sapiens
atttcaaatgaggaa

SEQ ID NO: 905695 - DNA, 15 bp, Homo sapiens
tttcaaatgaggaaa

SEQ ID NO: 905696 - DNA, 15 bp, Homo sapiens
ttcaaatgaggaaat

SEQ ID NO: 905697 - DNA, 15 bp, Homo sapiens
tcaaatgaggaaatt

SEQ ID NO: 905698 - DNA, 15 bp, Homo sapiens
caaatgaggaaatta

SEQ ID NO: 905699 - DNA, 15 bp, Homo sapiens
aaatgaggaaattag

SEQ ID NO: 905700 - DNA, 15 bp, Homo sapiens
aatgaggaaattaga

SEQ ID NO: 905701 - DNA, 15 bp, Homo sapiens
atgaggaaattagaa

SEQ ID NO: 905702 - DNA, 15 bp, Homo sapiens
tgaggaaattagaag

SEQ ID NO: 905703 - DNA, 15 bp, Homo sapiens
gaggaaattagaagg

SEQ ID NO: 905704 - DNA, 15 bp, Homo sapiens
aggaaattagaaggg

SEQ ID NO: 905705 - DNA, 15 bp, Homo sapiens
ggaaattagaagggg

SEQ ID NO: 905706 - DNA, 15 bp, Homo sapiens
gaaattagaaggggg

SEQ ID NO: 905707 - DNA, 15 bp, Homo sapiens
aaattagaaggggga

SEQ ID NO: 905708 - DNA, 15 bp, Homo sapiens
aattagaagggggaa

SEQ ID NO: 905709 - DNA, 15 bp, Homo sapiens
attagaagggggaaa

SEQ ID NO: 905710 - DNA, 15 bp, Homo sapiens
ttagaagggggaaaa

SEQ ID NO: 905711 - DNA, 15 bp, Homo sapiens
tagaagggggaaaag

SEQ ID NO: 905712 - DNA, 15 bp, Homo sapiens
agaagggggaaaaga

SEQ ID NO: 905713 - DNA, 15 bp, Homo sapiens
gaagggggaaaagaa

SEQ ID NO: 905714 - DNA, 15 bp, Homo sapiens
aagggggaaaagaaa

SEQ ID NO: 905715 - DNA, 15 bp, Homo sapiens
agggggaaaagaaac

SEQ ID NO: 905716 - DNA, 15 bp, Homo sapiens
gggggaaaagaaacc

SEQ ID NO: 905717 - DNA, 15 bp, Homo sapiens
ggggaaaagaaacct

SEQ ID NO: 905718 - DNA, 15 bp, Homo sapiens
gggaaaagaaacctg

SEQ ID NO: 905719 - DNA, 15 bp, Homo sapiens
ggaaaagaaacctga

SEQ ID NO: 905720 - DNA, 15 bp, Homo sapiens
gaaaagaaacctgac

SEQ ID NO: 905721 - DNA, 15 bp, Homo sapiens
aaaagaaacctgaca

SEQ ID NO: 905722 - DNA, 15 bp, Homo sapiens
aaagaaacctgacat

SEQ ID NO: 905723 - DNA, 15 bp, Homo sapiens
aagaaacctgacatc

SEQ ID NO: 905724 - DNA, 15 bp, Homo sapiens
agaaacctgacatcc

SEQ ID NO: 905725 - DNA, 15 bp, Homo sapiens
gaaacctgacatcca

SEQ ID NO: 905726 - DNA, 15 bp, Homo sapiens
aaacctgacatccag

SEQ ID NO: 905727 - DNA, 15 bp, Homo sapiens
aacctgacatccaga

SEQ ID NO: 905728 - DNA, 15 bp, Homo sapiens
acctgacatccagaa

SEQ ID NO: 905729 - DNA, 15 bp, Homo sapiens
cctgacatccagaag

SEQ ID NO: 905730 - DNA, 15 bp, Homo sapiens
ctgacatccagaaga

SEQ ID NO: 905731 - DNA, 15 bp, Homo sapiens
tgacatccagaagaa

SEQ ID NO: 905732 - DNA, 15 bp, Homo sapiens
gacatccagaagaaa

SEQ ID NO: 905733 - DNA, 15 bp, Homo sapiens
acatccagaagaaaa

SEQ ID NO: 905734 - DNA, 15 bp, Homo sapiens
catccagaagaaaat

SEQ ID NO: 905735 - DNA, 15 bp, Homo sapiens
atccagaagaaaata

SEQ ID NO: 905736 - DNA, 15 bp, Homo sapiens
tccagaagaaaataa

SEQ ID NO: 905737 - DNA, 15 bp, Homo sapiens
ccagaagaaaataat

SEQ ID NO: 905738 - DNA, 15 bp, Homo sapiens
cagaagaaaataata

SEQ ID NO: 905739 - DNA, 15 bp, Homo sapiens
agaagaaaataatac

SEQ ID NO: 905740 - DNA, 15 bp, Homo sapiens
gaagaaaataatacc

SEQ ID NO: 905741 - DNA, 15 bp, Homo sapiens
aagaaaataatacct

SEQ ID NO: 905742 - DNA, 15 bp, Homo sapiens
agaaaataataccta

SEQ ID NO: 905743 - DNA, 15 bp, Homo sapiens
gaaaataatacctaa

SEQ ID NO: 905744 - DNA, 15 bp, Homo sapiens
aaaataatacctaat

SEQ ID NO: 905745 - DNA, 15 bp, Homo sapiens
aaataatacctaatt

SEQ ID NO: 905746 - DNA, 15 bp, Homo sapiens
aataatacctaattt

SEQ ID NO: 905747 - DNA, 15 bp, Homo sapiens
ataatacctaatttt

SEQ ID NO: 905748 - DNA, 15 bp, Homo sapiens
taatacctaatttta

SEQ ID NO: 905749 - DNA, 15 bp, Homo sapiens
aatacctaattttag

SEQ ID NO: 905750 - DNA, 15 bp, Homo sapiens
atacctaattttaga

SEQ ID NO: 905751 - DNA, 15 bp, Homo sapiens
tacctaattttagag

SEQ ID NO: 905752 - DNA, 15 bp, Homo sapiens
acctaattttagagg

SEQ ID NO: 905753 - DNA, 15 bp, Homo sapiens
cctaattttagaggc

SEQ ID NO: 905754 - DNA, 15 bp, Homo sapiens
ctaattttagaggcc

SEQ ID NO: 905755 - DNA, 15 bp, Homo sapiens
taattttagaggcca

SEQ ID NO: 905756 - DNA, 15 bp, Homo sapiens
aattttagaggccac

SEQ ID NO: 905757 - DNA, 15 bp, Homo sapiens
attttagaggccaca

SEQ ID NO: 905758 - DNA, 15 bp, Homo sapiens
ttttagaggccacat

SEQ ID NO: 905759 - DNA, 15 bp, Homo sapiens
tttagaggccacatt

SEQ ID NO: 905760 - DNA, 15 bp, Homo sapiens
ttagaggccacattt

SEQ ID NO: 905761 - DNA, 15 bp, Homo sapiens
tagaggccacatttt

SEQ ID NO: 905762 - DNA, 15 bp, Homo sapiens
agaggccacattttc

SEQ ID NO: 905763 - DNA, 15 bp, Homo sapiens
gaggccacattttca

SEQ ID NO: 905764 - DNA, 15 bp, Homo sapiens
aggccacattttcat

SEQ ID NO: 905765 - DNA, 15 bp, Homo sapiens
ggccacattttcatc

SEQ ID NO: 905766 - DNA, 15 bp, Homo sapiens
gccacattttcatcg

SEQ ID NO: 905767 - DNA, 15 bp, Homo sapiens
ccacattttcatcgc

SEQ ID NO: 905768 - DNA, 15 bp, Homo sapiens
cacattttcatcgca

SEQ ID NO: 905769 - DNA, 15 bp, Homo sapiens
acattttcatcgcat

SEQ ID NO: 905770 - DNA, 15 bp, Homo sapiens
cattttcatcgcatt

SEQ ID NO: 905771 - DNA, 15 bp, Homo sapiens
attttcatcgcattt

SEQ ID NO: 905772 - DNA, 15 bp, Homo sapiens
ttttcatcgcatttt

SEQ ID NO: 905773 - DNA, 15 bp, Homo sapiens
tttcatcgcattttg

SEQ ID NO: 905774 - DNA, 15 bp, Homo sapiens
ttcatcgcattttga

SEQ ID NO: 905775 - DNA, 15 bp, Homo sapiens
tcatcgcattttgac

SEQ ID NO: 905776 - DNA, 15 bp, Homo sapiens
catcgcattttgaca

SEQ ID NO: 905777 - DNA, 15 bp, Homo sapiens
atcgcattttgacag

SEQ ID NO: 905778 - DNA, 15 bp, Homo sapiens
tcgcattttgacagg

SEQ ID NO: 905779 - DNA, 15 bp, Homo sapiens
cgcattttgacagga

SEQ ID NO: 905780 - DNA, 15 bp, Homo sapiens
gcattttgacaggat

SEQ ID NO: 905781 - DNA, 15 bp, Homo sapiens
cattttgacaggatt

SEQ ID NO: 905782 - DNA, 15 bp, Homo sapiens
attttgacaggattg

SEQ ID NO: 905783 - DNA, 15 bp, Homo sapiens
ttttgacaggattgg

SEQ ID NO: 905784 - DNA, 15 bp, Homo sapiens
tttgacaggattggt

SEQ ID NO: 905785 - DNA, 15 bp, Homo sapiens
ttgacaggattggtc

SEQ ID NO: 905786 - DNA, 15 bp, Homo sapiens
tgacaggattggtcc

SEQ ID NO: 905787 - DNA, 15 bp, Homo sapiens
gacaggattggtccc

SEQ ID NO: 905788 - DNA, 15 bp, Homo sapiens
acaggattggtccca

SEQ ID NO: 905789 - DNA, 15 bp, Homo sapiens
caggattggtcccat

SEQ ID NO: 905790 - DNA, 15 bp, Homo sapiens
aggattggtcccatt

SEQ ID NO: 905791 - DNA, 15 bp, Homo sapiens
ggattggtcccattt

SEQ ID NO: 905792 - DNA, 15 bp, Homo sapiens
gattggtcccatttc

SEQ ID NO: 905793 - DNA, 15 bp, Homo sapiens
attggtcccatttct

SEQ ID NO: 905794 - DNA, 15 bp, Homo sapiens
ttggtcccatttctc

SEQ ID NO: 905795 - DNA, 15 bp, Homo sapiens
tggtcccatttctcc

SEQ ID NO: 905796 - DNA, 15 bp, Homo sapiens
ggtcccatttctccc

SEQ ID NO: 905797 - DNA, 15 bp, Homo sapiens
gtcccatttctccct

SEQ ID NO: 905798 - DNA, 15 bp, Homo sapiens
tcccatttctccctc

SEQ ID NO: 905799 - DNA, 15 bp, Homo sapiens
cccatttctccctct

SEQ ID NO: 905800 - DNA, 15 bp, Homo sapiens
ccatttctccctctc

SEQ ID NO: 905801 - DNA, 15 bp, Homo sapiens
catttctccctctct

SEQ ID NO: 905802 - DNA, 15 bp, Homo sapiens
atttctccctctctg

SEQ ID NO: 905803 - DNA, 15 bp, Homo sapiens
tttctccctctctgt

SEQ ID NO: 905804 - DNA, 15 bp, Homo sapiens
ttctccctctctgtg

SEQ ID NO: 905805 - DNA, 15 bp, Homo sapiens
tctccctctctgtga

SEQ ID NO: 905806 - DNA, 15 bp, Homo sapiens
ctccctctctgtgaa

SEQ ID NO: 905807 - DNA, 15 bp, Homo sapiens
tccctctctgtgaag

SEQ ID NO: 905808 - DNA, 15 bp, Homo sapiens
ccctctctgtgaaga

SEQ ID NO: 905809 - DNA, 15 bp, Homo sapiens
cctctctgtgaagat

SEQ ID NO: 905810 - DNA, 15 bp, Homo sapiens
ctctctgtgaagatg

SEQ ID NO: 905811 - DNA, 15 bp, Homo sapiens
tctctgtgaagatga

SEQ ID NO: 905812 - DNA, 15 bp, Homo sapiens
ctctgtgaagatgat

SEQ ID NO: 905813 - DNA, 15 bp, Homo sapiens
tctgtgaagatgatc

SEQ ID NO: 905814 - DNA, 15 bp, Homo sapiens
ctgtgaagatgatca

SEQ ID NO: 905815 - DNA, 15 bp, Homo sapiens
tgtgaagatgatcat

SEQ ID NO: 905816 - DNA, 15 bp, Homo sapiens
gtgaagatgatcatt

SEQ ID NO: 905817 - DNA, 15 bp, Homo sapiens
tgaagatgatcattc

SEQ ID NO: 905818 - DNA, 15 bp, Homo sapiens
gaagatgatcattca

SEQ ID NO: 905819 - DNA, 15 bp, Homo sapiens
aagatgatcattcac

SEQ ID NO: 905820 - DNA, 15 bp, Homo sapiens
agatgatcattcact

SEQ ID NO: 905821 - DNA, 15 bp, Homo sapiens
gatgatcattcactg

SEQ ID NO: 905822 - DNA, 15 bp, Homo sapiens
atgatcattcactgg

SEQ ID NO: 905823 - DNA, 15 bp, Homo sapiens
tgatcattcactggt

SEQ ID NO: 905824 - DNA, 15 bp, Homo sapiens
gatcattcactggtt

SEQ ID NO: 905825 - DNA, 15 bp, Homo sapiens
atcattcactggttt

SEQ ID NO: 905826 - DNA, 15 bp, Homo sapiens
tcattcactggttta

SEQ ID NO: 905827 - DNA, 15 bp, Homo sapiens
cattcactggtttaa

SEQ ID NO: 905828 - DNA, 15 bp, Homo sapiens
attcactggtttaac

SEQ ID NO: 905829 - DNA, 15 bp, Homo sapiens
ttcactggtttaact

SEQ ID NO: 905830 - DNA, 15 bp, Homo sapiens
tcactggtttaactt

SEQ ID NO: 905831 - DNA, 15 bp, Homo sapiens
cactggtttaacttt

SEQ ID NO: 905832 - DNA, 15 bp, Homo sapiens
actggtttaactttg

SEQ ID NO: 905833 - DNA, 15 bp, Homo sapiens
ctggtttaactttgc

SEQ ID NO: 905834 - DNA, 15 bp, Homo sapiens
tggtttaactttgct

SEQ ID NO: 905835 - DNA, 15 bp, Homo sapiens
ggtttaactttgctt

SEQ ID NO: 905836 - DNA, 15 bp, Homo sapiens
gtttaactttgcttc

SEQ ID NO: 905837 - DNA, 15 bp, Homo sapiens
tttaactttgcttca

SEQ ID NO: 905838 - DNA, 15 bp, Homo sapiens
ttaactttgcttcat

SEQ ID NO: 905839 - DNA, 15 bp, Homo sapiens
taactttgcttcatg

SEQ ID NO: 905840 - DNA, 15 bp, Homo sapiens
aactttgcttcatgg

SEQ ID NO: 905841 - DNA, 15 bp, Homo sapiens
actttgcttcatggt

SEQ ID NO: 905842 - DNA, 15 bp, Homo sapiens
ctttgcttcatggtg

SEQ ID NO: 905843 - DNA, 15 bp, Homo sapiens
tttgcttcatggtgg

SEQ ID NO: 905844 - DNA, 15 bp, Homo sapiens
ttgcttcatggtggt

SEQ ID NO: 905845 - DNA, 15 bp, Homo sapiens
tgcttcatggtggtt

SEQ ID NO: 905846 - DNA, 15 bp, Homo sapiens
gcttcatggtggttt

SEQ ID NO: 905847 - DNA, 15 bp, Homo sapiens
cttcatggtggtttt

SEQ ID NO: 905848 - DNA, 15 bp, Homo sapiens
ttcatggtggtttta

SEQ ID NO: 905849 - DNA, 15 bp, Homo sapiens
tcatggtggttttat

SEQ ID NO: 905850 - DNA, 15 bp, Homo sapiens
catggtggttttatc

SEQ ID NO: 905851 - DNA, 15 bp, Homo sapiens
atggtggttttatct

SEQ ID NO: 905852 - DNA, 15 bp, Homo sapiens
tggtggttttatctg

SEQ ID NO: 905853 - DNA, 15 bp, Homo sapiens
ggtggttttatctgt

SEQ ID NO: 905854 - DNA, 15 bp, Homo sapiens
gtggttttatctgtg

SEQ ID NO: 905855 - DNA, 15 bp, Homo sapiens
tggttttatctgtgt

SEQ ID NO: 905856 - DNA, 15 bp, Homo sapiens
ggttttatctgtgtg

SEQ ID NO: 905857 - DNA, 15 bp, Homo sapiens
gttttatctgtgtgg

SEQ ID NO: 905858 - DNA, 15 bp, Homo sapiens
ttttatctgtgtggt

SEQ ID NO: 905859 - DNA, 15 bp, Homo sapiens
tttatctgtgtggtg

SEQ ID NO: 905860 - DNA, 15 bp, Homo sapiens
ttatctgtgtggtgc

SEQ ID NO: 905861 - DNA, 15 bp, Homo sapiens
tatctgtgtggtgct

SEQ ID NO: 905862 - DNA, 15 bp, Homo sapiens
atctgtgtggtgctt

SEQ ID NO: 905863 - DNA, 15 bp, Homo sapiens
tctgtgtggtgcttg

SEQ ID NO: 905864 - DNA, 15 bp, Homo sapiens
ctgtgtggtgcttgg

SEQ ID NO: 905865 - DNA, 15 bp, Homo sapiens
tgtgtggtgcttggg

SEQ ID NO: 905866 - DNA, 15 bp, Homo sapiens
gtgtggtgcttggga

SEQ ID NO: 905867 - DNA, 15 bp, Homo sapiens
tgtggtgcttgggaa

SEQ ID NO: 905868 - DNA, 15 bp, Homo sapiens
gtggtgcttgggaac

SEQ ID NO: 905869 - DNA, 15 bp, Homo sapiens
tggtgcttgggaaca

SEQ ID NO: 905870 - DNA, 15 bp, Homo sapiens
ggtgcttgggaacag

SEQ ID NO: 905871 - DNA, 15 bp, Homo sapiens
gtgcttgggaacagc

SEQ ID NO: 905872 - DNA, 15 bp, Homo sapiens
tgcttgggaacagcc

SEQ ID NO: 905873 - DNA, 15 bp, Homo sapiens
gcttgggaacagcca

SEQ ID NO: 905874 - DNA, 15 bp, Homo sapiens
cttgggaacagccat

SEQ ID NO: 905875 - DNA, 15 bp, Homo sapiens
ttgggaacagccatg

SEQ ID NO: 905876 - DNA, 15 bp, Homo sapiens
tgggaacagccatgt

SEQ ID NO: 905877 - DNA, 15 bp, Homo sapiens
gggaacagccatgtg

SEQ ID NO: 905878 - DNA, 15 bp, Homo sapiens
ggaacagccatgtga

SEQ ID NO: 905879 - DNA, 15 bp, Homo sapiens
gaacagccatgtgag

SEQ ID NO: 905880 - DNA, 15 bp, Homo sapiens
aacagccatgtgagg

SEQ ID NO: 905881 - DNA, 15 bp, Homo sapiens
acagccatgtgaggc

SEQ ID NO: 905882 - DNA, 15 bp, Homo sapiens
cagccatgtgaggct

SEQ ID NO: 905883 - DNA, 15 bp, Homo sapiens
agccatgtgaggctc

SEQ ID NO: 905884 - DNA, 15 bp, Homo sapiens
gccatgtgaggctct

SEQ ID NO: 905885 - DNA, 15 bp, Homo sapiens
ccatgtgaggctctc

SEQ ID NO: 905886 - DNA, 15 bp, Homo sapiens
catgtgaggctctct

SEQ ID NO: 905887 - DNA, 15 bp, Homo sapiens
atgtgaggctctctg

SEQ ID NO: 905888 - DNA, 15 bp, Homo sapiens
tgtgaggctctctgt

SEQ ID NO: 905889 - DNA, 15 bp, Homo sapiens
gtgaggctctctgtg

SEQ ID NO: 905890 - DNA, 15 bp, Homo sapiens
tgaggctctctgtgt

SEQ ID NO: 905891 - DNA, 15 bp, Homo sapiens
gaggctctctgtgta

SEQ ID NO: 905892 - DNA, 15 bp, Homo sapiens
aggctctctgtgtag

SEQ ID NO: 905893 - DNA, 15 bp, Homo sapiens
ggctctctgtgtaga

SEQ ID NO: 905894 - DNA, 15 bp, Homo sapiens
gctctctgtgtagat

SEQ ID NO: 905895 - DNA, 15 bp, Homo sapiens
ctctctgtgtagata

SEQ ID NO: 905896 - DNA, 15 bp, Homo sapiens
tctctgtgtagataa

SEQ ID NO: 905897 - DNA, 15 bp, Homo sapiens
ctctgtgtagataac

SEQ ID NO: 905898 - DNA, 15 bp, Homo sapiens
tctgtgtagataact

SEQ ID NO: 905899 - DNA, 15 bp, Homo sapiens
ctgtgtagataactc

SEQ ID NO: 905900 - DNA, 15 bp, Homo sapiens
tgtgtagataactca

SEQ ID NO: 905901 - DNA, 15 bp, Homo sapiens
gtgtagataactcaa

SEQ ID NO: 905902 - DNA, 15 bp, Homo sapiens
tgtagataactcaag

SEQ ID NO: 905903 - DNA, 15 bp, Homo sapiens
gtagataactcaagg

SEQ ID NO: 905904 - DNA, 15 bp, Homo sapiens
tagataactcaaggt

SEQ ID NO: 905905 - DNA, 15 bp, Homo sapiens
agataactcaaggta

SEQ ID NO: 905906 - DNA, 15 bp, Homo sapiens
gataactcaaggtaa

SEQ ID NO: 905907 - DNA, 15 bp, Homo sapiens
ataactcaaggtaac

SEQ ID NO: 905908 - DNA, 15 bp, Homo sapiens
taactcaaggtaact

SEQ ID NO: 905909 - DNA, 15 bp, Homo sapiens
aactcaaggtaactg

SEQ ID NO: 905910 - DNA, 15 bp, Homo sapiens
actcaaggtaactgt

SEQ ID NO: 905911 - DNA, 15 bp, Homo sapiens
ctcaaggtaactgtt

SEQ ID NO: 905912 - DNA, 15 bp, Homo sapiens
tcaaggtaactgttt

SEQ ID NO: 905913 - DNA, 15 bp, Homo sapiens
caaggtaactgtttg

SEQ ID NO: 905914 - DNA, 15 bp, Homo sapiens
aaggtaactgtttgc

SEQ ID NO: 905915 - DNA, 15 bp, Homo sapiens
aggtaactgtttgct

SEQ ID NO: 905916 - DNA, 15 bp, Homo sapiens
ggtaactgtttgctt

SEQ ID NO: 905917 - DNA, 15 bp, Homo sapiens
gtaactgtttgcttt

SEQ ID NO: 905918 - DNA, 15 bp, Homo sapiens
taactgtttgctttg

SEQ ID NO: 905919 - DNA, 15 bp, Homo sapiens
aactgtttgctttga

SEQ ID NO: 905920 - DNA, 15 bp, Homo sapiens
actgtttgctttgaa

SEQ ID NO: 905921 - DNA, 15 bp, Homo sapiens
ctgtttgctttgaaa

SEQ ID NO: 905922 - DNA, 15 bp, Homo sapiens
tgtttgctttgaaaa

SEQ ID NO: 905923 - DNA, 15 bp, Homo sapiens
gtttgctttgaaaac

SEQ ID NO: 905924 - DNA, 15 bp, Homo sapiens
tttgctttgaaaaca

SEQ ID NO: 905925 - DNA, 15 bp, Homo sapiens
ttgctttgaaaacat

SEQ ID NO: 905926 - DNA, 15 bp, Homo sapiens
tgctttgaaaacata

SEQ ID NO: 905927 - DNA, 15 bp, Homo sapiens
gctttgaaaacataa

SEQ ID NO: 905928 - DNA, 15 bp, Homo sapiens
ctttgaaaacataaa

SEQ ID NO: 905929 - DNA, 15 bp, Homo sapiens
tttgaaaacataaaa

SEQ ID NO: 905930 - DNA, 15 bp, Homo sapiens
ttgaaaacataaaaa

SEQ ID NO: 905931 - DNA, 15 bp, Homo sapiens
tgaaaacataaaaat

SEQ ID NO: 905932 - DNA, 15 bp, Homo sapiens
gaaaacataaaaata

SEQ ID NO: 905933 - DNA, 15 bp, Homo sapiens
aaaacataaaaatag

SEQ ID NO: 905934 - DNA, 15 bp, Homo sapiens
aaacataaaaataga

SEQ ID NO: 905935 - DNA, 15 bp, Homo sapiens
aacataaaaatagaa

SEQ ID NO: 905936 - DNA, 15 bp, Homo sapiens
acataaaaatagaac

SEQ ID NO: 905937 - DNA, 15 bp, Homo sapiens
cataaaaatagaaca

SEQ ID NO: 905938 - DNA, 15 bp, Homo sapiens
ataaaaatagaacag

SEQ ID NO: 905939 - DNA, 15 bp, Homo sapiens
taaaaatagaacagc

SEQ ID NO: 905940 - DNA, 15 bp, Homo sapiens
aaaaatagaacagca

SEQ ID NO: 905941 - DNA, 15 bp, Homo sapiens
aaaatagaacagcac

SEQ ID NO: 905942 - DNA, 15 bp, Homo sapiens
aaatagaacagcaca

SEQ ID NO: 905943 - DNA, 15 bp, Homo sapiens
aatagaacagcacag

SEQ ID NO: 905944 - DNA, 15 bp, Homo sapiens
atagaacagcacagg

SEQ ID NO: 905945 - DNA, 15 bp, Homo sapiens
tagaacagcacagga

SEQ ID NO: 905946 - DNA, 15 bp, Homo sapiens
agaacagcacaggac

SEQ ID NO: 905947 - DNA, 15 bp, Homo sapiens
gaacagcacaggact

SEQ ID NO: 905948 - DNA, 15 bp, Homo sapiens
aacagcacaggactc

SEQ ID NO: 905949 - DNA, 15 bp, Homo sapiens
acagcacaggactca

SEQ ID NO: 905950 - DNA, 15 bp, Homo sapiens
cagcacaggactcat

SEQ ID NO: 905951 - DNA, 15 bp, Homo sapiens
agcacaggactcatt

SEQ ID NO: 905952 - DNA, 15 bp, Homo sapiens
gcacaggactcattt

SEQ ID NO: 905953 - DNA, 15 bp, Homo sapiens
cacaggactcatttc

SEQ ID NO: 905954 - DNA, 15 bp, Homo sapiens
acaggactcatttct

SEQ ID NO: 905955 - DNA, 15 bp, Homo sapiens
caggactcatttctc

SEQ ID NO: 905956 - DNA, 15 bp, Homo sapiens
aggactcatttctct

SEQ ID NO: 905957 - DNA, 15 bp, Homo sapiens
ggactcatttctctg

SEQ ID NO: 905958 - DNA, 15 bp, Homo sapiens
gactcatttctctgt

SEQ ID NO: 905959 - DNA, 15 bp, Homo sapiens
actcatttctctgtt

SEQ ID NO: 905960 - DNA, 15 bp, Homo sapiens
ctcatttctctgttg

SEQ ID NO: 905961 - DNA, 15 bp, Homo sapiens
tcatttctctgttgg

SEQ ID NO: 905962 - DNA, 15 bp, Homo sapiens
catttctctgttgga

SEQ ID NO: 905963 - DNA, 15 bp, Homo sapiens
atttctctgttggaa

SEQ ID NO: 905964 - DNA, 15 bp, Homo sapiens
tttctctgttggaat

SEQ ID NO: 905965 - DNA, 15 bp, Homo sapiens
ttctctgttggaatg

SEQ ID NO: 905966 - DNA, 15 bp, Homo sapiens
tctctgttggaatga

SEQ ID NO: 905967 - DNA, 15 bp, Homo sapiens
ctctgttggaatgaa

SEQ ID NO: 905968 - DNA, 15 bp, Homo sapiens
tctgttggaatgaat

SEQ ID NO: 905969 - DNA, 15 bp, Homo sapiens
ctgttggaatgaatc

SEQ ID NO: 905970 - DNA, 15 bp, Homo sapiens
tgttggaatgaatca

SEQ ID NO: 905971 - DNA, 15 bp, Homo sapiens
gttggaatgaatcaa

SEQ ID NO: 905972 - DNA, 15 bp, Homo sapiens
ttggaatgaatcaaa

SEQ ID NO: 905973 - DNA, 15 bp, Homo sapiens
tggaatgaatcaaaa

SEQ ID NO: 905974 - DNA, 15 bp, Homo sapiens
ggaatgaatcaaaag

SEQ ID NO: 905975 - DNA, 15 bp, Homo sapiens
gaatgaatcaaaaga

SEQ ID NO: 905976 - DNA, 15 bp, Homo sapiens
aatgaatcaaaagaa

SEQ ID NO: 905977 - DNA, 15 bp, Homo sapiens
atgaatcaaaagaaa

SEQ ID NO: 905978 - DNA, 15 bp, Homo sapiens
tgaatcaaaagaaaa

SEQ ID NO: 905979 - DNA, 15 bp, Homo sapiens
gaatcaaaagaaaag

SEQ ID NO: 905980 - DNA, 15 bp, Homo sapiens
aatcaaaagaaaagt

SEQ ID NO: 905981 - DNA, 15 bp, Homo sapiens
atcaaaagaaaagtt

SEQ ID NO: 905982 - DNA, 15 bp, Homo sapiens
tcaaaagaaaagttg

SEQ ID NO: 905983 - DNA, 15 bp, Homo sapiens
caaaagaaaagttga

SEQ ID NO: 905984 - DNA, 15 bp, Homo sapiens
aaaagaaaagttgac

SEQ ID NO: 905985 - DNA, 15 bp, Homo sapiens
aaagaaaagttgaca

SEQ ID NO: 905986 - DNA, 15 bp, Homo sapiens
aagaaaagttgacag

SEQ ID NO: 905987 - DNA, 15 bp, Homo sapiens
agaaaagttgacaga

SEQ ID NO: 905988 - DNA, 15 bp, Homo sapiens
gaaaagttgacagag

SEQ ID NO: 905989 - DNA, 15 bp, Homo sapiens
aaaagttgacagaga

SEQ ID NO: 905990 - DNA, 15 bp, Homo sapiens
aaagttgacagagaa

SEQ ID NO: 905991 - DNA, 15 bp, Homo sapiens
aagttgacagagaaa

SEQ ID NO: 905992 - DNA, 15 bp, Homo sapiens
agttgacagagaaat

SEQ ID NO: 905993 - DNA, 15 bp, Homo sapiens
gttgacagagaaata

SEQ ID NO: 905994 - DNA, 15 bp, Homo sapiens
ttgacagagaaataa

SEQ ID NO: 905995 - DNA, 15 bp, Homo sapiens
tgacagagaaataaa

SEQ ID NO: 905996 - DNA, 15 bp, Homo sapiens
gacagagaaataaag

SEQ ID NO: 905997 - DNA, 15 bp, Homo sapiens
acagagaaataaagt

SEQ ID NO: 905998 - DNA, 15 bp, Homo sapiens
cagagaaataaagtt

SEQ ID NO: 905999 - DNA, 15 bp, Homo sapiens
agagaaataaagttt

SEQ ID NO: 906000 - DNA, 15 bp, Homo sapiens
gagaaataaagttta

SEQ ID NO: 906001 - DNA, 15 bp, Homo sapiens
agaaataaagtttat

SEQ ID NO: 906002 - DNA, 15 bp, Homo sapiens
gaaataaagtttatg

SEQ ID NO: 906003 - DNA, 15 bp, Homo sapiens
aaataaagtttatgt

SEQ ID NO: 906004 - DNA, 15 bp, Homo sapiens
aataaagtttatgta

SEQ ID NO: 906005 - DNA, 15 bp, Homo sapiens
ataaagtttatgtac

SEQ ID NO: 906006 - DNA, 15 bp, Homo sapiens
taaagtttatgtaca

SEQ ID NO: 906007 - DNA, 15 bp, Homo sapiens
aaagtttatgtacaa

SEQ ID NO: 906008 - DNA, 15 bp, Homo sapiens
aagtttatgtacaaa

SEQ ID NO: 906009 - DNA, 15 bp, Homo sapiens
agtttatgtacaaag

SEQ ID NO: 906010 - DNA, 15 bp, Homo sapiens
gtttatgtacaaagg

SEQ ID NO: 906011 - DNA, 15 bp, Homo sapiens
tttatgtacaaagga

SEQ ID NO: 906012 - DNA, 15 bp, Homo sapiens
ttatgtacaaaggag

SEQ ID NO: 906013 - DNA, 15 bp, Homo sapiens
tatgtacaaaggaga

SEQ ID NO: 906014 - DNA, 15 bp, Homo sapiens
atgtacaaaggagaa

SEQ ID NO: 906015 - DNA, 15 bp, Homo sapiens
tgtacaaaggagaag

SEQ ID NO: 906016 - DNA, 15 bp, Homo sapiens
gtacaaaggagaagg

SEQ ID NO: 906017 - DNA, 15 bp, Homo sapiens
tacaaaggagaagga

SEQ ID NO: 906018 - DNA, 15 bp, Homo sapiens
acaaaggagaaggaa

SEQ ID NO: 906019 - DNA, 15 bp, Homo sapiens
caaaggagaaggaag

SEQ ID NO: 906020 - DNA, 15 bp, Homo sapiens
aaaggagaaggaagg

SEQ ID NO: 906021 - DNA, 15 bp, Homo sapiens
aaggagaaggaaggt

SEQ ID NO: 906022 - DNA, 15 bp, Homo sapiens
aggagaaggaaggtt

SEQ ID NO: 906023 - DNA, 15 bp, Homo sapiens
ggagaaggaaggttt

SEQ ID NO: 906024 - DNA, 15 bp, Homo sapiens
gagaaggaaggttta

SEQ ID NO: 906025 - DNA, 15 bp, Homo sapiens
agaaggaaggtttag

SEQ ID NO: 906026 - DNA, 15 bp, Homo sapiens
gaaggaaggtttaga

SEQ ID NO: 906027 - DNA, 15 bp, Homo sapiens
aaggaaggtttagat

SEQ ID NO: 906028 - DNA, 15 bp, Homo sapiens
aggaaggtttagata

SEQ ID NO: 906029 - DNA, 15 bp, Homo sapiens
ggaaggtttagataa

SEQ ID NO: 906030 - DNA, 15 bp, Homo sapiens
gaaggtttagataac

SEQ ID NO: 906031 - DNA, 15 bp, Homo sapiens
aaggtttagataaca

SEQ ID NO: 906032 - DNA, 15 bp, Homo sapiens
aggtttagataacat

SEQ ID NO: 906033 - DNA, 15 bp, Homo sapiens
ggtttagataacata

SEQ ID NO: 906034 - DNA, 15 bp, Homo sapiens
gtttagataacatat

SEQ ID NO: 906035 - DNA, 15 bp, Homo sapiens
tttagataacatata

SEQ ID NO: 906036 - DNA, 15 bp, Homo sapiens
ttagataacatatac

SEQ ID NO: 906037 - DNA, 15 bp, Homo sapiens
tagataacatatacc

SEQ ID NO: 906038 - DNA, 15 bp, Homo sapiens
agataacatataccc

SEQ ID NO: 906039 - DNA, 15 bp, Homo sapiens
gataacatataccca

SEQ ID NO: 906040 - DNA, 15 bp, Homo sapiens
ataacatatacccaa

SEQ ID NO: 906041 - DNA, 15 bp, Homo sapiens
taacatatacccaaa

SEQ ID NO: 906042 - DNA, 15 bp, Homo sapiens
aacatatacccaaat

SEQ ID NO: 906043 - DNA, 15 bp, Homo sapiens
acatatacccaaata

SEQ ID NO: 906044 - DNA, 15 bp, Homo sapiens
catatacccaaatat

SEQ ID NO: 906045 - DNA, 15 bp, Homo sapiens
atatacccaaatatg

SEQ ID NO: 906046 - DNA, 15 bp, Homo sapiens
tatacccaaatatga

SEQ ID NO: 906047 - DNA, 15 bp, Homo sapiens
atacccaaatatgag

SEQ ID NO: 906048 - DNA, 15 bp, Homo sapiens
tacccaaatatgaga

SEQ ID NO: 906049 - DNA, 15 bp, Homo sapiens
acccaaatatgagaa

SEQ ID NO: 906050 - DNA, 15 bp, Homo sapiens
cccaaatatgagaaa

SEQ ID NO: 906051 - DNA, 15 bp, Homo sapiens
ccaaatatgagaaaa

SEQ ID NO: 906052 - DNA, 15 bp, Homo sapiens
caaatatgagaaaat

SEQ ID NO: 906053 - DNA, 15 bp, Homo sapiens
aaatatgagaaaatt

SEQ ID NO: 906054 - DNA, 15 bp, Homo sapiens
aatatgagaaaattt

SEQ ID NO: 906055 - DNA, 15 bp, Homo sapiens
atatgagaaaatttt

SEQ ID NO: 906056 - DNA, 15 bp, Homo sapiens
tatgagaaaattttt

SEQ ID NO: 906057 - DNA, 15 bp, Homo sapiens
atgagaaaatttttg

SEQ ID NO: 906058 - DNA, 15 bp, Homo sapiens
tgagaaaatttttgt

SEQ ID NO: 906059 - DNA, 15 bp, Homo sapiens
gagaaaatttttgta

SEQ ID NO: 906060 - DNA, 15 bp, Homo sapiens
agaaaatttttgtag

SEQ ID NO: 906061 - DNA, 15 bp, Homo sapiens
gaaaatttttgtaga

SEQ ID NO: 906062 - DNA, 15 bp, Homo sapiens
aaaatttttgtagat

SEQ ID NO: 906063 - DNA, 15 bp, Homo sapiens
aaatttttgtagata

SEQ ID NO: 906064 - DNA, 15 bp, Homo sapiens
aatttttgtagatat

SEQ ID NO: 906065 - DNA, 15 bp, Homo sapiens
atttttgtagatata

SEQ ID NO: 906066 - DNA, 15 bp, Homo sapiens
tttttgtagatatag

SEQ ID NO: 906067 - DNA, 15 bp, Homo sapiens
ttttgtagatataga

SEQ ID NO: 906068 - DNA, 15 bp, Homo sapiens
tttgtagatatagaa

SEQ ID NO: 906069 - DNA, 15 bp, Homo sapiens
ttgtagatatagaaa

SEQ ID NO: 906070 - DNA, 15 bp, Homo sapiens
tgtagatatagaaaa

SEQ ID NO: 906071 - DNA, 15 bp, Homo sapiens
gtagatatagaaaat

SEQ ID NO: 906072 - DNA, 15 bp, Homo sapiens
tagatatagaaaata

SEQ ID NO: 906073 - DNA, 15 bp, Homo sapiens
agatatagaaaatat

SEQ ID NO: 906074 - DNA, 15 bp, Homo sapiens
gatatagaaaatata

SEQ ID NO: 906075 - DNA, 15 bp, Homo sapiens
atatagaaaatataa

SEQ ID NO: 906076 - DNA, 15 bp, Homo sapiens
tatagaaaatataac

SEQ ID NO: 906077 - DNA, 15 bp, Homo sapiens
atagaaaatataaca

SEQ ID NO: 906078 - DNA, 15 bp, Homo sapiens
tagaaaatataacaa

SEQ ID NO: 906079 - DNA, 15 bp, Homo sapiens
agaaaatataacaat

SEQ ID NO: 906080 - DNA, 15 bp, Homo sapiens
gaaaatataacaata

SEQ ID NO: 906081 - DNA, 15 bp, Homo sapiens
aaaatataacaatag

SEQ ID NO: 906082 - DNA, 15 bp, Homo sapiens
aaatataacaataga

SEQ ID NO: 906083 - DNA, 15 bp, Homo sapiens
aatataacaatagaa

SEQ ID NO: 906084 - DNA, 15 bp, Homo sapiens
atataacaatagaac

SEQ ID NO: 906085 - DNA, 15 bp, Homo sapiens
tataacaatagaact

SEQ ID NO: 906086 - DNA, 15 bp, Homo sapiens
ataacaatagaactg

SEQ ID NO: 906087 - DNA, 15 bp, Homo sapiens
taacaatagaactgg

SEQ ID NO: 906088 - DNA, 15 bp, Homo sapiens
aacaatagaactggt

SEQ ID NO: 906089 - DNA, 15 bp, Homo sapiens
acaatagaactggta

SEQ ID NO: 906090 - DNA, 15 bp, Homo sapiens
caatagaactggtac

SEQ ID NO: 906091 - DNA, 15 bp, Homo sapiens
aatagaactggtaca

SEQ ID NO: 906092 - DNA, 15 bp, Homo sapiens
atagaactggtacaa

SEQ ID NO: 906093 - DNA, 15 bp, Homo sapiens
tagaactggtacaaa

SEQ ID NO: 906094 - DNA, 15 bp, Homo sapiens
agaactggtacaaag

SEQ ID NO: 906095 - DNA, 15 bp, Homo sapiens
gaactggtacaaaga

SEQ ID NO: 906096 - DNA, 15 bp, Homo sapiens
aactggtacaaagaa

SEQ ID NO: 906097 - DNA, 15 bp, Homo sapiens
actggtacaaagaaa

SEQ ID NO: 906098 - DNA, 15 bp, Homo sapiens
ctggtacaaagaaaa

SEQ ID NO: 906099 - DNA, 15 bp, Homo sapiens
tggtacaaagaaaac

SEQ ID NO: 906100 - DNA, 15 bp, Homo sapiens
ggtacaaagaaaact

SEQ ID NO: 906101 - DNA, 15 bp, Homo sapiens
gtacaaagaaaactg

SEQ ID NO: 906102 - DNA, 15 bp, Homo sapiens
tacaaagaaaactgg

SEQ ID NO: 906103 - DNA, 15 bp, Homo sapiens
acaaagaaaactggc

SEQ ID NO: 906104 - DNA, 15 bp, Homo sapiens
caaagaaaactggct

SEQ ID NO: 906105 - DNA, 15 bp, Homo sapiens
aaagaaaactggcta

SEQ ID NO: 906106 - DNA, 15 bp, Homo sapiens
aagaaaactggctag

SEQ ID NO: 906107 - DNA, 15 bp, Homo sapiens
agaaaactggctaga

SEQ ID NO: 906108 - DNA, 15 bp, Homo sapiens
gaaaactggctagag

SEQ ID NO: 906109 - DNA, 15 bp, Homo sapiens
aaaactggctagaga

SEQ ID NO: 906110 - DNA, 15 bp, Homo sapiens
aaactggctagagaa

SEQ ID NO: 906111 - DNA, 15 bp, Homo sapiens
aactggctagagaat

SEQ ID NO: 906112 - DNA, 15 bp, Homo sapiens
actggctagagaatg

SEQ ID NO: 906113 - DNA, 15 bp, Homo sapiens
ctggctagagaatgt

SEQ ID NO: 906114 - DNA, 15 bp, Homo sapiens
tggctagagaatgtc

SEQ ID NO: 906115 - DNA, 15 bp, Homo sapiens
ggctagagaatgtct

SEQ ID NO: 906116 - DNA, 15 bp, Homo sapiens
gctagagaatgtcta

SEQ ID NO: 906117 - DNA, 15 bp, Homo sapiens
ctagagaatgtctat

SEQ ID NO: 906118 - DNA, 15 bp, Homo sapiens
tagagaatgtctata

SEQ ID NO: 906119 - DNA, 15 bp, Homo sapiens
agagaatgtctataa

SEQ ID NO: 906120 - DNA, 15 bp, Homo sapiens
gagaatgtctataac

SEQ ID NO: 906121 - DNA, 15 bp, Homo sapiens
agaatgtctataaca

SEQ ID NO: 906122 - DNA, 15 bp, Homo sapiens
gaatgtctataacaa

SEQ ID NO: 906123 - DNA, 15 bp, Homo sapiens
aatgtctataacaat

SEQ ID NO: 906124 - DNA, 15 bp, Homo sapiens
atgtctataacaatc

SEQ ID NO: 906125 - DNA, 15 bp, Homo sapiens
tgtctataacaatct

SEQ ID NO: 906126 - DNA, 15 bp, Homo sapiens
gtctataacaatctg

SEQ ID NO: 906127 - DNA, 15 bp, Homo sapiens
tctataacaatctgc

SEQ ID NO: 906128 - DNA, 15 bp, Homo sapiens
ctataacaatctgct

SEQ ID NO: 906129 - DNA, 15 bp, Homo sapiens
tataacaatctgctt

SEQ ID NO: 906130 - DNA, 15 bp, Homo sapiens
ataacaatctgcttc

SEQ ID NO: 906131 - DNA, 15 bp, Homo sapiens
taacaatctgcttct

SEQ ID NO: 906132 - DNA, 15 bp, Homo sapiens
aacaatctgcttctc

SEQ ID NO: 906133 - DNA, 15 bp, Homo sapiens
acaatctgcttctca

SEQ ID NO: 906134 - DNA, 15 bp, Homo sapiens
caatctgcttctcag

SEQ ID NO: 906135 - DNA, 15 bp, Homo sapiens
aatctgcttctcagt

SEQ ID NO: 906136 - DNA, 15 bp, Homo sapiens
atctgcttctcagtc

SEQ ID NO: 906137 - DNA, 15 bp, Homo sapiens
tctgcttctcagtct

SEQ ID NO: 906138 - DNA, 15 bp, Homo sapiens
ctgcttctcagtctt

SEQ ID NO: 906139 - DNA, 15 bp, Homo sapiens
tgcttctcagtcttc

SEQ ID NO: 906140 - DNA, 15 bp, Homo sapiens
gcttctcagtcttct

SEQ ID NO: 906141 - DNA, 15 bp, Homo sapiens
cttctcagtcttcta

SEQ ID NO: 906142 - DNA, 15 bp, Homo sapiens
ttctcagtcttctag

SEQ ID NO: 906143 - DNA, 15 bp, Homo sapiens
tctcagtcttctagg

SEQ ID NO: 906144 - DNA, 15 bp, Homo sapiens
ctcagtcttctaggt

SEQ ID NO: 906145 - DNA, 15 bp, Homo sapiens
tcagtcttctaggtc

SEQ ID NO: 906146 - DNA, 15 bp, Homo sapiens
cagtcttctaggtct

SEQ ID NO: 906147 - DNA, 15 bp, Homo sapiens
agtcttctaggtcta

SEQ ID NO: 906148 - DNA, 15 bp, Homo sapiens
gtcttctaggtctat

SEQ ID NO: 906149 - DNA, 15 bp, Homo sapiens
tcttctaggtctatt

SEQ ID NO: 906150 - DNA, 15 bp, Homo sapiens
cttctaggtctattt

SEQ ID NO: 906151 - DNA, 15 bp, Homo sapiens
ttctaggtctatttc

SEQ ID NO: 906152 - DNA, 15 bp, Homo sapiens
tctaggtctatttcc

SEQ ID NO: 906153 - DNA, 15 bp, Homo sapiens
ctaggtctatttccc

SEQ ID NO: 906154 - DNA, 15 bp, Homo sapiens
taggtctatttcccc

SEQ ID NO: 906155 - DNA, 15 bp, Homo sapiens
aggtctatttcccca

SEQ ID NO: 906156 - DNA, 15 bp, Homo sapiens
ggtctatttccccat

SEQ ID NO: 906157 - DNA, 15 bp, Homo sapiens
gtctatttccccatt

SEQ ID NO: 906158 - DNA, 15 bp, Homo sapiens
tctatttccccattg

SEQ ID NO: 906159 - DNA, 15 bp, Homo sapiens
ctatttccccattga

SEQ ID NO: 906160 - DNA, 15 bp, Homo sapiens
tatttccccattgac

SEQ ID NO: 906161 - DNA, 15 bp, Homo sapiens
atttccccattgaca

SEQ ID NO: 906162 - DNA, 15 bp, Homo sapiens
tttccccattgacac

SEQ ID NO: 906163 - DNA, 15 bp, Homo sapiens
ttccccattgacacg

SEQ ID NO: 906164 - DNA, 15 bp, Homo sapiens
tccccattgacacgt

SEQ ID NO: 906165 - DNA, 15 bp, Homo sapiens
ccccattgacacgtg

SEQ ID NO: 906166 - DNA, 15 bp, Homo sapiens
cccattgacacgtgg

SEQ ID NO: 906167 - DNA, 15 bp, Homo sapiens
ccattgacacgtgga

SEQ ID NO: 906168 - DNA, 15 bp, Homo sapiens
cattgacacgtggat

SEQ ID NO: 906169 - DNA, 15 bp, Homo sapiens
attgacacgtggatt

SEQ ID NO: 906170 - DNA, 15 bp, Homo sapiens
ttgacacgtggattt

SEQ ID NO: 906171 - DNA, 15 bp, Homo sapiens
tgacacgtggattta

SEQ ID NO: 906172 - DNA, 15 bp, Homo sapiens
gacacgtggatttag

SEQ ID NO: 906173 - DNA, 15 bp, Homo sapiens
acacgtggatttagt

SEQ ID NO: 906174 - DNA, 15 bp, Homo sapiens
cacgtggatttagtg

SEQ ID NO: 906175 - DNA, 15 bp, Homo sapiens
acgtggatttagtgt

SEQ ID NO: 906176 - DNA, 15 bp, Homo sapiens
cgtggatttagtgtt

SEQ ID NO: 906177 - DNA, 15 bp, Homo sapiens
gtggatttagtgttt

SEQ ID NO: 906178 - DNA, 15 bp, Homo sapiens
tggatttagtgtttg

SEQ ID NO: 906179 - DNA, 15 bp, Homo sapiens
ggatttagtgtttgc

SEQ ID NO: 906180 - DNA, 15 bp, Homo sapiens
gatttagtgtttgct

SEQ ID NO: 906181 - DNA, 15 bp, Homo sapiens
atttagtgtttgctg

SEQ ID NO: 906182 - DNA, 15 bp, Homo sapiens
tttagtgtttgctga

SEQ ID NO: 906183 - DNA, 15 bp, Homo sapiens
ttagtgtttgctgaa

SEQ ID NO: 906184 - DNA, 15 bp, Homo sapiens
tagtgtttgctgaac

SEQ ID NO: 906185 - DNA, 15 bp, Homo sapiens
agtgtttgctgaact

SEQ ID NO: 906186 - DNA, 15 bp, Homo sapiens
gtgtttgctgaactg

SEQ ID NO: 906187 - DNA, 15 bp, Homo sapiens
tgtttgctgaactga

SEQ ID NO: 906188 - DNA, 15 bp, Homo sapiens
gtttgctgaactgaa

SEQ ID NO: 906189 - DNA, 15 bp, Homo sapiens
tttgctgaactgaaa

SEQ ID NO: 906190 - DNA, 15 bp, Homo sapiens
ttgctgaactgaaag

SEQ ID NO: 906191 - DNA, 15 bp, Homo sapiens
tgctgaactgaaagt

SEQ ID NO: 906192 - DNA, 15 bp, Homo sapiens
gctgaactgaaagtg

SEQ ID NO: 906193 - DNA, 15 bp, Homo sapiens
ctgaactgaaagtga

SEQ ID NO: 906194 - DNA, 15 bp, Homo sapiens
tgaactgaaagtgaa

SEQ ID NO: 906195 - DNA, 15 bp, Homo sapiens
gaactgaaagtgaaa

SEQ ID NO: 906196 - DNA, 15 bp, Homo sapiens
aactgaaagtgaaaa

SEQ ID NO: 906197 - DNA, 15 bp, Homo sapiens
actgaaagtgaaaaa

SEQ ID NO: 906198 - DNA, 15 bp, Homo sapiens
ctgaaagtgaaaaaa

SEQ ID NO: 906199 - DNA, 15 bp, Homo sapiens
tgaaagtgaaaaaaa

SEQ ID NO: 906200 - DNA, 15 bp, Homo sapiens
gaaagtgaaaaaaac

SEQ ID NO: 906201 - DNA, 15 bp, Homo sapiens
aaagtgaaaaaaact

SEQ ID NO: 906202 - DNA, 15 bp, Homo sapiens
aagtgaaaaaaactg

SEQ ID NO: 906203 - DNA, 15 bp, Homo sapiens
agtgaaaaaaactgg

SEQ ID NO: 906204 - DNA, 15 bp, Homo sapiens
gtgaaaaaaactggt

SEQ ID NO: 906205 - DNA, 15 bp, Homo sapiens
tgaaaaaaactggta

SEQ ID NO: 906206 - DNA, 15 bp, Homo sapiens
gaaaaaaactggtat

SEQ ID NO: 906207 - DNA, 15 bp, Homo sapiens
aaaaaaactggtata

SEQ ID NO: 906208 - DNA, 15 bp, Homo sapiens
aaaaaactggtataa

SEQ ID NO: 906209 - DNA, 15 bp, Homo sapiens
aaaaactggtataaa

SEQ ID NO: 906210 - DNA, 15 bp, Homo sapiens
aaaactggtataaag

SEQ ID NO: 906211 - DNA, 15 bp, Homo sapiens
aaactggtataaaga

SEQ ID NO: 906212 - DNA, 15 bp, Homo sapiens
aactggtataaagaa

SEQ ID NO: 906213 - DNA, 15 bp, Homo sapiens
actggtataaagaaa

SEQ ID NO: 906214 - DNA, 15 bp, Homo sapiens
ctggtataaagaaaa

SEQ ID NO: 906215 - DNA, 15 bp, Homo sapiens
tggtataaagaaaac

SEQ ID NO: 906216 - DNA, 15 bp, Homo sapiens
ggtataaagaaaaca

SEQ ID NO: 906217 - DNA, 15 bp, Homo sapiens
gtataaagaaaacaa

SEQ ID NO: 906218 - DNA, 15 bp, Homo sapiens
tataaagaaaacaaa

SEQ ID NO: 906219 - DNA, 15 bp, Homo sapiens
ataaagaaaacaaat

SEQ ID NO: 906220 - DNA, 15 bp, Homo sapiens
taaagaaaacaaatg

SEQ ID NO: 906221 - DNA, 15 bp, Homo sapiens
aaagaaaacaaatgt

SEQ ID NO: 906222 - DNA, 15 bp, Homo sapiens
aagaaaacaaatgtg

SEQ ID NO: 906223 - DNA, 15 bp, Homo sapiens
agaaaacaaatgtgc

SEQ ID NO: 906224 - DNA, 15 bp, Homo sapiens
gaaaacaaatgtgct

SEQ ID NO: 906225 - DNA, 15 bp, Homo sapiens
aaaacaaatgtgctc

SEQ ID NO: 906226 - DNA, 15 bp, Homo sapiens
aaacaaatgtgctct

SEQ ID NO: 906227 - DNA, 15 bp, Homo sapiens
aacaaatgtgctctg

SEQ ID NO: 906228 - DNA, 15 bp, Homo sapiens
acaaatgtgctctga

SEQ ID NO: 906229 - DNA, 15 bp, Homo sapiens
caaatgtgctctgat

SEQ ID NO: 906230 - DNA, 15 bp, Homo sapiens
aaatgtgctctgatt

SEQ ID NO: 906231 - DNA, 15 bp, Homo sapiens
aatgtgctctgattt

SEQ ID NO: 906232 - DNA, 15 bp, Homo sapiens
atgtgctctgattta

SEQ ID NO: 906233 - DNA, 15 bp, Homo sapiens
tgtgctctgatttac

SEQ ID NO: 906234 - DNA, 15 bp, Homo sapiens
gtgctctgatttaca

SEQ ID NO: 906235 - DNA, 15 bp, Homo sapiens
tgctctgatttacat

SEQ ID NO: 906236 - DNA, 15 bp, Homo sapiens
gctctgatttacatg

SEQ ID NO: 906237 - DNA, 15 bp, Homo sapiens
ctctgatttacatgc

SEQ ID NO: 906238 - DNA, 15 bp, Homo sapiens
tctgatttacatgcc

SEQ ID NO: 906239 - DNA, 15 bp, Homo sapiens
ctgatttacatgcct

SEQ ID NO: 906240 - DNA, 15 bp, Homo sapiens
tgatttacatgccta

SEQ ID NO: 906241 - DNA, 15 bp, Homo sapiens
gatttacatgcctaa

SEQ ID NO: 906242 - DNA, 15 bp, Homo sapiens
atttacatgcctaaa

SEQ ID NO: 906243 - DNA, 15 bp, Homo sapiens
tttacatgcctaaat

SEQ ID NO: 906244 - DNA, 15 bp, Homo sapiens
ttacatgcctaaatg

SEQ ID NO: 906245 - DNA, 15 bp, Homo sapiens
tacatgcctaaatga

SEQ ID NO: 906246 - DNA, 15 bp, Homo sapiens
acatgcctaaatgaa

SEQ ID NO: 906247 - DNA, 15 bp, Homo sapiens
catgcctaaatgaag

SEQ ID NO: 906248 - DNA, 15 bp, Homo sapiens
atgcctaaatgaaga

SEQ ID NO: 906249 - DNA, 15 bp, Homo sapiens
tgcctaaatgaagaa

SEQ ID NO: 906250 - DNA, 15 bp, Homo sapiens
gcctaaatgaagaaa

SEQ ID NO: 906251 - DNA, 15 bp, Homo sapiens
cctaaatgaagaaag

SEQ ID NO: 906252 - DNA, 15 bp, Homo sapiens
ctaaatgaagaaagc

SEQ ID NO: 906253 - DNA, 15 bp, Homo sapiens
taaatgaagaaagct

SEQ ID NO: 906254 - DNA, 15 bp, Homo sapiens
aaatgaagaaagcta

SEQ ID NO: 906255 - DNA, 15 bp, Homo sapiens
aatgaagaaagctat

SEQ ID NO: 906256 - DNA, 15 bp, Homo sapiens
atgaagaaagctatc

SEQ ID NO: 906257 - DNA, 15 bp, Homo sapiens
tgaagaaagctatct

SEQ ID NO: 906258 - DNA, 15 bp, Homo sapiens
gaagaaagctatctt

SEQ ID NO: 906259 - DNA, 15 bp, Homo sapiens
aagaaagctatcttt

SEQ ID NO: 906260 - DNA, 15 bp, Homo sapiens
agaaagctatctttt

SEQ ID NO: 906261 - DNA, 15 bp, Homo sapiens
gaaagctatcttttt

SEQ ID NO: 906262 - DNA, 15 bp, Homo sapiens
aaagctatctttttt

SEQ ID NO: 906263 - DNA, 15 bp, Homo sapiens
aagctatcttttttc

SEQ ID NO: 906264 - DNA, 15 bp, Homo sapiens
agctatcttttttca

SEQ ID NO: 906265 - DNA, 15 bp, Homo sapiens
gctatcttttttcat

SEQ ID NO: 906266 - DNA, 15 bp, Homo sapiens
ctatcttttttcata

SEQ ID NO: 906267 - DNA, 15 bp, Homo sapiens
tatcttttttcatat

SEQ ID NO: 906268 - DNA, 15 bp, Homo sapiens
atcttttttcatata

SEQ ID NO: 906269 - DNA, 15 bp, Homo sapiens
tcttttttcatataa

SEQ ID NO: 906270 - DNA, 15 bp, Homo sapiens
cttttttcatataag

SEQ ID NO: 906271 - DNA, 15 bp, Homo sapiens
ttttttcatataagc

SEQ ID NO: 906272 - DNA, 15 bp, Homo sapiens
tttttcatataagca

SEQ ID NO: 906273 - DNA, 15 bp, Homo sapiens
ttttcatataagcat

SEQ ID NO: 906274 - DNA, 15 bp, Homo sapiens
tttcatataagcata

SEQ ID NO: 906275 - DNA, 15 bp, Homo sapiens
ttcatataagcatat

SEQ ID NO: 906276 - DNA, 15 bp, Homo sapiens
tcatataagcatata

SEQ ID NO: 906277 - DNA, 15 bp, Homo sapiens
catataagcatataa

SEQ ID NO: 906278 - DNA, 15 bp, Homo sapiens
atataagcatataaa

SEQ ID NO: 906279 - DNA, 15 bp, Homo sapiens
tataagcatataaag

SEQ ID NO: 906280 - DNA, 15 bp, Homo sapiens
ataagcatataaagt

SEQ ID NO: 906281 - DNA, 15 bp, Homo sapiens
taagcatataaagtt

SEQ ID NO: 906282 - DNA, 15 bp, Homo sapiens
aagcatataaagttg

SEQ ID NO: 906283 - DNA, 15 bp, Homo sapiens
agcatataaagttgt

SEQ ID NO: 906284 - DNA, 15 bp, Homo sapiens
gcatataaagttgta

SEQ ID NO: 906285 - DNA, 15 bp, Homo sapiens
catataaagttgtaa

SEQ ID NO: 906286 - DNA, 15 bp, Homo sapiens
atataaagttgtaat

SEQ ID NO: 906287 - DNA, 15 bp, Homo sapiens
tataaagttgtaatt

SEQ ID NO: 906288 - DNA, 15 bp, Homo sapiens
ataaagttgtaattt

SEQ ID NO: 906289 - DNA, 15 bp, Homo sapiens
taaagttgtaatttt

SEQ ID NO: 906290 - DNA, 15 bp, Homo sapiens
aaagttgtaattttg

SEQ ID NO: 906291 - DNA, 15 bp, Homo sapiens
aagttgtaattttga

SEQ ID NO: 906292 - DNA, 15 bp, Homo sapiens
agttgtaattttgat

SEQ ID NO: 906293 - DNA, 15 bp, Homo sapiens
gttgtaattttgatt

SEQ ID NO: 906294 - DNA, 15 bp, Homo sapiens
ttgtaattttgattt

SEQ ID NO: 906295 - DNA, 15 bp, Homo sapiens
tgtaattttgatttc

SEQ ID NO: 906296 - DNA, 15 bp, Homo sapiens
gtaattttgatttca

SEQ ID NO: 906297 - DNA, 15 bp, Homo sapiens
taattttgatttcag

SEQ ID NO: 906298 - DNA, 15 bp, Homo sapiens
aattttgatttcagg

SEQ ID NO: 906299 - DNA, 15 bp, Homo sapiens
attttgatttcaggc

SEQ ID NO: 906300 - DNA, 15 bp, Homo sapiens
ttttgatttcaggca

SEQ ID NO: 906301 - DNA, 15 bp, Homo sapiens
tttgatttcaggcac

SEQ ID NO: 906302 - DNA, 15 bp, Homo sapiens
ttgatttcaggcaca

SEQ ID NO: 906303 - DNA, 15 bp, Homo sapiens
tgatttcaggcacat

SEQ ID NO: 906304 - DNA, 15 bp, Homo sapiens
gatttcaggcacatg

SEQ ID NO: 906305 - DNA, 15 bp, Homo sapiens
atttcaggcacatga

SEQ ID NO: 906306 - DNA, 15 bp, Homo sapiens
tttcaggcacatgat

SEQ ID NO: 906307 - DNA, 15 bp, Homo sapiens
ttcaggcacatgatg

SEQ ID NO: 906308 - DNA, 15 bp, Homo sapiens
tcaggcacatgatgg

SEQ ID NO: 906309 - DNA, 15 bp, Homo sapiens
caggcacatgatggt

SEQ ID NO: 906310 - DNA, 15 bp, Homo sapiens
aggcacatgatggtg

SEQ ID NO: 906311 - DNA, 15 bp, Homo sapiens
ggcacatgatggtgt

SEQ ID NO: 906312 - DNA, 15 bp, Homo sapiens
gcacatgatggtgtt

SEQ ID NO: 906313 - DNA, 15 bp, Homo sapiens
cacatgatggtgttt

SEQ ID NO: 906314 - DNA, 15 bp, Homo sapiens
acatgatggtgttta

SEQ ID NO: 906315 - DNA, 15 bp, Homo sapiens
catgatggtgtttaa

SEQ ID NO: 906316 - DNA, 15 bp, Homo sapiens
atgatggtgtttaag

SEQ ID NO: 906317 - DNA, 15 bp, Homo sapiens
tgatggtgtttaagt

SEQ ID NO: 906318 - DNA, 15 bp, Homo sapiens
gatggtgtttaagta

SEQ ID NO: 906319 - DNA, 15 bp, Homo sapiens
atggtgtttaagtac

SEQ ID NO: 906320 - DNA, 15 bp, Homo sapiens
tggtgtttaagtaca

SEQ ID NO: 906321 - DNA, 15 bp, Homo sapiens
ggtgtttaagtacat

SEQ ID NO: 906322 - DNA, 15 bp, Homo sapiens
gtgtttaagtacatt

SEQ ID NO: 906323 - DNA, 15 bp, Homo sapiens
tgtttaagtacattt

SEQ ID NO: 906324 - DNA, 15 bp, Homo sapiens
gtttaagtacattta

SEQ ID NO: 906325 - DNA, 15 bp, Homo sapiens
tttaagtacatttat

SEQ ID NO: 906326 - DNA, 15 bp, Homo sapiens
ttaagtacatttatt

SEQ ID NO: 906327 - DNA, 15 bp, Homo sapiens
taagtacatttattg

SEQ ID NO: 906328 - DNA, 15 bp, Homo sapiens
aagtacatttattgc

SEQ ID NO: 906329 - DNA, 15 bp, Homo sapiens
agtacatttattgca

SEQ ID NO: 906330 - DNA, 15 bp, Homo sapiens
gtacatttattgcag

SEQ ID NO: 906331 - DNA, 15 bp, Homo sapiens
tacatttattgcagc

SEQ ID NO: 906332 - DNA, 15 bp, Homo sapiens
acatttattgcagct

SEQ ID NO: 906333 - DNA, 15 bp, Homo sapiens
catttattgcagctt

SEQ ID NO: 906334 - DNA, 15 bp, Homo sapiens
atttattgcagcttg

SEQ ID NO: 906335 - DNA, 15 bp, Homo sapiens
tttattgcagcttgt

SEQ ID NO: 906336 - DNA, 15 bp, Homo sapiens
ttattgcagcttgta

SEQ ID NO: 906337 - DNA, 15 bp, Homo sapiens
tattgcagcttgtat

SEQ ID NO: 906338 - DNA, 15 bp, Homo sapiens
attgcagcttgtatt

SEQ ID NO: 906339 - DNA, 15 bp, Homo sapiens
ttgcagcttgtattc

SEQ ID NO: 906340 - DNA, 15 bp, Homo sapiens
tgcagcttgtattct

SEQ ID NO: 906341 - DNA, 15 bp, Homo sapiens
gcagcttgtattcta

SEQ ID NO: 906342 - DNA, 15 bp, Homo sapiens
cagcttgtattctag

SEQ ID NO: 906343 - DNA, 15 bp, Homo sapiens
agcttgtattctagt

SEQ ID NO: 906344 - DNA, 15 bp, Homo sapiens
gcttgtattctagtg

SEQ ID NO: 906345 - DNA, 15 bp, Homo sapiens
cttgtattctagtga

SEQ ID NO: 906346 - DNA, 15 bp, Homo sapiens
ttgtattctagtgag

SEQ ID NO: 906347 - DNA, 15 bp, Homo sapiens
tgtattctagtgaga

SEQ ID NO: 906348 - DNA, 15 bp, Homo sapiens
gtattctagtgagaa

SEQ ID NO: 906349 - DNA, 15 bp, Homo sapiens
tattctagtgagaag

SEQ ID NO: 906350 - DNA, 15 bp, Homo sapiens
attctagtgagaagt

SEQ ID NO: 906351 - DNA, 15 bp, Homo sapiens
ttctagtgagaagta

SEQ ID NO: 906352 - DNA, 15 bp, Homo sapiens
tctagtgagaagtaa

SEQ ID NO: 906353 - DNA, 15 bp, Homo sapiens
ctagtgagaagtaat

SEQ ID NO: 906354 - DNA, 15 bp, Homo sapiens
tagtgagaagtaata

SEQ ID NO: 906355 - DNA, 15 bp, Homo sapiens
agtgagaagtaataa

SEQ ID NO: 906356 - DNA, 15 bp, Homo sapiens
gtgagaagtaataag

SEQ ID NO: 906357 - DNA, 15 bp, Homo sapiens
tgagaagtaataaga

SEQ ID NO: 906358 - DNA, 15 bp, Homo sapiens
gagaagtaataagaa

SEQ ID NO: 906359 - DNA, 15 bp, Homo sapiens
agaagtaataagaaa

SEQ ID NO: 906360 - DNA, 15 bp, Homo sapiens
gaagtaataagaaaa

SEQ ID NO: 906361 - DNA, 15 bp, Homo sapiens
aagtaataagaaaat

SEQ ID NO: 906362 - DNA, 15 bp, Homo sapiens
agtaataagaaaatt

SEQ ID NO: 906363 - DNA, 15 bp, Homo sapiens
gtaataagaaaatta

SEQ ID NO: 906364 - DNA, 15 bp, Homo sapiens
taataagaaaattaa

SEQ ID NO: 906365 - DNA, 15 bp, Homo sapiens
aataagaaaattaat

SEQ ID NO: 906366 - DNA, 15 bp, Homo sapiens
ataagaaaattaata

SEQ ID NO: 906367 - DNA, 15 bp, Homo sapiens
taagaaaattaataa

SEQ ID NO: 906368 - DNA, 15 bp, Homo sapiens
aagaaaattaataaa

SEQ ID NO: 906369 - DNA, 15 bp, Homo sapiens
agaaaattaataaac

SEQ ID NO: 906370 - DNA, 15 bp, Homo sapiens
gaaaattaataaaca

SEQ ID NO: 906371 - DNA, 15 bp, Homo sapiens
aaaattaataaacaa

SEQ ID NO: 906372 - DNA, 15 bp, Homo sapiens
aaattaataaacaag

SEQ ID NO: 906373 - DNA, 15 bp, Homo sapiens
aattaataaacaaga

SEQ ID NO: 906374 - DNA, 15 bp, Homo sapiens
attaataaacaagat

SEQ ID NO: 906375 - DNA, 15 bp, Homo sapiens
ttaataaacaagata

SEQ ID NO: 906376 - DNA, 15 bp, Homo sapiens
taataaacaagataa

SEQ ID NO: 906377 - DNA, 15 bp, Homo sapiens
aataaacaagataaa

SEQ ID NO: 906378 - DNA, 15 bp, Homo sapiens
ataaacaagataaaa

SEQ ID NO: 906379 - DNA, 15 bp, Homo sapiens
taaacaagataaaaa

SEQ ID NO: 906380 - DNA, 15 bp, Homo sapiens
aaacaagataaaaag

SEQ ID NO: 906381 - DNA, 15 bp, Homo sapiens
aacaagataaaaagg

SEQ ID NO: 906382 - DNA, 15 bp, Homo sapiens
acaagataaaaagga

SEQ ID NO: 906383 - DNA, 15 bp, Homo sapiens
caagataaaaaggaa

SEQ ID NO: 906384 - DNA, 15 bp, Homo sapiens
aagataaaaaggaag

SEQ ID NO: 906385 - DNA, 15 bp, Homo sapiens
agataaaaaggaagc

SEQ ID NO: 906386 - DNA, 15 bp, Homo sapiens
gataaaaaggaagct

SEQ ID NO: 906387 - DNA, 15 bp, Homo sapiens
ataaaaaggaagcta

SEQ ID NO: 906388 - DNA, 15 bp, Homo sapiens
taaaaaggaagctac

SEQ ID NO: 906389 - DNA, 15 bp, Homo sapiens
aaaaaggaagctact

SEQ ID NO: 906390 - DNA, 15 bp, Homo sapiens
aaaaggaagctactt

SEQ ID NO: 906391 - DNA, 15 bp, Homo sapiens
aaaggaagctactta

SEQ ID NO: 906392 - DNA, 15 bp, Homo sapiens
aaggaagctacttac

SEQ ID NO: 906393 - DNA, 15 bp, Homo sapiens
aggaagctacttact

SEQ ID NO: 906394 - DNA, 15 bp, Homo sapiens
ggaagctacttactt

SEQ ID NO: 906395 - DNA, 15 bp, Homo sapiens
gaagctacttacttc

SEQ ID NO: 906396 - DNA, 15 bp, Homo sapiens
aagctacttacttca

SEQ ID NO: 906397 - DNA, 15 bp, Homo sapiens
agctacttacttcac

SEQ ID NO: 906398 - DNA, 15 bp, Homo sapiens
gctacttacttcacc

SEQ ID NO: 906399 - DNA, 15 bp, Homo sapiens
ctacttacttcacca

SEQ ID NO: 906400 - DNA, 15 bp, Homo sapiens
tacttacttcaccac

SEQ ID NO: 906401 - DNA, 15 bp, Homo sapiens
acttacttcaccaca

SEQ ID NO: 906402 - DNA, 15 bp, Homo sapiens
cttacttcaccacaa

SEQ ID NO: 906403 - DNA, 15 bp, Homo sapiens
ttacttcaccacaac

SEQ ID NO: 906404 - DNA, 15 bp, Homo sapiens
tacttcaccacaacc

SEQ ID NO: 906405 - DNA, 15 bp, Homo sapiens
acttcaccacaacct

SEQ ID NO: 906406 - DNA, 15 bp, Homo sapiens
cttcaccacaaccta

SEQ ID NO: 906407 - DNA, 15 bp, Homo sapiens
ttcaccacaacctat

SEQ ID NO: 906408 - DNA, 15 bp, Homo sapiens
tcaccacaacctatg

SEQ ID NO: 906409 - DNA, 15 bp, Homo sapiens
caccacaacctatga

SEQ ID NO: 906410 - DNA, 15 bp, Homo sapiens
accacaacctatgaa

SEQ ID NO: 906411 - DNA, 15 bp, Homo sapiens
ccacaacctatgaac

SEQ ID NO: 906412 - DNA, 15 bp, Homo sapiens
cacaacctatgaacg

SEQ ID NO: 906413 - DNA, 15 bp, Homo sapiens
acaacctatgaacgt

SEQ ID NO: 906414 - DNA, 15 bp, Homo sapiens
caacctatgaacgtc

SEQ ID NO: 906415 - DNA, 15 bp, Homo sapiens
aacctatgaacgtcc

SEQ ID NO: 906416 - DNA, 15 bp, Homo sapiens
acctatgaacgtcct

SEQ ID NO: 906417 - DNA, 15 bp, Homo sapiens
cctatgaacgtccta

SEQ ID NO: 906418 - DNA, 15 bp, Homo sapiens
ctatgaacgtcctaa

SEQ ID NO: 906419 - DNA, 15 bp, Homo sapiens
tatgaacgtcctaag

SEQ ID NO: 906420 - DNA, 15 bp, Homo sapiens
atgaacgtcctaagg

SEQ ID NO: 906421 - DNA, 15 bp, Homo sapiens
tgaacgtcctaaggt

SEQ ID NO: 906422 - DNA, 15 bp, Homo sapiens
gaacgtcctaaggtg

SEQ ID NO: 906423 - DNA, 15 bp, Homo sapiens
aacgtcctaaggtgt

SEQ ID NO: 906424 - DNA, 15 bp, Homo sapiens
acgtcctaaggtgtc

SEQ ID NO: 906425 - DNA, 15 bp, Homo sapiens
cgtcctaaggtgtct

SEQ ID NO: 906426 - DNA, 15 bp, Homo sapiens
gtcctaaggtgtcta

SEQ ID NO: 906427 - DNA, 15 bp, Homo sapiens
tcctaaggtgtctac

SEQ ID NO: 906428 - DNA, 15 bp, Homo sapiens
cctaaggtgtctaca

SEQ ID NO: 906429 - DNA, 15 bp, Homo sapiens
ctaaggtgtctacac

SEQ ID NO: 906430 - DNA, 15 bp, Homo sapiens
taaggtgtctacacg

SEQ ID NO: 906431 - DNA, 15 bp, Homo sapiens
aaggtgtctacacgt

SEQ ID NO: 906432 - DNA, 15 bp, Homo sapiens
aggtgtctacacgtt

SEQ ID NO: 906433 - DNA, 15 bp, Homo sapiens
ggtgtctacacgttt

SEQ ID NO: 906434 - DNA, 15 bp, Homo sapiens
gtgtctacacgtttt

SEQ ID NO: 906435 - DNA, 15 bp, Homo sapiens
tgtctacacgtttta

SEQ ID NO: 906436 - DNA, 15 bp, Homo sapiens
gtctacacgttttaa

SEQ ID NO: 906437 - DNA, 15 bp, Homo sapiens
tctacacgttttaaa

SEQ ID NO: 906438 - DNA, 15 bp, Homo sapiens
ctacacgttttaaaa

SEQ ID NO: 906439 - DNA, 15 bp, Homo sapiens
tacacgttttaaaaa

SEQ ID NO: 906440 - DNA, 15 bp, Homo sapiens
acacgttttaaaaat

SEQ ID NO: 906441 - DNA, 15 bp, Homo sapiens
cacgttttaaaaatt

SEQ ID NO: 906442 - DNA, 15 bp, Homo sapiens
acgttttaaaaattc

SEQ ID NO: 906443 - DNA, 15 bp, Homo sapiens
cgttttaaaaattca

SEQ ID NO: 906444 - DNA, 15 bp, Homo sapiens
gttttaaaaattcat

SEQ ID NO: 906445 - DNA, 15 bp, Homo sapiens
ttttaaaaattcatt

SEQ ID NO: 906446 - DNA, 15 bp, Homo sapiens
tttaaaaattcattc

SEQ ID NO: 906447 - DNA, 15 bp, Homo sapiens
ttaaaaattcattct

SEQ ID NO: 906448 - DNA, 15 bp, Homo sapiens
taaaaattcattctc

SEQ ID NO: 906449 - DNA, 15 bp, Homo sapiens
aaaaattcattctcc

SEQ ID NO: 906450 - DNA, 15 bp, Homo sapiens
aaaattcattctcca

SEQ ID NO: 906451 - DNA, 15 bp, Homo sapiens
aaattcattctccat

SEQ ID NO: 906452 - DNA, 15 bp, Homo sapiens
aattcattctccatc

SEQ ID NO: 906453 - DNA, 15 bp, Homo sapiens
attcattctccatcc

SEQ ID NO: 906454 - DNA, 15 bp, Homo sapiens
ttcattctccatcct

SEQ ID NO: 906455 - DNA, 15 bp, Homo sapiens
tcattctccatccta

SEQ ID NO: 906456 - DNA, 15 bp, Homo sapiens
cattctccatcctac

SEQ ID NO: 906457 - DNA, 15 bp, Homo sapiens
attctccatcctact

SEQ ID NO: 906458 - DNA, 15 bp, Homo sapiens
ttctccatcctacta

SEQ ID NO: 906459 - DNA, 15 bp, Homo sapiens
tctccatcctactac

SEQ ID NO: 906460 - DNA, 15 bp, Homo sapiens
ctccatcctactacc

SEQ ID NO: 906461 - DNA, 15 bp, Homo sapiens
tccatcctactaccc

SEQ ID NO: 906462 - DNA, 15 bp, Homo sapiens
ccatcctactaccct

SEQ ID NO: 906463 - DNA, 15 bp, Homo sapiens
catcctactaccctt

SEQ ID NO: 906464 - DNA, 15 bp, Homo sapiens
atcctactacccttt

SEQ ID NO: 906465 - DNA, 15 bp, Homo sapiens
tcctactacccttta

SEQ ID NO: 906466 - DNA, 15 bp, Homo sapiens
cctactaccctttaa

SEQ ID NO: 906467 - DNA, 15 bp, Homo sapiens
ctactaccctttaaa

SEQ ID NO: 906468 - DNA, 15 bp, Homo sapiens
tactaccctttaaat

SEQ ID NO: 906469 - DNA, 15 bp, Homo sapiens
actaccctttaaatt

SEQ ID NO: 906470 - DNA, 15 bp, Homo sapiens
ctaccctttaaatta

SEQ ID NO: 906471 - DNA, 15 bp, Homo sapiens
taccctttaaattat

SEQ ID NO: 906472 - DNA, 15 bp, Homo sapiens
accctttaaattata

SEQ ID NO: 906473 - DNA, 15 bp, Homo sapiens
ccctttaaattatag

SEQ ID NO: 906474 - DNA, 15 bp, Homo sapiens
cctttaaattatagc

SEQ ID NO: 906475 - DNA, 15 bp, Homo sapiens
ctttaaattatagcc

SEQ ID NO: 906476 - DNA, 15 bp, Homo sapiens
tttaaattatagcct

SEQ ID NO: 906477 - DNA, 15 bp, Homo sapiens
ttaaattatagcctg

SEQ ID NO: 906478 - DNA, 15 bp, Homo sapiens
taaattatagcctgt

SEQ ID NO: 906479 - DNA, 15 bp, Homo sapiens
aaattatagcctgtt

SEQ ID NO: 906480 - DNA, 15 bp, Homo sapiens
aattatagcctgtta

SEQ ID NO: 906481 - DNA, 15 bp, Homo sapiens
attatagcctgttac

SEQ ID NO: 906482 - DNA, 15 bp, Homo sapiens
ttatagcctgttaca

SEQ ID NO: 906483 - DNA, 15 bp, Homo sapiens
tatagcctgttacag

SEQ ID NO: 906484 - DNA, 15 bp, Homo sapiens
atagcctgttacagg

SEQ ID NO: 906485 - DNA, 15 bp, Homo sapiens
tagcctgttacaggg

SEQ ID NO: 906486 - DNA, 15 bp, Homo sapiens
agcctgttacaggga

SEQ ID NO: 906487 - DNA, 15 bp, Homo sapiens
gcctgttacagggag

SEQ ID NO: 906488 - DNA, 15 bp, Homo sapiens
cctgttacagggagt

SEQ ID NO: 906489 - DNA, 15 bp, Homo sapiens
ctgttacagggagta

SEQ ID NO: 906490 - DNA, 15 bp, Homo sapiens
tgttacagggagtaa

SEQ ID NO: 906491 - DNA, 15 bp, Homo sapiens
gttacagggagtaag

SEQ ID NO: 906492 - DNA, 15 bp, Homo sapiens
ttacagggagtaagt

SEQ ID NO: 906493 - DNA, 15 bp, Homo sapiens
tacagggagtaagtg

SEQ ID NO: 906494 - DNA, 15 bp, Homo sapiens
acagggagtaagtgg

SEQ ID NO: 906495 - DNA, 15 bp, Homo sapiens
cagggagtaagtggg

SEQ ID NO: 906496 - DNA, 15 bp, Homo sapiens
agggagtaagtgggg

SEQ ID NO: 906497 - DNA, 15 bp, Homo sapiens
gggagtaagtgggga

SEQ ID NO: 906498 - DNA, 15 bp, Homo sapiens
ggagtaagtggggac

SEQ ID NO: 906499 - DNA, 15 bp, Homo sapiens
gagtaagtggggact

SEQ ID NO: 906500 - DNA, 15 bp, Homo sapiens
agtaagtggggactg

SEQ ID NO: 906501 - DNA, 15 bp, Homo sapiens
gtaagtggggactgt

SEQ ID NO: 906502 - DNA, 15 bp, Homo sapiens
taagtggggactgtg

SEQ ID NO: 906503 - DNA, 15 bp, Homo sapiens
aagtggggactgtgc

SEQ ID NO: 906504 - DNA, 15 bp, Homo sapiens
agtggggactgtgcc

SEQ ID NO: 906505 - DNA, 15 bp, Homo sapiens
gtggggactgtgccc

SEQ ID NO: 906506 - DNA, 15 bp, Homo sapiens
tggggactgtgccct

SEQ ID NO: 906507 - DNA, 15 bp, Homo sapiens
ggggactgtgccctg

SEQ ID NO: 906508 - DNA, 15 bp, Homo sapiens
gggactgtgccctga

SEQ ID NO: 906509 - DNA, 15 bp, Homo sapiens
ggactgtgccctgac

SEQ ID NO: 906510 - DNA, 15 bp, Homo sapiens
gactgtgccctgaca

SEQ ID NO: 906511 - DNA, 15 bp, Homo sapiens
actgtgccctgacag

SEQ ID NO: 906512 - DNA, 15 bp, Homo sapiens
ctgtgccctgacaga

SEQ ID NO: 906513 - DNA, 15 bp, Homo sapiens
tgtgccctgacagag

SEQ ID NO: 906514 - DNA, 15 bp, Homo sapiens
gtgccctgacagagt

SEQ ID NO: 906515 - DNA, 15 bp, Homo sapiens
tgccctgacagagtg

SEQ ID NO: 906516 - DNA, 15 bp, Homo sapiens
gccctgacagagtgt

SEQ ID NO: 906517 - DNA, 15 bp, Homo sapiens
ccctgacagagtgtc

SEQ ID NO: 906518 - DNA, 15 bp, Homo sapiens
cctgacagagtgtca

SEQ ID NO: 906519 - DNA, 15 bp, Homo sapiens
ctgacagagtgtcaa

SEQ ID NO: 906520 - DNA, 15 bp, Homo sapiens
tgacagagtgtcaat

SEQ ID NO: 906521 - DNA, 15 bp, Homo sapiens
gacagagtgtcaatg

SEQ ID NO: 906522 - DNA, 15 bp, Homo sapiens
acagagtgtcaatgt

SEQ ID NO: 906523 - DNA, 15 bp, Homo sapiens
cagagtgtcaatgtg

SEQ ID NO: 906524 - DNA, 15 bp, Homo sapiens
agagtgtcaatgtgt

SEQ ID NO: 906525 - DNA, 15 bp, Homo sapiens
gagtgtcaatgtgtc

SEQ ID NO: 906526 - DNA, 15 bp, Homo sapiens
agtgtcaatgtgtct

SEQ ID NO: 906527 - DNA, 15 bp, Homo sapiens
gtgtcaatgtgtctg

SEQ ID NO: 906528 - DNA, 15 bp, Homo sapiens
tgtcaatgtgtctgg

SEQ ID NO: 906529 - DNA, 15 bp, Homo sapiens
gtcaatgtgtctgga

SEQ ID NO: 906530 - DNA, 15 bp, Homo sapiens
tcaatgtgtctggag

SEQ ID NO: 906531 - DNA, 15 bp, Homo sapiens
caatgtgtctggaga

SEQ ID NO: 906532 - DNA, 15 bp, Homo sapiens
aatgtgtctggagag

SEQ ID NO: 906533 - DNA, 15 bp, Homo sapiens
atgtgtctggagagc

SEQ ID NO: 906534 - DNA, 15 bp, Homo sapiens
tgtgtctggagagca

SEQ ID NO: 906535 - DNA, 15 bp, Homo sapiens
gtgtctggagagcaa

SEQ ID NO: 906536 - DNA, 15 bp, Homo sapiens
tgtctggagagcaag

SEQ ID NO: 906537 - DNA, 15 bp, Homo sapiens
gtctggagagcaaga

SEQ ID NO: 906538 - DNA, 15 bp, Homo sapiens
tctggagagcaagag

SEQ ID NO: 906539 - DNA, 15 bp, Homo sapiens
ctggagagcaagagt

SEQ ID NO: 906540 - DNA, 15 bp, Homo sapiens
tggagagcaagagtc

SEQ ID NO: 906541 - DNA, 15 bp, Homo sapiens
ggagagcaagagtca

SEQ ID NO: 906542 - DNA, 15 bp, Homo sapiens
gagagcaagagtcag

SEQ ID NO: 906543 - DNA, 15 bp, Homo sapiens
agagcaagagtcagc

SEQ ID NO: 906544 - DNA, 15 bp, Homo sapiens
gagcaagagtcagca

SEQ ID NO: 906545 - DNA, 15 bp, Homo sapiens
agcaagagtcagcag

SEQ ID NO: 906546 - DNA, 15 bp, Homo sapiens
gcaagagtcagcagc

SEQ ID NO: 906547 - DNA, 15 bp, Homo sapiens
caagagtcagcagca

SEQ ID NO: 906548 - DNA, 15 bp, Homo sapiens
aagagtcagcagcat

SEQ ID NO: 906549 - DNA, 15 bp, Homo sapiens
agagtcagcagcatg

SEQ ID NO: 906550 - DNA, 15 bp, Homo sapiens
gagtcagcagcatgt

SEQ ID NO: 906551 - DNA, 15 bp, Homo sapiens
agtcagcagcatgta

SEQ ID NO: 906552 - DNA, 15 bp, Homo sapiens
gtcagcagcatgtat

SEQ ID NO: 906553 - DNA, 15 bp, Homo sapiens
tcagcagcatgtatt

SEQ ID NO: 906554 - DNA, 15 bp, Homo sapiens
cagcagcatgtattt

SEQ ID NO: 906555 - DNA, 15 bp, Homo sapiens
agcagcatgtatttg

SEQ ID NO: 906556 - DNA, 15 bp, Homo sapiens
gcagcatgtatttgg

SEQ ID NO: 906557 - DNA, 15 bp, Homo sapiens
cagcatgtatttgga

SEQ ID NO: 906558 - DNA, 15 bp, Homo sapiens
agcatgtatttggaa

SEQ ID NO: 906559 - DNA, 15 bp, Homo sapiens
gcatgtatttggaaa

SEQ ID NO: 906560 - DNA, 15 bp, Homo sapiens
catgtatttggaaat

SEQ ID NO: 906561 - DNA, 15 bp, Homo sapiens
atgtatttggaaata

SEQ ID NO: 906562 - DNA, 15 bp, Homo sapiens
tgtatttggaaataa

SEQ ID NO: 906563 - DNA, 15 bp, Homo sapiens
gtatttggaaataag

SEQ ID NO: 906564 - DNA, 15 bp, Homo sapiens
tatttggaaataagg

SEQ ID NO: 906565 - DNA, 15 bp, Homo sapiens
atttggaaataaggc

SEQ ID NO: 906566 - DNA, 15 bp, Homo sapiens
tttggaaataaggct

SEQ ID NO: 906567 - DNA, 15 bp, Homo sapiens
ttggaaataaggcta

SEQ ID NO: 906568 - DNA, 15 bp, Homo sapiens
tggaaataaggctaa

SEQ ID NO: 906569 - DNA, 15 bp, Homo sapiens
ggaaataaggctaaa

SEQ ID NO: 906570 - DNA, 15 bp, Homo sapiens
gaaataaggctaaaa

SEQ ID NO: 906571 - DNA, 15 bp, Homo sapiens
aaataaggctaaaag

SEQ ID NO: 906572 - DNA, 15 bp, Homo sapiens
aataaggctaaaagg

SEQ ID NO: 906573 - DNA, 15 bp, Homo sapiens
ataaggctaaaaggt

SEQ ID NO: 906574 - DNA, 15 bp, Homo sapiens
taaggctaaaaggta

SEQ ID NO: 906575 - DNA, 15 bp, Homo sapiens
aaggctaaaaggtag

SEQ ID NO: 906576 - DNA, 15 bp, Homo sapiens
aggctaaaaggtaga

SEQ ID NO: 906577 - DNA, 15 bp, Homo sapiens
ggctaaaaggtagaa

SEQ ID NO: 906578 - DNA, 15 bp, Homo sapiens
gctaaaaggtagaaa

SEQ ID NO: 906579 - DNA, 15 bp, Homo sapiens
ctaaaaggtagaaaa

SEQ ID NO: 906580 - DNA, 15 bp, Homo sapiens
taaaaggtagaaaag

SEQ ID NO: 906581 - DNA, 15 bp, Homo sapiens
aaaaggtagaaaaga

SEQ ID NO: 906582 - DNA, 15 bp, Homo sapiens
aaaggtagaaaagag

SEQ ID NO: 906583 - DNA, 15 bp, Homo sapiens
aaggtagaaaagagc

SEQ ID NO: 906584 - DNA, 15 bp, Homo sapiens
aggtagaaaagagcc

SEQ ID NO: 906585 - DNA, 15 bp, Homo sapiens
ggtagaaaagagcca

SEQ ID NO: 906586 - DNA, 15 bp, Homo sapiens
gtagaaaagagccat

SEQ ID NO: 906587 - DNA, 15 bp, Homo sapiens
tagaaaagagccatg

SEQ ID NO: 906588 - DNA, 15 bp, Homo sapiens
agaaaagagccatgc

SEQ ID NO: 906589 - DNA, 15 bp, Homo sapiens
gaaaagagccatgct

SEQ ID NO: 906590 - DNA, 15 bp, Homo sapiens
aaaagagccatgcta

SEQ ID NO: 906591 - DNA, 15 bp, Homo sapiens
aaagagccatgctaa

SEQ ID NO: 906592 - DNA, 15 bp, Homo sapiens
aagagccatgctaag

SEQ ID NO: 906593 - DNA, 15 bp, Homo sapiens
agagccatgctaagt

SEQ ID NO: 906594 - DNA, 15 bp, Homo sapiens
gagccatgctaagta

SEQ ID NO: 906595 - DNA, 15 bp, Homo sapiens
agccatgctaagtaa

SEQ ID NO: 906596 - DNA, 15 bp, Homo sapiens
gccatgctaagtaag

SEQ ID NO: 906597 - DNA, 15 bp, Homo sapiens
ccatgctaagtaaga

SEQ ID NO: 906598 - DNA, 15 bp, Homo sapiens
catgctaagtaagac

SEQ ID NO: 906599 - DNA, 15 bp, Homo sapiens
atgctaagtaagacc

SEQ ID NO: 906600 - DNA, 15 bp, Homo sapiens
tgctaagtaagacct

SEQ ID NO: 906601 - DNA, 15 bp, Homo sapiens
gctaagtaagacctt

SEQ ID NO: 906602 - DNA, 15 bp, Homo sapiens
ctaagtaagacctta

SEQ ID NO: 906603 - DNA, 15 bp, Homo sapiens
taagtaagaccttac

SEQ ID NO: 906604 - DNA, 15 bp, Homo sapiens
aagtaagaccttaca

SEQ ID NO: 906605 - DNA, 15 bp, Homo sapiens
agtaagaccttacag

SEQ ID NO: 906606 - DNA, 15 bp, Homo sapiens
gtaagaccttacagg

SEQ ID NO: 906607 - DNA, 15 bp, Homo sapiens
taagaccttacaggt

SEQ ID NO: 906608 - DNA, 15 bp, Homo sapiens
aagaccttacaggtc

SEQ ID NO: 906609 - DNA, 15 bp, Homo sapiens
agaccttacaggtca

SEQ ID NO: 906610 - DNA, 15 bp, Homo sapiens
gaccttacaggtcac

SEQ ID NO: 906611 - DNA, 15 bp, Homo sapiens
accttacaggtcaca

SEQ ID NO: 906612 - DNA, 15 bp, Homo sapiens
ccttacaggtcacac

SEQ ID NO: 906613 - DNA, 15 bp, Homo sapiens
cttacaggtcacacg

SEQ ID NO: 906614 - DNA, 15 bp, Homo sapiens
ttacaggtcacacga

SEQ ID NO: 906615 - DNA, 15 bp, Homo sapiens
tacaggtcacacgaa

SEQ ID NO: 906616 - DNA, 15 bp, Homo sapiens
acaggtcacacgaat

SEQ ID NO: 906617 - DNA, 15 bp, Homo sapiens
caggtcacacgaatg

SEQ ID NO: 906618 - DNA, 15 bp, Homo sapiens
aggtcacacgaatga

SEQ ID NO: 906619 - DNA, 15 bp, Homo sapiens
ggtcacacgaatgag

SEQ ID NO: 906620 - DNA, 15 bp, Homo sapiens
gtcacacgaatgagt

SEQ ID NO: 906621 - DNA, 15 bp, Homo sapiens
tcacacgaatgagtt

SEQ ID NO: 906622 - DNA, 15 bp, Homo sapiens
cacacgaatgagttt

SEQ ID NO: 906623 - DNA, 15 bp, Homo sapiens
acacgaatgagtttg

SEQ ID NO: 906624 - DNA, 15 bp, Homo sapiens
cacgaatgagtttgc

SEQ ID NO: 906625 - DNA, 15 bp, Homo sapiens
acgaatgagtttgct

SEQ ID NO: 906626 - DNA, 15 bp, Homo sapiens
cgaatgagtttgctc

SEQ ID NO: 906627 - DNA, 15 bp, Homo sapiens
gaatgagtttgctca

SEQ ID NO: 906628 - DNA, 15 bp, Homo sapiens
aatgagtttgctcat

SEQ ID NO: 906629 - DNA, 15 bp, Homo sapiens
atgagtttgctcatc

SEQ ID NO: 906630 - DNA, 15 bp, Homo sapiens
tgagtttgctcatca

SEQ ID NO: 906631 - DNA, 15 bp, Homo sapiens
gagtttgctcatcat

SEQ ID NO: 906632 - DNA, 15 bp, Homo sapiens
agtttgctcatcatt

SEQ ID NO: 906633 - DNA, 15 bp, Homo sapiens
gtttgctcatcattc

SEQ ID NO: 906634 - DNA, 15 bp, Homo sapiens
tttgctcatcattct

SEQ ID NO: 906635 - DNA, 15 bp, Homo sapiens
ttgctcatcattcta

SEQ ID NO: 906636 - DNA, 15 bp, Homo sapiens
tgctcatcattctaa

SEQ ID NO: 906637 - DNA, 15 bp, Homo sapiens
gctcatcattctaag

SEQ ID NO: 906638 - DNA, 15 bp, Homo sapiens
ctcatcattctaaga

SEQ ID NO: 906639 - DNA, 15 bp, Homo sapiens
tcatcattctaagag

SEQ ID NO: 906640 - DNA, 15 bp, Homo sapiens
catcattctaagagg

SEQ ID NO: 906641 - DNA, 15 bp, Homo sapiens
atcattctaagagga

SEQ ID NO: 906642 - DNA, 15 bp, Homo sapiens
tcattctaagaggaa

SEQ ID NO: 906643 - DNA, 15 bp, Homo sapiens
cattctaagaggaat

SEQ ID NO: 906644 - DNA, 15 bp, Homo sapiens
attctaagaggaatg

SEQ ID NO: 906645 - DNA, 15 bp, Homo sapiens
ttctaagaggaatgg

SEQ ID NO: 906646 - DNA, 15 bp, Homo sapiens
tctaagaggaatgga

SEQ ID NO: 906647 - DNA, 15 bp, Homo sapiens
ctaagaggaatggaa

SEQ ID NO: 906648 - DNA, 15 bp, Homo sapiens
taagaggaatggaaa

SEQ ID NO: 906649 - DNA, 15 bp, Homo sapiens
aagaggaatggaaag

SEQ ID NO: 906650 - DNA, 15 bp, Homo sapiens
agaggaatggaaagc

SEQ ID NO: 906651 - DNA, 15 bp, Homo sapiens
gaggaatggaaagcc

SEQ ID NO: 906652 - DNA, 15 bp, Homo sapiens
aggaatggaaagcca

SEQ ID NO: 906653 - DNA, 15 bp, Homo sapiens
ggaatggaaagccat

SEQ ID NO: 906654 - DNA, 15 bp, Homo sapiens
gaatggaaagccatc

SEQ ID NO: 906655 - DNA, 15 bp, Homo sapiens
aatggaaagccatcc

SEQ ID NO: 906656 - DNA, 15 bp, Homo sapiens
atggaaagccatcca

SEQ ID NO: 906657 - DNA, 15 bp, Homo sapiens
tggaaagccatccaa

SEQ ID NO: 906658 - DNA, 15 bp, Homo sapiens
ggaaagccatccaag

SEQ ID NO: 906659 - DNA, 15 bp, Homo sapiens
gaaagccatccaagg

SEQ ID NO: 906660 - DNA, 15 bp, Homo sapiens
aaagccatccaaggt

SEQ ID NO: 906661 - DNA, 15 bp, Homo sapiens
aagccatccaaggta

SEQ ID NO: 906662 - DNA, 15 bp, Homo sapiens
agccatccaaggtat

SEQ ID NO: 906663 - DNA, 15 bp, Homo sapiens
gccatccaaggtatt

SEQ ID NO: 906664 - DNA, 15 bp, Homo sapiens
ccatccaaggtatta

SEQ ID NO: 906665 - DNA, 15 bp, Homo sapiens
catccaaggtattaa

SEQ ID NO: 906666 - DNA, 15 bp, Homo sapiens
atccaaggtattaag

SEQ ID NO: 906667 - DNA, 15 bp, Homo sapiens
tccaaggtattaagc

SEQ ID NO: 906668 - DNA, 15 bp, Homo sapiens
ccaaggtattaagca

SEQ ID NO: 906669 - DNA, 15 bp, Homo sapiens
caaggtattaagcag

SEQ ID NO: 906670 - DNA, 15 bp, Homo sapiens
aaggtattaagcagg

SEQ ID NO: 906671 - DNA, 15 bp, Homo sapiens
aggtattaagcaggg

SEQ ID NO: 906672 - DNA, 15 bp, Homo sapiens
ggtattaagcagggg

SEQ ID NO: 906673 - DNA, 15 bp, Homo sapiens
gtattaagcaggggg

SEQ ID NO: 906674 - DNA, 15 bp, Homo sapiens
tattaagcagggggc

SEQ ID NO: 906675 - DNA, 15 bp, Homo sapiens
attaagcagggggct

SEQ ID NO: 906676 - DNA, 15 bp, Homo sapiens
ttaagcagggggctg

SEQ ID NO: 906677 - DNA, 15 bp, Homo sapiens
taagcagggggctga

SEQ ID NO: 906678 - DNA, 15 bp, Homo sapiens
aagcagggggctgac

SEQ ID NO: 906679 - DNA, 15 bp, Homo sapiens
agcagggggctgaca

SEQ ID NO: 906680 - DNA, 15 bp, Homo sapiens
gcagggggctgacaa

SEQ ID NO: 906681 - DNA, 15 bp, Homo sapiens
cagggggctgacaag

SEQ ID NO: 906682 - DNA, 15 bp, Homo sapiens
agggggctgacaagg

SEQ ID NO: 906683 - DNA, 15 bp, Homo sapiens
gggggctgacaaggt

SEQ ID NO: 906684 - DNA, 15 bp, Homo sapiens
ggggctgacaaggta

SEQ ID NO: 906685 - DNA, 15 bp, Homo sapiens
gggctgacaaggtaa

SEQ ID NO: 906686 - DNA, 15 bp, Homo sapiens
ggctgacaaggtaat

SEQ ID NO: 906687 - DNA, 15 bp, Homo sapiens
gctgacaaggtaatt

SEQ ID NO: 906688 - DNA, 15 bp, Homo sapiens
ctgacaaggtaattg

SEQ ID NO: 906689 - DNA, 15 bp, Homo sapiens
tgacaaggtaattgc

SEQ ID NO: 906690 - DNA, 15 bp, Homo sapiens
gacaaggtaattgca

SEQ ID NO: 906691 - DNA, 15 bp, Homo sapiens
acaaggtaattgcac

SEQ ID NO: 906692 - DNA, 15 bp, Homo sapiens
caaggtaattgcact

SEQ ID NO: 906693 - DNA, 15 bp, Homo sapiens
aaggtaattgcactt

SEQ ID NO: 906694 - DNA, 15 bp, Homo sapiens
aggtaattgcacttt

SEQ ID NO: 906695 - DNA, 15 bp, Homo sapiens
ggtaattgcactttc

SEQ ID NO: 906696 - DNA, 15 bp, Homo sapiens
gtaattgcactttcc

SEQ ID NO: 906697 - DNA, 15 bp, Homo sapiens
taattgcactttcca

SEQ ID NO: 906698 - DNA, 15 bp, Homo sapiens
aattgcactttccaa

SEQ ID NO: 906699 - DNA, 15 bp, Homo sapiens
attgcactttccaaa

SEQ ID NO: 906700 - DNA, 15 bp, Homo sapiens
ttgcactttccaaag

SEQ ID NO: 906701 - DNA, 15 bp, Homo sapiens
tgcactttccaaagg

SEQ ID NO: 906702 - DNA, 15 bp, Homo sapiens
gcactttccaaaggt

SEQ ID NO: 906703 - DNA, 15 bp, Homo sapiens
cactttccaaaggta

SEQ ID NO: 906704 - DNA, 15 bp, Homo sapiens
actttccaaaggtat

SEQ ID NO: 906705 - DNA, 15 bp, Homo sapiens
ctttccaaaggtatc

SEQ ID NO: 906706 - DNA, 15 bp, Homo sapiens
tttccaaaggtatct

SEQ ID NO: 906707 - DNA, 15 bp, Homo sapiens
ttccaaaggtatcta

SEQ ID NO: 906708 - DNA, 15 bp, Homo sapiens
tccaaaggtatctat

SEQ ID NO: 906709 - DNA, 15 bp, Homo sapiens
ccaaaggtatctatg

SEQ ID NO: 906710 - DNA, 15 bp, Homo sapiens
caaaggtatctatga

SEQ ID NO: 906711 - DNA, 15 bp, Homo sapiens
aaaggtatctatgac

SEQ ID NO: 906712 - DNA, 15 bp, Homo sapiens
aaggtatctatgact

SEQ ID NO: 906713 - DNA, 15 bp, Homo sapiens
aggtatctatgactg

SEQ ID NO: 906714 - DNA, 15 bp, Homo sapiens
ggtatctatgactgc

SEQ ID NO: 906715 - DNA, 15 bp, Homo sapiens
gtatctatgactgca

SEQ ID NO: 906716 - DNA, 15 bp, Homo sapiens
tatctatgactgcag

SEQ ID NO: 906717 - DNA, 15 bp, Homo sapiens
atctatgactgcagt

SEQ ID NO: 906718 - DNA, 15 bp, Homo sapiens
tctatgactgcagtg

SEQ ID NO: 906719 - DNA, 15 bp, Homo sapiens
ctatgactgcagtgt

SEQ ID NO: 906720 - DNA, 15 bp, Homo sapiens
tatgactgcagtgtt

SEQ ID NO: 906721 - DNA, 15 bp, Homo sapiens
atgactgcagtgttg

SEQ ID NO: 906722 - DNA, 15 bp, Homo sapiens
tgactgcagtgttgt

SEQ ID NO: 906723 - DNA, 15 bp, Homo sapiens
gactgcagtgttgtg

SEQ ID NO: 906724 - DNA, 15 bp, Homo sapiens
actgcagtgttgtga

SEQ ID NO: 906725 - DNA, 15 bp, Homo sapiens
ctgcagtgttgtgat

SEQ ID NO: 906726 - DNA, 15 bp, Homo sapiens
tgcagtgttgtgatc

SEQ ID NO: 906727 - DNA, 15 bp, Homo sapiens
gcagtgttgtgatca

SEQ ID NO: 906728 - DNA, 15 bp, Homo sapiens
cagtgttgtgatcaa

SEQ ID NO: 906729 - DNA, 15 bp, Homo sapiens
agtgttgtgatcaaa

SEQ ID NO: 906730 - DNA, 15 bp, Homo sapiens
gtgttgtgatcaaaa

SEQ ID NO: 906731 - DNA, 15 bp, Homo sapiens
tgttgtgatcaaaat

SEQ ID NO: 906732 - DNA, 15 bp, Homo sapiens
gttgtgatcaaaatg

SEQ ID NO: 906733 - DNA, 15 bp, Homo sapiens
ttgtgatcaaaatgg

SEQ ID NO: 906734 - DNA, 15 bp, Homo sapiens
tgtgatcaaaatgga

SEQ ID NO: 906735 - DNA, 15 bp, Homo sapiens
gtgatcaaaatggag

SEQ ID NO: 906736 - DNA, 15 bp, Homo sapiens
tgatcaaaatggaga

SEQ ID NO: 906737 - DNA, 15 bp, Homo sapiens
gatcaaaatggagaa

SEQ ID NO: 906738 - DNA, 15 bp, Homo sapiens
atcaaaatggagaag

SEQ ID NO: 906739 - DNA, 15 bp, Homo sapiens
tcaaaatggagaaga

SEQ ID NO: 906740 - DNA, 15 bp, Homo sapiens
caaaatggagaagaa

SEQ ID NO: 906741 - DNA, 15 bp, Homo sapiens
aaaatggagaagaac

SEQ ID NO: 906742 - DNA, 15 bp, Homo sapiens
aaatggagaagaaca

SEQ ID NO: 906743 - DNA, 15 bp, Homo sapiens
aatggagaagaacaa

SEQ ID NO: 906744 - DNA, 15 bp, Homo sapiens
atggagaagaacaag

SEQ ID NO: 906745 - DNA, 15 bp, Homo sapiens
tggagaagaacaaga

SEQ ID NO: 906746 - DNA, 15 bp, Homo sapiens
ggagaagaacaagag

SEQ ID NO: 906747 - DNA, 15 bp, Homo sapiens
gagaagaacaagagt

SEQ ID NO: 906748 - DNA, 15 bp, Homo sapiens
agaagaacaagagtg

SEQ ID NO: 906749 - DNA, 15 bp, Homo sapiens
gaagaacaagagtgg

SEQ ID NO: 906750 - DNA, 15 bp, Homo sapiens
aagaacaagagtgga

SEQ ID NO: 906751 - DNA, 15 bp, Homo sapiens
agaacaagagtggat

SEQ ID NO: 906752 - DNA, 15 bp, Homo sapiens
gaacaagagtggatg

SEQ ID NO: 906753 - DNA, 15 bp, Homo sapiens
aacaagagtggatgc

SEQ ID NO: 906754 - DNA, 15 bp, Homo sapiens
acaagagtggatgcc

SEQ ID NO: 906755 - DNA, 15 bp, Homo sapiens
caagagtggatgcca

SEQ ID NO: 906756 - DNA, 15 bp, Homo sapiens
aagagtggatgccaa

SEQ ID NO: 906757 - DNA, 15 bp, Homo sapiens
agagtggatgccaag

SEQ ID NO: 906758 - DNA, 15 bp, Homo sapiens
gagtggatgccaaga

SEQ ID NO: 906759 - DNA, 15 bp, Homo sapiens
agtggatgccaagaa

SEQ ID NO: 906760 - DNA, 15 bp, Homo sapiens
gtggatgccaagaag

SEQ ID NO: 906761 - DNA, 15 bp, Homo sapiens
tggatgccaagaagc

SEQ ID NO: 906762 - DNA, 15 bp, Homo sapiens
ggatgccaagaagcc

SEQ ID NO: 906763 - DNA, 15 bp, Homo sapiens
gatgccaagaagcca

SEQ ID NO: 906764 - DNA, 15 bp, Homo sapiens
atgccaagaagccag

SEQ ID NO: 906765 - DNA, 15 bp, Homo sapiens
tgccaagaagccaga

SEQ ID NO: 906766 - DNA, 15 bp, Homo sapiens
gccaagaagccagat

SEQ ID NO: 906767 - DNA, 15 bp, Homo sapiens
ccaagaagccagatg

SEQ ID NO: 906768 - DNA, 15 bp, Homo sapiens
caagaagccagatga

SEQ ID NO: 906769 - DNA, 15 bp, Homo sapiens
aagaagccagatgaa

SEQ ID NO: 906770 - DNA, 15 bp, Homo sapiens
agaagccagatgaaa

SEQ ID NO: 906771 - DNA, 15 bp, Homo sapiens
gaagccagatgaaag

SEQ ID NO: 906772 - DNA, 15 bp, Homo sapiens
aagccagatgaaagt

SEQ ID NO: 906773 - DNA, 15 bp, Homo sapiens
agccagatgaaagtc

SEQ ID NO: 906774 - DNA, 15 bp, Homo sapiens
gccagatgaaagtct

SEQ ID NO: 906775 - DNA, 15 bp, Homo sapiens
ccagatgaaagtcta

SEQ ID NO: 906776 - DNA, 15 bp, Homo sapiens
cagatgaaagtctac

SEQ ID NO: 906777 - DNA, 15 bp, Homo sapiens
agatgaaagtctact

SEQ ID NO: 906778 - DNA, 15 bp, Homo sapiens
gatgaaagtctactg

SEQ ID NO: 906779 - DNA, 15 bp, Homo sapiens
atgaaagtctactgt

SEQ ID NO: 906780 - DNA, 15 bp, Homo sapiens
tgaaagtctactgta

SEQ ID NO: 906781 - DNA, 15 bp, Homo sapiens
gaaagtctactgtag

SEQ ID NO: 906782 - DNA, 15 bp, Homo sapiens
aaagtctactgtagt

SEQ ID NO: 906783 - DNA, 15 bp, Homo sapiens
aagtctactgtagta

SEQ ID NO: 906784 - DNA, 15 bp, Homo sapiens
agtctactgtagtaa

SEQ ID NO: 906785 - DNA, 15 bp, Homo sapiens
gtctactgtagtaat

SEQ ID NO: 906786 - DNA, 15 bp, Homo sapiens
tctactgtagtaatc

SEQ ID NO: 906787 - DNA, 15 bp, Homo sapiens
ctactgtagtaatcc

SEQ ID NO: 906788 - DNA, 15 bp, Homo sapiens
tactgtagtaatcca

SEQ ID NO: 906789 - DNA, 15 bp, Homo sapiens
actgtagtaatccaa

SEQ ID NO: 906790 - DNA, 15 bp, Homo sapiens
ctgtagtaatccaaa

SEQ ID NO: 906791 - DNA, 15 bp, Homo sapiens
tgtagtaatccaaat

SEQ ID NO: 906792 - DNA, 15 bp, Homo sapiens
gtagtaatccaaatg

SEQ ID NO: 906793 - DNA, 15 bp, Homo sapiens
tagtaatccaaatga

SEQ ID NO: 906794 - DNA, 15 bp, Homo sapiens
agtaatccaaatgat

SEQ ID NO: 906795 - DNA, 15 bp, Homo sapiens
gtaatccaaatgatg

SEQ ID NO: 906796 - DNA, 15 bp, Homo sapiens
taatccaaatgatgc

SEQ ID NO: 906797 - DNA, 15 bp, Homo sapiens
aatccaaatgatgct

SEQ ID NO: 906798 - DNA, 15 bp, Homo sapiens
atccaaatgatgcta

SEQ ID NO: 906799 - DNA, 15 bp, Homo sapiens
tccaaatgatgctag

SEQ ID NO: 906800 - DNA, 15 bp, Homo sapiens
ccaaatgatgctagc

SEQ ID NO: 906801 - DNA, 15 bp, Homo sapiens
caaatgatgctagcc

SEQ ID NO: 906802 - DNA, 15 bp, Homo sapiens
aaatgatgctagcct

SEQ ID NO: 906803 - DNA, 15 bp, Homo sapiens
aatgatgctagccta

SEQ ID NO: 906804 - DNA, 15 bp, Homo sapiens
atgatgctagcctag

SEQ ID NO: 906805 - DNA, 15 bp, Homo sapiens
tgatgctagcctagc

SEQ ID NO: 906806 - DNA, 15 bp, Homo sapiens
gatgctagcctagcc

SEQ ID NO: 906807 - DNA, 15 bp, Homo sapiens
atgctagcctagccc

SEQ ID NO: 906808 - DNA, 15 bp, Homo sapiens
tgctagcctagccca

SEQ ID NO: 906809 - DNA, 15 bp, Homo sapiens
gctagcctagcccag

SEQ ID NO: 906810 - DNA, 15 bp, Homo sapiens
ctagcctagcccagg

SEQ ID NO: 906811 - DNA, 15 bp, Homo sapiens
tagcctagcccaggc

SEQ ID NO: 906812 - DNA, 15 bp, Homo sapiens
agcctagcccaggca

SEQ ID NO: 906813 - DNA, 15 bp, Homo sapiens
gcctagcccaggcag

SEQ ID NO: 906814 - DNA, 15 bp, Homo sapiens
cctagcccaggcagc

SEQ ID NO: 906815 - DNA, 15 bp, Homo sapiens
ctagcccaggcagct

SEQ ID NO: 906816 - DNA, 15 bp, Homo sapiens
tagcccaggcagctg

SEQ ID NO: 906817 - DNA, 15 bp, Homo sapiens
agcccaggcagctgt

SEQ ID NO: 906818 - DNA, 15 bp, Homo sapiens
gcccaggcagctgtg

SEQ ID NO: 906819 - DNA, 15 bp, Homo sapiens
cccaggcagctgtga

SEQ ID NO: 906820 - DNA, 15 bp, Homo sapiens
ccaggcagctgtgag

SEQ ID NO: 906821 - DNA, 15 bp, Homo sapiens
caggcagctgtgaga

SEQ ID NO: 906822 - DNA, 15 bp, Homo sapiens
aggcagctgtgagat

SEQ ID NO: 906823 - DNA, 15 bp, Homo sapiens
ggcagctgtgagatg

SEQ ID NO: 906824 - DNA, 15 bp, Homo sapiens
gcagctgtgagatgg

SEQ ID NO: 906825 - DNA, 15 bp, Homo sapiens
cagctgtgagatggc

SEQ ID NO: 906826 - DNA, 15 bp, Homo sapiens
agctgtgagatggcg

SEQ ID NO: 906827 - DNA, 15 bp, Homo sapiens
gctgtgagatggcgg

SEQ ID NO: 906828 - DNA, 15 bp, Homo sapiens
ctgtgagatggcgga

SEQ ID NO: 906829 - DNA, 15 bp, Homo sapiens
tgtgagatggcggaa

SEQ ID NO: 906830 - DNA, 15 bp, Homo sapiens
gtgagatggcggaaa

SEQ ID NO: 906831 - DNA, 15 bp, Homo sapiens
tgagatggcggaaag

SEQ ID NO: 906832 - DNA, 15 bp, Homo sapiens
gagatggcggaaaga

SEQ ID NO: 906833 - DNA, 15 bp, Homo sapiens
agatggcggaaagat

SEQ ID NO: 906834 - DNA, 15 bp, Homo sapiens
gatggcggaaagatg

SEQ ID NO: 906835 - DNA, 15 bp, Homo sapiens
atggcggaaagatgg

SEQ ID NO: 906836 - DNA, 15 bp, Homo sapiens
tggcggaaagatggc

SEQ ID NO: 906837 - DNA, 15 bp, Homo sapiens
ggcggaaagatggcc

SEQ ID NO: 906838 - DNA, 15 bp, Homo sapiens
gcggaaagatggcca

SEQ ID NO: 906839 - DNA, 15 bp, Homo sapiens
cggaaagatggccag

SEQ ID NO: 906840 - DNA, 15 bp, Homo sapiens
ggaaagatggccaga

SEQ ID NO: 906841 - DNA, 15 bp, Homo sapiens
gaaagatggccagaa

SEQ ID NO: 906842 - DNA, 15 bp, Homo sapiens
aaagatggccagaag

SEQ ID NO: 906843 - DNA, 15 bp, Homo sapiens
aagatggccagaaga

SEQ ID NO: 906844 - DNA, 15 bp, Homo sapiens
agatggccagaagaa

SEQ ID NO: 906845 - DNA, 15 bp, Homo sapiens
gatggccagaagaat

SEQ ID NO: 906846 - DNA, 15 bp, Homo sapiens
atggccagaagaata

SEQ ID NO: 906847 - DNA, 15 bp, Homo sapiens
tggccagaagaatat

SEQ ID NO: 906848 - DNA, 15 bp, Homo sapiens
ggccagaagaatatg

SEQ ID NO: 906849 - DNA, 15 bp, Homo sapiens
gccagaagaatatgt

SEQ ID NO: 906850 - DNA, 15 bp, Homo sapiens
ccagaagaatatgtg

SEQ ID NO: 906851 - DNA, 15 bp, Homo sapiens
cagaagaatatgtgt

SEQ ID NO: 906852 - DNA, 15 bp, Homo sapiens
agaagaatatgtgtc

SEQ ID NO: 906853 - DNA, 15 bp, Homo sapiens
gaagaatatgtgtct

SEQ ID NO: 906854 - DNA, 15 bp, Homo sapiens
aagaatatgtgtctg

SEQ ID NO: 906855 - DNA, 15 bp, Homo sapiens
agaatatgtgtctgg

SEQ ID NO: 906856 - DNA, 15 bp, Homo sapiens
gaatatgtgtctgga

SEQ ID NO: 906857 - DNA, 15 bp, Homo sapiens
aatatgtgtctggaa

SEQ ID NO: 906858 - DNA, 15 bp, Homo sapiens
atatgtgtctggaaa

SEQ ID NO: 906859 - DNA, 15 bp, Homo sapiens
tatgtgtctggaaag

SEQ ID NO: 906860 - DNA, 15 bp, Homo sapiens
atgtgtctggaaagt

SEQ ID NO: 906861 - DNA, 15 bp, Homo sapiens
tgtgtctggaaagtg

SEQ ID NO: 906862 - DNA, 15 bp, Homo sapiens
gtgtctggaaagtgc

SEQ ID NO: 906863 - DNA, 15 bp, Homo sapiens
tgtctggaaagtgct

SEQ ID NO: 906864 - DNA, 15 bp, Homo sapiens
gtctggaaagtgcta

SEQ ID NO: 906865 - DNA, 15 bp, Homo sapiens
tctggaaagtgctat

SEQ ID NO: 906866 - DNA, 15 bp, Homo sapiens
ctggaaagtgctatg

SEQ ID NO: 906867 - DNA, 15 bp, Homo sapiens
tggaaagtgctatgt

SEQ ID NO: 906868 - DNA, 15 bp, Homo sapiens
ggaaagtgctatgtt

SEQ ID NO: 906869 - DNA, 15 bp, Homo sapiens
gaaagtgctatgttt

SEQ ID NO: 906870 - DNA, 15 bp, Homo sapiens
aaagtgctatgtttg

SEQ ID NO: 906871 - DNA, 15 bp, Homo sapiens
aagtgctatgtttga

SEQ ID NO: 906872 - DNA, 15 bp, Homo sapiens
agtgctatgtttgaa

SEQ ID NO: 906873 - DNA, 15 bp, Homo sapiens
gtgctatgtttgaat

SEQ ID NO: 906874 - DNA, 15 bp, Homo sapiens
tgctatgtttgaata

SEQ ID NO: 906875 - DNA, 15 bp, Homo sapiens
gctatgtttgaatac

SEQ ID NO: 906876 - DNA, 15 bp, Homo sapiens
ctatgtttgaataca

SEQ ID NO: 906877 - DNA, 15 bp, Homo sapiens
tatgtttgaatacat

SEQ ID NO: 906878 - DNA, 15 bp, Homo sapiens
atgtttgaatacatt

SEQ ID NO: 906879 - DNA, 15 bp, Homo sapiens
tgtttgaatacattc

SEQ ID NO: 906880 - DNA, 15 bp, Homo sapiens
gtttgaatacattcc

SEQ ID NO: 906881 - DNA, 15 bp, Homo sapiens
tttgaatacattccc

SEQ ID NO: 906882 - DNA, 15 bp, Homo sapiens
ttgaatacattccca

SEQ ID NO: 906883 - DNA, 15 bp, Homo sapiens
tgaatacattcccaa

SEQ ID NO: 906884 - DNA, 15 bp, Homo sapiens
gaatacattcccaat

SEQ ID NO: 906885 - DNA, 15 bp, Homo sapiens
aatacattcccaatg

SEQ ID NO: 906886 - DNA, 15 bp, Homo sapiens
atacattcccaatgt

SEQ ID NO: 906887 - DNA, 15 bp, Homo sapiens
tacattcccaatgtt

SEQ ID NO: 906888 - DNA, 15 bp, Homo sapiens
acattcccaatgttc

SEQ ID NO: 906889 - DNA, 15 bp, Homo sapiens
cattcccaatgttca

SEQ ID NO: 906890 - DNA, 15 bp, Homo sapiens
attcccaatgttcac

SEQ ID NO: 906891 - DNA, 15 bp, Homo sapiens
ttcccaatgttcacg

SEQ ID NO: 906892 - DNA, 15 bp, Homo sapiens
tcccaatgttcacgt

SEQ ID NO: 906893 - DNA, 15 bp, Homo sapiens
cccaatgttcacgtg

SEQ ID NO: 906894 - DNA, 15 bp, Homo sapiens
ccaatgttcacgtga

SEQ ID NO: 906895 - DNA, 15 bp, Homo sapiens
caatgttcacgtgac

SEQ ID NO: 906896 - DNA, 15 bp, Homo sapiens
aatgttcacgtgaca

SEQ ID NO: 906897 - DNA, 15 bp, Homo sapiens
atgttcacgtgacag

SEQ ID NO: 906898 - DNA, 15 bp, Homo sapiens
tgttcacgtgacaga

SEQ ID NO: 906899 - DNA, 15 bp, Homo sapiens
gttcacgtgacagaa

SEQ ID NO: 906900 - DNA, 15 bp, Homo sapiens
ttcacgtgacagaaa

SEQ ID NO: 906901 - DNA, 15 bp, Homo sapiens
tcacgtgacagaaac

SEQ ID NO: 906902 - DNA, 15 bp, Homo sapiens
cacgtgacagaaact

SEQ ID NO: 906903 - DNA, 15 bp, Homo sapiens
acgtgacagaaactt

SEQ ID NO: 906904 - DNA, 15 bp, Homo sapiens
cgtgacagaaactta

SEQ ID NO: 906905 - DNA, 15 bp, Homo sapiens
gtgacagaaacttaa

SEQ ID NO: 906906 - DNA, 15 bp, Homo sapiens
tgacagaaacttaat

SEQ ID NO: 906907 - DNA, 15 bp, Homo sapiens
gacagaaacttaatc

SEQ ID NO: 906908 - DNA, 15 bp, Homo sapiens
acagaaacttaatcc

SEQ ID NO: 906909 - DNA, 15 bp, Homo sapiens
cagaaacttaatccc

SEQ ID NO: 906910 - DNA, 15 bp, Homo sapiens
agaaacttaatcccc

SEQ ID NO: 906911 - DNA, 15 bp, Homo sapiens
gaaacttaatcccca

SEQ ID NO: 906912 - DNA, 15 bp, Homo sapiens
aaacttaatccccaa

SEQ ID NO: 906913 - DNA, 15 bp, Homo sapiens
aacttaatccccaat

SEQ ID NO: 906914 - DNA, 15 bp, Homo sapiens
acttaatccccaatg

SEQ ID NO: 906915 - DNA, 15 bp, Homo sapiens
cttaatccccaatgc

SEQ ID NO: 906916 - DNA, 15 bp, Homo sapiens
ttaatccccaatgca

SEQ ID NO: 906917 - DNA, 15 bp, Homo sapiens
taatccccaatgcaa

SEQ ID NO: 906918 - DNA, 15 bp, Homo sapiens
aatccccaatgcaac

SEQ ID NO: 906919 - DNA, 15 bp, Homo sapiens
atccccaatgcaaca

SEQ ID NO: 906920 - DNA, 15 bp, Homo sapiens
tccccaatgcaacag

SEQ ID NO: 906921 - DNA, 15 bp, Homo sapiens
ccccaatgcaacagt

SEQ ID NO: 906922 - DNA, 15 bp, Homo sapiens
cccaatgcaacagtg

SEQ ID NO: 906923 - DNA, 15 bp, Homo sapiens
ccaatgcaacagtgt

SEQ ID NO: 906924 - DNA, 15 bp, Homo sapiens
caatgcaacagtgtt

SEQ ID NO: 906925 - DNA, 15 bp, Homo sapiens
aatgcaacagtgtta

SEQ ID NO: 906926 - DNA, 15 bp, Homo sapiens
atgcaacagtgttaa

SEQ ID NO: 906927 - DNA, 15 bp, Homo sapiens
tgcaacagtgttaaa

SEQ ID NO: 906928 - DNA, 15 bp, Homo sapiens
gcaacagtgttaaaa

SEQ ID NO: 906929 - DNA, 15 bp, Homo sapiens
caacagtgttaaaag

SEQ ID NO: 906930 - DNA, 15 bp, Homo sapiens
aacagtgttaaaagg

SEQ ID NO: 906931 - DNA, 15 bp, Homo sapiens
acagtgttaaaaggt

SEQ ID NO: 906932 - DNA, 15 bp, Homo sapiens
cagtgttaaaaggtg

SEQ ID NO: 906933 - DNA, 15 bp, Homo sapiens
agtgttaaaaggtgg

SEQ ID NO: 906934 - DNA, 15 bp, Homo sapiens
gtgttaaaaggtggg

SEQ ID NO: 906935 - DNA, 15 bp, Homo sapiens
tgttaaaaggtggga

SEQ ID NO: 906936 - DNA, 15 bp, Homo sapiens
gttaaaaggtgggac

SEQ ID NO: 906937 - DNA, 15 bp, Homo sapiens
ttaaaaggtgggacc

SEQ ID NO: 906938 - DNA, 15 bp, Homo sapiens
taaaaggtgggacct

SEQ ID NO: 906939 - DNA, 15 bp, Homo sapiens
aaaaggtgggacctt

SEQ ID NO: 906940 - DNA, 15 bp, Homo sapiens
aaaggtgggaccttt

SEQ ID NO: 906941 - DNA, 15 bp, Homo sapiens
aaggtgggaccttta

SEQ ID NO: 906942 - DNA, 15 bp, Homo sapiens
aggtgggacctttag

SEQ ID NO: 906943 - DNA, 15 bp, Homo sapiens
ggtgggacctttagg

SEQ ID NO: 906944 - DNA, 15 bp, Homo sapiens
gtgggacctttaggt

SEQ ID NO: 906945 - DNA, 15 bp, Homo sapiens
tgggacctttaggtg

SEQ ID NO: 906946 - DNA, 15 bp, Homo sapiens
gggacctttaggtga

SEQ ID NO: 906947 - DNA, 15 bp, Homo sapiens
ggacctttaggtgag

SEQ ID NO: 906948 - DNA, 15 bp, Homo sapiens
gacctttaggtgagc

SEQ ID NO: 906949 - DNA, 15 bp, Homo sapiens
acctttaggtgagca

SEQ ID NO: 906950 - DNA, 15 bp, Homo sapiens
cctttaggtgagcag

SEQ ID NO: 906951 - DNA, 15 bp, Homo sapiens
ctttaggtgagcagg

SEQ ID NO: 906952 - DNA, 15 bp, Homo sapiens
tttaggtgagcaggt

SEQ ID NO: 906953 - DNA, 15 bp, Homo sapiens
ttaggtgagcaggtc

SEQ ID NO: 906954 - DNA, 15 bp, Homo sapiens
taggtgagcaggtca

SEQ ID NO: 906955 - DNA, 15 bp, Homo sapiens
aggtgagcaggtcat

SEQ ID NO: 906956 - DNA, 15 bp, Homo sapiens
ggtgagcaggtcatg

SEQ ID NO: 906957 - DNA, 15 bp, Homo sapiens
gtgagcaggtcatga

SEQ ID NO: 906958 - DNA, 15 bp, Homo sapiens
tgagcaggtcatgag

SEQ ID NO: 906959 - DNA, 15 bp, Homo sapiens
gagcaggtcatgagt

SEQ ID NO: 906960 - DNA, 15 bp, Homo sapiens
agcaggtcatgagtg

SEQ ID NO: 906961 - DNA, 15 bp, Homo sapiens
gcaggtcatgagtgc

SEQ ID NO: 906962 - DNA, 15 bp, Homo sapiens
caggtcatgagtgct

SEQ ID NO: 906963 - DNA, 15 bp, Homo sapiens
aggtcatgagtgctc

SEQ ID NO: 906964 - DNA, 15 bp, Homo sapiens
ggtcatgagtgctct

SEQ ID NO: 906965 - DNA, 15 bp, Homo sapiens
gtcatgagtgctctg

SEQ ID NO: 906966 - DNA, 15 bp, Homo sapiens
tcatgagtgctctgc

SEQ ID NO: 906967 - DNA, 15 bp, Homo sapiens
catgagtgctctgcc

SEQ ID NO: 906968 - DNA, 15 bp, Homo sapiens
atgagtgctctgccc

SEQ ID NO: 906969 - DNA, 15 bp, Homo sapiens
tgagtgctctgccct

SEQ ID NO: 906970 - DNA, 15 bp, Homo sapiens
gagtgctctgccctc

SEQ ID NO: 906971 - DNA, 15 bp, Homo sapiens
agtgctctgccctcc

SEQ ID NO: 906972 - DNA, 15 bp, Homo sapiens
gtgctctgccctcca

SEQ ID NO: 906973 - DNA, 15 bp, Homo sapiens
tgctctgccctccag

SEQ ID NO: 906974 - DNA, 15 bp, Homo sapiens
gctctgccctccaga

SEQ ID NO: 906975 - DNA, 15 bp, Homo sapiens
ctctgccctccagaa

SEQ ID NO: 906976 - DNA, 15 bp, Homo sapiens
tctgccctccagaat

SEQ ID NO: 906977 - DNA, 15 bp, Homo sapiens
ctgccctccagaatg

SEQ ID NO: 906978 - DNA, 15 bp, Homo sapiens
tgccctccagaatgg

SEQ ID NO: 906979 - DNA, 15 bp, Homo sapiens
gccctccagaatgga

SEQ ID NO: 906980 - DNA, 15 bp, Homo sapiens
ccctccagaatggat

SEQ ID NO: 906981 - DNA, 15 bp, Homo sapiens
cctccagaatggatt

SEQ ID NO: 906982 - DNA, 15 bp, Homo sapiens
ctccagaatggatta

SEQ ID NO: 906983 - DNA, 15 bp, Homo sapiens
tccagaatggattaa

SEQ ID NO: 906984 - DNA, 15 bp, Homo sapiens
ccagaatggattaat

SEQ ID NO: 906985 - DNA, 15 bp, Homo sapiens
cagaatggattaatg

SEQ ID NO: 906986 - DNA, 15 bp, Homo sapiens
agaatggattaatgc

SEQ ID NO: 906987 - DNA, 15 bp, Homo sapiens
gaatggattaatgcc

SEQ ID NO: 906988 - DNA, 15 bp, Homo sapiens
aatggattaatgcca

SEQ ID NO: 906989 - DNA, 15 bp, Homo sapiens
atggattaatgccat

SEQ ID NO: 906990 - DNA, 15 bp, Homo sapiens
tggattaatgccatt

SEQ ID NO: 906991 - DNA, 15 bp, Homo sapiens
ggattaatgccattt

SEQ ID NO: 906992 - DNA, 15 bp, Homo sapiens
gattaatgccatttt

SEQ ID NO: 906993 - DNA, 15 bp, Homo sapiens
attaatgccattttc

SEQ ID NO: 906994 - DNA, 15 bp, Homo sapiens
ttaatgccattttcg

SEQ ID NO: 906995 - DNA, 15 bp, Homo sapiens
taatgccattttcgc

SEQ ID NO: 906996 - DNA, 15 bp, Homo sapiens
aatgccattttcgct

SEQ ID NO: 906997 - DNA, 15 bp, Homo sapiens
atgccattttcgctg

SEQ ID NO: 906998 - DNA, 15 bp, Homo sapiens
tgccattttcgctgg

SEQ ID NO: 906999 - DNA, 15 bp, Homo sapiens
gccattttcgctgga

SEQ ID NO: 907000 - DNA, 15 bp, Homo sapiens
ccattttcgctggag

SEQ ID NO: 907001 - DNA, 15 bp, Homo sapiens
cattttcgctggagt

SEQ ID NO: 907002 - DNA, 15 bp, Homo sapiens
attttcgctggagtg

SEQ ID NO: 907003 - DNA, 15 bp, Homo sapiens
ttttcgctggagtgg

SEQ ID NO: 907004 - DNA, 15 bp, Homo sapiens
tttcgctggagtggg

SEQ ID NO: 907005 - DNA, 15 bp, Homo sapiens
ttcgctggagtgggt

SEQ ID NO: 907006 - DNA, 15 bp, Homo sapiens
tcgctggagtgggtt

SEQ ID NO: 907007 - DNA, 15 bp, Homo sapiens
cgctggagtgggtta

SEQ ID NO: 907008 - DNA, 15 bp, Homo sapiens
gctggagtgggttag

SEQ ID NO: 907009 - DNA, 15 bp, Homo sapiens
ctggagtgggttagt

SEQ ID NO: 907010 - DNA, 15 bp, Homo sapiens
tggagtgggttagtt

SEQ ID NO: 907011 - DNA, 15 bp, Homo sapiens
ggagtgggttagtta

SEQ ID NO: 907012 - DNA, 15 bp, Homo sapiens
gagtgggttagttat

SEQ ID NO: 907013 - DNA, 15 bp, Homo sapiens
agtgggttagttatt

SEQ ID NO: 907014 - DNA, 15 bp, Homo sapiens
gtgggttagttattg

SEQ ID NO: 907015 - DNA, 15 bp, Homo sapiens
tgggttagttattgt

SEQ ID NO: 907016 - DNA, 15 bp, Homo sapiens
gggttagttattgtg

SEQ ID NO: 907017 - DNA, 15 bp, Homo sapiens
ggttagttattgtgg

SEQ ID NO: 907018 - DNA, 15 bp, Homo sapiens
gttagttattgtgga

SEQ ID NO: 907019 - DNA, 15 bp, Homo sapiens
ttagttattgtggaa

SEQ ID NO: 907020 - DNA, 15 bp, Homo sapiens
tagttattgtggaag

SEQ ID NO: 907021 - DNA, 15 bp, Homo sapiens
agttattgtggaagt

SEQ ID NO: 907022 - DNA, 15 bp, Homo sapiens
gttattgtggaagtg

SEQ ID NO: 907023 - DNA, 15 bp, Homo sapiens
ttattgtggaagtgg

SEQ ID NO: 907024 - DNA, 15 bp, Homo sapiens
tattgtggaagtggg

SEQ ID NO: 907025 - DNA, 15 bp, Homo sapiens
attgtggaagtgggt

SEQ ID NO: 907026 - DNA, 15 bp, Homo sapiens
ttgtggaagtgggtc

SEQ ID NO: 907027 - DNA, 15 bp, Homo sapiens
tgtggaagtgggtcc

SEQ ID NO: 907028 - DNA, 15 bp, Homo sapiens
gtggaagtgggtccc

SEQ ID NO: 907029 - DNA, 15 bp, Homo sapiens
tggaagtgggtccct

SEQ ID NO: 907030 - DNA, 15 bp, Homo sapiens
ggaagtgggtcccta

SEQ ID NO: 907031 - DNA, 15 bp, Homo sapiens
gaagtgggtccctaa

SEQ ID NO: 907032 - DNA, 15 bp, Homo sapiens
aagtgggtccctaat

SEQ ID NO: 907033 - DNA, 15 bp, Homo sapiens
agtgggtccctaata

SEQ ID NO: 907034 - DNA, 15 bp, Homo sapiens
gtgggtccctaataa

SEQ ID NO: 907035 - DNA, 15 bp, Homo sapiens
tgggtccctaataaa

SEQ ID NO: 907036 - DNA, 15 bp, Homo sapiens
gggtccctaataaat

SEQ ID NO: 907037 - DNA, 15 bp, Homo sapiens
ggtccctaataaatg

SEQ ID NO: 907038 - DNA, 15 bp, Homo sapiens
gtccctaataaatgg

SEQ ID NO: 907039 - DNA, 15 bp, Homo sapiens
tccctaataaatgga

SEQ ID NO: 907040 - DNA, 15 bp, Homo sapiens
ccctaataaatggac

SEQ ID NO: 907041 - DNA, 15 bp, Homo sapiens
cctaataaatggacg

SEQ ID NO: 907042 - DNA, 15 bp, Homo sapiens
ctaataaatggacga

SEQ ID NO: 907043 - DNA, 15 bp, Homo sapiens
taataaatggacgag

SEQ ID NO: 907044 - DNA, 15 bp, Homo sapiens
aataaatggacgagt

SEQ ID NO: 907045 - DNA, 15 bp, Homo sapiens
ataaatggacgagtt

SEQ ID NO: 907046 - DNA, 15 bp, Homo sapiens
taaatggacgagttg

SEQ ID NO: 907047 - DNA, 15 bp, Homo sapiens
aaatggacgagttgg

SEQ ID NO: 907048 - DNA, 15 bp, Homo sapiens
aatggacgagttggg

SEQ ID NO: 907049 - DNA, 15 bp, Homo sapiens
atggacgagttgggc

SEQ ID NO: 907050 - DNA, 15 bp, Homo sapiens
tggacgagttgggcc

SEQ ID NO: 907051 - DNA, 15 bp, Homo sapiens
ggacgagttgggccc

SEQ ID NO: 907052 - DNA, 15 bp, Homo sapiens
gacgagttgggcccc

SEQ ID NO: 907053 - DNA, 15 bp, Homo sapiens
acgagttgggccccc

SEQ ID NO: 907054 - DNA, 15 bp, Homo sapiens
cgagttgggccccct

SEQ ID NO: 907055 - DNA, 15 bp, Homo sapiens
gagttgggccccctt

SEQ ID NO: 907056 - DNA, 15 bp, Homo sapiens
agttgggcccccttt

SEQ ID NO: 907057 - DNA, 15 bp, Homo sapiens
gttgggccccctttt

SEQ ID NO: 907058 - DNA, 15 bp, Homo sapiens
ttgggcccccttttc

SEQ ID NO: 907059 - DNA, 15 bp, Homo sapiens
tgggcccccttttcc

SEQ ID NO: 907060 - DNA, 15 bp, Homo sapiens
gggcccccttttcct

SEQ ID NO: 907061 - DNA, 15 bp, Homo sapiens
ggcccccttttcctc

SEQ ID NO: 907062 - DNA, 15 bp, Homo sapiens
gcccccttttcctcc

SEQ ID NO: 907063 - DNA, 15 bp, Homo sapiens
cccccttttcctcct

SEQ ID NO: 907064 - DNA, 15 bp, Homo sapiens
ccccttttcctcctt

SEQ ID NO: 907065 - DNA, 15 bp, Homo sapiens
cccttttcctccttc

SEQ ID NO: 907066 - DNA, 15 bp, Homo sapiens
ccttttcctccttca

SEQ ID NO: 907067 - DNA, 15 bp, Homo sapiens
cttttcctccttcac

SEQ ID NO: 907068 - DNA, 15 bp, Homo sapiens
ttttcctccttcact

SEQ ID NO: 907069 - DNA, 15 bp, Homo sapiens
tttcctccttcactt

SEQ ID NO: 907070 - DNA, 15 bp, Homo sapiens
ttcctccttcacttc

SEQ ID NO: 907071 - DNA, 15 bp, Homo sapiens
tcctccttcacttct

SEQ ID NO: 907072 - DNA, 15 bp, Homo sapiens
cctccttcacttctc

SEQ ID NO: 907073 - DNA, 15 bp, Homo sapiens
ctccttcacttctct

SEQ ID NO: 907074 - DNA, 15 bp, Homo sapiens
tccttcacttctctc

SEQ ID NO: 907075 - DNA, 15 bp, Homo sapiens
ccttcacttctctct

SEQ ID NO: 907076 - DNA, 15 bp, Homo sapiens
cttcacttctctctt

SEQ ID NO: 907077 - DNA, 15 bp, Homo sapiens
ttcacttctctctta

SEQ ID NO: 907078 - DNA, 15 bp, Homo sapiens
tcacttctctcttat

SEQ ID NO: 907079 - DNA, 15 bp, Homo sapiens
cacttctctcttatg

SEQ ID NO: 907080 - DNA, 15 bp, Homo sapiens
acttctctcttatgt

SEQ ID NO: 907081 - DNA, 15 bp, Homo sapiens
cttctctcttatgtg

SEQ ID NO: 907082 - DNA, 15 bp, Homo sapiens
ttctctcttatgtgt

SEQ ID NO: 907083 - DNA, 15 bp, Homo sapiens
tctctcttatgtgtg

SEQ ID NO: 907084 - DNA, 15 bp, Homo sapiens
ctctcttatgtgtgt

SEQ ID NO: 907085 - DNA, 15 bp, Homo sapiens
tctcttatgtgtgtg

SEQ ID NO: 907086 - DNA, 15 bp, Homo sapiens
ctcttatgtgtgtgt

SEQ ID NO: 907087 - DNA, 15 bp, Homo sapiens
tcttatgtgtgtgtg

SEQ ID NO: 907088 - DNA, 15 bp, Homo sapiens
cttatgtgtgtgtgc

SEQ ID NO: 907089 - DNA, 15 bp, Homo sapiens
ttatgtgtgtgtgct

SEQ ID NO: 907090 - DNA, 15 bp, Homo sapiens
tatgtgtgtgtgctc

SEQ ID NO: 907091 - DNA, 15 bp, Homo sapiens
atgtgtgtgtgctct

SEQ ID NO: 907092 - DNA, 15 bp, Homo sapiens
tgtgtgtgtgctctc

SEQ ID NO: 907093 - DNA, 15 bp, Homo sapiens
gtgtgtgtgctctct

SEQ ID NO: 907094 - DNA, 15 bp, Homo sapiens
tgtgtgtgctctctt

SEQ ID NO: 907095 - DNA, 15 bp, Homo sapiens
gtgtgtgctctcttg

SEQ ID NO: 907096 - DNA, 15 bp, Homo sapiens
tgtgtgctctcttgc

SEQ ID NO: 907097 - DNA, 15 bp, Homo sapiens
gtgtgctctcttgct

SEQ ID NO: 907098 - DNA, 15 bp, Homo sapiens
tgtgctctcttgctc

SEQ ID NO: 907099 - DNA, 15 bp, Homo sapiens
gtgctctcttgctct

SEQ ID NO: 907100 - DNA, 15 bp, Homo sapiens
tgctctcttgctctt

SEQ ID NO: 907101 - DNA, 15 bp, Homo sapiens
gctctcttgctcttc

SEQ ID NO: 907102 - DNA, 15 bp, Homo sapiens
ctctcttgctcttcc

SEQ ID NO: 907103 - DNA, 15 bp, Homo sapiens
tctcttgctcttccg

SEQ ID NO: 907104 - DNA, 15 bp, Homo sapiens
ctcttgctcttccgc

SEQ ID NO: 907105 - DNA, 15 bp, Homo sapiens
tcttgctcttccgct

SEQ ID NO: 907106 - DNA, 15 bp, Homo sapiens
cttgctcttccgctt

SEQ ID NO: 907107 - DNA, 15 bp, Homo sapiens
ttgctcttccgcttt

SEQ ID NO: 907108 - DNA, 15 bp, Homo sapiens
tgctcttccgctttc

SEQ ID NO: 907109 - DNA, 15 bp, Homo sapiens
gctcttccgctttcc

SEQ ID NO: 907110 - DNA, 15 bp, Homo sapiens
ctcttccgctttcca

SEQ ID NO: 907111 - DNA, 15 bp, Homo sapiens
tcttccgctttccac

SEQ ID NO: 907112 - DNA, 15 bp, Homo sapiens
cttccgctttccacc

SEQ ID NO: 907113 - DNA, 15 bp, Homo sapiens
ttccgctttccacca

SEQ ID NO: 907114 - DNA, 15 bp, Homo sapiens
tccgctttccaccat

SEQ ID NO: 907115 - DNA, 15 bp, Homo sapiens
ccgctttccaccatt

SEQ ID NO: 907116 - DNA, 15 bp, Homo sapiens
cgctttccaccattg

SEQ ID NO: 907117 - DNA, 15 bp, Homo sapiens
gctttccaccattgg

SEQ ID NO: 907118 - DNA, 15 bp, Homo sapiens
ctttccaccattggc

SEQ ID NO: 907119 - DNA, 15 bp, Homo sapiens
tttccaccattggcc

SEQ ID NO: 907120 - DNA, 15 bp, Homo sapiens
ttccaccattggccc

SEQ ID NO: 907121 - DNA, 15 bp, Homo sapiens
tccaccattggcccc

SEQ ID NO: 907122 - DNA, 15 bp, Homo sapiens
ccaccattggcccct

SEQ ID NO: 907123 - DNA, 15 bp, Homo sapiens
caccattggcccctt

SEQ ID NO: 907124 - DNA, 15 bp, Homo sapiens
accattggccccttg

SEQ ID NO: 907125 - DNA, 15 bp, Homo sapiens
ccattggccccttga

SEQ ID NO: 907126 - DNA, 15 bp, Homo sapiens
cattggccccttgac

SEQ ID NO: 907127 - DNA, 15 bp, Homo sapiens
attggccccttgacc

SEQ ID NO: 907128 - DNA, 15 bp, Homo sapiens
ttggccccttgacct

SEQ ID NO: 907129 - DNA, 15 bp, Homo sapiens
tggccccttgacctt

SEQ ID NO: 907130 - DNA, 15 bp, Homo sapiens
ggccccttgaccttg

SEQ ID NO: 907131 - DNA, 15 bp, Homo sapiens
gccccttgaccttga

SEQ ID NO: 907132 - DNA, 15 bp, Homo sapiens
ccccttgaccttgaa

SEQ ID NO: 907133 - DNA, 15 bp, Homo sapiens
cccttgaccttgaac

SEQ ID NO: 907134 - DNA, 15 bp, Homo sapiens
ccttgaccttgaact

SEQ ID NO: 907135 - DNA, 15 bp, Homo sapiens
cttgaccttgaactt

SEQ ID NO: 907136 - DNA, 15 bp, Homo sapiens
ttgaccttgaacttc

SEQ ID NO: 907137 - DNA, 15 bp, Homo sapiens
tgaccttgaacttcc

SEQ ID NO: 907138 - DNA, 15 bp, Homo sapiens
gaccttgaacttccc

SEQ ID NO: 907139 - DNA, 15 bp, Homo sapiens
accttgaacttccca

SEQ ID NO: 907140 - DNA, 15 bp, Homo sapiens
ccttgaacttcccag

SEQ ID NO: 907141 - DNA, 15 bp, Homo sapiens
cttgaacttcccagc

SEQ ID NO: 907142 - DNA, 15 bp, Homo sapiens
ttgaacttcccagcc

SEQ ID NO: 907143 - DNA, 15 bp, Homo sapiens
tgaacttcccagcct

SEQ ID NO: 907144 - DNA, 15 bp, Homo sapiens
gaacttcccagcctc

SEQ ID NO: 907145 - DNA, 15 bp, Homo sapiens
aacttcccagcctcc

SEQ ID NO: 907146 - DNA, 15 bp, Homo sapiens
acttcccagcctcca

SEQ ID NO: 907147 - DNA, 15 bp, Homo sapiens
cttcccagcctccag

SEQ ID NO: 907148 - DNA, 15 bp, Homo sapiens
ttcccagcctccagg

SEQ ID NO: 907149 - DNA, 15 bp, Homo sapiens
tcccagcctccaggt

SEQ ID NO: 907150 - DNA, 15 bp, Homo sapiens
cccagcctccaggtg

SEQ ID NO: 907151 - DNA, 15 bp, Homo sapiens
ccagcctccaggtgt

SEQ ID NO: 907152 - DNA, 15 bp, Homo sapiens
cagcctccaggtgtg

SEQ ID NO: 907153 - DNA, 15 bp, Homo sapiens
agcctccaggtgtgt

SEQ ID NO: 907154 - DNA, 15 bp, Homo sapiens
gcctccaggtgtgta

SEQ ID NO: 907155 - DNA, 15 bp, Homo sapiens
cctccaggtgtgtaa

SEQ ID NO: 907156 - DNA, 15 bp, Homo sapiens
ctccaggtgtgtaag

SEQ ID NO: 907157 - DNA, 15 bp, Homo sapiens
tccaggtgtgtaaga

SEQ ID NO: 907158 - DNA, 15 bp, Homo sapiens
ccaggtgtgtaagaa

SEQ ID NO: 907159 - DNA, 15 bp, Homo sapiens
caggtgtgtaagaaa

SEQ ID NO: 907160 - DNA, 15 bp, Homo sapiens
aggtgtgtaagaaat

SEQ ID NO: 907161 - DNA, 15 bp, Homo sapiens
ggtgtgtaagaaata

SEQ ID NO: 907162 - DNA, 15 bp, Homo sapiens
gtgtgtaagaaataa

SEQ ID NO: 907163 - DNA, 15 bp, Homo sapiens
tgtgtaagaaataaa

SEQ ID NO: 907164 - DNA, 15 bp, Homo sapiens
gtgtaagaaataaat

SEQ ID NO: 907165 - DNA, 15 bp, Homo sapiens
tgtaagaaataaatc

SEQ ID NO: 907166 - DNA, 15 bp, Homo sapiens
gtaagaaataaatct

SEQ ID NO: 907167 - DNA, 15 bp, Homo sapiens
taagaaataaatctc

SEQ ID NO: 907168 - DNA, 15 bp, Homo sapiens
aagaaataaatctct

SEQ ID NO: 907169 - DNA, 15 bp, Homo sapiens
agaaataaatctctg

SEQ ID NO: 907170 - DNA, 15 bp, Homo sapiens
gaaataaatctctgt

SEQ ID NO: 907171 - DNA, 15 bp, Homo sapiens
aaataaatctctgtt

SEQ ID NO: 907172 - DNA, 15 bp, Homo sapiens
aataaatctctgttc

SEQ ID NO: 907173 - DNA, 15 bp, Homo sapiens
ataaatctctgttct

SEQ ID NO: 907174 - DNA, 15 bp, Homo sapiens
taaatctctgttctg

SEQ ID NO: 907175 - DNA, 15 bp, Homo sapiens
aaatctctgttctgt

SEQ ID NO: 907176 - DNA, 15 bp, Homo sapiens
aatctctgttctgta

SEQ ID NO: 907177 - DNA, 15 bp, Homo sapiens
atctctgttctgtat

SEQ ID NO: 907178 - DNA, 15 bp, Homo sapiens
tctctgttctgtata

SEQ ID NO: 907179 - DNA, 15 bp, Homo sapiens
ctctgttctgtataa

SEQ ID NO: 907180 - DNA, 15 bp, Homo sapiens
tctgttctgtataaa

SEQ ID NO: 907181 - DNA, 15 bp, Homo sapiens
ctgttctgtataaat

SEQ ID NO: 907182 - DNA, 15 bp, Homo sapiens
tgttctgtataaatt

SEQ ID NO: 907183 - DNA, 15 bp, Homo sapiens
gttctgtataaatta

SEQ ID NO: 907184 - DNA, 15 bp, Homo sapiens
ttctgtataaattac

SEQ ID NO: 907185 - DNA, 15 bp, Homo sapiens
tctgtataaattact

SEQ ID NO: 907186 - DNA, 15 bp, Homo sapiens
ctgtataaattactc

SEQ ID NO: 907187 - DNA, 15 bp, Homo sapiens
tgtataaattactca

SEQ ID NO: 907188 - DNA, 15 bp, Homo sapiens
gtataaattactcag

SEQ ID NO: 907189 - DNA, 15 bp, Homo sapiens
tataaattactcagt

SEQ ID NO: 907190 - DNA, 15 bp, Homo sapiens
ataaattactcagtc

SEQ ID NO: 907191 - DNA, 15 bp, Homo sapiens
taaattactcagtct

SEQ ID NO: 907192 - DNA, 15 bp, Homo sapiens
aaattactcagtctc

SEQ ID NO: 907193 - DNA, 15 bp, Homo sapiens
aattactcagtctca

SEQ ID NO: 907194 - DNA, 15 bp, Homo sapiens
attactcagtctcag

SEQ ID NO: 907195 - DNA, 15 bp, Homo sapiens
ttactcagtctcagg

SEQ ID NO: 907196 - DNA, 15 bp, Homo sapiens
tactcagtctcaggt

SEQ ID NO: 907197 - DNA, 15 bp, Homo sapiens
actcagtctcaggta

SEQ ID NO: 907198 - DNA, 15 bp, Homo sapiens
ctcagtctcaggtat

SEQ ID NO: 907199 - DNA, 15 bp, Homo sapiens
tcagtctcaggtatt

SEQ ID NO: 907200 - DNA, 15 bp, Homo sapiens
cagtctcaggtattc

SEQ ID NO: 907201 - DNA, 15 bp, Homo sapiens
agtctcaggtattct

SEQ ID NO: 907202 - DNA, 15 bp, Homo sapiens
gtctcaggtattctg

SEQ ID NO: 907203 - DNA, 15 bp, Homo sapiens
tctcaggtattctgt

SEQ ID NO: 907204 - DNA, 15 bp, Homo sapiens
ctcaggtattctgtt

SEQ ID NO: 907205 - DNA, 15 bp, Homo sapiens
tcaggtattctgtta

SEQ ID NO: 907206 - DNA, 15 bp, Homo sapiens
caggtattctgttat

SEQ ID NO: 907207 - DNA, 15 bp, Homo sapiens
aggtattctgttata

SEQ ID NO: 907208 - DNA, 15 bp, Homo sapiens
ggtattctgttatag

SEQ ID NO: 907209 - DNA, 15 bp, Homo sapiens
gtattctgttatagc

SEQ ID NO: 907210 - DNA, 15 bp, Homo sapiens
tattctgttatagca

SEQ ID NO: 907211 - DNA, 15 bp, Homo sapiens
attctgttatagcag

SEQ ID NO: 907212 - DNA, 15 bp, Homo sapiens
ttctgttatagcagc

SEQ ID NO: 907213 - DNA, 15 bp, Homo sapiens
tctgttatagcagca

SEQ ID NO: 907214 - DNA, 15 bp, Homo sapiens
ctgttatagcagcat

SEQ ID NO: 907215 - DNA, 15 bp, Homo sapiens
tgttatagcagcata

SEQ ID NO: 907216 - DNA, 15 bp, Homo sapiens
gttatagcagcataa

SEQ ID NO: 907217 - DNA, 15 bp, Homo sapiens
ttatagcagcataaa

SEQ ID NO: 907218 - DNA, 15 bp, Homo sapiens
tatagcagcataaaa

SEQ ID NO: 907219 - DNA, 15 bp, Homo sapiens
atagcagcataaaat

SEQ ID NO: 907220 - DNA, 15 bp, Homo sapiens
tagcagcataaaatg

SEQ ID NO: 907221 - DNA, 15 bp, Homo sapiens
agcagcataaaatga

SEQ ID NO: 907222 - DNA, 15 bp, Homo sapiens
gcagcataaaatgaa

SEQ ID NO: 907223 - DNA, 15 bp, Homo sapiens
cagcataaaatgaac

SEQ ID NO: 907224 - DNA, 15 bp, Homo sapiens
agcataaaatgaact

SEQ ID NO: 907225 - DNA, 15 bp, Homo sapiens
gcataaaatgaacta

SEQ ID NO: 907226 - DNA, 15 bp, Homo sapiens
cataaaatgaactaa

SEQ ID NO: 907227 - DNA, 15 bp, Homo sapiens
ataaaatgaactaag

SEQ ID NO: 907228 - DNA, 15 bp, Homo sapiens
taaaatgaactaaga

SEQ ID NO: 907229 - DNA, 15 bp, Homo sapiens
aaaatgaactaagac

SEQ ID NO: 907230 - DNA, 15 bp, Homo sapiens
aaatgaactaagaca

SEQ ID NO: 907231 - DNA, 15 bp, Homo sapiens
aatgaactaagacag

SEQ ID NO: 907232 - DNA, 15 bp, Homo sapiens
atgaactaagacaga

SEQ ID NO: 907233 - DNA, 15 bp, Homo sapiens
tgaactaagacagaa

SEQ ID NO: 907234 - DNA, 15 bp, Homo sapiens
gaactaagacagaaa

SEQ ID NO: 907235 - DNA, 15 bp, Homo sapiens
aactaagacagaaaa

SEQ ID NO: 907236 - DNA, 15 bp, Homo sapiens
actaagacagaaaat

SEQ ID NO: 907237 - DNA, 15 bp, Homo sapiens
ctaagacagaaaatc

SEQ ID NO: 907238 - DNA, 15 bp, Homo sapiens
taagacagaaaatca

SEQ ID NO: 907239 - DNA, 15 bp, Homo sapiens
aagacagaaaatcac

SEQ ID NO: 907240 - DNA, 15 bp, Homo sapiens
agacagaaaatcact

SEQ ID NO: 907241 - DNA, 15 bp, Homo sapiens
gacagaaaatcactt

SEQ ID NO: 907242 - DNA, 15 bp, Homo sapiens
acagaaaatcacttc

SEQ ID NO: 907243 - DNA, 15 bp, Homo sapiens
cagaaaatcacttca

SEQ ID NO: 907244 - DNA, 15 bp, Homo sapiens
agaaaatcacttcat

SEQ ID NO: 907245 - DNA, 15 bp, Homo sapiens
gaaaatcacttcata

SEQ ID NO: 907246 - DNA, 15 bp, Homo sapiens
aaaatcacttcatag

SEQ ID NO: 907247 - DNA, 15 bp, Homo sapiens
aaatcacttcataga

SEQ ID NO: 907248 - DNA, 15 bp, Homo sapiens
aatcacttcatagag

SEQ ID NO: 907249 - DNA, 15 bp, Homo sapiens
atcacttcatagagt

SEQ ID NO: 907250 - DNA, 15 bp, Homo sapiens
tcacttcatagagtt

SEQ ID NO: 907251 - DNA, 15 bp, Homo sapiens
cacttcatagagttg

SEQ ID NO: 907252 - DNA, 15 bp, Homo sapiens
acttcatagagttgt

SEQ ID NO: 907253 - DNA, 15 bp, Homo sapiens
cttcatagagttgtt

SEQ ID NO: 907254 - DNA, 15 bp, Homo sapiens
ttcatagagttgttc

SEQ ID NO: 907255 - DNA, 15 bp, Homo sapiens
tcatagagttgttca

SEQ ID NO: 907256 - DNA, 15 bp, Homo sapiens
catagagttgttcat

SEQ ID NO: 907257 - DNA, 15 bp, Homo sapiens
atagagttgttcatg

SEQ ID NO: 907258 - DNA, 15 bp, Homo sapiens
tagagttgttcatgg

SEQ ID NO: 907259 - DNA, 15 bp, Homo sapiens
agagttgttcatgga

SEQ ID NO: 907260 - DNA, 15 bp, Homo sapiens
gagttgttcatggac

SEQ ID NO: 907261 - DNA, 15 bp, Homo sapiens
agttgttcatggact

SEQ ID NO: 907262 - DNA, 15 bp, Homo sapiens
gttgttcatggacta

SEQ ID NO: 907263 - DNA, 15 bp, Homo sapiens
ttgttcatggactat

SEQ ID NO: 907264 - DNA, 15 bp, Homo sapiens
tgttcatggactata

SEQ ID NO: 907265 - DNA, 15 bp, Homo sapiens
gttcatggactatat

SEQ ID NO: 907266 - DNA, 15 bp, Homo sapiens
ttcatggactatatt

SEQ ID NO: 907267 - DNA, 15 bp, Homo sapiens
tcatggactatattt

SEQ ID NO: 907268 - DNA, 15 bp, Homo sapiens
catggactatatttg

SEQ ID NO: 907269 - DNA, 15 bp, Homo sapiens
atggactatatttga

SEQ ID NO: 907270 - DNA, 15 bp, Homo sapiens
tggactatatttgag

SEQ ID NO: 907271 - DNA, 15 bp, Homo sapiens
ggactatatttgaga

SEQ ID NO: 907272 - DNA, 15 bp, Homo sapiens
gactatatttgagat

SEQ ID NO: 907273 - DNA, 15 bp, Homo sapiens
actatatttgagatg

SEQ ID NO: 907274 - DNA, 15 bp, Homo sapiens
ctatatttgagatgt

SEQ ID NO: 907275 - DNA, 15 bp, Homo sapiens
tatatttgagatgtg

SEQ ID NO: 907276 - DNA, 15 bp, Homo sapiens
atatttgagatgtgg

SEQ ID NO: 907277 - DNA, 15 bp, Homo sapiens
tatttgagatgtgga

SEQ ID NO: 907278 - DNA, 15 bp, Homo sapiens
atttgagatgtggat

SEQ ID NO: 907279 - DNA, 15 bp, Homo sapiens
tttgagatgtggata

SEQ ID NO: 907280 - DNA, 15 bp, Homo sapiens
ttgagatgtggatag

SEQ ID NO: 907281 - DNA, 15 bp, Homo sapiens
tgagatgtggataga

SEQ ID NO: 907282 - DNA, 15 bp, Homo sapiens
gagatgtggatagag

SEQ ID NO: 907283 - DNA, 15 bp, Homo sapiens
agatgtggatagaga

SEQ ID NO: 907284 - DNA, 15 bp, Homo sapiens
gatgtggatagagaa

SEQ ID NO: 907285 - DNA, 15 bp, Homo sapiens
atgtggatagagaaa

SEQ ID NO: 907286 - DNA, 15 bp, Homo sapiens
tgtggatagagaaag

SEQ ID NO: 907287 - DNA, 15 bp, Homo sapiens
gtggatagagaaaga

SEQ ID NO: 907288 - DNA, 15 bp, Homo sapiens
tggatagagaaagag

SEQ ID NO: 907289 - DNA, 15 bp, Homo sapiens
ggatagagaaagaga

SEQ ID NO: 907290 - DNA, 15 bp, Homo sapiens
gatagagaaagagac

SEQ ID NO: 907291 - DNA, 15 bp, Homo sapiens
atagagaaagagacg

SEQ ID NO: 907292 - DNA, 15 bp, Homo sapiens
tagagaaagagacga

SEQ ID NO: 907293 - DNA, 15 bp, Homo sapiens
agagaaagagacgat

SEQ ID NO: 907294 - DNA, 15 bp, Homo sapiens
gagaaagagacgatg

SEQ ID NO: 907295 - DNA, 15 bp, Homo sapiens
agaaagagacgatgt

SEQ ID NO: 907296 - DNA, 15 bp, Homo sapiens
gaaagagacgatgtc

SEQ ID NO: 907297 - DNA, 15 bp, Homo sapiens
aaagagacgatgtca

SEQ ID NO: 907298 - DNA, 15 bp, Homo sapiens
aagagacgatgtcaa

SEQ ID NO: 907299 - DNA, 15 bp, Homo sapiens
agagacgatgtcaaa

SEQ ID NO: 907300 - DNA, 15 bp, Homo sapiens
gagacgatgtcaaag

SEQ ID NO: 907301 - DNA, 15 bp, Homo sapiens
agacgatgtcaaaga

SEQ ID NO: 907302 - DNA, 15 bp, Homo sapiens
gacgatgtcaaagat

SEQ ID NO: 907303 - DNA, 15 bp, Homo sapiens
acgatgtcaaagata

SEQ ID NO: 907304 - DNA, 15 bp, Homo sapiens
cgatgtcaaagataa

SEQ ID NO: 907305 - DNA, 15 bp, Homo sapiens
gatgtcaaagataac

SEQ ID NO: 907306 - DNA, 15 bp, Homo sapiens
atgtcaaagataacg

SEQ ID NO: 907307 - DNA, 15 bp, Homo sapiens
tgtcaaagataacgc

SEQ ID NO: 907308 - DNA, 15 bp, Homo sapiens
gtcaaagataacgct

SEQ ID NO: 907309 - DNA, 15 bp, Homo sapiens
tcaaagataacgcta

SEQ ID NO: 907310 - DNA, 15 bp, Homo sapiens
caaagataacgctat

SEQ ID NO: 907311 - DNA, 15 bp, Homo sapiens
aaagataacgctata

SEQ ID NO: 907312 - DNA, 15 bp, Homo sapiens
aagataacgctatat

SEQ ID NO: 907313 - DNA, 15 bp, Homo sapiens
agataacgctatatt

SEQ ID NO: 907314 - DNA, 15 bp, Homo sapiens
gataacgctatattt

SEQ ID NO: 907315 - DNA, 15 bp, Homo sapiens
ataacgctatatttc

SEQ ID NO: 907316 - DNA, 15 bp, Homo sapiens
taacgctatatttct

SEQ ID NO: 907317 - DNA, 15 bp, Homo sapiens
aacgctatatttctg

SEQ ID NO: 907318 - DNA, 15 bp, Homo sapiens
acgctatatttctgg

SEQ ID NO: 907319 - DNA, 15 bp, Homo sapiens
cgctatatttctggt

SEQ ID NO: 907320 - DNA, 15 bp, Homo sapiens
gctatatttctggtt

SEQ ID NO: 907321 - DNA, 15 bp, Homo sapiens
ctatatttctggtta

SEQ ID NO: 907322 - DNA, 15 bp, Homo sapiens
tatatttctggttaa

SEQ ID NO: 907323 - DNA, 15 bp, Homo sapiens
atatttctggttaaa

SEQ ID NO: 907324 - DNA, 15 bp, Homo sapiens
tatttctggttaaac

SEQ ID NO: 907325 - DNA, 15 bp, Homo sapiens
atttctggttaaaca

SEQ ID NO: 907326 - DNA, 15 bp, Homo sapiens
tttctggttaaacaa

SEQ ID NO: 907327 - DNA, 15 bp, Homo sapiens
ttctggttaaacaac

SEQ ID NO: 907328 - DNA, 15 bp, Homo sapiens
tctggttaaacaact

SEQ ID NO: 907329 - DNA, 15 bp, Homo sapiens
ctggttaaacaactg

SEQ ID NO: 907330 - DNA, 15 bp, Homo sapiens
tggttaaacaactgg

SEQ ID NO: 907331 - DNA, 15 bp, Homo sapiens
ggttaaacaactgga

SEQ ID NO: 907332 - DNA, 15 bp, Homo sapiens
gttaaacaactggat

SEQ ID NO: 907333 - DNA, 15 bp, Homo sapiens
ttaaacaactggata

SEQ ID NO: 907334 - DNA, 15 bp, Homo sapiens
taaacaactggatag

SEQ ID NO: 907335 - DNA, 15 bp, Homo sapiens
aaacaactggataga

SEQ ID NO: 907336 - DNA, 15 bp, Homo sapiens
aacaactggatagat

SEQ ID NO: 907337 - DNA, 15 bp, Homo sapiens
acaactggatagatg

SEQ ID NO: 907338 - DNA, 15 bp, Homo sapiens
caactggatagatgg

SEQ ID NO: 907339 - DNA, 15 bp, Homo sapiens
aactggatagatggt

SEQ ID NO: 907340 - DNA, 15 bp, Homo sapiens
actggatagatggtg

SEQ ID NO: 907341 - DNA, 15 bp, Homo sapiens
ctggatagatggtga

SEQ ID NO: 907342 - DNA, 15 bp, Homo sapiens
tggatagatggtgag

SEQ ID NO: 907343 - DNA, 15 bp, Homo sapiens
ggatagatggtgaga

SEQ ID NO: 907344 - DNA, 15 bp, Homo sapiens
gatagatggtgagat

SEQ ID NO: 907345 - DNA, 15 bp, Homo sapiens
atagatggtgagatt

SEQ ID NO: 907346 - DNA, 15 bp, Homo sapiens
tagatggtgagatta

SEQ ID NO: 907347 - DNA, 15 bp, Homo sapiens
agatggtgagattat

SEQ ID NO: 907348 - DNA, 15 bp, Homo sapiens
gatggtgagattatg

SEQ ID NO: 907349 - DNA, 15 bp, Homo sapiens
atggtgagattatgg

SEQ ID NO: 907350 - DNA, 15 bp, Homo sapiens
tggtgagattatgga

SEQ ID NO: 907351 - DNA, 15 bp, Homo sapiens
ggtgagattatggaa

SEQ ID NO: 907352 - DNA, 15 bp, Homo sapiens
gtgagattatggaac

SEQ ID NO: 907353 - DNA, 15 bp, Homo sapiens
tgagattatggaaca

SEQ ID NO: 907354 - DNA, 15 bp, Homo sapiens
gagattatggaacac

SEQ ID NO: 907355 - DNA, 15 bp, Homo sapiens
agattatggaacact

SEQ ID NO: 907356 - DNA, 15 bp, Homo sapiens
gattatggaacactg

SEQ ID NO: 907357 - DNA, 15 bp, Homo sapiens
attatggaacactgg

SEQ ID NO: 907358 - DNA, 15 bp, Homo sapiens
ttatggaacactgga

SEQ ID NO: 907359 - DNA, 15 bp, Homo sapiens
tatggaacactggaa

SEQ ID NO: 907360 - DNA, 15 bp, Homo sapiens
atggaacactggaaa

SEQ ID NO: 907361 - DNA, 15 bp, Homo sapiens
tggaacactggaaaa

SEQ ID NO: 907362 - DNA, 15 bp, Homo sapiens
ggaacactggaaaag

SEQ ID NO: 907363 - DNA, 15 bp, Homo sapiens
gaacactggaaaagg

SEQ ID NO: 907364 - DNA, 15 bp, Homo sapiens
aacactggaaaagga

SEQ ID NO: 907365 - DNA, 15 bp, Homo sapiens
acactggaaaaggac

SEQ ID NO: 907366 - DNA, 15 bp, Homo sapiens
cactggaaaaggact

SEQ ID NO: 907367 - DNA, 15 bp, Homo sapiens
actggaaaaggacta

SEQ ID NO: 907368 - DNA, 15 bp, Homo sapiens
ctggaaaaggactac

SEQ ID NO: 907369 - DNA, 15 bp, Homo sapiens
tggaaaaggactaca

SEQ ID NO: 907370 - DNA, 15 bp, Homo sapiens
ggaaaaggactacag

SEQ ID NO: 907371 - DNA, 15 bp, Homo sapiens
gaaaaggactacagt

SEQ ID NO: 907372 - DNA, 15 bp, Homo sapiens
aaaaggactacagtt

SEQ ID NO: 907373 - DNA, 15 bp, Homo sapiens
aaaggactacagttc

SEQ ID NO: 907374 - DNA, 15 bp, Homo sapiens
aaggactacagttcc

SEQ ID NO: 907375 - DNA, 15 bp, Homo sapiens
aggactacagttccc

SEQ ID NO: 907376 - DNA, 15 bp, Homo sapiens
ggactacagttccct

SEQ ID NO: 907377 - DNA, 15 bp, Homo sapiens
gactacagttccctt

SEQ ID NO: 907378 - DNA, 15 bp, Homo sapiens
actacagttcccttt

SEQ ID NO: 907379 - DNA, 15 bp, Homo sapiens
ctacagttccctttc

SEQ ID NO: 907380 - DNA, 15 bp, Homo sapiens
tacagttccctttca

SEQ ID NO: 907381 - DNA, 15 bp, Homo sapiens
acagttccctttcat

SEQ ID NO: 907382 - DNA, 15 bp, Homo sapiens
cagttccctttcatc

SEQ ID NO: 907383 - DNA, 15 bp, Homo sapiens
agttccctttcatca

SEQ ID NO: 907384 - DNA, 15 bp, Homo sapiens
gttccctttcatcat

SEQ ID NO: 907385 - DNA, 15 bp, Homo sapiens
ttccctttcatcata

SEQ ID NO: 907386 - DNA, 15 bp, Homo sapiens
tccctttcatcataa

SEQ ID NO: 907387 - DNA, 15 bp, Homo sapiens
ccctttcatcataaa

SEQ ID NO: 907388 - DNA, 15 bp, Homo sapiens
cctttcatcataaaa

SEQ ID NO: 907389 - DNA, 15 bp, Homo sapiens
ctttcatcataaaac

SEQ ID NO: 907390 - DNA, 15 bp, Homo sapiens
tttcatcataaaaca

SEQ ID NO: 907391 - DNA, 15 bp, Homo sapiens
ttcatcataaaacat

SEQ ID NO: 907392 - DNA, 15 bp, Homo sapiens
tcatcataaaacatt

SEQ ID NO: 907393 - DNA, 15 bp, Homo sapiens
catcataaaacattt

SEQ ID NO: 907394 - DNA, 15 bp, Homo sapiens
atcataaaacatttt

SEQ ID NO: 907395 - DNA, 15 bp, Homo sapiens
tcataaaacatttta

SEQ ID NO: 907396 - DNA, 15 bp, Homo sapiens
cataaaacattttaa

SEQ ID NO: 907397 - DNA, 15 bp, Homo sapiens
ataaaacattttaaa

SEQ ID NO: 907398 - DNA, 15 bp, Homo sapiens
taaaacattttaaaa

SEQ ID NO: 907399 - DNA, 15 bp, Homo sapiens
aaaacattttaaaat

SEQ ID NO: 907400 - DNA, 15 bp, Homo sapiens
aaacattttaaaatt

SEQ ID NO: 907401 - DNA, 15 bp, Homo sapiens
aacattttaaaatta

SEQ ID NO: 907402 - DNA, 15 bp, Homo sapiens
acattttaaaattat

SEQ ID NO: 907403 - DNA, 15 bp, Homo sapiens
cattttaaaattata

SEQ ID NO: 907404 - DNA, 15 bp, Homo sapiens
attttaaaattatag

SEQ ID NO: 907405 - DNA, 15 bp, Homo sapiens
ttttaaaattatagt

SEQ ID NO: 907406 - DNA, 15 bp, Homo sapiens
tttaaaattatagtg

SEQ ID NO: 907407 - DNA, 15 bp, Homo sapiens
ttaaaattatagtgt

SEQ ID NO: 907408 - DNA, 15 bp, Homo sapiens
taaaattatagtgta

SEQ ID NO: 907409 - DNA, 15 bp, Homo sapiens
aaaattatagtgtat

SEQ ID NO: 907410 - DNA, 15 bp, Homo sapiens
aaattatagtgtatg

SEQ ID NO: 907411 - DNA, 15 bp, Homo sapiens
aattatagtgtatgc

SEQ ID NO: 907412 - DNA, 15 bp, Homo sapiens
attatagtgtatgct

SEQ ID NO: 907413 - DNA, 15 bp, Homo sapiens
ttatagtgtatgctc

SEQ ID NO: 907414 - DNA, 15 bp, Homo sapiens
tatagtgtatgctca

SEQ ID NO: 907415 - DNA, 15 bp, Homo sapiens
atagtgtatgctcac

SEQ ID NO: 907416 - DNA, 15 bp, Homo sapiens
tagtgtatgctcact

SEQ ID NO: 907417 - DNA, 15 bp, Homo sapiens
agtgtatgctcactg

SEQ ID NO: 907418 - DNA, 15 bp, Homo sapiens
gtgtatgctcactgc

SEQ ID NO: 907419 - DNA, 15 bp, Homo sapiens
tgtatgctcactgcc

SEQ ID NO: 907420 - DNA, 15 bp, Homo sapiens
gtatgctcactgcct

SEQ ID NO: 907421 - DNA, 15 bp, Homo sapiens
tatgctcactgcctc

SEQ ID NO: 907422 - DNA, 15 bp, Homo sapiens
atgctcactgcctct

SEQ ID NO: 907423 - DNA, 15 bp, Homo sapiens
tgctcactgcctcta

SEQ ID NO: 907424 - DNA, 15 bp, Homo sapiens
gctcactgcctctat

SEQ ID NO: 907425 - DNA, 15 bp, Homo sapiens
ctcactgcctctatt

SEQ ID NO: 907426 - DNA, 15 bp, Homo sapiens
tcactgcctctattt

SEQ ID NO: 907427 - DNA, 15 bp, Homo sapiens
cactgcctctatttc

SEQ ID NO: 907428 - DNA, 15 bp, Homo sapiens
actgcctctatttca

SEQ ID NO: 907429 - DNA, 15 bp, Homo sapiens
ctgcctctatttcat

SEQ ID NO: 907430 - DNA, 15 bp, Homo sapiens
tgcctctatttcata

SEQ ID NO: 907431 - DNA, 15 bp, Homo sapiens
gcctctatttcatat

SEQ ID NO: 907432 - DNA, 15 bp, Homo sapiens
cctctatttcatata

SEQ ID NO: 907433 - DNA, 15 bp, Homo sapiens
ctctatttcatatat

SEQ ID NO: 907434 - DNA, 15 bp, Homo sapiens
tctatttcatatatg

SEQ ID NO: 907435 - DNA, 15 bp, Homo sapiens
ctatttcatatatgt

SEQ ID NO: 907436 - DNA, 15 bp, Homo sapiens
tatttcatatatgtg

SEQ ID NO: 907437 - DNA, 15 bp, Homo sapiens
atttcatatatgtgt

SEQ ID NO: 907438 - DNA, 15 bp, Homo sapiens
tttcatatatgtgtg

SEQ ID NO: 907439 - DNA, 15 bp, Homo sapiens
ttcatatatgtgtgt

SEQ ID NO: 907440 - DNA, 15 bp, Homo sapiens
tcatatatgtgtgtg

SEQ ID NO: 907441 - DNA, 15 bp, Homo sapiens
catatatgtgtgtgt

SEQ ID NO: 907442 - DNA, 15 bp, Homo sapiens
atatatgtgtgtgta

SEQ ID NO: 907443 - DNA, 15 bp, Homo sapiens
tatatgtgtgtgtat

SEQ ID NO: 907444 - DNA, 15 bp, Homo sapiens
atatgtgtgtgtatg

SEQ ID NO: 907445 - DNA, 15 bp, Homo sapiens
tatgtgtgtgtatgt

SEQ ID NO: 907446 - DNA, 15 bp, Homo sapiens
atgtgtgtgtatgtg

SEQ ID NO: 907447 - DNA, 15 bp, Homo sapiens
tgtgtgtgtatgtgt

SEQ ID NO: 907448 - DNA, 15 bp, Homo sapiens
gtgtgtgtatgtgta

SEQ ID NO: 907449 - DNA, 15 bp, Homo sapiens
tgtgtgtatgtgtat

SEQ ID NO: 907450 - DNA, 15 bp, Homo sapiens
gtgtgtatgtgtatg

SEQ ID NO: 907451 - DNA, 15 bp, Homo sapiens
tgtgtatgtgtatgt

SEQ ID NO: 907452 - DNA, 15 bp, Homo sapiens
gtgtatgtgtatgta

SEQ ID NO: 907453 - DNA, 15 bp, Homo sapiens
tgtatgtgtatgtat

SEQ ID NO: 907454 - DNA, 15 bp, Homo sapiens
gtatgtgtatgtatg

SEQ ID NO: 907455 - DNA, 15 bp, Homo sapiens
tatgtgtatgtatgt

SEQ ID NO: 907456 - DNA, 15 bp, Homo sapiens
atgtgtatgtatgta

SEQ ID NO: 907457 - DNA, 15 bp, Homo sapiens
tgtgtatgtatgtat

SEQ ID NO: 907458 - DNA, 15 bp, Homo sapiens
gtgtatgtatgtatg

SEQ ID NO: 907459 - DNA, 15 bp, Homo sapiens
tgtatgtatgtatgt

SEQ ID NO: 907460 - DNA, 15 bp, Homo sapiens
gtatgtatgtatgtg

SEQ ID NO: 907461 - DNA, 15 bp, Homo sapiens
tatgtatgtatgtgt

SEQ ID NO: 907462 - DNA, 15 bp, Homo sapiens
atgtatgtatgtgtg

SEQ ID NO: 907463 - DNA, 15 bp, Homo sapiens
tgtatgtatgtgtgt

SEQ ID NO: 907464 - DNA, 15 bp, Homo sapiens
gtatgtatgtgtgta

SEQ ID NO: 907465 - DNA, 15 bp, Homo sapiens
tatgtatgtgtgtat

SEQ ID NO: 907466 - DNA, 15 bp, Homo sapiens
atgtatgtgtgtatg

SEQ ID NO: 907467 - DNA, 15 bp, Homo sapiens
tgtatgtgtgtatgt

SEQ ID NO: 907468 - DNA, 15 bp, Homo sapiens
gtatgtgtgtatgtg

SEQ ID NO: 907469 - DNA, 15 bp, Homo sapiens
tatgtgtgtatgtgt

SEQ ID NO: 907470 - DNA, 15 bp, Homo sapiens
atgtgtgtatgtgta

SEQ ID NO: 907471 - DNA, 15 bp, Homo sapiens
tgtgtgtatgtgtac

SEQ ID NO: 907472 - DNA, 15 bp, Homo sapiens
gtgtgtatgtgtaca

SEQ ID NO: 907473 - DNA, 15 bp, Homo sapiens
tgtgtatgtgtacat

SEQ ID NO: 907474 - DNA, 15 bp, Homo sapiens
gtgtatgtgtacatg

SEQ ID NO: 907475 - DNA, 15 bp, Homo sapiens
tgtatgtgtacatgt

SEQ ID NO: 907476 - DNA, 15 bp, Homo sapiens
gtatgtgtacatgta

SEQ ID NO: 907477 - DNA, 15 bp, Homo sapiens
tatgtgtacatgtat

SEQ ID NO: 907478 - DNA, 15 bp, Homo sapiens
atgtgtacatgtata

SEQ ID NO: 907479 - DNA, 15 bp, Homo sapiens
tgtgtacatgtatat

SEQ ID NO: 907480 - DNA, 15 bp, Homo sapiens
gtgtacatgtatatt

SEQ ID NO: 907481 - DNA, 15 bp, Homo sapiens
tgtacatgtatattc

SEQ ID NO: 907482 - DNA, 15 bp, Homo sapiens
gtacatgtatattct

SEQ ID NO: 907483 - DNA, 15 bp, Homo sapiens
tacatgtatattctt

SEQ ID NO: 907484 - DNA, 15 bp, Homo sapiens
acatgtatattcttg

SEQ ID NO: 907485 - DNA, 15 bp, Homo sapiens
catgtatattcttga

SEQ ID NO: 907486 - DNA, 15 bp, Homo sapiens
atgtatattcttgaa

SEQ ID NO: 907487 - DNA, 15 bp, Homo sapiens
tgtatattcttgaaa

SEQ ID NO: 907488 - DNA, 15 bp, Homo sapiens
gtatattcttgaaat

SEQ ID NO: 907489 - DNA, 15 bp, Homo sapiens
tatattcttgaaatc

SEQ ID NO: 907490 - DNA, 15 bp, Homo sapiens
atattcttgaaatcc

SEQ ID NO: 907491 - DNA, 15 bp, Homo sapiens
tattcttgaaatcct

SEQ ID NO: 907492 - DNA, 15 bp, Homo sapiens
attcttgaaatcctc

SEQ ID NO: 907493 - DNA, 15 bp, Homo sapiens
ttcttgaaatcctct

SEQ ID NO: 907494 - DNA, 15 bp, Homo sapiens
tcttgaaatcctctc

SEQ ID NO: 907495 - DNA, 15 bp, Homo sapiens
cttgaaatcctctct

SEQ ID NO: 907496 - DNA, 15 bp, Homo sapiens
ttgaaatcctctctt

SEQ ID NO: 907497 - DNA, 15 bp, Homo sapiens
tgaaatcctctcttt

SEQ ID NO: 907498 - DNA, 15 bp, Homo sapiens
gaaatcctctcttta

SEQ ID NO: 907499 - DNA, 15 bp, Homo sapiens
aaatcctctctttac

SEQ ID NO: 907500 - DNA, 15 bp, Homo sapiens
aatcctctctttact

SEQ ID NO: 907501 - DNA, 15 bp, Homo sapiens
atcctctctttactt

SEQ ID NO: 907502 - DNA, 15 bp, Homo sapiens
tcctctctttacttg

SEQ ID NO: 907503 - DNA, 15 bp, Homo sapiens
cctctctttacttga

SEQ ID NO: 907504 - DNA, 15 bp, Homo sapiens
ctctctttacttgac

SEQ ID NO: 907505 - DNA, 15 bp, Homo sapiens
tctctttacttgact

SEQ ID NO: 907506 - DNA, 15 bp, Homo sapiens
ctctttacttgactt

SEQ ID NO: 907507 - DNA, 15 bp, Homo sapiens
tctttacttgacttg

SEQ ID NO: 907508 - DNA, 15 bp, Homo sapiens
ctttacttgacttga

SEQ ID NO: 907509 - DNA, 15 bp, Homo sapiens
tttacttgacttgaa

SEQ ID NO: 907510 - DNA, 15 bp, Homo sapiens
ttacttgacttgaat

SEQ ID NO: 907511 - DNA, 15 bp, Homo sapiens
tacttgacttgaatt

SEQ ID NO: 907512 - DNA, 15 bp, Homo sapiens
acttgacttgaatta

SEQ ID NO: 907513 - DNA, 15 bp, Homo sapiens
cttgacttgaattat

SEQ ID NO: 907514 - DNA, 15 bp, Homo sapiens
ttgacttgaattatg

SEQ ID NO: 907515 - DNA, 15 bp, Homo sapiens
tgacttgaattatgt

SEQ ID NO: 907516 - DNA, 15 bp, Homo sapiens
gacttgaattatgtt

SEQ ID NO: 907517 - DNA, 15 bp, Homo sapiens
acttgaattatgttt

SEQ ID NO: 907518 - DNA, 15 bp, Homo sapiens
cttgaattatgttta

SEQ ID NO: 907519 - DNA, 15 bp, Homo sapiens
ttgaattatgtttaa

SEQ ID NO: 907520 - DNA, 15 bp, Homo sapiens
tgaattatgtttaac

SEQ ID NO: 907521 - DNA, 15 bp, Homo sapiens
gaattatgtttaact

SEQ ID NO: 907522 - DNA, 15 bp, Homo sapiens
aattatgtttaacta

SEQ ID NO: 907523 - DNA, 15 bp, Homo sapiens
attatgtttaactat

SEQ ID NO: 907524 - DNA, 15 bp, Homo sapiens
ttatgtttaactatt

SEQ ID NO: 907525 - DNA, 15 bp, Homo sapiens
tatgtttaactattt

SEQ ID NO: 907526 - DNA, 15 bp, Homo sapiens
atgtttaactattta

SEQ ID NO: 907527 - DNA, 15 bp, Homo sapiens
tgtttaactatttaa

SEQ ID NO: 907528 - DNA, 15 bp, Homo sapiens
gtttaactatttaac

SEQ ID NO: 907529 - DNA, 15 bp, Homo sapiens
tttaactatttaact

SEQ ID NO: 907530 - DNA, 15 bp, Homo sapiens
ttaactatttaactt

SEQ ID NO: 907531 - DNA, 15 bp, Homo sapiens
taactatttaacttc

SEQ ID NO: 907532 - DNA, 15 bp, Homo sapiens
aactatttaacttcc

SEQ ID NO: 907533 - DNA, 15 bp, Homo sapiens
actatttaacttccc

SEQ ID NO: 907534 - DNA, 15 bp, Homo sapiens
ctatttaacttccca

SEQ ID NO: 907535 - DNA, 15 bp, Homo sapiens
tatttaacttcccag

SEQ ID NO: 907536 - DNA, 15 bp, Homo sapiens
atttaacttcccagg

SEQ ID NO: 907537 - DNA, 15 bp, Homo sapiens
tttaacttcccaggt

SEQ ID NO: 907538 - DNA, 15 bp, Homo sapiens
ttaacttcccaggtt

SEQ ID NO: 907539 - DNA, 15 bp, Homo sapiens
taacttcccaggttc

SEQ ID NO: 907540 - DNA, 15 bp, Homo sapiens
aacttcccaggttct

SEQ ID NO: 907541 - DNA, 15 bp, Homo sapiens
acttcccaggttctc

SEQ ID NO: 907542 - DNA, 15 bp, Homo sapiens
cttcccaggttctct

SEQ ID NO: 907543 - DNA, 15 bp, Homo sapiens
ttcccaggttctctc

SEQ ID NO: 907544 - DNA, 15 bp, Homo sapiens
tcccaggttctctcc

SEQ ID NO: 907545 - DNA, 15 bp, Homo sapiens
cccaggttctctcct

SEQ ID NO: 907546 - DNA, 15 bp, Homo sapiens
ccaggttctctccta

SEQ ID NO: 907547 - DNA, 15 bp, Homo sapiens
caggttctctcctac

SEQ ID NO: 907548 - DNA, 15 bp, Homo sapiens
aggttctctcctact

SEQ ID NO: 907549 - DNA, 15 bp, Homo sapiens
ggttctctcctactt

SEQ ID NO: 907550 - DNA, 15 bp, Homo sapiens
gttctctcctacttt

SEQ ID NO: 907551 - DNA, 15 bp, Homo sapiens
ttctctcctacttta

SEQ ID NO: 907552 - DNA, 15 bp, Homo sapiens
tctctcctactttat

SEQ ID NO: 907553 - DNA, 15 bp, Homo sapiens
ctctcctactttata

SEQ ID NO: 907554 - DNA, 15 bp, Homo sapiens
tctcctactttatag

SEQ ID NO: 907555 - DNA, 15 bp, Homo sapiens
ctcctactttatagt

SEQ ID NO: 907556 - DNA, 15 bp, Homo sapiens
tcctactttatagtt

SEQ ID NO: 907557 - DNA, 15 bp, Homo sapiens
cctactttatagttc

SEQ ID NO: 907558 - DNA, 15 bp, Homo sapiens
ctactttatagttct

SEQ ID NO: 907559 - DNA, 15 bp, Homo sapiens
tactttatagttctt

SEQ ID NO: 907560 - DNA, 15 bp, Homo sapiens
actttatagttcttt

SEQ ID NO: 907561 - DNA, 15 bp, Homo sapiens
ctttatagttctttt

SEQ ID NO: 907562 - DNA, 15 bp, Homo sapiens
tttatagttcttttt

SEQ ID NO: 907563 - DNA, 15 bp, Homo sapiens
ttatagttcttttta

SEQ ID NO: 907564 - DNA, 15 bp, Homo sapiens
tatagttctttttat

SEQ ID NO: 907565 - DNA, 15 bp, Homo sapiens
atagttctttttatc

SEQ ID NO: 907566 - DNA, 15 bp, Homo sapiens
tagttctttttatct

SEQ ID NO: 907567 - DNA, 15 bp, Homo sapiens
agttctttttatctt

SEQ ID NO: 907568 - DNA, 15 bp, Homo sapiens
gttctttttatcttt

SEQ ID NO: 907569 - DNA, 15 bp, Homo sapiens
ttctttttatctttt

SEQ ID NO: 907570 - DNA, 15 bp, Homo sapiens
tctttttatcttttc

SEQ ID NO: 907571 - DNA, 15 bp, Homo sapiens
ctttttatcttttct

SEQ ID NO: 907572 - DNA, 15 bp, Homo sapiens
tttttatcttttctc

SEQ ID NO: 907573 - DNA, 15 bp, Homo sapiens
ttttatcttttctcc

SEQ ID NO: 907574 - DNA, 15 bp, Homo sapiens
tttatcttttctcct

SEQ ID NO: 907575 - DNA, 15 bp, Homo sapiens
ttatcttttctcctt

SEQ ID NO: 907576 - DNA, 15 bp, Homo sapiens
tatcttttctccttt

SEQ ID NO: 907577 - DNA, 15 bp, Homo sapiens
atcttttctcctttc

SEQ ID NO: 907578 - DNA, 15 bp, Homo sapiens
tcttttctcctttcc

SEQ ID NO: 907579 - DNA, 15 bp, Homo sapiens
cttttctcctttcct

SEQ ID NO: 907580 - DNA, 15 bp, Homo sapiens
ttttctcctttcctg

SEQ ID NO: 907581 - DNA, 15 bp, Homo sapiens
tttctcctttcctgg

SEQ ID NO: 907582 - DNA, 15 bp, Homo sapiens
ttctcctttcctggg

SEQ ID NO: 907583 - DNA, 15 bp, Homo sapiens
tctcctttcctgggt

SEQ ID NO: 907584 - DNA, 15 bp, Homo sapiens
ctcctttcctgggtt

SEQ ID NO: 907585 - DNA, 15 bp, Homo sapiens
tcctttcctgggttc

SEQ ID NO: 907586 - DNA, 15 bp, Homo sapiens
cctttcctgggttct

SEQ ID NO: 907587 - DNA, 15 bp, Homo sapiens
ctttcctgggttctt

SEQ ID NO: 907588 - DNA, 15 bp, Homo sapiens
tttcctgggttcttt

SEQ ID NO: 907589 - DNA, 15 bp, Homo sapiens
ttcctgggttcttta

SEQ ID NO: 907590 - DNA, 15 bp, Homo sapiens
tcctgggttctttat

SEQ ID NO: 907591 - DNA, 15 bp, Homo sapiens
cctgggttctttatc

SEQ ID NO: 907592 - DNA, 15 bp, Homo sapiens
ctgggttctttatct

SEQ ID NO: 907593 - DNA, 15 bp, Homo sapiens
tgggttctttatctt

SEQ ID NO: 907594 - DNA, 15 bp, Homo sapiens
gggttctttatcttc

SEQ ID NO: 907595 - DNA, 15 bp, Homo sapiens
ggttctttatcttct

SEQ ID NO: 907596 - DNA, 15 bp, Homo sapiens
gttctttatcttctc

SEQ ID NO: 907597 - DNA, 15 bp, Homo sapiens
ttctttatcttctct

SEQ ID NO: 907598 - DNA, 15 bp, Homo sapiens
tctttatcttctctt

SEQ ID NO: 907599 - DNA, 15 bp, Homo sapiens
ctttatcttctctta

SEQ ID NO: 907600 - DNA, 15 bp, Homo sapiens
tttatcttctcttac

SEQ ID NO: 907601 - DNA, 15 bp, Homo sapiens
ttatcttctcttaca

SEQ ID NO: 907602 - DNA, 15 bp, Homo sapiens
tatcttctcttacac

SEQ ID NO: 907603 - DNA, 15 bp, Homo sapiens
atcttctcttacact

SEQ ID NO: 907604 - DNA, 15 bp, Homo sapiens
tcttctcttacactt

SEQ ID NO: 907605 - DNA, 15 bp, Homo sapiens
cttctcttacacttt

SEQ ID NO: 907606 - DNA, 15 bp, Homo sapiens
ttctcttacacttta

SEQ ID NO: 907607 - DNA, 15 bp, Homo sapiens
tctcttacactttag

SEQ ID NO: 907608 - DNA, 15 bp, Homo sapiens
ctcttacactttaga

SEQ ID NO: 907609 - DNA, 15 bp, Homo sapiens
tcttacactttagag

SEQ ID NO: 907610 - DNA, 15 bp, Homo sapiens
cttacactttagagc

SEQ ID NO: 907611 - DNA, 15 bp, Homo sapiens
ttacactttagagct

SEQ ID NO: 907612 - DNA, 15 bp, Homo sapiens
tacactttagagctt

SEQ ID NO: 907613 - DNA, 15 bp, Homo sapiens
acactttagagcttt

SEQ ID NO: 907614 - DNA, 15 bp, Homo sapiens
cactttagagctttt

SEQ ID NO: 907615 - DNA, 15 bp, Homo sapiens
actttagagcttttt

SEQ ID NO: 907616 - DNA, 15 bp, Homo sapiens
ctttagagctttttt

SEQ ID NO: 907617 - DNA, 15 bp, Homo sapiens
tttagagcttttttc

SEQ ID NO: 907618 - DNA, 15 bp, Homo sapiens
ttagagcttttttca

SEQ ID NO: 907619 - DNA, 15 bp, Homo sapiens
tagagcttttttcag

SEQ ID NO: 907620 - DNA, 15 bp, Homo sapiens
agagcttttttcagt

SEQ ID NO: 907621 - DNA, 15 bp, Homo sapiens
gagcttttttcagta

SEQ ID NO: 907622 - DNA, 15 bp, Homo sapiens
agcttttttcagtaa

SEQ ID NO: 907623 - DNA, 15 bp, Homo sapiens
gcttttttcagtaat

SEQ ID NO: 907624 - DNA, 15 bp, Homo sapiens
cttttttcagtaatt

SEQ ID NO: 907625 - DNA, 15 bp, Homo sapiens
ttttttcagtaattg

SEQ ID NO: 907626 - DNA, 15 bp, Homo sapiens
tttttcagtaattgg

SEQ ID NO: 907627 - DNA, 15 bp, Homo sapiens
ttttcagtaattgga

SEQ ID NO: 907628 - DNA, 15 bp, Homo sapiens
tttcagtaattggaa

SEQ ID NO: 907629 - DNA, 15 bp, Homo sapiens
ttcagtaattggaaa

SEQ ID NO: 907630 - DNA, 15 bp, Homo sapiens
tcagtaattggaaat

SEQ ID NO: 907631 - DNA, 15 bp, Homo sapiens
cagtaattggaaata

SEQ ID NO: 907632 - DNA, 15 bp, Homo sapiens
agtaattggaaatat

SEQ ID NO: 907633 - DNA, 15 bp, Homo sapiens
gtaattggaaatatc

SEQ ID NO: 907634 - DNA, 15 bp, Homo sapiens
taattggaaatatca

SEQ ID NO: 907635 - DNA, 15 bp, Homo sapiens
aattggaaatatcat

SEQ ID NO: 907636 - DNA, 15 bp, Homo sapiens
attggaaatatcatc

SEQ ID NO: 907637 - DNA, 15 bp, Homo sapiens
ttggaaatatcatct

SEQ ID NO: 907638 - DNA, 15 bp, Homo sapiens
tggaaatatcatcta

SEQ ID NO: 907639 - DNA, 15 bp, Homo sapiens
ggaaatatcatctat

SEQ ID NO: 907640 - DNA, 15 bp, Homo sapiens
gaaatatcatctatc

SEQ ID NO: 907641 - DNA, 15 bp, Homo sapiens
aaatatcatctatcc

SEQ ID NO: 907642 - DNA, 15 bp, Homo sapiens
aatatcatctatcca

SEQ ID NO: 907643 - DNA, 15 bp, Homo sapiens
atatcatctatccac

SEQ ID NO: 907644 - DNA, 15 bp, Homo sapiens
tatcatctatccaca

SEQ ID NO: 907645 - DNA, 15 bp, Homo sapiens
atcatctatccacac

SEQ ID NO: 907646 - DNA, 15 bp, Homo sapiens
tcatctatccacact

SEQ ID NO: 907647 - DNA, 15 bp, Homo sapiens
catctatccacactt

SEQ ID NO: 907648 - DNA, 15 bp, Homo sapiens
atctatccacactta

SEQ ID NO: 907649 - DNA, 15 bp, Homo sapiens
tctatccacacttaa

SEQ ID NO: 907650 - DNA, 15 bp, Homo sapiens
ctatccacacttaaa

SEQ ID NO: 907651 - DNA, 15 bp, Homo sapiens
tatccacacttaaaa

SEQ ID NO: 907652 - DNA, 15 bp, Homo sapiens
atccacacttaaaac

SEQ ID NO: 907653 - DNA, 15 bp, Homo sapiens
tccacacttaaaacc

SEQ ID NO: 907654 - DNA, 15 bp, Homo sapiens
ccacacttaaaaccg

SEQ ID NO: 907655 - DNA, 15 bp, Homo sapiens
cacacttaaaaccga

SEQ ID NO: 907656 - DNA, 15 bp, Homo sapiens
acacttaaaaccgaa

SEQ ID NO: 907657 - DNA, 15 bp, Homo sapiens
cacttaaaaccgaag

SEQ ID NO: 907658 - DNA, 15 bp, Homo sapiens
acttaaaaccgaagc

SEQ ID NO: 907659 - DNA, 15 bp, Homo sapiens
cttaaaaccgaagcc

SEQ ID NO: 907660 - DNA, 15 bp, Homo sapiens
ttaaaaccgaagcca

SEQ ID NO: 907661 - DNA, 15 bp, Homo sapiens
taaaaccgaagccat

SEQ ID NO: 907662 - DNA, 15 bp, Homo sapiens
aaaaccgaagccatc

SEQ ID NO: 907663 - DNA, 15 bp, Homo sapiens
aaaccgaagccatct

SEQ ID NO: 907664 - DNA, 15 bp, Homo sapiens
aaccgaagccatctc

SEQ ID NO: 907665 - DNA, 15 bp, Homo sapiens
accgaagccatctct

SEQ ID NO: 907666 - DNA, 15 bp, Homo sapiens
ccgaagccatctctc

SEQ ID NO: 907667 - DNA, 15 bp, Homo sapiens
cgaagccatctctcc

SEQ ID NO: 907668 - DNA, 15 bp, Homo sapiens
gaagccatctctcca

SEQ ID NO: 907669 - DNA, 15 bp, Homo sapiens
aagccatctctccag

SEQ ID NO: 907670 - DNA, 15 bp, Homo sapiens
agccatctctccagc

SEQ ID NO: 907671 - DNA, 15 bp, Homo sapiens
gccatctctccagct

SEQ ID NO: 907672 - DNA, 15 bp, Homo sapiens
ccatctctccagctg

SEQ ID NO: 907673 - DNA, 15 bp, Homo sapiens
catctctccagctgc

SEQ ID NO: 907674 - DNA, 15 bp, Homo sapiens
atctctccagctgca

SEQ ID NO: 907675 - DNA, 15 bp, Homo sapiens
tctctccagctgcaa

SEQ ID NO: 907676 - DNA, 15 bp, Homo sapiens
ctctccagctgcaac

SEQ ID NO: 907677 - DNA, 15 bp, Homo sapiens
tctccagctgcaacc

SEQ ID NO: 907678 - DNA, 15 bp, Homo sapiens
ctccagctgcaacct

SEQ ID NO: 907679 - DNA, 15 bp, Homo sapiens
tccagctgcaacctt

SEQ ID NO: 907680 - DNA, 15 bp, Homo sapiens
ccagctgcaaccttg

SEQ ID NO: 907681 - DNA, 15 bp, Homo sapiens
cagctgcaaccttgc

SEQ ID NO: 907682 - DNA, 15 bp, Homo sapiens
agctgcaaccttgct

SEQ ID NO: 907683 - DNA, 15 bp, Homo sapiens
gctgcaaccttgctc

SEQ ID NO: 907684 - DNA, 15 bp, Homo sapiens
ctgcaaccttgctct

SEQ ID NO: 907685 - DNA, 15 bp, Homo sapiens
tgcaaccttgctctt

SEQ ID NO: 907686 - DNA, 15 bp, Homo sapiens
gcaaccttgctcttc

SEQ ID NO: 907687 - DNA, 15 bp, Homo sapiens
caaccttgctcttcc

SEQ ID NO: 907688 - DNA, 15 bp, Homo sapiens
aaccttgctcttcca

SEQ ID NO: 907689 - DNA, 15 bp, Homo sapiens
accttgctcttccaa

SEQ ID NO: 907690 - DNA, 15 bp, Homo sapiens
ccttgctcttccaac

SEQ ID NO: 907691 - DNA, 15 bp, Homo sapiens
cttgctcttccaacc

SEQ ID NO: 907692 - DNA, 15 bp, Homo sapiens
ttgctcttccaaccc

SEQ ID NO: 907693 - DNA, 15 bp, Homo sapiens
tgctcttccaaccca

SEQ ID NO: 907694 - DNA, 15 bp, Homo sapiens
gctcttccaacccaa

SEQ ID NO: 907695 - DNA, 15 bp, Homo sapiens
ctcttccaacccaag

SEQ ID NO: 907696 - DNA, 15 bp, Homo sapiens
tcttccaacccaagt

SEQ ID NO: 907697 - DNA, 15 bp, Homo sapiens
cttccaacccaagtc

SEQ ID NO: 907698 - DNA, 15 bp, Homo sapiens
ttccaacccaagtcc

SEQ ID NO: 907699 - DNA, 15 bp, Homo sapiens
tccaacccaagtcct

SEQ ID NO: 907700 - DNA, 15 bp, Homo sapiens
ccaacccaagtcctg

SEQ ID NO: 907701 - DNA, 15 bp, Homo sapiens
caacccaagtcctgt

SEQ ID NO: 907702 - DNA, 15 bp, Homo sapiens
aacccaagtcctgtg

SEQ ID NO: 907703 - DNA, 15 bp, Homo sapiens
acccaagtcctgtgt

SEQ ID NO: 907704 - DNA, 15 bp, Homo sapiens
cccaagtcctgtgtt

SEQ ID NO: 907705 - DNA, 15 bp, Homo sapiens
ccaagtcctgtgttg

SEQ ID NO: 907706 - DNA, 15 bp, Homo sapiens
caagtcctgtgttgt

SEQ ID NO: 907707 - DNA, 15 bp, Homo sapiens
aagtcctgtgttgtc

SEQ ID NO: 907708 - DNA, 15 bp, Homo sapiens
agtcctgtgttgtct

SEQ ID NO: 907709 - DNA, 15 bp, Homo sapiens
gtcctgtgttgtcta

SEQ ID NO: 907710 - DNA, 15 bp, Homo sapiens
tcctgtgttgtctac

SEQ ID NO: 907711 - DNA, 15 bp, Homo sapiens
cctgtgttgtctact

SEQ ID NO: 907712 - DNA, 15 bp, Homo sapiens
ctgtgttgtctacta

SEQ ID NO: 907713 - DNA, 15 bp, Homo sapiens
tgtgttgtctactac

SEQ ID NO: 907714 - DNA, 15 bp, Homo sapiens
gtgttgtctactacc

SEQ ID NO: 907715 - DNA, 15 bp, Homo sapiens
tgttgtctactacct

SEQ ID NO: 907716 - DNA, 15 bp, Homo sapiens
gttgtctactaccta

SEQ ID NO: 907717 - DNA, 15 bp, Homo sapiens
ttgtctactacctat

SEQ ID NO: 907718 - DNA, 15 bp, Homo sapiens
tgtctactacctatg

SEQ ID NO: 907719 - DNA, 15 bp, Homo sapiens
gtctactacctatgt

SEQ ID NO: 907720 - DNA, 15 bp, Homo sapiens
tctactacctatgtt

SEQ ID NO: 907721 - DNA, 15 bp, Homo sapiens
ctactacctatgttg

SEQ ID NO: 907722 - DNA, 15 bp, Homo sapiens
tactacctatgttga

SEQ ID NO: 907723 - DNA, 15 bp, Homo sapiens
actacctatgttgac

SEQ ID NO: 907724 - DNA, 15 bp, Homo sapiens
ctacctatgttgaca

SEQ ID NO: 907725 - DNA, 15 bp, Homo sapiens
tacctatgttgacat

SEQ ID NO: 907726 - DNA, 15 bp, Homo sapiens
acctatgttgacatt

SEQ ID NO: 907727 - DNA, 15 bp, Homo sapiens
cctatgttgacattt

SEQ ID NO: 907728 - DNA, 15 bp, Homo sapiens
ctatgttgacatttc

SEQ ID NO: 907729 - DNA, 15 bp, Homo sapiens
tatgttgacatttcc

SEQ ID NO: 907730 - DNA, 15 bp, Homo sapiens
atgttgacatttccc

SEQ ID NO: 907731 - DNA, 15 bp, Homo sapiens
tgttgacatttccct

SEQ ID NO: 907732 - DNA, 15 bp, Homo sapiens
gttgacatttccctg

SEQ ID NO: 907733 - DNA, 15 bp, Homo sapiens
ttgacatttccctgt

SEQ ID NO: 907734 - DNA, 15 bp, Homo sapiens
tgacatttccctgtg

SEQ ID NO: 907735 - DNA, 15 bp, Homo sapiens
gacatttccctgtgg

SEQ ID NO: 907736 - DNA, 15 bp, Homo sapiens
acatttccctgtggc

SEQ ID NO: 907737 - DNA, 15 bp, Homo sapiens
catttccctgtggct

SEQ ID NO: 907738 - DNA, 15 bp, Homo sapiens
atttccctgtggctg

SEQ ID NO: 907739 - DNA, 15 bp, Homo sapiens
tttccctgtggctgt

SEQ ID NO: 907740 - DNA, 15 bp, Homo sapiens
ttccctgtggctgtc

SEQ ID NO: 907741 - DNA, 15 bp, Homo sapiens
tccctgtggctgtca

SEQ ID NO: 907742 - DNA, 15 bp, Homo sapiens
ccctgtggctgtcat

SEQ ID NO: 907743 - DNA, 15 bp, Homo sapiens
cctgtggctgtcatc

SEQ ID NO: 907744 - DNA, 15 bp, Homo sapiens
ctgtggctgtcatct

SEQ ID NO: 907745 - DNA, 15 bp, Homo sapiens
tgtggctgtcatctt

SEQ ID NO: 907746 - DNA, 15 bp, Homo sapiens
gtggctgtcatcttt

SEQ ID NO: 907747 - DNA, 15 bp, Homo sapiens
tggctgtcatcttta

SEQ ID NO: 907748 - DNA, 15 bp, Homo sapiens
ggctgtcatctttag

SEQ ID NO: 907749 - DNA, 15 bp, Homo sapiens
gctgtcatctttaga

SEQ ID NO: 907750 - DNA, 15 bp, Homo sapiens
ctgtcatctttagac

SEQ ID NO: 907751 - DNA, 15 bp, Homo sapiens
tgtcatctttagact

SEQ ID NO: 907752 - DNA, 15 bp, Homo sapiens
gtcatctttagactt

SEQ ID NO: 907753 - DNA, 15 bp, Homo sapiens
tcatctttagacttc

SEQ ID NO: 907754 - DNA, 15 bp, Homo sapiens
catctttagacttca

SEQ ID NO: 907755 - DNA, 15 bp, Homo sapiens
atctttagacttcaa

SEQ ID NO: 907756 - DNA, 15 bp, Homo sapiens
tctttagacttcaaa

SEQ ID NO: 907757 - DNA, 15 bp, Homo sapiens
ctttagacttcaaaa

SEQ ID NO: 907758 - DNA, 15 bp, Homo sapiens
tttagacttcaaaat

SEQ ID NO: 907759 - DNA, 15 bp, Homo sapiens
ttagacttcaaaatt

SEQ ID NO: 907760 - DNA, 15 bp, Homo sapiens
tagacttcaaaattc

SEQ ID NO: 907761 - DNA, 15 bp, Homo sapiens
agacttcaaaattca

SEQ ID NO: 907762 - DNA, 15 bp, Homo sapiens
gacttcaaaattcac

SEQ ID NO: 907763 - DNA, 15 bp, Homo sapiens
acttcaaaattcact

SEQ ID NO: 907764 - DNA, 15 bp, Homo sapiens
cttcaaaattcactt

SEQ ID NO: 907765 - DNA, 15 bp, Homo sapiens
ttcaaaattcacttg

SEQ ID NO: 907766 - DNA, 15 bp, Homo sapiens
tcaaaattcacttgg

SEQ ID NO: 907767 - DNA, 15 bp, Homo sapiens
caaaattcacttggc

SEQ ID NO: 907768 - DNA, 15 bp, Homo sapiens
aaaattcacttggca

SEQ ID NO: 907769 - DNA, 15 bp, Homo sapiens
aaattcacttggcaa

SEQ ID NO: 907770 - DNA, 15 bp, Homo sapiens
aattcacttggcaaa

SEQ ID NO: 907771 - DNA, 15 bp, Homo sapiens
attcacttggcaaaa

SEQ ID NO: 907772 - DNA, 15 bp, Homo sapiens
ttcacttggcaaaat

SEQ ID NO: 907773 - DNA, 15 bp, Homo sapiens
tcacttggcaaaatt

SEQ ID NO: 907774 - DNA, 15 bp, Homo sapiens
cacttggcaaaatta

SEQ ID NO: 907775 - DNA, 15 bp, Homo sapiens
acttggcaaaattaa

SEQ ID NO: 907776 - DNA, 15 bp, Homo sapiens
cttggcaaaattaaa

SEQ ID NO: 907777 - DNA, 15 bp, Homo sapiens
ttggcaaaattaaac

SEQ ID NO: 907778 - DNA, 15 bp, Homo sapiens
tggcaaaattaaact

SEQ ID NO: 907779 - DNA, 15 bp, Homo sapiens
ggcaaaattaaactc

SEQ ID NO: 907780 - DNA, 15 bp, Homo sapiens
gcaaaattaaactct

SEQ ID NO: 907781 - DNA, 15 bp, Homo sapiens
caaaattaaactctt

SEQ ID NO: 907782 - DNA, 15 bp, Homo sapiens
aaaattaaactctta

SEQ ID NO: 907783 - DNA, 15 bp, Homo sapiens
aaattaaactcttat

SEQ ID NO: 907784 - DNA, 15 bp, Homo sapiens
aattaaactcttatc

SEQ ID NO: 907785 - DNA, 15 bp, Homo sapiens
attaaactcttatca

SEQ ID NO: 907786 - DNA, 15 bp, Homo sapiens
ttaaactcttatcag

SEQ ID NO: 907787 - DNA, 15 bp, Homo sapiens
taaactcttatcaga

SEQ ID NO: 907788 - DNA, 15 bp, Homo sapiens
aaactcttatcagac

SEQ ID NO: 907789 - DNA, 15 bp, Homo sapiens
aactcttatcagacc

SEQ ID NO: 907790 - DNA, 15 bp, Homo sapiens
actcttatcagacct

SEQ ID NO: 907791 - DNA, 15 bp, Homo sapiens
ctcttatcagaccta

SEQ ID NO: 907792 - DNA, 15 bp, Homo sapiens
tcttatcagacctaa

SEQ ID NO: 907793 - DNA, 15 bp, Homo sapiens
cttatcagacctaat

SEQ ID NO: 907794 - DNA, 15 bp, Homo sapiens
ttatcagacctaata

SEQ ID NO: 907795 - DNA, 15 bp, Homo sapiens
tatcagacctaataa

SEQ ID NO: 907796 - DNA, 15 bp, Homo sapiens
atcagacctaataaa

SEQ ID NO: 907797 - DNA, 15 bp, Homo sapiens
tcagacctaataaat

SEQ ID NO: 907798 - DNA, 15 bp, Homo sapiens
cagacctaataaatc

SEQ ID NO: 907799 - DNA, 15 bp, Homo sapiens
agacctaataaatct

SEQ ID NO: 907800 - DNA, 15 bp, Homo sapiens
gacctaataaatcta

SEQ ID NO: 907801 - DNA, 15 bp, Homo sapiens
acctaataaatctat

SEQ ID NO: 907802 - DNA, 15 bp, Homo sapiens
cctaataaatctata

SEQ ID NO: 907803 - DNA, 15 bp, Homo sapiens
ctaataaatctatac

SEQ ID NO: 907804 - DNA, 15 bp, Homo sapiens
taataaatctatact

SEQ ID NO: 907805 - DNA, 15 bp, Homo sapiens
aataaatctatactg

SEQ ID NO: 907806 - DNA, 15 bp, Homo sapiens
ataaatctatactgt

SEQ ID NO: 907807 - DNA, 15 bp, Homo sapiens
taaatctatactgtc

SEQ ID NO: 907808 - DNA, 15 bp, Homo sapiens
aaatctatactgtct

SEQ ID NO: 907809 - DNA, 15 bp, Homo sapiens
aatctatactgtctc

SEQ ID NO: 907810 - DNA, 15 bp, Homo sapiens
atctatactgtctca

SEQ ID NO: 907811 - DNA, 15 bp, Homo sapiens
tctatactgtctcat

SEQ ID NO: 907812 - DNA, 15 bp, Homo sapiens
ctatactgtctcatg

SEQ ID NO: 907813 - DNA, 15 bp, Homo sapiens
tatactgtctcatgt

SEQ ID NO: 907814 - DNA, 15 bp, Homo sapiens
atactgtctcatgtt

SEQ ID NO: 907815 - DNA, 15 bp, Homo sapiens
tactgtctcatgttt

SEQ ID NO: 907816 - DNA, 15 bp, Homo sapiens
actgtctcatgtttc

SEQ ID NO: 907817 - DNA, 15 bp, Homo sapiens
ctgtctcatgtttct

SEQ ID NO: 907818 - DNA, 15 bp, Homo sapiens
tgtctcatgtttctg

SEQ ID NO: 907819 - DNA, 15 bp, Homo sapiens
gtctcatgtttctgt

SEQ ID NO: 907820 - DNA, 15 bp, Homo sapiens
tctcatgtttctgtt

SEQ ID NO: 907821 - DNA, 15 bp, Homo sapiens
ctcatgtttctgttc

SEQ ID NO: 907822 - DNA, 15 bp, Homo sapiens
tcatgtttctgttca

SEQ ID NO: 907823 - DNA, 15 bp, Homo sapiens
catgtttctgttcat

SEQ ID NO: 907824 - DNA, 15 bp, Homo sapiens
atgtttctgttcatt

SEQ ID NO: 907825 - DNA, 15 bp, Homo sapiens
tgtttctgttcattg

SEQ ID NO: 907826 - DNA, 15 bp, Homo sapiens
gtttctgttcattgt

SEQ ID NO: 907827 - DNA, 15 bp, Homo sapiens
tttctgttcattgta

SEQ ID NO: 907828 - DNA, 15 bp, Homo sapiens
ttctgttcattgtac

SEQ ID NO: 907829 - DNA, 15 bp, Homo sapiens
tctgttcattgtacc

SEQ ID NO: 907830 - DNA, 15 bp, Homo sapiens
ctgttcattgtacca

SEQ ID NO: 907831 - DNA, 15 bp, Homo sapiens
tgttcattgtaccac

SEQ ID NO: 907832 - DNA, 15 bp, Homo sapiens
gttcattgtaccaca

SEQ ID NO: 907833 - DNA, 15 bp, Homo sapiens
ttcattgtaccacaa

SEQ ID NO: 907834 - DNA, 15 bp, Homo sapiens
tcattgtaccacaaa

SEQ ID NO: 907835 - DNA, 15 bp, Homo sapiens
cattgtaccacaaat

SEQ ID NO: 907836 - DNA, 15 bp, Homo sapiens
attgtaccacaaatc

SEQ ID NO: 907837 - DNA, 15 bp, Homo sapiens
ttgtaccacaaatct

SEQ ID NO: 907838 - DNA, 15 bp, Homo sapiens
tgtaccacaaatctt

SEQ ID NO: 907839 - DNA, 15 bp, Homo sapiens
gtaccacaaatcttc

SEQ ID NO: 907840 - DNA, 15 bp, Homo sapiens
taccacaaatcttcc

SEQ ID NO: 907841 - DNA, 15 bp, Homo sapiens
accacaaatcttcca

SEQ ID NO: 907842 - DNA, 15 bp, Homo sapiens
ccacaaatcttccag

SEQ ID NO: 907843 - DNA, 15 bp, Homo sapiens
cacaaatcttccagc

SEQ ID NO: 907844 - DNA, 15 bp, Homo sapiens
acaaatcttccagct

SEQ ID NO: 907845 - DNA, 15 bp, Homo sapiens
caaatcttccagcta

SEQ ID NO: 907846 - DNA, 15 bp, Homo sapiens
aaatcttccagctat

SEQ ID NO: 907847 - DNA, 15 bp, Homo sapiens
aatcttccagctatt

SEQ ID NO: 907848 - DNA, 15 bp, Homo sapiens
atcttccagctatta

SEQ ID NO: 907849 - DNA, 15 bp, Homo sapiens
tcttccagctattaa

SEQ ID NO: 907850 - DNA, 15 bp, Homo sapiens
cttccagctattaaa

SEQ ID NO: 907851 - DNA, 15 bp, Homo sapiens
ttccagctattaaag

SEQ ID NO: 907852 - DNA, 15 bp, Homo sapiens
tccagctattaaagc

SEQ ID NO: 907853 - DNA, 15 bp, Homo sapiens
ccagctattaaagcc

SEQ ID NO: 907854 - DNA, 15 bp, Homo sapiens
cagctattaaagcca

SEQ ID NO: 907855 - DNA, 15 bp, Homo sapiens
agctattaaagccaa

SEQ ID NO: 907856 - DNA, 15 bp, Homo sapiens
gctattaaagccaat

SEQ ID NO: 907857 - DNA, 15 bp, Homo sapiens
ctattaaagccaata

SEQ ID NO: 907858 - DNA, 15 bp, Homo sapiens
tattaaagccaataa

SEQ ID NO: 907859 - DNA, 15 bp, Homo sapiens
attaaagccaataat

SEQ ID NO: 907860 - DNA, 15 bp, Homo sapiens
ttaaagccaataatt

SEQ ID NO: 907861 - DNA, 15 bp, Homo sapiens
taaagccaataattg

SEQ ID NO: 907862 - DNA, 15 bp, Homo sapiens
aaagccaataattgt

SEQ ID NO: 907863 - DNA, 15 bp, Homo sapiens
aagccaataattgtc

SEQ ID NO: 907864 - DNA, 15 bp, Homo sapiens
agccaataattgtct

SEQ ID NO: 907865 - DNA, 15 bp, Homo sapiens
gccaataattgtctt

SEQ ID NO: 907866 - DNA, 15 bp, Homo sapiens
ccaataattgtcttt

SEQ ID NO: 907867 - DNA, 15 bp, Homo sapiens
caataattgtctttg

SEQ ID NO: 907868 - DNA, 15 bp, Homo sapiens
aataattgtctttga

SEQ ID NO: 907869 - DNA, 15 bp, Homo sapiens
ataattgtctttgaa

SEQ ID NO: 907870 - DNA, 15 bp, Homo sapiens
taattgtctttgaat

SEQ ID NO: 907871 - DNA, 15 bp, Homo sapiens
aattgtctttgaatc

SEQ ID NO: 907872 - DNA, 15 bp, Homo sapiens
attgtctttgaatcc

SEQ ID NO: 907873 - DNA, 15 bp, Homo sapiens
ttgtctttgaatcct

SEQ ID NO: 907874 - DNA, 15 bp, Homo sapiens
tgtctttgaatcctc

SEQ ID NO: 907875 - DNA, 15 bp, Homo sapiens
gtctttgaatcctct

SEQ ID NO: 907876 - DNA, 15 bp, Homo sapiens
tctttgaatcctctt

SEQ ID NO: 907877 - DNA, 15 bp, Homo sapiens
ctttgaatcctcttc

SEQ ID NO: 907878 - DNA, 15 bp, Homo sapiens
tttgaatcctcttcc

SEQ ID NO: 907879 - DNA, 15 bp, Homo sapiens
ttgaatcctcttcca

SEQ ID NO: 907880 - DNA, 15 bp, Homo sapiens
tgaatcctcttccaa

SEQ ID NO: 907881 - DNA, 15 bp, Homo sapiens
gaatcctcttccaac

SEQ ID NO: 907882 - DNA, 15 bp, Homo sapiens
aatcctcttccaacg

SEQ ID NO: 907883 - DNA, 15 bp, Homo sapiens
atcctcttccaacga

SEQ ID NO: 907884 - DNA, 15 bp, Homo sapiens
tcctcttccaacgat

SEQ ID NO: 907885 - DNA, 15 bp, Homo sapiens
cctcttccaacgata

SEQ ID NO: 907886 - DNA, 15 bp, Homo sapiens
ctcttccaacgatag

SEQ ID NO: 907887 - DNA, 15 bp, Homo sapiens
tcttccaacgataga

SEQ ID NO: 907888 - DNA, 15 bp, Homo sapiens
cttccaacgatagat

SEQ ID NO: 907889 - DNA, 15 bp, Homo sapiens
ttccaacgatagatc

SEQ ID NO: 907890 - DNA, 15 bp, Homo sapiens
tccaacgatagatct

SEQ ID NO: 907891 - DNA, 15 bp, Homo sapiens
ccaacgatagatcta

SEQ ID NO: 907892 - DNA, 15 bp, Homo sapiens
caacgatagatctaa

SEQ ID NO: 907893 - DNA, 15 bp, Homo sapiens
aacgatagatctaat

SEQ ID NO: 907894 - DNA, 15 bp, Homo sapiens
acgatagatctaatt

SEQ ID NO: 907895 - DNA, 15 bp, Homo sapiens
cgatagatctaattg

SEQ ID NO: 907896 - DNA, 15 bp, Homo sapiens
gatagatctaattgg

SEQ ID NO: 907897 - DNA, 15 bp, Homo sapiens
atagatctaattggc

SEQ ID NO: 907898 - DNA, 15 bp, Homo sapiens
tagatctaattggcc

SEQ ID NO: 907899 - DNA, 15 bp, Homo sapiens
agatctaattggcct

SEQ ID NO: 907900 - DNA, 15 bp, Homo sapiens
gatctaattggccta

SEQ ID NO: 907901 - DNA, 15 bp, Homo sapiens
atctaattggcctac

SEQ ID NO: 907902 - DNA, 15 bp, Homo sapiens
tctaattggcctact

SEQ ID NO: 907903 - DNA, 15 bp, Homo sapiens
ctaattggcctactg

SEQ ID NO: 907904 - DNA, 15 bp, Homo sapiens
taattggcctactga

SEQ ID NO: 907905 - DNA, 15 bp, Homo sapiens
aattggcctactgat

SEQ ID NO: 907906 - DNA, 15 bp, Homo sapiens
attggcctactgatt

SEQ ID NO: 907907 - DNA, 15 bp, Homo sapiens
ttggcctactgattc

SEQ ID NO: 907908 - DNA, 15 bp, Homo sapiens
tggcctactgattct

SEQ ID NO: 907909 - DNA, 15 bp, Homo sapiens
ggcctactgattctt

SEQ ID NO: 907910 - DNA, 15 bp, Homo sapiens
gcctactgattcttc

SEQ ID NO: 907911 - DNA, 15 bp, Homo sapiens
cctactgattcttct

SEQ ID NO: 907912 - DNA, 15 bp, Homo sapiens
ctactgattcttctt

SEQ ID NO: 907913 - DNA, 15 bp, Homo sapiens
tactgattcttcttt

SEQ ID NO: 907914 - DNA, 15 bp, Homo sapiens
actgattcttctttc

SEQ ID NO: 907915 - DNA, 15 bp, Homo sapiens
ctgattcttctttca

SEQ ID NO: 907916 - DNA, 15 bp, Homo sapiens
tgattcttctttcaa

SEQ ID NO: 907917 - DNA, 15 bp, Homo sapiens
gattcttctttcaaa

SEQ ID NO: 907918 - DNA, 15 bp, Homo sapiens
attcttctttcaaaa

SEQ ID NO: 907919 - DNA, 15 bp, Homo sapiens
ttcttctttcaaaat

SEQ ID NO: 907920 - DNA, 15 bp, Homo sapiens
tcttctttcaaaata

SEQ ID NO: 907921 - DNA, 15 bp, Homo sapiens
cttctttcaaaatat

SEQ ID NO: 907922 - DNA, 15 bp, Homo sapiens
ttctttcaaaatatc

SEQ ID NO: 907923 - DNA, 15 bp, Homo sapiens
tctttcaaaatatct

SEQ ID NO: 907924 - DNA, 15 bp, Homo sapiens
ctttcaaaatatctt

SEQ ID NO: 907925 - DNA, 15 bp, Homo sapiens
tttcaaaatatcttt

SEQ ID NO: 907926 - DNA, 15 bp, Homo sapiens
ttcaaaatatctttt

SEQ ID NO: 907927 - DNA, 15 bp, Homo sapiens
tcaaaatatcttttg

SEQ ID NO: 907928 - DNA, 15 bp, Homo sapiens
caaaatatcttttgt

SEQ ID NO: 907929 - DNA, 15 bp, Homo sapiens
aaaatatcttttgtt

SEQ ID NO: 907930 - DNA, 15 bp, Homo sapiens
aaatatcttttgttt

SEQ ID NO: 907931 - DNA, 15 bp, Homo sapiens
aatatcttttgtttc

SEQ ID NO: 907932 - DNA, 15 bp, Homo sapiens
atatcttttgtttct

SEQ ID NO: 907933 - DNA, 15 bp, Homo sapiens
tatcttttgtttctg

SEQ ID NO: 907934 - DNA, 15 bp, Homo sapiens
atcttttgtttctgt

SEQ ID NO: 907935 - DNA, 15 bp, Homo sapiens
tcttttgtttctgtc

SEQ ID NO: 907936 - DNA, 15 bp, Homo sapiens
cttttgtttctgtca

SEQ ID NO: 907937 - DNA, 15 bp, Homo sapiens
ttttgtttctgtcac

SEQ ID NO: 907938 - DNA, 15 bp, Homo sapiens
tttgtttctgtcact

SEQ ID NO: 907939 - DNA, 15 bp, Homo sapiens
ttgtttctgtcactt

SEQ ID NO: 907940 - DNA, 15 bp, Homo sapiens
tgtttctgtcacttt

SEQ ID NO: 907941 - DNA, 15 bp, Homo sapiens
gtttctgtcactttt

SEQ ID NO: 907942 - DNA, 15 bp, Homo sapiens
tttctgtcacttttc

SEQ ID NO: 907943 - DNA, 15 bp, Homo sapiens
ttctgtcacttttct

SEQ ID NO: 907944 - DNA, 15 bp, Homo sapiens
tctgtcacttttctc

SEQ ID NO: 907945 - DNA, 15 bp, Homo sapiens
ctgtcacttttctct

SEQ ID NO: 907946 - DNA, 15 bp, Homo sapiens
tgtcacttttctctt

SEQ ID NO: 907947 - DNA, 15 bp, Homo sapiens
gtcacttttctcttc

SEQ ID NO: 907948 - DNA, 15 bp, Homo sapiens
tcacttttctcttca

SEQ ID NO: 907949 - DNA, 15 bp, Homo sapiens
cacttttctcttcac

SEQ ID NO: 907950 - DNA, 15 bp, Homo sapiens
acttttctcttcaca

SEQ ID NO: 907951 - DNA, 15 bp, Homo sapiens
cttttctcttcacag

SEQ ID NO: 907952 - DNA, 15 bp, Homo sapiens
ttttctcttcacaga

SEQ ID NO: 907953 - DNA, 15 bp, Homo sapiens
tttctcttcacagac

SEQ ID NO: 907954 - DNA, 15 bp, Homo sapiens
ttctcttcacagaca

SEQ ID NO: 907955 - DNA, 15 bp, Homo sapiens
tctcttcacagacaa

SEQ ID NO: 907956 - DNA, 15 bp, Homo sapiens
ctcttcacagacaaa

SEQ ID NO: 907957 - DNA, 15 bp, Homo sapiens
tcttcacagacaaat

SEQ ID NO: 907958 - DNA, 15 bp, Homo sapiens
cttcacagacaaata

SEQ ID NO: 907959 - DNA, 15 bp, Homo sapiens
ttcacagacaaataa

SEQ ID NO: 907960 - DNA, 15 bp, Homo sapiens
tcacagacaaataaa

SEQ ID NO: 907961 - DNA, 15 bp, Homo sapiens
cacagacaaataaag

SEQ ID NO: 907962 - DNA, 15 bp, Homo sapiens
acagacaaataaagt

SEQ ID NO: 907963 - DNA, 15 bp, Homo sapiens
cagacaaataaagtc

SEQ ID NO: 907964 - DNA, 15 bp, Homo sapiens
agacaaataaagtcc

SEQ ID NO: 907965 - DNA, 15 bp, Homo sapiens
gacaaataaagtccc

SEQ ID NO: 907966 - DNA, 15 bp, Homo sapiens
acaaataaagtccct

SEQ ID NO: 907967 - DNA, 15 bp, Homo sapiens
caaataaagtccctt

SEQ ID NO: 907968 - DNA, 15 bp, Homo sapiens
aaataaagtcccttt

SEQ ID NO: 907969 - DNA, 15 bp, Homo sapiens
aataaagtcccttta

SEQ ID NO: 907970 - DNA, 15 bp, Homo sapiens
ataaagtccctttat

SEQ ID NO: 907971 - DNA, 15 bp, Homo sapiens
taaagtccctttatt

SEQ ID NO: 907972 - DNA, 15 bp, Homo sapiens
aaagtccctttattg

SEQ ID NO: 907973 - DNA, 15 bp, Homo sapiens
aagtccctttattgg

SEQ ID NO: 907974 - DNA, 15 bp, Homo sapiens
agtccctttattgga

SEQ ID NO: 907975 - DNA, 15 bp, Homo sapiens
gtccctttattggaa

SEQ ID NO: 907976 - DNA, 15 bp, Homo sapiens
tccctttattggaac

SEQ ID NO: 907977 - DNA, 15 bp, Homo sapiens
ccctttattggaaca

SEQ ID NO: 907978 - DNA, 15 bp, Homo sapiens
cctttattggaacac

SEQ ID NO: 907979 - DNA, 15 bp, Homo sapiens
ctttattggaacact

SEQ ID NO: 907980 - DNA, 15 bp, Homo sapiens
tttattggaacactt

SEQ ID NO: 907981 - DNA, 15 bp, Homo sapiens
ttattggaacacttt

SEQ ID NO: 907982 - DNA, 15 bp, Homo sapiens
tattggaacactttg

SEQ ID NO: 907983 - DNA, 15 bp, Homo sapiens
attggaacactttgg

SEQ ID NO: 907984 - DNA, 15 bp, Homo sapiens
ttggaacactttggt

SEQ ID NO: 907985 - DNA, 15 bp, Homo sapiens
tggaacactttggtt

SEQ ID NO: 907986 - DNA, 15 bp, Homo sapiens
ggaacactttggtta

SEQ ID NO: 907987 - DNA, 15 bp, Homo sapiens
gaacactttggttat

SEQ ID NO: 907988 - DNA, 15 bp, Homo sapiens
aacactttggttatt

SEQ ID NO: 907989 - DNA, 15 bp, Homo sapiens
acactttggttatta

SEQ ID NO: 907990 - DNA, 15 bp, Homo sapiens
cactttggttattaa

SEQ ID NO: 907991 - DNA, 15 bp, Homo sapiens
actttggttattaag

SEQ ID NO: 907992 - DNA, 15 bp, Homo sapiens
ctttggttattaaga

SEQ ID NO: 907993 - DNA, 15 bp, Homo sapiens
tttggttattaagat

SEQ ID NO: 907994 - DNA, 15 bp, Homo sapiens
ttggttattaagata

SEQ ID NO: 907995 - DNA, 15 bp, Homo sapiens
tggttattaagatag

SEQ ID NO: 907996 - DNA, 15 bp, Homo sapiens
ggttattaagatagt

SEQ ID NO: 907997 - DNA, 15 bp, Homo sapiens
gttattaagatagtt

SEQ ID NO: 907998 - DNA, 15 bp, Homo sapiens
ttattaagatagttt

SEQ ID NO: 907999 - DNA, 15 bp, Homo sapiens
tattaagatagtttg

SEQ ID NO: 908000 - DNA, 15 bp, Homo sapiens
attaagatagtttgc

SEQ ID NO: 908001 - DNA, 15 bp, Homo sapiens
ttaagatagtttgct

SEQ ID NO: 908002 - DNA, 15 bp, Homo sapiens
taagatagtttgcta

SEQ ID NO: 908003 - DNA, 15 bp, Homo sapiens
aagatagtttgctaa

SEQ ID NO: 908004 - DNA, 15 bp, Homo sapiens
agatagtttgctaaa

SEQ ID NO: 908005 - DNA, 15 bp, Homo sapiens
gatagtttgctaaat

SEQ ID NO: 908006 - DNA, 15 bp, Homo sapiens
atagtttgctaaata

SEQ ID NO: 908007 - DNA, 15 bp, Homo sapiens
tagtttgctaaataa

SEQ ID NO: 908008 - DNA, 15 bp, Homo sapiens
agtttgctaaataac

SEQ ID NO: 908009 - DNA, 15 bp, Homo sapiens
gtttgctaaataacc

SEQ ID NO: 908010 - DNA, 15 bp, Homo sapiens
tttgctaaataacct

SEQ ID NO: 908011 - DNA, 15 bp, Homo sapiens
ttgctaaataacctc

SEQ ID NO: 908012 - DNA, 15 bp, Homo sapiens
tgctaaataacctcc

SEQ ID NO: 908013 - DNA, 15 bp, Homo sapiens
gctaaataacctcct

SEQ ID NO: 908014 - DNA, 15 bp, Homo sapiens
ctaaataacctcctc

SEQ ID NO: 908015 - DNA, 15 bp, Homo sapiens
taaataacctcctca

SEQ ID NO: 908016 - DNA, 15 bp, Homo sapiens
aaataacctcctcaa

SEQ ID NO: 908017 - DNA, 15 bp, Homo sapiens
aataacctcctcaac

SEQ ID NO: 908018 - DNA, 15 bp, Homo sapiens
ataacctcctcaact

SEQ ID NO: 908019 - DNA, 15 bp, Homo sapiens
taacctcctcaactc

SEQ ID NO: 908020 - DNA, 15 bp, Homo sapiens
aacctcctcaactct

SEQ ID NO: 908021 - DNA, 15 bp, Homo sapiens
acctcctcaactcta

SEQ ID NO: 908022 - DNA, 15 bp, Homo sapiens
cctcctcaactctac

SEQ ID NO: 908023 - DNA, 15 bp, Homo sapiens
ctcctcaactctacc

SEQ ID NO: 908024 - DNA, 15 bp, Homo sapiens
tcctcaactctaccc

SEQ ID NO: 908025 - DNA, 15 bp, Homo sapiens
cctcaactctaccct

SEQ ID NO: 908026 - DNA, 15 bp, Homo sapiens
ctcaactctaccctc

SEQ ID NO: 908027 - DNA, 15 bp, Homo sapiens
tcaactctaccctca

SEQ ID NO: 908028 - DNA, 15 bp, Homo sapiens
caactctaccctcat

SEQ ID NO: 908029 - DNA, 15 bp, Homo sapiens
aactctaccctcata

SEQ ID NO: 908030 - DNA, 15 bp, Homo sapiens
actctaccctcatat

SEQ ID NO: 908031 - DNA, 15 bp, Homo sapiens
ctctaccctcatatt

SEQ ID NO: 908032 - DNA, 15 bp, Homo sapiens
tctaccctcatattt

SEQ ID NO: 908033 - DNA, 15 bp, Homo sapiens
ctaccctcatatttt

SEQ ID NO: 908034 - DNA, 15 bp, Homo sapiens
taccctcatattttt

SEQ ID NO: 908035 - DNA, 15 bp, Homo sapiens
accctcatatttttc

SEQ ID NO: 908036 - DNA, 15 bp, Homo sapiens
ccctcatatttttca

SEQ ID NO: 908037 - DNA, 15 bp, Homo sapiens
cctcatatttttcaa

SEQ ID NO: 908038 - DNA, 15 bp, Homo sapiens
ctcatatttttcaaa

SEQ ID NO: 908039 - DNA, 15 bp, Homo sapiens
tcatatttttcaaag

SEQ ID NO: 908040 - DNA, 15 bp, Homo sapiens
catatttttcaaagt

SEQ ID NO: 908041 - DNA, 15 bp, Homo sapiens
atatttttcaaagtg

SEQ ID NO: 908042 - DNA, 15 bp, Homo sapiens
tatttttcaaagtgg

SEQ ID NO: 908043 - DNA, 15 bp, Homo sapiens
atttttcaaagtggt

SEQ ID NO: 908044 - DNA, 15 bp, Homo sapiens
tttttcaaagtggta

SEQ ID NO: 908045 - DNA, 15 bp, Homo sapiens
ttttcaaagtggtag

SEQ ID NO: 908046 - DNA, 15 bp, Homo sapiens
tttcaaagtggtagt

SEQ ID NO: 908047 - DNA, 15 bp, Homo sapiens
ttcaaagtggtagtt

SEQ ID NO: 908048 - DNA, 15 bp, Homo sapiens
tcaaagtggtagtta

SEQ ID NO: 908049 - DNA, 15 bp, Homo sapiens
caaagtggtagttat

SEQ ID NO: 908050 - DNA, 15 bp, Homo sapiens
aaagtggtagttatt

SEQ ID NO: 908051 - DNA, 15 bp, Homo sapiens
aagtggtagttattg

SEQ ID NO: 908052 - DNA, 15 bp, Homo sapiens
agtggtagttattga

SEQ ID NO: 908053 - DNA, 15 bp, Homo sapiens
gtggtagttattgaa

SEQ ID NO: 908054 - DNA, 15 bp, Homo sapiens
tggtagttattgaat

SEQ ID NO: 908055 - DNA, 15 bp, Homo sapiens
ggtagttattgaatc

SEQ ID NO: 908056 - DNA, 15 bp, Homo sapiens
gtagttattgaatca

SEQ ID NO: 908057 - DNA, 15 bp, Homo sapiens
tagttattgaatcac

SEQ ID NO: 908058 - DNA, 15 bp, Homo sapiens
agttattgaatcacc

SEQ ID NO: 908059 - DNA, 15 bp, Homo sapiens
gttattgaatcacct

SEQ ID NO: 908060 - DNA, 15 bp, Homo sapiens
ttattgaatcacctg

SEQ ID NO: 908061 - DNA, 15 bp, Homo sapiens
tattgaatcacctgc

SEQ ID NO: 908062 - DNA, 15 bp, Homo sapiens
attgaatcacctgca

SEQ ID NO: 908063 - DNA, 15 bp, Homo sapiens
ttgaatcacctgcac

SEQ ID NO: 908064 - DNA, 15 bp, Homo sapiens
tgaatcacctgcaca

SEQ ID NO: 908065 - DNA, 15 bp, Homo sapiens
gaatcacctgcacaa

SEQ ID NO: 908066 - DNA, 15 bp, Homo sapiens
aatcacctgcacaag

SEQ ID NO: 908067 - DNA, 15 bp, Homo sapiens
atcacctgcacaaga

SEQ ID NO: 908068 - DNA, 15 bp, Homo sapiens
tcacctgcacaagaa

SEQ ID NO: 908069 - DNA, 15 bp, Homo sapiens
cacctgcacaagaat

SEQ ID NO: 908070 - DNA, 15 bp, Homo sapiens
acctgcacaagaatt

SEQ ID NO: 908071 - DNA, 15 bp, Homo sapiens
cctgcacaagaatta

SEQ ID NO: 908072 - DNA, 15 bp, Homo sapiens
ctgcacaagaattat

SEQ ID NO: 908073 - DNA, 15 bp, Homo sapiens
tgcacaagaattatc

SEQ ID NO: 908074 - DNA, 15 bp, Homo sapiens
gcacaagaattatct

SEQ ID NO: 908075 - DNA, 15 bp, Homo sapiens
cacaagaattatctg

SEQ ID NO: 908076 - DNA, 15 bp, Homo sapiens
acaagaattatctgg

SEQ ID NO: 908077 - DNA, 15 bp, Homo sapiens
caagaattatctggg

SEQ ID NO: 908078 - DNA, 15 bp, Homo sapiens
aagaattatctgggg

SEQ ID NO: 908079 - DNA, 15 bp, Homo sapiens
agaattatctgggga

SEQ ID NO: 908080 - DNA, 15 bp, Homo sapiens
gaattatctggggag

SEQ ID NO: 908081 - DNA, 15 bp, Homo sapiens
aattatctggggagc

SEQ ID NO: 908082 - DNA, 15 bp, Homo sapiens
attatctggggagct

SEQ ID NO: 908083 - DNA, 15 bp, Homo sapiens
ttatctggggagctt

SEQ ID NO: 908084 - DNA, 15 bp, Homo sapiens
tatctggggagcttt

SEQ ID NO: 908085 - DNA, 15 bp, Homo sapiens
atctggggagctttg

SEQ ID NO: 908086 - DNA, 15 bp, Homo sapiens
tctggggagctttgt

SEQ ID NO: 908087 - DNA, 15 bp, Homo sapiens
ctggggagctttgta

SEQ ID NO: 908088 - DNA, 15 bp, Homo sapiens
tggggagctttgtaa

SEQ ID NO: 908089 - DNA, 15 bp, Homo sapiens
ggggagctttgtaaa

SEQ ID NO: 908090 - DNA, 15 bp, Homo sapiens
gggagctttgtaaaa

SEQ ID NO: 908091 - DNA, 15 bp, Homo sapiens
ggagctttgtaaaaa

SEQ ID NO: 908092 - DNA, 15 bp, Homo sapiens
gagctttgtaaaaac

SEQ ID NO: 908093 - DNA, 15 bp, Homo sapiens
agctttgtaaaaaca

SEQ ID NO: 908094 - DNA, 15 bp, Homo sapiens
gctttgtaaaaacat

SEQ ID NO: 908095 - DNA, 15 bp, Homo sapiens
ctttgtaaaaacatc

SEQ ID NO: 908096 - DNA, 15 bp, Homo sapiens
tttgtaaaaacatca

SEQ ID NO: 908097 - DNA, 15 bp, Homo sapiens
ttgtaaaaacatcac

SEQ ID NO: 908098 - DNA, 15 bp, Homo sapiens
tgtaaaaacatcact

SEQ ID NO: 908099 - DNA, 15 bp, Homo sapiens
gtaaaaacatcactt

SEQ ID NO: 908100 - DNA, 15 bp, Homo sapiens
taaaaacatcacttc

SEQ ID NO: 908101 - DNA, 15 bp, Homo sapiens
aaaaacatcacttca

SEQ ID NO: 908102 - DNA, 15 bp, Homo sapiens
aaaacatcacttcat

SEQ ID NO: 908103 - DNA, 15 bp, Homo sapiens
aaacatcacttcatg

SEQ ID NO: 908104 - DNA, 15 bp, Homo sapiens
aacatcacttcatgt

SEQ ID NO: 908105 - DNA, 15 bp, Homo sapiens
acatcacttcatgtg

SEQ ID NO: 908106 - DNA, 15 bp, Homo sapiens
catcacttcatgtgg

SEQ ID NO: 908107 - DNA, 15 bp, Homo sapiens
atcacttcatgtggc

SEQ ID NO: 908108 - DNA, 15 bp, Homo sapiens
tcacttcatgtggcc

SEQ ID NO: 908109 - DNA, 15 bp, Homo sapiens
cacttcatgtggccc

SEQ ID NO: 908110 - DNA, 15 bp, Homo sapiens
acttcatgtggccca

SEQ ID NO: 908111 - DNA, 15 bp, Homo sapiens
cttcatgtggcccat

SEQ ID NO: 908112 - DNA, 15 bp, Homo sapiens
ttcatgtggcccata

SEQ ID NO: 908113 - DNA, 15 bp, Homo sapiens
tcatgtggcccatat

SEQ ID NO: 908114 - DNA, 15 bp, Homo sapiens
catgtggcccatatt

SEQ ID NO: 908115 - DNA, 15 bp, Homo sapiens
atgtggcccatattt

SEQ ID NO: 908116 - DNA, 15 bp, Homo sapiens
tgtggcccatattta

SEQ ID NO: 908117 - DNA, 15 bp, Homo sapiens
gtggcccatatttaa

SEQ ID NO: 908118 - DNA, 15 bp, Homo sapiens
tggcccatatttaat

SEQ ID NO: 908119 - DNA, 15 bp, Homo sapiens
ggcccatatttaatc

SEQ ID NO: 908120 - DNA, 15 bp, Homo sapiens
gcccatatttaatca

SEQ ID NO: 908121 - DNA, 15 bp, Homo sapiens
cccatatttaatcag

SEQ ID NO: 908122 - DNA, 15 bp, Homo sapiens
ccatatttaatcaga

SEQ ID NO: 908123 - DNA, 15 bp, Homo sapiens
catatttaatcagaa

SEQ ID NO: 908124 - DNA, 15 bp, Homo sapiens
atatttaatcagaat

SEQ ID NO: 908125 - DNA, 15 bp, Homo sapiens
tatttaatcagaatc

SEQ ID NO: 908126 - DNA, 15 bp, Homo sapiens
atttaatcagaatct

SEQ ID NO: 908127 - DNA, 15 bp, Homo sapiens
tttaatcagaatctt

SEQ ID NO: 908128 - DNA, 15 bp, Homo sapiens
ttaatcagaatcttt

SEQ ID NO: 908129 - DNA, 15 bp, Homo sapiens
taatcagaatctttt

SEQ ID NO: 908130 - DNA, 15 bp, Homo sapiens
aatcagaatcttttt

SEQ ID NO: 908131 - DNA, 15 bp, Homo sapiens
atcagaatctttttg

SEQ ID NO: 908132 - DNA, 15 bp, Homo sapiens
tcagaatctttttgg

SEQ ID NO: 908133 - DNA, 15 bp, Homo sapiens
cagaatctttttggg

SEQ ID NO: 908134 - DNA, 15 bp, Homo sapiens
agaatctttttgggt

SEQ ID NO: 908135 - DNA, 15 bp, Homo sapiens
gaatctttttgggta

SEQ ID NO: 908136 - DNA, 15 bp, Homo sapiens
aatctttttgggtaa

SEQ ID NO: 908137 - DNA, 15 bp, Homo sapiens
atctttttgggtaag

SEQ ID NO: 908138 - DNA, 15 bp, Homo sapiens
tctttttgggtaagg

SEQ ID NO: 908139 - DNA, 15 bp, Homo sapiens
ctttttgggtaaggc

SEQ ID NO: 908140 - DNA, 15 bp, Homo sapiens
tttttgggtaaggcc

SEQ ID NO: 908141 - DNA, 15 bp, Homo sapiens
ttttgggtaaggcct

SEQ ID NO: 908142 - DNA, 15 bp, Homo sapiens
tttgggtaaggcctg

SEQ ID NO: 908143 - DNA, 15 bp, Homo sapiens
ttgggtaaggcctgg

SEQ ID NO: 908144 - DNA, 15 bp, Homo sapiens
tgggtaaggcctgga

SEQ ID NO: 908145 - DNA, 15 bp, Homo sapiens
gggtaaggcctggaa

SEQ ID NO: 908146 - DNA, 15 bp, Homo sapiens
ggtaaggcctggaaa

SEQ ID NO: 908147 - DNA, 15 bp, Homo sapiens
gtaaggcctggaaat

SEQ ID NO: 908148 - DNA, 15 bp, Homo sapiens
taaggcctggaaatt

SEQ ID NO: 908149 - DNA, 15 bp, Homo sapiens
aaggcctggaaattt

SEQ ID NO: 908150 - DNA, 15 bp, Homo sapiens
aggcctggaaattta

SEQ ID NO: 908151 - DNA, 15 bp, Homo sapiens
ggcctggaaatttac

SEQ ID NO: 908152 - DNA, 15 bp, Homo sapiens
gcctggaaatttacc

SEQ ID NO: 908153 - DNA, 15 bp, Homo sapiens
cctggaaatttacca

SEQ ID NO: 908154 - DNA, 15 bp, Homo sapiens
ctggaaatttaccaa

SEQ ID NO: 908155 - DNA, 15 bp, Homo sapiens
tggaaatttaccaaa

SEQ ID NO: 908156 - DNA, 15 bp, Homo sapiens
ggaaatttaccaaat

SEQ ID NO: 908157 - DNA, 15 bp, Homo sapiens
gaaatttaccaaata

SEQ ID NO: 908158 - DNA, 15 bp, Homo sapiens
aaatttaccaaatac

SEQ ID NO: 908159 - DNA, 15 bp, Homo sapiens
aatttaccaaatact

SEQ ID NO: 908160 - DNA, 15 bp, Homo sapiens
atttaccaaatacta

SEQ ID NO: 908161 - DNA, 15 bp, Homo sapiens
tttaccaaatactat

SEQ ID NO: 908162 - DNA, 15 bp, Homo sapiens
ttaccaaatactata

SEQ ID NO: 908163 - DNA, 15 bp, Homo sapiens
taccaaatactatag

SEQ ID NO: 908164 - DNA, 15 bp, Homo sapiens
accaaatactataga

SEQ ID NO: 908165 - DNA, 15 bp, Homo sapiens
ccaaatactatagat

SEQ ID NO: 908166 - DNA, 15 bp, Homo sapiens
caaatactatagata

SEQ ID NO: 908167 - DNA, 15 bp, Homo sapiens
aaatactatagatag

SEQ ID NO: 908168 - DNA, 15 bp, Homo sapiens
aatactatagataga

SEQ ID NO: 908169 - DNA, 15 bp, Homo sapiens
atactatagatagat

SEQ ID NO: 908170 - DNA, 15 bp, Homo sapiens
tactatagatagatc

SEQ ID NO: 908171 - DNA, 15 bp, Homo sapiens
actatagatagatct

SEQ ID NO: 908172 - DNA, 15 bp, Homo sapiens
ctatagatagatctt

SEQ ID NO: 908173 - DNA, 15 bp, Homo sapiens
tatagatagatcttg

SEQ ID NO: 908174 - DNA, 15 bp, Homo sapiens
atagatagatcttgc

SEQ ID NO: 908175 - DNA, 15 bp, Homo sapiens
tagatagatcttgca

SEQ ID NO: 908176 - DNA, 15 bp, Homo sapiens
agatagatcttgcaa

SEQ ID NO: 908177 - DNA, 15 bp, Homo sapiens
gatagatcttgcaat

SEQ ID NO: 908178 - DNA, 15 bp, Homo sapiens
atagatcttgcaatc

SEQ ID NO: 908179 - DNA, 15 bp, Homo sapiens
tagatcttgcaatct

SEQ ID NO: 908180 - DNA, 15 bp, Homo sapiens
agatcttgcaatctc

SEQ ID NO: 908181 - DNA, 15 bp, Homo sapiens
gatcttgcaatctct

SEQ ID NO: 908182 - DNA, 15 bp, Homo sapiens
atcttgcaatctctt

SEQ ID NO: 908183 - DNA, 15 bp, Homo sapiens
tcttgcaatctcttt

SEQ ID NO: 908184 - DNA, 15 bp, Homo sapiens
cttgcaatctctttc

SEQ ID NO: 908185 - DNA, 15 bp, Homo sapiens
ttgcaatctctttct

SEQ ID NO: 908186 - DNA, 15 bp, Homo sapiens
tgcaatctctttctg

SEQ ID NO: 908187 - DNA, 15 bp, Homo sapiens
gcaatctctttctgc

SEQ ID NO: 908188 - DNA, 15 bp, Homo sapiens
caatctctttctgcc

SEQ ID NO: 908189 - DNA, 15 bp, Homo sapiens
aatctctttctgccc

SEQ ID NO: 908190 - DNA, 15 bp, Homo sapiens
atctctttctgccct

SEQ ID NO: 908191 - DNA, 15 bp, Homo sapiens
tctctttctgccctg

SEQ ID NO: 908192 - DNA, 15 bp, Homo sapiens
ctctttctgccctgg

SEQ ID NO: 908193 - DNA, 15 bp, Homo sapiens
tctttctgccctggg

SEQ ID NO: 908194 - DNA, 15 bp, Homo sapiens
ctttctgccctgggt

SEQ ID NO: 908195 - DNA, 15 bp, Homo sapiens
tttctgccctgggtt

SEQ ID NO: 908196 - DNA, 15 bp, Homo sapiens
ttctgccctgggttt

SEQ ID NO: 908197 - DNA, 15 bp, Homo sapiens
tctgccctgggtttc

SEQ ID NO: 908198 - DNA, 15 bp, Homo sapiens
ctgccctgggtttct

SEQ ID NO: 908199 - DNA, 15 bp, Homo sapiens
tgccctgggtttctt

SEQ ID NO: 908200 - DNA, 15 bp, Homo sapiens
gccctgggtttcttc

SEQ ID NO: 908201 - DNA, 15 bp, Homo sapiens
ccctgggtttcttct

SEQ ID NO: 908202 - DNA, 15 bp, Homo sapiens
cctgggtttcttctg

SEQ ID NO: 908203 - DNA, 15 bp, Homo sapiens
ctgggtttcttctgc

SEQ ID NO: 908204 - DNA, 15 bp, Homo sapiens
tgggtttcttctgcc

SEQ ID NO: 908205 - DNA, 15 bp, Homo sapiens
gggtttcttctgcct

SEQ ID NO: 908206 - DNA, 15 bp, Homo sapiens
ggtttcttctgccta

SEQ ID NO: 908207 - DNA, 15 bp, Homo sapiens
gtttcttctgcctag

SEQ ID NO: 908208 - DNA, 15 bp, Homo sapiens
tttcttctgcctaga

SEQ ID NO: 908209 - DNA, 15 bp, Homo sapiens
ttcttctgcctagat

SEQ ID NO: 908210 - DNA, 15 bp, Homo sapiens
tcttctgcctagatc

SEQ ID NO: 908211 - DNA, 15 bp, Homo sapiens
cttctgcctagatca

SEQ ID NO: 908212 - DNA, 15 bp, Homo sapiens
ttctgcctagatcat

SEQ ID NO: 908213 - DNA, 15 bp, Homo sapiens
tctgcctagatcatg

SEQ ID NO: 908214 - DNA, 15 bp, Homo sapiens
ctgcctagatcatgc

SEQ ID NO: 908215 - DNA, 15 bp, Homo sapiens
tgcctagatcatgca

SEQ ID NO: 908216 - DNA, 15 bp, Homo sapiens
gcctagatcatgcaa

SEQ ID NO: 908217 - DNA, 15 bp, Homo sapiens
cctagatcatgcaaa

SEQ ID NO: 908218 - DNA, 15 bp, Homo sapiens
ctagatcatgcaaat

SEQ ID NO: 908219 - DNA, 15 bp, Homo sapiens
tagatcatgcaaatg

SEQ ID NO: 908220 - DNA, 15 bp, Homo sapiens
agatcatgcaaatga

SEQ ID NO: 908221 - DNA, 15 bp, Homo sapiens
gatcatgcaaatgaa

SEQ ID NO: 908222 - DNA, 15 bp, Homo sapiens
atcatgcaaatgaat

SEQ ID NO: 908223 - DNA, 15 bp, Homo sapiens
tcatgcaaatgaata

SEQ ID NO: 908224 - DNA, 15 bp, Homo sapiens
catgcaaatgaatag

SEQ ID NO: 908225 - DNA, 15 bp, Homo sapiens
atgcaaatgaatagt

SEQ ID NO: 908226 - DNA, 15 bp, Homo sapiens
tgcaaatgaatagtt

SEQ ID NO: 908227 - DNA, 15 bp, Homo sapiens
gcaaatgaatagttt

SEQ ID NO: 908228 - DNA, 15 bp, Homo sapiens
caaatgaatagtttc

SEQ ID NO: 908229 - DNA, 15 bp, Homo sapiens
aaatgaatagtttcc

SEQ ID NO: 908230 - DNA, 15 bp, Homo sapiens
aatgaatagtttcca

SEQ ID NO: 908231 - DNA, 15 bp, Homo sapiens
atgaatagtttccaa

SEQ ID NO: 908232 - DNA, 15 bp, Homo sapiens
tgaatagtttccaag

SEQ ID NO: 908233 - DNA, 15 bp, Homo sapiens
gaatagtttccaagc

SEQ ID NO: 908234 - DNA, 15 bp, Homo sapiens
aatagtttccaagca

SEQ ID NO: 908235 - DNA, 15 bp, Homo sapiens
atagtttccaagcat

SEQ ID NO: 908236 - DNA, 15 bp, Homo sapiens
tagtttccaagcatg

SEQ ID NO: 908237 - DNA, 15 bp, Homo sapiens
agtttccaagcatga

SEQ ID NO: 908238 - DNA, 15 bp, Homo sapiens
gtttccaagcatgac

SEQ ID NO: 908239 - DNA, 15 bp, Homo sapiens
tttccaagcatgacc

SEQ ID NO: 908240 - DNA, 15 bp, Homo sapiens
ttccaagcatgacct

SEQ ID NO: 908241 - DNA, 15 bp, Homo sapiens
tccaagcatgacctt

SEQ ID NO: 908242 - DNA, 15 bp, Homo sapiens
ccaagcatgaccttg

SEQ ID NO: 908243 - DNA, 15 bp, Homo sapiens
caagcatgaccttga

SEQ ID NO: 908244 - DNA, 15 bp, Homo sapiens
aagcatgaccttgat

SEQ ID NO: 908245 - DNA, 15 bp, Homo sapiens
agcatgaccttgatc

SEQ ID NO: 908246 - DNA, 15 bp, Homo sapiens
gcatgaccttgatca

SEQ ID NO: 908247 - DNA, 15 bp, Homo sapiens
catgaccttgatcat

SEQ ID NO: 908248 - DNA, 15 bp, Homo sapiens
atgaccttgatcatg

SEQ ID NO: 908249 - DNA, 15 bp, Homo sapiens
tgaccttgatcatgg

SEQ ID NO: 908250 - DNA, 15 bp, Homo sapiens
gaccttgatcatgga

SEQ ID NO: 908251 - DNA, 15 bp, Homo sapiens
accttgatcatggaa

SEQ ID NO: 908252 - DNA, 15 bp, Homo sapiens
ccttgatcatggaac

SEQ ID NO: 908253 - DNA, 15 bp, Homo sapiens
cttgatcatggaact

SEQ ID NO: 908254 - DNA, 15 bp, Homo sapiens
ttgatcatggaactt

SEQ ID NO: 908255 - DNA, 15 bp, Homo sapiens
tgatcatggaacttc

SEQ ID NO: 908256 - DNA, 15 bp, Homo sapiens
gatcatggaacttcc

SEQ ID NO: 908257 - DNA, 15 bp, Homo sapiens
atcatggaacttccc

SEQ ID NO: 908258 - DNA, 15 bp, Homo sapiens
tcatggaacttccct

SEQ ID NO: 908259 - DNA, 15 bp, Homo sapiens
catggaacttccctc

SEQ ID NO: 908260 - DNA, 15 bp, Homo sapiens
atggaacttccctca

SEQ ID NO: 908261 - DNA, 15 bp, Homo sapiens
tggaacttccctcat

SEQ ID NO: 908262 - DNA, 15 bp, Homo sapiens
ggaacttccctcatc

SEQ ID NO: 908263 - DNA, 15 bp, Homo sapiens
gaacttccctcatca

SEQ ID NO: 908264 - DNA, 15 bp, Homo sapiens
aacttccctcatcac

SEQ ID NO: 908265 - DNA, 15 bp, Homo sapiens
acttccctcatcaca

SEQ ID NO: 908266 - DNA, 15 bp, Homo sapiens
cttccctcatcacag

SEQ ID NO: 908267 - DNA, 15 bp, Homo sapiens
ttccctcatcacagc

SEQ ID NO: 908268 - DNA, 15 bp, Homo sapiens
tccctcatcacagcc

SEQ ID NO: 908269 - DNA, 15 bp, Homo sapiens
ccctcatcacagcca

SEQ ID NO: 908270 - DNA, 15 bp, Homo sapiens
cctcatcacagccat

SEQ ID NO: 908271 - DNA, 15 bp, Homo sapiens
ctcatcacagccatt

SEQ ID NO: 908272 - DNA, 15 bp, Homo sapiens
tcatcacagccattg

SEQ ID NO: 908273 - DNA, 15 bp, Homo sapiens
catcacagccattgg

SEQ ID NO: 908274 - DNA, 15 bp, Homo sapiens
atcacagccattggc

SEQ ID NO: 908275 - DNA, 15 bp, Homo sapiens
tcacagccattggct

SEQ ID NO: 908276 - DNA, 15 bp, Homo sapiens
cacagccattggctc

SEQ ID NO: 908277 - DNA, 15 bp, Homo sapiens
acagccattggctct

SEQ ID NO: 908278 - DNA, 15 bp, Homo sapiens
cagccattggctctc

SEQ ID NO: 908279 - DNA, 15 bp, Homo sapiens
agccattggctctca

SEQ ID NO: 908280 - DNA, 15 bp, Homo sapiens
gccattggctctcac

SEQ ID NO: 908281 - DNA, 15 bp, Homo sapiens
ccattggctctcact

SEQ ID NO: 908282 - DNA, 15 bp, Homo sapiens
cattggctctcactt

SEQ ID NO: 908283 - DNA, 15 bp, Homo sapiens
attggctctcactta

SEQ ID NO: 908284 - DNA, 15 bp, Homo sapiens
ttggctctcacttaa

SEQ ID NO: 908285 - DNA, 15 bp, Homo sapiens
tggctctcacttaac

SEQ ID NO: 908286 - DNA, 15 bp, Homo sapiens
ggctctcacttaacc

SEQ ID NO: 908287 - DNA, 15 bp, Homo sapiens
gctctcacttaacca

SEQ ID NO: 908288 - DNA, 15 bp, Homo sapiens
ctctcacttaaccaa

SEQ ID NO: 908289 - DNA, 15 bp, Homo sapiens
tctcacttaaccaag

SEQ ID NO: 908290 - DNA, 15 bp, Homo sapiens
ctcacttaaccaagc

SEQ ID NO: 908291 - DNA, 15 bp, Homo sapiens
tcacttaaccaagca

SEQ ID NO: 908292 - DNA, 15 bp, Homo sapiens
cacttaaccaagcaa

SEQ ID NO: 908293 - DNA, 15 bp, Homo sapiens
acttaaccaagcaaa

SEQ ID NO: 908294 - DNA, 15 bp, Homo sapiens
cttaaccaagcaaat

SEQ ID NO: 908295 - DNA, 15 bp, Homo sapiens
ttaaccaagcaaatc

SEQ ID NO: 908296 - DNA, 15 bp, Homo sapiens
taaccaagcaaatca

SEQ ID NO: 908297 - DNA, 15 bp, Homo sapiens
aaccaagcaaatcaa

SEQ ID NO: 908298 - DNA, 15 bp, Homo sapiens
accaagcaaatcaag

SEQ ID NO: 908299 - DNA, 15 bp, Homo sapiens
ccaagcaaatcaagt

SEQ ID NO: 908300 - DNA, 15 bp, Homo sapiens
caagcaaatcaagtc

SEQ ID NO: 908301 - DNA, 15 bp, Homo sapiens
aagcaaatcaagtct

SEQ ID NO: 908302 - DNA, 15 bp, Homo sapiens
agcaaatcaagtctt

SEQ ID NO: 908303 - DNA, 15 bp, Homo sapiens
gcaaatcaagtcttc

SEQ ID NO: 908304 - DNA, 15 bp, Homo sapiens
caaatcaagtcttct

SEQ ID NO: 908305 - DNA, 15 bp, Homo sapiens
aaatcaagtcttcta

SEQ ID NO: 908306 - DNA, 15 bp, Homo sapiens
aatcaagtcttctag

SEQ ID NO: 908307 - DNA, 15 bp, Homo sapiens
atcaagtcttctagg

SEQ ID NO: 908308 - DNA, 15 bp, Homo sapiens
tcaagtcttctagga

SEQ ID NO: 908309 - DNA, 15 bp, Homo sapiens
caagtcttctaggac

SEQ ID NO: 908310 - DNA, 15 bp, Homo sapiens
aagtcttctaggact

SEQ ID NO: 908311 - DNA, 15 bp, Homo sapiens
agtcttctaggactg

SEQ ID NO: 908312 - DNA, 15 bp, Homo sapiens
gtcttctaggactgg

SEQ ID NO: 908313 - DNA, 15 bp, Homo sapiens
tcttctaggactgga

SEQ ID NO: 908314 - DNA, 15 bp, Homo sapiens
cttctaggactggat

SEQ ID NO: 908315 - DNA, 15 bp, Homo sapiens
ttctaggactggatg

SEQ ID NO: 908316 - DNA, 15 bp, Homo sapiens
tctaggactggatgt

SEQ ID NO: 908317 - DNA, 15 bp, Homo sapiens
ctaggactggatgtc

SEQ ID NO: 908318 - DNA, 15 bp, Homo sapiens
taggactggatgtca

SEQ ID NO: 908319 - DNA, 15 bp, Homo sapiens
aggactggatgtcaa

SEQ ID NO: 908320 - DNA, 15 bp, Homo sapiens
ggactggatgtcaag

SEQ ID NO: 908321 - DNA, 15 bp, Homo sapiens
gactggatgtcaaga

SEQ ID NO: 908322 - DNA, 15 bp, Homo sapiens
actggatgtcaagac

SEQ ID NO: 908323 - DNA, 15 bp, Homo sapiens
ctggatgtcaagacc

SEQ ID NO: 908324 - DNA, 15 bp, Homo sapiens
tggatgtcaagaccc

SEQ ID NO: 908325 - DNA, 15 bp, Homo sapiens
ggatgtcaagaccct

SEQ ID NO: 908326 - DNA, 15 bp, Homo sapiens
gatgtcaagaccctc

SEQ ID NO: 908327 - DNA, 15 bp, Homo sapiens
atgtcaagaccctcc

SEQ ID NO: 908328 - DNA, 15 bp, Homo sapiens
tgtcaagaccctcca

SEQ ID NO: 908329 - DNA, 15 bp, Homo sapiens
gtcaagaccctccaa

SEQ ID NO: 908330 - DNA, 15 bp, Homo sapiens
tcaagaccctccaat

SEQ ID NO: 908331 - DNA, 15 bp, Homo sapiens
caagaccctccaatt

SEQ ID NO: 908332 - DNA, 15 bp, Homo sapiens
aagaccctccaattt

SEQ ID NO: 908333 - DNA, 15 bp, Homo sapiens
agaccctccaatttt

SEQ ID NO: 908334 - DNA, 15 bp, Homo sapiens
gaccctccaattttt

SEQ ID NO: 908335 - DNA, 15 bp, Homo sapiens
accctccaatttttg

SEQ ID NO: 908336 - DNA, 15 bp, Homo sapiens
ccctccaatttttga

SEQ ID NO: 908337 - DNA, 15 bp, Homo sapiens
cctccaatttttgat

SEQ ID NO: 908338 - DNA, 15 bp, Homo sapiens
ctccaatttttgatg

SEQ ID NO: 908339 - DNA, 15 bp, Homo sapiens
tccaatttttgatgg

SEQ ID NO: 908340 - DNA, 15 bp, Homo sapiens
ccaatttttgatggc

SEQ ID NO: 908341 - DNA, 15 bp, Homo sapiens
caatttttgatggcc

SEQ ID NO: 908342 - DNA, 15 bp, Homo sapiens
aatttttgatggcca

SEQ ID NO: 908343 - DNA, 15 bp, Homo sapiens
atttttgatggccag

SEQ ID NO: 908344 - DNA, 15 bp, Homo sapiens
tttttgatggccagg

SEQ ID NO: 908345 - DNA, 15 bp, Homo sapiens
ttttgatggccaggt

SEQ ID NO: 908346 - DNA, 15 bp, Homo sapiens
tttgatggccaggtg

SEQ ID NO: 908347 - DNA, 15 bp, Homo sapiens
ttgatggccaggtga

SEQ ID NO: 908348 - DNA, 15 bp, Homo sapiens
tgatggccaggtgaa

SEQ ID NO: 908349 - DNA, 15 bp, Homo sapiens
gatggccaggtgaat

SEQ ID NO: 908350 - DNA, 15 bp, Homo sapiens
atggccaggtgaatt

SEQ ID NO: 908351 - DNA, 15 bp, Homo sapiens
tggccaggtgaattt

SEQ ID NO: 908352 - DNA, 15 bp, Homo sapiens
ggccaggtgaatttc

SEQ ID NO: 908353 - DNA, 15 bp, Homo sapiens
gccaggtgaatttct

SEQ ID NO: 908354 - DNA, 15 bp, Homo sapiens
ccaggtgaatttcta

SEQ ID NO: 908355 - DNA, 15 bp, Homo sapiens
caggtgaatttctag

SEQ ID NO: 908356 - DNA, 15 bp, Homo sapiens
aggtgaatttctagc

SEQ ID NO: 908357 - DNA, 15 bp, Homo sapiens
ggtgaatttctagcc

SEQ ID NO: 908358 - DNA, 15 bp, Homo sapiens
gtgaatttctagcct

SEQ ID NO: 908359 - DNA, 15 bp, Homo sapiens
tgaatttctagccta

SEQ ID NO: 908360 - DNA, 15 bp, Homo sapiens
gaatttctagcctaa

SEQ ID NO: 908361 - DNA, 15 bp, Homo sapiens
aatttctagcctaat

SEQ ID NO: 908362 - DNA, 15 bp, Homo sapiens
atttctagcctaatc

SEQ ID NO: 908363 - DNA, 15 bp, Homo sapiens
tttctagcctaatcc

SEQ ID NO: 908364 - DNA, 15 bp, Homo sapiens
ttctagcctaatcct

SEQ ID NO: 908365 - DNA, 15 bp, Homo sapiens
tctagcctaatcctt

SEQ ID NO: 908366 - DNA, 15 bp, Homo sapiens
ctagcctaatcctta

SEQ ID NO: 908367 - DNA, 15 bp, Homo sapiens
tagcctaatccttac

SEQ ID NO: 908368 - DNA, 15 bp, Homo sapiens
agcctaatccttacc

SEQ ID NO: 908369 - DNA, 15 bp, Homo sapiens
gcctaatccttacct

SEQ ID NO: 908370 - DNA, 15 bp, Homo sapiens
cctaatccttacctc

SEQ ID NO: 908371 - DNA, 15 bp, Homo sapiens
ctaatccttacctcc

SEQ ID NO: 908372 - DNA, 15 bp, Homo sapiens
taatccttacctccc

SEQ ID NO: 908373 - DNA, 15 bp, Homo sapiens
aatccttacctccct

SEQ ID NO: 908374 - DNA, 15 bp, Homo sapiens
atccttacctccctt

SEQ ID NO: 908375 - DNA, 15 bp, Homo sapiens
tccttacctcccttc

SEQ ID NO: 908376 - DNA, 15 bp, Homo sapiens
ccttacctcccttct

SEQ ID NO: 908377 - DNA, 15 bp, Homo sapiens
cttacctcccttctc

SEQ ID NO: 908378 - DNA, 15 bp, Homo sapiens
ttacctcccttctct

SEQ ID NO: 908379 - DNA, 15 bp, Homo sapiens
tacctcccttctctc

SEQ ID NO: 908380 - DNA, 15 bp, Homo sapiens
acctcccttctctca

SEQ ID NO: 908381 - DNA, 15 bp, Homo sapiens
cctcccttctctcat

SEQ ID NO: 908382 - DNA, 15 bp, Homo sapiens
ctcccttctctcatc

SEQ ID NO: 908383 - DNA, 15 bp, Homo sapiens
tcccttctctcatcc

SEQ ID NO: 908384 - DNA, 15 bp, Homo sapiens
cccttctctcatcct

SEQ ID NO: 908385 - DNA, 15 bp, Homo sapiens
ccttctctcatcctg

SEQ ID NO: 908386 - DNA, 15 bp, Homo sapiens
cttctctcatcctgt

SEQ ID NO: 908387 - DNA, 15 bp, Homo sapiens
ttctctcatcctgtt

SEQ ID NO: 908388 - DNA, 15 bp, Homo sapiens
tctctcatcctgtta

SEQ ID NO: 908389 - DNA, 15 bp, Homo sapiens
ctctcatcctgttac

SEQ ID NO: 908390 - DNA, 15 bp, Homo sapiens
tctcatcctgttaca

SEQ ID NO: 908391 - DNA, 15 bp, Homo sapiens
ctcatcctgttacaa

SEQ ID NO: 908392 - DNA, 15 bp, Homo sapiens
tcatcctgttacaac

SEQ ID NO: 908393 - DNA, 15 bp, Homo sapiens
catcctgttacaact

SEQ ID NO: 908394 - DNA, 15 bp, Homo sapiens
atcctgttacaacta

SEQ ID NO: 908395 - DNA, 15 bp, Homo sapiens
tcctgttacaactaa

SEQ ID NO: 908396 - DNA, 15 bp, Homo sapiens
cctgttacaactaaa

SEQ ID NO: 908397 - DNA, 15 bp, Homo sapiens
ctgttacaactaaac

SEQ ID NO: 908398 - DNA, 15 bp, Homo sapiens
tgttacaactaaact

SEQ ID NO: 908399 - DNA, 15 bp, Homo sapiens
gttacaactaaacta

SEQ ID NO: 908400 - DNA, 15 bp, Homo sapiens
ttacaactaaactat

SEQ ID NO: 908401 - DNA, 15 bp, Homo sapiens
tacaactaaactata

SEQ ID NO: 908402 - DNA, 15 bp, Homo sapiens
acaactaaactatac

SEQ ID NO: 908403 - DNA, 15 bp, Homo sapiens
caactaaactatact

SEQ ID NO: 908404 - DNA, 15 bp, Homo sapiens
aactaaactatacta

SEQ ID NO: 908405 - DNA, 15 bp, Homo sapiens
actaaactatactac

SEQ ID NO: 908406 - DNA, 15 bp, Homo sapiens
ctaaactatactact

SEQ ID NO: 908407 - DNA, 15 bp, Homo sapiens
taaactatactactt

SEQ ID NO: 908408 - DNA, 15 bp, Homo sapiens
aaactatactacttg

SEQ ID NO: 908409 - DNA, 15 bp, Homo sapiens
aactatactacttgc

SEQ ID NO: 908410 - DNA, 15 bp, Homo sapiens
actatactacttgcc

SEQ ID NO: 908411 - DNA, 15 bp, Homo sapiens
ctatactacttgcca

SEQ ID NO: 908412 - DNA, 15 bp, Homo sapiens
tatactacttgccat

SEQ ID NO: 908413 - DNA, 15 bp, Homo sapiens
atactacttgccata

SEQ ID NO: 908414 - DNA, 15 bp, Homo sapiens
tactacttgccatat

SEQ ID NO: 908415 - DNA, 15 bp, Homo sapiens
actacttgccatatc

SEQ ID NO: 908416 - DNA, 15 bp, Homo sapiens
ctacttgccatatct

SEQ ID NO: 908417 - DNA, 15 bp, Homo sapiens
tacttgccatatctc

SEQ ID NO: 908418 - DNA, 15 bp, Homo sapiens
acttgccatatctca

SEQ ID NO: 908419 - DNA, 15 bp, Homo sapiens
cttgccatatctcaa

SEQ ID NO: 908420 - DNA, 15 bp, Homo sapiens
ttgccatatctcaag

SEQ ID NO: 908421 - DNA, 15 bp, Homo sapiens
tgccatatctcaagc

SEQ ID NO: 908422 - DNA, 15 bp, Homo sapiens
gccatatctcaagca

SEQ ID NO: 908423 - DNA, 15 bp, Homo sapiens
ccatatctcaagcat

SEQ ID NO: 908424 - DNA, 15 bp, Homo sapiens
catatctcaagcatg

SEQ ID NO: 908425 - DNA, 15 bp, Homo sapiens
atatctcaagcatgc

SEQ ID NO: 908426 - DNA, 15 bp, Homo sapiens
tatctcaagcatgcc

SEQ ID NO: 908427 - DNA, 15 bp, Homo sapiens
atctcaagcatgcct

SEQ ID NO: 908428 - DNA, 15 bp, Homo sapiens
tctcaagcatgccta

SEQ ID NO: 908429 - DNA, 15 bp, Homo sapiens
ctcaagcatgcctat

SEQ ID NO: 908430 - DNA, 15 bp, Homo sapiens
tcaagcatgcctatc

SEQ ID NO: 908431 - DNA, 15 bp, Homo sapiens
caagcatgcctatca

SEQ ID NO: 908432 - DNA, 15 bp, Homo sapiens
aagcatgcctatcat

SEQ ID NO: 908433 - DNA, 15 bp, Homo sapiens
agcatgcctatcatg

SEQ ID NO: 908434 - DNA, 15 bp, Homo sapiens
gcatgcctatcatgt

SEQ ID NO: 908435 - DNA, 15 bp, Homo sapiens
catgcctatcatgtc

SEQ ID NO: 908436 - DNA, 15 bp, Homo sapiens
atgcctatcatgtct

SEQ ID NO: 908437 - DNA, 15 bp, Homo sapiens
tgcctatcatgtctt

SEQ ID NO: 908438 - DNA, 15 bp, Homo sapiens
gcctatcatgtcttt

SEQ ID NO: 908439 - DNA, 15 bp, Homo sapiens
cctatcatgtcttta

SEQ ID NO: 908440 - DNA, 15 bp, Homo sapiens
ctatcatgtctttat

SEQ ID NO: 908441 - DNA, 15 bp, Homo sapiens
tatcatgtctttata

SEQ ID NO: 908442 - DNA, 15 bp, Homo sapiens
atcatgtctttatat

SEQ ID NO: 908443 - DNA, 15 bp, Homo sapiens
tcatgtctttatatc

SEQ ID NO: 908444 - DNA, 15 bp, Homo sapiens
catgtctttatatct

SEQ ID NO: 908445 - DNA, 15 bp, Homo sapiens
atgtctttatatctc

SEQ ID NO: 908446 - DNA, 15 bp, Homo sapiens
tgtctttatatctct

SEQ ID NO: 908447 - DNA, 15 bp, Homo sapiens
gtctttatatctctg

SEQ ID NO: 908448 - DNA, 15 bp, Homo sapiens
tctttatatctctgt

SEQ ID NO: 908449 - DNA, 15 bp, Homo sapiens
ctttatatctctgtc

SEQ ID NO: 908450 - DNA, 15 bp, Homo sapiens
tttatatctctgtcc

SEQ ID NO: 908451 - DNA, 15 bp, Homo sapiens
ttatatctctgtccc

SEQ ID NO: 908452 - DNA, 15 bp, Homo sapiens
tatatctctgtccct

SEQ ID NO: 908453 - DNA, 15 bp, Homo sapiens
atatctctgtccctg

SEQ ID NO: 908454 - DNA, 15 bp, Homo sapiens
tatctctgtccctga

SEQ ID NO: 908455 - DNA, 15 bp, Homo sapiens
atctctgtccctgag

SEQ ID NO: 908456 - DNA, 15 bp, Homo sapiens
tctctgtccctgagc

SEQ ID NO: 908457 - DNA, 15 bp, Homo sapiens
ctctgtccctgagcc

SEQ ID NO: 908458 - DNA, 15 bp, Homo sapiens
tctgtccctgagccc

SEQ ID NO: 908459 - DNA, 15 bp, Homo sapiens
ctgtccctgagcccc

SEQ ID NO: 908460 - DNA, 15 bp, Homo sapiens
tgtccctgagcccca

SEQ ID NO: 908461 - DNA, 15 bp, Homo sapiens
gtccctgagccccat

SEQ ID NO: 908462 - DNA, 15 bp, Homo sapiens
tccctgagccccatg

SEQ ID NO: 908463 - DNA, 15 bp, Homo sapiens
ccctgagccccatgc

SEQ ID NO: 908464 - DNA, 15 bp, Homo sapiens
cctgagccccatgca

SEQ ID NO: 908465 - DNA, 15 bp, Homo sapiens
ctgagccccatgcat

SEQ ID NO: 908466 - DNA, 15 bp, Homo sapiens
tgagccccatgcatt

SEQ ID NO: 908467 - DNA, 15 bp, Homo sapiens
gagccccatgcattt

SEQ ID NO: 908468 - DNA, 15 bp, Homo sapiens
agccccatgcatttc

SEQ ID NO: 908469 - DNA, 15 bp, Homo sapiens
gccccatgcatttca

SEQ ID NO: 908470 - DNA, 15 bp, Homo sapiens
ccccatgcatttcaa

SEQ ID NO: 908471 - DNA, 15 bp, Homo sapiens
cccatgcatttcaaa

SEQ ID NO: 908472 - DNA, 15 bp, Homo sapiens
ccatgcatttcaaac

SEQ ID NO: 908473 - DNA, 15 bp, Homo sapiens
catgcatttcaaacc

SEQ ID NO: 908474 - DNA, 15 bp, Homo sapiens
atgcatttcaaacct

SEQ ID NO: 908475 - DNA, 15 bp, Homo sapiens
tgcatttcaaacctc

SEQ ID NO: 908476 - DNA, 15 bp, Homo sapiens
gcatttcaaacctcc

SEQ ID NO: 908477 - DNA, 15 bp, Homo sapiens
catttcaaacctcca

SEQ ID NO: 908478 - DNA, 15 bp, Homo sapiens
atttcaaacctccag

SEQ ID NO: 908479 - DNA, 15 bp, Homo sapiens
tttcaaacctccaga

SEQ ID NO: 908480 - DNA, 15 bp, Homo sapiens
ttcaaacctccagaa

SEQ ID NO: 908481 - DNA, 15 bp, Homo sapiens
tcaaacctccagaaa

SEQ ID NO: 908482 - DNA, 15 bp, Homo sapiens
caaacctccagaaaa

SEQ ID NO: 908483 - DNA, 15 bp, Homo sapiens
aaacctccagaaaag

SEQ ID NO: 908484 - DNA, 15 bp, Homo sapiens
aacctccagaaaagg

SEQ ID NO: 908485 - DNA, 15 bp, Homo sapiens
acctccagaaaaggt

SEQ ID NO: 908486 - DNA, 15 bp, Homo sapiens
cctccagaaaaggtc

SEQ ID NO: 908487 - DNA, 15 bp, Homo sapiens
ctccagaaaaggtct

SEQ ID NO: 908488 - DNA, 15 bp, Homo sapiens
tccagaaaaggtctc

SEQ ID NO: 908489 - DNA, 15 bp, Homo sapiens
ccagaaaaggtctct

SEQ ID NO: 908490 - DNA, 15 bp, Homo sapiens
cagaaaaggtctctt

SEQ ID NO: 908491 - DNA, 15 bp, Homo sapiens
agaaaaggtctcttt

SEQ ID NO: 908492 - DNA, 15 bp, Homo sapiens
gaaaaggtctctttc

SEQ ID NO: 908493 - DNA, 15 bp, Homo sapiens
aaaaggtctctttcc

SEQ ID NO: 908494 - DNA, 15 bp, Homo sapiens
aaaggtctctttccc

SEQ ID NO: 908495 - DNA, 15 bp, Homo sapiens
aaggtctctttcccc

SEQ ID NO: 908496 - DNA, 15 bp, Homo sapiens
aggtctctttcccct

SEQ ID NO: 908497 - DNA, 15 bp, Homo sapiens
ggtctctttcccctc

SEQ ID NO: 908498 - DNA, 15 bp, Homo sapiens
gtctctttcccctct

SEQ ID NO: 908499 - DNA, 15 bp, Homo sapiens
tctctttcccctctc

SEQ ID NO: 908500 - DNA, 15 bp, Homo sapiens
ctctttcccctctca

SEQ ID NO: 908501 - DNA, 15 bp, Homo sapiens
tctttcccctctcat

SEQ ID NO: 908502 - DNA, 15 bp, Homo sapiens
ctttcccctctcatt

SEQ ID NO: 908503 - DNA, 15 bp, Homo sapiens
tttcccctctcattt

SEQ ID NO: 908504 - DNA, 15 bp, Homo sapiens
ttcccctctcatttc

SEQ ID NO: 908505 - DNA, 15 bp, Homo sapiens
tcccctctcatttcc

SEQ ID NO: 908506 - DNA, 15 bp, Homo sapiens
cccctctcatttcca

SEQ ID NO: 908507 - DNA, 15 bp, Homo sapiens
ccctctcatttccac

SEQ ID NO: 908508 - DNA, 15 bp, Homo sapiens
cctctcatttccacc

SEQ ID NO: 908509 - DNA, 15 bp, Homo sapiens
ctctcatttccacct

SEQ ID NO: 908510 - DNA, 15 bp, Homo sapiens
tctcatttccacctc

SEQ ID NO: 908511 - DNA, 15 bp, Homo sapiens
ctcatttccacctcc

SEQ ID NO: 908512 - DNA, 15 bp, Homo sapiens
tcatttccacctccc

SEQ ID NO: 908513 - DNA, 15 bp, Homo sapiens
catttccacctccca

SEQ ID NO: 908514 - DNA, 15 bp, Homo sapiens
atttccacctcccaa

SEQ ID NO: 908515 - DNA, 15 bp, Homo sapiens
tttccacctcccaaa

SEQ ID NO: 908516 - DNA, 15 bp, Homo sapiens
ttccacctcccaaaa

SEQ ID NO: 908517 - DNA, 15 bp, Homo sapiens
tccacctcccaaaat

SEQ ID NO: 908518 - DNA, 15 bp, Homo sapiens
ccacctcccaaaatc

SEQ ID NO: 908519 - DNA, 15 bp, Homo sapiens
cacctcccaaaatct

SEQ ID NO: 908520 - DNA, 15 bp, Homo sapiens
acctcccaaaatcta

SEQ ID NO: 908521 - DNA, 15 bp, Homo sapiens
cctcccaaaatctac

SEQ ID NO: 908522 - DNA, 15 bp, Homo sapiens
ctcccaaaatctacc

SEQ ID NO: 908523 - DNA, 15 bp, Homo sapiens
tcccaaaatctacca

SEQ ID NO: 908524 - DNA, 15 bp, Homo sapiens
cccaaaatctaccaa

SEQ ID NO: 908525 - DNA, 15 bp, Homo sapiens
ccaaaatctaccaat

SEQ ID NO: 908526 - DNA, 15 bp, Homo sapiens
caaaatctaccaatt

SEQ ID NO: 908527 - DNA, 15 bp, Homo sapiens
aaaatctaccaattc

SEQ ID NO: 908528 - DNA, 15 bp, Homo sapiens
aaatctaccaattct

SEQ ID NO: 908529 - DNA, 15 bp, Homo sapiens
aatctaccaattctc

SEQ ID NO: 908530 - DNA, 15 bp, Homo sapiens
atctaccaattctca

SEQ ID NO: 908531 - DNA, 15 bp, Homo sapiens
tctaccaattctcaa

SEQ ID NO: 908532 - DNA, 15 bp, Homo sapiens
ctaccaattctcaat

SEQ ID NO: 908533 - DNA, 15 bp, Homo sapiens
taccaattctcaatg

SEQ ID NO: 908534 - DNA, 15 bp, Homo sapiens
accaattctcaatgg

SEQ ID NO: 908535 - DNA, 15 bp, Homo sapiens
ccaattctcaatggt

SEQ ID NO: 908536 - DNA, 15 bp, Homo sapiens
caattctcaatggtt

SEQ ID NO: 908537 - DNA, 15 bp, Homo sapiens
aattctcaatggttc

SEQ ID NO: 908538 - DNA, 15 bp, Homo sapiens
attctcaatggttcc

SEQ ID NO: 908539 - DNA, 15 bp, Homo sapiens
ttctcaatggttcct

SEQ ID NO: 908540 - DNA, 15 bp, Homo sapiens
tctcaatggttcctc

SEQ ID NO: 908541 - DNA, 15 bp, Homo sapiens
ctcaatggttcctct

SEQ ID NO: 908542 - DNA, 15 bp, Homo sapiens
tcaatggttcctctt

SEQ ID NO: 908543 - DNA, 15 bp, Homo sapiens
caatggttcctctta

SEQ ID NO: 908544 - DNA, 15 bp, Homo sapiens
aatggttcctcttaa

SEQ ID NO: 908545 - DNA, 15 bp, Homo sapiens
atggttcctcttaaa

SEQ ID NO: 908546 - DNA, 15 bp, Homo sapiens
tggttcctcttaaat

SEQ ID NO: 908547 - DNA, 15 bp, Homo sapiens
ggttcctcttaaata

SEQ ID NO: 908548 - DNA, 15 bp, Homo sapiens
gttcctcttaaatag

SEQ ID NO: 908549 - DNA, 15 bp, Homo sapiens
ttcctcttaaataga

SEQ ID NO: 908550 - DNA, 15 bp, Homo sapiens
tcctcttaaatagag

SEQ ID NO: 908551 - DNA, 15 bp, Homo sapiens
cctcttaaatagagc

SEQ ID NO: 908552 - DNA, 15 bp, Homo sapiens
ctcttaaatagagcc

SEQ ID NO: 908553 - DNA, 15 bp, Homo sapiens
tcttaaatagagcct

SEQ ID NO: 908554 - DNA, 15 bp, Homo sapiens
cttaaatagagcctc

SEQ ID NO: 908555 - DNA, 15 bp, Homo sapiens
ttaaatagagcctcc

SEQ ID NO: 908556 - DNA, 15 bp, Homo sapiens
taaatagagcctccc

SEQ ID NO: 908557 - DNA, 15 bp, Homo sapiens
aaatagagcctcccc

SEQ ID NO: 908558 - DNA, 15 bp, Homo sapiens
aatagagcctcccct

SEQ ID NO: 908559 - DNA, 15 bp, Homo sapiens
atagagcctcccctt

SEQ ID NO: 908560 - DNA, 15 bp, Homo sapiens
tagagcctcccctta

SEQ ID NO: 908561 - DNA, 15 bp, Homo sapiens
agagcctccccttaa

SEQ ID NO: 908562 - DNA, 15 bp, Homo sapiens
gagcctccccttaat

SEQ ID NO: 908563 - DNA, 15 bp, Homo sapiens
agcctccccttaatc

SEQ ID NO: 908564 - DNA, 15 bp, Homo sapiens
gcctccccttaatcc

SEQ ID NO: 908565 - DNA, 15 bp, Homo sapiens
cctccccttaatcct

SEQ ID NO: 908566 - DNA, 15 bp, Homo sapiens
ctccccttaatcctt

SEQ ID NO: 908567 - DNA, 15 bp, Homo sapiens
tccccttaatccttt

SEQ ID NO: 908568 - DNA, 15 bp, Homo sapiens
ccccttaatcctttc

SEQ ID NO: 908569 - DNA, 15 bp, Homo sapiens
cccttaatcctttca

SEQ ID NO: 908570 - DNA, 15 bp, Homo sapiens
ccttaatcctttcac

SEQ ID NO: 908571 - DNA, 15 bp, Homo sapiens
cttaatcctttcaca

SEQ ID NO: 908572 - DNA, 15 bp, Homo sapiens
ttaatcctttcacat

SEQ ID NO: 908573 - DNA, 15 bp, Homo sapiens
taatcctttcacatt

SEQ ID NO: 908574 - DNA, 15 bp, Homo sapiens
aatcctttcacattt

SEQ ID NO: 908575 - DNA, 15 bp, Homo sapiens
atcctttcacatttt

SEQ ID NO: 908576 - DNA, 15 bp, Homo sapiens
tcctttcacattttt

SEQ ID NO: 908577 - DNA, 15 bp, Homo sapiens
cctttcacatttttc

SEQ ID NO: 908578 - DNA, 15 bp, Homo sapiens
ctttcacatttttcc

SEQ ID NO: 908579 - DNA, 15 bp, Homo sapiens
tttcacatttttcct

SEQ ID NO: 908580 - DNA, 15 bp, Homo sapiens
ttcacatttttcctc

SEQ ID NO: 908581 - DNA, 15 bp, Homo sapiens
tcacatttttcctct

SEQ ID NO: 908582 - DNA, 15 bp, Homo sapiens
cacatttttcctctt

SEQ ID NO: 908583 - DNA, 15 bp, Homo sapiens
acatttttcctcttc

SEQ ID NO: 908584 - DNA, 15 bp, Homo sapiens
catttttcctcttcc

SEQ ID NO: 908585 - DNA, 15 bp, Homo sapiens
atttttcctcttcct

SEQ ID NO: 908586 - DNA, 15 bp, Homo sapiens
tttttcctcttcctt

SEQ ID NO: 908587 - DNA, 15 bp, Homo sapiens
ttttcctcttccttt

SEQ ID NO: 908588 - DNA, 15 bp, Homo sapiens
tttcctcttcctttt

SEQ ID NO: 908589 - DNA, 15 bp, Homo sapiens
ttcctcttccttttc

SEQ ID NO: 908590 - DNA, 15 bp, Homo sapiens
tcctcttccttttct

SEQ ID NO: 908591 - DNA, 15 bp, Homo sapiens
cctcttccttttcta

SEQ ID NO: 908592 - DNA, 15 bp, Homo sapiens
ctcttccttttctat

SEQ ID NO: 908593 - DNA, 15 bp, Homo sapiens
tcttccttttctatt

SEQ ID NO: 908594 - DNA, 15 bp, Homo sapiens
cttccttttctattc

SEQ ID NO: 908595 - DNA, 15 bp, Homo sapiens
ttccttttctattcc

SEQ ID NO: 908596 - DNA, 15 bp, Homo sapiens
tccttttctattcct

SEQ ID NO: 908597 - DNA, 15 bp, Homo sapiens
ccttttctattcctt

SEQ ID NO: 908598 - DNA, 15 bp, Homo sapiens
cttttctattccttt

SEQ ID NO: 908599 - DNA, 15 bp, Homo sapiens
ttttctattcctttc

SEQ ID NO: 908600 - DNA, 15 bp, Homo sapiens
tttctattcctttca

SEQ ID NO: 908601 - DNA, 15 bp, Homo sapiens
ttctattcctttcac

SEQ ID NO: 908602 - DNA, 15 bp, Homo sapiens
tctattcctttcact

SEQ ID NO: 908603 - DNA, 15 bp, Homo sapiens
ctattcctttcactc

SEQ ID NO: 908604 - DNA, 15 bp, Homo sapiens
tattcctttcactcc

SEQ ID NO: 908605 - DNA, 15 bp, Homo sapiens
attcctttcactcca

SEQ ID NO: 908606 - DNA, 15 bp, Homo sapiens
ttcctttcactccaa

SEQ ID NO: 908607 - DNA, 15 bp, Homo sapiens
tcctttcactccaag

SEQ ID NO: 908608 - DNA, 15 bp, Homo sapiens
cctttcactccaagc

SEQ ID NO: 908609 - DNA, 15 bp, Homo sapiens
ctttcactccaagct

SEQ ID NO: 908610 - DNA, 15 bp, Homo sapiens
tttcactccaagcta

SEQ ID NO: 908611 - DNA, 15 bp, Homo sapiens
ttcactccaagctag

SEQ ID NO: 908612 - DNA, 15 bp, Homo sapiens
tcactccaagctaga

SEQ ID NO: 908613 - DNA, 15 bp, Homo sapiens
cactccaagctagaa

SEQ ID NO: 908614 - DNA, 15 bp, Homo sapiens
actccaagctagaag

SEQ ID NO: 908615 - DNA, 15 bp, Homo sapiens
ctccaagctagaagg

SEQ ID NO: 908616 - DNA, 15 bp, Homo sapiens
tccaagctagaagga

SEQ ID NO: 908617 - DNA, 15 bp, Homo sapiens
ccaagctagaaggag

SEQ ID NO: 908618 - DNA, 15 bp, Homo sapiens
caagctagaaggagc

SEQ ID NO: 908619 - DNA, 15 bp, Homo sapiens
aagctagaaggagcc

SEQ ID NO: 908620 - DNA, 15 bp, Homo sapiens
agctagaaggagcct

SEQ ID NO: 908621 - DNA, 15 bp, Homo sapiens
gctagaaggagcctc

SEQ ID NO: 908622 - DNA, 15 bp, Homo sapiens
ctagaaggagcctct

SEQ ID NO: 908623 - DNA, 15 bp, Homo sapiens
tagaaggagcctctc

SEQ ID NO: 908624 - DNA, 15 bp, Homo sapiens
agaaggagcctctcc

SEQ ID NO: 908625 - DNA, 15 bp, Homo sapiens
gaaggagcctctcca

SEQ ID NO: 908626 - DNA, 15 bp, Homo sapiens
aaggagcctctccaa

SEQ ID NO: 908627 - DNA, 15 bp, Homo sapiens
aggagcctctccaat

SEQ ID NO: 908628 - DNA, 15 bp, Homo sapiens
ggagcctctccaatc

SEQ ID NO: 908629 - DNA, 15 bp, Homo sapiens
gagcctctccaatct

SEQ ID NO: 908630 - DNA, 15 bp, Homo sapiens
agcctctccaatctt

SEQ ID NO: 908631 - DNA, 15 bp, Homo sapiens
gcctctccaatcttt

SEQ ID NO: 908632 - DNA, 15 bp, Homo sapiens
cctctccaatctttg

SEQ ID NO: 908633 - DNA, 15 bp, Homo sapiens
ctctccaatctttga

SEQ ID NO: 908634 - DNA, 15 bp, Homo sapiens
tctccaatctttgaa

SEQ ID NO: 908635 - DNA, 15 bp, Homo sapiens
ctccaatctttgaac

SEQ ID NO: 908636 - DNA, 15 bp, Homo sapiens
tccaatctttgaact

SEQ ID NO: 908637 - DNA, 15 bp, Homo sapiens
ccaatctttgaactc

SEQ ID NO: 908638 - DNA, 15 bp, Homo sapiens
caatctttgaactcc

SEQ ID NO: 908639 - DNA, 15 bp, Homo sapiens
aatctttgaactcct

SEQ ID NO: 908640 - DNA, 15 bp, Homo sapiens
atctttgaactcctt

SEQ ID NO: 908641 - DNA, 15 bp, Homo sapiens
tctttgaactccttc

SEQ ID NO: 908642 - DNA, 15 bp, Homo sapiens
ctttgaactccttca

SEQ ID NO: 908643 - DNA, 15 bp, Homo sapiens
tttgaactccttcag

SEQ ID NO: 908644 - DNA, 15 bp, Homo sapiens
ttgaactccttcagc

SEQ ID NO: 908645 - DNA, 15 bp, Homo sapiens
tgaactccttcagca

SEQ ID NO: 908646 - DNA, 15 bp, Homo sapiens
gaactccttcagcag

SEQ ID NO: 908647 - DNA, 15 bp, Homo sapiens
aactccttcagcaga

SEQ ID NO: 908648 - DNA, 15 bp, Homo sapiens
actccttcagcagat

SEQ ID NO: 908649 - DNA, 15 bp, Homo sapiens
ctccttcagcagatt

SEQ ID NO: 908650 - DNA, 15 bp, Homo sapiens
tccttcagcagattc

SEQ ID NO: 908651 - DNA, 15 bp, Homo sapiens
ccttcagcagattct

SEQ ID NO: 908652 - DNA, 15 bp, Homo sapiens
cttcagcagattcta

SEQ ID NO: 908653 - DNA, 15 bp, Homo sapiens
ttcagcagattctac

SEQ ID NO: 908654 - DNA, 15 bp, Homo sapiens
tcagcagattctacc

SEQ ID NO: 908655 - DNA, 15 bp, Homo sapiens
cagcagattctacct

SEQ ID NO: 908656 - DNA, 15 bp, Homo sapiens
agcagattctacctt

SEQ ID NO: 908657 - DNA, 15 bp, Homo sapiens
gcagattctaccttt

SEQ ID NO: 908658 - DNA, 15 bp, Homo sapiens
cagattctacctttt

SEQ ID NO: 908659 - DNA, 15 bp, Homo sapiens
agattctaccttttg

SEQ ID NO: 908660 - DNA, 15 bp, Homo sapiens
gattctaccttttgg

SEQ ID NO: 908661 - DNA, 15 bp, Homo sapiens
attctaccttttggt

SEQ ID NO: 908662 - DNA, 15 bp, Homo sapiens
ttctaccttttggta

SEQ ID NO: 908663 - DNA, 15 bp, Homo sapiens
tctaccttttggtac

SEQ ID NO: 908664 - DNA, 15 bp, Homo sapiens
ctaccttttggtact

SEQ ID NO: 908665 - DNA, 15 bp, Homo sapiens
taccttttggtactt

SEQ ID NO: 908666 - DNA, 15 bp, Homo sapiens
accttttggtacttg

SEQ ID NO: 908667 - DNA, 15 bp, Homo sapiens
ccttttggtacttgc

SEQ ID NO: 908668 - DNA, 15 bp, Homo sapiens
cttttggtacttgct

SEQ ID NO: 908669 - DNA, 15 bp, Homo sapiens
ttttggtacttgctt

SEQ ID NO: 908670 - DNA, 15 bp, Homo sapiens
tttggtacttgcttg

SEQ ID NO: 908671 - DNA, 15 bp, Homo sapiens
ttggtacttgcttgt

SEQ ID NO: 908672 - DNA, 15 bp, Homo sapiens
tggtacttgcttgta

SEQ ID NO: 908673 - DNA, 15 bp, Homo sapiens
ggtacttgcttgtaa

SEQ ID NO: 908674 - DNA, 15 bp, Homo sapiens
gtacttgcttgtaac

SEQ ID NO: 908675 - DNA, 15 bp, Homo sapiens
tacttgcttgtaaca

SEQ ID NO: 908676 - DNA, 15 bp, Homo sapiens
acttgcttgtaacat

SEQ ID NO: 908677 - DNA, 15 bp, Homo sapiens
cttgcttgtaacata

SEQ ID NO: 908678 - DNA, 15 bp, Homo sapiens
ttgcttgtaacataa

SEQ ID NO: 908679 - DNA, 15 bp, Homo sapiens
tgcttgtaacataat

SEQ ID NO: 908680 - DNA, 15 bp, Homo sapiens
gcttgtaacataatt

SEQ ID NO: 908681 - DNA, 15 bp, Homo sapiens
cttgtaacataatta

SEQ ID NO: 908682 - DNA, 15 bp, Homo sapiens
ttgtaacataattat

SEQ ID NO: 908683 - DNA, 15 bp, Homo sapiens
tgtaacataattata

SEQ ID NO: 908684 - DNA, 15 bp, Homo sapiens
gtaacataattatat

SEQ ID NO: 908685 - DNA, 15 bp, Homo sapiens
taacataattatatg

SEQ ID NO: 908686 - DNA, 15 bp, Homo sapiens
aacataattatatgt

SEQ ID NO: 908687 - DNA, 15 bp, Homo sapiens
acataattatatgta

SEQ ID NO: 908688 - DNA, 15 bp, Homo sapiens
cataattatatgtat

SEQ ID NO: 908689 - DNA, 15 bp, Homo sapiens
ataattatatgtata

SEQ ID NO: 908690 - DNA, 15 bp, Homo sapiens
taattatatgtataa

SEQ ID NO: 908691 - DNA, 15 bp, Homo sapiens
aattatatgtataaa

SEQ ID NO: 908692 - DNA, 15 bp, Homo sapiens
attatatgtataaat

SEQ ID NO: 908693 - DNA, 15 bp, Homo sapiens
ttatatgtataaata

SEQ ID NO: 908694 - DNA, 15 bp, Homo sapiens
tatatgtataaataa

SEQ ID NO: 908695 - DNA, 15 bp, Homo sapiens
atatgtataaataag

SEQ ID NO: 908696 - DNA, 15 bp, Homo sapiens
tatgtataaataagt

SEQ ID NO: 908697 - DNA, 15 bp, Homo sapiens
atgtataaataagtt

SEQ ID NO: 908698 - DNA, 15 bp, Homo sapiens
tgtataaataagttt

SEQ ID NO: 908699 - DNA, 15 bp, Homo sapiens
gtataaataagtttt

SEQ ID NO: 908700 - DNA, 15 bp, Homo sapiens
tataaataagttttc

SEQ ID NO: 908701 - DNA, 15 bp, Homo sapiens
ataaataagttttcc

SEQ ID NO: 908702 - DNA, 15 bp, Homo sapiens
taaataagttttcct

SEQ ID NO: 908703 - DNA, 15 bp, Homo sapiens
aaataagttttcctt

SEQ ID NO: 908704 - DNA, 15 bp, Homo sapiens
aataagttttccttt

SEQ ID NO: 908705 - DNA, 15 bp, Homo sapiens
ataagttttcctttt

SEQ ID NO: 908706 - DNA, 15 bp, Homo sapiens
taagttttccttttt

SEQ ID NO: 908707 - DNA, 15 bp, Homo sapiens
aagttttcctttttt

SEQ ID NO: 908708 - DNA, 15 bp, Homo sapiens
agttttcctttttta

SEQ ID NO: 908709 - DNA, 15 bp, Homo sapiens
gttttccttttttac

SEQ ID NO: 908710 - DNA, 15 bp, Homo sapiens
ttttccttttttact

SEQ ID NO: 908711 - DNA, 15 bp, Homo sapiens
tttccttttttactt

SEQ ID NO: 908712 - DNA, 15 bp, Homo sapiens
ttccttttttacttc

SEQ ID NO: 908713 - DNA, 15 bp, Homo sapiens
tccttttttacttct

SEQ ID NO: 908714 - DNA, 15 bp, Homo sapiens
ccttttttacttcta

SEQ ID NO: 908715 - DNA, 15 bp, Homo sapiens
cttttttacttctac

SEQ ID NO: 908716 - DNA, 15 bp, Homo sapiens
ttttttacttctact

SEQ ID NO: 908717 - DNA, 15 bp, Homo sapiens
tttttacttctactt

SEQ ID NO: 908718 - DNA, 15 bp, Homo sapiens
ttttacttctactta

SEQ ID NO: 908719 - DNA, 15 bp, Homo sapiens
tttacttctacttac

SEQ ID NO: 908720 - DNA, 15 bp, Homo sapiens
ttacttctacttaca

SEQ ID NO: 908721 - DNA, 15 bp, Homo sapiens
tacttctacttacaa

SEQ ID NO: 908722 - DNA, 15 bp, Homo sapiens
acttctacttacaaa

SEQ ID NO: 908723 - DNA, 15 bp, Homo sapiens
cttctacttacaaaa

SEQ ID NO: 908724 - DNA, 15 bp, Homo sapiens
ttctacttacaaaat

SEQ ID NO: 908725 - DNA, 15 bp, Homo sapiens
tctacttacaaaatt

SEQ ID NO: 908726 - DNA, 15 bp, Homo sapiens
ctacttacaaaattg

SEQ ID NO: 908727 - DNA, 15 bp, Homo sapiens
tacttacaaaattga

SEQ ID NO: 908728 - DNA, 15 bp, Homo sapiens
acttacaaaattgaa

SEQ ID NO: 908729 - DNA, 15 bp, Homo sapiens
cttacaaaattgaag

SEQ ID NO: 908730 - DNA, 15 bp, Homo sapiens
ttacaaaattgaaga

SEQ ID NO: 908731 - DNA, 15 bp, Homo sapiens
tacaaaattgaagac

SEQ ID NO: 908732 - DNA, 15 bp, Homo sapiens
acaaaattgaagaca

SEQ ID NO: 908733 - DNA, 15 bp, Homo sapiens
caaaattgaagacag

SEQ ID NO: 908734 - DNA, 15 bp, Homo sapiens
aaaattgaagacagg

SEQ ID NO: 908735 - DNA, 15 bp, Homo sapiens
aaattgaagacagga

SEQ ID NO: 908736 - DNA, 15 bp, Homo sapiens
aattgaagacaggaa

SEQ ID NO: 908737 - DNA, 15 bp, Homo sapiens
attgaagacaggaac

SEQ ID NO: 908738 - DNA, 15 bp, Homo sapiens
ttgaagacaggaact

SEQ ID NO: 908739 - DNA, 15 bp, Homo sapiens
tgaagacaggaacta

SEQ ID NO: 908740 - DNA, 15 bp, Homo sapiens
gaagacaggaactat

SEQ ID NO: 908741 - DNA, 15 bp, Homo sapiens
aagacaggaactata

SEQ ID NO: 908742 - DNA, 15 bp, Homo sapiens
agacaggaactatat

SEQ ID NO: 908743 - DNA, 15 bp, Homo sapiens
gacaggaactatatt

SEQ ID NO: 908744 - DNA, 15 bp, Homo sapiens
acaggaactatattt

SEQ ID NO: 908745 - DNA, 15 bp, Homo sapiens
caggaactatatttt

SEQ ID NO: 908746 - DNA, 15 bp, Homo sapiens
aggaactatatttta

SEQ ID NO: 908747 - DNA, 15 bp, Homo sapiens
ggaactatattttat

SEQ ID NO: 908748 - DNA, 15 bp, Homo sapiens
gaactatattttatg

SEQ ID NO: 908749 - DNA, 15 bp, Homo sapiens
aactatattttatga

SEQ ID NO: 908750 - DNA, 15 bp, Homo sapiens
actatattttatgaa

SEQ ID NO: 908751 - DNA, 15 bp, Homo sapiens
ctatattttatgaaa

SEQ ID NO: 908752 - DNA, 15 bp, Homo sapiens
tatattttatgaaaa

SEQ ID NO: 908753 - DNA, 15 bp, Homo sapiens
atattttatgaaaag

SEQ ID NO: 908754 - DNA, 15 bp, Homo sapiens
tattttatgaaaaga

SEQ ID NO: 908755 - DNA, 15 bp, Homo sapiens
attttatgaaaagat

SEQ ID NO: 908756 - DNA, 15 bp, Homo sapiens
ttttatgaaaagatg

SEQ ID NO: 908757 - DNA, 15 bp, Homo sapiens
tttatgaaaagatga

SEQ ID NO: 908758 - DNA, 15 bp, Homo sapiens
ttatgaaaagatgaa

SEQ ID NO: 908759 - DNA, 15 bp, Homo sapiens
tatgaaaagatgaat

SEQ ID NO: 908760 - DNA, 15 bp, Homo sapiens
atgaaaagatgaatt

SEQ ID NO: 908761 - DNA, 15 bp, Homo sapiens
tgaaaagatgaattg

SEQ ID NO: 908762 - DNA, 15 bp, Homo sapiens
gaaaagatgaattga

SEQ ID NO: 908763 - DNA, 15 bp, Homo sapiens
aaaagatgaattgat

SEQ ID NO: 908764 - DNA, 15 bp, Homo sapiens
aaagatgaattgatg

SEQ ID NO: 908765 - DNA, 15 bp, Homo sapiens
aagatgaattgatga

SEQ ID NO: 908766 - DNA, 15 bp, Homo sapiens
agatgaattgatgaa

SEQ ID NO: 908767 - DNA, 15 bp, Homo sapiens
gatgaattgatgaat

SEQ ID NO: 908768 - DNA, 15 bp, Homo sapiens
atgaattgatgaata

SEQ ID NO: 908769 - DNA, 15 bp, Homo sapiens
tgaattgatgaatag

SEQ ID NO: 908770 - DNA, 15 bp, Homo sapiens
gaattgatgaataga

SEQ ID NO: 908771 - DNA, 15 bp, Homo sapiens
aattgatgaatagaa

SEQ ID NO: 908772 - DNA, 15 bp, Homo sapiens
attgatgaatagaaa

SEQ ID NO: 908773 - DNA, 15 bp, Homo sapiens
ttgatgaatagaaag

SEQ ID NO: 908774 - DNA, 15 bp, Homo sapiens
tgatgaatagaaaga

SEQ ID NO: 908775 - DNA, 15 bp, Homo sapiens
gatgaatagaaagaa

SEQ ID NO: 908776 - DNA, 15 bp, Homo sapiens
atgaatagaaagaaa

SEQ ID NO: 908777 - DNA, 15 bp, Homo sapiens
tgaatagaaagaaag

SEQ ID NO: 908778 - DNA, 15 bp, Homo sapiens
gaatagaaagaaagt

SEQ ID NO: 908779 - DNA, 15 bp, Homo sapiens
aatagaaagaaagtt

SEQ ID NO: 908780 - DNA, 15 bp, Homo sapiens
atagaaagaaagttg

SEQ ID NO: 908781 - DNA, 15 bp, Homo sapiens
tagaaagaaagttga

SEQ ID NO: 908782 - DNA, 15 bp, Homo sapiens
agaaagaaagttgac

SEQ ID NO: 908783 - DNA, 15 bp, Homo sapiens
gaaagaaagttgacc

SEQ ID NO: 908784 - DNA, 15 bp, Homo sapiens
aaagaaagttgacca

SEQ ID NO: 908785 - DNA, 15 bp, Homo sapiens
aagaaagttgaccag

SEQ ID NO: 908786 - DNA, 15 bp, Homo sapiens
agaaagttgaccaga

SEQ ID NO: 908787 - DNA, 15 bp, Homo sapiens
gaaagttgaccagag

SEQ ID NO: 908788 - DNA, 15 bp, Homo sapiens
aaagttgaccagagt

SEQ ID NO: 908789 - DNA, 15 bp, Homo sapiens
aagttgaccagagtt

SEQ ID NO: 908790 - DNA, 15 bp, Homo sapiens
agttgaccagagttc

SEQ ID NO: 908791 - DNA, 15 bp, Homo sapiens
gttgaccagagttca

SEQ ID NO: 908792 - DNA, 15 bp, Homo sapiens
ttgaccagagttcaa

SEQ ID NO: 908793 - DNA, 15 bp, Homo sapiens
tgaccagagttcaaa

SEQ ID NO: 908794 - DNA, 15 bp, Homo sapiens
gaccagagttcaaaa

SEQ ID NO: 908795 - DNA, 15 bp, Homo sapiens
accagagttcaaaat

SEQ ID NO: 908796 - DNA, 15 bp, Homo sapiens
ccagagttcaaaatc

SEQ ID NO: 908797 - DNA, 15 bp, Homo sapiens
cagagttcaaaatcc

SEQ ID NO: 908798 - DNA, 15 bp, Homo sapiens
agagttcaaaatcca

SEQ ID NO: 908799 - DNA, 15 bp, Homo sapiens
gagttcaaaatccat

SEQ ID NO: 908800 - DNA, 15 bp, Homo sapiens
agttcaaaatccatc

SEQ ID NO: 908801 - DNA, 15 bp, Homo sapiens
gttcaaaatccatct

SEQ ID NO: 908802 - DNA, 15 bp, Homo sapiens
ttcaaaatccatcta

SEQ ID NO: 908803 - DNA, 15 bp, Homo sapiens
tcaaaatccatctag

SEQ ID NO: 908804 - DNA, 15 bp, Homo sapiens
caaaatccatctagt

SEQ ID NO: 908805 - DNA, 15 bp, Homo sapiens
aaaatccatctagtg

SEQ ID NO: 908806 - DNA, 15 bp, Homo sapiens
aaatccatctagtgc

SEQ ID NO: 908807 - DNA, 15 bp, Homo sapiens
aatccatctagtgca

SEQ ID NO: 908808 - DNA, 15 bp, Homo sapiens
atccatctagtgcat

SEQ ID NO: 908809 - DNA, 15 bp, Homo sapiens
tccatctagtgcatg

SEQ ID NO: 908810 - DNA, 15 bp, Homo sapiens
ccatctagtgcatgt

SEQ ID NO: 908811 - DNA, 15 bp, Homo sapiens
catctagtgcatgtc

SEQ ID NO: 908812 - DNA, 15 bp, Homo sapiens
atctagtgcatgtcc

SEQ ID NO: 908813 - DNA, 15 bp, Homo sapiens
tctagtgcatgtcct

SEQ ID NO: 908814 - DNA, 15 bp, Homo sapiens
ctagtgcatgtcctt

SEQ ID NO: 908815 - DNA, 15 bp, Homo sapiens
tagtgcatgtccttg

SEQ ID NO: 908816 - DNA, 15 bp, Homo sapiens
agtgcatgtccttgg

SEQ ID NO: 908817 - DNA, 15 bp, Homo sapiens
gtgcatgtccttggg

SEQ ID NO: 908818 - DNA, 15 bp, Homo sapiens
tgcatgtccttgggc

SEQ ID NO: 908819 - DNA, 15 bp, Homo sapiens
gcatgtccttgggca

SEQ ID NO: 908820 - DNA, 15 bp, Homo sapiens
catgtccttgggcaa

SEQ ID NO: 908821 - DNA, 15 bp, Homo sapiens
atgtccttgggcaaa

SEQ ID NO: 908822 - DNA, 15 bp, Homo sapiens
tgtccttgggcaaat

SEQ ID NO: 908823 - DNA, 15 bp, Homo sapiens
gtccttgggcaaata

SEQ ID NO: 908824 - DNA, 15 bp, Homo sapiens
tccttgggcaaataa

SEQ ID NO: 908825 - DNA, 15 bp, Homo sapiens
ccttgggcaaataat

SEQ ID NO: 908826 - DNA, 15 bp, Homo sapiens
cttgggcaaataatt

SEQ ID NO: 908827 - DNA, 15 bp, Homo sapiens
ttgggcaaataattg

SEQ ID NO: 908828 - DNA, 15 bp, Homo sapiens
tgggcaaataattga

SEQ ID NO: 908829 - DNA, 15 bp, Homo sapiens
gggcaaataattgag

SEQ ID NO: 908830 - DNA, 15 bp, Homo sapiens
ggcaaataattgagt

SEQ ID NO: 908831 - DNA, 15 bp, Homo sapiens
gcaaataattgagtt

SEQ ID NO: 908832 - DNA, 15 bp, Homo sapiens
caaataattgagttc

SEQ ID NO: 908833 - DNA, 15 bp, Homo sapiens
aaataattgagttcc

SEQ ID NO: 908834 - DNA, 15 bp, Homo sapiens
aataattgagttccc

SEQ ID NO: 908835 - DNA, 15 bp, Homo sapiens
ataattgagttccct

SEQ ID NO: 908836 - DNA, 15 bp, Homo sapiens
taattgagttccctt

SEQ ID NO: 908837 - DNA, 15 bp, Homo sapiens
aattgagttccctta

SEQ ID NO: 908838 - DNA, 15 bp, Homo sapiens
attgagttcccttat

SEQ ID NO: 908839 - DNA, 15 bp, Homo sapiens
ttgagttcccttatt

SEQ ID NO: 908840 - DNA, 15 bp, Homo sapiens
tgagttcccttatta

SEQ ID NO: 908841 - DNA, 15 bp, Homo sapiens
gagttcccttattaa

SEQ ID NO: 908842 - DNA, 15 bp, Homo sapiens
agttcccttattaag

SEQ ID NO: 908843 - DNA, 15 bp, Homo sapiens
gttcccttattaagt

SEQ ID NO: 908844 - DNA, 15 bp, Homo sapiens
ttcccttattaagtg

SEQ ID NO: 908845 - DNA, 15 bp, Homo sapiens
tcccttattaagtga

SEQ ID NO: 908846 - DNA, 15 bp, Homo sapiens
cccttattaagtgag

SEQ ID NO: 908847 - DNA, 15 bp, Homo sapiens
ccttattaagtgaga

SEQ ID NO: 908848 - DNA, 15 bp, Homo sapiens
cttattaagtgagat

SEQ ID NO: 908849 - DNA, 15 bp, Homo sapiens
ttattaagtgagatt

SEQ ID NO: 908850 - DNA, 15 bp, Homo sapiens
tattaagtgagatta

SEQ ID NO: 908851 - DNA, 15 bp, Homo sapiens
attaagtgagattat

SEQ ID NO: 908852 - DNA, 15 bp, Homo sapiens
ttaagtgagattatg

SEQ ID NO: 908853 - DNA, 15 bp, Homo sapiens
taagtgagattatgt

SEQ ID NO: 908854 - DNA, 15 bp, Homo sapiens
aagtgagattatgtc

SEQ ID NO: 908855 - DNA, 15 bp, Homo sapiens
agtgagattatgtca

SEQ ID NO: 908856 - DNA, 15 bp, Homo sapiens
gtgagattatgtcac

SEQ ID NO: 908857 - DNA, 15 bp, Homo sapiens
tgagattatgtcact

SEQ ID NO: 908858 - DNA, 15 bp, Homo sapiens
gagattatgtcactt

SEQ ID NO: 908859 - DNA, 15 bp, Homo sapiens
agattatgtcactta

SEQ ID NO: 908860 - DNA, 15 bp, Homo sapiens
gattatgtcacttac

SEQ ID NO: 908861 - DNA, 15 bp, Homo sapiens
attatgtcacttact

SEQ ID NO: 908862 - DNA, 15 bp, Homo sapiens
ttatgtcacttactt

SEQ ID NO: 908863 - DNA, 15 bp, Homo sapiens
tatgtcacttacttt

SEQ ID NO: 908864 - DNA, 15 bp, Homo sapiens
atgtcacttacttta

SEQ ID NO: 908865 - DNA, 15 bp, Homo sapiens
tgtcacttactttat

SEQ ID NO: 908866 - DNA, 15 bp, Homo sapiens
gtcacttactttata

SEQ ID NO: 908867 - DNA, 15 bp, Homo sapiens
tcacttactttatag

SEQ ID NO: 908868 - DNA, 15 bp, Homo sapiens
cacttactttataga

SEQ ID NO: 908869 - DNA, 15 bp, Homo sapiens
acttactttatagaa

SEQ ID NO: 908870 - DNA, 15 bp, Homo sapiens
cttactttatagaat

SEQ ID NO: 908871 - DNA, 15 bp, Homo sapiens
ttactttatagaatt

SEQ ID NO: 908872 - DNA, 15 bp, Homo sapiens
tactttatagaattt

SEQ ID NO: 908873 - DNA, 15 bp, Homo sapiens
actttatagaatttt

SEQ ID NO: 908874 - DNA, 15 bp, Homo sapiens
ctttatagaattttg

SEQ ID NO: 908875 - DNA, 15 bp, Homo sapiens
tttatagaattttgg

SEQ ID NO: 908876 - DNA, 15 bp, Homo sapiens
ttatagaattttggt

SEQ ID NO: 908877 - DNA, 15 bp, Homo sapiens
tatagaattttggtc

SEQ ID NO: 908878 - DNA, 15 bp, Homo sapiens
atagaattttggtca

SEQ ID NO: 908879 - DNA, 15 bp, Homo sapiens
tagaattttggtcag

SEQ ID NO: 908880 - DNA, 15 bp, Homo sapiens
agaattttggtcagt

SEQ ID NO: 908881 - DNA, 15 bp, Homo sapiens
gaattttggtcagta

SEQ ID NO: 908882 - DNA, 15 bp, Homo sapiens
aattttggtcagtat

SEQ ID NO: 908883 - DNA, 15 bp, Homo sapiens
attttggtcagtata

SEQ ID NO: 908884 - DNA, 15 bp, Homo sapiens
ttttggtcagtataa

SEQ ID NO: 908885 - DNA, 15 bp, Homo sapiens
tttggtcagtataag

SEQ ID NO: 908886 - DNA, 15 bp, Homo sapiens
ttggtcagtataagt

SEQ ID NO: 908887 - DNA, 15 bp, Homo sapiens
tggtcagtataagta

SEQ ID NO: 908888 - DNA, 15 bp, Homo sapiens
ggtcagtataagtag

SEQ ID NO: 908889 - DNA, 15 bp, Homo sapiens
gtcagtataagtaga

SEQ ID NO: 908890 - DNA, 15 bp, Homo sapiens
tcagtataagtagag

SEQ ID NO: 908891 - DNA, 15 bp, Homo sapiens
cagtataagtagagg

SEQ ID NO: 908892 - DNA, 15 bp, Homo sapiens
agtataagtagaggt

SEQ ID NO: 908893 - DNA, 15 bp, Homo sapiens
gtataagtagaggta

SEQ ID NO: 908894 - DNA, 15 bp, Homo sapiens
tataagtagaggtat

SEQ ID NO: 908895 - DNA, 15 bp, Homo sapiens
ataagtagaggtatc

SEQ ID NO: 908896 - DNA, 15 bp, Homo sapiens
taagtagaggtatct

SEQ ID NO: 908897 - DNA, 15 bp, Homo sapiens
aagtagaggtatctt

SEQ ID NO: 908898 - DNA, 15 bp, Homo sapiens
agtagaggtatctta

SEQ ID NO: 908899 - DNA, 15 bp, Homo sapiens
gtagaggtatcttat

SEQ ID NO: 908900 - DNA, 15 bp, Homo sapiens
tagaggtatcttata

SEQ ID NO: 908901 - DNA, 15 bp, Homo sapiens
agaggtatcttataa

SEQ ID NO: 908902 - DNA, 15 bp, Homo sapiens
gaggtatcttataaa

SEQ ID NO: 908903 - DNA, 15 bp, Homo sapiens
aggtatcttataaaa

SEQ ID NO: 908904 - DNA, 15 bp, Homo sapiens
ggtatcttataaaaa

SEQ ID NO: 908905 - DNA, 15 bp, Homo sapiens
gtatcttataaaaag

SEQ ID NO: 908906 - DNA, 15 bp, Homo sapiens
tatcttataaaaaga

SEQ ID NO: 908907 - DNA, 15 bp, Homo sapiens
atcttataaaaagat

SEQ ID NO: 908908 - DNA, 15 bp, Homo sapiens
tcttataaaaagata

SEQ ID NO: 908909 - DNA, 15 bp, Homo sapiens
cttataaaaagataa

SEQ ID NO: 908910 - DNA, 15 bp, Homo sapiens
ttataaaaagataag

SEQ ID NO: 908911 - DNA, 15 bp, Homo sapiens
tataaaaagataagc

SEQ ID NO: 908912 - DNA, 15 bp, Homo sapiens
ataaaaagataagca

SEQ ID NO: 908913 - DNA, 15 bp, Homo sapiens
taaaaagataagcaa

SEQ ID NO: 908914 - DNA, 15 bp, Homo sapiens
aaaaagataagcaat

SEQ ID NO: 908915 - DNA, 15 bp, Homo sapiens
aaaagataagcaata

SEQ ID NO: 908916 - DNA, 15 bp, Homo sapiens
aaagataagcaatat

SEQ ID NO: 908917 - DNA, 15 bp, Homo sapiens
aagataagcaatatg

SEQ ID NO: 908918 - DNA, 15 bp, Homo sapiens
agataagcaatatga

SEQ ID NO: 908919 - DNA, 15 bp, Homo sapiens
gataagcaatatgaa

SEQ ID NO: 908920 - DNA, 15 bp, Homo sapiens
ataagcaatatgaaa

SEQ ID NO: 908921 - DNA, 15 bp, Homo sapiens
taagcaatatgaaat

SEQ ID NO: 908922 - DNA, 15 bp, Homo sapiens
aagcaatatgaaatg

SEQ ID NO: 908923 - DNA, 15 bp, Homo sapiens
agcaatatgaaatgg

SEQ ID NO: 908924 - DNA, 15 bp, Homo sapiens
gcaatatgaaatggc

SEQ ID NO: 908925 - DNA, 15 bp, Homo sapiens
caatatgaaatggct

SEQ ID NO: 908926 - DNA, 15 bp, Homo sapiens
aatatgaaatggcta

SEQ ID NO: 908927 - DNA, 15 bp, Homo sapiens
atatgaaatggctaa

SEQ ID NO: 908928 - DNA, 15 bp, Homo sapiens
tatgaaatggctaat

SEQ ID NO: 908929 - DNA, 15 bp, Homo sapiens
atgaaatggctaata

SEQ ID NO: 908930 - DNA, 15 bp, Homo sapiens
tgaaatggctaatat

SEQ ID NO: 908931 - DNA, 15 bp, Homo sapiens
gaaatggctaatatt

SEQ ID NO: 908932 - DNA, 15 bp, Homo sapiens
aaatggctaatattt

SEQ ID NO: 908933 - DNA, 15 bp, Homo sapiens
aatggctaatatttt

SEQ ID NO: 908934 - DNA, 15 bp, Homo sapiens
atggctaatatttta

SEQ ID NO: 908935 - DNA, 15 bp, Homo sapiens
tggctaatattttat

SEQ ID NO: 908936 - DNA, 15 bp, Homo sapiens
ggctaatattttatt

SEQ ID NO: 908937 - DNA, 15 bp, Homo sapiens
gctaatattttattt

SEQ ID NO: 908938 - DNA, 15 bp, Homo sapiens
ctaatattttatttt

SEQ ID NO: 908939 - DNA, 15 bp, Homo sapiens
taatattttattttc

SEQ ID NO: 908940 - DNA, 15 bp, Homo sapiens
aatattttattttca

SEQ ID NO: 908941 - DNA, 15 bp, Homo sapiens
atattttattttcac

SEQ ID NO: 908942 - DNA, 15 bp, Homo sapiens
tattttattttcact

SEQ ID NO: 908943 - DNA, 15 bp, Homo sapiens
attttattttcacta

SEQ ID NO: 908944 - DNA, 15 bp, Homo sapiens
ttttattttcactaa

SEQ ID NO: 908945 - DNA, 15 bp, Homo sapiens
tttattttcactaac

SEQ ID NO: 908946 - DNA, 15 bp, Homo sapiens
ttattttcactaaca

SEQ ID NO: 908947 - DNA, 15 bp, Homo sapiens
tattttcactaacaa

SEQ ID NO: 908948 - DNA, 15 bp, Homo sapiens
attttcactaacaaa

SEQ ID NO: 908949 - DNA, 15 bp, Homo sapiens
ttttcactaacaaaa

SEQ ID NO: 908950 - DNA, 15 bp, Homo sapiens
tttcactaacaaaat

SEQ ID NO: 908951 - DNA, 15 bp, Homo sapiens
ttcactaacaaaatg

SEQ ID NO: 908952 - DNA, 15 bp, Homo sapiens
tcactaacaaaatgg

SEQ ID NO: 908953 - DNA, 15 bp, Homo sapiens
cactaacaaaatgga

SEQ ID NO: 908954 - DNA, 15 bp, Homo sapiens
actaacaaaatggaa

SEQ ID NO: 908955 - DNA, 15 bp, Homo sapiens
ctaacaaaatggaaa

SEQ ID NO: 908956 - DNA, 15 bp, Homo sapiens
taacaaaatggaaat

SEQ ID NO: 908957 - DNA, 15 bp, Homo sapiens
aacaaaatggaaatt

SEQ ID NO: 908958 - DNA, 15 bp, Homo sapiens
acaaaatggaaattt

SEQ ID NO: 908959 - DNA, 15 bp, Homo sapiens
caaaatggaaatttc

SEQ ID NO: 908960 - DNA, 15 bp, Homo sapiens
aaaatggaaatttca

SEQ ID NO: 908961 - DNA, 15 bp, Homo sapiens
aaatggaaatttcat

SEQ ID NO: 908962 - DNA, 15 bp, Homo sapiens
aatggaaatttcatt

SEQ ID NO: 908963 - DNA, 15 bp, Homo sapiens
atggaaatttcatta

SEQ ID NO: 908964 - DNA, 15 bp, Homo sapiens
tggaaatttcattat

SEQ ID NO: 908965 - DNA, 15 bp, Homo sapiens
ggaaatttcattata

SEQ ID NO: 908966 - DNA, 15 bp, Homo sapiens
gaaatttcattatac

SEQ ID NO: 908967 - DNA, 15 bp, Homo sapiens
aaatttcattatacc

SEQ ID NO: 908968 - DNA, 15 bp, Homo sapiens
aatttcattatacct

SEQ ID NO: 908969 - DNA, 15 bp, Homo sapiens
atttcattatacctg

SEQ ID NO: 908970 - DNA, 15 bp, Homo sapiens
tttcattatacctgg

SEQ ID NO: 908971 - DNA, 15 bp, Homo sapiens
ttcattatacctggt

SEQ ID NO: 908972 - DNA, 15 bp, Homo sapiens
tcattatacctggtg

SEQ ID NO: 908973 - DNA, 15 bp, Homo sapiens
cattatacctggtgg

SEQ ID NO: 908974 - DNA, 15 bp, Homo sapiens
attatacctggtggt

SEQ ID NO: 908975 - DNA, 15 bp, Homo sapiens
ttatacctggtggtt

SEQ ID NO: 908976 - DNA, 15 bp, Homo sapiens
tatacctggtggttc

SEQ ID NO: 908977 - DNA, 15 bp, Homo sapiens
atacctggtggttct

SEQ ID NO: 908978 - DNA, 15 bp, Homo sapiens
tacctggtggttctc

SEQ ID NO: 908979 - DNA, 15 bp, Homo sapiens
acctggtggttctct

SEQ ID NO: 908980 - DNA, 15 bp, Homo sapiens
cctggtggttctcta

SEQ ID NO: 908981 - DNA, 15 bp, Homo sapiens
ctggtggttctctat

SEQ ID NO: 908982 - DNA, 15 bp, Homo sapiens
tggtggttctctata

SEQ ID NO: 908983 - DNA, 15 bp, Homo sapiens
ggtggttctctatat

SEQ ID NO: 908984 - DNA, 15 bp, Homo sapiens
gtggttctctatatt

SEQ ID NO: 908985 - DNA, 15 bp, Homo sapiens
tggttctctatattt

SEQ ID NO: 908986 - DNA, 15 bp, Homo sapiens
ggttctctatatttt

SEQ ID NO: 908987 - DNA, 15 bp, Homo sapiens
gttctctatatttta

SEQ ID NO: 908988 - DNA, 15 bp, Homo sapiens
ttctctatattttag

SEQ ID NO: 908989 - DNA, 15 bp, Homo sapiens
tctctatattttagt

SEQ ID NO: 908990 - DNA, 15 bp, Homo sapiens
ctctatattttagta

SEQ ID NO: 908991 - DNA, 15 bp, Homo sapiens
tctatattttagtac

SEQ ID NO: 908992 - DNA, 15 bp, Homo sapiens
ctatattttagtacg

SEQ ID NO: 908993 - DNA, 15 bp, Homo sapiens
tatattttagtacgc

SEQ ID NO: 908994 - DNA, 15 bp, Homo sapiens
atattttagtacgct

SEQ ID NO: 908995 - DNA, 15 bp, Homo sapiens
tattttagtacgctt

SEQ ID NO: 908996 - DNA, 15 bp, Homo sapiens
attttagtacgcttt

SEQ ID NO: 908997 - DNA, 15 bp, Homo sapiens
ttttagtacgctttt

SEQ ID NO: 908998 - DNA, 15 bp, Homo sapiens
tttagtacgcttttc

SEQ ID NO: 908999 - DNA, 15 bp, Homo sapiens
ttagtacgcttttct

SEQ ID NO: 909000 - DNA, 15 bp, Homo sapiens
tagtacgcttttctt

SEQ ID NO: 909001 - DNA, 15 bp, Homo sapiens
agtacgcttttcttt

SEQ ID NO: 909002 - DNA, 15 bp, Homo sapiens
gtacgcttttcttta

SEQ ID NO: 909003 - DNA, 15 bp, Homo sapiens
tacgcttttctttaa

SEQ ID NO: 909004 - DNA, 15 bp, Homo sapiens
acgcttttctttaaa

SEQ ID NO: 909005 - DNA, 15 bp, Homo sapiens
cgcttttctttaaaa

SEQ ID NO: 909006 - DNA, 15 bp, Homo sapiens
gcttttctttaaaat

SEQ ID NO: 909007 - DNA, 15 bp, Homo sapiens
cttttctttaaaata

SEQ ID NO: 909008 - DNA, 15 bp, Homo sapiens
ttttctttaaaataa

SEQ ID NO: 909009 - DNA, 15 bp, Homo sapiens
tttctttaaaataat

SEQ ID NO: 909010 - DNA, 15 bp, Homo sapiens
ttctttaaaataatg

SEQ ID NO: 909011 - DNA, 15 bp, Homo sapiens
tctttaaaataatgt

SEQ ID NO: 909012 - DNA, 15 bp, Homo sapiens
ctttaaaataatgtt

SEQ ID NO: 909013 - DNA, 15 bp, Homo sapiens
tttaaaataatgttg

SEQ ID NO: 909014 - DNA, 15 bp, Homo sapiens
ttaaaataatgttgt

SEQ ID NO: 909015 - DNA, 15 bp, Homo sapiens
taaaataatgttgta

SEQ ID NO: 909016 - DNA, 15 bp, Homo sapiens
aaaataatgttgtat

SEQ ID NO: 909017 - DNA, 15 bp, Homo sapiens
aaataatgttgtata

SEQ ID NO: 909018 - DNA, 15 bp, Homo sapiens
aataatgttgtatac

SEQ ID NO: 909019 - DNA, 15 bp, Homo sapiens
ataatgttgtatact

SEQ ID NO: 909020 - DNA, 15 bp, Homo sapiens
taatgttgtatacta

SEQ ID NO: 909021 - DNA, 15 bp, Homo sapiens
aatgttgtatactat

SEQ ID NO: 909022 - DNA, 15 bp, Homo sapiens
atgttgtatactatg

SEQ ID NO: 909023 - DNA, 15 bp, Homo sapiens
tgttgtatactatgc

SEQ ID NO: 909024 - DNA, 15 bp, Homo sapiens
gttgtatactatgct

SEQ ID NO: 909025 - DNA, 15 bp, Homo sapiens
ttgtatactatgctt

SEQ ID NO: 909026 - DNA, 15 bp, Homo sapiens
tgtatactatgcttt

SEQ ID NO: 909027 - DNA, 15 bp, Homo sapiens
gtatactatgcttta

SEQ ID NO: 909028 - DNA, 15 bp, Homo sapiens
tatactatgctttac

SEQ ID NO: 909029 - DNA, 15 bp, Homo sapiens
atactatgctttaca

SEQ ID NO: 909030 - DNA, 15 bp, Homo sapiens
tactatgctttacat

SEQ ID NO: 909031 - DNA, 15 bp, Homo sapiens
actatgctttacatc

SEQ ID NO: 909032 - DNA, 15 bp, Homo sapiens
ctatgctttacatcc

SEQ ID NO: 909033 - DNA, 15 bp, Homo sapiens
tatgctttacatcca

SEQ ID NO: 909034 - DNA, 15 bp, Homo sapiens
atgctttacatccac

SEQ ID NO: 909035 - DNA, 15 bp, Homo sapiens
tgctttacatccact

SEQ ID NO: 909036 - DNA, 15 bp, Homo sapiens
gctttacatccactt

SEQ ID NO: 909037 - DNA, 15 bp, Homo sapiens
ctttacatccacttt

SEQ ID NO: 909038 - DNA, 15 bp, Homo sapiens
tttacatccacttta

SEQ ID NO: 909039 - DNA, 15 bp, Homo sapiens
ttacatccactttac

SEQ ID NO: 909040 - DNA, 15 bp, Homo sapiens
tacatccactttaca

SEQ ID NO: 909041 - DNA, 15 bp, Homo sapiens
acatccactttacaa

SEQ ID NO: 909042 - DNA, 15 bp, Homo sapiens
catccactttacaaa

SEQ ID NO: 909043 - DNA, 15 bp, Homo sapiens
atccactttacaaat

SEQ ID NO: 909044 - DNA, 15 bp, Homo sapiens
tccactttacaaata

SEQ ID NO: 909045 - DNA, 15 bp, Homo sapiens
ccactttacaaatat

SEQ ID NO: 909046 - DNA, 15 bp, Homo sapiens
cactttacaaatatt

SEQ ID NO: 909047 - DNA, 15 bp, Homo sapiens
actttacaaatattg

SEQ ID NO: 909048 - DNA, 15 bp, Homo sapiens
ctttacaaatattgc

SEQ ID NO: 909049 - DNA, 15 bp, Homo sapiens
tttacaaatattgcc

SEQ ID NO: 909050 - DNA, 15 bp, Homo sapiens
ttacaaatattgccc

SEQ ID NO: 909051 - DNA, 15 bp, Homo sapiens
tacaaatattgccca

SEQ ID NO: 909052 - DNA, 15 bp, Homo sapiens
acaaatattgcccac

SEQ ID NO: 909053 - DNA, 15 bp, Homo sapiens
caaatattgcccact

SEQ ID NO: 909054 - DNA, 15 bp, Homo sapiens
aaatattgcccactg

SEQ ID NO: 909055 - DNA, 15 bp, Homo sapiens
aatattgcccactga

SEQ ID NO: 909056 - DNA, 15 bp, Homo sapiens
atattgcccactgaa

SEQ ID NO: 909057 - DNA, 15 bp, Homo sapiens
tattgcccactgaat

SEQ ID NO: 909058 - DNA, 15 bp, Homo sapiens
attgcccactgaata

SEQ ID NO: 909059 - DNA, 15 bp, Homo sapiens
ttgcccactgaatat

SEQ ID NO: 909060 - DNA, 15 bp, Homo sapiens
tgcccactgaatata

SEQ ID NO: 909061 - DNA, 15 bp, Homo sapiens
gcccactgaatatat

SEQ ID NO: 909062 - DNA, 15 bp, Homo sapiens
cccactgaatatata

SEQ ID NO: 909063 - DNA, 15 bp, Homo sapiens
ccactgaatatataa

SEQ ID NO: 909064 - DNA, 15 bp, Homo sapiens
cactgaatatataaa

SEQ ID NO: 909065 - DNA, 15 bp, Homo sapiens
actgaatatataaat

SEQ ID NO: 909066 - DNA, 15 bp, Homo sapiens
ctgaatatataaatg

SEQ ID NO: 909067 - DNA, 15 bp, Homo sapiens
tgaatatataaatga

SEQ ID NO: 909068 - DNA, 15 bp, Homo sapiens
gaatatataaatgaa

SEQ ID NO: 909069 - DNA, 15 bp, Homo sapiens
aatatataaatgaat

SEQ ID NO: 909070 - DNA, 15 bp, Homo sapiens
atatataaatgaata

SEQ ID NO: 909071 - DNA, 15 bp, Homo sapiens
tatataaatgaatat

SEQ ID NO: 909072 - DNA, 15 bp, Homo sapiens
atataaatgaatata

SEQ ID NO: 909073 - DNA, 15 bp, Homo sapiens
tataaatgaatatag

SEQ ID NO: 909074 - DNA, 15 bp, Homo sapiens
ataaatgaatatagt

SEQ ID NO: 909075 - DNA, 15 bp, Homo sapiens
taaatgaatatagta

SEQ ID NO: 909076 - DNA, 15 bp, Homo sapiens
aaatgaatatagtaa

SEQ ID NO: 909077 - DNA, 15 bp, Homo sapiens
aatgaatatagtaat

SEQ ID NO: 909078 - DNA, 15 bp, Homo sapiens
atgaatatagtaatg

SEQ ID NO: 909079 - DNA, 15 bp, Homo sapiens
tgaatatagtaatgc

SEQ ID NO: 909080 - DNA, 15 bp, Homo sapiens
gaatatagtaatgct

SEQ ID NO: 909081 - DNA, 15 bp, Homo sapiens
aatatagtaatgcta

SEQ ID NO: 909082 - DNA, 15 bp, Homo sapiens
atatagtaatgctaa

SEQ ID NO: 909083 - DNA, 15 bp, Homo sapiens
tatagtaatgctaac

SEQ ID NO: 909084 - DNA, 15 bp, Homo sapiens
atagtaatgctaacc

SEQ ID NO: 909085 - DNA, 15 bp, Homo sapiens
tagtaatgctaaccc

SEQ ID NO: 909086 - DNA, 15 bp, Homo sapiens
agtaatgctaaccct

SEQ ID NO: 909087 - DNA, 15 bp, Homo sapiens
gtaatgctaacccta

SEQ ID NO: 909088 - DNA, 15 bp, Homo sapiens
taatgctaaccctat

SEQ ID NO: 909089 - DNA, 15 bp, Homo sapiens
aatgctaaccctatt

SEQ ID NO: 909090 - DNA, 15 bp, Homo sapiens
atgctaaccctatta

SEQ ID NO: 909091 - DNA, 15 bp, Homo sapiens
tgctaaccctattag

SEQ ID NO: 909092 - DNA, 15 bp, Homo sapiens
gctaaccctattagc

SEQ ID NO: 909093 - DNA, 15 bp, Homo sapiens
ctaaccctattagca

SEQ ID NO: 909094 - DNA, 15 bp, Homo sapiens
taaccctattagcat

SEQ ID NO: 909095 - DNA, 15 bp, Homo sapiens
aaccctattagcatg

SEQ ID NO: 909096 - DNA, 15 bp, Homo sapiens
accctattagcatga

SEQ ID NO: 909097 - DNA, 15 bp, Homo sapiens
ccctattagcatgaa

SEQ ID NO: 909098 - DNA, 15 bp, Homo sapiens
cctattagcatgaag

SEQ ID NO: 909099 - DNA, 15 bp, Homo sapiens
ctattagcatgaaga

SEQ ID NO: 909100 - DNA, 15 bp, Homo sapiens
tattagcatgaagag

SEQ ID NO: 909101 - DNA, 15 bp, Homo sapiens
attagcatgaagaga

SEQ ID NO: 909102 - DNA, 15 bp, Homo sapiens
ttagcatgaagagag

SEQ ID NO: 909103 - DNA, 15 bp, Homo sapiens
tagcatgaagagaga

SEQ ID NO: 909104 - DNA, 15 bp, Homo sapiens
agcatgaagagagag

SEQ ID NO: 909105 - DNA, 15 bp, Homo sapiens
gcatgaagagagaga

SEQ ID NO: 909106 - DNA, 15 bp, Homo sapiens
catgaagagagagaa

SEQ ID NO: 909107 - DNA, 15 bp, Homo sapiens
atgaagagagagaag

SEQ ID NO: 909108 - DNA, 15 bp, Homo sapiens
tgaagagagagaaga

SEQ ID NO: 909109 - DNA, 15 bp, Homo sapiens
gaagagagagaagaa

SEQ ID NO: 909110 - DNA, 15 bp, Homo sapiens
aagagagagaagaat

SEQ ID NO: 909111 - DNA, 15 bp, Homo sapiens
agagagagaagaatt

SEQ ID NO: 909112 - DNA, 15 bp, Homo sapiens
gagagagaagaatta

SEQ ID NO: 909113 - DNA, 15 bp, Homo sapiens
agagagaagaattag

SEQ ID NO: 909114 - DNA, 15 bp, Homo sapiens
gagagaagaattaga

SEQ ID NO: 909115 - DNA, 15 bp, Homo sapiens
agagaagaattagag

SEQ ID NO: 909116 - DNA, 15 bp, Homo sapiens
gagaagaattagaga

SEQ ID NO: 909117 - DNA, 15 bp, Homo sapiens
agaagaattagagag

SEQ ID NO: 909118 - DNA, 15 bp, Homo sapiens
gaagaattagagaga

SEQ ID NO: 909119 - DNA, 15 bp, Homo sapiens
aagaattagagagac

SEQ ID NO: 909120 - DNA, 15 bp, Homo sapiens
agaattagagagact

SEQ ID NO: 909121 - DNA, 15 bp, Homo sapiens
gaattagagagactc

SEQ ID NO: 909122 - DNA, 15 bp, Homo sapiens
aattagagagactct

SEQ ID NO: 909123 - DNA, 15 bp, Homo sapiens
attagagagactctg

SEQ ID NO: 909124 - DNA, 15 bp, Homo sapiens
ttagagagactctga

SEQ ID NO: 909125 - DNA, 15 bp, Homo sapiens
tagagagactctgaa

SEQ ID NO: 909126 - DNA, 15 bp, Homo sapiens
agagagactctgaaa

SEQ ID NO: 909127 - DNA, 15 bp, Homo sapiens
gagagactctgaaat

SEQ ID NO: 909128 - DNA, 15 bp, Homo sapiens
agagactctgaaata

SEQ ID NO: 909129 - DNA, 15 bp, Homo sapiens
gagactctgaaatag

SEQ ID NO: 909130 - DNA, 15 bp, Homo sapiens
agactctgaaataga

SEQ ID NO: 909131 - DNA, 15 bp, Homo sapiens
gactctgaaatagag

SEQ ID NO: 909132 - DNA, 15 bp, Homo sapiens
actctgaaatagaga

SEQ ID NO: 909133 - DNA, 15 bp, Homo sapiens
ctctgaaatagagag

SEQ ID NO: 909134 - DNA, 15 bp, Homo sapiens
tctgaaatagagaga

SEQ ID NO: 909135 - DNA, 15 bp, Homo sapiens
ctgaaatagagagaa

SEQ ID NO: 909136 - DNA, 15 bp, Homo sapiens
tgaaatagagagaag

SEQ ID NO: 909137 - DNA, 15 bp, Homo sapiens
gaaatagagagaaga

SEQ ID NO: 909138 - DNA, 15 bp, Homo sapiens
aaatagagagaagag

SEQ ID NO: 909139 - DNA, 15 bp, Homo sapiens
aatagagagaagaga

SEQ ID NO: 909140 - DNA, 15 bp, Homo sapiens
atagagagaagagag

SEQ ID NO: 909141 - DNA, 15 bp, Homo sapiens
tagagagaagagaga

SEQ ID NO: 909142 - DNA, 15 bp, Homo sapiens
agagagaagagagaa

SEQ ID NO: 909143 - DNA, 15 bp, Homo sapiens
gagagaagagagaaa

SEQ ID NO: 909144 - DNA, 15 bp, Homo sapiens
agagaagagagaaaa

SEQ ID NO: 909145 - DNA, 15 bp, Homo sapiens
gagaagagagaaaag

SEQ ID NO: 909146 - DNA, 15 bp, Homo sapiens
agaagagagaaaaga

SEQ ID NO: 909147 - DNA, 15 bp, Homo sapiens
gaagagagaaaagaa

SEQ ID NO: 909148 - DNA, 15 bp, Homo sapiens
aagagagaaaagaag

SEQ ID NO: 909149 - DNA, 15 bp, Homo sapiens
agagagaaaagaagg

SEQ ID NO: 909150 - DNA, 15 bp, Homo sapiens
gagagaaaagaaggg

SEQ ID NO: 909151 - DNA, 15 bp, Homo sapiens
agagaaaagaaggga

SEQ ID NO: 909152 - DNA, 15 bp, Homo sapiens
gagaaaagaagggaa

SEQ ID NO: 909153 - DNA, 15 bp, Homo sapiens
agaaaagaagggaaa

SEQ ID NO: 909154 - DNA, 15 bp, Homo sapiens
gaaaagaagggaaac

SEQ ID NO: 909155 - DNA, 15 bp, Homo sapiens
aaaagaagggaaaca

SEQ ID NO: 909156 - DNA, 15 bp, Homo sapiens
aaagaagggaaacaa

SEQ ID NO: 909157 - DNA, 15 bp, Homo sapiens
aagaagggaaacaat

SEQ ID NO: 909158 - DNA, 15 bp, Homo sapiens
agaagggaaacaatc

SEQ ID NO: 909159 - DNA, 15 bp, Homo sapiens
gaagggaaacaatct

SEQ ID NO: 909160 - DNA, 15 bp, Homo sapiens
aagggaaacaatctg

SEQ ID NO: 909161 - DNA, 15 bp, Homo sapiens
agggaaacaatctgc

SEQ ID NO: 909162 - DNA, 15 bp, Homo sapiens
gggaaacaatctgcc

SEQ ID NO: 909163 - DNA, 15 bp, Homo sapiens
ggaaacaatctgcct

SEQ ID NO: 909164 - DNA, 15 bp, Homo sapiens
gaaacaatctgcctc

SEQ ID NO: 909165 - DNA, 15 bp, Homo sapiens
aaacaatctgcctcg

SEQ ID NO: 909166 - DNA, 15 bp, Homo sapiens
aacaatctgcctcgg

SEQ ID NO: 909167 - DNA, 15 bp, Homo sapiens
acaatctgcctcggg

SEQ ID NO: 909168 - DNA, 15 bp, Homo sapiens
caatctgcctcgggg

SEQ ID NO: 909169 - DNA, 15 bp, Homo sapiens
aatctgcctcggggc

SEQ ID NO: 909170 - DNA, 15 bp, Homo sapiens
atctgcctcggggct

SEQ ID NO: 909171 - DNA, 15 bp, Homo sapiens
tctgcctcggggctt

SEQ ID NO: 909172 - DNA, 15 bp, Homo sapiens
ctgcctcggggctta

SEQ ID NO: 909173 - DNA, 15 bp, Homo sapiens
tgcctcggggcttac

SEQ ID NO: 909174 - DNA, 15 bp, Homo sapiens
gcctcggggcttacc

SEQ ID NO: 909175 - DNA, 15 bp, Homo sapiens
cctcggggcttacct

SEQ ID NO: 909176 - DNA, 15 bp, Homo sapiens
ctcggggcttacctt

SEQ ID NO: 909177 - DNA, 15 bp, Homo sapiens
tcggggcttaccttg

SEQ ID NO: 909178 - DNA, 15 bp, Homo sapiens
cggggcttaccttgc

SEQ ID NO: 909179 - DNA, 15 bp, Homo sapiens
ggggcttaccttgcc

SEQ ID NO: 909180 - DNA, 15 bp, Homo sapiens
gggcttaccttgcct

SEQ ID NO: 909181 - DNA, 15 bp, Homo sapiens
ggcttaccttgcctc

SEQ ID NO: 909182 - DNA, 15 bp, Homo sapiens
gcttaccttgcctct

SEQ ID NO: 909183 - DNA, 15 bp, Homo sapiens
cttaccttgcctctt

SEQ ID NO: 909184 - DNA, 15 bp, Homo sapiens
ttaccttgcctcttc

SEQ ID NO: 909185 - DNA, 15 bp, Homo sapiens
taccttgcctcttcc

SEQ ID NO: 909186 - DNA, 15 bp, Homo sapiens
accttgcctcttcct

SEQ ID NO: 909187 - DNA, 15 bp, Homo sapiens
ccttgcctcttcctt

SEQ ID NO: 909188 - DNA, 15 bp, Homo sapiens
cttgcctcttccttt

SEQ ID NO: 909189 - DNA, 15 bp, Homo sapiens
ttgcctcttcctttt

SEQ ID NO: 909190 - DNA, 15 bp, Homo sapiens
tgcctcttccttttt

SEQ ID NO: 909191 - DNA, 15 bp, Homo sapiens
gcctcttcctttttc

SEQ ID NO: 909192 - DNA, 15 bp, Homo sapiens
cctcttcctttttct

SEQ ID NO: 909193 - DNA, 15 bp, Homo sapiens
ctcttcctttttctt

SEQ ID NO: 909194 - DNA, 15 bp, Homo sapiens
tcttcctttttcttt

SEQ ID NO: 909195 - DNA, 15 bp, Homo sapiens
cttcctttttctttt

SEQ ID NO: 909196 - DNA, 15 bp, Homo sapiens
ttcctttttctttta

SEQ ID NO: 909197 - DNA, 15 bp, Homo sapiens
tcctttttcttttat

SEQ ID NO: 909198 - DNA, 15 bp, Homo sapiens
cctttttcttttatt

SEQ ID NO: 909199 - DNA, 15 bp, Homo sapiens
ctttttcttttattt

SEQ ID NO: 909200 - DNA, 15 bp, Homo sapiens
tttttcttttatttt

SEQ ID NO: 909201 - DNA, 15 bp, Homo sapiens
ttttcttttattttc

SEQ ID NO: 909202 - DNA, 15 bp, Homo sapiens
tttcttttattttct

SEQ ID NO: 909203 - DNA, 15 bp, Homo sapiens
ttcttttattttctt

SEQ ID NO: 909204 - DNA, 15 bp, Homo sapiens
tcttttattttcttt

SEQ ID NO: 909205 - DNA, 15 bp, Homo sapiens
cttttattttctttt

SEQ ID NO: 909206 - DNA, 15 bp, Homo sapiens
ttttattttcttttt

SEQ ID NO: 909207 - DNA, 15 bp, Homo sapiens
tttattttctttttt

SEQ ID NO: 909208 - DNA, 15 bp, Homo sapiens
ttattttcttttttt

SEQ ID NO: 909209 - DNA, 15 bp, Homo sapiens
tattttctttttttt

SEQ ID NO: 909210 - DNA, 15 bp, Homo sapiens
attttcttttttttt

SEQ ID NO: 909211 - DNA, 15 bp, Homo sapiens
ttttttttttttttc

SEQ ID NO: 909212 - DNA, 15 bp, Homo sapiens
ttttttttttcttga

SEQ ID NO: 909213 - DNA, 15 bp, Homo sapiens
tttttttttcttgag

SEQ ID NO: 909214 - DNA, 15 bp, Homo sapiens
ttttttttcttgaga

SEQ ID NO: 909215 - DNA, 15 bp, Homo sapiens
tttttttcttgagat

SEQ ID NO: 909216 - DNA, 15 bp, Homo sapiens
ttttttcttgagatg

SEQ ID NO: 909217 - DNA, 15 bp, Homo sapiens
tttttcttgagatgc

SEQ ID NO: 909218 - DNA, 15 bp, Homo sapiens
ttttcttgagatgca

SEQ ID NO: 909219 - DNA, 15 bp, Homo sapiens
tttcttgagatgcag

SEQ ID NO: 909220 - DNA, 15 bp, Homo sapiens
ttcttgagatgcagt

SEQ ID NO: 909221 - DNA, 15 bp, Homo sapiens
tcttgagatgcagtc

SEQ ID NO: 909222 - DNA, 15 bp, Homo sapiens
cttgagatgcagtct

SEQ ID NO: 909223 - DNA, 15 bp, Homo sapiens
ttgagatgcagtctc

SEQ ID NO: 909224 - DNA, 15 bp, Homo sapiens
tgagatgcagtctca

SEQ ID NO: 909225 - DNA, 15 bp, Homo sapiens
gagatgcagtctcac

SEQ ID NO: 909226 - DNA, 15 bp, Homo sapiens
agatgcagtctcact

SEQ ID NO: 909227 - DNA, 15 bp, Homo sapiens
gatgcagtctcactc

SEQ ID NO: 909228 - DNA, 15 bp, Homo sapiens
atgcagtctcactct

SEQ ID NO: 909229 - DNA, 15 bp, Homo sapiens
tgcagtctcactctg

SEQ ID NO: 909230 - DNA, 15 bp, Homo sapiens
gcagtctcactctgt

SEQ ID NO: 909231 - DNA, 15 bp, Homo sapiens
cagtctcactctgtc

SEQ ID NO: 909232 - DNA, 15 bp, Homo sapiens
agtctcactctgtca

SEQ ID NO: 909233 - DNA, 15 bp, Homo sapiens
gtctcactctgtcat

SEQ ID NO: 909234 - DNA, 15 bp, Homo sapiens
tctcactctgtcatc

SEQ ID NO: 909235 - DNA, 15 bp, Homo sapiens
ctcactctgtcatcc

SEQ ID NO: 909236 - DNA, 15 bp, Homo sapiens
tcactctgtcatcca

SEQ ID NO: 909237 - DNA, 15 bp, Homo sapiens
cactctgtcatccag

SEQ ID NO: 909238 - DNA, 15 bp, Homo sapiens
actctgtcatccagg

SEQ ID NO: 909239 - DNA, 15 bp, Homo sapiens
ctctgtcatccaggc

SEQ ID NO: 909240 - DNA, 15 bp, Homo sapiens
tctgtcatccaggct

SEQ ID NO: 909241 - DNA, 15 bp, Homo sapiens
ctgtcatccaggctg

SEQ ID NO: 909242 - DNA, 15 bp, Homo sapiens
tgtcatccaggctgg

SEQ ID NO: 909243 - DNA, 15 bp, Homo sapiens
gtcatccaggctgga

SEQ ID NO: 909244 - DNA, 15 bp, Homo sapiens
tcatccaggctggag

SEQ ID NO: 909245 - DNA, 15 bp, Homo sapiens
catccaggctggagt

SEQ ID NO: 909246 - DNA, 15 bp, Homo sapiens
atccaggctggagtg

SEQ ID NO: 909247 - DNA, 15 bp, Homo sapiens
tccaggctggagtgc

SEQ ID NO: 909248 - DNA, 15 bp, Homo sapiens
gagtgcaatggcaca

SEQ ID NO: 909249 - DNA, 15 bp, Homo sapiens
agtgcaatggcacaa

SEQ ID NO: 909250 - DNA, 15 bp, Homo sapiens
gtgcaatggcacaat

SEQ ID NO: 909251 - DNA, 15 bp, Homo sapiens
tgcaatggcacaatc

SEQ ID NO: 909252 - DNA, 15 bp, Homo sapiens
gcaatggcacaatct

SEQ ID NO: 909253 - DNA, 15 bp, Homo sapiens
caatggcacaatctt

SEQ ID NO: 909254 - DNA, 15 bp, Homo sapiens
aatggcacaatcttg

SEQ ID NO: 909255 - DNA, 15 bp, Homo sapiens
atggcacaatcttgg

SEQ ID NO: 909256 - DNA, 15 bp, Homo sapiens
tggcacaatcttggc

SEQ ID NO: 909257 - DNA, 15 bp, Homo sapiens
ggcacaatcttggct

SEQ ID NO: 909258 - DNA, 15 bp, Homo sapiens
gcacaatcttggctc

SEQ ID NO: 909259 - DNA, 15 bp, Homo sapiens
cacaatcttggctca

SEQ ID NO: 909260 - DNA, 15 bp, Homo sapiens
acaatcttggctcac

SEQ ID NO: 909261 - DNA, 15 bp, Homo sapiens
caatcttggctcact

SEQ ID NO: 909262 - DNA, 15 bp, Homo sapiens
aatcttggctcactg

SEQ ID NO: 909263 - DNA, 15 bp, Homo sapiens
atcttggctcactgc

SEQ ID NO: 909264 - DNA, 15 bp, Homo sapiens
tcttggctcactgca

SEQ ID NO: 909265 - DNA, 15 bp, Homo sapiens
cttggctcactgcag

SEQ ID NO: 909266 - DNA, 15 bp, Homo sapiens
ttggctcactgcagt

SEQ ID NO: 909267 - DNA, 15 bp, Homo sapiens
tggctcactgcagtc

SEQ ID NO: 909268 - DNA, 15 bp, Homo sapiens
ggctcactgcagtct

SEQ ID NO: 909269 - DNA, 15 bp, Homo sapiens
gctcactgcagtctc

SEQ ID NO: 909270 - DNA, 15 bp, Homo sapiens
ctcactgcagtctct

SEQ ID NO: 909271 - DNA, 15 bp, Homo sapiens
tcactgcagtctctg

SEQ ID NO: 909272 - DNA, 15 bp, Homo sapiens
cactgcagtctctgc

SEQ ID NO: 909273 - DNA, 15 bp, Homo sapiens
actgcagtctctgcc

SEQ ID NO: 909274 - DNA, 15 bp, Homo sapiens
ctgcagtctctgcct

SEQ ID NO: 909275 - DNA, 15 bp, Homo sapiens
tgcagtctctgcctc

SEQ ID NO: 909276 - DNA, 15 bp, Homo sapiens
gcagtctctgcctcc

SEQ ID NO: 909277 - DNA, 15 bp, Homo sapiens
cagtctctgcctcct

SEQ ID NO: 909278 - DNA, 15 bp, Homo sapiens
agtctctgcctcctg

SEQ ID NO: 909279 - DNA, 15 bp, Homo sapiens
gtctctgcctcctgg

SEQ ID NO: 909280 - DNA, 15 bp, Homo sapiens
tctctgcctcctggg

SEQ ID NO: 909281 - DNA, 15 bp, Homo sapiens
ctctgcctcctgggt

SEQ ID NO: 909282 - DNA, 15 bp, Homo sapiens
tctgcctcctgggtt

SEQ ID NO: 909283 - DNA, 15 bp, Homo sapiens
ctgcctcctgggttc

SEQ ID NO: 909284 - DNA, 15 bp, Homo sapiens
tgcctcctgggttca

SEQ ID NO: 909285 - DNA, 15 bp, Homo sapiens
gcctcctgggttcaa

SEQ ID NO: 909286 - DNA, 15 bp, Homo sapiens
cctcctgggttcaag

SEQ ID NO: 909287 - DNA, 15 bp, Homo sapiens
ctcctgggttcaagc

SEQ ID NO: 909288 - DNA, 15 bp, Homo sapiens
tcctgggttcaagcg

SEQ ID NO: 909289 - DNA, 15 bp, Homo sapiens
cctgggttcaagcga

SEQ ID NO: 909290 - DNA, 15 bp, Homo sapiens
ctgggttcaagcgat

SEQ ID NO: 909291 - DNA, 15 bp, Homo sapiens
tgggttcaagcgatt

SEQ ID NO: 909292 - DNA, 15 bp, Homo sapiens
gggttcaagcgattc

SEQ ID NO: 909293 - DNA, 15 bp, Homo sapiens
ggttcaagcgattct

SEQ ID NO: 909294 - DNA, 15 bp, Homo sapiens
gttcaagcgattctc

SEQ ID NO: 909295 - DNA, 15 bp, Homo sapiens
ttcaagcgattctcc

SEQ ID NO: 909296 - DNA, 15 bp, Homo sapiens
tcaagcgattctcct

SEQ ID NO: 909297 - DNA, 15 bp, Homo sapiens
caagcgattctcctg

SEQ ID NO: 909298 - DNA, 15 bp, Homo sapiens
aagcgattctcctgc

SEQ ID NO: 909299 - DNA, 15 bp, Homo sapiens
agcgattctcctgcc

SEQ ID NO: 909300 - DNA, 15 bp, Homo sapiens
gcgattctcctgcct

SEQ ID NO: 909301 - DNA, 15 bp, Homo sapiens
cgattctcctgcctc

SEQ ID NO: 909302 - DNA, 15 bp, Homo sapiens
tgcctcagcctccca

SEQ ID NO: 909303 - DNA, 15 bp, Homo sapiens
gcctcagcctcccaa

SEQ ID NO: 909304 - DNA, 15 bp, Homo sapiens
cctcagcctcccaag

SEQ ID NO: 909305 - DNA, 15 bp, Homo sapiens
ctcagcctcccaagt

SEQ ID NO: 909306 - DNA, 15 bp, Homo sapiens
tcagcctcccaagta

SEQ ID NO: 909307 - DNA, 15 bp, Homo sapiens
cagcctcccaagtag

SEQ ID NO: 909308 - DNA, 15 bp, Homo sapiens
agcctcccaagtagc

SEQ ID NO: 909309 - DNA, 15 bp, Homo sapiens
gcctcccaagtagct

SEQ ID NO: 909310 - DNA, 15 bp, Homo sapiens
cctcccaagtagctg

SEQ ID NO: 909311 - DNA, 15 bp, Homo sapiens
ctcccaagtagctgg

SEQ ID NO: 909312 - DNA, 15 bp, Homo sapiens
tcccaagtagctggg

SEQ ID NO: 909313 - DNA, 15 bp, Homo sapiens
cccaagtagctggga

SEQ ID NO: 909314 - DNA, 15 bp, Homo sapiens
ccaagtagctgggat

SEQ ID NO: 909315 - DNA, 15 bp, Homo sapiens
caagtagctgggatt

SEQ ID NO: 909316 - DNA, 15 bp, Homo sapiens
aagtagctgggatta

SEQ ID NO: 909317 - DNA, 15 bp, Homo sapiens
agtagctgggattac

SEQ ID NO: 909318 - DNA, 15 bp, Homo sapiens
gtagctgggattaca

SEQ ID NO: 909319 - DNA, 15 bp, Homo sapiens
tagctgggattacag

SEQ ID NO: 909320 - DNA, 15 bp, Homo sapiens
agctgggattacagg

SEQ ID NO: 909321 - DNA, 15 bp, Homo sapiens
gctgggattacaggc

SEQ ID NO: 909322 - DNA, 15 bp, Homo sapiens
ctgggattacaggca

SEQ ID NO: 909323 - DNA, 15 bp, Homo sapiens
tgggattacaggcac

SEQ ID NO: 909324 - DNA, 15 bp, Homo sapiens
gggattacaggcaca

SEQ ID NO: 909325 - DNA, 15 bp, Homo sapiens
ggattacaggcacac

SEQ ID NO: 909326 - DNA, 15 bp, Homo sapiens
gattacaggcacaca

SEQ ID NO: 909327 - DNA, 15 bp, Homo sapiens
attacaggcacacac

SEQ ID NO: 909328 - DNA, 15 bp, Homo sapiens
ttacaggcacacacc

SEQ ID NO: 909329 - DNA, 15 bp, Homo sapiens
tacaggcacacacca

SEQ ID NO: 909330 - DNA, 15 bp, Homo sapiens
acaggcacacaccac

SEQ ID NO: 909331 - DNA, 15 bp, Homo sapiens
caggcacacaccaca

SEQ ID NO: 909332 - DNA, 15 bp, Homo sapiens
aggcacacaccacaa

SEQ ID NO: 909333 - DNA, 15 bp, Homo sapiens
ggcacacaccacaat

SEQ ID NO: 909334 - DNA, 15 bp, Homo sapiens
gcacacaccacaatg

SEQ ID NO: 909335 - DNA, 15 bp, Homo sapiens
cacacaccacaatgc

SEQ ID NO: 909336 - DNA, 15 bp, Homo sapiens
acacaccacaatgcc

SEQ ID NO: 909337 - DNA, 15 bp, Homo sapiens
cacaccacaatgccc

SEQ ID NO: 909338 - DNA, 15 bp, Homo sapiens
acaccacaatgccca

SEQ ID NO: 909339 - DNA, 15 bp, Homo sapiens
caccacaatgcccag

SEQ ID NO: 909340 - DNA, 15 bp, Homo sapiens
accacaatgcccagc

SEQ ID NO: 909341 - DNA, 15 bp, Homo sapiens
ccacaatgcccagct

SEQ ID NO: 909342 - DNA, 15 bp, Homo sapiens
cacaatgcccagctt

SEQ ID NO: 909343 - DNA, 15 bp, Homo sapiens
acaatgcccagcttt

SEQ ID NO: 909344 - DNA, 15 bp, Homo sapiens
caatgcccagctttt

SEQ ID NO: 909345 - DNA, 15 bp, Homo sapiens
aatgcccagcttttt

SEQ ID NO: 909346 - DNA, 15 bp, Homo sapiens
atgcccagctttttt

SEQ ID NO: 909347 - DNA, 15 bp, Homo sapiens
tgcccagcttttttt

SEQ ID NO: 909348 - DNA, 15 bp, Homo sapiens
gcccagctttttttt

SEQ ID NO: 909349 - DNA, 15 bp, Homo sapiens
cccagcttttttttt

SEQ ID NO: 909350 - DNA, 15 bp, Homo sapiens
ccagctttttttttt

SEQ ID NO: 909351 - DNA, 15 bp, Homo sapiens
cagcttttttttttt

SEQ ID NO: 909352 - DNA, 15 bp, Homo sapiens
agctttttttttttt

SEQ ID NO: 909353 - DNA, 15 bp, Homo sapiens
gcttttttttttttt

SEQ ID NO: 909354 - DNA, 15 bp, Homo sapiens
ttttttttttttgta

SEQ ID NO: 909355 - DNA, 15 bp, Homo sapiens
tttttttttttgtat

SEQ ID NO: 909356 - DNA, 15 bp, Homo sapiens
ttttttttttgtatt

SEQ ID NO: 909357 - DNA, 15 bp, Homo sapiens
tttttttttgtattt

SEQ ID NO: 909358 - DNA, 15 bp, Homo sapiens
ttttttttgtatttt

SEQ ID NO: 909359 - DNA, 15 bp, Homo sapiens
tttttttgtattttt

SEQ ID NO: 909360 - DNA, 15 bp, Homo sapiens
ttttttgtattttta

SEQ ID NO: 909361 - DNA, 15 bp, Homo sapiens
tttttgtatttttag

SEQ ID NO: 909362 - DNA, 15 bp, Homo sapiens
ttttgtatttttagt

SEQ ID NO: 909363 - DNA, 15 bp, Homo sapiens
tttgtatttttagta

SEQ ID NO: 909364 - DNA, 15 bp, Homo sapiens
ttgtatttttagtag

SEQ ID NO: 909365 - DNA, 15 bp, Homo sapiens
tgtatttttagtaga

SEQ ID NO: 909366 - DNA, 15 bp, Homo sapiens
gtatttttagtagag

SEQ ID NO: 909367 - DNA, 15 bp, Homo sapiens
tatttttagtagaga

SEQ ID NO: 909368 - DNA, 15 bp, Homo sapiens
atttttagtagagat

SEQ ID NO: 909369 - DNA, 15 bp, Homo sapiens
tttttagtagagatg

SEQ ID NO: 909370 - DNA, 15 bp, Homo sapiens
ttttagtagagatga

SEQ ID NO: 909371 - DNA, 15 bp, Homo sapiens
tttagtagagatgag

SEQ ID NO: 909372 - DNA, 15 bp, Homo sapiens
ttagtagagatgagg

SEQ ID NO: 909373 - DNA, 15 bp, Homo sapiens
tagtagagatgaggt

SEQ ID NO: 909374 - DNA, 15 bp, Homo sapiens
agtagagatgaggtt

SEQ ID NO: 909375 - DNA, 15 bp, Homo sapiens
gtagagatgaggttt

SEQ ID NO: 909376 - DNA, 15 bp, Homo sapiens
tagagatgaggtttc

SEQ ID NO: 909377 - DNA, 15 bp, Homo sapiens
agagatgaggtttca

SEQ ID NO: 909378 - DNA, 15 bp, Homo sapiens
gagatgaggtttcac

SEQ ID NO: 909379 - DNA, 15 bp, Homo sapiens
agatgaggtttcact

SEQ ID NO: 909380 - DNA, 15 bp, Homo sapiens
gatgaggtttcacta

SEQ ID NO: 909381 - DNA, 15 bp, Homo sapiens
atgaggtttcactat

SEQ ID NO: 909382 - DNA, 15 bp, Homo sapiens
tgaggtttcactatg

SEQ ID NO: 909383 - DNA, 15 bp, Homo sapiens
gaggtttcactatgt

SEQ ID NO: 909384 - DNA, 15 bp, Homo sapiens
aggtttcactatgtt

SEQ ID NO: 909385 - DNA, 15 bp, Homo sapiens
ggtttcactatgtta

SEQ ID NO: 909386 - DNA, 15 bp, Homo sapiens
gtttcactatgttag

SEQ ID NO: 909387 - DNA, 15 bp, Homo sapiens
tttcactatgttagc

SEQ ID NO: 909388 - DNA, 15 bp, Homo sapiens
ttcactatgttagcc

SEQ ID NO: 909389 - DNA, 15 bp, Homo sapiens
tcactatgttagcca

SEQ ID NO: 909390 - DNA, 15 bp, Homo sapiens
cactatgttagccag

SEQ ID NO: 909391 - DNA, 15 bp, Homo sapiens
actatgttagccagg

SEQ ID NO: 909392 - DNA, 15 bp, Homo sapiens
ctatgttagccaggc

SEQ ID NO: 909393 - DNA, 15 bp, Homo sapiens
tatgttagccaggct

SEQ ID NO: 909394 - DNA, 15 bp, Homo sapiens
atgttagccaggctg

SEQ ID NO: 909395 - DNA, 15 bp, Homo sapiens
tgttagccaggctgg

SEQ ID NO: 909396 - DNA, 15 bp, Homo sapiens
gttagccaggctggt

SEQ ID NO: 909397 - DNA, 15 bp, Homo sapiens
ttagccaggctggtc

SEQ ID NO: 909398 - DNA, 15 bp, Homo sapiens
tagccaggctggtct

SEQ ID NO: 909399 - DNA, 15 bp, Homo sapiens
agccaggctggtctt

SEQ ID NO: 909400 - DNA, 15 bp, Homo sapiens
gccaggctggtcttg

SEQ ID NO: 909401 - DNA, 15 bp, Homo sapiens
ccaggctggtcttga

SEQ ID NO: 909402 - DNA, 15 bp, Homo sapiens
caggctggtcttgaa

SEQ ID NO: 909403 - DNA, 15 bp, Homo sapiens
aggctggtcttgaat

SEQ ID NO: 909404 - DNA, 15 bp, Homo sapiens
ggctggtcttgaatg

SEQ ID NO: 909405 - DNA, 15 bp, Homo sapiens
gctggtcttgaatgc

SEQ ID NO: 909406 - DNA, 15 bp, Homo sapiens
ctggtcttgaatgcc

SEQ ID NO: 909407 - DNA, 15 bp, Homo sapiens
tggtcttgaatgcct

SEQ ID NO: 909408 - DNA, 15 bp, Homo sapiens
ggtcttgaatgcctg

SEQ ID NO: 909409 - DNA, 15 bp, Homo sapiens
gtcttgaatgcctga

SEQ ID NO: 909410 - DNA, 15 bp, Homo sapiens
tcttgaatgcctgac

SEQ ID NO: 909411 - DNA, 15 bp, Homo sapiens
cttgaatgcctgacc

SEQ ID NO: 909412 - DNA, 15 bp, Homo sapiens
ttgaatgcctgacct

SEQ ID NO: 909413 - DNA, 15 bp, Homo sapiens
tgaatgcctgacctc

SEQ ID NO: 909414 - DNA, 15 bp, Homo sapiens
gaatgcctgacctca

SEQ ID NO: 909415 - DNA, 15 bp, Homo sapiens
aatgcctgacctcag

SEQ ID NO: 909416 - DNA, 15 bp, Homo sapiens
atgcctgacctcagg

SEQ ID NO: 909417 - DNA, 15 bp, Homo sapiens
tgcctgacctcaggt

SEQ ID NO: 909418 - DNA, 15 bp, Homo sapiens
gcctgacctcaggtg

SEQ ID NO: 909419 - DNA, 15 bp, Homo sapiens
cctgacctcaggtga

SEQ ID NO: 909420 - DNA, 15 bp, Homo sapiens
ctgacctcaggtgat

SEQ ID NO: 909421 - DNA, 15 bp, Homo sapiens
tgacctcaggtgatc

SEQ ID NO: 909422 - DNA, 15 bp, Homo sapiens
gatccgcctgcctca

SEQ ID NO: 909423 - DNA, 15 bp, Homo sapiens
atccgcctgcctcag

SEQ ID NO: 909424 - DNA, 15 bp, Homo sapiens
tccgcctgcctcagc

SEQ ID NO: 909425 - DNA, 15 bp, Homo sapiens
ccgcctgcctcagcc

SEQ ID NO: 909426 - DNA, 15 bp, Homo sapiens
cgcctgcctcagcct

SEQ ID NO: 909427 - DNA, 15 bp, Homo sapiens
gcctgcctcagcctc

SEQ ID NO: 909428 - DNA, 15 bp, Homo sapiens
gcctcagcctcccag

SEQ ID NO: 909429 - DNA, 15 bp, Homo sapiens
cctcagcctcccaga

SEQ ID NO: 909430 - DNA, 15 bp, Homo sapiens
ctcagcctcccagag

SEQ ID NO: 909431 - DNA, 15 bp, Homo sapiens
tcagcctcccagagt

SEQ ID NO: 909432 - DNA, 15 bp, Homo sapiens
cagcctcccagagtg

SEQ ID NO: 909433 - DNA, 15 bp, Homo sapiens
agcctcccagagtgc

SEQ ID NO: 909434 - DNA, 15 bp, Homo sapiens
gcctcccagagtgct

SEQ ID NO: 909435 - DNA, 15 bp, Homo sapiens
cctcccagagtgctg

SEQ ID NO: 909436 - DNA, 15 bp, Homo sapiens
ctcccagagtgctgg

SEQ ID NO: 909437 - DNA, 15 bp, Homo sapiens
tcccagagtgctggg

SEQ ID NO: 909438 - DNA, 15 bp, Homo sapiens
cccagagtgctggga

SEQ ID NO: 909439 - DNA, 15 bp, Homo sapiens
ccagagtgctgggat

SEQ ID NO: 909440 - DNA, 15 bp, Homo sapiens
cagagtgctgggatt

SEQ ID NO: 909441 - DNA, 15 bp, Homo sapiens
agagtgctgggatta

SEQ ID NO: 909442 - DNA, 15 bp, Homo sapiens
gagtgctgggattat

SEQ ID NO: 909443 - DNA, 15 bp, Homo sapiens
agtgctgggattata

SEQ ID NO: 909444 - DNA, 15 bp, Homo sapiens
gtgctgggattatag

SEQ ID NO: 909445 - DNA, 15 bp, Homo sapiens
tgctgggattatagg

SEQ ID NO: 909446 - DNA, 15 bp, Homo sapiens
gctgggattataggc

SEQ ID NO: 909447 - DNA, 15 bp, Homo sapiens
ctgggattataggcg

SEQ ID NO: 909448 - DNA, 15 bp, Homo sapiens
tgggattataggcgt

SEQ ID NO: 909449 - DNA, 15 bp, Homo sapiens
gggattataggcgtg

SEQ ID NO: 909450 - DNA, 15 bp, Homo sapiens
ggattataggcgtga

SEQ ID NO: 909451 - DNA, 15 bp, Homo sapiens
gattataggcgtgaa

SEQ ID NO: 909452 - DNA, 15 bp, Homo sapiens
attataggcgtgaac

SEQ ID NO: 909453 - DNA, 15 bp, Homo sapiens
ttataggcgtgaacc

SEQ ID NO: 909454 - DNA, 15 bp, Homo sapiens
tataggcgtgaacca

SEQ ID NO: 909455 - DNA, 15 bp, Homo sapiens
ataggcgtgaaccac

SEQ ID NO: 909456 - DNA, 15 bp, Homo sapiens
taggcgtgaaccacc

SEQ ID NO: 909457 - DNA, 15 bp, Homo sapiens
aggcgtgaaccacca

SEQ ID NO: 909458 - DNA, 15 bp, Homo sapiens
ggcgtgaaccaccat

SEQ ID NO: 909459 - DNA, 15 bp, Homo sapiens
gcgtgaaccaccatg

SEQ ID NO: 909460 - DNA, 15 bp, Homo sapiens
cgtgaaccaccatgt

SEQ ID NO: 909461 - DNA, 15 bp, Homo sapiens
gtgaaccaccatgtc

SEQ ID NO: 909462 - DNA, 15 bp, Homo sapiens
tgaaccaccatgtca

SEQ ID NO: 909463 - DNA, 15 bp, Homo sapiens
gaaccaccatgtcag

SEQ ID NO: 909464 - DNA, 15 bp, Homo sapiens
aaccaccatgtcagg

SEQ ID NO: 909465 - DNA, 15 bp, Homo sapiens
accaccatgtcaggc

SEQ ID NO: 909466 - DNA, 15 bp, Homo sapiens
ccaccatgtcaggct

SEQ ID NO: 909467 - DNA, 15 bp, Homo sapiens
caccatgtcaggctg

SEQ ID NO: 909468 - DNA, 15 bp, Homo sapiens
accatgtcaggctgc

SEQ ID NO: 909469 - DNA, 15 bp, Homo sapiens
ccatgtcaggctgcc

SEQ ID NO: 909470 - DNA, 15 bp, Homo sapiens
catgtcaggctgcct

SEQ ID NO: 909471 - DNA, 15 bp, Homo sapiens
atgtcaggctgcctg

SEQ ID NO: 909472 - DNA, 15 bp, Homo sapiens
tgtcaggctgcctgt

SEQ ID NO: 909473 - DNA, 15 bp, Homo sapiens
gtcaggctgcctgtt

SEQ ID NO: 909474 - DNA, 15 bp, Homo sapiens
tcaggctgcctgttc

SEQ ID NO: 909475 - DNA, 15 bp, Homo sapiens
caggctgcctgttcc

SEQ ID NO: 909476 - DNA, 15 bp, Homo sapiens
aggctgcctgttcct

SEQ ID NO: 909477 - DNA, 15 bp, Homo sapiens
ggctgcctgttcctt

SEQ ID NO: 909478 - DNA, 15 bp, Homo sapiens
gctgcctgttccttt

SEQ ID NO: 909479 - DNA, 15 bp, Homo sapiens
ctgcctgttcctttt

SEQ ID NO: 909480 - DNA, 15 bp, Homo sapiens
tgcctgttccttttt

SEQ ID NO: 909481 - DNA, 15 bp, Homo sapiens
gcctgttcctttttc

SEQ ID NO: 909482 - DNA, 15 bp, Homo sapiens
cctgttcctttttca

SEQ ID NO: 909483 - DNA, 15 bp, Homo sapiens
ctgttcctttttcaa

SEQ ID NO: 909484 - DNA, 15 bp, Homo sapiens
tgttcctttttcaaa

SEQ ID NO: 909485 - DNA, 15 bp, Homo sapiens
gttcctttttcaaag

SEQ ID NO: 909486 - DNA, 15 bp, Homo sapiens
ttcctttttcaaagc

SEQ ID NO: 909487 - DNA, 15 bp, Homo sapiens
tcctttttcaaagca

SEQ ID NO: 909488 - DNA, 15 bp, Homo sapiens
cctttttcaaagcag

SEQ ID NO: 909489 - DNA, 15 bp, Homo sapiens
ctttttcaaagcagg

SEQ ID NO: 909490 - DNA, 15 bp, Homo sapiens
tttttcaaagcaggt

SEQ ID NO: 909491 - DNA, 15 bp, Homo sapiens
ttttcaaagcaggtg

SEQ ID NO: 909492 - DNA, 15 bp, Homo sapiens
tttcaaagcaggtga

SEQ ID NO: 909493 - DNA, 15 bp, Homo sapiens
ttcaaagcaggtgag

SEQ ID NO: 909494 - DNA, 15 bp, Homo sapiens
tcaaagcaggtgagc

SEQ ID NO: 909495 - DNA, 15 bp, Homo sapiens
caaagcaggtgagca

SEQ ID NO: 909496 - DNA, 15 bp, Homo sapiens
aaagcaggtgagcac

SEQ ID NO: 909497 - DNA, 15 bp, Homo sapiens
aagcaggtgagcaca

SEQ ID NO: 909498 - DNA, 15 bp, Homo sapiens
agcaggtgagcacac

SEQ ID NO: 909499 - DNA, 15 bp, Homo sapiens
gcaggtgagcacaca

SEQ ID NO: 909500 - DNA, 15 bp, Homo sapiens
caggtgagcacacag

SEQ ID NO: 909501 - DNA, 15 bp, Homo sapiens
aggtgagcacacagc

SEQ ID NO: 909502 - DNA, 15 bp, Homo sapiens
ggtgagcacacagca

SEQ ID NO: 909503 - DNA, 15 bp, Homo sapiens
gtgagcacacagcag

SEQ ID NO: 909504 - DNA, 15 bp, Homo sapiens
tgagcacacagcagt

SEQ ID NO: 909505 - DNA, 15 bp, Homo sapiens
gagcacacagcagtt

SEQ ID NO: 909506 - DNA, 15 bp, Homo sapiens
agcacacagcagttt

SEQ ID NO: 909507 - DNA, 15 bp, Homo sapiens
gcacacagcagtttt

SEQ ID NO: 909508 - DNA, 15 bp, Homo sapiens
cacacagcagtttta

SEQ ID NO: 909509 - DNA, 15 bp, Homo sapiens
acacagcagttttaa

SEQ ID NO: 909510 - DNA, 15 bp, Homo sapiens
cacagcagttttaac

SEQ ID NO: 909511 - DNA, 15 bp, Homo sapiens
acagcagttttaaca

SEQ ID NO: 909512 - DNA, 15 bp, Homo sapiens
cagcagttttaacaa

SEQ ID NO: 909513 - DNA, 15 bp, Homo sapiens
agcagttttaacaat

SEQ ID NO: 909514 - DNA, 15 bp, Homo sapiens
gcagttttaacaata

SEQ ID NO: 909515 - DNA, 15 bp, Homo sapiens
cagttttaacaataa

SEQ ID NO: 909516 - DNA, 15 bp, Homo sapiens
agttttaacaataag

SEQ ID NO: 909517 - DNA, 15 bp, Homo sapiens
gttttaacaataagc

SEQ ID NO: 909518 - DNA, 15 bp, Homo sapiens
ttttaacaataagct

SEQ ID NO: 909519 - DNA, 15 bp, Homo sapiens
tttaacaataagcta

SEQ ID NO: 909520 - DNA, 15 bp, Homo sapiens
ttaacaataagctaa

SEQ ID NO: 909521 - DNA, 15 bp, Homo sapiens
taacaataagctaaa

SEQ ID NO: 909522 - DNA, 15 bp, Homo sapiens
aacaataagctaaag

SEQ ID NO: 909523 - DNA, 15 bp, Homo sapiens
acaataagctaaagc

SEQ ID NO: 909524 - DNA, 15 bp, Homo sapiens
caataagctaaagca

SEQ ID NO: 909525 - DNA, 15 bp, Homo sapiens
aataagctaaagcaa

SEQ ID NO: 909526 - DNA, 15 bp, Homo sapiens
ataagctaaagcaag

SEQ ID NO: 909527 - DNA, 15 bp, Homo sapiens
taagctaaagcaagc

SEQ ID NO: 909528 - DNA, 15 bp, Homo sapiens
aagctaaagcaagct

SEQ ID NO: 909529 - DNA, 15 bp, Homo sapiens
agctaaagcaagctc

SEQ ID NO: 909530 - DNA, 15 bp, Homo sapiens
gctaaagcaagctct

SEQ ID NO: 909531 - DNA, 15 bp, Homo sapiens
ctaaagcaagctctt

SEQ ID NO: 909532 - DNA, 15 bp, Homo sapiens
taaagcaagctcttt

SEQ ID NO: 909533 - DNA, 15 bp, Homo sapiens
aaagcaagctctttt

SEQ ID NO: 909534 - DNA, 15 bp, Homo sapiens
aagcaagctcttttc

SEQ ID NO: 909535 - DNA, 15 bp, Homo sapiens
agcaagctcttttct

SEQ ID NO: 909536 - DNA, 15 bp, Homo sapiens
gcaagctcttttcta

SEQ ID NO: 909537 - DNA, 15 bp, Homo sapiens
caagctcttttctaa

SEQ ID NO: 909538 - DNA, 15 bp, Homo sapiens
aagctcttttctaat

SEQ ID NO: 909539 - DNA, 15 bp, Homo sapiens
agctcttttctaatg

SEQ ID NO: 909540 - DNA, 15 bp, Homo sapiens
gctcttttctaatga

SEQ ID NO: 909541 - DNA, 15 bp, Homo sapiens
ctcttttctaatgag

SEQ ID NO: 909542 - DNA, 15 bp, Homo sapiens
tcttttctaatgaga

SEQ ID NO: 909543 - DNA, 15 bp, Homo sapiens
cttttctaatgagag

SEQ ID NO: 909544 - DNA, 15 bp, Homo sapiens
ttttctaatgagaga

SEQ ID NO: 909545 - DNA, 15 bp, Homo sapiens
tttctaatgagagag

SEQ ID NO: 909546 - DNA, 15 bp, Homo sapiens
ttctaatgagagagt

SEQ ID NO: 909547 - DNA, 15 bp, Homo sapiens
tctaatgagagagtt

SEQ ID NO: 909548 - DNA, 15 bp, Homo sapiens
ctaatgagagagttc

SEQ ID NO: 909549 - DNA, 15 bp, Homo sapiens
taatgagagagttct

SEQ ID NO: 909550 - DNA, 15 bp, Homo sapiens
aatgagagagttctg

SEQ ID NO: 909551 - DNA, 15 bp, Homo sapiens
atgagagagttctgt

SEQ ID NO: 909552 - DNA, 15 bp, Homo sapiens
tgagagagttctgtt

SEQ ID NO: 909553 - DNA, 15 bp, Homo sapiens
gagagagttctgtta

SEQ ID NO: 909554 - DNA, 15 bp, Homo sapiens
agagagttctgttaa

SEQ ID NO: 909555 - DNA, 15 bp, Homo sapiens
gagagttctgttaaa

SEQ ID NO: 909556 - DNA, 15 bp, Homo sapiens
agagttctgttaaat

SEQ ID NO: 909557 - DNA, 15 bp, Homo sapiens
gagttctgttaaata

SEQ ID NO: 909558 - DNA, 15 bp, Homo sapiens
agttctgttaaataa

SEQ ID NO: 909559 - DNA, 15 bp, Homo sapiens
gttctgttaaataaa

SEQ ID NO: 909560 - DNA, 15 bp, Homo sapiens
ttctgttaaataaag

SEQ ID NO: 909561 - DNA, 15 bp, Homo sapiens
tctgttaaataaagg

SEQ ID NO: 909562 - DNA, 15 bp, Homo sapiens
ctgttaaataaaggt

SEQ ID NO: 909563 - DNA, 15 bp, Homo sapiens
tgttaaataaaggtc

SEQ ID NO: 909564 - DNA, 15 bp, Homo sapiens
gttaaataaaggtca

SEQ ID NO: 909565 - DNA, 15 bp, Homo sapiens
ttaaataaaggtcaa

SEQ ID NO: 909566 - DNA, 15 bp, Homo sapiens
taaataaaggtcaac

SEQ ID NO: 909567 - DNA, 15 bp, Homo sapiens
aaataaaggtcaaca

SEQ ID NO: 909568 - DNA, 15 bp, Homo sapiens
aataaaggtcaacaa

SEQ ID NO: 909569 - DNA, 15 bp, Homo sapiens
ataaaggtcaacaag

SEQ ID NO: 909570 - DNA, 15 bp, Homo sapiens
taaaggtcaacaaga

SEQ ID NO: 909571 - DNA, 15 bp, Homo sapiens
aaaggtcaacaagaa

SEQ ID NO: 909572 - DNA, 15 bp, Homo sapiens
aaggtcaacaagaaa

SEQ ID NO: 909573 - DNA, 15 bp, Homo sapiens
aggtcaacaagaaaa

SEQ ID NO: 909574 - DNA, 15 bp, Homo sapiens
ggtcaacaagaaaag

SEQ ID NO: 909575 - DNA, 15 bp, Homo sapiens
gtcaacaagaaaagt

SEQ ID NO: 909576 - DNA, 15 bp, Homo sapiens
tcaacaagaaaagta

SEQ ID NO: 909577 - DNA, 15 bp, Homo sapiens
caacaagaaaagtaa

SEQ ID NO: 909578 - DNA, 15 bp, Homo sapiens
aacaagaaaagtaac

SEQ ID NO: 909579 - DNA, 15 bp, Homo sapiens
acaagaaaagtaaca

SEQ ID NO: 909580 - DNA, 15 bp, Homo sapiens
caagaaaagtaacaa

SEQ ID NO: 909581 - DNA, 15 bp, Homo sapiens
aagaaaagtaacaac

SEQ ID NO: 909582 - DNA, 15 bp, Homo sapiens
agaaaagtaacaaca

SEQ ID NO: 909583 - DNA, 15 bp, Homo sapiens
gaaaagtaacaacac

SEQ ID NO: 909584 - DNA, 15 bp, Homo sapiens
aaaagtaacaacact

SEQ ID NO: 909585 - DNA, 15 bp, Homo sapiens
aaagtaacaacactc

SEQ ID NO: 909586 - DNA, 15 bp, Homo sapiens
aagtaacaacactca

SEQ ID NO: 909587 - DNA, 15 bp, Homo sapiens
agtaacaacactcat

SEQ ID NO: 909588 - DNA, 15 bp, Homo sapiens
gtaacaacactcatt

SEQ ID NO: 909589 - DNA, 15 bp, Homo sapiens
taacaacactcattg

SEQ ID NO: 909590 - DNA, 15 bp, Homo sapiens
aacaacactcattgt

SEQ ID NO: 909591 - DNA, 15 bp, Homo sapiens
acaacactcattgtc

SEQ ID NO: 909592 - DNA, 15 bp, Homo sapiens
caacactcattgtct

SEQ ID NO: 909593 - DNA, 15 bp, Homo sapiens
aacactcattgtctc

SEQ ID NO: 909594 - DNA, 15 bp, Homo sapiens
acactcattgtctct

SEQ ID NO: 909595 - DNA, 15 bp, Homo sapiens
cactcattgtctctt

SEQ ID NO: 909596 - DNA, 15 bp, Homo sapiens
actcattgtctcttg

SEQ ID NO: 909597 - DNA, 15 bp, Homo sapiens
ctcattgtctcttgt

SEQ ID NO: 909598 - DNA, 15 bp, Homo sapiens
tcattgtctcttgtt

SEQ ID NO: 909599 - DNA, 15 bp, Homo sapiens
cattgtctcttgttt

SEQ ID NO: 909600 - DNA, 15 bp, Homo sapiens
attgtctcttgttta

SEQ ID NO: 909601 - DNA, 15 bp, Homo sapiens
ttgtctcttgtttac

SEQ ID NO: 909602 - DNA, 15 bp, Homo sapiens
tgtctcttgtttacg

SEQ ID NO: 909603 - DNA, 15 bp, Homo sapiens
gtctcttgtttacgg

SEQ ID NO: 909604 - DNA, 15 bp, Homo sapiens
tctcttgtttacggt

SEQ ID NO: 909605 - DNA, 15 bp, Homo sapiens
ctcttgtttacggtc

SEQ ID NO: 909606 - DNA, 15 bp, Homo sapiens
tcttgtttacggtcc

SEQ ID NO: 909607 - DNA, 15 bp, Homo sapiens
cttgtttacggtcca

SEQ ID NO: 909608 - DNA, 15 bp, Homo sapiens
ttgtttacggtccat

SEQ ID NO: 909609 - DNA, 15 bp, Homo sapiens
tgtttacggtccatc

SEQ ID NO: 909610 - DNA, 15 bp, Homo sapiens
gtttacggtccatct

SEQ ID NO: 909611 - DNA, 15 bp, Homo sapiens
tttacggtccatctg

SEQ ID NO: 909612 - DNA, 15 bp, Homo sapiens
ttacggtccatctga

SEQ ID NO: 909613 - DNA, 15 bp, Homo sapiens
tacggtccatctgag

SEQ ID NO: 909614 - DNA, 15 bp, Homo sapiens
acggtccatctgagc

SEQ ID NO: 909615 - DNA, 15 bp, Homo sapiens
cggtccatctgagca

SEQ ID NO: 909616 - DNA, 15 bp, Homo sapiens
ggtccatctgagcat

SEQ ID NO: 909617 - DNA, 15 bp, Homo sapiens
gtccatctgagcatc

SEQ ID NO: 909618 - DNA, 15 bp, Homo sapiens
tccatctgagcatca

SEQ ID NO: 909619 - DNA, 15 bp, Homo sapiens
ccatctgagcatcat

SEQ ID NO: 909620 - DNA, 15 bp, Homo sapiens
catctgagcatcatg

SEQ ID NO: 909621 - DNA, 15 bp, Homo sapiens
atctgagcatcatgc

SEQ ID NO: 909622 - DNA, 15 bp, Homo sapiens
tctgagcatcatgca

SEQ ID NO: 909623 - DNA, 15 bp, Homo sapiens
ctgagcatcatgcaa

SEQ ID NO: 909624 - DNA, 15 bp, Homo sapiens
tgagcatcatgcaaa

SEQ ID NO: 909625 - DNA, 15 bp, Homo sapiens
gagcatcatgcaaac

SEQ ID NO: 909626 - DNA, 15 bp, Homo sapiens
agcatcatgcaaact

SEQ ID NO: 909627 - DNA, 15 bp, Homo sapiens
gcatcatgcaaactt

SEQ ID NO: 909628 - DNA, 15 bp, Homo sapiens
catcatgcaaacttg

SEQ ID NO: 909629 - DNA, 15 bp, Homo sapiens
atcatgcaaacttgc

SEQ ID NO: 909630 - DNA, 15 bp, Homo sapiens
tcatgcaaacttgct

SEQ ID NO: 909631 - DNA, 15 bp, Homo sapiens
catgcaaacttgctc

SEQ ID NO: 909632 - DNA, 15 bp, Homo sapiens
atgcaaacttgctca

SEQ ID NO: 909633 - DNA, 15 bp, Homo sapiens
tgcaaacttgctcaa

SEQ ID NO: 909634 - DNA, 15 bp, Homo sapiens
gcaaacttgctcaaa

SEQ ID NO: 909635 - DNA, 15 bp, Homo sapiens
caaacttgctcaaat

SEQ ID NO: 909636 - DNA, 15 bp, Homo sapiens
aaacttgctcaaatt

SEQ ID NO: 909637 - DNA, 15 bp, Homo sapiens
aacttgctcaaattt

SEQ ID NO: 909638 - DNA, 15 bp, Homo sapiens
acttgctcaaatttc

SEQ ID NO: 909639 - DNA, 15 bp, Homo sapiens
cttgctcaaatttct

SEQ ID NO: 909640 - DNA, 15 bp, Homo sapiens
ttgctcaaatttctc

SEQ ID NO: 909641 - DNA, 15 bp, Homo sapiens
tgctcaaatttctct

SEQ ID NO: 909642 - DNA, 15 bp, Homo sapiens
gctcaaatttctctc

SEQ ID NO: 909643 - DNA, 15 bp, Homo sapiens
ctcaaatttctctcc

SEQ ID NO: 909644 - DNA, 15 bp, Homo sapiens
tcaaatttctctcct

SEQ ID NO: 909645 - DNA, 15 bp, Homo sapiens
caaatttctctcctg

SEQ ID NO: 909646 - DNA, 15 bp, Homo sapiens
aaatttctctcctgt

SEQ ID NO: 909647 - DNA, 15 bp, Homo sapiens
aatttctctcctgtg

SEQ ID NO: 909648 - DNA, 15 bp, Homo sapiens
atttctctcctgtgc

SEQ ID NO: 909649 - DNA, 15 bp, Homo sapiens
tttctctcctgtgca

SEQ ID NO: 909650 - DNA, 15 bp, Homo sapiens
ttctctcctgtgcat

SEQ ID NO: 909651 - DNA, 15 bp, Homo sapiens
tctctcctgtgcatt

SEQ ID NO: 909652 - DNA, 15 bp, Homo sapiens
ctctcctgtgcattg

SEQ ID NO: 909653 - DNA, 15 bp, Homo sapiens
tctcctgtgcattgt

SEQ ID NO: 909654 - DNA, 15 bp, Homo sapiens
ctcctgtgcattgtt

SEQ ID NO: 909655 - DNA, 15 bp, Homo sapiens
tcctgtgcattgtta

SEQ ID NO: 909656 - DNA, 15 bp, Homo sapiens
cctgtgcattgttac

SEQ ID NO: 909657 - DNA, 15 bp, Homo sapiens
ctgtgcattgttact

SEQ ID NO: 909658 - DNA, 15 bp, Homo sapiens
tgtgcattgttactt

SEQ ID NO: 909659 - DNA, 15 bp, Homo sapiens
gtgcattgttacttt

SEQ ID NO: 909660 - DNA, 15 bp, Homo sapiens
tgcattgttacttta

SEQ ID NO: 909661 - DNA, 15 bp, Homo sapiens
gcattgttactttac

SEQ ID NO: 909662 - DNA, 15 bp, Homo sapiens
cattgttactttacc

SEQ ID NO: 909663 - DNA, 15 bp, Homo sapiens
attgttactttacct

SEQ ID NO: 909664 - DNA, 15 bp, Homo sapiens
ttgttactttaccta

SEQ ID NO: 909665 - DNA, 15 bp, Homo sapiens
tgttactttacctag

SEQ ID NO: 909666 - DNA, 15 bp, Homo sapiens
gttactttacctaga

SEQ ID NO: 909667 - DNA, 15 bp, Homo sapiens
ttactttacctagag

SEQ ID NO: 909668 - DNA, 15 bp, Homo sapiens
tactttacctagagt

SEQ ID NO: 909669 - DNA, 15 bp, Homo sapiens
actttacctagagtt

SEQ ID NO: 909670 - DNA, 15 bp, Homo sapiens
ctttacctagagttt

SEQ ID NO: 909671 - DNA, 15 bp, Homo sapiens
tttacctagagttta

SEQ ID NO: 909672 - DNA, 15 bp, Homo sapiens
ttacctagagtttat

SEQ ID NO: 909673 - DNA, 15 bp, Homo sapiens
tacctagagtttatc

SEQ ID NO: 909674 - DNA, 15 bp, Homo sapiens
acctagagtttatct

SEQ ID NO: 909675 - DNA, 15 bp, Homo sapiens
cctagagtttatcta

SEQ ID NO: 909676 - DNA, 15 bp, Homo sapiens
ctagagtttatctaa

SEQ ID NO: 909677 - DNA, 15 bp, Homo sapiens
tagagtttatctaaa

SEQ ID NO: 909678 - DNA, 15 bp, Homo sapiens
agagtttatctaaat

SEQ ID NO: 909679 - DNA, 15 bp, Homo sapiens
gagtttatctaaatc

SEQ ID NO: 909680 - DNA, 15 bp, Homo sapiens
agtttatctaaatca

SEQ ID NO: 909681 - DNA, 15 bp, Homo sapiens
gtttatctaaatcac

SEQ ID NO: 909682 - DNA, 15 bp, Homo sapiens
tttatctaaatcaca

SEQ ID NO: 909683 - DNA, 15 bp, Homo sapiens
ttatctaaatcacat

SEQ ID NO: 909684 - DNA, 15 bp, Homo sapiens
tatctaaatcacatt

SEQ ID NO: 909685 - DNA, 15 bp, Homo sapiens
atctaaatcacatta

SEQ ID NO: 909686 - DNA, 15 bp, Homo sapiens
tctaaatcacattac

SEQ ID NO: 909687 - DNA, 15 bp, Homo sapiens
ctaaatcacattaca

SEQ ID NO: 909688 - DNA, 15 bp, Homo sapiens
taaatcacattacac

SEQ ID NO: 909689 - DNA, 15 bp, Homo sapiens
aaatcacattacact

SEQ ID NO: 909690 - DNA, 15 bp, Homo sapiens
aatcacattacactc

SEQ ID NO: 909691 - DNA, 15 bp, Homo sapiens
atcacattacactct

SEQ ID NO: 909692 - DNA, 15 bp, Homo sapiens
tcacattacactcta

SEQ ID NO: 909693 - DNA, 15 bp, Homo sapiens
cacattacactctac

SEQ ID NO: 909694 - DNA, 15 bp, Homo sapiens
acattacactctacc

SEQ ID NO: 909695 - DNA, 15 bp, Homo sapiens
cattacactctaccc

SEQ ID NO: 909696 - DNA, 15 bp, Homo sapiens
attacactctaccct

SEQ ID NO: 909697 - DNA, 15 bp, Homo sapiens
ttacactctaccctg

SEQ ID NO: 909698 - DNA, 15 bp, Homo sapiens
tacactctaccctgg

SEQ ID NO: 909699 - DNA, 15 bp, Homo sapiens
acactctaccctggc

SEQ ID NO: 909700 - DNA, 15 bp, Homo sapiens
cactctaccctggct

SEQ ID NO: 909701 - DNA, 15 bp, Homo sapiens
actctaccctggctg

SEQ ID NO: 909702 - DNA, 15 bp, Homo sapiens
ctctaccctggctgg

SEQ ID NO: 909703 - DNA, 15 bp, Homo sapiens
tctaccctggctgga

SEQ ID NO: 909704 - DNA, 15 bp, Homo sapiens
ctaccctggctggaa

SEQ ID NO: 909705 - DNA, 15 bp, Homo sapiens
taccctggctggaat

SEQ ID NO: 909706 - DNA, 15 bp, Homo sapiens
accctggctggaatt

SEQ ID NO: 909707 - DNA, 15 bp, Homo sapiens
ccctggctggaattc

SEQ ID NO: 909708 - DNA, 15 bp, Homo sapiens
cctggctggaattct

SEQ ID NO: 909709 - DNA, 15 bp, Homo sapiens
ctggctggaattctt

SEQ ID NO: 909710 - DNA, 15 bp, Homo sapiens
tggctggaattcttt

SEQ ID NO: 909711 - DNA, 15 bp, Homo sapiens
ggctggaattctttg

SEQ ID NO: 909712 - DNA, 15 bp, Homo sapiens
gctggaattctttgt

SEQ ID NO: 909713 - DNA, 15 bp, Homo sapiens
ctggaattctttgtc

SEQ ID NO: 909714 - DNA, 15 bp, Homo sapiens
tggaattctttgtcg

SEQ ID NO: 909715 - DNA, 15 bp, Homo sapiens
ggaattctttgtcgt

SEQ ID NO: 909716 - DNA, 15 bp, Homo sapiens
gaattctttgtcgtt

SEQ ID NO: 909717 - DNA, 15 bp, Homo sapiens
aattctttgtcgtta

SEQ ID NO: 909718 - DNA, 15 bp, Homo sapiens
attctttgtcgttaa

SEQ ID NO: 909719 - DNA, 15 bp, Homo sapiens
ttctttgtcgttaat

SEQ ID NO: 909720 - DNA, 15 bp, Homo sapiens
tctttgtcgttaatc

SEQ ID NO: 909721 - DNA, 15 bp, Homo sapiens
ctttgtcgttaatca

SEQ ID NO: 909722 - DNA, 15 bp, Homo sapiens
tttgtcgttaatcag

SEQ ID NO: 909723 - DNA, 15 bp, Homo sapiens
ttgtcgttaatcaga

SEQ ID NO: 909724 - DNA, 15 bp, Homo sapiens
tgtcgttaatcagaa

SEQ ID NO: 909725 - DNA, 15 bp, Homo sapiens
gtcgttaatcagaat

SEQ ID NO: 909726 - DNA, 15 bp, Homo sapiens
tcgttaatcagaata

SEQ ID NO: 909727 - DNA, 15 bp, Homo sapiens
cgttaatcagaataa

SEQ ID NO: 909728 - DNA, 15 bp, Homo sapiens
gttaatcagaataac

SEQ ID NO: 909729 - DNA, 15 bp, Homo sapiens
ttaatcagaataaca

SEQ ID NO: 909730 - DNA, 15 bp, Homo sapiens
taatcagaataacaa

SEQ ID NO: 909731 - DNA, 15 bp, Homo sapiens
aatcagaataacaat

SEQ ID NO: 909732 - DNA, 15 bp, Homo sapiens
atcagaataacaata

SEQ ID NO: 909733 - DNA, 15 bp, Homo sapiens
tcagaataacaatag

SEQ ID NO: 909734 - DNA, 15 bp, Homo sapiens
cagaataacaatagt

SEQ ID NO: 909735 - DNA, 15 bp, Homo sapiens
agaataacaatagtt

SEQ ID NO: 909736 - DNA, 15 bp, Homo sapiens
gaataacaatagttt

SEQ ID NO: 909737 - DNA, 15 bp, Homo sapiens
aataacaatagtttc

SEQ ID NO: 909738 - DNA, 15 bp, Homo sapiens
ataacaatagtttcc

SEQ ID NO: 909739 - DNA, 15 bp, Homo sapiens
taacaatagtttcca

SEQ ID NO: 909740 - DNA, 15 bp, Homo sapiens
aacaatagtttccaa

SEQ ID NO: 909741 - DNA, 15 bp, Homo sapiens
acaatagtttccaaa

SEQ ID NO: 909742 - DNA, 15 bp, Homo sapiens
caatagtttccaaat

SEQ ID NO: 909743 - DNA, 15 bp, Homo sapiens
aatagtttccaaatg

SEQ ID NO: 909744 - DNA, 15 bp, Homo sapiens
atagtttccaaatgt

SEQ ID NO: 909745 - DNA, 15 bp, Homo sapiens
tagtttccaaatgta

SEQ ID NO: 909746 - DNA, 15 bp, Homo sapiens
agtttccaaatgtaa

SEQ ID NO: 909747 - DNA, 15 bp, Homo sapiens
gtttccaaatgtaac

SEQ ID NO: 909748 - DNA, 15 bp, Homo sapiens
tttccaaatgtaact

SEQ ID NO: 909749 - DNA, 15 bp, Homo sapiens
ttccaaatgtaactt

SEQ ID NO: 909750 - DNA, 15 bp, Homo sapiens
tccaaatgtaactta

SEQ ID NO: 909751 - DNA, 15 bp, Homo sapiens
ccaaatgtaacttat

SEQ ID NO: 909752 - DNA, 15 bp, Homo sapiens
caaatgtaacttata

SEQ ID NO: 909753 - DNA, 15 bp, Homo sapiens
aaatgtaacttataa

SEQ ID NO: 909754 - DNA, 15 bp, Homo sapiens
aatgtaacttataaa

SEQ ID NO: 909755 - DNA, 15 bp, Homo sapiens
atgtaacttataaaa

SEQ ID NO: 909756 - DNA, 15 bp, Homo sapiens
tgtaacttataaaaa

SEQ ID NO: 909757 - DNA, 15 bp, Homo sapiens
gtaacttataaaaaa

SEQ ID NO: 909758 - DNA, 15 bp, Homo sapiens
taacttataaaaaag

SEQ ID NO: 909759 - DNA, 15 bp, Homo sapiens
aacttataaaaaagt

SEQ ID NO: 909760 - DNA, 15 bp, Homo sapiens
acttataaaaaagta

SEQ ID NO: 909761 - DNA, 15 bp, Homo sapiens
cttataaaaaagtat

SEQ ID NO: 909762 - DNA, 15 bp, Homo sapiens
ttataaaaaagtatg

SEQ ID NO: 909763 - DNA, 15 bp, Homo sapiens
tataaaaaagtatgc

SEQ ID NO: 909764 - DNA, 15 bp, Homo sapiens
ataaaaaagtatgca

SEQ ID NO: 909765 - DNA, 15 bp, Homo sapiens
taaaaaagtatgcat

SEQ ID NO: 909766 - DNA, 15 bp, Homo sapiens
aaaaaagtatgcata

SEQ ID NO: 909767 - DNA, 15 bp, Homo sapiens
aaaaagtatgcatat

SEQ ID NO: 909768 - DNA, 15 bp, Homo sapiens
aaaagtatgcatatt

SEQ ID NO: 909769 - DNA, 15 bp, Homo sapiens
aaagtatgcatattt

SEQ ID NO: 909770 - DNA, 15 bp, Homo sapiens
aagtatgcatatttt

SEQ ID NO: 909771 - DNA, 15 bp, Homo sapiens
agtatgcatattttt

SEQ ID NO: 909772 - DNA, 15 bp, Homo sapiens
gtatgcatatttttt

SEQ ID NO: 909773 - DNA, 15 bp, Homo sapiens
tatgcatattttttt

SEQ ID NO: 909774 - DNA, 15 bp, Homo sapiens
atgcatatttttttt

SEQ ID NO: 909775 - DNA, 15 bp, Homo sapiens
tgcatattttttttt

SEQ ID NO: 909776 - DNA, 15 bp, Homo sapiens
gcatatttttttttc

SEQ ID NO: 909777 - DNA, 15 bp, Homo sapiens
catatttttttttct

SEQ ID NO: 909778 - DNA, 15 bp, Homo sapiens
atatttttttttctc

SEQ ID NO: 909779 - DNA, 15 bp, Homo sapiens
tatttttttttctct

SEQ ID NO: 909780 - DNA, 15 bp, Homo sapiens
atttttttttctctt

SEQ ID NO: 909781 - DNA, 15 bp, Homo sapiens
tttttttttctcttc

SEQ ID NO: 909782 - DNA, 15 bp, Homo sapiens
ttttttttctcttca

SEQ ID NO: 909783 - DNA, 15 bp, Homo sapiens
tttttttctcttcag

SEQ ID NO: 909784 - DNA, 15 bp, Homo sapiens
ttttttctcttcagc

SEQ ID NO: 909785 - DNA, 15 bp, Homo sapiens
tttttctcttcagct

SEQ ID NO: 909786 - DNA, 15 bp, Homo sapiens
ttttctcttcagcta

SEQ ID NO: 909787 - DNA, 15 bp, Homo sapiens
tttctcttcagctat

SEQ ID NO: 909788 - DNA, 15 bp, Homo sapiens
ttctcttcagctatc

SEQ ID NO: 909789 - DNA, 15 bp, Homo sapiens
tctcttcagctatct

SEQ ID NO: 909790 - DNA, 15 bp, Homo sapiens
ctcttcagctatctt

SEQ ID NO: 909791 - DNA, 15 bp, Homo sapiens
tcttcagctatcttt

SEQ ID NO: 909792 - DNA, 15 bp, Homo sapiens
cttcagctatctttc

SEQ ID NO: 909793 - DNA, 15 bp, Homo sapiens
ttcagctatctttct

SEQ ID NO: 909794 - DNA, 15 bp, Homo sapiens
tcagctatctttcta

SEQ ID NO: 909795 - DNA, 15 bp, Homo sapiens
cagctatctttctat

SEQ ID NO: 909796 - DNA, 15 bp, Homo sapiens
agctatctttctatc

SEQ ID NO: 909797 - DNA, 15 bp, Homo sapiens
gctatctttctatcc

SEQ ID NO: 909798 - DNA, 15 bp, Homo sapiens
ctatctttctatccc

SEQ ID NO: 909799 - DNA, 15 bp, Homo sapiens
tatctttctatcccc

SEQ ID NO: 909800 - DNA, 15 bp, Homo sapiens
atctttctatcccct

SEQ ID NO: 909801 - DNA, 15 bp, Homo sapiens
tctttctatcccctt

SEQ ID NO: 909802 - DNA, 15 bp, Homo sapiens
ctttctatccccttg

SEQ ID NO: 909803 - DNA, 15 bp, Homo sapiens
tttctatccccttgc

SEQ ID NO: 909804 - DNA, 15 bp, Homo sapiens
ttctatccccttgca

SEQ ID NO: 909805 - DNA, 15 bp, Homo sapiens
tctatccccttgcat

SEQ ID NO: 909806 - DNA, 15 bp, Homo sapiens
ctatccccttgcatt

SEQ ID NO: 909807 - DNA, 15 bp, Homo sapiens
tatccccttgcatta

SEQ ID NO: 909808 - DNA, 15 bp, Homo sapiens
atccccttgcattat

SEQ ID NO: 909809 - DNA, 15 bp, Homo sapiens
tccccttgcattatt

SEQ ID NO: 909810 - DNA, 15 bp, Homo sapiens
ccccttgcattattt

SEQ ID NO: 909811 - DNA, 15 bp, Homo sapiens
cccttgcattattta

SEQ ID NO: 909812 - DNA, 15 bp, Homo sapiens
ccttgcattatttat

SEQ ID NO: 909813 - DNA, 15 bp, Homo sapiens
cttgcattatttatg

SEQ ID NO: 909814 - DNA, 15 bp, Homo sapiens
ttgcattatttatga

SEQ ID NO: 909815 - DNA, 15 bp, Homo sapiens
tgcattatttatgaa

SEQ ID NO: 909816 - DNA, 15 bp, Homo sapiens
gcattatttatgaaa

SEQ ID NO: 909817 - DNA, 15 bp, Homo sapiens
cattatttatgaaaa

SEQ ID NO: 909818 - DNA, 15 bp, Homo sapiens
attatttatgaaaag

SEQ ID NO: 909819 - DNA, 15 bp, Homo sapiens
ttatttatgaaaaga

SEQ ID NO: 909820 - DNA, 15 bp, Homo sapiens
tatttatgaaaagaa

SEQ ID NO: 909821 - DNA, 15 bp, Homo sapiens
atttatgaaaagaaa

SEQ ID NO: 909822 - DNA, 15 bp, Homo sapiens
tttatgaaaagaaaa

SEQ ID NO: 909823 - DNA, 15 bp, Homo sapiens
ttatgaaaagaaaaa

SEQ ID NO: 909824 - DNA, 15 bp, Homo sapiens
tatgaaaagaaaaat

SEQ ID NO: 909825 - DNA, 15 bp, Homo sapiens
atgaaaagaaaaata

SEQ ID NO: 909826 - DNA, 15 bp, Homo sapiens
tgaaaagaaaaatac

SEQ ID NO: 909827 - DNA, 15 bp, Homo sapiens
gaaaagaaaaatacc

SEQ ID NO: 909828 - DNA, 15 bp, Homo sapiens
aaaagaaaaatacct

SEQ ID NO: 909829 - DNA, 15 bp, Homo sapiens
aaagaaaaatacctc

SEQ ID NO: 909830 - DNA, 15 bp, Homo sapiens
aagaaaaatacctct

SEQ ID NO: 909831 - DNA, 15 bp, Homo sapiens
agaaaaatacctctt

SEQ ID NO: 909832 - DNA, 15 bp, Homo sapiens
gaaaaatacctcttg

SEQ ID NO: 909833 - DNA, 15 bp, Homo sapiens
aaaaatacctcttga

SEQ ID NO: 909834 - DNA, 15 bp, Homo sapiens
aaaatacctcttgac

SEQ ID NO: 909835 - DNA, 15 bp, Homo sapiens
aaatacctcttgacc

SEQ ID NO: 909836 - DNA, 15 bp, Homo sapiens
aatacctcttgacca

SEQ ID NO: 909837 - DNA, 15 bp, Homo sapiens
atacctcttgaccag

SEQ ID NO: 909838 - DNA, 15 bp, Homo sapiens
tacctcttgaccagt

SEQ ID NO: 909839 - DNA, 15 bp, Homo sapiens
acctcttgaccagtt

SEQ ID NO: 909840 - DNA, 15 bp, Homo sapiens
cctcttgaccagtta

SEQ ID NO: 909841 - DNA, 15 bp, Homo sapiens
ctcttgaccagttaa

SEQ ID NO: 909842 - DNA, 15 bp, Homo sapiens
tcttgaccagttaac

SEQ ID NO: 909843 - DNA, 15 bp, Homo sapiens
cttgaccagttaact

SEQ ID NO: 909844 - DNA, 15 bp, Homo sapiens
ttgaccagttaactt

SEQ ID NO: 909845 - DNA, 15 bp, Homo sapiens
tgaccagttaactta

SEQ ID NO: 909846 - DNA, 15 bp, Homo sapiens
gaccagttaacttaa

SEQ ID NO: 909847 - DNA, 15 bp, Homo sapiens
accagttaacttaaa

SEQ ID NO: 909848 - DNA, 15 bp, Homo sapiens
ccagttaacttaaag

SEQ ID NO: 909849 - DNA, 15 bp, Homo sapiens
cagttaacttaaagg

SEQ ID NO: 909850 - DNA, 15 bp, Homo sapiens
agttaacttaaagga

SEQ ID NO: 909851 - DNA, 15 bp, Homo sapiens
gttaacttaaaggaa

SEQ ID NO: 909852 - DNA, 15 bp, Homo sapiens
ttaacttaaaggaaa

SEQ ID NO: 909853 - DNA, 15 bp, Homo sapiens
taacttaaaggaaac

SEQ ID NO: 909854 - DNA, 15 bp, Homo sapiens
aacttaaaggaaact

SEQ ID NO: 909855 - DNA, 15 bp, Homo sapiens
acttaaaggaaactc

SEQ ID NO: 909856 - DNA, 15 bp, Homo sapiens
cttaaaggaaactct

SEQ ID NO: 909857 - DNA, 15 bp, Homo sapiens
ttaaaggaaactctt

SEQ ID NO: 909858 - DNA, 15 bp, Homo sapiens
taaaggaaactctta

SEQ ID NO: 909859 - DNA, 15 bp, Homo sapiens
aaaggaaactcttac

SEQ ID NO: 909860 - DNA, 15 bp, Homo sapiens
aaggaaactcttacc

SEQ ID NO: 909861 - DNA, 15 bp, Homo sapiens
aggaaactcttacct

SEQ ID NO: 909862 - DNA, 15 bp, Homo sapiens
ggaaactcttacctt

SEQ ID NO: 909863 - DNA, 15 bp, Homo sapiens
gaaactcttaccttg

SEQ ID NO: 909864 - DNA, 15 bp, Homo sapiens
aaactcttaccttga

SEQ ID NO: 909865 - DNA, 15 bp, Homo sapiens
aactcttaccttgat

SEQ ID NO: 909866 - DNA, 15 bp, Homo sapiens
actcttaccttgata

SEQ ID NO: 909867 - DNA, 15 bp, Homo sapiens
ctcttaccttgataa

SEQ ID NO: 909868 - DNA, 15 bp, Homo sapiens
tcttaccttgataag

SEQ ID NO: 909869 - DNA, 15 bp, Homo sapiens
cttaccttgataagg

SEQ ID NO: 909870 - DNA, 15 bp, Homo sapiens
ttaccttgataaggt

SEQ ID NO: 909871 - DNA, 15 bp, Homo sapiens
taccttgataaggtc

SEQ ID NO: 909872 - DNA, 15 bp, Homo sapiens
accttgataaggtca

SEQ ID NO: 909873 - DNA, 15 bp, Homo sapiens
ccttgataaggtcag

SEQ ID NO: 909874 - DNA, 15 bp, Homo sapiens
cttgataaggtcagt

SEQ ID NO: 909875 - DNA, 15 bp, Homo sapiens
ttgataaggtcagtg

SEQ ID NO: 909876 - DNA, 15 bp, Homo sapiens
tgataaggtcagtgt

SEQ ID NO: 909877 - DNA, 15 bp, Homo sapiens
gataaggtcagtgtt

SEQ ID NO: 909878 - DNA, 15 bp, Homo sapiens
ataaggtcagtgtta

SEQ ID NO: 909879 - DNA, 15 bp, Homo sapiens
taaggtcagtgttat

SEQ ID NO: 909880 - DNA, 15 bp, Homo sapiens
aaggtcagtgttatg

SEQ ID NO: 909881 - DNA, 15 bp, Homo sapiens
aggtcagtgttatgt

SEQ ID NO: 909882 - DNA, 15 bp, Homo sapiens
ggtcagtgttatgtt

SEQ ID NO: 909883 - DNA, 15 bp, Homo sapiens
gtcagtgttatgttg

SEQ ID NO: 909884 - DNA, 15 bp, Homo sapiens
tcagtgttatgttgg

SEQ ID NO: 909885 - DNA, 15 bp, Homo sapiens
cagtgttatgttggc

SEQ ID NO: 909886 - DNA, 15 bp, Homo sapiens
agtgttatgttggct

SEQ ID NO: 909887 - DNA, 15 bp, Homo sapiens
gtgttatgttggcta

SEQ ID NO: 909888 - DNA, 15 bp, Homo sapiens
tgttatgttggctat

SEQ ID NO: 909889 - DNA, 15 bp, Homo sapiens
gttatgttggctata

SEQ ID NO: 909890 - DNA, 15 bp, Homo sapiens
ttatgttggctatat

SEQ ID NO: 909891 - DNA, 15 bp, Homo sapiens
tatgttggctatata

SEQ ID NO: 909892 - DNA, 15 bp, Homo sapiens
atgttggctatataa

SEQ ID NO: 909893 - DNA, 15 bp, Homo sapiens
tgttggctatataag

SEQ ID NO: 909894 - DNA, 15 bp, Homo sapiens
gttggctatataagt

SEQ ID NO: 909895 - DNA, 15 bp, Homo sapiens
ttggctatataagta

SEQ ID NO: 909896 - DNA, 15 bp, Homo sapiens
tggctatataagtaa

SEQ ID NO: 909897 - DNA, 15 bp, Homo sapiens
ggctatataagtaaa

SEQ ID NO: 909898 - DNA, 15 bp, Homo sapiens
gctatataagtaaat

SEQ ID NO: 909899 - DNA, 15 bp, Homo sapiens
ctatataagtaaatt

SEQ ID NO: 909900 - DNA, 15 bp, Homo sapiens
tatataagtaaatta

SEQ ID NO: 909901 - DNA, 15 bp, Homo sapiens
atataagtaaattaa

SEQ ID NO: 909902 - DNA, 15 bp, Homo sapiens
tataagtaaattaac

SEQ ID NO: 909903 - DNA, 15 bp, Homo sapiens
ataagtaaattaact

SEQ ID NO: 909904 - DNA, 15 bp, Homo sapiens
taagtaaattaacta

SEQ ID NO: 909905 - DNA, 15 bp, Homo sapiens
aagtaaattaactaa

SEQ ID NO: 909906 - DNA, 15 bp, Homo sapiens
agtaaattaactaag

SEQ ID NO: 909907 - DNA, 15 bp, Homo sapiens
gtaaattaactaagg

SEQ ID NO: 909908 - DNA, 15 bp, Homo sapiens
taaattaactaagga

SEQ ID NO: 909909 - DNA, 15 bp, Homo sapiens
aaattaactaaggaa

SEQ ID NO: 909910 - DNA, 15 bp, Homo sapiens
aattaactaaggaat

SEQ ID NO: 909911 - DNA, 15 bp, Homo sapiens
attaactaaggaatt

SEQ ID NO: 909912 - DNA, 15 bp, Homo sapiens
ttaactaaggaattg

SEQ ID NO: 909913 - DNA, 15 bp, Homo sapiens
taactaaggaattga

SEQ ID NO: 909914 - DNA, 15 bp, Homo sapiens
aactaaggaattgat

SEQ ID NO: 909915 - DNA, 15 bp, Homo sapiens
actaaggaattgatg

SEQ ID NO: 909916 - DNA, 15 bp, Homo sapiens
ctaaggaattgatgt

SEQ ID NO: 909917 - DNA, 15 bp, Homo sapiens
taaggaattgatgtc

SEQ ID NO: 909918 - DNA, 15 bp, Homo sapiens
aaggaattgatgtca

SEQ ID NO: 909919 - DNA, 15 bp, Homo sapiens
aggaattgatgtcat

SEQ ID NO: 909920 - DNA, 15 bp, Homo sapiens
ggaattgatgtcatt

SEQ ID NO: 909921 - DNA, 15 bp, Homo sapiens
gaattgatgtcattc

SEQ ID NO: 909922 - DNA, 15 bp, Homo sapiens
aattgatgtcattct

SEQ ID NO: 909923 - DNA, 15 bp, Homo sapiens
attgatgtcattctc

SEQ ID NO: 909924 - DNA, 15 bp, Homo sapiens
ttgatgtcattctca

SEQ ID NO: 909925 - DNA, 15 bp, Homo sapiens
tgatgtcattctcag

SEQ ID NO: 909926 - DNA, 15 bp, Homo sapiens
gatgtcattctcaga

SEQ ID NO: 909927 - DNA, 15 bp, Homo sapiens
atgtcattctcagat

SEQ ID NO: 909928 - DNA, 15 bp, Homo sapiens
tgtcattctcagatt

SEQ ID NO: 909929 - DNA, 15 bp, Homo sapiens
gtcattctcagattc

SEQ ID NO: 909930 - DNA, 15 bp, Homo sapiens
tcattctcagattct

SEQ ID NO: 909931 - DNA, 15 bp, Homo sapiens
cattctcagattctt

SEQ ID NO: 909932 - DNA, 15 bp, Homo sapiens
attctcagattctta

SEQ ID NO: 909933 - DNA, 15 bp, Homo sapiens
ttctcagattcttac

SEQ ID NO: 909934 - DNA, 15 bp, Homo sapiens
tctcagattcttact

SEQ ID NO: 909935 - DNA, 15 bp, Homo sapiens
ctcagattcttactt

SEQ ID NO: 909936 - DNA, 15 bp, Homo sapiens
tcagattcttacttt

SEQ ID NO: 909937 - DNA, 15 bp, Homo sapiens
cagattcttacttta

SEQ ID NO: 909938 - DNA, 15 bp, Homo sapiens
agattcttactttaa

SEQ ID NO: 909939 - DNA, 15 bp, Homo sapiens
gattcttactttaat

SEQ ID NO: 909940 - DNA, 15 bp, Homo sapiens
attcttactttaatc

SEQ ID NO: 909941 - DNA, 15 bp, Homo sapiens
ttcttactttaatct

SEQ ID NO: 909942 - DNA, 15 bp, Homo sapiens
tcttactttaatctt

SEQ ID NO: 909943 - DNA, 15 bp, Homo sapiens
cttactttaatcttc

SEQ ID NO: 909944 - DNA, 15 bp, Homo sapiens
ttactttaatcttca

SEQ ID NO: 909945 - DNA, 15 bp, Homo sapiens
tactttaatcttcag

SEQ ID NO: 909946 - DNA, 15 bp, Homo sapiens
actttaatcttcaga

SEQ ID NO: 909947 - DNA, 15 bp, Homo sapiens
ctttaatcttcagac

SEQ ID NO: 909948 - DNA, 15 bp, Homo sapiens
tttaatcttcagact

SEQ ID NO: 909949 - DNA, 15 bp, Homo sapiens
ttaatcttcagactt

SEQ ID NO: 909950 - DNA, 15 bp, Homo sapiens
taatcttcagacttt

SEQ ID NO: 909951 - DNA, 15 bp, Homo sapiens
aatcttcagactttg

SEQ ID NO: 909952 - DNA, 15 bp, Homo sapiens
atcttcagactttgc

SEQ ID NO: 909953 - DNA, 15 bp, Homo sapiens
tcttcagactttgca

SEQ ID NO: 909954 - DNA, 15 bp, Homo sapiens
cttcagactttgcaa

SEQ ID NO: 909955 - DNA, 15 bp, Homo sapiens
ttcagactttgcaac

SEQ ID NO: 909956 - DNA, 15 bp, Homo sapiens
tcagactttgcaacc

SEQ ID NO: 909957 - DNA, 15 bp, Homo sapiens
cagactttgcaaccc

SEQ ID NO: 909958 - DNA, 15 bp, Homo sapiens
agactttgcaacccc

SEQ ID NO: 909959 - DNA, 15 bp, Homo sapiens
gactttgcaacccca

SEQ ID NO: 909960 - DNA, 15 bp, Homo sapiens
actttgcaaccccaa

SEQ ID NO: 909961 - DNA, 15 bp, Homo sapiens
ctttgcaaccccaag

SEQ ID NO: 909962 - DNA, 15 bp, Homo sapiens
tttgcaaccccaagg

SEQ ID NO: 909963 - DNA, 15 bp, Homo sapiens
ttgcaaccccaagga

SEQ ID NO: 909964 - DNA, 15 bp, Homo sapiens
tgcaaccccaaggag

SEQ ID NO: 909965 - DNA, 15 bp, Homo sapiens
gcaaccccaaggaga

SEQ ID NO: 909966 - DNA, 15 bp, Homo sapiens
caaccccaaggagag

SEQ ID NO: 909967 - DNA, 15 bp, Homo sapiens
aaccccaaggagaga

SEQ ID NO: 909968 - DNA, 15 bp, Homo sapiens
accccaaggagagat

SEQ ID NO: 909969 - DNA, 15 bp, Homo sapiens
ccccaaggagagatt

SEQ ID NO: 909970 - DNA, 15 bp, Homo sapiens
cccaaggagagattc

SEQ ID NO: 909971 - DNA, 15 bp, Homo sapiens
ccaaggagagattct

SEQ ID NO: 909972 - DNA, 15 bp, Homo sapiens
caaggagagattctt

SEQ ID NO: 909973 - DNA, 15 bp, Homo sapiens
aaggagagattcttt

SEQ ID NO: 909974 - DNA, 15 bp, Homo sapiens
aggagagattctttg

SEQ ID NO: 909975 - DNA, 15 bp, Homo sapiens
ggagagattctttgt

SEQ ID NO: 909976 - DNA, 15 bp, Homo sapiens
gagagattctttgtc

SEQ ID NO: 909977 - DNA, 15 bp, Homo sapiens
agagattctttgtct

SEQ ID NO: 909978 - DNA, 15 bp, Homo sapiens
gagattctttgtcta

SEQ ID NO: 909979 - DNA, 15 bp, Homo sapiens
agattctttgtctaa

SEQ ID NO: 909980 - DNA, 15 bp, Homo sapiens
gattctttgtctaat

SEQ ID NO: 909981 - DNA, 15 bp, Homo sapiens
attctttgtctaata

SEQ ID NO: 909982 - DNA, 15 bp, Homo sapiens
ttctttgtctaatat

SEQ ID NO: 909983 - DNA, 15 bp, Homo sapiens
tctttgtctaatatt

SEQ ID NO: 909984 - DNA, 15 bp, Homo sapiens
ctttgtctaatattt

SEQ ID NO: 909985 - DNA, 15 bp, Homo sapiens
tttgtctaatatttc

SEQ ID NO: 909986 - DNA, 15 bp, Homo sapiens
ttgtctaatatttcc

SEQ ID NO: 909987 - DNA, 15 bp, Homo sapiens
tgtctaatatttcct

SEQ ID NO: 909988 - DNA, 15 bp, Homo sapiens
gtctaatatttcctt

SEQ ID NO: 909989 - DNA, 15 bp, Homo sapiens
tctaatatttccttt

SEQ ID NO: 909990 - DNA, 15 bp, Homo sapiens
ctaatatttcctttg

SEQ ID NO: 909991 - DNA, 15 bp, Homo sapiens
taatatttcctttgt

SEQ ID NO: 909992 - DNA, 15 bp, Homo sapiens
aatatttcctttgtt

SEQ ID NO: 909993 - DNA, 15 bp, Homo sapiens
atatttcctttgtta

SEQ ID NO: 909994 - DNA, 15 bp, Homo sapiens
tatttcctttgttaa

SEQ ID NO: 909995 - DNA, 15 bp, Homo sapiens
atttcctttgttaaa

SEQ ID NO: 909996 - DNA, 15 bp, Homo sapiens
tttcctttgttaaaa

SEQ ID NO: 909997 - DNA, 15 bp, Homo sapiens
ttcctttgttaaaaa

SEQ ID NO: 909998 - DNA, 15 bp, Homo sapiens
tcctttgttaaaaaa

SEQ ID NO: 909999 - DNA, 15 bp, Homo sapiens
cctttgttaaaaaat

SEQ ID NO: 910000 - DNA, 15 bp, Homo sapiens
ctttgttaaaaaatg

SEQ ID NO: 910001 - DNA, 15 bp, Homo sapiens
tttgttaaaaaatga

SEQ ID NO: 910002 - DNA, 15 bp, Homo sapiens
ttgttaaaaaatgat

SEQ ID NO: 910003 - DNA, 15 bp, Homo sapiens
tgttaaaaaatgatt

SEQ ID NO: 910004 - DNA, 15 bp, Homo sapiens
gttaaaaaatgattt

SEQ ID NO: 910005 - DNA, 15 bp, Homo sapiens
ttaaaaaatgatttg

SEQ ID NO: 910006 - DNA, 15 bp, Homo sapiens
taaaaaatgatttgc

SEQ ID NO: 910007 - DNA, 15 bp, Homo sapiens
aaaaaatgatttgcc

SEQ ID NO: 910008 - DNA, 15 bp, Homo sapiens
aaaaatgatttgccc

SEQ ID NO: 910009 - DNA, 15 bp, Homo sapiens
aaaatgatttgcccg

SEQ ID NO: 910010 - DNA, 15 bp, Homo sapiens
aaatgatttgcccgg

SEQ ID NO: 910011 - DNA, 15 bp, Homo sapiens
aatgatttgcccggc

SEQ ID NO: 910012 - DNA, 15 bp, Homo sapiens
atgatttgcccggcc

SEQ ID NO: 910013 - DNA, 15 bp, Homo sapiens
tgatttgcccggcca

SEQ ID NO: 910014 - DNA, 15 bp, Homo sapiens
gatttgcccggccag

SEQ ID NO: 910015 - DNA, 15 bp, Homo sapiens
atttgcccggccagg

SEQ ID NO: 910016 - DNA, 15 bp, Homo sapiens
tttgcccggccaggc

SEQ ID NO: 910017 - DNA, 15 bp, Homo sapiens
ttgcccggccaggca

SEQ ID NO: 910018 - DNA, 15 bp, Homo sapiens
tgcccggccaggcac

SEQ ID NO: 910019 - DNA, 15 bp, Homo sapiens
gcccggccaggcaca

SEQ ID NO: 910020 - DNA, 15 bp, Homo sapiens
cccggccaggcacag

SEQ ID NO: 910021 - DNA, 15 bp, Homo sapiens
ccggccaggcacagt

SEQ ID NO: 910022 - DNA, 15 bp, Homo sapiens
cggccaggcacagtg

SEQ ID NO: 910023 - DNA, 15 bp, Homo sapiens
ggccaggcacagtgg

SEQ ID NO: 910024 - DNA, 15 bp, Homo sapiens
gccaggcacagtggc

SEQ ID NO: 910025 - DNA, 15 bp, Homo sapiens
ccaggcacagtggct

SEQ ID NO: 910026 - DNA, 15 bp, Homo sapiens
caggcacagtggctc

SEQ ID NO: 910027 - DNA, 15 bp, Homo sapiens
aggcacagtggctca

SEQ ID NO: 910028 - DNA, 15 bp, Homo sapiens
ggcacagtggctcac

SEQ ID NO: 910029 - DNA, 15 bp, Homo sapiens
gcacagtggctcacg

SEQ ID NO: 910030 - DNA, 15 bp, Homo sapiens
cacagtggctcacgc

SEQ ID NO: 910031 - DNA, 15 bp, Homo sapiens
acagtggctcacgcc

SEQ ID NO: 910032 - DNA, 15 bp, Homo sapiens
cagtggctcacgcct

SEQ ID NO: 910033 - DNA, 15 bp, Homo sapiens
agtggctcacgcctg

SEQ ID NO: 910034 - DNA, 15 bp, Homo sapiens
gtggctcacgcctgt

SEQ ID NO: 910035 - DNA, 15 bp, Homo sapiens
tggctcacgcctgta

SEQ ID NO: 910036 - DNA, 15 bp, Homo sapiens
ggctcacgcctgtaa

SEQ ID NO: 910037 - DNA, 15 bp, Homo sapiens
gctcacgcctgtaat

SEQ ID NO: 910038 - DNA, 15 bp, Homo sapiens
ctcacgcctgtaatc

SEQ ID NO: 910039 - DNA, 15 bp, Homo sapiens
tcacgcctgtaatcc

SEQ ID NO: 910040 - DNA, 15 bp, Homo sapiens
cacgcctgtaatccc

SEQ ID NO: 910041 - DNA, 15 bp, Homo sapiens
acgcctgtaatccca

SEQ ID NO: 910042 - DNA, 15 bp, Homo sapiens
cgcctgtaatcccag

SEQ ID NO: 910043 - DNA, 15 bp, Homo sapiens
gcctgtaatcccagc

SEQ ID NO: 910044 - DNA, 15 bp, Homo sapiens
cctgtaatcccagca

SEQ ID NO: 910045 - DNA, 15 bp, Homo sapiens
ctgtaatcccagcac

SEQ ID NO: 910046 - DNA, 15 bp, Homo sapiens
tgtaatcccagcact

SEQ ID NO: 910047 - DNA, 15 bp, Homo sapiens
gtaatcccagcactt

SEQ ID NO: 910048 - DNA, 15 bp, Homo sapiens
taatcccagcacttt

SEQ ID NO: 910049 - DNA, 15 bp, Homo sapiens
aatcccagcactttg

SEQ ID NO: 910050 - DNA, 15 bp, Homo sapiens
atcccagcactttgg

SEQ ID NO: 910051 - DNA, 15 bp, Homo sapiens
tcccagcactttggg

SEQ ID NO: 910052 - DNA, 15 bp, Homo sapiens
cccagcactttggga

SEQ ID NO: 910053 - DNA, 15 bp, Homo sapiens
ccagcactttgggag

SEQ ID NO: 910054 - DNA, 15 bp, Homo sapiens
cagcactttgggagg

SEQ ID NO: 910055 - DNA, 15 bp, Homo sapiens
agcactttgggaggc

SEQ ID NO: 910056 - DNA, 15 bp, Homo sapiens
gcactttgggaggcc

SEQ ID NO: 910057 - DNA, 15 bp, Homo sapiens
cactttgggaggccg

SEQ ID NO: 910058 - DNA, 15 bp, Homo sapiens
actttgggaggccga

SEQ ID NO: 910059 - DNA, 15 bp, Homo sapiens
ctttgggaggccgag

SEQ ID NO: 910060 - DNA, 15 bp, Homo sapiens
tttgggaggccgagg

SEQ ID NO: 910061 - DNA, 15 bp, Homo sapiens
ttgggaggccgaggc

SEQ ID NO: 910062 - DNA, 15 bp, Homo sapiens
tgggaggccgaggcg

SEQ ID NO: 910063 - DNA, 15 bp, Homo sapiens
gggaggccgaggcgg

SEQ ID NO: 910064 - DNA, 15 bp, Homo sapiens
ggaggccgaggcggg

SEQ ID NO: 910065 - DNA, 15 bp, Homo sapiens
gaggccgaggcgggc

SEQ ID NO: 910066 - DNA, 15 bp, Homo sapiens
aggccgaggcgggcg

SEQ ID NO: 910067 - DNA, 15 bp, Homo sapiens
ggccgaggcgggcgg

SEQ ID NO: 910068 - DNA, 15 bp, Homo sapiens
gccgaggcgggcgga

SEQ ID NO: 910069 - DNA, 15 bp, Homo sapiens
ccgaggcgggcggat

SEQ ID NO: 910070 - DNA, 15 bp, Homo sapiens
cgaggcgggcggatc

SEQ ID NO: 910071 - DNA, 15 bp, Homo sapiens
gaggcgggcggatca

SEQ ID NO: 910072 - DNA, 15 bp, Homo sapiens
aggcgggcggatcat

SEQ ID NO: 910073 - DNA, 15 bp, Homo sapiens
ggcgggcggatcatg

SEQ ID NO: 910074 - DNA, 15 bp, Homo sapiens
gcgggcggatcatga

SEQ ID NO: 910075 - DNA, 15 bp, Homo sapiens
cgggcggatcatgag

SEQ ID NO: 910076 - DNA, 15 bp, Homo sapiens
gggcggatcatgagg

SEQ ID NO: 910077 - DNA, 15 bp, Homo sapiens
ggcggatcatgaggt

SEQ ID NO: 910078 - DNA, 15 bp, Homo sapiens
gcggatcatgaggtc

SEQ ID NO: 910079 - DNA, 15 bp, Homo sapiens
cggatcatgaggtca

SEQ ID NO: 910080 - DNA, 15 bp, Homo sapiens
ggatcatgaggtcag

SEQ ID NO: 910081 - DNA, 15 bp, Homo sapiens
gatcatgaggtcagg

SEQ ID NO: 910082 - DNA, 15 bp, Homo sapiens
atcatgaggtcagga

SEQ ID NO: 910083 - DNA, 15 bp, Homo sapiens
tcatgaggtcaggag

SEQ ID NO: 910084 - DNA, 15 bp, Homo sapiens
catgaggtcaggaga

SEQ ID NO: 910085 - DNA, 15 bp, Homo sapiens
atgaggtcaggagat

SEQ ID NO: 910086 - DNA, 15 bp, Homo sapiens
tgaggtcaggagatc

SEQ ID NO: 910087 - DNA, 15 bp, Homo sapiens
gaggtcaggagatcg

SEQ ID NO: 910088 - DNA, 15 bp, Homo sapiens
aggtcaggagatcga

SEQ ID NO: 910089 - DNA, 15 bp, Homo sapiens
ggtcaggagatcgag

SEQ ID NO: 910090 - DNA, 15 bp, Homo sapiens
gtcaggagatcgaga

SEQ ID NO: 910091 - DNA, 15 bp, Homo sapiens
tcaggagatcgagac

SEQ ID NO: 910092 - DNA, 15 bp, Homo sapiens
caggagatcgagact

SEQ ID NO: 910093 - DNA, 15 bp, Homo sapiens
aggagatcgagactg

SEQ ID NO: 910094 - DNA, 15 bp, Homo sapiens
ggagatcgagactgt

SEQ ID NO: 910095 - DNA, 15 bp, Homo sapiens
gagatcgagactgtc

SEQ ID NO: 910096 - DNA, 15 bp, Homo sapiens
agatcgagactgtcc

SEQ ID NO: 910097 - DNA, 15 bp, Homo sapiens
gatcgagactgtcct

SEQ ID NO: 910098 - DNA, 15 bp, Homo sapiens
atcgagactgtcctg

SEQ ID NO: 910099 - DNA, 15 bp, Homo sapiens
tcgagactgtcctgg

SEQ ID NO: 910100 - DNA, 15 bp, Homo sapiens
cgagactgtcctggc

SEQ ID NO: 910101 - DNA, 15 bp, Homo sapiens
gagactgtcctggct

SEQ ID NO: 910102 - DNA, 15 bp, Homo sapiens
agactgtcctggcta

SEQ ID NO: 910103 - DNA, 15 bp, Homo sapiens
gactgtcctggctaa

SEQ ID NO: 910104 - DNA, 15 bp, Homo sapiens
actgtcctggctaac

SEQ ID NO: 910105 - DNA, 15 bp, Homo sapiens
ctgtcctggctaaca

SEQ ID NO: 910106 - DNA, 15 bp, Homo sapiens
tgtcctggctaacat

SEQ ID NO: 910107 - DNA, 15 bp, Homo sapiens
gtcctggctaacatg

SEQ ID NO: 910108 - DNA, 15 bp, Homo sapiens
tcctggctaacatgg

SEQ ID NO: 910109 - DNA, 15 bp, Homo sapiens
cctggctaacatggt

SEQ ID NO: 910110 - DNA, 15 bp, Homo sapiens
ctggctaacatggtg

SEQ ID NO: 910111 - DNA, 15 bp, Homo sapiens
tggctaacatggtga

SEQ ID NO: 910112 - DNA, 15 bp, Homo sapiens
ggctaacatggtgaa

SEQ ID NO: 910113 - DNA, 15 bp, Homo sapiens
gctaacatggtgaaa

SEQ ID NO: 910114 - DNA, 15 bp, Homo sapiens
ctaacatggtgaaac

SEQ ID NO: 910115 - DNA, 15 bp, Homo sapiens
taacatggtgaaacc

SEQ ID NO: 910116 - DNA, 15 bp, Homo sapiens
aacatggtgaaaccc

SEQ ID NO: 910117 - DNA, 15 bp, Homo sapiens
acatggtgaaacccc

SEQ ID NO: 910118 - DNA, 15 bp, Homo sapiens
catggtgaaacccca

SEQ ID NO: 910119 - DNA, 15 bp, Homo sapiens
atggtgaaaccccat

SEQ ID NO: 910120 - DNA, 15 bp, Homo sapiens
tggtgaaaccccatt

SEQ ID NO: 910121 - DNA, 15 bp, Homo sapiens
ggtgaaaccccattt

SEQ ID NO: 910122 - DNA, 15 bp, Homo sapiens
gtgaaaccccatttc

SEQ ID NO: 910123 - DNA, 15 bp, Homo sapiens
tgaaaccccatttct

SEQ ID NO: 910124 - DNA, 15 bp, Homo sapiens
gaaaccccatttcta

SEQ ID NO: 910125 - DNA, 15 bp, Homo sapiens
aaaccccatttctac

SEQ ID NO: 910126 - DNA, 15 bp, Homo sapiens
aaccccatttctact

SEQ ID NO: 910127 - DNA, 15 bp, Homo sapiens
accccatttctacta

SEQ ID NO: 910128 - DNA, 15 bp, Homo sapiens
ccccatttctactaa

SEQ ID NO: 910129 - DNA, 15 bp, Homo sapiens
cccatttctactaaa

SEQ ID NO: 910130 - DNA, 15 bp, Homo sapiens
ccatttctactaaaa

SEQ ID NO: 910131 - DNA, 15 bp, Homo sapiens
catttctactaaaaa

SEQ ID NO: 910132 - DNA, 15 bp, Homo sapiens
atttctactaaaaat

SEQ ID NO: 910133 - DNA, 15 bp, Homo sapiens
tttctactaaaaata

SEQ ID NO: 910134 - DNA, 15 bp, Homo sapiens
ttctactaaaaatac

SEQ ID NO: 910135 - DNA, 15 bp, Homo sapiens
tctactaaaaataca

SEQ ID NO: 910136 - DNA, 15 bp, Homo sapiens
ctactaaaaatacaa

SEQ ID NO: 910137 - DNA, 15 bp, Homo sapiens
tactaaaaatacaaa

SEQ ID NO: 910138 - DNA, 15 bp, Homo sapiens
actaaaaatacaaaa

SEQ ID NO: 910139 - DNA, 15 bp, Homo sapiens
ctaaaaatacaaaaa

SEQ ID NO: 910140 - DNA, 15 bp, Homo sapiens
taaaaatacaaaaaa

SEQ ID NO: 910141 - DNA, 15 bp, Homo sapiens
aaaaatacaaaaaaa

SEQ ID NO: 910142 - DNA, 15 bp, Homo sapiens
aaaatacaaaaaaaa

SEQ ID NO: 910143 - DNA, 15 bp, Homo sapiens
aaatacaaaaaaaaa

SEQ ID NO: 910144 - DNA, 15 bp, Homo sapiens
aatacaaaaaaaaaa

SEQ ID NO: 910145 - DNA, 15 bp, Homo sapiens
atacaaaaaaaaaaa

SEQ ID NO: 910146 - DNA, 15 bp, Homo sapiens
tacaaaaaaaaaaaa

SEQ ID NO: 910147 - DNA, 15 bp, Homo sapiens
acaaaaaaaaaaaaa

SEQ ID NO: 910148 - DNA, 15 bp, Homo sapiens
caaaaaaaaaaaaaa

SEQ ID NO: 910149 - DNA, 15 bp, Homo sapiens
aaaaaaaaaaaaaat

SEQ ID NO: 910150 - DNA, 15 bp, Homo sapiens
aaaaaaaaaaaaatt

SEQ ID NO: 910151 - DNA, 15 bp, Homo sapiens
aaaaaaaaaaaatta

SEQ ID NO: 910152 - DNA, 15 bp, Homo sapiens
aaaaaaaaaaattag

SEQ ID NO: 910153 - DNA, 15 bp, Homo sapiens
aaaaaaaaaattaga

SEQ ID NO: 910154 - DNA, 15 bp, Homo sapiens
aaaaaaaaattagac

SEQ ID NO: 910155 - DNA, 15 bp, Homo sapiens
aaaaaaaattagacg

SEQ ID NO: 910156 - DNA, 15 bp, Homo sapiens
aaaaaaattagacgg

SEQ ID NO: 910157 - DNA, 15 bp, Homo sapiens
aaaaaattagacggg

SEQ ID NO: 910158 - DNA, 15 bp, Homo sapiens
aaaaattagacgggc

SEQ ID NO: 910159 - DNA, 15 bp, Homo sapiens
aaaattagacgggca

SEQ ID NO: 910160 - DNA, 15 bp, Homo sapiens
aaattagacgggcat

SEQ ID NO: 910161 - DNA, 15 bp, Homo sapiens
aattagacgggcatg

SEQ ID NO: 910162 - DNA, 15 bp, Homo sapiens
attagacgggcatgg

SEQ ID NO: 910163 - DNA, 15 bp, Homo sapiens
ttagacgggcatggt

SEQ ID NO: 910164 - DNA, 15 bp, Homo sapiens
tagacgggcatggtg

SEQ ID NO: 910165 - DNA, 15 bp, Homo sapiens
agacgggcatggtgg

SEQ ID NO: 910166 - DNA, 15 bp, Homo sapiens
gacgggcatggtggc

SEQ ID NO: 910167 - DNA, 15 bp, Homo sapiens
acgggcatggtggcg

SEQ ID NO: 910168 - DNA, 15 bp, Homo sapiens
cgggcatggtggcgg

SEQ ID NO: 910169 - DNA, 15 bp, Homo sapiens
gggcatggtggcggg

SEQ ID NO: 910170 - DNA, 15 bp, Homo sapiens
ggcatggtggcgggc

SEQ ID NO: 910171 - DNA, 15 bp, Homo sapiens
gcatggtggcgggca

SEQ ID NO: 910172 - DNA, 15 bp, Homo sapiens
catggtggcgggcac

SEQ ID NO: 910173 - DNA, 15 bp, Homo sapiens
atggtggcgggcacc

SEQ ID NO: 910174 - DNA, 15 bp, Homo sapiens
tggtggcgggcacct

SEQ ID NO: 910175 - DNA, 15 bp, Homo sapiens
ggtggcgggcacctg

SEQ ID NO: 910176 - DNA, 15 bp, Homo sapiens
gtggcgggcacctgt

SEQ ID NO: 910177 - DNA, 15 bp, Homo sapiens
tggcgggcacctgta

SEQ ID NO: 910178 - DNA, 15 bp, Homo sapiens
ggcgggcacctgtag

SEQ ID NO: 910179 - DNA, 15 bp, Homo sapiens
gcgggcacctgtagt

SEQ ID NO: 910180 - DNA, 15 bp, Homo sapiens
cgggcacctgtagtc

SEQ ID NO: 910181 - DNA, 15 bp, Homo sapiens
gggcacctgtagtcc

SEQ ID NO: 910182 - DNA, 15 bp, Homo sapiens
ggcacctgtagtccc

SEQ ID NO: 910183 - DNA, 15 bp, Homo sapiens
gcacctgtagtccca

SEQ ID NO: 910184 - DNA, 15 bp, Homo sapiens
cacctgtagtcccag

SEQ ID NO: 910185 - DNA, 15 bp, Homo sapiens
acctgtagtcccagc

SEQ ID NO: 910186 - DNA, 15 bp, Homo sapiens
cctgtagtcccagct

SEQ ID NO: 910187 - DNA, 15 bp, Homo sapiens
ctgtagtcccagcta

SEQ ID NO: 910188 - DNA, 15 bp, Homo sapiens
tgtagtcccagctac

SEQ ID NO: 910189 - DNA, 15 bp, Homo sapiens
gtagtcccagctact

SEQ ID NO: 910190 - DNA, 15 bp, Homo sapiens
tagtcccagctactc

SEQ ID NO: 910191 - DNA, 15 bp, Homo sapiens
agtcccagctactcg

SEQ ID NO: 910192 - DNA, 15 bp, Homo sapiens
gtcccagctactcgg

SEQ ID NO: 910193 - DNA, 15 bp, Homo sapiens
tcccagctactcggg

SEQ ID NO: 910194 - DNA, 15 bp, Homo sapiens
cccagctactcggga

SEQ ID NO: 910195 - DNA, 15 bp, Homo sapiens
ccagctactcgggag

SEQ ID NO: 910196 - DNA, 15 bp, Homo sapiens
cagctactcgggagg

SEQ ID NO: 910197 - DNA, 15 bp, Homo sapiens
agctactcgggaggc

SEQ ID NO: 910198 - DNA, 15 bp, Homo sapiens
gctactcgggaggct

SEQ ID NO: 910199 - DNA, 15 bp, Homo sapiens
ctactcgggaggctg

SEQ ID NO: 910200 - DNA, 15 bp, Homo sapiens
tactcgggaggctga

SEQ ID NO: 910201 - DNA, 15 bp, Homo sapiens
actcgggaggctgag

SEQ ID NO: 910202 - DNA, 15 bp, Homo sapiens
ctcgggaggctgagg

SEQ ID NO: 910203 - DNA, 15 bp, Homo sapiens
tcgggaggctgaggc

SEQ ID NO: 910204 - DNA, 15 bp, Homo sapiens
cgggaggctgaggca

SEQ ID NO: 910205 - DNA, 15 bp, Homo sapiens
gggaggctgaggcag

SEQ ID NO: 910206 - DNA, 15 bp, Homo sapiens
ggaggctgaggcagg

SEQ ID NO: 910207 - DNA, 15 bp, Homo sapiens
gaggctgaggcagga

SEQ ID NO: 910208 - DNA, 15 bp, Homo sapiens
aggctgaggcaggag

SEQ ID NO: 910209 - DNA, 15 bp, Homo sapiens
ggctgaggcaggaga

SEQ ID NO: 910210 - DNA, 15 bp, Homo sapiens
gctgaggcaggagaa

SEQ ID NO: 910211 - DNA, 15 bp, Homo sapiens
ctgaggcaggagaat

SEQ ID NO: 910212 - DNA, 15 bp, Homo sapiens
tgaggcaggagaatg

SEQ ID NO: 910213 - DNA, 15 bp, Homo sapiens
gaggcaggagaatgg

SEQ ID NO: 910214 - DNA, 15 bp, Homo sapiens
aggcaggagaatggc

SEQ ID NO: 910215 - DNA, 15 bp, Homo sapiens
ggcaggagaatggca

SEQ ID NO: 910216 - DNA, 15 bp, Homo sapiens
gcaggagaatggcat

SEQ ID NO: 910217 - DNA, 15 bp, Homo sapiens
caggagaatggcatg

SEQ ID NO: 910218 - DNA, 15 bp, Homo sapiens
aggagaatggcatga

SEQ ID NO: 910219 - DNA, 15 bp, Homo sapiens
ggagaatggcatgaa

SEQ ID NO: 910220 - DNA, 15 bp, Homo sapiens
gagaatggcatgaac

SEQ ID NO: 910221 - DNA, 15 bp, Homo sapiens
agaatggcatgaacc

SEQ ID NO: 910222 - DNA, 15 bp, Homo sapiens
gaatggcatgaaccc

SEQ ID NO: 910223 - DNA, 15 bp, Homo sapiens
aatggcatgaacccg

SEQ ID NO: 910224 - DNA, 15 bp, Homo sapiens
atggcatgaacccgg

SEQ ID NO: 910225 - DNA, 15 bp, Homo sapiens
tggcatgaacccggg

SEQ ID NO: 910226 - DNA, 15 bp, Homo sapiens
ggcatgaacccggga

SEQ ID NO: 910227 - DNA, 15 bp, Homo sapiens
gcatgaacccgggag

SEQ ID NO: 910228 - DNA, 15 bp, Homo sapiens
catgaacccgggagg

SEQ ID NO: 910229 - DNA, 15 bp, Homo sapiens
atgaacccgggaggc

SEQ ID NO: 910230 - DNA, 15 bp, Homo sapiens
tgaacccgggaggca

SEQ ID NO: 910231 - DNA, 15 bp, Homo sapiens
gaacccgggaggcag

SEQ ID NO: 910232 - DNA, 15 bp, Homo sapiens
aacccgggaggcaga

SEQ ID NO: 910233 - DNA, 15 bp, Homo sapiens
acccgggaggcagaa

SEQ ID NO: 910234 - DNA, 15 bp, Homo sapiens
cccgggaggcagaac

SEQ ID NO: 910235 - DNA, 15 bp, Homo sapiens
ccgggaggcagaact

SEQ ID NO: 910236 - DNA, 15 bp, Homo sapiens
cgggaggcagaactt

SEQ ID NO: 910237 - DNA, 15 bp, Homo sapiens
gggaggcagaacttg

SEQ ID NO: 910238 - DNA, 15 bp, Homo sapiens
ggaggcagaacttgc

SEQ ID NO: 910239 - DNA, 15 bp, Homo sapiens
gaggcagaacttgca

SEQ ID NO: 910240 - DNA, 15 bp, Homo sapiens
aggcagaacttgcag

SEQ ID NO: 910241 - DNA, 15 bp, Homo sapiens
ggcagaacttgcagt

SEQ ID NO: 910242 - DNA, 15 bp, Homo sapiens
gcagaacttgcagtg

SEQ ID NO: 910243 - DNA, 15 bp, Homo sapiens
cagaacttgcagtga

SEQ ID NO: 910244 - DNA, 15 bp, Homo sapiens
agaacttgcagtgag

SEQ ID NO: 910245 - DNA, 15 bp, Homo sapiens
gaacttgcagtgagc

SEQ ID NO: 910246 - DNA, 15 bp, Homo sapiens
aacttgcagtgagcc

SEQ ID NO: 910247 - DNA, 15 bp, Homo sapiens
acttgcagtgagcca

SEQ ID NO: 910248 - DNA, 15 bp, Homo sapiens
cttgcagtgagccaa

SEQ ID NO: 910249 - DNA, 15 bp, Homo sapiens
ttgcagtgagccaag

SEQ ID NO: 910250 - DNA, 15 bp, Homo sapiens
tgcagtgagccaaga

SEQ ID NO: 910251 - DNA, 15 bp, Homo sapiens
gcagtgagccaagat

SEQ ID NO: 910252 - DNA, 15 bp, Homo sapiens
cagtgagccaagata

SEQ ID NO: 910253 - DNA, 15 bp, Homo sapiens
agtgagccaagatag

SEQ ID NO: 910254 - DNA, 15 bp, Homo sapiens
gtgagccaagatagc

SEQ ID NO: 910255 - DNA, 15 bp, Homo sapiens
tgagccaagatagcg

SEQ ID NO: 910256 - DNA, 15 bp, Homo sapiens
gagccaagatagcgc

SEQ ID NO: 910257 - DNA, 15 bp, Homo sapiens
agccaagatagcgcc

SEQ ID NO: 910258 - DNA, 15 bp, Homo sapiens
gccaagatagcgcca

SEQ ID NO: 910259 - DNA, 15 bp, Homo sapiens
ccaagatagcgccac

SEQ ID NO: 910260 - DNA, 15 bp, Homo sapiens
caagatagcgccact

SEQ ID NO: 910261 - DNA, 15 bp, Homo sapiens
aagatagcgccactg

SEQ ID NO: 910262 - DNA, 15 bp, Homo sapiens
agatagcgccactgc

SEQ ID NO: 910263 - DNA, 15 bp, Homo sapiens
gatagcgccactgca

SEQ ID NO: 910264 - DNA, 15 bp, Homo sapiens
atagcgccactgcac

SEQ ID NO: 910265 - DNA, 15 bp, Homo sapiens
tagcgccactgcact

SEQ ID NO: 910266 - DNA, 15 bp, Homo sapiens
agcgccactgcactc

SEQ ID NO: 910267 - DNA, 15 bp, Homo sapiens
gcgccactgcactcc

SEQ ID NO: 910268 - DNA, 15 bp, Homo sapiens
cgccactgcactcca

SEQ ID NO: 910269 - DNA, 15 bp, Homo sapiens
gccactgcactccag

SEQ ID NO: 910270 - DNA, 15 bp, Homo sapiens
ccactgcactccagc

SEQ ID NO: 910271 - DNA, 15 bp, Homo sapiens
cactgcactccagcc

SEQ ID NO: 910272 - DNA, 15 bp, Homo sapiens
actgcactccagcct

SEQ ID NO: 910273 - DNA, 15 bp, Homo sapiens
ctgcactccagcctg

SEQ ID NO: 910274 - DNA, 15 bp, Homo sapiens
tgcactccagcctgg

SEQ ID NO: 910275 - DNA, 15 bp, Homo sapiens
gcactccagcctggg

SEQ ID NO: 910276 - DNA, 15 bp, Homo sapiens
cactccagcctgggc

SEQ ID NO: 910277 - DNA, 15 bp, Homo sapiens
actccagcctgggcg

SEQ ID NO: 910278 - DNA, 15 bp, Homo sapiens
ctccagcctgggcga

SEQ ID NO: 910279 - DNA, 15 bp, Homo sapiens
tccagcctgggcgac

SEQ ID NO: 910280 - DNA, 15 bp, Homo sapiens
ccagcctgggcgaca

SEQ ID NO: 910281 - DNA, 15 bp, Homo sapiens
cagcctgggcgacag

SEQ ID NO: 910282 - DNA, 15 bp, Homo sapiens
agcctgggcgacaga

SEQ ID NO: 910283 - DNA, 15 bp, Homo sapiens
gcctgggcgacagag

SEQ ID NO: 910284 - DNA, 15 bp, Homo sapiens
cctgggcgacagagc

SEQ ID NO: 910285 - DNA, 15 bp, Homo sapiens
ctgggcgacagagcg

SEQ ID NO: 910286 - DNA, 15 bp, Homo sapiens
tgggcgacagagcga

SEQ ID NO: 910287 - DNA, 15 bp, Homo sapiens
gggcgacagagcgag

SEQ ID NO: 910288 - DNA, 15 bp, Homo sapiens
ggcgacagagcgaga

SEQ ID NO: 910289 - DNA, 15 bp, Homo sapiens
gcgacagagcgagac

SEQ ID NO: 910290 - DNA, 15 bp, Homo sapiens
cgacagagcgagact

SEQ ID NO: 910291 - DNA, 15 bp, Homo sapiens
gacagagcgagactc

SEQ ID NO: 910292 - DNA, 15 bp, Homo sapiens
acagagcgagactcc

SEQ ID NO: 910293 - DNA, 15 bp, Homo sapiens
cagagcgagactccg

SEQ ID NO: 910294 - DNA, 15 bp, Homo sapiens
agagcgagactccgt

SEQ ID NO: 910295 - DNA, 15 bp, Homo sapiens
gagcgagactccgtc

SEQ ID NO: 910296 - DNA, 15 bp, Homo sapiens
agcgagactccgtct

SEQ ID NO: 910297 - DNA, 15 bp, Homo sapiens
gcgagactccgtctc

SEQ ID NO: 910298 - DNA, 15 bp, Homo sapiens
cgagactccgtctca

SEQ ID NO: 910299 - DNA, 15 bp, Homo sapiens
gagactccgtctcaa

SEQ ID NO: 910300 - DNA, 15 bp, Homo sapiens
agactccgtctcaaa

SEQ ID NO: 910301 - DNA, 15 bp, Homo sapiens
gactccgtctcaaaa

SEQ ID NO: 910302 - DNA, 15 bp, Homo sapiens
actccgtctcaaaaa

SEQ ID NO: 910303 - DNA, 15 bp, Homo sapiens
ctccgtctcaaaaaa

SEQ ID NO: 910304 - DNA, 15 bp, Homo sapiens
tccgtctcaaaaaaa

SEQ ID NO: 910305 - DNA, 15 bp, Homo sapiens
ccgtctcaaaaaaaa

SEQ ID NO: 910306 - DNA, 15 bp, Homo sapiens
cgtctcaaaaaaaaa

SEQ ID NO: 910307 - DNA, 15 bp, Homo sapiens
gtctcaaaaaaaaaa

SEQ ID NO: 910308 - DNA, 15 bp, Homo sapiens
tctcaaaaaaaaaaa

SEQ ID NO: 910309 - DNA, 15 bp, Homo sapiens
ctcaaaaaaaaaaaa

SEQ ID NO: 910310 - DNA, 15 bp, Homo sapiens
tcaaaaaaaaaaaaa

SEQ ID NO: 910311 - DNA, 15 bp, Homo sapiens
aaaaaaaaaaaaaaa

SEQ ID NO: 910312 - DNA, 15 bp, Homo sapiens
aaaaaaaaaaaaaag

SEQ ID NO: 910313 - DNA, 15 bp, Homo sapiens
aaaaaaaaaaaaaga

SEQ ID NO: 910314 - DNA, 15 bp, Homo sapiens
aaaaaaaaaaaagat

SEQ ID NO: 910315 - DNA, 15 bp, Homo sapiens
aaaaaaaaaaagatt

SEQ ID NO: 910316 - DNA, 15 bp, Homo sapiens
aaaaaaaaaagattt

SEQ ID NO: 910317 - DNA, 15 bp, Homo sapiens
aaaaaaaaagatttg

SEQ ID NO: 910318 - DNA, 15 bp, Homo sapiens
aaaaaaaagatttgc

SEQ ID NO: 910319 - DNA, 15 bp, Homo sapiens
aaaaaaagatttgcc

SEQ ID NO: 910320 - DNA, 15 bp, Homo sapiens
aaaaaagatttgccc

SEQ ID NO: 910321 - DNA, 15 bp, Homo sapiens
aaaaagatttgcccc

SEQ ID NO: 910322 - DNA, 15 bp, Homo sapiens
aaaagatttgcccca

SEQ ID NO: 910323 - DNA, 15 bp, Homo sapiens
aaagatttgccccac

SEQ ID NO: 910324 - DNA, 15 bp, Homo sapiens
aagatttgccccacg

SEQ ID NO: 910325 - DNA, 15 bp, Homo sapiens
agatttgccccacga

SEQ ID NO: 910326 - DNA, 15 bp, Homo sapiens
gatttgccccacgaa

SEQ ID NO: 910327 - DNA, 15 bp, Homo sapiens
atttgccccacgaag

SEQ ID NO: 910328 - DNA, 15 bp, Homo sapiens
tttgccccacgaagg

SEQ ID NO: 910329 - DNA, 15 bp, Homo sapiens
ttgccccacgaaggc

SEQ ID NO: 910330 - DNA, 15 bp, Homo sapiens
tgccccacgaaggca

SEQ ID NO: 910331 - DNA, 15 bp, Homo sapiens
gccccacgaaggcat

SEQ ID NO: 910332 - DNA, 15 bp, Homo sapiens
ccccacgaaggcatt

SEQ ID NO: 910333 - DNA, 15 bp, Homo sapiens
cccacgaaggcatta

SEQ ID NO: 910334 - DNA, 15 bp, Homo sapiens
ccacgaaggcattat

SEQ ID NO: 910335 - DNA, 15 bp, Homo sapiens
cacgaaggcattata

SEQ ID NO: 910336 - DNA, 15 bp, Homo sapiens
acgaaggcattataa

SEQ ID NO: 910337 - DNA, 15 bp, Homo sapiens
cgaaggcattataat

SEQ ID NO: 910338 - DNA, 15 bp, Homo sapiens
gaaggcattataata

SEQ ID NO: 910339 - DNA, 15 bp, Homo sapiens
aaggcattataataa

SEQ ID NO: 910340 - DNA, 15 bp, Homo sapiens
aggcattataataaa

SEQ ID NO: 910341 - DNA, 15 bp, Homo sapiens
ggcattataataaaa

SEQ ID NO: 910342 - DNA, 15 bp, Homo sapiens
gcattataataaaag

SEQ ID NO: 910343 - DNA, 15 bp, Homo sapiens
cattataataaaaga

SEQ ID NO: 910344 - DNA, 15 bp, Homo sapiens
attataataaaagag

SEQ ID NO: 910345 - DNA, 15 bp, Homo sapiens
ttataataaaagagg

SEQ ID NO: 910346 - DNA, 15 bp, Homo sapiens
tataataaaagaggt

SEQ ID NO: 910347 - DNA, 15 bp, Homo sapiens
ataataaaagaggtc

SEQ ID NO: 910348 - DNA, 15 bp, Homo sapiens
taataaaagaggtcc

SEQ ID NO: 910349 - DNA, 15 bp, Homo sapiens
aataaaagaggtcct

SEQ ID NO: 910350 - DNA, 15 bp, Homo sapiens
ataaaagaggtcctt

SEQ ID NO: 910351 - DNA, 15 bp, Homo sapiens
taaaagaggtccttg

SEQ ID NO: 910352 - DNA, 15 bp, Homo sapiens
aaaagaggtccttga

SEQ ID NO: 910353 - DNA, 15 bp, Homo sapiens
aaagaggtccttgag

SEQ ID NO: 910354 - DNA, 15 bp, Homo sapiens
aagaggtccttgagg

SEQ ID NO: 910355 - DNA, 15 bp, Homo sapiens
agaggtccttgagga

SEQ ID NO: 910356 - DNA, 15 bp, Homo sapiens
gaggtccttgaggat

SEQ ID NO: 910357 - DNA, 15 bp, Homo sapiens
aggtccttgaggatt

SEQ ID NO: 910358 - DNA, 15 bp, Homo sapiens
ggtccttgaggatta

SEQ ID NO: 910359 - DNA, 15 bp, Homo sapiens
gtccttgaggattat

SEQ ID NO: 910360 - DNA, 15 bp, Homo sapiens
tccttgaggattata

SEQ ID NO: 910361 - DNA, 15 bp, Homo sapiens
ccttgaggattatac

SEQ ID NO: 910362 - DNA, 15 bp, Homo sapiens
cttgaggattataca

SEQ ID NO: 910363 - DNA, 15 bp, Homo sapiens
ttgaggattatacat

SEQ ID NO: 910364 - DNA, 15 bp, Homo sapiens
tgaggattatacatt

SEQ ID NO: 910365 - DNA, 15 bp, Homo sapiens
gaggattatacatta

SEQ ID NO: 910366 - DNA, 15 bp, Homo sapiens
aggattatacattat

SEQ ID NO: 910367 - DNA, 15 bp, Homo sapiens
ggattatacattatt

SEQ ID NO: 910368 - DNA, 15 bp, Homo sapiens
gattatacattattc

SEQ ID NO: 910369 - DNA, 15 bp, Homo sapiens
attatacattattca

SEQ ID NO: 910370 - DNA, 15 bp, Homo sapiens
ttatacattattcaa

SEQ ID NO: 910371 - DNA, 15 bp, Homo sapiens
tatacattattcaag

SEQ ID NO: 910372 - DNA, 15 bp, Homo sapiens
atacattattcaaga

SEQ ID NO: 910373 - DNA, 15 bp, Homo sapiens
tacattattcaagag

SEQ ID NO: 910374 - DNA, 15 bp, Homo sapiens
acattattcaagagg

SEQ ID NO: 910375 - DNA, 15 bp, Homo sapiens
cattattcaagaggt

SEQ ID NO: 910376 - DNA, 15 bp, Homo sapiens
attattcaagaggta

SEQ ID NO: 910377 - DNA, 15 bp, Homo sapiens
ttattcaagaggtag

SEQ ID NO: 910378 - DNA, 15 bp, Homo sapiens
tattcaagaggtagg

SEQ ID NO: 910379 - DNA, 15 bp, Homo sapiens
attcaagaggtaggt

SEQ ID NO: 910380 - DNA, 15 bp, Homo sapiens
ttcaagaggtaggtc

SEQ ID NO: 910381 - DNA, 15 bp, Homo sapiens
tcaagaggtaggtca

SEQ ID NO: 910382 - DNA, 15 bp, Homo sapiens
caagaggtaggtcaa

SEQ ID NO: 910383 - DNA, 15 bp, Homo sapiens
aagaggtaggtcaag

SEQ ID NO: 910384 - DNA, 15 bp, Homo sapiens
agaggtaggtcaagt

SEQ ID NO: 910385 - DNA, 15 bp, Homo sapiens
gaggtaggtcaagtt

SEQ ID NO: 910386 - DNA, 15 bp, Homo sapiens
aggtaggtcaagttc

SEQ ID NO: 910387 - DNA, 15 bp, Homo sapiens
ggtaggtcaagttcc

SEQ ID NO: 910388 - DNA, 15 bp, Homo sapiens
gtaggtcaagttccc

SEQ ID NO: 910389 - DNA, 15 bp, Homo sapiens
agcattccgaataac

SEQ ID NO: 910390 - DNA, 15 bp, Homo sapiens
gcattccgaataact

SEQ ID NO: 910391 - DNA, 15 bp, Homo sapiens
cattccgaataacta

SEQ ID NO: 910392 - DNA, 15 bp, Homo sapiens
attccgaataactat

SEQ ID NO: 910393 - DNA, 15 bp, Homo sapiens
ttccgaataactatt

SEQ ID NO: 910394 - DNA, 15 bp, Homo sapiens
tccgaataactatta

SEQ ID NO: 910395 - DNA, 15 bp, Homo sapiens
ccgaataactattaa

SEQ ID NO: 910396 - DNA, 15 bp, Homo sapiens
cgaataactattaag

SEQ ID NO: 910397 - DNA, 15 bp, Homo sapiens
gaataactattaaga

SEQ ID NO: 910398 - DNA, 15 bp, Homo sapiens
aataactattaagat

SEQ ID NO: 910399 - DNA, 15 bp, Homo sapiens
ataactattaagatt

SEQ ID NO: 910400 - DNA, 15 bp, Homo sapiens
taactattaagattt

SEQ ID NO: 910401 - DNA, 15 bp, Homo sapiens
aactattaagatttc

SEQ ID NO: 910402 - DNA, 15 bp, Homo sapiens
actattaagatttcc

SEQ ID NO: 910403 - DNA, 15 bp, Homo sapiens
ctattaagatttcca

SEQ ID NO: 910404 - DNA, 15 bp, Homo sapiens
tattaagatttccac

SEQ ID NO: 910405 - DNA, 15 bp, Homo sapiens
attaagatttccaca

SEQ ID NO: 910406 - DNA, 15 bp, Homo sapiens
ttaagatttccacag

SEQ ID NO: 910407 - DNA, 15 bp, Homo sapiens
taagatttccacaga

SEQ ID NO: 910408 - DNA, 15 bp, Homo sapiens
aagatttccacagag

SEQ ID NO: 910409 - DNA, 15 bp, Homo sapiens
agatttccacagaga

SEQ ID NO: 910410 - DNA, 15 bp, Homo sapiens
gatttccacagagat

SEQ ID NO: 910411 - DNA, 15 bp, Homo sapiens
atttccacagagata

SEQ ID NO: 910412 - DNA, 15 bp, Homo sapiens
tttccacagagataa

SEQ ID NO: 910413 - DNA, 15 bp, Homo sapiens
ttccacagagataaa

SEQ ID NO: 910414 - DNA, 15 bp, Homo sapiens
tccacagagataaac

SEQ ID NO: 910415 - DNA, 15 bp, Homo sapiens
ccacagagataaaca

SEQ ID NO: 910416 - DNA, 15 bp, Homo sapiens
cacagagataaacaa

SEQ ID NO: 910417 - DNA, 15 bp, Homo sapiens
acagagataaacaag

SEQ ID NO: 910418 - DNA, 15 bp, Homo sapiens
cagagataaacaagg

SEQ ID NO: 910419 - DNA, 15 bp, Homo sapiens
agagataaacaaggt

SEQ ID NO: 910420 - DNA, 15 bp, Homo sapiens
gagataaacaaggta

SEQ ID NO: 910421 - DNA, 15 bp, Homo sapiens
agataaacaaggtaa

SEQ ID NO: 910422 - DNA, 15 bp, Homo sapiens
gataaacaaggtaac

SEQ ID NO: 910423 - DNA, 15 bp, Homo sapiens
ataaacaaggtaact

SEQ ID NO: 910424 - DNA, 15 bp, Homo sapiens
taaacaaggtaactg

SEQ ID NO: 910425 - DNA, 15 bp, Homo sapiens
aaacaaggtaactgt

SEQ ID NO: 910426 - DNA, 15 bp, Homo sapiens
aacaaggtaactgtc

SEQ ID NO: 910427 - DNA, 15 bp, Homo sapiens
acaaggtaactgtcc

SEQ ID NO: 910428 - DNA, 15 bp, Homo sapiens
caaggtaactgtcca

SEQ ID NO: 910429 - DNA, 15 bp, Homo sapiens
aaggtaactgtccaa

SEQ ID NO: 910430 - DNA, 15 bp, Homo sapiens
aggtaactgtccaat

SEQ ID NO: 910431 - DNA, 15 bp, Homo sapiens
ggtaactgtccaatt

SEQ ID NO: 910432 - DNA, 15 bp, Homo sapiens
gtaactgtccaatta

SEQ ID NO: 910433 - DNA, 15 bp, Homo sapiens
taactgtccaattac

SEQ ID NO: 910434 - DNA, 15 bp, Homo sapiens
aactgtccaattact

SEQ ID NO: 910435 - DNA, 15 bp, Homo sapiens
actgtccaattactg

SEQ ID NO: 910436 - DNA, 15 bp, Homo sapiens
ctgtccaattactgc

SEQ ID NO: 910437 - DNA, 15 bp, Homo sapiens
tgtccaattactgct

SEQ ID NO: 910438 - DNA, 15 bp, Homo sapiens
gtccaattactgctt

SEQ ID NO: 910439 - DNA, 15 bp, Homo sapiens
tccaattactgcttt

SEQ ID NO: 910440 - DNA, 15 bp, Homo sapiens
ccaattactgcttta

SEQ ID NO: 910441 - DNA, 15 bp, Homo sapiens
caattactgctttat

SEQ ID NO: 910442 - DNA, 15 bp, Homo sapiens
aattactgctttatt

SEQ ID NO: 910443 - DNA, 15 bp, Homo sapiens
attactgctttattc

SEQ ID NO: 910444 - DNA, 15 bp, Homo sapiens
ttactgctttattct

SEQ ID NO: 910445 - DNA, 15 bp, Homo sapiens
tactgctttattctc

SEQ ID NO: 910446 - DNA, 15 bp, Homo sapiens
actgctttattctct

SEQ ID NO: 910447 - DNA, 15 bp, Homo sapiens
ctgctttattctctc

SEQ ID NO: 910448 - DNA, 15 bp, Homo sapiens
tgctttattctctct

SEQ ID NO: 910449 - DNA, 15 bp, Homo sapiens
gctttattctctcta

SEQ ID NO: 910450 - DNA, 15 bp, Homo sapiens
ctttattctctctac

SEQ ID NO: 910451 - DNA, 15 bp, Homo sapiens
tttattctctctacc

SEQ ID NO: 910452 - DNA, 15 bp, Homo sapiens
ttattctctctaccc

SEQ ID NO: 910453 - DNA, 15 bp, Homo sapiens
tattctctctaccct

SEQ ID NO: 910454 - DNA, 15 bp, Homo sapiens
attctctctaccctt

SEQ ID NO: 910455 - DNA, 15 bp, Homo sapiens
ttctctctaccctta

SEQ ID NO: 910456 - DNA, 15 bp, Homo sapiens
tctctctacccttat

SEQ ID NO: 910457 - DNA, 15 bp, Homo sapiens
ctctctacccttatt

SEQ ID NO: 910458 - DNA, 15 bp, Homo sapiens
tctctacccttattc

SEQ ID NO: 910459 - DNA, 15 bp, Homo sapiens
ctctacccttattcg

SEQ ID NO: 910460 - DNA, 15 bp, Homo sapiens
tctacccttattcgt

SEQ ID NO: 910461 - DNA, 15 bp, Homo sapiens
ctacccttattcgtt

SEQ ID NO: 910462 - DNA, 15 bp, Homo sapiens
tacccttattcgttg

SEQ ID NO: 910463 - DNA, 15 bp, Homo sapiens
acccttattcgttgg

SEQ ID NO: 910464 - DNA, 15 bp, Homo sapiens
cccttattcgttggc

SEQ ID NO: 910465 - DNA, 15 bp, Homo sapiens
ccttattcgttggcc

SEQ ID NO: 910466 - DNA, 15 bp, Homo sapiens
cttattcgttggcca

SEQ ID NO: 910467 - DNA, 15 bp, Homo sapiens
ttattcgttggccat

SEQ ID NO: 910468 - DNA, 15 bp, Homo sapiens
tattcgttggccatg

SEQ ID NO: 910469 - DNA, 15 bp, Homo sapiens
attcgttggccatgc

SEQ ID NO: 910470 - DNA, 15 bp, Homo sapiens
ttcgttggccatgcc

SEQ ID NO: 910471 - DNA, 15 bp, Homo sapiens
tcgttggccatgcct

SEQ ID NO: 910472 - DNA, 15 bp, Homo sapiens
cgttggccatgcctt

SEQ ID NO: 910473 - DNA, 15 bp, Homo sapiens
gttggccatgccttt

SEQ ID NO: 910474 - DNA, 15 bp, Homo sapiens
ttggccatgccttta

SEQ ID NO: 910475 - DNA, 15 bp, Homo sapiens
tggccatgcctttac

SEQ ID NO: 910476 - DNA, 15 bp, Homo sapiens
ggccatgcctttaca

SEQ ID NO: 910477 - DNA, 15 bp, Homo sapiens
gccatgcctttacaa

SEQ ID NO: 910478 - DNA, 15 bp, Homo sapiens
ccatgcctttacaaa

SEQ ID NO: 910479 - DNA, 15 bp, Homo sapiens
catgcctttacaaag

SEQ ID NO: 910480 - DNA, 15 bp, Homo sapiens
atgcctttacaaaga

SEQ ID NO: 910481 - DNA, 15 bp, Homo sapiens
tgcctttacaaagaa

SEQ ID NO: 910482 - DNA, 15 bp, Homo sapiens
gcctttacaaagaaa

SEQ ID NO: 910483 - DNA, 15 bp, Homo sapiens
cctttacaaagaaag

SEQ ID NO: 910484 - DNA, 15 bp, Homo sapiens
ctttacaaagaaagg

SEQ ID NO: 910485 - DNA, 15 bp, Homo sapiens
tttacaaagaaaggg

SEQ ID NO: 910486 - DNA, 15 bp, Homo sapiens
ttacaaagaaagggc

SEQ ID NO: 910487 - DNA, 15 bp, Homo sapiens
tacaaagaaagggca

SEQ ID NO: 910488 - DNA, 15 bp, Homo sapiens
acaaagaaagggcat

SEQ ID NO: 910489 - DNA, 15 bp, Homo sapiens
caaagaaagggcatt

SEQ ID NO: 910490 - DNA, 15 bp, Homo sapiens
aaagaaagggcatta

SEQ ID NO: 910491 - DNA, 15 bp, Homo sapiens
aagaaagggcattac

SEQ ID NO: 910492 - DNA, 15 bp, Homo sapiens
agaaagggcattact

SEQ ID NO: 910493 - DNA, 15 bp, Homo sapiens
gaaagggcattactg

SEQ ID NO: 910494 - DNA, 15 bp, Homo sapiens
aaagggcattactgt

SEQ ID NO: 910495 - DNA, 15 bp, Homo sapiens
aagggcattactgtg

SEQ ID NO: 910496 - DNA, 15 bp, Homo sapiens
agggcattactgtgt

SEQ ID NO: 910497 - DNA, 15 bp, Homo sapiens
gggcattactgtgtt

SEQ ID NO: 910498 - DNA, 15 bp, Homo sapiens
ggcattactgtgttt

SEQ ID NO: 910499 - DNA, 15 bp, Homo sapiens
gcattactgtgtttc

SEQ ID NO: 910500 - DNA, 15 bp, Homo sapiens
cattactgtgtttct

SEQ ID NO: 910501 - DNA, 15 bp, Homo sapiens
attactgtgtttctt

SEQ ID NO: 910502 - DNA, 15 bp, Homo sapiens
ttactgtgtttcttg

SEQ ID NO: 910503 - DNA, 15 bp, Homo sapiens
tactgtgtttcttgt

SEQ ID NO: 910504 - DNA, 15 bp, Homo sapiens
actgtgtttcttgtt

SEQ ID NO: 910505 - DNA, 15 bp, Homo sapiens
ctgtgtttcttgtta

SEQ ID NO: 910506 - DNA, 15 bp, Homo sapiens
tgtgtttcttgttac

SEQ ID NO: 910507 - DNA, 15 bp, Homo sapiens
gtgtttcttgttact

SEQ ID NO: 910508 - DNA, 15 bp, Homo sapiens
tgtttcttgttactc

SEQ ID NO: 910509 - DNA, 15 bp, Homo sapiens
gtttcttgttactct

SEQ ID NO: 910510 - DNA, 15 bp, Homo sapiens
tttcttgttactctt

SEQ ID NO: 910511 - DNA, 15 bp, Homo sapiens
ttcttgttactctta

SEQ ID NO: 910512 - DNA, 15 bp, Homo sapiens
tcttgttactcttat

SEQ ID NO: 910513 - DNA, 15 bp, Homo sapiens
cttgttactcttatg

SEQ ID NO: 910514 - DNA, 15 bp, Homo sapiens
ttgttactcttatga

SEQ ID NO: 910515 - DNA, 15 bp, Homo sapiens
tgttactcttatgaa

SEQ ID NO: 910516 - DNA, 15 bp, Homo sapiens
gttactcttatgaaa

SEQ ID NO: 910517 - DNA, 15 bp, Homo sapiens
ttactcttatgaaaa

SEQ ID NO: 910518 - DNA, 15 bp, Homo sapiens
tactcttatgaaaaa

SEQ ID NO: 910519 - DNA, 15 bp, Homo sapiens
actcttatgaaaaag

SEQ ID NO: 910520 - DNA, 15 bp, Homo sapiens
ctcttatgaaaaaga

SEQ ID NO: 910521 - DNA, 15 bp, Homo sapiens
tcttatgaaaaagag

SEQ ID NO: 910522 - DNA, 15 bp, Homo sapiens
cttatgaaaaagaga

SEQ ID NO: 910523 - DNA, 15 bp, Homo sapiens
ttatgaaaaagagaa

SEQ ID NO: 910524 - DNA, 15 bp, Homo sapiens
tatgaaaaagagaaa

SEQ ID NO: 910525 - DNA, 15 bp, Homo sapiens
atgaaaaagagaaaa

SEQ ID NO: 910526 - DNA, 15 bp, Homo sapiens
tgaaaaagagaaaaa

SEQ ID NO: 910527 - DNA, 15 bp, Homo sapiens
gaaaaagagaaaaag

SEQ ID NO: 910528 - DNA, 15 bp, Homo sapiens
aaaaagagaaaaaga

SEQ ID NO: 910529 - DNA, 15 bp, Homo sapiens
aaaagagaaaaagaa

SEQ ID NO: 910530 - DNA, 15 bp, Homo sapiens
aaagagaaaaagaaa

SEQ ID NO: 910531 - DNA, 15 bp, Homo sapiens
aagagaaaaagaaat

SEQ ID NO: 910532 - DNA, 15 bp, Homo sapiens
agagaaaaagaaata

SEQ ID NO: 910533 - DNA, 15 bp, Homo sapiens
gagaaaaagaaatat

SEQ ID NO: 910534 - DNA, 15 bp, Homo sapiens
agaaaaagaaatatt

SEQ ID NO: 910535 - DNA, 15 bp, Homo sapiens
gaaaaagaaatatta

SEQ ID NO: 910536 - DNA, 15 bp, Homo sapiens
aaaaagaaatattat

SEQ ID NO: 910537 - DNA, 15 bp, Homo sapiens
aaaagaaatattata

SEQ ID NO: 910538 - DNA, 15 bp, Homo sapiens
aaagaaatattataa

SEQ ID NO: 910539 - DNA, 15 bp, Homo sapiens
aagaaatattataat

SEQ ID NO: 910540 - DNA, 15 bp, Homo sapiens
agaaatattataatt

SEQ ID NO: 910541 - DNA, 15 bp, Homo sapiens
gaaatattataattg

SEQ ID NO: 910542 - DNA, 15 bp, Homo sapiens
aaatattataattgg

SEQ ID NO: 910543 - DNA, 15 bp, Homo sapiens
aatattataattggg

SEQ ID NO: 910544 - DNA, 15 bp, Homo sapiens
atattataattgggg

SEQ ID NO: 910545 - DNA, 15 bp, Homo sapiens
tattataattgggga

SEQ ID NO: 910546 - DNA, 15 bp, Homo sapiens
attataattggggaa

SEQ ID NO: 910547 - DNA, 15 bp, Homo sapiens
ttataattggggaac

SEQ ID NO: 910548 - DNA, 15 bp, Homo sapiens
tataattggggaaca

SEQ ID NO: 910549 - DNA, 15 bp, Homo sapiens
ataattggggaacag

SEQ ID NO: 910550 - DNA, 15 bp, Homo sapiens
taattggggaacaga

SEQ ID NO: 910551 - DNA, 15 bp, Homo sapiens
aattggggaacagat

SEQ ID NO: 910552 - DNA, 15 bp, Homo sapiens
attggggaacagata

SEQ ID NO: 910553 - DNA, 15 bp, Homo sapiens
ttggggaacagatag

SEQ ID NO: 910554 - DNA, 15 bp, Homo sapiens
tggggaacagataga

SEQ ID NO: 910555 - DNA, 15 bp, Homo sapiens
ggggaacagatagaa

SEQ ID NO: 910556 - DNA, 15 bp, Homo sapiens
gggaacagatagaag

SEQ ID NO: 910557 - DNA, 15 bp, Homo sapiens
ggaacagatagaaga

SEQ ID NO: 910558 - DNA, 15 bp, Homo sapiens
gaacagatagaagaa

SEQ ID NO: 910559 - DNA, 15 bp, Homo sapiens
aacagatagaagaat

SEQ ID NO: 910560 - DNA, 15 bp, Homo sapiens
acagatagaagaata

SEQ ID NO: 910561 - DNA, 15 bp, Homo sapiens
cagatagaagaatag

SEQ ID NO: 910562 - DNA, 15 bp, Homo sapiens
agatagaagaatagt

SEQ ID NO: 910563 - DNA, 15 bp, Homo sapiens
gatagaagaatagta

SEQ ID NO: 910564 - DNA, 15 bp, Homo sapiens
atagaagaatagtaa

SEQ ID NO: 910565 - DNA, 15 bp, Homo sapiens
tagaagaatagtaac

SEQ ID NO: 910566 - DNA, 15 bp, Homo sapiens
agaagaatagtaacg

SEQ ID NO: 910567 - DNA, 15 bp, Homo sapiens
gaagaatagtaacgt

SEQ ID NO: 910568 - DNA, 15 bp, Homo sapiens
aagaatagtaacgtt

SEQ ID NO: 910569 - DNA, 15 bp, Homo sapiens
agaatagtaacgtta

SEQ ID NO: 910570 - DNA, 15 bp, Homo sapiens
gaatagtaacgttaa

SEQ ID NO: 910571 - DNA, 15 bp, Homo sapiens
aatagtaacgttaat

SEQ ID NO: 910572 - DNA, 15 bp, Homo sapiens
atagtaacgttaata

SEQ ID NO: 910573 - DNA, 15 bp, Homo sapiens
tagtaacgttaatag

SEQ ID NO: 910574 - DNA, 15 bp, Homo sapiens
agtaacgttaataga

SEQ ID NO: 910575 - DNA, 15 bp, Homo sapiens
gtaacgttaatagag

SEQ ID NO: 910576 - DNA, 15 bp, Homo sapiens
taacgttaatagagc

SEQ ID NO: 910577 - DNA, 15 bp, Homo sapiens
aacgttaatagagct

SEQ ID NO: 910578 - DNA, 15 bp, Homo sapiens
acgttaatagagctt

SEQ ID NO: 910579 - DNA, 15 bp, Homo sapiens
cgttaatagagcttt

SEQ ID NO: 910580 - DNA, 15 bp, Homo sapiens
gttaatagagcttta

SEQ ID NO: 910581 - DNA, 15 bp, Homo sapiens
ttaatagagctttag

SEQ ID NO: 910582 - DNA, 15 bp, Homo sapiens
taatagagctttagt

SEQ ID NO: 910583 - DNA, 15 bp, Homo sapiens
aatagagctttagtg

SEQ ID NO: 910584 - DNA, 15 bp, Homo sapiens
atagagctttagtga

SEQ ID NO: 910585 - DNA, 15 bp, Homo sapiens
tagagctttagtgaa

SEQ ID NO: 910586 - DNA, 15 bp, Homo sapiens
agagctttagtgaag

SEQ ID NO: 910587 - DNA, 15 bp, Homo sapiens
gagctttagtgaagg

SEQ ID NO: 910588 - DNA, 15 bp, Homo sapiens
agctttagtgaaggc

SEQ ID NO: 910589 - DNA, 15 bp, Homo sapiens
gctttagtgaaggct

SEQ ID NO: 910590 - DNA, 15 bp, Homo sapiens
ctttagtgaaggctt

SEQ ID NO: 910591 - DNA, 15 bp, Homo sapiens
tttagtgaaggcttt

SEQ ID NO: 910592 - DNA, 15 bp, Homo sapiens
ttagtgaaggcttta

SEQ ID NO: 910593 - DNA, 15 bp, Homo sapiens
tagtgaaggctttaa

SEQ ID NO: 910594 - DNA, 15 bp, Homo sapiens
agtgaaggctttaag

SEQ ID NO: 910595 - DNA, 15 bp, Homo sapiens
gtgaaggctttaagt

SEQ ID NO: 910596 - DNA, 15 bp, Homo sapiens
tgaaggctttaagta

SEQ ID NO: 910597 - DNA, 15 bp, Homo sapiens
gaaggctttaagtaa

SEQ ID NO: 910598 - DNA, 15 bp, Homo sapiens
aaggctttaagtaaa

SEQ ID NO: 910599 - DNA, 15 bp, Homo sapiens
aggctttaagtaaag

SEQ ID NO: 910600 - DNA, 15 bp, Homo sapiens
ggctttaagtaaagg

SEQ ID NO: 910601 - DNA, 15 bp, Homo sapiens
gctttaagtaaaggt

SEQ ID NO: 910602 - DNA, 15 bp, Homo sapiens
ctttaagtaaaggta

SEQ ID NO: 910603 - DNA, 15 bp, Homo sapiens
tttaagtaaaggtat

SEQ ID NO: 910604 - DNA, 15 bp, Homo sapiens
ttaagtaaaggtatc

SEQ ID NO: 910605 - DNA, 15 bp, Homo sapiens
taagtaaaggtatca

SEQ ID NO: 910606 - DNA, 15 bp, Homo sapiens
aagtaaaggtatcaa

SEQ ID NO: 910607 - DNA, 15 bp, Homo sapiens
agtaaaggtatcaag

SEQ ID NO: 910608 - DNA, 15 bp, Homo sapiens
gtaaaggtatcaaga

SEQ ID NO: 910609 - DNA, 15 bp, Homo sapiens
taaaggtatcaagaa

SEQ ID NO: 910610 - DNA, 15 bp, Homo sapiens
aaaggtatcaagaat

SEQ ID NO: 910611 - DNA, 15 bp, Homo sapiens
aaggtatcaagaata

SEQ ID NO: 910612 - DNA, 15 bp, Homo sapiens
aggtatcaagaataa

SEQ ID NO: 910613 - DNA, 15 bp, Homo sapiens
ggtatcaagaataag

SEQ ID NO: 910614 - DNA, 15 bp, Homo sapiens
gtatcaagaataagg

SEQ ID NO: 910615 - DNA, 15 bp, Homo sapiens
tatcaagaataagga

SEQ ID NO: 910616 - DNA, 15 bp, Homo sapiens
atcaagaataaggaa

SEQ ID NO: 910617 - DNA, 15 bp, Homo sapiens
tcaagaataaggaaa

SEQ ID NO: 910618 - DNA, 15 bp, Homo sapiens
caagaataaggaaat

SEQ ID NO: 910619 - DNA, 15 bp, Homo sapiens
aagaataaggaaatc

SEQ ID NO: 910620 - DNA, 15 bp, Homo sapiens
agaataaggaaatct

SEQ ID NO: 910621 - DNA, 15 bp, Homo sapiens
gaataaggaaatcta

SEQ ID NO: 910622 - DNA, 15 bp, Homo sapiens
aataaggaaatctaa

SEQ ID NO: 910623 - DNA, 15 bp, Homo sapiens
ataaggaaatctaag

SEQ ID NO: 910624 - DNA, 15 bp, Homo sapiens
taaggaaatctaagc

SEQ ID NO: 910625 - DNA, 15 bp, Homo sapiens
aaggaaatctaagca

SEQ ID NO: 910626 - DNA, 15 bp, Homo sapiens
aggaaatctaagcag

SEQ ID NO: 910627 - DNA, 15 bp, Homo sapiens
ggaaatctaagcagt

SEQ ID NO: 910628 - DNA, 15 bp, Homo sapiens
gaaatctaagcagtg

SEQ ID NO: 910629 - DNA, 15 bp, Homo sapiens
aaatctaagcagtgc

SEQ ID NO: 910630 - DNA, 15 bp, Homo sapiens
aatctaagcagtgca

SEQ ID NO: 910631 - DNA, 15 bp, Homo sapiens
atctaagcagtgcat

SEQ ID NO: 910632 - DNA, 15 bp, Homo sapiens
tctaagcagtgcatt

SEQ ID NO: 910633 - DNA, 15 bp, Homo sapiens
ctaagcagtgcattg

SEQ ID NO: 910634 - DNA, 15 bp, Homo sapiens
taagcagtgcattga

SEQ ID NO: 910635 - DNA, 15 bp, Homo sapiens
aagcagtgcattgag

SEQ ID NO: 910636 - DNA, 15 bp, Homo sapiens
agcagtgcattgaga

SEQ ID NO: 910637 - DNA, 15 bp, Homo sapiens
gcagtgcattgagat

SEQ ID NO: 910638 - DNA, 15 bp, Homo sapiens
cagtgcattgagatc

SEQ ID NO: 910639 - DNA, 15 bp, Homo sapiens
agtgcattgagatct

SEQ ID NO: 910640 - DNA, 15 bp, Homo sapiens
gtgcattgagatctc

SEQ ID NO: 910641 - DNA, 15 bp, Homo sapiens
tgcattgagatctct

SEQ ID NO: 910642 - DNA, 15 bp, Homo sapiens
gcattgagatctctg

SEQ ID NO: 910643 - DNA, 15 bp, Homo sapiens
cattgagatctctgt

SEQ ID NO: 910644 - DNA, 15 bp, Homo sapiens
attgagatctctgtg

SEQ ID NO: 910645 - DNA, 15 bp, Homo sapiens
ttgagatctctgtga

SEQ ID NO: 910646 - DNA, 15 bp, Homo sapiens
tgagatctctgtgaa

SEQ ID NO: 910647 - DNA, 15 bp, Homo sapiens
gagatctctgtgaaa

SEQ ID NO: 910648 - DNA, 15 bp, Homo sapiens
agatctctgtgaaat

SEQ ID NO: 910649 - DNA, 15 bp, Homo sapiens
gatctctgtgaaatc

SEQ ID NO: 910650 - DNA, 15 bp, Homo sapiens
atctctgtgaaatca

SEQ ID NO: 910651 - DNA, 15 bp, Homo sapiens
tctctgtgaaatcag

SEQ ID NO: 910652 - DNA, 15 bp, Homo sapiens
ctctgtgaaatcagt

SEQ ID NO: 910653 - DNA, 15 bp, Homo sapiens
tctgtgaaatcagtg

SEQ ID NO: 910654 - DNA, 15 bp, Homo sapiens
ctgtgaaatcagtga

SEQ ID NO: 910655 - DNA, 15 bp, Homo sapiens
tgtgaaatcagtgag

SEQ ID NO: 910656 - DNA, 15 bp, Homo sapiens
gtgaaatcagtgaga

SEQ ID NO: 910657 - DNA, 15 bp, Homo sapiens
tgaaatcagtgagaa

SEQ ID NO: 910658 - DNA, 15 bp, Homo sapiens
gaaatcagtgagaat

SEQ ID NO: 910659 - DNA, 15 bp, Homo sapiens
aaatcagtgagaatt

SEQ ID NO: 910660 - DNA, 15 bp, Homo sapiens
aatcagtgagaattc

SEQ ID NO: 910661 - DNA, 15 bp, Homo sapiens
atcagtgagaattca

SEQ ID NO: 910662 - DNA, 15 bp, Homo sapiens
tcagtgagaattcat

SEQ ID NO: 910663 - DNA, 15 bp, Homo sapiens
cagtgagaattcatc

SEQ ID NO: 910664 - DNA, 15 bp, Homo sapiens
agtgagaattcatcc

SEQ ID NO: 910665 - DNA, 15 bp, Homo sapiens
gtgagaattcatcct

SEQ ID NO: 910666 - DNA, 15 bp, Homo sapiens
tgagaattcatcctt

SEQ ID NO: 910667 - DNA, 15 bp, Homo sapiens
gagaattcatccttg

SEQ ID NO: 910668 - DNA, 15 bp, Homo sapiens
agaattcatccttga

SEQ ID NO: 910669 - DNA, 15 bp, Homo sapiens
gaattcatccttgat

SEQ ID NO: 910670 - DNA, 15 bp, Homo sapiens
aattcatccttgatg

SEQ ID NO: 910671 - DNA, 15 bp, Homo sapiens
attcatccttgatgg

SEQ ID NO: 910672 - DNA, 15 bp, Homo sapiens
ttcatccttgatggt

SEQ ID NO: 910673 - DNA, 15 bp, Homo sapiens
tcatccttgatggta

SEQ ID NO: 910674 - DNA, 15 bp, Homo sapiens
catccttgatggtat

SEQ ID NO: 910675 - DNA, 15 bp, Homo sapiens
atccttgatggtatc

SEQ ID NO: 910676 - DNA, 15 bp, Homo sapiens
tccttgatggtatct

SEQ ID NO: 910677 - DNA, 15 bp, Homo sapiens
ccttgatggtatctt

SEQ ID NO: 910678 - DNA, 15 bp, Homo sapiens
cttgatggtatcttg

SEQ ID NO: 910679 - DNA, 15 bp, Homo sapiens
ttgatggtatcttgg

SEQ ID NO: 910680 - DNA, 15 bp, Homo sapiens
tgatggtatcttgga

SEQ ID NO: 910681 - DNA, 15 bp, Homo sapiens
gatggtatcttggag

SEQ ID NO: 910682 - DNA, 15 bp, Homo sapiens
atggtatcttggaga

SEQ ID NO: 910683 - DNA, 15 bp, Homo sapiens
tggtatcttggagat

SEQ ID NO: 910684 - DNA, 15 bp, Homo sapiens
ggtatcttggagatt

SEQ ID NO: 910685 - DNA, 15 bp, Homo sapiens
gtatcttggagatta

SEQ ID NO: 910686 - DNA, 15 bp, Homo sapiens
tatcttggagattat

SEQ ID NO: 910687 - DNA, 15 bp, Homo sapiens
atcttggagattatc

SEQ ID NO: 910688 - DNA, 15 bp, Homo sapiens
tcttggagattatct

SEQ ID NO: 910689 - DNA, 15 bp, Homo sapiens
cttggagattatctc

SEQ ID NO: 910690 - DNA, 15 bp, Homo sapiens
ttggagattatctca

SEQ ID NO: 910691 - DNA, 15 bp, Homo sapiens
tggagattatctcac

SEQ ID NO: 910692 - DNA, 15 bp, Homo sapiens
ggagattatctcacc

SEQ ID NO: 910693 - DNA, 15 bp, Homo sapiens
gagattatctcaccc

SEQ ID NO: 910694 - DNA, 15 bp, Homo sapiens
agattatctcaccca

SEQ ID NO: 910695 - DNA, 15 bp, Homo sapiens
gattatctcacccac

SEQ ID NO: 910696 - DNA, 15 bp, Homo sapiens
attatctcacccacc

SEQ ID NO: 910697 - DNA, 15 bp, Homo sapiens
ttatctcacccacca

SEQ ID NO: 910698 - DNA, 15 bp, Homo sapiens
tatctcacccaccat

SEQ ID NO: 910699 - DNA, 15 bp, Homo sapiens
atctcacccaccatt

SEQ ID NO: 910700 - DNA, 15 bp, Homo sapiens
tctcacccaccattt

SEQ ID NO: 910701 - DNA, 15 bp, Homo sapiens
ctcacccaccattta

SEQ ID NO: 910702 - DNA, 15 bp, Homo sapiens
tcacccaccatttaa

SEQ ID NO: 910703 - DNA, 15 bp, Homo sapiens
cacccaccatttaaa

SEQ ID NO: 910704 - DNA, 15 bp, Homo sapiens
acccaccatttaaat

SEQ ID NO: 910705 - DNA, 15 bp, Homo sapiens
cccaccatttaaatt

SEQ ID NO: 910706 - DNA, 15 bp, Homo sapiens
ccaccatttaaatta

SEQ ID NO: 910707 - DNA, 15 bp, Homo sapiens
caccatttaaattat

SEQ ID NO: 910708 - DNA, 15 bp, Homo sapiens
accatttaaattatg

SEQ ID NO: 910709 - DNA, 15 bp, Homo sapiens
ccatttaaattatga

SEQ ID NO: 910710 - DNA, 15 bp, Homo sapiens
catttaaattatgag

SEQ ID NO: 910711 - DNA, 15 bp, Homo sapiens
atttaaattatgagt

SEQ ID NO: 910712 - DNA, 15 bp, Homo sapiens
tttaaattatgagta

SEQ ID NO: 910713 - DNA, 15 bp, Homo sapiens
ttaaattatgagtaa

SEQ ID NO: 910714 - DNA, 15 bp, Homo sapiens
taaattatgagtaaa

SEQ ID NO: 910715 - DNA, 15 bp, Homo sapiens
aaattatgagtaaac

SEQ ID NO: 910716 - DNA, 15 bp, Homo sapiens
aattatgagtaaact

SEQ ID NO: 910717 - DNA, 15 bp, Homo sapiens
attatgagtaaacta

SEQ ID NO: 910718 - DNA, 15 bp, Homo sapiens
ttatgagtaaactag

SEQ ID NO: 910719 - DNA, 15 bp, Homo sapiens
tatgagtaaactagg

SEQ ID NO: 910720 - DNA, 15 bp, Homo sapiens
atgagtaaactaggg

SEQ ID NO: 910721 - DNA, 15 bp, Homo sapiens
tgagtaaactagggt

SEQ ID NO: 910722 - DNA, 15 bp, Homo sapiens
gagtaaactagggtt

SEQ ID NO: 910723 - DNA, 15 bp, Homo sapiens
agtaaactagggttc

SEQ ID NO: 910724 - DNA, 15 bp, Homo sapiens
gtaaactagggttca

SEQ ID NO: 910725 - DNA, 15 bp, Homo sapiens
taaactagggttcag

SEQ ID NO: 910726 - DNA, 15 bp, Homo sapiens
aaactagggttcaga

SEQ ID NO: 910727 - DNA, 15 bp, Homo sapiens
aactagggttcagag

SEQ ID NO: 910728 - DNA, 15 bp, Homo sapiens
actagggttcagaga

SEQ ID NO: 910729 - DNA, 15 bp, Homo sapiens
ctagggttcagagac

SEQ ID NO: 910730 - DNA, 15 bp, Homo sapiens
tagggttcagagaca

SEQ ID NO: 910731 - DNA, 15 bp, Homo sapiens
agggttcagagacat

SEQ ID NO: 910732 - DNA, 15 bp, Homo sapiens
gggttcagagacatt

SEQ ID NO: 910733 - DNA, 15 bp, Homo sapiens
ggttcagagacattc

SEQ ID NO: 910734 - DNA, 15 bp, Homo sapiens
gttcagagacattct

SEQ ID NO: 910735 - DNA, 15 bp, Homo sapiens
ttcagagacattctg

SEQ ID NO: 910736 - DNA, 15 bp, Homo sapiens
tcagagacattctgt

SEQ ID NO: 910737 - DNA, 15 bp, Homo sapiens
cagagacattctgtg

SEQ ID NO: 910738 - DNA, 15 bp, Homo sapiens
agagacattctgtga

SEQ ID NO: 910739 - DNA, 15 bp, Homo sapiens
gagacattctgtgat

SEQ ID NO: 910740 - DNA, 15 bp, Homo sapiens
agacattctgtgatt

SEQ ID NO: 910741 - DNA, 15 bp, Homo sapiens
gacattctgtgattt

SEQ ID NO: 910742 - DNA, 15 bp, Homo sapiens
acattctgtgatttg

SEQ ID NO: 910743 - DNA, 15 bp, Homo sapiens
cattctgtgatttga

SEQ ID NO: 910744 - DNA, 15 bp, Homo sapiens
attctgtgatttgac

SEQ ID NO: 910745 - DNA, 15 bp, Homo sapiens
ttctgtgatttgacc

SEQ ID NO: 910746 - DNA, 15 bp, Homo sapiens
tctgtgatttgacca

SEQ ID NO: 910747 - DNA, 15 bp, Homo sapiens
ctgtgatttgaccac

SEQ ID NO: 910748 - DNA, 15 bp, Homo sapiens
tgtgatttgaccacc

SEQ ID NO: 910749 - DNA, 15 bp, Homo sapiens
gtgatttgaccacca

SEQ ID NO: 910750 - DNA, 15 bp, Homo sapiens
tgatttgaccaccat

SEQ ID NO: 910751 - DNA, 15 bp, Homo sapiens
gatttgaccaccatc

SEQ ID NO: 910752 - DNA, 15 bp, Homo sapiens
atttgaccaccatca

SEQ ID NO: 910753 - DNA, 15 bp, Homo sapiens
tttgaccaccatcaa

SEQ ID NO: 910754 - DNA, 15 bp, Homo sapiens
ttgaccaccatcaaa

SEQ ID NO: 910755 - DNA, 15 bp, Homo sapiens
tgaccaccatcaaac

SEQ ID NO: 910756 - DNA, 15 bp, Homo sapiens
gaccaccatcaaaca

SEQ ID NO: 910757 - DNA, 15 bp, Homo sapiens
accaccatcaaacag

SEQ ID NO: 910758 - DNA, 15 bp, Homo sapiens
ccaccatcaaacagc

SEQ ID NO: 910759 - DNA, 15 bp, Homo sapiens
caccatcaaacagca

SEQ ID NO: 910760 - DNA, 15 bp, Homo sapiens
accatcaaacagcaa

SEQ ID NO: 910761 - DNA, 15 bp, Homo sapiens
ccatcaaacagcaag

SEQ ID NO: 910762 - DNA, 15 bp, Homo sapiens
catcaaacagcaagt

SEQ ID NO: 910763 - DNA, 15 bp, Homo sapiens
atcaaacagcaagtt

SEQ ID NO: 910764 - DNA, 15 bp, Homo sapiens
tcaaacagcaagtta

SEQ ID NO: 910765 - DNA, 15 bp, Homo sapiens
caaacagcaagttag

SEQ ID NO: 910766 - DNA, 15 bp, Homo sapiens
aaacagcaagttagc

SEQ ID NO: 910767 - DNA, 15 bp, Homo sapiens
aacagcaagttagca

SEQ ID NO: 910768 - DNA, 15 bp, Homo sapiens
acagcaagttagcaa

SEQ ID NO: 910769 - DNA, 15 bp, Homo sapiens
cagcaagttagcaac

SEQ ID NO: 910770 - DNA, 15 bp, Homo sapiens
agcaagttagcaaca

SEQ ID NO: 910771 - DNA, 15 bp, Homo sapiens
gcaagttagcaacac

SEQ ID NO: 910772 - DNA, 15 bp, Homo sapiens
caagttagcaacacc

SEQ ID NO: 910773 - DNA, 15 bp, Homo sapiens
aagttagcaacacca

SEQ ID NO: 910774 - DNA, 15 bp, Homo sapiens
agttagcaacaccaa

SEQ ID NO: 910775 - DNA, 15 bp, Homo sapiens
gttagcaacaccaag

SEQ ID NO: 910776 - DNA, 15 bp, Homo sapiens
ttagcaacaccaaga

SEQ ID NO: 910777 - DNA, 15 bp, Homo sapiens
tagcaacaccaagag

SEQ ID NO: 910778 - DNA, 15 bp, Homo sapiens
agcaacaccaagaga

SEQ ID NO: 910779 - DNA, 15 bp, Homo sapiens
gcaacaccaagagac

SEQ ID NO: 910780 - DNA, 15 bp, Homo sapiens
caacaccaagagaca

SEQ ID NO: 910781 - DNA, 15 bp, Homo sapiens
aacaccaagagacat

SEQ ID NO: 910782 - DNA, 15 bp, Homo sapiens
acaccaagagacatt

SEQ ID NO: 910783 - DNA, 15 bp, Homo sapiens
caccaagagacattg

SEQ ID NO: 910784 - DNA, 15 bp, Homo sapiens
accaagagacattga

SEQ ID NO: 910785 - DNA, 15 bp, Homo sapiens
ccaagagacattgaa

SEQ ID NO: 910786 - DNA, 15 bp, Homo sapiens
caagagacattgaaa

SEQ ID NO: 910787 - DNA, 15 bp, Homo sapiens
aagagacattgaaac

SEQ ID NO: 910788 - DNA, 15 bp, Homo sapiens
agagacattgaaacg

SEQ ID NO: 910789 - DNA, 15 bp, Homo sapiens
gagacattgaaacga

SEQ ID NO: 910790 - DNA, 15 bp, Homo sapiens
agacattgaaacgaa

SEQ ID NO: 910791 - DNA, 15 bp, Homo sapiens
gacattgaaacgaaa

SEQ ID NO: 910792 - DNA, 15 bp, Homo sapiens
acattgaaacgaaac

SEQ ID NO: 910793 - DNA, 15 bp, Homo sapiens
cattgaaacgaaacc

SEQ ID NO: 910794 - DNA, 15 bp, Homo sapiens
attgaaacgaaacct

SEQ ID NO: 910795 - DNA, 15 bp, Homo sapiens
ttgaaacgaaacctt

SEQ ID NO: 910796 - DNA, 15 bp, Homo sapiens
tgaaacgaaaccttg

SEQ ID NO: 910797 - DNA, 15 bp, Homo sapiens
gaaacgaaaccttgg

SEQ ID NO: 910798 - DNA, 15 bp, Homo sapiens
aaacgaaaccttgga

SEQ ID NO: 910799 - DNA, 15 bp, Homo sapiens
aacgaaaccttggag

SEQ ID NO: 910800 - DNA, 15 bp, Homo sapiens
acgaaaccttggagc

SEQ ID NO: 910801 - DNA, 15 bp, Homo sapiens
cgaaaccttggagcc

SEQ ID NO: 910802 - DNA, 15 bp, Homo sapiens
gaaaccttggagccc

SEQ ID NO: 910803 - DNA, 15 bp, Homo sapiens
aaaccttggagcccc

SEQ ID NO: 910804 - DNA, 15 bp, Homo sapiens
aaccttggagcccca

SEQ ID NO: 910805 - DNA, 15 bp, Homo sapiens
accttggagccccac

SEQ ID NO: 910806 - DNA, 15 bp, Homo sapiens
ccttggagccccaca

SEQ ID NO: 910807 - DNA, 15 bp, Homo sapiens
cttggagccccacac

SEQ ID NO: 910808 - DNA, 15 bp, Homo sapiens
ttggagccccacacc

SEQ ID NO: 910809 - DNA, 15 bp, Homo sapiens
tggagccccacacca

SEQ ID NO: 910810 - DNA, 15 bp, Homo sapiens
ggagccccacaccag

SEQ ID NO: 910811 - DNA, 15 bp, Homo sapiens
gagccccacaccagt

SEQ ID NO: 910812 - DNA, 15 bp, Homo sapiens
agccccacaccagtg

SEQ ID NO: 910813 - DNA, 15 bp, Homo sapiens
gccccacaccagtgc

SEQ ID NO: 910814 - DNA, 15 bp, Homo sapiens
ccccacaccagtgcc

SEQ ID NO: 910815 - DNA, 15 bp, Homo sapiens
cccacaccagtgcct

SEQ ID NO: 910816 - DNA, 15 bp, Homo sapiens
ccacaccagtgcctt

SEQ ID NO: 910817 - DNA, 15 bp, Homo sapiens
cacaccagtgccttc

SEQ ID NO: 910818 - DNA, 15 bp, Homo sapiens
acaccagtgccttca

SEQ ID NO: 910819 - DNA, 15 bp, Homo sapiens
caccagtgccttcag

SEQ ID NO: 910820 - DNA, 15 bp, Homo sapiens
accagtgccttcagc

SEQ ID NO: 910821 - DNA, 15 bp, Homo sapiens
ccagtgccttcagct

SEQ ID NO: 910822 - DNA, 15 bp, Homo sapiens
cagtgccttcagctc

SEQ ID NO: 910823 - DNA, 15 bp, Homo sapiens
agtgccttcagctcc

SEQ ID NO: 910824 - DNA, 15 bp, Homo sapiens
gtgccttcagctcct

SEQ ID NO: 910825 - DNA, 15 bp, Homo sapiens
tgccttcagctcctg

SEQ ID NO: 910826 - DNA, 15 bp, Homo sapiens
gccttcagctcctgc

SEQ ID NO: 910827 - DNA, 15 bp, Homo sapiens
ccttcagctcctgca

SEQ ID NO: 910828 - DNA, 15 bp, Homo sapiens
cttcagctcctgcac

SEQ ID NO: 910829 - DNA, 15 bp, Homo sapiens
ttcagctcctgcaca

SEQ ID NO: 910830 - DNA, 15 bp, Homo sapiens
tcagctcctgcacac

SEQ ID NO: 910831 - DNA, 15 bp, Homo sapiens
cagctcctgcacaca

SEQ ID NO: 910832 - DNA, 15 bp, Homo sapiens
agctcctgcacacac

SEQ ID NO: 910833 - DNA, 15 bp, Homo sapiens
gctcctgcacacact

SEQ ID NO: 910834 - DNA, 15 bp, Homo sapiens
ctcctgcacacactt

SEQ ID NO: 910835 - DNA, 15 bp, Homo sapiens
tcctgcacacacttg

SEQ ID NO: 910836 - DNA, 15 bp, Homo sapiens
cctgcacacacttgg

SEQ ID NO: 910837 - DNA, 15 bp, Homo sapiens
ctgcacacacttggc

SEQ ID NO: 910838 - DNA, 15 bp, Homo sapiens
tgcacacacttggcc

SEQ ID NO: 910839 - DNA, 15 bp, Homo sapiens
gcacacacttggcct

SEQ ID NO: 910840 - DNA, 15 bp, Homo sapiens
cacacacttggcctc

SEQ ID NO: 910841 - DNA, 15 bp, Homo sapiens
acacacttggcctcc

SEQ ID NO: 910842 - DNA, 15 bp, Homo sapiens
cacacttggcctcct

SEQ ID NO: 910843 - DNA, 15 bp, Homo sapiens
acacttggcctcctg

SEQ ID NO: 910844 - DNA, 15 bp, Homo sapiens
cacttggcctcctga

SEQ ID NO: 910845 - DNA, 15 bp, Homo sapiens
acttggcctcctgac

SEQ ID NO: 910846 - DNA, 15 bp, Homo sapiens
cttggcctcctgacc

SEQ ID NO: 910847 - DNA, 15 bp, Homo sapiens
ttggcctcctgacct

SEQ ID NO: 910848 - DNA, 15 bp, Homo sapiens
tggcctcctgacctc

SEQ ID NO: 910849 - DNA, 15 bp, Homo sapiens
ggcctcctgacctct

SEQ ID NO: 910850 - DNA, 15 bp, Homo sapiens
gcctcctgacctctg

SEQ ID NO: 910851 - DNA, 15 bp, Homo sapiens
cctcctgacctctgc

SEQ ID NO: 910852 - DNA, 15 bp, Homo sapiens
ctcctgacctctgct

SEQ ID NO: 910853 - DNA, 15 bp, Homo sapiens
tcctgacctctgctg

SEQ ID NO: 910854 - DNA, 15 bp, Homo sapiens
cctgacctctgctgt

SEQ ID NO: 910855 - DNA, 15 bp, Homo sapiens
ctgacctctgctgtg

SEQ ID NO: 910856 - DNA, 15 bp, Homo sapiens
tgacctctgctgtga

SEQ ID NO: 910857 - DNA, 15 bp, Homo sapiens
gacctctgctgtgag

SEQ ID NO: 910858 - DNA, 15 bp, Homo sapiens
acctctgctgtgagg

SEQ ID NO: 910859 - DNA, 15 bp, Homo sapiens
cctctgctgtgaggt

SEQ ID NO: 910860 - DNA, 15 bp, Homo sapiens
ctctgctgtgaggtt

SEQ ID NO: 910861 - DNA, 15 bp, Homo sapiens
tctgctgtgaggttc

SEQ ID NO: 910862 - DNA, 15 bp, Homo sapiens
ctgctgtgaggttcc

SEQ ID NO: 910863 - DNA, 15 bp, Homo sapiens
tgctgtgaggttcct

SEQ ID NO: 910864 - DNA, 15 bp, Homo sapiens
gctgtgaggttcctg

SEQ ID NO: 910865 - DNA, 15 bp, Homo sapiens
ctgtgaggttcctgg

SEQ ID NO: 910866 - DNA, 15 bp, Homo sapiens
tgtgaggttcctggt

SEQ ID NO: 910867 - DNA, 15 bp, Homo sapiens
gtgaggttcctggtt

SEQ ID NO: 910868 - DNA, 15 bp, Homo sapiens
tgaggttcctggtta

SEQ ID NO: 910869 - DNA, 15 bp, Homo sapiens
gaggttcctggttag

SEQ ID NO: 910870 - DNA, 15 bp, Homo sapiens
aggttcctggttagc

SEQ ID NO: 910871 - DNA, 15 bp, Homo sapiens
ggttcctggttagca

SEQ ID NO: 910872 - DNA, 15 bp, Homo sapiens
gttcctggttagcaa

SEQ ID NO: 910873 - DNA, 15 bp, Homo sapiens
ttcctggttagcaaa

SEQ ID NO: 910874 - DNA, 15 bp, Homo sapiens
tcctggttagcaaaa

SEQ ID NO: 910875 - DNA, 15 bp, Homo sapiens
cctggttagcaaaat

SEQ ID NO: 910876 - DNA, 15 bp, Homo sapiens
ctggttagcaaaatg

SEQ ID NO: 910877 - DNA, 15 bp, Homo sapiens
tggttagcaaaatgg

SEQ ID NO: 910878 - DNA, 15 bp, Homo sapiens
ggttagcaaaatggc

SEQ ID NO: 910879 - DNA, 15 bp, Homo sapiens
gttagcaaaatggct

SEQ ID NO: 910880 - DNA, 15 bp, Homo sapiens
ttagcaaaatggctg

SEQ ID NO: 910881 - DNA, 15 bp, Homo sapiens
tagcaaaatggctgt

SEQ ID NO: 910882 - DNA, 15 bp, Homo sapiens
agcaaaatggctgtc

SEQ ID NO: 910883 - DNA, 15 bp, Homo sapiens
gcaaaatggctgtcg

SEQ ID NO: 910884 - DNA, 15 bp, Homo sapiens
caaaatggctgtcgt

SEQ ID NO: 910885 - DNA, 15 bp, Homo sapiens
aaaatggctgtcgtt

SEQ ID NO: 910886 - DNA, 15 bp, Homo sapiens
aaatggctgtcgttc

SEQ ID NO: 910887 - DNA, 15 bp, Homo sapiens
aatggctgtcgttct

SEQ ID NO: 910888 - DNA, 15 bp, Homo sapiens
atggctgtcgttctt

SEQ ID NO: 910889 - DNA, 15 bp, Homo sapiens
tggctgtcgttcttt

SEQ ID NO: 910890 - DNA, 15 bp, Homo sapiens
ggctgtcgttctttt

SEQ ID NO: 910891 - DNA, 15 bp, Homo sapiens
gctgtcgttcttttg

SEQ ID NO: 910892 - DNA, 15 bp, Homo sapiens
ctgtcgttcttttgg

SEQ ID NO: 910893 - DNA, 15 bp, Homo sapiens
tgtcgttcttttggg

SEQ ID NO: 910894 - DNA, 15 bp, Homo sapiens
gtcgttcttttggga

SEQ ID NO: 910895 - DNA, 15 bp, Homo sapiens
tcgttcttttgggag

SEQ ID NO: 910896 - DNA, 15 bp, Homo sapiens
cgttcttttgggagg

SEQ ID NO: 910897 - DNA, 15 bp, Homo sapiens
gttcttttgggagga

SEQ ID NO: 910898 - DNA, 15 bp, Homo sapiens
ttcttttgggaggat

SEQ ID NO: 910899 - DNA, 15 bp, Homo sapiens
tcttttgggaggatt

SEQ ID NO: 910900 - DNA, 15 bp, Homo sapiens
cttttgggaggatta

SEQ ID NO: 910901 - DNA, 15 bp, Homo sapiens
ttttgggaggattaa

SEQ ID NO: 910902 - DNA, 15 bp, Homo sapiens
tttgggaggattaat

SEQ ID NO: 910903 - DNA, 15 bp, Homo sapiens
ttgggaggattaata

SEQ ID NO: 910904 - DNA, 15 bp, Homo sapiens
tgggaggattaataa

SEQ ID NO: 910905 - DNA, 15 bp, Homo sapiens
gggaggattaataag

SEQ ID NO: 910906 - DNA, 15 bp, Homo sapiens
ggaggattaataaga

SEQ ID NO: 910907 - DNA, 15 bp, Homo sapiens
gaggattaataagaa

SEQ ID NO: 910908 - DNA, 15 bp, Homo sapiens
aggattaataagaaa

SEQ ID NO: 910909 - DNA, 15 bp, Homo sapiens
ggattaataagaaaa

SEQ ID NO: 910910 - DNA, 15 bp, Homo sapiens
gattaataagaaaat

SEQ ID NO: 910911 - DNA, 15 bp, Homo sapiens
attaataagaaaatc

SEQ ID NO: 910912 - DNA, 15 bp, Homo sapiens
ttaataagaaaatct

SEQ ID NO: 910913 - DNA, 15 bp, Homo sapiens
taataagaaaatctg

SEQ ID NO: 910914 - DNA, 15 bp, Homo sapiens
aataagaaaatctgt

SEQ ID NO: 910915 - DNA, 15 bp, Homo sapiens
ataagaaaatctgta

SEQ ID NO: 910916 - DNA, 15 bp, Homo sapiens
taagaaaatctgtaa

SEQ ID NO: 910917 - DNA, 15 bp, Homo sapiens
aagaaaatctgtaaa

SEQ ID NO: 910918 - DNA, 15 bp, Homo sapiens
agaaaatctgtaaat

SEQ ID NO: 910919 - DNA, 15 bp, Homo sapiens
gaaaatctgtaaatt

SEQ ID NO: 910920 - DNA, 15 bp, Homo sapiens
aaaatctgtaaattg

SEQ ID NO: 910921 - DNA, 15 bp, Homo sapiens
aaatctgtaaattgg

SEQ ID NO: 910922 - DNA, 15 bp, Homo sapiens
aatctgtaaattggt

SEQ ID NO: 910923 - DNA, 15 bp, Homo sapiens
atctgtaaattggtt

SEQ ID NO: 910924 - DNA, 15 bp, Homo sapiens
tctgtaaattggttt

SEQ ID NO: 910925 - DNA, 15 bp, Homo sapiens
ctgtaaattggtttt

SEQ ID NO: 910926 - DNA, 15 bp, Homo sapiens
tgtaaattggtttta

SEQ ID NO: 910927 - DNA, 15 bp, Homo sapiens
gtaaattggttttag

SEQ ID NO: 910928 - DNA, 15 bp, Homo sapiens
taaattggttttagc

SEQ ID NO: 910929 - DNA, 15 bp, Homo sapiens
aaattggttttagct

SEQ ID NO: 910930 - DNA, 15 bp, Homo sapiens
aattggttttagctc

SEQ ID NO: 910931 - DNA, 15 bp, Homo sapiens
attggttttagctct

SEQ ID NO: 910932 - DNA, 15 bp, Homo sapiens
ttggttttagctctt

SEQ ID NO: 910933 - DNA, 15 bp, Homo sapiens
tggttttagctcttt

SEQ ID NO: 910934 - DNA, 15 bp, Homo sapiens
ggttttagctctttg

SEQ ID NO: 910935 - DNA, 15 bp, Homo sapiens
gttttagctctttgc

SEQ ID NO: 910936 - DNA, 15 bp, Homo sapiens
ttttagctctttgca

SEQ ID NO: 910937 - DNA, 15 bp, Homo sapiens
tttagctctttgcaa

SEQ ID NO: 910938 - DNA, 15 bp, Homo sapiens
ttagctctttgcaag

SEQ ID NO: 910939 - DNA, 15 bp, Homo sapiens
tagctctttgcaaga

SEQ ID NO: 910940 - DNA, 15 bp, Homo sapiens
agctctttgcaagag

SEQ ID NO: 910941 - DNA, 15 bp, Homo sapiens
gctctttgcaagaga

SEQ ID NO: 910942 - DNA, 15 bp, Homo sapiens
ctctttgcaagagag

SEQ ID NO: 910943 - DNA, 15 bp, Homo sapiens
tctttgcaagagaga

SEQ ID NO: 910944 - DNA, 15 bp, Homo sapiens
ctttgcaagagagaa

SEQ ID NO: 910945 - DNA, 15 bp, Homo sapiens
tttgcaagagagaaa

SEQ ID NO: 910946 - DNA, 15 bp, Homo sapiens
ttgcaagagagaaaa

SEQ ID NO: 910947 - DNA, 15 bp, Homo sapiens
tgcaagagagaaaaa

SEQ ID NO: 910948 - DNA, 15 bp, Homo sapiens
gcaagagagaaaaaa

SEQ ID NO: 910949 - DNA, 15 bp, Homo sapiens
caagagagaaaaaaa

SEQ ID NO: 910950 - DNA, 15 bp, Homo sapiens
aagagagaaaaaaaa

SEQ ID NO: 910951 - DNA, 15 bp, Homo sapiens
agagagaaaaaaaaa

SEQ ID NO: 910952 - DNA, 15 bp, Homo sapiens
gagagaaaaaaaaac

SEQ ID NO: 910953 - DNA, 15 bp, Homo sapiens
agagaaaaaaaaact

SEQ ID NO: 910954 - DNA, 15 bp, Homo sapiens
gagaaaaaaaaacta

SEQ ID NO: 910955 - DNA, 15 bp, Homo sapiens
agaaaaaaaaactat

SEQ ID NO: 910956 - DNA, 15 bp, Homo sapiens
gaaaaaaaaactatg

SEQ ID NO: 910957 - DNA, 15 bp, Homo sapiens
aaaaaaaaactatgt

SEQ ID NO: 910958 - DNA, 15 bp, Homo sapiens
aaaaaaaactatgtg

SEQ ID NO: 910959 - DNA, 15 bp, Homo sapiens
aaaaaaactatgtgc

SEQ ID NO: 910960 - DNA, 15 bp, Homo sapiens
aaaaaactatgtgca

SEQ ID NO: 910961 - DNA, 15 bp, Homo sapiens
aaaaactatgtgcaa

SEQ ID NO: 910962 - DNA, 15 bp, Homo sapiens
aaaactatgtgcaat

SEQ ID NO: 910963 - DNA, 15 bp, Homo sapiens
aaactatgtgcaatt

SEQ ID NO: 910964 - DNA, 15 bp, Homo sapiens
aactatgtgcaattt

SEQ ID NO: 910965 - DNA, 15 bp, Homo sapiens
actatgtgcaatttc

SEQ ID NO: 910966 - DNA, 15 bp, Homo sapiens
ctatgtgcaatttct

SEQ ID NO: 910967 - DNA, 15 bp, Homo sapiens
tatgtgcaatttctt

SEQ ID NO: 910968 - DNA, 15 bp, Homo sapiens
atgtgcaatttcttc

SEQ ID NO: 910969 - DNA, 15 bp, Homo sapiens
tgtgcaatttcttct

SEQ ID NO: 910970 - DNA, 15 bp, Homo sapiens
gtgcaatttcttctt

SEQ ID NO: 910971 - DNA, 15 bp, Homo sapiens
tgcaatttcttcttt

SEQ ID NO: 910972 - DNA, 15 bp, Homo sapiens
gcaatttcttcttta

SEQ ID NO: 910973 - DNA, 15 bp, Homo sapiens
caatttcttctttat

SEQ ID NO: 910974 - DNA, 15 bp, Homo sapiens
aatttcttctttatt

SEQ ID NO: 910975 - DNA, 15 bp, Homo sapiens
atttcttctttattg

SEQ ID NO: 910976 - DNA, 15 bp, Homo sapiens
tttcttctttattgc

SEQ ID NO: 910977 - DNA, 15 bp, Homo sapiens
ttcttctttattgct

SEQ ID NO: 910978 - DNA, 15 bp, Homo sapiens
tcttctttattgctg

SEQ ID NO: 910979 - DNA, 15 bp, Homo sapiens
cttctttattgctgt

SEQ ID NO: 910980 - DNA, 15 bp, Homo sapiens
ttctttattgctgtt

SEQ ID NO: 910981 - DNA, 15 bp, Homo sapiens
tctttattgctgtta

SEQ ID NO: 910982 - DNA, 15 bp, Homo sapiens
ctttattgctgttat

SEQ ID NO: 910983 - DNA, 15 bp, Homo sapiens
tttattgctgttatt

SEQ ID NO: 910984 - DNA, 15 bp, Homo sapiens
ttattgctgttatta

SEQ ID NO: 910985 - DNA, 15 bp, Homo sapiens
tattgctgttattat

SEQ ID NO: 910986 - DNA, 15 bp, Homo sapiens
attgctgttattatg

SEQ ID NO: 910987 - DNA, 15 bp, Homo sapiens
ttgctgttattatgt

SEQ ID NO: 910988 - DNA, 15 bp, Homo sapiens
tgctgttattatgtg

SEQ ID NO: 910989 - DNA, 15 bp, Homo sapiens
gctgttattatgtga

SEQ ID NO: 910990 - DNA, 15 bp, Homo sapiens
ctgttattatgtgaa

SEQ ID NO: 910991 - DNA, 15 bp, Homo sapiens
tgttattatgtgaac

SEQ ID NO: 910992 - DNA, 15 bp, Homo sapiens
gttattatgtgaacc

SEQ ID NO: 910993 - DNA, 15 bp, Homo sapiens
ttattatgtgaacca

SEQ ID NO: 910994 - DNA, 15 bp, Homo sapiens
tattatgtgaaccag

SEQ ID NO: 910995 - DNA, 15 bp, Homo sapiens
attatgtgaaccaga

SEQ ID NO: 910996 - DNA, 15 bp, Homo sapiens
ttatgtgaaccagat

SEQ ID NO: 910997 - DNA, 15 bp, Homo sapiens
tatgtgaaccagatt

SEQ ID NO: 910998 - DNA, 15 bp, Homo sapiens
atgtgaaccagattg

SEQ ID NO: 910999 - DNA, 15 bp, Homo sapiens
tgtgaaccagattga

SEQ ID NO: 911000 - DNA, 15 bp, Homo sapiens
gtgaaccagattgaa

SEQ ID NO: 911001 - DNA, 15 bp, Homo sapiens
tgaaccagattgaat

SEQ ID NO: 911002 - DNA, 15 bp, Homo sapiens
gaaccagattgaatt

SEQ ID NO: 911003 - DNA, 15 bp, Homo sapiens
aaccagattgaattg

SEQ ID NO: 911004 - DNA, 15 bp, Homo sapiens
accagattgaattgc

SEQ ID NO: 911005 - DNA, 15 bp, Homo sapiens
ccagattgaattgct

SEQ ID NO: 911006 - DNA, 15 bp, Homo sapiens
cagattgaattgctg

SEQ ID NO: 911007 - DNA, 15 bp, Homo sapiens
agattgaattgctgc

SEQ ID NO: 911008 - DNA, 15 bp, Homo sapiens
gattgaattgctgca

SEQ ID NO: 911009 - DNA, 15 bp, Homo sapiens
attgaattgctgcat

SEQ ID NO: 911010 - DNA, 15 bp, Homo sapiens
ttgaattgctgcatc

SEQ ID NO: 911011 - DNA, 15 bp, Homo sapiens
tgaattgctgcatct

SEQ ID NO: 911012 - DNA, 15 bp, Homo sapiens
gaattgctgcatctc

SEQ ID NO: 911013 - DNA, 15 bp, Homo sapiens
aattgctgcatctct

SEQ ID NO: 911014 - DNA, 15 bp, Homo sapiens
attgctgcatctctg

SEQ ID NO: 911015 - DNA, 15 bp, Homo sapiens
ttgctgcatctctga

SEQ ID NO: 911016 - DNA, 15 bp, Homo sapiens
tgctgcatctctgaa

SEQ ID NO: 911017 - DNA, 15 bp, Homo sapiens
gctgcatctctgaag

SEQ ID NO: 911018 - DNA, 15 bp, Homo sapiens
ctgcatctctgaaga

SEQ ID NO: 911019 - DNA, 15 bp, Homo sapiens
tgcatctctgaagag

SEQ ID NO: 911020 - DNA, 15 bp, Homo sapiens
gcatctctgaagagt

SEQ ID NO: 911021 - DNA, 15 bp, Homo sapiens
catctctgaagagtt

SEQ ID NO: 911022 - DNA, 15 bp, Homo sapiens
atctctgaagagttt

SEQ ID NO: 911023 - DNA, 15 bp, Homo sapiens
tctctgaagagtttc

SEQ ID NO: 911024 - DNA, 15 bp, Homo sapiens
ctctgaagagtttct

SEQ ID NO: 911025 - DNA, 15 bp, Homo sapiens
tctgaagagtttctt

SEQ ID NO: 911026 - DNA, 15 bp, Homo sapiens
ctgaagagtttctta

SEQ ID NO: 911027 - DNA, 15 bp, Homo sapiens
tgaagagtttcttat

SEQ ID NO: 911028 - DNA, 15 bp, Homo sapiens
gaagagtttcttatg

SEQ ID NO: 911029 - DNA, 15 bp, Homo sapiens
aagagtttcttatga

SEQ ID NO: 911030 - DNA, 15 bp, Homo sapiens
agagtttcttatgac

SEQ ID NO: 911031 - DNA, 15 bp, Homo sapiens
gagtttcttatgact

SEQ ID NO: 911032 - DNA, 15 bp, Homo sapiens
agtttcttatgacta

SEQ ID NO: 911033 - DNA, 15 bp, Homo sapiens
gtttcttatgactag

SEQ ID NO: 911034 - DNA, 15 bp, Homo sapiens
tttcttatgactagt

SEQ ID NO: 911035 - DNA, 15 bp, Homo sapiens
ttcttatgactagtg

SEQ ID NO: 911036 - DNA, 15 bp, Homo sapiens
tcttatgactagtgt

SEQ ID NO: 911037 - DNA, 15 bp, Homo sapiens
cttatgactagtgtg

SEQ ID NO: 911038 - DNA, 15 bp, Homo sapiens
ttatgactagtgtga

SEQ ID NO: 911039 - DNA, 15 bp, Homo sapiens
tatgactagtgtgaa

SEQ ID NO: 911040 - DNA, 15 bp, Homo sapiens
atgactagtgtgaag

SEQ ID NO: 911041 - DNA, 15 bp, Homo sapiens
tgactagtgtgaagt

SEQ ID NO: 911042 - DNA, 15 bp, Homo sapiens
gactagtgtgaagtt

SEQ ID NO: 911043 - DNA, 15 bp, Homo sapiens
actagtgtgaagttt

SEQ ID NO: 911044 - DNA, 15 bp, Homo sapiens
ctagtgtgaagtttc

SEQ ID NO: 911045 - DNA, 15 bp, Homo sapiens
tagtgtgaagtttcc

SEQ ID NO: 911046 - DNA, 15 bp, Homo sapiens
agtgtgaagtttccc

SEQ ID NO: 911047 - DNA, 15 bp, Homo sapiens
gtgtgaagtttccca

SEQ ID NO: 911048 - DNA, 15 bp, Homo sapiens
tgtgaagtttcccat

SEQ ID NO: 911049 - DNA, 15 bp, Homo sapiens
gtgaagtttcccatt

SEQ ID NO: 911050 - DNA, 15 bp, Homo sapiens
tgaagtttcccattt

SEQ ID NO: 911051 - DNA, 15 bp, Homo sapiens
gaagtttcccatttt

SEQ ID NO: 911052 - DNA, 15 bp, Homo sapiens
aagtttcccatttta

SEQ ID NO: 911053 - DNA, 15 bp, Homo sapiens
agtttcccattttaa

SEQ ID NO: 911054 - DNA, 15 bp, Homo sapiens
gtttcccattttaac

SEQ ID NO: 911055 - DNA, 15 bp, Homo sapiens
tttcccattttaacc

SEQ ID NO: 911056 - DNA, 15 bp, Homo sapiens
ttcccattttaaccc

SEQ ID NO: 911057 - DNA, 15 bp, Homo sapiens
tcccattttaaccca

SEQ ID NO: 911058 - DNA, 15 bp, Homo sapiens
cccattttaacccaa

SEQ ID NO: 911059 - DNA, 15 bp, Homo sapiens
ccattttaacccaag

SEQ ID NO: 911060 - DNA, 15 bp, Homo sapiens
cattttaacccaagt

SEQ ID NO: 911061 - DNA, 15 bp, Homo sapiens
attttaacccaagtc

SEQ ID NO: 911062 - DNA, 15 bp, Homo sapiens
ttttaacccaagtca

SEQ ID NO: 911063 - DNA, 15 bp, Homo sapiens
tttaacccaagtcaa

SEQ ID NO: 911064 - DNA, 15 bp, Homo sapiens
ttaacccaagtcaat

SEQ ID NO: 911065 - DNA, 15 bp, Homo sapiens
taacccaagtcaatt

SEQ ID NO: 911066 - DNA, 15 bp, Homo sapiens
aacccaagtcaattt

SEQ ID NO: 911067 - DNA, 15 bp, Homo sapiens
acccaagtcaatttt

SEQ ID NO: 911068 - DNA, 15 bp, Homo sapiens
cccaagtcaatttta

SEQ ID NO: 911069 - DNA, 15 bp, Homo sapiens
ccaagtcaattttaa

SEQ ID NO: 911070 - DNA, 15 bp, Homo sapiens
caagtcaattttaaa

SEQ ID NO: 911071 - DNA, 15 bp, Homo sapiens
aagtcaattttaaat

SEQ ID NO: 911072 - DNA, 15 bp, Homo sapiens
agtcaattttaaatt

SEQ ID NO: 911073 - DNA, 15 bp, Homo sapiens
gtcaattttaaattg

SEQ ID NO: 911074 - DNA, 15 bp, Homo sapiens
tcaattttaaattgc

SEQ ID NO: 911075 - DNA, 15 bp, Homo sapiens
caattttaaattgcc

SEQ ID NO: 911076 - DNA, 15 bp, Homo sapiens
aattttaaattgccc

SEQ ID NO: 911077 - DNA, 15 bp, Homo sapiens
attttaaattgccca

SEQ ID NO: 911078 - DNA, 15 bp, Homo sapiens
ttttaaattgcccat

SEQ ID NO: 911079 - DNA, 15 bp, Homo sapiens
tttaaattgcccata

SEQ ID NO: 911080 - DNA, 15 bp, Homo sapiens
ttaaattgcccatac

SEQ ID NO: 911081 - DNA, 15 bp, Homo sapiens
taaattgcccataca

SEQ ID NO: 911082 - DNA, 15 bp, Homo sapiens
aaattgcccatacaa

SEQ ID NO: 911083 - DNA, 15 bp, Homo sapiens
aattgcccatacaat

SEQ ID NO: 911084 - DNA, 15 bp, Homo sapiens
attgcccatacaata

SEQ ID NO: 911085 - DNA, 15 bp, Homo sapiens
ttgcccatacaatac

SEQ ID NO: 911086 - DNA, 15 bp, Homo sapiens
tgcccatacaataca

SEQ ID NO: 911087 - DNA, 15 bp, Homo sapiens
gcccatacaatacac

SEQ ID NO: 911088 - DNA, 15 bp, Homo sapiens
cccatacaatacaca

SEQ ID NO: 911089 - DNA, 15 bp, Homo sapiens
ccatacaatacacag

SEQ ID NO: 911090 - DNA, 15 bp, Homo sapiens
catacaatacacaga

SEQ ID NO: 911091 - DNA, 15 bp, Homo sapiens
atacaatacacagat

SEQ ID NO: 911092 - DNA, 15 bp, Homo sapiens
tacaatacacagata

SEQ ID NO: 911093 - DNA, 15 bp, Homo sapiens
acaatacacagataa

SEQ ID NO: 911094 - DNA, 15 bp, Homo sapiens
caatacacagataac

SEQ ID NO: 911095 - DNA, 15 bp, Homo sapiens
aatacacagataact

SEQ ID NO: 911096 - DNA, 15 bp, Homo sapiens
atacacagataactg

SEQ ID NO: 911097 - DNA, 15 bp, Homo sapiens
tacacagataactga

SEQ ID NO: 911098 - DNA, 15 bp, Homo sapiens
acacagataactgac

SEQ ID NO: 911099 - DNA, 15 bp, Homo sapiens
cacagataactgact

SEQ ID NO: 911100 - DNA, 15 bp, Homo sapiens
acagataactgactg

SEQ ID NO: 911101 - DNA, 15 bp, Homo sapiens
cagataactgactgt

SEQ ID NO: 911102 - DNA, 15 bp, Homo sapiens
agataactgactgta

SEQ ID NO: 911103 - DNA, 15 bp, Homo sapiens
gataactgactgtaa

SEQ ID NO: 911104 - DNA, 15 bp, Homo sapiens
ataactgactgtaat

SEQ ID NO: 911105 - DNA, 15 bp, Homo sapiens
taactgactgtaata

SEQ ID NO: 911106 - DNA, 15 bp, Homo sapiens
aactgactgtaataa

SEQ ID NO: 911107 - DNA, 15 bp, Homo sapiens
actgactgtaataat

SEQ ID NO: 911108 - DNA, 15 bp, Homo sapiens
ctgactgtaataatt

SEQ ID NO: 911109 - DNA, 15 bp, Homo sapiens
tgactgtaataattc

SEQ ID NO: 911110 - DNA, 15 bp, Homo sapiens
gactgtaataattca

SEQ ID NO: 911111 - DNA, 15 bp, Homo sapiens
actgtaataattcag

SEQ ID NO: 911112 - DNA, 15 bp, Homo sapiens
ctgtaataattcagt

SEQ ID NO: 911113 - DNA, 15 bp, Homo sapiens
tgtaataattcagtt

SEQ ID NO: 911114 - DNA, 15 bp, Homo sapiens
gtaataattcagttg

SEQ ID NO: 911115 - DNA, 15 bp, Homo sapiens
taataattcagttgc

SEQ ID NO: 911116 - DNA, 15 bp, Homo sapiens
aataattcagttgcc

SEQ ID NO: 911117 - DNA, 15 bp, Homo sapiens
ataattcagttgcca

SEQ ID NO: 911118 - DNA, 15 bp, Homo sapiens
taattcagttgccac

SEQ ID NO: 911119 - DNA, 15 bp, Homo sapiens
aattcagttgccaca

SEQ ID NO: 911120 - DNA, 15 bp, Homo sapiens
attcagttgccacac

SEQ ID NO: 911121 - DNA, 15 bp, Homo sapiens
ttcagttgccacact

SEQ ID NO: 911122 - DNA, 15 bp, Homo sapiens
tcagttgccacactc

SEQ ID NO: 911123 - DNA, 15 bp, Homo sapiens
cagttgccacactca

SEQ ID NO: 911124 - DNA, 15 bp, Homo sapiens
agttgccacactcaa

SEQ ID NO: 911125 - DNA, 15 bp, Homo sapiens
gttgccacactcaat

SEQ ID NO: 911126 - DNA, 15 bp, Homo sapiens
ttgccacactcaata

SEQ ID NO: 911127 - DNA, 15 bp, Homo sapiens
tgccacactcaatac

SEQ ID NO: 911128 - DNA, 15 bp, Homo sapiens
gccacactcaataca

SEQ ID NO: 911129 - DNA, 15 bp, Homo sapiens
ccacactcaatacat

SEQ ID NO: 911130 - DNA, 15 bp, Homo sapiens
cacactcaatacatt

SEQ ID NO: 911131 - DNA, 15 bp, Homo sapiens
acactcaatacattg

SEQ ID NO: 911132 - DNA, 15 bp, Homo sapiens
cactcaatacattgt

SEQ ID NO: 911133 - DNA, 15 bp, Homo sapiens
actcaatacattgtt

SEQ ID NO: 911134 - DNA, 15 bp, Homo sapiens
ctcaatacattgttt

SEQ ID NO: 911135 - DNA, 15 bp, Homo sapiens
tcaatacattgtttg

SEQ ID NO: 911136 - DNA, 15 bp, Homo sapiens
caatacattgtttga

SEQ ID NO: 911137 - DNA, 15 bp, Homo sapiens
aatacattgtttgaa

SEQ ID NO: 911138 - DNA, 15 bp, Homo sapiens
atacattgtttgaaa

SEQ ID NO: 911139 - DNA, 15 bp, Homo sapiens
tacattgtttgaaat

SEQ ID NO: 911140 - DNA, 15 bp, Homo sapiens
acattgtttgaaatc

SEQ ID NO: 911141 - DNA, 15 bp, Homo sapiens
cattgtttgaaatcc

SEQ ID NO: 911142 - DNA, 15 bp, Homo sapiens
attgtttgaaatcca

SEQ ID NO: 911143 - DNA, 15 bp, Homo sapiens
ttgtttgaaatccaa

SEQ ID NO: 911144 - DNA, 15 bp, Homo sapiens
tgtttgaaatccaat

SEQ ID NO: 911145 - DNA, 15 bp, Homo sapiens
gtttgaaatccaatg

SEQ ID NO: 911146 - DNA, 15 bp, Homo sapiens
tttgaaatccaatga

SEQ ID NO: 911147 - DNA, 15 bp, Homo sapiens
ttgaaatccaatgaa

SEQ ID NO: 911148 - DNA, 15 bp, Homo sapiens
tgaaatccaatgaaa

SEQ ID NO: 911149 - DNA, 15 bp, Homo sapiens
gaaatccaatgaaag

SEQ ID NO: 911150 - DNA, 15 bp, Homo sapiens
aaatccaatgaaagg

SEQ ID NO: 911151 - DNA, 15 bp, Homo sapiens
aatccaatgaaaggc

SEQ ID NO: 911152 - DNA, 15 bp, Homo sapiens
atccaatgaaaggca

SEQ ID NO: 911153 - DNA, 15 bp, Homo sapiens
tccaatgaaaggcaa

SEQ ID NO: 911154 - DNA, 15 bp, Homo sapiens
ccaatgaaaggcaaa

SEQ ID NO: 911155 - DNA, 15 bp, Homo sapiens
caatgaaaggcaaaa

SEQ ID NO: 911156 - DNA, 15 bp, Homo sapiens
aatgaaaggcaaaag

SEQ ID NO: 911157 - DNA, 15 bp, Homo sapiens
atgaaaggcaaaagg

SEQ ID NO: 911158 - DNA, 15 bp, Homo sapiens
tgaaaggcaaaagga

SEQ ID NO: 911159 - DNA, 15 bp, Homo sapiens
gaaaggcaaaaggaa

SEQ ID NO: 911160 - DNA, 15 bp, Homo sapiens
aaaggcaaaaggaaa

SEQ ID NO: 911161 - DNA, 15 bp, Homo sapiens
aaggcaaaaggaaaa

SEQ ID NO: 911162 - DNA, 15 bp, Homo sapiens
aggcaaaaggaaaac

SEQ ID NO: 911163 - DNA, 15 bp, Homo sapiens
ggcaaaaggaaaact

SEQ ID NO: 911164 - DNA, 15 bp, Homo sapiens
gcaaaaggaaaactt

SEQ ID NO: 911165 - DNA, 15 bp, Homo sapiens
caaaaggaaaacttg

SEQ ID NO: 911166 - DNA, 15 bp, Homo sapiens
aaaaggaaaacttgc

SEQ ID NO: 911167 - DNA, 15 bp, Homo sapiens
aaaggaaaacttgca

SEQ ID NO: 911168 - DNA, 15 bp, Homo sapiens
aaggaaaacttgcaa

SEQ ID NO: 911169 - DNA, 15 bp, Homo sapiens
aggaaaacttgcaat

SEQ ID NO: 911170 - DNA, 15 bp, Homo sapiens
ggaaaacttgcaatc

SEQ ID NO: 911171 - DNA, 15 bp, Homo sapiens
gaaaacttgcaatcc

SEQ ID NO: 911172 - DNA, 15 bp, Homo sapiens
aaaacttgcaatcct

SEQ ID NO: 911173 - DNA, 15 bp, Homo sapiens
aaacttgcaatccta

SEQ ID NO: 911174 - DNA, 15 bp, Homo sapiens
aacttgcaatcctac

SEQ ID NO: 911175 - DNA, 15 bp, Homo sapiens
acttgcaatcctaca

SEQ ID NO: 911176 - DNA, 15 bp, Homo sapiens
cttgcaatcctacag

SEQ ID NO: 911177 - DNA, 15 bp, Homo sapiens
ttgcaatcctacaga

SEQ ID NO: 911178 - DNA, 15 bp, Homo sapiens
tgcaatcctacagaa

SEQ ID NO: 911179 - DNA, 15 bp, Homo sapiens
gcaatcctacagaat

SEQ ID NO: 911180 - DNA, 15 bp, Homo sapiens
caatcctacagaatc

SEQ ID NO: 911181 - DNA, 15 bp, Homo sapiens
aatcctacagaatca

SEQ ID NO: 911182 - DNA, 15 bp, Homo sapiens
atcctacagaatcag

SEQ ID NO: 911183 - DNA, 15 bp, Homo sapiens
tcctacagaatcagc

SEQ ID NO: 911184 - DNA, 15 bp, Homo sapiens
cctacagaatcagca

SEQ ID NO: 911185 - DNA, 15 bp, Homo sapiens
ctacagaatcagcag

SEQ ID NO: 911186 - DNA, 15 bp, Homo sapiens
tacagaatcagcagg

SEQ ID NO: 911187 - DNA, 15 bp, Homo sapiens
acagaatcagcagga

SEQ ID NO: 911188 - DNA, 15 bp, Homo sapiens
cagaatcagcaggat

SEQ ID NO: 911189 - DNA, 15 bp, Homo sapiens
agaatcagcaggata

SEQ ID NO: 911190 - DNA, 15 bp, Homo sapiens
gaatcagcaggatag

SEQ ID NO: 911191 - DNA, 15 bp, Homo sapiens
aatcagcaggataga

SEQ ID NO: 911192 - DNA, 15 bp, Homo sapiens
atcagcaggatagat

SEQ ID NO: 911193 - DNA, 15 bp, Homo sapiens
tcagcaggatagatc

SEQ ID NO: 911194 - DNA, 15 bp, Homo sapiens
cagcaggatagatcc

SEQ ID NO: 911195 - DNA, 15 bp, Homo sapiens
agcaggatagatcct

SEQ ID NO: 911196 - DNA, 15 bp, Homo sapiens
gcaggatagatcctg

SEQ ID NO: 911197 - DNA, 15 bp, Homo sapiens
caggatagatcctgc

SEQ ID NO: 911198 - DNA, 15 bp, Homo sapiens
aggatagatcctgca

SEQ ID NO: 911199 - DNA, 15 bp, Homo sapiens
ggatagatcctgcaa

SEQ ID NO: 911200 - DNA, 15 bp, Homo sapiens
gatagatcctgcaag

SEQ ID NO: 911201 - DNA, 15 bp, Homo sapiens
atagatcctgcaagc

SEQ ID NO: 911202 - DNA, 15 bp, Homo sapiens
tagatcctgcaagct

SEQ ID NO: 911203 - DNA, 15 bp, Homo sapiens
agatcctgcaagctg

SEQ ID NO: 911204 - DNA, 15 bp, Homo sapiens
gatcctgcaagctgt

SEQ ID NO: 911205 - DNA, 15 bp, Homo sapiens
atcctgcaagctgtc

SEQ ID NO: 911206 - DNA, 15 bp, Homo sapiens
tcctgcaagctgtca

SEQ ID NO: 911207 - DNA, 15 bp, Homo sapiens
cctgcaagctgtcac

SEQ ID NO: 911208 - DNA, 15 bp, Homo sapiens
ctgcaagctgtcaca

SEQ ID NO: 911209 - DNA, 15 bp, Homo sapiens
tgcaagctgtcacag

SEQ ID NO: 911210 - DNA, 15 bp, Homo sapiens
gcaagctgtcacagg

SEQ ID NO: 911211 - DNA, 15 bp, Homo sapiens
caagctgtcacagga

SEQ ID NO: 911212 - DNA, 15 bp, Homo sapiens
aagctgtcacaggac

SEQ ID NO: 911213 - DNA, 15 bp, Homo sapiens
agctgtcacaggact

SEQ ID NO: 911214 - DNA, 15 bp, Homo sapiens
gctgtcacaggactt

SEQ ID NO: 911215 - DNA, 15 bp, Homo sapiens
ctgtcacaggactta

SEQ ID NO: 911216 - DNA, 15 bp, Homo sapiens
tgtcacaggacttat

SEQ ID NO: 911217 - DNA, 15 bp, Homo sapiens
gtcacaggacttatt

SEQ ID NO: 911218 - DNA, 15 bp, Homo sapiens
tcacaggacttattt

SEQ ID NO: 911219 - DNA, 15 bp, Homo sapiens
cacaggacttatttt

SEQ ID NO: 911220 - DNA, 15 bp, Homo sapiens
acaggacttatttta

SEQ ID NO: 911221 - DNA, 15 bp, Homo sapiens
caggacttattttaa

SEQ ID NO: 911222 - DNA, 15 bp, Homo sapiens
aggacttattttaag

SEQ ID NO: 911223 - DNA, 15 bp, Homo sapiens
ggacttattttaagt

SEQ ID NO: 911224 - DNA, 15 bp, Homo sapiens
gacttattttaagta

SEQ ID NO: 911225 - DNA, 15 bp, Homo sapiens
acttattttaagtaa

SEQ ID NO: 911226 - DNA, 15 bp, Homo sapiens
cttattttaagtaat

SEQ ID NO: 911227 - DNA, 15 bp, Homo sapiens
ttattttaagtaatt

SEQ ID NO: 911228 - DNA, 15 bp, Homo sapiens
tattttaagtaatta

SEQ ID NO: 911229 - DNA, 15 bp, Homo sapiens
attttaagtaattaa

SEQ ID NO: 911230 - DNA, 15 bp, Homo sapiens
ttttaagtaattaaa

SEQ ID NO: 911231 - DNA, 15 bp, Homo sapiens
tttaagtaattaaaa

SEQ ID NO: 911232 - DNA, 15 bp, Homo sapiens
ttaagtaattaaaaa

SEQ ID NO: 911233 - DNA, 15 bp, Homo sapiens
taagtaattaaaaag

SEQ ID NO: 911234 - DNA, 15 bp, Homo sapiens
aagtaattaaaaagg

SEQ ID NO: 911235 - DNA, 15 bp, Homo sapiens
agtaattaaaaagga

SEQ ID NO: 911236 - DNA, 15 bp, Homo sapiens
gtaattaaaaaggag

SEQ ID NO: 911237 - DNA, 15 bp, Homo sapiens
taattaaaaaggagc

SEQ ID NO: 911238 - DNA, 15 bp, Homo sapiens
aattaaaaaggagct

SEQ ID NO: 911239 - DNA, 15 bp, Homo sapiens
attaaaaaggagctg

SEQ ID NO: 911240 - DNA, 15 bp, Homo sapiens
ttaaaaaggagctgt

SEQ ID NO: 911241 - DNA, 15 bp, Homo sapiens
taaaaaggagctgtg

SEQ ID NO: 911242 - DNA, 15 bp, Homo sapiens
aaaaaggagctgtgt

SEQ ID NO: 911243 - DNA, 15 bp, Homo sapiens
aaaaggagctgtgtg

SEQ ID NO: 911244 - DNA, 15 bp, Homo sapiens
aaaggagctgtgtgt

SEQ ID NO: 911245 - DNA, 15 bp, Homo sapiens
aaggagctgtgtgtg

SEQ ID NO: 911246 - DNA, 15 bp, Homo sapiens
aggagctgtgtgtgt

SEQ ID NO: 911247 - DNA, 15 bp, Homo sapiens
ggagctgtgtgtgta

SEQ ID NO: 911248 - DNA, 15 bp, Homo sapiens
gagctgtgtgtgtag

SEQ ID NO: 911249 - DNA, 15 bp, Homo sapiens
agctgtgtgtgtagt

SEQ ID NO: 911250 - DNA, 15 bp, Homo sapiens
gctgtgtgtgtagta

SEQ ID NO: 911251 - DNA, 15 bp, Homo sapiens
ctgtgtgtgtagtaa

SEQ ID NO: 911252 - DNA, 15 bp, Homo sapiens
tgtgtgtgtagtaac

SEQ ID NO: 911253 - DNA, 15 bp, Homo sapiens
gtgtgtgtagtaaca

SEQ ID NO: 911254 - DNA, 15 bp, Homo sapiens
tgtgtgtagtaacaa

SEQ ID NO: 911255 - DNA, 15 bp, Homo sapiens
gtgtgtagtaacaag

SEQ ID NO: 911256 - DNA, 15 bp, Homo sapiens
tgtgtagtaacaaga

SEQ ID NO: 911257 - DNA, 15 bp, Homo sapiens
gtgtagtaacaagat

SEQ ID NO: 911258 - DNA, 15 bp, Homo sapiens
tgtagtaacaagatc

SEQ ID NO: 911259 - DNA, 15 bp, Homo sapiens
gtagtaacaagatca

SEQ ID NO: 911260 - DNA, 15 bp, Homo sapiens
tagtaacaagatcag

SEQ ID NO: 911261 - DNA, 15 bp, Homo sapiens
agtaacaagatcagt

SEQ ID NO: 911262 - DNA, 15 bp, Homo sapiens
gtaacaagatcagtg

SEQ ID NO: 911263 - DNA, 15 bp, Homo sapiens
taacaagatcagtgg

SEQ ID NO: 911264 - DNA, 15 bp, Homo sapiens
aacaagatcagtggg

SEQ ID NO: 911265 - DNA, 15 bp, Homo sapiens
acaagatcagtgggt

SEQ ID NO: 911266 - DNA, 15 bp, Homo sapiens
caagatcagtgggtc

SEQ ID NO: 911267 - DNA, 15 bp, Homo sapiens
aagatcagtgggtct

SEQ ID NO: 911268 - DNA, 15 bp, Homo sapiens
agatcagtgggtctc

SEQ ID NO: 911269 - DNA, 15 bp, Homo sapiens
gatcagtgggtctcc

SEQ ID NO: 911270 - DNA, 15 bp, Homo sapiens
atcagtgggtctcct

SEQ ID NO: 911271 - DNA, 15 bp, Homo sapiens
tcagtgggtctcctc

SEQ ID NO: 911272 - DNA, 15 bp, Homo sapiens
cagtgggtctcctct

SEQ ID NO: 911273 - DNA, 15 bp, Homo sapiens
agtgggtctcctctg

SEQ ID NO: 911274 - DNA, 15 bp, Homo sapiens
gtgggtctcctctgc

SEQ ID NO: 911275 - DNA, 15 bp, Homo sapiens
tgggtctcctctgca

SEQ ID NO: 911276 - DNA, 15 bp, Homo sapiens
gggtctcctctgcat

SEQ ID NO: 911277 - DNA, 15 bp, Homo sapiens
ggtctcctctgcatg

SEQ ID NO: 911278 - DNA, 15 bp, Homo sapiens
gtctcctctgcatgg

SEQ ID NO: 911279 - DNA, 15 bp, Homo sapiens
tctcctctgcatggc

SEQ ID NO: 911280 - DNA, 15 bp, Homo sapiens
ctcctctgcatggct

SEQ ID NO: 911281 - DNA, 15 bp, Homo sapiens
tcctctgcatggcta

SEQ ID NO: 911282 - DNA, 15 bp, Homo sapiens
cctctgcatggctac

SEQ ID NO: 911283 - DNA, 15 bp, Homo sapiens
ctctgcatggctaca

SEQ ID NO: 911284 - DNA, 15 bp, Homo sapiens
tctgcatggctacaa

SEQ ID NO: 911285 - DNA, 15 bp, Homo sapiens
ctgcatggctacaat

SEQ ID NO: 911286 - DNA, 15 bp, Homo sapiens
tgcatggctacaata

SEQ ID NO: 911287 - DNA, 15 bp, Homo sapiens
gcatggctacaatac

SEQ ID NO: 911288 - DNA, 15 bp, Homo sapiens
catggctacaataca

SEQ ID NO: 911289 - DNA, 15 bp, Homo sapiens
atggctacaatacaa

SEQ ID NO: 911290 - DNA, 15 bp, Homo sapiens
tggctacaatacaag

SEQ ID NO: 911291 - DNA, 15 bp, Homo sapiens
ggctacaatacaagg

SEQ ID NO: 911292 - DNA, 15 bp, Homo sapiens
gctacaatacaagga

SEQ ID NO: 911293 - DNA, 15 bp, Homo sapiens
ctacaatacaaggat

SEQ ID NO: 911294 - DNA, 15 bp, Homo sapiens
tacaatacaaggata

SEQ ID NO: 911295 - DNA, 15 bp, Homo sapiens
acaatacaaggatag

SEQ ID NO: 911296 - DNA, 15 bp, Homo sapiens
caatacaaggatagg

SEQ ID NO: 911297 - DNA, 15 bp, Homo sapiens
aatacaaggatagga

SEQ ID NO: 911298 - DNA, 15 bp, Homo sapiens
atacaaggataggag

SEQ ID NO: 911299 - DNA, 15 bp, Homo sapiens
tacaaggataggagc

SEQ ID NO: 911300 - DNA, 15 bp, Homo sapiens
acaaggataggagct

SEQ ID NO: 911301 - DNA, 15 bp, Homo sapiens
caaggataggagctg

SEQ ID NO: 911302 - DNA, 15 bp, Homo sapiens
aaggataggagctgc

SEQ ID NO: 911303 - DNA, 15 bp, Homo sapiens
aggataggagctgca

SEQ ID NO: 911304 - DNA, 15 bp, Homo sapiens
ggataggagctgcaa

SEQ ID NO: 911305 - DNA, 15 bp, Homo sapiens
gataggagctgcaat

SEQ ID NO: 911306 - DNA, 15 bp, Homo sapiens
ataggagctgcaatt

SEQ ID NO: 911307 - DNA, 15 bp, Homo sapiens
taggagctgcaattc

SEQ ID NO: 911308 - DNA, 15 bp, Homo sapiens
aggagctgcaattct

SEQ ID NO: 911309 - DNA, 15 bp, Homo sapiens
ggagctgcaattctc

SEQ ID NO: 911310 - DNA, 15 bp, Homo sapiens
gagctgcaattctct

SEQ ID NO: 911311 - DNA, 15 bp, Homo sapiens
agctgcaattctctg

SEQ ID NO: 911312 - DNA, 15 bp, Homo sapiens
gctgcaattctctgg

SEQ ID NO: 911313 - DNA, 15 bp, Homo sapiens
ctgcaattctctggg

SEQ ID NO: 911314 - DNA, 15 bp, Homo sapiens
tgcaattctctgggc

SEQ ID NO: 911315 - DNA, 15 bp, Homo sapiens
gcaattctctgggcc

SEQ ID NO: 911316 - DNA, 15 bp, Homo sapiens
caattctctgggcct

SEQ ID NO: 911317 - DNA, 15 bp, Homo sapiens
aattctctgggcctg

SEQ ID NO: 911318 - DNA, 15 bp, Homo sapiens
attctctgggcctgg

SEQ ID NO: 911319 - DNA, 15 bp, Homo sapiens
ttctctgggcctggg

SEQ ID NO: 911320 - DNA, 15 bp, Homo sapiens
tctctgggcctgggg

SEQ ID NO: 911321 - DNA, 15 bp, Homo sapiens
ctctgggcctggggt

SEQ ID NO: 911322 - DNA, 15 bp, Homo sapiens
tctgggcctggggtt

SEQ ID NO: 911323 - DNA, 15 bp, Homo sapiens
ctgggcctggggttt

SEQ ID NO: 911324 - DNA, 15 bp, Homo sapiens
tgggcctggggtttt

SEQ ID NO: 911325 - DNA, 15 bp, Homo sapiens
gggcctggggttttt

SEQ ID NO: 911326 - DNA, 15 bp, Homo sapiens
ggcctggggtttttt

SEQ ID NO: 911327 - DNA, 15 bp, Homo sapiens
gcctggggtttttta

SEQ ID NO: 911328 - DNA, 15 bp, Homo sapiens
cctggggttttttaa

SEQ ID NO: 911329 - DNA, 15 bp, Homo sapiens
ctggggttttttaaa

SEQ ID NO: 911330 - DNA, 15 bp, Homo sapiens
tggggttttttaaat

SEQ ID NO: 911331 - DNA, 15 bp, Homo sapiens
ggggttttttaaatc

SEQ ID NO: 911332 - DNA, 15 bp, Homo sapiens
gggttttttaaatct

SEQ ID NO: 911333 - DNA, 15 bp, Homo sapiens
ggttttttaaatctg

SEQ ID NO: 911334 - DNA, 15 bp, Homo sapiens
gttttttaaatctgt

SEQ ID NO: 911335 - DNA, 15 bp, Homo sapiens
ttttttaaatctgta

SEQ ID NO: 911336 - DNA, 15 bp, Homo sapiens
tttttaaatctgtaa

SEQ ID NO: 911337 - DNA, 15 bp, Homo sapiens
ttttaaatctgtaaa

SEQ ID NO: 911338 - DNA, 15 bp, Homo sapiens
tttaaatctgtaaaa

SEQ ID NO: 911339 - DNA, 15 bp, Homo sapiens
ttaaatctgtaaaac

SEQ ID NO: 911340 - DNA, 15 bp, Homo sapiens
taaatctgtaaaaca

SEQ ID NO: 911341 - DNA, 15 bp, Homo sapiens
aaatctgtaaaacaa

SEQ ID NO: 911342 - DNA, 15 bp, Homo sapiens
aatctgtaaaacaag

SEQ ID NO: 911343 - DNA, 15 bp, Homo sapiens
atctgtaaaacaaga

SEQ ID NO: 911344 - DNA, 15 bp, Homo sapiens
tctgtaaaacaagat

SEQ ID NO: 911345 - DNA, 15 bp, Homo sapiens
ctgtaaaacaagatg

SEQ ID NO: 911346 - DNA, 15 bp, Homo sapiens
tgtaaaacaagatga

SEQ ID NO: 911347 - DNA, 15 bp, Homo sapiens
gtaaaacaagatgaa

SEQ ID NO: 911348 - DNA, 15 bp, Homo sapiens
taaaacaagatgaat

SEQ ID NO: 911349 - DNA, 15 bp, Homo sapiens
aaaacaagatgaata

SEQ ID NO: 911350 - DNA, 15 bp, Homo sapiens
aaacaagatgaataa

SEQ ID NO: 911351 - DNA, 15 bp, Homo sapiens
aacaagatgaataag

SEQ ID NO: 911352 - DNA, 15 bp, Homo sapiens
acaagatgaataagc

SEQ ID NO: 911353 - DNA, 15 bp, Homo sapiens
caagatgaataagct

SEQ ID NO: 911354 - DNA, 15 bp, Homo sapiens
aagatgaataagcta

SEQ ID NO: 911355 - DNA, 15 bp, Homo sapiens
agatgaataagctag

SEQ ID NO: 911356 - DNA, 15 bp, Homo sapiens
gatgaataagctaga

SEQ ID NO: 911357 - DNA, 15 bp, Homo sapiens
atgaataagctagaa

SEQ ID NO: 911358 - DNA, 15 bp, Homo sapiens
tgaataagctagaac

SEQ ID NO: 911359 - DNA, 15 bp, Homo sapiens
gaataagctagaaca

SEQ ID NO: 911360 - DNA, 15 bp, Homo sapiens
aataagctagaacac

SEQ ID NO: 911361 - DNA, 15 bp, Homo sapiens
ataagctagaacact

SEQ ID NO: 911362 - DNA, 15 bp, Homo sapiens
taagctagaacactt

SEQ ID NO: 911363 - DNA, 15 bp, Homo sapiens
aagctagaacacttc

SEQ ID NO: 911364 - DNA, 15 bp, Homo sapiens
agctagaacacttct

SEQ ID NO: 911365 - DNA, 15 bp, Homo sapiens
gctagaacacttctt

SEQ ID NO: 911366 - DNA, 15 bp, Homo sapiens
ctagaacacttcttt

SEQ ID NO: 911367 - DNA, 15 bp, Homo sapiens
tagaacacttctttc

SEQ ID NO: 911368 - DNA, 15 bp, Homo sapiens
agaacacttctttca

SEQ ID NO: 911369 - DNA, 15 bp, Homo sapiens
gaacacttctttcag

SEQ ID NO: 911370 - DNA, 15 bp, Homo sapiens
aacacttctttcaga

SEQ ID NO: 911371 - DNA, 15 bp, Homo sapiens
acacttctttcagaa

SEQ ID NO: 911372 - DNA, 15 bp, Homo sapiens
cacttctttcagaat

SEQ ID NO: 911373 - DNA, 15 bp, Homo sapiens
acttctttcagaatt

SEQ ID NO: 911374 - DNA, 15 bp, Homo sapiens
cttctttcagaatta

SEQ ID NO: 911375 - DNA, 15 bp, Homo sapiens
ttctttcagaattaa

SEQ ID NO: 911376 - DNA, 15 bp, Homo sapiens
tctttcagaattaag

SEQ ID NO: 911377 - DNA, 15 bp, Homo sapiens
ctttcagaattaagc

SEQ ID NO: 911378 - DNA, 15 bp, Homo sapiens
tttcagaattaagcc

SEQ ID NO: 911379 - DNA, 15 bp, Homo sapiens
ttcagaattaagcct

SEQ ID NO: 911380 - DNA, 15 bp, Homo sapiens
tcagaattaagcctc

SEQ ID NO: 911381 - DNA, 15 bp, Homo sapiens
cagaattaagcctct

SEQ ID NO: 911382 - DNA, 15 bp, Homo sapiens
agaattaagcctctc

SEQ ID NO: 911383 - DNA, 15 bp, Homo sapiens
gaattaagcctctct

SEQ ID NO: 911384 - DNA, 15 bp, Homo sapiens
aattaagcctctctc

SEQ ID NO: 911385 - DNA, 15 bp, Homo sapiens
attaagcctctctca

SEQ ID NO: 911386 - DNA, 15 bp, Homo sapiens
ttaagcctctctcat

SEQ ID NO: 911387 - DNA, 15 bp, Homo sapiens
taagcctctctcatt

SEQ ID NO: 911388 - DNA, 15 bp, Homo sapiens
aagcctctctcattt

SEQ ID NO: 911389 - DNA, 15 bp, Homo sapiens
agcctctctcatttc

SEQ ID NO: 911390 - DNA, 15 bp, Homo sapiens
gcctctctcatttct

SEQ ID NO: 911391 - DNA, 15 bp, Homo sapiens
cctctctcatttctg

SEQ ID NO: 911392 - DNA, 15 bp, Homo sapiens
ctctctcatttctgt

SEQ ID NO: 911393 - DNA, 15 bp, Homo sapiens
tctctcatttctgtc

SEQ ID NO: 911394 - DNA, 15 bp, Homo sapiens
ctctcatttctgtct

SEQ ID NO: 911395 - DNA, 15 bp, Homo sapiens
tctcatttctgtctg

SEQ ID NO: 911396 - DNA, 15 bp, Homo sapiens
ctcatttctgtctgt

SEQ ID NO: 911397 - DNA, 15 bp, Homo sapiens
tcatttctgtctgta

SEQ ID NO: 911398 - DNA, 15 bp, Homo sapiens
catttctgtctgtat

SEQ ID NO: 911399 - DNA, 15 bp, Homo sapiens
atttctgtctgtatt

SEQ ID NO: 911400 - DNA, 15 bp, Homo sapiens
tttctgtctgtattt

SEQ ID NO: 911401 - DNA, 15 bp, Homo sapiens
ttctgtctgtatttt

SEQ ID NO: 911402 - DNA, 15 bp, Homo sapiens
tctgtctgtatttta

SEQ ID NO: 911403 - DNA, 15 bp, Homo sapiens
ctgtctgtattttaa

SEQ ID NO: 911404 - DNA, 15 bp, Homo sapiens
tgtctgtattttaat

SEQ ID NO: 911405 - DNA, 15 bp, Homo sapiens
gtctgtattttaatt

SEQ ID NO: 911406 - DNA, 15 bp, Homo sapiens
tctgtattttaattt

SEQ ID NO: 911407 - DNA, 15 bp, Homo sapiens
ctgtattttaatttt

SEQ ID NO: 911408 - DNA, 15 bp, Homo sapiens
tgtattttaattttt

SEQ ID NO: 911409 - DNA, 15 bp, Homo sapiens
gtattttaatttttg

SEQ ID NO: 911410 - DNA, 15 bp, Homo sapiens
tattttaatttttgt

SEQ ID NO: 911411 - DNA, 15 bp, Homo sapiens
attttaatttttgtc

SEQ ID NO: 911412 - DNA, 15 bp, Homo sapiens
ttttaatttttgtca

SEQ ID NO: 911413 - DNA, 15 bp, Homo sapiens
tttaatttttgtcat

SEQ ID NO: 911414 - DNA, 15 bp, Homo sapiens
ttaatttttgtcatc

SEQ ID NO: 911415 - DNA, 15 bp, Homo sapiens
taatttttgtcatcc

SEQ ID NO: 911416 - DNA, 15 bp, Homo sapiens
aatttttgtcatccc

SEQ ID NO: 911417 - DNA, 15 bp, Homo sapiens
atttttgtcatccct

SEQ ID NO: 911418 - DNA, 15 bp, Homo sapiens
tttttgtcatccctc

SEQ ID NO: 911419 - DNA, 15 bp, Homo sapiens
ttttgtcatccctcc

SEQ ID NO: 911420 - DNA, 15 bp, Homo sapiens
tttgtcatccctcca

SEQ ID NO: 911421 - DNA, 15 bp, Homo sapiens
ttgtcatccctccac

SEQ ID NO: 911422 - DNA, 15 bp, Homo sapiens
tgtcatccctccacc

SEQ ID NO: 911423 - DNA, 15 bp, Homo sapiens
gtcatccctccacca

SEQ ID NO: 911424 - DNA, 15 bp, Homo sapiens
tcatccctccaccaa

SEQ ID NO: 911425 - DNA, 15 bp, Homo sapiens
catccctccaccaac

SEQ ID NO: 911426 - DNA, 15 bp, Homo sapiens
atccctccaccaaca

SEQ ID NO: 911427 - DNA, 15 bp, Homo sapiens
tccctccaccaacat

SEQ ID NO: 911428 - DNA, 15 bp, Homo sapiens
ccctccaccaacatt

SEQ ID NO: 911429 - DNA, 15 bp, Homo sapiens
cctccaccaacattt

SEQ ID NO: 911430 - DNA, 15 bp, Homo sapiens
ctccaccaacatttc

SEQ ID NO: 911431 - DNA, 15 bp, Homo sapiens
tccaccaacatttct

SEQ ID NO: 911432 - DNA, 15 bp, Homo sapiens
ccaccaacatttcta

SEQ ID NO: 911433 - DNA, 15 bp, Homo sapiens
caccaacatttctaa

SEQ ID NO: 911434 - DNA, 15 bp, Homo sapiens
accaacatttctaaa

SEQ ID NO: 911435 - DNA, 15 bp, Homo sapiens
ccaacatttctaaaa

SEQ ID NO: 911436 - DNA, 15 bp, Homo sapiens
caacatttctaaaat

SEQ ID NO: 911437 - DNA, 15 bp, Homo sapiens
aacatttctaaaata

SEQ ID NO: 911438 - DNA, 15 bp, Homo sapiens
acatttctaaaatag

SEQ ID NO: 911439 - DNA, 15 bp, Homo sapiens
catttctaaaatagt

SEQ ID NO: 911440 - DNA, 15 bp, Homo sapiens
atttctaaaatagtt

SEQ ID NO: 911441 - DNA, 15 bp, Homo sapiens
tttctaaaatagttc

SEQ ID NO: 911442 - DNA, 15 bp, Homo sapiens
ttctaaaatagttca

SEQ ID NO: 911443 - DNA, 15 bp, Homo sapiens
tctaaaatagttcaa

SEQ ID NO: 911444 - DNA, 15 bp, Homo sapiens
ctaaaatagttcaaa

SEQ ID NO: 911445 - DNA, 15 bp, Homo sapiens
taaaatagttcaaaa

SEQ ID NO: 911446 - DNA, 15 bp, Homo sapiens
aaaatagttcaaaac

SEQ ID NO: 911447 - DNA, 15 bp, Homo sapiens
aaatagttcaaaaca

SEQ ID NO: 911448 - DNA, 15 bp, Homo sapiens
aatagttcaaaacaa

SEQ ID NO: 911449 - DNA, 15 bp, Homo sapiens
atagttcaaaacaaa

SEQ ID NO: 911450 - DNA, 15 bp, Homo sapiens
tagttcaaaacaaac

SEQ ID NO: 911451 - DNA, 15 bp, Homo sapiens
agttcaaaacaaact

SEQ ID NO: 911452 - DNA, 15 bp, Homo sapiens
gttcaaaacaaacta

SEQ ID NO: 911453 - DNA, 15 bp, Homo sapiens
ttcaaaacaaactat

SEQ ID NO: 911454 - DNA, 15 bp, Homo sapiens
tcaaaacaaactata

SEQ ID NO: 911455 - DNA, 15 bp, Homo sapiens
caaaacaaactataa

SEQ ID NO: 911456 - DNA, 15 bp, Homo sapiens
aaaacaaactataaa

SEQ ID NO: 911457 - DNA, 15 bp, Homo sapiens
aaacaaactataaag

SEQ ID NO: 911458 - DNA, 15 bp, Homo sapiens
aacaaactataaaga

SEQ ID NO: 911459 - DNA, 15 bp, Homo sapiens
acaaactataaagaa

SEQ ID NO: 911460 - DNA, 15 bp, Homo sapiens
caaactataaagaat

SEQ ID NO: 911461 - DNA, 15 bp, Homo sapiens
aaactataaagaata

SEQ ID NO: 911462 - DNA, 15 bp, Homo sapiens
aactataaagaatat

SEQ ID NO: 911463 - DNA, 15 bp, Homo sapiens
actataaagaatatt

SEQ ID NO: 911464 - DNA, 15 bp, Homo sapiens
ctataaagaatattt

SEQ ID NO: 911465 - DNA, 15 bp, Homo sapiens
tataaagaatatttc

SEQ ID NO: 911466 - DNA, 15 bp, Homo sapiens
ataaagaatatttca

SEQ ID NO: 911467 - DNA, 15 bp, Homo sapiens
taaagaatatttcac

SEQ ID NO: 911468 - DNA, 15 bp, Homo sapiens
aaagaatatttcacg

SEQ ID NO: 911469 - DNA, 15 bp, Homo sapiens
aagaatatttcacgg

SEQ ID NO: 911470 - DNA, 15 bp, Homo sapiens
agaatatttcacgga

SEQ ID NO: 911471 - DNA, 15 bp, Homo sapiens
gaatatttcacggat

SEQ ID NO: 911472 - DNA, 15 bp, Homo sapiens
aatatttcacggatc

SEQ ID NO: 911473 - DNA, 15 bp, Homo sapiens
atatttcacggatca

SEQ ID NO: 911474 - DNA, 15 bp, Homo sapiens
tatttcacggatcat

SEQ ID NO: 911475 - DNA, 15 bp, Homo sapiens
atttcacggatcata

SEQ ID NO: 911476 - DNA, 15 bp, Homo sapiens
tttcacggatcatag

SEQ ID NO: 911477 - DNA, 15 bp, Homo sapiens
ttcacggatcatagt

SEQ ID NO: 911478 - DNA, 15 bp, Homo sapiens
tcacggatcatagtt

SEQ ID NO: 911479 - DNA, 15 bp, Homo sapiens
cacggatcatagttc

SEQ ID NO: 911480 - DNA, 15 bp, Homo sapiens
acggatcatagttcc

SEQ ID NO: 911481 - DNA, 15 bp, Homo sapiens
cggatcatagttcca

SEQ ID NO: 911482 - DNA, 15 bp, Homo sapiens
ggatcatagttccag

SEQ ID NO: 911483 - DNA, 15 bp, Homo sapiens
gatcatagttccagg

SEQ ID NO: 911484 - DNA, 15 bp, Homo sapiens
atcatagttccaggt

SEQ ID NO: 911485 - DNA, 15 bp, Homo sapiens
tcatagttccaggtt

SEQ ID NO: 911486 - DNA, 15 bp, Homo sapiens
catagttccaggttt

SEQ ID NO: 911487 - DNA, 15 bp, Homo sapiens
atagttccaggtttt

SEQ ID NO: 911488 - DNA, 15 bp, Homo sapiens
tagttccaggttttt

SEQ ID NO: 911489 - DNA, 15 bp, Homo sapiens
agttccaggtttttt

SEQ ID NO: 911490 - DNA, 15 bp, Homo sapiens
gttccaggttttttt

SEQ ID NO: 911491 - DNA, 15 bp, Homo sapiens
ttccaggttttttta

SEQ ID NO: 911492 - DNA, 15 bp, Homo sapiens
tccaggtttttttaa

SEQ ID NO: 911493 - DNA, 15 bp, Homo sapiens
ccaggtttttttaaa

SEQ ID NO: 911494 - DNA, 15 bp, Homo sapiens
caggtttttttaaaa

SEQ ID NO: 911495 - DNA, 15 bp, Homo sapiens
aggtttttttaaaat

SEQ ID NO: 911496 - DNA, 15 bp, Homo sapiens
ggtttttttaaaatc

SEQ ID NO: 911497 - DNA, 15 bp, Homo sapiens
gtttttttaaaatca

SEQ ID NO: 911498 - DNA, 15 bp, Homo sapiens
tttttttaaaatcat

SEQ ID NO: 911499 - DNA, 15 bp, Homo sapiens
ttttttaaaatcata

SEQ ID NO: 911500 - DNA, 15 bp, Homo sapiens
tttttaaaatcataa

SEQ ID NO: 911501 - DNA, 15 bp, Homo sapiens
ttttaaaatcataaa

SEQ ID NO: 911502 - DNA, 15 bp, Homo sapiens
tttaaaatcataaat

SEQ ID NO: 911503 - DNA, 15 bp, Homo sapiens
ttaaaatcataaata

SEQ ID NO: 911504 - DNA, 15 bp, Homo sapiens
taaaatcataaataa

SEQ ID NO: 911505 - DNA, 15 bp, Homo sapiens
aaaatcataaataaa

SEQ ID NO: 911506 - DNA, 15 bp, Homo sapiens
aaatcataaataaat

SEQ ID NO: 911507 - DNA, 15 bp, Homo sapiens
aatcataaataaatt

SEQ ID NO: 911508 - DNA, 15 bp, Homo sapiens
atcataaataaattt

SEQ ID NO: 911509 - DNA, 15 bp, Homo sapiens
tcataaataaattta

SEQ ID NO: 911510 - DNA, 15 bp, Homo sapiens
cataaataaatttat

SEQ ID NO: 911511 - DNA, 15 bp, Homo sapiens
ataaataaatttatg

SEQ ID NO: 911512 - DNA, 15 bp, Homo sapiens
taaataaatttatgg

SEQ ID NO: 911513 - DNA, 15 bp, Homo sapiens
aaataaatttatggc

SEQ ID NO: 911514 - DNA, 15 bp, Homo sapiens
aataaatttatggct

SEQ ID NO: 911515 - DNA, 15 bp, Homo sapiens
ataaatttatggctc

SEQ ID NO: 911516 - DNA, 15 bp, Homo sapiens
taaatttatggctca

SEQ ID NO: 911517 - DNA, 15 bp, Homo sapiens
aaatttatggctcaa

SEQ ID NO: 911518 - DNA, 15 bp, Homo sapiens
aatttatggctcaat

SEQ ID NO: 911519 - DNA, 15 bp, Homo sapiens
atttatggctcaatt

SEQ ID NO: 911520 - DNA, 15 bp, Homo sapiens
tttatggctcaattt

SEQ ID NO: 911521 - DNA, 15 bp, Homo sapiens
ttatggctcaatttc

SEQ ID NO: 911522 - DNA, 15 bp, Homo sapiens
tatggctcaatttca

SEQ ID NO: 911523 - DNA, 15 bp, Homo sapiens
atggctcaatttcag

SEQ ID NO: 911524 - DNA, 15 bp, Homo sapiens
tggctcaatttcagg

SEQ ID NO: 911525 - DNA, 15 bp, Homo sapiens
ggctcaatttcaggt

SEQ ID NO: 911526 - DNA, 15 bp, Homo sapiens
gctcaatttcaggtt

SEQ ID NO: 911527 - DNA, 15 bp, Homo sapiens
ctcaatttcaggttc

SEQ ID NO: 911528 - DNA, 15 bp, Homo sapiens
tcaatttcaggttcc

SEQ ID NO: 911529 - DNA, 15 bp, Homo sapiens
caatttcaggttcct

SEQ ID NO: 911530 - DNA, 15 bp, Homo sapiens
aatttcaggttcctt

SEQ ID NO: 911531 - DNA, 15 bp, Homo sapiens
atttcaggttcctta

SEQ ID NO: 911532 - DNA, 15 bp, Homo sapiens
tttcaggttccttat

SEQ ID NO: 911533 - DNA, 15 bp, Homo sapiens
ttcaggttccttatc

SEQ ID NO: 911534 - DNA, 15 bp, Homo sapiens
tcaggttccttatca

SEQ ID NO: 911535 - DNA, 15 bp, Homo sapiens
caggttccttatcag

SEQ ID NO: 911536 - DNA, 15 bp, Homo sapiens
aggttccttatcagt

SEQ ID NO: 911537 - DNA, 15 bp, Homo sapiens
ggttccttatcagta

SEQ ID NO: 911538 - DNA, 15 bp, Homo sapiens
gttccttatcagtaa

SEQ ID NO: 911539 - DNA, 15 bp, Homo sapiens
ttccttatcagtaaa

SEQ ID NO: 911540 - DNA, 15 bp, Homo sapiens
tccttatcagtaaaa

SEQ ID NO: 911541 - DNA, 15 bp, Homo sapiens
ccttatcagtaaaat

SEQ ID NO: 911542 - DNA, 15 bp, Homo sapiens
cttatcagtaaaata

SEQ ID NO: 911543 - DNA, 15 bp, Homo sapiens
ttatcagtaaaatag

SEQ ID NO: 911544 - DNA, 15 bp, Homo sapiens
tatcagtaaaataga

SEQ ID NO: 911545 - DNA, 15 bp, Homo sapiens
atcagtaaaatagag

SEQ ID NO: 911546 - DNA, 15 bp, Homo sapiens
tcagtaaaatagagg

SEQ ID NO: 911547 - DNA, 15 bp, Homo sapiens
cagtaaaatagagga

SEQ ID NO: 911548 - DNA, 15 bp, Homo sapiens
agtaaaatagaggag

SEQ ID NO: 911549 - DNA, 15 bp, Homo sapiens
gtaaaatagaggagc

SEQ ID NO: 911550 - DNA, 15 bp, Homo sapiens
taaaatagaggagcg

SEQ ID NO: 911551 - DNA, 15 bp, Homo sapiens
aaaatagaggagcgt

SEQ ID NO: 911552 - DNA, 15 bp, Homo sapiens
aaatagaggagcgtt

SEQ ID NO: 911553 - DNA, 15 bp, Homo sapiens
aatagaggagcgttg

SEQ ID NO: 911554 - DNA, 15 bp, Homo sapiens
atagaggagcgttgg

SEQ ID NO: 911555 - DNA, 15 bp, Homo sapiens
tagaggagcgttggt

SEQ ID NO: 911556 - DNA, 15 bp, Homo sapiens
agaggagcgttggtg

SEQ ID NO: 911557 - DNA, 15 bp, Homo sapiens
gaggagcgttggtgt

SEQ ID NO: 911558 - DNA, 15 bp, Homo sapiens
aggagcgttggtgta

SEQ ID NO: 911559 - DNA, 15 bp, Homo sapiens
ggagcgttggtgtaa

SEQ ID NO: 911560 - DNA, 15 bp, Homo sapiens
gagcgttggtgtaaa

SEQ ID NO: 911561 - DNA, 15 bp, Homo sapiens
agcgttggtgtaaat

SEQ ID NO: 911562 - DNA, 15 bp, Homo sapiens
gcgttggtgtaaata

SEQ ID NO: 911563 - DNA, 15 bp, Homo sapiens
cgttggtgtaaatat

SEQ ID NO: 911564 - DNA, 15 bp, Homo sapiens
gttggtgtaaatatt

SEQ ID NO: 911565 - DNA, 15 bp, Homo sapiens
ttggtgtaaatattc

SEQ ID NO: 911566 - DNA, 15 bp, Homo sapiens
tggtgtaaatattct

SEQ ID NO: 911567 - DNA, 15 bp, Homo sapiens
ggtgtaaatattcta

SEQ ID NO: 911568 - DNA, 15 bp, Homo sapiens
gtgtaaatattctaa

SEQ ID NO: 911569 - DNA, 15 bp, Homo sapiens
tgtaaatattctaaa

SEQ ID NO: 911570 - DNA, 15 bp, Homo sapiens
gtaaatattctaaac

SEQ ID NO: 911571 - DNA, 15 bp, Homo sapiens
taaatattctaaact

SEQ ID NO: 911572 - DNA, 15 bp, Homo sapiens
aaatattctaaactc

SEQ ID NO: 911573 - DNA, 15 bp, Homo sapiens
aatattctaaactca

SEQ ID NO: 911574 - DNA, 15 bp, Homo sapiens
atattctaaactcag

SEQ ID NO: 911575 - DNA, 15 bp, Homo sapiens
tattctaaactcagc

SEQ ID NO: 911576 - DNA, 15 bp, Homo sapiens
attctaaactcagct

SEQ ID NO: 911577 - DNA, 15 bp, Homo sapiens
ttctaaactcagctc

SEQ ID NO: 911578 - DNA, 15 bp, Homo sapiens
tctaaactcagctct

SEQ ID NO: 911579 - DNA, 15 bp, Homo sapiens
ctaaactcagctctg

SEQ ID NO: 911580 - DNA, 15 bp, Homo sapiens
taaactcagctctgt

SEQ ID NO: 911581 - DNA, 15 bp, Homo sapiens
aaactcagctctgtg

SEQ ID NO: 911582 - DNA, 15 bp, Homo sapiens
aactcagctctgtgc

SEQ ID NO: 911583 - DNA, 15 bp, Homo sapiens
actcagctctgtgct

SEQ ID NO: 911584 - DNA, 15 bp, Homo sapiens
ctcagctctgtgctt

SEQ ID NO: 911585 - DNA, 15 bp, Homo sapiens
tcagctctgtgcttc

SEQ ID NO: 911586 - DNA, 15 bp, Homo sapiens
cagctctgtgcttca

SEQ ID NO: 911587 - DNA, 15 bp, Homo sapiens
agctctgtgcttcag

SEQ ID NO: 911588 - DNA, 15 bp, Homo sapiens
gctctgtgcttcagt

SEQ ID NO: 911589 - DNA, 15 bp, Homo sapiens
ctctgtgcttcagtg

SEQ ID NO: 911590 - DNA, 15 bp, Homo sapiens
tctgtgcttcagtgg

SEQ ID NO: 911591 - DNA, 15 bp, Homo sapiens
ctgtgcttcagtggg

SEQ ID NO: 911592 - DNA, 15 bp, Homo sapiens
tgtgcttcagtgggc

SEQ ID NO: 911593 - DNA, 15 bp, Homo sapiens
gtgcttcagtgggct

SEQ ID NO: 911594 - DNA, 15 bp, Homo sapiens
tgcttcagtgggctt

SEQ ID NO: 911595 - DNA, 15 bp, Homo sapiens
gcttcagtgggcttt

SEQ ID NO: 911596 - DNA, 15 bp, Homo sapiens
cttcagtgggctttt

SEQ ID NO: 911597 - DNA, 15 bp, Homo sapiens
ttcagtgggcttttc

SEQ ID NO: 911598 - DNA, 15 bp, Homo sapiens
tcagtgggcttttca

SEQ ID NO: 911599 - DNA, 15 bp, Homo sapiens
cagtgggcttttcac

SEQ ID NO: 911600 - DNA, 15 bp, Homo sapiens
agtgggcttttcact

SEQ ID NO: 911601 - DNA, 15 bp, Homo sapiens
gtgggcttttcacta

SEQ ID NO: 911602 - DNA, 15 bp, Homo sapiens
tgggcttttcactac

SEQ ID NO: 911603 - DNA, 15 bp, Homo sapiens
gggcttttcactacc

SEQ ID NO: 911604 - DNA, 15 bp, Homo sapiens
ggcttttcactacct

SEQ ID NO: 911605 - DNA, 15 bp, Homo sapiens
gcttttcactacctt

SEQ ID NO: 911606 - DNA, 15 bp, Homo sapiens
cttttcactaccttt

SEQ ID NO: 911607 - DNA, 15 bp, Homo sapiens
ttttcactaccttta

SEQ ID NO: 911608 - DNA, 15 bp, Homo sapiens
tttcactacctttag

SEQ ID NO: 911609 - DNA, 15 bp, Homo sapiens
ttcactacctttagt

SEQ ID NO: 911610 - DNA, 15 bp, Homo sapiens
tcactacctttagtt

SEQ ID NO: 911611 - DNA, 15 bp, Homo sapiens
cactacctttagtta

SEQ ID NO: 911612 - DNA, 15 bp, Homo sapiens
actacctttagttag

SEQ ID NO: 911613 - DNA, 15 bp, Homo sapiens
ctacctttagttagt

SEQ ID NO: 911614 - DNA, 15 bp, Homo sapiens
tacctttagttagtt

SEQ ID NO: 911615 - DNA, 15 bp, Homo sapiens
acctttagttagttg

SEQ ID NO: 911616 - DNA, 15 bp, Homo sapiens
cctttagttagttgc

SEQ ID NO: 911617 - DNA, 15 bp, Homo sapiens
ctttagttagttgca

SEQ ID NO: 911618 - DNA, 15 bp, Homo sapiens
tttagttagttgcac

SEQ ID NO: 911619 - DNA, 15 bp, Homo sapiens
ttagttagttgcact

SEQ ID NO: 911620 - DNA, 15 bp, Homo sapiens
tagttagttgcacta

SEQ ID NO: 911621 - DNA, 15 bp, Homo sapiens
agttagttgcactag

SEQ ID NO: 911622 - DNA, 15 bp, Homo sapiens
gttagttgcactagg

SEQ ID NO: 911623 - DNA, 15 bp, Homo sapiens
ttagttgcactaggc

SEQ ID NO: 911624 - DNA, 15 bp, Homo sapiens
tagttgcactaggct

SEQ ID NO: 911625 - DNA, 15 bp, Homo sapiens
agttgcactaggctg

SEQ ID NO: 911626 - DNA, 15 bp, Homo sapiens
gttgcactaggctgg

SEQ ID NO: 911627 - DNA, 15 bp, Homo sapiens
ttgcactaggctggt

SEQ ID NO: 911628 - DNA, 15 bp, Homo sapiens
tgcactaggctggtt

SEQ ID NO: 911629 - DNA, 15 bp, Homo sapiens
gcactaggctggttg

SEQ ID NO: 911630 - DNA, 15 bp, Homo sapiens
cactaggctggttgc

SEQ ID NO: 911631 - DNA, 15 bp, Homo sapiens
actaggctggttgct

SEQ ID NO: 911632 - DNA, 15 bp, Homo sapiens
ctaggctggttgctg

SEQ ID NO: 911633 - DNA, 15 bp, Homo sapiens
taggctggttgctgt

SEQ ID NO: 911634 - DNA, 15 bp, Homo sapiens
aggctggttgctgtt

SEQ ID NO: 911635 - DNA, 15 bp, Homo sapiens
ggctggttgctgttt

SEQ ID NO: 911636 - DNA, 15 bp, Homo sapiens
gctggttgctgttta

SEQ ID NO: 911637 - DNA, 15 bp, Homo sapiens
ctggttgctgtttac

SEQ ID NO: 911638 - DNA, 15 bp, Homo sapiens
tggttgctgtttacc

SEQ ID NO: 911639 - DNA, 15 bp, Homo sapiens
ggttgctgtttacct

SEQ ID NO: 911640 - DNA, 15 bp, Homo sapiens
gttgctgtttacctt

SEQ ID NO: 911641 - DNA, 15 bp, Homo sapiens
ttgctgtttaccttg

SEQ ID NO: 911642 - DNA, 15 bp, Homo sapiens
tgctgtttaccttgc

SEQ ID NO: 911643 - DNA, 15 bp, Homo sapiens
gctgtttaccttgca

SEQ ID NO: 911644 - DNA, 15 bp, Homo sapiens
ctgtttaccttgcat

SEQ ID NO: 911645 - DNA, 15 bp, Homo sapiens
tgtttaccttgcatg

SEQ ID NO: 911646 - DNA, 15 bp, Homo sapiens
gtttaccttgcatgg

SEQ ID NO: 911647 - DNA, 15 bp, Homo sapiens
tttaccttgcatggt

SEQ ID NO: 911648 - DNA, 15 bp, Homo sapiens
ttaccttgcatggtt

SEQ ID NO: 911649 - DNA, 15 bp, Homo sapiens
taccttgcatggttg

SEQ ID NO: 911650 - DNA, 15 bp, Homo sapiens
accttgcatggttga

SEQ ID NO: 911651 - DNA, 15 bp, Homo sapiens
ccttgcatggttgac

SEQ ID NO: 911652 - DNA, 15 bp, Homo sapiens
cttgcatggttgact

SEQ ID NO: 911653 - DNA, 15 bp, Homo sapiens
ttgcatggttgactg

SEQ ID NO: 911654 - DNA, 15 bp, Homo sapiens
tgcatggttgactgc

SEQ ID NO: 911655 - DNA, 15 bp, Homo sapiens
gcatggttgactgct

SEQ ID NO: 911656 - DNA, 15 bp, Homo sapiens
catggttgactgctc

SEQ ID NO: 911657 - DNA, 15 bp, Homo sapiens
atggttgactgctct

SEQ ID NO: 911658 - DNA, 15 bp, Homo sapiens
tggttgactgctctc

SEQ ID NO: 911659 - DNA, 15 bp, Homo sapiens
ggttgactgctctct

SEQ ID NO: 911660 - DNA, 15 bp, Homo sapiens
gttgactgctctctt

SEQ ID NO: 911661 - DNA, 15 bp, Homo sapiens
ttgactgctctcttc

SEQ ID NO: 911662 - DNA, 15 bp, Homo sapiens
tgactgctctcttct

SEQ ID NO: 911663 - DNA, 15 bp, Homo sapiens
gactgctctcttctc

SEQ ID NO: 911664 - DNA, 15 bp, Homo sapiens
actgctctcttctca

SEQ ID NO: 911665 - DNA, 15 bp, Homo sapiens
ctgctctcttctcac

SEQ ID NO: 911666 - DNA, 15 bp, Homo sapiens
tgctctcttctcaca

SEQ ID NO: 911667 - DNA, 15 bp, Homo sapiens
gctctcttctcacat

SEQ ID NO: 911668 - DNA, 15 bp, Homo sapiens
ctctcttctcacatt

SEQ ID NO: 911669 - DNA, 15 bp, Homo sapiens
tctcttctcacattg

SEQ ID NO: 911670 - DNA, 15 bp, Homo sapiens
ctcttctcacattgt

SEQ ID NO: 911671 - DNA, 15 bp, Homo sapiens
tcttctcacattgtg

SEQ ID NO: 911672 - DNA, 15 bp, Homo sapiens
cttctcacattgtgt

SEQ ID NO: 911673 - DNA, 15 bp, Homo sapiens
ttctcacattgtgtg

SEQ ID NO: 911674 - DNA, 15 bp, Homo sapiens
tctcacattgtgtgc

SEQ ID NO: 911675 - DNA, 15 bp, Homo sapiens
ctcacattgtgtgcc

SEQ ID NO: 911676 - DNA, 15 bp, Homo sapiens
tcacattgtgtgcca

SEQ ID NO: 911677 - DNA, 15 bp, Homo sapiens
cacattgtgtgccag

SEQ ID NO: 911678 - DNA, 15 bp, Homo sapiens
acattgtgtgccagg

SEQ ID NO: 911679 - DNA, 15 bp, Homo sapiens
cattgtgtgccagga

SEQ ID NO: 911680 - DNA, 15 bp, Homo sapiens
attgtgtgccaggaa

SEQ ID NO: 911681 - DNA, 15 bp, Homo sapiens
ttgtgtgccaggaag

SEQ ID NO: 911682 - DNA, 15 bp, Homo sapiens
tgtgtgccaggaagg

SEQ ID NO: 911683 - DNA, 15 bp, Homo sapiens
gtgtgccaggaaggg

SEQ ID NO: 911684 - DNA, 15 bp, Homo sapiens
tgtgccaggaagggc

SEQ ID NO: 911685 - DNA, 15 bp, Homo sapiens
gtgccaggaagggca

SEQ ID NO: 911686 - DNA, 15 bp, Homo sapiens
tgccaggaagggcac

SEQ ID NO: 911687 - DNA, 15 bp, Homo sapiens
gccaggaagggcact

SEQ ID NO: 911688 - DNA, 15 bp, Homo sapiens
ccaggaagggcactg

SEQ ID NO: 911689 - DNA, 15 bp, Homo sapiens
caggaagggcactgc

SEQ ID NO: 911690 - DNA, 15 bp, Homo sapiens
aggaagggcactgca

SEQ ID NO: 911691 - DNA, 15 bp, Homo sapiens
ggaagggcactgcac

SEQ ID NO: 911692 - DNA, 15 bp, Homo sapiens
gaagggcactgcacc

SEQ ID NO: 911693 - DNA, 15 bp, Homo sapiens
aagggcactgcacct

SEQ ID NO: 911694 - DNA, 15 bp, Homo sapiens
agggcactgcacctt

SEQ ID NO: 911695 - DNA, 15 bp, Homo sapiens
gggcactgcaccttg

SEQ ID NO: 911696 - DNA, 15 bp, Homo sapiens
ggcactgcaccttgg

SEQ ID NO: 911697 - DNA, 15 bp, Homo sapiens
gcactgcaccttggt

SEQ ID NO: 911698 - DNA, 15 bp, Homo sapiens
cactgcaccttggta

SEQ ID NO: 911699 - DNA, 15 bp, Homo sapiens
actgcaccttggtat

SEQ ID NO: 911700 - DNA, 15 bp, Homo sapiens
ctgcaccttggtata

SEQ ID NO: 911701 - DNA, 15 bp, Homo sapiens
tgcaccttggtataa

SEQ ID NO: 911702 - DNA, 15 bp, Homo sapiens
gcaccttggtataaa

SEQ ID NO: 911703 - DNA, 15 bp, Homo sapiens
caccttggtataaat

SEQ ID NO: 911704 - DNA, 15 bp, Homo sapiens
accttggtataaatg

SEQ ID NO: 911705 - DNA, 15 bp, Homo sapiens
ccttggtataaatgc

SEQ ID NO: 911706 - DNA, 15 bp, Homo sapiens
cttggtataaatgct

SEQ ID NO: 911707 - DNA, 15 bp, Homo sapiens
ttggtataaatgctg

SEQ ID NO: 911708 - DNA, 15 bp, Homo sapiens
tggtataaatgctgc

SEQ ID NO: 911709 - DNA, 15 bp, Homo sapiens
ggtataaatgctgct

SEQ ID NO: 911710 - DNA, 15 bp, Homo sapiens
gtataaatgctgctg

SEQ ID NO: 911711 - DNA, 15 bp, Homo sapiens
tataaatgctgctgg

SEQ ID NO: 911712 - DNA, 15 bp, Homo sapiens
ataaatgctgctggg

SEQ ID NO: 911713 - DNA, 15 bp, Homo sapiens
taaatgctgctgggc

SEQ ID NO: 911714 - DNA, 15 bp, Homo sapiens
aaatgctgctgggca

SEQ ID NO: 911715 - DNA, 15 bp, Homo sapiens
aatgctgctgggcac

SEQ ID NO: 911716 - DNA, 15 bp, Homo sapiens
atgctgctgggcacc

SEQ ID NO: 911717 - DNA, 15 bp, Homo sapiens
tgctgctgggcaccg

SEQ ID NO: 911718 - DNA, 15 bp, Homo sapiens
gctgctgggcaccgt

SEQ ID NO: 911719 - DNA, 15 bp, Homo sapiens
ctgctgggcaccgtt

SEQ ID NO: 911720 - DNA, 15 bp, Homo sapiens
tgctgggcaccgttc

SEQ ID NO: 911721 - DNA, 15 bp, Homo sapiens
gctgggcaccgttct

SEQ ID NO: 911722 - DNA, 15 bp, Homo sapiens
ctgggcaccgttctg

SEQ ID NO: 911723 - DNA, 15 bp, Homo sapiens
tgggcaccgttctgt

SEQ ID NO: 911724 - DNA, 15 bp, Homo sapiens
gggcaccgttctgtt

SEQ ID NO: 911725 - DNA, 15 bp, Homo sapiens
ggcaccgttctgttt

SEQ ID NO: 911726 - DNA, 15 bp, Homo sapiens
gcaccgttctgtttt

SEQ ID NO: 911727 - DNA, 15 bp, Homo sapiens
caccgttctgttttc

SEQ ID NO: 911728 - DNA, 15 bp, Homo sapiens
accgttctgttttct

SEQ ID NO: 911729 - DNA, 15 bp, Homo sapiens
ccgttctgttttctt

SEQ ID NO: 911730 - DNA, 15 bp, Homo sapiens
cgttctgttttcttt

SEQ ID NO: 911731 - DNA, 15 bp, Homo sapiens
gttctgttttctttc

SEQ ID NO: 911732 - DNA, 15 bp, Homo sapiens
ttctgttttctttct

SEQ ID NO: 911733 - DNA, 15 bp, Homo sapiens
tctgttttctttctt

SEQ ID NO: 911734 - DNA, 15 bp, Homo sapiens
ctgttttctttcttt

SEQ ID NO: 911735 - DNA, 15 bp, Homo sapiens
tgttttctttctttt

SEQ ID NO: 911736 - DNA, 15 bp, Homo sapiens
gttttctttcttttc

SEQ ID NO: 911737 - DNA, 15 bp, Homo sapiens
ttttctttcttttct

SEQ ID NO: 911738 - DNA, 15 bp, Homo sapiens
tttctttcttttctt

SEQ ID NO: 911739 - DNA, 15 bp, Homo sapiens
ttctttcttttctta

SEQ ID NO: 911740 - DNA, 15 bp, Homo sapiens
tctttcttttcttaa

SEQ ID NO: 911741 - DNA, 15 bp, Homo sapiens
ctttcttttcttaat

SEQ ID NO: 911742 - DNA, 15 bp, Homo sapiens
tttcttttcttaatc

SEQ ID NO: 911743 - DNA, 15 bp, Homo sapiens
ttcttttcttaatcc

SEQ ID NO: 911744 - DNA, 15 bp, Homo sapiens
tcttttcttaatcct

SEQ ID NO: 911745 - DNA, 15 bp, Homo sapiens
cttttcttaatccta

SEQ ID NO: 911746 - DNA, 15 bp, Homo sapiens
ttttcttaatcctat

SEQ ID NO: 911747 - DNA, 15 bp, Homo sapiens
tttcttaatcctatc

SEQ ID NO: 911748 - DNA, 15 bp, Homo sapiens
ttcttaatcctatcc

SEQ ID NO: 911749 - DNA, 15 bp, Homo sapiens
tcttaatcctatcca

SEQ ID NO: 911750 - DNA, 15 bp, Homo sapiens
cttaatcctatccaa

SEQ ID NO: 911751 - DNA, 15 bp, Homo sapiens
ttaatcctatccaag

SEQ ID NO: 911752 - DNA, 15 bp, Homo sapiens
taatcctatccaagt

SEQ ID NO: 911753 - DNA, 15 bp, Homo sapiens
aatcctatccaagta

SEQ ID NO: 911754 - DNA, 15 bp, Homo sapiens
atcctatccaagtat

SEQ ID NO: 911755 - DNA, 15 bp, Homo sapiens
tcctatccaagtatg

SEQ ID NO: 911756 - DNA, 15 bp, Homo sapiens
cctatccaagtatgc

SEQ ID NO: 911757 - DNA, 15 bp, Homo sapiens
ctatccaagtatgca

SEQ ID NO: 911758 - DNA, 15 bp, Homo sapiens
tatccaagtatgcag

SEQ ID NO: 911759 - DNA, 15 bp, Homo sapiens
atccaagtatgcagt

SEQ ID NO: 911760 - DNA, 15 bp, Homo sapiens
tccaagtatgcagta

SEQ ID NO: 911761 - DNA, 15 bp, Homo sapiens
ccaagtatgcagtac

SEQ ID NO: 911762 - DNA, 15 bp, Homo sapiens
caagtatgcagtacg

SEQ ID NO: 911763 - DNA, 15 bp, Homo sapiens
aagtatgcagtacgc

SEQ ID NO: 911764 - DNA, 15 bp, Homo sapiens
agtatgcagtacgct

SEQ ID NO: 911765 - DNA, 15 bp, Homo sapiens
gtatgcagtacgctc

SEQ ID NO: 911766 - DNA, 15 bp, Homo sapiens
tatgcagtacgctct

SEQ ID NO: 911767 - DNA, 15 bp, Homo sapiens
atgcagtacgctctt

SEQ ID NO: 911768 - DNA, 15 bp, Homo sapiens
tgcagtacgctcttg

SEQ ID NO: 911769 - DNA, 15 bp, Homo sapiens
gcagtacgctcttgg

SEQ ID NO: 911770 - DNA, 15 bp, Homo sapiens
cagtacgctcttggg

SEQ ID NO: 911771 - DNA, 15 bp, Homo sapiens
agtacgctcttgggt

SEQ ID NO: 911772 - DNA, 15 bp, Homo sapiens
gtacgctcttgggtc

SEQ ID NO: 911773 - DNA, 15 bp, Homo sapiens
tacgctcttgggtcg

SEQ ID NO: 911774 - DNA, 15 bp, Homo sapiens
acgctcttgggtcgt

SEQ ID NO: 911775 - DNA, 15 bp, Homo sapiens
cgctcttgggtcgtc

SEQ ID NO: 911776 - DNA, 15 bp, Homo sapiens
gctcttgggtcgtct

SEQ ID NO: 911777 - DNA, 15 bp, Homo sapiens
ctcttgggtcgtctc

SEQ ID NO: 911778 - DNA, 15 bp, Homo sapiens
tcttgggtcgtctca

SEQ ID NO: 911779 - DNA, 15 bp, Homo sapiens
cttgggtcgtctcat

SEQ ID NO: 911780 - DNA, 15 bp, Homo sapiens
ttgggtcgtctcatg

SEQ ID NO: 911781 - DNA, 15 bp, Homo sapiens
tgggtcgtctcatga

SEQ ID NO: 911782 - DNA, 15 bp, Homo sapiens
gggtcgtctcatgag

SEQ ID NO: 911783 - DNA, 15 bp, Homo sapiens
ggtcgtctcatgaga

SEQ ID NO: 911784 - DNA, 15 bp, Homo sapiens
gtcgtctcatgagac

SEQ ID NO: 911785 - DNA, 15 bp, Homo sapiens
tcgtctcatgagacc

SEQ ID NO: 911786 - DNA, 15 bp, Homo sapiens
cgtctcatgagaccc

SEQ ID NO: 911787 - DNA, 15 bp, Homo sapiens
gtctcatgagaccca

SEQ ID NO: 911788 - DNA, 15 bp, Homo sapiens
tctcatgagacccag

SEQ ID NO: 911789 - DNA, 15 bp, Homo sapiens
ctcatgagacccagg

SEQ ID NO: 911790 - DNA, 15 bp, Homo sapiens
tcatgagacccaggg

SEQ ID NO: 911791 - DNA, 15 bp, Homo sapiens
catgagacccagggg

SEQ ID NO: 911792 - DNA, 15 bp, Homo sapiens
atgagacccaggggc

SEQ ID NO: 911793 - DNA, 15 bp, Homo sapiens
tgagacccaggggca

SEQ ID NO: 911794 - DNA, 15 bp, Homo sapiens
gagacccaggggcat

SEQ ID NO: 911795 - DNA, 15 bp, Homo sapiens
agacccaggggcatg

SEQ ID NO: 911796 - DNA, 15 bp, Homo sapiens
gacccaggggcatgt

SEQ ID NO: 911797 - DNA, 15 bp, Homo sapiens
acccaggggcatgtt

SEQ ID NO: 911798 - DNA, 15 bp, Homo sapiens
cccaggggcatgttg

SEQ ID NO: 911799 - DNA, 15 bp, Homo sapiens
ccaggggcatgttgg

SEQ ID NO: 911800 - DNA, 15 bp, Homo sapiens
caggggcatgttgga

SEQ ID NO: 911801 - DNA, 15 bp, Homo sapiens
aggggcatgttggaa

SEQ ID NO: 911802 - DNA, 15 bp, Homo sapiens
ggggcatgttggaaa

SEQ ID NO: 911803 - DNA, 15 bp, Homo sapiens
gggcatgttggaaag

SEQ ID NO: 911804 - DNA, 15 bp, Homo sapiens
ggcatgttggaaaga

SEQ ID NO: 911805 - DNA, 15 bp, Homo sapiens
gcatgttggaaagaa

SEQ ID NO: 911806 - DNA, 15 bp, Homo sapiens
catgttggaaagaac

SEQ ID NO: 911807 - DNA, 15 bp, Homo sapiens
atgttggaaagaact

SEQ ID NO: 911808 - DNA, 15 bp, Homo sapiens
tgttggaaagaactg

SEQ ID NO: 911809 - DNA, 15 bp, Homo sapiens
gttggaaagaactga

SEQ ID NO: 911810 - DNA, 15 bp, Homo sapiens
ttggaaagaactgag

SEQ ID NO: 911811 - DNA, 15 bp, Homo sapiens
tggaaagaactgaga

SEQ ID NO: 911812 - DNA, 15 bp, Homo sapiens
ggaaagaactgagag

SEQ ID NO: 911813 - DNA, 15 bp, Homo sapiens
gaaagaactgagaga

SEQ ID NO: 911814 - DNA, 15 bp, Homo sapiens
aaagaactgagagaa

SEQ ID NO: 911815 - DNA, 15 bp, Homo sapiens
aagaactgagagaaa

SEQ ID NO: 911816 - DNA, 15 bp, Homo sapiens
agaactgagagaaag

SEQ ID NO: 911817 - DNA, 15 bp, Homo sapiens
gaactgagagaaaga

SEQ ID NO: 911818 - DNA, 15 bp, Homo sapiens
aactgagagaaagag

SEQ ID NO: 911819 - DNA, 15 bp, Homo sapiens
actgagagaaagagc

SEQ ID NO: 911820 - DNA, 15 bp, Homo sapiens
ctgagagaaagagca

SEQ ID NO: 911821 - DNA, 15 bp, Homo sapiens
tgagagaaagagcaa

SEQ ID NO: 911822 - DNA, 15 bp, Homo sapiens
gagagaaagagcaac

SEQ ID NO: 911823 - DNA, 15 bp, Homo sapiens
agagaaagagcaaca

SEQ ID NO: 911824 - DNA, 15 bp, Homo sapiens
gagaaagagcaacaa

SEQ ID NO: 911825 - DNA, 15 bp, Homo sapiens
agaaagagcaacaaa

SEQ ID NO: 911826 - DNA, 15 bp, Homo sapiens
gaaagagcaacaaag

SEQ ID NO: 911827 - DNA, 15 bp, Homo sapiens
aaagagcaacaaagc

SEQ ID NO: 911828 - DNA, 15 bp, Homo sapiens
aagagcaacaaagcg

SEQ ID NO: 911829 - DNA, 15 bp, Homo sapiens
agagcaacaaagcgg

SEQ ID NO: 911830 - DNA, 15 bp, Homo sapiens
gagcaacaaagcggc

SEQ ID NO: 911831 - DNA, 15 bp, Homo sapiens
agcaacaaagcggcg

SEQ ID NO: 911832 - DNA, 15 bp, Homo sapiens
gcaacaaagcggcga

SEQ ID NO: 911833 - DNA, 15 bp, Homo sapiens
caacaaagcggcgag

SEQ ID NO: 911834 - DNA, 15 bp, Homo sapiens
aacaaagcggcgagt

SEQ ID NO: 911835 - DNA, 15 bp, Homo sapiens
acaaagcggcgagtg

SEQ ID NO: 911836 - DNA, 15 bp, Homo sapiens
caaagcggcgagtgg

SEQ ID NO: 911837 - DNA, 15 bp, Homo sapiens
aaagcggcgagtggt

SEQ ID NO: 911838 - DNA, 15 bp, Homo sapiens
aagcggcgagtggtg

SEQ ID NO: 911839 - DNA, 15 bp, Homo sapiens
agcggcgagtggtgt

SEQ ID NO: 911840 - DNA, 15 bp, Homo sapiens
gcggcgagtggtgtg

SEQ ID NO: 911841 - DNA, 15 bp, Homo sapiens
cggcgagtggtgtga

SEQ ID NO: 911842 - DNA, 15 bp, Homo sapiens
ggcgagtggtgtgag

SEQ ID NO: 911843 - DNA, 15 bp, Homo sapiens
gcgagtggtgtgaga

SEQ ID NO: 911844 - DNA, 15 bp, Homo sapiens
cgagtggtgtgagag

SEQ ID NO: 911845 - DNA, 15 bp, Homo sapiens
gagtggtgtgagagg

SEQ ID NO: 911846 - DNA, 15 bp, Homo sapiens
agtggtgtgagaggg

SEQ ID NO: 911847 - DNA, 15 bp, Homo sapiens
gtggtgtgagagggc

SEQ ID NO: 911848 - DNA, 15 bp, Homo sapiens
tggtgtgagagggca

SEQ ID NO: 911849 - DNA, 15 bp, Homo sapiens
ggtgtgagagggcag

SEQ ID NO: 911850 - DNA, 15 bp, Homo sapiens
gtgtgagagggcagc

SEQ ID NO: 911851 - DNA, 15 bp, Homo sapiens
tgtgagagggcagca

SEQ ID NO: 911852 - DNA, 15 bp, Homo sapiens
gtgagagggcagcac

SEQ ID NO: 911853 - DNA, 15 bp, Homo sapiens
tgagagggcagcacg

SEQ ID NO: 911854 - DNA, 15 bp, Homo sapiens
gagagggcagcacgc

SEQ ID NO: 911855 - DNA, 15 bp, Homo sapiens
agagggcagcacgcg

SEQ ID NO: 911856 - DNA, 15 bp, Homo sapiens
gagggcagcacgcgc

SEQ ID NO: 911857 - DNA, 15 bp, Homo sapiens
agggcagcacgcgct

SEQ ID NO: 911858 - DNA, 15 bp, Homo sapiens
gggcagcacgcgctg

SEQ ID NO: 911859 - DNA, 15 bp, Homo sapiens
ggcagcacgcgctgt

SEQ ID NO: 911860 - DNA, 15 bp, Homo sapiens
gcagcacgcgctgtg

SEQ ID NO: 911861 - DNA, 15 bp, Homo sapiens
cagcacgcgctgtgg

SEQ ID NO: 911862 - DNA, 15 bp, Homo sapiens
agcacgcgctgtggg

SEQ ID NO: 911863 - DNA, 15 bp, Homo sapiens
gcacgcgctgtgggt

SEQ ID NO: 911864 - DNA, 15 bp, Homo sapiens
cacgcgctgtgggta

SEQ ID NO: 911865 - DNA, 15 bp, Homo sapiens
acgcgctgtgggtaa

SEQ ID NO: 911866 - DNA, 15 bp, Homo sapiens
cgcgctgtgggtaag

SEQ ID NO: 911867 - DNA, 15 bp, Homo sapiens
gcgctgtgggtaagc

SEQ ID NO: 911868 - DNA, 15 bp, Homo sapiens
cgctgtgggtaagct

SEQ ID NO: 911869 - DNA, 15 bp, Homo sapiens
gctgtgggtaagctg

SEQ ID NO: 911870 - DNA, 15 bp, Homo sapiens
ctgtgggtaagctgg

SEQ ID NO: 911871 - DNA, 15 bp, Homo sapiens
tgtgggtaagctgga

SEQ ID NO: 911872 - DNA, 15 bp, Homo sapiens
gtgggtaagctggac

SEQ ID NO: 911873 - DNA, 15 bp, Homo sapiens
tgggtaagctggact

SEQ ID NO: 911874 - DNA, 15 bp, Homo sapiens
gggtaagctggactc

SEQ ID NO: 911875 - DNA, 15 bp, Homo sapiens
ggtaagctggactca

SEQ ID NO: 911876 - DNA, 15 bp, Homo sapiens
gtaagctggactcac

SEQ ID NO: 911877 - DNA, 15 bp, Homo sapiens
taagctggactcacc

SEQ ID NO: 911878 - DNA, 15 bp, Homo sapiens
aagctggactcaccc

SEQ ID NO: 911879 - DNA, 15 bp, Homo sapiens
agctggactcaccca

SEQ ID NO: 911880 - DNA, 15 bp, Homo sapiens
gctggactcacccaa

SEQ ID NO: 911881 - DNA, 15 bp, Homo sapiens
ctggactcacccaaa

SEQ ID NO: 911882 - DNA, 15 bp, Homo sapiens
tggactcacccaaag

SEQ ID NO: 911883 - DNA, 15 bp, Homo sapiens
ggactcacccaaaga

SEQ ID NO: 911884 - DNA, 15 bp, Homo sapiens
gactcacccaaagaa

SEQ ID NO: 911885 - DNA, 15 bp, Homo sapiens
actcacccaaagaac

SEQ ID NO: 911886 - DNA, 15 bp, Homo sapiens
ctcacccaaagaact

SEQ ID NO: 911887 - DNA, 15 bp, Homo sapiens
tcacccaaagaactg

SEQ ID NO: 911888 - DNA, 15 bp, Homo sapiens
cacccaaagaactgt

SEQ ID NO: 911889 - DNA, 15 bp, Homo sapiens
acccaaagaactgta

SEQ ID NO: 911890 - DNA, 15 bp, Homo sapiens
cccaaagaactgtat

SEQ ID NO: 911891 - DNA, 15 bp, Homo sapiens
ccaaagaactgtatt

SEQ ID NO: 911892 - DNA, 15 bp, Homo sapiens
caaagaactgtattt

SEQ ID NO: 911893 - DNA, 15 bp, Homo sapiens
aaagaactgtattta

SEQ ID NO: 911894 - DNA, 15 bp, Homo sapiens
aagaactgtatttat

SEQ ID NO: 911895 - DNA, 15 bp, Homo sapiens
agaactgtatttatt

SEQ ID NO: 911896 - DNA, 15 bp, Homo sapiens
gaactgtatttattt

SEQ ID NO: 911897 - DNA, 15 bp, Homo sapiens
aactgtatttatttt

SEQ ID NO: 911898 - DNA, 15 bp, Homo sapiens
actgtatttattttg

SEQ ID NO: 911899 - DNA, 15 bp, Homo sapiens
ctgtatttattttgc

SEQ ID NO: 911900 - DNA, 15 bp, Homo sapiens
tgtatttattttgca

SEQ ID NO: 911901 - DNA, 15 bp, Homo sapiens
gtatttattttgcat

SEQ ID NO: 911902 - DNA, 15 bp, Homo sapiens
tatttattttgcatt

SEQ ID NO: 911903 - DNA, 15 bp, Homo sapiens
atttattttgcattc

SEQ ID NO: 911904 - DNA, 15 bp, Homo sapiens
tttattttgcattca

SEQ ID NO: 911905 - DNA, 15 bp, Homo sapiens
ttattttgcattcat

SEQ ID NO: 911906 - DNA, 15 bp, Homo sapiens
tattttgcattcatc

SEQ ID NO: 911907 - DNA, 15 bp, Homo sapiens
attttgcattcatcc

SEQ ID NO: 911908 - DNA, 15 bp, Homo sapiens
ttttgcattcatccc

SEQ ID NO: 911909 - DNA, 15 bp, Homo sapiens
tttgcattcatcccc

SEQ ID NO: 911910 - DNA, 15 bp, Homo sapiens
ttgcattcatcccca

SEQ ID NO: 911911 - DNA, 15 bp, Homo sapiens
tgcattcatccccat

SEQ ID NO: 911912 - DNA, 15 bp, Homo sapiens
gcattcatccccatg

SEQ ID NO: 911913 - DNA, 15 bp, Homo sapiens
cattcatccccatga

SEQ ID NO: 911914 - DNA, 15 bp, Homo sapiens
attcatccccatgaa

SEQ ID NO: 911915 - DNA, 15 bp, Homo sapiens
ttcatccccatgaat

SEQ ID NO: 911916 - DNA, 15 bp, Homo sapiens
tcatccccatgaatt

SEQ ID NO: 911917 - DNA, 15 bp, Homo sapiens
catccccatgaatta

SEQ ID NO: 911918 - DNA, 15 bp, Homo sapiens
atccccatgaattaa

SEQ ID NO: 911919 - DNA, 15 bp, Homo sapiens
tccccatgaattaat

SEQ ID NO: 911920 - DNA, 15 bp, Homo sapiens
ccccatgaattaata

SEQ ID NO: 911921 - DNA, 15 bp, Homo sapiens
cccatgaattaataa

SEQ ID NO: 911922 - DNA, 15 bp, Homo sapiens
ccatgaattaataaa

SEQ ID NO: 911923 - DNA, 15 bp, Homo sapiens
catgaattaataaaa

SEQ ID NO: 911924 - DNA, 15 bp, Homo sapiens
atgaattaataaaaa

SEQ ID NO: 911925 - DNA, 15 bp, Homo sapiens
tgaattaataaaaag

SEQ ID NO: 911926 - DNA, 15 bp, Homo sapiens
gaattaataaaaaga

SEQ ID NO: 911927 - DNA, 15 bp, Homo sapiens
aattaataaaaagaa

SEQ ID NO: 911928 - DNA, 15 bp, Homo sapiens
attaataaaaagaat

SEQ ID NO: 911929 - DNA, 15 bp, Homo sapiens
ttaataaaaagaatt

SEQ ID NO: 911930 - DNA, 15 bp, Homo sapiens
taataaaaagaattg

SEQ ID NO: 911931 - DNA, 15 bp, Homo sapiens
aataaaaagaattgg

SEQ ID NO: 911932 - DNA, 15 bp, Homo sapiens
ataaaaagaattggt

SEQ ID NO: 911933 - DNA, 15 bp, Homo sapiens
taaaaagaattggtg

SEQ ID NO: 911934 - DNA, 15 bp, Homo sapiens
aaaaagaattggtga

SEQ ID NO: 911935 - DNA, 15 bp, Homo sapiens
aaaagaattggtgat

SEQ ID NO: 911936 - DNA, 15 bp, Homo sapiens
aaagaattggtgata

SEQ ID NO: 911937 - DNA, 15 bp, Homo sapiens
aagaattggtgatac

SEQ ID NO: 911938 - DNA, 15 bp, Homo sapiens
agaattggtgataca

SEQ ID NO: 911939 - DNA, 15 bp, Homo sapiens
gaattggtgatacac

SEQ ID NO: 911940 - DNA, 15 bp, Homo sapiens
aattggtgatacaca

SEQ ID NO: 911941 - DNA, 15 bp, Homo sapiens
attggtgatacacaa

SEQ ID NO: 911942 - DNA, 15 bp, Homo sapiens
ttggtgatacacaaa

SEQ ID NO: 911943 - DNA, 15 bp, Homo sapiens
tggtgatacacaaag

SEQ ID NO: 911944 - DNA, 15 bp, Homo sapiens
ggtgatacacaaaga

SEQ ID NO: 911945 - DNA, 15 bp, Homo sapiens
gtgatacacaaagag

SEQ ID NO: 911946 - DNA, 15 bp, Homo sapiens
tgatacacaaagaga

SEQ ID NO: 911947 - DNA, 15 bp, Homo sapiens
gatacacaaagagag

SEQ ID NO: 911948 - DNA, 15 bp, Homo sapiens
atacacaaagagagg

SEQ ID NO: 911949 - DNA, 15 bp, Homo sapiens
tacacaaagagagga

SEQ ID NO: 911950 - DNA, 15 bp, Homo sapiens
acacaaagagaggag

SEQ ID NO: 911951 - DNA, 15 bp, Homo sapiens
cacaaagagaggaga

SEQ ID NO: 911952 - DNA, 15 bp, Homo sapiens
acaaagagaggagag

SEQ ID NO: 911953 - DNA, 15 bp, Homo sapiens
caaagagaggagagg

SEQ ID NO: 911954 - DNA, 15 bp, Homo sapiens
aaagagaggagaggc

SEQ ID NO: 911955 - DNA, 15 bp, Homo sapiens
aagagaggagaggct

SEQ ID NO: 911956 - DNA, 15 bp, Homo sapiens
agagaggagaggcta

SEQ ID NO: 911957 - DNA, 15 bp, Homo sapiens
gagaggagaggctac

SEQ ID NO: 911958 - DNA, 15 bp, Homo sapiens
agaggagaggctaca

SEQ ID NO: 911959 - DNA, 15 bp, Homo sapiens
gaggagaggctacaa

SEQ ID NO: 911960 - DNA, 15 bp, Homo sapiens
aggagaggctacaat

SEQ ID NO: 911961 - DNA, 15 bp, Homo sapiens
ggagaggctacaatt

SEQ ID NO: 911962 - DNA, 15 bp, Homo sapiens
gagaggctacaattt

SEQ ID NO: 911963 - DNA, 15 bp, Homo sapiens
agaggctacaattta

SEQ ID NO: 911964 - DNA, 15 bp, Homo sapiens
gaggctacaatttaa

SEQ ID NO: 911965 - DNA, 15 bp, Homo sapiens
aggctacaatttaaa

SEQ ID NO: 911966 - DNA, 15 bp, Homo sapiens
ggctacaatttaaaa

SEQ ID NO: 911967 - DNA, 15 bp, Homo sapiens
gctacaatttaaaag

SEQ ID NO: 911968 - DNA, 15 bp, Homo sapiens
ctacaatttaaaaga

SEQ ID NO: 911969 - DNA, 15 bp, Homo sapiens
tacaatttaaaagag

SEQ ID NO: 911970 - DNA, 15 bp, Homo sapiens
acaatttaaaagagc

SEQ ID NO: 911971 - DNA, 15 bp, Homo sapiens
caatttaaaagagct

SEQ ID NO: 911972 - DNA, 15 bp, Homo sapiens
aatttaaaagagctg

SEQ ID NO: 911973 - DNA, 15 bp, Homo sapiens
atttaaaagagctgt

SEQ ID NO: 911974 - DNA, 15 bp, Homo sapiens
tttaaaagagctgta

SEQ ID NO: 911975 - DNA, 15 bp, Homo sapiens
ttaaaagagctgtac

SEQ ID NO: 911976 - DNA, 15 bp, Homo sapiens
taaaagagctgtact

SEQ ID NO: 911977 - DNA, 15 bp, Homo sapiens
aaaagagctgtactg

SEQ ID NO: 911978 - DNA, 15 bp, Homo sapiens
aaagagctgtactgg

SEQ ID NO: 911979 - DNA, 15 bp, Homo sapiens
aagagctgtactggt

SEQ ID NO: 911980 - DNA, 15 bp, Homo sapiens
agagctgtactggtt

SEQ ID NO: 911981 - DNA, 15 bp, Homo sapiens
gagctgtactggttt

SEQ ID NO: 911982 - DNA, 15 bp, Homo sapiens
agctgtactggtttg

SEQ ID NO: 911983 - DNA, 15 bp, Homo sapiens
gctgtactggtttgg

SEQ ID NO: 911984 - DNA, 15 bp, Homo sapiens
ctgtactggtttgga

SEQ ID NO: 911985 - DNA, 15 bp, Homo sapiens
tgtactggtttggat

SEQ ID NO: 911986 - DNA, 15 bp, Homo sapiens
gtactggtttggatg

SEQ ID NO: 911987 - DNA, 15 bp, Homo sapiens
tactggtttggatgt

SEQ ID NO: 911988 - DNA, 15 bp, Homo sapiens
actggtttggatgtt

SEQ ID NO: 911989 - DNA, 15 bp, Homo sapiens
ctggtttggatgttt

SEQ ID NO: 911990 - DNA, 15 bp, Homo sapiens
tggtttggatgtttt

SEQ ID NO: 911991 - DNA, 15 bp, Homo sapiens
ggtttggatgttttg

SEQ ID NO: 911992 - DNA, 15 bp, Homo sapiens
gtttggatgttttgt

SEQ ID NO: 911993 - DNA, 15 bp, Homo sapiens
tttggatgttttgta

SEQ ID NO: 911994 - DNA, 15 bp, Homo sapiens
ttggatgttttgtaa

SEQ ID NO: 911995 - DNA, 15 bp, Homo sapiens
tggatgttttgtaaa

SEQ ID NO: 911996 - DNA, 15 bp, Homo sapiens
ggatgttttgtaaaa

SEQ ID NO: 911997 - DNA, 15 bp, Homo sapiens
gatgttttgtaaaat

SEQ ID NO: 911998 - DNA, 15 bp, Homo sapiens
atgttttgtaaaatg

SEQ ID NO: 911999 - DNA, 15 bp, Homo sapiens
tgttttgtaaaatga

SEQ ID NO: 912000 - DNA, 15 bp, Homo sapiens
gttttgtaaaatgat

SEQ ID NO: 912001 - DNA, 15 bp, Homo sapiens
ttttgtaaaatgatt

SEQ ID NO: 912002 - DNA, 15 bp, Homo sapiens
tttgtaaaatgatta

SEQ ID NO: 912003 - DNA, 15 bp, Homo sapiens
ttgtaaaatgattac

SEQ ID NO: 912004 - DNA, 15 bp, Homo sapiens
tgtaaaatgattaca

SEQ ID NO: 912005 - DNA, 15 bp, Homo sapiens
gtaaaatgattacat

SEQ ID NO: 912006 - DNA, 15 bp, Homo sapiens
taaaatgattacatg

SEQ ID NO: 912007 - DNA, 15 bp, Homo sapiens
aaaatgattacatga

SEQ ID NO: 912008 - DNA, 15 bp, Homo sapiens
aaatgattacatgat

SEQ ID NO: 912009 - DNA, 15 bp, Homo sapiens
aatgattacatgatg

SEQ ID NO: 912010 - DNA, 15 bp, Homo sapiens
atgattacatgatgg

SEQ ID NO: 912011 - DNA, 15 bp, Homo sapiens
tgattacatgatgga

SEQ ID NO: 912012 - DNA, 15 bp, Homo sapiens
gattacatgatggaa

SEQ ID NO: 912013 - DNA, 15 bp, Homo sapiens
attacatgatggaaa

SEQ ID NO: 912014 - DNA, 15 bp, Homo sapiens
ttacatgatggaaaa

SEQ ID NO: 912015 - DNA, 15 bp, Homo sapiens
tacatgatggaaaag

SEQ ID NO: 912016 - DNA, 15 bp, Homo sapiens
acatgatggaaaagt

SEQ ID NO: 912017 - DNA, 15 bp, Homo sapiens
catgatggaaaagtg

SEQ ID NO: 912018 - DNA, 15 bp, Homo sapiens
atgatggaaaagtgt

SEQ ID NO: 912019 - DNA, 15 bp, Homo sapiens
tgatggaaaagtgta

SEQ ID NO: 912020 - DNA, 15 bp, Homo sapiens
gatggaaaagtgtag

SEQ ID NO: 912021 - DNA, 15 bp, Homo sapiens
atggaaaagtgtaga

SEQ ID NO: 912022 - DNA, 15 bp, Homo sapiens
tggaaaagtgtagaa

SEQ ID NO: 912023 - DNA, 15 bp, Homo sapiens
ggaaaagtgtagaaa

SEQ ID NO: 912024 - DNA, 15 bp, Homo sapiens
gaaaagtgtagaaaa

SEQ ID NO: 912025 - DNA, 15 bp, Homo sapiens
aaaagtgtagaaaat

SEQ ID NO: 912026 - DNA, 15 bp, Homo sapiens
aaagtgtagaaaatg

SEQ ID NO: 912027 - DNA, 15 bp, Homo sapiens
aagtgtagaaaatgc

SEQ ID NO: 912028 - DNA, 15 bp, Homo sapiens
agtgtagaaaatgca

SEQ ID NO: 912029 - DNA, 15 bp, Homo sapiens
gtgtagaaaatgcaa

SEQ ID NO: 912030 - DNA, 15 bp, Homo sapiens
tgtagaaaatgcaat

SEQ ID NO: 912031 - DNA, 15 bp, Homo sapiens
gtagaaaatgcaata

SEQ ID NO: 912032 - DNA, 15 bp, Homo sapiens
tagaaaatgcaatat

SEQ ID NO: 912033 - DNA, 15 bp, Homo sapiens
agaaaatgcaatatt

SEQ ID NO: 912034 - DNA, 15 bp, Homo sapiens
gaaaatgcaatattt

SEQ ID NO: 912035 - DNA, 15 bp, Homo sapiens
aaaatgcaatatttg

SEQ ID NO: 912036 - DNA, 15 bp, Homo sapiens
aaatgcaatatttgc

SEQ ID NO: 912037 - DNA, 15 bp, Homo sapiens
aatgcaatatttgct

SEQ ID NO: 912038 - DNA, 15 bp, Homo sapiens
atgcaatatttgctg

SEQ ID NO: 912039 - DNA, 15 bp, Homo sapiens
tgcaatatttgctgg

SEQ ID NO: 912040 - DNA, 15 bp, Homo sapiens
gcaatatttgctggc

SEQ ID NO: 912041 - DNA, 15 bp, Homo sapiens
caatatttgctggct

SEQ ID NO: 912042 - DNA, 15 bp, Homo sapiens
aatatttgctggctt

SEQ ID NO: 912043 - DNA, 15 bp, Homo sapiens
atatttgctggcttt

SEQ ID NO: 912044 - DNA, 15 bp, Homo sapiens
tatttgctggctttg

SEQ ID NO: 912045 - DNA, 15 bp, Homo sapiens
atttgctggctttgg

SEQ ID NO: 912046 - DNA, 15 bp, Homo sapiens
tttgctggctttgga

SEQ ID NO: 912047 - DNA, 15 bp, Homo sapiens
ttgctggctttggaa

SEQ ID NO: 912048 - DNA, 15 bp, Homo sapiens
tgctggctttggaac

SEQ ID NO: 912049 - DNA, 15 bp, Homo sapiens
gctggctttggaact

SEQ ID NO: 912050 - DNA, 15 bp, Homo sapiens
ctggctttggaacta

SEQ ID NO: 912051 - DNA, 15 bp, Homo sapiens
tggctttggaactat

SEQ ID NO: 912052 - DNA, 15 bp, Homo sapiens
ggctttggaactatc

SEQ ID NO: 912053 - DNA, 15 bp, Homo sapiens
gctttggaactatct

SEQ ID NO: 912054 - DNA, 15 bp, Homo sapiens
ctttggaactatctg

SEQ ID NO: 912055 - DNA, 15 bp, Homo sapiens
tttggaactatctgt

SEQ ID NO: 912056 - DNA, 15 bp, Homo sapiens
ttggaactatctgta

SEQ ID NO: 912057 - DNA, 15 bp, Homo sapiens
tggaactatctgtat

SEQ ID NO: 912058 - DNA, 15 bp, Homo sapiens
ggaactatctgtatg

SEQ ID NO: 912059 - DNA, 15 bp, Homo sapiens
gaactatctgtatga

SEQ ID NO: 912060 - DNA, 15 bp, Homo sapiens
aactatctgtatgac

SEQ ID NO: 912061 - DNA, 15 bp, Homo sapiens
actatctgtatgact

SEQ ID NO: 912062 - DNA, 15 bp, Homo sapiens
ctatctgtatgacta

SEQ ID NO: 912063 - DNA, 15 bp, Homo sapiens
tatctgtatgactat

SEQ ID NO: 912064 - DNA, 15 bp, Homo sapiens
atctgtatgactata

SEQ ID NO: 912065 - DNA, 15 bp, Homo sapiens
tctgtatgactataa

SEQ ID NO: 912066 - DNA, 15 bp, Homo sapiens
ctgtatgactataaa

SEQ ID NO: 912067 - DNA, 15 bp, Homo sapiens
tgtatgactataaag

SEQ ID NO: 912068 - DNA, 15 bp, Homo sapiens
gtatgactataaagt

SEQ ID NO: 912069 - DNA, 15 bp, Homo sapiens
tatgactataaagtc

SEQ ID NO: 912070 - DNA, 15 bp, Homo sapiens
atgactataaagtca

SEQ ID NO: 912071 - DNA, 15 bp, Homo sapiens
tgactataaagtcag

SEQ ID NO: 912072 - DNA, 15 bp, Homo sapiens
gactataaagtcagg

SEQ ID NO: 912073 - DNA, 15 bp, Homo sapiens
actataaagtcagga

SEQ ID NO: 912074 - DNA, 15 bp, Homo sapiens
ctataaagtcaggag

SEQ ID NO: 912075 - DNA, 15 bp, Homo sapiens
tataaagtcaggagt

SEQ ID NO: 912076 - DNA, 15 bp, Homo sapiens
ataaagtcaggagtg

SEQ ID NO: 912077 - DNA, 15 bp, Homo sapiens
taaagtcaggagtgg

SEQ ID NO: 912078 - DNA, 15 bp, Homo sapiens
aaagtcaggagtgga

SEQ ID NO: 912079 - DNA, 15 bp, Homo sapiens
aagtcaggagtggag

SEQ ID NO: 912080 - DNA, 15 bp, Homo sapiens
agtcaggagtggagg

SEQ ID NO: 912081 - DNA, 15 bp, Homo sapiens
gtcaggagtggaggg

SEQ ID NO: 912082 - DNA, 15 bp, Homo sapiens
tcaggagtggaggga

SEQ ID NO: 912083 - DNA, 15 bp, Homo sapiens
caggagtggagggac

SEQ ID NO: 912084 - DNA, 15 bp, Homo sapiens
aggagtggagggaca

SEQ ID NO: 912085 - DNA, 15 bp, Homo sapiens
ggagtggagggacat

SEQ ID NO: 912086 - DNA, 15 bp, Homo sapiens
gagtggagggacatg

SEQ ID NO: 912087 - DNA, 15 bp, Homo sapiens
agtggagggacatga

SEQ ID NO: 912088 - DNA, 15 bp, Homo sapiens
gtggagggacatgag

SEQ ID NO: 912089 - DNA, 15 bp, Homo sapiens
tggagggacatgagg

SEQ ID NO: 912090 - DNA, 15 bp, Homo sapiens
ggagggacatgagga

SEQ ID NO: 912091 - DNA, 15 bp, Homo sapiens
gagggacatgaggac

SEQ ID NO: 912092 - DNA, 15 bp, Homo sapiens
agggacatgaggact

SEQ ID NO: 912093 - DNA, 15 bp, Homo sapiens
gggacatgaggactt

SEQ ID NO: 912094 - DNA, 15 bp, Homo sapiens
ggacatgaggacttg

SEQ ID NO: 912095 - DNA, 15 bp, Homo sapiens
gacatgaggacttgt

SEQ ID NO: 912096 - DNA, 15 bp, Homo sapiens
acatgaggacttgtg

SEQ ID NO: 912097 - DNA, 15 bp, Homo sapiens
catgaggacttgtga

SEQ ID NO: 912098 - DNA, 15 bp, Homo sapiens
atgaggacttgtgag

SEQ ID NO: 912099 - DNA, 15 bp, Homo sapiens
tgaggacttgtgaga

SEQ ID NO: 912100 - DNA, 15 bp, Homo sapiens
gaggacttgtgagaa

SEQ ID NO: 912101 - DNA, 15 bp, Homo sapiens
aggacttgtgagaat

SEQ ID NO: 912102 - DNA, 15 bp, Homo sapiens
ggacttgtgagaatg

SEQ ID NO: 912103 - DNA, 15 bp, Homo sapiens
gacttgtgagaatgg

SEQ ID NO: 912104 - DNA, 15 bp, Homo sapiens
acttgtgagaatggt

SEQ ID NO: 912105 - DNA, 15 bp, Homo sapiens
cttgtgagaatggtt

SEQ ID NO: 912106 - DNA, 15 bp, Homo sapiens
ttgtgagaatggttt

SEQ ID NO: 912107 - DNA, 15 bp, Homo sapiens
tgtgagaatggtttt

SEQ ID NO: 912108 - DNA, 15 bp, Homo sapiens
gtgagaatggttttt

SEQ ID NO: 912109 - DNA, 15 bp, Homo sapiens
tgagaatggtttttt

SEQ ID NO: 912110 - DNA, 15 bp, Homo sapiens
gagaatggttttttt

SEQ ID NO: 912111 - DNA, 15 bp, Homo sapiens
agaatggtttttttc

SEQ ID NO: 912112 - DNA, 15 bp, Homo sapiens
gaatggtttttttca

SEQ ID NO: 912113 - DNA, 15 bp, Homo sapiens
aatggtttttttcac

SEQ ID NO: 912114 - DNA, 15 bp, Homo sapiens
atggtttttttcaca

SEQ ID NO: 912115 - DNA, 15 bp, Homo sapiens
tggtttttttcacag

SEQ ID NO: 912116 - DNA, 15 bp, Homo sapiens
ggtttttttcacagg

SEQ ID NO: 912117 - DNA, 15 bp, Homo sapiens
gtttttttcacaggg

SEQ ID NO: 912118 - DNA, 15 bp, Homo sapiens
tttttttcacaggga

SEQ ID NO: 912119 - DNA, 15 bp, Homo sapiens
ttttttcacagggaa

SEQ ID NO: 912120 - DNA, 15 bp, Homo sapiens
tttttcacagggaag

SEQ ID NO: 912121 - DNA, 15 bp, Homo sapiens
ttttcacagggaagt

SEQ ID NO: 912122 - DNA, 15 bp, Homo sapiens
tttcacagggaagtg

SEQ ID NO: 912123 - DNA, 15 bp, Homo sapiens
ttcacagggaagtga

SEQ ID NO: 912124 - DNA, 15 bp, Homo sapiens
tcacagggaagtgat

SEQ ID NO: 912125 - DNA, 15 bp, Homo sapiens
cacagggaagtgatt

SEQ ID NO: 912126 - DNA, 15 bp, Homo sapiens
acagggaagtgattt

SEQ ID NO: 912127 - DNA, 15 bp, Homo sapiens
cagggaagtgatttt

SEQ ID NO: 912128 - DNA, 15 bp, Homo sapiens
agggaagtgattttt

SEQ ID NO: 912129 - DNA, 15 bp, Homo sapiens
gggaagtgatttttc

SEQ ID NO: 912130 - DNA, 15 bp, Homo sapiens
ggaagtgatttttct

SEQ ID NO: 912131 - DNA, 15 bp, Homo sapiens
gaagtgatttttctt

SEQ ID NO: 912132 - DNA, 15 bp, Homo sapiens
aagtgatttttcttt

SEQ ID NO: 912133 - DNA, 15 bp, Homo sapiens
agtgatttttctttt

SEQ ID NO: 912134 - DNA, 15 bp, Homo sapiens
gtgatttttcttttc

SEQ ID NO: 912135 - DNA, 15 bp, Homo sapiens
tgatttttcttttct

SEQ ID NO: 912136 - DNA, 15 bp, Homo sapiens
gatttttcttttctt

SEQ ID NO: 912137 - DNA, 15 bp, Homo sapiens
atttttcttttctta

SEQ ID NO: 912138 - DNA, 15 bp, Homo sapiens
tttttcttttcttag

SEQ ID NO: 912139 - DNA, 15 bp, Homo sapiens
ttttcttttcttagt

SEQ ID NO: 912140 - DNA, 15 bp, Homo sapiens
tttcttttcttagtt

SEQ ID NO: 912141 - DNA, 15 bp, Homo sapiens
ttcttttcttagttg

SEQ ID NO: 912142 - DNA, 15 bp, Homo sapiens
tcttttcttagttgg

SEQ ID NO: 912143 - DNA, 15 bp, Homo sapiens
cttttcttagttgga

SEQ ID NO: 912144 - DNA, 15 bp, Homo sapiens
ttttcttagttggat

SEQ ID NO: 912145 - DNA, 15 bp, Homo sapiens
tttcttagttggatt

SEQ ID NO: 912146 - DNA, 15 bp, Homo sapiens
ttcttagttggattt

SEQ ID NO: 912147 - DNA, 15 bp, Homo sapiens
tcttagttggattta

SEQ ID NO: 912148 - DNA, 15 bp, Homo sapiens
cttagttggatttag

SEQ ID NO: 912149 - DNA, 15 bp, Homo sapiens
ttagttggatttagg

SEQ ID NO: 912150 - DNA, 15 bp, Homo sapiens
tagttggatttaggg

SEQ ID NO: 912151 - DNA, 15 bp, Homo sapiens
agttggatttagggt

SEQ ID NO: 912152 - DNA, 15 bp, Homo sapiens
gttggatttagggtt

SEQ ID NO: 912153 - DNA, 15 bp, Homo sapiens
ttggatttagggtta

SEQ ID NO: 912154 - DNA, 15 bp, Homo sapiens
tggatttagggttat

SEQ ID NO: 912155 - DNA, 15 bp, Homo sapiens
ggatttagggttatt

SEQ ID NO: 912156 - DNA, 15 bp, Homo sapiens
gatttagggttattc

SEQ ID NO: 912157 - DNA, 15 bp, Homo sapiens
atttagggttattct

SEQ ID NO: 912158 - DNA, 15 bp, Homo sapiens
tttagggttattctt

SEQ ID NO: 912159 - DNA, 15 bp, Homo sapiens
ttagggttattcttg

SEQ ID NO: 912160 - DNA, 15 bp, Homo sapiens
tagggttattcttga

SEQ ID NO: 912161 - DNA, 15 bp, Homo sapiens
agggttattcttgat

SEQ ID NO: 912162 - DNA, 15 bp, Homo sapiens
gggttattcttgatt

SEQ ID NO: 912163 - DNA, 15 bp, Homo sapiens
ggttattcttgattc

SEQ ID NO: 912164 - DNA, 15 bp, Homo sapiens
gttattcttgattct

SEQ ID NO: 912165 - DNA, 15 bp, Homo sapiens
ttattcttgattcta

SEQ ID NO: 912166 - DNA, 15 bp, Homo sapiens
tattcttgattctag

SEQ ID NO: 912167 - DNA, 15 bp, Homo sapiens
attcttgattctagt

SEQ ID NO: 912168 - DNA, 15 bp, Homo sapiens
ttcttgattctagtg

SEQ ID NO: 912169 - DNA, 15 bp, Homo sapiens
tcttgattctagtgc

SEQ ID NO: 912170 - DNA, 15 bp, Homo sapiens
cttgattctagtgca

SEQ ID NO: 912171 - DNA, 15 bp, Homo sapiens
ttgattctagtgcat

SEQ ID NO: 912172 - DNA, 15 bp, Homo sapiens
tgattctagtgcata

SEQ ID NO: 912173 - DNA, 15 bp, Homo sapiens
gattctagtgcatat

SEQ ID NO: 912174 - DNA, 15 bp, Homo sapiens
attctagtgcatatt

SEQ ID NO: 912175 - DNA, 15 bp, Homo sapiens
ttctagtgcatattt

SEQ ID NO: 912176 - DNA, 15 bp, Homo sapiens
tctagtgcatatttt

SEQ ID NO: 912177 - DNA, 15 bp, Homo sapiens
ctagtgcatattttc

SEQ ID NO: 912178 - DNA, 15 bp, Homo sapiens
tagtgcatattttct

SEQ ID NO: 912179 - DNA, 15 bp, Homo sapiens
agtgcatattttctc

SEQ ID NO: 912180 - DNA, 15 bp, Homo sapiens
gtgcatattttctca

SEQ ID NO: 912181 - DNA, 15 bp, Homo sapiens
tgcatattttctcat

SEQ ID NO: 912182 - DNA, 15 bp, Homo sapiens
gcatattttctcata

SEQ ID NO: 912183 - DNA, 15 bp, Homo sapiens
catattttctcatat

SEQ ID NO: 912184 - DNA, 15 bp, Homo sapiens
atattttctcatatt

SEQ ID NO: 912185 - DNA, 15 bp, Homo sapiens
tattttctcatattt

SEQ ID NO: 912186 - DNA, 15 bp, Homo sapiens
attttctcatatttt

SEQ ID NO: 912187 - DNA, 15 bp, Homo sapiens
ttttctcatatttta

SEQ ID NO: 912188 - DNA, 15 bp, Homo sapiens
tttctcatattttaa

SEQ ID NO: 912189 - DNA, 15 bp, Homo sapiens
ttctcatattttaaa

SEQ ID NO: 912190 - DNA, 15 bp, Homo sapiens
tctcatattttaaaa

SEQ ID NO: 912191 - DNA, 15 bp, Homo sapiens
ctcatattttaaaac

SEQ ID NO: 912192 - DNA, 15 bp, Homo sapiens
tcatattttaaaaca

SEQ ID NO: 912193 - DNA, 15 bp, Homo sapiens
catattttaaaacat

SEQ ID NO: 912194 - DNA, 15 bp, Homo sapiens
atattttaaaacatt

SEQ ID NO: 912195 - DNA, 15 bp, Homo sapiens
tattttaaaacattg

SEQ ID NO: 912196 - DNA, 15 bp, Homo sapiens
attttaaaacattgc

SEQ ID NO: 912197 - DNA, 15 bp, Homo sapiens
ttttaaaacattgcg

SEQ ID NO: 912198 - DNA, 15 bp, Homo sapiens
tttaaaacattgcgt

SEQ ID NO: 912199 - DNA, 15 bp, Homo sapiens
ttaaaacattgcgtg

SEQ ID NO: 912200 - DNA, 15 bp, Homo sapiens
taaaacattgcgtga

SEQ ID NO: 912201 - DNA, 15 bp, Homo sapiens
aaaacattgcgtgat

SEQ ID NO: 912202 - DNA, 15 bp, Homo sapiens
aaacattgcgtgatg

SEQ ID NO: 912203 - DNA, 15 bp, Homo sapiens
aacattgcgtgatgt

SEQ ID NO: 912204 - DNA, 15 bp, Homo sapiens
acattgcgtgatgtt

SEQ ID NO: 912205 - DNA, 15 bp, Homo sapiens
cattgcgtgatgtta

SEQ ID NO: 912206 - DNA, 15 bp, Homo sapiens
attgcgtgatgttaa

SEQ ID NO: 912207 - DNA, 15 bp, Homo sapiens
ttgcgtgatgttaat

SEQ ID NO: 912208 - DNA, 15 bp, Homo sapiens
tgcgtgatgttaatt

SEQ ID NO: 912209 - DNA, 15 bp, Homo sapiens
gcgtgatgttaattc

SEQ ID NO: 912210 - DNA, 15 bp, Homo sapiens
cgtgatgttaattca

SEQ ID NO: 912211 - DNA, 15 bp, Homo sapiens
gtgatgttaattcac

SEQ ID NO: 912212 - DNA, 15 bp, Homo sapiens
tgatgttaattcaca

SEQ ID NO: 912213 - DNA, 15 bp, Homo sapiens
gatgttaattcacaa

SEQ ID NO: 912214 - DNA, 15 bp, Homo sapiens
atgttaattcacaag

SEQ ID NO: 912215 - DNA, 15 bp, Homo sapiens
tgttaattcacaagt

SEQ ID NO: 912216 - DNA, 15 bp, Homo sapiens
gttaattcacaagtc

SEQ ID NO: 912217 - DNA, 15 bp, Homo sapiens
ttaattcacaagtct

SEQ ID NO: 912218 - DNA, 15 bp, Homo sapiens
taattcacaagtctc

SEQ ID NO: 912219 - DNA, 15 bp, Homo sapiens
aattcacaagtctca

SEQ ID NO: 912220 - DNA, 15 bp, Homo sapiens
attcacaagtctcag

SEQ ID NO: 912221 - DNA, 15 bp, Homo sapiens
ttcacaagtctcaga

SEQ ID NO: 912222 - DNA, 15 bp, Homo sapiens
tcacaagtctcagat

SEQ ID NO: 912223 - DNA, 15 bp, Homo sapiens
cacaagtctcagatt

SEQ ID NO: 912224 - DNA, 15 bp, Homo sapiens
acaagtctcagattt

SEQ ID NO: 912225 - DNA, 15 bp, Homo sapiens
caagtctcagatttc

SEQ ID NO: 912226 - DNA, 15 bp, Homo sapiens
aagtctcagatttca

SEQ ID NO: 912227 - DNA, 15 bp, Homo sapiens
agtctcagatttcaa

SEQ ID NO: 912228 - DNA, 15 bp, Homo sapiens
gtctcagatttcaac

SEQ ID NO: 912229 - DNA, 15 bp, Homo sapiens
tctcagatttcaact

SEQ ID NO: 912230 - DNA, 15 bp, Homo sapiens
ctcagatttcaactt

SEQ ID NO: 912231 - DNA, 15 bp, Homo sapiens
tcagatttcaacttt

SEQ ID NO: 912232 - DNA, 15 bp, Homo sapiens
cagatttcaacttta

SEQ ID NO: 912233 - DNA, 15 bp, Homo sapiens
agatttcaactttaa

SEQ ID NO: 912234 - DNA, 15 bp, Homo sapiens
gatttcaactttaat

SEQ ID NO: 912235 - DNA, 15 bp, Homo sapiens
atttcaactttaata

SEQ ID NO: 912236 - DNA, 15 bp, Homo sapiens
tttcaactttaatat

SEQ ID NO: 912237 - DNA, 15 bp, Homo sapiens
ttcaactttaatata

SEQ ID NO: 912238 - DNA, 15 bp, Homo sapiens
tcaactttaatataa

SEQ ID NO: 912239 - DNA, 15 bp, Homo sapiens
caactttaatataat

SEQ ID NO: 912240 - DNA, 15 bp, Homo sapiens
aactttaatataata

SEQ ID NO: 912241 - DNA, 15 bp, Homo sapiens
actttaatataatac

SEQ ID NO: 912242 - DNA, 15 bp, Homo sapiens
ctttaatataataca

SEQ ID NO: 912243 - DNA, 15 bp, Homo sapiens
tttaatataatacat

SEQ ID NO: 912244 - DNA, 15 bp, Homo sapiens
ttaatataatacatt

SEQ ID NO: 912245 - DNA, 15 bp, Homo sapiens
taatataatacattg

SEQ ID NO: 912246 - DNA, 15 bp, Homo sapiens
aatataatacattgg

SEQ ID NO: 912247 - DNA, 15 bp, Homo sapiens
atataatacattgga

SEQ ID NO: 912248 - DNA, 15 bp, Homo sapiens
tataatacattggaa

SEQ ID NO: 912249 - DNA, 15 bp, Homo sapiens
ataatacattggaat

SEQ ID NO: 912250 - DNA, 15 bp, Homo sapiens
taatacattggaatc

SEQ ID NO: 912251 - DNA, 15 bp, Homo sapiens
aatacattggaatca

SEQ ID NO: 912252 - DNA, 15 bp, Homo sapiens
atacattggaatcat

SEQ ID NO: 912253 - DNA, 15 bp, Homo sapiens
tacattggaatcatg

SEQ ID NO: 912254 - DNA, 15 bp, Homo sapiens
acattggaatcatga

SEQ ID NO: 912255 - DNA, 15 bp, Homo sapiens
cattggaatcatgat

SEQ ID NO: 912256 - DNA, 15 bp, Homo sapiens
attggaatcatgatt

SEQ ID NO: 912257 - DNA, 15 bp, Homo sapiens
ttggaatcatgattt

SEQ ID NO: 912258 - DNA, 15 bp, Homo sapiens
tggaatcatgatttt

SEQ ID NO: 912259 - DNA, 15 bp, Homo sapiens
ggaatcatgattttt

SEQ ID NO: 912260 - DNA, 15 bp, Homo sapiens
gaatcatgatttttt

SEQ ID NO: 912261 - DNA, 15 bp, Homo sapiens
aatcatgattttttc

SEQ ID NO: 912262 - DNA, 15 bp, Homo sapiens
atcatgattttttct

SEQ ID NO: 912263 - DNA, 15 bp, Homo sapiens
tcatgattttttctc

SEQ ID NO: 912264 - DNA, 15 bp, Homo sapiens
catgattttttctca

SEQ ID NO: 912265 - DNA, 15 bp, Homo sapiens
atgattttttctcag

SEQ ID NO: 912266 - DNA, 15 bp, Homo sapiens
tgattttttctcagc

SEQ ID NO: 912267 - DNA, 15 bp, Homo sapiens
gattttttctcagcc

SEQ ID NO: 912268 - DNA, 15 bp, Homo sapiens
attttttctcagcct

SEQ ID NO: 912269 - DNA, 15 bp, Homo sapiens
ttttttctcagcctt

SEQ ID NO: 912270 - DNA, 15 bp, Homo sapiens
tttttctcagccttt

SEQ ID NO: 912271 - DNA, 15 bp, Homo sapiens
ttttctcagcctttc

SEQ ID NO: 912272 - DNA, 15 bp, Homo sapiens
tttctcagcctttca

SEQ ID NO: 912273 - DNA, 15 bp, Homo sapiens
ttctcagcctttcaa

SEQ ID NO: 912274 - DNA, 15 bp, Homo sapiens
tctcagcctttcaaa

SEQ ID NO: 912275 - DNA, 15 bp, Homo sapiens
ctcagcctttcaaat

SEQ ID NO: 912276 - DNA, 15 bp, Homo sapiens
tcagcctttcaaatt

SEQ ID NO: 912277 - DNA, 15 bp, Homo sapiens
cagcctttcaaattc

SEQ ID NO: 912278 - DNA, 15 bp, Homo sapiens
agcctttcaaattct

SEQ ID NO: 912279 - DNA, 15 bp, Homo sapiens
gcctttcaaattctc

SEQ ID NO: 912280 - DNA, 15 bp, Homo sapiens
cctttcaaattctca

SEQ ID NO: 912281 - DNA, 15 bp, Homo sapiens
ctttcaaattctcaa

SEQ ID NO: 912282 - DNA, 15 bp, Homo sapiens
tttcaaattctcaag

SEQ ID NO: 912283 - DNA, 15 bp, Homo sapiens
ttcaaattctcaagt

SEQ ID NO: 912284 - DNA, 15 bp, Homo sapiens
tcaaattctcaagta

SEQ ID NO: 912285 - DNA, 15 bp, Homo sapiens
caaattctcaagtat

SEQ ID NO: 912286 - DNA, 15 bp, Homo sapiens
aaattctcaagtatt

SEQ ID NO: 912287 - DNA, 15 bp, Homo sapiens
aattctcaagtattt

SEQ ID NO: 912288 - DNA, 15 bp, Homo sapiens
attctcaagtatttt

SEQ ID NO: 912289 - DNA, 15 bp, Homo sapiens
ttctcaagtatttta

SEQ ID NO: 912290 - DNA, 15 bp, Homo sapiens
tctcaagtattttac

SEQ ID NO: 912291 - DNA, 15 bp, Homo sapiens
ctcaagtattttact

SEQ ID NO: 912292 - DNA, 15 bp, Homo sapiens
tcaagtattttacta

SEQ ID NO: 912293 - DNA, 15 bp, Homo sapiens
caagtattttactat

SEQ ID NO: 912294 - DNA, 15 bp, Homo sapiens
aagtattttactatg

SEQ ID NO: 912295 - DNA, 15 bp, Homo sapiens
agtattttactatga

SEQ ID NO: 912296 - DNA, 15 bp, Homo sapiens
gtattttactatgag

SEQ ID NO: 912297 - DNA, 15 bp, Homo sapiens
tattttactatgaga

SEQ ID NO: 912298 - DNA, 15 bp, Homo sapiens
attttactatgagaa

SEQ ID NO: 912299 - DNA, 15 bp, Homo sapiens
ttttactatgagaat

SEQ ID NO: 912300 - DNA, 15 bp, Homo sapiens
tttactatgagaatt

SEQ ID NO: 912301 - DNA, 15 bp, Homo sapiens
ttactatgagaattt

SEQ ID NO: 912302 - DNA, 15 bp, Homo sapiens
tactatgagaatttt

SEQ ID NO: 912303 - DNA, 15 bp, Homo sapiens
actatgagaattttc

SEQ ID NO: 912304 - DNA, 15 bp, Homo sapiens
ctatgagaattttct

SEQ ID NO: 912305 - DNA, 15 bp, Homo sapiens
tatgagaattttctt

SEQ ID NO: 912306 - DNA, 15 bp, Homo sapiens
atgagaattttcttg

SEQ ID NO: 912307 - DNA, 15 bp, Homo sapiens
tgagaattttcttgt

SEQ ID NO: 912308 - DNA, 15 bp, Homo sapiens
gagaattttcttgta

SEQ ID NO: 912309 - DNA, 15 bp, Homo sapiens
agaattttcttgtat

SEQ ID NO: 912310 - DNA, 15 bp, Homo sapiens
gaattttcttgtatt

SEQ ID NO: 912311 - DNA, 15 bp, Homo sapiens
aattttcttgtattt

SEQ ID NO: 912312 - DNA, 15 bp, Homo sapiens
attttcttgtatttg

SEQ ID NO: 912313 - DNA, 15 bp, Homo sapiens
ttttcttgtatttga

SEQ ID NO: 912314 - DNA, 15 bp, Homo sapiens
tttcttgtatttgaa

SEQ ID NO: 912315 - DNA, 15 bp, Homo sapiens
ttcttgtatttgaac

SEQ ID NO: 912316 - DNA, 15 bp, Homo sapiens
tcttgtatttgaaca

SEQ ID NO: 912317 - DNA, 15 bp, Homo sapiens
cttgtatttgaacaa

SEQ ID NO: 912318 - DNA, 15 bp, Homo sapiens
ttgtatttgaacaat

SEQ ID NO: 912319 - DNA, 15 bp, Homo sapiens
tgtatttgaacaatt

SEQ ID NO: 912320 - DNA, 15 bp, Homo sapiens
gtatttgaacaattt

SEQ ID NO: 912321 - DNA, 15 bp, Homo sapiens
tatttgaacaatttt

SEQ ID NO: 912322 - DNA, 15 bp, Homo sapiens
atttgaacaattttt

SEQ ID NO: 912323 - DNA, 15 bp, Homo sapiens
tttgaacaatttttt

SEQ ID NO: 912324 - DNA, 15 bp, Homo sapiens
ttgaacaatttttta

SEQ ID NO: 912325 - DNA, 15 bp, Homo sapiens
tgaacaattttttaa

SEQ ID NO: 912326 - DNA, 15 bp, Homo sapiens
gaacaattttttaaa

SEQ ID NO: 912327 - DNA, 15 bp, Homo sapiens
aacaattttttaaaa

SEQ ID NO: 912328 - DNA, 15 bp, Homo sapiens
acaattttttaaaag

SEQ ID NO: 912329 - DNA, 15 bp, Homo sapiens
caattttttaaaaga

SEQ ID NO: 912330 - DNA, 15 bp, Homo sapiens
aattttttaaaagaa

SEQ ID NO: 912331 - DNA, 15 bp, Homo sapiens
attttttaaaagaag

SEQ ID NO: 912332 - DNA, 15 bp, Homo sapiens
ttttttaaaagaagc

SEQ ID NO: 912333 - DNA, 15 bp, Homo sapiens
tttttaaaagaagct

SEQ ID NO: 912334 - DNA, 15 bp, Homo sapiens
ttttaaaagaagctc

SEQ ID NO: 912335 - DNA, 15 bp, Homo sapiens
tttaaaagaagctct

SEQ ID NO: 912336 - DNA, 15 bp, Homo sapiens
ttaaaagaagctctg

SEQ ID NO: 912337 - DNA, 15 bp, Homo sapiens
taaaagaagctctgt

SEQ ID NO: 912338 - DNA, 15 bp, Homo sapiens
aaaagaagctctgtc

SEQ ID NO: 912339 - DNA, 15 bp, Homo sapiens
aaagaagctctgtct

SEQ ID NO: 912340 - DNA, 15 bp, Homo sapiens
aagaagctctgtcta

SEQ ID NO: 912341 - DNA, 15 bp, Homo sapiens
agaagctctgtctag

SEQ ID NO: 912342 - DNA, 15 bp, Homo sapiens
gaagctctgtctaga

SEQ ID NO: 912343 - DNA, 15 bp, Homo sapiens
aagctctgtctagac

SEQ ID NO: 912344 - DNA, 15 bp, Homo sapiens
agctctgtctagaca

SEQ ID NO: 912345 - DNA, 15 bp, Homo sapiens
gctctgtctagacac

SEQ ID NO: 912346 - DNA, 15 bp, Homo sapiens
ctctgtctagacacg

SEQ ID NO: 912347 - DNA, 15 bp, Homo sapiens
tctgtctagacacgc

SEQ ID NO: 912348 - DNA, 15 bp, Homo sapiens
ctgtctagacacgca

SEQ ID NO: 912349 - DNA, 15 bp, Homo sapiens
tgtctagacacgcaa

SEQ ID NO: 912350 - DNA, 15 bp, Homo sapiens
gtctagacacgcaaa

SEQ ID NO: 912351 - DNA, 15 bp, Homo sapiens
tctagacacgcaaac

SEQ ID NO: 912352 - DNA, 15 bp, Homo sapiens
ctagacacgcaaact

SEQ ID NO: 912353 - DNA, 15 bp, Homo sapiens
tagacacgcaaactg

SEQ ID NO: 912354 - DNA, 15 bp, Homo sapiens
agacacgcaaactga

SEQ ID NO: 912355 - DNA, 15 bp, Homo sapiens
gacacgcaaactgag

SEQ ID NO: 912356 - DNA, 15 bp, Homo sapiens
acacgcaaactgagt

SEQ ID NO: 912357 - DNA, 15 bp, Homo sapiens
cacgcaaactgagtt

SEQ ID NO: 912358 - DNA, 15 bp, Homo sapiens
acgcaaactgagttg

SEQ ID NO: 912359 - DNA, 15 bp, Homo sapiens
cgcaaactgagttgg

SEQ ID NO: 912360 - DNA, 15 bp, Homo sapiens
gcaaactgagttgga

SEQ ID NO: 912361 - DNA, 15 bp, Homo sapiens
caaactgagttggaa

SEQ ID NO: 912362 - DNA, 15 bp, Homo sapiens
aaactgagttggaaa

SEQ ID NO: 912363 - DNA, 15 bp, Homo sapiens
aactgagttggaaaa

SEQ ID NO: 912364 - DNA, 15 bp, Homo sapiens
actgagttggaaaat

SEQ ID NO: 912365 - DNA, 15 bp, Homo sapiens
ctgagttggaaaatg

SEQ ID NO: 912366 - DNA, 15 bp, Homo sapiens
tgagttggaaaatgg

SEQ ID NO: 912367 - DNA, 15 bp, Homo sapiens
gagttggaaaatgga

SEQ ID NO: 912368 - DNA, 15 bp, Homo sapiens
agttggaaaatggat

SEQ ID NO: 912369 - DNA, 15 bp, Homo sapiens
gttggaaaatggata

SEQ ID NO: 912370 - DNA, 15 bp, Homo sapiens
ttggaaaatggatat

SEQ ID NO: 912371 - DNA, 15 bp, Homo sapiens
tggaaaatggatata

SEQ ID NO: 912372 - DNA, 15 bp, Homo sapiens
ggaaaatggatataa

SEQ ID NO: 912373 - DNA, 15 bp, Homo sapiens
gaaaatggatataag

SEQ ID NO: 912374 - DNA, 15 bp, Homo sapiens
aaaatggatataagc

SEQ ID NO: 912375 - DNA, 15 bp, Homo sapiens
aaatggatataagca

SEQ ID NO: 912376 - DNA, 15 bp, Homo sapiens
aatggatataagcat

SEQ ID NO: 912377 - DNA, 15 bp, Homo sapiens
atggatataagcatc

SEQ ID NO: 912378 - DNA, 15 bp, Homo sapiens
tggatataagcatct

SEQ ID NO: 912379 - DNA, 15 bp, Homo sapiens
ggatataagcatcta

SEQ ID NO: 912380 - DNA, 15 bp, Homo sapiens
gatataagcatctag

SEQ ID NO: 912381 - DNA, 15 bp, Homo sapiens
atataagcatctaga

SEQ ID NO: 912382 - DNA, 15 bp, Homo sapiens
tataagcatctagat

SEQ ID NO: 912383 - DNA, 15 bp, Homo sapiens
ataagcatctagatg

SEQ ID NO: 912384 - DNA, 15 bp, Homo sapiens
taagcatctagatga

SEQ ID NO: 912385 - DNA, 15 bp, Homo sapiens
aagcatctagatgac

SEQ ID NO: 912386 - DNA, 15 bp, Homo sapiens
agcatctagatgact

SEQ ID NO: 912387 - DNA, 15 bp, Homo sapiens
gcatctagatgactc

SEQ ID NO: 912388 - DNA, 15 bp, Homo sapiens
catctagatgactct

SEQ ID NO: 912389 - DNA, 15 bp, Homo sapiens
atctagatgactcta

SEQ ID NO: 912390 - DNA, 15 bp, Homo sapiens
tctagatgactctat

SEQ ID NO: 912391 - DNA, 15 bp, Homo sapiens
ctagatgactctata

SEQ ID NO: 912392 - DNA, 15 bp, Homo sapiens
tagatgactctataa

SEQ ID NO: 912393 - DNA, 15 bp, Homo sapiens
agatgactctataaa

SEQ ID NO: 912394 - DNA, 15 bp, Homo sapiens
gatgactctataaaa

SEQ ID NO: 912395 - DNA, 15 bp, Homo sapiens
atgactctataaaaa

SEQ ID NO: 912396 - DNA, 15 bp, Homo sapiens
tgactctataaaaaa

SEQ ID NO: 912397 - DNA, 15 bp, Homo sapiens
gactctataaaaaaa

SEQ ID NO: 912398 - DNA, 15 bp, Homo sapiens
actctataaaaaaag

SEQ ID NO: 912399 - DNA, 15 bp, Homo sapiens
ctctataaaaaaagt

SEQ ID NO: 912400 - DNA, 15 bp, Homo sapiens
tctataaaaaaagta

SEQ ID NO: 912401 - DNA, 15 bp, Homo sapiens
ctataaaaaaagtat

SEQ ID NO: 912402 - DNA, 15 bp, Homo sapiens
tataaaaaaagtatc

SEQ ID NO: 912403 - DNA, 15 bp, Homo sapiens
ataaaaaaagtatct

SEQ ID NO: 912404 - DNA, 15 bp, Homo sapiens
taaaaaaagtatctt

SEQ ID NO: 912405 - DNA, 15 bp, Homo sapiens
aaaaaaagtatcttc

SEQ ID NO: 912406 - DNA, 15 bp, Homo sapiens
aaaaaagtatcttca

SEQ ID NO: 912407 - DNA, 15 bp, Homo sapiens
aaaaagtatcttcat

SEQ ID NO: 912408 - DNA, 15 bp, Homo sapiens
aaaagtatcttcatt

SEQ ID NO: 912409 - DNA, 15 bp, Homo sapiens
aaagtatcttcattg

SEQ ID NO: 912410 - DNA, 15 bp, Homo sapiens
aagtatcttcattgt

SEQ ID NO: 912411 - DNA, 15 bp, Homo sapiens
agtatcttcattgtt

SEQ ID NO: 912412 - DNA, 15 bp, Homo sapiens
gtatcttcattgttt

SEQ ID NO: 912413 - DNA, 15 bp, Homo sapiens
tatcttcattgtttt

SEQ ID NO: 912414 - DNA, 15 bp, Homo sapiens
atcttcattgtttta

SEQ ID NO: 912415 - DNA, 15 bp, Homo sapiens
tcttcattgttttag

SEQ ID NO: 912416 - DNA, 15 bp, Homo sapiens
cttcattgttttagg

SEQ ID NO: 912417 - DNA, 15 bp, Homo sapiens
ttcattgttttaggc

SEQ ID NO: 912418 - DNA, 15 bp, Homo sapiens
tcattgttttaggca

SEQ ID NO: 912419 - DNA, 15 bp, Homo sapiens
cattgttttaggcaa

SEQ ID NO: 912420 - DNA, 15 bp, Homo sapiens
attgttttaggcaac

SEQ ID NO: 912421 - DNA, 15 bp, Homo sapiens
ttgttttaggcaaca

SEQ ID NO: 912422 - DNA, 15 bp, Homo sapiens
tgttttaggcaacaa

SEQ ID NO: 912423 - DNA, 15 bp, Homo sapiens
gttttaggcaacaag

SEQ ID NO: 912424 - DNA, 15 bp, Homo sapiens
ttttaggcaacaagt

SEQ ID NO: 912425 - DNA, 15 bp, Homo sapiens
tttaggcaacaagtg

SEQ ID NO: 912426 - DNA, 15 bp, Homo sapiens
ttaggcaacaagtgt

SEQ ID NO: 912427 - DNA, 15 bp, Homo sapiens
taggcaacaagtgtc

SEQ ID NO: 912428 - DNA, 15 bp, Homo sapiens
aggcaacaagtgtct

SEQ ID NO: 912429 - DNA, 15 bp, Homo sapiens
ggcaacaagtgtcta

SEQ ID NO: 912430 - DNA, 15 bp, Homo sapiens
gcaacaagtgtctag

SEQ ID NO: 912431 - DNA, 15 bp, Homo sapiens
caacaagtgtctagt

SEQ ID NO: 912432 - DNA, 15 bp, Homo sapiens
aacaagtgtctagtc

SEQ ID NO: 912433 - DNA, 15 bp, Homo sapiens
acaagtgtctagtct

SEQ ID NO: 912434 - DNA, 15 bp, Homo sapiens
caagtgtctagtctt

SEQ ID NO: 912435 - DNA, 15 bp, Homo sapiens
aagtgtctagtcttc

SEQ ID NO: 912436 - DNA, 15 bp, Homo sapiens
agtgtctagtcttca

SEQ ID NO: 912437 - DNA, 15 bp, Homo sapiens
gtgtctagtcttcac

SEQ ID NO: 912438 - DNA, 15 bp, Homo sapiens
tgtctagtcttcact

SEQ ID NO: 912439 - DNA, 15 bp, Homo sapiens
gtctagtcttcactg

SEQ ID NO: 912440 - DNA, 15 bp, Homo sapiens
tctagtcttcactgg

SEQ ID NO: 912441 - DNA, 15 bp, Homo sapiens
ctagtcttcactggt

SEQ ID NO: 912442 - DNA, 15 bp, Homo sapiens
tagtcttcactggta

SEQ ID NO: 912443 - DNA, 15 bp, Homo sapiens
agtcttcactggtat

SEQ ID NO: 912444 - DNA, 15 bp, Homo sapiens
gtcttcactggtatt

SEQ ID NO: 912445 - DNA, 15 bp, Homo sapiens
tcttcactggtatta

SEQ ID NO: 912446 - DNA, 15 bp, Homo sapiens
cttcactggtattaa

SEQ ID NO: 912447 - DNA, 15 bp, Homo sapiens
ttcactggtattaat

SEQ ID NO: 912448 - DNA, 15 bp, Homo sapiens
tcactggtattaatt

SEQ ID NO: 912449 - DNA, 15 bp, Homo sapiens
cactggtattaatta

SEQ ID NO: 912450 - DNA, 15 bp, Homo sapiens
actggtattaattat

SEQ ID NO: 912451 - DNA, 15 bp, Homo sapiens
ctggtattaattatc

SEQ ID NO: 912452 - DNA, 15 bp, Homo sapiens
tggtattaattatcc

SEQ ID NO: 912453 - DNA, 15 bp, Homo sapiens
ggtattaattatcca

SEQ ID NO: 912454 - DNA, 15 bp, Homo sapiens
gtattaattatccaa

SEQ ID NO: 912455 - DNA, 15 bp, Homo sapiens
tattaattatccaaa

SEQ ID NO: 912456 - DNA, 15 bp, Homo sapiens
attaattatccaaat

SEQ ID NO: 912457 - DNA, 15 bp, Homo sapiens
ttaattatccaaata

SEQ ID NO: 912458 - DNA, 15 bp, Homo sapiens
taattatccaaatat

SEQ ID NO: 912459 - DNA, 15 bp, Homo sapiens
aattatccaaatatg

SEQ ID NO: 912460 - DNA, 15 bp, Homo sapiens
attatccaaatatgt

SEQ ID NO: 912461 - DNA, 15 bp, Homo sapiens
ttatccaaatatgta

SEQ ID NO: 912462 - DNA, 15 bp, Homo sapiens
tatccaaatatgtat

SEQ ID NO: 912463 - DNA, 15 bp, Homo sapiens
atccaaatatgtatt

SEQ ID NO: 912464 - DNA, 15 bp, Homo sapiens
tccaaatatgtattt

SEQ ID NO: 912465 - DNA, 15 bp, Homo sapiens
ccaaatatgtatttt

SEQ ID NO: 912466 - DNA, 15 bp, Homo sapiens
caaatatgtatttta

SEQ ID NO: 912467 - DNA, 15 bp, Homo sapiens
aaatatgtattttat

SEQ ID NO: 912468 - DNA, 15 bp, Homo sapiens
aatatgtattttata

SEQ ID NO: 912469 - DNA, 15 bp, Homo sapiens
atatgtattttatat

SEQ ID NO: 912470 - DNA, 15 bp, Homo sapiens
tatgtattttatatc

SEQ ID NO: 912471 - DNA, 15 bp, Homo sapiens
atgtattttatatca

SEQ ID NO: 912472 - DNA, 15 bp, Homo sapiens
tgtattttatatcac

SEQ ID NO: 912473 - DNA, 15 bp, Homo sapiens
gtattttatatcact

SEQ ID NO: 912474 - DNA, 15 bp, Homo sapiens
tattttatatcacta

SEQ ID NO: 912475 - DNA, 15 bp, Homo sapiens
attttatatcactaa

SEQ ID NO: 912476 - DNA, 15 bp, Homo sapiens
ttttatatcactaat

SEQ ID NO: 912477 - DNA, 15 bp, Homo sapiens
tttatatcactaatt

SEQ ID NO: 912478 - DNA, 15 bp, Homo sapiens
ttatatcactaatta

SEQ ID NO: 912479 - DNA, 15 bp, Homo sapiens
tatatcactaattaa

SEQ ID NO: 912480 - DNA, 15 bp, Homo sapiens
atatcactaattaac

SEQ ID NO: 912481 - DNA, 15 bp, Homo sapiens
tatcactaattaact

SEQ ID NO: 912482 - DNA, 15 bp, Homo sapiens
atcactaattaactt

SEQ ID NO: 912483 - DNA, 15 bp, Homo sapiens
tcactaattaacttt

SEQ ID NO: 912484 - DNA, 15 bp, Homo sapiens
cactaattaactttt

SEQ ID NO: 912485 - DNA, 15 bp, Homo sapiens
actaattaacttttc

SEQ ID NO: 912486 - DNA, 15 bp, Homo sapiens
ctaattaacttttca

SEQ ID NO: 912487 - DNA, 15 bp, Homo sapiens
taattaacttttcac

SEQ ID NO: 912488 - DNA, 15 bp, Homo sapiens
aattaacttttcaca

SEQ ID NO: 912489 - DNA, 15 bp, Homo sapiens
attaacttttcacac

SEQ ID NO: 912490 - DNA, 15 bp, Homo sapiens
ttaacttttcacacc

SEQ ID NO: 912491 - DNA, 15 bp, Homo sapiens
taacttttcacacct

SEQ ID NO: 912492 - DNA, 15 bp, Homo sapiens
aacttttcacaccta

SEQ ID NO: 912493 - DNA, 15 bp, Homo sapiens
acttttcacacctag

SEQ ID NO: 912494 - DNA, 15 bp, Homo sapiens
cttttcacacctaga

SEQ ID NO: 912495 - DNA, 15 bp, Homo sapiens
ttttcacacctagaa

SEQ ID NO: 912496 - DNA, 15 bp, Homo sapiens
tttcacacctagaaa

SEQ ID NO: 912497 - DNA, 15 bp, Homo sapiens
ttcacacctagaaat

SEQ ID NO: 912498 - DNA, 15 bp, Homo sapiens
tcacacctagaaatt

SEQ ID NO: 912499 - DNA, 15 bp, Homo sapiens
cacacctagaaattg

SEQ ID NO: 912500 - DNA, 15 bp, Homo sapiens
acacctagaaattgt

SEQ ID NO: 912501 - DNA, 15 bp, Homo sapiens
cacctagaaattgtc

SEQ ID NO: 912502 - DNA, 15 bp, Homo sapiens
acctagaaattgtct

SEQ ID NO: 912503 - DNA, 15 bp, Homo sapiens
cctagaaattgtctt

SEQ ID NO: 912504 - DNA, 15 bp, Homo sapiens
ctagaaattgtctta

SEQ ID NO: 912505 - DNA, 15 bp, Homo sapiens
tagaaattgtcttac

SEQ ID NO: 912506 - DNA, 15 bp, Homo sapiens
agaaattgtcttaca

SEQ ID NO: 912507 - DNA, 15 bp, Homo sapiens
gaaattgtcttacaa

SEQ ID NO: 912508 - DNA, 15 bp, Homo sapiens
aaattgtcttacaaa

SEQ ID NO: 912509 - DNA, 15 bp, Homo sapiens
aattgtcttacaaaa

SEQ ID NO: 912510 - DNA, 15 bp, Homo sapiens
attgtcttacaaaaa

SEQ ID NO: 912511 - DNA, 15 bp, Homo sapiens
ttgtcttacaaaaac

SEQ ID NO: 912512 - DNA, 15 bp, Homo sapiens
tgtcttacaaaaaca

SEQ ID NO: 912513 - DNA, 15 bp, Homo sapiens
gtcttacaaaaacat

SEQ ID NO: 912514 - DNA, 15 bp, Homo sapiens
tcttacaaaaacatt

SEQ ID NO: 912515 - DNA, 15 bp, Homo sapiens
cttacaaaaacattt

SEQ ID NO: 912516 - DNA, 15 bp, Homo sapiens
ttacaaaaacattta

SEQ ID NO: 912517 - DNA, 15 bp, Homo sapiens
tacaaaaacatttaa

SEQ ID NO: 912518 - DNA, 15 bp, Homo sapiens
acaaaaacatttaac

SEQ ID NO: 912519 - DNA, 15 bp, Homo sapiens
caaaaacatttaaca

SEQ ID NO: 912520 - DNA, 15 bp, Homo sapiens
aaaaacatttaacaa

SEQ ID NO: 912521 - DNA, 15 bp, Homo sapiens
aaaacatttaacaac

SEQ ID NO: 912522 - DNA, 15 bp, Homo sapiens
aaacatttaacaaca

SEQ ID NO: 912523 - DNA, 15 bp, Homo sapiens
aacatttaacaacac

SEQ ID NO: 912524 - DNA, 15 bp, Homo sapiens
acatttaacaacact

SEQ ID NO: 912525 - DNA, 15 bp, Homo sapiens
catttaacaacacta

SEQ ID NO: 912526 - DNA, 15 bp, Homo sapiens
atttaacaacactat

SEQ ID NO: 912527 - DNA, 15 bp, Homo sapiens
tttaacaacactatt

SEQ ID NO: 912528 - DNA, 15 bp, Homo sapiens
ttaacaacactatta

SEQ ID NO: 912529 - DNA, 15 bp, Homo sapiens
taacaacactattat

SEQ ID NO: 912530 - DNA, 15 bp, Homo sapiens
aacaacactattatt

SEQ ID NO: 912531 - DNA, 15 bp, Homo sapiens
acaacactattattt

SEQ ID NO: 912532 - DNA, 15 bp, Homo sapiens
caacactattatttt

SEQ ID NO: 912533 - DNA, 15 bp, Homo sapiens
aacactattattttc

SEQ ID NO: 912534 - DNA, 15 bp, Homo sapiens
acactattattttcc

SEQ ID NO: 912535 - DNA, 15 bp, Homo sapiens
cactattattttcca

SEQ ID NO: 912536 - DNA, 15 bp, Homo sapiens
actattattttccag

SEQ ID NO: 912537 - DNA, 15 bp, Homo sapiens
ctattattttccagg

SEQ ID NO: 912538 - DNA, 15 bp, Homo sapiens
tattattttccagga

SEQ ID NO: 912539 - DNA, 15 bp, Homo sapiens
attattttccaggac

SEQ ID NO: 912540 - DNA, 15 bp, Homo sapiens
ttattttccaggacc

SEQ ID NO: 912541 - DNA, 15 bp, Homo sapiens
tattttccaggaccc

SEQ ID NO: 912542 - DNA, 15 bp, Homo sapiens
attttccaggaccct

SEQ ID NO: 912543 - DNA, 15 bp, Homo sapiens
ttttccaggaccctt

SEQ ID NO: 912544 - DNA, 15 bp, Homo sapiens
tttccaggacccttt

SEQ ID NO: 912545 - DNA, 15 bp, Homo sapiens
ttccaggaccctttt

SEQ ID NO: 912546 - DNA, 15 bp, Homo sapiens
tccaggacccttttt

SEQ ID NO: 912547 - DNA, 15 bp, Homo sapiens
ccaggaccctttttt

SEQ ID NO: 912548 - DNA, 15 bp, Homo sapiens
caggacccttttttc

SEQ ID NO: 912549 - DNA, 15 bp, Homo sapiens
aggacccttttttcc

SEQ ID NO: 912550 - DNA, 15 bp, Homo sapiens
ggacccttttttcct

SEQ ID NO: 912551 - DNA, 15 bp, Homo sapiens
gacccttttttcctc

SEQ ID NO: 912552 - DNA, 15 bp, Homo sapiens
acccttttttcctct

SEQ ID NO: 912553 - DNA, 15 bp, Homo sapiens
cccttttttcctctg

SEQ ID NO: 912554 - DNA, 15 bp, Homo sapiens
ccttttttcctctgc

SEQ ID NO: 912555 - DNA, 15 bp, Homo sapiens
cttttttcctctgca

SEQ ID NO: 912556 - DNA, 15 bp, Homo sapiens
ttttttcctctgcat

SEQ ID NO: 912557 - DNA, 15 bp, Homo sapiens
tttttcctctgcata

SEQ ID NO: 912558 - DNA, 15 bp, Homo sapiens
ttttcctctgcatac

SEQ ID NO: 912559 - DNA, 15 bp, Homo sapiens
tttcctctgcatact

SEQ ID NO: 912560 - DNA, 15 bp, Homo sapiens
ttcctctgcatacta

SEQ ID NO: 912561 - DNA, 15 bp, Homo sapiens
tcctctgcatactag

SEQ ID NO: 912562 - DNA, 15 bp, Homo sapiens
cctctgcatactaga

SEQ ID NO: 912563 - DNA, 15 bp, Homo sapiens
ctctgcatactagat

SEQ ID NO: 912564 - DNA, 15 bp, Homo sapiens
tctgcatactagatc

SEQ ID NO: 912565 - DNA, 15 bp, Homo sapiens
ctgcatactagatca

SEQ ID NO: 912566 - DNA, 15 bp, Homo sapiens
tgcatactagatcac

SEQ ID NO: 912567 - DNA, 15 bp, Homo sapiens
gcatactagatcaca

SEQ ID NO: 912568 - DNA, 15 bp, Homo sapiens
catactagatcacag

SEQ ID NO: 912569 - DNA, 15 bp, Homo sapiens
atactagatcacagt

SEQ ID NO: 912570 - DNA, 15 bp, Homo sapiens
tactagatcacagta

SEQ ID NO: 912571 - DNA, 15 bp, Homo sapiens
actagatcacagtat

SEQ ID NO: 912572 - DNA, 15 bp, Homo sapiens
ctagatcacagtatt

SEQ ID NO: 912573 - DNA, 15 bp, Homo sapiens
tagatcacagtattt

SEQ ID NO: 912574 - DNA, 15 bp, Homo sapiens
agatcacagtatttt

SEQ ID NO: 912575 - DNA, 15 bp, Homo sapiens
gatcacagtattttt

SEQ ID NO: 912576 - DNA, 15 bp, Homo sapiens
atcacagtattttta

SEQ ID NO: 912577 - DNA, 15 bp, Homo sapiens
tcacagtatttttag

SEQ ID NO: 912578 - DNA, 15 bp, Homo sapiens
cacagtatttttagt

SEQ ID NO: 912579 - DNA, 15 bp, Homo sapiens
acagtatttttagtg

SEQ ID NO: 912580 - DNA, 15 bp, Homo sapiens
cagtatttttagtga

SEQ ID NO: 912581 - DNA, 15 bp, Homo sapiens
agtatttttagtgat

SEQ ID NO: 912582 - DNA, 15 bp, Homo sapiens
gtatttttagtgatg

SEQ ID NO: 912583 - DNA, 15 bp, Homo sapiens
tatttttagtgatga

SEQ ID NO: 912584 - DNA, 15 bp, Homo sapiens
atttttagtgatgag

SEQ ID NO: 912585 - DNA, 15 bp, Homo sapiens
tttttagtgatgagg

SEQ ID NO: 912586 - DNA, 15 bp, Homo sapiens
ttttagtgatgagga

SEQ ID NO: 912587 - DNA, 15 bp, Homo sapiens
tttagtgatgaggaa

SEQ ID NO: 912588 - DNA, 15 bp, Homo sapiens
ttagtgatgaggaaa

SEQ ID NO: 912589 - DNA, 15 bp, Homo sapiens
tagtgatgaggaaat

SEQ ID NO: 912590 - DNA, 15 bp, Homo sapiens
agtgatgaggaaata

SEQ ID NO: 912591 - DNA, 15 bp, Homo sapiens
gtgatgaggaaatat

SEQ ID NO: 912592 - DNA, 15 bp, Homo sapiens
tgatgaggaaatata

SEQ ID NO: 912593 - DNA, 15 bp, Homo sapiens
gatgaggaaatatat

SEQ ID NO: 912594 - DNA, 15 bp, Homo sapiens
atgaggaaatatata

SEQ ID NO: 912595 - DNA, 15 bp, Homo sapiens
tgaggaaatatatac

SEQ ID NO: 912596 - DNA, 15 bp, Homo sapiens
gaggaaatatataca

SEQ ID NO: 912597 - DNA, 15 bp, Homo sapiens
aggaaatatatacaa

SEQ ID NO: 912598 - DNA, 15 bp, Homo sapiens
ggaaatatatacaaa

SEQ ID NO: 912599 - DNA, 15 bp, Homo sapiens
gaaatatatacaaat

SEQ ID NO: 912600 - DNA, 15 bp, Homo sapiens
aaatatatacaaatt

SEQ ID NO: 912601 - DNA, 15 bp, Homo sapiens
aatatatacaaattc

SEQ ID NO: 912602 - DNA, 15 bp, Homo sapiens
atatatacaaattca

SEQ ID NO: 912603 - DNA, 15 bp, Homo sapiens
tatatacaaattcaa

SEQ ID NO: 912604 - DNA, 15 bp, Homo sapiens
atatacaaattcaaa

SEQ ID NO: 912605 - DNA, 15 bp, Homo sapiens
tatacaaattcaaac

SEQ ID NO: 912606 - DNA, 15 bp, Homo sapiens
atacaaattcaaact

SEQ ID NO: 912607 - DNA, 15 bp, Homo sapiens
tacaaattcaaactg

SEQ ID NO: 912608 - DNA, 15 bp, Homo sapiens
acaaattcaaactga

SEQ ID NO: 912609 - DNA, 15 bp, Homo sapiens
caaattcaaactgac

SEQ ID NO: 912610 - DNA, 15 bp, Homo sapiens
aaattcaaactgaca

SEQ ID NO: 912611 - DNA, 15 bp, Homo sapiens
aattcaaactgacag

SEQ ID NO: 912612 - DNA, 15 bp, Homo sapiens
attcaaactgacagc

SEQ ID NO: 912613 - DNA, 15 bp, Homo sapiens
ttcaaactgacagca

SEQ ID NO: 912614 - DNA, 15 bp, Homo sapiens
tcaaactgacagcaa

SEQ ID NO: 912615 - DNA, 15 bp, Homo sapiens
caaactgacagcaat

SEQ ID NO: 912616 - DNA, 15 bp, Homo sapiens
aaactgacagcaatt

SEQ ID NO: 912617 - DNA, 15 bp, Homo sapiens
aactgacagcaattc

SEQ ID NO: 912618 - DNA, 15 bp, Homo sapiens
actgacagcaattca

SEQ ID NO: 912619 - DNA, 15 bp, Homo sapiens
ctgacagcaattcat

SEQ ID NO: 912620 - DNA, 15 bp, Homo sapiens
tgacagcaattcatg

SEQ ID NO: 912621 - DNA, 15 bp, Homo sapiens
gacagcaattcatga

SEQ ID NO: 912622 - DNA, 15 bp, Homo sapiens
acagcaattcatgaa

SEQ ID NO: 912623 - DNA, 15 bp, Homo sapiens
cagcaattcatgaat

SEQ ID NO: 912624 - DNA, 15 bp, Homo sapiens
agcaattcatgaatc

SEQ ID NO: 912625 - DNA, 15 bp, Homo sapiens
gcaattcatgaatct

SEQ ID NO: 912626 - DNA, 15 bp, Homo sapiens
caattcatgaatctc

SEQ ID NO: 912627 - DNA, 15 bp, Homo sapiens
aattcatgaatctct

SEQ ID NO: 912628 - DNA, 15 bp, Homo sapiens
attcatgaatctcta

SEQ ID NO: 912629 - DNA, 15 bp, Homo sapiens
ttcatgaatctctaa

SEQ ID NO: 912630 - DNA, 15 bp, Homo sapiens
tcatgaatctctaat

SEQ ID NO: 912631 - DNA, 15 bp, Homo sapiens
catgaatctctaata

SEQ ID NO: 912632 - DNA, 15 bp, Homo sapiens
atgaatctctaatat

SEQ ID NO: 912633 - DNA, 15 bp, Homo sapiens
tgaatctctaatatt

SEQ ID NO: 912634 - DNA, 15 bp, Homo sapiens
gaatctctaatattc

SEQ ID NO: 912635 - DNA, 15 bp, Homo sapiens
aatctctaatattcc

SEQ ID NO: 912636 - DNA, 15 bp, Homo sapiens
atctctaatattcct

SEQ ID NO: 912637 - DNA, 15 bp, Homo sapiens
tctctaatattcctg

SEQ ID NO: 912638 - DNA, 15 bp, Homo sapiens
ctctaatattcctgg

SEQ ID NO: 912639 - DNA, 15 bp, Homo sapiens
tctaatattcctggt

SEQ ID NO: 912640 - DNA, 15 bp, Homo sapiens
ctaatattcctggta

SEQ ID NO: 912641 - DNA, 15 bp, Homo sapiens
taatattcctggtat

SEQ ID NO: 912642 - DNA, 15 bp, Homo sapiens
aatattcctggtata

SEQ ID NO: 912643 - DNA, 15 bp, Homo sapiens
atattcctggtatat

SEQ ID NO: 912644 - DNA, 15 bp, Homo sapiens
tattcctggtatatg

SEQ ID NO: 912645 - DNA, 15 bp, Homo sapiens
attcctggtatatgt

SEQ ID NO: 912646 - DNA, 15 bp, Homo sapiens
ttcctggtatatgtt

SEQ ID NO: 912647 - DNA, 15 bp, Homo sapiens
tcctggtatatgttg

SEQ ID NO: 912648 - DNA, 15 bp, Homo sapiens
cctggtatatgttgt

SEQ ID NO: 912649 - DNA, 15 bp, Homo sapiens
ctggtatatgttgtc

SEQ ID NO: 912650 - DNA, 15 bp, Homo sapiens
tggtatatgttgtcc

SEQ ID NO: 912651 - DNA, 15 bp, Homo sapiens
ggtatatgttgtcca

SEQ ID NO: 912652 - DNA, 15 bp, Homo sapiens
gtatatgttgtccac

SEQ ID NO: 912653 - DNA, 15 bp, Homo sapiens
tatatgttgtccact

SEQ ID NO: 912654 - DNA, 15 bp, Homo sapiens
atatgttgtccactt

SEQ ID NO: 912655 - DNA, 15 bp, Homo sapiens
tatgttgtccacttt

SEQ ID NO: 912656 - DNA, 15 bp, Homo sapiens
atgttgtccactttg

SEQ ID NO: 912657 - DNA, 15 bp, Homo sapiens
tgttgtccactttgc

SEQ ID NO: 912658 - DNA, 15 bp, Homo sapiens
gttgtccactttgcg

SEQ ID NO: 912659 - DNA, 15 bp, Homo sapiens
ttgtccactttgcga

SEQ ID NO: 912660 - DNA, 15 bp, Homo sapiens
tgtccactttgcgaa

SEQ ID NO: 912661 - DNA, 15 bp, Homo sapiens
gtccactttgcgaaa

SEQ ID NO: 912662 - DNA, 15 bp, Homo sapiens
tccactttgcgaaaa

SEQ ID NO: 912663 - DNA, 15 bp, Homo sapiens
ccactttgcgaaaat

SEQ ID NO: 912664 - DNA, 15 bp, Homo sapiens
cactttgcgaaaatg

SEQ ID NO: 912665 - DNA, 15 bp, Homo sapiens
actttgcgaaaatga

SEQ ID NO: 912666 - DNA, 15 bp, Homo sapiens
ctttgcgaaaatgat

SEQ ID NO: 912667 - DNA, 15 bp, Homo sapiens
tttgcgaaaatgatt

SEQ ID NO: 912668 - DNA, 15 bp, Homo sapiens
ttgcgaaaatgatta

SEQ ID NO: 912669 - DNA, 15 bp, Homo sapiens
tgcgaaaatgattat

SEQ ID NO: 912670 - DNA, 15 bp, Homo sapiens
gcgaaaatgattatt

SEQ ID NO: 912671 - DNA, 15 bp, Homo sapiens
cgaaaatgattatta

SEQ ID NO: 912672 - DNA, 15 bp, Homo sapiens
gaaaatgattattaa

SEQ ID NO: 912673 - DNA, 15 bp, Homo sapiens
aaaatgattattaat

SEQ ID NO: 912674 - DNA, 15 bp, Homo sapiens
aaatgattattaata

SEQ ID NO: 912675 - DNA, 15 bp, Homo sapiens
aatgattattaatag

SEQ ID NO: 912676 - DNA, 15 bp, Homo sapiens
atgattattaatagc

SEQ ID NO: 912677 - DNA, 15 bp, Homo sapiens
tgattattaatagcc

SEQ ID NO: 912678 - DNA, 15 bp, Homo sapiens
gattattaatagcct

SEQ ID NO: 912679 - DNA, 15 bp, Homo sapiens
attattaatagcctg

SEQ ID NO: 912680 - DNA, 15 bp, Homo sapiens
ttattaatagcctga

SEQ ID NO: 912681 - DNA, 15 bp, Homo sapiens
tattaatagcctgac

SEQ ID NO: 912682 - DNA, 15 bp, Homo sapiens
attaatagcctgact

SEQ ID NO: 912683 - DNA, 15 bp, Homo sapiens
ttaatagcctgactg

SEQ ID NO: 912684 - DNA, 15 bp, Homo sapiens
taatagcctgactgc

SEQ ID NO: 912685 - DNA, 15 bp, Homo sapiens
aatagcctgactgca

SEQ ID NO: 912686 - DNA, 15 bp, Homo sapiens
atagcctgactgcaa

SEQ ID NO: 912687 - DNA, 15 bp, Homo sapiens
tagcctgactgcaaa

SEQ ID NO: 912688 - DNA, 15 bp, Homo sapiens
agcctgactgcaaaa

SEQ ID NO: 912689 - DNA, 15 bp, Homo sapiens
gcctgactgcaaaat

SEQ ID NO: 912690 - DNA, 15 bp, Homo sapiens
cctgactgcaaaatt

SEQ ID NO: 912691 - DNA, 15 bp, Homo sapiens
ctgactgcaaaattg

SEQ ID NO: 912692 - DNA, 15 bp, Homo sapiens
tgactgcaaaattgt

SEQ ID NO: 912693 - DNA, 15 bp, Homo sapiens
gactgcaaaattgtt

SEQ ID NO: 912694 - DNA, 15 bp, Homo sapiens
actgcaaaattgttt

SEQ ID NO: 912695 - DNA, 15 bp, Homo sapiens
ctgcaaaattgttta

SEQ ID NO: 912696 - DNA, 15 bp, Homo sapiens
tgcaaaattgtttaa

SEQ ID NO: 912697 - DNA, 15 bp, Homo sapiens
gcaaaattgtttaag

SEQ ID NO: 912698 - DNA, 15 bp, Homo sapiens
caaaattgtttaaga

SEQ ID NO: 912699 - DNA, 15 bp, Homo sapiens
aaaattgtttaagaa

SEQ ID NO: 912700 - DNA, 15 bp, Homo sapiens
aaattgtttaagaaa

SEQ ID NO: 912701 - DNA, 15 bp, Homo sapiens
aattgtttaagaaac

SEQ ID NO: 912702 - DNA, 15 bp, Homo sapiens
attgtttaagaaacc

SEQ ID NO: 912703 - DNA, 15 bp, Homo sapiens
ttgtttaagaaacct

SEQ ID NO: 912704 - DNA, 15 bp, Homo sapiens
tgtttaagaaacctt

SEQ ID NO: 912705 - DNA, 15 bp, Homo sapiens
gtttaagaaaccttt

SEQ ID NO: 912706 - DNA, 15 bp, Homo sapiens
tttaagaaacctttc

SEQ ID NO: 912707 - DNA, 15 bp, Homo sapiens
ttaagaaacctttca

SEQ ID NO: 912708 - DNA, 15 bp, Homo sapiens
taagaaacctttcat

SEQ ID NO: 912709 - DNA, 15 bp, Homo sapiens
aagaaacctttcatt

SEQ ID NO: 912710 - DNA, 15 bp, Homo sapiens
agaaacctttcattt

SEQ ID NO: 912711 - DNA, 15 bp, Homo sapiens
gaaacctttcatttt

SEQ ID NO: 912712 - DNA, 15 bp, Homo sapiens
aaacctttcatttta

SEQ ID NO: 912713 - DNA, 15 bp, Homo sapiens
aacctttcattttaa

SEQ ID NO: 912714 - DNA, 15 bp, Homo sapiens
acctttcattttaaa

SEQ ID NO: 912715 - DNA, 15 bp, Homo sapiens
cctttcattttaaat

SEQ ID NO: 912716 - DNA, 15 bp, Homo sapiens
ctttcattttaaatt

SEQ ID NO: 912717 - DNA, 15 bp, Homo sapiens
tttcattttaaatta

SEQ ID NO: 912718 - DNA, 15 bp, Homo sapiens
ttcattttaaattag

SEQ ID NO: 912719 - DNA, 15 bp, Homo sapiens
tcattttaaattagc

SEQ ID NO: 912720 - DNA, 15 bp, Homo sapiens
cattttaaattagcc

SEQ ID NO: 912721 - DNA, 15 bp, Homo sapiens
attttaaattagcca

SEQ ID NO: 912722 - DNA, 15 bp, Homo sapiens
ttttaaattagccat

SEQ ID NO: 912723 - DNA, 15 bp, Homo sapiens
tttaaattagccata

SEQ ID NO: 912724 - DNA, 15 bp, Homo sapiens
ttaaattagccataa

SEQ ID NO: 912725 - DNA, 15 bp, Homo sapiens
taaattagccataat

SEQ ID NO: 912726 - DNA, 15 bp, Homo sapiens
aaattagccataatt

SEQ ID NO: 912727 - DNA, 15 bp, Homo sapiens
aattagccataattt

SEQ ID NO: 912728 - DNA, 15 bp, Homo sapiens
attagccataattta

SEQ ID NO: 912729 - DNA, 15 bp, Homo sapiens
ttagccataatttat

SEQ ID NO: 912730 - DNA, 15 bp, Homo sapiens
tagccataatttatt

SEQ ID NO: 912731 - DNA, 15 bp, Homo sapiens
agccataatttattt

SEQ ID NO: 912732 - DNA, 15 bp, Homo sapiens
gccataatttatttt

SEQ ID NO: 912733 - DNA, 15 bp, Homo sapiens
ccataatttattttt

SEQ ID NO: 912734 - DNA, 15 bp, Homo sapiens
cataatttatttttt

SEQ ID NO: 912735 - DNA, 15 bp, Homo sapiens
ataatttattttttc

SEQ ID NO: 912736 - DNA, 15 bp, Homo sapiens
taatttattttttca

SEQ ID NO: 912737 - DNA, 15 bp, Homo sapiens
aatttattttttcag

SEQ ID NO: 912738 - DNA, 15 bp, Homo sapiens
atttattttttcaga

SEQ ID NO: 912739 - DNA, 15 bp, Homo sapiens
tttattttttcagac

SEQ ID NO: 912740 - DNA, 15 bp, Homo sapiens
ttattttttcagact

SEQ ID NO: 912741 - DNA, 15 bp, Homo sapiens
tattttttcagacta

SEQ ID NO: 912742 - DNA, 15 bp, Homo sapiens
attttttcagactat

SEQ ID NO: 912743 - DNA, 15 bp, Homo sapiens
ttttttcagactata

SEQ ID NO: 912744 - DNA, 15 bp, Homo sapiens
tttttcagactatac

SEQ ID NO: 912745 - DNA, 15 bp, Homo sapiens
ttttcagactataca

SEQ ID NO: 912746 - DNA, 15 bp, Homo sapiens
tttcagactatacag

SEQ ID NO: 912747 - DNA, 15 bp, Homo sapiens
ttcagactatacaga

SEQ ID NO: 912748 - DNA, 15 bp, Homo sapiens
tcagactatacagat

SEQ ID NO: 912749 - DNA, 15 bp, Homo sapiens
cagactatacagatg

SEQ ID NO: 912750 - DNA, 15 bp, Homo sapiens
agactatacagatgt

SEQ ID NO: 912751 - DNA, 15 bp, Homo sapiens
gactatacagatgta

SEQ ID NO: 912752 - DNA, 15 bp, Homo sapiens
actatacagatgtat

SEQ ID NO: 912753 - DNA, 15 bp, Homo sapiens
ctatacagatgtatt

SEQ ID NO: 912754 - DNA, 15 bp, Homo sapiens
tatacagatgtatta

SEQ ID NO: 912755 - DNA, 15 bp, Homo sapiens
atacagatgtattaa

SEQ ID NO: 912756 - DNA, 15 bp, Homo sapiens
tacagatgtattaag

SEQ ID NO: 912757 - DNA, 15 bp, Homo sapiens
acagatgtattaagg

SEQ ID NO: 912758 - DNA, 15 bp, Homo sapiens
cagatgtattaaggt

SEQ ID NO: 912759 - DNA, 15 bp, Homo sapiens
agatgtattaaggtc

SEQ ID NO: 912760 - DNA, 15 bp, Homo sapiens
gatgtattaaggtca

SEQ ID NO: 912761 - DNA, 15 bp, Homo sapiens
atgtattaaggtcat

SEQ ID NO: 912762 - DNA, 15 bp, Homo sapiens
tgtattaaggtcatt

SEQ ID NO: 912763 - DNA, 15 bp, Homo sapiens
gtattaaggtcattt

SEQ ID NO: 912764 - DNA, 15 bp, Homo sapiens
tattaaggtcatttt

SEQ ID NO: 912765 - DNA, 15 bp, Homo sapiens
attaaggtcattttc

SEQ ID NO: 912766 - DNA, 15 bp, Homo sapiens
ttaaggtcattttcc

SEQ ID NO: 912767 - DNA, 15 bp, Homo sapiens
taaggtcattttcct

SEQ ID NO: 912768 - DNA, 15 bp, Homo sapiens
aaggtcattttcctt

SEQ ID NO: 912769 - DNA, 15 bp, Homo sapiens
aggtcattttccttg

SEQ ID NO: 912770 - DNA, 15 bp, Homo sapiens
ggtcattttccttgc

SEQ ID NO: 912771 - DNA, 15 bp, Homo sapiens
gtcattttccttgcc

SEQ ID NO: 912772 - DNA, 15 bp, Homo sapiens
tcattttccttgccc

SEQ ID NO: 912773 - DNA, 15 bp, Homo sapiens
cattttccttgccca

SEQ ID NO: 912774 - DNA, 15 bp, Homo sapiens
attttccttgcccat

SEQ ID NO: 912775 - DNA, 15 bp, Homo sapiens
ttttccttgcccata

SEQ ID NO: 912776 - DNA, 15 bp, Homo sapiens
tttccttgcccatat

SEQ ID NO: 912777 - DNA, 15 bp, Homo sapiens
ttccttgcccatatt

SEQ ID NO: 912778 - DNA, 15 bp, Homo sapiens
tccttgcccatattt

SEQ ID NO: 912779 - DNA, 15 bp, Homo sapiens
ccttgcccatattta

SEQ ID NO: 912780 - DNA, 15 bp, Homo sapiens
cttgcccatatttag

SEQ ID NO: 912781 - DNA, 15 bp, Homo sapiens
ttgcccatatttagt

SEQ ID NO: 912782 - DNA, 15 bp, Homo sapiens
tgcccatatttagtt

SEQ ID NO: 912783 - DNA, 15 bp, Homo sapiens
gcccatatttagttt

SEQ ID NO: 912784 - DNA, 15 bp, Homo sapiens
cccatatttagtttt

SEQ ID NO: 912785 - DNA, 15 bp, Homo sapiens
ccatatttagttttc

SEQ ID NO: 912786 - DNA, 15 bp, Homo sapiens
catatttagttttcc

SEQ ID NO: 912787 - DNA, 15 bp, Homo sapiens
atatttagttttccc

SEQ ID NO: 912788 - DNA, 15 bp, Homo sapiens
tatttagttttccct

SEQ ID NO: 912789 - DNA, 15 bp, Homo sapiens
atttagttttccctg

SEQ ID NO: 912790 - DNA, 15 bp, Homo sapiens
tttagttttccctgt

SEQ ID NO: 912791 - DNA, 15 bp, Homo sapiens
ttagttttccctgtt

SEQ ID NO: 912792 - DNA, 15 bp, Homo sapiens
tagttttccctgttt

SEQ ID NO: 912793 - DNA, 15 bp, Homo sapiens
agttttccctgttta

SEQ ID NO: 912794 - DNA, 15 bp, Homo sapiens
gttttccctgtttaa

SEQ ID NO: 912795 - DNA, 15 bp, Homo sapiens
ttttccctgtttaat

SEQ ID NO: 912796 - DNA, 15 bp, Homo sapiens
tttccctgtttaata

SEQ ID NO: 912797 - DNA, 15 bp, Homo sapiens
ttccctgtttaataa

SEQ ID NO: 912798 - DNA, 15 bp, Homo sapiens
tccctgtttaataaa

SEQ ID NO: 912799 - DNA, 15 bp, Homo sapiens
ccctgtttaataaaa

SEQ ID NO: 912800 - DNA, 15 bp, Homo sapiens
cctgtttaataaaaa

SEQ ID NO: 912801 - DNA, 15 bp, Homo sapiens
ctgtttaataaaaat

SEQ ID NO: 912802 - DNA, 15 bp, Homo sapiens
tgtttaataaaaatt

SEQ ID NO: 912803 - DNA, 15 bp, Homo sapiens
gtttaataaaaatta

SEQ ID NO: 912804 - DNA, 15 bp, Homo sapiens
tttaataaaaattat

SEQ ID NO: 912805 - DNA, 15 bp, Homo sapiens
ttaataaaaattata

SEQ ID NO: 912806 - DNA, 15 bp, Homo sapiens
taataaaaattatat

SEQ ID NO: 912807 - DNA, 15 bp, Homo sapiens
aataaaaattatata

SEQ ID NO: 912808 - DNA, 15 bp, Homo sapiens
ataaaaattatatat

SEQ ID NO: 912809 - DNA, 15 bp, Homo sapiens
taaaaattatatata

SEQ ID NO: 912810 - DNA, 15 bp, Homo sapiens
aaaaattatatatat

SEQ ID NO: 912811 - DNA, 15 bp, Homo sapiens
aaaattatatatata

SEQ ID NO: 912812 - DNA, 15 bp, Homo sapiens
aaattatatatatat

SEQ ID NO: 912813 - DNA, 15 bp, Homo sapiens
aattatatatatata

SEQ ID NO: 912814 - DNA, 15 bp, Homo sapiens
attatatatatataa

SEQ ID NO: 912815 - DNA, 15 bp, Homo sapiens
ttatatatatataaa

SEQ ID NO: 912816 - DNA, 15 bp, Homo sapiens
tatatatatataaaa

SEQ ID NO: 912817 - DNA, 15 bp, Homo sapiens
atatatatataaaat

SEQ ID NO: 912818 - DNA, 15 bp, Homo sapiens
tatatatataaaata

SEQ ID NO: 912819 - DNA, 15 bp, Homo sapiens
atatatataaaatat

SEQ ID NO: 912820 - DNA, 15 bp, Homo sapiens
tatatataaaatata

SEQ ID NO: 912821 - DNA, 15 bp, Homo sapiens
atatataaaatatat

SEQ ID NO: 912822 - DNA, 15 bp, Homo sapiens
tatataaaatatata

SEQ ID NO: 912823 - DNA, 15 bp, Homo sapiens
atataaaatatataa

SEQ ID NO: 912824 - DNA, 15 bp, Homo sapiens
tataaaatatataat

SEQ ID NO: 912825 - DNA, 15 bp, Homo sapiens
ataaaatatataata

SEQ ID NO: 912826 - DNA, 15 bp, Homo sapiens
taaaatatataatac

SEQ ID NO: 912827 - DNA, 15 bp, Homo sapiens
aaaatatataataca

SEQ ID NO: 912828 - DNA, 15 bp, Homo sapiens
aaatatataatacaa

SEQ ID NO: 912829 - DNA, 15 bp, Homo sapiens
aatatataatacaaa

SEQ ID NO: 912830 - DNA, 15 bp, Homo sapiens
atatataatacaaat

SEQ ID NO: 912831 - DNA, 15 bp, Homo sapiens
tatataatacaaata

SEQ ID NO: 912832 - DNA, 15 bp, Homo sapiens
atataatacaaatat

SEQ ID NO: 912833 - DNA, 15 bp, Homo sapiens
tataatacaaatatg

SEQ ID NO: 912834 - DNA, 15 bp, Homo sapiens
ataatacaaatatgt

SEQ ID NO: 912835 - DNA, 15 bp, Homo sapiens
taatacaaatatgta

SEQ ID NO: 912836 - DNA, 15 bp, Homo sapiens
aatacaaatatgtat

SEQ ID NO: 912837 - DNA, 15 bp, Homo sapiens
atacaaatatgtata

SEQ ID NO: 912838 - DNA, 15 bp, Homo sapiens
tacaaatatgtataa

SEQ ID NO: 912839 - DNA, 15 bp, Homo sapiens
acaaatatgtataaa

SEQ ID NO: 912840 - DNA, 15 bp, Homo sapiens
caaatatgtataaaa

SEQ ID NO: 912841 - DNA, 15 bp, Homo sapiens
aaatatgtataaaat

SEQ ID NO: 912842 - DNA, 15 bp, Homo sapiens
aatatgtataaaata

SEQ ID NO: 912843 - DNA, 15 bp, Homo sapiens
atatgtataaaatat

SEQ ID NO: 912844 - DNA, 15 bp, Homo sapiens
tatgtataaaatata

SEQ ID NO: 912845 - DNA, 15 bp, Homo sapiens
atgtataaaatatat

SEQ ID NO: 912846 - DNA, 15 bp, Homo sapiens
tgtataaaatatata

SEQ ID NO: 912847 - DNA, 15 bp, Homo sapiens
gtataaaatatatat

SEQ ID NO: 912848 - DNA, 15 bp, Homo sapiens
tataaaatatatatt

SEQ ID NO: 912849 - DNA, 15 bp, Homo sapiens
ataaaatatatatta

SEQ ID NO: 912850 - DNA, 15 bp, Homo sapiens
taaaatatatattaa

SEQ ID NO: 912851 - DNA, 15 bp, Homo sapiens
aaaatatatattaaa

SEQ ID NO: 912852 - DNA, 15 bp, Homo sapiens
aaatatatattaaaa

SEQ ID NO: 912853 - DNA, 15 bp, Homo sapiens
aatatatattaaaac

SEQ ID NO: 912854 - DNA, 15 bp, Homo sapiens
atatatattaaaaca

SEQ ID NO: 912855 - DNA, 15 bp, Homo sapiens
tatatattaaaacaa

SEQ ID NO: 912856 - DNA, 15 bp, Homo sapiens
atatattaaaacaat

SEQ ID NO: 912857 - DNA, 15 bp, Homo sapiens
tatattaaaacaata

SEQ ID NO: 912858 - DNA, 15 bp, Homo sapiens
atattaaaacaatat

SEQ ID NO: 912859 - DNA, 15 bp, Homo sapiens
tattaaaacaatata

SEQ ID NO: 912860 - DNA, 15 bp, Homo sapiens
attaaaacaatatat

SEQ ID NO: 912861 - DNA, 15 bp, Homo sapiens
ttaaaacaatatatg

SEQ ID NO: 912862 - DNA, 15 bp, Homo sapiens
taaaacaatatatgt

SEQ ID NO: 912863 - DNA, 15 bp, Homo sapiens
aaaacaatatatgta

SEQ ID NO: 912864 - DNA, 15 bp, Homo sapiens
aaacaatatatgtat

SEQ ID NO: 912865 - DNA, 15 bp, Homo sapiens
aacaatatatgtata

SEQ ID NO: 912866 - DNA, 15 bp, Homo sapiens
acaatatatgtatat

SEQ ID NO: 912867 - DNA, 15 bp, Homo sapiens
caatatatgtatatt

SEQ ID NO: 912868 - DNA, 15 bp, Homo sapiens
aatatatgtatattt

SEQ ID NO: 912869 - DNA, 15 bp, Homo sapiens
atatatgtatattta

SEQ ID NO: 912870 - DNA, 15 bp, Homo sapiens
tatatgtatatttat

SEQ ID NO: 912871 - DNA, 15 bp, Homo sapiens
atatgtatatttata

SEQ ID NO: 912872 - DNA, 15 bp, Homo sapiens
tatgtatatttatat

SEQ ID NO: 912873 - DNA, 15 bp, Homo sapiens
atgtatatttatata

SEQ ID NO: 912874 - DNA, 15 bp, Homo sapiens
tgtatatttatatac

SEQ ID NO: 912875 - DNA, 15 bp, Homo sapiens
gtatatttatatact

SEQ ID NO: 912876 - DNA, 15 bp, Homo sapiens
tatatttatatactc

SEQ ID NO: 912877 - DNA, 15 bp, Homo sapiens
atatttatatactct

SEQ ID NO: 912878 - DNA, 15 bp, Homo sapiens
tatttatatactctt

SEQ ID NO: 912879 - DNA, 15 bp, Homo sapiens
atttatatactcttt

SEQ ID NO: 912880 - DNA, 15 bp, Homo sapiens
tttatatactctttt

SEQ ID NO: 912881 - DNA, 15 bp, Homo sapiens
ttatatactctttta

SEQ ID NO: 912882 - DNA, 15 bp, Homo sapiens
tatatactcttttat

SEQ ID NO: 912883 - DNA, 15 bp, Homo sapiens
atatactcttttatg

SEQ ID NO: 912884 - DNA, 15 bp, Homo sapiens
tatactcttttatga

SEQ ID NO: 912885 - DNA, 15 bp, Homo sapiens
atactcttttatgaa

SEQ ID NO: 912886 - DNA, 15 bp, Homo sapiens
tactcttttatgaat

SEQ ID NO: 912887 - DNA, 15 bp, Homo sapiens
actcttttatgaata

SEQ ID NO: 912888 - DNA, 15 bp, Homo sapiens
ctcttttatgaatac

SEQ ID NO: 912889 - DNA, 15 bp, Homo sapiens
tcttttatgaataca

SEQ ID NO: 912890 - DNA, 15 bp, Homo sapiens
cttttatgaatacac

SEQ ID NO: 912891 - DNA, 15 bp, Homo sapiens
ttttatgaatacaca

SEQ ID NO: 912892 - DNA, 15 bp, Homo sapiens
tttatgaatacacag

SEQ ID NO: 912893 - DNA, 15 bp, Homo sapiens
ttatgaatacacagc

SEQ ID NO: 912894 - DNA, 15 bp, Homo sapiens
tatgaatacacagca

SEQ ID NO: 912895 - DNA, 15 bp, Homo sapiens
atgaatacacagcat

SEQ ID NO: 912896 - DNA, 15 bp, Homo sapiens
tgaatacacagcata

SEQ ID NO: 912897 - DNA, 15 bp, Homo sapiens
gaatacacagcatat

SEQ ID NO: 912898 - DNA, 15 bp, Homo sapiens
aatacacagcatatt

SEQ ID NO: 912899 - DNA, 15 bp, Homo sapiens
atacacagcatattt

SEQ ID NO: 912900 - DNA, 15 bp, Homo sapiens
tacacagcatattta

SEQ ID NO: 912901 - DNA, 15 bp, Homo sapiens
acacagcatatttat

SEQ ID NO: 912902 - DNA, 15 bp, Homo sapiens
cacagcatatttatt

SEQ ID NO: 912903 - DNA, 15 bp, Homo sapiens
acagcatatttatta

SEQ ID NO: 912904 - DNA, 15 bp, Homo sapiens
cagcatatttattat

SEQ ID NO: 912905 - DNA, 15 bp, Homo sapiens
agcatatttattata

SEQ ID NO: 912906 - DNA, 15 bp, Homo sapiens
gcatatttattatat

SEQ ID NO: 912907 - DNA, 15 bp, Homo sapiens
catatttattatata

SEQ ID NO: 912908 - DNA, 15 bp, Homo sapiens
atatttattatatat

SEQ ID NO: 912909 - DNA, 15 bp, Homo sapiens
tatttattatatatt

SEQ ID NO: 912910 - DNA, 15 bp, Homo sapiens
atttattatatatta

SEQ ID NO: 912911 - DNA, 15 bp, Homo sapiens
tttattatatattat

SEQ ID NO: 912912 - DNA, 15 bp, Homo sapiens
ttattatatattata

SEQ ID NO: 912913 - DNA, 15 bp, Homo sapiens
tattatatattatac

SEQ ID NO: 912914 - DNA, 15 bp, Homo sapiens
attatatattataca

SEQ ID NO: 912915 - DNA, 15 bp, Homo sapiens
ttatatattatacat

SEQ ID NO: 912916 - DNA, 15 bp, Homo sapiens
tatatattatacata

SEQ ID NO: 912917 - DNA, 15 bp, Homo sapiens
atatattatacatat

SEQ ID NO: 912918 - DNA, 15 bp, Homo sapiens
tatattatacatatc

SEQ ID NO: 912919 - DNA, 15 bp, Homo sapiens
atattatacatatct

SEQ ID NO: 912920 - DNA, 15 bp, Homo sapiens
tattatacatatctt

SEQ ID NO: 912921 - DNA, 15 bp, Homo sapiens
attatacatatcttt

SEQ ID NO: 912922 - DNA, 15 bp, Homo sapiens
ttatacatatctttt

SEQ ID NO: 912923 - DNA, 15 bp, Homo sapiens
tatacatatcttttt

SEQ ID NO: 912924 - DNA, 15 bp, Homo sapiens
atacatatctttttt

SEQ ID NO: 912925 - DNA, 15 bp, Homo sapiens
tacatatctttttta

SEQ ID NO: 912926 - DNA, 15 bp, Homo sapiens
acatatcttttttat

SEQ ID NO: 912927 - DNA, 15 bp, Homo sapiens
catatcttttttatt

SEQ ID NO: 912928 - DNA, 15 bp, Homo sapiens
atatcttttttatta

SEQ ID NO: 912929 - DNA, 15 bp, Homo sapiens
tatcttttttattaa

SEQ ID NO: 912930 - DNA, 15 bp, Homo sapiens
atcttttttattaaa

SEQ ID NO: 912931 - DNA, 15 bp, Homo sapiens
tcttttttattaaac

SEQ ID NO: 912932 - DNA, 15 bp, Homo sapiens
cttttttattaaaca

SEQ ID NO: 912933 - DNA, 15 bp, Homo sapiens
ttttttattaaacag

SEQ ID NO: 912934 - DNA, 15 bp, Homo sapiens
tttttattaaacagg

SEQ ID NO: 912935 - DNA, 15 bp, Homo sapiens
ttttattaaacaggg

SEQ ID NO: 912936 - DNA, 15 bp, Homo sapiens
tttattaaacaggga

SEQ ID NO: 912937 - DNA, 15 bp, Homo sapiens
ttattaaacagggaa

SEQ ID NO: 912938 - DNA, 15 bp, Homo sapiens
tattaaacagggaaa

SEQ ID NO: 912939 - DNA, 15 bp, Homo sapiens
attaaacagggaaaa

SEQ ID NO: 912940 - DNA, 15 bp, Homo sapiens
ttaaacagggaaaat

SEQ ID NO: 912941 - DNA, 15 bp, Homo sapiens
taaacagggaaaatg

SEQ ID NO: 912942 - DNA, 15 bp, Homo sapiens
aaacagggaaaatga

SEQ ID NO: 912943 - DNA, 15 bp, Homo sapiens
aacagggaaaatgaa

SEQ ID NO: 912944 - DNA, 15 bp, Homo sapiens
acagggaaaatgaat

SEQ ID NO: 912945 - DNA, 15 bp, Homo sapiens
cagggaaaatgaata

SEQ ID NO: 912946 - DNA, 15 bp, Homo sapiens
agggaaaatgaatat

SEQ ID NO: 912947 - DNA, 15 bp, Homo sapiens
gggaaaatgaatata

SEQ ID NO: 912948 - DNA, 15 bp, Homo sapiens
ggaaaatgaatatat

SEQ ID NO: 912949 - DNA, 15 bp, Homo sapiens
gaaaatgaatatata

SEQ ID NO: 912950 - DNA, 15 bp, Homo sapiens
aaaatgaatatataa

SEQ ID NO: 912951 - DNA, 15 bp, Homo sapiens
aaatgaatatataaa

SEQ ID NO: 912952 - DNA, 15 bp, Homo sapiens
aatgaatatataaat

SEQ ID NO: 912953 - DNA, 15 bp, Homo sapiens
atgaatatataaatt

SEQ ID NO: 912954 - DNA, 15 bp, Homo sapiens
tgaatatataaatta

SEQ ID NO: 912955 - DNA, 15 bp, Homo sapiens
gaatatataaattac

SEQ ID NO: 912956 - DNA, 15 bp, Homo sapiens
aatatataaattact

SEQ ID NO: 912957 - DNA, 15 bp, Homo sapiens
atatataaattacta

SEQ ID NO: 912958 - DNA, 15 bp, Homo sapiens
tatataaattactaa

SEQ ID NO: 912959 - DNA, 15 bp, Homo sapiens
atataaattactaat

SEQ ID NO: 912960 - DNA, 15 bp, Homo sapiens
tataaattactaata

SEQ ID NO: 912961 - DNA, 15 bp, Homo sapiens
ataaattactaatat

SEQ ID NO: 912962 - DNA, 15 bp, Homo sapiens
taaattactaatata

SEQ ID NO: 912963 - DNA, 15 bp, Homo sapiens
aaattactaatatat

SEQ ID NO: 912964 - DNA, 15 bp, Homo sapiens
aattactaatatata

SEQ ID NO: 912965 - DNA, 15 bp, Homo sapiens
attactaatatatat

SEQ ID NO: 912966 - DNA, 15 bp, Homo sapiens
ttactaatatatata

SEQ ID NO: 912967 - DNA, 15 bp, Homo sapiens
tactaatatatataa

SEQ ID NO: 912968 - DNA, 15 bp, Homo sapiens
actaatatatataaa

SEQ ID NO: 912969 - DNA, 15 bp, Homo sapiens
ctaatatatataaat

SEQ ID NO: 912970 - DNA, 15 bp, Homo sapiens
taatatatataaatt

SEQ ID NO: 912971 - DNA, 15 bp, Homo sapiens
aatatatataaatta

SEQ ID NO: 912972 - DNA, 15 bp, Homo sapiens
atatatataaattac

SEQ ID NO: 912973 - DNA, 15 bp, Homo sapiens
tatatataaattact

SEQ ID NO: 912974 - DNA, 15 bp, Homo sapiens
atatataaattactt

SEQ ID NO: 912975 - DNA, 15 bp, Homo sapiens
tatataaattacttt

SEQ ID NO: 912976 - DNA, 15 bp, Homo sapiens
atataaattactttt

SEQ ID NO: 912977 - DNA, 15 bp, Homo sapiens
tataaattacttttt

SEQ ID NO: 912978 - DNA, 15 bp, Homo sapiens
ataaattacttttta

SEQ ID NO: 912979 - DNA, 15 bp, Homo sapiens
taaattactttttat

SEQ ID NO: 912980 - DNA, 15 bp, Homo sapiens
aaattactttttata

SEQ ID NO: 912981 - DNA, 15 bp, Homo sapiens
aattactttttatat

SEQ ID NO: 912982 - DNA, 15 bp, Homo sapiens
attactttttatata

SEQ ID NO: 912983 - DNA, 15 bp, Homo sapiens
ttactttttatatat

SEQ ID NO: 912984 - DNA, 15 bp, Homo sapiens
tactttttatatata

SEQ ID NO: 912985 - DNA, 15 bp, Homo sapiens
actttttatatatat

SEQ ID NO: 912986 - DNA, 15 bp, Homo sapiens
ctttttatatatata

SEQ ID NO: 912987 - DNA, 15 bp, Homo sapiens
tttttatatatatat

SEQ ID NO: 912988 - DNA, 15 bp, Homo sapiens
ttttatatatatata

SEQ ID NO: 912989 - DNA, 15 bp, Homo sapiens
tttatatatatataa

SEQ ID NO: 912990 - DNA, 15 bp, Homo sapiens
tatatatatataaat

SEQ ID NO: 912991 - DNA, 15 bp, Homo sapiens
atatatatataaatt

SEQ ID NO: 912992 - DNA, 15 bp, Homo sapiens
tatatatataaatta

SEQ ID NO: 912993 - DNA, 15 bp, Homo sapiens
atatatataaattaa

SEQ ID NO: 912994 - DNA, 15 bp, Homo sapiens
tatatataaattaag

SEQ ID NO: 912995 - DNA, 15 bp, Homo sapiens
atatataaattaaga

SEQ ID NO: 912996 - DNA, 15 bp, Homo sapiens
tatataaattaagaa

SEQ ID NO: 912997 - DNA, 15 bp, Homo sapiens
atataaattaagaac

SEQ ID NO: 912998 - DNA, 15 bp, Homo sapiens
tataaattaagaacc

SEQ ID NO: 912999 - DNA, 15 bp, Homo sapiens
ataaattaagaacca

SEQ ID NO: 913000 - DNA, 15 bp, Homo sapiens
taaattaagaaccac

SEQ ID NO: 913001 - DNA, 15 bp, Homo sapiens
aaattaagaaccaca

SEQ ID NO: 913002 - DNA, 15 bp, Homo sapiens
aattaagaaccacaa

SEQ ID NO: 913003 - DNA, 15 bp, Homo sapiens
attaagaaccacaag

SEQ ID NO: 913004 - DNA, 15 bp, Homo sapiens
ttaagaaccacaaga

SEQ ID NO: 913005 - DNA, 15 bp, Homo sapiens
taagaaccacaagaa

SEQ ID NO: 913006 - DNA, 15 bp, Homo sapiens
aagaaccacaagaaa

SEQ ID NO: 913007 - DNA, 15 bp, Homo sapiens
agaaccacaagaaag

SEQ ID NO: 913008 - DNA, 15 bp, Homo sapiens
gaaccacaagaaaga

SEQ ID NO: 913009 - DNA, 15 bp, Homo sapiens
aaccacaagaaagaa

SEQ ID NO: 913010 - DNA, 15 bp, Homo sapiens
accacaagaaagaaa

SEQ ID NO: 913011 - DNA, 15 bp, Homo sapiens
ccacaagaaagaaaa

SEQ ID NO: 913012 - DNA, 15 bp, Homo sapiens
cacaagaaagaaaat

SEQ ID NO: 913013 - DNA, 15 bp, Homo sapiens
acaagaaagaaaata

SEQ ID NO: 913014 - DNA, 15 bp, Homo sapiens
caagaaagaaaataa

SEQ ID NO: 913015 - DNA, 15 bp, Homo sapiens
aagaaagaaaataat

SEQ ID NO: 913016 - DNA, 15 bp, Homo sapiens
agaaagaaaataatt

SEQ ID NO: 913017 - DNA, 15 bp, Homo sapiens
gaaagaaaataattg

SEQ ID NO: 913018 - DNA, 15 bp, Homo sapiens
aaagaaaataattgg

SEQ ID NO: 913019 - DNA, 15 bp, Homo sapiens
aagaaaataattggc

SEQ ID NO: 913020 - DNA, 15 bp, Homo sapiens
agaaaataattggca

SEQ ID NO: 913021 - DNA, 15 bp, Homo sapiens
gaaaataattggcaa

SEQ ID NO: 913022 - DNA, 15 bp, Homo sapiens
aaaataattggcaag

SEQ ID NO: 913023 - DNA, 15 bp, Homo sapiens
aaataattggcaagt

SEQ ID NO: 913024 - DNA, 15 bp, Homo sapiens
aataattggcaagta

SEQ ID NO: 913025 - DNA, 15 bp, Homo sapiens
ataattggcaagtaa

SEQ ID NO: 913026 - DNA, 15 bp, Homo sapiens
taattggcaagtaat

SEQ ID NO: 913027 - DNA, 15 bp, Homo sapiens
aattggcaagtaatt

SEQ ID NO: 913028 - DNA, 15 bp, Homo sapiens
attggcaagtaatta

SEQ ID NO: 913029 - DNA, 15 bp, Homo sapiens
ttggcaagtaattag

SEQ ID NO: 913030 - DNA, 15 bp, Homo sapiens
tggcaagtaattagt

SEQ ID NO: 913031 - DNA, 15 bp, Homo sapiens
ggcaagtaattagtc

SEQ ID NO: 913032 - DNA, 15 bp, Homo sapiens
gcaagtaattagtca

SEQ ID NO: 913033 - DNA, 15 bp, Homo sapiens
caagtaattagtcag

SEQ ID NO: 913034 - DNA, 15 bp, Homo sapiens
aagtaattagtcagt

SEQ ID NO: 913035 - DNA, 15 bp, Homo sapiens
agtaattagtcagtt

SEQ ID NO: 913036 - DNA, 15 bp, Homo sapiens
gtaattagtcagttc

SEQ ID NO: 913037 - DNA, 15 bp, Homo sapiens
taattagtcagttca

SEQ ID NO: 913038 - DNA, 15 bp, Homo sapiens
aattagtcagttcat

SEQ ID NO: 913039 - DNA, 15 bp, Homo sapiens
attagtcagttcatt

SEQ ID NO: 913040 - DNA, 15 bp, Homo sapiens
ttagtcagttcattt

SEQ ID NO: 913041 - DNA, 15 bp, Homo sapiens
tagtcagttcatttg

SEQ ID NO: 913042 - DNA, 15 bp, Homo sapiens
agtcagttcatttga

SEQ ID NO: 913043 - DNA, 15 bp, Homo sapiens
gtcagttcatttgat

SEQ ID NO: 913044 - DNA, 15 bp, Homo sapiens
tcagttcatttgatt

SEQ ID NO: 913045 - DNA, 15 bp, Homo sapiens
cagttcatttgatta

SEQ ID NO: 913046 - DNA, 15 bp, Homo sapiens
agttcatttgattat

SEQ ID NO: 913047 - DNA, 15 bp, Homo sapiens
gttcatttgattatt

SEQ ID NO: 913048 - DNA, 15 bp, Homo sapiens
ttcatttgattattt

SEQ ID NO: 913049 - DNA, 15 bp, Homo sapiens
tcatttgattatttt

SEQ ID NO: 913050 - DNA, 15 bp, Homo sapiens
catttgattatttta

SEQ ID NO: 913051 - DNA, 15 bp, Homo sapiens
atttgattattttag

SEQ ID NO: 913052 - DNA, 15 bp, Homo sapiens
tttgattattttaga

SEQ ID NO: 913053 - DNA, 15 bp, Homo sapiens
ttgattattttagat

SEQ ID NO: 913054 - DNA, 15 bp, Homo sapiens
tgattattttagatc

SEQ ID NO: 913055 - DNA, 15 bp, Homo sapiens
gattattttagatca

SEQ ID NO: 913056 - DNA, 15 bp, Homo sapiens
attattttagatcac

SEQ ID NO: 913057 - DNA, 15 bp, Homo sapiens
ttattttagatcacc

SEQ ID NO: 913058 - DNA, 15 bp, Homo sapiens
tattttagatcacca

SEQ ID NO: 913059 - DNA, 15 bp, Homo sapiens
attttagatcaccaa

SEQ ID NO: 913060 - DNA, 15 bp, Homo sapiens
ttttagatcaccaaa

SEQ ID NO: 913061 - DNA, 15 bp, Homo sapiens
tttagatcaccaaac

SEQ ID NO: 913062 - DNA, 15 bp, Homo sapiens
ttagatcaccaaaca

SEQ ID NO: 913063 - DNA, 15 bp, Homo sapiens
tagatcaccaaacaa

SEQ ID NO: 913064 - DNA, 15 bp, Homo sapiens
agatcaccaaacaaa

SEQ ID NO: 913065 - DNA, 15 bp, Homo sapiens
gatcaccaaacaaaa

SEQ ID NO: 913066 - DNA, 15 bp, Homo sapiens
atcaccaaacaaaat

SEQ ID NO: 913067 - DNA, 15 bp, Homo sapiens
tcaccaaacaaaata

SEQ ID NO: 913068 - DNA, 15 bp, Homo sapiens
caccaaacaaaatac

SEQ ID NO: 913069 - DNA, 15 bp, Homo sapiens
accaaacaaaatact

SEQ ID NO: 913070 - DNA, 15 bp, Homo sapiens
ccaaacaaaatactt

SEQ ID NO: 913071 - DNA, 15 bp, Homo sapiens
caaacaaaatacttc

SEQ ID NO: 913072 - DNA, 15 bp, Homo sapiens
aaacaaaatacttca

SEQ ID NO: 913073 - DNA, 15 bp, Homo sapiens
aacaaaatacttcaa

SEQ ID NO: 913074 - DNA, 15 bp, Homo sapiens
acaaaatacttcaag

SEQ ID NO: 913075 - DNA, 15 bp, Homo sapiens
caaaatacttcaagt

SEQ ID NO: 913076 - DNA, 15 bp, Homo sapiens
aaaatacttcaagtt

SEQ ID NO: 913077 - DNA, 15 bp, Homo sapiens
aaatacttcaagttt

SEQ ID NO: 913078 - DNA, 15 bp, Homo sapiens
aatacttcaagtttt

SEQ ID NO: 913079 - DNA, 15 bp, Homo sapiens
atacttcaagttttc

SEQ ID NO: 913080 - DNA, 15 bp, Homo sapiens
tacttcaagttttcc

SEQ ID NO: 913081 - DNA, 15 bp, Homo sapiens
acttcaagttttcca

SEQ ID NO: 913082 - DNA, 15 bp, Homo sapiens
cttcaagttttccaa

SEQ ID NO: 913083 - DNA, 15 bp, Homo sapiens
ttcaagttttccaag

SEQ ID NO: 913084 - DNA, 15 bp, Homo sapiens
tcaagttttccaaga

SEQ ID NO: 913085 - DNA, 15 bp, Homo sapiens
caagttttccaagat

SEQ ID NO: 913086 - DNA, 15 bp, Homo sapiens
aagttttccaagata

SEQ ID NO: 913087 - DNA, 15 bp, Homo sapiens
agttttccaagatag

SEQ ID NO: 913088 - DNA, 15 bp, Homo sapiens
gttttccaagatagt

SEQ ID NO: 913089 - DNA, 15 bp, Homo sapiens
ttttccaagatagtt

SEQ ID NO: 913090 - DNA, 15 bp, Homo sapiens
tttccaagatagttt

SEQ ID NO: 913091 - DNA, 15 bp, Homo sapiens
ttccaagatagtttg

SEQ ID NO: 913092 - DNA, 15 bp, Homo sapiens
tccaagatagtttgt

SEQ ID NO: 913093 - DNA, 15 bp, Homo sapiens
ccaagatagtttgta

SEQ ID NO: 913094 - DNA, 15 bp, Homo sapiens
caagatagtttgtac

SEQ ID NO: 913095 - DNA, 15 bp, Homo sapiens
aagatagtttgtacc

SEQ ID NO: 913096 - DNA, 15 bp, Homo sapiens
agatagtttgtacca

SEQ ID NO: 913097 - DNA, 15 bp, Homo sapiens
gatagtttgtaccat

SEQ ID NO: 913098 - DNA, 15 bp, Homo sapiens
atagtttgtaccatt

SEQ ID NO: 913099 - DNA, 15 bp, Homo sapiens
tagtttgtaccattt

SEQ ID NO: 913100 - DNA, 15 bp, Homo sapiens
agtttgtaccatttg

SEQ ID NO: 913101 - DNA, 15 bp, Homo sapiens
gtttgtaccatttgg

SEQ ID NO: 913102 - DNA, 15 bp, Homo sapiens
tttgtaccatttggc

SEQ ID NO: 913103 - DNA, 15 bp, Homo sapiens
ttgtaccatttggct

SEQ ID NO: 913104 - DNA, 15 bp, Homo sapiens
tgtaccatttggctc

SEQ ID NO: 913105 - DNA, 15 bp, Homo sapiens
gtaccatttggctca

SEQ ID NO: 913106 - DNA, 15 bp, Homo sapiens
taccatttggctcaa

SEQ ID NO: 913107 - DNA, 15 bp, Homo sapiens
accatttggctcaaa

SEQ ID NO: 913108 - DNA, 15 bp, Homo sapiens
ccatttggctcaaat

SEQ ID NO: 913109 - DNA, 15 bp, Homo sapiens
catttggctcaaatg

SEQ ID NO: 913110 - DNA, 15 bp, Homo sapiens
atttggctcaaatgt

SEQ ID NO: 913111 - DNA, 15 bp, Homo sapiens
tttggctcaaatgtt

SEQ ID NO: 913112 - DNA, 15 bp, Homo sapiens
ttggctcaaatgttt

SEQ ID NO: 913113 - DNA, 15 bp, Homo sapiens
tggctcaaatgtttc

SEQ ID NO: 913114 - DNA, 15 bp, Homo sapiens
ggctcaaatgtttcc

SEQ ID NO: 913115 - DNA, 15 bp, Homo sapiens
gctcaaatgtttcct

SEQ ID NO: 913116 - DNA, 15 bp, Homo sapiens
ctcaaatgtttcctc

SEQ ID NO: 913117 - DNA, 15 bp, Homo sapiens
tcaaatgtttcctct

SEQ ID NO: 913118 - DNA, 15 bp, Homo sapiens
caaatgtttcctctg

SEQ ID NO: 913119 - DNA, 15 bp, Homo sapiens
aaatgtttcctctga

SEQ ID NO: 913120 - DNA, 15 bp, Homo sapiens
aatgtttcctctgag

SEQ ID NO: 913121 - DNA, 15 bp, Homo sapiens
atgtttcctctgagg

SEQ ID NO: 913122 - DNA, 15 bp, Homo sapiens
tgtttcctctgaggg

SEQ ID NO: 913123 - DNA, 15 bp, Homo sapiens
gtttcctctgagggg

SEQ ID NO: 913124 - DNA, 15 bp, Homo sapiens
tttcctctgaggggc

SEQ ID NO: 913125 - DNA, 15 bp, Homo sapiens
ttcctctgaggggct

SEQ ID NO: 913126 - DNA, 15 bp, Homo sapiens
tcctctgaggggcta

SEQ ID NO: 913127 - DNA, 15 bp, Homo sapiens
cctctgaggggctaa

SEQ ID NO: 913128 - DNA, 15 bp, Homo sapiens
ctctgaggggctaat

SEQ ID NO: 913129 - DNA, 15 bp, Homo sapiens
tctgaggggctaatt

SEQ ID NO: 913130 - DNA, 15 bp, Homo sapiens
ctgaggggctaattt

SEQ ID NO: 913131 - DNA, 15 bp, Homo sapiens
tgaggggctaattta

SEQ ID NO: 913132 - DNA, 15 bp, Homo sapiens
gaggggctaatttat

SEQ ID NO: 913133 - DNA, 15 bp, Homo sapiens
aggggctaatttatt

SEQ ID NO: 913134 - DNA, 15 bp, Homo sapiens
ggggctaatttatta

SEQ ID NO: 913135 - DNA, 15 bp, Homo sapiens
gggctaatttattag

SEQ ID NO: 913136 - DNA, 15 bp, Homo sapiens
ggctaatttattagc

SEQ ID NO: 913137 - DNA, 15 bp, Homo sapiens
gctaatttattagca

SEQ ID NO: 913138 - DNA, 15 bp, Homo sapiens
ctaatttattagcaa

SEQ ID NO: 913139 - DNA, 15 bp, Homo sapiens
taatttattagcaac

SEQ ID NO: 913140 - DNA, 15 bp, Homo sapiens
aatttattagcaaca

SEQ ID NO: 913141 - DNA, 15 bp, Homo sapiens
atttattagcaacaa

SEQ ID NO: 913142 - DNA, 15 bp, Homo sapiens
tttattagcaacaac

SEQ ID NO: 913143 - DNA, 15 bp, Homo sapiens
ttattagcaacaaca

SEQ ID NO: 913144 - DNA, 15 bp, Homo sapiens
tattagcaacaacag

SEQ ID NO: 913145 - DNA, 15 bp, Homo sapiens
attagcaacaacaga

SEQ ID NO: 913146 - DNA, 15 bp, Homo sapiens
ttagcaacaacagag

SEQ ID NO: 913147 - DNA, 15 bp, Homo sapiens
tagcaacaacagagt

SEQ ID NO: 913148 - DNA, 15 bp, Homo sapiens
agcaacaacagagtg

SEQ ID NO: 913149 - DNA, 15 bp, Homo sapiens
gcaacaacagagtga

SEQ ID NO: 913150 - DNA, 15 bp, Homo sapiens
caacaacagagtgag

SEQ ID NO: 913151 - DNA, 15 bp, Homo sapiens
aacaacagagtgagt

SEQ ID NO: 913152 - DNA, 15 bp, Homo sapiens
acaacagagtgagtt

SEQ ID NO: 913153 - DNA, 15 bp, Homo sapiens
caacagagtgagtta

SEQ ID NO: 913154 - DNA, 15 bp, Homo sapiens
aacagagtgagttag

SEQ ID NO: 913155 - DNA, 15 bp, Homo sapiens
acagagtgagttaga

SEQ ID NO: 913156 - DNA, 15 bp, Homo sapiens
cagagtgagttagag

SEQ ID NO: 913157 - DNA, 15 bp, Homo sapiens
agagtgagttagaga

SEQ ID NO: 913158 - DNA, 15 bp, Homo sapiens
gagtgagttagagat

SEQ ID NO: 913159 - DNA, 15 bp, Homo sapiens
agtgagttagagata

SEQ ID NO: 913160 - DNA, 15 bp, Homo sapiens
gtgagttagagataa

SEQ ID NO: 913161 - DNA, 15 bp, Homo sapiens
tgagttagagataag

SEQ ID NO: 913162 - DNA, 15 bp, Homo sapiens
gagttagagataaga

SEQ ID NO: 913163 - DNA, 15 bp, Homo sapiens
agttagagataagaa

SEQ ID NO: 913164 - DNA, 15 bp, Homo sapiens
gttagagataagaaa

SEQ ID NO: 913165 - DNA, 15 bp, Homo sapiens
ttagagataagaaag

SEQ ID NO: 913166 - DNA, 15 bp, Homo sapiens
tagagataagaaagg

SEQ ID NO: 913167 - DNA, 15 bp, Homo sapiens
agagataagaaagga

SEQ ID NO: 913168 - DNA, 15 bp, Homo sapiens
gagataagaaaggat

SEQ ID NO: 913169 - DNA, 15 bp, Homo sapiens
agataagaaaggatg

SEQ ID NO: 913170 - DNA, 15 bp, Homo sapiens
gataagaaaggatga

SEQ ID NO: 913171 - DNA, 15 bp, Homo sapiens
ataagaaaggatgag

SEQ ID NO: 913172 - DNA, 15 bp, Homo sapiens
taagaaaggatgaga

SEQ ID NO: 913173 - DNA, 15 bp, Homo sapiens
aagaaaggatgagaa

SEQ ID NO: 913174 - DNA, 15 bp, Homo sapiens
agaaaggatgagaac

SEQ ID NO: 913175 - DNA, 15 bp, Homo sapiens
gaaaggatgagaacc

SEQ ID NO: 913176 - DNA, 15 bp, Homo sapiens
aaaggatgagaaccc

SEQ ID NO: 913177 - DNA, 15 bp, Homo sapiens
aaggatgagaaccca

SEQ ID NO: 913178 - DNA, 15 bp, Homo sapiens
aggatgagaacccaa

SEQ ID NO: 913179 - DNA, 15 bp, Homo sapiens
ggatgagaacccaag

SEQ ID NO: 913180 - DNA, 15 bp, Homo sapiens
gatgagaacccaagt

SEQ ID NO: 913181 - DNA, 15 bp, Homo sapiens
atgagaacccaagta

SEQ ID NO: 913182 - DNA, 15 bp, Homo sapiens
tgagaacccaagtaa

SEQ ID NO: 913183 - DNA, 15 bp, Homo sapiens
gagaacccaagtaat

SEQ ID NO: 913184 - DNA, 15 bp, Homo sapiens
agaacccaagtaatt

SEQ ID NO: 913185 - DNA, 15 bp, Homo sapiens
gaacccaagtaattg

SEQ ID NO: 913186 - DNA, 15 bp, Homo sapiens
aacccaagtaattga

SEQ ID NO: 913187 - DNA, 15 bp, Homo sapiens
acccaagtaattgac

SEQ ID NO: 913188 - DNA, 15 bp, Homo sapiens
cccaagtaattgaca

SEQ ID NO: 913189 - DNA, 15 bp, Homo sapiens
ccaagtaattgacat

SEQ ID NO: 913190 - DNA, 15 bp, Homo sapiens
caagtaattgacatc

SEQ ID NO: 913191 - DNA, 15 bp, Homo sapiens
aagtaattgacatcc

SEQ ID NO: 913192 - DNA, 15 bp, Homo sapiens
agtaattgacatcca

SEQ ID NO: 913193 - DNA, 15 bp, Homo sapiens
gtaattgacatccaa

SEQ ID NO: 913194 - DNA, 15 bp, Homo sapiens
taattgacatccaat

SEQ ID NO: 913195 - DNA, 15 bp, Homo sapiens
aattgacatccaatc

SEQ ID NO: 913196 - DNA, 15 bp, Homo sapiens
attgacatccaatca

SEQ ID NO: 913197 - DNA, 15 bp, Homo sapiens
ttgacatccaatcag

SEQ ID NO: 913198 - DNA, 15 bp, Homo sapiens
tgacatccaatcagg

SEQ ID NO: 913199 - DNA, 15 bp, Homo sapiens
gacatccaatcagga

SEQ ID NO: 913200 - DNA, 15 bp, Homo sapiens
acatccaatcaggag

SEQ ID NO: 913201 - DNA, 15 bp, Homo sapiens
catccaatcaggagg

SEQ ID NO: 913202 - DNA, 15 bp, Homo sapiens
atccaatcaggaggc

SEQ ID NO: 913203 - DNA, 15 bp, Homo sapiens
tccaatcaggaggcc

SEQ ID NO: 913204 - DNA, 15 bp, Homo sapiens
ccaatcaggaggcct

SEQ ID NO: 913205 - DNA, 15 bp, Homo sapiens
caatcaggaggcctt

SEQ ID NO: 913206 - DNA, 15 bp, Homo sapiens
aatcaggaggccttt

SEQ ID NO: 913207 - DNA, 15 bp, Homo sapiens
atcaggaggcctttg

SEQ ID NO: 913208 - DNA, 15 bp, Homo sapiens
tcaggaggcctttgt

SEQ ID NO: 913209 - DNA, 15 bp, Homo sapiens
caggaggcctttgtc

SEQ ID NO: 913210 - DNA, 15 bp, Homo sapiens
aggaggcctttgtct

SEQ ID NO: 913211 - DNA, 15 bp, Homo sapiens
ggaggcctttgtcta

SEQ ID NO: 913212 - DNA, 15 bp, Homo sapiens
gaggcctttgtctaa

SEQ ID NO: 913213 - DNA, 15 bp, Homo sapiens
aggcctttgtctaag

SEQ ID NO: 913214 - DNA, 15 bp, Homo sapiens
ggcctttgtctaaga

SEQ ID NO: 913215 - DNA, 15 bp, Homo sapiens
gcctttgtctaagaa

SEQ ID NO: 913216 - DNA, 15 bp, Homo sapiens
cctttgtctaagaat

SEQ ID NO: 913217 - DNA, 15 bp, Homo sapiens
ctttgtctaagaatc

SEQ ID NO: 913218 - DNA, 15 bp, Homo sapiens
tttgtctaagaatct

SEQ ID NO: 913219 - DNA, 15 bp, Homo sapiens
ttgtctaagaatctg

SEQ ID NO: 913220 - DNA, 15 bp, Homo sapiens
tgtctaagaatctga

SEQ ID NO: 913221 - DNA, 15 bp, Homo sapiens
gtctaagaatctgag

SEQ ID NO: 913222 - DNA, 15 bp, Homo sapiens
tctaagaatctgagg

SEQ ID NO: 913223 - DNA, 15 bp, Homo sapiens
ctaagaatctgaggt

SEQ ID NO: 913224 - DNA, 15 bp, Homo sapiens
taagaatctgaggtg

SEQ ID NO: 913225 - DNA, 15 bp, Homo sapiens
aagaatctgaggtga

SEQ ID NO: 913226 - DNA, 15 bp, Homo sapiens
agaatctgaggtgac

SEQ ID NO: 913227 - DNA, 15 bp, Homo sapiens
gaatctgaggtgact

SEQ ID NO: 913228 - DNA, 15 bp, Homo sapiens
aatctgaggtgacta

SEQ ID NO: 913229 - DNA, 15 bp, Homo sapiens
atctgaggtgactaa

SEQ ID NO: 913230 - DNA, 15 bp, Homo sapiens
tctgaggtgactaat

SEQ ID NO: 913231 - DNA, 15 bp, Homo sapiens
ctgaggtgactaata

SEQ ID NO: 913232 - DNA, 15 bp, Homo sapiens
tgaggtgactaataa

SEQ ID NO: 913233 - DNA, 15 bp, Homo sapiens
gaggtgactaataaa

SEQ ID NO: 913234 - DNA, 15 bp, Homo sapiens
aggtgactaataaaa

SEQ ID NO: 913235 - DNA, 15 bp, Homo sapiens
ggtgactaataaaaa

SEQ ID NO: 913236 - DNA, 15 bp, Homo sapiens
gtgactaataaaaac

SEQ ID NO: 913237 - DNA, 15 bp, Homo sapiens
tgactaataaaaact

SEQ ID NO: 913238 - DNA, 15 bp, Homo sapiens
gactaataaaaactg

SEQ ID NO: 913239 - DNA, 15 bp, Homo sapiens
actaataaaaactga

SEQ ID NO: 913240 - DNA, 15 bp, Homo sapiens
ctaataaaaactgac

SEQ ID NO: 913241 - DNA, 15 bp, Homo sapiens
taataaaaactgaca

SEQ ID NO: 913242 - DNA, 15 bp, Homo sapiens
aataaaaactgacaa

SEQ ID NO: 913243 - DNA, 15 bp, Homo sapiens
ataaaaactgacaat

SEQ ID NO: 913244 - DNA, 15 bp, Homo sapiens
taaaaactgacaatc

SEQ ID NO: 913245 - DNA, 15 bp, Homo sapiens
aaaaactgacaatca

SEQ ID NO: 913246 - DNA, 15 bp, Homo sapiens
aaaactgacaatcaa

SEQ ID NO: 913247 - DNA, 15 bp, Homo sapiens
aaactgacaatcaaa

SEQ ID NO: 913248 - DNA, 15 bp, Homo sapiens
aactgacaatcaaag

SEQ ID NO: 913249 - DNA, 15 bp, Homo sapiens
actgacaatcaaagg

SEQ ID NO: 913250 - DNA, 15 bp, Homo sapiens
ctgacaatcaaaggg

SEQ ID NO: 913251 - DNA, 15 bp, Homo sapiens
tgacaatcaaaggga

SEQ ID NO: 913252 - DNA, 15 bp, Homo sapiens
gacaatcaaagggag

SEQ ID NO: 913253 - DNA, 15 bp, Homo sapiens
acaatcaaagggagg

SEQ ID NO: 913254 - DNA, 15 bp, Homo sapiens
caatcaaagggaggg

SEQ ID NO: 913255 - DNA, 15 bp, Homo sapiens
aatcaaagggaggga

SEQ ID NO: 913256 - DNA, 15 bp, Homo sapiens
atcaaagggagggag

SEQ ID NO: 913257 - DNA, 15 bp, Homo sapiens
tcaaagggagggaga

SEQ ID NO: 913258 - DNA, 15 bp, Homo sapiens
caaagggagggagac

SEQ ID NO: 913259 - DNA, 15 bp, Homo sapiens
aaagggagggagact

SEQ ID NO: 913260 - DNA, 15 bp, Homo sapiens
aagggagggagactt

SEQ ID NO: 913261 - DNA, 15 bp, Homo sapiens
agggagggagacttc

SEQ ID NO: 913262 - DNA, 15 bp, Homo sapiens
gggagggagacttct

SEQ ID NO: 913263 - DNA, 15 bp, Homo sapiens
ggagggagacttcta

SEQ ID NO: 913264 - DNA, 15 bp, Homo sapiens
gagggagacttctat

SEQ ID NO: 913265 - DNA, 15 bp, Homo sapiens
agggagacttctatc

SEQ ID NO: 913266 - DNA, 15 bp, Homo sapiens
gggagacttctatct

SEQ ID NO: 913267 - DNA, 15 bp, Homo sapiens
ggagacttctatctg

SEQ ID NO: 913268 - DNA, 15 bp, Homo sapiens
gagacttctatctgg

SEQ ID NO: 913269 - DNA, 15 bp, Homo sapiens
agacttctatctgga

SEQ ID NO: 913270 - DNA, 15 bp, Homo sapiens
gacttctatctggag

SEQ ID NO: 913271 - DNA, 15 bp, Homo sapiens
acttctatctggagg

SEQ ID NO: 913272 - DNA, 15 bp, Homo sapiens
cttctatctggaggg

SEQ ID NO: 913273 - DNA, 15 bp, Homo sapiens
ttctatctggagggt

SEQ ID NO: 913274 - DNA, 15 bp, Homo sapiens
tctatctggagggta

SEQ ID NO: 913275 - DNA, 15 bp, Homo sapiens
ctatctggagggtat

SEQ ID NO: 913276 - DNA, 15 bp, Homo sapiens
tatctggagggtatt

SEQ ID NO: 913277 - DNA, 15 bp, Homo sapiens
atctggagggtattt

SEQ ID NO: 913278 - DNA, 15 bp, Homo sapiens
tctggagggtatttc

SEQ ID NO: 913279 - DNA, 15 bp, Homo sapiens
ctggagggtatttct

SEQ ID NO: 913280 - DNA, 15 bp, Homo sapiens
tggagggtatttctc

SEQ ID NO: 913281 - DNA, 15 bp, Homo sapiens
ggagggtatttctca

SEQ ID NO: 913282 - DNA, 15 bp, Homo sapiens
gagggtatttctcat

SEQ ID NO: 913283 - DNA, 15 bp, Homo sapiens
agggtatttctcatg

SEQ ID NO: 913284 - DNA, 15 bp, Homo sapiens
gggtatttctcatga

SEQ ID NO: 913285 - DNA, 15 bp, Homo sapiens
ggtatttctcatgaa

SEQ ID NO: 913286 - DNA, 15 bp, Homo sapiens
gtatttctcatgaaa

SEQ ID NO: 913287 - DNA, 15 bp, Homo sapiens
tatttctcatgaaaa

SEQ ID NO: 913288 - DNA, 15 bp, Homo sapiens
atttctcatgaaaac

SEQ ID NO: 913289 - DNA, 15 bp, Homo sapiens
tttctcatgaaaaca

SEQ ID NO: 913290 - DNA, 15 bp, Homo sapiens
ttctcatgaaaacaa

SEQ ID NO: 913291 - DNA, 15 bp, Homo sapiens
tctcatgaaaacaaa

SEQ ID NO: 913292 - DNA, 15 bp, Homo sapiens
ctcatgaaaacaaat

SEQ ID NO: 913293 - DNA, 15 bp, Homo sapiens
tcatgaaaacaaata

SEQ ID NO: 913294 - DNA, 15 bp, Homo sapiens
catgaaaacaaataa

SEQ ID NO: 913295 - DNA, 15 bp, Homo sapiens
atgaaaacaaataat

SEQ ID NO: 913296 - DNA, 15 bp, Homo sapiens
tgaaaacaaataatg

SEQ ID NO: 913297 - DNA, 15 bp, Homo sapiens
gaaaacaaataatgc

SEQ ID NO: 913298 - DNA, 15 bp, Homo sapiens
aaaacaaataatgca

SEQ ID NO: 913299 - DNA, 15 bp, Homo sapiens
aaacaaataatgcaa

SEQ ID NO: 913300 - DNA, 15 bp, Homo sapiens
aacaaataatgcaaa

SEQ ID NO: 913301 - DNA, 15 bp, Homo sapiens
acaaataatgcaaaa

SEQ ID NO: 913302 - DNA, 15 bp, Homo sapiens
caaataatgcaaaat

SEQ ID NO: 913303 - DNA, 15 bp, Homo sapiens
aaataatgcaaaatt

SEQ ID NO: 913304 - DNA, 15 bp, Homo sapiens
aataatgcaaaatta

SEQ ID NO: 913305 - DNA, 15 bp, Homo sapiens
ataatgcaaaattaa

SEQ ID NO: 913306 - DNA, 15 bp, Homo sapiens
taatgcaaaattaaa

SEQ ID NO: 913307 - DNA, 15 bp, Homo sapiens
aatgcaaaattaaat

SEQ ID NO: 913308 - DNA, 15 bp, Homo sapiens
atgcaaaattaaatt

SEQ ID NO: 913309 - DNA, 15 bp, Homo sapiens
tgcaaaattaaatta

SEQ ID NO: 913310 - DNA, 15 bp, Homo sapiens
gcaaaattaaattaa

SEQ ID NO: 913311 - DNA, 15 bp, Homo sapiens
caaaattaaattaaa

SEQ ID NO: 913312 - DNA, 15 bp, Homo sapiens
aaaattaaattaaag

SEQ ID NO: 913313 - DNA, 15 bp, Homo sapiens
aaattaaattaaaga

SEQ ID NO: 913314 - DNA, 15 bp, Homo sapiens
aattaaattaaagat

SEQ ID NO: 913315 - DNA, 15 bp, Homo sapiens
attaaattaaagata

SEQ ID NO: 913316 - DNA, 15 bp, Homo sapiens
ttaaattaaagatat

SEQ ID NO: 913317 - DNA, 15 bp, Homo sapiens
taaattaaagatatc

SEQ ID NO: 913318 - DNA, 15 bp, Homo sapiens
aaattaaagatatca

SEQ ID NO: 913319 - DNA, 15 bp, Homo sapiens
aattaaagatatcac

SEQ ID NO: 913320 - DNA, 15 bp, Homo sapiens
attaaagatatcacc

SEQ ID NO: 913321 - DNA, 15 bp, Homo sapiens
ttaaagatatcaccc

SEQ ID NO: 913322 - DNA, 15 bp, Homo sapiens
taaagatatcacccc

SEQ ID NO: 913323 - DNA, 15 bp, Homo sapiens
aaagatatcacccca

SEQ ID NO: 913324 - DNA, 15 bp, Homo sapiens
aagatatcaccccac

SEQ ID NO: 913325 - DNA, 15 bp, Homo sapiens
agatatcaccccact

SEQ ID NO: 913326 - DNA, 15 bp, Homo sapiens
gatatcaccccactg

SEQ ID NO: 913327 - DNA, 15 bp, Homo sapiens
atatcaccccactga

SEQ ID NO: 913328 - DNA, 15 bp, Homo sapiens
tatcaccccactgaa

SEQ ID NO: 913329 - DNA, 15 bp, Homo sapiens
atcaccccactgaag

SEQ ID NO: 913330 - DNA, 15 bp, Homo sapiens
tcaccccactgaagc

SEQ ID NO: 913331 - DNA, 15 bp, Homo sapiens
caccccactgaagcg

SEQ ID NO: 913332 - DNA, 15 bp, Homo sapiens
accccactgaagcga

SEQ ID NO: 913333 - DNA, 15 bp, Homo sapiens
ccccactgaagcgat

SEQ ID NO: 913334 - DNA, 15 bp, Homo sapiens
cccactgaagcgatt

SEQ ID NO: 913335 - DNA, 15 bp, Homo sapiens
ccactgaagcgattg

SEQ ID NO: 913336 - DNA, 15 bp, Homo sapiens
cactgaagcgattgc

SEQ ID NO: 913337 - DNA, 15 bp, Homo sapiens
actgaagcgattgct

SEQ ID NO: 913338 - DNA, 15 bp, Homo sapiens
ctgaagcgattgcta

SEQ ID NO: 913339 - DNA, 15 bp, Homo sapiens
tgaagcgattgctat

SEQ ID NO: 913340 - DNA, 15 bp, Homo sapiens
gaagcgattgctatt

SEQ ID NO: 913341 - DNA, 15 bp, Homo sapiens
aagcgattgctattc

SEQ ID NO: 913342 - DNA, 15 bp, Homo sapiens
agcgattgctattcc

SEQ ID NO: 913343 - DNA, 15 bp, Homo sapiens
gcgattgctattccc

SEQ ID NO: 913344 - DNA, 15 bp, Homo sapiens
cgattgctattccca

SEQ ID NO: 913345 - DNA, 15 bp, Homo sapiens
gattgctattcccaa

SEQ ID NO: 913346 - DNA, 15 bp, Homo sapiens
attgctattcccaac

SEQ ID NO: 913347 - DNA, 15 bp, Homo sapiens
ttgctattcccaact

SEQ ID NO: 913348 - DNA, 15 bp, Homo sapiens
tgctattcccaactt

SEQ ID NO: 913349 - DNA, 15 bp, Homo sapiens
gctattcccaacttt

SEQ ID NO: 913350 - DNA, 15 bp, Homo sapiens
ctattcccaacttta

SEQ ID NO: 913351 - DNA, 15 bp, Homo sapiens
tattcccaactttat

SEQ ID NO: 913352 - DNA, 15 bp, Homo sapiens
attcccaactttatc

SEQ ID NO: 913353 - DNA, 15 bp, Homo sapiens
ttcccaactttatcc

SEQ ID NO: 913354 - DNA, 15 bp, Homo sapiens
tcccaactttatcct

SEQ ID NO: 913355 - DNA, 15 bp, Homo sapiens
cccaactttatcctt

SEQ ID NO: 913356 - DNA, 15 bp, Homo sapiens
ccaactttatcctta

SEQ ID NO: 913357 - DNA, 15 bp, Homo sapiens
caactttatccttag

SEQ ID NO: 913358 - DNA, 15 bp, Homo sapiens
aactttatccttaga

SEQ ID NO: 913359 - DNA, 15 bp, Homo sapiens
actttatccttagaa

SEQ ID NO: 913360 - DNA, 15 bp, Homo sapiens
ctttatccttagaat

SEQ ID NO: 913361 - DNA, 15 bp, Homo sapiens
tttatccttagaatt

SEQ ID NO: 913362 - DNA, 15 bp, Homo sapiens
ttatccttagaattc

SEQ ID NO: 913363 - DNA, 15 bp, Homo sapiens
tatccttagaattct

SEQ ID NO: 913364 - DNA, 15 bp, Homo sapiens
atccttagaattctt

SEQ ID NO: 913365 - DNA, 15 bp, Homo sapiens
tccttagaattcttt

SEQ ID NO: 913366 - DNA, 15 bp, Homo sapiens
ccttagaattctttt

SEQ ID NO: 913367 - DNA, 15 bp, Homo sapiens
cttagaattcttttt

SEQ ID NO: 913368 - DNA, 15 bp, Homo sapiens
ttagaattctttttc

SEQ ID NO: 913369 - DNA, 15 bp, Homo sapiens
tagaattctttttcc

SEQ ID NO: 913370 - DNA, 15 bp, Homo sapiens
agaattctttttcca

SEQ ID NO: 913371 - DNA, 15 bp, Homo sapiens
gaattctttttccaa

SEQ ID NO: 913372 - DNA, 15 bp, Homo sapiens
aattctttttccaag

SEQ ID NO: 913373 - DNA, 15 bp, Homo sapiens
attctttttccaagc

SEQ ID NO: 913374 - DNA, 15 bp, Homo sapiens
ttctttttccaagct

SEQ ID NO: 913375 - DNA, 15 bp, Homo sapiens
tctttttccaagctt

SEQ ID NO: 913376 - DNA, 15 bp, Homo sapiens
ctttttccaagcttg

SEQ ID NO: 913377 - DNA, 15 bp, Homo sapiens
tttttccaagcttga

SEQ ID NO: 913378 - DNA, 15 bp, Homo sapiens
ttttccaagcttgag

SEQ ID NO: 913379 - DNA, 15 bp, Homo sapiens
tttccaagcttgaga

SEQ ID NO: 913380 - DNA, 15 bp, Homo sapiens
ttccaagcttgagat

SEQ ID NO: 913381 - DNA, 15 bp, Homo sapiens
tccaagcttgagatt

SEQ ID NO: 913382 - DNA, 15 bp, Homo sapiens
ccaagcttgagatta

SEQ ID NO: 913383 - DNA, 15 bp, Homo sapiens
caagcttgagattac

SEQ ID NO: 913384 - DNA, 15 bp, Homo sapiens
aagcttgagattact

SEQ ID NO: 913385 - DNA, 15 bp, Homo sapiens
agcttgagattactg

SEQ ID NO: 913386 - DNA, 15 bp, Homo sapiens
gcttgagattactgc

SEQ ID NO: 913387 - DNA, 15 bp, Homo sapiens
cttgagattactgca

SEQ ID NO: 913388 - DNA, 15 bp, Homo sapiens
ttgagattactgcat

SEQ ID NO: 913389 - DNA, 15 bp, Homo sapiens
tgagattactgcatg

SEQ ID NO: 913390 - DNA, 15 bp, Homo sapiens
gagattactgcatgg

SEQ ID NO: 913391 - DNA, 15 bp, Homo sapiens
agattactgcatggg

SEQ ID NO: 913392 - DNA, 15 bp, Homo sapiens
gattactgcatgggc

SEQ ID NO: 913393 - DNA, 15 bp, Homo sapiens
attactgcatgggca

SEQ ID NO: 913394 - DNA, 15 bp, Homo sapiens
ttactgcatgggcaa

SEQ ID NO: 913395 - DNA, 15 bp, Homo sapiens
tactgcatgggcaaa

SEQ ID NO: 913396 - DNA, 15 bp, Homo sapiens
actgcatgggcaaat

SEQ ID NO: 913397 - DNA, 15 bp, Homo sapiens
ctgcatgggcaaatg

SEQ ID NO: 913398 - DNA, 15 bp, Homo sapiens
tgcatgggcaaatgc

SEQ ID NO: 913399 - DNA, 15 bp, Homo sapiens
gcatgggcaaatgca

SEQ ID NO: 913400 - DNA, 15 bp, Homo sapiens
catgggcaaatgcac

SEQ ID NO: 913401 - DNA, 15 bp, Homo sapiens
atgggcaaatgcact

SEQ ID NO: 913402 - DNA, 15 bp, Homo sapiens
tgggcaaatgcactc

SEQ ID NO: 913403 - DNA, 15 bp, Homo sapiens
gggcaaatgcactcc

SEQ ID NO: 913404 - DNA, 15 bp, Homo sapiens
ggcaaatgcactcca

SEQ ID NO: 913405 - DNA, 15 bp, Homo sapiens
gcaaatgcactccac

SEQ ID NO: 913406 - DNA, 15 bp, Homo sapiens
caaatgcactccact

SEQ ID NO: 913407 - DNA, 15 bp, Homo sapiens
aaatgcactccactg

SEQ ID NO: 913408 - DNA, 15 bp, Homo sapiens
aatgcactccactga

SEQ ID NO: 913409 - DNA, 15 bp, Homo sapiens
atgcactccactgag

SEQ ID NO: 913410 - DNA, 15 bp, Homo sapiens
tgcactccactgagc

SEQ ID NO: 913411 - DNA, 15 bp, Homo sapiens
gcactccactgagcc

SEQ ID NO: 913412 - DNA, 15 bp, Homo sapiens
cactccactgagccg

SEQ ID NO: 913413 - DNA, 15 bp, Homo sapiens
actccactgagccgc

SEQ ID NO: 913414 - DNA, 15 bp, Homo sapiens
ctccactgagccgca

SEQ ID NO: 913415 - DNA, 15 bp, Homo sapiens
tccactgagccgcac

SEQ ID NO: 913416 - DNA, 15 bp, Homo sapiens
ccactgagccgcaca

SEQ ID NO: 913417 - DNA, 15 bp, Homo sapiens
cactgagccgcacaa

SEQ ID NO: 913418 - DNA, 15 bp, Homo sapiens
actgagccgcacaag

SEQ ID NO: 913419 - DNA, 15 bp, Homo sapiens
ctgagccgcacaagc

SEQ ID NO: 913420 - DNA, 15 bp, Homo sapiens
tgagccgcacaagca

SEQ ID NO: 913421 - DNA, 15 bp, Homo sapiens
gagccgcacaagcac

SEQ ID NO: 913422 - DNA, 15 bp, Homo sapiens
agccgcacaagcaca

SEQ ID NO: 913423 - DNA, 15 bp, Homo sapiens
gccgcacaagcacaa

SEQ ID NO: 913424 - DNA, 15 bp, Homo sapiens
ccgcacaagcacaag

SEQ ID NO: 913425 - DNA, 15 bp, Homo sapiens
cgcacaagcacaagc

SEQ ID NO: 913426 - DNA, 15 bp, Homo sapiens
gcacaagcacaagca

SEQ ID NO: 913427 - DNA, 15 bp, Homo sapiens
cacaagcacaagcac

SEQ ID NO: 913428 - DNA, 15 bp, Homo sapiens
acaagcacaagcaca

SEQ ID NO: 913429 - DNA, 15 bp, Homo sapiens
caagcacaagcacac

SEQ ID NO: 913430 - DNA, 15 bp, Homo sapiens
aagcacaagcacacc

SEQ ID NO: 913431 - DNA, 15 bp, Homo sapiens
agcacaagcacacct

SEQ ID NO: 913432 - DNA, 15 bp, Homo sapiens
gcacaagcacaccta

SEQ ID NO: 913433 - DNA, 15 bp, Homo sapiens
cacaagcacacctag

SEQ ID NO: 913434 - DNA, 15 bp, Homo sapiens
acaagcacacctaga

SEQ ID NO: 913435 - DNA, 15 bp, Homo sapiens
caagcacacctagat

SEQ ID NO: 913436 - DNA, 15 bp, Homo sapiens
aagcacacctagatc

SEQ ID NO: 913437 - DNA, 15 bp, Homo sapiens
agcacacctagatca

SEQ ID NO: 913438 - DNA, 15 bp, Homo sapiens
gcacacctagatcaa

SEQ ID NO: 913439 - DNA, 15 bp, Homo sapiens
cacacctagatcaat

SEQ ID NO: 913440 - DNA, 15 bp, Homo sapiens
acacctagatcaatc

SEQ ID NO: 913441 - DNA, 15 bp, Homo sapiens
cacctagatcaatca

SEQ ID NO: 913442 - DNA, 15 bp, Homo sapiens
acctagatcaatcaa

SEQ ID NO: 913443 - DNA, 15 bp, Homo sapiens
cctagatcaatcaac

SEQ ID NO: 913444 - DNA, 15 bp, Homo sapiens
ctagatcaatcaacc

SEQ ID NO: 913445 - DNA, 15 bp, Homo sapiens
tagatcaatcaacca

SEQ ID NO: 913446 - DNA, 15 bp, Homo sapiens
agatcaatcaaccag

SEQ ID NO: 913447 - DNA, 15 bp, Homo sapiens
gatcaatcaaccagt

SEQ ID NO: 913448 - DNA, 15 bp, Homo sapiens
atcaatcaaccagta

SEQ ID NO: 913449 - DNA, 15 bp, Homo sapiens
tcaatcaaccagtag

SEQ ID NO: 913450 - DNA, 15 bp, Homo sapiens
caatcaaccagtagt

SEQ ID NO: 913451 - DNA, 15 bp, Homo sapiens
aatcaaccagtagtc

SEQ ID NO: 913452 - DNA, 15 bp, Homo sapiens
atcaaccagtagtca

SEQ ID NO: 913453 - DNA, 15 bp, Homo sapiens
tcaaccagtagtcag

SEQ ID NO: 913454 - DNA, 15 bp, Homo sapiens
caaccagtagtcagc

SEQ ID NO: 913455 - DNA, 15 bp, Homo sapiens
aaccagtagtcagcc

SEQ ID NO: 913456 - DNA, 15 bp, Homo sapiens
accagtagtcagcca

SEQ ID NO: 913457 - DNA, 15 bp, Homo sapiens
ccagtagtcagccaa

SEQ ID NO: 913458 - DNA, 15 bp, Homo sapiens
cagtagtcagccaat

SEQ ID NO: 913459 - DNA, 15 bp, Homo sapiens
agtagtcagccaatc

SEQ ID NO: 913460 - DNA, 15 bp, Homo sapiens
gtagtcagccaatca

SEQ ID NO: 913461 - DNA, 15 bp, Homo sapiens
tagtcagccaatcaa

SEQ ID NO: 913462 - DNA, 15 bp, Homo sapiens
agtcagccaatcaat

SEQ ID NO: 913463 - DNA, 15 bp, Homo sapiens
gtcagccaatcaatg

SEQ ID NO: 913464 - DNA, 15 bp, Homo sapiens
tcagccaatcaatga

SEQ ID NO: 913465 - DNA, 15 bp, Homo sapiens
cagccaatcaatgaa

SEQ ID NO: 913466 - DNA, 15 bp, Homo sapiens
agccaatcaatgaaa

SEQ ID NO: 913467 - DNA, 15 bp, Homo sapiens
gccaatcaatgaaat

SEQ ID NO: 913468 - DNA, 15 bp, Homo sapiens
ccaatcaatgaaatc

SEQ ID NO: 913469 - DNA, 15 bp, Homo sapiens
caatcaatgaaatct

SEQ ID NO: 913470 - DNA, 15 bp, Homo sapiens
aatcaatgaaatcta

SEQ ID NO: 913471 - DNA, 15 bp, Homo sapiens
atcaatgaaatctat

SEQ ID NO: 913472 - DNA, 15 bp, Homo sapiens
tcaatgaaatctatc

SEQ ID NO: 913473 - DNA, 15 bp, Homo sapiens
caatgaaatctatcc

SEQ ID NO: 913474 - DNA, 15 bp, Homo sapiens
aatgaaatctatcca

SEQ ID NO: 913475 - DNA, 15 bp, Homo sapiens
atgaaatctatccaa

SEQ ID NO: 913476 - DNA, 15 bp, Homo sapiens
tgaaatctatccaaa

SEQ ID NO: 913477 - DNA, 15 bp, Homo sapiens
gaaatctatccaaag

SEQ ID NO: 913478 - DNA, 15 bp, Homo sapiens
aaatctatccaaagc

SEQ ID NO: 913479 - DNA, 15 bp, Homo sapiens
aatctatccaaagcc

SEQ ID NO: 913480 - DNA, 15 bp, Homo sapiens
atctatccaaagcca

SEQ ID NO: 913481 - DNA, 15 bp, Homo sapiens
tctatccaaagccaa

SEQ ID NO: 913482 - DNA, 15 bp, Homo sapiens
ctatccaaagccaaa

SEQ ID NO: 913483 - DNA, 15 bp, Homo sapiens
tatccaaagccaaag

SEQ ID NO: 913484 - DNA, 15 bp, Homo sapiens
atccaaagccaaagt

SEQ ID NO: 913485 - DNA, 15 bp, Homo sapiens
tccaaagccaaagtt

SEQ ID NO: 913486 - DNA, 15 bp, Homo sapiens
ccaaagccaaagttt

SEQ ID NO: 913487 - DNA, 15 bp, Homo sapiens
caaagccaaagtttt

SEQ ID NO: 913488 - DNA, 15 bp, Homo sapiens
aaagccaaagttttc

SEQ ID NO: 913489 - DNA, 15 bp, Homo sapiens
aagccaaagttttct

SEQ ID NO: 913490 - DNA, 15 bp, Homo sapiens
agccaaagttttctt

SEQ ID NO: 913491 - DNA, 15 bp, Homo sapiens
gccaaagttttcttt

SEQ ID NO: 913492 - DNA, 15 bp, Homo sapiens
ccaaagttttctttt

SEQ ID NO: 913493 - DNA, 15 bp, Homo sapiens
caaagttttcttttc

SEQ ID NO: 913494 - DNA, 15 bp, Homo sapiens
aaagttttcttttcc

SEQ ID NO: 913495 - DNA, 15 bp, Homo sapiens
aagttttcttttcct

SEQ ID NO: 913496 - DNA, 15 bp, Homo sapiens
agttttcttttccta

SEQ ID NO: 913497 - DNA, 15 bp, Homo sapiens
gttttcttttcctaa

SEQ ID NO: 913498 - DNA, 15 bp, Homo sapiens
ttttcttttcctaaa

SEQ ID NO: 913499 - DNA, 15 bp, Homo sapiens
tttcttttcctaaat

SEQ ID NO: 913500 - DNA, 15 bp, Homo sapiens
ttcttttcctaaatg

SEQ ID NO: 913501 - DNA, 15 bp, Homo sapiens
tcttttcctaaatgt

SEQ ID NO: 913502 - DNA, 15 bp, Homo sapiens
cttttcctaaatgta

SEQ ID NO: 913503 - DNA, 15 bp, Homo sapiens
ttttcctaaatgtag

SEQ ID NO: 913504 - DNA, 15 bp, Homo sapiens
tttcctaaatgtagc

SEQ ID NO: 913505 - DNA, 15 bp, Homo sapiens
ttcctaaatgtagcg

SEQ ID NO: 913506 - DNA, 15 bp, Homo sapiens
tcctaaatgtagcga

SEQ ID NO: 913507 - DNA, 15 bp, Homo sapiens
cctaaatgtagcgag

SEQ ID NO: 913508 - DNA, 15 bp, Homo sapiens
ctaaatgtagcgaga

SEQ ID NO: 913509 - DNA, 15 bp, Homo sapiens
taaatgtagcgagat

SEQ ID NO: 913510 - DNA, 15 bp, Homo sapiens
aaatgtagcgagata

SEQ ID NO: 913511 - DNA, 15 bp, Homo sapiens
aatgtagcgagataa

SEQ ID NO: 913512 - DNA, 15 bp, Homo sapiens
atgtagcgagataat

SEQ ID NO: 913513 - DNA, 15 bp, Homo sapiens
tgtagcgagataatt

SEQ ID NO: 913514 - DNA, 15 bp, Homo sapiens
gtagcgagataattg

SEQ ID NO: 913515 - DNA, 15 bp, Homo sapiens
tagcgagataattgg

SEQ ID NO: 913516 - DNA, 15 bp, Homo sapiens
agcgagataattggc

SEQ ID NO: 913517 - DNA, 15 bp, Homo sapiens
gcgagataattggct

SEQ ID NO: 913518 - DNA, 15 bp, Homo sapiens
cgagataattggctt

SEQ ID NO: 913519 - DNA, 15 bp, Homo sapiens
gagataattggcttt

SEQ ID NO: 913520 - DNA, 15 bp, Homo sapiens
agataattggctttg

SEQ ID NO: 913521 - DNA, 15 bp, Homo sapiens
gataattggctttgc

SEQ ID NO: 913522 - DNA, 15 bp, Homo sapiens
ataattggctttgct

SEQ ID NO: 913523 - DNA, 15 bp, Homo sapiens
taattggctttgctc

SEQ ID NO: 913524 - DNA, 15 bp, Homo sapiens
aattggctttgctct

SEQ ID NO: 913525 - DNA, 15 bp, Homo sapiens
attggctttgctcta

SEQ ID NO: 913526 - DNA, 15 bp, Homo sapiens
ttggctttgctctac

SEQ ID NO: 913527 - DNA, 15 bp, Homo sapiens
tggctttgctctaca

SEQ ID NO: 913528 - DNA, 15 bp, Homo sapiens
ggctttgctctacac

SEQ ID NO: 913529 - DNA, 15 bp, Homo sapiens
gctttgctctacact

SEQ ID NO: 913530 - DNA, 15 bp, Homo sapiens
ctttgctctacactg

SEQ ID NO: 913531 - DNA, 15 bp, Homo sapiens
tttgctctacactgt

SEQ ID NO: 913532 - DNA, 15 bp, Homo sapiens
ttgctctacactgtt

SEQ ID NO: 913533 - DNA, 15 bp, Homo sapiens
tgctctacactgttc

SEQ ID NO: 913534 - DNA, 15 bp, Homo sapiens
gctctacactgttct

SEQ ID NO: 913535 - DNA, 15 bp, Homo sapiens
ctctacactgttctt

SEQ ID NO: 913536 - DNA, 15 bp, Homo sapiens
tctacactgttcttt

SEQ ID NO: 913537 - DNA, 15 bp, Homo sapiens
ctacactgttctttg

SEQ ID NO: 913538 - DNA, 15 bp, Homo sapiens
tacactgttctttga

SEQ ID NO: 913539 - DNA, 15 bp, Homo sapiens
acactgttctttgat

SEQ ID NO: 913540 - DNA, 15 bp, Homo sapiens
cactgttctttgata

SEQ ID NO: 913541 - DNA, 15 bp, Homo sapiens
actgttctttgatag

SEQ ID NO: 913542 - DNA, 15 bp, Homo sapiens
ctgttctttgataga

SEQ ID NO: 913543 - DNA, 15 bp, Homo sapiens
tgttctttgatagag

SEQ ID NO: 913544 - DNA, 15 bp, Homo sapiens
gttctttgatagaga

SEQ ID NO: 913545 - DNA, 15 bp, Homo sapiens
ttctttgatagagag

SEQ ID NO: 913546 - DNA, 15 bp, Homo sapiens
tctttgatagagagt

SEQ ID NO: 913547 - DNA, 15 bp, Homo sapiens
ctttgatagagagtt

SEQ ID NO: 913548 - DNA, 15 bp, Homo sapiens
tttgatagagagttc

SEQ ID NO: 913549 - DNA, 15 bp, Homo sapiens
ttgatagagagttca

SEQ ID NO: 913550 - DNA, 15 bp, Homo sapiens
tgatagagagttcac

SEQ ID NO: 913551 - DNA, 15 bp, Homo sapiens
gatagagagttcact

SEQ ID NO: 913552 - DNA, 15 bp, Homo sapiens
atagagagttcactg

SEQ ID NO: 913553 - DNA, 15 bp, Homo sapiens
tagagagttcactga

SEQ ID NO: 913554 - DNA, 15 bp, Homo sapiens
agagagttcactgac

SEQ ID NO: 913555 - DNA, 15 bp, Homo sapiens
gagagttcactgact

SEQ ID NO: 913556 - DNA, 15 bp, Homo sapiens
agagttcactgactt

SEQ ID NO: 913557 - DNA, 15 bp, Homo sapiens
gagttcactgactta

SEQ ID NO: 913558 - DNA, 15 bp, Homo sapiens
agttcactgacttaa

SEQ ID NO: 913559 - DNA, 15 bp, Homo sapiens
gttcactgacttaag

SEQ ID NO: 913560 - DNA, 15 bp, Homo sapiens
ttcactgacttaagg

SEQ ID NO: 913561 - DNA, 15 bp, Homo sapiens
tcactgacttaaggt

SEQ ID NO: 913562 - DNA, 15 bp, Homo sapiens
cactgacttaaggtg

SEQ ID NO: 913563 - DNA, 15 bp, Homo sapiens
actgacttaaggtga

SEQ ID NO: 913564 - DNA, 15 bp, Homo sapiens
ctgacttaaggtgat

SEQ ID NO: 913565 - DNA, 15 bp, Homo sapiens
tgacttaaggtgata

SEQ ID NO: 913566 - DNA, 15 bp, Homo sapiens
gacttaaggtgataa

SEQ ID NO: 913567 - DNA, 15 bp, Homo sapiens
acttaaggtgataaa

SEQ ID NO: 913568 - DNA, 15 bp, Homo sapiens
cttaaggtgataaag

SEQ ID NO: 913569 - DNA, 15 bp, Homo sapiens
ttaaggtgataaaga

SEQ ID NO: 913570 - DNA, 15 bp, Homo sapiens
taaggtgataaagat

SEQ ID NO: 913571 - DNA, 15 bp, Homo sapiens
aaggtgataaagatt

SEQ ID NO: 913572 - DNA, 15 bp, Homo sapiens
aggtgataaagattt

SEQ ID NO: 913573 - DNA, 15 bp, Homo sapiens
ggtgataaagatttt

SEQ ID NO: 913574 - DNA, 15 bp, Homo sapiens
gtgataaagatttta

SEQ ID NO: 913575 - DNA, 15 bp, Homo sapiens
tgataaagattttaa

SEQ ID NO: 913576 - DNA, 15 bp, Homo sapiens
gataaagattttaaa

SEQ ID NO: 913577 - DNA, 15 bp, Homo sapiens
ataaagattttaaac

SEQ ID NO: 913578 - DNA, 15 bp, Homo sapiens
taaagattttaaaca

SEQ ID NO: 913579 - DNA, 15 bp, Homo sapiens
aaagattttaaacat

SEQ ID NO: 913580 - DNA, 15 bp, Homo sapiens
aagattttaaacatt

SEQ ID NO: 913581 - DNA, 15 bp, Homo sapiens
agattttaaacatta

SEQ ID NO: 913582 - DNA, 15 bp, Homo sapiens
gattttaaacattag

SEQ ID NO: 913583 - DNA, 15 bp, Homo sapiens
attttaaacattagc

SEQ ID NO: 913584 - DNA, 15 bp, Homo sapiens
ttttaaacattagct

SEQ ID NO: 913585 - DNA, 15 bp, Homo sapiens
tttaaacattagcta

SEQ ID NO: 913586 - DNA, 15 bp, Homo sapiens
ttaaacattagctaa

SEQ ID NO: 913587 - DNA, 15 bp, Homo sapiens
taaacattagctaac

SEQ ID NO: 913588 - DNA, 15 bp, Homo sapiens
aaacattagctaaca

SEQ ID NO: 913589 - DNA, 15 bp, Homo sapiens
aacattagctaacat

SEQ ID NO: 913590 - DNA, 15 bp, Homo sapiens
acattagctaacatt

SEQ ID NO: 913591 - DNA, 15 bp, Homo sapiens
cattagctaacattt

SEQ ID NO: 913592 - DNA, 15 bp, Homo sapiens
attagctaacatttt

SEQ ID NO: 913593 - DNA, 15 bp, Homo sapiens
ttagctaacattttt

SEQ ID NO: 913594 - DNA, 15 bp, Homo sapiens
tagctaacatttttg

SEQ ID NO: 913595 - DNA, 15 bp, Homo sapiens
agctaacatttttga

SEQ ID NO: 913596 - DNA, 15 bp, Homo sapiens
gctaacatttttgag

SEQ ID NO: 913597 - DNA, 15 bp, Homo sapiens
ctaacatttttgagc

SEQ ID NO: 913598 - DNA, 15 bp, Homo sapiens
taacatttttgagca

SEQ ID NO: 913599 - DNA, 15 bp, Homo sapiens
aacatttttgagcac

SEQ ID NO: 913600 - DNA, 15 bp, Homo sapiens
acatttttgagcact

SEQ ID NO: 913601 - DNA, 15 bp, Homo sapiens
catttttgagcacta

SEQ ID NO: 913602 - DNA, 15 bp, Homo sapiens
atttttgagcactac

SEQ ID NO: 913603 - DNA, 15 bp, Homo sapiens
tttttgagcactacg

SEQ ID NO: 913604 - DNA, 15 bp, Homo sapiens
ttttgagcactacgt

SEQ ID NO: 913605 - DNA, 15 bp, Homo sapiens
tttgagcactacgtg

SEQ ID NO: 913606 - DNA, 15 bp, Homo sapiens
ttgagcactacgtgt

SEQ ID NO: 913607 - DNA, 15 bp, Homo sapiens
tgagcactacgtgtt

SEQ ID NO: 913608 - DNA, 15 bp, Homo sapiens
gagcactacgtgttg

SEQ ID NO: 913609 - DNA, 15 bp, Homo sapiens
agcactacgtgttgg

SEQ ID NO: 913610 - DNA, 15 bp, Homo sapiens
gcactacgtgttggg

SEQ ID NO: 913611 - DNA, 15 bp, Homo sapiens
cactacgtgttgggg

SEQ ID NO: 913612 - DNA, 15 bp, Homo sapiens
actacgtgttgggga

SEQ ID NO: 913613 - DNA, 15 bp, Homo sapiens
ctacgtgttggggat

SEQ ID NO: 913614 - DNA, 15 bp, Homo sapiens
tacgtgttggggatg

SEQ ID NO: 913615 - DNA, 15 bp, Homo sapiens
acgtgttggggatgt

SEQ ID NO: 913616 - DNA, 15 bp, Homo sapiens
cgtgttggggatgtg

SEQ ID NO: 913617 - DNA, 15 bp, Homo sapiens
gtgttggggatgtgc

SEQ ID NO: 913618 - DNA, 15 bp, Homo sapiens
tgttggggatgtgcc

SEQ ID NO: 913619 - DNA, 15 bp, Homo sapiens
gttggggatgtgcca

SEQ ID NO: 913620 - DNA, 15 bp, Homo sapiens
ttggggatgtgccaa

SEQ ID NO: 913621 - DNA, 15 bp, Homo sapiens
tggggatgtgccaaa

SEQ ID NO: 913622 - DNA, 15 bp, Homo sapiens
ggggatgtgccaaat

SEQ ID NO: 913623 - DNA, 15 bp, Homo sapiens
gggatgtgccaaatg

SEQ ID NO: 913624 - DNA, 15 bp, Homo sapiens
ggatgtgccaaatga

SEQ ID NO: 913625 - DNA, 15 bp, Homo sapiens
gatgtgccaaatgat

SEQ ID NO: 913626 - DNA, 15 bp, Homo sapiens
atgtgccaaatgatt

SEQ ID NO: 913627 - DNA, 15 bp, Homo sapiens
tgtgccaaatgattt

SEQ ID NO: 913628 - DNA, 15 bp, Homo sapiens
gtgccaaatgatttc

SEQ ID NO: 913629 - DNA, 15 bp, Homo sapiens
tgccaaatgatttct

SEQ ID NO: 913630 - DNA, 15 bp, Homo sapiens
gccaaatgatttctg

SEQ ID NO: 913631 - DNA, 15 bp, Homo sapiens
ccaaatgatttctgt

SEQ ID NO: 913632 - DNA, 15 bp, Homo sapiens
caaatgatttctgtc

SEQ ID NO: 913633 - DNA, 15 bp, Homo sapiens
aaatgatttctgtct

SEQ ID NO: 913634 - DNA, 15 bp, Homo sapiens
aatgatttctgtctt

SEQ ID NO: 913635 - DNA, 15 bp, Homo sapiens
atgatttctgtcttg

SEQ ID NO: 913636 - DNA, 15 bp, Homo sapiens
tgatttctgtcttgt

SEQ ID NO: 913637 - DNA, 15 bp, Homo sapiens
gatttctgtcttgtc

SEQ ID NO: 913638 - DNA, 15 bp, Homo sapiens
atttctgtcttgtct

SEQ ID NO: 913639 - DNA, 15 bp, Homo sapiens
tttctgtcttgtctt

SEQ ID NO: 913640 - DNA, 15 bp, Homo sapiens
ttctgtcttgtcttt

SEQ ID NO: 913641 - DNA, 15 bp, Homo sapiens
tctgtcttgtctttt

SEQ ID NO: 913642 - DNA, 15 bp, Homo sapiens
ctgtcttgtctttta

SEQ ID NO: 913643 - DNA, 15 bp, Homo sapiens
tgtcttgtcttttat

SEQ ID NO: 913644 - DNA, 15 bp, Homo sapiens
gtcttgtcttttatc

SEQ ID NO: 913645 - DNA, 15 bp, Homo sapiens
tcttgtcttttatca

SEQ ID NO: 913646 - DNA, 15 bp, Homo sapiens
cttgtcttttatcag

SEQ ID NO: 913647 - DNA, 15 bp, Homo sapiens
ttgtcttttatcaga

SEQ ID NO: 913648 - DNA, 15 bp, Homo sapiens
tgtcttttatcagaa

SEQ ID NO: 913649 - DNA, 15 bp, Homo sapiens
gtcttttatcagaat

SEQ ID NO: 913650 - DNA, 15 bp, Homo sapiens
tcttttatcagaatt

SEQ ID NO: 913651 - DNA, 15 bp, Homo sapiens
cttttatcagaattt

SEQ ID NO: 913652 - DNA, 15 bp, Homo sapiens
ttttatcagaatttt

SEQ ID NO: 913653 - DNA, 15 bp, Homo sapiens
tttatcagaattttt

SEQ ID NO: 913654 - DNA, 15 bp, Homo sapiens
ttatcagaatttttg

SEQ ID NO: 913655 - DNA, 15 bp, Homo sapiens
tatcagaatttttga

SEQ ID NO: 913656 - DNA, 15 bp, Homo sapiens
atcagaatttttgaa

SEQ ID NO: 913657 - DNA, 15 bp, Homo sapiens
tcagaatttttgaaa

SEQ ID NO: 913658 - DNA, 15 bp, Homo sapiens
cagaatttttgaaat

SEQ ID NO: 913659 - DNA, 15 bp, Homo sapiens
agaatttttgaaata

SEQ ID NO: 913660 - DNA, 15 bp, Homo sapiens
gaatttttgaaataa

SEQ ID NO: 913661 - DNA, 15 bp, Homo sapiens
aatttttgaaataac

SEQ ID NO: 913662 - DNA, 15 bp, Homo sapiens
atttttgaaataact

SEQ ID NO: 913663 - DNA, 15 bp, Homo sapiens
tttttgaaataacta

SEQ ID NO: 913664 - DNA, 15 bp, Homo sapiens
ttttgaaataactat

SEQ ID NO: 913665 - DNA, 15 bp, Homo sapiens
tttgaaataactata

SEQ ID NO: 913666 - DNA, 15 bp, Homo sapiens
ttgaaataactatat

SEQ ID NO: 913667 - DNA, 15 bp, Homo sapiens
tgaaataactatatg

SEQ ID NO: 913668 - DNA, 15 bp, Homo sapiens
gaaataactatatga

SEQ ID NO: 913669 - DNA, 15 bp, Homo sapiens
aaataactatatgaa

SEQ ID NO: 913670 - DNA, 15 bp, Homo sapiens
aataactatatgaag

SEQ ID NO: 913671 - DNA, 15 bp, Homo sapiens
ataactatatgaagt

SEQ ID NO: 913672 - DNA, 15 bp, Homo sapiens
taactatatgaagtt

SEQ ID NO: 913673 - DNA, 15 bp, Homo sapiens
aactatatgaagtta

SEQ ID NO: 913674 - DNA, 15 bp, Homo sapiens
actatatgaagttag

SEQ ID NO: 913675 - DNA, 15 bp, Homo sapiens
ctatatgaagttagt

SEQ ID NO: 913676 - DNA, 15 bp, Homo sapiens
tatatgaagttagtg

SEQ ID NO: 913677 - DNA, 15 bp, Homo sapiens
atatgaagttagtgc

SEQ ID NO: 913678 - DNA, 15 bp, Homo sapiens
tatgaagttagtgca

SEQ ID NO: 913679 - DNA, 15 bp, Homo sapiens
atgaagttagtgcat

SEQ ID NO: 913680 - DNA, 15 bp, Homo sapiens
tgaagttagtgcatt

SEQ ID NO: 913681 - DNA, 15 bp, Homo sapiens
gaagttagtgcattt

SEQ ID NO: 913682 - DNA, 15 bp, Homo sapiens
aagttagtgcatttt

SEQ ID NO: 913683 - DNA, 15 bp, Homo sapiens
agttagtgcattttt

SEQ ID NO: 913684 - DNA, 15 bp, Homo sapiens
gttagtgcatttttg

SEQ ID NO: 913685 - DNA, 15 bp, Homo sapiens
ttagtgcatttttgt

SEQ ID NO: 913686 - DNA, 15 bp, Homo sapiens
tagtgcatttttgtc

SEQ ID NO: 913687 - DNA, 15 bp, Homo sapiens
agtgcatttttgtcc

SEQ ID NO: 913688 - DNA, 15 bp, Homo sapiens
gtgcatttttgtccc

SEQ ID NO: 913689 - DNA, 15 bp, Homo sapiens
tgcatttttgtcccc

SEQ ID NO: 913690 - DNA, 15 bp, Homo sapiens
gcatttttgtcccca

SEQ ID NO: 913691 - DNA, 15 bp, Homo sapiens
catttttgtccccag

SEQ ID NO: 913692 - DNA, 15 bp, Homo sapiens
atttttgtccccaga

SEQ ID NO: 913693 - DNA, 15 bp, Homo sapiens
tttttgtccccagat

SEQ ID NO: 913694 - DNA, 15 bp, Homo sapiens
ttttgtccccagatg

SEQ ID NO: 913695 - DNA, 15 bp, Homo sapiens
tttgtccccagatgt

SEQ ID NO: 913696 - DNA, 15 bp, Homo sapiens
ttgtccccagatgtg

SEQ ID NO: 913697 - DNA, 15 bp, Homo sapiens
tgtccccagatgtgg

SEQ ID NO: 913698 - DNA, 15 bp, Homo sapiens
gtccccagatgtgga

SEQ ID NO: 913699 - DNA, 15 bp, Homo sapiens
tccccagatgtggac

SEQ ID NO: 913700 - DNA, 15 bp, Homo sapiens
ccccagatgtggaca

SEQ ID NO: 913701 - DNA, 15 bp, Homo sapiens
cccagatgtggacac

SEQ ID NO: 913702 - DNA, 15 bp, Homo sapiens
ccagatgtggacact

SEQ ID NO: 913703 - DNA, 15 bp, Homo sapiens
cagatgtggacacta

SEQ ID NO: 913704 - DNA, 15 bp, Homo sapiens
agatgtggacactaa

SEQ ID NO: 913705 - DNA, 15 bp, Homo sapiens
gatgtggacactaag

SEQ ID NO: 913706 - DNA, 15 bp, Homo sapiens
atgtggacactaagg

SEQ ID NO: 913707 - DNA, 15 bp, Homo sapiens
tgtggacactaaggc

SEQ ID NO: 913708 - DNA, 15 bp, Homo sapiens
gtggacactaaggct

SEQ ID NO: 913709 - DNA, 15 bp, Homo sapiens
tggacactaaggctt

SEQ ID NO: 913710 - DNA, 15 bp, Homo sapiens
ggacactaaggcttg

SEQ ID NO: 913711 - DNA, 15 bp, Homo sapiens
gacactaaggcttga

SEQ ID NO: 913712 - DNA, 15 bp, Homo sapiens
acactaaggcttgac

SEQ ID NO: 913713 - DNA, 15 bp, Homo sapiens
cactaaggcttgact

SEQ ID NO: 913714 - DNA, 15 bp, Homo sapiens
actaaggcttgacta

SEQ ID NO: 913715 - DNA, 15 bp, Homo sapiens
ctaaggcttgactac

SEQ ID NO: 913716 - DNA, 15 bp, Homo sapiens
taaggcttgactaca

SEQ ID NO: 913717 - DNA, 15 bp, Homo sapiens
aaggcttgactacag

SEQ ID NO: 913718 - DNA, 15 bp, Homo sapiens
aggcttgactacagt

SEQ ID NO: 913719 - DNA, 15 bp, Homo sapiens
ggcttgactacagtt

SEQ ID NO: 913720 - DNA, 15 bp, Homo sapiens
gcttgactacagttg

SEQ ID NO: 913721 - DNA, 15 bp, Homo sapiens
cttgactacagttgc

SEQ ID NO: 913722 - DNA, 15 bp, Homo sapiens
ttgactacagttgct

SEQ ID NO: 913723 - DNA, 15 bp, Homo sapiens
tgactacagttgctt

SEQ ID NO: 913724 - DNA, 15 bp, Homo sapiens
gactacagttgcttg

SEQ ID NO: 913725 - DNA, 15 bp, Homo sapiens
actacagttgcttgc

SEQ ID NO: 913726 - DNA, 15 bp, Homo sapiens
ctacagttgcttgcc

SEQ ID NO: 913727 - DNA, 15 bp, Homo sapiens
tacagttgcttgccc

SEQ ID NO: 913728 - DNA, 15 bp, Homo sapiens
acagttgcttgccca

SEQ ID NO: 913729 - DNA, 15 bp, Homo sapiens
cagttgcttgcccaa

SEQ ID NO: 913730 - DNA, 15 bp, Homo sapiens
agttgcttgcccaag

SEQ ID NO: 913731 - DNA, 15 bp, Homo sapiens
gttgcttgcccaaga

SEQ ID NO: 913732 - DNA, 15 bp, Homo sapiens
ttgcttgcccaagat

SEQ ID NO: 913733 - DNA, 15 bp, Homo sapiens
tgcttgcccaagata

SEQ ID NO: 913734 - DNA, 15 bp, Homo sapiens
gcttgcccaagataa

SEQ ID NO: 913735 - DNA, 15 bp, Homo sapiens
cttgcccaagataac

SEQ ID NO: 913736 - DNA, 15 bp, Homo sapiens
ttgcccaagataaca

SEQ ID NO: 913737 - DNA, 15 bp, Homo sapiens
tgcccaagataacac

SEQ ID NO: 913738 - DNA, 15 bp, Homo sapiens
gcccaagataacaca

SEQ ID NO: 913739 - DNA, 15 bp, Homo sapiens
cccaagataacacag

SEQ ID NO: 913740 - DNA, 15 bp, Homo sapiens
ccaagataacacagc

SEQ ID NO: 913741 - DNA, 15 bp, Homo sapiens
caagataacacagct

SEQ ID NO: 913742 - DNA, 15 bp, Homo sapiens
aagataacacagctg

SEQ ID NO: 913743 - DNA, 15 bp, Homo sapiens
agataacacagctgc

SEQ ID NO: 913744 - DNA, 15 bp, Homo sapiens
gataacacagctgct

SEQ ID NO: 913745 - DNA, 15 bp, Homo sapiens
ataacacagctgcta

SEQ ID NO: 913746 - DNA, 15 bp, Homo sapiens
taacacagctgctaa

SEQ ID NO: 913747 - DNA, 15 bp, Homo sapiens
aacacagctgctaaa

SEQ ID NO: 913748 - DNA, 15 bp, Homo sapiens
acacagctgctaaac

SEQ ID NO: 913749 - DNA, 15 bp, Homo sapiens
cacagctgctaaaca

SEQ ID NO: 913750 - DNA, 15 bp, Homo sapiens
acagctgctaaacaa

SEQ ID NO: 913751 - DNA, 15 bp, Homo sapiens
cagctgctaaacaac

SEQ ID NO: 913752 - DNA, 15 bp, Homo sapiens
agctgctaaacaaca

SEQ ID NO: 913753 - DNA, 15 bp, Homo sapiens
gctgctaaacaacag

SEQ ID NO: 913754 - DNA, 15 bp, Homo sapiens
ctgctaaacaacaga

SEQ ID NO: 913755 - DNA, 15 bp, Homo sapiens
tgctaaacaacagaa

SEQ ID NO: 913756 - DNA, 15 bp, Homo sapiens
gctaaacaacagaac

SEQ ID NO: 913757 - DNA, 15 bp, Homo sapiens
ctaaacaacagaacc

SEQ ID NO: 913758 - DNA, 15 bp, Homo sapiens
taaacaacagaacca

SEQ ID NO: 913759 - DNA, 15 bp, Homo sapiens
aaacaacagaaccag

SEQ ID NO: 913760 - DNA, 15 bp, Homo sapiens
aacaacagaaccagg

SEQ ID NO: 913761 - DNA, 15 bp, Homo sapiens
acaacagaaccagga

SEQ ID NO: 913762 - DNA, 15 bp, Homo sapiens
caacagaaccaggat

SEQ ID NO: 913763 - DNA, 15 bp, Homo sapiens
aacagaaccaggatg

SEQ ID NO: 913764 - DNA, 15 bp, Homo sapiens
acagaaccaggatgc

SEQ ID NO: 913765 - DNA, 15 bp, Homo sapiens
cagaaccaggatgca

SEQ ID NO: 913766 - DNA, 15 bp, Homo sapiens
agaaccaggatgcaa

SEQ ID NO: 913767 - DNA, 15 bp, Homo sapiens
gaaccaggatgcaaa

SEQ ID NO: 913768 - DNA, 15 bp, Homo sapiens
aaccaggatgcaaac

SEQ ID NO: 913769 - DNA, 15 bp, Homo sapiens
accaggatgcaaacc

SEQ ID NO: 913770 - DNA, 15 bp, Homo sapiens
ccaggatgcaaaccc

SEQ ID NO: 913771 - DNA, 15 bp, Homo sapiens
caggatgcaaaccca

SEQ ID NO: 913772 - DNA, 15 bp, Homo sapiens
aggatgcaaacccag

SEQ ID NO: 913773 - DNA, 15 bp, Homo sapiens
ggatgcaaacccagc

SEQ ID NO: 913774 - DNA, 15 bp, Homo sapiens
gatgcaaacccagcg

SEQ ID NO: 913775 - DNA, 15 bp, Homo sapiens
atgcaaacccagcgt

SEQ ID NO: 913776 - DNA, 15 bp, Homo sapiens
tgcaaacccagcgtg

SEQ ID NO: 913777 - DNA, 15 bp, Homo sapiens
gcaaacccagcgtga

SEQ ID NO: 913778 - DNA, 15 bp, Homo sapiens
caaacccagcgtgac

SEQ ID NO: 913779 - DNA, 15 bp, Homo sapiens
aaacccagcgtgacc

SEQ ID NO: 913780 - DNA, 15 bp, Homo sapiens
aacccagcgtgacct

SEQ ID NO: 913781 - DNA, 15 bp, Homo sapiens
acccagcgtgacctg

SEQ ID NO: 913782 - DNA, 15 bp, Homo sapiens
cccagcgtgacctga

SEQ ID NO: 913783 - DNA, 15 bp, Homo sapiens
ccagcgtgacctgag

SEQ ID NO: 913784 - DNA, 15 bp, Homo sapiens
cagcgtgacctgagc

SEQ ID NO: 913785 - DNA, 15 bp, Homo sapiens
agcgtgacctgagcc

SEQ ID NO: 913786 - DNA, 15 bp, Homo sapiens
gcgtgacctgagcca

SEQ ID NO: 913787 - DNA, 15 bp, Homo sapiens
cgtgacctgagccac

SEQ ID NO: 913788 - DNA, 15 bp, Homo sapiens
gtgacctgagccacc

SEQ ID NO: 913789 - DNA, 15 bp, Homo sapiens
tgacctgagccacca

SEQ ID NO: 913790 - DNA, 15 bp, Homo sapiens
gacctgagccaccac

SEQ ID NO: 913791 - DNA, 15 bp, Homo sapiens
acctgagccaccacc

SEQ ID NO: 913792 - DNA, 15 bp, Homo sapiens
cctgagccaccaccc

SEQ ID NO: 913793 - DNA, 15 bp, Homo sapiens
ctgagccaccaccct

SEQ ID NO: 913794 - DNA, 15 bp, Homo sapiens
tgagccaccacccta

SEQ ID NO: 913795 - DNA, 15 bp, Homo sapiens
gagccaccaccctat

SEQ ID NO: 913796 - DNA, 15 bp, Homo sapiens
agccaccaccctata

SEQ ID NO: 913797 - DNA, 15 bp, Homo sapiens
gccaccaccctatac

SEQ ID NO: 913798 - DNA, 15 bp, Homo sapiens
ccaccaccctatacc

SEQ ID NO: 913799 - DNA, 15 bp, Homo sapiens
caccaccctatacca

SEQ ID NO: 913800 - DNA, 15 bp, Homo sapiens
gaaaaggccttggat

SEQ ID NO: 913801 - DNA, 15 bp, Homo sapiens
aaaaggccttggatt

SEQ ID NO: 913802 - DNA, 15 bp, Homo sapiens
aaaggccttggatta

SEQ ID NO: 913803 - DNA, 15 bp, Homo sapiens
aaggccttggattaa

SEQ ID NO: 913804 - DNA, 15 bp, Homo sapiens
aggccttggattaaa

SEQ ID NO: 913805 - DNA, 15 bp, Homo sapiens
ggccttggattaaat

SEQ ID NO: 913806 - DNA, 15 bp, Homo sapiens
gccttggattaaata

SEQ ID NO: 913807 - DNA, 15 bp, Homo sapiens
ccttggattaaatac

SEQ ID NO: 913808 - DNA, 15 bp, Homo sapiens
cttggattaaatact

SEQ ID NO: 913809 - DNA, 15 bp, Homo sapiens
ttggattaaatacta

SEQ ID NO: 913810 - DNA, 15 bp, Homo sapiens
tggattaaatactat

SEQ ID NO: 913811 - DNA, 15 bp, Homo sapiens
ggattaaatactatt

SEQ ID NO: 913812 - DNA, 15 bp, Homo sapiens
gattaaatactattt

SEQ ID NO: 913813 - DNA, 15 bp, Homo sapiens
attaaatactatttt

SEQ ID NO: 913814 - DNA, 15 bp, Homo sapiens
ttaaatactattttt

SEQ ID NO: 913815 - DNA, 15 bp, Homo sapiens
taaatactattttta

SEQ ID NO: 913816 - DNA, 15 bp, Homo sapiens
aaatactatttttac

SEQ ID NO: 913817 - DNA, 15 bp, Homo sapiens
aatactatttttacc

SEQ ID NO: 913818 - DNA, 15 bp, Homo sapiens
atactatttttacca

SEQ ID NO: 913819 - DNA, 15 bp, Homo sapiens
tactatttttaccac

SEQ ID NO: 913820 - DNA, 15 bp, Homo sapiens
actatttttaccact

SEQ ID NO: 913821 - DNA, 15 bp, Homo sapiens
ctatttttaccactg

SEQ ID NO: 913822 - DNA, 15 bp, Homo sapiens
tatttttaccactga

SEQ ID NO: 913823 - DNA, 15 bp, Homo sapiens
atttttaccactgaa

SEQ ID NO: 913824 - DNA, 15 bp, Homo sapiens
tttttaccactgaac

SEQ ID NO: 913825 - DNA, 15 bp, Homo sapiens
ttttaccactgaact

SEQ ID NO: 913826 - DNA, 15 bp, Homo sapiens
tttaccactgaacta

SEQ ID NO: 913827 - DNA, 15 bp, Homo sapiens
ttaccactgaactat

SEQ ID NO: 913828 - DNA, 15 bp, Homo sapiens
taccactgaactatt

SEQ ID NO: 913829 - DNA, 15 bp, Homo sapiens
accactgaactattg

SEQ ID NO: 913830 - DNA, 15 bp, Homo sapiens
ccactgaactattgc

SEQ ID NO: 913831 - DNA, 15 bp, Homo sapiens
cactgaactattgca

SEQ ID NO: 913832 - DNA, 15 bp, Homo sapiens
actgaactattgcat

SEQ ID NO: 913833 - DNA, 15 bp, Homo sapiens
ctgaactattgcatg

SEQ ID NO: 913834 - DNA, 15 bp, Homo sapiens
tgaactattgcatga

SEQ ID NO: 913835 - DNA, 15 bp, Homo sapiens
gaactattgcatgac

SEQ ID NO: 913836 - DNA, 15 bp, Homo sapiens
aactattgcatgacc

SEQ ID NO: 913837 - DNA, 15 bp, Homo sapiens
actattgcatgacca

SEQ ID NO: 913838 - DNA, 15 bp, Homo sapiens
ctattgcatgaccac

SEQ ID NO: 913839 - DNA, 15 bp, Homo sapiens
tattgcatgaccacg

SEQ ID NO: 913840 - DNA, 15 bp, Homo sapiens
attgcatgaccacga

SEQ ID NO: 913841 - DNA, 15 bp, Homo sapiens
ttgcatgaccacgag

SEQ ID NO: 913842 - DNA, 15 bp, Homo sapiens
tgcatgaccacgagc

SEQ ID NO: 913843 - DNA, 15 bp, Homo sapiens
gcatgaccacgagca

SEQ ID NO: 913844 - DNA, 15 bp, Homo sapiens
catgaccacgagcaa

SEQ ID NO: 913845 - DNA, 15 bp, Homo sapiens
atgaccacgagcaaa

SEQ ID NO: 913846 - DNA, 15 bp, Homo sapiens
tgaccacgagcaaat

SEQ ID NO: 913847 - DNA, 15 bp, Homo sapiens
gaccacgagcaaatt

SEQ ID NO: 913848 - DNA, 15 bp, Homo sapiens
accacgagcaaatta

SEQ ID NO: 913849 - DNA, 15 bp, Homo sapiens
ccacgagcaaattat

SEQ ID NO: 913850 - DNA, 15 bp, Homo sapiens
cacgagcaaattatt

SEQ ID NO: 913851 - DNA, 15 bp, Homo sapiens
acgagcaaattattt

SEQ ID NO: 913852 - DNA, 15 bp, Homo sapiens
cgagcaaattattta

SEQ ID NO: 913853 - DNA, 15 bp, Homo sapiens
gagcaaattatttaa

SEQ ID NO: 913854 - DNA, 15 bp, Homo sapiens
agcaaattatttaac

SEQ ID NO: 913855 - DNA, 15 bp, Homo sapiens
gcaaattatttaact

SEQ ID NO: 913856 - DNA, 15 bp, Homo sapiens
caaattatttaactt

SEQ ID NO: 913857 - DNA, 15 bp, Homo sapiens
aaattatttaacttt

SEQ ID NO: 913858 - DNA, 15 bp, Homo sapiens
aattatttaactttt

SEQ ID NO: 913859 - DNA, 15 bp, Homo sapiens
attatttaacttttc

SEQ ID NO: 913860 - DNA, 15 bp, Homo sapiens
ttatttaacttttct

SEQ ID NO: 913861 - DNA, 15 bp, Homo sapiens
tatttaacttttctg

SEQ ID NO: 913862 - DNA, 15 bp, Homo sapiens
atttaacttttctga

SEQ ID NO: 913863 - DNA, 15 bp, Homo sapiens
tttaacttttctgag

SEQ ID NO: 913864 - DNA, 15 bp, Homo sapiens
ttaacttttctgaga

SEQ ID NO: 913865 - DNA, 15 bp, Homo sapiens
taacttttctgagaa

SEQ ID NO: 913866 - DNA, 15 bp, Homo sapiens
aacttttctgagaat

SEQ ID NO: 913867 - DNA, 15 bp, Homo sapiens
acttttctgagaatc

SEQ ID NO: 913868 - DNA, 15 bp, Homo sapiens
cttttctgagaatca

SEQ ID NO: 913869 - DNA, 15 bp, Homo sapiens
ttttctgagaatcaa

SEQ ID NO: 913870 - DNA, 15 bp, Homo sapiens
tttctgagaatcaac

SEQ ID NO: 913871 - DNA, 15 bp, Homo sapiens
ttctgagaatcaact

SEQ ID NO: 913872 - DNA, 15 bp, Homo sapiens
tctgagaatcaactt

SEQ ID NO: 913873 - DNA, 15 bp, Homo sapiens
ctgagaatcaacttc

SEQ ID NO: 913874 - DNA, 15 bp, Homo sapiens
tgagaatcaacttct

SEQ ID NO: 913875 - DNA, 15 bp, Homo sapiens
gagaatcaacttctc

SEQ ID NO: 913876 - DNA, 15 bp, Homo sapiens
agaatcaacttctca

SEQ ID NO: 913877 - DNA, 15 bp, Homo sapiens
gaatcaacttctcaa

SEQ ID NO: 913878 - DNA, 15 bp, Homo sapiens
aatcaacttctcaat

SEQ ID NO: 913879 - DNA, 15 bp, Homo sapiens
atcaacttctcaatg

SEQ ID NO: 913880 - DNA, 15 bp, Homo sapiens
tcaacttctcaatgg

SEQ ID NO: 913881 - DNA, 15 bp, Homo sapiens
caacttctcaatggt

SEQ ID NO: 913882 - DNA, 15 bp, Homo sapiens
aacttctcaatggta

SEQ ID NO: 913883 - DNA, 15 bp, Homo sapiens
acttctcaatggtaa

SEQ ID NO: 913884 - DNA, 15 bp, Homo sapiens
cttctcaatggtaaa

SEQ ID NO: 913885 - DNA, 15 bp, Homo sapiens
ttctcaatggtaaaa

SEQ ID NO: 913886 - DNA, 15 bp, Homo sapiens
tctcaatggtaaaac

SEQ ID NO: 913887 - DNA, 15 bp, Homo sapiens
ctcaatggtaaaact

SEQ ID NO: 913888 - DNA, 15 bp, Homo sapiens
tcaatggtaaaactg

SEQ ID NO: 913889 - DNA, 15 bp, Homo sapiens
caatggtaaaactga

SEQ ID NO: 913890 - DNA, 15 bp, Homo sapiens
aatggtaaaactgaa

SEQ ID NO: 913891 - DNA, 15 bp, Homo sapiens
atggtaaaactgaag

SEQ ID NO: 913892 - DNA, 15 bp, Homo sapiens
tggtaaaactgaaga

SEQ ID NO: 913893 - DNA, 15 bp, Homo sapiens
ggtaaaactgaagaa

SEQ ID NO: 913894 - DNA, 15 bp, Homo sapiens
gtaaaactgaagaag

SEQ ID NO: 913895 - DNA, 15 bp, Homo sapiens
taaaactgaagaagg

SEQ ID NO: 913896 - DNA, 15 bp, Homo sapiens
aaaactgaagaagga

SEQ ID NO: 913897 - DNA, 15 bp, Homo sapiens
aaactgaagaaggaa

SEQ ID NO: 913898 - DNA, 15 bp, Homo sapiens
aactgaagaaggaaa

SEQ ID NO: 913899 - DNA, 15 bp, Homo sapiens
actgaagaaggaaag

SEQ ID NO: 913900 - DNA, 15 bp, Homo sapiens
ctgaagaaggaaaga

SEQ ID NO: 913901 - DNA, 15 bp, Homo sapiens
tgaagaaggaaagac

SEQ ID NO: 913902 - DNA, 15 bp, Homo sapiens
gaagaaggaaagaca

SEQ ID NO: 913903 - DNA, 15 bp, Homo sapiens
aagaaggaaagacaa

SEQ ID NO: 913904 - DNA, 15 bp, Homo sapiens
agaaggaaagacaat

SEQ ID NO: 913905 - DNA, 15 bp, Homo sapiens
gaaggaaagacaata

SEQ ID NO: 913906 - DNA, 15 bp, Homo sapiens
aaggaaagacaatat

SEQ ID NO: 913907 - DNA, 15 bp, Homo sapiens
aggaaagacaatatt

SEQ ID NO: 913908 - DNA, 15 bp, Homo sapiens
ggaaagacaatatta

SEQ ID NO: 913909 - DNA, 15 bp, Homo sapiens
gaaagacaatattat

SEQ ID NO: 913910 - DNA, 15 bp, Homo sapiens
aaagacaatattata

SEQ ID NO: 913911 - DNA, 15 bp, Homo sapiens
aagacaatattatat

SEQ ID NO: 913912 - DNA, 15 bp, Homo sapiens
agacaatattatatg

SEQ ID NO: 913913 - DNA, 15 bp, Homo sapiens
gacaatattatatgt

SEQ ID NO: 913914 - DNA, 15 bp, Homo sapiens
acaatattatatgta

SEQ ID NO: 913915 - DNA, 15 bp, Homo sapiens
caatattatatgtaa

SEQ ID NO: 913916 - DNA, 15 bp, Homo sapiens
aatattatatgtaaa

SEQ ID NO: 913917 - DNA, 15 bp, Homo sapiens
atattatatgtaaaa

SEQ ID NO: 913918 - DNA, 15 bp, Homo sapiens
tattatatgtaaaac

SEQ ID NO: 913919 - DNA, 15 bp, Homo sapiens
attatatgtaaaact

SEQ ID NO: 913920 - DNA, 15 bp, Homo sapiens
ttatatgtaaaactt

SEQ ID NO: 913921 - DNA, 15 bp, Homo sapiens
tatatgtaaaacttc

SEQ ID NO: 913922 - DNA, 15 bp, Homo sapiens
atatgtaaaacttct

SEQ ID NO: 913923 - DNA, 15 bp, Homo sapiens
tatgtaaaacttctg

SEQ ID NO: 913924 - DNA, 15 bp, Homo sapiens
atgtaaaacttctgg

SEQ ID NO: 913925 - DNA, 15 bp, Homo sapiens
tgtaaaacttctggc

SEQ ID NO: 913926 - DNA, 15 bp, Homo sapiens
gtaaaacttctggca

SEQ ID NO: 913927 - DNA, 15 bp, Homo sapiens
taaaacttctggcat

SEQ ID NO: 913928 - DNA, 15 bp, Homo sapiens
aaaacttctggcata

SEQ ID NO: 913929 - DNA, 15 bp, Homo sapiens
aaacttctggcataa

SEQ ID NO: 913930 - DNA, 15 bp, Homo sapiens
aacttctggcataaa

SEQ ID NO: 913931 - DNA, 15 bp, Homo sapiens
acttctggcataaaa

SEQ ID NO: 913932 - DNA, 15 bp, Homo sapiens
cttctggcataaaat

SEQ ID NO: 913933 - DNA, 15 bp, Homo sapiens
ttctggcataaaata

SEQ ID NO: 913934 - DNA, 15 bp, Homo sapiens
tctggcataaaataa

SEQ ID NO: 913935 - DNA, 15 bp, Homo sapiens
ctggcataaaataag

SEQ ID NO: 913936 - DNA, 15 bp, Homo sapiens
tggcataaaataaga

SEQ ID NO: 913937 - DNA, 15 bp, Homo sapiens
ggcataaaataagaa

SEQ ID NO: 913938 - DNA, 15 bp, Homo sapiens
gcataaaataagaat

SEQ ID NO: 913939 - DNA, 15 bp, Homo sapiens
cataaaataagaatc

SEQ ID NO: 913940 - DNA, 15 bp, Homo sapiens
ataaaataagaatcc

SEQ ID NO: 913941 - DNA, 15 bp, Homo sapiens
taaaataagaatcca

SEQ ID NO: 913942 - DNA, 15 bp, Homo sapiens
aaaataagaatccaa

SEQ ID NO: 913943 - DNA, 15 bp, Homo sapiens
aaataagaatccaat

SEQ ID NO: 913944 - DNA, 15 bp, Homo sapiens
aataagaatccaatg

SEQ ID NO: 913945 - DNA, 15 bp, Homo sapiens
ataagaatccaatga

SEQ ID NO: 913946 - DNA, 15 bp, Homo sapiens
taagaatccaatgat

SEQ ID NO: 913947 - DNA, 15 bp, Homo sapiens
aagaatccaatgata

SEQ ID NO: 913948 - DNA, 15 bp, Homo sapiens
agaatccaatgatat

SEQ ID NO: 913949 - DNA, 15 bp, Homo sapiens
gaatccaatgatatt

SEQ ID NO: 913950 - DNA, 15 bp, Homo sapiens
aatccaatgatattg

SEQ ID NO: 913951 - DNA, 15 bp, Homo sapiens
atccaatgatattgg

SEQ ID NO: 913952 - DNA, 15 bp, Homo sapiens
tccaatgatattggt

SEQ ID NO: 913953 - DNA, 15 bp, Homo sapiens
ccaatgatattggtt

SEQ ID NO: 913954 - DNA, 15 bp, Homo sapiens
caatgatattggttc

SEQ ID NO: 913955 - DNA, 15 bp, Homo sapiens
aatgatattggttct

SEQ ID NO: 913956 - DNA, 15 bp, Homo sapiens
atgatattggttctc

SEQ ID NO: 913957 - DNA, 15 bp, Homo sapiens
tgatattggttctct

SEQ ID NO: 913958 - DNA, 15 bp, Homo sapiens
gatattggttctctt

SEQ ID NO: 913959 - DNA, 15 bp, Homo sapiens
atattggttctcttt

SEQ ID NO: 913960 - DNA, 15 bp, Homo sapiens
tattggttctcttta

SEQ ID NO: 913961 - DNA, 15 bp, Homo sapiens
attggttctctttaa

SEQ ID NO: 913962 - DNA, 15 bp, Homo sapiens
ttggttctctttaaa

SEQ ID NO: 913963 - DNA, 15 bp, Homo sapiens
tggttctctttaaaa

SEQ ID NO: 913964 - DNA, 15 bp, Homo sapiens
ggttctctttaaaaa

SEQ ID NO: 913965 - DNA, 15 bp, Homo sapiens
gttctctttaaaaat

SEQ ID NO: 913966 - DNA, 15 bp, Homo sapiens
ttctctttaaaaatg

SEQ ID NO: 913967 - DNA, 15 bp, Homo sapiens
tctctttaaaaatgg

SEQ ID NO: 913968 - DNA, 15 bp, Homo sapiens
ctctttaaaaatgga

SEQ ID NO: 913969 - DNA, 15 bp, Homo sapiens
tctttaaaaatggaa

SEQ ID NO: 913970 - DNA, 15 bp, Homo sapiens
ctttaaaaatggaat

SEQ ID NO: 913971 - DNA, 15 bp, Homo sapiens
tttaaaaatggaata

SEQ ID NO: 913972 - DNA, 15 bp, Homo sapiens
ttaaaaatggaataa

SEQ ID NO: 913973 - DNA, 15 bp, Homo sapiens
taaaaatggaataat

SEQ ID NO: 913974 - DNA, 15 bp, Homo sapiens
aaaaatggaataatt

SEQ ID NO: 913975 - DNA, 15 bp, Homo sapiens
aaaatggaataattt

SEQ ID NO: 913976 - DNA, 15 bp, Homo sapiens
aaatggaataatttt

SEQ ID NO: 913977 - DNA, 15 bp, Homo sapiens
aatggaataattttc

SEQ ID NO: 913978 - DNA, 15 bp, Homo sapiens
atggaataattttct

SEQ ID NO: 913979 - DNA, 15 bp, Homo sapiens
tggaataattttcta

SEQ ID NO: 913980 - DNA, 15 bp, Homo sapiens
ggaataattttctat

SEQ ID NO: 913981 - DNA, 15 bp, Homo sapiens
gaataattttctata

SEQ ID NO: 913982 - DNA, 15 bp, Homo sapiens
aataattttctatat

SEQ ID NO: 913983 - DNA, 15 bp, Homo sapiens
ataattttctatatg

SEQ ID NO: 913984 - DNA, 15 bp, Homo sapiens
taattttctatatgt

SEQ ID NO: 913985 - DNA, 15 bp, Homo sapiens
aattttctatatgtt

SEQ ID NO: 913986 - DNA, 15 bp, Homo sapiens
attttctatatgttc

SEQ ID NO: 913987 - DNA, 15 bp, Homo sapiens
ttttctatatgttca

SEQ ID NO: 913988 - DNA, 15 bp, Homo sapiens
tttctatatgttcat

SEQ ID NO: 913989 - DNA, 15 bp, Homo sapiens
ttctatatgttcatt

SEQ ID NO: 913990 - DNA, 15 bp, Homo sapiens
tctatatgttcattt

SEQ ID NO: 913991 - DNA, 15 bp, Homo sapiens
ctatatgttcatttg

SEQ ID NO: 913992 - DNA, 15 bp, Homo sapiens
tatatgttcatttgg

SEQ ID NO: 913993 - DNA, 15 bp, Homo sapiens
atatgttcatttggt

SEQ ID NO: 913994 - DNA, 15 bp, Homo sapiens
tatgttcatttggtt

SEQ ID NO: 913995 - DNA, 15 bp, Homo sapiens
atgttcatttggtta

SEQ ID NO: 913996 - DNA, 15 bp, Homo sapiens
tgttcatttggttat

SEQ ID NO: 913997 - DNA, 15 bp, Homo sapiens
gttcatttggttata

SEQ ID NO: 913998 - DNA, 15 bp, Homo sapiens
ttcatttggttataa

SEQ ID NO: 913999 - DNA, 15 bp, Homo sapiens
tcatttggttataag

SEQ ID NO: 914000 - DNA, 15 bp, Homo sapiens
catttggttataaga

SEQ ID NO: 914001 - DNA, 15 bp, Homo sapiens
atttggttataagag

SEQ ID NO: 914002 - DNA, 15 bp, Homo sapiens
tttggttataagagg

SEQ ID NO: 914003 - DNA, 15 bp, Homo sapiens
ttggttataagagga

SEQ ID NO: 914004 - DNA, 15 bp, Homo sapiens
tggttataagaggaa

SEQ ID NO: 914005 - DNA, 15 bp, Homo sapiens
ggttataagaggaaa

SEQ ID NO: 914006 - DNA, 15 bp, Homo sapiens
gttataagaggaaac

SEQ ID NO: 914007 - DNA, 15 bp, Homo sapiens
ttataagaggaaaca

SEQ ID NO: 914008 - DNA, 15 bp, Homo sapiens
tataagaggaaacag

SEQ ID NO: 914009 - DNA, 15 bp, Homo sapiens
ataagaggaaacaga

SEQ ID NO: 914010 - DNA, 15 bp, Homo sapiens
taagaggaaacagaa

SEQ ID NO: 914011 - DNA, 15 bp, Homo sapiens
aagaggaaacagaaa

SEQ ID NO: 914012 - DNA, 15 bp, Homo sapiens
agaggaaacagaaat

SEQ ID NO: 914013 - DNA, 15 bp, Homo sapiens
gaggaaacagaaata

SEQ ID NO: 914014 - DNA, 15 bp, Homo sapiens
aggaaacagaaataa

SEQ ID NO: 914015 - DNA, 15 bp, Homo sapiens
ggaaacagaaataat

SEQ ID NO: 914016 - DNA, 15 bp, Homo sapiens
gaaacagaaataatg

SEQ ID NO: 914017 - DNA, 15 bp, Homo sapiens
aaacagaaataatgt

SEQ ID NO: 914018 - DNA, 15 bp, Homo sapiens
aacagaaataatgtg

SEQ ID NO: 914019 - DNA, 15 bp, Homo sapiens
acagaaataatgtgc

SEQ ID NO: 914020 - DNA, 15 bp, Homo sapiens
cagaaataatgtgct

SEQ ID NO: 914021 - DNA, 15 bp, Homo sapiens
agaaataatgtgctt

SEQ ID NO: 914022 - DNA, 15 bp, Homo sapiens
gaaataatgtgcttt

SEQ ID NO: 914023 - DNA, 15 bp, Homo sapiens
aaataatgtgctttg

SEQ ID NO: 914024 - DNA, 15 bp, Homo sapiens
aataatgtgctttga

SEQ ID NO: 914025 - DNA, 15 bp, Homo sapiens
ataatgtgctttgag

SEQ ID NO: 914026 - DNA, 15 bp, Homo sapiens
taatgtgctttgagt

SEQ ID NO: 914027 - DNA, 15 bp, Homo sapiens
aatgtgctttgagtt

SEQ ID NO: 914028 - DNA, 15 bp, Homo sapiens
atgtgctttgagttc

SEQ ID NO: 914029 - DNA, 15 bp, Homo sapiens
tgtgctttgagttca

SEQ ID NO: 914030 - DNA, 15 bp, Homo sapiens
gtgctttgagttcaa

SEQ ID NO: 914031 - DNA, 15 bp, Homo sapiens
tgctttgagttcaat

SEQ ID NO: 914032 - DNA, 15 bp, Homo sapiens
gctttgagttcaata

SEQ ID NO: 914033 - DNA, 15 bp, Homo sapiens
ctttgagttcaatat

SEQ ID NO: 914034 - DNA, 15 bp, Homo sapiens
tttgagttcaatata

SEQ ID NO: 914035 - DNA, 15 bp, Homo sapiens
ttgagttcaatataa

SEQ ID NO: 914036 - DNA, 15 bp, Homo sapiens
tgagttcaatataat

SEQ ID NO: 914037 - DNA, 15 bp, Homo sapiens
gagttcaatataatc

SEQ ID NO: 914038 - DNA, 15 bp, Homo sapiens
agttcaatataatct

SEQ ID NO: 914039 - DNA, 15 bp, Homo sapiens
gttcaatataatcta

SEQ ID NO: 914040 - DNA, 15 bp, Homo sapiens
ttcaatataatctat

SEQ ID NO: 914041 - DNA, 15 bp, Homo sapiens
tcaatataatctatg

SEQ ID NO: 914042 - DNA, 15 bp, Homo sapiens
caatataatctatgt

SEQ ID NO: 914043 - DNA, 15 bp, Homo sapiens
aatataatctatgtc

SEQ ID NO: 914044 - DNA, 15 bp, Homo sapiens
atataatctatgtct

SEQ ID NO: 914045 - DNA, 15 bp, Homo sapiens
tataatctatgtctt

SEQ ID NO: 914046 - DNA, 15 bp, Homo sapiens
ataatctatgtctta

SEQ ID NO: 914047 - DNA, 15 bp, Homo sapiens
taatctatgtcttag

SEQ ID NO: 914048 - DNA, 15 bp, Homo sapiens
aatctatgtcttagg

SEQ ID NO: 914049 - DNA, 15 bp, Homo sapiens
atctatgtcttagga

SEQ ID NO: 914050 - DNA, 15 bp, Homo sapiens
tctatgtcttaggac

SEQ ID NO: 914051 - DNA, 15 bp, Homo sapiens
ctatgtcttaggact

SEQ ID NO: 914052 - DNA, 15 bp, Homo sapiens
tatgtcttaggactt

SEQ ID NO: 914053 - DNA, 15 bp, Homo sapiens
atgtcttaggacttc

SEQ ID NO: 914054 - DNA, 15 bp, Homo sapiens
tgtcttaggacttca

SEQ ID NO: 914055 - DNA, 15 bp, Homo sapiens
gtcttaggacttcaa

SEQ ID NO: 914056 - DNA, 15 bp, Homo sapiens
tcttaggacttcaag

SEQ ID NO: 914057 - DNA, 15 bp, Homo sapiens
cttaggacttcaagt

SEQ ID NO: 914058 - DNA, 15 bp, Homo sapiens
ttaggacttcaagtg

SEQ ID NO: 914059 - DNA, 15 bp, Homo sapiens
taggacttcaagtga

SEQ ID NO: 914060 - DNA, 15 bp, Homo sapiens
ggacttcaagtgaac

SEQ ID NO: 914061 - DNA, 15 bp, Homo sapiens
gacttcaagtgaaca

SEQ ID NO: 914062 - DNA, 15 bp, Homo sapiens
acttcaagtgaacag

SEQ ID NO: 914063 - DNA, 15 bp, Homo sapiens
cttcaagtgaacagt

SEQ ID NO: 914064 - DNA, 15 bp, Homo sapiens
ttcaagtgaacagtc

SEQ ID NO: 914065 - DNA, 15 bp, Homo sapiens
tcaagtgaacagtct

SEQ ID NO: 914066 - DNA, 15 bp, Homo sapiens
caagtgaacagtctt

SEQ ID NO: 914067 - DNA, 15 bp, Homo sapiens
aagtgaacagtctta

SEQ ID NO: 914068 - DNA, 15 bp, Homo sapiens
agtgaacagtcttaa

SEQ ID NO: 914069 - DNA, 15 bp, Homo sapiens
gtgaacagtcttaaa

SEQ ID NO: 914070 - DNA, 15 bp, Homo sapiens
tgaacagtcttaaag

SEQ ID NO: 914071 - DNA, 15 bp, Homo sapiens
gaacagtcttaaagt

SEQ ID NO: 914072 - DNA, 15 bp, Homo sapiens
aacagtcttaaagta

SEQ ID NO: 914073 - DNA, 15 bp, Homo sapiens
acagtcttaaagtat

SEQ ID NO: 914074 - DNA, 15 bp, Homo sapiens
cagtcttaaagtata

SEQ ID NO: 914075 - DNA, 15 bp, Homo sapiens
agtcttaaagtatac

SEQ ID NO: 914076 - DNA, 15 bp, Homo sapiens
gtcttaaagtataca

SEQ ID NO: 914077 - DNA, 15 bp, Homo sapiens
tcttaaagtatacat

SEQ ID NO: 914078 - DNA, 15 bp, Homo sapiens
cttaaagtatacatt

SEQ ID NO: 914079 - DNA, 15 bp, Homo sapiens
ttaaagtatacatta

SEQ ID NO: 914080 - DNA, 15 bp, Homo sapiens
taaagtatacattat

SEQ ID NO: 914081 - DNA, 15 bp, Homo sapiens
aaagtatacattatt

SEQ ID NO: 914082 - DNA, 15 bp, Homo sapiens
aagtatacattattt

SEQ ID NO: 914083 - DNA, 15 bp, Homo sapiens
agtatacattattta

SEQ ID NO: 914084 - DNA, 15 bp, Homo sapiens
gtatacattatttac

SEQ ID NO: 914085 - DNA, 15 bp, Homo sapiens
tatacattatttact

SEQ ID NO: 914086 - DNA, 15 bp, Homo sapiens
atacattatttactt

SEQ ID NO: 914087 - DNA, 15 bp, Homo sapiens
tacattatttacttg

SEQ ID NO: 914088 - DNA, 15 bp, Homo sapiens
acattatttacttga

SEQ ID NO: 914089 - DNA, 15 bp, Homo sapiens
cattatttacttgat

SEQ ID NO: 914090 - DNA, 15 bp, Homo sapiens
attatttacttgatg

SEQ ID NO: 914091 - DNA, 15 bp, Homo sapiens
ttatttacttgatgg

SEQ ID NO: 914092 - DNA, 15 bp, Homo sapiens
tatttacttgatgga

SEQ ID NO: 914093 - DNA, 15 bp, Homo sapiens
atttacttgatggat

SEQ ID NO: 914094 - DNA, 15 bp, Homo sapiens
tttacttgatggatg

SEQ ID NO: 914095 - DNA, 15 bp, Homo sapiens
ttacttgatggatga

SEQ ID NO: 914096 - DNA, 15 bp, Homo sapiens
tacttgatggatgaa

SEQ ID NO: 914097 - DNA, 15 bp, Homo sapiens
acttgatggatgaaa

SEQ ID NO: 914098 - DNA, 15 bp, Homo sapiens
cttgatggatgaaat

SEQ ID NO: 914099 - DNA, 15 bp, Homo sapiens
ttgatggatgaaatg

SEQ ID NO: 914100 - DNA, 15 bp, Homo sapiens
tgatggatgaaatgg

SEQ ID NO: 914101 - DNA, 15 bp, Homo sapiens
gatggatgaaatggc

SEQ ID NO: 914102 - DNA, 15 bp, Homo sapiens
atggatgaaatggct

SEQ ID NO: 914103 - DNA, 15 bp, Homo sapiens
tggatgaaatggcta

SEQ ID NO: 914104 - DNA, 15 bp, Homo sapiens
ggatgaaatggctac

SEQ ID NO: 914105 - DNA, 15 bp, Homo sapiens
gatgaaatggctacc

SEQ ID NO: 914106 - DNA, 15 bp, Homo sapiens
atgaaatggctacct

SEQ ID NO: 914107 - DNA, 15 bp, Homo sapiens
tgaaatggctaccta

SEQ ID NO: 914108 - DNA, 15 bp, Homo sapiens
gaaatggctacctag

SEQ ID NO: 914109 - DNA, 15 bp, Homo sapiens
aaatggctacctaga

SEQ ID NO: 914110 - DNA, 15 bp, Homo sapiens
aatggctacctagat

SEQ ID NO: 914111 - DNA, 15 bp, Homo sapiens
atggctacctagatt

SEQ ID NO: 914112 - DNA, 15 bp, Homo sapiens
tggctacctagattt

SEQ ID NO: 914113 - DNA, 15 bp, Homo sapiens
ggctacctagatttg

SEQ ID NO: 914114 - DNA, 15 bp, Homo sapiens
gctacctagatttgt

SEQ ID NO: 914115 - DNA, 15 bp, Homo sapiens
ctacctagatttgtt

SEQ ID NO: 914116 - DNA, 15 bp, Homo sapiens
tacctagatttgtta

SEQ ID NO: 914117 - DNA, 15 bp, Homo sapiens
acctagatttgttaa

SEQ ID NO: 914118 - DNA, 15 bp, Homo sapiens
cctagatttgttaat

SEQ ID NO: 914119 - DNA, 15 bp, Homo sapiens
ctagatttgttaata

SEQ ID NO: 914120 - DNA, 15 bp, Homo sapiens
tagatttgttaatac

SEQ ID NO: 914121 - DNA, 15 bp, Homo sapiens
agatttgttaatacg

SEQ ID NO: 914122 - DNA, 15 bp, Homo sapiens
gatttgttaatacgt

SEQ ID NO: 914123 - DNA, 15 bp, Homo sapiens
atttgttaatacgta

SEQ ID NO: 914124 - DNA, 15 bp, Homo sapiens
tttgttaatacgtat

SEQ ID NO: 914125 - DNA, 15 bp, Homo sapiens
ttgttaatacgtatt

SEQ ID NO: 914126 - DNA, 15 bp, Homo sapiens
tgttaatacgtatta

SEQ ID NO: 914127 - DNA, 15 bp, Homo sapiens
gttaatacgtattaa

SEQ ID NO: 914128 - DNA, 15 bp, Homo sapiens
ttaatacgtattaag

SEQ ID NO: 914129 - DNA, 15 bp, Homo sapiens
taatacgtattaaga

SEQ ID NO: 914130 - DNA, 15 bp, Homo sapiens
aatacgtattaagat

SEQ ID NO: 914131 - DNA, 15 bp, Homo sapiens
atacgtattaagatg

SEQ ID NO: 914132 - DNA, 15 bp, Homo sapiens
tacgtattaagatgc

SEQ ID NO: 914133 - DNA, 15 bp, Homo sapiens
acgtattaagatgca

SEQ ID NO: 914134 - DNA, 15 bp, Homo sapiens
cgtattaagatgcat

SEQ ID NO: 914135 - DNA, 15 bp, Homo sapiens
gtattaagatgcatg

SEQ ID NO: 914136 - DNA, 15 bp, Homo sapiens
tattaagatgcatgt

SEQ ID NO: 914137 - DNA, 15 bp, Homo sapiens
attaagatgcatgtt

SEQ ID NO: 914138 - DNA, 15 bp, Homo sapiens
ttaagatgcatgttt

SEQ ID NO: 914139 - DNA, 15 bp, Homo sapiens
taagatgcatgtttc

SEQ ID NO: 914140 - DNA, 15 bp, Homo sapiens
aagatgcatgtttca

SEQ ID NO: 914141 - DNA, 15 bp, Homo sapiens
agatgcatgtttcag

SEQ ID NO: 914142 - DNA, 15 bp, Homo sapiens
gatgcatgtttcaga

SEQ ID NO: 914143 - DNA, 15 bp, Homo sapiens
atgcatgtttcagaa

SEQ ID NO: 914144 - DNA, 15 bp, Homo sapiens
tgcatgtttcagaaa

SEQ ID NO: 914145 - DNA, 15 bp, Homo sapiens
gcatgtttcagaaat

SEQ ID NO: 914146 - DNA, 15 bp, Homo sapiens
catgtttcagaaata

SEQ ID NO: 914147 - DNA, 15 bp, Homo sapiens
atgtttcagaaataa

SEQ ID NO: 914148 - DNA, 15 bp, Homo sapiens
tgtttcagaaataaa

SEQ ID NO: 914149 - DNA, 15 bp, Homo sapiens
gtttcagaaataaaa

SEQ ID NO: 914150 - DNA, 15 bp, Homo sapiens
tttcagaaataaaaa

SEQ ID NO: 914151 - DNA, 15 bp, Homo sapiens
ttcagaaataaaaaa

SEQ ID NO: 914152 - DNA, 15 bp, Homo sapiens
tcagaaataaaaaag

SEQ ID NO: 914153 - DNA, 15 bp, Homo sapiens
cagaaataaaaaagt

SEQ ID NO: 914154 - DNA, 15 bp, Homo sapiens
agaaataaaaaagtt

SEQ ID NO: 914155 - DNA, 15 bp, Homo sapiens
gaaataaaaaagtta

SEQ ID NO: 914156 - DNA, 15 bp, Homo sapiens
aaataaaaaagttac

SEQ ID NO: 914157 - DNA, 15 bp, Homo sapiens
aataaaaaagttact

SEQ ID NO: 914158 - DNA, 15 bp, Homo sapiens
ataaaaaagttacta

SEQ ID NO: 914159 - DNA, 15 bp, Homo sapiens
taaaaaagttactat

SEQ ID NO: 914160 - DNA, 15 bp, Homo sapiens
aaaaaagttactata

SEQ ID NO: 914161 - DNA, 15 bp, Homo sapiens
aaaaagttactataa

SEQ ID NO: 914162 - DNA, 15 bp, Homo sapiens
aaaagttactataaa

SEQ ID NO: 914163 - DNA, 15 bp, Homo sapiens
aaagttactataaaa

SEQ ID NO: 914164 - DNA, 15 bp, Homo sapiens
aagttactataaaaa

SEQ ID NO: 914165 - DNA, 15 bp, Homo sapiens
agttactataaaaat

SEQ ID NO: 914166 - DNA, 15 bp, Homo sapiens
gttactataaaaatt

SEQ ID NO: 914167 - DNA, 15 bp, Homo sapiens
ttactataaaaattg

SEQ ID NO: 914168 - DNA, 15 bp, Homo sapiens
tactataaaaattgc

SEQ ID NO: 914169 - DNA, 15 bp, Homo sapiens
actataaaaattgct

SEQ ID NO: 914170 - DNA, 15 bp, Homo sapiens
ctataaaaattgcta

SEQ ID NO: 914171 - DNA, 15 bp, Homo sapiens
tataaaaattgctaa

SEQ ID NO: 914172 - DNA, 15 bp, Homo sapiens
ataaaaattgctaat

SEQ ID NO: 914173 - DNA, 15 bp, Homo sapiens
taaaaattgctaata

SEQ ID NO: 914174 - DNA, 15 bp, Homo sapiens
aaaaattgctaatat

SEQ ID NO: 914175 - DNA, 15 bp, Homo sapiens
aaaattgctaatata

SEQ ID NO: 914176 - DNA, 15 bp, Homo sapiens
aaattgctaatatac

SEQ ID NO: 914177 - DNA, 15 bp, Homo sapiens
aattgctaatatact

SEQ ID NO: 914178 - DNA, 15 bp, Homo sapiens
attgctaatatactt

SEQ ID NO: 914179 - DNA, 15 bp, Homo sapiens
ttgctaatatactta

SEQ ID NO: 914180 - DNA, 15 bp, Homo sapiens
tgctaatatacttat

SEQ ID NO: 914181 - DNA, 15 bp, Homo sapiens
gctaatatacttata

SEQ ID NO: 914182 - DNA, 15 bp, Homo sapiens
ctaatatacttatag

SEQ ID NO: 914183 - DNA, 15 bp, Homo sapiens
taatatacttatagg

SEQ ID NO: 914184 - DNA, 15 bp, Homo sapiens
aatatacttatagga

SEQ ID NO: 914185 - DNA, 15 bp, Homo sapiens
atatacttataggat

SEQ ID NO: 914186 - DNA, 15 bp, Homo sapiens
tatacttataggata

SEQ ID NO: 914187 - DNA, 15 bp, Homo sapiens
atacttataggatat

SEQ ID NO: 914188 - DNA, 15 bp, Homo sapiens
tacttataggatatt

SEQ ID NO: 914189 - DNA, 15 bp, Homo sapiens
acttataggatattt

SEQ ID NO: 914190 - DNA, 15 bp, Homo sapiens
cttataggatatttg

SEQ ID NO: 914191 - DNA, 15 bp, Homo sapiens
ttataggatatttgg

SEQ ID NO: 914192 - DNA, 15 bp, Homo sapiens
tataggatatttggc

SEQ ID NO: 914193 - DNA, 15 bp, Homo sapiens
ataggatatttggct

SEQ ID NO: 914194 - DNA, 15 bp, Homo sapiens
taggatatttggctg

SEQ ID NO: 914195 - DNA, 15 bp, Homo sapiens
aggatatttggctgt

SEQ ID NO: 914196 - DNA, 15 bp, Homo sapiens
ggatatttggctgtt

SEQ ID NO: 914197 - DNA, 15 bp, Homo sapiens
gatatttggctgttt

SEQ ID NO: 914198 - DNA, 15 bp, Homo sapiens
atatttggctgttta

SEQ ID NO: 914199 - DNA, 15 bp, Homo sapiens
tatttggctgtttaa

SEQ ID NO: 914200 - DNA, 15 bp, Homo sapiens
atttggctgtttaaa

SEQ ID NO: 914201 - DNA, 15 bp, Homo sapiens
tttggctgtttaaag

SEQ ID NO: 914202 - DNA, 15 bp, Homo sapiens
ttggctgtttaaagt

SEQ ID NO: 914203 - DNA, 15 bp, Homo sapiens
tggctgtttaaagta

SEQ ID NO: 914204 - DNA, 15 bp, Homo sapiens
ggctgtttaaagtat

SEQ ID NO: 914205 - DNA, 15 bp, Homo sapiens
gctgtttaaagtatg

SEQ ID NO: 914206 - DNA, 15 bp, Homo sapiens
ctgtttaaagtatga

SEQ ID NO: 914207 - DNA, 15 bp, Homo sapiens
tgtttaaagtatgat

SEQ ID NO: 914208 - DNA, 15 bp, Homo sapiens
gtttaaagtatgatc

SEQ ID NO: 914209 - DNA, 15 bp, Homo sapiens
tttaaagtatgatct

SEQ ID NO: 914210 - DNA, 15 bp, Homo sapiens
ttaaagtatgatcta

SEQ ID NO: 914211 - DNA, 15 bp, Homo sapiens
taaagtatgatctat

SEQ ID NO: 914212 - DNA, 15 bp, Homo sapiens
aaagtatgatctatt

SEQ ID NO: 914213 - DNA, 15 bp, Homo sapiens
aagtatgatctattt

SEQ ID NO: 914214 - DNA, 15 bp, Homo sapiens
agtatgatctatttg

SEQ ID NO: 914215 - DNA, 15 bp, Homo sapiens
gtatgatctatttgt

SEQ ID NO: 914216 - DNA, 15 bp, Homo sapiens
tatgatctatttgtt

SEQ ID NO: 914217 - DNA, 15 bp, Homo sapiens
atgatctatttgtta

SEQ ID NO: 914218 - DNA, 15 bp, Homo sapiens
tgatctatttgttat

SEQ ID NO: 914219 - DNA, 15 bp, Homo sapiens
gatctatttgttatt

SEQ ID NO: 914220 - DNA, 15 bp, Homo sapiens
atctatttgttattt

SEQ ID NO: 914221 - DNA, 15 bp, Homo sapiens
tctatttgttatttg

SEQ ID NO: 914222 - DNA, 15 bp, Homo sapiens
ctatttgttatttgc

SEQ ID NO: 914223 - DNA, 15 bp, Homo sapiens
tatttgttatttgca

SEQ ID NO: 914224 - DNA, 15 bp, Homo sapiens
atttgttatttgcat

SEQ ID NO: 914225 - DNA, 15 bp, Homo sapiens
tttgttatttgcatt

SEQ ID NO: 914226 - DNA, 15 bp, Homo sapiens
ttgttatttgcattc

SEQ ID NO: 914227 - DNA, 15 bp, Homo sapiens
tgttatttgcattcc

SEQ ID NO: 914228 - DNA, 15 bp, Homo sapiens
gttatttgcattcca

SEQ ID NO: 914229 - DNA, 15 bp, Homo sapiens
ttatttgcattccac

SEQ ID NO: 914230 - DNA, 15 bp, Homo sapiens
tatttgcattccaca

SEQ ID NO: 914231 - DNA, 15 bp, Homo sapiens
atttgcattccacaa

SEQ ID NO: 914232 - DNA, 15 bp, Homo sapiens
tttgcattccacaaa

SEQ ID NO: 914233 - DNA, 15 bp, Homo sapiens
ttgcattccacaaag

SEQ ID NO: 914234 - DNA, 15 bp, Homo sapiens
tgcattccacaaagt

SEQ ID NO: 914235 - DNA, 15 bp, Homo sapiens
gcattccacaaagta

SEQ ID NO: 914236 - DNA, 15 bp, Homo sapiens
cattccacaaagtaa

SEQ ID NO: 914237 - DNA, 15 bp, Homo sapiens
attccacaaagtaag

SEQ ID NO: 914238 - DNA, 15 bp, Homo sapiens
ttccacaaagtaaga

SEQ ID NO: 914239 - DNA, 15 bp, Homo sapiens
tccacaaagtaagat

SEQ ID NO: 914240 - DNA, 15 bp, Homo sapiens
ccacaaagtaagatg

SEQ ID NO: 914241 - DNA, 15 bp, Homo sapiens
cacaaagtaagatga

SEQ ID NO: 914242 - DNA, 15 bp, Homo sapiens
acaaagtaagatgag

SEQ ID NO: 914243 - DNA, 15 bp, Homo sapiens
caaagtaagatgagc

SEQ ID NO: 914244 - DNA, 15 bp, Homo sapiens
aaagtaagatgagca

SEQ ID NO: 914245 - DNA, 15 bp, Homo sapiens
aagtaagatgagcaa

SEQ ID NO: 914246 - DNA, 15 bp, Homo sapiens
agtaagatgagcaat

SEQ ID NO: 914247 - DNA, 15 bp, Homo sapiens
gtaagatgagcaatt

SEQ ID NO: 914248 - DNA, 15 bp, Homo sapiens
taagatgagcaatta

SEQ ID NO: 914249 - DNA, 15 bp, Homo sapiens
aagatgagcaattac

SEQ ID NO: 914250 - DNA, 15 bp, Homo sapiens
agatgagcaattaca

SEQ ID NO: 914251 - DNA, 15 bp, Homo sapiens
gatgagcaattacat

SEQ ID NO: 914252 - DNA, 15 bp, Homo sapiens
atgagcaattacatc

SEQ ID NO: 914253 - DNA, 15 bp, Homo sapiens
tgagcaattacatca

SEQ ID NO: 914254 - DNA, 15 bp, Homo sapiens
gagcaattacatcag

SEQ ID NO: 914255 - DNA, 15 bp, Homo sapiens
agcaattacatcaga

SEQ ID NO: 914256 - DNA, 15 bp, Homo sapiens
gcaattacatcagat

SEQ ID NO: 914257 - DNA, 15 bp, Homo sapiens
caattacatcagatt

SEQ ID NO: 914258 - DNA, 15 bp, Homo sapiens
aattacatcagatta

SEQ ID NO: 914259 - DNA, 15 bp, Homo sapiens
attacatcagattat

SEQ ID NO: 914260 - DNA, 15 bp, Homo sapiens
ttacatcagattata

SEQ ID NO: 914261 - DNA, 15 bp, Homo sapiens
tacatcagattatac

SEQ ID NO: 914262 - DNA, 15 bp, Homo sapiens
acatcagattatact

SEQ ID NO: 914263 - DNA, 15 bp, Homo sapiens
catcagattatacta

SEQ ID NO: 914264 - DNA, 15 bp, Homo sapiens
atcagattatactaa

SEQ ID NO: 914265 - DNA, 15 bp, Homo sapiens
tcagattatactaat

SEQ ID NO: 914266 - DNA, 15 bp, Homo sapiens
cagattatactaatc

SEQ ID NO: 914267 - DNA, 15 bp, Homo sapiens
agattatactaatca

SEQ ID NO: 914268 - DNA, 15 bp, Homo sapiens
gattatactaatcat

SEQ ID NO: 914269 - DNA, 15 bp, Homo sapiens
attatactaatcatt

SEQ ID NO: 914270 - DNA, 15 bp, Homo sapiens
ttatactaatcattg

SEQ ID NO: 914271 - DNA, 15 bp, Homo sapiens
tatactaatcattgg

SEQ ID NO: 914272 - DNA, 15 bp, Homo sapiens
atactaatcattggt

SEQ ID NO: 914273 - DNA, 15 bp, Homo sapiens
tactaatcattggtt

SEQ ID NO: 914274 - DNA, 15 bp, Homo sapiens
actaatcattggtta

SEQ ID NO: 914275 - DNA, 15 bp, Homo sapiens
ctaatcattggttaa

SEQ ID NO: 914276 - DNA, 15 bp, Homo sapiens
taatcattggttaaa

SEQ ID NO: 914277 - DNA, 15 bp, Homo sapiens
aatcattggttaaat

SEQ ID NO: 914278 - DNA, 15 bp, Homo sapiens
atcattggttaaatc

SEQ ID NO: 914279 - DNA, 15 bp, Homo sapiens
tcattggttaaatct

SEQ ID NO: 914280 - DNA, 15 bp, Homo sapiens
cattggttaaatctt

SEQ ID NO: 914281 - DNA, 15 bp, Homo sapiens
attggttaaatctta

SEQ ID NO: 914282 - DNA, 15 bp, Homo sapiens
ttggttaaatcttat

SEQ ID NO: 914283 - DNA, 15 bp, Homo sapiens
tggttaaatcttatt

SEQ ID NO: 914284 - DNA, 15 bp, Homo sapiens
ggttaaatcttattt

SEQ ID NO: 914285 - DNA, 15 bp, Homo sapiens
gttaaatcttatttt

SEQ ID NO: 914286 - DNA, 15 bp, Homo sapiens
ttaaatcttattttc

SEQ ID NO: 914287 - DNA, 15 bp, Homo sapiens
taaatcttattttct

SEQ ID NO: 914288 - DNA, 15 bp, Homo sapiens
aaatcttattttctt

SEQ ID NO: 914289 - DNA, 15 bp, Homo sapiens
aatcttattttctta

SEQ ID NO: 914290 - DNA, 15 bp, Homo sapiens
atcttattttcttat

SEQ ID NO: 914291 - DNA, 15 bp, Homo sapiens
tcttattttcttatt

SEQ ID NO: 914292 - DNA, 15 bp, Homo sapiens
cttattttcttattt

SEQ ID NO: 914293 - DNA, 15 bp, Homo sapiens
ttattttcttattta

SEQ ID NO: 914294 - DNA, 15 bp, Homo sapiens
tattttcttatttaa

SEQ ID NO: 914295 - DNA, 15 bp, Homo sapiens
attttcttatttaaa

SEQ ID NO: 914296 - DNA, 15 bp, Homo sapiens
ttttcttatttaaat

SEQ ID NO: 914297 - DNA, 15 bp, Homo sapiens
tttcttatttaaatc

SEQ ID NO: 914298 - DNA, 15 bp, Homo sapiens
ttcttatttaaatca

SEQ ID NO: 914299 - DNA, 15 bp, Homo sapiens
tcttatttaaatcaa

SEQ ID NO: 914300 - DNA, 15 bp, Homo sapiens
cttatttaaatcaaa

SEQ ID NO: 914301 - DNA, 15 bp, Homo sapiens
ttatttaaatcaaaa

SEQ ID NO: 914302 - DNA, 15 bp, Homo sapiens
tatttaaatcaaaat

SEQ ID NO: 914303 - DNA, 15 bp, Homo sapiens
atttaaatcaaaatt

SEQ ID NO: 914304 - DNA, 15 bp, Homo sapiens
tttaaatcaaaatta

SEQ ID NO: 914305 - DNA, 15 bp, Homo sapiens
ttaaatcaaaattaa

SEQ ID NO: 914306 - DNA, 15 bp, Homo sapiens
taaatcaaaattaag

SEQ ID NO: 914307 - DNA, 15 bp, Homo sapiens
aaatcaaaattaagt

SEQ ID NO: 914308 - DNA, 15 bp, Homo sapiens
aatcaaaattaagtt

SEQ ID NO: 914309 - DNA, 15 bp, Homo sapiens
atcaaaattaagtta

SEQ ID NO: 914310 - DNA, 15 bp, Homo sapiens
tcaaaattaagttat

SEQ ID NO: 914311 - DNA, 15 bp, Homo sapiens
caaaattaagttata

SEQ ID NO: 914312 - DNA, 15 bp, Homo sapiens
aaaattaagttatac

SEQ ID NO: 914313 - DNA, 15 bp, Homo sapiens
aaattaagttataca

SEQ ID NO: 914314 - DNA, 15 bp, Homo sapiens
aattaagttatacaa

SEQ ID NO: 914315 - DNA, 15 bp, Homo sapiens
attaagttatacaaa

SEQ ID NO: 914316 - DNA, 15 bp, Homo sapiens
ttaagttatacaaat

SEQ ID NO: 914317 - DNA, 15 bp, Homo sapiens
taagttatacaaata

SEQ ID NO: 914318 - DNA, 15 bp, Homo sapiens
aagttatacaaatat

SEQ ID NO: 914319 - DNA, 15 bp, Homo sapiens
agttatacaaatata

SEQ ID NO: 914320 - DNA, 15 bp, Homo sapiens
gttatacaaatataa

SEQ ID NO: 914321 - DNA, 15 bp, Homo sapiens
ttatacaaatataaa

SEQ ID NO: 914322 - DNA, 15 bp, Homo sapiens
tatacaaatataaaa

SEQ ID NO: 914323 - DNA, 15 bp, Homo sapiens
atacaaatataaaaa

SEQ ID NO: 914324 - DNA, 15 bp, Homo sapiens
tacaaatataaaaag

SEQ ID NO: 914325 - DNA, 15 bp, Homo sapiens
acaaatataaaaagg

SEQ ID NO: 914326 - DNA, 15 bp, Homo sapiens
caaatataaaaaggg

SEQ ID NO: 914327 - DNA, 15 bp, Homo sapiens
aaatataaaaaggga

SEQ ID NO: 914328 - DNA, 15 bp, Homo sapiens
aatataaaaagggaa

SEQ ID NO: 914329 - DNA, 15 bp, Homo sapiens
atataaaaagggaac

SEQ ID NO: 914330 - DNA, 15 bp, Homo sapiens
tataaaaagggaacc

SEQ ID NO: 914331 - DNA, 15 bp, Homo sapiens
ataaaaagggaacct

SEQ ID NO: 914332 - DNA, 15 bp, Homo sapiens
taaaaagggaaccta

SEQ ID NO: 914333 - DNA, 15 bp, Homo sapiens
aaaaagggaacctaa

SEQ ID NO: 914334 - DNA, 15 bp, Homo sapiens
aaaagggaacctaat

SEQ ID NO: 914335 - DNA, 15 bp, Homo sapiens
aaagggaacctaata

SEQ ID NO: 914336 - DNA, 15 bp, Homo sapiens
aagggaacctaataa

SEQ ID NO: 914337 - DNA, 15 bp, Homo sapiens
agggaacctaataat

SEQ ID NO: 914338 - DNA, 15 bp, Homo sapiens
gggaacctaataatg

SEQ ID NO: 914339 - DNA, 15 bp, Homo sapiens
ggaacctaataatgg

SEQ ID NO: 914340 - DNA, 15 bp, Homo sapiens
gaacctaataatggc

SEQ ID NO: 914341 - DNA, 15 bp, Homo sapiens
aacctaataatggca

SEQ ID NO: 914342 - DNA, 15 bp, Homo sapiens
acctaataatggcaa

SEQ ID NO: 914343 - DNA, 15 bp, Homo sapiens
cctaataatggcaag

SEQ ID NO: 914344 - DNA, 15 bp, Homo sapiens
ctaataatggcaagt

SEQ ID NO: 914345 - DNA, 15 bp, Homo sapiens
taataatggcaagtt

SEQ ID NO: 914346 - DNA, 15 bp, Homo sapiens
aataatggcaagttt

SEQ ID NO: 914347 - DNA, 15 bp, Homo sapiens
ataatggcaagtttc

SEQ ID NO: 914348 - DNA, 15 bp, Homo sapiens
taatggcaagtttcc

SEQ ID NO: 914349 - DNA, 15 bp, Homo sapiens
aatggcaagtttccg

SEQ ID NO: 914350 - DNA, 15 bp, Homo sapiens
atggcaagtttccgt

SEQ ID NO: 914351 - DNA, 15 bp, Homo sapiens
tggcaagtttccgtc

SEQ ID NO: 914352 - DNA, 15 bp, Homo sapiens
ggcaagtttccgtct

SEQ ID NO: 914353 - DNA, 15 bp, Homo sapiens
gcaagtttccgtctc

SEQ ID NO: 914354 - DNA, 15 bp, Homo sapiens
caagtttccgtctct

SEQ ID NO: 914355 - DNA, 15 bp, Homo sapiens
aagtttccgtctctt

SEQ ID NO: 914356 - DNA, 15 bp, Homo sapiens
agtttccgtctcttt

SEQ ID NO: 914357 - DNA, 15 bp, Homo sapiens
gtttccgtctctttt

SEQ ID NO: 914358 - DNA, 15 bp, Homo sapiens
tttccgtctcttttt

SEQ ID NO: 914359 - DNA, 15 bp, Homo sapiens
ttccgtctctttttg

SEQ ID NO: 914360 - DNA, 15 bp, Homo sapiens
tccgtctctttttgg

SEQ ID NO: 914361 - DNA, 15 bp, Homo sapiens
ccgtctctttttggc

SEQ ID NO: 914362 - DNA, 15 bp, Homo sapiens
cgtctctttttggct

SEQ ID NO: 914363 - DNA, 15 bp, Homo sapiens
gtctctttttggctg

SEQ ID NO: 914364 - DNA, 15 bp, Homo sapiens
tctctttttggctgg

SEQ ID NO: 914365 - DNA, 15 bp, Homo sapiens
ctctttttggctggg

SEQ ID NO: 914366 - DNA, 15 bp, Homo sapiens
tctttttggctggga

SEQ ID NO: 914367 - DNA, 15 bp, Homo sapiens
ctttttggctgggat

SEQ ID NO: 914368 - DNA, 15 bp, Homo sapiens
tttttggctgggatt

SEQ ID NO: 914369 - DNA, 15 bp, Homo sapiens
ttttggctgggattc

SEQ ID NO: 914370 - DNA, 15 bp, Homo sapiens
tttggctgggattca

SEQ ID NO: 914371 - DNA, 15 bp, Homo sapiens
ttggctgggattcat

SEQ ID NO: 914372 - DNA, 15 bp, Homo sapiens
tggctgggattcatc

SEQ ID NO: 914373 - DNA, 15 bp, Homo sapiens
ggctgggattcatca

SEQ ID NO: 914374 - DNA, 15 bp, Homo sapiens
gctgggattcatcaa

SEQ ID NO: 914375 - DNA, 15 bp, Homo sapiens
ctgggattcatcaaa

SEQ ID NO: 914376 - DNA, 15 bp, Homo sapiens
tgggattcatcaaaa

SEQ ID NO: 914377 - DNA, 15 bp, Homo sapiens
gggattcatcaaaaa

SEQ ID NO: 914378 - DNA, 15 bp, Homo sapiens
ggattcatcaaaaac

SEQ ID NO: 914379 - DNA, 15 bp, Homo sapiens
gattcatcaaaaacc

SEQ ID NO: 914380 - DNA, 15 bp, Homo sapiens
attcatcaaaaacct

SEQ ID NO: 914381 - DNA, 15 bp, Homo sapiens
ttcatcaaaaacctt

SEQ ID NO: 914382 - DNA, 15 bp, Homo sapiens
tcatcaaaaaccttt

SEQ ID NO: 914383 - DNA, 15 bp, Homo sapiens
catcaaaaaccttta

SEQ ID NO: 914384 - DNA, 15 bp, Homo sapiens
atcaaaaacctttaa

SEQ ID NO: 914385 - DNA, 15 bp, Homo sapiens
tcaaaaacctttaat

SEQ ID NO: 914386 - DNA, 15 bp, Homo sapiens
caaaaacctttaatt

SEQ ID NO: 914387 - DNA, 15 bp, Homo sapiens
aaaaacctttaattc

SEQ ID NO: 914388 - DNA, 15 bp, Homo sapiens
aaaacctttaattca

SEQ ID NO: 914389 - DNA, 15 bp, Homo sapiens
aaacctttaattcag

SEQ ID NO: 914390 - DNA, 15 bp, Homo sapiens
aacctttaattcagt

SEQ ID NO: 914391 - DNA, 15 bp, Homo sapiens
acctttaattcagta

SEQ ID NO: 914392 - DNA, 15 bp, Homo sapiens
cctttaattcagtag

SEQ ID NO: 914393 - DNA, 15 bp, Homo sapiens
ctttaattcagtagt

SEQ ID NO: 914394 - DNA, 15 bp, Homo sapiens
tttaattcagtagtt

SEQ ID NO: 914395 - DNA, 15 bp, Homo sapiens
ttaattcagtagttg

SEQ ID NO: 914396 - DNA, 15 bp, Homo sapiens
taattcagtagttgg

SEQ ID NO: 914397 - DNA, 15 bp, Homo sapiens
aattcagtagttgga

SEQ ID NO: 914398 - DNA, 15 bp, Homo sapiens
attcagtagttggag

SEQ ID NO: 914399 - DNA, 15 bp, Homo sapiens
ttcagtagttggagg

SEQ ID NO: 914400 - DNA, 15 bp, Homo sapiens
tcagtagttggaggt

SEQ ID NO: 914401 - DNA, 15 bp, Homo sapiens
cagtagttggaggtg

SEQ ID NO: 914402 - DNA, 15 bp, Homo sapiens
agtagttggaggtga

SEQ ID NO: 914403 - DNA, 15 bp, Homo sapiens
gtagttggaggtgat

SEQ ID NO: 914404 - DNA, 15 bp, Homo sapiens
tagttggaggtgata

SEQ ID NO: 914405 - DNA, 15 bp, Homo sapiens
agttggaggtgatat

SEQ ID NO: 914406 - DNA, 15 bp, Homo sapiens
gttggaggtgatatt

SEQ ID NO: 914407 - DNA, 15 bp, Homo sapiens
ttggaggtgatattc

SEQ ID NO: 914408 - DNA, 15 bp, Homo sapiens
tggaggtgatattct

SEQ ID NO: 914409 - DNA, 15 bp, Homo sapiens
ggaggtgatattctg

SEQ ID NO: 914410 - DNA, 15 bp, Homo sapiens
gaggtgatattctgt

SEQ ID NO: 914411 - DNA, 15 bp, Homo sapiens
aggtgatattctgta

SEQ ID NO: 914412 - DNA, 15 bp, Homo sapiens
ggtgatattctgtaa

SEQ ID NO: 914413 - DNA, 15 bp, Homo sapiens
gtgatattctgtaat

SEQ ID NO: 914414 - DNA, 15 bp, Homo sapiens
tgatattctgtaatt

SEQ ID NO: 914415 - DNA, 15 bp, Homo sapiens
gatattctgtaattg

SEQ ID NO: 914416 - DNA, 15 bp, Homo sapiens
atattctgtaattgt

SEQ ID NO: 914417 - DNA, 15 bp, Homo sapiens
tattctgtaattgta

SEQ ID NO: 914418 - DNA, 15 bp, Homo sapiens
attctgtaattgtaa

SEQ ID NO: 914419 - DNA, 15 bp, Homo sapiens
ttctgtaattgtaaa

SEQ ID NO: 914420 - DNA, 15 bp, Homo sapiens
tctgtaattgtaaat

SEQ ID NO: 914421 - DNA, 15 bp, Homo sapiens
ctgtaattgtaaata

SEQ ID NO: 914422 - DNA, 15 bp, Homo sapiens
tgtaattgtaaatag

SEQ ID NO: 914423 - DNA, 15 bp, Homo sapiens
gtaattgtaaatagt

SEQ ID NO: 914424 - DNA, 15 bp, Homo sapiens
taattgtaaatagtt

SEQ ID NO: 914425 - DNA, 15 bp, Homo sapiens
aattgtaaatagtta

SEQ ID NO: 914426 - DNA, 15 bp, Homo sapiens
attgtaaatagttaa

SEQ ID NO: 914427 - DNA, 15 bp, Homo sapiens
ttgtaaatagttaag

SEQ ID NO: 914428 - DNA, 15 bp, Homo sapiens
tgtaaatagttaaga

SEQ ID NO: 914429 - DNA, 15 bp, Homo sapiens
gtaaatagttaagaa

SEQ ID NO: 914430 - DNA, 15 bp, Homo sapiens
taaatagttaagaac

SEQ ID NO: 914431 - DNA, 15 bp, Homo sapiens
aaatagttaagaact

SEQ ID NO: 914432 - DNA, 15 bp, Homo sapiens
aatagttaagaactt

SEQ ID NO: 914433 - DNA, 15 bp, Homo sapiens
atagttaagaacttt

SEQ ID NO: 914434 - DNA, 15 bp, Homo sapiens
tagttaagaactttg

SEQ ID NO: 914435 - DNA, 15 bp, Homo sapiens
agttaagaactttga

SEQ ID NO: 914436 - DNA, 15 bp, Homo sapiens
gttaagaactttgag

SEQ ID NO: 914437 - DNA, 15 bp, Homo sapiens
ttaagaactttgagc

SEQ ID NO: 914438 - DNA, 15 bp, Homo sapiens
taagaactttgagct

SEQ ID NO: 914439 - DNA, 15 bp, Homo sapiens
aagaactttgagcta

SEQ ID NO: 914440 - DNA, 15 bp, Homo sapiens
agaactttgagctat

SEQ ID NO: 914441 - DNA, 15 bp, Homo sapiens
gaactttgagctatt

SEQ ID NO: 914442 - DNA, 15 bp, Homo sapiens
aactttgagctattt

SEQ ID NO: 914443 - DNA, 15 bp, Homo sapiens
actttgagctattta

SEQ ID NO: 914444 - DNA, 15 bp, Homo sapiens
ctttgagctatttat

SEQ ID NO: 914445 - DNA, 15 bp, Homo sapiens
tttgagctatttatt

SEQ ID NO: 914446 - DNA, 15 bp, Homo sapiens
ttgagctatttattt

SEQ ID NO: 914447 - DNA, 15 bp, Homo sapiens
tgagctatttatttc

SEQ ID NO: 914448 - DNA, 15 bp, Homo sapiens
gagctatttatttca

SEQ ID NO: 914449 - DNA, 15 bp, Homo sapiens
agctatttatttcaa

SEQ ID NO: 914450 - DNA, 15 bp, Homo sapiens
gctatttatttcaaa

SEQ ID NO: 914451 - DNA, 15 bp, Homo sapiens
ctatttatttcaaat

SEQ ID NO: 914452 - DNA, 15 bp, Homo sapiens
tatttatttcaaatt

SEQ ID NO: 914453 - DNA, 15 bp, Homo sapiens
atttatttcaaattt

SEQ ID NO: 914454 - DNA, 15 bp, Homo sapiens
tttatttcaaatttg

SEQ ID NO: 914455 - DNA, 15 bp, Homo sapiens
ttatttcaaatttga

SEQ ID NO: 914456 - DNA, 15 bp, Homo sapiens
tatttcaaatttgac

SEQ ID NO: 914457 - DNA, 15 bp, Homo sapiens
atttcaaatttgact

SEQ ID NO: 914458 - DNA, 15 bp, Homo sapiens
tttcaaatttgactg

SEQ ID NO: 914459 - DNA, 15 bp, Homo sapiens
ttcaaatttgactga

SEQ ID NO: 914460 - DNA, 15 bp, Homo sapiens
tcaaatttgactgag

SEQ ID NO: 914461 - DNA, 15 bp, Homo sapiens
caaatttgactgagt

SEQ ID NO: 914462 - DNA, 15 bp, Homo sapiens
aaatttgactgagtt

SEQ ID NO: 914463 - DNA, 15 bp, Homo sapiens
aatttgactgagtta

SEQ ID NO: 914464 - DNA, 15 bp, Homo sapiens
atttgactgagttac

SEQ ID NO: 914465 - DNA, 15 bp, Homo sapiens
tttgactgagttaca

SEQ ID NO: 914466 - DNA, 15 bp, Homo sapiens
ttgactgagttacaa

SEQ ID NO: 914467 - DNA, 15 bp, Homo sapiens
tgactgagttacaaa

SEQ ID NO: 914468 - DNA, 15 bp, Homo sapiens
gactgagttacaaaa

SEQ ID NO: 914469 - DNA, 15 bp, Homo sapiens
actgagttacaaaat

SEQ ID NO: 914470 - DNA, 15 bp, Homo sapiens
ctgagttacaaaata

SEQ ID NO: 914471 - DNA, 15 bp, Homo sapiens
tgagttacaaaatat

SEQ ID NO: 914472 - DNA, 15 bp, Homo sapiens
gagttacaaaatata

SEQ ID NO: 914473 - DNA, 15 bp, Homo sapiens
agttacaaaatataa

SEQ ID NO: 914474 - DNA, 15 bp, Homo sapiens
gttacaaaatataaa

SEQ ID NO: 914475 - DNA, 15 bp, Homo sapiens
ttacaaaatataaaa

SEQ ID NO: 914476 - DNA, 15 bp, Homo sapiens
tacaaaatataaaaa

SEQ ID NO: 914477 - DNA, 15 bp, Homo sapiens
acaaaatataaaaac

SEQ ID NO: 914478 - DNA, 15 bp, Homo sapiens
caaaatataaaaaca

SEQ ID NO: 914479 - DNA, 15 bp, Homo sapiens
aaaatataaaaacaa

SEQ ID NO: 914480 - DNA, 15 bp, Homo sapiens
aaatataaaaacaat

SEQ ID NO: 914481 - DNA, 15 bp, Homo sapiens
aatataaaaacaata

SEQ ID NO: 914482 - DNA, 15 bp, Homo sapiens
atataaaaacaataa

SEQ ID NO: 914483 - DNA, 15 bp, Homo sapiens
tataaaaacaataac

SEQ ID NO: 914484 - DNA, 15 bp, Homo sapiens
ataaaaacaataact

SEQ ID NO: 914485 - DNA, 15 bp, Homo sapiens
taaaaacaataactg

SEQ ID NO: 914486 - DNA, 15 bp, Homo sapiens
aaaaacaataactgt

SEQ ID NO: 914487 - DNA, 15 bp, Homo sapiens
aaaacaataactgtt

SEQ ID NO: 914488 - DNA, 15 bp, Homo sapiens
aaacaataactgttt

SEQ ID NO: 914489 - DNA, 15 bp, Homo sapiens
aacaataactgtttc

SEQ ID NO: 914490 - DNA, 15 bp, Homo sapiens
acaataactgtttct

SEQ ID NO: 914491 - DNA, 15 bp, Homo sapiens
caataactgtttctc

SEQ ID NO: 914492 - DNA, 15 bp, Homo sapiens
aataactgtttctca

SEQ ID NO: 914493 - DNA, 15 bp, Homo sapiens
ataactgtttctcat

SEQ ID NO: 914494 - DNA, 15 bp, Homo sapiens
taactgtttctcatt

SEQ ID NO: 914495 - DNA, 15 bp, Homo sapiens
aactgtttctcattg

SEQ ID NO: 914496 - DNA, 15 bp, Homo sapiens
actgtttctcattga

SEQ ID NO: 914497 - DNA, 15 bp, Homo sapiens
ctgtttctcattgac

SEQ ID NO: 914498 - DNA, 15 bp, Homo sapiens
tgtttctcattgact

SEQ ID NO: 914499 - DNA, 15 bp, Homo sapiens
gtttctcattgactg

SEQ ID NO: 914500 - DNA, 15 bp, Homo sapiens
tttctcattgactgg

SEQ ID NO: 914501 - DNA, 15 bp, Homo sapiens
ttctcattgactgga

SEQ ID NO: 914502 - DNA, 15 bp, Homo sapiens
tctcattgactggat

SEQ ID NO: 914503 - DNA, 15 bp, Homo sapiens
ctcattgactggatc

SEQ ID NO: 914504 - DNA, 15 bp, Homo sapiens
tcattgactggatct

SEQ ID NO: 914505 - DNA, 15 bp, Homo sapiens
cattgactggatctt

SEQ ID NO: 914506 - DNA, 15 bp, Homo sapiens
attgactggatcttt

SEQ ID NO: 914507 - DNA, 15 bp, Homo sapiens
ttgactggatctttt

SEQ ID NO: 914508 - DNA, 15 bp, Homo sapiens
tgactggatctttta

SEQ ID NO: 914509 - DNA, 15 bp, Homo sapiens
gactggatcttttac

SEQ ID NO: 914510 - DNA, 15 bp, Homo sapiens
actggatcttttaca

SEQ ID NO: 914511 - DNA, 15 bp, Homo sapiens
ctggatcttttacaa

SEQ ID NO: 914512 - DNA, 15 bp, Homo sapiens
tggatcttttacaat

SEQ ID NO: 914513 - DNA, 15 bp, Homo sapiens
ggatcttttacaatg

SEQ ID NO: 914514 - DNA, 15 bp, Homo sapiens
gatcttttacaatga

SEQ ID NO: 914515 - DNA, 15 bp, Homo sapiens
atcttttacaatgat

SEQ ID NO: 914516 - DNA, 15 bp, Homo sapiens
tcttttacaatgatg

SEQ ID NO: 914517 - DNA, 15 bp, Homo sapiens
cttttacaatgatgt

SEQ ID NO: 914518 - DNA, 15 bp, Homo sapiens
ttttacaatgatgtc

SEQ ID NO: 914519 - DNA, 15 bp, Homo sapiens
tttacaatgatgtcc

SEQ ID NO: 914520 - DNA, 15 bp, Homo sapiens
ttacaatgatgtcct

SEQ ID NO: 914521 - DNA, 15 bp, Homo sapiens
tacaatgatgtcctc

SEQ ID NO: 914522 - DNA, 15 bp, Homo sapiens
acaatgatgtcctca

SEQ ID NO: 914523 - DNA, 15 bp, Homo sapiens
caatgatgtcctcaa

SEQ ID NO: 914524 - DNA, 15 bp, Homo sapiens
aatgatgtcctcaag

SEQ ID NO: 914525 - DNA, 15 bp, Homo sapiens
atgatgtcctcaaga

SEQ ID NO: 914526 - DNA, 15 bp, Homo sapiens
tgatgtcctcaagaa

SEQ ID NO: 914527 - DNA, 15 bp, Homo sapiens
gatgtcctcaagaag

SEQ ID NO: 914528 - DNA, 15 bp, Homo sapiens
atgtcctcaagaaga

SEQ ID NO: 914529 - DNA, 15 bp, Homo sapiens
tgtcctcaagaagat

SEQ ID NO: 914530 - DNA, 15 bp, Homo sapiens
gtcctcaagaagata

SEQ ID NO: 914531 - DNA, 15 bp, Homo sapiens
tcctcaagaagatag

SEQ ID NO: 914532 - DNA, 15 bp, Homo sapiens
cctcaagaagataga

SEQ ID NO: 914533 - DNA, 15 bp, Homo sapiens
ctcaagaagatagaa

SEQ ID NO: 914534 - DNA, 15 bp, Homo sapiens
tcaagaagatagaat

SEQ ID NO: 914535 - DNA, 15 bp, Homo sapiens
caagaagatagaatt

SEQ ID NO: 914536 - DNA, 15 bp, Homo sapiens
aagaagatagaattt

SEQ ID NO: 914537 - DNA, 15 bp, Homo sapiens
agaagatagaattta

SEQ ID NO: 914538 - DNA, 15 bp, Homo sapiens
gaagatagaatttaa

SEQ ID NO: 914539 - DNA, 15 bp, Homo sapiens
aagatagaatttaaa

SEQ ID NO: 914540 - DNA, 15 bp, Homo sapiens
agatagaatttaaaa

SEQ ID NO: 914541 - DNA, 15 bp, Homo sapiens
gatagaatttaaaag

SEQ ID NO: 914542 - DNA, 15 bp, Homo sapiens
atagaatttaaaagc

SEQ ID NO: 914543 - DNA, 15 bp, Homo sapiens
tagaatttaaaagca

SEQ ID NO: 914544 - DNA, 15 bp, Homo sapiens
agaatttaaaagcag

SEQ ID NO: 914545 - DNA, 15 bp, Homo sapiens
gaatttaaaagcaga

SEQ ID NO: 914546 - DNA, 15 bp, Homo sapiens
aatttaaaagcagaa

SEQ ID NO: 914547 - DNA, 15 bp, Homo sapiens
atttaaaagcagaat

SEQ ID NO: 914548 - DNA, 15 bp, Homo sapiens
tttaaaagcagaata

SEQ ID NO: 914549 - DNA, 15 bp, Homo sapiens
ttaaaagcagaataa

SEQ ID NO: 914550 - DNA, 15 bp, Homo sapiens
taaaagcagaataaa

SEQ ID NO: 914551 - DNA, 15 bp, Homo sapiens
aaaagcagaataaaa

SEQ ID NO: 914552 - DNA, 15 bp, Homo sapiens
aaagcagaataaaaa

SEQ ID NO: 914553 - DNA, 15 bp, Homo sapiens
aagcagaataaaaat

SEQ ID NO: 914554 - DNA, 15 bp, Homo sapiens
agcagaataaaaatt

SEQ ID NO: 914555 - DNA, 15 bp, Homo sapiens
gcagaataaaaattt

SEQ ID NO: 914556 - DNA, 15 bp, Homo sapiens
cagaataaaaatttc

SEQ ID NO: 914557 - DNA, 15 bp, Homo sapiens
agaataaaaatttcc

SEQ ID NO: 914558 - DNA, 15 bp, Homo sapiens
gaataaaaatttcct

SEQ ID NO: 914559 - DNA, 15 bp, Homo sapiens
aataaaaatttcctt

SEQ ID NO: 914560 - DNA, 15 bp, Homo sapiens
ataaaaatttccttt

SEQ ID NO: 914561 - DNA, 15 bp, Homo sapiens
taaaaatttcctttt

SEQ ID NO: 914562 - DNA, 15 bp, Homo sapiens
aaaaatttccttttc

SEQ ID NO: 914563 - DNA, 15 bp, Homo sapiens
aaaatttccttttca

SEQ ID NO: 914564 - DNA, 15 bp, Homo sapiens
aaatttccttttcac

SEQ ID NO: 914565 - DNA, 15 bp, Homo sapiens
aatttccttttcaca

SEQ ID NO: 914566 - DNA, 15 bp, Homo sapiens
atttccttttcacag

SEQ ID NO: 914567 - DNA, 15 bp, Homo sapiens
tttccttttcacagc

SEQ ID NO: 914568 - DNA, 15 bp, Homo sapiens
ttccttttcacagct

SEQ ID NO: 914569 - DNA, 15 bp, Homo sapiens
tccttttcacagcta

SEQ ID NO: 914570 - DNA, 15 bp, Homo sapiens
ccttttcacagctaa

SEQ ID NO: 914571 - DNA, 15 bp, Homo sapiens
cttttcacagctaaa

SEQ ID NO: 914572 - DNA, 15 bp, Homo sapiens
ttttcacagctaaaa

SEQ ID NO: 914573 - DNA, 15 bp, Homo sapiens
tttcacagctaaaat

SEQ ID NO: 914574 - DNA, 15 bp, Homo sapiens
ttcacagctaaaatc

SEQ ID NO: 914575 - DNA, 15 bp, Homo sapiens
tcacagctaaaatct

SEQ ID NO: 914576 - DNA, 15 bp, Homo sapiens
cacagctaaaatcta

SEQ ID NO: 914577 - DNA, 15 bp, Homo sapiens
acagctaaaatctac

SEQ ID NO: 914578 - DNA, 15 bp, Homo sapiens
cagctaaaatctact

SEQ ID NO: 914579 - DNA, 15 bp, Homo sapiens
agctaaaatctacta

SEQ ID NO: 914580 - DNA, 15 bp, Homo sapiens
gctaaaatctactag

SEQ ID NO: 914581 - DNA, 15 bp, Homo sapiens
ctaaaatctactagc

SEQ ID NO: 914582 - DNA, 15 bp, Homo sapiens
taaaatctactagct

SEQ ID NO: 914583 - DNA, 15 bp, Homo sapiens
aaaatctactagctg

SEQ ID NO: 914584 - DNA, 15 bp, Homo sapiens
aaatctactagctgt

SEQ ID NO: 914585 - DNA, 15 bp, Homo sapiens
aatctactagctgtg

SEQ ID NO: 914586 - DNA, 15 bp, Homo sapiens
atctactagctgtgt

SEQ ID NO: 914587 - DNA, 15 bp, Homo sapiens
tctactagctgtgta

SEQ ID NO: 914588 - DNA, 15 bp, Homo sapiens
ctactagctgtgtaa

SEQ ID NO: 914589 - DNA, 15 bp, Homo sapiens
tactagctgtgtaat

SEQ ID NO: 914590 - DNA, 15 bp, Homo sapiens
actagctgtgtaatc

SEQ ID NO: 914591 - DNA, 15 bp, Homo sapiens
ctagctgtgtaatcc

SEQ ID NO: 914592 - DNA, 15 bp, Homo sapiens
tagctgtgtaatcct

SEQ ID NO: 914593 - DNA, 15 bp, Homo sapiens
agctgtgtaatcctg

SEQ ID NO: 914594 - DNA, 15 bp, Homo sapiens
gctgtgtaatcctgg

SEQ ID NO: 914595 - DNA, 15 bp, Homo sapiens
ctgtgtaatcctggc

SEQ ID NO: 914596 - DNA, 15 bp, Homo sapiens
tgtgtaatcctggca

SEQ ID NO: 914597 - DNA, 15 bp, Homo sapiens
gtgtaatcctggcaa

SEQ ID NO: 914598 - DNA, 15 bp, Homo sapiens
tgtaatcctggcaag

SEQ ID NO: 914599 - DNA, 15 bp, Homo sapiens
gtaatcctggcaagt

SEQ ID NO: 914600 - DNA, 15 bp, Homo sapiens
taatcctggcaagtt

SEQ ID NO: 914601 - DNA, 15 bp, Homo sapiens
aatcctggcaagtta

SEQ ID NO: 914602 - DNA, 15 bp, Homo sapiens
atcctggcaagttac

SEQ ID NO: 914603 - DNA, 15 bp, Homo sapiens
tcctggcaagttact

SEQ ID NO: 914604 - DNA, 15 bp, Homo sapiens
cctggcaagttactt

SEQ ID NO: 914605 - DNA, 15 bp, Homo sapiens
ctggcaagttactta

SEQ ID NO: 914606 - DNA, 15 bp, Homo sapiens
tggcaagttacttaa

SEQ ID NO: 914607 - DNA, 15 bp, Homo sapiens
ggcaagttacttaac

SEQ ID NO: 914608 - DNA, 15 bp, Homo sapiens
gcaagttacttaact

SEQ ID NO: 914609 - DNA, 15 bp, Homo sapiens
caagttacttaactt

SEQ ID NO: 914610 - DNA, 15 bp, Homo sapiens
aagttacttaacttt

SEQ ID NO: 914611 - DNA, 15 bp, Homo sapiens
agttacttaactttt

SEQ ID NO: 914612 - DNA, 15 bp, Homo sapiens
gttacttaacttttc

SEQ ID NO: 914613 - DNA, 15 bp, Homo sapiens
ttacttaacttttct

SEQ ID NO: 914614 - DNA, 15 bp, Homo sapiens
tacttaacttttctg

SEQ ID NO: 914615 - DNA, 15 bp, Homo sapiens
acttaacttttctga

SEQ ID NO: 914616 - DNA, 15 bp, Homo sapiens
cttaacttttctgag

SEQ ID NO: 914617 - DNA, 15 bp, Homo sapiens
ttaacttttctgagg

SEQ ID NO: 914618 - DNA, 15 bp, Homo sapiens
taacttttctgaggc

SEQ ID NO: 914619 - DNA, 15 bp, Homo sapiens
aacttttctgaggct

SEQ ID NO: 914620 - DNA, 15 bp, Homo sapiens
acttttctgaggctc

SEQ ID NO: 914621 - DNA, 15 bp, Homo sapiens
cttttctgaggctcc

SEQ ID NO: 914622 - DNA, 15 bp, Homo sapiens
ttttctgaggctccg

SEQ ID NO: 914623 - DNA, 15 bp, Homo sapiens
tttctgaggctccga

SEQ ID NO: 914624 - DNA, 15 bp, Homo sapiens
ttctgaggctccgaa

SEQ ID NO: 914625 - DNA, 15 bp, Homo sapiens
tctgaggctccgaaa

SEQ ID NO: 914626 - DNA, 15 bp, Homo sapiens
ctgaggctccgaaat

SEQ ID NO: 914627 - DNA, 15 bp, Homo sapiens
tgaggctccgaaatt

SEQ ID NO: 914628 - DNA, 15 bp, Homo sapiens
gaggctccgaaattt

SEQ ID NO: 914629 - DNA, 15 bp, Homo sapiens
aggctccgaaatttt

SEQ ID NO: 914630 - DNA, 15 bp, Homo sapiens
ggctccgaaattttt

SEQ ID NO: 914631 - DNA, 15 bp, Homo sapiens
gctccgaaattttta

SEQ ID NO: 914632 - DNA, 15 bp, Homo sapiens
ctccgaaatttttat

SEQ ID NO: 914633 - DNA, 15 bp, Homo sapiens
tccgaaatttttatt

SEQ ID NO: 914634 - DNA, 15 bp, Homo sapiens
ccgaaatttttattt

SEQ ID NO: 914635 - DNA, 15 bp, Homo sapiens
cgaaatttttatttc

SEQ ID NO: 914636 - DNA, 15 bp, Homo sapiens
gaaatttttatttct

SEQ ID NO: 914637 - DNA, 15 bp, Homo sapiens
aaatttttatttcta

SEQ ID NO: 914638 - DNA, 15 bp, Homo sapiens
aatttttatttctaa

SEQ ID NO: 914639 - DNA, 15 bp, Homo sapiens
atttttatttctaaa

SEQ ID NO: 914640 - DNA, 15 bp, Homo sapiens
tttttatttctaaaa

SEQ ID NO: 914641 - DNA, 15 bp, Homo sapiens
ttttatttctaaaag

SEQ ID NO: 914642 - DNA, 15 bp, Homo sapiens
tttatttctaaaagt

SEQ ID NO: 914643 - DNA, 15 bp, Homo sapiens
ttatttctaaaagtg

SEQ ID NO: 914644 - DNA, 15 bp, Homo sapiens
tatttctaaaagtgg

SEQ ID NO: 914645 - DNA, 15 bp, Homo sapiens
atttctaaaagtggg

SEQ ID NO: 914646 - DNA, 15 bp, Homo sapiens
tttctaaaagtggga

SEQ ID NO: 914647 - DNA, 15 bp, Homo sapiens
ttctaaaagtgggaa

SEQ ID NO: 914648 - DNA, 15 bp, Homo sapiens
tctaaaagtgggaat

SEQ ID NO: 914649 - DNA, 15 bp, Homo sapiens
ctaaaagtgggaata

SEQ ID NO: 914650 - DNA, 15 bp, Homo sapiens
taaaagtgggaataa

SEQ ID NO: 914651 - DNA, 15 bp, Homo sapiens
aaaagtgggaataat

SEQ ID NO: 914652 - DNA, 15 bp, Homo sapiens
aaagtgggaataata

SEQ ID NO: 914653 - DNA, 15 bp, Homo sapiens
aagtgggaataatac

SEQ ID NO: 914654 - DNA, 15 bp, Homo sapiens
agtgggaataatacc

SEQ ID NO: 914655 - DNA, 15 bp, Homo sapiens
gtgggaataatacct

SEQ ID NO: 914656 - DNA, 15 bp, Homo sapiens
tgggaataatacctt

SEQ ID NO: 914657 - DNA, 15 bp, Homo sapiens
gggaataatacctta

SEQ ID NO: 914658 - DNA, 15 bp, Homo sapiens
ggaataataccttac

SEQ ID NO: 914659 - DNA, 15 bp, Homo sapiens
gaataataccttacg

SEQ ID NO: 914660 - DNA, 15 bp, Homo sapiens
aataataccttacgc

SEQ ID NO: 914661 - DNA, 15 bp, Homo sapiens
ataataccttacgct

SEQ ID NO: 914662 - DNA, 15 bp, Homo sapiens
taataccttacgctc

SEQ ID NO: 914663 - DNA, 15 bp, Homo sapiens
aataccttacgctct

SEQ ID NO: 914664 - DNA, 15 bp, Homo sapiens
ataccttacgctctt

SEQ ID NO: 914665 - DNA, 15 bp, Homo sapiens
taccttacgctcttc

SEQ ID NO: 914666 - DNA, 15 bp, Homo sapiens
accttacgctcttca

SEQ ID NO: 914667 - DNA, 15 bp, Homo sapiens
ccttacgctcttcac

SEQ ID NO: 914668 - DNA, 15 bp, Homo sapiens
cttacgctcttcaca

SEQ ID NO: 914669 - DNA, 15 bp, Homo sapiens
ttacgctcttcacag

SEQ ID NO: 914670 - DNA, 15 bp, Homo sapiens
tacgctcttcacaga

SEQ ID NO: 914671 - DNA, 15 bp, Homo sapiens
acgctcttcacagag

SEQ ID NO: 914672 - DNA, 15 bp, Homo sapiens
cgctcttcacagaga

SEQ ID NO: 914673 - DNA, 15 bp, Homo sapiens
gctcttcacagagat

SEQ ID NO: 914674 - DNA, 15 bp, Homo sapiens
ctcttcacagagatg

SEQ ID NO: 914675 - DNA, 15 bp, Homo sapiens
tcttcacagagatgt

SEQ ID NO: 914676 - DNA, 15 bp, Homo sapiens
cttcacagagatgtt

SEQ ID NO: 914677 - DNA, 15 bp, Homo sapiens
ttcacagagatgttt

SEQ ID NO: 914678 - DNA, 15 bp, Homo sapiens
tcacagagatgtttt

SEQ ID NO: 914679 - DNA, 15 bp, Homo sapiens
cacagagatgttttg

SEQ ID NO: 914680 - DNA, 15 bp, Homo sapiens
acagagatgttttga

SEQ ID NO: 914681 - DNA, 15 bp, Homo sapiens
cagagatgttttgaa

SEQ ID NO: 914682 - DNA, 15 bp, Homo sapiens
agagatgttttgaag

SEQ ID NO: 914683 - DNA, 15 bp, Homo sapiens
gagatgttttgaaga

SEQ ID NO: 914684 - DNA, 15 bp, Homo sapiens
agatgttttgaagaa

SEQ ID NO: 914685 - DNA, 15 bp, Homo sapiens
gatgttttgaagaag

SEQ ID NO: 914686 - DNA, 15 bp, Homo sapiens
atgttttgaagaaga

SEQ ID NO: 914687 - DNA, 15 bp, Homo sapiens
tgttttgaagaagaa

SEQ ID NO: 914688 - DNA, 15 bp, Homo sapiens
gttttgaagaagaaa

SEQ ID NO: 914689 - DNA, 15 bp, Homo sapiens
ttttgaagaagaaag

SEQ ID NO: 914690 - DNA, 15 bp, Homo sapiens
tttgaagaagaaagg

SEQ ID NO: 914691 - DNA, 15 bp, Homo sapiens
ttgaagaagaaagga

SEQ ID NO: 914692 - DNA, 15 bp, Homo sapiens
tgaagaagaaaggag

SEQ ID NO: 914693 - DNA, 15 bp, Homo sapiens
gaagaagaaaggaga

SEQ ID NO: 914694 - DNA, 15 bp, Homo sapiens
aagaagaaaggagat

SEQ ID NO: 914695 - DNA, 15 bp, Homo sapiens
agaagaaaggagata

SEQ ID NO: 914696 - DNA, 15 bp, Homo sapiens
gaagaaaggagataa

SEQ ID NO: 914697 - DNA, 15 bp, Homo sapiens
aagaaaggagataat

SEQ ID NO: 914698 - DNA, 15 bp, Homo sapiens
agaaaggagataatg

SEQ ID NO: 914699 - DNA, 15 bp, Homo sapiens
gaaaggagataatgc

SEQ ID NO: 914700 - DNA, 15 bp, Homo sapiens
aaaggagataatgca

SEQ ID NO: 914701 - DNA, 15 bp, Homo sapiens
aaggagataatgcac

SEQ ID NO: 914702 - DNA, 15 bp, Homo sapiens
aggagataatgcaca

SEQ ID NO: 914703 - DNA, 15 bp, Homo sapiens
ggagataatgcacat

SEQ ID NO: 914704 - DNA, 15 bp, Homo sapiens
gagataatgcacata

SEQ ID NO: 914705 - DNA, 15 bp, Homo sapiens
agataatgcacataa

SEQ ID NO: 914706 - DNA, 15 bp, Homo sapiens
gataatgcacataaa

SEQ ID NO: 914707 - DNA, 15 bp, Homo sapiens
ataatgcacataaat

SEQ ID NO: 914708 - DNA, 15 bp, Homo sapiens
taatgcacataaatg

SEQ ID NO: 914709 - DNA, 15 bp, Homo sapiens
aatgcacataaatgt

SEQ ID NO: 914710 - DNA, 15 bp, Homo sapiens
atgcacataaatgta

SEQ ID NO: 914711 - DNA, 15 bp, Homo sapiens
tgcacataaatgtac

SEQ ID NO: 914712 - DNA, 15 bp, Homo sapiens
gcacataaatgtact

SEQ ID NO: 914713 - DNA, 15 bp, Homo sapiens
cacataaatgtactc

SEQ ID NO: 914714 - DNA, 15 bp, Homo sapiens
acataaatgtactca

SEQ ID NO: 914715 - DNA, 15 bp, Homo sapiens
cataaatgtactcag

SEQ ID NO: 914716 - DNA, 15 bp, Homo sapiens
ataaatgtactcaga

SEQ ID NO: 914717 - DNA, 15 bp, Homo sapiens
taaatgtactcagaa

SEQ ID NO: 914718 - DNA, 15 bp, Homo sapiens
aaatgtactcagaaa

SEQ ID NO: 914719 - DNA, 15 bp, Homo sapiens
aatgtactcagaaat

SEQ ID NO: 914720 - DNA, 15 bp, Homo sapiens
atgtactcagaaatg

SEQ ID NO: 914721 - DNA, 15 bp, Homo sapiens
tgtactcagaaatgc

SEQ ID NO: 914722 - DNA, 15 bp, Homo sapiens
gtactcagaaatgct

SEQ ID NO: 914723 - DNA, 15 bp, Homo sapiens
tactcagaaatgcta

SEQ ID NO: 914724 - DNA, 15 bp, Homo sapiens
actcagaaatgctaa

SEQ ID NO: 914725 - DNA, 15 bp, Homo sapiens
ctcagaaatgctaag

SEQ ID NO: 914726 - DNA, 15 bp, Homo sapiens
tcagaaatgctaagg

SEQ ID NO: 914727 - DNA, 15 bp, Homo sapiens
cagaaatgctaaggt

SEQ ID NO: 914728 - DNA, 15 bp, Homo sapiens
agaaatgctaaggtc

SEQ ID NO: 914729 - DNA, 15 bp, Homo sapiens
gaaatgctaaggtca

SEQ ID NO: 914730 - DNA, 15 bp, Homo sapiens
aaatgctaaggtcag

SEQ ID NO: 914731 - DNA, 15 bp, Homo sapiens
aatgctaaggtcaga

SEQ ID NO: 914732 - DNA, 15 bp, Homo sapiens
atgctaaggtcagaa

SEQ ID NO: 914733 - DNA, 15 bp, Homo sapiens
tgctaaggtcagaaa

SEQ ID NO: 914734 - DNA, 15 bp, Homo sapiens
gctaaggtcagaaaa

SEQ ID NO: 914735 - DNA, 15 bp, Homo sapiens
ctaaggtcagaaaag

SEQ ID NO: 914736 - DNA, 15 bp, Homo sapiens
taaggtcagaaaaga

SEQ ID NO: 914737 - DNA, 15 bp, Homo sapiens
aaggtcagaaaagaa

SEQ ID NO: 914738 - DNA, 15 bp, Homo sapiens
aggtcagaaaagaag

SEQ ID NO: 914739 - DNA, 15 bp, Homo sapiens
ggtcagaaaagaagg

SEQ ID NO: 914740 - DNA, 15 bp, Homo sapiens
gtcagaaaagaagga

SEQ ID NO: 914741 - DNA, 15 bp, Homo sapiens
tcagaaaagaaggaa

SEQ ID NO: 914742 - DNA, 15 bp, Homo sapiens
cagaaaagaaggaaa

SEQ ID NO: 914743 - DNA, 15 bp, Homo sapiens
agaaaagaaggaaac

SEQ ID NO: 914744 - DNA, 15 bp, Homo sapiens
gaaaagaaggaaacg

SEQ ID NO: 914745 - DNA, 15 bp, Homo sapiens
aaaagaaggaaacgg

SEQ ID NO: 914746 - DNA, 15 bp, Homo sapiens
aaagaaggaaacggc

SEQ ID NO: 914747 - DNA, 15 bp, Homo sapiens
aagaaggaaacggcc

SEQ ID NO: 914748 - DNA, 15 bp, Homo sapiens
agaaggaaacggcca

SEQ ID NO: 914749 - DNA, 15 bp, Homo sapiens
gaaggaaacggccag

SEQ ID NO: 914750 - DNA, 15 bp, Homo sapiens
aaggaaacggccaga

SEQ ID NO: 914751 - DNA, 15 bp, Homo sapiens
aggaaacggccagag

SEQ ID NO: 914752 - DNA, 15 bp, Homo sapiens
ggaaacggccagagt

SEQ ID NO: 914753 - DNA, 15 bp, Homo sapiens
gaaacggccagagtt

SEQ ID NO: 914754 - DNA, 15 bp, Homo sapiens
aaacggccagagtta

SEQ ID NO: 914755 - DNA, 15 bp, Homo sapiens
aacggccagagttaa

SEQ ID NO: 914756 - DNA, 15 bp, Homo sapiens
acggccagagttaat

SEQ ID NO: 914757 - DNA, 15 bp, Homo sapiens
cggccagagttaatg

SEQ ID NO: 914758 - DNA, 15 bp, Homo sapiens
ggccagagttaatgg

SEQ ID NO: 914759 - DNA, 15 bp, Homo sapiens
gccagagttaatggt

SEQ ID NO: 914760 - DNA, 15 bp, Homo sapiens
ccagagttaatggtt

SEQ ID NO: 914761 - DNA, 15 bp, Homo sapiens
cagagttaatggttc

SEQ ID NO: 914762 - DNA, 15 bp, Homo sapiens
agagttaatggttcc

SEQ ID NO: 914763 - DNA, 15 bp, Homo sapiens
gagttaatggttcct

SEQ ID NO: 914764 - DNA, 15 bp, Homo sapiens
agttaatggttcctt

SEQ ID NO: 914765 - DNA, 15 bp, Homo sapiens
gttaatggttccttt

SEQ ID NO: 914766 - DNA, 15 bp, Homo sapiens
ttaatggttcctttc

SEQ ID NO: 914767 - DNA, 15 bp, Homo sapiens
taatggttcctttct

SEQ ID NO: 914768 - DNA, 15 bp, Homo sapiens
aatggttcctttctt

SEQ ID NO: 914769 - DNA, 15 bp, Homo sapiens
atggttcctttcttt

SEQ ID NO: 914770 - DNA, 15 bp, Homo sapiens
tggttcctttctttg

SEQ ID NO: 914771 - DNA, 15 bp, Homo sapiens
ggttcctttctttga

SEQ ID NO: 914772 - DNA, 15 bp, Homo sapiens
gttcctttctttgac

SEQ ID NO: 914773 - DNA, 15 bp, Homo sapiens
ttcctttctttgact

SEQ ID NO: 914774 - DNA, 15 bp, Homo sapiens
tcctttctttgactt

SEQ ID NO: 914775 - DNA, 15 bp, Homo sapiens
cctttctttgacttc

SEQ ID NO: 914776 - DNA, 15 bp, Homo sapiens
ctttctttgacttcc

SEQ ID NO: 914777 - DNA, 15 bp, Homo sapiens
tttctttgacttcca

SEQ ID NO: 914778 - DNA, 15 bp, Homo sapiens
ttctttgacttccaa

SEQ ID NO: 914779 - DNA, 15 bp, Homo sapiens
tctttgacttccaat

SEQ ID NO: 914780 - DNA, 15 bp, Homo sapiens
ctttgacttccaata

SEQ ID NO: 914781 - DNA, 15 bp, Homo sapiens
tttgacttccaatag

SEQ ID NO: 914782 - DNA, 15 bp, Homo sapiens
ttgacttccaatagc

SEQ ID NO: 914783 - DNA, 15 bp, Homo sapiens
tgacttccaatagca

SEQ ID NO: 914784 - DNA, 15 bp, Homo sapiens
gacttccaatagcaa

SEQ ID NO: 914785 - DNA, 15 bp, Homo sapiens
acttccaatagcaag

SEQ ID NO: 914786 - DNA, 15 bp, Homo sapiens
cttccaatagcaagc

SEQ ID NO: 914787 - DNA, 15 bp, Homo sapiens
ttccaatagcaagct

SEQ ID NO: 914788 - DNA, 15 bp, Homo sapiens
tccaatagcaagctg

SEQ ID NO: 914789 - DNA, 15 bp, Homo sapiens
ccaatagcaagctgt

SEQ ID NO: 914790 - DNA, 15 bp, Homo sapiens
caatagcaagctgtt

SEQ ID NO: 914791 - DNA, 15 bp, Homo sapiens
aatagcaagctgttc

SEQ ID NO: 914792 - DNA, 15 bp, Homo sapiens
atagcaagctgttca

SEQ ID NO: 914793 - DNA, 15 bp, Homo sapiens
tagcaagctgttcac

SEQ ID NO: 914794 - DNA, 15 bp, Homo sapiens
agcaagctgttcact

SEQ ID NO: 914795 - DNA, 15 bp, Homo sapiens
gcaagctgttcactg

SEQ ID NO: 914796 - DNA, 15 bp, Homo sapiens
caagctgttcactgc

SEQ ID NO: 914797 - DNA, 15 bp, Homo sapiens
aagctgttcactgca

SEQ ID NO: 914798 - DNA, 15 bp, Homo sapiens
agctgttcactgcac

SEQ ID NO: 914799 - DNA, 15 bp, Homo sapiens
gctgttcactgcact

SEQ ID NO: 914800 - DNA, 15 bp, Homo sapiens
ctgttcactgcactc

SEQ ID NO: 914801 - DNA, 15 bp, Homo sapiens
tgttcactgcactcc

SEQ ID NO: 914802 - DNA, 15 bp, Homo sapiens
gttcactgcactcca

SEQ ID NO: 914803 - DNA, 15 bp, Homo sapiens
ttcactgcactccat

SEQ ID NO: 914804 - DNA, 15 bp, Homo sapiens
tcactgcactccata

SEQ ID NO: 914805 - DNA, 15 bp, Homo sapiens
cactgcactccatag

SEQ ID NO: 914806 - DNA, 15 bp, Homo sapiens
actgcactccatagt

SEQ ID NO: 914807 - DNA, 15 bp, Homo sapiens
ctgcactccatagtg

SEQ ID NO: 914808 - DNA, 15 bp, Homo sapiens
tgcactccatagtgt

SEQ ID NO: 914809 - DNA, 15 bp, Homo sapiens
gcactccatagtgtt

SEQ ID NO: 914810 - DNA, 15 bp, Homo sapiens
cactccatagtgtta

SEQ ID NO: 914811 - DNA, 15 bp, Homo sapiens
actccatagtgttat

SEQ ID NO: 914812 - DNA, 15 bp, Homo sapiens
ctccatagtgttata

SEQ ID NO: 914813 - DNA, 15 bp, Homo sapiens
tccatagtgttataa

SEQ ID NO: 914814 - DNA, 15 bp, Homo sapiens
ccatagtgttataat

SEQ ID NO: 914815 - DNA, 15 bp, Homo sapiens
catagtgttataatt

SEQ ID NO: 914816 - DNA, 15 bp, Homo sapiens
atagtgttataatta

SEQ ID NO: 914817 - DNA, 15 bp, Homo sapiens
tagtgttataattac

SEQ ID NO: 914818 - DNA, 15 bp, Homo sapiens
agtgttataattacc

SEQ ID NO: 914819 - DNA, 15 bp, Homo sapiens
gtgttataattacct

SEQ ID NO: 914820 - DNA, 15 bp, Homo sapiens
tgttataattacctg

SEQ ID NO: 914821 - DNA, 15 bp, Homo sapiens
gttataattacctgt

SEQ ID NO: 914822 - DNA, 15 bp, Homo sapiens
ttataattacctgtt

SEQ ID NO: 914823 - DNA, 15 bp, Homo sapiens
tataattacctgttc

SEQ ID NO: 914824 - DNA, 15 bp, Homo sapiens
ataattacctgttct

SEQ ID NO: 914825 - DNA, 15 bp, Homo sapiens
taattacctgttctc

SEQ ID NO: 914826 - DNA, 15 bp, Homo sapiens
aattacctgttctca

SEQ ID NO: 914827 - DNA, 15 bp, Homo sapiens
attacctgttctcat

SEQ ID NO: 914828 - DNA, 15 bp, Homo sapiens
ttacctgttctcatg

SEQ ID NO: 914829 - DNA, 15 bp, Homo sapiens
tacctgttctcatgg

SEQ ID NO: 914830 - DNA, 15 bp, Homo sapiens
acctgttctcatggc

SEQ ID NO: 914831 - DNA, 15 bp, Homo sapiens
cctgttctcatggcc

SEQ ID NO: 914832 - DNA, 15 bp, Homo sapiens
ctgttctcatggcct

SEQ ID NO: 914833 - DNA, 15 bp, Homo sapiens
tgttctcatggcctg

SEQ ID NO: 914834 - DNA, 15 bp, Homo sapiens
gttctcatggcctga

SEQ ID NO: 914835 - DNA, 15 bp, Homo sapiens
ttctcatggcctgaa

SEQ ID NO: 914836 - DNA, 15 bp, Homo sapiens
tctcatggcctgaaa

SEQ ID NO: 914837 - DNA, 15 bp, Homo sapiens
ctcatggcctgaaag

SEQ ID NO: 914838 - DNA, 15 bp, Homo sapiens
tcatggcctgaaagt

SEQ ID NO: 914839 - DNA, 15 bp, Homo sapiens
catggcctgaaagtg

SEQ ID NO: 914840 - DNA, 15 bp, Homo sapiens
atggcctgaaagtga

SEQ ID NO: 914841 - DNA, 15 bp, Homo sapiens
tggcctgaaagtgat

SEQ ID NO: 914842 - DNA, 15 bp, Homo sapiens
ggcctgaaagtgatg

SEQ ID NO: 914843 - DNA, 15 bp, Homo sapiens
gcctgaaagtgatgc

SEQ ID NO: 914844 - DNA, 15 bp, Homo sapiens
cctgaaagtgatgca

SEQ ID NO: 914845 - DNA, 15 bp, Homo sapiens
ctgaaagtgatgcag

SEQ ID NO: 914846 - DNA, 15 bp, Homo sapiens
tgaaagtgatgcagt

SEQ ID NO: 914847 - DNA, 15 bp, Homo sapiens
gaaagtgatgcagta

SEQ ID NO: 914848 - DNA, 15 bp, Homo sapiens
aaagtgatgcagtag

SEQ ID NO: 914849 - DNA, 15 bp, Homo sapiens
aagtgatgcagtagc

SEQ ID NO: 914850 - DNA, 15 bp, Homo sapiens
agtgatgcagtagca

SEQ ID NO: 914851 - DNA, 15 bp, Homo sapiens
gtgatgcagtagcag

SEQ ID NO: 914852 - DNA, 15 bp, Homo sapiens
tgatgcagtagcagg

SEQ ID NO: 914853 - DNA, 15 bp, Homo sapiens
gatgcagtagcaggt

SEQ ID NO: 914854 - DNA, 15 bp, Homo sapiens
atgcagtagcaggtg

SEQ ID NO: 914855 - DNA, 15 bp, Homo sapiens
tgcagtagcaggtgg

SEQ ID NO: 914856 - DNA, 15 bp, Homo sapiens
gcagtagcaggtgga

SEQ ID NO: 914857 - DNA, 15 bp, Homo sapiens
cagtagcaggtggaa

SEQ ID NO: 914858 - DNA, 15 bp, Homo sapiens
agtagcaggtggaag

SEQ ID NO: 914859 - DNA, 15 bp, Homo sapiens
gtagcaggtggaaga

SEQ ID NO: 914860 - DNA, 15 bp, Homo sapiens
tagcaggtggaagaa

SEQ ID NO: 914861 - DNA, 15 bp, Homo sapiens
agcaggtggaagaat

SEQ ID NO: 914862 - DNA, 15 bp, Homo sapiens
gcaggtggaagaatt

SEQ ID NO: 914863 - DNA, 15 bp, Homo sapiens
caggtggaagaatta

SEQ ID NO: 914864 - DNA, 15 bp, Homo sapiens
aggtggaagaattaa

SEQ ID NO: 914865 - DNA, 15 bp, Homo sapiens
ggtggaagaattaac

SEQ ID NO: 914866 - DNA, 15 bp, Homo sapiens
gtggaagaattaacc

SEQ ID NO: 914867 - DNA, 15 bp, Homo sapiens
tggaagaattaaccg

SEQ ID NO: 914868 - DNA, 15 bp, Homo sapiens
ggaagaattaaccgg

SEQ ID NO: 914869 - DNA, 15 bp, Homo sapiens
gaagaattaaccgga

SEQ ID NO: 914870 - DNA, 15 bp, Homo sapiens
aagaattaaccggag

SEQ ID NO: 914871 - DNA, 15 bp, Homo sapiens
agaattaaccggagg

SEQ ID NO: 914872 - DNA, 15 bp, Homo sapiens
gaattaaccggaggt

SEQ ID NO: 914873 - DNA, 15 bp, Homo sapiens
aattaaccggaggtc

SEQ ID NO: 914874 - DNA, 15 bp, Homo sapiens
attaaccggaggtct

SEQ ID NO: 914875 - DNA, 15 bp, Homo sapiens
ttaaccggaggtctg

SEQ ID NO: 914876 - DNA, 15 bp, Homo sapiens
taaccggaggtctgt

SEQ ID NO: 914877 - DNA, 15 bp, Homo sapiens
aaccggaggtctgtg

SEQ ID NO: 914878 - DNA, 15 bp, Homo sapiens
accggaggtctgtga

SEQ ID NO: 914879 - DNA, 15 bp, Homo sapiens
ccggaggtctgtgaa

SEQ ID NO: 914880 - DNA, 15 bp, Homo sapiens
cggaggtctgtgaaa

SEQ ID NO: 914881 - DNA, 15 bp, Homo sapiens
ggaggtctgtgaaac

SEQ ID NO: 914882 - DNA, 15 bp, Homo sapiens
gaggtctgtgaaact

SEQ ID NO: 914883 - DNA, 15 bp, Homo sapiens
aggtctgtgaaactc

SEQ ID NO: 914884 - DNA, 15 bp, Homo sapiens
ggtctgtgaaactcc

SEQ ID NO: 914885 - DNA, 15 bp, Homo sapiens
gtctgtgaaactcca

SEQ ID NO: 914886 - DNA, 15 bp, Homo sapiens
tctgtgaaactccac

SEQ ID NO: 914887 - DNA, 15 bp, Homo sapiens
ctgtgaaactccaca

SEQ ID NO: 914888 - DNA, 15 bp, Homo sapiens
tgtgaaactccacac

SEQ ID NO: 914889 - DNA, 15 bp, Homo sapiens
gtgaaactccacact

SEQ ID NO: 914890 - DNA, 15 bp, Homo sapiens
tgaaactccacacta

SEQ ID NO: 914891 - DNA, 15 bp, Homo sapiens
gaaactccacactaa

SEQ ID NO: 914892 - DNA, 15 bp, Homo sapiens
aaactccacactaag

SEQ ID NO: 914893 - DNA, 15 bp, Homo sapiens
aactccacactaagc

SEQ ID NO: 914894 - DNA, 15 bp, Homo sapiens
actccacactaagct

SEQ ID NO: 914895 - DNA, 15 bp, Homo sapiens
ctccacactaagcta

SEQ ID NO: 914896 - DNA, 15 bp, Homo sapiens
tccacactaagctat

SEQ ID NO: 914897 - DNA, 15 bp, Homo sapiens
ccacactaagctatc

SEQ ID NO: 914898 - DNA, 15 bp, Homo sapiens
cacactaagctatct

SEQ ID NO: 914899 - DNA, 15 bp, Homo sapiens
acactaagctatctt

SEQ ID NO: 914900 - DNA, 15 bp, Homo sapiens
cactaagctatcttc

SEQ ID NO: 914901 - DNA, 15 bp, Homo sapiens
actaagctatcttcc

SEQ ID NO: 914902 - DNA, 15 bp, Homo sapiens
ctaagctatcttccc

SEQ ID NO: 914903 - DNA, 15 bp, Homo sapiens
taagctatcttccct

SEQ ID NO: 914904 - DNA, 15 bp, Homo sapiens
aagctatcttccctg

SEQ ID NO: 914905 - DNA, 15 bp, Homo sapiens
agctatcttccctgg

SEQ ID NO: 914906 - DNA, 15 bp, Homo sapiens
gctatcttccctggt

SEQ ID NO: 914907 - DNA, 15 bp, Homo sapiens
ctatcttccctggtt

SEQ ID NO: 914908 - DNA, 15 bp, Homo sapiens
tatcttccctggtta

SEQ ID NO: 914909 - DNA, 15 bp, Homo sapiens
atcttccctggttag

SEQ ID NO: 914910 - DNA, 15 bp, Homo sapiens
tcttccctggttagg

SEQ ID NO: 914911 - DNA, 15 bp, Homo sapiens
cttccctggttagga

SEQ ID NO: 914912 - DNA, 15 bp, Homo sapiens
ttccctggttaggaa

SEQ ID NO: 914913 - DNA, 15 bp, Homo sapiens
tccctggttaggaaa

SEQ ID NO: 914914 - DNA, 15 bp, Homo sapiens
ccctggttaggaaaa

SEQ ID NO: 914915 - DNA, 15 bp, Homo sapiens
cctggttaggaaaac

SEQ ID NO: 914916 - DNA, 15 bp, Homo sapiens
ctggttaggaaaact

SEQ ID NO: 914917 - DNA, 15 bp, Homo sapiens
tggttaggaaaactt

SEQ ID NO: 914918 - DNA, 15 bp, Homo sapiens
ggttaggaaaactta

SEQ ID NO: 914919 - DNA, 15 bp, Homo sapiens
gttaggaaaacttag

SEQ ID NO: 914920 - DNA, 15 bp, Homo sapiens
ttaggaaaacttagg

SEQ ID NO: 914921 - DNA, 15 bp, Homo sapiens
taggaaaacttaggt

SEQ ID NO: 914922 - DNA, 15 bp, Homo sapiens
aggaaaacttaggtt

SEQ ID NO: 914923 - DNA, 15 bp, Homo sapiens
ggaaaacttaggttg

SEQ ID NO: 914924 - DNA, 15 bp, Homo sapiens
gaaaacttaggttga

SEQ ID NO: 914925 - DNA, 15 bp, Homo sapiens
aaaacttaggttgaa

SEQ ID NO: 914926 - DNA, 15 bp, Homo sapiens
aaacttaggttgaaa

SEQ ID NO: 914927 - DNA, 15 bp, Homo sapiens
aacttaggttgaaat

SEQ ID NO: 914928 - DNA, 15 bp, Homo sapiens
acttaggttgaaatc

SEQ ID NO: 914929 - DNA, 15 bp, Homo sapiens
cttaggttgaaatca

SEQ ID NO: 914930 - DNA, 15 bp, Homo sapiens
ttaggttgaaatcat

SEQ ID NO: 914931 - DNA, 15 bp, Homo sapiens
taggttgaaatcatt

SEQ ID NO: 914932 - DNA, 15 bp, Homo sapiens
aggttgaaatcattt

SEQ ID NO: 914933 - DNA, 15 bp, Homo sapiens
ggttgaaatcattta

SEQ ID NO: 914934 - DNA, 15 bp, Homo sapiens
gttgaaatcatttat

SEQ ID NO: 914935 - DNA, 15 bp, Homo sapiens
ttgaaatcatttatt

SEQ ID NO: 914936 - DNA, 15 bp, Homo sapiens
tgaaatcatttattt

SEQ ID NO: 914937 - DNA, 15 bp, Homo sapiens
gaaatcatttattta

SEQ ID NO: 914938 - DNA, 15 bp, Homo sapiens
aaatcatttatttaa

SEQ ID NO: 914939 - DNA, 15 bp, Homo sapiens
aatcatttatttaac

SEQ ID NO: 914940 - DNA, 15 bp, Homo sapiens
atcatttatttaacc

SEQ ID NO: 914941 - DNA, 15 bp, Homo sapiens
tcatttatttaacca

SEQ ID NO: 914942 - DNA, 15 bp, Homo sapiens
catttatttaaccag

SEQ ID NO: 914943 - DNA, 15 bp, Homo sapiens
atttatttaaccaga

SEQ ID NO: 914944 - DNA, 15 bp, Homo sapiens
tttatttaaccagaa

SEQ ID NO: 914945 - DNA, 15 bp, Homo sapiens
ttatttaaccagaaa

SEQ ID NO: 914946 - DNA, 15 bp, Homo sapiens
tatttaaccagaaat

SEQ ID NO: 914947 - DNA, 15 bp, Homo sapiens
atttaaccagaaatg

SEQ ID NO: 914948 - DNA, 15 bp, Homo sapiens
tttaaccagaaatgg

SEQ ID NO: 914949 - DNA, 15 bp, Homo sapiens
ttaaccagaaatggt

SEQ ID NO: 914950 - DNA, 15 bp, Homo sapiens
taaccagaaatggtg

SEQ ID NO: 914951 - DNA, 15 bp, Homo sapiens
aaccagaaatggtgt

SEQ ID NO: 914952 - DNA, 15 bp, Homo sapiens
accagaaatggtgtt

SEQ ID NO: 914953 - DNA, 15 bp, Homo sapiens
ccagaaatggtgtta

SEQ ID NO: 914954 - DNA, 15 bp, Homo sapiens
cagaaatggtgttat

SEQ ID NO: 914955 - DNA, 15 bp, Homo sapiens
agaaatggtgttatt

SEQ ID NO: 914956 - DNA, 15 bp, Homo sapiens
gaaatggtgttattt

SEQ ID NO: 914957 - DNA, 15 bp, Homo sapiens
aaatggtgttatttt

SEQ ID NO: 914958 - DNA, 15 bp, Homo sapiens
aatggtgttattttt

SEQ ID NO: 914959 - DNA, 15 bp, Homo sapiens
atggtgttatttttg

SEQ ID NO: 914960 - DNA, 15 bp, Homo sapiens
tggtgttatttttgt

SEQ ID NO: 914961 - DNA, 15 bp, Homo sapiens
ggtgttatttttgtc

SEQ ID NO: 914962 - DNA, 15 bp, Homo sapiens
gtgttatttttgtca

SEQ ID NO: 914963 - DNA, 15 bp, Homo sapiens
tgttatttttgtcat

SEQ ID NO: 914964 - DNA, 15 bp, Homo sapiens
gttatttttgtcatg

SEQ ID NO: 914965 - DNA, 15 bp, Homo sapiens
ttatttttgtcatgt

SEQ ID NO: 914966 - DNA, 15 bp, Homo sapiens
tatttttgtcatgtt

SEQ ID NO: 914967 - DNA, 15 bp, Homo sapiens
atttttgtcatgttt

SEQ ID NO: 914968 - DNA, 15 bp, Homo sapiens
tttttgtcatgtttt

SEQ ID NO: 914969 - DNA, 15 bp, Homo sapiens
ttttgtcatgttttg

SEQ ID NO: 914970 - DNA, 15 bp, Homo sapiens
tttgtcatgttttgt

SEQ ID NO: 914971 - DNA, 15 bp, Homo sapiens
ttgtcatgttttgta

SEQ ID NO: 914972 - DNA, 15 bp, Homo sapiens
tgtcatgttttgtaa

SEQ ID NO: 914973 - DNA, 15 bp, Homo sapiens
gtcatgttttgtaat

SEQ ID NO: 914974 - DNA, 15 bp, Homo sapiens
tcatgttttgtaatg

SEQ ID NO: 914975 - DNA, 15 bp, Homo sapiens
catgttttgtaatgt

SEQ ID NO: 914976 - DNA, 15 bp, Homo sapiens
atgttttgtaatgtc

SEQ ID NO: 914977 - DNA, 15 bp, Homo sapiens
tgttttgtaatgtct

SEQ ID NO: 914978 - DNA, 15 bp, Homo sapiens
gttttgtaatgtcta

SEQ ID NO: 914979 - DNA, 15 bp, Homo sapiens
ttttgtaatgtctaa

SEQ ID NO: 914980 - DNA, 15 bp, Homo sapiens
tttgtaatgtctaac

SEQ ID NO: 914981 - DNA, 15 bp, Homo sapiens
ttgtaatgtctaact

SEQ ID NO: 914982 - DNA, 15 bp, Homo sapiens
tgtaatgtctaactt

SEQ ID NO: 914983 - DNA, 15 bp, Homo sapiens
gtaatgtctaacttc

SEQ ID NO: 914984 - DNA, 15 bp, Homo sapiens
taatgtctaacttct

SEQ ID NO: 914985 - DNA, 15 bp, Homo sapiens
aatgtctaacttctc

SEQ ID NO: 914986 - DNA, 15 bp, Homo sapiens
atgtctaacttctcc

SEQ ID NO: 914987 - DNA, 15 bp, Homo sapiens
tgtctaacttctcca

SEQ ID NO: 914988 - DNA, 15 bp, Homo sapiens
gtctaacttctccaa

SEQ ID NO: 914989 - DNA, 15 bp, Homo sapiens
tctaacttctccaag

SEQ ID NO: 914990 - DNA, 15 bp, Homo sapiens
ctaacttctccaagg

SEQ ID NO: 914991 - DNA, 15 bp, Homo sapiens
taacttctccaaggg

SEQ ID NO: 914992 - DNA, 15 bp, Homo sapiens
aacttctccaagggc

SEQ ID NO: 914993 - DNA, 15 bp, Homo sapiens
acttctccaagggca

SEQ ID NO: 914994 - DNA, 15 bp, Homo sapiens
cttctccaagggcac

SEQ ID NO: 914995 - DNA, 15 bp, Homo sapiens
ttctccaagggcact

SEQ ID NO: 914996 - DNA, 15 bp, Homo sapiens
tctccaagggcactg

SEQ ID NO: 914997 - DNA, 15 bp, Homo sapiens
ctccaagggcactgg

SEQ ID NO: 914998 - DNA, 15 bp, Homo sapiens
tccaagggcactggc

SEQ ID NO: 914999 - DNA, 15 bp, Homo sapiens
ccaagggcactggca

SEQ ID NO: 915000 - DNA, 15 bp, Homo sapiens
caagggcactggcaa

SEQ ID NO: 915001 - DNA, 15 bp, Homo sapiens
aagggcactggcaaa

SEQ ID NO: 915002 - DNA, 15 bp, Homo sapiens
agggcactggcaaag

SEQ ID NO: 915003 - DNA, 15 bp, Homo sapiens
gggcactggcaaagg

SEQ ID NO: 915004 - DNA, 15 bp, Homo sapiens
ggcactggcaaagga

SEQ ID NO: 915005 - DNA, 15 bp, Homo sapiens
gcactggcaaaggag

SEQ ID NO: 915006 - DNA, 15 bp, Homo sapiens
cactggcaaaggaga

SEQ ID NO: 915007 - DNA, 15 bp, Homo sapiens
actggcaaaggagat

SEQ ID NO: 915008 - DNA, 15 bp, Homo sapiens
ctggcaaaggagatg

SEQ ID NO: 915009 - DNA, 15 bp, Homo sapiens
tggcaaaggagatgt

SEQ ID NO: 915010 - DNA, 15 bp, Homo sapiens
ggcaaaggagatgta

SEQ ID NO: 915011 - DNA, 15 bp, Homo sapiens
gcaaaggagatgtac

SEQ ID NO: 915012 - DNA, 15 bp, Homo sapiens
caaaggagatgtaca

SEQ ID NO: 915013 - DNA, 15 bp, Homo sapiens
aaaggagatgtacag

SEQ ID NO: 915014 - DNA, 15 bp, Homo sapiens
aaggagatgtacaga

SEQ ID NO: 915015 - DNA, 15 bp, Homo sapiens
aggagatgtacagaa

SEQ ID NO: 915016 - DNA, 15 bp, Homo sapiens
ggagatgtacagaag

SEQ ID NO: 915017 - DNA, 15 bp, Homo sapiens
gagatgtacagaaga

SEQ ID NO: 915018 - DNA, 15 bp, Homo sapiens
agatgtacagaagac

SEQ ID NO: 915019 - DNA, 15 bp, Homo sapiens
gatgtacagaagaca

SEQ ID NO: 915020 - DNA, 15 bp, Homo sapiens
atgtacagaagacaa

SEQ ID NO: 915021 - DNA, 15 bp, Homo sapiens
tgtacagaagacaaa

SEQ ID NO: 915022 - DNA, 15 bp, Homo sapiens
gtacagaagacaaaa

SEQ ID NO: 915023 - DNA, 15 bp, Homo sapiens
tacagaagacaaaag

SEQ ID NO: 915024 - DNA, 15 bp, Homo sapiens
acagaagacaaaagg

SEQ ID NO: 915025 - DNA, 15 bp, Homo sapiens
cagaagacaaaaggc

SEQ ID NO: 915026 - DNA, 15 bp, Homo sapiens
agaagacaaaaggca

SEQ ID NO: 915027 - DNA, 15 bp, Homo sapiens
gaagacaaaaggcag

SEQ ID NO: 915028 - DNA, 15 bp, Homo sapiens
aagacaaaaggcagc

SEQ ID NO: 915029 - DNA, 15 bp, Homo sapiens
agacaaaaggcagct

SEQ ID NO: 915030 - DNA, 15 bp, Homo sapiens
gacaaaaggcagcta

SEQ ID NO: 915031 - DNA, 15 bp, Homo sapiens
acaaaaggcagctag

SEQ ID NO: 915032 - DNA, 15 bp, Homo sapiens
caaaaggcagctagc

SEQ ID NO: 915033 - DNA, 15 bp, Homo sapiens
aaaaggcagctagcc

SEQ ID NO: 915034 - DNA, 15 bp, Homo sapiens
aaaggcagctagcca

SEQ ID NO: 915035 - DNA, 15 bp, Homo sapiens
aaggcagctagccaa

SEQ ID NO: 915036 - DNA, 15 bp, Homo sapiens
aggcagctagccaag

SEQ ID NO: 915037 - DNA, 15 bp, Homo sapiens
ggcagctagccaagg

SEQ ID NO: 915038 - DNA, 15 bp, Homo sapiens
gcagctagccaaggg

SEQ ID NO: 915039 - DNA, 15 bp, Homo sapiens
cagctagccaagggg

SEQ ID NO: 915040 - DNA, 15 bp, Homo sapiens
agctagccaaggggt

SEQ ID NO: 915041 - DNA, 15 bp, Homo sapiens
gctagccaaggggtt

SEQ ID NO: 915042 - DNA, 15 bp, Homo sapiens
ctagccaaggggttg

SEQ ID NO: 915043 - DNA, 15 bp, Homo sapiens
tagccaaggggttgt

SEQ ID NO: 915044 - DNA, 15 bp, Homo sapiens
agccaaggggttgtc

SEQ ID NO: 915045 - DNA, 15 bp, Homo sapiens
gccaaggggttgtcc

SEQ ID NO: 915046 - DNA, 15 bp, Homo sapiens
ccaaggggttgtcct

SEQ ID NO: 915047 - DNA, 15 bp, Homo sapiens
caaggggttgtccta

SEQ ID NO: 915048 - DNA, 15 bp, Homo sapiens
aaggggttgtcctag

SEQ ID NO: 915049 - DNA, 15 bp, Homo sapiens
aggggttgtcctagc

SEQ ID NO: 915050 - DNA, 15 bp, Homo sapiens
ggggttgtcctagct

SEQ ID NO: 915051 - DNA, 15 bp, Homo sapiens
gggttgtcctagctg

SEQ ID NO: 915052 - DNA, 15 bp, Homo sapiens
ggttgtcctagctgg

SEQ ID NO: 915053 - DNA, 15 bp, Homo sapiens
gttgtcctagctggc

SEQ ID NO: 915054 - DNA, 15 bp, Homo sapiens
ttgtcctagctggca

SEQ ID NO: 915055 - DNA, 15 bp, Homo sapiens
tgtcctagctggcag

SEQ ID NO: 915056 - DNA, 15 bp, Homo sapiens
gtcctagctggcagg

SEQ ID NO: 915057 - DNA, 15 bp, Homo sapiens
tcctagctggcaggg

SEQ ID NO: 915058 - DNA, 15 bp, Homo sapiens
cctagctggcagggc

SEQ ID NO: 915059 - DNA, 15 bp, Homo sapiens
ctagctggcagggct

SEQ ID NO: 915060 - DNA, 15 bp, Homo sapiens
tagctggcagggcta

SEQ ID NO: 915061 - DNA, 15 bp, Homo sapiens
agctggcagggctaa

SEQ ID NO: 915062 - DNA, 15 bp, Homo sapiens
gctggcagggctaac

SEQ ID NO: 915063 - DNA, 15 bp, Homo sapiens
ctggcagggctaaca

SEQ ID NO: 915064 - DNA, 15 bp, Homo sapiens
tggcagggctaacac

SEQ ID NO: 915065 - DNA, 15 bp, Homo sapiens
ggcagggctaacacg

SEQ ID NO: 915066 - DNA, 15 bp, Homo sapiens
gcagggctaacacgt

SEQ ID NO: 915067 - DNA, 15 bp, Homo sapiens
cagggctaacacgtc

SEQ ID NO: 915068 - DNA, 15 bp, Homo sapiens
agggctaacacgtct

SEQ ID NO: 915069 - DNA, 15 bp, Homo sapiens
gggctaacacgtctg

SEQ ID NO: 915070 - DNA, 15 bp, Homo sapiens
ggctaacacgtctgc

SEQ ID NO: 915071 - DNA, 15 bp, Homo sapiens
gctaacacgtctgct

SEQ ID NO: 915072 - DNA, 15 bp, Homo sapiens
ctaacacgtctgctt

SEQ ID NO: 915073 - DNA, 15 bp, Homo sapiens
taacacgtctgcttt

SEQ ID NO: 915074 - DNA, 15 bp, Homo sapiens
aacacgtctgcttta

SEQ ID NO: 915075 - DNA, 15 bp, Homo sapiens
acacgtctgctttaa

SEQ ID NO: 915076 - DNA, 15 bp, Homo sapiens
cacgtctgctttaaa

SEQ ID NO: 915077 - DNA, 15 bp, Homo sapiens
acgtctgctttaaaa

SEQ ID NO: 915078 - DNA, 15 bp, Homo sapiens
cgtctgctttaaaaa

SEQ ID NO: 915079 - DNA, 15 bp, Homo sapiens
gtctgctttaaaaag

SEQ ID NO: 915080 - DNA, 15 bp, Homo sapiens
tctgctttaaaaaga

SEQ ID NO: 915081 - DNA, 15 bp, Homo sapiens
ctgctttaaaaagat

SEQ ID NO: 915082 - DNA, 15 bp, Homo sapiens
tgctttaaaaagatg

SEQ ID NO: 915083 - DNA, 15 bp, Homo sapiens
gctttaaaaagatga

SEQ ID NO: 915084 - DNA, 15 bp, Homo sapiens
ctttaaaaagatgat

SEQ ID NO: 915085 - DNA, 15 bp, Homo sapiens
tttaaaaagatgatg

SEQ ID NO: 915086 - DNA, 15 bp, Homo sapiens
ttaaaaagatgatga

SEQ ID NO: 915087 - DNA, 15 bp, Homo sapiens
taaaaagatgatgaa

SEQ ID NO: 915088 - DNA, 15 bp, Homo sapiens
aaaaagatgatgaaa

SEQ ID NO: 915089 - DNA, 15 bp, Homo sapiens
aaaagatgatgaaac

SEQ ID NO: 915090 - DNA, 15 bp, Homo sapiens
aaagatgatgaaacg

SEQ ID NO: 915091 - DNA, 15 bp, Homo sapiens
aagatgatgaaacgg

SEQ ID NO: 915092 - DNA, 15 bp, Homo sapiens
agatgatgaaacgga

SEQ ID NO: 915093 - DNA, 15 bp, Homo sapiens
gatgatgaaacggat

SEQ ID NO: 915094 - DNA, 15 bp, Homo sapiens
atgatgaaacggata

SEQ ID NO: 915095 - DNA, 15 bp, Homo sapiens
tgatgaaacggatag

SEQ ID NO: 915096 - DNA, 15 bp, Homo sapiens
gatgaaacggatagc

SEQ ID NO: 915097 - DNA, 15 bp, Homo sapiens
atgaaacggatagct

SEQ ID NO: 915098 - DNA, 15 bp, Homo sapiens
tgaaacggatagctc

SEQ ID NO: 915099 - DNA, 15 bp, Homo sapiens
gaaacggatagctca

SEQ ID NO: 915100 - DNA, 15 bp, Homo sapiens
aaacggatagctcat

SEQ ID NO: 915101 - DNA, 15 bp, Homo sapiens
aacggatagctcatg

SEQ ID NO: 915102 - DNA, 15 bp, Homo sapiens
acggatagctcatgc

SEQ ID NO: 915103 - DNA, 15 bp, Homo sapiens
cggatagctcatgca

SEQ ID NO: 915104 - DNA, 15 bp, Homo sapiens
ggatagctcatgcat

SEQ ID NO: 915105 - DNA, 15 bp, Homo sapiens
gatagctcatgcatc

SEQ ID NO: 915106 - DNA, 15 bp, Homo sapiens
atagctcatgcatct

SEQ ID NO: 915107 - DNA, 15 bp, Homo sapiens
tagctcatgcatctg

SEQ ID NO: 915108 - DNA, 15 bp, Homo sapiens
agctcatgcatctgg

SEQ ID NO: 915109 - DNA, 15 bp, Homo sapiens
gctcatgcatctggg

SEQ ID NO: 915110 - DNA, 15 bp, Homo sapiens
ctcatgcatctgggt

SEQ ID NO: 915111 - DNA, 15 bp, Homo sapiens
tcatgcatctgggta

SEQ ID NO: 915112 - DNA, 15 bp, Homo sapiens
catgcatctgggtat

SEQ ID NO: 915113 - DNA, 15 bp, Homo sapiens
atgcatctgggtatg

SEQ ID NO: 915114 - DNA, 15 bp, Homo sapiens
tgcatctgggtatgg

SEQ ID NO: 915115 - DNA, 15 bp, Homo sapiens
gcatctgggtatggc

SEQ ID NO: 915116 - DNA, 15 bp, Homo sapiens
catctgggtatggct

SEQ ID NO: 915117 - DNA, 15 bp, Homo sapiens
atctgggtatggctt

SEQ ID NO: 915118 - DNA, 15 bp, Homo sapiens
tctgggtatggcttt

SEQ ID NO: 915119 - DNA, 15 bp, Homo sapiens
ctgggtatggctttt

SEQ ID NO: 915120 - DNA, 15 bp, Homo sapiens
tgggtatggctttta

SEQ ID NO: 915121 - DNA, 15 bp, Homo sapiens
gggtatggcttttat

SEQ ID NO: 915122 - DNA, 15 bp, Homo sapiens
ggtatggcttttata

SEQ ID NO: 915123 - DNA, 15 bp, Homo sapiens
gtatggcttttatat

SEQ ID NO: 915124 - DNA, 15 bp, Homo sapiens
tatggcttttatatc

SEQ ID NO: 915125 - DNA, 15 bp, Homo sapiens
atggcttttatatcc

SEQ ID NO: 915126 - DNA, 15 bp, Homo sapiens
tggcttttatatccc

SEQ ID NO: 915127 - DNA, 15 bp, Homo sapiens
ggcttttatatccca

SEQ ID NO: 915128 - DNA, 15 bp, Homo sapiens
gcttttatatcccag

SEQ ID NO: 915129 - DNA, 15 bp, Homo sapiens
cttttatatcccagc

SEQ ID NO: 915130 - DNA, 15 bp, Homo sapiens
ttttatatcccagcc

SEQ ID NO: 915131 - DNA, 15 bp, Homo sapiens
tttatatcccagcca

SEQ ID NO: 915132 - DNA, 15 bp, Homo sapiens
ttatatcccagccaa

SEQ ID NO: 915133 - DNA, 15 bp, Homo sapiens
tatatcccagccaac

SEQ ID NO: 915134 - DNA, 15 bp, Homo sapiens
atatcccagccaaca

SEQ ID NO: 915135 - DNA, 15 bp, Homo sapiens
tatcccagccaacac

SEQ ID NO: 915136 - DNA, 15 bp, Homo sapiens
atcccagccaacaca

SEQ ID NO: 915137 - DNA, 15 bp, Homo sapiens
tcccagccaacacac

SEQ ID NO: 915138 - DNA, 15 bp, Homo sapiens
cccagccaacacaca

SEQ ID NO: 915139 - DNA, 15 bp, Homo sapiens
ccagccaacacacaa

SEQ ID NO: 915140 - DNA, 15 bp, Homo sapiens
cagccaacacacaag

SEQ ID NO: 915141 - DNA, 15 bp, Homo sapiens
agccaacacacaagt

SEQ ID NO: 915142 - DNA, 15 bp, Homo sapiens
gccaacacacaagtt

SEQ ID NO: 915143 - DNA, 15 bp, Homo sapiens
ccaacacacaagttt

SEQ ID NO: 915144 - DNA, 15 bp, Homo sapiens
caacacacaagttta

SEQ ID NO: 915145 - DNA, 15 bp, Homo sapiens
aacacacaagtttag

SEQ ID NO: 915146 - DNA, 15 bp, Homo sapiens
acacacaagtttagt

SEQ ID NO: 915147 - DNA, 15 bp, Homo sapiens
cacacaagtttagtg

SEQ ID NO: 915148 - DNA, 15 bp, Homo sapiens
acacaagtttagtgc

SEQ ID NO: 915149 - DNA, 15 bp, Homo sapiens
cacaagtttagtgcc

SEQ ID NO: 915150 - DNA, 15 bp, Homo sapiens
acaagtttagtgcct

SEQ ID NO: 915151 - DNA, 15 bp, Homo sapiens
caagtttagtgcctc

SEQ ID NO: 915152 - DNA, 15 bp, Homo sapiens
aagtttagtgcctcc

SEQ ID NO: 915153 - DNA, 15 bp, Homo sapiens
agtttagtgcctcca

SEQ ID NO: 915154 - DNA, 15 bp, Homo sapiens
gtttagtgcctccaa

SEQ ID NO: 915155 - DNA, 15 bp, Homo sapiens
tttagtgcctccaaa

SEQ ID NO: 915156 - DNA, 15 bp, Homo sapiens
ttagtgcctccaaag

SEQ ID NO: 915157 - DNA, 15 bp, Homo sapiens
tagtgcctccaaagc

SEQ ID NO: 915158 - DNA, 15 bp, Homo sapiens
agtgcctccaaagca

SEQ ID NO: 915159 - DNA, 15 bp, Homo sapiens
gtgcctccaaagcag

SEQ ID NO: 915160 - DNA, 15 bp, Homo sapiens
tgcctccaaagcagc

SEQ ID NO: 915161 - DNA, 15 bp, Homo sapiens
gcctccaaagcagct

SEQ ID NO: 915162 - DNA, 15 bp, Homo sapiens
cctccaaagcagctt

SEQ ID NO: 915163 - DNA, 15 bp, Homo sapiens
ctccaaagcagcttg

SEQ ID NO: 915164 - DNA, 15 bp, Homo sapiens
tccaaagcagcttgc

SEQ ID NO: 915165 - DNA, 15 bp, Homo sapiens
ccaaagcagcttgct

SEQ ID NO: 915166 - DNA, 15 bp, Homo sapiens
caaagcagcttgctg

SEQ ID NO: 915167 - DNA, 15 bp, Homo sapiens
aaagcagcttgctgc

SEQ ID NO: 915168 - DNA, 15 bp, Homo sapiens
aagcagcttgctgct

SEQ ID NO: 915169 - DNA, 15 bp, Homo sapiens
agcagcttgctgctc

SEQ ID NO: 915170 - DNA, 15 bp, Homo sapiens
gcagcttgctgctca

SEQ ID NO: 915171 - DNA, 15 bp, Homo sapiens
cagcttgctgctcac

SEQ ID NO: 915172 - DNA, 15 bp, Homo sapiens
agcttgctgctcacc

SEQ ID NO: 915173 - DNA, 15 bp, Homo sapiens
gcttgctgctcacct

SEQ ID NO: 915174 - DNA, 15 bp, Homo sapiens
cttgctgctcacctt

SEQ ID NO: 915175 - DNA, 15 bp, Homo sapiens
ttgctgctcacctta

SEQ ID NO: 915176 - DNA, 15 bp, Homo sapiens
tgctgctcaccttac

SEQ ID NO: 915177 - DNA, 15 bp, Homo sapiens
gctgctcaccttaca

SEQ ID NO: 915178 - DNA, 15 bp, Homo sapiens
ctgctcaccttacaa

SEQ ID NO: 915179 - DNA, 15 bp, Homo sapiens
tgctcaccttacaaa

SEQ ID NO: 915180 - DNA, 15 bp, Homo sapiens
gctcaccttacaaaa

SEQ ID NO: 915181 - DNA, 15 bp, Homo sapiens
ctcaccttacaaaac

SEQ ID NO: 915182 - DNA, 15 bp, Homo sapiens
tcaccttacaaaacc

SEQ ID NO: 915183 - DNA, 15 bp, Homo sapiens
caccttacaaaaccc

SEQ ID NO: 915184 - DNA, 15 bp, Homo sapiens
accttacaaaaccct

SEQ ID NO: 915185 - DNA, 15 bp, Homo sapiens
ccttacaaaaccctg

SEQ ID NO: 915186 - DNA, 15 bp, Homo sapiens
cttacaaaaccctga

SEQ ID NO: 915187 - DNA, 15 bp, Homo sapiens
ttacaaaaccctgaa

SEQ ID NO: 915188 - DNA, 15 bp, Homo sapiens
tacaaaaccctgaac

SEQ ID NO: 915189 - DNA, 15 bp, Homo sapiens
acaaaaccctgaacg

SEQ ID NO: 915190 - DNA, 15 bp, Homo sapiens
caaaaccctgaacga

SEQ ID NO: 915191 - DNA, 15 bp, Homo sapiens
aaaaccctgaacgag

SEQ ID NO: 915192 - DNA, 15 bp, Homo sapiens
aaaccctgaacgaga

SEQ ID NO: 915193 - DNA, 15 bp, Homo sapiens
aaccctgaacgagaa

SEQ ID NO: 915194 - DNA, 15 bp, Homo sapiens
accctgaacgagaat

SEQ ID NO: 915195 - DNA, 15 bp, Homo sapiens
ccctgaacgagaatg

SEQ ID NO: 915196 - DNA, 15 bp, Homo sapiens
cctgaacgagaatga

SEQ ID NO: 915197 - DNA, 15 bp, Homo sapiens
ctgaacgagaatgag

SEQ ID NO: 915198 - DNA, 15 bp, Homo sapiens
tgaacgagaatgaga

SEQ ID NO: 915199 - DNA, 15 bp, Homo sapiens
gaacgagaatgagaa

SEQ ID NO: 915200 - DNA, 15 bp, Homo sapiens
aacgagaatgagaaa

SEQ ID NO: 915201 - DNA, 15 bp, Homo sapiens
acgagaatgagaaac

SEQ ID NO: 915202 - DNA, 15 bp, Homo sapiens
cgagaatgagaaact

SEQ ID NO: 915203 - DNA, 15 bp, Homo sapiens
gagaatgagaaactg

SEQ ID NO: 915204 - DNA, 15 bp, Homo sapiens
agaatgagaaactgg

SEQ ID NO: 915205 - DNA, 15 bp, Homo sapiens
gaatgagaaactggt

SEQ ID NO: 915206 - DNA, 15 bp, Homo sapiens
aatgagaaactggtc

SEQ ID NO: 915207 - DNA, 15 bp, Homo sapiens
atgagaaactggtcc

SEQ ID NO: 915208 - DNA, 15 bp, Homo sapiens
tgagaaactggtcca

SEQ ID NO: 915209 - DNA, 15 bp, Homo sapiens
gagaaactggtccaa

SEQ ID NO: 915210 - DNA, 15 bp, Homo sapiens
agaaactggtccaag

SEQ ID NO: 915211 - DNA, 15 bp, Homo sapiens
gaaactggtccaagg

SEQ ID NO: 915212 - DNA, 15 bp, Homo sapiens
aaactggtccaaggt

SEQ ID NO: 915213 - DNA, 15 bp, Homo sapiens
aactggtccaaggtt

SEQ ID NO: 915214 - DNA, 15 bp, Homo sapiens
actggtccaaggttg

SEQ ID NO: 915215 - DNA, 15 bp, Homo sapiens
ctggtccaaggttgg

SEQ ID NO: 915216 - DNA, 15 bp, Homo sapiens
tggtccaaggttggt

SEQ ID NO: 915217 - DNA, 15 bp, Homo sapiens
ggtccaaggttggtg

SEQ ID NO: 915218 - DNA, 15 bp, Homo sapiens
gtccaaggttggtgt

SEQ ID NO: 915219 - DNA, 15 bp, Homo sapiens
tccaaggttggtgta

SEQ ID NO: 915220 - DNA, 15 bp, Homo sapiens
ccaaggttggtgtat

SEQ ID NO: 915221 - DNA, 15 bp, Homo sapiens
caaggttggtgtatt

SEQ ID NO: 915222 - DNA, 15 bp, Homo sapiens
aaggttggtgtatta

SEQ ID NO: 915223 - DNA, 15 bp, Homo sapiens
aggttggtgtattag

SEQ ID NO: 915224 - DNA, 15 bp, Homo sapiens
ggttggtgtattaga

SEQ ID NO: 915225 - DNA, 15 bp, Homo sapiens
gttggtgtattagag

SEQ ID NO: 915226 - DNA, 15 bp, Homo sapiens
ttggtgtattagagg

SEQ ID NO: 915227 - DNA, 15 bp, Homo sapiens
tggtgtattagagga

SEQ ID NO: 915228 - DNA, 15 bp, Homo sapiens
ggtgtattagaggat

SEQ ID NO: 915229 - DNA, 15 bp, Homo sapiens
gtgtattagaggatt

SEQ ID NO: 915230 - DNA, 15 bp, Homo sapiens
tgtattagaggattc

SEQ ID NO: 915231 - DNA, 15 bp, Homo sapiens
gtattagaggattct

SEQ ID NO: 915232 - DNA, 15 bp, Homo sapiens
tattagaggattctt

SEQ ID NO: 915233 - DNA, 15 bp, Homo sapiens
attagaggattctta

SEQ ID NO: 915234 - DNA, 15 bp, Homo sapiens
ttagaggattcttac

SEQ ID NO: 915235 - DNA, 15 bp, Homo sapiens
tagaggattcttaca

SEQ ID NO: 915236 - DNA, 15 bp, Homo sapiens
agaggattcttacat

SEQ ID NO: 915237 - DNA, 15 bp, Homo sapiens
gaggattcttacatg

SEQ ID NO: 915238 - DNA, 15 bp, Homo sapiens
aggattcttacatgt

SEQ ID NO: 915239 - DNA, 15 bp, Homo sapiens
ggattcttacatgta

SEQ ID NO: 915240 - DNA, 15 bp, Homo sapiens
gattcttacatgtac

SEQ ID NO: 915241 - DNA, 15 bp, Homo sapiens
attcttacatgtaca

SEQ ID NO: 915242 - DNA, 15 bp, Homo sapiens
ttcttacatgtacag

SEQ ID NO: 915243 - DNA, 15 bp, Homo sapiens
tcttacatgtacaga

SEQ ID NO: 915244 - DNA, 15 bp, Homo sapiens
cttacatgtacagac

SEQ ID NO: 915245 - DNA, 15 bp, Homo sapiens
ttacatgtacagact

SEQ ID NO: 915246 - DNA, 15 bp, Homo sapiens
tacatgtacagacta

SEQ ID NO: 915247 - DNA, 15 bp, Homo sapiens
acatgtacagactaa

SEQ ID NO: 915248 - DNA, 15 bp, Homo sapiens
catgtacagactaag

SEQ ID NO: 915249 - DNA, 15 bp, Homo sapiens
atgtacagactaaga

SEQ ID NO: 915250 - DNA, 15 bp, Homo sapiens
tgtacagactaagat

SEQ ID NO: 915251 - DNA, 15 bp, Homo sapiens
gtacagactaagata

SEQ ID NO: 915252 - DNA, 15 bp, Homo sapiens
tacagactaagataa

SEQ ID NO: 915253 - DNA, 15 bp, Homo sapiens
acagactaagataaa

SEQ ID NO: 915254 - DNA, 15 bp, Homo sapiens
cagactaagataaat

SEQ ID NO: 915255 - DNA, 15 bp, Homo sapiens
agactaagataaatt

SEQ ID NO: 915256 - DNA, 15 bp, Homo sapiens
gactaagataaatta

SEQ ID NO: 915257 - DNA, 15 bp, Homo sapiens
actaagataaattag

SEQ ID NO: 915258 - DNA, 15 bp, Homo sapiens
ctaagataaattagt

SEQ ID NO: 915259 - DNA, 15 bp, Homo sapiens
taagataaattagtg

SEQ ID NO: 915260 - DNA, 15 bp, Homo sapiens
aagataaattagtga

SEQ ID NO: 915261 - DNA, 15 bp, Homo sapiens
agataaattagtgag

SEQ ID NO: 915262 - DNA, 15 bp, Homo sapiens
gataaattagtgagg

SEQ ID NO: 915263 - DNA, 15 bp, Homo sapiens
ataaattagtgaggc

SEQ ID NO: 915264 - DNA, 15 bp, Homo sapiens
taaattagtgaggct

SEQ ID NO: 915265 - DNA, 15 bp, Homo sapiens
aaattagtgaggctt

SEQ ID NO: 915266 - DNA, 15 bp, Homo sapiens
aattagtgaggctta

SEQ ID NO: 915267 - DNA, 15 bp, Homo sapiens
attagtgaggcttag

SEQ ID NO: 915268 - DNA, 15 bp, Homo sapiens
ttagtgaggcttagt

SEQ ID NO: 915269 - DNA, 15 bp, Homo sapiens
tagtgaggcttagtg

SEQ ID NO: 915270 - DNA, 15 bp, Homo sapiens
agtgaggcttagtgg

SEQ ID NO: 915271 - DNA, 15 bp, Homo sapiens
gtgaggcttagtggg

SEQ ID NO: 915272 - DNA, 15 bp, Homo sapiens
tgaggcttagtggga

SEQ ID NO: 915273 - DNA, 15 bp, Homo sapiens
gaggcttagtgggag

SEQ ID NO: 915274 - DNA, 15 bp, Homo sapiens
aggcttagtgggaga

SEQ ID NO: 915275 - DNA, 15 bp, Homo sapiens
ggcttagtgggagac

SEQ ID NO: 915276 - DNA, 15 bp, Homo sapiens
gcttagtgggagaca

SEQ ID NO: 915277 - DNA, 15 bp, Homo sapiens
cttagtgggagacag

SEQ ID NO: 915278 - DNA, 15 bp, Homo sapiens
ttagtgggagacagt

SEQ ID NO: 915279 - DNA, 15 bp, Homo sapiens
tagtgggagacagtg

SEQ ID NO: 915280 - DNA, 15 bp, Homo sapiens
agtgggagacagtgc

SEQ ID NO: 915281 - DNA, 15 bp, Homo sapiens
gtgggagacagtgct

SEQ ID NO: 915282 - DNA, 15 bp, Homo sapiens
tgggagacagtgctg

SEQ ID NO: 915283 - DNA, 15 bp, Homo sapiens
gggagacagtgctgg

SEQ ID NO: 915284 - DNA, 15 bp, Homo sapiens
ggagacagtgctggg

SEQ ID NO: 915285 - DNA, 15 bp, Homo sapiens
gagacagtgctgggt

SEQ ID NO: 915286 - DNA, 15 bp, Homo sapiens
agacagtgctgggta

SEQ ID NO: 915287 - DNA, 15 bp, Homo sapiens
gacagtgctgggtac

SEQ ID NO: 915288 - DNA, 15 bp, Homo sapiens
acagtgctgggtact

SEQ ID NO: 915289 - DNA, 15 bp, Homo sapiens
cagtgctgggtactt

SEQ ID NO: 915290 - DNA, 15 bp, Homo sapiens
agtgctgggtacttt

SEQ ID NO: 915291 - DNA, 15 bp, Homo sapiens
gtgctgggtactttg

SEQ ID NO: 915292 - DNA, 15 bp, Homo sapiens
tgctgggtactttgc

SEQ ID NO: 915293 - DNA, 15 bp, Homo sapiens
gctgggtactttgcc

SEQ ID NO: 915294 - DNA, 15 bp, Homo sapiens
ctgggtactttgcca

SEQ ID NO: 915295 - DNA, 15 bp, Homo sapiens
tgggtactttgccac

SEQ ID NO: 915296 - DNA, 15 bp, Homo sapiens
gggtactttgccaca

SEQ ID NO: 915297 - DNA, 15 bp, Homo sapiens
ggtactttgccacag

SEQ ID NO: 915298 - DNA, 15 bp, Homo sapiens
gtactttgccacagg

SEQ ID NO: 915299 - DNA, 15 bp, Homo sapiens
tactttgccacaggc

SEQ ID NO: 915300 - DNA, 15 bp, Homo sapiens
actttgccacaggca

SEQ ID NO: 915301 - DNA, 15 bp, Homo sapiens
ctttgccacaggcaa

SEQ ID NO: 915302 - DNA, 15 bp, Homo sapiens
tttgccacaggcaat

SEQ ID NO: 915303 - DNA, 15 bp, Homo sapiens
ttgccacaggcaata

SEQ ID NO: 915304 - DNA, 15 bp, Homo sapiens
tgccacaggcaatag

SEQ ID NO: 915305 - DNA, 15 bp, Homo sapiens
gccacaggcaatagt

SEQ ID NO: 915306 - DNA, 15 bp, Homo sapiens
ccacaggcaatagtt

SEQ ID NO: 915307 - DNA, 15 bp, Homo sapiens
cacaggcaatagttg

SEQ ID NO: 915308 - DNA, 15 bp, Homo sapiens
acaggcaatagttgt

SEQ ID NO: 915309 - DNA, 15 bp, Homo sapiens
caggcaatagttgtt

SEQ ID NO: 915310 - DNA, 15 bp, Homo sapiens
aggcaatagttgttc

SEQ ID NO: 915311 - DNA, 15 bp, Homo sapiens
ggcaatagttgttct

SEQ ID NO: 915312 - DNA, 15 bp, Homo sapiens
gcaatagttgttctg

SEQ ID NO: 915313 - DNA, 15 bp, Homo sapiens
caatagttgttctga

SEQ ID NO: 915314 - DNA, 15 bp, Homo sapiens
aatagttgttctgac

SEQ ID NO: 915315 - DNA, 15 bp, Homo sapiens
atagttgttctgact

SEQ ID NO: 915316 - DNA, 15 bp, Homo sapiens
tagttgttctgactt

SEQ ID NO: 915317 - DNA, 15 bp, Homo sapiens
agttgttctgacttc

SEQ ID NO: 915318 - DNA, 15 bp, Homo sapiens
gttgttctgacttca

SEQ ID NO: 915319 - DNA, 15 bp, Homo sapiens
ttgttctgacttcat

SEQ ID NO: 915320 - DNA, 15 bp, Homo sapiens
tgttctgacttcata

SEQ ID NO: 915321 - DNA, 15 bp, Homo sapiens
gttctgacttcatag

SEQ ID NO: 915322 - DNA, 15 bp, Homo sapiens
ttctgacttcatagg

SEQ ID NO: 915323 - DNA, 15 bp, Homo sapiens
tctgacttcatagga

SEQ ID NO: 915324 - DNA, 15 bp, Homo sapiens
ctgacttcataggag

SEQ ID NO: 915325 - DNA, 15 bp, Homo sapiens
tgacttcataggaga

SEQ ID NO: 915326 - DNA, 15 bp, Homo sapiens
gacttcataggagag

SEQ ID NO: 915327 - DNA, 15 bp, Homo sapiens
acttcataggagaga

SEQ ID NO: 915328 - DNA, 15 bp, Homo sapiens
cttcataggagagat

SEQ ID NO: 915329 - DNA, 15 bp, Homo sapiens
ttcataggagagatc

SEQ ID NO: 915330 - DNA, 15 bp, Homo sapiens
tcataggagagatcc

SEQ ID NO: 915331 - DNA, 15 bp, Homo sapiens
cataggagagatcct

SEQ ID NO: 915332 - DNA, 15 bp, Homo sapiens
ataggagagatcctg

SEQ ID NO: 915333 - DNA, 15 bp, Homo sapiens
taggagagatcctgc

SEQ ID NO: 915334 - DNA, 15 bp, Homo sapiens
aggagagatcctgcc

SEQ ID NO: 915335 - DNA, 15 bp, Homo sapiens
ggagagatcctgccc

SEQ ID NO: 915336 - DNA, 15 bp, Homo sapiens
gagagatcctgccca

SEQ ID NO: 915337 - DNA, 15 bp, Homo sapiens
agagatcctgcccag

SEQ ID NO: 915338 - DNA, 15 bp, Homo sapiens
gagatcctgcccagt

SEQ ID NO: 915339 - DNA, 15 bp, Homo sapiens
agatcctgcccagtc

SEQ ID NO: 915340 - DNA, 15 bp, Homo sapiens
gatcctgcccagtct

SEQ ID NO: 915341 - DNA, 15 bp, Homo sapiens
atcctgcccagtctc

SEQ ID NO: 915342 - DNA, 15 bp, Homo sapiens
tcctgcccagtctcc

SEQ ID NO: 915343 - DNA, 15 bp, Homo sapiens
cctgcccagtctccc

SEQ ID NO: 915344 - DNA, 15 bp, Homo sapiens
ctgcccagtctcccg

SEQ ID NO: 915345 - DNA, 15 bp, Homo sapiens
tgcccagtctcccgc

SEQ ID NO: 915346 - DNA, 15 bp, Homo sapiens
gcccagtctcccgca

SEQ ID NO: 915347 - DNA, 15 bp, Homo sapiens
cccagtctcccgcag

SEQ ID NO: 915348 - DNA, 15 bp, Homo sapiens
ccagtctcccgcagg

SEQ ID NO: 915349 - DNA, 15 bp, Homo sapiens
cagtctcccgcaggt

SEQ ID NO: 915350 - DNA, 15 bp, Homo sapiens
agtctcccgcaggtg

SEQ ID NO: 915351 - DNA, 15 bp, Homo sapiens
gtctcccgcaggtgc

SEQ ID NO: 915352 - DNA, 15 bp, Homo sapiens
tctcccgcaggtgct

SEQ ID NO: 915353 - DNA, 15 bp, Homo sapiens
ctcccgcaggtgctg

SEQ ID NO: 915354 - DNA, 15 bp, Homo sapiens
tcccgcaggtgctgt

SEQ ID NO: 915355 - DNA, 15 bp, Homo sapiens
cccgcaggtgctgtc

SEQ ID NO: 915356 - DNA, 15 bp, Homo sapiens
ccgcaggtgctgtct

SEQ ID NO: 915357 - DNA, 15 bp, Homo sapiens
cgcaggtgctgtctc

SEQ ID NO: 915358 - DNA, 15 bp, Homo sapiens
gcaggtgctgtctcc

SEQ ID NO: 915359 - DNA, 15 bp, Homo sapiens
caggtgctgtctccc

SEQ ID NO: 915360 - DNA, 15 bp, Homo sapiens
aggtgctgtctccct

SEQ ID NO: 915361 - DNA, 15 bp, Homo sapiens
ggtgctgtctccctc

SEQ ID NO: 915362 - DNA, 15 bp, Homo sapiens
gtgctgtctccctcc

SEQ ID NO: 915363 - DNA, 15 bp, Homo sapiens
tgctgtctccctccc

SEQ ID NO: 915364 - DNA, 15 bp, Homo sapiens
gctgtctccctccct

SEQ ID NO: 915365 - DNA, 15 bp, Homo sapiens
ctgtctccctccctc

SEQ ID NO: 915366 - DNA, 15 bp, Homo sapiens
tgtctccctccctcc

SEQ ID NO: 915367 - DNA, 15 bp, Homo sapiens
gtctccctccctccc

SEQ ID NO: 915368 - DNA, 15 bp, Homo sapiens
tctccctccctccct

SEQ ID NO: 915369 - DNA, 15 bp, Homo sapiens
ctccctccctccctc

SEQ ID NO: 915370 - DNA, 15 bp, Homo sapiens
tccctccctccctcc

SEQ ID NO: 915371 - DNA, 15 bp, Homo sapiens
ccctccctccctccc

SEQ ID NO: 915372 - DNA, 15 bp, Homo sapiens
cctccctccctccct

SEQ ID NO: 915373 - DNA, 15 bp, Homo sapiens
tccctccctccctct

SEQ ID NO: 915374 - DNA, 15 bp, Homo sapiens
ccctccctccctctc

SEQ ID NO: 915375 - DNA, 15 bp, Homo sapiens
cctccctccctctcc

SEQ ID NO: 915376 - DNA, 15 bp, Homo sapiens
ctccctccctctcca

SEQ ID NO: 915377 - DNA, 15 bp, Homo sapiens
tccctccctctccaa

SEQ ID NO: 915378 - DNA, 15 bp, Homo sapiens
ccctccctctccaaa

SEQ ID NO: 915379 - DNA, 15 bp, Homo sapiens
cctccctctccaaaa

SEQ ID NO: 915380 - DNA, 15 bp, Homo sapiens
ctccctctccaaaag

SEQ ID NO: 915381 - DNA, 15 bp, Homo sapiens
tccctctccaaaaga

SEQ ID NO: 915382 - DNA, 15 bp, Homo sapiens
ccctctccaaaagaa

SEQ ID NO: 915383 - DNA, 15 bp, Homo sapiens
cctctccaaaagaaa

SEQ ID NO: 915384 - DNA, 15 bp, Homo sapiens
ctctccaaaagaaaa

SEQ ID NO: 915385 - DNA, 15 bp, Homo sapiens
tctccaaaagaaaaa

SEQ ID NO: 915386 - DNA, 15 bp, Homo sapiens
ctccaaaagaaaaag

SEQ ID NO: 915387 - DNA, 15 bp, Homo sapiens
tccaaaagaaaaagt

SEQ ID NO: 915388 - DNA, 15 bp, Homo sapiens
ccaaaagaaaaagtt

SEQ ID NO: 915389 - DNA, 15 bp, Homo sapiens
caaaagaaaaagttt

SEQ ID NO: 915390 - DNA, 15 bp, Homo sapiens
aaaagaaaaagtttg

SEQ ID NO: 915391 - DNA, 15 bp, Homo sapiens
aaagaaaaagtttgt

SEQ ID NO: 915392 - DNA, 15 bp, Homo sapiens
aagaaaaagtttgta

SEQ ID NO: 915393 - DNA, 15 bp, Homo sapiens
agaaaaagtttgtat

SEQ ID NO: 915394 - DNA, 15 bp, Homo sapiens
gaaaaagtttgtatg

SEQ ID NO: 915395 - DNA, 15 bp, Homo sapiens
aaaaagtttgtatga

SEQ ID NO: 915396 - DNA, 15 bp, Homo sapiens
aaaagtttgtatgaa

SEQ ID NO: 915397 - DNA, 15 bp, Homo sapiens
aaagtttgtatgaaa

SEQ ID NO: 915398 - DNA, 15 bp, Homo sapiens
aagtttgtatgaaat

SEQ ID NO: 915399 - DNA, 15 bp, Homo sapiens
agtttgtatgaaata

SEQ ID NO: 915400 - DNA, 15 bp, Homo sapiens
gtttgtatgaaatag

SEQ ID NO: 915401 - DNA, 15 bp, Homo sapiens
tttgtatgaaatagt

SEQ ID NO: 915402 - DNA, 15 bp, Homo sapiens
ttgtatgaaatagta

SEQ ID NO: 915403 - DNA, 15 bp, Homo sapiens
tgtatgaaatagtac

SEQ ID NO: 915404 - DNA, 15 bp, Homo sapiens
gtatgaaatagtact

SEQ ID NO: 915405 - DNA, 15 bp, Homo sapiens
tatgaaatagtactt

SEQ ID NO: 915406 - DNA, 15 bp, Homo sapiens
atgaaatagtactta

SEQ ID NO: 915407 - DNA, 15 bp, Homo sapiens
tgaaatagtacttac

SEQ ID NO: 915408 - DNA, 15 bp, Homo sapiens
gaaatagtacttacc

SEQ ID NO: 915409 - DNA, 15 bp, Homo sapiens
aaatagtacttacct

SEQ ID NO: 915410 - DNA, 15 bp, Homo sapiens
aatagtacttacctc

SEQ ID NO: 915411 - DNA, 15 bp, Homo sapiens
atagtacttacctca

SEQ ID NO: 915412 - DNA, 15 bp, Homo sapiens
tagtacttacctcac

SEQ ID NO: 915413 - DNA, 15 bp, Homo sapiens
agtacttacctcaca

SEQ ID NO: 915414 - DNA, 15 bp, Homo sapiens
gtacttacctcacag

SEQ ID NO: 915415 - DNA, 15 bp, Homo sapiens
tacttacctcacaga

SEQ ID NO: 915416 - DNA, 15 bp, Homo sapiens
acttacctcacagag

SEQ ID NO: 915417 - DNA, 15 bp, Homo sapiens
cttacctcacagagc

SEQ ID NO: 915418 - DNA, 15 bp, Homo sapiens
ttacctcacagagct

SEQ ID NO: 915419 - DNA, 15 bp, Homo sapiens
tacctcacagagctg

SEQ ID NO: 915420 - DNA, 15 bp, Homo sapiens
acctcacagagctgt

SEQ ID NO: 915421 - DNA, 15 bp, Homo sapiens
cctcacagagctgtt

SEQ ID NO: 915422 - DNA, 15 bp, Homo sapiens
ctcacagagctgttg

SEQ ID NO: 915423 - DNA, 15 bp, Homo sapiens
tcacagagctgttgt

SEQ ID NO: 915424 - DNA, 15 bp, Homo sapiens
cacagagctgttgtg

SEQ ID NO: 915425 - DNA, 15 bp, Homo sapiens
acagagctgttgtga

SEQ ID NO: 915426 - DNA, 15 bp, Homo sapiens
cagagctgttgtgaa

SEQ ID NO: 915427 - DNA, 15 bp, Homo sapiens
agagctgttgtgaaa

SEQ ID NO: 915428 - DNA, 15 bp, Homo sapiens
gagctgttgtgaaaa

SEQ ID NO: 915429 - DNA, 15 bp, Homo sapiens
agctgttgtgaaaag

SEQ ID NO: 915430 - DNA, 15 bp, Homo sapiens
gctgttgtgaaaagt

SEQ ID NO: 915431 - DNA, 15 bp, Homo sapiens
ctgttgtgaaaagta

SEQ ID NO: 915432 - DNA, 15 bp, Homo sapiens
tgttgtgaaaagtaa

SEQ ID NO: 915433 - DNA, 15 bp, Homo sapiens
gttgtgaaaagtaat

SEQ ID NO: 915434 - DNA, 15 bp, Homo sapiens
ttgtgaaaagtaatg

SEQ ID NO: 915435 - DNA, 15 bp, Homo sapiens
tgtgaaaagtaatga

SEQ ID NO: 915436 - DNA, 15 bp, Homo sapiens
gtgaaaagtaatgac

SEQ ID NO: 915437 - DNA, 15 bp, Homo sapiens
tgaaaagtaatgact

SEQ ID NO: 915438 - DNA, 15 bp, Homo sapiens
gaaaagtaatgactg

SEQ ID NO: 915439 - DNA, 15 bp, Homo sapiens
aaaagtaatgactga

SEQ ID NO: 915440 - DNA, 15 bp, Homo sapiens
aaagtaatgactgaa

SEQ ID NO: 915441 - DNA, 15 bp, Homo sapiens
aagtaatgactgaat

SEQ ID NO: 915442 - DNA, 15 bp, Homo sapiens
agtaatgactgaata

SEQ ID NO: 915443 - DNA, 15 bp, Homo sapiens
gtaatgactgaatag

SEQ ID NO: 915444 - DNA, 15 bp, Homo sapiens
taatgactgaatagg

SEQ ID NO: 915445 - DNA, 15 bp, Homo sapiens
aatgactgaataggt

SEQ ID NO: 915446 - DNA, 15 bp, Homo sapiens
atgactgaataggta

SEQ ID NO: 915447 - DNA, 15 bp, Homo sapiens
tgactgaataggtaa

SEQ ID NO: 915448 - DNA, 15 bp, Homo sapiens
gactgaataggtaaa

SEQ ID NO: 915449 - DNA, 15 bp, Homo sapiens
actgaataggtaaaa

SEQ ID NO: 915450 - DNA, 15 bp, Homo sapiens
ctgaataggtaaaag

SEQ ID NO: 915451 - DNA, 15 bp, Homo sapiens
tgaataggtaaaagc

SEQ ID NO: 915452 - DNA, 15 bp, Homo sapiens
gaataggtaaaagca

SEQ ID NO: 915453 - DNA, 15 bp, Homo sapiens
aataggtaaaagcac

SEQ ID NO: 915454 - DNA, 15 bp, Homo sapiens
ataggtaaaagcacc

SEQ ID NO: 915455 - DNA, 15 bp, Homo sapiens
taggtaaaagcacct

SEQ ID NO: 915456 - DNA, 15 bp, Homo sapiens
aggtaaaagcaccta

SEQ ID NO: 915457 - DNA, 15 bp, Homo sapiens
ggtaaaagcacctag

SEQ ID NO: 915458 - DNA, 15 bp, Homo sapiens
gtaaaagcacctaga

SEQ ID NO: 915459 - DNA, 15 bp, Homo sapiens
taaaagcacctagaa

SEQ ID NO: 915460 - DNA, 15 bp, Homo sapiens
aaaagcacctagaac

SEQ ID NO: 915461 - DNA, 15 bp, Homo sapiens
aaagcacctagaaca

SEQ ID NO: 915462 - DNA, 15 bp, Homo sapiens
aagcacctagaacag

SEQ ID NO: 915463 - DNA, 15 bp, Homo sapiens
agcacctagaacagt

SEQ ID NO: 915464 - DNA, 15 bp, Homo sapiens
gcacctagaacagtg

SEQ ID NO: 915465 - DNA, 15 bp, Homo sapiens
cacctagaacagtgc

SEQ ID NO: 915466 - DNA, 15 bp, Homo sapiens
acctagaacagtgcc

SEQ ID NO: 915467 - DNA, 15 bp, Homo sapiens
cctagaacagtgcct

SEQ ID NO: 915468 - DNA, 15 bp, Homo sapiens
ctagaacagtgcctg

SEQ ID NO: 915469 - DNA, 15 bp, Homo sapiens
tagaacagtgcctgg

SEQ ID NO: 915470 - DNA, 15 bp, Homo sapiens
agaacagtgcctggc

SEQ ID NO: 915471 - DNA, 15 bp, Homo sapiens
gaacagtgcctggca

SEQ ID NO: 915472 - DNA, 15 bp, Homo sapiens
aacagtgcctggcac

SEQ ID NO: 915473 - DNA, 15 bp, Homo sapiens
acagtgcctggcaca

SEQ ID NO: 915474 - DNA, 15 bp, Homo sapiens
cagtgcctggcacat

SEQ ID NO: 915475 - DNA, 15 bp, Homo sapiens
agtgcctggcacatg

SEQ ID NO: 915476 - DNA, 15 bp, Homo sapiens
gtgcctggcacatgc

SEQ ID NO: 915477 - DNA, 15 bp, Homo sapiens
tgcctggcacatgct

SEQ ID NO: 915478 - DNA, 15 bp, Homo sapiens
gcctggcacatgcta

SEQ ID NO: 915479 - DNA, 15 bp, Homo sapiens
cctggcacatgctaa

SEQ ID NO: 915480 - DNA, 15 bp, Homo sapiens
ctggcacatgctaag

SEQ ID NO: 915481 - DNA, 15 bp, Homo sapiens
tggcacatgctaagt

SEQ ID NO: 915482 - DNA, 15 bp, Homo sapiens
ggcacatgctaagtg

SEQ ID NO: 915483 - DNA, 15 bp, Homo sapiens
gcacatgctaagtgc

SEQ ID NO: 915484 - DNA, 15 bp, Homo sapiens
cacatgctaagtgct

SEQ ID NO: 915485 - DNA, 15 bp, Homo sapiens
acatgctaagtgctt

SEQ ID NO: 915486 - DNA, 15 bp, Homo sapiens
catgctaagtgcttt

SEQ ID NO: 915487 - DNA, 15 bp, Homo sapiens
atgctaagtgctttg

SEQ ID NO: 915488 - DNA, 15 bp, Homo sapiens
tgctaagtgctttgt

SEQ ID NO: 915489 - DNA, 15 bp, Homo sapiens
gctaagtgctttgtt

SEQ ID NO: 915490 - DNA, 15 bp, Homo sapiens
ctaagtgctttgttc

SEQ ID NO: 915491 - DNA, 15 bp, Homo sapiens
taagtgctttgttca

SEQ ID NO: 915492 - DNA, 15 bp, Homo sapiens
aagtgctttgttcat

SEQ ID NO: 915493 - DNA, 15 bp, Homo sapiens
agtgctttgttcatt

SEQ ID NO: 915494 - DNA, 15 bp, Homo sapiens
gtgctttgttcatta

SEQ ID NO: 915495 - DNA, 15 bp, Homo sapiens
tgctttgttcattat

SEQ ID NO: 915496 - DNA, 15 bp, Homo sapiens
gctttgttcattatt

SEQ ID NO: 915497 - DNA, 15 bp, Homo sapiens
ctttgttcattattg

SEQ ID NO: 915498 - DNA, 15 bp, Homo sapiens
tttgttcattattgt

SEQ ID NO: 915499 - DNA, 15 bp, Homo sapiens
ttgttcattattgtt

SEQ ID NO: 915500 - DNA, 15 bp, Homo sapiens
tgttcattattgttg

SEQ ID NO: 915501 - DNA, 15 bp, Homo sapiens
gttcattattgttgt

SEQ ID NO: 915502 - DNA, 15 bp, Homo sapiens
ttcattattgttgtt

SEQ ID NO: 915503 - DNA, 15 bp, Homo sapiens
tcattattgttgtta

SEQ ID NO: 915504 - DNA, 15 bp, Homo sapiens
cattattgttgttat

SEQ ID NO: 915505 - DNA, 15 bp, Homo sapiens
attattgttgttatt

SEQ ID NO: 915506 - DNA, 15 bp, Homo sapiens
ttattgttgttatta

SEQ ID NO: 915507 - DNA, 15 bp, Homo sapiens
tattgttgttattat

SEQ ID NO: 915508 - DNA, 15 bp, Homo sapiens
attgttgttattatg

SEQ ID NO: 915509 - DNA, 15 bp, Homo sapiens
ttgttgttattatgt

SEQ ID NO: 915510 - DNA, 15 bp, Homo sapiens
tgttgttattatgtt

SEQ ID NO: 915511 - DNA, 15 bp, Homo sapiens
gttgttattatgtta

SEQ ID NO: 915512 - DNA, 15 bp, Homo sapiens
ttgttattatgttat

SEQ ID NO: 915513 - DNA, 15 bp, Homo sapiens
tgttattatgttatt

SEQ ID NO: 915514 - DNA, 15 bp, Homo sapiens
gttattatgttattt

SEQ ID NO: 915515 - DNA, 15 bp, Homo sapiens
ttattatgttatttt

SEQ ID NO: 915516 - DNA, 15 bp, Homo sapiens
tattatgttattttc

SEQ ID NO: 915517 - DNA, 15 bp, Homo sapiens
attatgttattttct

SEQ ID NO: 915518 - DNA, 15 bp, Homo sapiens
ttatgttattttctc

SEQ ID NO: 915519 - DNA, 15 bp, Homo sapiens
tatgttattttctct

SEQ ID NO: 915520 - DNA, 15 bp, Homo sapiens
atgttattttctctc

SEQ ID NO: 915521 - DNA, 15 bp, Homo sapiens
tgttattttctctca

SEQ ID NO: 915522 - DNA, 15 bp, Homo sapiens
gttattttctctcag

SEQ ID NO: 915523 - DNA, 15 bp, Homo sapiens
ttattttctctcaga

SEQ ID NO: 915524 - DNA, 15 bp, Homo sapiens
tattttctctcagac

SEQ ID NO: 915525 - DNA, 15 bp, Homo sapiens
attttctctcagact

SEQ ID NO: 915526 - DNA, 15 bp, Homo sapiens
ttttctctcagactg

SEQ ID NO: 915527 - DNA, 15 bp, Homo sapiens
tttctctcagactga

SEQ ID NO: 915528 - DNA, 15 bp, Homo sapiens
ttctctcagactgag

SEQ ID NO: 915529 - DNA, 15 bp, Homo sapiens
tctctcagactgaga

SEQ ID NO: 915530 - DNA, 15 bp, Homo sapiens
ctctcagactgagag

SEQ ID NO: 915531 - DNA, 15 bp, Homo sapiens
tctcagactgagagc

SEQ ID NO: 915532 - DNA, 15 bp, Homo sapiens
ctcagactgagagca

SEQ ID NO: 915533 - DNA, 15 bp, Homo sapiens
tcagactgagagcac

SEQ ID NO: 915534 - DNA, 15 bp, Homo sapiens
cagactgagagcact

SEQ ID NO: 915535 - DNA, 15 bp, Homo sapiens
agactgagagcactg

SEQ ID NO: 915536 - DNA, 15 bp, Homo sapiens
gactgagagcactgt

SEQ ID NO: 915537 - DNA, 15 bp, Homo sapiens
actgagagcactgtt

SEQ ID NO: 915538 - DNA, 15 bp, Homo sapiens
ctgagagcactgtta

SEQ ID NO: 915539 - DNA, 15 bp, Homo sapiens
tgagagcactgttag

SEQ ID NO: 915540 - DNA, 15 bp, Homo sapiens
gagagcactgttagt

SEQ ID NO: 915541 - DNA, 15 bp, Homo sapiens
agagcactgttagtg

SEQ ID NO: 915542 - DNA, 15 bp, Homo sapiens
gagcactgttagtga

SEQ ID NO: 915543 - DNA, 15 bp, Homo sapiens
agcactgttagtgac

SEQ ID NO: 915544 - DNA, 15 bp, Homo sapiens
gcactgttagtgacc

SEQ ID NO: 915545 - DNA, 15 bp, Homo sapiens
cactgttagtgaccc

SEQ ID NO: 915546 - DNA, 15 bp, Homo sapiens
actgttagtgaccca

SEQ ID NO: 915547 - DNA, 15 bp, Homo sapiens
ctgttagtgacccaa

SEQ ID NO: 915548 - DNA, 15 bp, Homo sapiens
tgttagtgacccaag

SEQ ID NO: 915549 - DNA, 15 bp, Homo sapiens
gttagtgacccaagt

SEQ ID NO: 915550 - DNA, 15 bp, Homo sapiens
ttagtgacccaagta

SEQ ID NO: 915551 - DNA, 15 bp, Homo sapiens
tagtgacccaagtaa

SEQ ID NO: 915552 - DNA, 15 bp, Homo sapiens
agtgacccaagtaaa

SEQ ID NO: 915553 - DNA, 15 bp, Homo sapiens
gtgacccaagtaaat

SEQ ID NO: 915554 - DNA, 15 bp, Homo sapiens
tgacccaagtaaatt

SEQ ID NO: 915555 - DNA, 15 bp, Homo sapiens
gacccaagtaaattt

SEQ ID NO: 915556 - DNA, 15 bp, Homo sapiens
acccaagtaaattta

SEQ ID NO: 915557 - DNA, 15 bp, Homo sapiens
cccaagtaaatttat

SEQ ID NO: 915558 - DNA, 15 bp, Homo sapiens
ccaagtaaatttata

SEQ ID NO: 915559 - DNA, 15 bp, Homo sapiens
caagtaaatttatag

SEQ ID NO: 915560 - DNA, 15 bp, Homo sapiens
aagtaaatttatagt

SEQ ID NO: 915561 - DNA, 15 bp, Homo sapiens
agtaaatttatagtt

SEQ ID NO: 915562 - DNA, 15 bp, Homo sapiens
gtaaatttatagttt

SEQ ID NO: 915563 - DNA, 15 bp, Homo sapiens
taaatttatagtttt

SEQ ID NO: 915564 - DNA, 15 bp, Homo sapiens
aaatttatagttttt

SEQ ID NO: 915565 - DNA, 15 bp, Homo sapiens
aatttatagttttta

SEQ ID NO: 915566 - DNA, 15 bp, Homo sapiens
atttatagtttttaa

SEQ ID NO: 915567 - DNA, 15 bp, Homo sapiens
tttatagtttttaag

SEQ ID NO: 915568 - DNA, 15 bp, Homo sapiens
ttatagtttttaagt

SEQ ID NO: 915569 - DNA, 15 bp, Homo sapiens
tatagtttttaagtt

SEQ ID NO: 915570 - DNA, 15 bp, Homo sapiens
atagtttttaagttc

SEQ ID NO: 915571 - DNA, 15 bp, Homo sapiens
tagtttttaagttca

SEQ ID NO: 915572 - DNA, 15 bp, Homo sapiens
agtttttaagttcag

SEQ ID NO: 915573 - DNA, 15 bp, Homo sapiens
gtttttaagttcaga

SEQ ID NO: 915574 - DNA, 15 bp, Homo sapiens
tttttaagttcagag

SEQ ID NO: 915575 - DNA, 15 bp, Homo sapiens
ttttaagttcagagg

SEQ ID NO: 915576 - DNA, 15 bp, Homo sapiens
tttaagttcagagga

SEQ ID NO: 915577 - DNA, 15 bp, Homo sapiens
ttaagttcagaggaa

SEQ ID NO: 915578 - DNA, 15 bp, Homo sapiens
taagttcagaggaaa

SEQ ID NO: 915579 - DNA, 15 bp, Homo sapiens
aagttcagaggaaaa

SEQ ID NO: 915580 - DNA, 15 bp, Homo sapiens
agttcagaggaaaaa

SEQ ID NO: 915581 - DNA, 15 bp, Homo sapiens
gttcagaggaaaaat

SEQ ID NO: 915582 - DNA, 15 bp, Homo sapiens
ttcagaggaaaaata

SEQ ID NO: 915583 - DNA, 15 bp, Homo sapiens
tcagaggaaaaataa

SEQ ID NO: 915584 - DNA, 15 bp, Homo sapiens
cagaggaaaaataaa

SEQ ID NO: 915585 - DNA, 15 bp, Homo sapiens
agaggaaaaataaag

SEQ ID NO: 915586 - DNA, 15 bp, Homo sapiens
gaggaaaaataaagc

SEQ ID NO: 915587 - DNA, 15 bp, Homo sapiens
aggaaaaataaagcc

SEQ ID NO: 915588 - DNA, 15 bp, Homo sapiens
ggaaaaataaagcct

SEQ ID NO: 915589 - DNA, 15 bp, Homo sapiens
gaaaaataaagccta

SEQ ID NO: 915590 - DNA, 15 bp, Homo sapiens
aaaaataaagcctat

SEQ ID NO: 915591 - DNA, 15 bp, Homo sapiens
aaaataaagcctatt

SEQ ID NO: 915592 - DNA, 15 bp, Homo sapiens
aaataaagcctattt

SEQ ID NO: 915593 - DNA, 15 bp, Homo sapiens
aataaagcctatttt

SEQ ID NO: 915594 - DNA, 15 bp, Homo sapiens
ataaagcctattttt

SEQ ID NO: 915595 - DNA, 15 bp, Homo sapiens
taaagcctatttttt

SEQ ID NO: 915596 - DNA, 15 bp, Homo sapiens
aaagcctattttttg

SEQ ID NO: 915597 - DNA, 15 bp, Homo sapiens
aagcctattttttgt

SEQ ID NO: 915598 - DNA, 15 bp, Homo sapiens
agcctattttttgtt

SEQ ID NO: 915599 - DNA, 15 bp, Homo sapiens
gcctattttttgtta

SEQ ID NO: 915600 - DNA, 15 bp, Homo sapiens
cctattttttgttaa

SEQ ID NO: 915601 - DNA, 15 bp, Homo sapiens
ctattttttgttaac

SEQ ID NO: 915602 - DNA, 15 bp, Homo sapiens
tattttttgttaaca

SEQ ID NO: 915603 - DNA, 15 bp, Homo sapiens
attttttgttaacag

SEQ ID NO: 915604 - DNA, 15 bp, Homo sapiens
ttttttgttaacagt

SEQ ID NO: 915605 - DNA, 15 bp, Homo sapiens
tttttgttaacagtc

SEQ ID NO: 915606 - DNA, 15 bp, Homo sapiens
ttttgttaacagtct

SEQ ID NO: 915607 - DNA, 15 bp, Homo sapiens
tttgttaacagtctt

SEQ ID NO: 915608 - DNA, 15 bp, Homo sapiens
ttgttaacagtctta

SEQ ID NO: 915609 - DNA, 15 bp, Homo sapiens
tgttaacagtcttaa

SEQ ID NO: 915610 - DNA, 15 bp, Homo sapiens
gttaacagtcttaat

SEQ ID NO: 915611 - DNA, 15 bp, Homo sapiens
ttaacagtcttaata

SEQ ID NO: 915612 - DNA, 15 bp, Homo sapiens
taacagtcttaataa

SEQ ID NO: 915613 - DNA, 15 bp, Homo sapiens
aacagtcttaataaa

SEQ ID NO: 915614 - DNA, 15 bp, Homo sapiens
acagtcttaataaat

SEQ ID NO: 915615 - DNA, 15 bp, Homo sapiens
cagtcttaataaata

SEQ ID NO: 915616 - DNA, 15 bp, Homo sapiens
agtcttaataaataa

SEQ ID NO: 915617 - DNA, 15 bp, Homo sapiens
gtcttaataaataat

SEQ ID NO: 915618 - DNA, 15 bp, Homo sapiens
tcttaataaataata

SEQ ID NO: 915619 - DNA, 15 bp, Homo sapiens
cttaataaataataa

SEQ ID NO: 915620 - DNA, 15 bp, Homo sapiens
ttaataaataataaa

SEQ ID NO: 915621 - DNA, 15 bp, Homo sapiens
taataaataataaaa

SEQ ID NO: 915622 - DNA, 15 bp, Homo sapiens
aataaataataaaat

SEQ ID NO: 915623 - DNA, 15 bp, Homo sapiens
ataaataataaaatg

SEQ ID NO: 915624 - DNA, 15 bp, Homo sapiens
taaataataaaatgg

SEQ ID NO: 915625 - DNA, 15 bp, Homo sapiens
aaataataaaatgga

SEQ ID NO: 915626 - DNA, 15 bp, Homo sapiens
aataataaaatggaa

SEQ ID NO: 915627 - DNA, 15 bp, Homo sapiens
ataataaaatggaat

SEQ ID NO: 915628 - DNA, 15 bp, Homo sapiens
taataaaatggaata

SEQ ID NO: 915629 - DNA, 15 bp, Homo sapiens
aataaaatggaataa

SEQ ID NO: 915630 - DNA, 15 bp, Homo sapiens
ataaaatggaataaa

SEQ ID NO: 915631 - DNA, 15 bp, Homo sapiens
taaaatggaataaag

SEQ ID NO: 915632 - DNA, 15 bp, Homo sapiens
aaaatggaataaaga

SEQ ID NO: 915633 - DNA, 15 bp, Homo sapiens
aaatggaataaagaa

SEQ ID NO: 915634 - DNA, 15 bp, Homo sapiens
aatggaataaagaaa

SEQ ID NO: 915635 - DNA, 15 bp, Homo sapiens
atggaataaagaaac

SEQ ID NO: 915636 - DNA, 15 bp, Homo sapiens
tggaataaagaaacc

SEQ ID NO: 915637 - DNA, 15 bp, Homo sapiens
ggaataaagaaacca

SEQ ID NO: 915638 - DNA, 15 bp, Homo sapiens
gaataaagaaaccaa

SEQ ID NO: 915639 - DNA, 15 bp, Homo sapiens
aataaagaaaccaaa

SEQ ID NO: 915640 - DNA, 15 bp, Homo sapiens
ataaagaaaccaaaa

SEQ ID NO: 915641 - DNA, 15 bp, Homo sapiens
taaagaaaccaaaaa

SEQ ID NO: 915642 - DNA, 15 bp, Homo sapiens
aaagaaaccaaaaaa

SEQ ID NO: 915643 - DNA, 15 bp, Homo sapiens
aagaaaccaaaaaaa

SEQ ID NO: 915644 - DNA, 15 bp, Homo sapiens
agaaaccaaaaaaaa

SEQ ID NO: 915645 - DNA, 15 bp, Homo sapiens
gaaaccaaaaaaaaa

SEQ ID NO: 915646 - DNA, 15 bp, Homo sapiens
aaaccaaaaaaaaaa

SEQ ID NO: 915647 - DNA, 15 bp, Homo sapiens
aaccaaaaaaaaaag

SEQ ID NO: 915648 - DNA, 15 bp, Homo sapiens
accaaaaaaaaaaga

SEQ ID NO: 915649 - DNA, 15 bp, Homo sapiens
ccaaaaaaaaaagaa

SEQ ID NO: 915650 - DNA, 15 bp, Homo sapiens
caaaaaaaaaagaaa

SEQ ID NO: 915651 - DNA, 15 bp, Homo sapiens
aaaaaaaaaagaaaa

SEQ ID NO: 915652 - DNA, 15 bp, Homo sapiens
aaaaaaaaagaaaaa

SEQ ID NO: 915653 - DNA, 15 bp, Homo sapiens
aaaaaaaagaaaaag

SEQ ID NO: 915654 - DNA, 15 bp, Homo sapiens
aaaaaaagaaaaagt

SEQ ID NO: 915655 - DNA, 15 bp, Homo sapiens
aaaaaagaaaaagtt

SEQ ID NO: 915656 - DNA, 15 bp, Homo sapiens
aaaaagaaaaagttt

SEQ ID NO: 915657 - DNA, 15 bp, Homo sapiens
aagtttgtatgaaaa

SEQ ID NO: 915658 - DNA, 15 bp, Homo sapiens
agtttgtatgaaaat

SEQ ID NO: 915659 - DNA, 15 bp, Homo sapiens
gtttgtatgaaaatt

SEQ ID NO: 915660 - DNA, 15 bp, Homo sapiens
tttgtatgaaaattc

SEQ ID NO: 915661 - DNA, 15 bp, Homo sapiens
ttgtatgaaaattca

SEQ ID NO: 915662 - DNA, 15 bp, Homo sapiens
tgtatgaaaattcat

SEQ ID NO: 915663 - DNA, 15 bp, Homo sapiens
gtatgaaaattcatc

SEQ ID NO: 915664 - DNA, 15 bp, Homo sapiens
tatgaaaattcatcc

SEQ ID NO: 915665 - DNA, 15 bp, Homo sapiens
atgaaaattcatccc

SEQ ID NO: 915666 - DNA, 15 bp, Homo sapiens
tgaaaattcatccct

SEQ ID NO: 915667 - DNA, 15 bp, Homo sapiens
gaaaattcatcccta

SEQ ID NO: 915668 - DNA, 15 bp, Homo sapiens
aaaattcatccctat

SEQ ID NO: 915669 - DNA, 15 bp, Homo sapiens
aaattcatccctatt

SEQ ID NO: 915670 - DNA, 15 bp, Homo sapiens
aattcatccctattt

SEQ ID NO: 915671 - DNA, 15 bp, Homo sapiens
attcatccctatttc

SEQ ID NO: 915672 - DNA, 15 bp, Homo sapiens
ttcatccctatttct

SEQ ID NO: 915673 - DNA, 15 bp, Homo sapiens
tcatccctatttctt

SEQ ID NO: 915674 - DNA, 15 bp, Homo sapiens
catccctatttcttt

SEQ ID NO: 915675 - DNA, 15 bp, Homo sapiens
atccctatttcttta

SEQ ID NO: 915676 - DNA, 15 bp, Homo sapiens
tccctatttctttat

SEQ ID NO: 915677 - DNA, 15 bp, Homo sapiens
ccctatttctttatt

SEQ ID NO: 915678 - DNA, 15 bp, Homo sapiens
cctatttctttattt

SEQ ID NO: 915679 - DNA, 15 bp, Homo sapiens
ctatttctttatttt

SEQ ID NO: 915680 - DNA, 15 bp, Homo sapiens
tatttctttattttg

SEQ ID NO: 915681 - DNA, 15 bp, Homo sapiens
atttctttattttgg

SEQ ID NO: 915682 - DNA, 15 bp, Homo sapiens
tttctttattttgga

SEQ ID NO: 915683 - DNA, 15 bp, Homo sapiens
ttctttattttggac

SEQ ID NO: 915684 - DNA, 15 bp, Homo sapiens
tctttattttggact

SEQ ID NO: 915685 - DNA, 15 bp, Homo sapiens
ctttattttggacta

SEQ ID NO: 915686 - DNA, 15 bp, Homo sapiens
tttattttggactaa

SEQ ID NO: 915687 - DNA, 15 bp, Homo sapiens
ttattttggactaag

SEQ ID NO: 915688 - DNA, 15 bp, Homo sapiens
tattttggactaagt

SEQ ID NO: 915689 - DNA, 15 bp, Homo sapiens
attttggactaagta

SEQ ID NO: 915690 - DNA, 15 bp, Homo sapiens
ttttggactaagtag

SEQ ID NO: 915691 - DNA, 15 bp, Homo sapiens
tttggactaagtagt

SEQ ID NO: 915692 - DNA, 15 bp, Homo sapiens
ttggactaagtagtc

SEQ ID NO: 915693 - DNA, 15 bp, Homo sapiens
tggactaagtagtca

SEQ ID NO: 915694 - DNA, 15 bp, Homo sapiens
ggactaagtagtcaa

SEQ ID NO: 915695 - DNA, 15 bp, Homo sapiens
gactaagtagtcaaa

SEQ ID NO: 915696 - DNA, 15 bp, Homo sapiens
actaagtagtcaaat

SEQ ID NO: 915697 - DNA, 15 bp, Homo sapiens
ctaagtagtcaaatt

SEQ ID NO: 915698 - DNA, 15 bp, Homo sapiens
taagtagtcaaattt

SEQ ID NO: 915699 - DNA, 15 bp, Homo sapiens
aagtagtcaaatttc

SEQ ID NO: 915700 - DNA, 15 bp, Homo sapiens
agtagtcaaatttct

SEQ ID NO: 915701 - DNA, 15 bp, Homo sapiens
gtagtcaaatttcta

SEQ ID NO: 915702 - DNA, 15 bp, Homo sapiens
tagtcaaatttctac

SEQ ID NO: 915703 - DNA, 15 bp, Homo sapiens
agtcaaatttctact

SEQ ID NO: 915704 - DNA, 15 bp, Homo sapiens
gtcaaatttctacta

SEQ ID NO: 915705 - DNA, 15 bp, Homo sapiens
tcaaatttctactat

SEQ ID NO: 915706 - DNA, 15 bp, Homo sapiens
caaatttctactata

SEQ ID NO: 915707 - DNA, 15 bp, Homo sapiens
aaatttctactatat

SEQ ID NO: 915708 - DNA, 15 bp, Homo sapiens
aatttctactatatt

SEQ ID NO: 915709 - DNA, 15 bp, Homo sapiens
atttctactatatta

SEQ ID NO: 915710 - DNA, 15 bp, Homo sapiens
tttctactatattaa

SEQ ID NO: 915711 - DNA, 15 bp, Homo sapiens
ttctactatattaat

SEQ ID NO: 915712 - DNA, 15 bp, Homo sapiens
tctactatattaata

SEQ ID NO: 915713 - DNA, 15 bp, Homo sapiens
ctactatattaatat

SEQ ID NO: 915714 - DNA, 15 bp, Homo sapiens
tactatattaatatt

SEQ ID NO: 915715 - DNA, 15 bp, Homo sapiens
actatattaatatta

SEQ ID NO: 915716 - DNA, 15 bp, Homo sapiens
ctatattaatattat

SEQ ID NO: 915717 - DNA, 15 bp, Homo sapiens
tatattaatattatg

SEQ ID NO: 915718 - DNA, 15 bp, Homo sapiens
atattaatattatgt

SEQ ID NO: 915719 - DNA, 15 bp, Homo sapiens
tattaatattatgta

SEQ ID NO: 915720 - DNA, 15 bp, Homo sapiens
attaatattatgtaa

SEQ ID NO: 915721 - DNA, 15 bp, Homo sapiens
ttaatattatgtaag

SEQ ID NO: 915722 - DNA, 15 bp, Homo sapiens
taatattatgtaagc

SEQ ID NO: 915723 - DNA, 15 bp, Homo sapiens
aatattatgtaagcg

SEQ ID NO: 915724 - DNA, 15 bp, Homo sapiens
atattatgtaagcga

SEQ ID NO: 915725 - DNA, 15 bp, Homo sapiens
tattatgtaagcgac

SEQ ID NO: 915726 - DNA, 15 bp, Homo sapiens
attatgtaagcgaca

SEQ ID NO: 915727 - DNA, 15 bp, Homo sapiens
ttatgtaagcgacac

SEQ ID NO: 915728 - DNA, 15 bp, Homo sapiens
tatgtaagcgacacc

SEQ ID NO: 915729 - DNA, 15 bp, Homo sapiens
atgtaagcgacaccc

SEQ ID NO: 915730 - DNA, 15 bp, Homo sapiens
tgtaagcgacaccca

SEQ ID NO: 915731 - DNA, 15 bp, Homo sapiens
gtaagcgacacccat

SEQ ID NO: 915732 - DNA, 15 bp, Homo sapiens
taagcgacacccatt

SEQ ID NO: 915733 - DNA, 15 bp, Homo sapiens
aagcgacacccattt

SEQ ID NO: 915734 - DNA, 15 bp, Homo sapiens
agcgacacccattta

SEQ ID NO: 915735 - DNA, 15 bp, Homo sapiens
gcgacacccatttaa

SEQ ID NO: 915736 - DNA, 15 bp, Homo sapiens
cgacacccatttaaa

SEQ ID NO: 915737 - DNA, 15 bp, Homo sapiens
gacacccatttaaat

SEQ ID NO: 915738 - DNA, 15 bp, Homo sapiens
acacccatttaaatt

SEQ ID NO: 915739 - DNA, 15 bp, Homo sapiens
cacccatttaaattc

SEQ ID NO: 915740 - DNA, 15 bp, Homo sapiens
acccatttaaattca

SEQ ID NO: 915741 - DNA, 15 bp, Homo sapiens
cccatttaaattcac

SEQ ID NO: 915742 - DNA, 15 bp, Homo sapiens
ccatttaaattcact

SEQ ID NO: 915743 - DNA, 15 bp, Homo sapiens
catttaaattcactc

SEQ ID NO: 915744 - DNA, 15 bp, Homo sapiens
atttaaattcactct

SEQ ID NO: 915745 - DNA, 15 bp, Homo sapiens
tttaaattcactctc

SEQ ID NO: 915746 - DNA, 15 bp, Homo sapiens
ttaaattcactctct

SEQ ID NO: 915747 - DNA, 15 bp, Homo sapiens
taaattcactctctt

SEQ ID NO: 915748 - DNA, 15 bp, Homo sapiens
aaattcactctcttg

SEQ ID NO: 915749 - DNA, 15 bp, Homo sapiens
aattcactctcttga

SEQ ID NO: 915750 - DNA, 15 bp, Homo sapiens
attcactctcttgat

SEQ ID NO: 915751 - DNA, 15 bp, Homo sapiens
ttcactctcttgata

SEQ ID NO: 915752 - DNA, 15 bp, Homo sapiens
tcactctcttgatag

SEQ ID NO: 915753 - DNA, 15 bp, Homo sapiens
cactctcttgataga

SEQ ID NO: 915754 - DNA, 15 bp, Homo sapiens
actctcttgatagaa

SEQ ID NO: 915755 - DNA, 15 bp, Homo sapiens
ctctcttgatagaaa

SEQ ID NO: 915756 - DNA, 15 bp, Homo sapiens
tctcttgatagaaag

SEQ ID NO: 915757 - DNA, 15 bp, Homo sapiens
ctcttgatagaaagg

SEQ ID NO: 915758 - DNA, 15 bp, Homo sapiens
tcttgatagaaaggt

SEQ ID NO: 915759 - DNA, 15 bp, Homo sapiens
cttgatagaaaggtg

SEQ ID NO: 915760 - DNA, 15 bp, Homo sapiens
ttgatagaaaggtga

SEQ ID NO: 915761 - DNA, 15 bp, Homo sapiens
tgatagaaaggtgag

SEQ ID NO: 915762 - DNA, 15 bp, Homo sapiens
gatagaaaggtgagt

SEQ ID NO: 915763 - DNA, 15 bp, Homo sapiens
atagaaaggtgagtt

SEQ ID NO: 915764 - DNA, 15 bp, Homo sapiens
tagaaaggtgagttg

SEQ ID NO: 915765 - DNA, 15 bp, Homo sapiens
agaaaggtgagttga

SEQ ID NO: 915766 - DNA, 15 bp, Homo sapiens
gaaaggtgagttgat

SEQ ID NO: 915767 - DNA, 15 bp, Homo sapiens
aaaggtgagttgatt

SEQ ID NO: 915768 - DNA, 15 bp, Homo sapiens
aaggtgagttgatta

SEQ ID NO: 915769 - DNA, 15 bp, Homo sapiens
aggtgagttgattat

SEQ ID NO: 915770 - DNA, 15 bp, Homo sapiens
ggtgagttgattatc

SEQ ID NO: 915771 - DNA, 15 bp, Homo sapiens
gtgagttgattatca

SEQ ID NO: 915772 - DNA, 15 bp, Homo sapiens
tgagttgattatcac

SEQ ID NO: 915773 - DNA, 15 bp, Homo sapiens
gagttgattatcaca

SEQ ID NO: 915774 - DNA, 15 bp, Homo sapiens
agttgattatcacac

SEQ ID NO: 915775 - DNA, 15 bp, Homo sapiens
gttgattatcacacc

SEQ ID NO: 915776 - DNA, 15 bp, Homo sapiens
ttgattatcacacct

SEQ ID NO: 915777 - DNA, 15 bp, Homo sapiens
tgattatcacacctg

SEQ ID NO: 915778 - DNA, 15 bp, Homo sapiens
gattatcacacctgc

SEQ ID NO: 915779 - DNA, 15 bp, Homo sapiens
attatcacacctgct

SEQ ID NO: 915780 - DNA, 15 bp, Homo sapiens
ttatcacacctgcta

SEQ ID NO: 915781 - DNA, 15 bp, Homo sapiens
tatcacacctgctat

SEQ ID NO: 915782 - DNA, 15 bp, Homo sapiens
atcacacctgctatt

SEQ ID NO: 915783 - DNA, 15 bp, Homo sapiens
tcacacctgctattt

SEQ ID NO: 915784 - DNA, 15 bp, Homo sapiens
cacacctgctatttt

SEQ ID NO: 915785 - DNA, 15 bp, Homo sapiens
acacctgctattttt

SEQ ID NO: 915786 - DNA, 15 bp, Homo sapiens
cacctgctatttttt

SEQ ID NO: 915787 - DNA, 15 bp, Homo sapiens
acctgctattttttc

SEQ ID NO: 915788 - DNA, 15 bp, Homo sapiens
cctgctattttttca

SEQ ID NO: 915789 - DNA, 15 bp, Homo sapiens
ctgctattttttcac

SEQ ID NO: 915790 - DNA, 15 bp, Homo sapiens
tgctattttttcact

SEQ ID NO: 915791 - DNA, 15 bp, Homo sapiens
gctattttttcactg

SEQ ID NO: 915792 - DNA, 15 bp, Homo sapiens
ctattttttcactgc

SEQ ID NO: 915793 - DNA, 15 bp, Homo sapiens
tattttttcactgcc

SEQ ID NO: 915794 - DNA, 15 bp, Homo sapiens
attttttcactgcca

SEQ ID NO: 915795 - DNA, 15 bp, Homo sapiens
ttttttcactgccaa

SEQ ID NO: 915796 - DNA, 15 bp, Homo sapiens
tttttcactgccaaa

SEQ ID NO: 915797 - DNA, 15 bp, Homo sapiens
ttttcactgccaaaa

SEQ ID NO: 915798 - DNA, 15 bp, Homo sapiens
tttcactgccaaaag

SEQ ID NO: 915799 - DNA, 15 bp, Homo sapiens
ttcactgccaaaaga

SEQ ID NO: 915800 - DNA, 15 bp, Homo sapiens
tcactgccaaaagat

SEQ ID NO: 915801 - DNA, 15 bp, Homo sapiens
cactgccaaaagatt

SEQ ID NO: 915802 - DNA, 15 bp, Homo sapiens
actgccaaaagattg

SEQ ID NO: 915803 - DNA, 15 bp, Homo sapiens
ctgccaaaagattgc

SEQ ID NO: 915804 - DNA, 15 bp, Homo sapiens
tgccaaaagattgca

SEQ ID NO: 915805 - DNA, 15 bp, Homo sapiens
gccaaaagattgcaa

SEQ ID NO: 915806 - DNA, 15 bp, Homo sapiens
ccaaaagattgcaat

SEQ ID NO: 915807 - DNA, 15 bp, Homo sapiens
caaaagattgcaata

SEQ ID NO: 915808 - DNA, 15 bp, Homo sapiens
aaaagattgcaataa

SEQ ID NO: 915809 - DNA, 15 bp, Homo sapiens
aaagattgcaataac

SEQ ID NO: 915810 - DNA, 15 bp, Homo sapiens
aagattgcaataacc

SEQ ID NO: 915811 - DNA, 15 bp, Homo sapiens
agattgcaataacct

SEQ ID NO: 915812 - DNA, 15 bp, Homo sapiens
gattgcaataacctc

SEQ ID NO: 915813 - DNA, 15 bp, Homo sapiens
attgcaataacctcc

SEQ ID NO: 915814 - DNA, 15 bp, Homo sapiens
ttgcaataacctccc

SEQ ID NO: 915815 - DNA, 15 bp, Homo sapiens
tgcaataacctccct

SEQ ID NO: 915816 - DNA, 15 bp, Homo sapiens
gcaataacctccctc

SEQ ID NO: 915817 - DNA, 15 bp, Homo sapiens
caataacctccctcc

SEQ ID NO: 915818 - DNA, 15 bp, Homo sapiens
aataacctccctcca

SEQ ID NO: 915819 - DNA, 15 bp, Homo sapiens
ataacctccctccat

SEQ ID NO: 915820 - DNA, 15 bp, Homo sapiens
taacctccctccatc

SEQ ID NO: 915821 - DNA, 15 bp, Homo sapiens
aacctccctccatca

SEQ ID NO: 915822 - DNA, 15 bp, Homo sapiens
acctccctccatcac

SEQ ID NO: 915823 - DNA, 15 bp, Homo sapiens
cctccctccatcacc

SEQ ID NO: 915824 - DNA, 15 bp, Homo sapiens
ctccctccatcaccc

SEQ ID NO: 915825 - DNA, 15 bp, Homo sapiens
tccctccatcaccct

SEQ ID NO: 915826 - DNA, 15 bp, Homo sapiens
ccctccatcaccctc

SEQ ID NO: 915827 - DNA, 15 bp, Homo sapiens
cctccatcaccctca

SEQ ID NO: 915828 - DNA, 15 bp, Homo sapiens
ctccatcaccctcaa

SEQ ID NO: 915829 - DNA, 15 bp, Homo sapiens
tccatcaccctcaaa

SEQ ID NO: 915830 - DNA, 15 bp, Homo sapiens
ccatcaccctcaaaa

SEQ ID NO: 915831 - DNA, 15 bp, Homo sapiens
catcaccctcaaaaa

SEQ ID NO: 915832 - DNA, 15 bp, Homo sapiens
atcaccctcaaaaaa

SEQ ID NO: 915833 - DNA, 15 bp, Homo sapiens
tcaccctcaaaaaac

SEQ ID NO: 915834 - DNA, 15 bp, Homo sapiens
caccctcaaaaaaca

SEQ ID NO: 915835 - DNA, 15 bp, Homo sapiens
accctcaaaaaacaa

SEQ ID NO: 915836 - DNA, 15 bp, Homo sapiens
ccctcaaaaaacaaa

SEQ ID NO: 915837 - DNA, 15 bp, Homo sapiens
cctcaaaaaacaaac

SEQ ID NO: 915838 - DNA, 15 bp, Homo sapiens
ctcaaaaaacaaaca

SEQ ID NO: 915839 - DNA, 15 bp, Homo sapiens
tcaaaaaacaaacag

SEQ ID NO: 915840 - DNA, 15 bp, Homo sapiens
caaaaaacaaacaga

SEQ ID NO: 915841 - DNA, 15 bp, Homo sapiens
aaaaaacaaacagaa

SEQ ID NO: 915842 - DNA, 15 bp, Homo sapiens
aaaaacaaacagaaa

SEQ ID NO: 915843 - DNA, 15 bp, Homo sapiens
aaaacaaacagaaac

SEQ ID NO: 915844 - DNA, 15 bp, Homo sapiens
aaacaaacagaaacc

SEQ ID NO: 915845 - DNA, 15 bp, Homo sapiens
aacaaacagaaacca

SEQ ID NO: 915846 - DNA, 15 bp, Homo sapiens
acaaacagaaaccat

SEQ ID NO: 915847 - DNA, 15 bp, Homo sapiens
caaacagaaaccatc

SEQ ID NO: 915848 - DNA, 15 bp, Homo sapiens
aaacagaaaccatct

SEQ ID NO: 915849 - DNA, 15 bp, Homo sapiens
aacagaaaccatctg

SEQ ID NO: 915850 - DNA, 15 bp, Homo sapiens
acagaaaccatctga

SEQ ID NO: 915851 - DNA, 15 bp, Homo sapiens
cagaaaccatctgag

SEQ ID NO: 915852 - DNA, 15 bp, Homo sapiens
agaaaccatctgagg

SEQ ID NO: 915853 - DNA, 15 bp, Homo sapiens
gaaaccatctgaggc

SEQ ID NO: 915854 - DNA, 15 bp, Homo sapiens
aaaccatctgaggca

SEQ ID NO: 915855 - DNA, 15 bp, Homo sapiens
aaccatctgaggcat

SEQ ID NO: 915856 - DNA, 15 bp, Homo sapiens
accatctgaggcata

SEQ ID NO: 915857 - DNA, 15 bp, Homo sapiens
ccatctgaggcatag

SEQ ID NO: 915858 - DNA, 15 bp, Homo sapiens
catctgaggcatagc

SEQ ID NO: 915859 - DNA, 15 bp, Homo sapiens
atctgaggcatagcc

SEQ ID NO: 915860 - DNA, 15 bp, Homo sapiens
tctgaggcatagcca

SEQ ID NO: 915861 - DNA, 15 bp, Homo sapiens
ctgaggcatagccat

SEQ ID NO: 915862 - DNA, 15 bp, Homo sapiens
tgaggcatagccatt

SEQ ID NO: 915863 - DNA, 15 bp, Homo sapiens
gaggcatagccattg

SEQ ID NO: 915864 - DNA, 15 bp, Homo sapiens
aggcatagccattgt

SEQ ID NO: 915865 - DNA, 15 bp, Homo sapiens
ggcatagccattgtt

SEQ ID NO: 915866 - DNA, 15 bp, Homo sapiens
gcatagccattgttt

SEQ ID NO: 915867 - DNA, 15 bp, Homo sapiens
catagccattgttta

SEQ ID NO: 915868 - DNA, 15 bp, Homo sapiens
atagccattgtttac

SEQ ID NO: 915869 - DNA, 15 bp, Homo sapiens
tagccattgtttaca

SEQ ID NO: 915870 - DNA, 15 bp, Homo sapiens
agccattgtttacat

SEQ ID NO: 915871 - DNA, 15 bp, Homo sapiens
gccattgtttacata

SEQ ID NO: 915872 - DNA, 15 bp, Homo sapiens
ccattgtttacatat

SEQ ID NO: 915873 - DNA, 15 bp, Homo sapiens
cattgtttacatatt

SEQ ID NO: 915874 - DNA, 15 bp, Homo sapiens
attgtttacatattg

SEQ ID NO: 915875 - DNA, 15 bp, Homo sapiens
ttgtttacatattgt

SEQ ID NO: 915876 - DNA, 15 bp, Homo sapiens
tgtttacatattgtg

SEQ ID NO: 915877 - DNA, 15 bp, Homo sapiens
gtttacatattgtgt

SEQ ID NO: 915878 - DNA, 15 bp, Homo sapiens
tttacatattgtgtt

SEQ ID NO: 915879 - DNA, 15 bp, Homo sapiens
ttacatattgtgttt

SEQ ID NO: 915880 - DNA, 15 bp, Homo sapiens
tacatattgtgtttg

SEQ ID NO: 915881 - DNA, 15 bp, Homo sapiens
acatattgtgtttgt

SEQ ID NO: 915882 - DNA, 15 bp, Homo sapiens
catattgtgtttgtg

SEQ ID NO: 915883 - DNA, 15 bp, Homo sapiens
atattgtgtttgtgt

SEQ ID NO: 915884 - DNA, 15 bp, Homo sapiens
tattgtgtttgtgtg

SEQ ID NO: 915885 - DNA, 15 bp, Homo sapiens
attgtgtttgtgtgc

SEQ ID NO: 915886 - DNA, 15 bp, Homo sapiens
ttgtgtttgtgtgca

SEQ ID NO: 915887 - DNA, 15 bp, Homo sapiens
tgtgtttgtgtgcac

SEQ ID NO: 915888 - DNA, 15 bp, Homo sapiens
gtgtttgtgtgcacc

SEQ ID NO: 915889 - DNA, 15 bp, Homo sapiens
tgtttgtgtgcacct

SEQ ID NO: 915890 - DNA, 15 bp, Homo sapiens
gtttgtgtgcaccta

SEQ ID NO: 915891 - DNA, 15 bp, Homo sapiens
tttgtgtgcacctat

SEQ ID NO: 915892 - DNA, 15 bp, Homo sapiens
ttgtgtgcacctatc

SEQ ID NO: 915893 - DNA, 15 bp, Homo sapiens
tgtgtgcacctatct

SEQ ID NO: 915894 - DNA, 15 bp, Homo sapiens
gtgtgcacctatcta

SEQ ID NO: 915895 - DNA, 15 bp, Homo sapiens
tgtgcacctatctac

SEQ ID NO: 915896 - DNA, 15 bp, Homo sapiens
gtgcacctatctaca

SEQ ID NO: 915897 - DNA, 15 bp, Homo sapiens
tgcacctatctacaa

SEQ ID NO: 915898 - DNA, 15 bp, Homo sapiens
gcacctatctacaat

SEQ ID NO: 915899 - DNA, 15 bp, Homo sapiens
cacctatctacaatg

SEQ ID NO: 915900 - DNA, 15 bp, Homo sapiens
acctatctacaatgt

SEQ ID NO: 915901 - DNA, 15 bp, Homo sapiens
cctatctacaatgtt

SEQ ID NO: 915902 - DNA, 15 bp, Homo sapiens
ctatctacaatgttc

SEQ ID NO: 915903 - DNA, 15 bp, Homo sapiens
tatctacaatgttct

SEQ ID NO: 915904 - DNA, 15 bp, Homo sapiens
atctacaatgttctt

SEQ ID NO: 915905 - DNA, 15 bp, Homo sapiens
tctacaatgttcttt

SEQ ID NO: 915906 - DNA, 15 bp, Homo sapiens
ctacaatgttctttc

SEQ ID NO: 915907 - DNA, 15 bp, Homo sapiens
tacaatgttctttct

SEQ ID NO: 915908 - DNA, 15 bp, Homo sapiens
acaatgttctttctt

SEQ ID NO: 915909 - DNA, 15 bp, Homo sapiens
caatgttctttcttg

SEQ ID NO: 915910 - DNA, 15 bp, Homo sapiens
aatgttctttcttgt

SEQ ID NO: 915911 - DNA, 15 bp, Homo sapiens
atgttctttcttgta

SEQ ID NO: 915912 - DNA, 15 bp, Homo sapiens
tgttctttcttgtaa

SEQ ID NO: 915913 - DNA, 15 bp, Homo sapiens
gttctttcttgtaag

SEQ ID NO: 915914 - DNA, 15 bp, Homo sapiens
ttctttcttgtaagg

SEQ ID NO: 915915 - DNA, 15 bp, Homo sapiens
tctttcttgtaagga

SEQ ID NO: 915916 - DNA, 15 bp, Homo sapiens
ctttcttgtaaggag

SEQ ID NO: 915917 - DNA, 15 bp, Homo sapiens
tttcttgtaaggagt

SEQ ID NO: 915918 - DNA, 15 bp, Homo sapiens
ttcttgtaaggagtt

SEQ ID NO: 915919 - DNA, 15 bp, Homo sapiens
tcttgtaaggagttt

SEQ ID NO: 915920 - DNA, 15 bp, Homo sapiens
cttgtaaggagttta

SEQ ID NO: 915921 - DNA, 15 bp, Homo sapiens
ttgtaaggagtttat

SEQ ID NO: 915922 - DNA, 15 bp, Homo sapiens
tgtaaggagtttatc

SEQ ID NO: 915923 - DNA, 15 bp, Homo sapiens
gtaaggagtttatct

SEQ ID NO: 915924 - DNA, 15 bp, Homo sapiens
taaggagtttatctg

SEQ ID NO: 915925 - DNA, 15 bp, Homo sapiens
aaggagtttatctgc

SEQ ID NO: 915926 - DNA, 15 bp, Homo sapiens
aggagtttatctgcc

SEQ ID NO: 915927 - DNA, 15 bp, Homo sapiens
ggagtttatctgcca

SEQ ID NO: 915928 - DNA, 15 bp, Homo sapiens
gagtttatctgccaa

SEQ ID NO: 915929 - DNA, 15 bp, Homo sapiens
agtttatctgccaat

SEQ ID NO: 915930 - DNA, 15 bp, Homo sapiens
gtttatctgccaata

SEQ ID NO: 915931 - DNA, 15 bp, Homo sapiens
tttatctgccaatat

SEQ ID NO: 915932 - DNA, 15 bp, Homo sapiens
ttatctgccaatatt

SEQ ID NO: 915933 - DNA, 15 bp, Homo sapiens
tatctgccaatattt

SEQ ID NO: 915934 - DNA, 15 bp, Homo sapiens
atctgccaatatttt

SEQ ID NO: 915935 - DNA, 15 bp, Homo sapiens
tctgccaatattttt

SEQ ID NO: 915936 - DNA, 15 bp, Homo sapiens
ctgccaatatttttg

SEQ ID NO: 915937 - DNA, 15 bp, Homo sapiens
tgccaatatttttgg

SEQ ID NO: 915938 - DNA, 15 bp, Homo sapiens
gccaatatttttggc

SEQ ID NO: 915939 - DNA, 15 bp, Homo sapiens
ccaatatttttggct

SEQ ID NO: 915940 - DNA, 15 bp, Homo sapiens
caatatttttggctt

SEQ ID NO: 915941 - DNA, 15 bp, Homo sapiens
aatatttttggcttc

SEQ ID NO: 915942 - DNA, 15 bp, Homo sapiens
atatttttggcttca

SEQ ID NO: 915943 - DNA, 15 bp, Homo sapiens
tatttttggcttcag

SEQ ID NO: 915944 - DNA, 15 bp, Homo sapiens
atttttggcttcagc

SEQ ID NO: 915945 - DNA, 15 bp, Homo sapiens
tttttggcttcagca

SEQ ID NO: 915946 - DNA, 15 bp, Homo sapiens
ttttggcttcagcag

SEQ ID NO: 915947 - DNA, 15 bp, Homo sapiens
tttggcttcagcagc

SEQ ID NO: 915948 - DNA, 15 bp, Homo sapiens
ttggcttcagcagca

SEQ ID NO: 915949 - DNA, 15 bp, Homo sapiens
tggcttcagcagcag

SEQ ID NO: 915950 - DNA, 15 bp, Homo sapiens
ggcttcagcagcagc

SEQ ID NO: 915951 - DNA, 15 bp, Homo sapiens
gcttcagcagcagcg

SEQ ID NO: 915952 - DNA, 15 bp, Homo sapiens
cttcagcagcagcgc

SEQ ID NO: 915953 - DNA, 15 bp, Homo sapiens
ttcagcagcagcgct

SEQ ID NO: 915954 - DNA, 15 bp, Homo sapiens
tcagcagcagcgctc

SEQ ID NO: 915955 - DNA, 15 bp, Homo sapiens
cagcagcagcgctct

SEQ ID NO: 915956 - DNA, 15 bp, Homo sapiens
agcagcagcgctctt

SEQ ID NO: 915957 - DNA, 15 bp, Homo sapiens
gcagcagcgctcttc

SEQ ID NO: 915958 - DNA, 15 bp, Homo sapiens
cagcagcgctcttct

SEQ ID NO: 915959 - DNA, 15 bp, Homo sapiens
agcagcgctcttctt

SEQ ID NO: 915960 - DNA, 15 bp, Homo sapiens
gcagcgctcttcttg

SEQ ID NO: 915961 - DNA, 15 bp, Homo sapiens
cagcgctcttcttga

SEQ ID NO: 915962 - DNA, 15 bp, Homo sapiens
agcgctcttcttgac

SEQ ID NO: 915963 - DNA, 15 bp, Homo sapiens
gcgctcttcttgaca

SEQ ID NO: 915964 - DNA, 15 bp, Homo sapiens
cgctcttcttgacag

SEQ ID NO: 915965 - DNA, 15 bp, Homo sapiens
gctcttcttgacaga

SEQ ID NO: 915966 - DNA, 15 bp, Homo sapiens
ctcttcttgacagac

SEQ ID NO: 915967 - DNA, 15 bp, Homo sapiens
tcttcttgacagact

SEQ ID NO: 915968 - DNA, 15 bp, Homo sapiens
cttcttgacagacta

SEQ ID NO: 915969 - DNA, 15 bp, Homo sapiens
ttcttgacagactaa

SEQ ID NO: 915970 - DNA, 15 bp, Homo sapiens
tcttgacagactaag

SEQ ID NO: 915971 - DNA, 15 bp, Homo sapiens
cttgacagactaaga

SEQ ID NO: 915972 - DNA, 15 bp, Homo sapiens
ttgacagactaagag

SEQ ID NO: 915973 - DNA, 15 bp, Homo sapiens
tgacagactaagaga

SEQ ID NO: 915974 - DNA, 15 bp, Homo sapiens
gacagactaagagaa

SEQ ID NO: 915975 - DNA, 15 bp, Homo sapiens
acagactaagagaag

SEQ ID NO: 915976 - DNA, 15 bp, Homo sapiens
cagactaagagaagg

SEQ ID NO: 915977 - DNA, 15 bp, Homo sapiens
agactaagagaagga

SEQ ID NO: 915978 - DNA, 15 bp, Homo sapiens
gactaagagaaggat

SEQ ID NO: 915979 - DNA, 15 bp, Homo sapiens
actaagagaaggatc

SEQ ID NO: 915980 - DNA, 15 bp, Homo sapiens
ctaagagaaggatct

SEQ ID NO: 915981 - DNA, 15 bp, Homo sapiens
taagagaaggatcta

SEQ ID NO: 915982 - DNA, 15 bp, Homo sapiens
aagagaaggatctac

SEQ ID NO: 915983 - DNA, 15 bp, Homo sapiens
agagaaggatctaca

SEQ ID NO: 915984 - DNA, 15 bp, Homo sapiens
gagaaggatctacag

SEQ ID NO: 915985 - DNA, 15 bp, Homo sapiens
agaaggatctacaga

SEQ ID NO: 915986 - DNA, 15 bp, Homo sapiens
gaaggatctacagaa

SEQ ID NO: 915987 - DNA, 15 bp, Homo sapiens
aaggatctacagaaa

SEQ ID NO: 915988 - DNA, 15 bp, Homo sapiens
aggatctacagaaaa

SEQ ID NO: 915989 - DNA, 15 bp, Homo sapiens
ggatctacagaaaag

SEQ ID NO: 915990 - DNA, 15 bp, Homo sapiens
gatctacagaaaagt

SEQ ID NO: 915991 - DNA, 15 bp, Homo sapiens
atctacagaaaagtc

SEQ ID NO: 915992 - DNA, 15 bp, Homo sapiens
tctacagaaaagtca

SEQ ID NO: 915993 - DNA, 15 bp, Homo sapiens
ctacagaaaagtcat

SEQ ID NO: 915994 - DNA, 15 bp, Homo sapiens
tacagaaaagtcatc

SEQ ID NO: 915995 - DNA, 15 bp, Homo sapiens
acagaaaagtcatct

SEQ ID NO: 915996 - DNA, 15 bp, Homo sapiens
cagaaaagtcatctg

SEQ ID NO: 915997 - DNA, 15 bp, Homo sapiens
agaaaagtcatctga

SEQ ID NO: 915998 - DNA, 15 bp, Homo sapiens
gaaaagtcatctgat

SEQ ID NO: 915999 - DNA, 15 bp, Homo sapiens
aaaagtcatctgatt

SEQ ID NO: 916000 - DNA, 15 bp, Homo sapiens
aaagtcatctgatta

SEQ ID NO: 916001 - DNA, 15 bp, Homo sapiens
aagtcatctgattaa

SEQ ID NO: 916002 - DNA, 15 bp, Homo sapiens
agtcatctgattaag

SEQ ID NO: 916003 - DNA, 15 bp, Homo sapiens
gtcatctgattaagg

SEQ ID NO: 916004 - DNA, 15 bp, Homo sapiens
tcatctgattaaggt

SEQ ID NO: 916005 - DNA, 15 bp, Homo sapiens
catctgattaaggtt

SEQ ID NO: 916006 - DNA, 15 bp, Homo sapiens
atctgattaaggttt

SEQ ID NO: 916007 - DNA, 15 bp, Homo sapiens
tctgattaaggtttt

SEQ ID NO: 916008 - DNA, 15 bp, Homo sapiens
ctgattaaggttttg

SEQ ID NO: 916009 - DNA, 15 bp, Homo sapiens
tgattaaggttttgg

SEQ ID NO: 916010 - DNA, 15 bp, Homo sapiens
gattaaggttttggg

SEQ ID NO: 916011 - DNA, 15 bp, Homo sapiens
attaaggttttgggt

SEQ ID NO: 916012 - DNA, 15 bp, Homo sapiens
ttaaggttttgggtc

SEQ ID NO: 916013 - DNA, 15 bp, Homo sapiens
taaggttttgggtca

SEQ ID NO: 916014 - DNA, 15 bp, Homo sapiens
aaggttttgggtcaa

SEQ ID NO: 916015 - DNA, 15 bp, Homo sapiens
aggttttgggtcaaa

SEQ ID NO: 916016 - DNA, 15 bp, Homo sapiens
ggttttgggtcaaat

SEQ ID NO: 916017 - DNA, 15 bp, Homo sapiens
gttttgggtcaaatt

SEQ ID NO: 916018 - DNA, 15 bp, Homo sapiens
ttttgggtcaaatta

SEQ ID NO: 916019 - DNA, 15 bp, Homo sapiens
tttgggtcaaattaa

SEQ ID NO: 916020 - DNA, 15 bp, Homo sapiens
ttgggtcaaattaaa

SEQ ID NO: 916021 - DNA, 15 bp, Homo sapiens
tgggtcaaattaaaa

SEQ ID NO: 916022 - DNA, 15 bp, Homo sapiens
gggtcaaattaaaac

SEQ ID NO: 916023 - DNA, 15 bp, Homo sapiens
ggtcaaattaaaact

SEQ ID NO: 916024 - DNA, 15 bp, Homo sapiens
gtcaaattaaaactc

SEQ ID NO: 916025 - DNA, 15 bp, Homo sapiens
tcaaattaaaactct

SEQ ID NO: 916026 - DNA, 15 bp, Homo sapiens
caaattaaaactctc

SEQ ID NO: 916027 - DNA, 15 bp, Homo sapiens
aaattaaaactctct

SEQ ID NO: 916028 - DNA, 15 bp, Homo sapiens
aattaaaactctctg

SEQ ID NO: 916029 - DNA, 15 bp, Homo sapiens
attaaaactctctgg

SEQ ID NO: 916030 - DNA, 15 bp, Homo sapiens
ttaaaactctctgga

SEQ ID NO: 916031 - DNA, 15 bp, Homo sapiens
taaaactctctggac

SEQ ID NO: 916032 - DNA, 15 bp, Homo sapiens
aaaactctctggaca

SEQ ID NO: 916033 - DNA, 15 bp, Homo sapiens
aaactctctggacag

SEQ ID NO: 916034 - DNA, 15 bp, Homo sapiens
aactctctggacaga

SEQ ID NO: 916035 - DNA, 15 bp, Homo sapiens
actctctggacagaa

SEQ ID NO: 916036 - DNA, 15 bp, Homo sapiens
ctctctggacagaat

SEQ ID NO: 916037 - DNA, 15 bp, Homo sapiens
tctctggacagaatc

SEQ ID NO: 916038 - DNA, 15 bp, Homo sapiens
ctctggacagaatcc

SEQ ID NO: 916039 - DNA, 15 bp, Homo sapiens
tctggacagaatcct

SEQ ID NO: 916040 - DNA, 15 bp, Homo sapiens
ctggacagaatcctc

SEQ ID NO: 916041 - DNA, 15 bp, Homo sapiens
tggacagaatcctct

SEQ ID NO: 916042 - DNA, 15 bp, Homo sapiens
ggacagaatcctctt

SEQ ID NO: 916043 - DNA, 15 bp, Homo sapiens
gacagaatcctcttt

SEQ ID NO: 916044 - DNA, 15 bp, Homo sapiens
acagaatcctctttc

SEQ ID NO: 916045 - DNA, 15 bp, Homo sapiens
cagaatcctctttcc

SEQ ID NO: 916046 - DNA, 15 bp, Homo sapiens
agaatcctctttcct

SEQ ID NO: 916047 - DNA, 15 bp, Homo sapiens
gaatcctctttcctt

SEQ ID NO: 916048 - DNA, 15 bp, Homo sapiens
aatcctctttccttc

SEQ ID NO: 916049 - DNA, 15 bp, Homo sapiens
atcctctttccttca

SEQ ID NO: 916050 - DNA, 15 bp, Homo sapiens
tcctctttccttcac

SEQ ID NO: 916051 - DNA, 15 bp, Homo sapiens
cctctttccttcact

SEQ ID NO: 916052 - DNA, 15 bp, Homo sapiens
ctctttccttcactt

SEQ ID NO: 916053 - DNA, 15 bp, Homo sapiens
tctttccttcacttg

SEQ ID NO: 916054 - DNA, 15 bp, Homo sapiens
ctttccttcacttgg

SEQ ID NO: 916055 - DNA, 15 bp, Homo sapiens
tttccttcacttgga

SEQ ID NO: 916056 - DNA, 15 bp, Homo sapiens
ttccttcacttggat

SEQ ID NO: 916057 - DNA, 15 bp, Homo sapiens
tccttcacttggatt

SEQ ID NO: 916058 - DNA, 15 bp, Homo sapiens
ccttcacttggattt

SEQ ID NO: 916059 - DNA, 15 bp, Homo sapiens
cttcacttggatttc

SEQ ID NO: 916060 - DNA, 15 bp, Homo sapiens
ttcacttggatttct

SEQ ID NO: 916061 - DNA, 15 bp, Homo sapiens
tcacttggatttctg

SEQ ID NO: 916062 - DNA, 15 bp, Homo sapiens
cacttggatttctgc

SEQ ID NO: 916063 - DNA, 15 bp, Homo sapiens
acttggatttctgca

SEQ ID NO: 916064 - DNA, 15 bp, Homo sapiens
cttggatttctgcaa

SEQ ID NO: 916065 - DNA, 15 bp, Homo sapiens
ttggatttctgcaaa

SEQ ID NO: 916066 - DNA, 15 bp, Homo sapiens
tggatttctgcaaac

SEQ ID NO: 916067 - DNA, 15 bp, Homo sapiens
ggatttctgcaaaca

SEQ ID NO: 916068 - DNA, 15 bp, Homo sapiens
gatttctgcaaacag

SEQ ID NO: 916069 - DNA, 15 bp, Homo sapiens
atttctgcaaacaga

SEQ ID NO: 916070 - DNA, 15 bp, Homo sapiens
tttctgcaaacagaa

SEQ ID NO: 916071 - DNA, 15 bp, Homo sapiens
ttctgcaaacagaaa

SEQ ID NO: 916072 - DNA, 15 bp, Homo sapiens
tctgcaaacagaaag

SEQ ID NO: 916073 - DNA, 15 bp, Homo sapiens
ctgcaaacagaaagc

SEQ ID NO: 916074 - DNA, 15 bp, Homo sapiens
tgcaaacagaaagca

SEQ ID NO: 916075 - DNA, 15 bp, Homo sapiens
gcaaacagaaagcag

SEQ ID NO: 916076 - DNA, 15 bp, Homo sapiens
caaacagaaagcaga

SEQ ID NO: 916077 - DNA, 15 bp, Homo sapiens
aaacagaaagcagat

SEQ ID NO: 916078 - DNA, 15 bp, Homo sapiens
aacagaaagcagatt

SEQ ID NO: 916079 - DNA, 15 bp, Homo sapiens
acagaaagcagatta

SEQ ID NO: 916080 - DNA, 15 bp, Homo sapiens
cagaaagcagattat

SEQ ID NO: 916081 - DNA, 15 bp, Homo sapiens
agaaagcagattatt

SEQ ID NO: 916082 - DNA, 15 bp, Homo sapiens
gaaagcagattattc

SEQ ID NO: 916083 - DNA, 15 bp, Homo sapiens
aaagcagattattct

SEQ ID NO: 916084 - DNA, 15 bp, Homo sapiens
aagcagattattctc

SEQ ID NO: 916085 - DNA, 15 bp, Homo sapiens
agcagattattctcc

SEQ ID NO: 916086 - DNA, 15 bp, Homo sapiens
gcagattattctcct

SEQ ID NO: 916087 - DNA, 15 bp, Homo sapiens
cagattattctcctg

SEQ ID NO: 916088 - DNA, 15 bp, Homo sapiens
agattattctcctgg

SEQ ID NO: 916089 - DNA, 15 bp, Homo sapiens
gattattctcctggc

SEQ ID NO: 916090 - DNA, 15 bp, Homo sapiens
attattctcctggca

SEQ ID NO: 916091 - DNA, 15 bp, Homo sapiens
ttattctcctggcaa

SEQ ID NO: 916092 - DNA, 15 bp, Homo sapiens
tattctcctggcaaa

SEQ ID NO: 916093 - DNA, 15 bp, Homo sapiens
attctcctggcaaat

SEQ ID NO: 916094 - DNA, 15 bp, Homo sapiens
ttctcctggcaaata

SEQ ID NO: 916095 - DNA, 15 bp, Homo sapiens
tctcctggcaaatag

SEQ ID NO: 916096 - DNA, 15 bp, Homo sapiens
ctcctggcaaatagc

SEQ ID NO: 916097 - DNA, 15 bp, Homo sapiens
tcctggcaaatagcg

SEQ ID NO: 916098 - DNA, 15 bp, Homo sapiens
cctggcaaatagcga

SEQ ID NO: 916099 - DNA, 15 bp, Homo sapiens
ctggcaaatagcgac

SEQ ID NO: 916100 - DNA, 15 bp, Homo sapiens
tggcaaatagcgact

SEQ ID NO: 916101 - DNA, 15 bp, Homo sapiens
ggcaaatagcgactc

SEQ ID NO: 916102 - DNA, 15 bp, Homo sapiens
gcaaatagcgactct

SEQ ID NO: 916103 - DNA, 15 bp, Homo sapiens
caaatagcgactcta

SEQ ID NO: 916104 - DNA, 15 bp, Homo sapiens
aaatagcgactctag

SEQ ID NO: 916105 - DNA, 15 bp, Homo sapiens
aatagcgactctaga

SEQ ID NO: 916106 - DNA, 15 bp, Homo sapiens
atagcgactctagaa

SEQ ID NO: 916107 - DNA, 15 bp, Homo sapiens
tagcgactctagaaa

SEQ ID NO: 916108 - DNA, 15 bp, Homo sapiens
agcgactctagaaac

SEQ ID NO: 916109 - DNA, 15 bp, Homo sapiens
gcgactctagaaacg

SEQ ID NO: 916110 - DNA, 15 bp, Homo sapiens
cgactctagaaacgc

SEQ ID NO: 916111 - DNA, 15 bp, Homo sapiens
gactctagaaacgct

SEQ ID NO: 916112 - DNA, 15 bp, Homo sapiens
actctagaaacgctt

SEQ ID NO: 916113 - DNA, 15 bp, Homo sapiens
ctctagaaacgctta

SEQ ID NO: 916114 - DNA, 15 bp, Homo sapiens
tctagaaacgcttat

SEQ ID NO: 916115 - DNA, 15 bp, Homo sapiens
ctagaaacgcttatg

SEQ ID NO: 916116 - DNA, 15 bp, Homo sapiens
tagaaacgcttatgt

SEQ ID NO: 916117 - DNA, 15 bp, Homo sapiens
agaaacgcttatgtt

SEQ ID NO: 916118 - DNA, 15 bp, Homo sapiens
gaaacgcttatgttt

SEQ ID NO: 916119 - DNA, 15 bp, Homo sapiens
aaacgcttatgtttt

SEQ ID NO: 916120 - DNA, 15 bp, Homo sapiens
aacgcttatgttttt

SEQ ID NO: 916121 - DNA, 15 bp, Homo sapiens
acgcttatgtttttc

SEQ ID NO: 916122 - DNA, 15 bp, Homo sapiens
cgcttatgtttttca

SEQ ID NO: 916123 - DNA, 15 bp, Homo sapiens
gcttatgtttttcag

SEQ ID NO: 916124 - DNA, 15 bp, Homo sapiens
cttatgtttttcaga

SEQ ID NO: 916125 - DNA, 15 bp, Homo sapiens
ttatgtttttcagac

SEQ ID NO: 916126 - DNA, 15 bp, Homo sapiens
tatgtttttcagact

SEQ ID NO: 916127 - DNA, 15 bp, Homo sapiens
atgtttttcagactt

SEQ ID NO: 916128 - DNA, 15 bp, Homo sapiens
tgtttttcagacttt

SEQ ID NO: 916129 - DNA, 15 bp, Homo sapiens
gtttttcagactttg

SEQ ID NO: 916130 - DNA, 15 bp, Homo sapiens
tttttcagactttgg

SEQ ID NO: 916131 - DNA, 15 bp, Homo sapiens
ttttcagactttggc

SEQ ID NO: 916132 - DNA, 15 bp, Homo sapiens
tttcagactttggca

SEQ ID NO: 916133 - DNA, 15 bp, Homo sapiens
ttcagactttggcag

SEQ ID NO: 916134 - DNA, 15 bp, Homo sapiens
tcagactttggcaga

SEQ ID NO: 916135 - DNA, 15 bp, Homo sapiens
cagactttggcagaa

SEQ ID NO: 916136 - DNA, 15 bp, Homo sapiens
agactttggcagaac

SEQ ID NO: 916137 - DNA, 15 bp, Homo sapiens
gactttggcagaact

SEQ ID NO: 916138 - DNA, 15 bp, Homo sapiens
actttggcagaactt

SEQ ID NO: 916139 - DNA, 15 bp, Homo sapiens
ctttggcagaacttg

SEQ ID NO: 916140 - DNA, 15 bp, Homo sapiens
tttggcagaacttgt

SEQ ID NO: 916141 - DNA, 15 bp, Homo sapiens
ttggcagaacttgtt

SEQ ID NO: 916142 - DNA, 15 bp, Homo sapiens
tggcagaacttgtta

SEQ ID NO: 916143 - DNA, 15 bp, Homo sapiens
ggcagaacttgttaa

SEQ ID NO: 916144 - DNA, 15 bp, Homo sapiens
gcagaacttgttaag

SEQ ID NO: 916145 - DNA, 15 bp, Homo sapiens
cagaacttgttaaga

SEQ ID NO: 916146 - DNA, 15 bp, Homo sapiens
agaacttgttaagaa

SEQ ID NO: 916147 - DNA, 15 bp, Homo sapiens
gaacttgttaagaac

SEQ ID NO: 916148 - DNA, 15 bp, Homo sapiens
aacttgttaagaaca

SEQ ID NO: 916149 - DNA, 15 bp, Homo sapiens
acttgttaagaacag

SEQ ID NO: 916150 - DNA, 15 bp, Homo sapiens
cttgttaagaacagc

SEQ ID NO: 916151 - DNA, 15 bp, Homo sapiens
ttgttaagaacagca

SEQ ID NO: 916152 - DNA, 15 bp, Homo sapiens
tgttaagaacagcat

SEQ ID NO: 916153 - DNA, 15 bp, Homo sapiens
gttaagaacagcatc

SEQ ID NO: 916154 - DNA, 15 bp, Homo sapiens
ttaagaacagcatca

SEQ ID NO: 916155 - DNA, 15 bp, Homo sapiens
taagaacagcatcat

SEQ ID NO: 916156 - DNA, 15 bp, Homo sapiens
aagaacagcatcatc

SEQ ID NO: 916157 - DNA, 15 bp, Homo sapiens
agaacagcatcatca

SEQ ID NO: 916158 - DNA, 15 bp, Homo sapiens
gaacagcatcatcat

SEQ ID NO: 916159 - DNA, 15 bp, Homo sapiens
aacagcatcatcata

SEQ ID NO: 916160 - DNA, 15 bp, Homo sapiens
acagcatcatcataa

SEQ ID NO: 916161 - DNA, 15 bp, Homo sapiens
cagcatcatcataat

SEQ ID NO: 916162 - DNA, 15 bp, Homo sapiens
agcatcatcataata

SEQ ID NO: 916163 - DNA, 15 bp, Homo sapiens
gcatcatcataatac

SEQ ID NO: 916164 - DNA, 15 bp, Homo sapiens
catcatcataataca

SEQ ID NO: 916165 - DNA, 15 bp, Homo sapiens
atcatcataatacat

SEQ ID NO: 916166 - DNA, 15 bp, Homo sapiens
tcatcataatacatt

SEQ ID NO: 916167 - DNA, 15 bp, Homo sapiens
catcataatacattt

SEQ ID NO: 916168 - DNA, 15 bp, Homo sapiens
atcataatacatttg

SEQ ID NO: 916169 - DNA, 15 bp, Homo sapiens
tcataatacatttgt

SEQ ID NO: 916170 - DNA, 15 bp, Homo sapiens
cataatacatttgta

SEQ ID NO: 916171 - DNA, 15 bp, Homo sapiens
ataatacatttgtac

SEQ ID NO: 916172 - DNA, 15 bp, Homo sapiens
taatacatttgtaca

SEQ ID NO: 916173 - DNA, 15 bp, Homo sapiens
aatacatttgtacaa

SEQ ID NO: 916174 - DNA, 15 bp, Homo sapiens
atacatttgtacaaa

SEQ ID NO: 916175 - DNA, 15 bp, Homo sapiens
tacatttgtacaaac

SEQ ID NO: 916176 - DNA, 15 bp, Homo sapiens
acatttgtacaaact

SEQ ID NO: 916177 - DNA, 15 bp, Homo sapiens
catttgtacaaactc

SEQ ID NO: 916178 - DNA, 15 bp, Homo sapiens
atttgtacaaactcg

SEQ ID NO: 916179 - DNA, 15 bp, Homo sapiens
tttgtacaaactcga

SEQ ID NO: 916180 - DNA, 15 bp, Homo sapiens
ttgtacaaactcgaa

SEQ ID NO: 916181 - DNA, 15 bp, Homo sapiens
tgtacaaactcgaat

SEQ ID NO: 916182 - DNA, 15 bp, Homo sapiens
gtacaaactcgaatt

SEQ ID NO: 916183 - DNA, 15 bp, Homo sapiens
tacaaactcgaattt

SEQ ID NO: 916184 - DNA, 15 bp, Homo sapiens
acaaactcgaatttc

SEQ ID NO: 916185 - DNA, 15 bp, Homo sapiens
caaactcgaatttca

SEQ ID NO: 916186 - DNA, 15 bp, Homo sapiens
aaactcgaatttcag

SEQ ID NO: 916187 - DNA, 15 bp, Homo sapiens
aactcgaatttcagt

SEQ ID NO: 916188 - DNA, 15 bp, Homo sapiens
actcgaatttcagtg

SEQ ID NO: 916189 - DNA, 15 bp, Homo sapiens
ctcgaatttcagtgg

SEQ ID NO: 916190 - DNA, 15 bp, Homo sapiens
tcgaatttcagtggc

SEQ ID NO: 916191 - DNA, 15 bp, Homo sapiens
cgaatttcagtggct

SEQ ID NO: 916192 - DNA, 15 bp, Homo sapiens
gaatttcagtggctc

SEQ ID NO: 916193 - DNA, 15 bp, Homo sapiens
aatttcagtggctct

SEQ ID NO: 916194 - DNA, 15 bp, Homo sapiens
atttcagtggctctt

SEQ ID NO: 916195 - DNA, 15 bp, Homo sapiens
tttcagtggctcttt

SEQ ID NO: 916196 - DNA, 15 bp, Homo sapiens
ttcagtggctctttt

SEQ ID NO: 916197 - DNA, 15 bp, Homo sapiens
tcagtggctcttttg

SEQ ID NO: 916198 - DNA, 15 bp, Homo sapiens
cagtggctcttttgt

SEQ ID NO: 916199 - DNA, 15 bp, Homo sapiens
agtggctcttttgtc

SEQ ID NO: 916200 - DNA, 15 bp, Homo sapiens
gtggctcttttgtcc

SEQ ID NO: 916201 - DNA, 15 bp, Homo sapiens
tggctcttttgtccc

SEQ ID NO: 916202 - DNA, 15 bp, Homo sapiens
ggctcttttgtccca

SEQ ID NO: 916203 - DNA, 15 bp, Homo sapiens
gctcttttgtcccac

SEQ ID NO: 916204 - DNA, 15 bp, Homo sapiens
ctcttttgtcccaca

SEQ ID NO: 916205 - DNA, 15 bp, Homo sapiens
tcttttgtcccacat

SEQ ID NO: 916206 - DNA, 15 bp, Homo sapiens
cttttgtcccacatg

SEQ ID NO: 916207 - DNA, 15 bp, Homo sapiens
ttttgtcccacatga

SEQ ID NO: 916208 - DNA, 15 bp, Homo sapiens
tttgtcccacatgat

SEQ ID NO: 916209 - DNA, 15 bp, Homo sapiens
ttgtcccacatgatg

SEQ ID NO: 916210 - DNA, 15 bp, Homo sapiens
tgtcccacatgatgc

SEQ ID NO: 916211 - DNA, 15 bp, Homo sapiens
gtcccacatgatgca

SEQ ID NO: 916212 - DNA, 15 bp, Homo sapiens
tcccacatgatgcat

SEQ ID NO: 916213 - DNA, 15 bp, Homo sapiens
cccacatgatgcatg

SEQ ID NO: 916214 - DNA, 15 bp, Homo sapiens
ccacatgatgcatga

SEQ ID NO: 916215 - DNA, 15 bp, Homo sapiens
cacatgatgcatgat

SEQ ID NO: 916216 - DNA, 15 bp, Homo sapiens
acatgatgcatgatg

SEQ ID NO: 916217 - DNA, 15 bp, Homo sapiens
catgatgcatgatga

SEQ ID NO: 916218 - DNA, 15 bp, Homo sapiens
atgatgcatgatgaa

SEQ ID NO: 916219 - DNA, 15 bp, Homo sapiens
tgatgcatgatgaaa

SEQ ID NO: 916220 - DNA, 15 bp, Homo sapiens
gatgcatgatgaaat

SEQ ID NO: 916221 - DNA, 15 bp, Homo sapiens
atgcatgatgaaatt

SEQ ID NO: 916222 - DNA, 15 bp, Homo sapiens
tgcatgatgaaattt

SEQ ID NO: 916223 - DNA, 15 bp, Homo sapiens
gcatgatgaaattta

SEQ ID NO: 916224 - DNA, 15 bp, Homo sapiens
catgatgaaatttat

SEQ ID NO: 916225 - DNA, 15 bp, Homo sapiens
atgatgaaatttata

SEQ ID NO: 916226 - DNA, 15 bp, Homo sapiens
tgatgaaatttataa

SEQ ID NO: 916227 - DNA, 15 bp, Homo sapiens
gatgaaatttataaa

SEQ ID NO: 916228 - DNA, 15 bp, Homo sapiens
atgaaatttataaag

SEQ ID NO: 916229 - DNA, 15 bp, Homo sapiens
tgaaatttataaagg

SEQ ID NO: 916230 - DNA, 15 bp, Homo sapiens
gaaatttataaaggt

SEQ ID NO: 916231 - DNA, 15 bp, Homo sapiens
aaatttataaaggtc

SEQ ID NO: 916232 - DNA, 15 bp, Homo sapiens
aatttataaaggtct

SEQ ID NO: 916233 - DNA, 15 bp, Homo sapiens
atttataaaggtctg

SEQ ID NO: 916234 - DNA, 15 bp, Homo sapiens
tttataaaggtctgt

SEQ ID NO: 916235 - DNA, 15 bp, Homo sapiens
ttataaaggtctgtt

SEQ ID NO: 916236 - DNA, 15 bp, Homo sapiens
tataaaggtctgttt

SEQ ID NO: 916237 - DNA, 15 bp, Homo sapiens
ataaaggtctgtttt

SEQ ID NO: 916238 - DNA, 15 bp, Homo sapiens
taaaggtctgtttta

SEQ ID NO: 916239 - DNA, 15 bp, Homo sapiens
aaaggtctgttttac

SEQ ID NO: 916240 - DNA, 15 bp, Homo sapiens
aaggtctgttttacc

SEQ ID NO: 916241 - DNA, 15 bp, Homo sapiens
aggtctgttttaccc

SEQ ID NO: 916242 - DNA, 15 bp, Homo sapiens
ggtctgttttacccc

SEQ ID NO: 916243 - DNA, 15 bp, Homo sapiens
gtctgttttaccccc

SEQ ID NO: 916244 - DNA, 15 bp, Homo sapiens
tctgttttaccccca

SEQ ID NO: 916245 - DNA, 15 bp, Homo sapiens
ctgttttacccccac

SEQ ID NO: 916246 - DNA, 15 bp, Homo sapiens
tgttttacccccaca

SEQ ID NO: 916247 - DNA, 15 bp, Homo sapiens
gttttacccccacag

SEQ ID NO: 916248 - DNA, 15 bp, Homo sapiens
ttttacccccacagg

SEQ ID NO: 916249 - DNA, 15 bp, Homo sapiens
tttacccccacaggg

SEQ ID NO: 916250 - DNA, 15 bp, Homo sapiens
ttacccccacagggt

SEQ ID NO: 916251 - DNA, 15 bp, Homo sapiens
tacccccacagggtc

SEQ ID NO: 916252 - DNA, 15 bp, Homo sapiens
acccccacagggtca

SEQ ID NO: 916253 - DNA, 15 bp, Homo sapiens
cccccacagggtcat

SEQ ID NO: 916254 - DNA, 15 bp, Homo sapiens
ccccacagggtcatt

SEQ ID NO: 916255 - DNA, 15 bp, Homo sapiens
cccacagggtcattt

SEQ ID NO: 916256 - DNA, 15 bp, Homo sapiens
ccacagggtcatttc

SEQ ID NO: 916257 - DNA, 15 bp, Homo sapiens
cacagggtcatttct

SEQ ID NO: 916258 - DNA, 15 bp, Homo sapiens
acagggtcatttctt

SEQ ID NO: 916259 - DNA, 15 bp, Homo sapiens
cagggtcatttcttt

SEQ ID NO: 916260 - DNA, 15 bp, Homo sapiens
agggtcatttctttt

SEQ ID NO: 916261 - DNA, 15 bp, Homo sapiens
gggtcatttcttttg

SEQ ID NO: 916262 - DNA, 15 bp, Homo sapiens
ggtcatttcttttgt

SEQ ID NO: 916263 - DNA, 15 bp, Homo sapiens
gtcatttcttttgtg

SEQ ID NO: 916264 - DNA, 15 bp, Homo sapiens
tcatttcttttgtgt

SEQ ID NO: 916265 - DNA, 15 bp, Homo sapiens
catttcttttgtgtt

SEQ ID NO: 916266 - DNA, 15 bp, Homo sapiens
atttcttttgtgttc

SEQ ID NO: 916267 - DNA, 15 bp, Homo sapiens
tttcttttgtgttcc

SEQ ID NO: 916268 - DNA, 15 bp, Homo sapiens
ttcttttgtgttcct

SEQ ID NO: 916269 - DNA, 15 bp, Homo sapiens
tcttttgtgttccta

SEQ ID NO: 916270 - DNA, 15 bp, Homo sapiens
cttttgtgttcctac

SEQ ID NO: 916271 - DNA, 15 bp, Homo sapiens
ttttgtgttcctaca

SEQ ID NO: 916272 - DNA, 15 bp, Homo sapiens
tttgtgttcctacag

SEQ ID NO: 916273 - DNA, 15 bp, Homo sapiens
ttgtgttcctacaga

SEQ ID NO: 916274 - DNA, 15 bp, Homo sapiens
tgtgttcctacagag

SEQ ID NO: 916275 - DNA, 15 bp, Homo sapiens
gtgttcctacagagc

SEQ ID NO: 916276 - DNA, 15 bp, Homo sapiens
tgttcctacagagcc

SEQ ID NO: 916277 - DNA, 15 bp, Homo sapiens
gttcctacagagcca

SEQ ID NO: 916278 - DNA, 15 bp, Homo sapiens
ttcctacagagccaa

SEQ ID NO: 916279 - DNA, 15 bp, Homo sapiens
tcctacagagccaat

SEQ ID NO: 916280 - DNA, 15 bp, Homo sapiens
cctacagagccaata

SEQ ID NO: 916281 - DNA, 15 bp, Homo sapiens
ctacagagccaatag

SEQ ID NO: 916282 - DNA, 15 bp, Homo sapiens
tacagagccaatagg

SEQ ID NO: 916283 - DNA, 15 bp, Homo sapiens
acagagccaataggc

SEQ ID NO: 916284 - DNA, 15 bp, Homo sapiens
cagagccaataggct

SEQ ID NO: 916285 - DNA, 15 bp, Homo sapiens
agagccaataggctt

SEQ ID NO: 916286 - DNA, 15 bp, Homo sapiens
gagccaataggcttc

SEQ ID NO: 916287 - DNA, 15 bp, Homo sapiens
agccaataggcttca

SEQ ID NO: 916288 - DNA, 15 bp, Homo sapiens
gccaataggcttcat

SEQ ID NO: 916289 - DNA, 15 bp, Homo sapiens
ccaataggcttcatt

SEQ ID NO: 916290 - DNA, 15 bp, Homo sapiens
caataggcttcattt

SEQ ID NO: 916291 - DNA, 15 bp, Homo sapiens
aataggcttcattta

SEQ ID NO: 916292 - DNA, 15 bp, Homo sapiens
ataggcttcatttaa

SEQ ID NO: 916293 - DNA, 15 bp, Homo sapiens
taggcttcatttaag

SEQ ID NO: 916294 - DNA, 15 bp, Homo sapiens
aggcttcatttaagt

SEQ ID NO: 916295 - DNA, 15 bp, Homo sapiens
ggcttcatttaagtc

SEQ ID NO: 916296 - DNA, 15 bp, Homo sapiens
gcttcatttaagtcc

SEQ ID NO: 916297 - DNA, 15 bp, Homo sapiens
cttcatttaagtcca

SEQ ID NO: 916298 - DNA, 15 bp, Homo sapiens
ttcatttaagtccaa

SEQ ID NO: 916299 - DNA, 15 bp, Homo sapiens
tcatttaagtccaag

SEQ ID NO: 916300 - DNA, 15 bp, Homo sapiens
catttaagtccaagt

SEQ ID NO: 916301 - DNA, 15 bp, Homo sapiens
atttaagtccaagtt

SEQ ID NO: 916302 - DNA, 15 bp, Homo sapiens
tttaagtccaagtta

SEQ ID NO: 916303 - DNA, 15 bp, Homo sapiens
ttaagtccaagttat

SEQ ID NO: 916304 - DNA, 15 bp, Homo sapiens
taagtccaagttatt

SEQ ID NO: 916305 - DNA, 15 bp, Homo sapiens
aagtccaagttatta

SEQ ID NO: 916306 - DNA, 15 bp, Homo sapiens
agtccaagttattat

SEQ ID NO: 916307 - DNA, 15 bp, Homo sapiens
gtccaagttattata

SEQ ID NO: 916308 - DNA, 15 bp, Homo sapiens
tccaagttattatat

SEQ ID NO: 916309 - DNA, 15 bp, Homo sapiens
ccaagttattatatt

SEQ ID NO: 916310 - DNA, 15 bp, Homo sapiens
caagttattatatta

SEQ ID NO: 916311 - DNA, 15 bp, Homo sapiens
aagttattatattaa

SEQ ID NO: 916312 - DNA, 15 bp, Homo sapiens
agttattatattaac

SEQ ID NO: 916313 - DNA, 15 bp, Homo sapiens
gttattatattaacc

SEQ ID NO: 916314 - DNA, 15 bp, Homo sapiens
ttattatattaacca

SEQ ID NO: 916315 - DNA, 15 bp, Homo sapiens
tattatattaaccat

SEQ ID NO: 916316 - DNA, 15 bp, Homo sapiens
attatattaaccatc

SEQ ID NO: 916317 - DNA, 15 bp, Homo sapiens
ttatattaaccatcc

SEQ ID NO: 916318 - DNA, 15 bp, Homo sapiens
tatattaaccatccc

SEQ ID NO: 916319 - DNA, 15 bp, Homo sapiens
atattaaccatccct

SEQ ID NO: 916320 - DNA, 15 bp, Homo sapiens
tattaaccatccctt

SEQ ID NO: 916321 - DNA, 15 bp, Homo sapiens
attaaccatcccttt

SEQ ID NO: 916322 - DNA, 15 bp, Homo sapiens
ttaaccatccctttc

SEQ ID NO: 916323 - DNA, 15 bp, Homo sapiens
taaccatccctttca

SEQ ID NO: 916324 - DNA, 15 bp, Homo sapiens
aaccatccctttcac

SEQ ID NO: 916325 - DNA, 15 bp, Homo sapiens
accatccctttcact

SEQ ID NO: 916326 - DNA, 15 bp, Homo sapiens
ccatccctttcacta

SEQ ID NO: 916327 - DNA, 15 bp, Homo sapiens
catccctttcactag

SEQ ID NO: 916328 - DNA, 15 bp, Homo sapiens
atccctttcactaga

SEQ ID NO: 916329 - DNA, 15 bp, Homo sapiens
tccctttcactagac

SEQ ID NO: 916330 - DNA, 15 bp, Homo sapiens
ccctttcactagact

SEQ ID NO: 916331 - DNA, 15 bp, Homo sapiens
cctttcactagacta

SEQ ID NO: 916332 - DNA, 15 bp, Homo sapiens
ctttcactagactag

SEQ ID NO: 916333 - DNA, 15 bp, Homo sapiens
tttcactagactaga

SEQ ID NO: 916334 - DNA, 15 bp, Homo sapiens
ttcactagactagag

SEQ ID NO: 916335 - DNA, 15 bp, Homo sapiens
tcactagactagaga

SEQ ID NO: 916336 - DNA, 15 bp, Homo sapiens
cactagactagagaa

SEQ ID NO: 916337 - DNA, 15 bp, Homo sapiens
actagactagagaac

SEQ ID NO: 916338 - DNA, 15 bp, Homo sapiens
ctagactagagaact

SEQ ID NO: 916339 - DNA, 15 bp, Homo sapiens
tagactagagaactt

SEQ ID NO: 916340 - DNA, 15 bp, Homo sapiens
agactagagaacttc

SEQ ID NO: 916341 - DNA, 15 bp, Homo sapiens
gactagagaacttct

SEQ ID NO: 916342 - DNA, 15 bp, Homo sapiens
actagagaacttctt

SEQ ID NO: 916343 - DNA, 15 bp, Homo sapiens
ctagagaacttcttt

SEQ ID NO: 916344 - DNA, 15 bp, Homo sapiens
tagagaacttctttt

SEQ ID NO: 916345 - DNA, 15 bp, Homo sapiens
agagaacttcttttt

SEQ ID NO: 916346 - DNA, 15 bp, Homo sapiens
gagaacttctttttc

SEQ ID NO: 916347 - DNA, 15 bp, Homo sapiens
agaacttctttttca

SEQ ID NO: 916348 - DNA, 15 bp, Homo sapiens
gaacttctttttcat

SEQ ID NO: 916349 - DNA, 15 bp, Homo sapiens
aacttctttttcatg

SEQ ID NO: 916350 - DNA, 15 bp, Homo sapiens
acttctttttcatgg

SEQ ID NO: 916351 - DNA, 15 bp, Homo sapiens
cttctttttcatggt

SEQ ID NO: 916352 - DNA, 15 bp, Homo sapiens
ttctttttcatggtc

SEQ ID NO: 916353 - DNA, 15 bp, Homo sapiens
tctttttcatggtcc

SEQ ID NO: 916354 - DNA, 15 bp, Homo sapiens
ctttttcatggtcca

SEQ ID NO: 916355 - DNA, 15 bp, Homo sapiens
tttttcatggtccat

SEQ ID NO: 916356 - DNA, 15 bp, Homo sapiens
ttttcatggtccata

SEQ ID NO: 916357 - DNA, 15 bp, Homo sapiens
tttcatggtccatat

SEQ ID NO: 916358 - DNA, 15 bp, Homo sapiens
ttcatggtccatatc

SEQ ID NO: 916359 - DNA, 15 bp, Homo sapiens
tcatggtccatatcg

SEQ ID NO: 916360 - DNA, 15 bp, Homo sapiens
catggtccatatcgt

SEQ ID NO: 916361 - DNA, 15 bp, Homo sapiens
atggtccatatcgtg

SEQ ID NO: 916362 - DNA, 15 bp, Homo sapiens
tggtccatatcgtgg

SEQ ID NO: 916363 - DNA, 15 bp, Homo sapiens
ggtccatatcgtggc

SEQ ID NO: 916364 - DNA, 15 bp, Homo sapiens
gtccatatcgtggcc

SEQ ID NO: 916365 - DNA, 15 bp, Homo sapiens
tccatatcgtggcca

SEQ ID NO: 916366 - DNA, 15 bp, Homo sapiens
ccatatcgtggccac

SEQ ID NO: 916367 - DNA, 15 bp, Homo sapiens
catatcgtggccaca

SEQ ID NO: 916368 - DNA, 15 bp, Homo sapiens
atatcgtggccacaa

SEQ ID NO: 916369 - DNA, 15 bp, Homo sapiens
tatcgtggccacaat

SEQ ID NO: 916370 - DNA, 15 bp, Homo sapiens
atcgtggccacaatg

SEQ ID NO: 916371 - DNA, 15 bp, Homo sapiens
tcgtggccacaatgc

SEQ ID NO: 916372 - DNA, 15 bp, Homo sapiens
cgtggccacaatgca

SEQ ID NO: 916373 - DNA, 15 bp, Homo sapiens
gtggccacaatgcat

SEQ ID NO: 916374 - DNA, 15 bp, Homo sapiens
tggccacaatgcatc

SEQ ID NO: 916375 - DNA, 15 bp, Homo sapiens
ggccacaatgcatca

SEQ ID NO: 916376 - DNA, 15 bp, Homo sapiens
gccacaatgcatcaa

SEQ ID NO: 916377 - DNA, 15 bp, Homo sapiens
ccacaatgcatcaaa

SEQ ID NO: 916378 - DNA, 15 bp, Homo sapiens
cacaatgcatcaaag

SEQ ID NO: 916379 - DNA, 15 bp, Homo sapiens
acaatgcatcaaagg

SEQ ID NO: 916380 - DNA, 15 bp, Homo sapiens
caatgcatcaaaggt

SEQ ID NO: 916381 - DNA, 15 bp, Homo sapiens
aatgcatcaaaggta

SEQ ID NO: 916382 - DNA, 15 bp, Homo sapiens
atgcatcaaaggtag

SEQ ID NO: 916383 - DNA, 15 bp, Homo sapiens
tgcatcaaaggtagg

SEQ ID NO: 916384 - DNA, 15 bp, Homo sapiens
gcatcaaaggtagga

SEQ ID NO: 916385 - DNA, 15 bp, Homo sapiens
catcaaaggtaggat

SEQ ID NO: 916386 - DNA, 15 bp, Homo sapiens
atcaaaggtaggatc

SEQ ID NO: 916387 - DNA, 15 bp, Homo sapiens
tcaaaggtaggatca

SEQ ID NO: 916388 - DNA, 15 bp, Homo sapiens
caaaggtaggatcat

SEQ ID NO: 916389 - DNA, 15 bp, Homo sapiens
aaaggtaggatcatt

SEQ ID NO: 916390 - DNA, 15 bp, Homo sapiens
aaggtaggatcattg

SEQ ID NO: 916391 - DNA, 15 bp, Homo sapiens
aggtaggatcattgt

SEQ ID NO: 916392 - DNA, 15 bp, Homo sapiens
ggtaggatcattgtt

SEQ ID NO: 916393 - DNA, 15 bp, Homo sapiens
gtaggatcattgttt

SEQ ID NO: 916394 - DNA, 15 bp, Homo sapiens
taggatcattgtttt

SEQ ID NO: 916395 - DNA, 15 bp, Homo sapiens
aggatcattgttttc

SEQ ID NO: 916396 - DNA, 15 bp, Homo sapiens
ggatcattgttttcc

SEQ ID NO: 916397 - DNA, 15 bp, Homo sapiens
gatcattgttttcca

SEQ ID NO: 916398 - DNA, 15 bp, Homo sapiens
atcattgttttccac

SEQ ID NO: 916399 - DNA, 15 bp, Homo sapiens
tcattgttttccact

SEQ ID NO: 916400 - DNA, 15 bp, Homo sapiens
cattgttttccactt

SEQ ID NO: 916401 - DNA, 15 bp, Homo sapiens
attgttttccactta

SEQ ID NO: 916402 - DNA, 15 bp, Homo sapiens
ttgttttccacttac

SEQ ID NO: 916403 - DNA, 15 bp, Homo sapiens
tgttttccacttact

SEQ ID NO: 916404 - DNA, 15 bp, Homo sapiens
gttttccacttactt

SEQ ID NO: 916405 - DNA, 15 bp, Homo sapiens
ttttccacttacttt

SEQ ID NO: 916406 - DNA, 15 bp, Homo sapiens
tttccacttactttt

SEQ ID NO: 916407 - DNA, 15 bp, Homo sapiens
ttccacttacttttg

SEQ ID NO: 916408 - DNA, 15 bp, Homo sapiens
tccacttacttttgc

SEQ ID NO: 916409 - DNA, 15 bp, Homo sapiens
ccacttacttttgct

SEQ ID NO: 916410 - DNA, 15 bp, Homo sapiens
cacttacttttgcta

SEQ ID NO: 916411 - DNA, 15 bp, Homo sapiens
acttacttttgctac

SEQ ID NO: 916412 - DNA, 15 bp, Homo sapiens
cttacttttgctact

SEQ ID NO: 916413 - DNA, 15 bp, Homo sapiens
ttacttttgctacta

SEQ ID NO: 916414 - DNA, 15 bp, Homo sapiens
tacttttgctactag

SEQ ID NO: 916415 - DNA, 15 bp, Homo sapiens
acttttgctactaga

SEQ ID NO: 916416 - DNA, 15 bp, Homo sapiens
cttttgctactagac

SEQ ID NO: 916417 - DNA, 15 bp, Homo sapiens
ttttgctactagacc

SEQ ID NO: 916418 - DNA, 15 bp, Homo sapiens
tttgctactagaccc

SEQ ID NO: 916419 - DNA, 15 bp, Homo sapiens
ttgctactagacccc

SEQ ID NO: 916420 - DNA, 15 bp, Homo sapiens
tgctactagaccccc

SEQ ID NO: 916421 - DNA, 15 bp, Homo sapiens
gctactagaccccca

SEQ ID NO: 916422 - DNA, 15 bp, Homo sapiens
ctactagacccccaa

SEQ ID NO: 916423 - DNA, 15 bp, Homo sapiens
tactagacccccaaa

SEQ ID NO: 916424 - DNA, 15 bp, Homo sapiens
actagacccccaaat

SEQ ID NO: 916425 - DNA, 15 bp, Homo sapiens
ctagacccccaaatt

SEQ ID NO: 916426 - DNA, 15 bp, Homo sapiens
tagacccccaaattc

SEQ ID NO: 916427 - DNA, 15 bp, Homo sapiens
agacccccaaattct

SEQ ID NO: 916428 - DNA, 15 bp, Homo sapiens
gacccccaaattcta

SEQ ID NO: 916429 - DNA, 15 bp, Homo sapiens
acccccaaattctaa

SEQ ID NO: 916430 - DNA, 15 bp, Homo sapiens
cccccaaattctaat

SEQ ID NO: 916431 - DNA, 15 bp, Homo sapiens
ccccaaattctaata

SEQ ID NO: 916432 - DNA, 15 bp, Homo sapiens
cccaaattctaataa

SEQ ID NO: 916433 - DNA, 15 bp, Homo sapiens
ccaaattctaataaa

SEQ ID NO: 916434 - DNA, 15 bp, Homo sapiens
caaattctaataaaa

SEQ ID NO: 916435 - DNA, 15 bp, Homo sapiens
aaattctaataaaag

SEQ ID NO: 916436 - DNA, 15 bp, Homo sapiens
aattctaataaaaga

SEQ ID NO: 916437 - DNA, 15 bp, Homo sapiens
attctaataaaagaa

SEQ ID NO: 916438 - DNA, 15 bp, Homo sapiens
ttctaataaaagaaa

SEQ ID NO: 916439 - DNA, 15 bp, Homo sapiens
tctaataaaagaaat

SEQ ID NO: 916440 - DNA, 15 bp, Homo sapiens
ctaataaaagaaatt

SEQ ID NO: 916441 - DNA, 15 bp, Homo sapiens
taataaaagaaattt

SEQ ID NO: 916442 - DNA, 15 bp, Homo sapiens
aataaaagaaatttt

SEQ ID NO: 916443 - DNA, 15 bp, Homo sapiens
ataaaagaaattttt

SEQ ID NO: 916444 - DNA, 15 bp, Homo sapiens
taaaagaaattttta

SEQ ID NO: 916445 - DNA, 15 bp, Homo sapiens
aaaagaaatttttag

SEQ ID NO: 916446 - DNA, 15 bp, Homo sapiens
aaagaaatttttagg

SEQ ID NO: 916447 - DNA, 15 bp, Homo sapiens
aagaaatttttaggg

SEQ ID NO: 916448 - DNA, 15 bp, Homo sapiens
agaaatttttagggt

SEQ ID NO: 916449 - DNA, 15 bp, Homo sapiens
gaaatttttagggtt

SEQ ID NO: 916450 - DNA, 15 bp, Homo sapiens
aaatttttagggttg

SEQ ID NO: 916451 - DNA, 15 bp, Homo sapiens
aatttttagggttgg

SEQ ID NO: 916452 - DNA, 15 bp, Homo sapiens
atttttagggttggg

SEQ ID NO: 916453 - DNA, 15 bp, Homo sapiens
tttttagggttggga

SEQ ID NO: 916454 - DNA, 15 bp, Homo sapiens
ttttagggttgggaa

SEQ ID NO: 916455 - DNA, 15 bp, Homo sapiens
tttagggttgggaag

SEQ ID NO: 916456 - DNA, 15 bp, Homo sapiens
ttagggttgggaagg

SEQ ID NO: 916457 - DNA, 15 bp, Homo sapiens
tagggttgggaaggg

SEQ ID NO: 916458 - DNA, 15 bp, Homo sapiens
agggttgggaagggg

SEQ ID NO: 916459 - DNA, 15 bp, Homo sapiens
gggttgggaagggga

SEQ ID NO: 916460 - DNA, 15 bp, Homo sapiens
ggttgggaaggggag

SEQ ID NO: 916461 - DNA, 15 bp, Homo sapiens
gttgggaaggggaga

SEQ ID NO: 916462 - DNA, 15 bp, Homo sapiens
ttgggaaggggagag

SEQ ID NO: 916463 - DNA, 15 bp, Homo sapiens
tgggaaggggagaga

SEQ ID NO: 916464 - DNA, 15 bp, Homo sapiens
gggaaggggagagag

SEQ ID NO: 916465 - DNA, 15 bp, Homo sapiens
ggaaggggagagaga

SEQ ID NO: 916466 - DNA, 15 bp, Homo sapiens
gaaggggagagagac

SEQ ID NO: 916467 - DNA, 15 bp, Homo sapiens
aaggggagagagaca

SEQ ID NO: 916468 - DNA, 15 bp, Homo sapiens
aggggagagagacag

SEQ ID NO: 916469 - DNA, 15 bp, Homo sapiens
ggggagagagacagg

SEQ ID NO: 916470 - DNA, 15 bp, Homo sapiens
gggagagagacaggg

SEQ ID NO: 916471 - DNA, 15 bp, Homo sapiens
ggagagagacagggc

SEQ ID NO: 916472 - DNA, 15 bp, Homo sapiens
gagagagacagggct

SEQ ID NO: 916473 - DNA, 15 bp, Homo sapiens
agagagacagggctg

SEQ ID NO: 916474 - DNA, 15 bp, Homo sapiens
gagagacagggctgg

SEQ ID NO: 916475 - DNA, 15 bp, Homo sapiens
agagacagggctgga

SEQ ID NO: 916476 - DNA, 15 bp, Homo sapiens
gagacagggctggaa

SEQ ID NO: 916477 - DNA, 15 bp, Homo sapiens
agacagggctggaaa

SEQ ID NO: 916478 - DNA, 15 bp, Homo sapiens
gacagggctggaaac

SEQ ID NO: 916479 - DNA, 15 bp, Homo sapiens
acagggctggaaaca

SEQ ID NO: 916480 - DNA, 15 bp, Homo sapiens
cagggctggaaacag

SEQ ID NO: 916481 - DNA, 15 bp, Homo sapiens
agggctggaaacaga

SEQ ID NO: 916482 - DNA, 15 bp, Homo sapiens
gggctggaaacagat

SEQ ID NO: 916483 - DNA, 15 bp, Homo sapiens
ggctggaaacagatt

SEQ ID NO: 916484 - DNA, 15 bp, Homo sapiens
gctggaaacagattc

SEQ ID NO: 916485 - DNA, 15 bp, Homo sapiens
ctggaaacagattcc

SEQ ID NO: 916486 - DNA, 15 bp, Homo sapiens
tggaaacagattcca

SEQ ID NO: 916487 - DNA, 15 bp, Homo sapiens
ggaaacagattccat

SEQ ID NO: 916488 - DNA, 15 bp, Homo sapiens
gaaacagattccatg

SEQ ID NO: 916489 - DNA, 15 bp, Homo sapiens
aaacagattccatga

SEQ ID NO: 916490 - DNA, 15 bp, Homo sapiens
aacagattccatgat

SEQ ID NO: 916491 - DNA, 15 bp, Homo sapiens
acagattccatgatc

SEQ ID NO: 916492 - DNA, 15 bp, Homo sapiens
cagattccatgatca

SEQ ID NO: 916493 - DNA, 15 bp, Homo sapiens
agattccatgatcag

SEQ ID NO: 916494 - DNA, 15 bp, Homo sapiens
gattccatgatcagc

SEQ ID NO: 916495 - DNA, 15 bp, Homo sapiens
attccatgatcagca

SEQ ID NO: 916496 - DNA, 15 bp, Homo sapiens
ttccatgatcagcaa

SEQ ID NO: 916497 - DNA, 15 bp, Homo sapiens
tccatgatcagcaat

SEQ ID NO: 916498 - DNA, 15 bp, Homo sapiens
ccatgatcagcaatc

SEQ ID NO: 916499 - DNA, 15 bp, Homo sapiens
catgatcagcaatct

SEQ ID NO: 916500 - DNA, 15 bp, Homo sapiens
atgatcagcaatctt

SEQ ID NO: 916501 - DNA, 15 bp, Homo sapiens
tgatcagcaatctta

SEQ ID NO: 916502 - DNA, 15 bp, Homo sapiens
gatcagcaatcttat

SEQ ID NO: 916503 - DNA, 15 bp, Homo sapiens
atcagcaatcttatc

SEQ ID NO: 916504 - DNA, 15 bp, Homo sapiens
tcagcaatcttatct

SEQ ID NO: 916505 - DNA, 15 bp, Homo sapiens
cagcaatcttatctg

SEQ ID NO: 916506 - DNA, 15 bp, Homo sapiens
agcaatcttatctgg

SEQ ID NO: 916507 - DNA, 15 bp, Homo sapiens
gcaatcttatctggg

SEQ ID NO: 916508 - DNA, 15 bp, Homo sapiens
caatcttatctgggt

SEQ ID NO: 916509 - DNA, 15 bp, Homo sapiens
aatcttatctgggta

SEQ ID NO: 916510 - DNA, 15 bp, Homo sapiens
atcttatctgggtat

SEQ ID NO: 916511 - DNA, 15 bp, Homo sapiens
tcttatctgggtatt

SEQ ID NO: 916512 - DNA, 15 bp, Homo sapiens
cttatctgggtattt

SEQ ID NO: 916513 - DNA, 15 bp, Homo sapiens
ttatctgggtatttg

SEQ ID NO: 916514 - DNA, 15 bp, Homo sapiens
tatctgggtatttga

SEQ ID NO: 916515 - DNA, 15 bp, Homo sapiens
atctgggtatttgaa

SEQ ID NO: 916516 - DNA, 15 bp, Homo sapiens
tctgggtatttgaat

SEQ ID NO: 916517 - DNA, 15 bp, Homo sapiens
ctgggtatttgaata

SEQ ID NO: 916518 - DNA, 15 bp, Homo sapiens
tgggtatttgaatat

SEQ ID NO: 916519 - DNA, 15 bp, Homo sapiens
gggtatttgaatata

SEQ ID NO: 916520 - DNA, 15 bp, Homo sapiens
ggtatttgaatatac

SEQ ID NO: 916521 - DNA, 15 bp, Homo sapiens
gtatttgaatatacc

SEQ ID NO: 916522 - DNA, 15 bp, Homo sapiens
tatttgaatatacca

SEQ ID NO: 916523 - DNA, 15 bp, Homo sapiens
atttgaatataccaa

SEQ ID NO: 916524 - DNA, 15 bp, Homo sapiens
tttgaatataccaag

SEQ ID NO: 916525 - DNA, 15 bp, Homo sapiens
ttgaatataccaagc

SEQ ID NO: 916526 - DNA, 15 bp, Homo sapiens
tgaatataccaagcc

SEQ ID NO: 916527 - DNA, 15 bp, Homo sapiens
gaatataccaagcct

SEQ ID NO: 916528 - DNA, 15 bp, Homo sapiens
aatataccaagcctg

SEQ ID NO: 916529 - DNA, 15 bp, Homo sapiens
atataccaagcctgg

SEQ ID NO: 916530 - DNA, 15 bp, Homo sapiens
tataccaagcctggg

SEQ ID NO: 916531 - DNA, 15 bp, Homo sapiens
ataccaagcctggga

SEQ ID NO: 916532 - DNA, 15 bp, Homo sapiens
taccaagcctgggat

SEQ ID NO: 916533 - DNA, 15 bp, Homo sapiens
accaagcctgggata

SEQ ID NO: 916534 - DNA, 15 bp, Homo sapiens
ccaagcctgggatac

SEQ ID NO: 916535 - DNA, 15 bp, Homo sapiens
caagcctgggatact

SEQ ID NO: 916536 - DNA, 15 bp, Homo sapiens
aagcctgggatactt

SEQ ID NO: 916537 - DNA, 15 bp, Homo sapiens
agcctgggatacttc

SEQ ID NO: 916538 - DNA, 15 bp, Homo sapiens
gcctgggatacttcc

SEQ ID NO: 916539 - DNA, 15 bp, Homo sapiens
cctgggatacttcct

SEQ ID NO: 916540 - DNA, 15 bp, Homo sapiens
ctgggatacttcctg

SEQ ID NO: 916541 - DNA, 15 bp, Homo sapiens
tgggatacttcctgt

SEQ ID NO: 916542 - DNA, 15 bp, Homo sapiens
gggatacttcctgta

SEQ ID NO: 916543 - DNA, 15 bp, Homo sapiens
ggatacttcctgtaa

SEQ ID NO: 916544 - DNA, 15 bp, Homo sapiens
gatacttcctgtaac

SEQ ID NO: 916545 - DNA, 15 bp, Homo sapiens
atacttcctgtaaca

SEQ ID NO: 916546 - DNA, 15 bp, Homo sapiens
tacttcctgtaacac

SEQ ID NO: 916547 - DNA, 15 bp, Homo sapiens
acttcctgtaacact

SEQ ID NO: 916548 - DNA, 15 bp, Homo sapiens
cttcctgtaacactg

SEQ ID NO: 916549 - DNA, 15 bp, Homo sapiens
ttcctgtaacactgt

SEQ ID NO: 916550 - DNA, 15 bp, Homo sapiens
tcctgtaacactgtg

SEQ ID NO: 916551 - DNA, 15 bp, Homo sapiens
cctgtaacactgtgt

SEQ ID NO: 916552 - DNA, 15 bp, Homo sapiens
ctgtaacactgtgtt

SEQ ID NO: 916553 - DNA, 15 bp, Homo sapiens
tgtaacactgtgttc

SEQ ID NO: 916554 - DNA, 15 bp, Homo sapiens
gtaacactgtgttca

SEQ ID NO: 916555 - DNA, 15 bp, Homo sapiens
taacactgtgttcag

SEQ ID NO: 916556 - DNA, 15 bp, Homo sapiens
aacactgtgttcagg

SEQ ID NO: 916557 - DNA, 15 bp, Homo sapiens
acactgtgttcaggg

SEQ ID NO: 916558 - DNA, 15 bp, Homo sapiens
cactgtgttcagggt

SEQ ID NO: 916559 - DNA, 15 bp, Homo sapiens
actgtgttcagggtt

SEQ ID NO: 916560 - DNA, 15 bp, Homo sapiens
ctgtgttcagggttc

SEQ ID NO: 916561 - DNA, 15 bp, Homo sapiens
tgtgttcagggttca

SEQ ID NO: 916562 - DNA, 15 bp, Homo sapiens
gtgttcagggttcag

SEQ ID NO: 916563 - DNA, 15 bp, Homo sapiens
tgttcagggttcagt

SEQ ID NO: 916564 - DNA, 15 bp, Homo sapiens
gttcagggttcagtc

SEQ ID NO: 916565 - DNA, 15 bp, Homo sapiens
ttcagggttcagtct

SEQ ID NO: 916566 - DNA, 15 bp, Homo sapiens
tcagggttcagtctg

SEQ ID NO: 916567 - DNA, 15 bp, Homo sapiens
cagggttcagtctga

SEQ ID NO: 916568 - DNA, 15 bp, Homo sapiens
agggttcagtctgac

SEQ ID NO: 916569 - DNA, 15 bp, Homo sapiens
gggttcagtctgact

SEQ ID NO: 916570 - DNA, 15 bp, Homo sapiens
ggttcagtctgactt

SEQ ID NO: 916571 - DNA, 15 bp, Homo sapiens
gttcagtctgacttg

SEQ ID NO: 916572 - DNA, 15 bp, Homo sapiens
ttcagtctgacttgc

SEQ ID NO: 916573 - DNA, 15 bp, Homo sapiens
tcagtctgacttgct

SEQ ID NO: 916574 - DNA, 15 bp, Homo sapiens
cagtctgacttgctt

SEQ ID NO: 916575 - DNA, 15 bp, Homo sapiens
agtctgacttgcttt

SEQ ID NO: 916576 - DNA, 15 bp, Homo sapiens
gtctgacttgctttt

SEQ ID NO: 916577 - DNA, 15 bp, Homo sapiens
tctgacttgcttttc

SEQ ID NO: 916578 - DNA, 15 bp, Homo sapiens
ctgacttgcttttct

SEQ ID NO: 916579 - DNA, 15 bp, Homo sapiens
tgacttgcttttctt

SEQ ID NO: 916580 - DNA, 15 bp, Homo sapiens
gacttgcttttcttc

SEQ ID NO: 916581 - DNA, 15 bp, Homo sapiens
acttgcttttcttcc

SEQ ID NO: 916582 - DNA, 15 bp, Homo sapiens
cttgcttttcttcca

SEQ ID NO: 916583 - DNA, 15 bp, Homo sapiens
ttgcttttcttccag

SEQ ID NO: 916584 - DNA, 15 bp, Homo sapiens
tgcttttcttccaga

SEQ ID NO: 916585 - DNA, 15 bp, Homo sapiens
gcttttcttccagat

SEQ ID NO: 916586 - DNA, 15 bp, Homo sapiens
cttttcttccagatg

SEQ ID NO: 916587 - DNA, 15 bp, Homo sapiens
ttttcttccagatgt

SEQ ID NO: 916588 - DNA, 15 bp, Homo sapiens
tttcttccagatgta

SEQ ID NO: 916589 - DNA, 15 bp, Homo sapiens
ttcttccagatgtac

SEQ ID NO: 916590 - DNA, 15 bp, Homo sapiens
tcttccagatgtacg

SEQ ID NO: 916591 - DNA, 15 bp, Homo sapiens
cttccagatgtacgg

SEQ ID NO: 916592 - DNA, 15 bp, Homo sapiens
ttccagatgtacggt

SEQ ID NO: 916593 - DNA, 15 bp, Homo sapiens
tccagatgtacggtg

SEQ ID NO: 916594 - DNA, 15 bp, Homo sapiens
ccagatgtacggtgg

SEQ ID NO: 916595 - DNA, 15 bp, Homo sapiens
cagatgtacggtggg

SEQ ID NO: 916596 - DNA, 15 bp, Homo sapiens
agatgtacggtgggc

SEQ ID NO: 916597 - DNA, 15 bp, Homo sapiens
gatgtacggtgggct

SEQ ID NO: 916598 - DNA, 15 bp, Homo sapiens
atgtacggtgggctg

SEQ ID NO: 916599 - DNA, 15 bp, Homo sapiens
tgtacggtgggctga

SEQ ID NO: 916600 - DNA, 15 bp, Homo sapiens
gtacggtgggctgac

SEQ ID NO: 916601 - DNA, 15 bp, Homo sapiens
tacggtgggctgact

SEQ ID NO: 916602 - DNA, 15 bp, Homo sapiens
acggtgggctgactt

SEQ ID NO: 916603 - DNA, 15 bp, Homo sapiens
cggtgggctgacttg

SEQ ID NO: 916604 - DNA, 15 bp, Homo sapiens
ggtgggctgacttgg

SEQ ID NO: 916605 - DNA, 15 bp, Homo sapiens
gtgggctgacttggg

SEQ ID NO: 916606 - DNA, 15 bp, Homo sapiens
tgggctgacttgggc

SEQ ID NO: 916607 - DNA, 15 bp, Homo sapiens
gggctgacttgggct

SEQ ID NO: 916608 - DNA, 15 bp, Homo sapiens
ggctgacttgggctt

SEQ ID NO: 916609 - DNA, 15 bp, Homo sapiens
gctgacttgggcttg

SEQ ID NO: 916610 - DNA, 15 bp, Homo sapiens
ctgacttgggcttga

SEQ ID NO: 916611 - DNA, 15 bp, Homo sapiens
tgacttgggcttgat

SEQ ID NO: 916612 - DNA, 15 bp, Homo sapiens
gacttgggcttgatc

SEQ ID NO: 916613 - DNA, 15 bp, Homo sapiens
acttgggcttgatcc

SEQ ID NO: 916614 - DNA, 15 bp, Homo sapiens
cttgggcttgatcca

SEQ ID NO: 916615 - DNA, 15 bp, Homo sapiens
ttgggcttgatccag

SEQ ID NO: 916616 - DNA, 15 bp, Homo sapiens
tgggcttgatccaga

SEQ ID NO: 916617 - DNA, 15 bp, Homo sapiens
gggcttgatccagag

SEQ ID NO: 916618 - DNA, 15 bp, Homo sapiens
ggcttgatccagaga

SEQ ID NO: 916619 - DNA, 15 bp, Homo sapiens
gcttgatccagagac

SEQ ID NO: 916620 - DNA, 15 bp, Homo sapiens
cttgatccagagact

SEQ ID NO: 916621 - DNA, 15 bp, Homo sapiens
ttgatccagagactt

SEQ ID NO: 916622 - DNA, 15 bp, Homo sapiens
tgatccagagactta

SEQ ID NO: 916623 - DNA, 15 bp, Homo sapiens
gatccagagacttag

SEQ ID NO: 916624 - DNA, 15 bp, Homo sapiens
atccagagacttagg

SEQ ID NO: 916625 - DNA, 15 bp, Homo sapiens
tccagagacttaggc

SEQ ID NO: 916626 - DNA, 15 bp, Homo sapiens
ccagagacttaggca

SEQ ID NO: 916627 - DNA, 15 bp, Homo sapiens
cagagacttaggcat

SEQ ID NO: 916628 - DNA, 15 bp, Homo sapiens
agagacttaggcatc

SEQ ID NO: 916629 - DNA, 15 bp, Homo sapiens
gagacttaggcatct

SEQ ID NO: 916630 - DNA, 15 bp, Homo sapiens
agacttaggcatctg

SEQ ID NO: 916631 - DNA, 15 bp, Homo sapiens
gacttaggcatctga

SEQ ID NO: 916632 - DNA, 15 bp, Homo sapiens
acttaggcatctgat

SEQ ID NO: 916633 - DNA, 15 bp, Homo sapiens
cttaggcatctgata

SEQ ID NO: 916634 - DNA, 15 bp, Homo sapiens
ttaggcatctgataa

SEQ ID NO: 916635 - DNA, 15 bp, Homo sapiens
taggcatctgataaa

SEQ ID NO: 916636 - DNA, 15 bp, Homo sapiens
aggcatctgataaaa

SEQ ID NO: 916637 - DNA, 15 bp, Homo sapiens
ggcatctgataaaag

SEQ ID NO: 916638 - DNA, 15 bp, Homo sapiens
gcatctgataaaagc

SEQ ID NO: 916639 - DNA, 15 bp, Homo sapiens
catctgataaaagct

SEQ ID NO: 916640 - DNA, 15 bp, Homo sapiens
atctgataaaagctg

SEQ ID NO: 916641 - DNA, 15 bp, Homo sapiens
tctgataaaagctgc

SEQ ID NO: 916642 - DNA, 15 bp, Homo sapiens
ctgataaaagctgcc

SEQ ID NO: 916643 - DNA, 15 bp, Homo sapiens
tgataaaagctgcct

SEQ ID NO: 916644 - DNA, 15 bp, Homo sapiens
gataaaagctgcctg

SEQ ID NO: 916645 - DNA, 15 bp, Homo sapiens
ataaaagctgcctga

SEQ ID NO: 916646 - DNA, 15 bp, Homo sapiens
taaaagctgcctgag

SEQ ID NO: 916647 - DNA, 15 bp, Homo sapiens
aaaagctgcctgagt

SEQ ID NO: 916648 - DNA, 15 bp, Homo sapiens
aaagctgcctgagta

SEQ ID NO: 916649 - DNA, 15 bp, Homo sapiens
aagctgcctgagtag

SEQ ID NO: 916650 - DNA, 15 bp, Homo sapiens
agctgcctgagtagt

SEQ ID NO: 916651 - DNA, 15 bp, Homo sapiens
gctgcctgagtagtt

SEQ ID NO: 916652 - DNA, 15 bp, Homo sapiens
ctgcctgagtagttt

SEQ ID NO: 916653 - DNA, 15 bp, Homo sapiens
tgcctgagtagtttt

SEQ ID NO: 916654 - DNA, 15 bp, Homo sapiens
gcctgagtagttttg

SEQ ID NO: 916655 - DNA, 15 bp, Homo sapiens
cctgagtagttttgc

SEQ ID NO: 916656 - DNA, 15 bp, Homo sapiens
ctgagtagttttgca

SEQ ID NO: 916657 - DNA, 15 bp, Homo sapiens
tgagtagttttgcat

SEQ ID NO: 916658 - DNA, 15 bp, Homo sapiens
gagtagttttgcatt

SEQ ID NO: 916659 - DNA, 15 bp, Homo sapiens
agtagttttgcattt

SEQ ID NO: 916660 - DNA, 15 bp, Homo sapiens
gtagttttgcatttt

SEQ ID NO: 916661 - DNA, 15 bp, Homo sapiens
tagttttgcattttt

SEQ ID NO: 916662 - DNA, 15 bp, Homo sapiens
agttttgcattttta

SEQ ID NO: 916663 - DNA, 15 bp, Homo sapiens
gttttgcatttttat

SEQ ID NO: 916664 - DNA, 15 bp, Homo sapiens
ttttgcatttttatt

SEQ ID NO: 916665 - DNA, 15 bp, Homo sapiens
tttgcatttttatta

SEQ ID NO: 916666 - DNA, 15 bp, Homo sapiens
ttgcatttttattaa

SEQ ID NO: 916667 - DNA, 15 bp, Homo sapiens
tgcatttttattaac

SEQ ID NO: 916668 - DNA, 15 bp, Homo sapiens
gcatttttattaaca

SEQ ID NO: 916669 - DNA, 15 bp, Homo sapiens
catttttattaacaa

SEQ ID NO: 916670 - DNA, 15 bp, Homo sapiens
atttttattaacaaa

SEQ ID NO: 916671 - DNA, 15 bp, Homo sapiens
tttttattaacaaag

SEQ ID NO: 916672 - DNA, 15 bp, Homo sapiens
ttttattaacaaagc

SEQ ID NO: 916673 - DNA, 15 bp, Homo sapiens
tttattaacaaagca

SEQ ID NO: 916674 - DNA, 15 bp, Homo sapiens
ttattaacaaagcaa

SEQ ID NO: 916675 - DNA, 15 bp, Homo sapiens
tattaacaaagcaat

SEQ ID NO: 916676 - DNA, 15 bp, Homo sapiens
attaacaaagcaata

SEQ ID NO: 916677 - DNA, 15 bp, Homo sapiens
ttaacaaagcaatat

SEQ ID NO: 916678 - DNA, 15 bp, Homo sapiens
taacaaagcaatata

SEQ ID NO: 916679 - DNA, 15 bp, Homo sapiens
aacaaagcaatataa

SEQ ID NO: 916680 - DNA, 15 bp, Homo sapiens
acaaagcaatataat

SEQ ID NO: 916681 - DNA, 15 bp, Homo sapiens
caaagcaatataatg

SEQ ID NO: 916682 - DNA, 15 bp, Homo sapiens
aaagcaatataatgc

SEQ ID NO: 916683 - DNA, 15 bp, Homo sapiens
aagcaatataatgct

SEQ ID NO: 916684 - DNA, 15 bp, Homo sapiens
agcaatataatgcta

SEQ ID NO: 916685 - DNA, 15 bp, Homo sapiens
gcaatataatgctag

SEQ ID NO: 916686 - DNA, 15 bp, Homo sapiens
caatataatgctagt

SEQ ID NO: 916687 - DNA, 15 bp, Homo sapiens
aatataatgctagtt

SEQ ID NO: 916688 - DNA, 15 bp, Homo sapiens
atataatgctagttt

SEQ ID NO: 916689 - DNA, 15 bp, Homo sapiens
tataatgctagtttt

SEQ ID NO: 916690 - DNA, 15 bp, Homo sapiens
ataatgctagttttc

SEQ ID NO: 916691 - DNA, 15 bp, Homo sapiens
taatgctagttttct

SEQ ID NO: 916692 - DNA, 15 bp, Homo sapiens
aatgctagttttcta

SEQ ID NO: 916693 - DNA, 15 bp, Homo sapiens
atgctagttttctag

SEQ ID NO: 916694 - DNA, 15 bp, Homo sapiens
tgctagttttctagg

SEQ ID NO: 916695 - DNA, 15 bp, Homo sapiens
gctagttttctaggg

SEQ ID NO: 916696 - DNA, 15 bp, Homo sapiens
ctagttttctagggc

SEQ ID NO: 916697 - DNA, 15 bp, Homo sapiens
tagttttctagggca

SEQ ID NO: 916698 - DNA, 15 bp, Homo sapiens
agttttctagggcac

SEQ ID NO: 916699 - DNA, 15 bp, Homo sapiens
gttttctagggcaca

SEQ ID NO: 916700 - DNA, 15 bp, Homo sapiens
ttttctagggcacag

SEQ ID NO: 916701 - DNA, 15 bp, Homo sapiens
tttctagggcacagt

SEQ ID NO: 916702 - DNA, 15 bp, Homo sapiens
ttctagggcacagta

SEQ ID NO: 916703 - DNA, 15 bp, Homo sapiens
tctagggcacagtag

SEQ ID NO: 916704 - DNA, 15 bp, Homo sapiens
ctagggcacagtagt

SEQ ID NO: 916705 - DNA, 15 bp, Homo sapiens
tagggcacagtagtc

SEQ ID NO: 916706 - DNA, 15 bp, Homo sapiens
agggcacagtagtct

SEQ ID NO: 916707 - DNA, 15 bp, Homo sapiens
gggcacagtagtctc

SEQ ID NO: 916708 - DNA, 15 bp, Homo sapiens
ggcacagtagtctca

SEQ ID NO: 916709 - DNA, 15 bp, Homo sapiens
gcacagtagtctcac

SEQ ID NO: 916710 - DNA, 15 bp, Homo sapiens
cacagtagtctcact

SEQ ID NO: 916711 - DNA, 15 bp, Homo sapiens
acagtagtctcactt

SEQ ID NO: 916712 - DNA, 15 bp, Homo sapiens
cagtagtctcactta

SEQ ID NO: 916713 - DNA, 15 bp, Homo sapiens
agtagtctcacttac

SEQ ID NO: 916714 - DNA, 15 bp, Homo sapiens
gtagtctcacttaca

SEQ ID NO: 916715 - DNA, 15 bp, Homo sapiens
tagtctcacttacaa

SEQ ID NO: 916716 - DNA, 15 bp, Homo sapiens
agtctcacttacaac

SEQ ID NO: 916717 - DNA, 15 bp, Homo sapiens
gtctcacttacaaca

SEQ ID NO: 916718 - DNA, 15 bp, Homo sapiens
tctcacttacaacat

SEQ ID NO: 916719 - DNA, 15 bp, Homo sapiens
ctcacttacaacatg

SEQ ID NO: 916720 - DNA, 15 bp, Homo sapiens
tcacttacaacatgt

SEQ ID NO: 916721 - DNA, 15 bp, Homo sapiens
cacttacaacatgta

SEQ ID NO: 916722 - DNA, 15 bp, Homo sapiens
acttacaacatgtat

SEQ ID NO: 916723 - DNA, 15 bp, Homo sapiens
cttacaacatgtata

SEQ ID NO: 916724 - DNA, 15 bp, Homo sapiens
ttacaacatgtataa

SEQ ID NO: 916725 - DNA, 15 bp, Homo sapiens
tacaacatgtataaa

SEQ ID NO: 916726 - DNA, 15 bp, Homo sapiens
acaacatgtataaac

SEQ ID NO: 916727 - DNA, 15 bp, Homo sapiens
caacatgtataaact

SEQ ID NO: 916728 - DNA, 15 bp, Homo sapiens
aacatgtataaactg

SEQ ID NO: 916729 - DNA, 15 bp, Homo sapiens
acatgtataaactgt

SEQ ID NO: 916730 - DNA, 15 bp, Homo sapiens
catgtataaactgtt

SEQ ID NO: 916731 - DNA, 15 bp, Homo sapiens
atgtataaactgttt

SEQ ID NO: 916732 - DNA, 15 bp, Homo sapiens
tgtataaactgtttt

SEQ ID NO: 916733 - DNA, 15 bp, Homo sapiens
gtataaactgtttta

SEQ ID NO: 916734 - DNA, 15 bp, Homo sapiens
tataaactgttttat

SEQ ID NO: 916735 - DNA, 15 bp, Homo sapiens
ataaactgttttatt

SEQ ID NO: 916736 - DNA, 15 bp, Homo sapiens
taaactgttttatta

SEQ ID NO: 916737 - DNA, 15 bp, Homo sapiens
aaactgttttattag

SEQ ID NO: 916738 - DNA, 15 bp, Homo sapiens
aactgttttattaga

SEQ ID NO: 916739 - DNA, 15 bp, Homo sapiens
actgttttattagag

SEQ ID NO: 916740 - DNA, 15 bp, Homo sapiens
ctgttttattagaga

SEQ ID NO: 916741 - DNA, 15 bp, Homo sapiens
tgttttattagagat

SEQ ID NO: 916742 - DNA, 15 bp, Homo sapiens
gttttattagagatt

SEQ ID NO: 916743 - DNA, 15 bp, Homo sapiens
ttttattagagatta

SEQ ID NO: 916744 - DNA, 15 bp, Homo sapiens
tttattagagattat

SEQ ID NO: 916745 - DNA, 15 bp, Homo sapiens
ttattagagattata

SEQ ID NO: 916746 - DNA, 15 bp, Homo sapiens
tattagagattatag

SEQ ID NO: 916747 - DNA, 15 bp, Homo sapiens
attagagattatagc

SEQ ID NO: 916748 - DNA, 15 bp, Homo sapiens
ttagagattatagca

SEQ ID NO: 916749 - DNA, 15 bp, Homo sapiens
tagagattatagcac

SEQ ID NO: 916750 - DNA, 15 bp, Homo sapiens
agagattatagcact

SEQ ID NO: 916751 - DNA, 15 bp, Homo sapiens
gagattatagcacta

SEQ ID NO: 916752 - DNA, 15 bp, Homo sapiens
agattatagcactat

SEQ ID NO: 916753 - DNA, 15 bp, Homo sapiens
gattatagcactatt

SEQ ID NO: 916754 - DNA, 15 bp, Homo sapiens
attatagcactattg

SEQ ID NO: 916755 - DNA, 15 bp, Homo sapiens
ttatagcactattgg

SEQ ID NO: 916756 - DNA, 15 bp, Homo sapiens
tatagcactattggg

SEQ ID NO: 916757 - DNA, 15 bp, Homo sapiens
atagcactattggga

SEQ ID NO: 916758 - DNA, 15 bp, Homo sapiens
tagcactattgggag

SEQ ID NO: 916759 - DNA, 15 bp, Homo sapiens
agcactattgggaga

SEQ ID NO: 916760 - DNA, 15 bp, Homo sapiens
gcactattgggagag

SEQ ID NO: 916761 - DNA, 15 bp, Homo sapiens
cactattgggagaga

SEQ ID NO: 916762 - DNA, 15 bp, Homo sapiens
actattgggagagaa

SEQ ID NO: 916763 - DNA, 15 bp, Homo sapiens
ctattgggagagaaa

SEQ ID NO: 916764 - DNA, 15 bp, Homo sapiens
tattgggagagaaaa

SEQ ID NO: 916765 - DNA, 15 bp, Homo sapiens
attgggagagaaaat

SEQ ID NO: 916766 - DNA, 15 bp, Homo sapiens
ttgggagagaaaata

SEQ ID NO: 916767 - DNA, 15 bp, Homo sapiens
tgggagagaaaataa

SEQ ID NO: 916768 - DNA, 15 bp, Homo sapiens
gggagagaaaataaa

SEQ ID NO: 916769 - DNA, 15 bp, Homo sapiens
ggagagaaaataaaa

SEQ ID NO: 916770 - DNA, 15 bp, Homo sapiens
gagagaaaataaaag

SEQ ID NO: 916771 - DNA, 15 bp, Homo sapiens
agagaaaataaaagt

SEQ ID NO: 916772 - DNA, 15 bp, Homo sapiens
gagaaaataaaagtg

SEQ ID NO: 916773 - DNA, 15 bp, Homo sapiens
agaaaataaaagtga

SEQ ID NO: 916774 - DNA, 15 bp, Homo sapiens
gaaaataaaagtgat

SEQ ID NO: 916775 - DNA, 15 bp, Homo sapiens
aaaataaaagtgatc

SEQ ID NO: 916776 - DNA, 15 bp, Homo sapiens
aaataaaagtgatca

SEQ ID NO: 916777 - DNA, 15 bp, Homo sapiens
aataaaagtgatcat

SEQ ID NO: 916778 - DNA, 15 bp, Homo sapiens
ataaaagtgatcatt

SEQ ID NO: 916779 - DNA, 15 bp, Homo sapiens
taaaagtgatcattt

SEQ ID NO: 916780 - DNA, 15 bp, Homo sapiens
aaaagtgatcattta

SEQ ID NO: 916781 - DNA, 15 bp, Homo sapiens
aaagtgatcatttat

SEQ ID NO: 916782 - DNA, 15 bp, Homo sapiens
aagtgatcatttata

SEQ ID NO: 916783 - DNA, 15 bp, Homo sapiens
agtgatcatttatat

SEQ ID NO: 916784 - DNA, 15 bp, Homo sapiens
gtgatcatttatatg

SEQ ID NO: 916785 - DNA, 15 bp, Homo sapiens
tgatcatttatatga

SEQ ID NO: 916786 - DNA, 15 bp, Homo sapiens
gatcatttatatgat

SEQ ID NO: 916787 - DNA, 15 bp, Homo sapiens
atcatttatatgata

SEQ ID NO: 916788 - DNA, 15 bp, Homo sapiens
tcatttatatgataa

SEQ ID NO: 916789 - DNA, 15 bp, Homo sapiens
catttatatgataat

SEQ ID NO: 916790 - DNA, 15 bp, Homo sapiens
atttatatgataatg

SEQ ID NO: 916791 - DNA, 15 bp, Homo sapiens
tttatatgataatgt

SEQ ID NO: 916792 - DNA, 15 bp, Homo sapiens
ttatatgataatgtg

SEQ ID NO: 916793 - DNA, 15 bp, Homo sapiens
tatatgataatgtga

SEQ ID NO: 916794 - DNA, 15 bp, Homo sapiens
atatgataatgtgag

SEQ ID NO: 916795 - DNA, 15 bp, Homo sapiens
tatgataatgtgagc

SEQ ID NO: 916796 - DNA, 15 bp, Homo sapiens
atgataatgtgagct

SEQ ID NO: 916797 - DNA, 15 bp, Homo sapiens
tgataatgtgagctg

SEQ ID NO: 916798 - DNA, 15 bp, Homo sapiens
gataatgtgagctga

SEQ ID NO: 916799 - DNA, 15 bp, Homo sapiens
ataatgtgagctgat

SEQ ID NO: 916800 - DNA, 15 bp, Homo sapiens
taatgtgagctgata

SEQ ID NO: 916801 - DNA, 15 bp, Homo sapiens
aatgtgagctgataa

SEQ ID NO: 916802 - DNA, 15 bp, Homo sapiens
atgtgagctgataat

SEQ ID NO: 916803 - DNA, 15 bp, Homo sapiens
tgtgagctgataatt

SEQ ID NO: 916804 - DNA, 15 bp, Homo sapiens
gtgagctgataattt

SEQ ID NO: 916805 - DNA, 15 bp, Homo sapiens
tgagctgataattta

SEQ ID NO: 916806 - DNA, 15 bp, Homo sapiens
gagctgataatttag

SEQ ID NO: 916807 - DNA, 15 bp, Homo sapiens
agctgataatttagg

SEQ ID NO: 916808 - DNA, 15 bp, Homo sapiens
gctgataatttagga

SEQ ID NO: 916809 - DNA, 15 bp, Homo sapiens
ctgataatttaggag

SEQ ID NO: 916810 - DNA, 15 bp, Homo sapiens
tgataatttaggagt

SEQ ID NO: 916811 - DNA, 15 bp, Homo sapiens
gataatttaggagtg

SEQ ID NO: 916812 - DNA, 15 bp, Homo sapiens
ataatttaggagtga

SEQ ID NO: 916813 - DNA, 15 bp, Homo sapiens
taatttaggagtgat

SEQ ID NO: 916814 - DNA, 15 bp, Homo sapiens
aatttaggagtgatt

SEQ ID NO: 916815 - DNA, 15 bp, Homo sapiens
atttaggagtgattc

SEQ ID NO: 916816 - DNA, 15 bp, Homo sapiens
tttaggagtgattca

SEQ ID NO: 916817 - DNA, 15 bp, Homo sapiens
ttaggagtgattcat

SEQ ID NO: 916818 - DNA, 15 bp, Homo sapiens
taggagtgattcatt

SEQ ID NO: 916819 - DNA, 15 bp, Homo sapiens
aggagtgattcattc

SEQ ID NO: 916820 - DNA, 15 bp, Homo sapiens
ggagtgattcattct

SEQ ID NO: 916821 - DNA, 15 bp, Homo sapiens
gagtgattcattctc

SEQ ID NO: 916822 - DNA, 15 bp, Homo sapiens
agtgattcattctca

SEQ ID NO: 916823 - DNA, 15 bp, Homo sapiens
gtgattcattctcat

SEQ ID NO: 916824 - DNA, 15 bp, Homo sapiens
tgattcattctcatt

SEQ ID NO: 916825 - DNA, 15 bp, Homo sapiens
gattcattctcatta

SEQ ID NO: 916826 - DNA, 15 bp, Homo sapiens
attcattctcattaa

SEQ ID NO: 916827 - DNA, 15 bp, Homo sapiens
ttcattctcattaat

SEQ ID NO: 916828 - DNA, 15 bp, Homo sapiens
tcattctcattaatg

SEQ ID NO: 916829 - DNA, 15 bp, Homo sapiens
cattctcattaatgt

SEQ ID NO: 916830 - DNA, 15 bp, Homo sapiens
attctcattaatgtt

SEQ ID NO: 916831 - DNA, 15 bp, Homo sapiens
ttctcattaatgttc

SEQ ID NO: 916832 - DNA, 15 bp, Homo sapiens
tctcattaatgttcg

SEQ ID NO: 916833 - DNA, 15 bp, Homo sapiens
ctcattaatgttcgc

SEQ ID NO: 916834 - DNA, 15 bp, Homo sapiens
tcattaatgttcgca

SEQ ID NO: 916835 - DNA, 15 bp, Homo sapiens
cattaatgttcgcac

SEQ ID NO: 916836 - DNA, 15 bp, Homo sapiens
attaatgttcgcaca

SEQ ID NO: 916837 - DNA, 15 bp, Homo sapiens
ttaatgttcgcacac

SEQ ID NO: 916838 - DNA, 15 bp, Homo sapiens
taatgttcgcacact

SEQ ID NO: 916839 - DNA, 15 bp, Homo sapiens
aatgttcgcacactg

SEQ ID NO: 916840 - DNA, 15 bp, Homo sapiens
atgttcgcacactgc

SEQ ID NO: 916841 - DNA, 15 bp, Homo sapiens
tgttcgcacactgcc

SEQ ID NO: 916842 - DNA, 15 bp, Homo sapiens
gttcgcacactgcca

SEQ ID NO: 916843 - DNA, 15 bp, Homo sapiens
ttcgcacactgccat

SEQ ID NO: 916844 - DNA, 15 bp, Homo sapiens
tcgcacactgccatg

SEQ ID NO: 916845 - DNA, 15 bp, Homo sapiens
cgcacactgccatgt

SEQ ID NO: 916846 - DNA, 15 bp, Homo sapiens
gcacactgccatgta

SEQ ID NO: 916847 - DNA, 15 bp, Homo sapiens
cacactgccatgtaa

SEQ ID NO: 916848 - DNA, 15 bp, Homo sapiens
acactgccatgtaag

SEQ ID NO: 916849 - DNA, 15 bp, Homo sapiens
cactgccatgtaagt

SEQ ID NO: 916850 - DNA, 15 bp, Homo sapiens
actgccatgtaagtt

SEQ ID NO: 916851 - DNA, 15 bp, Homo sapiens
ctgccatgtaagttt

SEQ ID NO: 916852 - DNA, 15 bp, Homo sapiens
tgccatgtaagttta

SEQ ID NO: 916853 - DNA, 15 bp, Homo sapiens
gccatgtaagtttat

SEQ ID NO: 916854 - DNA, 15 bp, Homo sapiens
ccatgtaagtttatt

SEQ ID NO: 916855 - DNA, 15 bp, Homo sapiens
catgtaagtttatta

SEQ ID NO: 916856 - DNA, 15 bp, Homo sapiens
atgtaagtttattag

SEQ ID NO: 916857 - DNA, 15 bp, Homo sapiens
tgtaagtttattagt

SEQ ID NO: 916858 - DNA, 15 bp, Homo sapiens
gtaagtttattagtt

SEQ ID NO: 916859 - DNA, 15 bp, Homo sapiens
taagtttattagtta

SEQ ID NO: 916860 - DNA, 15 bp, Homo sapiens
aagtttattagttag

SEQ ID NO: 916861 - DNA, 15 bp, Homo sapiens
agtttattagttagt

SEQ ID NO: 916862 - DNA, 15 bp, Homo sapiens
gtttattagttagtg

SEQ ID NO: 916863 - DNA, 15 bp, Homo sapiens
tttattagttagtgt

SEQ ID NO: 916864 - DNA, 15 bp, Homo sapiens
ttattagttagtgtg

SEQ ID NO: 916865 - DNA, 15 bp, Homo sapiens
tattagttagtgtgt

SEQ ID NO: 916866 - DNA, 15 bp, Homo sapiens
attagttagtgtgtg

SEQ ID NO: 916867 - DNA, 15 bp, Homo sapiens
ttagttagtgtgtgt

SEQ ID NO: 916868 - DNA, 15 bp, Homo sapiens
tagttagtgtgtgtg

SEQ ID NO: 916869 - DNA, 15 bp, Homo sapiens
agttagtgtgtgtgg

SEQ ID NO: 916870 - DNA, 15 bp, Homo sapiens
gttagtgtgtgtggt

SEQ ID NO: 916871 - DNA, 15 bp, Homo sapiens
ttagtgtgtgtggta

SEQ ID NO: 916872 - DNA, 15 bp, Homo sapiens
tagtgtgtgtggtac

SEQ ID NO: 916873 - DNA, 15 bp, Homo sapiens
agtgtgtgtggtaca

SEQ ID NO: 916874 - DNA, 15 bp, Homo sapiens
gtgtgtgtggtacaa

SEQ ID NO: 916875 - DNA, 15 bp, Homo sapiens
tgtgtgtggtacaac

SEQ ID NO: 916876 - DNA, 15 bp, Homo sapiens
gtgtgtggtacaaca

SEQ ID NO: 916877 - DNA, 15 bp, Homo sapiens
tgtgtggtacaacag

SEQ ID NO: 916878 - DNA, 15 bp, Homo sapiens
gtgtggtacaacaga

SEQ ID NO: 916879 - DNA, 15 bp, Homo sapiens
tgtggtacaacagaa

SEQ ID NO: 916880 - DNA, 15 bp, Homo sapiens
gtggtacaacagaag

SEQ ID NO: 916881 - DNA, 15 bp, Homo sapiens
tggtacaacagaagg

SEQ ID NO: 916882 - DNA, 15 bp, Homo sapiens
ggtacaacagaaggt

SEQ ID NO: 916883 - DNA, 15 bp, Homo sapiens
gtacaacagaaggta

SEQ ID NO: 916884 - DNA, 15 bp, Homo sapiens
tacaacagaaggtaa

SEQ ID NO: 916885 - DNA, 15 bp, Homo sapiens
acaacagaaggtaag

SEQ ID NO: 916886 - DNA, 15 bp, Homo sapiens
caacagaaggtaagg

SEQ ID NO: 916887 - DNA, 15 bp, Homo sapiens
aacagaaggtaaggc

SEQ ID NO: 916888 - DNA, 15 bp, Homo sapiens
acagaaggtaaggcc

SEQ ID NO: 916889 - DNA, 15 bp, Homo sapiens
cagaaggtaaggcct

SEQ ID NO: 916890 - DNA, 15 bp, Homo sapiens
agaaggtaaggcctt

SEQ ID NO: 916891 - DNA, 15 bp, Homo sapiens
gaaggtaaggccttt

SEQ ID NO: 916892 - DNA, 15 bp, Homo sapiens
aaggtaaggcctttg

SEQ ID NO: 916893 - DNA, 15 bp, Homo sapiens
aggtaaggcctttga

SEQ ID NO: 916894 - DNA, 15 bp, Homo sapiens
ggtaaggcctttgat

SEQ ID NO: 916895 - DNA, 15 bp, Homo sapiens
gtaaggcctttgata

SEQ ID NO: 916896 - DNA, 15 bp, Homo sapiens
taaggcctttgataa

SEQ ID NO: 916897 - DNA, 15 bp, Homo sapiens
aaggcctttgataaa

SEQ ID NO: 916898 - DNA, 15 bp, Homo sapiens
aggcctttgataaaa

SEQ ID NO: 916899 - DNA, 15 bp, Homo sapiens
ggcctttgataaaac

SEQ ID NO: 916900 - DNA, 15 bp, Homo sapiens
gcctttgataaaaca

SEQ ID NO: 916901 - DNA, 15 bp, Homo sapiens
cctttgataaaacaa

SEQ ID NO: 916902 - DNA, 15 bp, Homo sapiens
ctttgataaaacaat

SEQ ID NO: 916903 - DNA, 15 bp, Homo sapiens
tttgataaaacaatc

SEQ ID NO: 916904 - DNA, 15 bp, Homo sapiens
ttgataaaacaatct

SEQ ID NO: 916905 - DNA, 15 bp, Homo sapiens
tgataaaacaatctt

SEQ ID NO: 916906 - DNA, 15 bp, Homo sapiens
gataaaacaatcttt

SEQ ID NO: 916907 - DNA, 15 bp, Homo sapiens
ataaaacaatcttta

SEQ ID NO: 916908 - DNA, 15 bp, Homo sapiens
taaaacaatctttaa

SEQ ID NO: 916909 - DNA, 15 bp, Homo sapiens
aaaacaatctttaat

SEQ ID NO: 916910 - DNA, 15 bp, Homo sapiens
aaacaatctttaatt

SEQ ID NO: 916911 - DNA, 15 bp, Homo sapiens
aacaatctttaattg

SEQ ID NO: 916912 - DNA, 15 bp, Homo sapiens
acaatctttaattga

SEQ ID NO: 916913 - DNA, 15 bp, Homo sapiens
caatctttaattgag

SEQ ID NO: 916914 - DNA, 15 bp, Homo sapiens
aatctttaattgagt

SEQ ID NO: 916915 - DNA, 15 bp, Homo sapiens
atctttaattgagta

SEQ ID NO: 916916 - DNA, 15 bp, Homo sapiens
tctttaattgagtat

SEQ ID NO: 916917 - DNA, 15 bp, Homo sapiens
ctttaattgagtatt

SEQ ID NO: 916918 - DNA, 15 bp, Homo sapiens
tttaattgagtattt

SEQ ID NO: 916919 - DNA, 15 bp, Homo sapiens
ttaattgagtatttt

SEQ ID NO: 916920 - DNA, 15 bp, Homo sapiens
taattgagtattttt

SEQ ID NO: 916921 - DNA, 15 bp, Homo sapiens
aattgagtatttttt

SEQ ID NO: 916922 - DNA, 15 bp, Homo sapiens
attgagtattttttc

SEQ ID NO: 916923 - DNA, 15 bp, Homo sapiens
ttgagtattttttct

SEQ ID NO: 916924 - DNA, 15 bp, Homo sapiens
tgagtattttttctg

SEQ ID NO: 916925 - DNA, 15 bp, Homo sapiens
gagtattttttctgt

SEQ ID NO: 916926 - DNA, 15 bp, Homo sapiens
agtattttttctgta

SEQ ID NO: 916927 - DNA, 15 bp, Homo sapiens
gtattttttctgtat

SEQ ID NO: 916928 - DNA, 15 bp, Homo sapiens
tattttttctgtatg

SEQ ID NO: 916929 - DNA, 15 bp, Homo sapiens
attttttctgtatgg

SEQ ID NO: 916930 - DNA, 15 bp, Homo sapiens
ttttttctgtatggt

SEQ ID NO: 916931 - DNA, 15 bp, Homo sapiens
tttttctgtatggta

SEQ ID NO: 916932 - DNA, 15 bp, Homo sapiens
ttttctgtatggtaa

SEQ ID NO: 916933 - DNA, 15 bp, Homo sapiens
tttctgtatggtaaa

SEQ ID NO: 916934 - DNA, 15 bp, Homo sapiens
ttctgtatggtaaag

SEQ ID NO: 916935 - DNA, 15 bp, Homo sapiens
tctgtatggtaaagt

SEQ ID NO: 916936 - DNA, 15 bp, Homo sapiens
ctgtatggtaaagtg

SEQ ID NO: 916937 - DNA, 15 bp, Homo sapiens
tgtatggtaaagtgg

SEQ ID NO: 916938 - DNA, 15 bp, Homo sapiens
gtatggtaaagtggt

SEQ ID NO: 916939 - DNA, 15 bp, Homo sapiens
tatggtaaagtggta

SEQ ID NO: 916940 - DNA, 15 bp, Homo sapiens
atggtaaagtggtat

SEQ ID NO: 916941 - DNA, 15 bp, Homo sapiens
tggtaaagtggtata

SEQ ID NO: 916942 - DNA, 15 bp, Homo sapiens
ggtaaagtggtatag

SEQ ID NO: 916943 - DNA, 15 bp, Homo sapiens
gtaaagtggtataga

SEQ ID NO: 916944 - DNA, 15 bp, Homo sapiens
taaagtggtatagaa

SEQ ID NO: 916945 - DNA, 15 bp, Homo sapiens
aaagtggtatagaaa

SEQ ID NO: 916946 - DNA, 15 bp, Homo sapiens
aagtggtatagaaaa

SEQ ID NO: 916947 - DNA, 15 bp, Homo sapiens
agtggtatagaaaac

SEQ ID NO: 916948 - DNA, 15 bp, Homo sapiens
gtggtatagaaaact

SEQ ID NO: 916949 - DNA, 15 bp, Homo sapiens
tggtatagaaaactt

SEQ ID NO: 916950 - DNA, 15 bp, Homo sapiens
ggtatagaaaactta

SEQ ID NO: 916951 - DNA, 15 bp, Homo sapiens
gtatagaaaacttag

SEQ ID NO: 916952 - DNA, 15 bp, Homo sapiens
tatagaaaacttagt

SEQ ID NO: 916953 - DNA, 15 bp, Homo sapiens
atagaaaacttagta

SEQ ID NO: 916954 - DNA, 15 bp, Homo sapiens
tagaaaacttagtaa

SEQ ID NO: 916955 - DNA, 15 bp, Homo sapiens
agaaaacttagtaag

SEQ ID NO: 916956 - DNA, 15 bp, Homo sapiens
gaaaacttagtaaga

SEQ ID NO: 916957 - DNA, 15 bp, Homo sapiens
aaaacttagtaagat

SEQ ID NO: 916958 - DNA, 15 bp, Homo sapiens
aaacttagtaagatt

SEQ ID NO: 916959 - DNA, 15 bp, Homo sapiens
aacttagtaagattg

SEQ ID NO: 916960 - DNA, 15 bp, Homo sapiens
acttagtaagattgt

SEQ ID NO: 916961 - DNA, 15 bp, Homo sapiens
cttagtaagattgta

SEQ ID NO: 916962 - DNA, 15 bp, Homo sapiens
ttagtaagattgtaa

SEQ ID NO: 916963 - DNA, 15 bp, Homo sapiens
tagtaagattgtaag

SEQ ID NO: 916964 - DNA, 15 bp, Homo sapiens
agtaagattgtaagg

SEQ ID NO: 916965 - DNA, 15 bp, Homo sapiens
gtaagattgtaaggt

SEQ ID NO: 916966 - DNA, 15 bp, Homo sapiens
taagattgtaaggtg

SEQ ID NO: 916967 - DNA, 15 bp, Homo sapiens
aagattgtaaggtgc

SEQ ID NO: 916968 - DNA, 15 bp, Homo sapiens
agattgtaaggtgca

SEQ ID NO: 916969 - DNA, 15 bp, Homo sapiens
gattgtaaggtgcag

SEQ ID NO: 916970 - DNA, 15 bp, Homo sapiens
attgtaaggtgcaga

SEQ ID NO: 916971 - DNA, 15 bp, Homo sapiens
ttgtaaggtgcagaa

SEQ ID NO: 916972 - DNA, 15 bp, Homo sapiens
tgtaaggtgcagaaa

SEQ ID NO: 916973 - DNA, 15 bp, Homo sapiens
gtaaggtgcagaaac

SEQ ID NO: 916974 - DNA, 15 bp, Homo sapiens
taaggtgcagaaaca

SEQ ID NO: 916975 - DNA, 15 bp, Homo sapiens
aaggtgcagaaacag

SEQ ID NO: 916976 - DNA, 15 bp, Homo sapiens
aggtgcagaaacagc

SEQ ID NO: 916977 - DNA, 15 bp, Homo sapiens
ggtgcagaaacagcc

SEQ ID NO: 916978 - DNA, 15 bp, Homo sapiens
gtgcagaaacagcca

SEQ ID NO: 916979 - DNA, 15 bp, Homo sapiens
tgcagaaacagccac

SEQ ID NO: 916980 - DNA, 15 bp, Homo sapiens
gcagaaacagccact

SEQ ID NO: 916981 - DNA, 15 bp, Homo sapiens
cagaaacagccactg

SEQ ID NO: 916982 - DNA, 15 bp, Homo sapiens
agaaacagccactgc

SEQ ID NO: 916983 - DNA, 15 bp, Homo sapiens
gaaacagccactgct

SEQ ID NO: 916984 - DNA, 15 bp, Homo sapiens
aaacagccactgctc

SEQ ID NO: 916985 - DNA, 15 bp, Homo sapiens
aacagccactgctcc

SEQ ID NO: 916986 - DNA, 15 bp, Homo sapiens
acagccactgctccc

SEQ ID NO: 916987 - DNA, 15 bp, Homo sapiens
cagccactgctcccc

SEQ ID NO: 916988 - DNA, 15 bp, Homo sapiens
agccactgctcccct

SEQ ID NO: 916989 - DNA, 15 bp, Homo sapiens
gccactgctcccctc

SEQ ID NO: 916990 - DNA, 15 bp, Homo sapiens
ccactgctcccctct

SEQ ID NO: 916991 - DNA, 15 bp, Homo sapiens
cactgctcccctctt

SEQ ID NO: 916992 - DNA, 15 bp, Homo sapiens
actgctcccctcttg

SEQ ID NO: 916993 - DNA, 15 bp, Homo sapiens
ctgctcccctcttgc

SEQ ID NO: 916994 - DNA, 15 bp, Homo sapiens
tgctcccctcttgct

SEQ ID NO: 916995 - DNA, 15 bp, Homo sapiens
gctcccctcttgctg

SEQ ID NO: 916996 - DNA, 15 bp, Homo sapiens
ctcccctcttgctgt

SEQ ID NO: 916997 - DNA, 15 bp, Homo sapiens
tcccctcttgctgtt

SEQ ID NO: 916998 - DNA, 15 bp, Homo sapiens
cccctcttgctgttt

SEQ ID NO: 916999 - DNA, 15 bp, Homo sapiens
ccctcttgctgtttc

SEQ ID NO: 917000 - DNA, 15 bp, Homo sapiens
cctcttgctgtttct

SEQ ID NO: 917001 - DNA, 15 bp, Homo sapiens
ctcttgctgtttctc

SEQ ID NO: 917002 - DNA, 15 bp, Homo sapiens
tcttgctgtttctct

SEQ ID NO: 917003 - DNA, 15 bp, Homo sapiens
cttgctgtttctcta

SEQ ID NO: 917004 - DNA, 15 bp, Homo sapiens
ttgctgtttctctac

SEQ ID NO: 917005 - DNA, 15 bp, Homo sapiens
tgctgtttctctacc

SEQ ID NO: 917006 - DNA, 15 bp, Homo sapiens
gctgtttctctaccc

SEQ ID NO: 917007 - DNA, 15 bp, Homo sapiens
ctgtttctctaccct

SEQ ID NO: 917008 - DNA, 15 bp, Homo sapiens
tgtttctctaccctg

SEQ ID NO: 917009 - DNA, 15 bp, Homo sapiens
gtttctctaccctgt

SEQ ID NO: 917010 - DNA, 15 bp, Homo sapiens
tttctctaccctgtc

SEQ ID NO: 917011 - DNA, 15 bp, Homo sapiens
ttctctaccctgtct

SEQ ID NO: 917012 - DNA, 15 bp, Homo sapiens
tctctaccctgtctc

SEQ ID NO: 917013 - DNA, 15 bp, Homo sapiens
ctctaccctgtctct

SEQ ID NO: 917014 - DNA, 15 bp, Homo sapiens
tctaccctgtctctt

SEQ ID NO: 917015 - DNA, 15 bp, Homo sapiens
ctaccctgtctcttg

SEQ ID NO: 917016 - DNA, 15 bp, Homo sapiens
taccctgtctcttgc

SEQ ID NO: 917017 - DNA, 15 bp, Homo sapiens
accctgtctcttgct

SEQ ID NO: 917018 - DNA, 15 bp, Homo sapiens
ccctgtctcttgctc

SEQ ID NO: 917019 - DNA, 15 bp, Homo sapiens
cctgtctcttgctct

SEQ ID NO: 917020 - DNA, 15 bp, Homo sapiens
ctgtctcttgctctt

SEQ ID NO: 917021 - DNA, 15 bp, Homo sapiens
tgtctcttgctcttt

SEQ ID NO: 917022 - DNA, 15 bp, Homo sapiens
gtctcttgctctttg

SEQ ID NO: 917023 - DNA, 15 bp, Homo sapiens
tctcttgctctttgc

SEQ ID NO: 917024 - DNA, 15 bp, Homo sapiens
ctcttgctctttgcc

SEQ ID NO: 917025 - DNA, 15 bp, Homo sapiens
tcttgctctttgcct

SEQ ID NO: 917026 - DNA, 15 bp, Homo sapiens
cttgctctttgcctc

SEQ ID NO: 917027 - DNA, 15 bp, Homo sapiens
ttgctctttgcctcg

SEQ ID NO: 917028 - DNA, 15 bp, Homo sapiens
tgctctttgcctcgt

SEQ ID NO: 917029 - DNA, 15 bp, Homo sapiens
gctctttgcctcgtt

SEQ ID NO: 917030 - DNA, 15 bp, Homo sapiens
ctctttgcctcgttt

SEQ ID NO: 917031 - DNA, 15 bp, Homo sapiens
tctttgcctcgttta

SEQ ID NO: 917032 - DNA, 15 bp, Homo sapiens
ctttgcctcgtttac

SEQ ID NO: 917033 - DNA, 15 bp, Homo sapiens
tttgcctcgtttaca

SEQ ID NO: 917034 - DNA, 15 bp, Homo sapiens
ttgcctcgtttacat

SEQ ID NO: 917035 - DNA, 15 bp, Homo sapiens
tgcctcgtttacata

SEQ ID NO: 917036 - DNA, 15 bp, Homo sapiens
gcctcgtttacatag

SEQ ID NO: 917037 - DNA, 15 bp, Homo sapiens
cctcgtttacatagg

SEQ ID NO: 917038 - DNA, 15 bp, Homo sapiens
ctcgtttacataggc

SEQ ID NO: 917039 - DNA, 15 bp, Homo sapiens
tcgtttacataggct

SEQ ID NO: 917040 - DNA, 15 bp, Homo sapiens
cgtttacataggctg

SEQ ID NO: 917041 - DNA, 15 bp, Homo sapiens
gtttacataggctgg

SEQ ID NO: 917042 - DNA, 15 bp, Homo sapiens
tttacataggctggg

SEQ ID NO: 917043 - DNA, 15 bp, Homo sapiens
ttacataggctgggg

SEQ ID NO: 917044 - DNA, 15 bp, Homo sapiens
tacataggctggggc

SEQ ID NO: 917045 - DNA, 15 bp, Homo sapiens
acataggctggggca

SEQ ID NO: 917046 - DNA, 15 bp, Homo sapiens
cataggctggggcaa

SEQ ID NO: 917047 - DNA, 15 bp, Homo sapiens
ataggctggggcaac

SEQ ID NO: 917048 - DNA, 15 bp, Homo sapiens
taggctggggcaact

SEQ ID NO: 917049 - DNA, 15 bp, Homo sapiens
aggctggggcaactg

SEQ ID NO: 917050 - DNA, 15 bp, Homo sapiens
ggctggggcaactgg

SEQ ID NO: 917051 - DNA, 15 bp, Homo sapiens
gctggggcaactggg

SEQ ID NO: 917052 - DNA, 15 bp, Homo sapiens
ctggggcaactggga

SEQ ID NO: 917053 - DNA, 15 bp, Homo sapiens
tggggcaactgggat

SEQ ID NO: 917054 - DNA, 15 bp, Homo sapiens
ggggcaactgggata

SEQ ID NO: 917055 - DNA, 15 bp, Homo sapiens
gggcaactgggataa

SEQ ID NO: 917056 - DNA, 15 bp, Homo sapiens
ggcaactgggataag

SEQ ID NO: 917057 - DNA, 15 bp, Homo sapiens
gcaactgggataagc

SEQ ID NO: 917058 - DNA, 15 bp, Homo sapiens
caactgggataagcc

SEQ ID NO: 917059 - DNA, 15 bp, Homo sapiens
aactgggataagccc

SEQ ID NO: 917060 - DNA, 15 bp, Homo sapiens
actgggataagccca

SEQ ID NO: 917061 - DNA, 15 bp, Homo sapiens
ctgggataagcccat

SEQ ID NO: 917062 - DNA, 15 bp, Homo sapiens
tgggataagcccatg

SEQ ID NO: 917063 - DNA, 15 bp, Homo sapiens
gggataagcccatgg

SEQ ID NO: 917064 - DNA, 15 bp, Homo sapiens
ggataagcccatgga

SEQ ID NO: 917065 - DNA, 15 bp, Homo sapiens
gataagcccatggat

SEQ ID NO: 917066 - DNA, 15 bp, Homo sapiens
ataagcccatggatg

SEQ ID NO: 917067 - DNA, 15 bp, Homo sapiens
taagcccatggatgt

SEQ ID NO: 917068 - DNA, 15 bp, Homo sapiens
aagcccatggatgtg

SEQ ID NO: 917069 - DNA, 15 bp, Homo sapiens
agcccatggatgtgt

SEQ ID NO: 917070 - DNA, 15 bp, Homo sapiens
gcccatggatgtgtc

SEQ ID NO: 917071 - DNA, 15 bp, Homo sapiens
cccatggatgtgtca

SEQ ID NO: 917072 - DNA, 15 bp, Homo sapiens
ccatggatgtgtcaa

SEQ ID NO: 917073 - DNA, 15 bp, Homo sapiens
catggatgtgtcaag

SEQ ID NO: 917074 - DNA, 15 bp, Homo sapiens
atggatgtgtcaaga

SEQ ID NO: 917075 - DNA, 15 bp, Homo sapiens
tggatgtgtcaagag

SEQ ID NO: 917076 - DNA, 15 bp, Homo sapiens
ggatgtgtcaagagg

SEQ ID NO: 917077 - DNA, 15 bp, Homo sapiens
gatgtgtcaagaggg

SEQ ID NO: 917078 - DNA, 15 bp, Homo sapiens
atgtgtcaagagggg

SEQ ID NO: 917079 - DNA, 15 bp, Homo sapiens
tgtgtcaagagggga

SEQ ID NO: 917080 - DNA, 15 bp, Homo sapiens
gtgtcaagaggggat

SEQ ID NO: 917081 - DNA, 15 bp, Homo sapiens
tgtcaagaggggatt

SEQ ID NO: 917082 - DNA, 15 bp, Homo sapiens
gtcaagaggggattt

SEQ ID NO: 917083 - DNA, 15 bp, Homo sapiens
tcaagaggggatttt

SEQ ID NO: 917084 - DNA, 15 bp, Homo sapiens
caagaggggattttg

SEQ ID NO: 917085 - DNA, 15 bp, Homo sapiens
aagaggggattttgt

SEQ ID NO: 917086 - DNA, 15 bp, Homo sapiens
agaggggattttgtg

SEQ ID NO: 917087 - DNA, 15 bp, Homo sapiens
gaggggattttgtgg

SEQ ID NO: 917088 - DNA, 15 bp, Homo sapiens
aggggattttgtgga

SEQ ID NO: 917089 - DNA, 15 bp, Homo sapiens
ggggattttgtggag

SEQ ID NO: 917090 - DNA, 15 bp, Homo sapiens
gggattttgtggagg

SEQ ID NO: 917091 - DNA, 15 bp, Homo sapiens
ggattttgtggaggg

SEQ ID NO: 917092 - DNA, 15 bp, Homo sapiens
gattttgtggaggga

SEQ ID NO: 917093 - DNA, 15 bp, Homo sapiens
attttgtggagggaa

SEQ ID NO: 917094 - DNA, 15 bp, Homo sapiens
ttttgtggagggaat

SEQ ID NO: 917095 - DNA, 15 bp, Homo sapiens
tttgtggagggaatt

SEQ ID NO: 917096 - DNA, 15 bp, Homo sapiens
ttgtggagggaattc

SEQ ID NO: 917097 - DNA, 15 bp, Homo sapiens
tgtggagggaattca

SEQ ID NO: 917098 - DNA, 15 bp, Homo sapiens
gtggagggaattcaa

SEQ ID NO: 917099 - DNA, 15 bp, Homo sapiens
tggagggaattcaag

SEQ ID NO: 917100 - DNA, 15 bp, Homo sapiens
ggagggaattcaagt

SEQ ID NO: 917101 - DNA, 15 bp, Homo sapiens
gagggaattcaagtt

SEQ ID NO: 917102 - DNA, 15 bp, Homo sapiens
agggaattcaagttt

SEQ ID NO: 917103 - DNA, 15 bp, Homo sapiens
gggaattcaagttta

SEQ ID NO: 917104 - DNA, 15 bp, Homo sapiens
ggaattcaagtttag

SEQ ID NO: 917105 - DNA, 15 bp, Homo sapiens
gaattcaagtttagg

SEQ ID NO: 917106 - DNA, 15 bp, Homo sapiens
aattcaagtttagga

SEQ ID NO: 917107 - DNA, 15 bp, Homo sapiens
attcaagtttaggat

SEQ ID NO: 917108 - DNA, 15 bp, Homo sapiens
ttcaagtttaggatg

SEQ ID NO: 917109 - DNA, 15 bp, Homo sapiens
tcaagtttaggatgg

SEQ ID NO: 917110 - DNA, 15 bp, Homo sapiens
caagtttaggatgga

SEQ ID NO: 917111 - DNA, 15 bp, Homo sapiens
aagtttaggatggag

SEQ ID NO: 917112 - DNA, 15 bp, Homo sapiens
agtttaggatggagg

SEQ ID NO: 917113 - DNA, 15 bp, Homo sapiens
gtttaggatggagga

SEQ ID NO: 917114 - DNA, 15 bp, Homo sapiens
tttaggatggaggat

SEQ ID NO: 917115 - DNA, 15 bp, Homo sapiens
ttaggatggaggatt

SEQ ID NO: 917116 - DNA, 15 bp, Homo sapiens
taggatggaggattt

SEQ ID NO: 917117 - DNA, 15 bp, Homo sapiens
aggatggaggatttg

SEQ ID NO: 917118 - DNA, 15 bp, Homo sapiens
ggatggaggatttga

SEQ ID NO: 917119 - DNA, 15 bp, Homo sapiens
gatggaggatttgac

SEQ ID NO: 917120 - DNA, 15 bp, Homo sapiens
atggaggatttgact

SEQ ID NO: 917121 - DNA, 15 bp, Homo sapiens
tggaggatttgacta

SEQ ID NO: 917122 - DNA, 15 bp, Homo sapiens
ggaggatttgactag

SEQ ID NO: 917123 - DNA, 15 bp, Homo sapiens
gaggatttgactaga

SEQ ID NO: 917124 - DNA, 15 bp, Homo sapiens
aggatttgactagat

SEQ ID NO: 917125 - DNA, 15 bp, Homo sapiens
ggatttgactagatg

SEQ ID NO: 917126 - DNA, 15 bp, Homo sapiens
gatttgactagatga

SEQ ID NO: 917127 - DNA, 15 bp, Homo sapiens
atttgactagatgaa

SEQ ID NO: 917128 - DNA, 15 bp, Homo sapiens
tttgactagatgaat

SEQ ID NO: 917129 - DNA, 15 bp, Homo sapiens
ttgactagatgaatt

SEQ ID NO: 917130 - DNA, 15 bp, Homo sapiens
tgactagatgaattc

SEQ ID NO: 917131 - DNA, 15 bp, Homo sapiens
gactagatgaattct

SEQ ID NO: 917132 - DNA, 15 bp, Homo sapiens
actagatgaattcta

SEQ ID NO: 917133 - DNA, 15 bp, Homo sapiens
ctagatgaattctaa

SEQ ID NO: 917134 - DNA, 15 bp, Homo sapiens
tagatgaattctaag

SEQ ID NO: 917135 - DNA, 15 bp, Homo sapiens
agatgaattctaaga

SEQ ID NO: 917136 - DNA, 15 bp, Homo sapiens
gatgaattctaagat

SEQ ID NO: 917137 - DNA, 15 bp, Homo sapiens
atgaattctaagatt

SEQ ID NO: 917138 - DNA, 15 bp, Homo sapiens
tgaattctaagattc

SEQ ID NO: 917139 - DNA, 15 bp, Homo sapiens
gaattctaagattcc

SEQ ID NO: 917140 - DNA, 15 bp, Homo sapiens
aattctaagattcct

SEQ ID NO: 917141 - DNA, 15 bp, Homo sapiens
attctaagattcctt

SEQ ID NO: 917142 - DNA, 15 bp, Homo sapiens
ttctaagattccttc

SEQ ID NO: 917143 - DNA, 15 bp, Homo sapiens
tctaagattccttcc

SEQ ID NO: 917144 - DNA, 15 bp, Homo sapiens
ctaagattccttcca

SEQ ID NO: 917145 - DNA, 15 bp, Homo sapiens
taagattccttccat

SEQ ID NO: 917146 - DNA, 15 bp, Homo sapiens
aagattccttccatc

SEQ ID NO: 917147 - DNA, 15 bp, Homo sapiens
agattccttccatct

SEQ ID NO: 917148 - DNA, 15 bp, Homo sapiens
gattccttccatctt

SEQ ID NO: 917149 - DNA, 15 bp, Homo sapiens
attccttccatcttt

SEQ ID NO: 917150 - DNA, 15 bp, Homo sapiens
ttccttccatctttg

SEQ ID NO: 917151 - DNA, 15 bp, Homo sapiens
tccttccatctttga

SEQ ID NO: 917152 - DNA, 15 bp, Homo sapiens
ccttccatctttgac

SEQ ID NO: 917153 - DNA, 15 bp, Homo sapiens
cttccatctttgact

SEQ ID NO: 917154 - DNA, 15 bp, Homo sapiens
ttccatctttgactt

SEQ ID NO: 917155 - DNA, 15 bp, Homo sapiens
tccatctttgacttt

SEQ ID NO: 917156 - DNA, 15 bp, Homo sapiens
ccatctttgactttc

SEQ ID NO: 917157 - DNA, 15 bp, Homo sapiens
catctttgactttcc

SEQ ID NO: 917158 - DNA, 15 bp, Homo sapiens
atctttgactttccc

SEQ ID NO: 917159 - DNA, 15 bp, Homo sapiens
tctttgactttccct

SEQ ID NO: 917160 - DNA, 15 bp, Homo sapiens
ctttgactttccctt

SEQ ID NO: 917161 - DNA, 15 bp, Homo sapiens
tttgactttcccttg

SEQ ID NO: 917162 - DNA, 15 bp, Homo sapiens
ttgactttcccttga

SEQ ID NO: 917163 - DNA, 15 bp, Homo sapiens
tgactttcccttgac

SEQ ID NO: 917164 - DNA, 15 bp, Homo sapiens
gactttcccttgacc

SEQ ID NO: 917165 - DNA, 15 bp, Homo sapiens
actttcccttgacct

SEQ ID NO: 917166 - DNA, 15 bp, Homo sapiens
ctttcccttgaccta

SEQ ID NO: 917167 - DNA, 15 bp, Homo sapiens
tttcccttgacctaa

SEQ ID NO: 917168 - DNA, 15 bp, Homo sapiens
ttcccttgacctaag

SEQ ID NO: 917169 - DNA, 15 bp, Homo sapiens
tcccttgacctaagc

SEQ ID NO: 917170 - DNA, 15 bp, Homo sapiens
cccttgacctaagca

SEQ ID NO: 917171 - DNA, 15 bp, Homo sapiens
ccttgacctaagcag

SEQ ID NO: 917172 - DNA, 15 bp, Homo sapiens
cttgacctaagcagg

SEQ ID NO: 917173 - DNA, 15 bp, Homo sapiens
ttgacctaagcagga

SEQ ID NO: 917174 - DNA, 15 bp, Homo sapiens
tgacctaagcaggag

SEQ ID NO: 917175 - DNA, 15 bp, Homo sapiens
gacctaagcaggagg

SEQ ID NO: 917176 - DNA, 15 bp, Homo sapiens
acctaagcaggaggt

SEQ ID NO: 917177 - DNA, 15 bp, Homo sapiens
cctaagcaggaggtg

SEQ ID NO: 917178 - DNA, 15 bp, Homo sapiens
ctaagcaggaggtgg

SEQ ID NO: 917179 - DNA, 15 bp, Homo sapiens
taagcaggaggtgga

SEQ ID NO: 917180 - DNA, 15 bp, Homo sapiens
aagcaggaggtggaa

SEQ ID NO: 917181 - DNA, 15 bp, Homo sapiens
agcaggaggtggaaa

SEQ ID NO: 917182 - DNA, 15 bp, Homo sapiens
gcaggaggtggaaat

SEQ ID NO: 917183 - DNA, 15 bp, Homo sapiens
caggaggtggaaata

SEQ ID NO: 917184 - DNA, 15 bp, Homo sapiens
aggaggtggaaataa

SEQ ID NO: 917185 - DNA, 15 bp, Homo sapiens
ggaggtggaaataat

SEQ ID NO: 917186 - DNA, 15 bp, Homo sapiens
gaggtggaaataatt

SEQ ID NO: 917187 - DNA, 15 bp, Homo sapiens
aggtggaaataattt

SEQ ID NO: 917188 - DNA, 15 bp, Homo sapiens
ggtggaaataatttc

SEQ ID NO: 917189 - DNA, 15 bp, Homo sapiens
gtggaaataatttcc

SEQ ID NO: 917190 - DNA, 15 bp, Homo sapiens
tggaaataatttcca

SEQ ID NO: 917191 - DNA, 15 bp, Homo sapiens
ggaaataatttccag

SEQ ID NO: 917192 - DNA, 15 bp, Homo sapiens
gaaataatttccagc

SEQ ID NO: 917193 - DNA, 15 bp, Homo sapiens
aaataatttccagct

SEQ ID NO: 917194 - DNA, 15 bp, Homo sapiens
aataatttccagctg

SEQ ID NO: 917195 - DNA, 15 bp, Homo sapiens
ataatttccagctgc

SEQ ID NO: 917196 - DNA, 15 bp, Homo sapiens
taatttccagctgca

SEQ ID NO: 917197 - DNA, 15 bp, Homo sapiens
aatttccagctgcaa

SEQ ID NO: 917198 - DNA, 15 bp, Homo sapiens
atttccagctgcaaa

SEQ ID NO: 917199 - DNA, 15 bp, Homo sapiens
tttccagctgcaaac

SEQ ID NO: 917200 - DNA, 15 bp, Homo sapiens
ttccagctgcaaaca

SEQ ID NO: 917201 - DNA, 15 bp, Homo sapiens
tccagctgcaaacac

SEQ ID NO: 917202 - DNA, 15 bp, Homo sapiens
ccagctgcaaacacc

SEQ ID NO: 917203 - DNA, 15 bp, Homo sapiens
cagctgcaaacacca

SEQ ID NO: 917204 - DNA, 15 bp, Homo sapiens
agctgcaaacaccag

SEQ ID NO: 917205 - DNA, 15 bp, Homo sapiens
gctgcaaacaccagc

SEQ ID NO: 917206 - DNA, 15 bp, Homo sapiens
ctgcaaacaccagca

SEQ ID NO: 917207 - DNA, 15 bp, Homo sapiens
tgcaaacaccagcag

SEQ ID NO: 917208 - DNA, 15 bp, Homo sapiens
gcaaacaccagcaga

SEQ ID NO: 917209 - DNA, 15 bp, Homo sapiens
caaacaccagcagag

SEQ ID NO: 917210 - DNA, 15 bp, Homo sapiens
aaacaccagcagaga

SEQ ID NO: 917211 - DNA, 15 bp, Homo sapiens
aacaccagcagagag

SEQ ID NO: 917212 - DNA, 15 bp, Homo sapiens
acaccagcagagagc

SEQ ID NO: 917213 - DNA, 15 bp, Homo sapiens
caccagcagagagcc

SEQ ID NO: 917214 - DNA, 15 bp, Homo sapiens
accagcagagagcca

SEQ ID NO: 917215 - DNA, 15 bp, Homo sapiens
ccagcagagagccaa

SEQ ID NO: 917216 - DNA, 15 bp, Homo sapiens
cagcagagagccaaa

SEQ ID NO: 917217 - DNA, 15 bp, Homo sapiens
agcagagagccaaat

SEQ ID NO: 917218 - DNA, 15 bp, Homo sapiens
gcagagagccaaatt

SEQ ID NO: 917219 - DNA, 15 bp, Homo sapiens
cagagagccaaatta

SEQ ID NO: 917220 - DNA, 15 bp, Homo sapiens
agagagccaaattaa

SEQ ID NO: 917221 - DNA, 15 bp, Homo sapiens
gagagccaaattaaa

SEQ ID NO: 917222 - DNA, 15 bp, Homo sapiens
agagccaaattaaaa

SEQ ID NO: 917223 - DNA, 15 bp, Homo sapiens
gagccaaattaaaaa

SEQ ID NO: 917224 - DNA, 15 bp, Homo sapiens
agccaaattaaaaag

SEQ ID NO: 917225 - DNA, 15 bp, Homo sapiens
gccaaattaaaaaga

SEQ ID NO: 917226 - DNA, 15 bp, Homo sapiens
ccaaattaaaaagaa

SEQ ID NO: 917227 - DNA, 15 bp, Homo sapiens
caaattaaaaagaag

SEQ ID NO: 917228 - DNA, 15 bp, Homo sapiens
aaattaaaaagaagt

SEQ ID NO: 917229 - DNA, 15 bp, Homo sapiens
aattaaaaagaagtt

SEQ ID NO: 917230 - DNA, 15 bp, Homo sapiens
attaaaaagaagttt

SEQ ID NO: 917231 - DNA, 15 bp, Homo sapiens
ttaaaaagaagtttt

SEQ ID NO: 917232 - DNA, 15 bp, Homo sapiens
taaaaagaagttttg

SEQ ID NO: 917233 - DNA, 15 bp, Homo sapiens
aaaaagaagttttgt

SEQ ID NO: 917234 - DNA, 15 bp, Homo sapiens
aaaagaagttttgtg

SEQ ID NO: 917235 - DNA, 15 bp, Homo sapiens
aaagaagttttgtga

SEQ ID NO: 917236 - DNA, 15 bp, Homo sapiens
aagaagttttgtgat

SEQ ID NO: 917237 - DNA, 15 bp, Homo sapiens
agaagttttgtgata

SEQ ID NO: 917238 - DNA, 15 bp, Homo sapiens
gaagttttgtgatat

SEQ ID NO: 917239 - DNA, 15 bp, Homo sapiens
aagttttgtgatatg

SEQ ID NO: 917240 - DNA, 15 bp, Homo sapiens
agttttgtgatatgc

SEQ ID NO: 917241 - DNA, 15 bp, Homo sapiens
gttttgtgatatgcc

SEQ ID NO: 917242 - DNA, 15 bp, Homo sapiens
ttttgtgatatgcca

SEQ ID NO: 917243 - DNA, 15 bp, Homo sapiens
tttgtgatatgccac

SEQ ID NO: 917244 - DNA, 15 bp, Homo sapiens
ttgtgatatgccact

SEQ ID NO: 917245 - DNA, 15 bp, Homo sapiens
tgtgatatgccactg

SEQ ID NO: 917246 - DNA, 15 bp, Homo sapiens
gtgatatgccactgg

SEQ ID NO: 917247 - DNA, 15 bp, Homo sapiens
tgatatgccactgga

SEQ ID NO: 917248 - DNA, 15 bp, Homo sapiens
gatatgccactggac

SEQ ID NO: 917249 - DNA, 15 bp, Homo sapiens
atatgccactggaca

SEQ ID NO: 917250 - DNA, 15 bp, Homo sapiens
tatgccactggacag

SEQ ID NO: 917251 - DNA, 15 bp, Homo sapiens
atgccactggacagg

SEQ ID NO: 917252 - DNA, 15 bp, Homo sapiens
tgccactggacagga

SEQ ID NO: 917253 - DNA, 15 bp, Homo sapiens
gccactggacaggaa

SEQ ID NO: 917254 - DNA, 15 bp, Homo sapiens
ccactggacaggaaa

SEQ ID NO: 917255 - DNA, 15 bp, Homo sapiens
cactggacaggaaaa

SEQ ID NO: 917256 - DNA, 15 bp, Homo sapiens
actggacaggaaaaa

SEQ ID NO: 917257 - DNA, 15 bp, Homo sapiens
ctggacaggaaaaaa

SEQ ID NO: 917258 - DNA, 15 bp, Homo sapiens
tggacaggaaaaaaa

SEQ ID NO: 917259 - DNA, 15 bp, Homo sapiens
ggacaggaaaaaaaa

SEQ ID NO: 917260 - DNA, 15 bp, Homo sapiens
gacaggaaaaaaaaa

SEQ ID NO: 917261 - DNA, 15 bp, Homo sapiens
acaggaaaaaaaaag

SEQ ID NO: 917262 - DNA, 15 bp, Homo sapiens
caggaaaaaaaaaga

SEQ ID NO: 917263 - DNA, 15 bp, Homo sapiens
aggaaaaaaaaagaa

SEQ ID NO: 917264 - DNA, 15 bp, Homo sapiens
ggaaaaaaaaagaaa

SEQ ID NO: 917265 - DNA, 15 bp, Homo sapiens
gaaaaaaaaagaaac

SEQ ID NO: 917266 - DNA, 15 bp, Homo sapiens
aaaaaaaaagaaaca

SEQ ID NO: 917267 - DNA, 15 bp, Homo sapiens
aaaaaaaagaaacaa

SEQ ID NO: 917268 - DNA, 15 bp, Homo sapiens
aaaaaaagaaacaag

SEQ ID NO: 917269 - DNA, 15 bp, Homo sapiens
aaaaaagaaacaagt

SEQ ID NO: 917270 - DNA, 15 bp, Homo sapiens
aaaaagaaacaagta

SEQ ID NO: 917271 - DNA, 15 bp, Homo sapiens
aaaagaaacaagtaa

SEQ ID NO: 917272 - DNA, 15 bp, Homo sapiens
aaagaaacaagtaat

SEQ ID NO: 917273 - DNA, 15 bp, Homo sapiens
aagaaacaagtaatt

SEQ ID NO: 917274 - DNA, 15 bp, Homo sapiens
agaaacaagtaattg

SEQ ID NO: 917275 - DNA, 15 bp, Homo sapiens
gaaacaagtaattgt

SEQ ID NO: 917276 - DNA, 15 bp, Homo sapiens
aaacaagtaattgtg

SEQ ID NO: 917277 - DNA, 15 bp, Homo sapiens
aacaagtaattgtgg

SEQ ID NO: 917278 - DNA, 15 bp, Homo sapiens
acaagtaattgtggt

SEQ ID NO: 917279 - DNA, 15 bp, Homo sapiens
caagtaattgtggta

SEQ ID NO: 917280 - DNA, 15 bp, Homo sapiens
aagtaattgtggtaa

SEQ ID NO: 917281 - DNA, 15 bp, Homo sapiens
agtaattgtggtaac

SEQ ID NO: 917282 - DNA, 15 bp, Homo sapiens
gtaattgtggtaaca

SEQ ID NO: 917283 - DNA, 15 bp, Homo sapiens
taattgtggtaacaa

SEQ ID NO: 917284 - DNA, 15 bp, Homo sapiens
aattgtggtaacaaa

SEQ ID NO: 917285 - DNA, 15 bp, Homo sapiens
attgtggtaacaaat

SEQ ID NO: 917286 - DNA, 15 bp, Homo sapiens
ttgtggtaacaaatc

SEQ ID NO: 917287 - DNA, 15 bp, Homo sapiens
tgtggtaacaaatca

SEQ ID NO: 917288 - DNA, 15 bp, Homo sapiens
gtggtaacaaatcaa

SEQ ID NO: 917289 - DNA, 15 bp, Homo sapiens
tggtaacaaatcaag

SEQ ID NO: 917290 - DNA, 15 bp, Homo sapiens
ggtaacaaatcaagc

SEQ ID NO: 917291 - DNA, 15 bp, Homo sapiens
gtaacaaatcaagca

SEQ ID NO: 917292 - DNA, 15 bp, Homo sapiens
taacaaatcaagcac

SEQ ID NO: 917293 - DNA, 15 bp, Homo sapiens
aacaaatcaagcacg

SEQ ID NO: 917294 - DNA, 15 bp, Homo sapiens
acaaatcaagcacgt

SEQ ID NO: 917295 - DNA, 15 bp, Homo sapiens
caaatcaagcacgtc

SEQ ID NO: 917296 - DNA, 15 bp, Homo sapiens
aaatcaagcacgtca

SEQ ID NO: 917297 - DNA, 15 bp, Homo sapiens
aatcaagcacgtcag

SEQ ID NO: 917298 - DNA, 15 bp, Homo sapiens
atcaagcacgtcagg

SEQ ID NO: 917299 - DNA, 15 bp, Homo sapiens
tcaagcacgtcagga

SEQ ID NO: 917300 - DNA, 15 bp, Homo sapiens
caagcacgtcaggaa

SEQ ID NO: 917301 - DNA, 15 bp, Homo sapiens
aagcacgtcaggaag

SEQ ID NO: 917302 - DNA, 15 bp, Homo sapiens
agcacgtcaggaagt

SEQ ID NO: 917303 - DNA, 15 bp, Homo sapiens
gcacgtcaggaagtc

SEQ ID NO: 917304 - DNA, 15 bp, Homo sapiens
cacgtcaggaagtct

SEQ ID NO: 917305 - DNA, 15 bp, Homo sapiens
acgtcaggaagtcta

SEQ ID NO: 917306 - DNA, 15 bp, Homo sapiens
cgtcaggaagtctaa

SEQ ID NO: 917307 - DNA, 15 bp, Homo sapiens
gtcaggaagtctaaa

SEQ ID NO: 917308 - DNA, 15 bp, Homo sapiens
tcaggaagtctaaag

SEQ ID NO: 917309 - DNA, 15 bp, Homo sapiens
caggaagtctaaaga

SEQ ID NO: 917310 - DNA, 15 bp, Homo sapiens
aggaagtctaaagat

SEQ ID NO: 917311 - DNA, 15 bp, Homo sapiens
ggaagtctaaagatg

SEQ ID NO: 917312 - DNA, 15 bp, Homo sapiens
gaagtctaaagatga

SEQ ID NO: 917313 - DNA, 15 bp, Homo sapiens
aagtctaaagatgag

SEQ ID NO: 917314 - DNA, 15 bp, Homo sapiens
agtctaaagatgagc

SEQ ID NO: 917315 - DNA, 15 bp, Homo sapiens
gtctaaagatgagct

SEQ ID NO: 917316 - DNA, 15 bp, Homo sapiens
tctaaagatgagctc

SEQ ID NO: 917317 - DNA, 15 bp, Homo sapiens
ctaaagatgagctct

SEQ ID NO: 917318 - DNA, 15 bp, Homo sapiens
taaagatgagctctt

SEQ ID NO: 917319 - DNA, 15 bp, Homo sapiens
aaagatgagctcttt

SEQ ID NO: 917320 - DNA, 15 bp, Homo sapiens
aagatgagctctttt

SEQ ID NO: 917321 - DNA, 15 bp, Homo sapiens
agatgagctctttta

SEQ ID NO: 917322 - DNA, 15 bp, Homo sapiens
gatgagctcttttag

SEQ ID NO: 917323 - DNA, 15 bp, Homo sapiens
atgagctcttttagt

SEQ ID NO: 917324 - DNA, 15 bp, Homo sapiens
tgagctcttttagtc

SEQ ID NO: 917325 - DNA, 15 bp, Homo sapiens
gagctcttttagtca

SEQ ID NO: 917326 - DNA, 15 bp, Homo sapiens
agctcttttagtcag

SEQ ID NO: 917327 - DNA, 15 bp, Homo sapiens
gctcttttagtcagc

SEQ ID NO: 917328 - DNA, 15 bp, Homo sapiens
ctcttttagtcagca

SEQ ID NO: 917329 - DNA, 15 bp, Homo sapiens
tcttttagtcagcat

SEQ ID NO: 917330 - DNA, 15 bp, Homo sapiens
cttttagtcagcatt

SEQ ID NO: 917331 - DNA, 15 bp, Homo sapiens
ttttagtcagcatta

SEQ ID NO: 917332 - DNA, 15 bp, Homo sapiens
tttagtcagcattat

SEQ ID NO: 917333 - DNA, 15 bp, Homo sapiens
ttagtcagcattata

SEQ ID NO: 917334 - DNA, 15 bp, Homo sapiens
tagtcagcattatat

SEQ ID NO: 917335 - DNA, 15 bp, Homo sapiens
agtcagcattatatt

SEQ ID NO: 917336 - DNA, 15 bp, Homo sapiens
gtcagcattatattt

SEQ ID NO: 917337 - DNA, 15 bp, Homo sapiens
tcagcattatatttt

SEQ ID NO: 917338 - DNA, 15 bp, Homo sapiens
cagcattatatttta

SEQ ID NO: 917339 - DNA, 15 bp, Homo sapiens
agcattatattttag

SEQ ID NO: 917340 - DNA, 15 bp, Homo sapiens
gcattatattttagc

SEQ ID NO: 917341 - DNA, 15 bp, Homo sapiens
cattatattttagca

SEQ ID NO: 917342 - DNA, 15 bp, Homo sapiens
attatattttagcat

SEQ ID NO: 917343 - DNA, 15 bp, Homo sapiens
ttatattttagcata

SEQ ID NO: 917344 - DNA, 15 bp, Homo sapiens
tatattttagcataa

SEQ ID NO: 917345 - DNA, 15 bp, Homo sapiens
atattttagcataaa

SEQ ID NO: 917346 - DNA, 15 bp, Homo sapiens
tattttagcataaaa

SEQ ID NO: 917347 - DNA, 15 bp, Homo sapiens
attttagcataaaat

SEQ ID NO: 917348 - DNA, 15 bp, Homo sapiens
ttttagcataaaata

SEQ ID NO: 917349 - DNA, 15 bp, Homo sapiens
tttagcataaaataa

SEQ ID NO: 917350 - DNA, 15 bp, Homo sapiens
ttagcataaaataaa

SEQ ID NO: 917351 - DNA, 15 bp, Homo sapiens
tagcataaaataaat

SEQ ID NO: 917352 - DNA, 15 bp, Homo sapiens
agcataaaataaatc

SEQ ID NO: 917353 - DNA, 15 bp, Homo sapiens
gcataaaataaatct

SEQ ID NO: 917354 - DNA, 15 bp, Homo sapiens
cataaaataaatctt

SEQ ID NO: 917355 - DNA, 15 bp, Homo sapiens
ataaaataaatcttg

SEQ ID NO: 917356 - DNA, 15 bp, Homo sapiens
taaaataaatcttgt

SEQ ID NO: 917357 - DNA, 15 bp, Homo sapiens
aaaataaatcttgtg

SEQ ID NO: 917358 - DNA, 15 bp, Homo sapiens
aaataaatcttgtgc

SEQ ID NO: 917359 - DNA, 15 bp, Homo sapiens
aataaatcttgtgcc

SEQ ID NO: 917360 - DNA, 15 bp, Homo sapiens
ataaatcttgtgcct

SEQ ID NO: 917361 - DNA, 15 bp, Homo sapiens
taaatcttgtgcctt

SEQ ID NO: 917362 - DNA, 15 bp, Homo sapiens
aaatcttgtgccttt

SEQ ID NO: 917363 - DNA, 15 bp, Homo sapiens
aatcttgtgccttta

SEQ ID NO: 917364 - DNA, 15 bp, Homo sapiens
atcttgtgcctttaa

SEQ ID NO: 917365 - DNA, 15 bp, Homo sapiens
tcttgtgcctttaaa

SEQ ID NO: 917366 - DNA, 15 bp, Homo sapiens
cttgtgcctttaaaa

SEQ ID NO: 917367 - DNA, 15 bp, Homo sapiens
ttgtgcctttaaaat

SEQ ID NO: 917368 - DNA, 15 bp, Homo sapiens
tgtgcctttaaaatt

SEQ ID NO: 917369 - DNA, 15 bp, Homo sapiens
gtgcctttaaaattt

SEQ ID NO: 917370 - DNA, 15 bp, Homo sapiens
tgcctttaaaattta

SEQ ID NO: 917371 - DNA, 15 bp, Homo sapiens
gcctttaaaatttac

SEQ ID NO: 917372 - DNA, 15 bp, Homo sapiens
cctttaaaatttact

SEQ ID NO: 917373 - DNA, 15 bp, Homo sapiens
ctttaaaatttactt

SEQ ID NO: 917374 - DNA, 15 bp, Homo sapiens
tttaaaatttacttt

SEQ ID NO: 917375 - DNA, 15 bp, Homo sapiens
ttaaaatttactttt

SEQ ID NO: 917376 - DNA, 15 bp, Homo sapiens
taaaatttacttttt

SEQ ID NO: 917377 - DNA, 15 bp, Homo sapiens
aaaatttactttttg

SEQ ID NO: 917378 - DNA, 15 bp, Homo sapiens
aaatttactttttga

SEQ ID NO: 917379 - DNA, 15 bp, Homo sapiens
aatttactttttgaa

SEQ ID NO: 917380 - DNA, 15 bp, Homo sapiens
atttactttttgaaa

SEQ ID NO: 917381 - DNA, 15 bp, Homo sapiens
tttactttttgaaaa

SEQ ID NO: 917382 - DNA, 15 bp, Homo sapiens
ttactttttgaaaac

SEQ ID NO: 917383 - DNA, 15 bp, Homo sapiens
tactttttgaaaaca

SEQ ID NO: 917384 - DNA, 15 bp, Homo sapiens
actttttgaaaacag

SEQ ID NO: 917385 - DNA, 15 bp, Homo sapiens
ctttttgaaaacagc

SEQ ID NO: 917386 - DNA, 15 bp, Homo sapiens
tttttgaaaacagcc

SEQ ID NO: 917387 - DNA, 15 bp, Homo sapiens
ttttgaaaacagcct

SEQ ID NO: 917388 - DNA, 15 bp, Homo sapiens
tttgaaaacagcctg

SEQ ID NO: 917389 - DNA, 15 bp, Homo sapiens
ttgaaaacagcctgt

SEQ ID NO: 917390 - DNA, 15 bp, Homo sapiens
tgaaaacagcctgtc

SEQ ID NO: 917391 - DNA, 15 bp, Homo sapiens
gaaaacagcctgtca

SEQ ID NO: 917392 - DNA, 15 bp, Homo sapiens
aaaacagcctgtcat

SEQ ID NO: 917393 - DNA, 15 bp, Homo sapiens
aaacagcctgtcata

SEQ ID NO: 917394 - DNA, 15 bp, Homo sapiens
aacagcctgtcataa

SEQ ID NO: 917395 - DNA, 15 bp, Homo sapiens
acagcctgtcataat

SEQ ID NO: 917396 - DNA, 15 bp, Homo sapiens
cagcctgtcataatt

SEQ ID NO: 917397 - DNA, 15 bp, Homo sapiens
agcctgtcataattt

SEQ ID NO: 917398 - DNA, 15 bp, Homo sapiens
gcctgtcataatttt

SEQ ID NO: 917399 - DNA, 15 bp, Homo sapiens
cctgtcataattttt

SEQ ID NO: 917400 - DNA, 15 bp, Homo sapiens
ctgtcataatttttt

SEQ ID NO: 917401 - DNA, 15 bp, Homo sapiens
tgtcataattttttt

SEQ ID NO: 917402 - DNA, 15 bp, Homo sapiens
gtcataatttttttt

SEQ ID NO: 917403 - DNA, 15 bp, Homo sapiens
tcataattttttttc

SEQ ID NO: 917404 - DNA, 15 bp, Homo sapiens
cataattttttttca

SEQ ID NO: 917405 - DNA, 15 bp, Homo sapiens
ataattttttttcag

SEQ ID NO: 917406 - DNA, 15 bp, Homo sapiens
taattttttttcaga

SEQ ID NO: 917407 - DNA, 15 bp, Homo sapiens
aattttttttcagaa

SEQ ID NO: 917408 - DNA, 15 bp, Homo sapiens
attttttttcagaag

SEQ ID NO: 917409 - DNA, 15 bp, Homo sapiens
ttttttttcagaaga

SEQ ID NO: 917410 - DNA, 15 bp, Homo sapiens
tttttttcagaagaa

SEQ ID NO: 917411 - DNA, 15 bp, Homo sapiens
ttttttcagaagaat

SEQ ID NO: 917412 - DNA, 15 bp, Homo sapiens
tttttcagaagaata

SEQ ID NO: 917413 - DNA, 15 bp, Homo sapiens
ttttcagaagaatag

SEQ ID NO: 917414 - DNA, 15 bp, Homo sapiens
tttcagaagaataga

SEQ ID NO: 917415 - DNA, 15 bp, Homo sapiens
ttcagaagaatagaa

SEQ ID NO: 917416 - DNA, 15 bp, Homo sapiens
tcagaagaatagaag

SEQ ID NO: 917417 - DNA, 15 bp, Homo sapiens
cagaagaatagaagg

SEQ ID NO: 917418 - DNA, 15 bp, Homo sapiens
agaagaatagaagga

SEQ ID NO: 917419 - DNA, 15 bp, Homo sapiens
gaagaatagaaggag

SEQ ID NO: 917420 - DNA, 15 bp, Homo sapiens
aagaatagaaggagg

SEQ ID NO: 917421 - DNA, 15 bp, Homo sapiens
agaatagaaggaggt

SEQ ID NO: 917422 - DNA, 15 bp, Homo sapiens
gaatagaaggaggtg

SEQ ID NO: 917423 - DNA, 15 bp, Homo sapiens
aatagaaggaggtgg

SEQ ID NO: 917424 - DNA, 15 bp, Homo sapiens
atagaaggaggtggg

SEQ ID NO: 917425 - DNA, 15 bp, Homo sapiens
tagaaggaggtgggg

SEQ ID NO: 917426 - DNA, 15 bp, Homo sapiens
agaaggaggtgggga

SEQ ID NO: 917427 - DNA, 15 bp, Homo sapiens
gaaggaggtggggag

SEQ ID NO: 917428 - DNA, 15 bp, Homo sapiens
aaggaggtggggaga

SEQ ID NO: 917429 - DNA, 15 bp, Homo sapiens
aggaggtggggagaa

SEQ ID NO: 917430 - DNA, 15 bp, Homo sapiens
ggaggtggggagaaa

SEQ ID NO: 917431 - DNA, 15 bp, Homo sapiens
gaggtggggagaaag

SEQ ID NO: 917432 - DNA, 15 bp, Homo sapiens
aggtggggagaaagc

SEQ ID NO: 917433 - DNA, 15 bp, Homo sapiens
ggtggggagaaagca

SEQ ID NO: 917434 - DNA, 15 bp, Homo sapiens
gtggggagaaagcaa

SEQ ID NO: 917435 - DNA, 15 bp, Homo sapiens
tggggagaaagcaat

SEQ ID NO: 917436 - DNA, 15 bp, Homo sapiens
ggggagaaagcaatt

SEQ ID NO: 917437 - DNA, 15 bp, Homo sapiens
gggagaaagcaattt

SEQ ID NO: 917438 - DNA, 15 bp, Homo sapiens
ggagaaagcaatttt

SEQ ID NO: 917439 - DNA, 15 bp, Homo sapiens
gagaaagcaattttc

SEQ ID NO: 917440 - DNA, 15 bp, Homo sapiens
agaaagcaattttct

SEQ ID NO: 917441 - DNA, 15 bp, Homo sapiens
gaaagcaattttctt

SEQ ID NO: 917442 - DNA, 15 bp, Homo sapiens
aaagcaattttcttt

SEQ ID NO: 917443 - DNA, 15 bp, Homo sapiens
aagcaattttctttt

SEQ ID NO: 917444 - DNA, 15 bp, Homo sapiens
agcaattttcttttc

SEQ ID NO: 917445 - DNA, 15 bp, Homo sapiens
gcaattttcttttct

SEQ ID NO: 917446 - DNA, 15 bp, Homo sapiens
caattttcttttctt

SEQ ID NO: 917447 - DNA, 15 bp, Homo sapiens
aattttcttttcttt

SEQ ID NO: 917448 - DNA, 15 bp, Homo sapiens
attttcttttctttt

SEQ ID NO: 917449 - DNA, 15 bp, Homo sapiens
ttttcttttcttttt

SEQ ID NO: 917450 - DNA, 15 bp, Homo sapiens
tttcttttctttttt

SEQ ID NO: 917451 - DNA, 15 bp, Homo sapiens
ttcttttcttttttt

SEQ ID NO: 917452 - DNA, 15 bp, Homo sapiens
tcttttctttttttt

SEQ ID NO: 917453 - DNA, 15 bp, Homo sapiens
cttttcttttttttt

SEQ ID NO: 917454 - DNA, 15 bp, Homo sapiens
tttcttttttttttc

SEQ ID NO: 917455 - DNA, 15 bp, Homo sapiens
tttttttttctttct

SEQ ID NO: 917456 - DNA, 15 bp, Homo sapiens
ttttttttctttctt

SEQ ID NO: 917457 - DNA, 15 bp, Homo sapiens
tttttttctttcttt

SEQ ID NO: 917458 - DNA, 15 bp, Homo sapiens
ttttttctttctttt

SEQ ID NO: 917459 - DNA, 15 bp, Homo sapiens
tttttctttcttttt

SEQ ID NO: 917460 - DNA, 15 bp, Homo sapiens
ttttctttctttttt

SEQ ID NO: 917461 - DNA, 15 bp, Homo sapiens
tttctttcttttttt

SEQ ID NO: 917462 - DNA, 15 bp, Homo sapiens
ttctttctttttttt

SEQ ID NO: 917463 - DNA, 15 bp, Homo sapiens
tctttcttttttttt

SEQ ID NO: 917464 - DNA, 15 bp, Homo sapiens
ctttctttttttttt

SEQ ID NO: 917465 - DNA, 15 bp, Homo sapiens
ttttttttttttgag

SEQ ID NO: 917466 - DNA, 15 bp, Homo sapiens
tttttttttttgaga

SEQ ID NO: 917467 - DNA, 15 bp, Homo sapiens
ttttttttttgagac

SEQ ID NO: 917468 - DNA, 15 bp, Homo sapiens
tttttttttgagaca

SEQ ID NO: 917469 - DNA, 15 bp, Homo sapiens
ttttttttgagacag

SEQ ID NO: 917470 - DNA, 15 bp, Homo sapiens
tttttttgagacagc

SEQ ID NO: 917471 - DNA, 15 bp, Homo sapiens
ttttttgagacagcg

SEQ ID NO: 917472 - DNA, 15 bp, Homo sapiens
tttttgagacagcgt

SEQ ID NO: 917473 - DNA, 15 bp, Homo sapiens
ttttgagacagcgtc

SEQ ID NO: 917474 - DNA, 15 bp, Homo sapiens
tttgagacagcgtct

SEQ ID NO: 917475 - DNA, 15 bp, Homo sapiens
ttgagacagcgtctc

SEQ ID NO: 917476 - DNA, 15 bp, Homo sapiens
tgagacagcgtctcg

SEQ ID NO: 917477 - DNA, 15 bp, Homo sapiens
gagacagcgtctcgc

SEQ ID NO: 917478 - DNA, 15 bp, Homo sapiens
agacagcgtctcgct

SEQ ID NO: 917479 - DNA, 15 bp, Homo sapiens
gacagcgtctcgctc

SEQ ID NO: 917480 - DNA, 15 bp, Homo sapiens
acagcgtctcgctct

SEQ ID NO: 917481 - DNA, 15 bp, Homo sapiens
cagcgtctcgctctg

SEQ ID NO: 917482 - DNA, 15 bp, Homo sapiens
agcgtctcgctctgt

SEQ ID NO: 917483 - DNA, 15 bp, Homo sapiens
gcgtctcgctctgtc

SEQ ID NO: 917484 - DNA, 15 bp, Homo sapiens
cgtctcgctctgtca

SEQ ID NO: 917485 - DNA, 15 bp, Homo sapiens
gtctcgctctgtcac

SEQ ID NO: 917486 - DNA, 15 bp, Homo sapiens
tctcgctctgtcacc

SEQ ID NO: 917487 - DNA, 15 bp, Homo sapiens
ctcgctctgtcacca

SEQ ID NO: 917488 - DNA, 15 bp, Homo sapiens
tcgctctgtcaccag

SEQ ID NO: 917489 - DNA, 15 bp, Homo sapiens
cgctctgtcaccagg

SEQ ID NO: 917490 - DNA, 15 bp, Homo sapiens
gctctgtcaccaggc

SEQ ID NO: 917491 - DNA, 15 bp, Homo sapiens
ctctgtcaccaggct

SEQ ID NO: 917492 - DNA, 15 bp, Homo sapiens
tctgtcaccaggctg

SEQ ID NO: 917493 - DNA, 15 bp, Homo sapiens
ctgtcaccaggctgg

SEQ ID NO: 917494 - DNA, 15 bp, Homo sapiens
tgtcaccaggctgga

SEQ ID NO: 917495 - DNA, 15 bp, Homo sapiens
gtcaccaggctggag

SEQ ID NO: 917496 - DNA, 15 bp, Homo sapiens
tcaccaggctggagt

SEQ ID NO: 917497 - DNA, 15 bp, Homo sapiens
caccaggctggagtg

SEQ ID NO: 917498 - DNA, 15 bp, Homo sapiens
accaggctggagtgc

SEQ ID NO: 917499 - DNA, 15 bp, Homo sapiens
ggagtgcagtggcat

SEQ ID NO: 917500 - DNA, 15 bp, Homo sapiens
gagtgcagtggcatg

SEQ ID NO: 917501 - DNA, 15 bp, Homo sapiens
agtgcagtggcatga

SEQ ID NO: 917502 - DNA, 15 bp, Homo sapiens
gtgcagtggcatgat

SEQ ID NO: 917503 - DNA, 15 bp, Homo sapiens
tgcagtggcatgatc

SEQ ID NO: 917504 - DNA, 15 bp, Homo sapiens
gcagtggcatgatct

SEQ ID NO: 917505 - DNA, 15 bp, Homo sapiens
cagtggcatgatctc

SEQ ID NO: 917506 - DNA, 15 bp, Homo sapiens
agtggcatgatctcg

SEQ ID NO: 917507 - DNA, 15 bp, Homo sapiens
gtggcatgatctcgg

SEQ ID NO: 917508 - DNA, 15 bp, Homo sapiens
tggcatgatctcggc

SEQ ID NO: 917509 - DNA, 15 bp, Homo sapiens
ggcatgatctcggct

SEQ ID NO: 917510 - DNA, 15 bp, Homo sapiens
gcatgatctcggctc

SEQ ID NO: 917511 - DNA, 15 bp, Homo sapiens
catgatctcggctca

SEQ ID NO: 917512 - DNA, 15 bp, Homo sapiens
atgatctcggctcac

SEQ ID NO: 917513 - DNA, 15 bp, Homo sapiens
tgatctcggctcact

SEQ ID NO: 917514 - DNA, 15 bp, Homo sapiens
tcactgcaacctccg

SEQ ID NO: 917515 - DNA, 15 bp, Homo sapiens
cactgcaacctccgc

SEQ ID NO: 917516 - DNA, 15 bp, Homo sapiens
actgcaacctccgcc

SEQ ID NO: 917517 - DNA, 15 bp, Homo sapiens
tgcaacctccgcctc

SEQ ID NO: 917518 - DNA, 15 bp, Homo sapiens
gcaacctccgcctcc

SEQ ID NO: 917519 - DNA, 15 bp, Homo sapiens
caacctccgcctccc

SEQ ID NO: 917520 - DNA, 15 bp, Homo sapiens
aacctccgcctcccg

SEQ ID NO: 917521 - DNA, 15 bp, Homo sapiens
acctccgcctcccgg

SEQ ID NO: 917522 - DNA, 15 bp, Homo sapiens
cctccgcctcccggg

SEQ ID NO: 917523 - DNA, 15 bp, Homo sapiens
ctccgcctcccgggt

SEQ ID NO: 917524 - DNA, 15 bp, Homo sapiens
tccgcctcccgggtt

SEQ ID NO: 917525 - DNA, 15 bp, Homo sapiens
ccgcctcccgggttc

SEQ ID NO: 917526 - DNA, 15 bp, Homo sapiens
cgcctcccgggttca

SEQ ID NO: 917527 - DNA, 15 bp, Homo sapiens
gcctcccgggttcaa

SEQ ID NO: 917528 - DNA, 15 bp, Homo sapiens
cctcccgggttcaag

SEQ ID NO: 917529 - DNA, 15 bp, Homo sapiens
ctcccgggttcaagt

SEQ ID NO: 917530 - DNA, 15 bp, Homo sapiens
tcccgggttcaagtg

SEQ ID NO: 917531 - DNA, 15 bp, Homo sapiens
cccgggttcaagtga

SEQ ID NO: 917532 - DNA, 15 bp, Homo sapiens
ccgggttcaagtgat

SEQ ID NO: 917533 - DNA, 15 bp, Homo sapiens
cgggttcaagtgatt

SEQ ID NO: 917534 - DNA, 15 bp, Homo sapiens
gggttcaagtgattc

SEQ ID NO: 917535 - DNA, 15 bp, Homo sapiens
ggttcaagtgattct

SEQ ID NO: 917536 - DNA, 15 bp, Homo sapiens
ctgcctcagcctcct

SEQ ID NO: 917537 - DNA, 15 bp, Homo sapiens
tgcctcagcctcctg

SEQ ID NO: 917538 - DNA, 15 bp, Homo sapiens
gcctcagcctcctga

SEQ ID NO: 917539 - DNA, 15 bp, Homo sapiens
cctcagcctcctgag

SEQ ID NO: 917540 - DNA, 15 bp, Homo sapiens
ctcagcctcctgagt

SEQ ID NO: 917541 - DNA, 15 bp, Homo sapiens
tcagcctcctgagta

SEQ ID NO: 917542 - DNA, 15 bp, Homo sapiens
cagcctcctgagtag

SEQ ID NO: 917543 - DNA, 15 bp, Homo sapiens
agcctcctgagtagt

SEQ ID NO: 917544 - DNA, 15 bp, Homo sapiens
gcctcctgagtagtt

SEQ ID NO: 917545 - DNA, 15 bp, Homo sapiens
cctcctgagtagttg

SEQ ID NO: 917546 - DNA, 15 bp, Homo sapiens
ctcctgagtagttgg

SEQ ID NO: 917547 - DNA, 15 bp, Homo sapiens
tcctgagtagttggg

SEQ ID NO: 917548 - DNA, 15 bp, Homo sapiens
cctgagtagttggga

SEQ ID NO: 917549 - DNA, 15 bp, Homo sapiens
ctgagtagttgggat

SEQ ID NO: 917550 - DNA, 15 bp, Homo sapiens
tgagtagttgggatt

SEQ ID NO: 917551 - DNA, 15 bp, Homo sapiens
gagtagttgggatta

SEQ ID NO: 917552 - DNA, 15 bp, Homo sapiens
agtagttgggattac

SEQ ID NO: 917553 - DNA, 15 bp, Homo sapiens
gtagttgggattaca

SEQ ID NO: 917554 - DNA, 15 bp, Homo sapiens
tagttgggattacag

SEQ ID NO: 917555 - DNA, 15 bp, Homo sapiens
agttgggattacagg

SEQ ID NO: 917556 - DNA, 15 bp, Homo sapiens
gttgggattacaggc

SEQ ID NO: 917557 - DNA, 15 bp, Homo sapiens
ttgggattacaggca

SEQ ID NO: 917558 - DNA, 15 bp, Homo sapiens
ggattacaggcatgt

SEQ ID NO: 917559 - DNA, 15 bp, Homo sapiens
gattacaggcatgtg

SEQ ID NO: 917560 - DNA, 15 bp, Homo sapiens
attacaggcatgtgc

SEQ ID NO: 917561 - DNA, 15 bp, Homo sapiens
ttacaggcatgtgcc

SEQ ID NO: 917562 - DNA, 15 bp, Homo sapiens
tacaggcatgtgcca

SEQ ID NO: 917563 - DNA, 15 bp, Homo sapiens
acaggcatgtgccac

SEQ ID NO: 917564 - DNA, 15 bp, Homo sapiens
caggcatgtgccacc

SEQ ID NO: 917565 - DNA, 15 bp, Homo sapiens
aggcatgtgccacca

SEQ ID NO: 917566 - DNA, 15 bp, Homo sapiens
ggcatgtgccaccac

SEQ ID NO: 917567 - DNA, 15 bp, Homo sapiens
gcatgtgccaccacg

SEQ ID NO: 917568 - DNA, 15 bp, Homo sapiens
catgtgccaccacgc

SEQ ID NO: 917569 - DNA, 15 bp, Homo sapiens
atgtgccaccacgcc

SEQ ID NO: 917570 - DNA, 15 bp, Homo sapiens
tgtgccaccacgcct

SEQ ID NO: 917571 - DNA, 15 bp, Homo sapiens
gtgccaccacgcctg

SEQ ID NO: 917572 - DNA, 15 bp, Homo sapiens
tgccaccacgcctgg

SEQ ID NO: 917573 - DNA, 15 bp, Homo sapiens
gccaccacgcctggc

SEQ ID NO: 917574 - DNA, 15 bp, Homo sapiens
ccaccacgcctggct

SEQ ID NO: 917575 - DNA, 15 bp, Homo sapiens
caccacgcctggcta

SEQ ID NO: 917576 - DNA, 15 bp, Homo sapiens
accacgcctggctaa

SEQ ID NO: 917577 - DNA, 15 bp, Homo sapiens
ccacgcctggctaat

SEQ ID NO: 917578 - DNA, 15 bp, Homo sapiens
cacgcctggctaatt

SEQ ID NO: 917579 - DNA, 15 bp, Homo sapiens
acgcctggctaattt

SEQ ID NO: 917580 - DNA, 15 bp, Homo sapiens
cgcctggctaatttt

SEQ ID NO: 917581 - DNA, 15 bp, Homo sapiens
gcctggctaattttt

SEQ ID NO: 917582 - DNA, 15 bp, Homo sapiens
cctggctaatttttg

SEQ ID NO: 917583 - DNA, 15 bp, Homo sapiens
ctggctaatttttgt

SEQ ID NO: 917584 - DNA, 15 bp, Homo sapiens
tggctaatttttgta

SEQ ID NO: 917585 - DNA, 15 bp, Homo sapiens
ggctaatttttgtat

SEQ ID NO: 917586 - DNA, 15 bp, Homo sapiens
gctaatttttgtatt

SEQ ID NO: 917587 - DNA, 15 bp, Homo sapiens
ctaatttttgtattt

SEQ ID NO: 917588 - DNA, 15 bp, Homo sapiens
atttttagtagagac

SEQ ID NO: 917589 - DNA, 15 bp, Homo sapiens
tttttagtagagaca

SEQ ID NO: 917590 - DNA, 15 bp, Homo sapiens
ttttagtagagacag

SEQ ID NO: 917591 - DNA, 15 bp, Homo sapiens
tttagtagagacagg

SEQ ID NO: 917592 - DNA, 15 bp, Homo sapiens
ttagtagagacaggg

SEQ ID NO: 917593 - DNA, 15 bp, Homo sapiens
tagtagagacagggt

SEQ ID NO: 917594 - DNA, 15 bp, Homo sapiens
agtagagacagggtt

SEQ ID NO: 917595 - DNA, 15 bp, Homo sapiens
gtagagacagggttt

SEQ ID NO: 917596 - DNA, 15 bp, Homo sapiens
tagagacagggtttc

SEQ ID NO: 917597 - DNA, 15 bp, Homo sapiens
agagacagggtttca

SEQ ID NO: 917598 - DNA, 15 bp, Homo sapiens
gagacagggtttcac

SEQ ID NO: 917599 - DNA, 15 bp, Homo sapiens
agacagggtttcacc

SEQ ID NO: 917600 - DNA, 15 bp, Homo sapiens
gacagggtttcaccg

SEQ ID NO: 917601 - DNA, 15 bp, Homo sapiens
acagggtttcaccgt

SEQ ID NO: 917602 - DNA, 15 bp, Homo sapiens
cagggtttcaccgtg

SEQ ID NO: 917603 - DNA, 15 bp, Homo sapiens
agggtttcaccgtgt

SEQ ID NO: 917604 - DNA, 15 bp, Homo sapiens
gggtttcaccgtgtt

SEQ ID NO: 917605 - DNA, 15 bp, Homo sapiens
ggtttcaccgtgttg

SEQ ID NO: 917606 - DNA, 15 bp, Homo sapiens
gtttcaccgtgttgg

SEQ ID NO: 917607 - DNA, 15 bp, Homo sapiens
tttcaccgtgttggt

SEQ ID NO: 917608 - DNA, 15 bp, Homo sapiens
ttcaccgtgttggtc

SEQ ID NO: 917609 - DNA, 15 bp, Homo sapiens
tcaccgtgttggtca

SEQ ID NO: 917610 - DNA, 15 bp, Homo sapiens
caccgtgttggtcag

SEQ ID NO: 917611 - DNA, 15 bp, Homo sapiens
accgtgttggtcagg

SEQ ID NO: 917612 - DNA, 15 bp, Homo sapiens
ccgtgttggtcaggc

SEQ ID NO: 917613 - DNA, 15 bp, Homo sapiens
cgtgttggtcaggct

SEQ ID NO: 917614 - DNA, 15 bp, Homo sapiens
gtgttggtcaggctc

SEQ ID NO: 917615 - DNA, 15 bp, Homo sapiens
tgttggtcaggctcg

SEQ ID NO: 917616 - DNA, 15 bp, Homo sapiens
gttggtcaggctcgt

SEQ ID NO: 917617 - DNA, 15 bp, Homo sapiens
ttggtcaggctcgtc

SEQ ID NO: 917618 - DNA, 15 bp, Homo sapiens
tggtcaggctcgtct

SEQ ID NO: 917619 - DNA, 15 bp, Homo sapiens
ggtcaggctcgtctc

SEQ ID NO: 917620 - DNA, 15 bp, Homo sapiens
gtcaggctcgtctcg

SEQ ID NO: 917621 - DNA, 15 bp, Homo sapiens
tcaggctcgtctcga

SEQ ID NO: 917622 - DNA, 15 bp, Homo sapiens
caggctcgtctcgaa

SEQ ID NO: 917623 - DNA, 15 bp, Homo sapiens
aggctcgtctcgaac

SEQ ID NO: 917624 - DNA, 15 bp, Homo sapiens
ggctcgtctcgaact

SEQ ID NO: 917625 - DNA, 15 bp, Homo sapiens
gctcgtctcgaactc

SEQ ID NO: 917626 - DNA, 15 bp, Homo sapiens
ctcgtctcgaactcc

SEQ ID NO: 917627 - DNA, 15 bp, Homo sapiens
tcgtctcgaactcct

SEQ ID NO: 917628 - DNA, 15 bp, Homo sapiens
cgtctcgaactcctg

SEQ ID NO: 917629 - DNA, 15 bp, Homo sapiens
gtctcgaactcctga

SEQ ID NO: 917630 - DNA, 15 bp, Homo sapiens
tctcgaactcctgac

SEQ ID NO: 917631 - DNA, 15 bp, Homo sapiens
ctcgaactcctgacc

SEQ ID NO: 917632 - DNA, 15 bp, Homo sapiens
tcgaactcctgacct

SEQ ID NO: 917633 - DNA, 15 bp, Homo sapiens
cgaactcctgacctc

SEQ ID NO: 917634 - DNA, 15 bp, Homo sapiens
gaactcctgacctcg

SEQ ID NO: 917635 - DNA, 15 bp, Homo sapiens
aactcctgacctcgg

SEQ ID NO: 917636 - DNA, 15 bp, Homo sapiens
actcctgacctcggg

SEQ ID NO: 917637 - DNA, 15 bp, Homo sapiens
ctcctgacctcgggt

SEQ ID NO: 917638 - DNA, 15 bp, Homo sapiens
tcctgacctcgggtg

SEQ ID NO: 917639 - DNA, 15 bp, Homo sapiens
cctgacctcgggtga

SEQ ID NO: 917640 - DNA, 15 bp, Homo sapiens
ctgacctcgggtgat

SEQ ID NO: 917641 - DNA, 15 bp, Homo sapiens
tgacctcgggtgatc

SEQ ID NO: 917642 - DNA, 15 bp, Homo sapiens
gacctcgggtgatct

SEQ ID NO: 917643 - DNA, 15 bp, Homo sapiens
acctcgggtgatctg

SEQ ID NO: 917644 - DNA, 15 bp, Homo sapiens
cctcgggtgatctgc

SEQ ID NO: 917645 - DNA, 15 bp, Homo sapiens
ctcgggtgatctgcc

SEQ ID NO: 917646 - DNA, 15 bp, Homo sapiens
tcgggtgatctgccc

SEQ ID NO: 917647 - DNA, 15 bp, Homo sapiens
cgggtgatctgcccg

SEQ ID NO: 917648 - DNA, 15 bp, Homo sapiens
gggtgatctgcccgc

SEQ ID NO: 917649 - DNA, 15 bp, Homo sapiens
ggtgatctgcccgcc

SEQ ID NO: 917650 - DNA, 15 bp, Homo sapiens
gtgatctgcccgcct

SEQ ID NO: 917651 - DNA, 15 bp, Homo sapiens
tgatctgcccgcctg

SEQ ID NO: 917652 - DNA, 15 bp, Homo sapiens
gatctgcccgcctgg

SEQ ID NO: 917653 - DNA, 15 bp, Homo sapiens
atctgcccgcctggg

SEQ ID NO: 917654 - DNA, 15 bp, Homo sapiens
tctgcccgcctgggc

SEQ ID NO: 917655 - DNA, 15 bp, Homo sapiens
ctgcccgcctgggcc

SEQ ID NO: 917656 - DNA, 15 bp, Homo sapiens
tgcccgcctgggcct

SEQ ID NO: 917657 - DNA, 15 bp, Homo sapiens
gcccgcctgggcctc

SEQ ID NO: 917658 - DNA, 15 bp, Homo sapiens
cccgcctgggcctcc

SEQ ID NO: 917659 - DNA, 15 bp, Homo sapiens
ccgcctgggcctccc

SEQ ID NO: 917660 - DNA, 15 bp, Homo sapiens
cgcctgggcctccca

SEQ ID NO: 917661 - DNA, 15 bp, Homo sapiens
gcctgggcctcccaa

SEQ ID NO: 917662 - DNA, 15 bp, Homo sapiens
cctgggcctcccaaa

SEQ ID NO: 917663 - DNA, 15 bp, Homo sapiens
ctgggcctcccaaag

SEQ ID NO: 917664 - DNA, 15 bp, Homo sapiens
tgggcctcccaaagt

SEQ ID NO: 917665 - DNA, 15 bp, Homo sapiens
gggcctcccaaagtg

SEQ ID NO: 917666 - DNA, 15 bp, Homo sapiens
tgggattacaggcgt

SEQ ID NO: 917667 - DNA, 15 bp, Homo sapiens
gggattacaggcgtg

SEQ ID NO: 917668 - DNA, 15 bp, Homo sapiens
ggattacaggcgtga

SEQ ID NO: 917669 - DNA, 15 bp, Homo sapiens
gattacaggcgtgaa

SEQ ID NO: 917670 - DNA, 15 bp, Homo sapiens
attacaggcgtgaac

SEQ ID NO: 917671 - DNA, 15 bp, Homo sapiens
ttacaggcgtgaacc

SEQ ID NO: 917672 - DNA, 15 bp, Homo sapiens
tacaggcgtgaacca

SEQ ID NO: 917673 - DNA, 15 bp, Homo sapiens
acaggcgtgaaccac

SEQ ID NO: 917674 - DNA, 15 bp, Homo sapiens
caggcgtgaaccact

SEQ ID NO: 917675 - DNA, 15 bp, Homo sapiens
aggcgtgaaccacta

SEQ ID NO: 917676 - DNA, 15 bp, Homo sapiens
ggcgtgaaccactat

SEQ ID NO: 917677 - DNA, 15 bp, Homo sapiens
gcgtgaaccactatg

SEQ ID NO: 917678 - DNA, 15 bp, Homo sapiens
cgtgaaccactatgc

SEQ ID NO: 917679 - DNA, 15 bp, Homo sapiens
gtgaaccactatgcc

SEQ ID NO: 917680 - DNA, 15 bp, Homo sapiens
tgaaccactatgccc

SEQ ID NO: 917681 - DNA, 15 bp, Homo sapiens
gaaccactatgcccg

SEQ ID NO: 917682 - DNA, 15 bp, Homo sapiens
aaccactatgcccgg

SEQ ID NO: 917683 - DNA, 15 bp, Homo sapiens
accactatgcccggc

SEQ ID NO: 917684 - DNA, 15 bp, Homo sapiens
ccactatgcccggcc

SEQ ID NO: 917685 - DNA, 15 bp, Homo sapiens
cactatgcccggccc

SEQ ID NO: 917686 - DNA, 15 bp, Homo sapiens
actatgcccggccca

SEQ ID NO: 917687 - DNA, 15 bp, Homo sapiens
ctatgcccggcccaa

SEQ ID NO: 917688 - DNA, 15 bp, Homo sapiens
tatgcccggcccaaa

SEQ ID NO: 917689 - DNA, 15 bp, Homo sapiens
atgcccggcccaaaa

SEQ ID NO: 917690 - DNA, 15 bp, Homo sapiens
tgcccggcccaaaat

SEQ ID NO: 917691 - DNA, 15 bp, Homo sapiens
gcccggcccaaaatg

SEQ ID NO: 917692 - DNA, 15 bp, Homo sapiens
cccggcccaaaatgc

SEQ ID NO: 917693 - DNA, 15 bp, Homo sapiens
ccggcccaaaatgcc

SEQ ID NO: 917694 - DNA, 15 bp, Homo sapiens
cggcccaaaatgcca

SEQ ID NO: 917695 - DNA, 15 bp, Homo sapiens
ggcccaaaatgccaa

SEQ ID NO: 917696 - DNA, 15 bp, Homo sapiens
gcccaaaatgccaat

SEQ ID NO: 917697 - DNA, 15 bp, Homo sapiens
cccaaaatgccaatc

SEQ ID NO: 917698 - DNA, 15 bp, Homo sapiens
ccaaaatgccaatct

SEQ ID NO: 917699 - DNA, 15 bp, Homo sapiens
caaaatgccaatctt

SEQ ID NO: 917700 - DNA, 15 bp, Homo sapiens
aaaatgccaatcttt

SEQ ID NO: 917701 - DNA, 15 bp, Homo sapiens
aaatgccaatctttt

SEQ ID NO: 917702 - DNA, 15 bp, Homo sapiens
aatgccaatcttttc

SEQ ID NO: 917703 - DNA, 15 bp, Homo sapiens
atgccaatcttttct

SEQ ID NO: 917704 - DNA, 15 bp, Homo sapiens
tgccaatcttttctc

SEQ ID NO: 917705 - DNA, 15 bp, Homo sapiens
gccaatcttttctct

SEQ ID NO: 917706 - DNA, 15 bp, Homo sapiens
ccaatcttttctctt

SEQ ID NO: 917707 - DNA, 15 bp, Homo sapiens
caatcttttctcttg

SEQ ID NO: 917708 - DNA, 15 bp, Homo sapiens
aatcttttctcttgt

SEQ ID NO: 917709 - DNA, 15 bp, Homo sapiens
atcttttctcttgtg

SEQ ID NO: 917710 - DNA, 15 bp, Homo sapiens
tcttttctcttgtgg

SEQ ID NO: 917711 - DNA, 15 bp, Homo sapiens
cttttctcttgtggt

SEQ ID NO: 917712 - DNA, 15 bp, Homo sapiens
ttttctcttgtggtt

SEQ ID NO: 917713 - DNA, 15 bp, Homo sapiens
tttctcttgtggttt

SEQ ID NO: 917714 - DNA, 15 bp, Homo sapiens
ttctcttgtggtttc

SEQ ID NO: 917715 - DNA, 15 bp, Homo sapiens
tctcttgtggtttct

SEQ ID NO: 917716 - DNA, 15 bp, Homo sapiens
ctcttgtggtttctc

SEQ ID NO: 917717 - DNA, 15 bp, Homo sapiens
tcttgtggtttctcg

SEQ ID NO: 917718 - DNA, 15 bp, Homo sapiens
cttgtggtttctcgg

SEQ ID NO: 917719 - DNA, 15 bp, Homo sapiens
ttgtggtttctcggt

SEQ ID NO: 917720 - DNA, 15 bp, Homo sapiens
tgtggtttctcggtt

SEQ ID NO: 917721 - DNA, 15 bp, Homo sapiens
gtggtttctcggttt

SEQ ID NO: 917722 - DNA, 15 bp, Homo sapiens
tggtttctcggtttg

SEQ ID NO: 917723 - DNA, 15 bp, Homo sapiens
ggtttctcggtttga

SEQ ID NO: 917724 - DNA, 15 bp, Homo sapiens
gtttctcggtttgat

SEQ ID NO: 917725 - DNA, 15 bp, Homo sapiens
tttctcggtttgatg

SEQ ID NO: 917726 - DNA, 15 bp, Homo sapiens
ttctcggtttgatgt

SEQ ID NO: 917727 - DNA, 15 bp, Homo sapiens
tctcggtttgatgtc

SEQ ID NO: 917728 - DNA, 15 bp, Homo sapiens
ctcggtttgatgtca

SEQ ID NO: 917729 - DNA, 15 bp, Homo sapiens
tcggtttgatgtcaa

SEQ ID NO: 917730 - DNA, 15 bp, Homo sapiens
cggtttgatgtcaag

SEQ ID NO: 917731 - DNA, 15 bp, Homo sapiens
ggtttgatgtcaaga

SEQ ID NO: 917732 - DNA, 15 bp, Homo sapiens
gtttgatgtcaagat

SEQ ID NO: 917733 - DNA, 15 bp, Homo sapiens
tttgatgtcaagatt

SEQ ID NO: 917734 - DNA, 15 bp, Homo sapiens
ttgatgtcaagatta

SEQ ID NO: 917735 - DNA, 15 bp, Homo sapiens
tgatgtcaagattat

SEQ ID NO: 917736 - DNA, 15 bp, Homo sapiens
gatgtcaagattata

SEQ ID NO: 917737 - DNA, 15 bp, Homo sapiens
atgtcaagattataa

SEQ ID NO: 917738 - DNA, 15 bp, Homo sapiens
tgtcaagattataaa

SEQ ID NO: 917739 - DNA, 15 bp, Homo sapiens
gtcaagattataaaa

SEQ ID NO: 917740 - DNA, 15 bp, Homo sapiens
tcaagattataaaac

SEQ ID NO: 917741 - DNA, 15 bp, Homo sapiens
caagattataaaact

SEQ ID NO: 917742 - DNA, 15 bp, Homo sapiens
aagattataaaacta

SEQ ID NO: 917743 - DNA, 15 bp, Homo sapiens
agattataaaactat

SEQ ID NO: 917744 - DNA, 15 bp, Homo sapiens
gattataaaactatt

SEQ ID NO: 917745 - DNA, 15 bp, Homo sapiens
attataaaactattc

SEQ ID NO: 917746 - DNA, 15 bp, Homo sapiens
ttataaaactattct

SEQ ID NO: 917747 - DNA, 15 bp, Homo sapiens
tataaaactattctc

SEQ ID NO: 917748 - DNA, 15 bp, Homo sapiens
ataaaactattctct

SEQ ID NO: 917749 - DNA, 15 bp, Homo sapiens
taaaactattctctt

SEQ ID NO: 917750 - DNA, 15 bp, Homo sapiens
aaaactattctctta

SEQ ID NO: 917751 - DNA, 15 bp, Homo sapiens
aaactattctcttat

SEQ ID NO: 917752 - DNA, 15 bp, Homo sapiens
aactattctcttata

SEQ ID NO: 917753 - DNA, 15 bp, Homo sapiens
actattctcttatac

SEQ ID NO: 917754 - DNA, 15 bp, Homo sapiens
ctattctcttatact

SEQ ID NO: 917755 - DNA, 15 bp, Homo sapiens
tattctcttatactt

SEQ ID NO: 917756 - DNA, 15 bp, Homo sapiens
attctcttatacttt

SEQ ID NO: 917757 - DNA, 15 bp, Homo sapiens
ttctcttatactttt

SEQ ID NO: 917758 - DNA, 15 bp, Homo sapiens
tctcttatacttttt

SEQ ID NO: 917759 - DNA, 15 bp, Homo sapiens
ctcttatactttttg

SEQ ID NO: 917760 - DNA, 15 bp, Homo sapiens
tcttatactttttgt

SEQ ID NO: 917761 - DNA, 15 bp, Homo sapiens
cttatactttttgta

SEQ ID NO: 917762 - DNA, 15 bp, Homo sapiens
ttatactttttgtag

SEQ ID NO: 917763 - DNA, 15 bp, Homo sapiens
tatactttttgtagt

SEQ ID NO: 917764 - DNA, 15 bp, Homo sapiens
atactttttgtagta

SEQ ID NO: 917765 - DNA, 15 bp, Homo sapiens
tactttttgtagtac

SEQ ID NO: 917766 - DNA, 15 bp, Homo sapiens
ctctctttatgcctc

SEQ ID NO: 917767 - DNA, 15 bp, Homo sapiens
tctctttatgcctcc

SEQ ID NO: 917768 - DNA, 15 bp, Homo sapiens
ctctttatgcctcct

SEQ ID NO: 917769 - DNA, 15 bp, Homo sapiens
tctttatgcctcctt

SEQ ID NO: 917770 - DNA, 15 bp, Homo sapiens
ctttatgcctccttt

SEQ ID NO: 917771 - DNA, 15 bp, Homo sapiens
tttatgcctcctttt

SEQ ID NO: 917772 - DNA, 15 bp, Homo sapiens
ttatgcctccttttc

SEQ ID NO: 917773 - DNA, 15 bp, Homo sapiens
tatgcctccttttca

SEQ ID NO: 917774 - DNA, 15 bp, Homo sapiens
atgcctccttttcac

SEQ ID NO: 917775 - DNA, 15 bp, Homo sapiens
tgcctccttttcact

SEQ ID NO: 917776 - DNA, 15 bp, Homo sapiens
gcctccttttcactt

SEQ ID NO: 917777 - DNA, 15 bp, Homo sapiens
cctccttttcactta

SEQ ID NO: 917778 - DNA, 15 bp, Homo sapiens
ctccttttcacttac

SEQ ID NO: 917779 - DNA, 15 bp, Homo sapiens
tccttttcacttaca

SEQ ID NO: 917780 - DNA, 15 bp, Homo sapiens
ccttttcacttacaa

SEQ ID NO: 917781 - DNA, 15 bp, Homo sapiens
cttttcacttacaac

SEQ ID NO: 917782 - DNA, 15 bp, Homo sapiens
ttttcacttacaact

SEQ ID NO: 917783 - DNA, 15 bp, Homo sapiens
tttcacttacaactc

SEQ ID NO: 917784 - DNA, 15 bp, Homo sapiens
ttcacttacaactca

SEQ ID NO: 917785 - DNA, 15 bp, Homo sapiens
tcacttacaactcaa

SEQ ID NO: 917786 - DNA, 15 bp, Homo sapiens
cacttacaactcaaa

SEQ ID NO: 917787 - DNA, 15 bp, Homo sapiens
acttacaactcaaaa

SEQ ID NO: 917788 - DNA, 15 bp, Homo sapiens
cttacaactcaaaag

SEQ ID NO: 917789 - DNA, 15 bp, Homo sapiens
ttacaactcaaaagt

SEQ ID NO: 917790 - DNA, 15 bp, Homo sapiens
tacaactcaaaagtg

SEQ ID NO: 917791 - DNA, 15 bp, Homo sapiens
acaactcaaaagtga

SEQ ID NO: 917792 - DNA, 15 bp, Homo sapiens
caactcaaaagtgag

SEQ ID NO: 917793 - DNA, 15 bp, Homo sapiens
aactcaaaagtgaga

SEQ ID NO: 917794 - DNA, 15 bp, Homo sapiens
actcaaaagtgagaa

SEQ ID NO: 917795 - DNA, 15 bp, Homo sapiens
ctcaaaagtgagaag

SEQ ID NO: 917796 - DNA, 15 bp, Homo sapiens
tcaaaagtgagaaga

SEQ ID NO: 917797 - DNA, 15 bp, Homo sapiens
caaaagtgagaagag

SEQ ID NO: 917798 - DNA, 15 bp, Homo sapiens
aaaagtgagaagaga

SEQ ID NO: 917799 - DNA, 15 bp, Homo sapiens
aaagtgagaagagag

SEQ ID NO: 917800 - DNA, 15 bp, Homo sapiens
aagtgagaagagagg

SEQ ID NO: 917801 - DNA, 15 bp, Homo sapiens
agtgagaagagagga

SEQ ID NO: 917802 - DNA, 15 bp, Homo sapiens
gtgagaagagaggag

SEQ ID NO: 917803 - DNA, 15 bp, Homo sapiens
tgagaagagaggagg

SEQ ID NO: 917804 - DNA, 15 bp, Homo sapiens
gagaagagaggaggt

SEQ ID NO: 917805 - DNA, 15 bp, Homo sapiens
agaagagaggaggta

SEQ ID NO: 917806 - DNA, 15 bp, Homo sapiens
gaagagaggaggtaa

SEQ ID NO: 917807 - DNA, 15 bp, Homo sapiens
aagagaggaggtaaa

SEQ ID NO: 917808 - DNA, 15 bp, Homo sapiens
agagaggaggtaaag

SEQ ID NO: 917809 - DNA, 15 bp, Homo sapiens
gagaggaggtaaagg

SEQ ID NO: 917810 - DNA, 15 bp, Homo sapiens
agaggaggtaaaggg

SEQ ID NO: 917811 - DNA, 15 bp, Homo sapiens
gaggaggtaaaggga

SEQ ID NO: 917812 - DNA, 15 bp, Homo sapiens
aggaggtaaagggaa

SEQ ID NO: 917813 - DNA, 15 bp, Homo sapiens
ggaggtaaagggaag

SEQ ID NO: 917814 - DNA, 15 bp, Homo sapiens
gaggtaaagggaagg

SEQ ID NO: 917815 - DNA, 15 bp, Homo sapiens
aggtaaagggaaggt

SEQ ID NO: 917816 - DNA, 15 bp, Homo sapiens
ggtaaagggaaggta

SEQ ID NO: 917817 - DNA, 15 bp, Homo sapiens
gtaaagggaaggtaa

SEQ ID NO: 917818 - DNA, 15 bp, Homo sapiens
taaagggaaggtaat

SEQ ID NO: 917819 - DNA, 15 bp, Homo sapiens
aaagggaaggtaatc

SEQ ID NO: 917820 - DNA, 15 bp, Homo sapiens
aagggaaggtaatct

SEQ ID NO: 917821 - DNA, 15 bp, Homo sapiens
agggaaggtaatcta

SEQ ID NO: 917822 - DNA, 15 bp, Homo sapiens
gggaaggtaatctat

SEQ ID NO: 917823 - DNA, 15 bp, Homo sapiens
ggaaggtaatctatc

SEQ ID NO: 917824 - DNA, 15 bp, Homo sapiens
gaaggtaatctatct

SEQ ID NO: 917825 - DNA, 15 bp, Homo sapiens
aaggtaatctatctg

SEQ ID NO: 917826 - DNA, 15 bp, Homo sapiens
aggtaatctatctga

SEQ ID NO: 917827 - DNA, 15 bp, Homo sapiens
ggtaatctatctgat

SEQ ID NO: 917828 - DNA, 15 bp, Homo sapiens
gtaatctatctgatt

SEQ ID NO: 917829 - DNA, 15 bp, Homo sapiens
taatctatctgattg

SEQ ID NO: 917830 - DNA, 15 bp, Homo sapiens
aatctatctgattgg

SEQ ID NO: 917831 - DNA, 15 bp, Homo sapiens
atctatctgattggc

SEQ ID NO: 917832 - DNA, 15 bp, Homo sapiens
tctatctgattggca

SEQ ID NO: 917833 - DNA, 15 bp, Homo sapiens
ctatctgattggcaa

SEQ ID NO: 917834 - DNA, 15 bp, Homo sapiens
tatctgattggcaaa

SEQ ID NO: 917835 - DNA, 15 bp, Homo sapiens
atctgattggcaaac

SEQ ID NO: 917836 - DNA, 15 bp, Homo sapiens
tctgattggcaaaca

SEQ ID NO: 917837 - DNA, 15 bp, Homo sapiens
ctgattggcaaacag

SEQ ID NO: 917838 - DNA, 15 bp, Homo sapiens
tgattggcaaacaga

SEQ ID NO: 917839 - DNA, 15 bp, Homo sapiens
gattggcaaacagaa

SEQ ID NO: 917840 - DNA, 15 bp, Homo sapiens
attggcaaacagaaa

SEQ ID NO: 917841 - DNA, 15 bp, Homo sapiens
ttggcaaacagaaac

SEQ ID NO: 917842 - DNA, 15 bp, Homo sapiens
tggcaaacagaaacc

SEQ ID NO: 917843 - DNA, 15 bp, Homo sapiens
ggcaaacagaaacct

SEQ ID NO: 917844 - DNA, 15 bp, Homo sapiens
gcaaacagaaaccta

SEQ ID NO: 917845 - DNA, 15 bp, Homo sapiens
caaacagaaacctat

SEQ ID NO: 917846 - DNA, 15 bp, Homo sapiens
aaacagaaacctatt

SEQ ID NO: 917847 - DNA, 15 bp, Homo sapiens
aacagaaacctattt

SEQ ID NO: 917848 - DNA, 15 bp, Homo sapiens
acagaaacctatttt

SEQ ID NO: 917849 - DNA, 15 bp, Homo sapiens
cagaaacctattttt

SEQ ID NO: 917850 - DNA, 15 bp, Homo sapiens
agaaacctatttttg

SEQ ID NO: 917851 - DNA, 15 bp, Homo sapiens
gaaacctatttttgg

SEQ ID NO: 917852 - DNA, 15 bp, Homo sapiens
aaacctatttttgga

SEQ ID NO: 917853 - DNA, 15 bp, Homo sapiens
aacctatttttggaa

SEQ ID NO: 917854 - DNA, 15 bp, Homo sapiens
acctatttttggaaa

SEQ ID NO: 917855 - DNA, 15 bp, Homo sapiens
cctatttttggaaaa

SEQ ID NO: 917856 - DNA, 15 bp, Homo sapiens
ctatttttggaaaat

SEQ ID NO: 917857 - DNA, 15 bp, Homo sapiens
tatttttggaaaatg

SEQ ID NO: 917858 - DNA, 15 bp, Homo sapiens
atttttggaaaatga

SEQ ID NO: 917859 - DNA, 15 bp, Homo sapiens
tttttggaaaatgaa

SEQ ID NO: 917860 - DNA, 15 bp, Homo sapiens
ttttggaaaatgaaa

SEQ ID NO: 917861 - DNA, 15 bp, Homo sapiens
tttggaaaatgaaag

SEQ ID NO: 917862 - DNA, 15 bp, Homo sapiens
ttggaaaatgaaagt

SEQ ID NO: 917863 - DNA, 15 bp, Homo sapiens
tggaaaatgaaagtt

SEQ ID NO: 917864 - DNA, 15 bp, Homo sapiens
ggaaaatgaaagtta

SEQ ID NO: 917865 - DNA, 15 bp, Homo sapiens
gaaaatgaaagttac

SEQ ID NO: 917866 - DNA, 15 bp, Homo sapiens
aaaatgaaagttacc

SEQ ID NO: 917867 - DNA, 15 bp, Homo sapiens
aaatgaaagttaccg

SEQ ID NO: 917868 - DNA, 15 bp, Homo sapiens
aatgaaagttaccga

SEQ ID NO: 917869 - DNA, 15 bp, Homo sapiens
atgaaagttaccgaa

SEQ ID NO: 917870 - DNA, 15 bp, Homo sapiens
tgaaagttaccgaaa

SEQ ID NO: 917871 - DNA, 15 bp, Homo sapiens
gaaagttaccgaaag

SEQ ID NO: 917872 - DNA, 15 bp, Homo sapiens
aaagttaccgaaagc

SEQ ID NO: 917873 - DNA, 15 bp, Homo sapiens
aagttaccgaaagcc

SEQ ID NO: 917874 - DNA, 15 bp, Homo sapiens
agttaccgaaagcca

SEQ ID NO: 917875 - DNA, 15 bp, Homo sapiens
gttaccgaaagccat

SEQ ID NO: 917876 - DNA, 15 bp, Homo sapiens
ttaccgaaagccata

SEQ ID NO: 917877 - DNA, 15 bp, Homo sapiens
taccgaaagccataa

SEQ ID NO: 917878 - DNA, 15 bp, Homo sapiens
accgaaagccataaa

SEQ ID NO: 917879 - DNA, 15 bp, Homo sapiens
ccgaaagccataaag

SEQ ID NO: 917880 - DNA, 15 bp, Homo sapiens
cgaaagccataaaga

SEQ ID NO: 917881 - DNA, 15 bp, Homo sapiens
gaaagccataaagaa

SEQ ID NO: 917882 - DNA, 15 bp, Homo sapiens
aaagccataaagaag

SEQ ID NO: 917883 - DNA, 15 bp, Homo sapiens
aagccataaagaagt

SEQ ID NO: 917884 - DNA, 15 bp, Homo sapiens
agccataaagaagtt

SEQ ID NO: 917885 - DNA, 15 bp, Homo sapiens
gccataaagaagttt

SEQ ID NO: 917886 - DNA, 15 bp, Homo sapiens
ccataaagaagttta

SEQ ID NO: 917887 - DNA, 15 bp, Homo sapiens
cataaagaagtttaa

SEQ ID NO: 917888 - DNA, 15 bp, Homo sapiens
ataaagaagtttaaa

SEQ ID NO: 917889 - DNA, 15 bp, Homo sapiens
taaagaagtttaaaa

SEQ ID NO: 917890 - DNA, 15 bp, Homo sapiens
aaagaagtttaaaaa

SEQ ID NO: 917891 - DNA, 15 bp, Homo sapiens
aagaagtttaaaaaa

SEQ ID NO: 917892 - DNA, 15 bp, Homo sapiens
agaagtttaaaaaat

SEQ ID NO: 917893 - DNA, 15 bp, Homo sapiens
gaagtttaaaaaatt

SEQ ID NO: 917894 - DNA, 15 bp, Homo sapiens
aagtttaaaaaattc

SEQ ID NO: 917895 - DNA, 15 bp, Homo sapiens
agtttaaaaaattct

SEQ ID NO: 917896 - DNA, 15 bp, Homo sapiens
gtttaaaaaattctc

SEQ ID NO: 917897 - DNA, 15 bp, Homo sapiens
tttaaaaaattctca

SEQ ID NO: 917898 - DNA, 15 bp, Homo sapiens
ttaaaaaattctcaa

SEQ ID NO: 917899 - DNA, 15 bp, Homo sapiens
taaaaaattctcaat

SEQ ID NO: 917900 - DNA, 15 bp, Homo sapiens
aaaaaattctcaatg

SEQ ID NO: 917901 - DNA, 15 bp, Homo sapiens
aaaaattctcaatgc

SEQ ID NO: 917902 - DNA, 15 bp, Homo sapiens
aaaattctcaatgcc

SEQ ID NO: 917903 - DNA, 15 bp, Homo sapiens
aaattctcaatgccc

SEQ ID NO: 917904 - DNA, 15 bp, Homo sapiens
aattctcaatgccct

SEQ ID NO: 917905 - DNA, 15 bp, Homo sapiens
attctcaatgccctt

SEQ ID NO: 917906 - DNA, 15 bp, Homo sapiens
ttctcaatgcccttc

SEQ ID NO: 917907 - DNA, 15 bp, Homo sapiens
tctcaatgcccttcc

SEQ ID NO: 917908 - DNA, 15 bp, Homo sapiens
ctcaatgcccttccc

SEQ ID NO: 917909 - DNA, 15 bp, Homo sapiens
tcaatgcccttccca

SEQ ID NO: 917910 - DNA, 15 bp, Homo sapiens
caatgcccttcccat

SEQ ID NO: 917911 - DNA, 15 bp, Homo sapiens
aatgcccttcccatt

SEQ ID NO: 917912 - DNA, 15 bp, Homo sapiens
atgcccttcccattt

SEQ ID NO: 917913 - DNA, 15 bp, Homo sapiens
tgcccttcccatttt

SEQ ID NO: 917914 - DNA, 15 bp, Homo sapiens
gcccttcccattttt

SEQ ID NO: 917915 - DNA, 15 bp, Homo sapiens
cccttcccatttttc

SEQ ID NO: 917916 - DNA, 15 bp, Homo sapiens
ccttcccatttttcc

SEQ ID NO: 917917 - DNA, 15 bp, Homo sapiens
cttcccatttttcca

SEQ ID NO: 917918 - DNA, 15 bp, Homo sapiens
ttcccatttttccat

SEQ ID NO: 917919 - DNA, 15 bp, Homo sapiens
tcccatttttccatc

SEQ ID NO: 917920 - DNA, 15 bp, Homo sapiens
cccatttttccatct

SEQ ID NO: 917921 - DNA, 15 bp, Homo sapiens
ccatttttccatctt

SEQ ID NO: 917922 - DNA, 15 bp, Homo sapiens
catttttccatcttt

SEQ ID NO: 917923 - DNA, 15 bp, Homo sapiens
atttttccatctttc

SEQ ID NO: 917924 - DNA, 15 bp, Homo sapiens
tttttccatctttct

SEQ ID NO: 917925 - DNA, 15 bp, Homo sapiens
ttttccatctttcta

SEQ ID NO: 917926 - DNA, 15 bp, Homo sapiens
tttccatctttctac

SEQ ID NO: 917927 - DNA, 15 bp, Homo sapiens
ttccatctttctact

SEQ ID NO: 917928 - DNA, 15 bp, Homo sapiens
tccatctttctactg

SEQ ID NO: 917929 - DNA, 15 bp, Homo sapiens
ccatctttctactgc

SEQ ID NO: 917930 - DNA, 15 bp, Homo sapiens
catctttctactgct

SEQ ID NO: 917931 - DNA, 15 bp, Homo sapiens
atctttctactgctt

SEQ ID NO: 917932 - DNA, 15 bp, Homo sapiens
tctttctactgcttt

SEQ ID NO: 917933 - DNA, 15 bp, Homo sapiens
ctttctactgctttt

SEQ ID NO: 917934 - DNA, 15 bp, Homo sapiens
tttctactgcttttt

SEQ ID NO: 917935 - DNA, 15 bp, Homo sapiens
ttctactgcttttta

SEQ ID NO: 917936 - DNA, 15 bp, Homo sapiens
tctactgctttttat

SEQ ID NO: 917937 - DNA, 15 bp, Homo sapiens
ctactgctttttata

SEQ ID NO: 917938 - DNA, 15 bp, Homo sapiens
tactgctttttatag

SEQ ID NO: 917939 - DNA, 15 bp, Homo sapiens
actgctttttatagc

SEQ ID NO: 917940 - DNA, 15 bp, Homo sapiens
ctgctttttatagcc

SEQ ID NO: 917941 - DNA, 15 bp, Homo sapiens
tgctttttatagcct

SEQ ID NO: 917942 - DNA, 15 bp, Homo sapiens
gctttttatagcctt

SEQ ID NO: 917943 - DNA, 15 bp, Homo sapiens
ctttttatagccttt

SEQ ID NO: 917944 - DNA, 15 bp, Homo sapiens
tttttatagcctttt

SEQ ID NO: 917945 - DNA, 15 bp, Homo sapiens
ttttatagcctttta

SEQ ID NO: 917946 - DNA, 15 bp, Homo sapiens
tttatagccttttac

SEQ ID NO: 917947 - DNA, 15 bp, Homo sapiens
ttatagccttttact

SEQ ID NO: 917948 - DNA, 15 bp, Homo sapiens
tatagccttttactt

SEQ ID NO: 917949 - DNA, 15 bp, Homo sapiens
atagccttttactta

SEQ ID NO: 917950 - DNA, 15 bp, Homo sapiens
tagccttttacttac

SEQ ID NO: 917951 - DNA, 15 bp, Homo sapiens
agccttttacttaca

SEQ ID NO: 917952 - DNA, 15 bp, Homo sapiens
gccttttacttacat

SEQ ID NO: 917953 - DNA, 15 bp, Homo sapiens
ccttttacttacata

SEQ ID NO: 917954 - DNA, 15 bp, Homo sapiens
cttttacttacatag

SEQ ID NO: 917955 - DNA, 15 bp, Homo sapiens
ttttacttacatagt

SEQ ID NO: 917956 - DNA, 15 bp, Homo sapiens
tttacttacatagtt

SEQ ID NO: 917957 - DNA, 15 bp, Homo sapiens
ttacttacatagttt

SEQ ID NO: 917958 - DNA, 15 bp, Homo sapiens
tacttacatagttta

SEQ ID NO: 917959 - DNA, 15 bp, Homo sapiens
acttacatagtttat

SEQ ID NO: 917960 - DNA, 15 bp, Homo sapiens
cttacatagtttatt

SEQ ID NO: 917961 - DNA, 15 bp, Homo sapiens
ttacatagtttattc

SEQ ID NO: 917962 - DNA, 15 bp, Homo sapiens
tacatagtttattct

SEQ ID NO: 917963 - DNA, 15 bp, Homo sapiens
acatagtttattctc

SEQ ID NO: 917964 - DNA, 15 bp, Homo sapiens
catagtttattctct

SEQ ID NO: 917965 - DNA, 15 bp, Homo sapiens
atagtttattctctt

SEQ ID NO: 917966 - DNA, 15 bp, Homo sapiens
tagtttattctcttg

SEQ ID NO: 917967 - DNA, 15 bp, Homo sapiens
agtttattctcttgt

SEQ ID NO: 917968 - DNA, 15 bp, Homo sapiens
gtttattctcttgtg

SEQ ID NO: 917969 - DNA, 15 bp, Homo sapiens
tttattctcttgtga

SEQ ID NO: 917970 - DNA, 15 bp, Homo sapiens
ttattctcttgtgaa

SEQ ID NO: 917971 - DNA, 15 bp, Homo sapiens
tattctcttgtgaat

SEQ ID NO: 917972 - DNA, 15 bp, Homo sapiens
attctcttgtgaatt

SEQ ID NO: 917973 - DNA, 15 bp, Homo sapiens
ttctcttgtgaattt

SEQ ID NO: 917974 - DNA, 15 bp, Homo sapiens
tctcttgtgaattta

SEQ ID NO: 917975 - DNA, 15 bp, Homo sapiens
ctcttgtgaatttag

SEQ ID NO: 917976 - DNA, 15 bp, Homo sapiens
tcttgtgaatttagc

SEQ ID NO: 917977 - DNA, 15 bp, Homo sapiens
cttgtgaatttagcc

SEQ ID NO: 917978 - DNA, 15 bp, Homo sapiens
ttgtgaatttagcct

SEQ ID NO: 917979 - DNA, 15 bp, Homo sapiens
tgtgaatttagcctc

SEQ ID NO: 917980 - DNA, 15 bp, Homo sapiens
gtgaatttagcctca

SEQ ID NO: 917981 - DNA, 15 bp, Homo sapiens
tgaatttagcctcag

SEQ ID NO: 917982 - DNA, 15 bp, Homo sapiens
gaatttagcctcaga

SEQ ID NO: 917983 - DNA, 15 bp, Homo sapiens
aatttagcctcagat

SEQ ID NO: 917984 - DNA, 15 bp, Homo sapiens
atttagcctcagata

SEQ ID NO: 917985 - DNA, 15 bp, Homo sapiens
tttagcctcagatag

SEQ ID NO: 917986 - DNA, 15 bp, Homo sapiens
ttagcctcagataga

SEQ ID NO: 917987 - DNA, 15 bp, Homo sapiens
tagcctcagatagag

SEQ ID NO: 917988 - DNA, 15 bp, Homo sapiens
agcctcagatagagg

SEQ ID NO: 917989 - DNA, 15 bp, Homo sapiens
gcctcagatagagga

SEQ ID NO: 917990 - DNA, 15 bp, Homo sapiens
cctcagatagaggag

SEQ ID NO: 917991 - DNA, 15 bp, Homo sapiens
ctcagatagaggaga

SEQ ID NO: 917992 - DNA, 15 bp, Homo sapiens
tcagatagaggagag

SEQ ID NO: 917993 - DNA, 15 bp, Homo sapiens
cagatagaggagagg

SEQ ID NO: 917994 - DNA, 15 bp, Homo sapiens
agatagaggagaggc

SEQ ID NO: 917995 - DNA, 15 bp, Homo sapiens
gatagaggagaggct

SEQ ID NO: 917996 - DNA, 15 bp, Homo sapiens
atagaggagaggcta

SEQ ID NO: 917997 - DNA, 15 bp, Homo sapiens
tagaggagaggctaa

SEQ ID NO: 917998 - DNA, 15 bp, Homo sapiens
agaggagaggctaag

SEQ ID NO: 917999 - DNA, 15 bp, Homo sapiens
gaggagaggctaaga

SEQ ID NO: 918000 - DNA, 15 bp, Homo sapiens
aggagaggctaagag

SEQ ID NO: 918001 - DNA, 15 bp, Homo sapiens
ggagaggctaagaga

SEQ ID NO: 918002 - DNA, 15 bp, Homo sapiens
gagaggctaagagaa

SEQ ID NO: 918003 - DNA, 15 bp, Homo sapiens
agaggctaagagaat

SEQ ID NO: 918004 - DNA, 15 bp, Homo sapiens
gaggctaagagaatt

SEQ ID NO: 918005 - DNA, 15 bp, Homo sapiens
aggctaagagaattt

SEQ ID NO: 918006 - DNA, 15 bp, Homo sapiens
ggctaagagaattta

SEQ ID NO: 918007 - DNA, 15 bp, Homo sapiens
gctaagagaatttaa

SEQ ID NO: 918008 - DNA, 15 bp, Homo sapiens
ctaagagaatttaaa

SEQ ID NO: 918009 - DNA, 15 bp, Homo sapiens
taagagaatttaaaa

SEQ ID NO: 918010 - DNA, 15 bp, Homo sapiens
aagagaatttaaaaa

SEQ ID NO: 918011 - DNA, 15 bp, Homo sapiens
agagaatttaaaaag

SEQ ID NO: 918012 - DNA, 15 bp, Homo sapiens
gagaatttaaaaagt

SEQ ID NO: 918013 - DNA, 15 bp, Homo sapiens
agaatttaaaaagta

SEQ ID NO: 918014 - DNA, 15 bp, Homo sapiens
gaatttaaaaagtaa

SEQ ID NO: 918015 - DNA, 15 bp, Homo sapiens
aatttaaaaagtaat

SEQ ID NO: 918016 - DNA, 15 bp, Homo sapiens
atttaaaaagtaatg

SEQ ID NO: 918017 - DNA, 15 bp, Homo sapiens
tttaaaaagtaatgt

SEQ ID NO: 918018 - DNA, 15 bp, Homo sapiens
ttaaaaagtaatgtg

SEQ ID NO: 918019 - DNA, 15 bp, Homo sapiens
taaaaagtaatgtga

SEQ ID NO: 918020 - DNA, 15 bp, Homo sapiens
aaaaagtaatgtgaa

SEQ ID NO: 918021 - DNA, 15 bp, Homo sapiens
aaaagtaatgtgaat

SEQ ID NO: 918022 - DNA, 15 bp, Homo sapiens
aaagtaatgtgaatt

SEQ ID NO: 918023 - DNA, 15 bp, Homo sapiens
aagtaatgtgaattg

SEQ ID NO: 918024 - DNA, 15 bp, Homo sapiens
agtaatgtgaattgg

SEQ ID NO: 918025 - DNA, 15 bp, Homo sapiens
gtaatgtgaattggg

SEQ ID NO: 918026 - DNA, 15 bp, Homo sapiens
taatgtgaattggga

SEQ ID NO: 918027 - DNA, 15 bp, Homo sapiens
aatgtgaattgggat

SEQ ID NO: 918028 - DNA, 15 bp, Homo sapiens
atgtgaattgggata

SEQ ID NO: 918029 - DNA, 15 bp, Homo sapiens
tgtgaattgggatat

SEQ ID NO: 918030 - DNA, 15 bp, Homo sapiens
gtgaattgggatatc

SEQ ID NO: 918031 - DNA, 15 bp, Homo sapiens
tgaattgggatatct

SEQ ID NO: 918032 - DNA, 15 bp, Homo sapiens
gaattgggatatctc

SEQ ID NO: 918033 - DNA, 15 bp, Homo sapiens
aattgggatatctca

SEQ ID NO: 918034 - DNA, 15 bp, Homo sapiens
attgggatatctcaa

SEQ ID NO: 918035 - DNA, 15 bp, Homo sapiens
ttgggatatctcaaa

SEQ ID NO: 918036 - DNA, 15 bp, Homo sapiens
tgggatatctcaaaa

SEQ ID NO: 918037 - DNA, 15 bp, Homo sapiens
gggatatctcaaaaa

SEQ ID NO: 918038 - DNA, 15 bp, Homo sapiens
ggatatctcaaaaag

SEQ ID NO: 918039 - DNA, 15 bp, Homo sapiens
gatatctcaaaaagg

SEQ ID NO: 918040 - DNA, 15 bp, Homo sapiens
atatctcaaaaagga

SEQ ID NO: 918041 - DNA, 15 bp, Homo sapiens
tatctcaaaaaggaa

SEQ ID NO: 918042 - DNA, 15 bp, Homo sapiens
atctcaaaaaggaag

SEQ ID NO: 918043 - DNA, 15 bp, Homo sapiens
tctcaaaaaggaagg

SEQ ID NO: 918044 - DNA, 15 bp, Homo sapiens
ctcaaaaaggaagga

SEQ ID NO: 918045 - DNA, 15 bp, Homo sapiens
tcaaaaaggaaggaa

SEQ ID NO: 918046 - DNA, 15 bp, Homo sapiens
caaaaaggaaggaaa

SEQ ID NO: 918047 - DNA, 15 bp, Homo sapiens
aaaaaggaaggaaag

SEQ ID NO: 918048 - DNA, 15 bp, Homo sapiens
aaaaggaaggaaaga

SEQ ID NO: 918049 - DNA, 15 bp, Homo sapiens
aaaggaaggaaagat

SEQ ID NO: 918050 - DNA, 15 bp, Homo sapiens
aaggaaggaaagata

SEQ ID NO: 918051 - DNA, 15 bp, Homo sapiens
aggaaggaaagatac

SEQ ID NO: 918052 - DNA, 15 bp, Homo sapiens
ggaaggaaagataca

SEQ ID NO: 918053 - DNA, 15 bp, Homo sapiens
gaaggaaagatacat

SEQ ID NO: 918054 - DNA, 15 bp, Homo sapiens
aaggaaagatacatt

SEQ ID NO: 918055 - DNA, 15 bp, Homo sapiens
aggaaagatacattt

SEQ ID NO: 918056 - DNA, 15 bp, Homo sapiens
ggaaagatacatttt

SEQ ID NO: 918057 - DNA, 15 bp, Homo sapiens
gaaagatacatttta

SEQ ID NO: 918058 - DNA, 15 bp, Homo sapiens
aaagatacattttat

SEQ ID NO: 918059 - DNA, 15 bp, Homo sapiens
aagatacattttatg

SEQ ID NO: 918060 - DNA, 15 bp, Homo sapiens
agatacattttatgg

SEQ ID NO: 918061 - DNA, 15 bp, Homo sapiens
gatacattttatggt

SEQ ID NO: 918062 - DNA, 15 bp, Homo sapiens
atacattttatggtg

SEQ ID NO: 918063 - DNA, 15 bp, Homo sapiens
tacattttatggtgt

SEQ ID NO: 918064 - DNA, 15 bp, Homo sapiens
acattttatggtgta

SEQ ID NO: 918065 - DNA, 15 bp, Homo sapiens
cattttatggtgtat

SEQ ID NO: 918066 - DNA, 15 bp, Homo sapiens
attttatggtgtatg

SEQ ID NO: 918067 - DNA, 15 bp, Homo sapiens
ttttatggtgtatgt

SEQ ID NO: 918068 - DNA, 15 bp, Homo sapiens
tttatggtgtatgtt

SEQ ID NO: 918069 - DNA, 15 bp, Homo sapiens
ttatggtgtatgttc

SEQ ID NO: 918070 - DNA, 15 bp, Homo sapiens
tatggtgtatgttct

SEQ ID NO: 918071 - DNA, 15 bp, Homo sapiens
atggtgtatgttcta

SEQ ID NO: 918072 - DNA, 15 bp, Homo sapiens
tggtgtatgttctat

SEQ ID NO: 918073 - DNA, 15 bp, Homo sapiens
ggtgtatgttctatg

SEQ ID NO: 918074 - DNA, 15 bp, Homo sapiens
gtgtatgttctatgt

SEQ ID NO: 918075 - DNA, 15 bp, Homo sapiens
tgtatgttctatgtg

SEQ ID NO: 918076 - DNA, 15 bp, Homo sapiens
gtatgttctatgtgc

SEQ ID NO: 918077 - DNA, 15 bp, Homo sapiens
tatgttctatgtgcc

SEQ ID NO: 918078 - DNA, 15 bp, Homo sapiens
atgttctatgtgcca

SEQ ID NO: 918079 - DNA, 15 bp, Homo sapiens
tgttctatgtgccaa

SEQ ID NO: 918080 - DNA, 15 bp, Homo sapiens
gttctatgtgccaag

SEQ ID NO: 918081 - DNA, 15 bp, Homo sapiens
ttctatgtgccaagc

SEQ ID NO: 918082 - DNA, 15 bp, Homo sapiens
tctatgtgccaagcc

SEQ ID NO: 918083 - DNA, 15 bp, Homo sapiens
ctatgtgccaagccc

SEQ ID NO: 918084 - DNA, 15 bp, Homo sapiens
tatgtgccaagccca

SEQ ID NO: 918085 - DNA, 15 bp, Homo sapiens
atgtgccaagcccac

SEQ ID NO: 918086 - DNA, 15 bp, Homo sapiens
tgtgccaagcccact

SEQ ID NO: 918087 - DNA, 15 bp, Homo sapiens
gtgccaagcccactt

SEQ ID NO: 918088 - DNA, 15 bp, Homo sapiens
tgccaagcccactta

SEQ ID NO: 918089 - DNA, 15 bp, Homo sapiens
gccaagcccacttac

SEQ ID NO: 918090 - DNA, 15 bp, Homo sapiens
ccaagcccacttaca

SEQ ID NO: 918091 - DNA, 15 bp, Homo sapiens
caagcccacttacac

SEQ ID NO: 918092 - DNA, 15 bp, Homo sapiens
aagcccacttacaca

SEQ ID NO: 918093 - DNA, 15 bp, Homo sapiens
agcccacttacacat

SEQ ID NO: 918094 - DNA, 15 bp, Homo sapiens
gcccacttacacata

SEQ ID NO: 918095 - DNA, 15 bp, Homo sapiens
cccacttacacatat

SEQ ID NO: 918096 - DNA, 15 bp, Homo sapiens
ccacttacacatatt

SEQ ID NO: 918097 - DNA, 15 bp, Homo sapiens
cacttacacatatta

SEQ ID NO: 918098 - DNA, 15 bp, Homo sapiens
acttacacatattat

SEQ ID NO: 918099 - DNA, 15 bp, Homo sapiens
cttacacatattatt

SEQ ID NO: 918100 - DNA, 15 bp, Homo sapiens
ttacacatattattt

SEQ ID NO: 918101 - DNA, 15 bp, Homo sapiens
tacacatattatttc

SEQ ID NO: 918102 - DNA, 15 bp, Homo sapiens
acacatattatttcc

SEQ ID NO: 918103 - DNA, 15 bp, Homo sapiens
cacatattatttcct

SEQ ID NO: 918104 - DNA, 15 bp, Homo sapiens
acatattatttcctt

SEQ ID NO: 918105 - DNA, 15 bp, Homo sapiens
catattatttccttt

SEQ ID NO: 918106 - DNA, 15 bp, Homo sapiens
atattatttccttta

SEQ ID NO: 918107 - DNA, 15 bp, Homo sapiens
tattatttcctttag

SEQ ID NO: 918108 - DNA, 15 bp, Homo sapiens
attatttcctttagt

SEQ ID NO: 918109 - DNA, 15 bp, Homo sapiens
ttatttcctttagtc

SEQ ID NO: 918110 - DNA, 15 bp, Homo sapiens
tatttcctttagtcc

SEQ ID NO: 918111 - DNA, 15 bp, Homo sapiens
atttcctttagtcct

SEQ ID NO: 918112 - DNA, 15 bp, Homo sapiens
tttcctttagtcctt

SEQ ID NO: 918113 - DNA, 15 bp, Homo sapiens
ttcctttagtcctta

SEQ ID NO: 918114 - DNA, 15 bp, Homo sapiens
tcctttagtccttag

SEQ ID NO: 918115 - DNA, 15 bp, Homo sapiens
cctttagtccttagg

SEQ ID NO: 918116 - DNA, 15 bp, Homo sapiens
ctttagtccttaggt

SEQ ID NO: 918117 - DNA, 15 bp, Homo sapiens
tttagtccttaggta

SEQ ID NO: 918118 - DNA, 15 bp, Homo sapiens
ttagtccttaggtaa

SEQ ID NO: 918119 - DNA, 15 bp, Homo sapiens
tagtccttaggtaag

SEQ ID NO: 918120 - DNA, 15 bp, Homo sapiens
agtccttaggtaaga

SEQ ID NO: 918121 - DNA, 15 bp, Homo sapiens
gtccttaggtaagaa

SEQ ID NO: 918122 - DNA, 15 bp, Homo sapiens
tccttaggtaagaat

SEQ ID NO: 918123 - DNA, 15 bp, Homo sapiens
ccttaggtaagaatt

SEQ ID NO: 918124 - DNA, 15 bp, Homo sapiens
cttaggtaagaatta

SEQ ID NO: 918125 - DNA, 15 bp, Homo sapiens
ttaggtaagaattat

SEQ ID NO: 918126 - DNA, 15 bp, Homo sapiens
taggtaagaattatt

SEQ ID NO: 918127 - DNA, 15 bp, Homo sapiens
aggtaagaattattt

SEQ ID NO: 918128 - DNA, 15 bp, Homo sapiens
ggtaagaattatttt

SEQ ID NO: 918129 - DNA, 15 bp, Homo sapiens
gtaagaattattttt

SEQ ID NO: 918130 - DNA, 15 bp, Homo sapiens
taagaattatttttt

SEQ ID NO: 918131 - DNA, 15 bp, Homo sapiens
aagaattattttttc

SEQ ID NO: 918132 - DNA, 15 bp, Homo sapiens
agaattattttttca

SEQ ID NO: 918133 - DNA, 15 bp, Homo sapiens
gaattattttttcac

SEQ ID NO: 918134 - DNA, 15 bp, Homo sapiens
aattattttttcact

SEQ ID NO: 918135 - DNA, 15 bp, Homo sapiens
attattttttcactg

SEQ ID NO: 918136 - DNA, 15 bp, Homo sapiens
ttattttttcactgt

SEQ ID NO: 918137 - DNA, 15 bp, Homo sapiens
tattttttcactgta

SEQ ID NO: 918138 - DNA, 15 bp, Homo sapiens
attttttcactgtaa

SEQ ID NO: 918139 - DNA, 15 bp, Homo sapiens
ttttttcactgtaag

SEQ ID NO: 918140 - DNA, 15 bp, Homo sapiens
tttttcactgtaaga

SEQ ID NO: 918141 - DNA, 15 bp, Homo sapiens
ttttcactgtaagat

SEQ ID NO: 918142 - DNA, 15 bp, Homo sapiens
tttcactgtaagata

SEQ ID NO: 918143 - DNA, 15 bp, Homo sapiens
ttcactgtaagataa

SEQ ID NO: 918144 - DNA, 15 bp, Homo sapiens
tcactgtaagataaa

SEQ ID NO: 918145 - DNA, 15 bp, Homo sapiens
cactgtaagataaaa

SEQ ID NO: 918146 - DNA, 15 bp, Homo sapiens
actgtaagataaaaa

SEQ ID NO: 918147 - DNA, 15 bp, Homo sapiens
ctgtaagataaaaaa

SEQ ID NO: 918148 - DNA, 15 bp, Homo sapiens
tgtaagataaaaaaa

SEQ ID NO: 918149 - DNA, 15 bp, Homo sapiens
gtaagataaaaaaat

SEQ ID NO: 918150 - DNA, 15 bp, Homo sapiens
taagataaaaaaatt

SEQ ID NO: 918151 - DNA, 15 bp, Homo sapiens
aagataaaaaaattg

SEQ ID NO: 918152 - DNA, 15 bp, Homo sapiens
agataaaaaaattgg

SEQ ID NO: 918153 - DNA, 15 bp, Homo sapiens
gataaaaaaattggg

SEQ ID NO: 918154 - DNA, 15 bp, Homo sapiens
ataaaaaaattggga

SEQ ID NO: 918155 - DNA, 15 bp, Homo sapiens
taaaaaaattgggac

SEQ ID NO: 918156 - DNA, 15 bp, Homo sapiens
aaaaaaattgggact

SEQ ID NO: 918157 - DNA, 15 bp, Homo sapiens
aaaaaattgggacta

SEQ ID NO: 918158 - DNA, 15 bp, Homo sapiens
aaaaattgggactag

SEQ ID NO: 918159 - DNA, 15 bp, Homo sapiens
aaaattgggactagg

SEQ ID NO: 918160 - DNA, 15 bp, Homo sapiens
aaattgggactaggg

SEQ ID NO: 918161 - DNA, 15 bp, Homo sapiens
aattgggactaggga

SEQ ID NO: 918162 - DNA, 15 bp, Homo sapiens
attgggactagggaa

SEQ ID NO: 918163 - DNA, 15 bp, Homo sapiens
ttgggactagggaat

SEQ ID NO: 918164 - DNA, 15 bp, Homo sapiens
tgggactagggaata

SEQ ID NO: 918165 - DNA, 15 bp, Homo sapiens
gggactagggaatac

SEQ ID NO: 918166 - DNA, 15 bp, Homo sapiens
ggactagggaataca

SEQ ID NO: 918167 - DNA, 15 bp, Homo sapiens
gactagggaatacaa

SEQ ID NO: 918168 - DNA, 15 bp, Homo sapiens
actagggaatacaaa

SEQ ID NO: 918169 - DNA, 15 bp, Homo sapiens
ctagggaatacaaat

SEQ ID NO: 918170 - DNA, 15 bp, Homo sapiens
tagggaatacaaatc

SEQ ID NO: 918171 - DNA, 15 bp, Homo sapiens
agggaatacaaatca

SEQ ID NO: 918172 - DNA, 15 bp, Homo sapiens
gggaatacaaatcac

SEQ ID NO: 918173 - DNA, 15 bp, Homo sapiens
ggaatacaaatcacc

SEQ ID NO: 918174 - DNA, 15 bp, Homo sapiens
gaatacaaatcacct

SEQ ID NO: 918175 - DNA, 15 bp, Homo sapiens
aatacaaatcacctg

SEQ ID NO: 918176 - DNA, 15 bp, Homo sapiens
atacaaatcacctgt

SEQ ID NO: 918177 - DNA, 15 bp, Homo sapiens
tacaaatcacctgtc

SEQ ID NO: 918178 - DNA, 15 bp, Homo sapiens
acaaatcacctgtcc

SEQ ID NO: 918179 - DNA, 15 bp, Homo sapiens
caaatcacctgtcca

SEQ ID NO: 918180 - DNA, 15 bp, Homo sapiens
aaatcacctgtccag

SEQ ID NO: 918181 - DNA, 15 bp, Homo sapiens
aatcacctgtccagg

SEQ ID NO: 918182 - DNA, 15 bp, Homo sapiens
atcacctgtccagga

SEQ ID NO: 918183 - DNA, 15 bp, Homo sapiens
tcacctgtccaggaa

SEQ ID NO: 918184 - DNA, 15 bp, Homo sapiens
cacctgtccaggaac

SEQ ID NO: 918185 - DNA, 15 bp, Homo sapiens
acctgtccaggaaca

SEQ ID NO: 918186 - DNA, 15 bp, Homo sapiens
cctgtccaggaacac

SEQ ID NO: 918187 - DNA, 15 bp, Homo sapiens
ctgtccaggaacaca

SEQ ID NO: 918188 - DNA, 15 bp, Homo sapiens
tgtccaggaacacac

SEQ ID NO: 918189 - DNA, 15 bp, Homo sapiens
gtccaggaacacaca

SEQ ID NO: 918190 - DNA, 15 bp, Homo sapiens
tccaggaacacacag

SEQ ID NO: 918191 - DNA, 15 bp, Homo sapiens
ccaggaacacacagc

SEQ ID NO: 918192 - DNA, 15 bp, Homo sapiens
caggaacacacagcc

SEQ ID NO: 918193 - DNA, 15 bp, Homo sapiens
aggaacacacagcca

SEQ ID NO: 918194 - DNA, 15 bp, Homo sapiens
ggaacacacagccag

SEQ ID NO: 918195 - DNA, 15 bp, Homo sapiens
gaacacacagccagt

SEQ ID NO: 918196 - DNA, 15 bp, Homo sapiens
aacacacagccagtg

SEQ ID NO: 918197 - DNA, 15 bp, Homo sapiens
acacacagccagtga

SEQ ID NO: 918198 - DNA, 15 bp, Homo sapiens
cacacagccagtgat

SEQ ID NO: 918199 - DNA, 15 bp, Homo sapiens
acacagccagtgatg

SEQ ID NO: 918200 - DNA, 15 bp, Homo sapiens
cacagccagtgatgg

SEQ ID NO: 918201 - DNA, 15 bp, Homo sapiens
acagccagtgatggt

SEQ ID NO: 918202 - DNA, 15 bp, Homo sapiens
cagccagtgatggtt

SEQ ID NO: 918203 - DNA, 15 bp, Homo sapiens
agccagtgatggttt

SEQ ID NO: 918204 - DNA, 15 bp, Homo sapiens
gccagtgatggttta

SEQ ID NO: 918205 - DNA, 15 bp, Homo sapiens
ccagtgatggtttaa

SEQ ID NO: 918206 - DNA, 15 bp, Homo sapiens
cagtgatggtttaaa

SEQ ID NO: 918207 - DNA, 15 bp, Homo sapiens
agtgatggtttaaaa

SEQ ID NO: 918208 - DNA, 15 bp, Homo sapiens
gtgatggtttaaaac

SEQ ID NO: 918209 - DNA, 15 bp, Homo sapiens
tgatggtttaaaacc

SEQ ID NO: 918210 - DNA, 15 bp, Homo sapiens
gatggtttaaaaccc

SEQ ID NO: 918211 - DNA, 15 bp, Homo sapiens
atggtttaaaaccca

SEQ ID NO: 918212 - DNA, 15 bp, Homo sapiens
tggtttaaaacccag

SEQ ID NO: 918213 - DNA, 15 bp, Homo sapiens
ggtttaaaacccagc

SEQ ID NO: 918214 - DNA, 15 bp, Homo sapiens
gtttaaaacccagct

SEQ ID NO: 918215 - DNA, 15 bp, Homo sapiens
tttaaaacccagctc

SEQ ID NO: 918216 - DNA, 15 bp, Homo sapiens
ttaaaacccagctct

SEQ ID NO: 918217 - DNA, 15 bp, Homo sapiens
taaaacccagctctg

SEQ ID NO: 918218 - DNA, 15 bp, Homo sapiens
aaaacccagctctgt

SEQ ID NO: 918219 - DNA, 15 bp, Homo sapiens
aaacccagctctgtt

SEQ ID NO: 918220 - DNA, 15 bp, Homo sapiens
aacccagctctgttt

SEQ ID NO: 918221 - DNA, 15 bp, Homo sapiens
acccagctctgtttg

SEQ ID NO: 918222 - DNA, 15 bp, Homo sapiens
cccagctctgtttga

SEQ ID NO: 918223 - DNA, 15 bp, Homo sapiens
ccagctctgtttgat

SEQ ID NO: 918224 - DNA, 15 bp, Homo sapiens
cagctctgtttgatc

SEQ ID NO: 918225 - DNA, 15 bp, Homo sapiens
agctctgtttgatcc

SEQ ID NO: 918226 - DNA, 15 bp, Homo sapiens
gctctgtttgatccc

SEQ ID NO: 918227 - DNA, 15 bp, Homo sapiens
ctctgtttgatccca

SEQ ID NO: 918228 - DNA, 15 bp, Homo sapiens
tctgtttgatcccaa

SEQ ID NO: 918229 - DNA, 15 bp, Homo sapiens
ctgtttgatcccaaa

SEQ ID NO: 918230 - DNA, 15 bp, Homo sapiens
tgtttgatcccaaag

SEQ ID NO: 918231 - DNA, 15 bp, Homo sapiens
gtttgatcccaaagc

SEQ ID NO: 918232 - DNA, 15 bp, Homo sapiens
tttgatcccaaagcc

SEQ ID NO: 918233 - DNA, 15 bp, Homo sapiens
ttgatcccaaagccc

SEQ ID NO: 918234 - DNA, 15 bp, Homo sapiens
tgatcccaaagcccg

SEQ ID NO: 918235 - DNA, 15 bp, Homo sapiens
gatcccaaagcccgt

SEQ ID NO: 918236 - DNA, 15 bp, Homo sapiens
atcccaaagcccgtg

SEQ ID NO: 918237 - DNA, 15 bp, Homo sapiens
tcccaaagcccgtgt

SEQ ID NO: 918238 - DNA, 15 bp, Homo sapiens
cccaaagcccgtgtc

SEQ ID NO: 918239 - DNA, 15 bp, Homo sapiens
ccaaagcccgtgtcc

SEQ ID NO: 918240 - DNA, 15 bp, Homo sapiens
caaagcccgtgtcct

SEQ ID NO: 918241 - DNA, 15 bp, Homo sapiens
aaagcccgtgtccta

SEQ ID NO: 918242 - DNA, 15 bp, Homo sapiens
aagcccgtgtcctaa

SEQ ID NO: 918243 - DNA, 15 bp, Homo sapiens
agcccgtgtcctaaa

SEQ ID NO: 918244 - DNA, 15 bp, Homo sapiens
gcccgtgtcctaaaa

SEQ ID NO: 918245 - DNA, 15 bp, Homo sapiens
cccgtgtcctaaaaa

SEQ ID NO: 918246 - DNA, 15 bp, Homo sapiens
ccgtgtcctaaaaag

SEQ ID NO: 918247 - DNA, 15 bp, Homo sapiens
cgtgtcctaaaaagt

SEQ ID NO: 918248 - DNA, 15 bp, Homo sapiens
gtgtcctaaaaagtt

SEQ ID NO: 918249 - DNA, 15 bp, Homo sapiens
tgtcctaaaaagttt

SEQ ID NO: 918250 - DNA, 15 bp, Homo sapiens
gtcctaaaaagtttt

SEQ ID NO: 918251 - DNA, 15 bp, Homo sapiens
tcctaaaaagttttc

SEQ ID NO: 918252 - DNA, 15 bp, Homo sapiens
cctaaaaagttttct

SEQ ID NO: 918253 - DNA, 15 bp, Homo sapiens
ctaaaaagttttctc

SEQ ID NO: 918254 - DNA, 15 bp, Homo sapiens
taaaaagttttctct

SEQ ID NO: 918255 - DNA, 15 bp, Homo sapiens
aaaaagttttctcta

SEQ ID NO: 918256 - DNA, 15 bp, Homo sapiens
aaaagttttctctaa

SEQ ID NO: 918257 - DNA, 15 bp, Homo sapiens
aaagttttctctaat

SEQ ID NO: 918258 - DNA, 15 bp, Homo sapiens
aagttttctctaata

SEQ ID NO: 918259 - DNA, 15 bp, Homo sapiens
agttttctctaatac

SEQ ID NO: 918260 - DNA, 15 bp, Homo sapiens
gttttctctaataca

SEQ ID NO: 918261 - DNA, 15 bp, Homo sapiens
ttttctctaatacag

SEQ ID NO: 918262 - DNA, 15 bp, Homo sapiens
tttctctaatacagt

SEQ ID NO: 918263 - DNA, 15 bp, Homo sapiens
ttctctaatacagtg

SEQ ID NO: 918264 - DNA, 15 bp, Homo sapiens
tctctaatacagtga

SEQ ID NO: 918265 - DNA, 15 bp, Homo sapiens
ctctaatacagtgag

SEQ ID NO: 918266 - DNA, 15 bp, Homo sapiens
tctaatacagtgagg

SEQ ID NO: 918267 - DNA, 15 bp, Homo sapiens
ctaatacagtgagga

SEQ ID NO: 918268 - DNA, 15 bp, Homo sapiens
taatacagtgaggaa

SEQ ID NO: 918269 - DNA, 15 bp, Homo sapiens
aatacagtgaggaaa

SEQ ID NO: 918270 - DNA, 15 bp, Homo sapiens
atacagtgaggaaac

SEQ ID NO: 918271 - DNA, 15 bp, Homo sapiens
tacagtgaggaaaca

SEQ ID NO: 918272 - DNA, 15 bp, Homo sapiens
acagtgaggaaacag

SEQ ID NO: 918273 - DNA, 15 bp, Homo sapiens
cagtgaggaaacagc

SEQ ID NO: 918274 - DNA, 15 bp, Homo sapiens
agtgaggaaacagca

SEQ ID NO: 918275 - DNA, 15 bp, Homo sapiens
gtgaggaaacagcag

SEQ ID NO: 918276 - DNA, 15 bp, Homo sapiens
tgaggaaacagcagt

SEQ ID NO: 918277 - DNA, 15 bp, Homo sapiens
gaggaaacagcagtc

SEQ ID NO: 918278 - DNA, 15 bp, Homo sapiens
aggaaacagcagtca

SEQ ID NO: 918279 - DNA, 15 bp, Homo sapiens
ggaaacagcagtcat

SEQ ID NO: 918280 - DNA, 15 bp, Homo sapiens
gaaacagcagtcatc

SEQ ID NO: 918281 - DNA, 15 bp, Homo sapiens
aaacagcagtcatcg

SEQ ID NO: 918282 - DNA, 15 bp, Homo sapiens
aacagcagtcatcgt

SEQ ID NO: 918283 - DNA, 15 bp, Homo sapiens
acagcagtcatcgtt

SEQ ID NO: 918284 - DNA, 15 bp, Homo sapiens
cagcagtcatcgtta

SEQ ID NO: 918285 - DNA, 15 bp, Homo sapiens
agcagtcatcgttaa

SEQ ID NO: 918286 - DNA, 15 bp, Homo sapiens
gcagtcatcgttaat

SEQ ID NO: 918287 - DNA, 15 bp, Homo sapiens
cagtcatcgttaatt

SEQ ID NO: 918288 - DNA, 15 bp, Homo sapiens
agtcatcgttaattc

SEQ ID NO: 918289 - DNA, 15 bp, Homo sapiens
gtcatcgttaattct

SEQ ID NO: 918290 - DNA, 15 bp, Homo sapiens
tcatcgttaattctt

SEQ ID NO: 918291 - DNA, 15 bp, Homo sapiens
catcgttaattcttt

SEQ ID NO: 918292 - DNA, 15 bp, Homo sapiens
atcgttaattctttc

SEQ ID NO: 918293 - DNA, 15 bp, Homo sapiens
tcgttaattctttca

SEQ ID NO: 918294 - DNA, 15 bp, Homo sapiens
cgttaattctttcag

SEQ ID NO: 918295 - DNA, 15 bp, Homo sapiens
gttaattctttcagc

SEQ ID NO: 918296 - DNA, 15 bp, Homo sapiens
ttaattctttcagcc

SEQ ID NO: 918297 - DNA, 15 bp, Homo sapiens
taattctttcagcca

SEQ ID NO: 918298 - DNA, 15 bp, Homo sapiens
aattctttcagccaa

SEQ ID NO: 918299 - DNA, 15 bp, Homo sapiens
attctttcagccaac

SEQ ID NO: 918300 - DNA, 15 bp, Homo sapiens
ttctttcagccaaca

SEQ ID NO: 918301 - DNA, 15 bp, Homo sapiens
tctttcagccaacat

SEQ ID NO: 918302 - DNA, 15 bp, Homo sapiens
ctttcagccaacatt

SEQ ID NO: 918303 - DNA, 15 bp, Homo sapiens
tttcagccaacattt

SEQ ID NO: 918304 - DNA, 15 bp, Homo sapiens
ttcagccaacattta

SEQ ID NO: 918305 - DNA, 15 bp, Homo sapiens
tcagccaacatttac

SEQ ID NO: 918306 - DNA, 15 bp, Homo sapiens
cagccaacatttact

SEQ ID NO: 918307 - DNA, 15 bp, Homo sapiens
agccaacatttactg

SEQ ID NO: 918308 - DNA, 15 bp, Homo sapiens
gccaacatttactga

SEQ ID NO: 918309 - DNA, 15 bp, Homo sapiens
ccaacatttactgag

SEQ ID NO: 918310 - DNA, 15 bp, Homo sapiens
caacatttactgagc

SEQ ID NO: 918311 - DNA, 15 bp, Homo sapiens
aacatttactgagca

SEQ ID NO: 918312 - DNA, 15 bp, Homo sapiens
acatttactgagcag

SEQ ID NO: 918313 - DNA, 15 bp, Homo sapiens
catttactgagcagc

SEQ ID NO: 918314 - DNA, 15 bp, Homo sapiens
atttactgagcagct

SEQ ID NO: 918315 - DNA, 15 bp, Homo sapiens
tttactgagcagctg

SEQ ID NO: 918316 - DNA, 15 bp, Homo sapiens
ttactgagcagctgc

SEQ ID NO: 918317 - DNA, 15 bp, Homo sapiens
tactgagcagctgcc

SEQ ID NO: 918318 - DNA, 15 bp, Homo sapiens
actgagcagctgcca

SEQ ID NO: 918319 - DNA, 15 bp, Homo sapiens
ctgagcagctgccat

SEQ ID NO: 918320 - DNA, 15 bp, Homo sapiens
tgagcagctgccatg

SEQ ID NO: 918321 - DNA, 15 bp, Homo sapiens
gagcagctgccatgt

SEQ ID NO: 918322 - DNA, 15 bp, Homo sapiens
agcagctgccatgta

SEQ ID NO: 918323 - DNA, 15 bp, Homo sapiens
gcagctgccatgtat

SEQ ID NO: 918324 - DNA, 15 bp, Homo sapiens
cagctgccatgtatc

SEQ ID NO: 918325 - DNA, 15 bp, Homo sapiens
agctgccatgtatca

SEQ ID NO: 918326 - DNA, 15 bp, Homo sapiens
gctgccatgtatcag

SEQ ID NO: 918327 - DNA, 15 bp, Homo sapiens
ctgccatgtatcaga

SEQ ID NO: 918328 - DNA, 15 bp, Homo sapiens
tgccatgtatcagac

SEQ ID NO: 918329 - DNA, 15 bp, Homo sapiens
gccatgtatcagaca

SEQ ID NO: 918330 - DNA, 15 bp, Homo sapiens
ccatgtatcagacac

SEQ ID NO: 918331 - DNA, 15 bp, Homo sapiens
catgtatcagacaca

SEQ ID NO: 918332 - DNA, 15 bp, Homo sapiens
atgtatcagacacag

SEQ ID NO: 918333 - DNA, 15 bp, Homo sapiens
tgtatcagacacagt

SEQ ID NO: 918334 - DNA, 15 bp, Homo sapiens
gtatcagacacagtt

SEQ ID NO: 918335 - DNA, 15 bp, Homo sapiens
tatcagacacagttt

SEQ ID NO: 918336 - DNA, 15 bp, Homo sapiens
atcagacacagttta

SEQ ID NO: 918337 - DNA, 15 bp, Homo sapiens
tcagacacagtttag

SEQ ID NO: 918338 - DNA, 15 bp, Homo sapiens
cagacacagtttagg

SEQ ID NO: 918339 - DNA, 15 bp, Homo sapiens
agacacagtttaggt

SEQ ID NO: 918340 - DNA, 15 bp, Homo sapiens
gacacagtttaggtt

SEQ ID NO: 918341 - DNA, 15 bp, Homo sapiens
acacagtttaggttc

SEQ ID NO: 918342 - DNA, 15 bp, Homo sapiens
cacagtttaggttct

SEQ ID NO: 918343 - DNA, 15 bp, Homo sapiens
acagtttaggttctg

SEQ ID NO: 918344 - DNA, 15 bp, Homo sapiens
cagtttaggttctga

SEQ ID NO: 918345 - DNA, 15 bp, Homo sapiens
agtttaggttctgag

SEQ ID NO: 918346 - DNA, 15 bp, Homo sapiens
gtttaggttctgagg

SEQ ID NO: 918347 - DNA, 15 bp, Homo sapiens
tttaggttctgagga

SEQ ID NO: 918348 - DNA, 15 bp, Homo sapiens
ttaggttctgaggat

SEQ ID NO: 918349 - DNA, 15 bp, Homo sapiens
taggttctgaggata

SEQ ID NO: 918350 - DNA, 15 bp, Homo sapiens
aggttctgaggatac

SEQ ID NO: 918351 - DNA, 15 bp, Homo sapiens
ggttctgaggataca

SEQ ID NO: 918352 - DNA, 15 bp, Homo sapiens
gttctgaggatacag

SEQ ID NO: 918353 - DNA, 15 bp, Homo sapiens
ttctgaggatacaga

SEQ ID NO: 918354 - DNA, 15 bp, Homo sapiens
tctgaggatacagag

SEQ ID NO: 918355 - DNA, 15 bp, Homo sapiens
ctgaggatacagagt

SEQ ID NO: 918356 - DNA, 15 bp, Homo sapiens
tgaggatacagagta

SEQ ID NO: 918357 - DNA, 15 bp, Homo sapiens
gaggatacagagtag

SEQ ID NO: 918358 - DNA, 15 bp, Homo sapiens
aggatacagagtaga

SEQ ID NO: 918359 - DNA, 15 bp, Homo sapiens
ggatacagagtagag

SEQ ID NO: 918360 - DNA, 15 bp, Homo sapiens
gatacagagtagagc

SEQ ID NO: 918361 - DNA, 15 bp, Homo sapiens
atacagagtagagca

SEQ ID NO: 918362 - DNA, 15 bp, Homo sapiens
tacagagtagagcat

SEQ ID NO: 918363 - DNA, 15 bp, Homo sapiens
acagagtagagcatt

SEQ ID NO: 918364 - DNA, 15 bp, Homo sapiens
cagagtagagcatta

SEQ ID NO: 918365 - DNA, 15 bp, Homo sapiens
agagtagagcattat

SEQ ID NO: 918366 - DNA, 15 bp, Homo sapiens
gagtagagcattata

SEQ ID NO: 918367 - DNA, 15 bp, Homo sapiens
agtagagcattatat

SEQ ID NO: 918368 - DNA, 15 bp, Homo sapiens
gtagagcattatatg

SEQ ID NO: 918369 - DNA, 15 bp, Homo sapiens
tagagcattatatga

SEQ ID NO: 918370 - DNA, 15 bp, Homo sapiens
agagcattatatgac

SEQ ID NO: 918371 - DNA, 15 bp, Homo sapiens
gagcattatatgacc

SEQ ID NO: 918372 - DNA, 15 bp, Homo sapiens
agcattatatgacct

SEQ ID NO: 918373 - DNA, 15 bp, Homo sapiens
gcattatatgacctc

SEQ ID NO: 918374 - DNA, 15 bp, Homo sapiens
cattatatgacctct

SEQ ID NO: 918375 - DNA, 15 bp, Homo sapiens
attatatgacctctg

SEQ ID NO: 918376 - DNA, 15 bp, Homo sapiens
ttatatgacctctgg

SEQ ID NO: 918377 - DNA, 15 bp, Homo sapiens
tatatgacctctggc

SEQ ID NO: 918378 - DNA, 15 bp, Homo sapiens
atatgacctctggct

SEQ ID NO: 918379 - DNA, 15 bp, Homo sapiens
tatgacctctggctt

SEQ ID NO: 918380 - DNA, 15 bp, Homo sapiens
atgacctctggcttt

SEQ ID NO: 918381 - DNA, 15 bp, Homo sapiens
tgacctctggctttg

SEQ ID NO: 918382 - DNA, 15 bp, Homo sapiens
gacctctggctttga

SEQ ID NO: 918383 - DNA, 15 bp, Homo sapiens
acctctggctttgaa

SEQ ID NO: 918384 - DNA, 15 bp, Homo sapiens
cctctggctttgaag

SEQ ID NO: 918385 - DNA, 15 bp, Homo sapiens
ctctggctttgaaga

SEQ ID NO: 918386 - DNA, 15 bp, Homo sapiens
tctggctttgaagaa

SEQ ID NO: 918387 - DNA, 15 bp, Homo sapiens
ctggctttgaagaat

SEQ ID NO: 918388 - DNA, 15 bp, Homo sapiens
tggctttgaagaatt

SEQ ID NO: 918389 - DNA, 15 bp, Homo sapiens
ggctttgaagaattt

SEQ ID NO: 918390 - DNA, 15 bp, Homo sapiens
gctttgaagaattta

SEQ ID NO: 918391 - DNA, 15 bp, Homo sapiens
ctttgaagaatttac

SEQ ID NO: 918392 - DNA, 15 bp, Homo sapiens
tttgaagaatttaca

SEQ ID NO: 918393 - DNA, 15 bp, Homo sapiens
ttgaagaatttacag

SEQ ID NO: 918394 - DNA, 15 bp, Homo sapiens
tgaagaatttacagt

SEQ ID NO: 918395 - DNA, 15 bp, Homo sapiens
gaagaatttacagtc

SEQ ID NO: 918396 - DNA, 15 bp, Homo sapiens
aagaatttacagtct

SEQ ID NO: 918397 - DNA, 15 bp, Homo sapiens
agaatttacagtcta

SEQ ID NO: 918398 - DNA, 15 bp, Homo sapiens
gaatttacagtctag

SEQ ID NO: 918399 - DNA, 15 bp, Homo sapiens
aatttacagtctagt

SEQ ID NO: 918400 - DNA, 15 bp, Homo sapiens
atttacagtctagta

SEQ ID NO: 918401 - DNA, 15 bp, Homo sapiens
tttacagtctagtag

SEQ ID NO: 918402 - DNA, 15 bp, Homo sapiens
ttacagtctagtagg

SEQ ID NO: 918403 - DNA, 15 bp, Homo sapiens
tacagtctagtaggg

SEQ ID NO: 918404 - DNA, 15 bp, Homo sapiens
acagtctagtagggg

SEQ ID NO: 918405 - DNA, 15 bp, Homo sapiens
cagtctagtagggga

SEQ ID NO: 918406 - DNA, 15 bp, Homo sapiens
agtctagtaggggaa

SEQ ID NO: 918407 - DNA, 15 bp, Homo sapiens
gtctagtaggggaag

SEQ ID NO: 918408 - DNA, 15 bp, Homo sapiens
tctagtaggggaagg

SEQ ID NO: 918409 - DNA, 15 bp, Homo sapiens
ctagtaggggaagga

SEQ ID NO: 918410 - DNA, 15 bp, Homo sapiens
tagtaggggaaggag

SEQ ID NO: 918411 - DNA, 15 bp, Homo sapiens
agtaggggaaggaga

SEQ ID NO: 918412 - DNA, 15 bp, Homo sapiens
gtaggggaaggagag

SEQ ID NO: 918413 - DNA, 15 bp, Homo sapiens
taggggaaggagagt

SEQ ID NO: 918414 - DNA, 15 bp, Homo sapiens
aggggaaggagagtg

SEQ ID NO: 918415 - DNA, 15 bp, Homo sapiens
ggggaaggagagtga

SEQ ID NO: 918416 - DNA, 15 bp, Homo sapiens
gggaaggagagtgag

SEQ ID NO: 918417 - DNA, 15 bp, Homo sapiens
ggaaggagagtgaga

SEQ ID NO: 918418 - DNA, 15 bp, Homo sapiens
gaaggagagtgagac

SEQ ID NO: 918419 - DNA, 15 bp, Homo sapiens
aaggagagtgagact

SEQ ID NO: 918420 - DNA, 15 bp, Homo sapiens
aggagagtgagactg

SEQ ID NO: 918421 - DNA, 15 bp, Homo sapiens
ggagagtgagactgg

SEQ ID NO: 918422 - DNA, 15 bp, Homo sapiens
gagagtgagactgga

SEQ ID NO: 918423 - DNA, 15 bp, Homo sapiens
agagtgagactggag

SEQ ID NO: 918424 - DNA, 15 bp, Homo sapiens
gagtgagactggagg

SEQ ID NO: 918425 - DNA, 15 bp, Homo sapiens
agtgagactggaggg

SEQ ID NO: 918426 - DNA, 15 bp, Homo sapiens
gtgagactggagggc

SEQ ID NO: 918427 - DNA, 15 bp, Homo sapiens
tgagactggagggcc

SEQ ID NO: 918428 - DNA, 15 bp, Homo sapiens
gagactggagggcct

SEQ ID NO: 918429 - DNA, 15 bp, Homo sapiens
agactggagggcctt

SEQ ID NO: 918430 - DNA, 15 bp, Homo sapiens
gactggagggcctta

SEQ ID NO: 918431 - DNA, 15 bp, Homo sapiens
actggagggccttat

SEQ ID NO: 918432 - DNA, 15 bp, Homo sapiens
ctggagggccttata

SEQ ID NO: 918433 - DNA, 15 bp, Homo sapiens
tggagggccttatat

SEQ ID NO: 918434 - DNA, 15 bp, Homo sapiens
ggagggccttatata

SEQ ID NO: 918435 - DNA, 15 bp, Homo sapiens
gagggccttatatac

SEQ ID NO: 918436 - DNA, 15 bp, Homo sapiens
agggccttatatact

SEQ ID NO: 918437 - DNA, 15 bp, Homo sapiens
gggccttatatacta

SEQ ID NO: 918438 - DNA, 15 bp, Homo sapiens
ggccttatatactat

SEQ ID NO: 918439 - DNA, 15 bp, Homo sapiens
gccttatatactatc

SEQ ID NO: 918440 - DNA, 15 bp, Homo sapiens
ccttatatactatct

SEQ ID NO: 918441 - DNA, 15 bp, Homo sapiens
cttatatactatctt

SEQ ID NO: 918442 - DNA, 15 bp, Homo sapiens
ttatatactatcttt

SEQ ID NO: 918443 - DNA, 15 bp, Homo sapiens
tatatactatctttc

SEQ ID NO: 918444 - DNA, 15 bp, Homo sapiens
atatactatctttcc

SEQ ID NO: 918445 - DNA, 15 bp, Homo sapiens
tatactatctttcct

SEQ ID NO: 918446 - DNA, 15 bp, Homo sapiens
atactatctttcctt

SEQ ID NO: 918447 - DNA, 15 bp, Homo sapiens
tactatctttcctta

SEQ ID NO: 918448 - DNA, 15 bp, Homo sapiens
actatctttccttag

SEQ ID NO: 918449 - DNA, 15 bp, Homo sapiens
ctatctttccttagc

SEQ ID NO: 918450 - DNA, 15 bp, Homo sapiens
tatctttccttagct

SEQ ID NO: 918451 - DNA, 15 bp, Homo sapiens
atctttccttagctg

SEQ ID NO: 918452 - DNA, 15 bp, Homo sapiens
tctttccttagctgc

SEQ ID NO: 918453 - DNA, 15 bp, Homo sapiens
ctttccttagctgca

SEQ ID NO: 918454 - DNA, 15 bp, Homo sapiens
tttccttagctgcag

SEQ ID NO: 918455 - DNA, 15 bp, Homo sapiens
ttccttagctgcagg

SEQ ID NO: 918456 - DNA, 15 bp, Homo sapiens
tccttagctgcaggt

SEQ ID NO: 918457 - DNA, 15 bp, Homo sapiens
ccttagctgcaggta

SEQ ID NO: 918458 - DNA, 15 bp, Homo sapiens
cttagctgcaggtat

SEQ ID NO: 918459 - DNA, 15 bp, Homo sapiens
ttagctgcaggtatg

SEQ ID NO: 918460 - DNA, 15 bp, Homo sapiens
tagctgcaggtatgg

SEQ ID NO: 918461 - DNA, 15 bp, Homo sapiens
agctgcaggtatggc

SEQ ID NO: 918462 - DNA, 15 bp, Homo sapiens
gctgcaggtatggca

SEQ ID NO: 918463 - DNA, 15 bp, Homo sapiens
ctgcaggtatggcag

SEQ ID NO: 918464 - DNA, 15 bp, Homo sapiens
tgcaggtatggcaga

SEQ ID NO: 918465 - DNA, 15 bp, Homo sapiens
gcaggtatggcagat

SEQ ID NO: 918466 - DNA, 15 bp, Homo sapiens
caggtatggcagata

SEQ ID NO: 918467 - DNA, 15 bp, Homo sapiens
aggtatggcagatat

SEQ ID NO: 918468 - DNA, 15 bp, Homo sapiens
ggtatggcagatata

SEQ ID NO: 918469 - DNA, 15 bp, Homo sapiens
gtatggcagatatat

SEQ ID NO: 918470 - DNA, 15 bp, Homo sapiens
tatggcagatatatt

SEQ ID NO: 918471 - DNA, 15 bp, Homo sapiens
atggcagatatattt

SEQ ID NO: 918472 - DNA, 15 bp, Homo sapiens
tggcagatatattta

SEQ ID NO: 918473 - DNA, 15 bp, Homo sapiens
ggcagatatatttaa

SEQ ID NO: 918474 - DNA, 15 bp, Homo sapiens
gcagatatatttaaa

SEQ ID NO: 918475 - DNA, 15 bp, Homo sapiens
cagatatatttaaaa

SEQ ID NO: 918476 - DNA, 15 bp, Homo sapiens
agatatatttaaaat

SEQ ID NO: 918477 - DNA, 15 bp, Homo sapiens
gatatatttaaaata

SEQ ID NO: 918478 - DNA, 15 bp, Homo sapiens
atatatttaaaataa

SEQ ID NO: 918479 - DNA, 15 bp, Homo sapiens
tatatttaaaataag

SEQ ID NO: 918480 - DNA, 15 bp, Homo sapiens
atatttaaaataagc

SEQ ID NO: 918481 - DNA, 15 bp, Homo sapiens
tatttaaaataagca

SEQ ID NO: 918482 - DNA, 15 bp, Homo sapiens
atttaaaataagcaa

SEQ ID NO: 918483 - DNA, 15 bp, Homo sapiens
tttaaaataagcaac

SEQ ID NO: 918484 - DNA, 15 bp, Homo sapiens
ttaaaataagcaact

SEQ ID NO: 918485 - DNA, 15 bp, Homo sapiens
taaaataagcaactg

SEQ ID NO: 918486 - DNA, 15 bp, Homo sapiens
aaaataagcaactgt

SEQ ID NO: 918487 - DNA, 15 bp, Homo sapiens
aaataagcaactgtt

SEQ ID NO: 918488 - DNA, 15 bp, Homo sapiens
aataagcaactgttc

SEQ ID NO: 918489 - DNA, 15 bp, Homo sapiens
ataagcaactgttca

SEQ ID NO: 918490 - DNA, 15 bp, Homo sapiens
taagcaactgttcat

SEQ ID NO: 918491 - DNA, 15 bp, Homo sapiens
aagcaactgttcatc

SEQ ID NO: 918492 - DNA, 15 bp, Homo sapiens
agcaactgttcatct

SEQ ID NO: 918493 - DNA, 15 bp, Homo sapiens
gcaactgttcatctc

SEQ ID NO: 918494 - DNA, 15 bp, Homo sapiens
caactgttcatctcc

SEQ ID NO: 918495 - DNA, 15 bp, Homo sapiens
aactgttcatctcct

SEQ ID NO: 918496 - DNA, 15 bp, Homo sapiens
actgttcatctcctc

SEQ ID NO: 918497 - DNA, 15 bp, Homo sapiens
ctgttcatctcctct

SEQ ID NO: 918498 - DNA, 15 bp, Homo sapiens
tgttcatctcctcta

SEQ ID NO: 918499 - DNA, 15 bp, Homo sapiens
gttcatctcctctaa

SEQ ID NO: 918500 - DNA, 15 bp, Homo sapiens
ttcatctcctctaag

SEQ ID NO: 918501 - DNA, 15 bp, Homo sapiens
tcatctcctctaaga

SEQ ID NO: 918502 - DNA, 15 bp, Homo sapiens
catctcctctaagaa

SEQ ID NO: 918503 - DNA, 15 bp, Homo sapiens
atctcctctaagaat

SEQ ID NO: 918504 - DNA, 15 bp, Homo sapiens
tctcctctaagaata

SEQ ID NO: 918505 - DNA, 15 bp, Homo sapiens
ctcctctaagaataa

SEQ ID NO: 918506 - DNA, 15 bp, Homo sapiens
tcctctaagaataaa

SEQ ID NO: 918507 - DNA, 15 bp, Homo sapiens
cctctaagaataaat

SEQ ID NO: 918508 - DNA, 15 bp, Homo sapiens
ctctaagaataaatg

SEQ ID NO: 918509 - DNA, 15 bp, Homo sapiens
tctaagaataaatgt

SEQ ID NO: 918510 - DNA, 15 bp, Homo sapiens
ctaagaataaatgtc

SEQ ID NO: 918511 - DNA, 15 bp, Homo sapiens
taagaataaatgtca

SEQ ID NO: 918512 - DNA, 15 bp, Homo sapiens
aagaataaatgtcag

SEQ ID NO: 918513 - DNA, 15 bp, Homo sapiens
agaataaatgtcaga

SEQ ID NO: 918514 - DNA, 15 bp, Homo sapiens
gaataaatgtcagaa

SEQ ID NO: 918515 - DNA, 15 bp, Homo sapiens
aataaatgtcagaag

SEQ ID NO: 918516 - DNA, 15 bp, Homo sapiens
ataaatgtcagaagt

SEQ ID NO: 918517 - DNA, 15 bp, Homo sapiens
taaatgtcagaagtc

SEQ ID NO: 918518 - DNA, 15 bp, Homo sapiens
aaatgtcagaagtca

SEQ ID NO: 918519 - DNA, 15 bp, Homo sapiens
aatgtcagaagtcac

SEQ ID NO: 918520 - DNA, 15 bp, Homo sapiens
atgtcagaagtcaca

SEQ ID NO: 918521 - DNA, 15 bp, Homo sapiens
tgtcagaagtcacat

SEQ ID NO: 918522 - DNA, 15 bp, Homo sapiens
gtcagaagtcacatg

SEQ ID NO: 918523 - DNA, 15 bp, Homo sapiens
tcagaagtcacatgg

SEQ ID NO: 918524 - DNA, 15 bp, Homo sapiens
cagaagtcacatgga

SEQ ID NO: 918525 - DNA, 15 bp, Homo sapiens
agaagtcacatggaa

SEQ ID NO: 918526 - DNA, 15 bp, Homo sapiens
gaagtcacatggaaa

SEQ ID NO: 918527 - DNA, 15 bp, Homo sapiens
aagtcacatggaaat

SEQ ID NO: 918528 - DNA, 15 bp, Homo sapiens
agtcacatggaaatt

SEQ ID NO: 918529 - DNA, 15 bp, Homo sapiens
gtcacatggaaattg

SEQ ID NO: 918530 - DNA, 15 bp, Homo sapiens
tcacatggaaattga

SEQ ID NO: 918531 - DNA, 15 bp, Homo sapiens
cacatggaaattgaa

SEQ ID NO: 918532 - DNA, 15 bp, Homo sapiens
acatggaaattgaac

SEQ ID NO: 918533 - DNA, 15 bp, Homo sapiens
catggaaattgaact

SEQ ID NO: 918534 - DNA, 15 bp, Homo sapiens
atggaaattgaactt

SEQ ID NO: 918535 - DNA, 15 bp, Homo sapiens
tggaaattgaacttt

SEQ ID NO: 918536 - DNA, 15 bp, Homo sapiens
ggaaattgaacttta

SEQ ID NO: 918537 - DNA, 15 bp, Homo sapiens
gaaattgaactttag

SEQ ID NO: 918538 - DNA, 15 bp, Homo sapiens
aaattgaactttaga

SEQ ID NO: 918539 - DNA, 15 bp, Homo sapiens
aattgaactttagag

SEQ ID NO: 918540 - DNA, 15 bp, Homo sapiens
attgaactttagaga

SEQ ID NO: 918541 - DNA, 15 bp, Homo sapiens
ttgaactttagagac

SEQ ID NO: 918542 - DNA, 15 bp, Homo sapiens
tgaactttagagact

SEQ ID NO: 918543 - DNA, 15 bp, Homo sapiens
gaactttagagacta

SEQ ID NO: 918544 - DNA, 15 bp, Homo sapiens
aactttagagactag

SEQ ID NO: 918545 - DNA, 15 bp, Homo sapiens
actttagagactaga

SEQ ID NO: 918546 - DNA, 15 bp, Homo sapiens
ctttagagactagaa

SEQ ID NO: 918547 - DNA, 15 bp, Homo sapiens
tttagagactagaag

SEQ ID NO: 918548 - DNA, 15 bp, Homo sapiens
ttagagactagaagt

SEQ ID NO: 918549 - DNA, 15 bp, Homo sapiens
tagagactagaagtg

SEQ ID NO: 918550 - DNA, 15 bp, Homo sapiens
agagactagaagtgt

SEQ ID NO: 918551 - DNA, 15 bp, Homo sapiens
gagactagaagtgtc

SEQ ID NO: 918552 - DNA, 15 bp, Homo sapiens
agactagaagtgtct

SEQ ID NO: 918553 - DNA, 15 bp, Homo sapiens
gactagaagtgtctc

SEQ ID NO: 918554 - DNA, 15 bp, Homo sapiens
actagaagtgtctca

SEQ ID NO: 918555 - DNA, 15 bp, Homo sapiens
ctagaagtgtctcaa

SEQ ID NO: 918556 - DNA, 15 bp, Homo sapiens
tagaagtgtctcaag

SEQ ID NO: 918557 - DNA, 15 bp, Homo sapiens
agaagtgtctcaagc

SEQ ID NO: 918558 - DNA, 15 bp, Homo sapiens
gaagtgtctcaagca

SEQ ID NO: 918559 - DNA, 15 bp, Homo sapiens
aagtgtctcaagcag

SEQ ID NO: 918560 - DNA, 15 bp, Homo sapiens
agtgtctcaagcagc

SEQ ID NO: 918561 - DNA, 15 bp, Homo sapiens
gtgtctcaagcagcc

SEQ ID NO: 918562 - DNA, 15 bp, Homo sapiens
tgtctcaagcagcct

SEQ ID NO: 918563 - DNA, 15 bp, Homo sapiens
gtctcaagcagcctg

SEQ ID NO: 918564 - DNA, 15 bp, Homo sapiens
tctcaagcagcctgc

SEQ ID NO: 918565 - DNA, 15 bp, Homo sapiens
ctcaagcagcctgct

SEQ ID NO: 918566 - DNA, 15 bp, Homo sapiens
tcaagcagcctgctc

SEQ ID NO: 918567 - DNA, 15 bp, Homo sapiens
caagcagcctgctca

SEQ ID NO: 918568 - DNA, 15 bp, Homo sapiens
aagcagcctgctcag

SEQ ID NO: 918569 - DNA, 15 bp, Homo sapiens
agcagcctgctcagt

SEQ ID NO: 918570 - DNA, 15 bp, Homo sapiens
gcagcctgctcagtt

SEQ ID NO: 918571 - DNA, 15 bp, Homo sapiens
cagcctgctcagttt

SEQ ID NO: 918572 - DNA, 15 bp, Homo sapiens
agcctgctcagtttt

SEQ ID NO: 918573 - DNA, 15 bp, Homo sapiens
gcctgctcagttttg

SEQ ID NO: 918574 - DNA, 15 bp, Homo sapiens
cctgctcagttttga

SEQ ID NO: 918575 - DNA, 15 bp, Homo sapiens
ctgctcagttttgat

SEQ ID NO: 918576 - DNA, 15 bp, Homo sapiens
tgctcagttttgatc

SEQ ID NO: 918577 - DNA, 15 bp, Homo sapiens
gctcagttttgatca

SEQ ID NO: 918578 - DNA, 15 bp, Homo sapiens
ctcagttttgatcaa

SEQ ID NO: 918579 - DNA, 15 bp, Homo sapiens
tcagttttgatcaag

SEQ ID NO: 918580 - DNA, 15 bp, Homo sapiens
cagttttgatcaagg

SEQ ID NO: 918581 - DNA, 15 bp, Homo sapiens
agttttgatcaagga

SEQ ID NO: 918582 - DNA, 15 bp, Homo sapiens
gttttgatcaaggaa

SEQ ID NO: 918583 - DNA, 15 bp, Homo sapiens
ttttgatcaaggaaa

SEQ ID NO: 918584 - DNA, 15 bp, Homo sapiens
tttgatcaaggaaat

SEQ ID NO: 918585 - DNA, 15 bp, Homo sapiens
ttgatcaaggaaata

SEQ ID NO: 918586 - DNA, 15 bp, Homo sapiens
tgatcaaggaaataa

SEQ ID NO: 918587 - DNA, 15 bp, Homo sapiens
gatcaaggaaataaa

SEQ ID NO: 918588 - DNA, 15 bp, Homo sapiens
atcaaggaaataaaa

SEQ ID NO: 918589 - DNA, 15 bp, Homo sapiens
tcaaggaaataaaaa

SEQ ID NO: 918590 - DNA, 15 bp, Homo sapiens
caaggaaataaaaac

SEQ ID NO: 918591 - DNA, 15 bp, Homo sapiens
aaggaaataaaaacc

SEQ ID NO: 918592 - DNA, 15 bp, Homo sapiens
aggaaataaaaacct

SEQ ID NO: 918593 - DNA, 15 bp, Homo sapiens
ggaaataaaaaccta

SEQ ID NO: 918594 - DNA, 15 bp, Homo sapiens
gaaataaaaacctaa

SEQ ID NO: 918595 - DNA, 15 bp, Homo sapiens
aaataaaaacctaaa

SEQ ID NO: 918596 - DNA, 15 bp, Homo sapiens
aataaaaacctaaag

SEQ ID NO: 918597 - DNA, 15 bp, Homo sapiens
ataaaaacctaaaga

SEQ ID NO: 918598 - DNA, 15 bp, Homo sapiens
taaaaacctaaagaa

SEQ ID NO: 918599 - DNA, 15 bp, Homo sapiens
aaaaacctaaagaaa

SEQ ID NO: 918600 - DNA, 15 bp, Homo sapiens
aaaacctaaagaaat

SEQ ID NO: 918601 - DNA, 15 bp, Homo sapiens
aaacctaaagaaata

SEQ ID NO: 918602 - DNA, 15 bp, Homo sapiens
aacctaaagaaatac

SEQ ID NO: 918603 - DNA, 15 bp, Homo sapiens
acctaaagaaatact

SEQ ID NO: 918604 - DNA, 15 bp, Homo sapiens
cctaaagaaatactc

SEQ ID NO: 918605 - DNA, 15 bp, Homo sapiens
ctaaagaaatactca

SEQ ID NO: 918606 - DNA, 15 bp, Homo sapiens
taaagaaatactcag

SEQ ID NO: 918607 - DNA, 15 bp, Homo sapiens
aaagaaatactcaga

SEQ ID NO: 918608 - DNA, 15 bp, Homo sapiens
aagaaatactcagag

SEQ ID NO: 918609 - DNA, 15 bp, Homo sapiens
agaaatactcagagc

SEQ ID NO: 918610 - DNA, 15 bp, Homo sapiens
gaaatactcagagca

SEQ ID NO: 918611 - DNA, 15 bp, Homo sapiens
aaatactcagagcaa

SEQ ID NO: 918612 - DNA, 15 bp, Homo sapiens
aatactcagagcaaa

SEQ ID NO: 918613 - DNA, 15 bp, Homo sapiens
atactcagagcaaag

SEQ ID NO: 918614 - DNA, 15 bp, Homo sapiens
tactcagagcaaagt

SEQ ID NO: 918615 - DNA, 15 bp, Homo sapiens
actcagagcaaagtt

SEQ ID NO: 918616 - DNA, 15 bp, Homo sapiens
ctcagagcaaagtta

SEQ ID NO: 918617 - DNA, 15 bp, Homo sapiens
tcagagcaaagttac

SEQ ID NO: 918618 - DNA, 15 bp, Homo sapiens
cagagcaaagttact

SEQ ID NO: 918619 - DNA, 15 bp, Homo sapiens
agagcaaagttacta

SEQ ID NO: 918620 - DNA, 15 bp, Homo sapiens
gagcaaagttactaa

SEQ ID NO: 918621 - DNA, 15 bp, Homo sapiens
agcaaagttactaaa

SEQ ID NO: 918622 - DNA, 15 bp, Homo sapiens
gcaaagttactaaac

SEQ ID NO: 918623 - DNA, 15 bp, Homo sapiens
caaagttactaaaca

SEQ ID NO: 918624 - DNA, 15 bp, Homo sapiens
aaagttactaaacac

SEQ ID NO: 918625 - DNA, 15 bp, Homo sapiens
aagttactaaacacg

SEQ ID NO: 918626 - DNA, 15 bp, Homo sapiens
agttactaaacacgt

SEQ ID NO: 918627 - DNA, 15 bp, Homo sapiens
gttactaaacacgta

SEQ ID NO: 918628 - DNA, 15 bp, Homo sapiens
ttactaaacacgtaa

SEQ ID NO: 918629 - DNA, 15 bp, Homo sapiens
tactaaacacgtaac

SEQ ID NO: 918630 - DNA, 15 bp, Homo sapiens
actaaacacgtaact

SEQ ID NO: 918631 - DNA, 15 bp, Homo sapiens
ctaaacacgtaactt

SEQ ID NO: 918632 - DNA, 15 bp, Homo sapiens
taaacacgtaacttt

SEQ ID NO: 918633 - DNA, 15 bp, Homo sapiens
aaacacgtaactttg

SEQ ID NO: 918634 - DNA, 15 bp, Homo sapiens
aacacgtaactttga

SEQ ID NO: 918635 - DNA, 15 bp, Homo sapiens
acacgtaactttgag

SEQ ID NO: 918636 - DNA, 15 bp, Homo sapiens
cacgtaactttgagt

SEQ ID NO: 918637 - DNA, 15 bp, Homo sapiens
acgtaactttgagta

SEQ ID NO: 918638 - DNA, 15 bp, Homo sapiens
cgtaactttgagtaa

SEQ ID NO: 918639 - DNA, 15 bp, Homo sapiens
gtaactttgagtaaa

SEQ ID NO: 918640 - DNA, 15 bp, Homo sapiens
taactttgagtaaaa

SEQ ID NO: 918641 - DNA, 15 bp, Homo sapiens
aactttgagtaaaag

SEQ ID NO: 918642 - DNA, 15 bp, Homo sapiens
actttgagtaaaaga

SEQ ID NO: 918643 - DNA, 15 bp, Homo sapiens
ctttgagtaaaagat

SEQ ID NO: 918644 - DNA, 15 bp, Homo sapiens
tttgagtaaaagatg

SEQ ID NO: 918645 - DNA, 15 bp, Homo sapiens
ttgagtaaaagatgg

SEQ ID NO: 918646 - DNA, 15 bp, Homo sapiens
tgagtaaaagatggc

SEQ ID NO: 918647 - DNA, 15 bp, Homo sapiens
gagtaaaagatggct

SEQ ID NO: 918648 - DNA, 15 bp, Homo sapiens
agtaaaagatggctg

SEQ ID NO: 918649 - DNA, 15 bp, Homo sapiens
gtaaaagatggctgc

SEQ ID NO: 918650 - DNA, 15 bp, Homo sapiens
taaaagatggctgca

SEQ ID NO: 918651 - DNA, 15 bp, Homo sapiens
aaaagatggctgcaa

SEQ ID NO: 918652 - DNA, 15 bp, Homo sapiens
aaagatggctgcaac

SEQ ID NO: 918653 - DNA, 15 bp, Homo sapiens
aagatggctgcaaca

SEQ ID NO: 918654 - DNA, 15 bp, Homo sapiens
agatggctgcaacat

SEQ ID NO: 918655 - DNA, 15 bp, Homo sapiens
gatggctgcaacatg

SEQ ID NO: 918656 - DNA, 15 bp, Homo sapiens
atggctgcaacatga

SEQ ID NO: 918657 - DNA, 15 bp, Homo sapiens
tggctgcaacatgaa

SEQ ID NO: 918658 - DNA, 15 bp, Homo sapiens
ggctgcaacatgaaa

SEQ ID NO: 918659 - DNA, 15 bp, Homo sapiens
gctgcaacatgaaat

SEQ ID NO: 918660 - DNA, 15 bp, Homo sapiens
ctgcaacatgaaatt

SEQ ID NO: 918661 - DNA, 15 bp, Homo sapiens
tgcaacatgaaatta

SEQ ID NO: 918662 - DNA, 15 bp, Homo sapiens
gcaacatgaaattat

SEQ ID NO: 918663 - DNA, 15 bp, Homo sapiens
caacatgaaattatc

SEQ ID NO: 918664 - DNA, 15 bp, Homo sapiens
aacatgaaattatca

SEQ ID NO: 918665 - DNA, 15 bp, Homo sapiens
acatgaaattatcaa

SEQ ID NO: 918666 - DNA, 15 bp, Homo sapiens
catgaaattatcaaa

SEQ ID NO: 918667 - DNA, 15 bp, Homo sapiens
atgaaattatcaaag

SEQ ID NO: 918668 - DNA, 15 bp, Homo sapiens
tgaaattatcaaaga

SEQ ID NO: 918669 - DNA, 15 bp, Homo sapiens
gaaattatcaaagat

SEQ ID NO: 918670 - DNA, 15 bp, Homo sapiens
aaattatcaaagatt

SEQ ID NO: 918671 - DNA, 15 bp, Homo sapiens
aattatcaaagattt

SEQ ID NO: 918672 - DNA, 15 bp, Homo sapiens
attatcaaagattta

SEQ ID NO: 918673 - DNA, 15 bp, Homo sapiens
ttatcaaagatttac

SEQ ID NO: 918674 - DNA, 15 bp, Homo sapiens
tatcaaagatttaca

SEQ ID NO: 918675 - DNA, 15 bp, Homo sapiens
atcaaagatttacag

SEQ ID NO: 918676 - DNA, 15 bp, Homo sapiens
tcaaagatttacaga

SEQ ID NO: 918677 - DNA, 15 bp, Homo sapiens
caaagatttacagac

SEQ ID NO: 918678 - DNA, 15 bp, Homo sapiens
aaagatttacagact

SEQ ID NO: 918679 - DNA, 15 bp, Homo sapiens
aagatttacagacta

SEQ ID NO: 918680 - DNA, 15 bp, Homo sapiens
agatttacagactat

SEQ ID NO: 918681 - DNA, 15 bp, Homo sapiens
gatttacagactata

SEQ ID NO: 918682 - DNA, 15 bp, Homo sapiens
atttacagactataa

SEQ ID NO: 918683 - DNA, 15 bp, Homo sapiens
tttacagactataaa

SEQ ID NO: 918684 - DNA, 15 bp, Homo sapiens
ttacagactataaat

SEQ ID NO: 918685 - DNA, 15 bp, Homo sapiens
tacagactataaata

SEQ ID NO: 918686 - DNA, 15 bp, Homo sapiens
acagactataaatac

SEQ ID NO: 918687 - DNA, 15 bp, Homo sapiens
cagactataaatacc

SEQ ID NO: 918688 - DNA, 15 bp, Homo sapiens
agactataaatacca

SEQ ID NO: 918689 - DNA, 15 bp, Homo sapiens
gactataaataccaa

SEQ ID NO: 918690 - DNA, 15 bp, Homo sapiens
actataaataccaag

SEQ ID NO: 918691 - DNA, 15 bp, Homo sapiens
ctataaataccaaga

SEQ ID NO: 918692 - DNA, 15 bp, Homo sapiens
tataaataccaagag

SEQ ID NO: 918693 - DNA, 15 bp, Homo sapiens
ataaataccaagagg

SEQ ID NO: 918694 - DNA, 15 bp, Homo sapiens
taaataccaagagga

SEQ ID NO: 918695 - DNA, 15 bp, Homo sapiens
aaataccaagaggat

SEQ ID NO: 918696 - DNA, 15 bp, Homo sapiens
aataccaagaggatt

SEQ ID NO: 918697 - DNA, 15 bp, Homo sapiens
ataccaagaggatta

SEQ ID NO: 918698 - DNA, 15 bp, Homo sapiens
taccaagaggattaa

SEQ ID NO: 918699 - DNA, 15 bp, Homo sapiens
accaagaggattaaa

SEQ ID NO: 918700 - DNA, 15 bp, Homo sapiens
ccaagaggattaaaa

SEQ ID NO: 918701 - DNA, 15 bp, Homo sapiens
caagaggattaaaat

SEQ ID NO: 918702 - DNA, 15 bp, Homo sapiens
aagaggattaaaatg

SEQ ID NO: 918703 - DNA, 15 bp, Homo sapiens
agaggattaaaatgc

SEQ ID NO: 918704 - DNA, 15 bp, Homo sapiens
gaggattaaaatgct

SEQ ID NO: 918705 - DNA, 15 bp, Homo sapiens
aggattaaaatgctc

SEQ ID NO: 918706 - DNA, 15 bp, Homo sapiens
ggattaaaatgctct

SEQ ID NO: 918707 - DNA, 15 bp, Homo sapiens
gattaaaatgctctt

SEQ ID NO: 918708 - DNA, 15 bp, Homo sapiens
attaaaatgctcttg

SEQ ID NO: 918709 - DNA, 15 bp, Homo sapiens
ttaaaatgctcttgg

SEQ ID NO: 918710 - DNA, 15 bp, Homo sapiens
taaaatgctcttgga

SEQ ID NO: 918711 - DNA, 15 bp, Homo sapiens
aaaatgctcttggac

SEQ ID NO: 918712 - DNA, 15 bp, Homo sapiens
aaatgctcttggact

SEQ ID NO: 918713 - DNA, 15 bp, Homo sapiens
aatgctcttggactt

SEQ ID NO: 918714 - DNA, 15 bp, Homo sapiens
atgctcttggacttg

SEQ ID NO: 918715 - DNA, 15 bp, Homo sapiens
tgctcttggacttgc

SEQ ID NO: 918716 - DNA, 15 bp, Homo sapiens
gctcttggacttgca

SEQ ID NO: 918717 - DNA, 15 bp, Homo sapiens
ctcttggacttgcaa

SEQ ID NO: 918718 - DNA, 15 bp, Homo sapiens
tcttggacttgcaat

SEQ ID NO: 918719 - DNA, 15 bp, Homo sapiens
cttggacttgcaatc

SEQ ID NO: 918720 - DNA, 15 bp, Homo sapiens
ttggacttgcaatca

SEQ ID NO: 918721 - DNA, 15 bp, Homo sapiens
tggacttgcaatcaa

SEQ ID NO: 918722 - DNA, 15 bp, Homo sapiens
ggacttgcaatcaaa

SEQ ID NO: 918723 - DNA, 15 bp, Homo sapiens
gacttgcaatcaaat

SEQ ID NO: 918724 - DNA, 15 bp, Homo sapiens
acttgcaatcaaatt

SEQ ID NO: 918725 - DNA, 15 bp, Homo sapiens
cttgcaatcaaattt

SEQ ID NO: 918726 - DNA, 15 bp, Homo sapiens
ttgcaatcaaatttg

SEQ ID NO: 918727 - DNA, 15 bp, Homo sapiens
tgcaatcaaatttgg

SEQ ID NO: 918728 - DNA, 15 bp, Homo sapiens
gcaatcaaatttgga

SEQ ID NO: 918729 - DNA, 15 bp, Homo sapiens
caatcaaatttggag

SEQ ID NO: 918730 - DNA, 15 bp, Homo sapiens
aatcaaatttggagt

SEQ ID NO: 918731 - DNA, 15 bp, Homo sapiens
atcaaatttggagta

SEQ ID NO: 918732 - DNA, 15 bp, Homo sapiens
tcaaatttggagtaa

SEQ ID NO: 918733 - DNA, 15 bp, Homo sapiens
caaatttggagtaat

SEQ ID NO: 918734 - DNA, 15 bp, Homo sapiens
aaatttggagtaatt

SEQ ID NO: 918735 - DNA, 15 bp, Homo sapiens
aatttggagtaattg

SEQ ID NO: 918736 - DNA, 15 bp, Homo sapiens
atttggagtaattgg

SEQ ID NO: 918737 - DNA, 15 bp, Homo sapiens
tttggagtaattgga

SEQ ID NO: 918738 - DNA, 15 bp, Homo sapiens
ttggagtaattggat

SEQ ID NO: 918739 - DNA, 15 bp, Homo sapiens
tggagtaattggata

SEQ ID NO: 918740 - DNA, 15 bp, Homo sapiens
ggagtaattggataa

SEQ ID NO: 918741 - DNA, 15 bp, Homo sapiens
gagtaattggataaa

SEQ ID NO: 918742 - DNA, 15 bp, Homo sapiens
agtaattggataaaa

SEQ ID NO: 918743 - DNA, 15 bp, Homo sapiens
gtaattggataaaat

SEQ ID NO: 918744 - DNA, 15 bp, Homo sapiens
taattggataaaata

SEQ ID NO: 918745 - DNA, 15 bp, Homo sapiens
aattggataaaataa

SEQ ID NO: 918746 - DNA, 15 bp, Homo sapiens
attggataaaataag

SEQ ID NO: 918747 - DNA, 15 bp, Homo sapiens
ttggataaaataaga

SEQ ID NO: 918748 - DNA, 15 bp, Homo sapiens
tggataaaataagac

SEQ ID NO: 918749 - DNA, 15 bp, Homo sapiens
ggataaaataagact

SEQ ID NO: 918750 - DNA, 15 bp, Homo sapiens
gataaaataagacta

SEQ ID NO: 918751 - DNA, 15 bp, Homo sapiens
ataaaataagactac

SEQ ID NO: 918752 - DNA, 15 bp, Homo sapiens
taaaataagactacc

SEQ ID NO: 918753 - DNA, 15 bp, Homo sapiens
aaaataagactacct

SEQ ID NO: 918754 - DNA, 15 bp, Homo sapiens
aaataagactacctc

SEQ ID NO: 918755 - DNA, 15 bp, Homo sapiens
aataagactacctct

SEQ ID NO: 918756 - DNA, 15 bp, Homo sapiens
ataagactacctcta

SEQ ID NO: 918757 - DNA, 15 bp, Homo sapiens
taagactacctctaa

SEQ ID NO: 918758 - DNA, 15 bp, Homo sapiens
aagactacctctaac

SEQ ID NO: 918759 - DNA, 15 bp, Homo sapiens
agactacctctaact

SEQ ID NO: 918760 - DNA, 15 bp, Homo sapiens
gactacctctaactc

SEQ ID NO: 918761 - DNA, 15 bp, Homo sapiens
actacctctaactca

SEQ ID NO: 918762 - DNA, 15 bp, Homo sapiens
ctacctctaactcat

SEQ ID NO: 918763 - DNA, 15 bp, Homo sapiens
tacctctaactcatt

SEQ ID NO: 918764 - DNA, 15 bp, Homo sapiens
acctctaactcattt

SEQ ID NO: 918765 - DNA, 15 bp, Homo sapiens
cctctaactcatttt

SEQ ID NO: 918766 - DNA, 15 bp, Homo sapiens
ctctaactcatttta

SEQ ID NO: 918767 - DNA, 15 bp, Homo sapiens
tctaactcattttat

SEQ ID NO: 918768 - DNA, 15 bp, Homo sapiens
ctaactcattttatt

SEQ ID NO: 918769 - DNA, 15 bp, Homo sapiens
taactcattttatta

SEQ ID NO: 918770 - DNA, 15 bp, Homo sapiens
aactcattttattat

SEQ ID NO: 918771 - DNA, 15 bp, Homo sapiens
actcattttattata

SEQ ID NO: 918772 - DNA, 15 bp, Homo sapiens
ctcattttattataa

SEQ ID NO: 918773 - DNA, 15 bp, Homo sapiens
tcattttattataaa

SEQ ID NO: 918774 - DNA, 15 bp, Homo sapiens
cattttattataaag

SEQ ID NO: 918775 - DNA, 15 bp, Homo sapiens
attttattataaaga

SEQ ID NO: 918776 - DNA, 15 bp, Homo sapiens
ttttattataaagat

SEQ ID NO: 918777 - DNA, 15 bp, Homo sapiens
tttattataaagatt

SEQ ID NO: 918778 - DNA, 15 bp, Homo sapiens
ttattataaagattt

SEQ ID NO: 918779 - DNA, 15 bp, Homo sapiens
tattataaagattta

SEQ ID NO: 918780 - DNA, 15 bp, Homo sapiens
attataaagatttat

SEQ ID NO: 918781 - DNA, 15 bp, Homo sapiens
ttataaagatttatt

SEQ ID NO: 918782 - DNA, 15 bp, Homo sapiens
tataaagatttatta

SEQ ID NO: 918783 - DNA, 15 bp, Homo sapiens
ataaagatttattag

SEQ ID NO: 918784 - DNA, 15 bp, Homo sapiens
taaagatttattaga

SEQ ID NO: 918785 - DNA, 15 bp, Homo sapiens
aaagatttattagag

SEQ ID NO: 918786 - DNA, 15 bp, Homo sapiens
aagatttattagagt

SEQ ID NO: 918787 - DNA, 15 bp, Homo sapiens
agatttattagagta

SEQ ID NO: 918788 - DNA, 15 bp, Homo sapiens
gatttattagagtat

SEQ ID NO: 918789 - DNA, 15 bp, Homo sapiens
atttattagagtata

SEQ ID NO: 918790 - DNA, 15 bp, Homo sapiens
tttattagagtataa

SEQ ID NO: 918791 - DNA, 15 bp, Homo sapiens
ttattagagtataaa

SEQ ID NO: 918792 - DNA, 15 bp, Homo sapiens
tattagagtataaaa

SEQ ID NO: 918793 - DNA, 15 bp, Homo sapiens
attagagtataaaaa

SEQ ID NO: 918794 - DNA, 15 bp, Homo sapiens
ttagagtataaaaaa

SEQ ID NO: 918795 - DNA, 15 bp, Homo sapiens
tagagtataaaaaac

SEQ ID NO: 918796 - DNA, 15 bp, Homo sapiens
agagtataaaaaacc

SEQ ID NO: 918797 - DNA, 15 bp, Homo sapiens
gagtataaaaaaccg

SEQ ID NO: 918798 - DNA, 15 bp, Homo sapiens
agtataaaaaaccga

SEQ ID NO: 918799 - DNA, 15 bp, Homo sapiens
gtataaaaaaccgag

SEQ ID NO: 918800 - DNA, 15 bp, Homo sapiens
tataaaaaaccgagg

SEQ ID NO: 918801 - DNA, 15 bp, Homo sapiens
ataaaaaaccgaggc

SEQ ID NO: 918802 - DNA, 15 bp, Homo sapiens
taaaaaaccgaggcc

SEQ ID NO: 918803 - DNA, 15 bp, Homo sapiens
aaaaaaccgaggccc

SEQ ID NO: 918804 - DNA, 15 bp, Homo sapiens
aaaaaccgaggccca

SEQ ID NO: 918805 - DNA, 15 bp, Homo sapiens
aaaaccgaggcccaa

SEQ ID NO: 918806 - DNA, 15 bp, Homo sapiens
aaaccgaggcccaaa

SEQ ID NO: 918807 - DNA, 15 bp, Homo sapiens
aaccgaggcccaaag

SEQ ID NO: 918808 - DNA, 15 bp, Homo sapiens
accgaggcccaaaga

SEQ ID NO: 918809 - DNA, 15 bp, Homo sapiens
ccgaggcccaaagat

SEQ ID NO: 918810 - DNA, 15 bp, Homo sapiens
cgaggcccaaagata

SEQ ID NO: 918811 - DNA, 15 bp, Homo sapiens
gaggcccaaagatat

SEQ ID NO: 918812 - DNA, 15 bp, Homo sapiens
aggcccaaagatatt

SEQ ID NO: 918813 - DNA, 15 bp, Homo sapiens
ggcccaaagatattt

SEQ ID NO: 918814 - DNA, 15 bp, Homo sapiens
gcccaaagatatttc

SEQ ID NO: 918815 - DNA, 15 bp, Homo sapiens
cccaaagatatttct

SEQ ID NO: 918816 - DNA, 15 bp, Homo sapiens
ccaaagatatttctg

SEQ ID NO: 918817 - DNA, 15 bp, Homo sapiens
caaagatatttctgc

SEQ ID NO: 918818 - DNA, 15 bp, Homo sapiens
aaagatatttctgct

SEQ ID NO: 918819 - DNA, 15 bp, Homo sapiens
aagatatttctgctt

SEQ ID NO: 918820 - DNA, 15 bp, Homo sapiens
agatatttctgcttg

SEQ ID NO: 918821 - DNA, 15 bp, Homo sapiens
gatatttctgcttgc

SEQ ID NO: 918822 - DNA, 15 bp, Homo sapiens
atatttctgcttgcg

SEQ ID NO: 918823 - DNA, 15 bp, Homo sapiens
tatttctgcttgcga

SEQ ID NO: 918824 - DNA, 15 bp, Homo sapiens
atttctgcttgcgac

SEQ ID NO: 918825 - DNA, 15 bp, Homo sapiens
tttctgcttgcgaca

SEQ ID NO: 918826 - DNA, 15 bp, Homo sapiens
ttctgcttgcgacaa

SEQ ID NO: 918827 - DNA, 15 bp, Homo sapiens
tctgcttgcgacaat

SEQ ID NO: 918828 - DNA, 15 bp, Homo sapiens
ctgcttgcgacaatt

SEQ ID NO: 918829 - DNA, 15 bp, Homo sapiens
tgcttgcgacaatta

SEQ ID NO: 918830 - DNA, 15 bp, Homo sapiens
gcttgcgacaattaa

SEQ ID NO: 918831 - DNA, 15 bp, Homo sapiens
cttgcgacaattaaa

SEQ ID NO: 918832 - DNA, 15 bp, Homo sapiens
ttgcgacaattaaac

SEQ ID NO: 918833 - DNA, 15 bp, Homo sapiens
tgcgacaattaaacc

SEQ ID NO: 918834 - DNA, 15 bp, Homo sapiens
gcgacaattaaacca

SEQ ID NO: 918835 - DNA, 15 bp, Homo sapiens
cgacaattaaaccaa

SEQ ID NO: 918836 - DNA, 15 bp, Homo sapiens
gacaattaaaccaaa

SEQ ID NO: 918837 - DNA, 15 bp, Homo sapiens
acaattaaaccaaaa

SEQ ID NO: 918838 - DNA, 15 bp, Homo sapiens
caattaaaccaaaaa

SEQ ID NO: 918839 - DNA, 15 bp, Homo sapiens
aattaaaccaaaaaa

SEQ ID NO: 918840 - DNA, 15 bp, Homo sapiens
attaaaccaaaaaag

SEQ ID NO: 918841 - DNA, 15 bp, Homo sapiens
ttaaaccaaaaaagt

SEQ ID NO: 918842 - DNA, 15 bp, Homo sapiens
taaaccaaaaaagtc

SEQ ID NO: 918843 - DNA, 15 bp, Homo sapiens
aaaccaaaaaagtct

SEQ ID NO: 918844 - DNA, 15 bp, Homo sapiens
aaccaaaaaagtcta

SEQ ID NO: 918845 - DNA, 15 bp, Homo sapiens
accaaaaaagtctaa

SEQ ID NO: 918846 - DNA, 15 bp, Homo sapiens
ccaaaaaagtctaaa

SEQ ID NO: 918847 - DNA, 15 bp, Homo sapiens
caaaaaagtctaaag

SEQ ID NO: 918848 - DNA, 15 bp, Homo sapiens
aaaaaagtctaaagt

SEQ ID NO: 918849 - DNA, 15 bp, Homo sapiens
aaaaagtctaaagtc

SEQ ID NO: 918850 - DNA, 15 bp, Homo sapiens
aaaagtctaaagtca

SEQ ID NO: 918851 - DNA, 15 bp, Homo sapiens
aaagtctaaagtcaa

SEQ ID NO: 918852 - DNA, 15 bp, Homo sapiens
aagtctaaagtcaat

SEQ ID NO: 918853 - DNA, 15 bp, Homo sapiens
agtctaaagtcaatc

SEQ ID NO: 918854 - DNA, 15 bp, Homo sapiens
gtctaaagtcaatcc

SEQ ID NO: 918855 - DNA, 15 bp, Homo sapiens
tctaaagtcaatcca

SEQ ID NO: 918856 - DNA, 15 bp, Homo sapiens
ctaaagtcaatccat

SEQ ID NO: 918857 - DNA, 15 bp, Homo sapiens
taaagtcaatccatg

SEQ ID NO: 918858 - DNA, 15 bp, Homo sapiens
aaagtcaatccatga

SEQ ID NO: 918859 - DNA, 15 bp, Homo sapiens
aagtcaatccatgat

SEQ ID NO: 918860 - DNA, 15 bp, Homo sapiens
agtcaatccatgatt

SEQ ID NO: 918861 - DNA, 15 bp, Homo sapiens
gtcaatccatgatta

SEQ ID NO: 918862 - DNA, 15 bp, Homo sapiens
tcaatccatgattat

SEQ ID NO: 918863 - DNA, 15 bp, Homo sapiens
caatccatgattata

SEQ ID NO: 918864 - DNA, 15 bp, Homo sapiens
aatccatgattatat

SEQ ID NO: 918865 - DNA, 15 bp, Homo sapiens
atccatgattatata

SEQ ID NO: 918866 - DNA, 15 bp, Homo sapiens
tccatgattatatat

SEQ ID NO: 918867 - DNA, 15 bp, Homo sapiens
ccatgattatatatg

SEQ ID NO: 918868 - DNA, 15 bp, Homo sapiens
catgattatatatgg

SEQ ID NO: 918869 - DNA, 15 bp, Homo sapiens
atgattatatatgga

SEQ ID NO: 918870 - DNA, 15 bp, Homo sapiens
tgattatatatggaa

SEQ ID NO: 918871 - DNA, 15 bp, Homo sapiens
gattatatatggaaa

SEQ ID NO: 918872 - DNA, 15 bp, Homo sapiens
attatatatggaaat

SEQ ID NO: 918873 - DNA, 15 bp, Homo sapiens
ttatatatggaaata

SEQ ID NO: 918874 - DNA, 15 bp, Homo sapiens
tatatatggaaataa

SEQ ID NO: 918875 - DNA, 15 bp, Homo sapiens
atatatggaaataag

SEQ ID NO: 918876 - DNA, 15 bp, Homo sapiens
tatatggaaataagg

SEQ ID NO: 918877 - DNA, 15 bp, Homo sapiens
atatggaaataagga

SEQ ID NO: 918878 - DNA, 15 bp, Homo sapiens
tatggaaataaggac

SEQ ID NO: 918879 - DNA, 15 bp, Homo sapiens
atggaaataaggacc

SEQ ID NO: 918880 - DNA, 15 bp, Homo sapiens
tggaaataaggacca

SEQ ID NO: 918881 - DNA, 15 bp, Homo sapiens
ggaaataaggaccac

SEQ ID NO: 918882 - DNA, 15 bp, Homo sapiens
gaaataaggaccaca

SEQ ID NO: 918883 - DNA, 15 bp, Homo sapiens
aaataaggaccacag

SEQ ID NO: 918884 - DNA, 15 bp, Homo sapiens
aataaggaccacaga

SEQ ID NO: 918885 - DNA, 15 bp, Homo sapiens
ataaggaccacagaa

SEQ ID NO: 918886 - DNA, 15 bp, Homo sapiens
taaggaccacagaaa

SEQ ID NO: 918887 - DNA, 15 bp, Homo sapiens
aaggaccacagaaag

SEQ ID NO: 918888 - DNA, 15 bp, Homo sapiens
aggaccacagaaagt

SEQ ID NO: 918889 - DNA, 15 bp, Homo sapiens
ggaccacagaaagta

SEQ ID NO: 918890 - DNA, 15 bp, Homo sapiens
gaccacagaaagtaa

SEQ ID NO: 918891 - DNA, 15 bp, Homo sapiens
accacagaaagtaaa

SEQ ID NO: 918892 - DNA, 15 bp, Homo sapiens
ccacagaaagtaaaa

SEQ ID NO: 918893 - DNA, 15 bp, Homo sapiens
cacagaaagtaaaat

SEQ ID NO: 918894 - DNA, 15 bp, Homo sapiens
acagaaagtaaaatg

SEQ ID NO: 918895 - DNA, 15 bp, Homo sapiens
cagaaagtaaaatga

SEQ ID NO: 918896 - DNA, 15 bp, Homo sapiens
agaaagtaaaatgaa

SEQ ID NO: 918897 - DNA, 15 bp, Homo sapiens
gaaagtaaaatgaat

SEQ ID NO: 918898 - DNA, 15 bp, Homo sapiens
aaagtaaaatgaatt

SEQ ID NO: 918899 - DNA, 15 bp, Homo sapiens
aagtaaaatgaattt

SEQ ID NO: 918900 - DNA, 15 bp, Homo sapiens
agtaaaatgaatttc

SEQ ID NO: 918901 - DNA, 15 bp, Homo sapiens
gtaaaatgaatttca

SEQ ID NO: 918902 - DNA, 15 bp, Homo sapiens
taaaatgaatttcat

SEQ ID NO: 918903 - DNA, 15 bp, Homo sapiens
aaaatgaatttcatt

SEQ ID NO: 918904 - DNA, 15 bp, Homo sapiens
aaatgaatttcattt

SEQ ID NO: 918905 - DNA, 15 bp, Homo sapiens
aatgaatttcatttc

SEQ ID NO: 918906 - DNA, 15 bp, Homo sapiens
atgaatttcatttcc

SEQ ID NO: 918907 - DNA, 15 bp, Homo sapiens
tgaatttcatttcca

SEQ ID NO: 918908 - DNA, 15 bp, Homo sapiens
gaatttcatttccat

SEQ ID NO: 918909 - DNA, 15 bp, Homo sapiens
aatttcatttccatc

SEQ ID NO: 918910 - DNA, 15 bp, Homo sapiens
atttcatttccatca

SEQ ID NO: 918911 - DNA, 15 bp, Homo sapiens
tttcatttccatcat

SEQ ID NO: 918912 - DNA, 15 bp, Homo sapiens
ttcatttccatcatc

SEQ ID NO: 918913 - DNA, 15 bp, Homo sapiens
tcatttccatcatct

SEQ ID NO: 918914 - DNA, 15 bp, Homo sapiens
catttccatcatctt

SEQ ID NO: 918915 - DNA, 15 bp, Homo sapiens
atttccatcatcttt

SEQ ID NO: 918916 - DNA, 15 bp, Homo sapiens
tttccatcatcttta

SEQ ID NO: 918917 - DNA, 15 bp, Homo sapiens
ttccatcatctttaa

SEQ ID NO: 918918 - DNA, 15 bp, Homo sapiens
tccatcatctttaaa

SEQ ID NO: 918919 - DNA, 15 bp, Homo sapiens
ccatcatctttaaac

SEQ ID NO: 918920 - DNA, 15 bp, Homo sapiens
catcatctttaaacc

SEQ ID NO: 918921 - DNA, 15 bp, Homo sapiens
atcatctttaaacca

SEQ ID NO: 918922 - DNA, 15 bp, Homo sapiens
tcatctttaaaccac

SEQ ID NO: 918923 - DNA, 15 bp, Homo sapiens
catctttaaaccaca

SEQ ID NO: 918924 - DNA, 15 bp, Homo sapiens
atctttaaaccacat

SEQ ID NO: 918925 - DNA, 15 bp, Homo sapiens
tctttaaaccacatt

SEQ ID NO: 918926 - DNA, 15 bp, Homo sapiens
ctttaaaccacattt

SEQ ID NO: 918927 - DNA, 15 bp, Homo sapiens
tttaaaccacatttt

SEQ ID NO: 918928 - DNA, 15 bp, Homo sapiens
ttaaaccacattttg

SEQ ID NO: 918929 - DNA, 15 bp, Homo sapiens
taaaccacattttgc

SEQ ID NO: 918930 - DNA, 15 bp, Homo sapiens
aaaccacattttgct

SEQ ID NO: 918931 - DNA, 15 bp, Homo sapiens
aaccacattttgctt

SEQ ID NO: 918932 - DNA, 15 bp, Homo sapiens
accacattttgcttc

SEQ ID NO: 918933 - DNA, 15 bp, Homo sapiens
ccacattttgcttcc

SEQ ID NO: 918934 - DNA, 15 bp, Homo sapiens
cacattttgcttcca

SEQ ID NO: 918935 - DNA, 15 bp, Homo sapiens
acattttgcttccaa

SEQ ID NO: 918936 - DNA, 15 bp, Homo sapiens
cattttgcttccaac

SEQ ID NO: 918937 - DNA, 15 bp, Homo sapiens
attttgcttccaacc

SEQ ID NO: 918938 - DNA, 15 bp, Homo sapiens
ttttgcttccaacct

SEQ ID NO: 918939 - DNA, 15 bp, Homo sapiens
tttgcttccaacctt

SEQ ID NO: 918940 - DNA, 15 bp, Homo sapiens
ttgcttccaaccttt

SEQ ID NO: 918941 - DNA, 15 bp, Homo sapiens
tgcttccaacctttt

SEQ ID NO: 918942 - DNA, 15 bp, Homo sapiens
gcttccaaccttttc

SEQ ID NO: 918943 - DNA, 15 bp, Homo sapiens
cttccaaccttttcc

SEQ ID NO: 918944 - DNA, 15 bp, Homo sapiens
ttccaaccttttcct

SEQ ID NO: 918945 - DNA, 15 bp, Homo sapiens
tccaaccttttcctt

SEQ ID NO: 918946 - DNA, 15 bp, Homo sapiens
ccaaccttttccttg

SEQ ID NO: 918947 - DNA, 15 bp, Homo sapiens
caaccttttccttga

SEQ ID NO: 918948 - DNA, 15 bp, Homo sapiens
aaccttttccttgac

SEQ ID NO: 918949 - DNA, 15 bp, Homo sapiens
accttttccttgacc

SEQ ID NO: 918950 - DNA, 15 bp, Homo sapiens
ccttttccttgaccc

SEQ ID NO: 918951 - DNA, 15 bp, Homo sapiens
cttttccttgaccca

SEQ ID NO: 918952 - DNA, 15 bp, Homo sapiens
ttttccttgacccac

SEQ ID NO: 918953 - DNA, 15 bp, Homo sapiens
tttccttgacccacg

SEQ ID NO: 918954 - DNA, 15 bp, Homo sapiens
ttccttgacccacga

SEQ ID NO: 918955 - DNA, 15 bp, Homo sapiens
tccttgacccacgaa

SEQ ID NO: 918956 - DNA, 15 bp, Homo sapiens
ccttgacccacgaaa

SEQ ID NO: 918957 - DNA, 15 bp, Homo sapiens
cttgacccacgaaat

SEQ ID NO: 918958 - DNA, 15 bp, Homo sapiens
ttgacccacgaaatt

SEQ ID NO: 918959 - DNA, 15 bp, Homo sapiens
tgacccacgaaattg

SEQ ID NO: 918960 - DNA, 15 bp, Homo sapiens
gacccacgaaattgc

SEQ ID NO: 918961 - DNA, 15 bp, Homo sapiens
acccacgaaattgcc

SEQ ID NO: 918962 - DNA, 15 bp, Homo sapiens
cccacgaaattgcca

SEQ ID NO: 918963 - DNA, 15 bp, Homo sapiens
ccacgaaattgccaa

SEQ ID NO: 918964 - DNA, 15 bp, Homo sapiens
cacgaaattgccaaa

SEQ ID NO: 918965 - DNA, 15 bp, Homo sapiens
acgaaattgccaaaa

SEQ ID NO: 918966 - DNA, 15 bp, Homo sapiens
cgaaattgccaaaaa

SEQ ID NO: 918967 - DNA, 15 bp, Homo sapiens
gaaattgccaaaaat

SEQ ID NO: 918968 - DNA, 15 bp, Homo sapiens
aaattgccaaaaata

SEQ ID NO: 918969 - DNA, 15 bp, Homo sapiens
aattgccaaaaataa

SEQ ID NO: 918970 - DNA, 15 bp, Homo sapiens
attgccaaaaataaa

SEQ ID NO: 918971 - DNA, 15 bp, Homo sapiens
ttgccaaaaataaaa

SEQ ID NO: 918972 - DNA, 15 bp, Homo sapiens
tgccaaaaataaaaa

SEQ ID NO: 918973 - DNA, 15 bp, Homo sapiens
gccaaaaataaaaat

SEQ ID NO: 918974 - DNA, 15 bp, Homo sapiens
ccaaaaataaaaatt

SEQ ID NO: 918975 - DNA, 15 bp, Homo sapiens
caaaaataaaaattt

SEQ ID NO: 918976 - DNA, 15 bp, Homo sapiens
aaaaataaaaattta

SEQ ID NO: 918977 - DNA, 15 bp, Homo sapiens
aaaataaaaatttac

SEQ ID NO: 918978 - DNA, 15 bp, Homo sapiens
aaataaaaatttaca

SEQ ID NO: 918979 - DNA, 15 bp, Homo sapiens
aataaaaatttacat

SEQ ID NO: 918980 - DNA, 15 bp, Homo sapiens
ataaaaatttacatg

SEQ ID NO: 918981 - DNA, 15 bp, Homo sapiens
taaaaatttacatgt

SEQ ID NO: 918982 - DNA, 15 bp, Homo sapiens
aaaaatttacatgtt

SEQ ID NO: 918983 - DNA, 15 bp, Homo sapiens
aaaatttacatgttt

SEQ ID NO: 918984 - DNA, 15 bp, Homo sapiens
aaatttacatgtttt

SEQ ID NO: 918985 - DNA, 15 bp, Homo sapiens
aatttacatgttttg

SEQ ID NO: 918986 - DNA, 15 bp, Homo sapiens
atttacatgttttgg

SEQ ID NO: 918987 - DNA, 15 bp, Homo sapiens
tttacatgttttgga

SEQ ID NO: 918988 - DNA, 15 bp, Homo sapiens
ttacatgttttggat

SEQ ID NO: 918989 - DNA, 15 bp, Homo sapiens
tacatgttttggata

SEQ ID NO: 918990 - DNA, 15 bp, Homo sapiens
acatgttttggataa

SEQ ID NO: 918991 - DNA, 15 bp, Homo sapiens
catgttttggataat

SEQ ID NO: 918992 - DNA, 15 bp, Homo sapiens
atgttttggataatt

SEQ ID NO: 918993 - DNA, 15 bp, Homo sapiens
tgttttggataattt

SEQ ID NO: 918994 - DNA, 15 bp, Homo sapiens
gttttggataatttt

SEQ ID NO: 918995 - DNA, 15 bp, Homo sapiens
ttttggataattttt

SEQ ID NO: 918996 - DNA, 15 bp, Homo sapiens
tttggataattttta

SEQ ID NO: 918997 - DNA, 15 bp, Homo sapiens
ttggataatttttac

SEQ ID NO: 918998 - DNA, 15 bp, Homo sapiens
tggataatttttact

SEQ ID NO: 918999 - DNA, 15 bp, Homo sapiens
ggataatttttactg

SEQ ID NO: 919000 - DNA, 15 bp, Homo sapiens
gataatttttactga

SEQ ID NO: 919001 - DNA, 15 bp, Homo sapiens
ataatttttactgag

SEQ ID NO: 919002 - DNA, 15 bp, Homo sapiens
taatttttactgagt

SEQ ID NO: 919003 - DNA, 15 bp, Homo sapiens
aatttttactgagtc

SEQ ID NO: 919004 - DNA, 15 bp, Homo sapiens
atttttactgagtct

SEQ ID NO: 919005 - DNA, 15 bp, Homo sapiens
tttttactgagtctt

SEQ ID NO: 919006 - DNA, 15 bp, Homo sapiens
ttttactgagtcttg

SEQ ID NO: 919007 - DNA, 15 bp, Homo sapiens
tttactgagtcttgt

SEQ ID NO: 919008 - DNA, 15 bp, Homo sapiens
ttactgagtcttgtg

SEQ ID NO: 919009 - DNA, 15 bp, Homo sapiens
tactgagtcttgtga

SEQ ID NO: 919010 - DNA, 15 bp, Homo sapiens
actgagtcttgtgag

SEQ ID NO: 919011 - DNA, 15 bp, Homo sapiens
ctgagtcttgtgaga

SEQ ID NO: 919012 - DNA, 15 bp, Homo sapiens
tgagtcttgtgagag

SEQ ID NO: 919013 - DNA, 15 bp, Homo sapiens
gagtcttgtgagaga

SEQ ID NO: 919014 - DNA, 15 bp, Homo sapiens
agtcttgtgagagaa

SEQ ID NO: 919015 - DNA, 15 bp, Homo sapiens
gtcttgtgagagaaa

SEQ ID NO: 919016 - DNA, 15 bp, Homo sapiens
tcttgtgagagaaat

SEQ ID NO: 919017 - DNA, 15 bp, Homo sapiens
cttgtgagagaaatg

SEQ ID NO: 919018 - DNA, 15 bp, Homo sapiens
ttgtgagagaaatgg

SEQ ID NO: 919019 - DNA, 15 bp, Homo sapiens
tgtgagagaaatgga

SEQ ID NO: 919020 - DNA, 15 bp, Homo sapiens
gtgagagaaatggaa

SEQ ID NO: 919021 - DNA, 15 bp, Homo sapiens
tgagagaaatggaag

SEQ ID NO: 919022 - DNA, 15 bp, Homo sapiens
gagagaaatggaagc

SEQ ID NO: 919023 - DNA, 15 bp, Homo sapiens
agagaaatggaagcc

SEQ ID NO: 919024 - DNA, 15 bp, Homo sapiens
gagaaatggaagcct

SEQ ID NO: 919025 - DNA, 15 bp, Homo sapiens
agaaatggaagcctt

SEQ ID NO: 919026 - DNA, 15 bp, Homo sapiens
gaaatggaagccttt

SEQ ID NO: 919027 - DNA, 15 bp, Homo sapiens
aaatggaagcctttt

SEQ ID NO: 919028 - DNA, 15 bp, Homo sapiens
aatggaagccttttg

SEQ ID NO: 919029 - DNA, 15 bp, Homo sapiens
atggaagccttttgt

SEQ ID NO: 919030 - DNA, 15 bp, Homo sapiens
tggaagccttttgtt

SEQ ID NO: 919031 - DNA, 15 bp, Homo sapiens
ggaagccttttgttt

SEQ ID NO: 919032 - DNA, 15 bp, Homo sapiens
gaagccttttgtttc

SEQ ID NO: 919033 - DNA, 15 bp, Homo sapiens
aagccttttgtttct

SEQ ID NO: 919034 - DNA, 15 bp, Homo sapiens
agccttttgtttctt

SEQ ID NO: 919035 - DNA, 15 bp, Homo sapiens
gccttttgtttcttg

SEQ ID NO: 919036 - DNA, 15 bp, Homo sapiens
ccttttgtttcttgt

SEQ ID NO: 919037 - DNA, 15 bp, Homo sapiens
cttttgtttcttgtg

SEQ ID NO: 919038 - DNA, 15 bp, Homo sapiens
ttttgtttcttgtgg

SEQ ID NO: 919039 - DNA, 15 bp, Homo sapiens
tttgtttcttgtggg

SEQ ID NO: 919040 - DNA, 15 bp, Homo sapiens
ttgtttcttgtgggc

SEQ ID NO: 919041 - DNA, 15 bp, Homo sapiens
tgtttcttgtgggca

SEQ ID NO: 919042 - DNA, 15 bp, Homo sapiens
gtttcttgtgggcag

SEQ ID NO: 919043 - DNA, 15 bp, Homo sapiens
tttcttgtgggcaga

SEQ ID NO: 919044 - DNA, 15 bp, Homo sapiens
ttcttgtgggcagaa

SEQ ID NO: 919045 - DNA, 15 bp, Homo sapiens
tcttgtgggcagaat

SEQ ID NO: 919046 - DNA, 15 bp, Homo sapiens
cttgtgggcagaata

SEQ ID NO: 919047 - DNA, 15 bp, Homo sapiens
ttgtgggcagaataa

SEQ ID NO: 919048 - DNA, 15 bp, Homo sapiens
tgtgggcagaataat

SEQ ID NO: 919049 - DNA, 15 bp, Homo sapiens
gtgggcagaataatc

SEQ ID NO: 919050 - DNA, 15 bp, Homo sapiens
tgggcagaataatct

SEQ ID NO: 919051 - DNA, 15 bp, Homo sapiens
gggcagaataatctt

SEQ ID NO: 919052 - DNA, 15 bp, Homo sapiens
ggcagaataatcttt

SEQ ID NO: 919053 - DNA, 15 bp, Homo sapiens
gcagaataatctttg

SEQ ID NO: 919054 - DNA, 15 bp, Homo sapiens
cagaataatctttgt

SEQ ID NO: 919055 - DNA, 15 bp, Homo sapiens
agaataatctttgtt

SEQ ID NO: 919056 - DNA, 15 bp, Homo sapiens
gaataatctttgttt

SEQ ID NO: 919057 - DNA, 15 bp, Homo sapiens
aataatctttgtttt

SEQ ID NO: 919058 - DNA, 15 bp, Homo sapiens
ataatctttgttttt

SEQ ID NO: 919059 - DNA, 15 bp, Homo sapiens
taatctttgttttta

SEQ ID NO: 919060 - DNA, 15 bp, Homo sapiens
aatctttgtttttag

SEQ ID NO: 919061 - DNA, 15 bp, Homo sapiens
atctttgtttttagt

SEQ ID NO: 919062 - DNA, 15 bp, Homo sapiens
tctttgtttttagta

SEQ ID NO: 919063 - DNA, 15 bp, Homo sapiens
ctttgtttttagtag

SEQ ID NO: 919064 - DNA, 15 bp, Homo sapiens
tttgtttttagtagg

SEQ ID NO: 919065 - DNA, 15 bp, Homo sapiens
ttgtttttagtaggc

SEQ ID NO: 919066 - DNA, 15 bp, Homo sapiens
tgtttttagtaggca

SEQ ID NO: 919067 - DNA, 15 bp, Homo sapiens
gtttttagtaggcaa

SEQ ID NO: 919068 - DNA, 15 bp, Homo sapiens
tttttagtaggcaaa

SEQ ID NO: 919069 - DNA, 15 bp, Homo sapiens
ttttagtaggcaaag

SEQ ID NO: 919070 - DNA, 15 bp, Homo sapiens
tttagtaggcaaaga

SEQ ID NO: 919071 - DNA, 15 bp, Homo sapiens
ttagtaggcaaagag

SEQ ID NO: 919072 - DNA, 15 bp, Homo sapiens
tagtaggcaaagaga

SEQ ID NO: 919073 - DNA, 15 bp, Homo sapiens
agtaggcaaagagaa

SEQ ID NO: 919074 - DNA, 15 bp, Homo sapiens
gtaggcaaagagaag

SEQ ID NO: 919075 - DNA, 15 bp, Homo sapiens
taggcaaagagaagt

SEQ ID NO: 919076 - DNA, 15 bp, Homo sapiens
aggcaaagagaagtc

SEQ ID NO: 919077 - DNA, 15 bp, Homo sapiens
ggcaaagagaagtcc

SEQ ID NO: 919078 - DNA, 15 bp, Homo sapiens
gcaaagagaagtccc

SEQ ID NO: 919079 - DNA, 15 bp, Homo sapiens
caaagagaagtccct

SEQ ID NO: 919080 - DNA, 15 bp, Homo sapiens
aaagagaagtccctc

SEQ ID NO: 919081 - DNA, 15 bp, Homo sapiens
aagagaagtccctca

SEQ ID NO: 919082 - DNA, 15 bp, Homo sapiens
agagaagtccctcat

SEQ ID NO: 919083 - DNA, 15 bp, Homo sapiens
gagaagtccctcata

SEQ ID NO: 919084 - DNA, 15 bp, Homo sapiens
agaagtccctcatat

SEQ ID NO: 919085 - DNA, 15 bp, Homo sapiens
gaagtccctcatata

SEQ ID NO: 919086 - DNA, 15 bp, Homo sapiens
aagtccctcatataa

SEQ ID NO: 919087 - DNA, 15 bp, Homo sapiens
agtccctcatataag

SEQ ID NO: 919088 - DNA, 15 bp, Homo sapiens
gtccctcatataaga

SEQ ID NO: 919089 - DNA, 15 bp, Homo sapiens
tccctcatataagag

SEQ ID NO: 919090 - DNA, 15 bp, Homo sapiens
ccctcatataagagc

SEQ ID NO: 919091 - DNA, 15 bp, Homo sapiens
cctcatataagagct

SEQ ID NO: 919092 - DNA, 15 bp, Homo sapiens
ctcatataagagctt

SEQ ID NO: 919093 - DNA, 15 bp, Homo sapiens
tcatataagagcttc

SEQ ID NO: 919094 - DNA, 15 bp, Homo sapiens
catataagagcttcc

SEQ ID NO: 919095 - DNA, 15 bp, Homo sapiens
atataagagcttcct

SEQ ID NO: 919096 - DNA, 15 bp, Homo sapiens
tataagagcttcctc

SEQ ID NO: 919097 - DNA, 15 bp, Homo sapiens
ataagagcttcctca

SEQ ID NO: 919098 - DNA, 15 bp, Homo sapiens
taagagcttcctcat

SEQ ID NO: 919099 - DNA, 15 bp, Homo sapiens
aagagcttcctcatt

SEQ ID NO: 919100 - DNA, 15 bp, Homo sapiens
agagcttcctcattc

SEQ ID NO: 919101 - DNA, 15 bp, Homo sapiens
gagcttcctcattct

SEQ ID NO: 919102 - DNA, 15 bp, Homo sapiens
agcttcctcattctt

SEQ ID NO: 919103 - DNA, 15 bp, Homo sapiens
gcttcctcattctta

SEQ ID NO: 919104 - DNA, 15 bp, Homo sapiens
cttcctcattcttac

SEQ ID NO: 919105 - DNA, 15 bp, Homo sapiens
ttcctcattcttacc

SEQ ID NO: 919106 - DNA, 15 bp, Homo sapiens
tcctcattcttaccc

SEQ ID NO: 919107 - DNA, 15 bp, Homo sapiens
cctcattcttacccc

SEQ ID NO: 919108 - DNA, 15 bp, Homo sapiens
ctcattcttacccct

SEQ ID NO: 919109 - DNA, 15 bp, Homo sapiens
tcattcttaccccta

SEQ ID NO: 919110 - DNA, 15 bp, Homo sapiens
cattcttacccctat

SEQ ID NO: 919111 - DNA, 15 bp, Homo sapiens
attcttacccctata

SEQ ID NO: 919112 - DNA, 15 bp, Homo sapiens
ttcttacccctatac

SEQ ID NO: 919113 - DNA, 15 bp, Homo sapiens
tcttacccctataca

SEQ ID NO: 919114 - DNA, 15 bp, Homo sapiens
cttacccctatacac

SEQ ID NO: 919115 - DNA, 15 bp, Homo sapiens
ttacccctatacact

SEQ ID NO: 919116 - DNA, 15 bp, Homo sapiens
tacccctatacactc

SEQ ID NO: 919117 - DNA, 15 bp, Homo sapiens
acccctatacactcc

SEQ ID NO: 919118 - DNA, 15 bp, Homo sapiens
cccctatacactcca

SEQ ID NO: 919119 - DNA, 15 bp, Homo sapiens
ccctatacactccat

SEQ ID NO: 919120 - DNA, 15 bp, Homo sapiens
cctatacactccatc

SEQ ID NO: 919121 - DNA, 15 bp, Homo sapiens
ctatacactccatct

SEQ ID NO: 919122 - DNA, 15 bp, Homo sapiens
tatacactccatctt

SEQ ID NO: 919123 - DNA, 15 bp, Homo sapiens
atacactccatcttt

SEQ ID NO: 919124 - DNA, 15 bp, Homo sapiens
tacactccatctttc

SEQ ID NO: 919125 - DNA, 15 bp, Homo sapiens
acactccatctttca

SEQ ID NO: 919126 - DNA, 15 bp, Homo sapiens
cactccatctttcat

SEQ ID NO: 919127 - DNA, 15 bp, Homo sapiens
actccatctttcatc

SEQ ID NO: 919128 - DNA, 15 bp, Homo sapiens
ctccatctttcatct

SEQ ID NO: 919129 - DNA, 15 bp, Homo sapiens
tccatctttcatctg

SEQ ID NO: 919130 - DNA, 15 bp, Homo sapiens
ccatctttcatctga

SEQ ID NO: 919131 - DNA, 15 bp, Homo sapiens
catctttcatctgag

SEQ ID NO: 919132 - DNA, 15 bp, Homo sapiens
atctttcatctgaga

SEQ ID NO: 919133 - DNA, 15 bp, Homo sapiens
tctttcatctgagag

SEQ ID NO: 919134 - DNA, 15 bp, Homo sapiens
ctttcatctgagagc

SEQ ID NO: 919135 - DNA, 15 bp, Homo sapiens
tttcatctgagagca

SEQ ID NO: 919136 - DNA, 15 bp, Homo sapiens
ttcatctgagagcac

SEQ ID NO: 919137 - DNA, 15 bp, Homo sapiens
tcatctgagagcaca

SEQ ID NO: 919138 - DNA, 15 bp, Homo sapiens
catctgagagcacat

SEQ ID NO: 919139 - DNA, 15 bp, Homo sapiens
atctgagagcacata

SEQ ID NO: 919140 - DNA, 15 bp, Homo sapiens
tctgagagcacataa

SEQ ID NO: 919141 - DNA, 15 bp, Homo sapiens
ctgagagcacataaa

SEQ ID NO: 919142 - DNA, 15 bp, Homo sapiens
tgagagcacataaat

SEQ ID NO: 919143 - DNA, 15 bp, Homo sapiens
gagagcacataaatc

SEQ ID NO: 919144 - DNA, 15 bp, Homo sapiens
agagcacataaatca

SEQ ID NO: 919145 - DNA, 15 bp, Homo sapiens
gagcacataaatcat

SEQ ID NO: 919146 - DNA, 15 bp, Homo sapiens
agcacataaatcata

SEQ ID NO: 919147 - DNA, 15 bp, Homo sapiens
gcacataaatcatag

SEQ ID NO: 919148 - DNA, 15 bp, Homo sapiens
cacataaatcatagg

SEQ ID NO: 919149 - DNA, 15 bp, Homo sapiens
acataaatcataggg

SEQ ID NO: 919150 - DNA, 15 bp, Homo sapiens
cataaatcataggga

SEQ ID NO: 919151 - DNA, 15 bp, Homo sapiens
ataaatcatagggaa

SEQ ID NO: 919152 - DNA, 15 bp, Homo sapiens
taaatcatagggaaa

SEQ ID NO: 919153 - DNA, 15 bp, Homo sapiens
aaatcatagggaaat

SEQ ID NO: 919154 - DNA, 15 bp, Homo sapiens
aatcatagggaaatt

SEQ ID NO: 919155 - DNA, 15 bp, Homo sapiens
atcatagggaaattt

SEQ ID NO: 919156 - DNA, 15 bp, Homo sapiens
tcatagggaaatttt

SEQ ID NO: 919157 - DNA, 15 bp, Homo sapiens
catagggaaattttt

SEQ ID NO: 919158 - DNA, 15 bp, Homo sapiens
atagggaaatttttc

SEQ ID NO: 919159 - DNA, 15 bp, Homo sapiens
tagggaaatttttca

SEQ ID NO: 919160 - DNA, 15 bp, Homo sapiens
agggaaatttttcag

SEQ ID NO: 919161 - DNA, 15 bp, Homo sapiens
gggaaatttttcagc

SEQ ID NO: 919162 - DNA, 15 bp, Homo sapiens
ggaaatttttcagca

SEQ ID NO: 919163 - DNA, 15 bp, Homo sapiens
gaaatttttcagcaa

SEQ ID NO: 919164 - DNA, 15 bp, Homo sapiens
aaatttttcagcaag

SEQ ID NO: 919165 - DNA, 15 bp, Homo sapiens
aatttttcagcaaga

SEQ ID NO: 919166 - DNA, 15 bp, Homo sapiens
atttttcagcaagac

SEQ ID NO: 919167 - DNA, 15 bp, Homo sapiens
tttttcagcaagaca

SEQ ID NO: 919168 - DNA, 15 bp, Homo sapiens
ttttcagcaagacaa

SEQ ID NO: 919169 - DNA, 15 bp, Homo sapiens
tttcagcaagacaaa

SEQ ID NO: 919170 - DNA, 15 bp, Homo sapiens
ttcagcaagacaaaa

SEQ ID NO: 919171 - DNA, 15 bp, Homo sapiens
tcagcaagacaaaaa

SEQ ID NO: 919172 - DNA, 15 bp, Homo sapiens
cagcaagacaaaaag

SEQ ID NO: 919173 - DNA, 15 bp, Homo sapiens
agcaagacaaaaagg

SEQ ID NO: 919174 - DNA, 15 bp, Homo sapiens
gcaagacaaaaagga

SEQ ID NO: 919175 - DNA, 15 bp, Homo sapiens
caagacaaaaaggaa

SEQ ID NO: 919176 - DNA, 15 bp, Homo sapiens
aagacaaaaaggaac

SEQ ID NO: 919177 - DNA, 15 bp, Homo sapiens
agacaaaaaggaaca

SEQ ID NO: 919178 - DNA, 15 bp, Homo sapiens
gacaaaaaggaacaa

SEQ ID NO: 919179 - DNA, 15 bp, Homo sapiens
acaaaaaggaacaat

SEQ ID NO: 919180 - DNA, 15 bp, Homo sapiens
caaaaaggaacaatg

SEQ ID NO: 919181 - DNA, 15 bp, Homo sapiens
aaaaaggaacaatga

SEQ ID NO: 919182 - DNA, 15 bp, Homo sapiens
aaaaggaacaatgat

SEQ ID NO: 919183 - DNA, 15 bp, Homo sapiens
aaaggaacaatgatt

SEQ ID NO: 919184 - DNA, 15 bp, Homo sapiens
aaggaacaatgatta

SEQ ID NO: 919185 - DNA, 15 bp, Homo sapiens
aggaacaatgattat

SEQ ID NO: 919186 - DNA, 15 bp, Homo sapiens
ggaacaatgattatt

SEQ ID NO: 919187 - DNA, 15 bp, Homo sapiens
gaacaatgattatta

SEQ ID NO: 919188 - DNA, 15 bp, Homo sapiens
aacaatgattattac

SEQ ID NO: 919189 - DNA, 15 bp, Homo sapiens
acaatgattattact

SEQ ID NO: 919190 - DNA, 15 bp, Homo sapiens
caatgattattactt

SEQ ID NO: 919191 - DNA, 15 bp, Homo sapiens
aatgattattactta

SEQ ID NO: 919192 - DNA, 15 bp, Homo sapiens
atgattattacttac

SEQ ID NO: 919193 - DNA, 15 bp, Homo sapiens
tgattattacttact

SEQ ID NO: 919194 - DNA, 15 bp, Homo sapiens
gattattacttactg

SEQ ID NO: 919195 - DNA, 15 bp, Homo sapiens
attattacttactga

SEQ ID NO: 919196 - DNA, 15 bp, Homo sapiens
ttattacttactgag

SEQ ID NO: 919197 - DNA, 15 bp, Homo sapiens
tattacttactgagc

SEQ ID NO: 919198 - DNA, 15 bp, Homo sapiens
attacttactgagca

SEQ ID NO: 919199 - DNA, 15 bp, Homo sapiens
ttacttactgagcat

SEQ ID NO: 919200 - DNA, 15 bp, Homo sapiens
tacttactgagcatc

SEQ ID NO: 919201 - DNA, 15 bp, Homo sapiens
acttactgagcatct

SEQ ID NO: 919202 - DNA, 15 bp, Homo sapiens
cttactgagcatcta

SEQ ID NO: 919203 - DNA, 15 bp, Homo sapiens
ttactgagcatctac

SEQ ID NO: 919204 - DNA, 15 bp, Homo sapiens
tactgagcatctact

SEQ ID NO: 919205 - DNA, 15 bp, Homo sapiens
actgagcatctacta

SEQ ID NO: 919206 - DNA, 15 bp, Homo sapiens
ctgagcatctactat

SEQ ID NO: 919207 - DNA, 15 bp, Homo sapiens
tgagcatctactatg

SEQ ID NO: 919208 - DNA, 15 bp, Homo sapiens
gagcatctactatgt

SEQ ID NO: 919209 - DNA, 15 bp, Homo sapiens
agcatctactatgtc

SEQ ID NO: 919210 - DNA, 15 bp, Homo sapiens
gcatctactatgtct

SEQ ID NO: 919211 - DNA, 15 bp, Homo sapiens
catctactatgtctt

SEQ ID NO: 919212 - DNA, 15 bp, Homo sapiens
atctactatgtctta

SEQ ID NO: 919213 - DNA, 15 bp, Homo sapiens
tctactatgtcttag

SEQ ID NO: 919214 - DNA, 15 bp, Homo sapiens
ctactatgtcttagt

SEQ ID NO: 919215 - DNA, 15 bp, Homo sapiens
tactatgtcttagtt

SEQ ID NO: 919216 - DNA, 15 bp, Homo sapiens
actatgtcttagttc

SEQ ID NO: 919217 - DNA, 15 bp, Homo sapiens
ctatgtcttagttcc

SEQ ID NO: 919218 - DNA, 15 bp, Homo sapiens
tatgtcttagttcct

SEQ ID NO: 919219 - DNA, 15 bp, Homo sapiens
atgtcttagttcctt

SEQ ID NO: 919220 - DNA, 15 bp, Homo sapiens
tgtcttagttccttt

SEQ ID NO: 919221 - DNA, 15 bp, Homo sapiens
gtcttagttcctttt

SEQ ID NO: 919222 - DNA, 15 bp, Homo sapiens
tcttagttccttttg

SEQ ID NO: 919223 - DNA, 15 bp, Homo sapiens
cttagttccttttgt

SEQ ID NO: 919224 - DNA, 15 bp, Homo sapiens
ttagttccttttgta

SEQ ID NO: 919225 - DNA, 15 bp, Homo sapiens
tagttccttttgtaa

SEQ ID NO: 919226 - DNA, 15 bp, Homo sapiens
agttccttttgtaag

SEQ ID NO: 919227 - DNA, 15 bp, Homo sapiens
gttccttttgtaagt

SEQ ID NO: 919228 - DNA, 15 bp, Homo sapiens
ttccttttgtaagtt

SEQ ID NO: 919229 - DNA, 15 bp, Homo sapiens
tccttttgtaagttc

SEQ ID NO: 919230 - DNA, 15 bp, Homo sapiens
ccttttgtaagttct

SEQ ID NO: 919231 - DNA, 15 bp, Homo sapiens
cttttgtaagttctt

SEQ ID NO: 919232 - DNA, 15 bp, Homo sapiens
ttttgtaagttcttt

SEQ ID NO: 919233 - DNA, 15 bp, Homo sapiens
tttgtaagttcttta

SEQ ID NO: 919234 - DNA, 15 bp, Homo sapiens
ttgtaagttctttaa

SEQ ID NO: 919235 - DNA, 15 bp, Homo sapiens
tgtaagttctttaat

SEQ ID NO: 919236 - DNA, 15 bp, Homo sapiens
gtaagttctttaata

SEQ ID NO: 919237 - DNA, 15 bp, Homo sapiens
taagttctttaatat

SEQ ID NO: 919238 - DNA, 15 bp, Homo sapiens
aagttctttaatatg

SEQ ID NO: 919239 - DNA, 15 bp, Homo sapiens
agttctttaatatgt

SEQ ID NO: 919240 - DNA, 15 bp, Homo sapiens
gttctttaatatgtt

SEQ ID NO: 919241 - DNA, 15 bp, Homo sapiens
ttctttaatatgttt

SEQ ID NO: 919242 - DNA, 15 bp, Homo sapiens
tctttaatatgtttc

SEQ ID NO: 919243 - DNA, 15 bp, Homo sapiens
ctttaatatgtttct

SEQ ID NO: 919244 - DNA, 15 bp, Homo sapiens
tttaatatgtttctc

SEQ ID NO: 919245 - DNA, 15 bp, Homo sapiens
ttaatatgtttctca

SEQ ID NO: 919246 - DNA, 15 bp, Homo sapiens
taatatgtttctcat

SEQ ID NO: 919247 - DNA, 15 bp, Homo sapiens
aatatgtttctcatt

SEQ ID NO: 919248 - DNA, 15 bp, Homo sapiens
atatgtttctcatta

SEQ ID NO: 919249 - DNA, 15 bp, Homo sapiens
tatgtttctcattaa

SEQ ID NO: 919250 - DNA, 15 bp, Homo sapiens
atgtttctcattaat

SEQ ID NO: 919251 - DNA, 15 bp, Homo sapiens
tgtttctcattaatc

SEQ ID NO: 919252 - DNA, 15 bp, Homo sapiens
gtttctcattaatct

SEQ ID NO: 919253 - DNA, 15 bp, Homo sapiens
tttctcattaatctt

SEQ ID NO: 919254 - DNA, 15 bp, Homo sapiens
ttctcattaatcttc

SEQ ID NO: 919255 - DNA, 15 bp, Homo sapiens
tctcattaatcttca

SEQ ID NO: 919256 - DNA, 15 bp, Homo sapiens
ctcattaatcttcac

SEQ ID NO: 919257 - DNA, 15 bp, Homo sapiens
tcattaatcttcaca

SEQ ID NO: 919258 - DNA, 15 bp, Homo sapiens
cattaatcttcacaa

SEQ ID NO: 919259 - DNA, 15 bp, Homo sapiens
attaatcttcacaat

SEQ ID NO: 919260 - DNA, 15 bp, Homo sapiens
taatcttcacaataa

SEQ ID NO: 919261 - DNA, 15 bp, Homo sapiens
aatcttcacaataat

SEQ ID NO: 919262 - DNA, 15 bp, Homo sapiens
atcttcacaataatg

SEQ ID NO: 919263 - DNA, 15 bp, Homo sapiens
tcttcacaataatgg

SEQ ID NO: 919264 - DNA, 15 bp, Homo sapiens
cttcacaataatggt

SEQ ID NO: 919265 - DNA, 15 bp, Homo sapiens
ttcacaataatggtg

SEQ ID NO: 919266 - DNA, 15 bp, Homo sapiens
tcacaataatggtgg

SEQ ID NO: 919267 - DNA, 15 bp, Homo sapiens
cacaataatggtgga

SEQ ID NO: 919268 - DNA, 15 bp, Homo sapiens
acaataatggtggaa

SEQ ID NO: 919269 - DNA, 15 bp, Homo sapiens
caataatggtggaag

SEQ ID NO: 919270 - DNA, 15 bp, Homo sapiens
aataatggtggaaga

SEQ ID NO: 919271 - DNA, 15 bp, Homo sapiens
ataatggtggaagat

SEQ ID NO: 919272 - DNA, 15 bp, Homo sapiens
taatggtggaagata

SEQ ID NO: 919273 - DNA, 15 bp, Homo sapiens
aatggtggaagatag

SEQ ID NO: 919274 - DNA, 15 bp, Homo sapiens
atggtggaagatagg

SEQ ID NO: 919275 - DNA, 15 bp, Homo sapiens
tggtggaagataggc

SEQ ID NO: 919276 - DNA, 15 bp, Homo sapiens
ggtggaagataggca

SEQ ID NO: 919277 - DNA, 15 bp, Homo sapiens
gtggaagataggcat

SEQ ID NO: 919278 - DNA, 15 bp, Homo sapiens
tggaagataggcatt

SEQ ID NO: 919279 - DNA, 15 bp, Homo sapiens
ggaagataggcattc

SEQ ID NO: 919280 - DNA, 15 bp, Homo sapiens
gaagataggcattct

SEQ ID NO: 919281 - DNA, 15 bp, Homo sapiens
aagataggcattctt

SEQ ID NO: 919282 - DNA, 15 bp, Homo sapiens
agataggcattctta

SEQ ID NO: 919283 - DNA, 15 bp, Homo sapiens
gataggcattcttat

SEQ ID NO: 919284 - DNA, 15 bp, Homo sapiens
ataggcattcttatt

SEQ ID NO: 919285 - DNA, 15 bp, Homo sapiens
taggcattcttattg

SEQ ID NO: 919286 - DNA, 15 bp, Homo sapiens
aggcattcttattga

SEQ ID NO: 919287 - DNA, 15 bp, Homo sapiens
ggcattcttattgac

SEQ ID NO: 919288 - DNA, 15 bp, Homo sapiens
gcattcttattgact

SEQ ID NO: 919289 - DNA, 15 bp, Homo sapiens
cattcttattgactt

SEQ ID NO: 919290 - DNA, 15 bp, Homo sapiens
attcttattgactta

SEQ ID NO: 919291 - DNA, 15 bp, Homo sapiens
ttcttattgacttat

SEQ ID NO: 919292 - DNA, 15 bp, Homo sapiens
tcttattgacttatt

SEQ ID NO: 919293 - DNA, 15 bp, Homo sapiens
cttattgacttattc

SEQ ID NO: 919294 - DNA, 15 bp, Homo sapiens
ttattgacttattct

SEQ ID NO: 919295 - DNA, 15 bp, Homo sapiens
tattgacttattcta

SEQ ID NO: 919296 - DNA, 15 bp, Homo sapiens
attgacttattctat

SEQ ID NO: 919297 - DNA, 15 bp, Homo sapiens
ttgacttattctatg

SEQ ID NO: 919298 - DNA, 15 bp, Homo sapiens
tgacttattctatgg

SEQ ID NO: 919299 - DNA, 15 bp, Homo sapiens
gacttattctatgga

SEQ ID NO: 919300 - DNA, 15 bp, Homo sapiens
acttattctatggaa

SEQ ID NO: 919301 - DNA, 15 bp, Homo sapiens
cttattctatggaaa

SEQ ID NO: 919302 - DNA, 15 bp, Homo sapiens
ttattctatggaaaa

SEQ ID NO: 919303 - DNA, 15 bp, Homo sapiens
tattctatggaaaaa

SEQ ID NO: 919304 - DNA, 15 bp, Homo sapiens
attctatggaaaaag

SEQ ID NO: 919305 - DNA, 15 bp, Homo sapiens
ttctatggaaaaaga

SEQ ID NO: 919306 - DNA, 15 bp, Homo sapiens
tctatggaaaaagaa

SEQ ID NO: 919307 - DNA, 15 bp, Homo sapiens
ctatggaaaaagaaa

SEQ ID NO: 919308 - DNA, 15 bp, Homo sapiens
tatggaaaaagaaac

SEQ ID NO: 919309 - DNA, 15 bp, Homo sapiens
atggaaaaagaaact

SEQ ID NO: 919310 - DNA, 15 bp, Homo sapiens
tggaaaaagaaactg

SEQ ID NO: 919311 - DNA, 15 bp, Homo sapiens
ggaaaaagaaactga

SEQ ID NO: 919312 - DNA, 15 bp, Homo sapiens
gaaaaagaaactgag

SEQ ID NO: 919313 - DNA, 15 bp, Homo sapiens
aaaaagaaactgagg

SEQ ID NO: 919314 - DNA, 15 bp, Homo sapiens
aaaagaaactgaggc

SEQ ID NO: 919315 - DNA, 15 bp, Homo sapiens
aaagaaactgaggct

SEQ ID NO: 919316 - DNA, 15 bp, Homo sapiens
aagaaactgaggctc

SEQ ID NO: 919317 - DNA, 15 bp, Homo sapiens
agaaactgaggctcc

SEQ ID NO: 919318 - DNA, 15 bp, Homo sapiens
gaaactgaggctccc

SEQ ID NO: 919319 - DNA, 15 bp, Homo sapiens
aaactgaggctccca

SEQ ID NO: 919320 - DNA, 15 bp, Homo sapiens
aactgaggctcccac

SEQ ID NO: 919321 - DNA, 15 bp, Homo sapiens
actgaggctcccaca

SEQ ID NO: 919322 - DNA, 15 bp, Homo sapiens
ctgaggctcccacag

SEQ ID NO: 919323 - DNA, 15 bp, Homo sapiens
tgaggctcccacagg

SEQ ID NO: 919324 - DNA, 15 bp, Homo sapiens
gaggctcccacaggg

SEQ ID NO: 919325 - DNA, 15 bp, Homo sapiens
aggctcccacagggg

SEQ ID NO: 919326 - DNA, 15 bp, Homo sapiens
ggctcccacagggga

SEQ ID NO: 919327 - DNA, 15 bp, Homo sapiens
gctcccacaggggaa

SEQ ID NO: 919328 - DNA, 15 bp, Homo sapiens
ctcccacaggggaat

SEQ ID NO: 919329 - DNA, 15 bp, Homo sapiens
tcccacaggggaatg

SEQ ID NO: 919330 - DNA, 15 bp, Homo sapiens
cccacaggggaatgt

SEQ ID NO: 919331 - DNA, 15 bp, Homo sapiens
ccacaggggaatgtt

SEQ ID NO: 919332 - DNA, 15 bp, Homo sapiens
cacaggggaatgttt

SEQ ID NO: 919333 - DNA, 15 bp, Homo sapiens
acaggggaatgttta

SEQ ID NO: 919334 - DNA, 15 bp, Homo sapiens
caggggaatgtttat

SEQ ID NO: 919335 - DNA, 15 bp, Homo sapiens
aggggaatgtttata

SEQ ID NO: 919336 - DNA, 15 bp, Homo sapiens
ggggaatgtttatat

SEQ ID NO: 919337 - DNA, 15 bp, Homo sapiens
gggaatgtttatata

SEQ ID NO: 919338 - DNA, 15 bp, Homo sapiens
ggaatgtttatatat

SEQ ID NO: 919339 - DNA, 15 bp, Homo sapiens
gaatgtttatatata

SEQ ID NO: 919340 - DNA, 15 bp, Homo sapiens
aatgtttatatatat

SEQ ID NO: 919341 - DNA, 15 bp, Homo sapiens
atgtttatatatatt

SEQ ID NO: 919342 - DNA, 15 bp, Homo sapiens
tgtttatatatatta

SEQ ID NO: 919343 - DNA, 15 bp, Homo sapiens
gtttatatatattat

SEQ ID NO: 919344 - DNA, 15 bp, Homo sapiens
tttatatatattatg

SEQ ID NO: 919345 - DNA, 15 bp, Homo sapiens
ttatatatattatga

SEQ ID NO: 919346 - DNA, 15 bp, Homo sapiens
tatatatattatgat

SEQ ID NO: 919347 - DNA, 15 bp, Homo sapiens
atatatattatgata

SEQ ID NO: 919348 - DNA, 15 bp, Homo sapiens
tatatattatgatat

SEQ ID NO: 919349 - DNA, 15 bp, Homo sapiens
atatattatgatatg

SEQ ID NO: 919350 - DNA, 15 bp, Homo sapiens
tatattatgatatgt

SEQ ID NO: 919351 - DNA, 15 bp, Homo sapiens
atattatgatatgtt

SEQ ID NO: 919352 - DNA, 15 bp, Homo sapiens
tattatgatatgttc

SEQ ID NO: 919353 - DNA, 15 bp, Homo sapiens
attatgatatgttcc

SEQ ID NO: 919354 - DNA, 15 bp, Homo sapiens
ttatgatatgttcct

SEQ ID NO: 919355 - DNA, 15 bp, Homo sapiens
tatgatatgttccta

SEQ ID NO: 919356 - DNA, 15 bp, Homo sapiens
atgatatgttcctat

SEQ ID NO: 919357 - DNA, 15 bp, Homo sapiens
tgatatgttcctatg

SEQ ID NO: 919358 - DNA, 15 bp, Homo sapiens
gatatgttcctatgc

SEQ ID NO: 919359 - DNA, 15 bp, Homo sapiens
atatgttcctatgct

SEQ ID NO: 919360 - DNA, 15 bp, Homo sapiens
tatgttcctatgctt

SEQ ID NO: 919361 - DNA, 15 bp, Homo sapiens
atgttcctatgcttg

SEQ ID NO: 919362 - DNA, 15 bp, Homo sapiens
tgttcctatgcttga

SEQ ID NO: 919363 - DNA, 15 bp, Homo sapiens
gttcctatgcttgaa

SEQ ID NO: 919364 - DNA, 15 bp, Homo sapiens
ttcctatgcttgaat

SEQ ID NO: 919365 - DNA, 15 bp, Homo sapiens
tcctatgcttgaata

SEQ ID NO: 919366 - DNA, 15 bp, Homo sapiens
cctatgcttgaatat

SEQ ID NO: 919367 - DNA, 15 bp, Homo sapiens
ctatgcttgaatatt

SEQ ID NO: 919368 - DNA, 15 bp, Homo sapiens
tatgcttgaatatta

SEQ ID NO: 919369 - DNA, 15 bp, Homo sapiens
atgcttgaatattag

SEQ ID NO: 919370 - DNA, 15 bp, Homo sapiens
tgcttgaatattagg

SEQ ID NO: 919371 - DNA, 15 bp, Homo sapiens
gcttgaatattaggc

SEQ ID NO: 919372 - DNA, 15 bp, Homo sapiens
cttgaatattaggca

SEQ ID NO: 919373 - DNA, 15 bp, Homo sapiens
ttgaatattaggcag

SEQ ID NO: 919374 - DNA, 15 bp, Homo sapiens
tgaatattaggcagc

SEQ ID NO: 919375 - DNA, 15 bp, Homo sapiens
gaatattaggcagcc

SEQ ID NO: 919376 - DNA, 15 bp, Homo sapiens
aatattaggcagccc

SEQ ID NO: 919377 - DNA, 15 bp, Homo sapiens
atattaggcagccct

SEQ ID NO: 919378 - DNA, 15 bp, Homo sapiens
tattaggcagccctc

SEQ ID NO: 919379 - DNA, 15 bp, Homo sapiens
attaggcagccctca

SEQ ID NO: 919380 - DNA, 15 bp, Homo sapiens
ttaggcagccctcaa

SEQ ID NO: 919381 - DNA, 15 bp, Homo sapiens
taggcagccctcaaa

SEQ ID NO: 919382 - DNA, 15 bp, Homo sapiens
aggcagccctcaaag

SEQ ID NO: 919383 - DNA, 15 bp, Homo sapiens
ggcagccctcaaagt

SEQ ID NO: 919384 - DNA, 15 bp, Homo sapiens
gcagccctcaaagta

SEQ ID NO: 919385 - DNA, 15 bp, Homo sapiens
cagccctcaaagtaa

SEQ ID NO: 919386 - DNA, 15 bp, Homo sapiens
agccctcaaagtaat

SEQ ID NO: 919387 - DNA, 15 bp, Homo sapiens
gccctcaaagtaata

SEQ ID NO: 919388 - DNA, 15 bp, Homo sapiens
ccctcaaagtaatat

SEQ ID NO: 919389 - DNA, 15 bp, Homo sapiens
cctcaaagtaatatt

SEQ ID NO: 919390 - DNA, 15 bp, Homo sapiens
ctcaaagtaatattt

SEQ ID NO: 919391 - DNA, 15 bp, Homo sapiens
tcaaagtaatatttt

SEQ ID NO: 919392 - DNA, 15 bp, Homo sapiens
caaagtaatattttt

SEQ ID NO: 919393 - DNA, 15 bp, Homo sapiens
aaagtaatattttta

SEQ ID NO: 919394 - DNA, 15 bp, Homo sapiens
aagtaatatttttaa

SEQ ID NO: 919395 - DNA, 15 bp, Homo sapiens
agtaatatttttaag

SEQ ID NO: 919396 - DNA, 15 bp, Homo sapiens
gtaatatttttaagg

SEQ ID NO: 919397 - DNA, 15 bp, Homo sapiens
taatatttttaagga

SEQ ID NO: 919398 - DNA, 15 bp, Homo sapiens
aatatttttaaggac

SEQ ID NO: 919399 - DNA, 15 bp, Homo sapiens
atatttttaaggact

SEQ ID NO: 919400 - DNA, 15 bp, Homo sapiens
tatttttaaggactt

SEQ ID NO: 919401 - DNA, 15 bp, Homo sapiens
atttttaaggacttg

SEQ ID NO: 919402 - DNA, 15 bp, Homo sapiens
tttttaaggacttgt

SEQ ID NO: 919403 - DNA, 15 bp, Homo sapiens
ttttaaggacttgtt

SEQ ID NO: 919404 - DNA, 15 bp, Homo sapiens
tttaaggacttgtta

SEQ ID NO: 919405 - DNA, 15 bp, Homo sapiens
ttaaggacttgttat

SEQ ID NO: 919406 - DNA, 15 bp, Homo sapiens
taaggacttgttatg

SEQ ID NO: 919407 - DNA, 15 bp, Homo sapiens
aaggacttgttatga

SEQ ID NO: 919408 - DNA, 15 bp, Homo sapiens
aggacttgttatgaa

SEQ ID NO: 919409 - DNA, 15 bp, Homo sapiens
ggacttgttatgaac

SEQ ID NO: 919410 - DNA, 15 bp, Homo sapiens
gacttgttatgaaca

SEQ ID NO: 919411 - DNA, 15 bp, Homo sapiens
acttgttatgaacat

SEQ ID NO: 919412 - DNA, 15 bp, Homo sapiens
cttgttatgaacata

SEQ ID NO: 919413 - DNA, 15 bp, Homo sapiens
ttgttatgaacatac

SEQ ID NO: 919414 - DNA, 15 bp, Homo sapiens
tgttatgaacatacg

SEQ ID NO: 919415 - DNA, 15 bp, Homo sapiens
gttatgaacatacga

SEQ ID NO: 919416 - DNA, 15 bp, Homo sapiens
ttatgaacatacgat

SEQ ID NO: 919417 - DNA, 15 bp, Homo sapiens
tatgaacatacgatt

SEQ ID NO: 919418 - DNA, 15 bp, Homo sapiens
atgaacatacgatta

SEQ ID NO: 919419 - DNA, 15 bp, Homo sapiens
tgaacatacgattat

SEQ ID NO: 919420 - DNA, 15 bp, Homo sapiens
gaacatacgattata

SEQ ID NO: 919421 - DNA, 15 bp, Homo sapiens
aacatacgattataa

SEQ ID NO: 919422 - DNA, 15 bp, Homo sapiens
acatacgattataat

SEQ ID NO: 919423 - DNA, 15 bp, Homo sapiens
catacgattataatg

SEQ ID NO: 919424 - DNA, 15 bp, Homo sapiens
atacgattataatga

SEQ ID NO: 919425 - DNA, 15 bp, Homo sapiens
tacgattataatgaa

SEQ ID NO: 919426 - DNA, 15 bp, Homo sapiens
acgattataatgaaa

SEQ ID NO: 919427 - DNA, 15 bp, Homo sapiens
cgattataatgaaaa

SEQ ID NO: 919428 - DNA, 15 bp, Homo sapiens
gattataatgaaaag

SEQ ID NO: 919429 - DNA, 15 bp, Homo sapiens
attataatgaaaagt

SEQ ID NO: 919430 - DNA, 15 bp, Homo sapiens
ttataatgaaaagta

SEQ ID NO: 919431 - DNA, 15 bp, Homo sapiens
tataatgaaaagtat

SEQ ID NO: 919432 - DNA, 15 bp, Homo sapiens
ataatgaaaagtata

SEQ ID NO: 919433 - DNA, 15 bp, Homo sapiens
taatgaaaagtatat

SEQ ID NO: 919434 - DNA, 15 bp, Homo sapiens
aatgaaaagtatata

SEQ ID NO: 919435 - DNA, 15 bp, Homo sapiens
atgaaaagtatataa

SEQ ID NO: 919436 - DNA, 15 bp, Homo sapiens
tgaaaagtatataaa

SEQ ID NO: 919437 - DNA, 15 bp, Homo sapiens
gaaaagtatataaaa

SEQ ID NO: 919438 - DNA, 15 bp, Homo sapiens
aaaagtatataaaaa

SEQ ID NO: 919439 - DNA, 15 bp, Homo sapiens
aaagtatataaaaat

SEQ ID NO: 919440 - DNA, 15 bp, Homo sapiens
aagtatataaaaatt

SEQ ID NO: 919441 - DNA, 15 bp, Homo sapiens
agtatataaaaatta

SEQ ID NO: 919442 - DNA, 15 bp, Homo sapiens
gtatataaaaattaa

SEQ ID NO: 919443 - DNA, 15 bp, Homo sapiens
tatataaaaattaag

SEQ ID NO: 919444 - DNA, 15 bp, Homo sapiens
atataaaaattaagt

SEQ ID NO: 919445 - DNA, 15 bp, Homo sapiens
tataaaaattaagtt

SEQ ID NO: 919446 - DNA, 15 bp, Homo sapiens
ataaaaattaagttc

SEQ ID NO: 919447 - DNA, 15 bp, Homo sapiens
taaaaattaagttct

SEQ ID NO: 919448 - DNA, 15 bp, Homo sapiens
aaaaattaagttctc

SEQ ID NO: 919449 - DNA, 15 bp, Homo sapiens
aaaattaagttctca

SEQ ID NO: 919450 - DNA, 15 bp, Homo sapiens
aaattaagttctcaa

SEQ ID NO: 919451 - DNA, 15 bp, Homo sapiens
aattaagttctcaat

SEQ ID NO: 919452 - DNA, 15 bp, Homo sapiens
attaagttctcaata

SEQ ID NO: 919453 - DNA, 15 bp, Homo sapiens
ttaagttctcaatat

SEQ ID NO: 919454 - DNA, 15 bp, Homo sapiens
taagttctcaatatt

SEQ ID NO: 919455 - DNA, 15 bp, Homo sapiens
aagttctcaatattc

SEQ ID NO: 919456 - DNA, 15 bp, Homo sapiens
agttctcaatattca

SEQ ID NO: 919457 - DNA, 15 bp, Homo sapiens
gttctcaatattcat

SEQ ID NO: 919458 - DNA, 15 bp, Homo sapiens
ttctcaatattcata

SEQ ID NO: 919459 - DNA, 15 bp, Homo sapiens
tctcaatattcatac

SEQ ID NO: 919460 - DNA, 15 bp, Homo sapiens
ctcaatattcataca

SEQ ID NO: 919461 - DNA, 15 bp, Homo sapiens
tcaatattcatacat

SEQ ID NO: 919462 - DNA, 15 bp, Homo sapiens
caatattcatacata

SEQ ID NO: 919463 - DNA, 15 bp, Homo sapiens
aatattcatacatac

SEQ ID NO: 919464 - DNA, 15 bp, Homo sapiens
atattcatacataca

SEQ ID NO: 919465 - DNA, 15 bp, Homo sapiens
tattcatacatacaa

SEQ ID NO: 919466 - DNA, 15 bp, Homo sapiens
attcatacatacaac

SEQ ID NO: 919467 - DNA, 15 bp, Homo sapiens
ttcatacatacaact

SEQ ID NO: 919468 - DNA, 15 bp, Homo sapiens
tcatacatacaacta

SEQ ID NO: 919469 - DNA, 15 bp, Homo sapiens
catacatacaactag

SEQ ID NO: 919470 - DNA, 15 bp, Homo sapiens
atacatacaactaga

SEQ ID NO: 919471 - DNA, 15 bp, Homo sapiens
tacatacaactagaa

SEQ ID NO: 919472 - DNA, 15 bp, Homo sapiens
acatacaactagaaa

SEQ ID NO: 919473 - DNA, 15 bp, Homo sapiens
catacaactagaaaa

SEQ ID NO: 919474 - DNA, 15 bp, Homo sapiens
atacaactagaaaaa

SEQ ID NO: 919475 - DNA, 15 bp, Homo sapiens
tacaactagaaaaaa

SEQ ID NO: 919476 - DNA, 15 bp, Homo sapiens
acaactagaaaaaaa

SEQ ID NO: 919477 - DNA, 15 bp, Homo sapiens
caactagaaaaaaat

SEQ ID NO: 919478 - DNA, 15 bp, Homo sapiens
ctagaaaaaaatgcc

SEQ ID NO: 919479 - DNA, 15 bp, Homo sapiens
tagaaaaaaatgcca

SEQ ID NO: 919480 - DNA, 15 bp, Homo sapiens
agaaaaaaatgccaa

SEQ ID NO: 919481 - DNA, 15 bp, Homo sapiens
gaaaaaaatgccaaa

SEQ ID NO: 919482 - DNA, 15 bp, Homo sapiens
aaaaaaatgccaaaa

SEQ ID NO: 919483 - DNA, 15 bp, Homo sapiens
aaaaaatgccaaaat

SEQ ID NO: 919484 - DNA, 15 bp, Homo sapiens
aaaaatgccaaaatg

SEQ ID NO: 919485 - DNA, 15 bp, Homo sapiens
aaaatgccaaaatgc

SEQ ID NO: 919486 - DNA, 15 bp, Homo sapiens
aaatgccaaaatgct

SEQ ID NO: 919487 - DNA, 15 bp, Homo sapiens
aatgccaaaatgcta

SEQ ID NO: 919488 - DNA, 15 bp, Homo sapiens
atgccaaaatgctaa

SEQ ID NO: 919489 - DNA, 15 bp, Homo sapiens
tgccaaaatgctaat

SEQ ID NO: 919490 - DNA, 15 bp, Homo sapiens
gccaaaatgctaata

SEQ ID NO: 919491 - DNA, 15 bp, Homo sapiens
ccaaaatgctaatag

SEQ ID NO: 919492 - DNA, 15 bp, Homo sapiens
caaaatgctaatagc

SEQ ID NO: 919493 - DNA, 15 bp, Homo sapiens
aaaatgctaatagct

SEQ ID NO: 919494 - DNA, 15 bp, Homo sapiens
aaatgctaatagctg

SEQ ID NO: 919495 - DNA, 15 bp, Homo sapiens
aatgctaatagctgg

SEQ ID NO: 919496 - DNA, 15 bp, Homo sapiens
atgctaatagctgga

SEQ ID NO: 919497 - DNA, 15 bp, Homo sapiens
tgctaatagctggat

SEQ ID NO: 919498 - DNA, 15 bp, Homo sapiens
gctaatagctggata

SEQ ID NO: 919499 - DNA, 15 bp, Homo sapiens
ctaatagctggataa

SEQ ID NO: 919500 - DNA, 15 bp, Homo sapiens
taatagctggataag

SEQ ID NO: 919501 - DNA, 15 bp, Homo sapiens
aatagctggataagc

SEQ ID NO: 919502 - DNA, 15 bp, Homo sapiens
atagctggataagct

SEQ ID NO: 919503 - DNA, 15 bp, Homo sapiens
tagctggataagcta

SEQ ID NO: 919504 - DNA, 15 bp, Homo sapiens
agctggataagctaa

SEQ ID NO: 919505 - DNA, 15 bp, Homo sapiens
gctggataagctaat

SEQ ID NO: 919506 - DNA, 15 bp, Homo sapiens
ctggataagctaata

SEQ ID NO: 919507 - DNA, 15 bp, Homo sapiens
tggataagctaataa

SEQ ID NO: 919508 - DNA, 15 bp, Homo sapiens
ggataagctaataaa

SEQ ID NO: 919509 - DNA, 15 bp, Homo sapiens
gataagctaataaaa

SEQ ID NO: 919510 - DNA, 15 bp, Homo sapiens
ataagctaataaaac

SEQ ID NO: 919511 - DNA, 15 bp, Homo sapiens
taagctaataaaact

SEQ ID NO: 919512 - DNA, 15 bp, Homo sapiens
aagctaataaaacta

SEQ ID NO: 919513 - DNA, 15 bp, Homo sapiens
agctaataaaactat

SEQ ID NO: 919514 - DNA, 15 bp, Homo sapiens
gctaataaaactatg

SEQ ID NO: 919515 - DNA, 15 bp, Homo sapiens
ctaataaaactatga

SEQ ID NO: 919516 - DNA, 15 bp, Homo sapiens
taataaaactatgaa

SEQ ID NO: 919517 - DNA, 15 bp, Homo sapiens
aataaaactatgaat

SEQ ID NO: 919518 - DNA, 15 bp, Homo sapiens
ataaaactatgaata

SEQ ID NO: 919519 - DNA, 15 bp, Homo sapiens
taaaactatgaataa

SEQ ID NO: 919520 - DNA, 15 bp, Homo sapiens
aaaactatgaataat

SEQ ID NO: 919521 - DNA, 15 bp, Homo sapiens
aaactatgaataatt

SEQ ID NO: 919522 - DNA, 15 bp, Homo sapiens
aactatgaataattt

SEQ ID NO: 919523 - DNA, 15 bp, Homo sapiens
actatgaataatttt

SEQ ID NO: 919524 - DNA, 15 bp, Homo sapiens
ctatgaataattttt

SEQ ID NO: 919525 - DNA, 15 bp, Homo sapiens
tatgaataattttta

SEQ ID NO: 919526 - DNA, 15 bp, Homo sapiens
atgaataatttttat

SEQ ID NO: 919527 - DNA, 15 bp, Homo sapiens
tgaataatttttata

SEQ ID NO: 919528 - DNA, 15 bp, Homo sapiens
gaataatttttatat

SEQ ID NO: 919529 - DNA, 15 bp, Homo sapiens
aataatttttatatg

SEQ ID NO: 919530 - DNA, 15 bp, Homo sapiens
ataatttttatatgc

SEQ ID NO: 919531 - DNA, 15 bp, Homo sapiens
taatttttatatgca

SEQ ID NO: 919532 - DNA, 15 bp, Homo sapiens
aatttttatatgcag

SEQ ID NO: 919533 - DNA, 15 bp, Homo sapiens
atttttatatgcaga

SEQ ID NO: 919534 - DNA, 15 bp, Homo sapiens
tttttatatgcagat

SEQ ID NO: 919535 - DNA, 15 bp, Homo sapiens
ttttatatgcagatt

SEQ ID NO: 919536 - DNA, 15 bp, Homo sapiens
tttatatgcagattt

SEQ ID NO: 919537 - DNA, 15 bp, Homo sapiens
ttatatgcagatttt

SEQ ID NO: 919538 - DNA, 15 bp, Homo sapiens
tatatgcagatttta

SEQ ID NO: 919539 - DNA, 15 bp, Homo sapiens
atatgcagattttaa

SEQ ID NO: 919540 - DNA, 15 bp, Homo sapiens
tatgcagattttaaa

SEQ ID NO: 919541 - DNA, 15 bp, Homo sapiens
atgcagattttaaat

SEQ ID NO: 919542 - DNA, 15 bp, Homo sapiens
tgcagattttaaatg

SEQ ID NO: 919543 - DNA, 15 bp, Homo sapiens
gcagattttaaatgg

SEQ ID NO: 919544 - DNA, 15 bp, Homo sapiens
cagattttaaatgga

SEQ ID NO: 919545 - DNA, 15 bp, Homo sapiens
agattttaaatggaa

SEQ ID NO: 919546 - DNA, 15 bp, Homo sapiens
gattttaaatggaaa

SEQ ID NO: 919547 - DNA, 15 bp, Homo sapiens
attttaaatggaaaa

SEQ ID NO: 919548 - DNA, 15 bp, Homo sapiens
ttttaaatggaaaaa

SEQ ID NO: 919549 - DNA, 15 bp, Homo sapiens
tttaaatggaaaaaa

SEQ ID NO: 919550 - DNA, 15 bp, Homo sapiens
ttaaatggaaaaaat

SEQ ID NO: 919551 - DNA, 15 bp, Homo sapiens
taaatggaaaaaatt

SEQ ID NO: 919552 - DNA, 15 bp, Homo sapiens
aaatggaaaaaattt

SEQ ID NO: 919553 - DNA, 15 bp, Homo sapiens
aatggaaaaaatttt

SEQ ID NO: 919554 - DNA, 15 bp, Homo sapiens
atggaaaaaatttta

SEQ ID NO: 919555 - DNA, 15 bp, Homo sapiens
tggaaaaaattttaa

SEQ ID NO: 919556 - DNA, 15 bp, Homo sapiens
ggaaaaaattttaaa

SEQ ID NO: 919557 - DNA, 15 bp, Homo sapiens
gaaaaaattttaaat

SEQ ID NO: 919558 - DNA, 15 bp, Homo sapiens
aaaaaattttaaatt

SEQ ID NO: 919559 - DNA, 15 bp, Homo sapiens
aaaaattttaaatta

SEQ ID NO: 919560 - DNA, 15 bp, Homo sapiens
aaaattttaaattat

SEQ ID NO: 919561 - DNA, 15 bp, Homo sapiens
aaattttaaattatt

SEQ ID NO: 919562 - DNA, 15 bp, Homo sapiens
aattttaaattattt

SEQ ID NO: 919563 - DNA, 15 bp, Homo sapiens
attttaaattatttt

SEQ ID NO: 919564 - DNA, 15 bp, Homo sapiens
ttttaaattattttt

SEQ ID NO: 919565 - DNA, 15 bp, Homo sapiens
tttaaattatttttt

SEQ ID NO: 919566 - DNA, 15 bp, Homo sapiens
ttaaattatttttta

SEQ ID NO: 919567 - DNA, 15 bp, Homo sapiens
taaattattttttag

SEQ ID NO: 919568 - DNA, 15 bp, Homo sapiens
aaattattttttaga

SEQ ID NO: 919569 - DNA, 15 bp, Homo sapiens
aattattttttagag

SEQ ID NO: 919570 - DNA, 15 bp, Homo sapiens
attattttttagaga

SEQ ID NO: 919571 - DNA, 15 bp, Homo sapiens
ttattttttagagaa

SEQ ID NO: 919572 - DNA, 15 bp, Homo sapiens
tattttttagagaaa

SEQ ID NO: 919573 - DNA, 15 bp, Homo sapiens
attttttagagaaaa

SEQ ID NO: 919574 - DNA, 15 bp, Homo sapiens
ttttttagagaaaaa

SEQ ID NO: 919575 - DNA, 15 bp, Homo sapiens
tttttagagaaaaag

SEQ ID NO: 919576 - DNA, 15 bp, Homo sapiens
ttttagagaaaaagt

SEQ ID NO: 919577 - DNA, 15 bp, Homo sapiens
tttagagaaaaagtt

SEQ ID NO: 919578 - DNA, 15 bp, Homo sapiens
ttagagaaaaagtta

SEQ ID NO: 919579 - DNA, 15 bp, Homo sapiens
tagagaaaaagttat

SEQ ID NO: 919580 - DNA, 15 bp, Homo sapiens
agagaaaaagttata

SEQ ID NO: 919581 - DNA, 15 bp, Homo sapiens
gagaaaaagttatat

SEQ ID NO: 919582 - DNA, 15 bp, Homo sapiens
agaaaaagttatata

SEQ ID NO: 919583 - DNA, 15 bp, Homo sapiens
gaaaaagttatatac

SEQ ID NO: 919584 - DNA, 15 bp, Homo sapiens
aaaaagttatataca

SEQ ID NO: 919585 - DNA, 15 bp, Homo sapiens
aaaagttatatacag

SEQ ID NO: 919586 - DNA, 15 bp, Homo sapiens
aaagttatatacagg

SEQ ID NO: 919587 - DNA, 15 bp, Homo sapiens
aagttatatacagga

SEQ ID NO: 919588 - DNA, 15 bp, Homo sapiens
agttatatacaggaa

SEQ ID NO: 919589 - DNA, 15 bp, Homo sapiens
gttatatacaggaaa

SEQ ID NO: 919590 - DNA, 15 bp, Homo sapiens
ttatatacaggaaag

SEQ ID NO: 919591 - DNA, 15 bp, Homo sapiens
tatatacaggaaaga

SEQ ID NO: 919592 - DNA, 15 bp, Homo sapiens
atatacaggaaagat

SEQ ID NO: 919593 - DNA, 15 bp, Homo sapiens
tatacaggaaagata

SEQ ID NO: 919594 - DNA, 15 bp, Homo sapiens
atacaggaaagatat

SEQ ID NO: 919595 - DNA, 15 bp, Homo sapiens
tacaggaaagatatt

SEQ ID NO: 919596 - DNA, 15 bp, Homo sapiens
acaggaaagatattt

SEQ ID NO: 919597 - DNA, 15 bp, Homo sapiens
caggaaagatatttt

SEQ ID NO: 919598 - DNA, 15 bp, Homo sapiens
aggaaagatattttt

SEQ ID NO: 919599 - DNA, 15 bp, Homo sapiens
ggaaagatatttttg

SEQ ID NO: 919600 - DNA, 15 bp, Homo sapiens
gaaagatatttttgt

SEQ ID NO: 919601 - DNA, 15 bp, Homo sapiens
aaagatatttttgtc

SEQ ID NO: 919602 - DNA, 15 bp, Homo sapiens
aagatatttttgtcc

SEQ ID NO: 919603 - DNA, 15 bp, Homo sapiens
agatatttttgtcca

SEQ ID NO: 919604 - DNA, 15 bp, Homo sapiens
gatatttttgtccat

SEQ ID NO: 919605 - DNA, 15 bp, Homo sapiens
atatttttgtccatt

SEQ ID NO: 919606 - DNA, 15 bp, Homo sapiens
tatttttgtccatta

SEQ ID NO: 919607 - DNA, 15 bp, Homo sapiens
atttttgtccattaa

SEQ ID NO: 919608 - DNA, 15 bp, Homo sapiens
tttttgtccattaag

SEQ ID NO: 919609 - DNA, 15 bp, Homo sapiens
ttttgtccattaagc

SEQ ID NO: 919610 - DNA, 15 bp, Homo sapiens
tttgtccattaagct

SEQ ID NO: 919611 - DNA, 15 bp, Homo sapiens
ttgtccattaagctt

SEQ ID NO: 919612 - DNA, 15 bp, Homo sapiens
tgtccattaagcttc

SEQ ID NO: 919613 - DNA, 15 bp, Homo sapiens
gtccattaagcttct

SEQ ID NO: 919614 - DNA, 15 bp, Homo sapiens
tccattaagcttctg

SEQ ID NO: 919615 - DNA, 15 bp, Homo sapiens
ccattaagcttctgt

SEQ ID NO: 919616 - DNA, 15 bp, Homo sapiens
cattaagcttctgta

SEQ ID NO: 919617 - DNA, 15 bp, Homo sapiens
attaagcttctgtaa

SEQ ID NO: 919618 - DNA, 15 bp, Homo sapiens
ttaagcttctgtaac

SEQ ID NO: 919619 - DNA, 15 bp, Homo sapiens
taagcttctgtaaca

SEQ ID NO: 919620 - DNA, 15 bp, Homo sapiens
aagcttctgtaacaa

SEQ ID NO: 919621 - DNA, 15 bp, Homo sapiens
agcttctgtaacaaa

SEQ ID NO: 919622 - DNA, 15 bp, Homo sapiens
gcttctgtaacaaaa

SEQ ID NO: 919623 - DNA, 15 bp, Homo sapiens
cttctgtaacaaaat

SEQ ID NO: 919624 - DNA, 15 bp, Homo sapiens
ttctgtaacaaaatg

SEQ ID NO: 919625 - DNA, 15 bp, Homo sapiens
tctgtaacaaaatgc

SEQ ID NO: 919626 - DNA, 15 bp, Homo sapiens
ctgtaacaaaatgcc

SEQ ID NO: 919627 - DNA, 15 bp, Homo sapiens
tgtaacaaaatgcca

SEQ ID NO: 919628 - DNA, 15 bp, Homo sapiens
gtaacaaaatgccat

SEQ ID NO: 919629 - DNA, 15 bp, Homo sapiens
taacaaaatgccata

SEQ ID NO: 919630 - DNA, 15 bp, Homo sapiens
aacaaaatgccatag

SEQ ID NO: 919631 - DNA, 15 bp, Homo sapiens
acaaaatgccataga

SEQ ID NO: 919632 - DNA, 15 bp, Homo sapiens
caaaatgccatagaa

SEQ ID NO: 919633 - DNA, 15 bp, Homo sapiens
aaaatgccatagaat

SEQ ID NO: 919634 - DNA, 15 bp, Homo sapiens
aaatgccatagaatg

SEQ ID NO: 919635 - DNA, 15 bp, Homo sapiens
aatgccatagaatga

SEQ ID NO: 919636 - DNA, 15 bp, Homo sapiens
atgccatagaatgag

SEQ ID NO: 919637 - DNA, 15 bp, Homo sapiens
tgccatagaatgaga

SEQ ID NO: 919638 - DNA, 15 bp, Homo sapiens
gccatagaatgagag

SEQ ID NO: 919639 - DNA, 15 bp, Homo sapiens
ccatagaatgagagg

SEQ ID NO: 919640 - DNA, 15 bp, Homo sapiens
catagaatgagaggg

SEQ ID NO: 919641 - DNA, 15 bp, Homo sapiens
atagaatgagaggga

SEQ ID NO: 919642 - DNA, 15 bp, Homo sapiens
tagaatgagagggat

SEQ ID NO: 919643 - DNA, 15 bp, Homo sapiens
agaatgagagggata

SEQ ID NO: 919644 - DNA, 15 bp, Homo sapiens
gaatgagagggatat

SEQ ID NO: 919645 - DNA, 15 bp, Homo sapiens
aatgagagggatata

SEQ ID NO: 919646 - DNA, 15 bp, Homo sapiens
atgagagggatatac

SEQ ID NO: 919647 - DNA, 15 bp, Homo sapiens
tgagagggatataca

SEQ ID NO: 919648 - DNA, 15 bp, Homo sapiens
gagagggatatacac

SEQ ID NO: 919649 - DNA, 15 bp, Homo sapiens
agagggatatacaca

SEQ ID NO: 919650 - DNA, 15 bp, Homo sapiens
gagggatatacacag

SEQ ID NO: 919651 - DNA, 15 bp, Homo sapiens
agggatatacacagc

SEQ ID NO: 919652 - DNA, 15 bp, Homo sapiens
gggatatacacagca

SEQ ID NO: 919653 - DNA, 15 bp, Homo sapiens
ggatatacacagcaa

SEQ ID NO: 919654 - DNA, 15 bp, Homo sapiens
gatatacacagcaaa

SEQ ID NO: 919655 - DNA, 15 bp, Homo sapiens
atatacacagcaaaa

SEQ ID NO: 919656 - DNA, 15 bp, Homo sapiens
tatacacagcaaaaa

SEQ ID NO: 919657 - DNA, 15 bp, Homo sapiens
atacacagcaaaaat

SEQ ID NO: 919658 - DNA, 15 bp, Homo sapiens
tacacagcaaaaatt

SEQ ID NO: 919659 - DNA, 15 bp, Homo sapiens
acacagcaaaaattt

SEQ ID NO: 919660 - DNA, 15 bp, Homo sapiens
cacagcaaaaattta

SEQ ID NO: 919661 - DNA, 15 bp, Homo sapiens
acagcaaaaatttat

SEQ ID NO: 919662 - DNA, 15 bp, Homo sapiens
cagcaaaaatttatc

SEQ ID NO: 919663 - DNA, 15 bp, Homo sapiens
agcaaaaatttatct

SEQ ID NO: 919664 - DNA, 15 bp, Homo sapiens
gcaaaaatttatcta

SEQ ID NO: 919665 - DNA, 15 bp, Homo sapiens
caaaaatttatctat

SEQ ID NO: 919666 - DNA, 15 bp, Homo sapiens
aaaaatttatctatt

SEQ ID NO: 919667 - DNA, 15 bp, Homo sapiens
aaaatttatctatta

SEQ ID NO: 919668 - DNA, 15 bp, Homo sapiens
aaatttatctattac

SEQ ID NO: 919669 - DNA, 15 bp, Homo sapiens
aatttatctattaca

SEQ ID NO: 919670 - DNA, 15 bp, Homo sapiens
atttatctattacaa

SEQ ID NO: 919671 - DNA, 15 bp, Homo sapiens
tttatctattacaat

SEQ ID NO: 919672 - DNA, 15 bp, Homo sapiens
ttatctattacaatt

SEQ ID NO: 919673 - DNA, 15 bp, Homo sapiens
tatctattacaattc

SEQ ID NO: 919674 - DNA, 15 bp, Homo sapiens
atctattacaattct

SEQ ID NO: 919675 - DNA, 15 bp, Homo sapiens
tctattacaattctt

SEQ ID NO: 919676 - DNA, 15 bp, Homo sapiens
ctattacaattcttg

SEQ ID NO: 919677 - DNA, 15 bp, Homo sapiens
tattacaattcttga

SEQ ID NO: 919678 - DNA, 15 bp, Homo sapiens
attacaattcttgag

SEQ ID NO: 919679 - DNA, 15 bp, Homo sapiens
ttacaattcttgagg

SEQ ID NO: 919680 - DNA, 15 bp, Homo sapiens
tacaattcttgaggc

SEQ ID NO: 919681 - DNA, 15 bp, Homo sapiens
acaattcttgaggct

SEQ ID NO: 919682 - DNA, 15 bp, Homo sapiens
caattcttgaggctg

SEQ ID NO: 919683 - DNA, 15 bp, Homo sapiens
aattcttgaggctga

SEQ ID NO: 919684 - DNA, 15 bp, Homo sapiens
attcttgaggctgag

SEQ ID NO: 919685 - DNA, 15 bp, Homo sapiens
ttcttgaggctgaga

SEQ ID NO: 919686 - DNA, 15 bp, Homo sapiens
tcttgaggctgagaa

SEQ ID NO: 919687 - DNA, 15 bp, Homo sapiens
cttgaggctgagaag

SEQ ID NO: 919688 - DNA, 15 bp, Homo sapiens
ttgaggctgagaagt

SEQ ID NO: 919689 - DNA, 15 bp, Homo sapiens
tgaggctgagaagtc

SEQ ID NO: 919690 - DNA, 15 bp, Homo sapiens
gaggctgagaagtcc

SEQ ID NO: 919691 - DNA, 15 bp, Homo sapiens
aggctgagaagtcca

SEQ ID NO: 919692 - DNA, 15 bp, Homo sapiens
ggctgagaagtccaa

SEQ ID NO: 919693 - DNA, 15 bp, Homo sapiens
gctgagaagtccaag

SEQ ID NO: 919694 - DNA, 15 bp, Homo sapiens
ctgagaagtccaaga

SEQ ID NO: 919695 - DNA, 15 bp, Homo sapiens
tgagaagtccaagac

SEQ ID NO: 919696 - DNA, 15 bp, Homo sapiens
gagaagtccaagacc

SEQ ID NO: 919697 - DNA, 15 bp, Homo sapiens
agaagtccaagacca

SEQ ID NO: 919698 - DNA, 15 bp, Homo sapiens
gaagtccaagaccaa

SEQ ID NO: 919699 - DNA, 15 bp, Homo sapiens
aagtccaagaccaag

SEQ ID NO: 919700 - DNA, 15 bp, Homo sapiens
agtccaagaccaagg

SEQ ID NO: 919701 - DNA, 15 bp, Homo sapiens
gtccaagaccaaggt

SEQ ID NO: 919702 - DNA, 15 bp, Homo sapiens
tccaagaccaaggtg

SEQ ID NO: 919703 - DNA, 15 bp, Homo sapiens
ccaagaccaaggtgc

SEQ ID NO: 919704 - DNA, 15 bp, Homo sapiens
caagaccaaggtgct

SEQ ID NO: 919705 - DNA, 15 bp, Homo sapiens
aagaccaaggtgcta

SEQ ID NO: 919706 - DNA, 15 bp, Homo sapiens
agaccaaggtgctag

SEQ ID NO: 919707 - DNA, 15 bp, Homo sapiens
gaccaaggtgctagc

SEQ ID NO: 919708 - DNA, 15 bp, Homo sapiens
accaaggtgctagca

SEQ ID NO: 919709 - DNA, 15 bp, Homo sapiens
ccaaggtgctagcag

SEQ ID NO: 919710 - DNA, 15 bp, Homo sapiens
caaggtgctagcaga

SEQ ID NO: 919711 - DNA, 15 bp, Homo sapiens
aaggtgctagcagat

SEQ ID NO: 919712 - DNA, 15 bp, Homo sapiens
aggtgctagcagatt

SEQ ID NO: 919713 - DNA, 15 bp, Homo sapiens
ggtgctagcagattc

SEQ ID NO: 919714 - DNA, 15 bp, Homo sapiens
gtgctagcagattca

SEQ ID NO: 919715 - DNA, 15 bp, Homo sapiens
tgctagcagattcag

SEQ ID NO: 919716 - DNA, 15 bp, Homo sapiens
gctagcagattcagt

SEQ ID NO: 919717 - DNA, 15 bp, Homo sapiens
ctagcagattcagtg

SEQ ID NO: 919718 - DNA, 15 bp, Homo sapiens
tagcagattcagtgt

SEQ ID NO: 919719 - DNA, 15 bp, Homo sapiens
agcagattcagtgtc

SEQ ID NO: 919720 - DNA, 15 bp, Homo sapiens
gcagattcagtgtct

SEQ ID NO: 919721 - DNA, 15 bp, Homo sapiens
cagattcagtgtctg

SEQ ID NO: 919722 - DNA, 15 bp, Homo sapiens
agattcagtgtctgg

SEQ ID NO: 919723 - DNA, 15 bp, Homo sapiens
gattcagtgtctggt

SEQ ID NO: 919724 - DNA, 15 bp, Homo sapiens
attcagtgtctggtg

SEQ ID NO: 919725 - DNA, 15 bp, Homo sapiens
ttcagtgtctggtga

SEQ ID NO: 919726 - DNA, 15 bp, Homo sapiens
tcagtgtctggtgag

SEQ ID NO: 919727 - DNA, 15 bp, Homo sapiens
cagtgtctggtgagg

SEQ ID NO: 919728 - DNA, 15 bp, Homo sapiens
agtgtctggtgagga

SEQ ID NO: 919729 - DNA, 15 bp, Homo sapiens
gtgtctggtgaggac

SEQ ID NO: 919730 - DNA, 15 bp, Homo sapiens
tgtctggtgaggact

SEQ ID NO: 919731 - DNA, 15 bp, Homo sapiens
gtctggtgaggactt

SEQ ID NO: 919732 - DNA, 15 bp, Homo sapiens
tctggtgaggacttg

SEQ ID NO: 919733 - DNA, 15 bp, Homo sapiens
ctggtgaggacttgc

SEQ ID NO: 919734 - DNA, 15 bp, Homo sapiens
tggtgaggacttgct

SEQ ID NO: 919735 - DNA, 15 bp, Homo sapiens
ggtgaggacttgctc

SEQ ID NO: 919736 - DNA, 15 bp, Homo sapiens
gtgaggacttgctcc

SEQ ID NO: 919737 - DNA, 15 bp, Homo sapiens
tgaggacttgctccc

SEQ ID NO: 919738 - DNA, 15 bp, Homo sapiens
gaggacttgctccct

SEQ ID NO: 919739 - DNA, 15 bp, Homo sapiens
aggacttgctccctg

SEQ ID NO: 919740 - DNA, 15 bp, Homo sapiens
ggacttgctccctgg

SEQ ID NO: 919741 - DNA, 15 bp, Homo sapiens
gacttgctccctggt

SEQ ID NO: 919742 - DNA, 15 bp, Homo sapiens
acttgctccctggtt

SEQ ID NO: 919743 - DNA, 15 bp, Homo sapiens
cttgctccctggttc

SEQ ID NO: 919744 - DNA, 15 bp, Homo sapiens
ttgctccctggttca

SEQ ID NO: 919745 - DNA, 15 bp, Homo sapiens
tgctccctggttcat

SEQ ID NO: 919746 - DNA, 15 bp, Homo sapiens
gctccctggttcata

SEQ ID NO: 919747 - DNA, 15 bp, Homo sapiens
ctccctggttcatag

SEQ ID NO: 919748 - DNA, 15 bp, Homo sapiens
tccctggttcataga

SEQ ID NO: 919749 - DNA, 15 bp, Homo sapiens
ccctggttcatagac

SEQ ID NO: 919750 - DNA, 15 bp, Homo sapiens
cctggttcatagacg

SEQ ID NO: 919751 - DNA, 15 bp, Homo sapiens
ctggttcatagacgg

SEQ ID NO: 919752 - DNA, 15 bp, Homo sapiens
tggttcatagacggt

SEQ ID NO: 919753 - DNA, 15 bp, Homo sapiens
ggttcatagacggta

SEQ ID NO: 919754 - DNA, 15 bp, Homo sapiens
gttcatagacggtac

SEQ ID NO: 919755 - DNA, 15 bp, Homo sapiens
ttcatagacggtacc

SEQ ID NO: 919756 - DNA, 15 bp, Homo sapiens
tcatagacggtacct

SEQ ID NO: 919757 - DNA, 15 bp, Homo sapiens
catagacggtacctt

SEQ ID NO: 919758 - DNA, 15 bp, Homo sapiens
atagacggtaccttc

SEQ ID NO: 919759 - DNA, 15 bp, Homo sapiens
tagacggtaccttct

SEQ ID NO: 919760 - DNA, 15 bp, Homo sapiens
agacggtaccttctc

SEQ ID NO: 919761 - DNA, 15 bp, Homo sapiens
gacggtaccttctca

SEQ ID NO: 919762 - DNA, 15 bp, Homo sapiens
acggtaccttctcac

SEQ ID NO: 919763 - DNA, 15 bp, Homo sapiens
cggtaccttctcact

SEQ ID NO: 919764 - DNA, 15 bp, Homo sapiens
ggtaccttctcactg

SEQ ID NO: 919765 - DNA, 15 bp, Homo sapiens
gtaccttctcactgt

SEQ ID NO: 919766 - DNA, 15 bp, Homo sapiens
taccttctcactgtg

SEQ ID NO: 919767 - DNA, 15 bp, Homo sapiens
accttctcactgtgc

SEQ ID NO: 919768 - DNA, 15 bp, Homo sapiens
ccttctcactgtgct

SEQ ID NO: 919769 - DNA, 15 bp, Homo sapiens
cttctcactgtgctc

SEQ ID NO: 919770 - DNA, 15 bp, Homo sapiens
ttctcactgtgctct

SEQ ID NO: 919771 - DNA, 15 bp, Homo sapiens
tctcactgtgctctt

SEQ ID NO: 919772 - DNA, 15 bp, Homo sapiens
ctcactgtgctcttg

SEQ ID NO: 919773 - DNA, 15 bp, Homo sapiens
tcactgtgctcttgc

SEQ ID NO: 919774 - DNA, 15 bp, Homo sapiens
cactgtgctcttgca

SEQ ID NO: 919775 - DNA, 15 bp, Homo sapiens
actgtgctcttgcat

SEQ ID NO: 919776 - DNA, 15 bp, Homo sapiens
ctgtgctcttgcatg

SEQ ID NO: 919777 - DNA, 15 bp, Homo sapiens
tgtgctcttgcatga

SEQ ID NO: 919778 - DNA, 15 bp, Homo sapiens
gtgctcttgcatgat

SEQ ID NO: 919779 - DNA, 15 bp, Homo sapiens
tgctcttgcatgatg

SEQ ID NO: 919780 - DNA, 15 bp, Homo sapiens
gctcttgcatgatga

SEQ ID NO: 919781 - DNA, 15 bp, Homo sapiens
ctcttgcatgatgaa

SEQ ID NO: 919782 - DNA, 15 bp, Homo sapiens
tcttgcatgatgaaa

SEQ ID NO: 919783 - DNA, 15 bp, Homo sapiens
cttgcatgatgaaaa

SEQ ID NO: 919784 - DNA, 15 bp, Homo sapiens
ttgcatgatgaaaag

SEQ ID NO: 919785 - DNA, 15 bp, Homo sapiens
tgcatgatgaaaaga

SEQ ID NO: 919786 - DNA, 15 bp, Homo sapiens
gcatgatgaaaagaa

SEQ ID NO: 919787 - DNA, 15 bp, Homo sapiens
catgatgaaaagaat

SEQ ID NO: 919788 - DNA, 15 bp, Homo sapiens
atgatgaaaagaatg

SEQ ID NO: 919789 - DNA, 15 bp, Homo sapiens
tgatgaaaagaatga

SEQ ID NO: 919790 - DNA, 15 bp, Homo sapiens
gatgaaaagaatgag

SEQ ID NO: 919791 - DNA, 15 bp, Homo sapiens
atgaaaagaatgagc

SEQ ID NO: 919792 - DNA, 15 bp, Homo sapiens
tgaaaagaatgagct

SEQ ID NO: 919793 - DNA, 15 bp, Homo sapiens
gaaaagaatgagcta

SEQ ID NO: 919794 - DNA, 15 bp, Homo sapiens
aaaagaatgagctaa

SEQ ID NO: 919795 - DNA, 15 bp, Homo sapiens
aaagaatgagctaat

SEQ ID NO: 919796 - DNA, 15 bp, Homo sapiens
aagaatgagctaatt

SEQ ID NO: 919797 - DNA, 15 bp, Homo sapiens
agaatgagctaattc

SEQ ID NO: 919798 - DNA, 15 bp, Homo sapiens
gaatgagctaattct

SEQ ID NO: 919799 - DNA, 15 bp, Homo sapiens
aatgagctaattcta

SEQ ID NO: 919800 - DNA, 15 bp, Homo sapiens
atgagctaattctat

SEQ ID NO: 919801 - DNA, 15 bp, Homo sapiens
tgagctaattctatg

SEQ ID NO: 919802 - DNA, 15 bp, Homo sapiens
gagctaattctatga

SEQ ID NO: 919803 - DNA, 15 bp, Homo sapiens
agctaattctatgag

SEQ ID NO: 919804 - DNA, 15 bp, Homo sapiens
gctaattctatgagg

SEQ ID NO: 919805 - DNA, 15 bp, Homo sapiens
ctaattctatgaggt

SEQ ID NO: 919806 - DNA, 15 bp, Homo sapiens
taattctatgaggtc

SEQ ID NO: 919807 - DNA, 15 bp, Homo sapiens
aattctatgaggtct

SEQ ID NO: 919808 - DNA, 15 bp, Homo sapiens
attctatgaggtctc

SEQ ID NO: 919809 - DNA, 15 bp, Homo sapiens
ttctatgaggtctcc

SEQ ID NO: 919810 - DNA, 15 bp, Homo sapiens
tctatgaggtctcct

SEQ ID NO: 919811 - DNA, 15 bp, Homo sapiens
ctatgaggtctcctt

SEQ ID NO: 919812 - DNA, 15 bp, Homo sapiens
tatgaggtctcctta

SEQ ID NO: 919813 - DNA, 15 bp, Homo sapiens
atgaggtctccttaa

SEQ ID NO: 919814 - DNA, 15 bp, Homo sapiens
tgaggtctccttaat

SEQ ID NO: 919815 - DNA, 15 bp, Homo sapiens
gaggtctccttaata

SEQ ID NO: 919816 - DNA, 15 bp, Homo sapiens
aggtctccttaataa

SEQ ID NO: 919817 - DNA, 15 bp, Homo sapiens
ggtctccttaataag

SEQ ID NO: 919818 - DNA, 15 bp, Homo sapiens
gtctccttaataaga

SEQ ID NO: 919819 - DNA, 15 bp, Homo sapiens
tctccttaataagaa

SEQ ID NO: 919820 - DNA, 15 bp, Homo sapiens
ctccttaataagaac

SEQ ID NO: 919821 - DNA, 15 bp, Homo sapiens
tccttaataagaaca

SEQ ID NO: 919822 - DNA, 15 bp, Homo sapiens
ccttaataagaacac

SEQ ID NO: 919823 - DNA, 15 bp, Homo sapiens
cttaataagaacact

SEQ ID NO: 919824 - DNA, 15 bp, Homo sapiens
ttaataagaacacta

SEQ ID NO: 919825 - DNA, 15 bp, Homo sapiens
taataagaacactaa

SEQ ID NO: 919826 - DNA, 15 bp, Homo sapiens
aataagaacactaag

SEQ ID NO: 919827 - DNA, 15 bp, Homo sapiens
ataagaacactaagc

SEQ ID NO: 919828 - DNA, 15 bp, Homo sapiens
taagaacactaagca

SEQ ID NO: 919829 - DNA, 15 bp, Homo sapiens
aagaacactaagcac

SEQ ID NO: 919830 - DNA, 15 bp, Homo sapiens
agaacactaagcact

SEQ ID NO: 919831 - DNA, 15 bp, Homo sapiens
gaacactaagcactc

SEQ ID NO: 919832 - DNA, 15 bp, Homo sapiens
aacactaagcactca

SEQ ID NO: 919833 - DNA, 15 bp, Homo sapiens
acactaagcactcat

SEQ ID NO: 919834 - DNA, 15 bp, Homo sapiens
cactaagcactcatg

SEQ ID NO: 919835 - DNA, 15 bp, Homo sapiens
actaagcactcatga

SEQ ID NO: 919836 - DNA, 15 bp, Homo sapiens
ctaagcactcatgac

SEQ ID NO: 919837 - DNA, 15 bp, Homo sapiens
taagcactcatgacc

SEQ ID NO: 919838 - DNA, 15 bp, Homo sapiens
aagcactcatgacct

SEQ ID NO: 919839 - DNA, 15 bp, Homo sapiens
agcactcatgaccta

SEQ ID NO: 919840 - DNA, 15 bp, Homo sapiens
gcactcatgacctaa

SEQ ID NO: 919841 - DNA, 15 bp, Homo sapiens
cactcatgacctaac

SEQ ID NO: 919842 - DNA, 15 bp, Homo sapiens
actcatgacctaacc

SEQ ID NO: 919843 - DNA, 15 bp, Homo sapiens
ctcatgacctaacca

SEQ ID NO: 919844 - DNA, 15 bp, Homo sapiens
tcatgacctaaccac

SEQ ID NO: 919845 - DNA, 15 bp, Homo sapiens
catgacctaaccact

SEQ ID NO: 919846 - DNA, 15 bp, Homo sapiens
atgacctaaccactt

SEQ ID NO: 919847 - DNA, 15 bp, Homo sapiens
tgacctaaccactta

SEQ ID NO: 919848 - DNA, 15 bp, Homo sapiens
gacctaaccacttac

SEQ ID NO: 919849 - DNA, 15 bp, Homo sapiens
acctaaccacttacc

SEQ ID NO: 919850 - DNA, 15 bp, Homo sapiens
cctaaccacttacca

SEQ ID NO: 919851 - DNA, 15 bp, Homo sapiens
ctaaccacttaccag

SEQ ID NO: 919852 - DNA, 15 bp, Homo sapiens
taaccacttaccagg

SEQ ID NO: 919853 - DNA, 15 bp, Homo sapiens
aaccacttaccaggt

SEQ ID NO: 919854 - DNA, 15 bp, Homo sapiens
accacttaccaggtt

SEQ ID NO: 919855 - DNA, 15 bp, Homo sapiens
ccacttaccaggttc

SEQ ID NO: 919856 - DNA, 15 bp, Homo sapiens
cacttaccaggttcc

SEQ ID NO: 919857 - DNA, 15 bp, Homo sapiens
acttaccaggttccc

SEQ ID NO: 919858 - DNA, 15 bp, Homo sapiens
cttaccaggttccca

SEQ ID NO: 919859 - DNA, 15 bp, Homo sapiens
ttaccaggttcccac

SEQ ID NO: 919860 - DNA, 15 bp, Homo sapiens
taccaggttcccacc

SEQ ID NO: 919861 - DNA, 15 bp, Homo sapiens
accaggttcccacct

SEQ ID NO: 919862 - DNA, 15 bp, Homo sapiens
ccaggttcccacctc

SEQ ID NO: 919863 - DNA, 15 bp, Homo sapiens
caggttcccacctct

SEQ ID NO: 919864 - DNA, 15 bp, Homo sapiens
aggttcccacctctt

SEQ ID NO: 919865 - DNA, 15 bp, Homo sapiens
ggttcccacctcttc

SEQ ID NO: 919866 - DNA, 15 bp, Homo sapiens
gttcccacctcttca

SEQ ID NO: 919867 - DNA, 15 bp, Homo sapiens
ttcccacctcttcat

SEQ ID NO: 919868 - DNA, 15 bp, Homo sapiens
tcccacctcttcata

SEQ ID NO: 919869 - DNA, 15 bp, Homo sapiens
cccacctcttcatac

SEQ ID NO: 919870 - DNA, 15 bp, Homo sapiens
ccacctcttcatacc

SEQ ID NO: 919871 - DNA, 15 bp, Homo sapiens
cacctcttcatacca

SEQ ID NO: 919872 - DNA, 15 bp, Homo sapiens
acctcttcataccat

SEQ ID NO: 919873 - DNA, 15 bp, Homo sapiens
cctcttcataccatc

SEQ ID NO: 919874 - DNA, 15 bp, Homo sapiens
ctcttcataccatca

SEQ ID NO: 919875 - DNA, 15 bp, Homo sapiens
tcttcataccatcat

SEQ ID NO: 919876 - DNA, 15 bp, Homo sapiens
cttcataccatcatt

SEQ ID NO: 919877 - DNA, 15 bp, Homo sapiens
ttcataccatcattt

SEQ ID NO: 919878 - DNA, 15 bp, Homo sapiens
tcataccatcatttt

SEQ ID NO: 919879 - DNA, 15 bp, Homo sapiens
cataccatcatttta

SEQ ID NO: 919880 - DNA, 15 bp, Homo sapiens
ataccatcattttac

SEQ ID NO: 919881 - DNA, 15 bp, Homo sapiens
taccatcattttaca

SEQ ID NO: 919882 - DNA, 15 bp, Homo sapiens
accatcattttacac

SEQ ID NO: 919883 - DNA, 15 bp, Homo sapiens
ccatcattttacacg

SEQ ID NO: 919884 - DNA, 15 bp, Homo sapiens
catcattttacacgt

SEQ ID NO: 919885 - DNA, 15 bp, Homo sapiens
atcattttacacgtt

SEQ ID NO: 919886 - DNA, 15 bp, Homo sapiens
tcattttacacgtta

SEQ ID NO: 919887 - DNA, 15 bp, Homo sapiens
cattttacacgttag

SEQ ID NO: 919888 - DNA, 15 bp, Homo sapiens
attttacacgttagg

SEQ ID NO: 919889 - DNA, 15 bp, Homo sapiens
ttttacacgttagga

SEQ ID NO: 919890 - DNA, 15 bp, Homo sapiens
tttacacgttaggat

SEQ ID NO: 919891 - DNA, 15 bp, Homo sapiens
ttacacgttaggatt

SEQ ID NO: 919892 - DNA, 15 bp, Homo sapiens
tacacgttaggattt

SEQ ID NO: 919893 - DNA, 15 bp, Homo sapiens
acacgttaggatttc

SEQ ID NO: 919894 - DNA, 15 bp, Homo sapiens
cacgttaggatttca

SEQ ID NO: 919895 - DNA, 15 bp, Homo sapiens
acgttaggatttcaa

SEQ ID NO: 919896 - DNA, 15 bp, Homo sapiens
cgttaggatttcaac

SEQ ID NO: 919897 - DNA, 15 bp, Homo sapiens
gttaggatttcaaca

SEQ ID NO: 919898 - DNA, 15 bp, Homo sapiens
ttaggatttcaacat

SEQ ID NO: 919899 - DNA, 15 bp, Homo sapiens
taggatttcaacata

SEQ ID NO: 919900 - DNA, 15 bp, Homo sapiens
aggatttcaacataa

SEQ ID NO: 919901 - DNA, 15 bp, Homo sapiens
ggatttcaacataat

SEQ ID NO: 919902 - DNA, 15 bp, Homo sapiens
gatttcaacataatg

SEQ ID NO: 919903 - DNA, 15 bp, Homo sapiens
atttcaacataatgt

SEQ ID NO: 919904 - DNA, 15 bp, Homo sapiens
tttcaacataatgta

SEQ ID NO: 919905 - DNA, 15 bp, Homo sapiens
ttcaacataatgtat

SEQ ID NO: 919906 - DNA, 15 bp, Homo sapiens
tcaacataatgtatt

SEQ ID NO: 919907 - DNA, 15 bp, Homo sapiens
caacataatgtattt

SEQ ID NO: 919908 - DNA, 15 bp, Homo sapiens
aacataatgtatttt

SEQ ID NO: 919909 - DNA, 15 bp, Homo sapiens
acataatgtattttg

SEQ ID NO: 919910 - DNA, 15 bp, Homo sapiens
cataatgtattttgg

SEQ ID NO: 919911 - DNA, 15 bp, Homo sapiens
ataatgtattttggg

SEQ ID NO: 919912 - DNA, 15 bp, Homo sapiens
taatgtattttgggg

SEQ ID NO: 919913 - DNA, 15 bp, Homo sapiens
aatgtattttgggga

SEQ ID NO: 919914 - DNA, 15 bp, Homo sapiens
atgtattttggggaa

SEQ ID NO: 919915 - DNA, 15 bp, Homo sapiens
tgtattttggggaaa

SEQ ID NO: 919916 - DNA, 15 bp, Homo sapiens
gtattttggggaaac

SEQ ID NO: 919917 - DNA, 15 bp, Homo sapiens
tattttggggaaaca

SEQ ID NO: 919918 - DNA, 15 bp, Homo sapiens
attttggggaaacac

SEQ ID NO: 919919 - DNA, 15 bp, Homo sapiens
ttttggggaaacact

SEQ ID NO: 919920 - DNA, 15 bp, Homo sapiens
tttggggaaacacta

SEQ ID NO: 919921 - DNA, 15 bp, Homo sapiens
ttggggaaacactaa

SEQ ID NO: 919922 - DNA, 15 bp, Homo sapiens
tggggaaacactaac

SEQ ID NO: 919923 - DNA, 15 bp, Homo sapiens
ggggaaacactaaca

SEQ ID NO: 919924 - DNA, 15 bp, Homo sapiens
gggaaacactaacat

SEQ ID NO: 919925 - DNA, 15 bp, Homo sapiens
ggaaacactaacatt

SEQ ID NO: 919926 - DNA, 15 bp, Homo sapiens
gaaacactaacattc

SEQ ID NO: 919927 - DNA, 15 bp, Homo sapiens
aaacactaacattca

SEQ ID NO: 919928 - DNA, 15 bp, Homo sapiens
aacactaacattcag

SEQ ID NO: 919929 - DNA, 15 bp, Homo sapiens
acactaacattcaga

SEQ ID NO: 919930 - DNA, 15 bp, Homo sapiens
cactaacattcagac

SEQ ID NO: 919931 - DNA, 15 bp, Homo sapiens
actaacattcagacc

SEQ ID NO: 919932 - DNA, 15 bp, Homo sapiens
ctaacattcagacca

SEQ ID NO: 919933 - DNA, 15 bp, Homo sapiens
taacattcagaccat

SEQ ID NO: 919934 - DNA, 15 bp, Homo sapiens
aacattcagaccata

SEQ ID NO: 919935 - DNA, 15 bp, Homo sapiens
acattcagaccatag

SEQ ID NO: 919936 - DNA, 15 bp, Homo sapiens
cattcagaccatagc

SEQ ID NO: 919937 - DNA, 15 bp, Homo sapiens
attcagaccatagca

SEQ ID NO: 919938 - DNA, 15 bp, Homo sapiens
ttcagaccatagcaa

SEQ ID NO: 919939 - DNA, 15 bp, Homo sapiens
tcagaccatagcaaa

SEQ ID NO: 919940 - DNA, 15 bp, Homo sapiens
cagaccatagcaaat

SEQ ID NO: 919941 - DNA, 15 bp, Homo sapiens
agaccatagcaaatg

SEQ ID NO: 919942 - DNA, 15 bp, Homo sapiens
gaccatagcaaatga

SEQ ID NO: 919943 - DNA, 15 bp, Homo sapiens
accatagcaaatgac

SEQ ID NO: 919944 - DNA, 15 bp, Homo sapiens
ccatagcaaatgaca

SEQ ID NO: 919945 - DNA, 15 bp, Homo sapiens
catagcaaatgacaa

SEQ ID NO: 919946 - DNA, 15 bp, Homo sapiens
atagcaaatgacaac

SEQ ID NO: 919947 - DNA, 15 bp, Homo sapiens
tagcaaatgacaacc

SEQ ID NO: 919948 - DNA, 15 bp, Homo sapiens
agcaaatgacaacca

SEQ ID NO: 919949 - DNA, 15 bp, Homo sapiens
gcaaatgacaaccaa

SEQ ID NO: 919950 - DNA, 15 bp, Homo sapiens
caaatgacaaccaaa

SEQ ID NO: 919951 - DNA, 15 bp, Homo sapiens
aaatgacaaccaaaa

SEQ ID NO: 919952 - DNA, 15 bp, Homo sapiens
aatgacaaccaaaaa

SEQ ID NO: 919953 - DNA, 15 bp, Homo sapiens
atgacaaccaaaaag

SEQ ID NO: 919954 - DNA, 15 bp, Homo sapiens
tgacaaccaaaaagg

SEQ ID NO: 919955 - DNA, 15 bp, Homo sapiens
gacaaccaaaaaggt

SEQ ID NO: 919956 - DNA, 15 bp, Homo sapiens
acaaccaaaaaggtg

SEQ ID NO: 919957 - DNA, 15 bp, Homo sapiens
caaccaaaaaggtgt

SEQ ID NO: 919958 - DNA, 15 bp, Homo sapiens
aaccaaaaaggtgta

SEQ ID NO: 919959 - DNA, 15 bp, Homo sapiens
accaaaaaggtgtaa

SEQ ID NO: 919960 - DNA, 15 bp, Homo sapiens
ccaaaaaggtgtaag

SEQ ID NO: 919961 - DNA, 15 bp, Homo sapiens
caaaaaggtgtaaga

SEQ ID NO: 919962 - DNA, 15 bp, Homo sapiens
aaaaaggtgtaagat

SEQ ID NO: 919963 - DNA, 15 bp, Homo sapiens
aaaaggtgtaagatt

SEQ ID NO: 919964 - DNA, 15 bp, Homo sapiens
aaaggtgtaagattt

SEQ ID NO: 919965 - DNA, 15 bp, Homo sapiens
aaggtgtaagatttt

SEQ ID NO: 919966 - DNA, 15 bp, Homo sapiens
aggtgtaagatttta

SEQ ID NO: 919967 - DNA, 15 bp, Homo sapiens
ggtgtaagattttaa

SEQ ID NO: 919968 - DNA, 15 bp, Homo sapiens
gtgtaagattttaag

SEQ ID NO: 919969 - DNA, 15 bp, Homo sapiens
tgtaagattttaagg

SEQ ID NO: 919970 - DNA, 15 bp, Homo sapiens
gtaagattttaagga

SEQ ID NO: 919971 - DNA, 15 bp, Homo sapiens
taagattttaaggat

SEQ ID NO: 919972 - DNA, 15 bp, Homo sapiens
aagattttaaggatg

SEQ ID NO: 919973 - DNA, 15 bp, Homo sapiens
agattttaaggatgc

SEQ ID NO: 919974 - DNA, 15 bp, Homo sapiens
gattttaaggatgca

SEQ ID NO: 919975 - DNA, 15 bp, Homo sapiens
attttaaggatgcag

SEQ ID NO: 919976 - DNA, 15 bp, Homo sapiens
ttttaaggatgcaga

SEQ ID NO: 919977 - DNA, 15 bp, Homo sapiens
tttaaggatgcagat

SEQ ID NO: 919978 - DNA, 15 bp, Homo sapiens
ttaaggatgcagatc

SEQ ID NO: 919979 - DNA, 15 bp, Homo sapiens
taaggatgcagatct

SEQ ID NO: 919980 - DNA, 15 bp, Homo sapiens
aaggatgcagatcta

SEQ ID NO: 919981 - DNA, 15 bp, Homo sapiens
aggatgcagatctaa

SEQ ID NO: 919982 - DNA, 15 bp, Homo sapiens
ggatgcagatctaac

SEQ ID NO: 919983 - DNA, 15 bp, Homo sapiens
gatgcagatctaact

SEQ ID NO: 919984 - DNA, 15 bp, Homo sapiens
atgcagatctaactc

SEQ ID NO: 919985 - DNA, 15 bp, Homo sapiens
tgcagatctaactcc

SEQ ID NO: 919986 - DNA, 15 bp, Homo sapiens
gcagatctaactcct

SEQ ID NO: 919987 - DNA, 15 bp, Homo sapiens
cagatctaactcctg

SEQ ID NO: 919988 - DNA, 15 bp, Homo sapiens
agatctaactcctgg

SEQ ID NO: 919989 - DNA, 15 bp, Homo sapiens
gatctaactcctggc

SEQ ID NO: 919990 - DNA, 15 bp, Homo sapiens
atctaactcctggca

SEQ ID NO: 919991 - DNA, 15 bp, Homo sapiens
tctaactcctggcaa

SEQ ID NO: 919992 - DNA, 15 bp, Homo sapiens
ctaactcctggcaat

SEQ ID NO: 919993 - DNA, 15 bp, Homo sapiens
taactcctggcaata

SEQ ID NO: 919994 - DNA, 15 bp, Homo sapiens
aactcctggcaataa

SEQ ID NO: 919995 - DNA, 15 bp, Homo sapiens
actcctggcaataag

SEQ ID NO: 919996 - DNA, 15 bp, Homo sapiens
ctcctggcaataaga

SEQ ID NO: 919997 - DNA, 15 bp, Homo sapiens
tcctggcaataagat

SEQ ID NO: 919998 - DNA, 15 bp, Homo sapiens
cctggcaataagata

SEQ ID NO: 919999 - DNA, 15 bp, Homo sapiens
ctggcaataagataa

SEQ ID NO: 920000 - DNA, 15 bp, Homo sapiens
tggcaataagataac

SEQ ID NO: 920001 - DNA, 15 bp, Homo sapiens
ggcaataagataaca

SEQ ID NO: 920002 - DNA, 15 bp, Homo sapiens
gcaataagataacat

SEQ ID NO: 920003 - DNA, 15 bp, Homo sapiens
caataagataacatt

SEQ ID NO: 920004 - DNA, 15 bp, Homo sapiens
aataagataacattt

SEQ ID NO: 920005 - DNA, 15 bp, Homo sapiens
ataagataacatttg

SEQ ID NO: 920006 - DNA, 15 bp, Homo sapiens
taagataacatttga

SEQ ID NO: 920007 - DNA, 15 bp, Homo sapiens
aagataacatttgat

SEQ ID NO: 920008 - DNA, 15 bp, Homo sapiens
agataacatttgata

SEQ ID NO: 920009 - DNA, 15 bp, Homo sapiens
gataacatttgatac

SEQ ID NO: 920010 - DNA, 15 bp, Homo sapiens
ataacatttgataca

SEQ ID NO: 920011 - DNA, 15 bp, Homo sapiens
taacatttgatacaa

SEQ ID NO: 920012 - DNA, 15 bp, Homo sapiens
aacatttgatacaaa

SEQ ID NO: 920013 - DNA, 15 bp, Homo sapiens
acatttgatacaaat

SEQ ID NO: 920014 - DNA, 15 bp, Homo sapiens
catttgatacaaatg

SEQ ID NO: 920015 - DNA, 15 bp, Homo sapiens
atttgatacaaatgt

SEQ ID NO: 920016 - DNA, 15 bp, Homo sapiens
tttgatacaaatgtg

SEQ ID NO: 920017 - DNA, 15 bp, Homo sapiens
ttgatacaaatgtga

SEQ ID NO: 920018 - DNA, 15 bp, Homo sapiens
tgatacaaatgtgaa

SEQ ID NO: 920019 - DNA, 15 bp, Homo sapiens
gatacaaatgtgaaa

SEQ ID NO: 920020 - DNA, 15 bp, Homo sapiens
atacaaatgtgaaag

SEQ ID NO: 920021 - DNA, 15 bp, Homo sapiens
tacaaatgtgaaaga

SEQ ID NO: 920022 - DNA, 15 bp, Homo sapiens
acaaatgtgaaagat

SEQ ID NO: 920023 - DNA, 15 bp, Homo sapiens
caaatgtgaaagata

SEQ ID NO: 920024 - DNA, 15 bp, Homo sapiens
aaatgtgaaagataa

SEQ ID NO: 920025 - DNA, 15 bp, Homo sapiens
aatgtgaaagataaa

SEQ ID NO: 920026 - DNA, 15 bp, Homo sapiens
atgtgaaagataaac

SEQ ID NO: 920027 - DNA, 15 bp, Homo sapiens
tgtgaaagataaaca

SEQ ID NO: 920028 - DNA, 15 bp, Homo sapiens
gtgaaagataaacag

SEQ ID NO: 920029 - DNA, 15 bp, Homo sapiens
tgaaagataaacagg

SEQ ID NO: 920030 - DNA, 15 bp, Homo sapiens
gaaagataaacagga

SEQ ID NO: 920031 - DNA, 15 bp, Homo sapiens
aaagataaacaggac

SEQ ID NO: 920032 - DNA, 15 bp, Homo sapiens
aagataaacaggact

SEQ ID NO: 920033 - DNA, 15 bp, Homo sapiens
agataaacaggactt

SEQ ID NO: 920034 - DNA, 15 bp, Homo sapiens
gataaacaggacttg

SEQ ID NO: 920035 - DNA, 15 bp, Homo sapiens
ataaacaggacttgc

SEQ ID NO: 920036 - DNA, 15 bp, Homo sapiens
taaacaggacttgcc

SEQ ID NO: 920037 - DNA, 15 bp, Homo sapiens
aaacaggacttgcca

SEQ ID NO: 920038 - DNA, 15 bp, Homo sapiens
aacaggacttgccaa

SEQ ID NO: 920039 - DNA, 15 bp, Homo sapiens
acaggacttgccaat

SEQ ID NO: 920040 - DNA, 15 bp, Homo sapiens
caggacttgccaatg

SEQ ID NO: 920041 - DNA, 15 bp, Homo sapiens
aggacttgccaatgc

SEQ ID NO: 920042 - DNA, 15 bp, Homo sapiens
ggacttgccaatgct

SEQ ID NO: 920043 - DNA, 15 bp, Homo sapiens
gacttgccaatgcta

SEQ ID NO: 920044 - DNA, 15 bp, Homo sapiens
acttgccaatgctaa

SEQ ID NO: 920045 - DNA, 15 bp, Homo sapiens
cttgccaatgctaag

SEQ ID NO: 920046 - DNA, 15 bp, Homo sapiens
ttgccaatgctaaga

SEQ ID NO: 920047 - DNA, 15 bp, Homo sapiens
tgccaatgctaagac

SEQ ID NO: 920048 - DNA, 15 bp, Homo sapiens
gccaatgctaagact

SEQ ID NO: 920049 - DNA, 15 bp, Homo sapiens
ccaatgctaagactg

SEQ ID NO: 920050 - DNA, 15 bp, Homo sapiens
caatgctaagactgg

SEQ ID NO: 920051 - DNA, 15 bp, Homo sapiens
aatgctaagactgga

SEQ ID NO: 920052 - DNA, 15 bp, Homo sapiens
atgctaagactggat

SEQ ID NO: 920053 - DNA, 15 bp, Homo sapiens
tgctaagactggata

SEQ ID NO: 920054 - DNA, 15 bp, Homo sapiens
gctaagactggatag

SEQ ID NO: 920055 - DNA, 15 bp, Homo sapiens
ctaagactggataga

SEQ ID NO: 920056 - DNA, 15 bp, Homo sapiens
taagactggatagaa

SEQ ID NO: 920057 - DNA, 15 bp, Homo sapiens
aagactggatagaaa

SEQ ID NO: 920058 - DNA, 15 bp, Homo sapiens
agactggatagaaag

SEQ ID NO: 920059 - DNA, 15 bp, Homo sapiens
gactggatagaaagg

SEQ ID NO: 920060 - DNA, 15 bp, Homo sapiens
actggatagaaaggg

SEQ ID NO: 920061 - DNA, 15 bp, Homo sapiens
ctggatagaaagggg

SEQ ID NO: 920062 - DNA, 15 bp, Homo sapiens
tggatagaaagggga

SEQ ID NO: 920063 - DNA, 15 bp, Homo sapiens
ggatagaaaggggaa

SEQ ID NO: 920064 - DNA, 15 bp, Homo sapiens
gatagaaaggggaaa

SEQ ID NO: 920065 - DNA, 15 bp, Homo sapiens
atagaaaggggaaag

SEQ ID NO: 920066 - DNA, 15 bp, Homo sapiens
tagaaaggggaaaga

SEQ ID NO: 920067 - DNA, 15 bp, Homo sapiens
agaaaggggaaagaa

SEQ ID NO: 920068 - DNA, 15 bp, Homo sapiens
gaaaggggaaagaag

SEQ ID NO: 920069 - DNA, 15 bp, Homo sapiens
aaaggggaaagaagg

SEQ ID NO: 920070 - DNA, 15 bp, Homo sapiens
aaggggaaagaagga

SEQ ID NO: 920071 - DNA, 15 bp, Homo sapiens
aggggaaagaaggat

SEQ ID NO: 920072 - DNA, 15 bp, Homo sapiens
ggggaaagaaggatg

SEQ ID NO: 920073 - DNA, 15 bp, Homo sapiens
gggaaagaaggatgc

SEQ ID NO: 920074 - DNA, 15 bp, Homo sapiens
ggaaagaaggatgca

SEQ ID NO: 920075 - DNA, 15 bp, Homo sapiens
gaaagaaggatgcat

SEQ ID NO: 920076 - DNA, 15 bp, Homo sapiens
aaagaaggatgcatt

SEQ ID NO: 920077 - DNA, 15 bp, Homo sapiens
aagaaggatgcattc

SEQ ID NO: 920078 - DNA, 15 bp, Homo sapiens
agaaggatgcattct

SEQ ID NO: 920079 - DNA, 15 bp, Homo sapiens
gaaggatgcattcta

SEQ ID NO: 920080 - DNA, 15 bp, Homo sapiens
aaggatgcattctag

SEQ ID NO: 920081 - DNA, 15 bp, Homo sapiens
aggatgcattctagg

SEQ ID NO: 920082 - DNA, 15 bp, Homo sapiens
ggatgcattctaggc

SEQ ID NO: 920083 - DNA, 15 bp, Homo sapiens
gatgcattctaggca

SEQ ID NO: 920084 - DNA, 15 bp, Homo sapiens
atgcattctaggcag

SEQ ID NO: 920085 - DNA, 15 bp, Homo sapiens
tgcattctaggcaga

SEQ ID NO: 920086 - DNA, 15 bp, Homo sapiens
gcattctaggcagag

SEQ ID NO: 920087 - DNA, 15 bp, Homo sapiens
cattctaggcagaga

SEQ ID NO: 920088 - DNA, 15 bp, Homo sapiens
attctaggcagagaa

SEQ ID NO: 920089 - DNA, 15 bp, Homo sapiens
ttctaggcagagaag

SEQ ID NO: 920090 - DNA, 15 bp, Homo sapiens
tctaggcagagaagg

SEQ ID NO: 920091 - DNA, 15 bp, Homo sapiens
ctaggcagagaagga

SEQ ID NO: 920092 - DNA, 15 bp, Homo sapiens
taggcagagaaggac

SEQ ID NO: 920093 - DNA, 15 bp, Homo sapiens
aggcagagaaggaca

SEQ ID NO: 920094 - DNA, 15 bp, Homo sapiens
ggcagagaaggacag

SEQ ID NO: 920095 - DNA, 15 bp, Homo sapiens
gcagagaaggacaga

SEQ ID NO: 920096 - DNA, 15 bp, Homo sapiens
cagagaaggacagag

SEQ ID NO: 920097 - DNA, 15 bp, Homo sapiens
agagaaggacagagc

SEQ ID NO: 920098 - DNA, 15 bp, Homo sapiens
gagaaggacagagca

SEQ ID NO: 920099 - DNA, 15 bp, Homo sapiens
agaaggacagagcaa

SEQ ID NO: 920100 - DNA, 15 bp, Homo sapiens
gaaggacagagcaaa

SEQ ID NO: 920101 - DNA, 15 bp, Homo sapiens
aaggacagagcaaaa

SEQ ID NO: 920102 - DNA, 15 bp, Homo sapiens
aggacagagcaaaat

SEQ ID NO: 920103 - DNA, 15 bp, Homo sapiens
ggacagagcaaaatt

SEQ ID NO: 920104 - DNA, 15 bp, Homo sapiens
gacagagcaaaatta

SEQ ID NO: 920105 - DNA, 15 bp, Homo sapiens
acagagcaaaattag

SEQ ID NO: 920106 - DNA, 15 bp, Homo sapiens
cagagcaaaattagt

SEQ ID NO: 920107 - DNA, 15 bp, Homo sapiens
agagcaaaattagtt

SEQ ID NO: 920108 - DNA, 15 bp, Homo sapiens
gagcaaaattagtta

SEQ ID NO: 920109 - DNA, 15 bp, Homo sapiens
agcaaaattagttaa

SEQ ID NO: 920110 - DNA, 15 bp, Homo sapiens
gcaaaattagttaag

SEQ ID NO: 920111 - DNA, 15 bp, Homo sapiens
caaaattagttaaga

SEQ ID NO: 920112 - DNA, 15 bp, Homo sapiens
aaaattagttaagag

SEQ ID NO: 920113 - DNA, 15 bp, Homo sapiens
aaattagttaagagt

SEQ ID NO: 920114 - DNA, 15 bp, Homo sapiens
aattagttaagagtt

SEQ ID NO: 920115 - DNA, 15 bp, Homo sapiens
attagttaagagttt

SEQ ID NO: 920116 - DNA, 15 bp, Homo sapiens
ttagttaagagtttt

SEQ ID NO: 920117 - DNA, 15 bp, Homo sapiens
tagttaagagttttg

SEQ ID NO: 920118 - DNA, 15 bp, Homo sapiens
agttaagagttttgg

SEQ ID NO: 920119 - DNA, 15 bp, Homo sapiens
gttaagagttttggg

SEQ ID NO: 920120 - DNA, 15 bp, Homo sapiens
ttaagagttttgggt

SEQ ID NO: 920121 - DNA, 15 bp, Homo sapiens
taagagttttgggta

SEQ ID NO: 920122 - DNA, 15 bp, Homo sapiens
aagagttttgggtat

SEQ ID NO: 920123 - DNA, 15 bp, Homo sapiens
agagttttgggtatg

SEQ ID NO: 920124 - DNA, 15 bp, Homo sapiens
gagttttgggtatgt

SEQ ID NO: 920125 - DNA, 15 bp, Homo sapiens
agttttgggtatgta

SEQ ID NO: 920126 - DNA, 15 bp, Homo sapiens
gttttgggtatgtaa

SEQ ID NO: 920127 - DNA, 15 bp, Homo sapiens
ttttgggtatgtaaa

SEQ ID NO: 920128 - DNA, 15 bp, Homo sapiens
tttgggtatgtaaag

SEQ ID NO: 920129 - DNA, 15 bp, Homo sapiens
ttgggtatgtaaagg

SEQ ID NO: 920130 - DNA, 15 bp, Homo sapiens
tgggtatgtaaagga

SEQ ID NO: 920131 - DNA, 15 bp, Homo sapiens
gggtatgtaaaggaa

SEQ ID NO: 920132 - DNA, 15 bp, Homo sapiens
ggtatgtaaaggaag

SEQ ID NO: 920133 - DNA, 15 bp, Homo sapiens
gtatgtaaaggaagt

SEQ ID NO: 920134 - DNA, 15 bp, Homo sapiens
tatgtaaaggaagtt

SEQ ID NO: 920135 - DNA, 15 bp, Homo sapiens
atgtaaaggaagttt

SEQ ID NO: 920136 - DNA, 15 bp, Homo sapiens
tgtaaaggaagtttt

SEQ ID NO: 920137 - DNA, 15 bp, Homo sapiens
gtaaaggaagttttg

SEQ ID NO: 920138 - DNA, 15 bp, Homo sapiens
taaaggaagttttga

SEQ ID NO: 920139 - DNA, 15 bp, Homo sapiens
aaaggaagttttgag

SEQ ID NO: 920140 - DNA, 15 bp, Homo sapiens
aaggaagttttgaga

SEQ ID NO: 920141 - DNA, 15 bp, Homo sapiens
aggaagttttgagat

SEQ ID NO: 920142 - DNA, 15 bp, Homo sapiens
ggaagttttgagata

SEQ ID NO: 920143 - DNA, 15 bp, Homo sapiens
gaagttttgagatat

SEQ ID NO: 920144 - DNA, 15 bp, Homo sapiens
aagttttgagatata

SEQ ID NO: 920145 - DNA, 15 bp, Homo sapiens
agttttgagatataa

SEQ ID NO: 920146 - DNA, 15 bp, Homo sapiens
gttttgagatataag

SEQ ID NO: 920147 - DNA, 15 bp, Homo sapiens
ttttgagatataaga

SEQ ID NO: 920148 - DNA, 15 bp, Homo sapiens
tttgagatataagac

SEQ ID NO: 920149 - DNA, 15 bp, Homo sapiens
ttgagatataagacc

SEQ ID NO: 920150 - DNA, 15 bp, Homo sapiens
tgagatataagaccc

SEQ ID NO: 920151 - DNA, 15 bp, Homo sapiens
gagatataagaccca

SEQ ID NO: 920152 - DNA, 15 bp, Homo sapiens
agatataagacccaa

SEQ ID NO: 920153 - DNA, 15 bp, Homo sapiens
gatataagacccaaa

SEQ ID NO: 920154 - DNA, 15 bp, Homo sapiens
atataagacccaaag

SEQ ID NO: 920155 - DNA, 15 bp, Homo sapiens
tataagacccaaagc

SEQ ID NO: 920156 - DNA, 15 bp, Homo sapiens
ataagacccaaagca

SEQ ID NO: 920157 - DNA, 15 bp, Homo sapiens
taagacccaaagcag

SEQ ID NO: 920158 - DNA, 15 bp, Homo sapiens
aagacccaaagcagt

SEQ ID NO: 920159 - DNA, 15 bp, Homo sapiens
agacccaaagcagtt

SEQ ID NO: 920160 - DNA, 15 bp, Homo sapiens
gacccaaagcagttt

SEQ ID NO: 920161 - DNA, 15 bp, Homo sapiens
acccaaagcagtttg

SEQ ID NO: 920162 - DNA, 15 bp, Homo sapiens
cccaaagcagtttga

SEQ ID NO: 920163 - DNA, 15 bp, Homo sapiens
ccaaagcagtttgaa

SEQ ID NO: 920164 - DNA, 15 bp, Homo sapiens
caaagcagtttgaag

SEQ ID NO: 920165 - DNA, 15 bp, Homo sapiens
aaagcagtttgaagc

SEQ ID NO: 920166 - DNA, 15 bp, Homo sapiens
aagcagtttgaagcc

SEQ ID NO: 920167 - DNA, 15 bp, Homo sapiens
agcagtttgaagcca

SEQ ID NO: 920168 - DNA, 15 bp, Homo sapiens
gcagtttgaagccaa

SEQ ID NO: 920169 - DNA, 15 bp, Homo sapiens
cagtttgaagccaaa

SEQ ID NO: 920170 - DNA, 15 bp, Homo sapiens
agtttgaagccaaat

SEQ ID NO: 920171 - DNA, 15 bp, Homo sapiens
gtttgaagccaaatt

SEQ ID NO: 920172 - DNA, 15 bp, Homo sapiens
tttgaagccaaattg

SEQ ID NO: 920173 - DNA, 15 bp, Homo sapiens
ttgaagccaaattga

SEQ ID NO: 920174 - DNA, 15 bp, Homo sapiens
tgaagccaaattgaa

SEQ ID NO: 920175 - DNA, 15 bp, Homo sapiens
gaagccaaattgaaa

SEQ ID NO: 920176 - DNA, 15 bp, Homo sapiens
aagccaaattgaaat

SEQ ID NO: 920177 - DNA, 15 bp, Homo sapiens
agccaaattgaaatt

SEQ ID NO: 920178 - DNA, 15 bp, Homo sapiens
gccaaattgaaatta

SEQ ID NO: 920179 - DNA, 15 bp, Homo sapiens
ccaaattgaaattat

SEQ ID NO: 920180 - DNA, 15 bp, Homo sapiens
caaattgaaattatc

SEQ ID NO: 920181 - DNA, 15 bp, Homo sapiens
aaattgaaattatca

SEQ ID NO: 920182 - DNA, 15 bp, Homo sapiens
aattgaaattatcac

SEQ ID NO: 920183 - DNA, 15 bp, Homo sapiens
attgaaattatcact

SEQ ID NO: 920184 - DNA, 15 bp, Homo sapiens
ttgaaattatcactg

SEQ ID NO: 920185 - DNA, 15 bp, Homo sapiens
tgaaattatcactgt

SEQ ID NO: 920186 - DNA, 15 bp, Homo sapiens
gaaattatcactgta

SEQ ID NO: 920187 - DNA, 15 bp, Homo sapiens
aaattatcactgtat

SEQ ID NO: 920188 - DNA, 15 bp, Homo sapiens
aattatcactgtatg

SEQ ID NO: 920189 - DNA, 15 bp, Homo sapiens
attatcactgtatgc

SEQ ID NO: 920190 - DNA, 15 bp, Homo sapiens
ttatcactgtatgct

SEQ ID NO: 920191 - DNA, 15 bp, Homo sapiens
tatcactgtatgctt

SEQ ID NO: 920192 - DNA, 15 bp, Homo sapiens
atcactgtatgcttg

SEQ ID NO: 920193 - DNA, 15 bp, Homo sapiens
tcactgtatgcttgg

SEQ ID NO: 920194 - DNA, 15 bp, Homo sapiens
cactgtatgcttggc

SEQ ID NO: 920195 - DNA, 15 bp, Homo sapiens
actgtatgcttggct

SEQ ID NO: 920196 - DNA, 15 bp, Homo sapiens
ctgtatgcttggcta

SEQ ID NO: 920197 - DNA, 15 bp, Homo sapiens
tgtatgcttggctaa

SEQ ID NO: 920198 - DNA, 15 bp, Homo sapiens
gtatgcttggctaaa

SEQ ID NO: 920199 - DNA, 15 bp, Homo sapiens
tatgcttggctaaag

SEQ ID NO: 920200 - DNA, 15 bp, Homo sapiens
atgcttggctaaaga

SEQ ID NO: 920201 - DNA, 15 bp, Homo sapiens
tgcttggctaaagag

SEQ ID NO: 920202 - DNA, 15 bp, Homo sapiens
gcttggctaaagagt

SEQ ID NO: 920203 - DNA, 15 bp, Homo sapiens
cttggctaaagagtt

SEQ ID NO: 920204 - DNA, 15 bp, Homo sapiens
ttggctaaagagttt

SEQ ID NO: 920205 - DNA, 15 bp, Homo sapiens
tggctaaagagtttg

SEQ ID NO: 920206 - DNA, 15 bp, Homo sapiens
ggctaaagagtttgg

SEQ ID NO: 920207 - DNA, 15 bp, Homo sapiens
gctaaagagtttgga

SEQ ID NO: 920208 - DNA, 15 bp, Homo sapiens
ctaaagagtttggaa

SEQ ID NO: 920209 - DNA, 15 bp, Homo sapiens
taaagagtttggaat

SEQ ID NO: 920210 - DNA, 15 bp, Homo sapiens
aaagagtttggaatt

SEQ ID NO: 920211 - DNA, 15 bp, Homo sapiens
aagagtttggaattt

SEQ ID NO: 920212 - DNA, 15 bp, Homo sapiens
agagtttggaattta

SEQ ID NO: 920213 - DNA, 15 bp, Homo sapiens
gagtttggaatttat

SEQ ID NO: 920214 - DNA, 15 bp, Homo sapiens
agtttggaatttatt

SEQ ID NO: 920215 - DNA, 15 bp, Homo sapiens
gtttggaatttattt

SEQ ID NO: 920216 - DNA, 15 bp, Homo sapiens
tttggaatttatttt

SEQ ID NO: 920217 - DNA, 15 bp, Homo sapiens
ttggaatttattttc

SEQ ID NO: 920218 - DNA, 15 bp, Homo sapiens
tggaatttattttca

SEQ ID NO: 920219 - DNA, 15 bp, Homo sapiens
ggaatttattttcat

SEQ ID NO: 920220 - DNA, 15 bp, Homo sapiens
gaatttattttcata

SEQ ID NO: 920221 - DNA, 15 bp, Homo sapiens
aatttattttcatag

SEQ ID NO: 920222 - DNA, 15 bp, Homo sapiens
atttattttcatagg

SEQ ID NO: 920223 - DNA, 15 bp, Homo sapiens
tttattttcataggc

SEQ ID NO: 920224 - DNA, 15 bp, Homo sapiens
ttattttcataggca

SEQ ID NO: 920225 - DNA, 15 bp, Homo sapiens
tattttcataggcaa

SEQ ID NO: 920226 - DNA, 15 bp, Homo sapiens
attttcataggcaat

SEQ ID NO: 920227 - DNA, 15 bp, Homo sapiens
ttttcataggcaatg

SEQ ID NO: 920228 - DNA, 15 bp, Homo sapiens
tttcataggcaatgg

SEQ ID NO: 920229 - DNA, 15 bp, Homo sapiens
ttcataggcaatggc

SEQ ID NO: 920230 - DNA, 15 bp, Homo sapiens
tcataggcaatggca

SEQ ID NO: 920231 - DNA, 15 bp, Homo sapiens
cataggcaatggcaa

SEQ ID NO: 920232 - DNA, 15 bp, Homo sapiens
ataggcaatggcaaa

SEQ ID NO: 920233 - DNA, 15 bp, Homo sapiens
taggcaatggcaaac

SEQ ID NO: 920234 - DNA, 15 bp, Homo sapiens
aggcaatggcaaact

SEQ ID NO: 920235 - DNA, 15 bp, Homo sapiens
ggcaatggcaaactt

SEQ ID NO: 920236 - DNA, 15 bp, Homo sapiens
gcaatggcaaacttt

SEQ ID NO: 920237 - DNA, 15 bp, Homo sapiens
caatggcaaactttt

SEQ ID NO: 920238 - DNA, 15 bp, Homo sapiens
aatggcaaacttttg

SEQ ID NO: 920239 - DNA, 15 bp, Homo sapiens
atggcaaacttttga

SEQ ID NO: 920240 - DNA, 15 bp, Homo sapiens
tggcaaacttttgaa

SEQ ID NO: 920241 - DNA, 15 bp, Homo sapiens
ggcaaacttttgaaa

SEQ ID NO: 920242 - DNA, 15 bp, Homo sapiens
gcaaacttttgaaag

SEQ ID NO: 920243 - DNA, 15 bp, Homo sapiens
caaacttttgaaagt

SEQ ID NO: 920244 - DNA, 15 bp, Homo sapiens
aaacttttgaaagtt

SEQ ID NO: 920245 - DNA, 15 bp, Homo sapiens
aacttttgaaagttt

SEQ ID NO: 920246 - DNA, 15 bp, Homo sapiens
acttttgaaagtttt

SEQ ID NO: 920247 - DNA, 15 bp, Homo sapiens
cttttgaaagttttt

SEQ ID NO: 920248 - DNA, 15 bp, Homo sapiens
ttttgaaagtttttt

SEQ ID NO: 920249 - DNA, 15 bp, Homo sapiens
tttgaaagtttttta

SEQ ID NO: 920250 - DNA, 15 bp, Homo sapiens
ttgaaagttttttag

SEQ ID NO: 920251 - DNA, 15 bp, Homo sapiens
tgaaagttttttagt

SEQ ID NO: 920252 - DNA, 15 bp, Homo sapiens
gaaagttttttagta

SEQ ID NO: 920253 - DNA, 15 bp, Homo sapiens
aaagttttttagtaa

SEQ ID NO: 920254 - DNA, 15 bp, Homo sapiens
aagttttttagtaag

SEQ ID NO: 920255 - DNA, 15 bp, Homo sapiens
agttttttagtaagg

SEQ ID NO: 920256 - DNA, 15 bp, Homo sapiens
gttttttagtaaggc

SEQ ID NO: 920257 - DNA, 15 bp, Homo sapiens
ttttttagtaaggca

SEQ ID NO: 920258 - DNA, 15 bp, Homo sapiens
tttttagtaaggcaa

SEQ ID NO: 920259 - DNA, 15 bp, Homo sapiens
ttttagtaaggcaat

SEQ ID NO: 920260 - DNA, 15 bp, Homo sapiens
tttagtaaggcaatg

SEQ ID NO: 920261 - DNA, 15 bp, Homo sapiens
ttagtaaggcaatgc

SEQ ID NO: 920262 - DNA, 15 bp, Homo sapiens
tagtaaggcaatgcc

SEQ ID NO: 920263 - DNA, 15 bp, Homo sapiens
agtaaggcaatgcca

SEQ ID NO: 920264 - DNA, 15 bp, Homo sapiens
gtaaggcaatgccat

SEQ ID NO: 920265 - DNA, 15 bp, Homo sapiens
taaggcaatgccatg

SEQ ID NO: 920266 - DNA, 15 bp, Homo sapiens
aaggcaatgccatgg

SEQ ID NO: 920267 - DNA, 15 bp, Homo sapiens
aggcaatgccatggt

SEQ ID NO: 920268 - DNA, 15 bp, Homo sapiens
ggcaatgccatggtc

SEQ ID NO: 920269 - DNA, 15 bp, Homo sapiens
gcaatgccatggtca

SEQ ID NO: 920270 - DNA, 15 bp, Homo sapiens
caatgccatggtcaa

SEQ ID NO: 920271 - DNA, 15 bp, Homo sapiens
aatgccatggtcaaa

SEQ ID NO: 920272 - DNA, 15 bp, Homo sapiens
atgccatggtcaaag

SEQ ID NO: 920273 - DNA, 15 bp, Homo sapiens
tgccatggtcaaagg

SEQ ID NO: 920274 - DNA, 15 bp, Homo sapiens
gccatggtcaaaggg

SEQ ID NO: 920275 - DNA, 15 bp, Homo sapiens
ccatggtcaaagggg

SEQ ID NO: 920276 - DNA, 15 bp, Homo sapiens
catggtcaaaggggt

SEQ ID NO: 920277 - DNA, 15 bp, Homo sapiens
atggtcaaaggggtg

SEQ ID NO: 920278 - DNA, 15 bp, Homo sapiens
tggtcaaaggggtgc

SEQ ID NO: 920279 - DNA, 15 bp, Homo sapiens
ggtcaaaggggtgct

SEQ ID NO: 920280 - DNA, 15 bp, Homo sapiens
gtcaaaggggtgctt

SEQ ID NO: 920281 - DNA, 15 bp, Homo sapiens
tcaaaggggtgcttt

SEQ ID NO: 920282 - DNA, 15 bp, Homo sapiens
caaaggggtgcttta

SEQ ID NO: 920283 - DNA, 15 bp, Homo sapiens
aaaggggtgctttag

SEQ ID NO: 920284 - DNA, 15 bp, Homo sapiens
aaggggtgctttagg

SEQ ID NO: 920285 - DNA, 15 bp, Homo sapiens
aggggtgctttagga

SEQ ID NO: 920286 - DNA, 15 bp, Homo sapiens
ggggtgctttaggac

SEQ ID NO: 920287 - DNA, 15 bp, Homo sapiens
gggtgctttaggacc

SEQ ID NO: 920288 - DNA, 15 bp, Homo sapiens
ggtgctttaggacct

SEQ ID NO: 920289 - DNA, 15 bp, Homo sapiens
gtgctttaggacctt

SEQ ID NO: 920290 - DNA, 15 bp, Homo sapiens
tgctttaggacctta

SEQ ID NO: 920291 - DNA, 15 bp, Homo sapiens
gctttaggaccttaa

SEQ ID NO: 920292 - DNA, 15 bp, Homo sapiens
ctttaggaccttaat

SEQ ID NO: 920293 - DNA, 15 bp, Homo sapiens
tttaggaccttaatt

SEQ ID NO: 920294 - DNA, 15 bp, Homo sapiens
ttaggaccttaattt

SEQ ID NO: 920295 - DNA, 15 bp, Homo sapiens
taggaccttaatttg

SEQ ID NO: 920296 - DNA, 15 bp, Homo sapiens
aggaccttaatttgc

SEQ ID NO: 920297 - DNA, 15 bp, Homo sapiens
ggaccttaatttgcc

SEQ ID NO: 920298 - DNA, 15 bp, Homo sapiens
gaccttaatttgccg

SEQ ID NO: 920299 - DNA, 15 bp, Homo sapiens
accttaatttgccgg

SEQ ID NO: 920300 - DNA, 15 bp, Homo sapiens
ccttaatttgccggg

SEQ ID NO: 920301 - DNA, 15 bp, Homo sapiens
cttaatttgccggga

SEQ ID NO: 920302 - DNA, 15 bp, Homo sapiens
ttaatttgccgggaa

SEQ ID NO: 920303 - DNA, 15 bp, Homo sapiens
taatttgccgggaat

SEQ ID NO: 920304 - DNA, 15 bp, Homo sapiens
aatttgccgggaata

SEQ ID NO: 920305 - DNA, 15 bp, Homo sapiens
atttgccgggaatat

SEQ ID NO: 920306 - DNA, 15 bp, Homo sapiens
tttgccgggaatatg

SEQ ID NO: 920307 - DNA, 15 bp, Homo sapiens
ttgccgggaatatgc

SEQ ID NO: 920308 - DNA, 15 bp, Homo sapiens
tgccgggaatatgca

SEQ ID NO: 920309 - DNA, 15 bp, Homo sapiens
gccgggaatatgcac

SEQ ID NO: 920310 - DNA, 15 bp, Homo sapiens
ccgggaatatgcaca

SEQ ID NO: 920311 - DNA, 15 bp, Homo sapiens
cgggaatatgcacaa

SEQ ID NO: 920312 - DNA, 15 bp, Homo sapiens
gggaatatgcacaat

SEQ ID NO: 920313 - DNA, 15 bp, Homo sapiens
ggaatatgcacaatg

SEQ ID NO: 920314 - DNA, 15 bp, Homo sapiens
gaatatgcacaatga

SEQ ID NO: 920315 - DNA, 15 bp, Homo sapiens
aatatgcacaatgaa

SEQ ID NO: 920316 - DNA, 15 bp, Homo sapiens
atatgcacaatgaat

SEQ ID NO: 920317 - DNA, 15 bp, Homo sapiens
tatgcacaatgaata

SEQ ID NO: 920318 - DNA, 15 bp, Homo sapiens
atgcacaatgaatag

SEQ ID NO: 920319 - DNA, 15 bp, Homo sapiens
tgcacaatgaataga

SEQ ID NO: 920320 - DNA, 15 bp, Homo sapiens
gcacaatgaatagaa

SEQ ID NO: 920321 - DNA, 15 bp, Homo sapiens
cacaatgaatagaag

SEQ ID NO: 920322 - DNA, 15 bp, Homo sapiens
acaatgaatagaaga

SEQ ID NO: 920323 - DNA, 15 bp, Homo sapiens
caatgaatagaagac

SEQ ID NO: 920324 - DNA, 15 bp, Homo sapiens
aatgaatagaagacg

SEQ ID NO: 920325 - DNA, 15 bp, Homo sapiens
atgaatagaagacgc

SEQ ID NO: 920326 - DNA, 15 bp, Homo sapiens
tgaatagaagacgca

SEQ ID NO: 920327 - DNA, 15 bp, Homo sapiens
gaatagaagacgcaa

SEQ ID NO: 920328 - DNA, 15 bp, Homo sapiens
aatagaagacgcaag

SEQ ID NO: 920329 - DNA, 15 bp, Homo sapiens
atagaagacgcaaga

SEQ ID NO: 920330 - DNA, 15 bp, Homo sapiens
tagaagacgcaagag

SEQ ID NO: 920331 - DNA, 15 bp, Homo sapiens
agaagacgcaagaga

SEQ ID NO: 920332 - DNA, 15 bp, Homo sapiens
gaagacgcaagagag

SEQ ID NO: 920333 - DNA, 15 bp, Homo sapiens
aagacgcaagagagt

SEQ ID NO: 920334 - DNA, 15 bp, Homo sapiens
agacgcaagagagta

SEQ ID NO: 920335 - DNA, 15 bp, Homo sapiens
gacgcaagagagtac

SEQ ID NO: 920336 - DNA, 15 bp, Homo sapiens
acgcaagagagtaca

SEQ ID NO: 920337 - DNA, 15 bp, Homo sapiens
cgcaagagagtacaa

SEQ ID NO: 920338 - DNA, 15 bp, Homo sapiens
gcaagagagtacaaa

SEQ ID NO: 920339 - DNA, 15 bp, Homo sapiens
caagagagtacaaac

SEQ ID NO: 920340 - DNA, 15 bp, Homo sapiens
aagagagtacaaaca

SEQ ID NO: 920341 - DNA, 15 bp, Homo sapiens
agagagtacaaacag

SEQ ID NO: 920342 - DNA, 15 bp, Homo sapiens
gagagtacaaacagg

SEQ ID NO: 920343 - DNA, 15 bp, Homo sapiens
agagtacaaacagga

SEQ ID NO: 920344 - DNA, 15 bp, Homo sapiens
gagtacaaacaggaa

SEQ ID NO: 920345 - DNA, 15 bp, Homo sapiens
agtacaaacaggaag

SEQ ID NO: 920346 - DNA, 15 bp, Homo sapiens
gtacaaacaggaaga

SEQ ID NO: 920347 - DNA, 15 bp, Homo sapiens
tacaaacaggaagaa

SEQ ID NO: 920348 - DNA, 15 bp, Homo sapiens
acaaacaggaagaat

SEQ ID NO: 920349 - DNA, 15 bp, Homo sapiens
caaacaggaagaata

SEQ ID NO: 920350 - DNA, 15 bp, Homo sapiens
aaacaggaagaataa

SEQ ID NO: 920351 - DNA, 15 bp, Homo sapiens
aacaggaagaataat

SEQ ID NO: 920352 - DNA, 15 bp, Homo sapiens
acaggaagaataatt

SEQ ID NO: 920353 - DNA, 15 bp, Homo sapiens
caggaagaataatta

SEQ ID NO: 920354 - DNA, 15 bp, Homo sapiens
aggaagaataattac

SEQ ID NO: 920355 - DNA, 15 bp, Homo sapiens
ggaagaataattaca

SEQ ID NO: 920356 - DNA, 15 bp, Homo sapiens
gaagaataattacaa

SEQ ID NO: 920357 - DNA, 15 bp, Homo sapiens
aagaataattacaaa

SEQ ID NO: 920358 - DNA, 15 bp, Homo sapiens
agaataattacaaag

SEQ ID NO: 920359 - DNA, 15 bp, Homo sapiens
gaataattacaaagt

SEQ ID NO: 920360 - DNA, 15 bp, Homo sapiens
aataattacaaagtc

SEQ ID NO: 920361 - DNA, 15 bp, Homo sapiens
ataattacaaagtca

SEQ ID NO: 920362 - DNA, 15 bp, Homo sapiens
taattacaaagtcat

SEQ ID NO: 920363 - DNA, 15 bp, Homo sapiens
aattacaaagtcatt

SEQ ID NO: 920364 - DNA, 15 bp, Homo sapiens
attacaaagtcattg

SEQ ID NO: 920365 - DNA, 15 bp, Homo sapiens
ttacaaagtcattga

SEQ ID NO: 920366 - DNA, 15 bp, Homo sapiens
tacaaagtcattgaa

SEQ ID NO: 920367 - DNA, 15 bp, Homo sapiens
acaaagtcattgaaa

SEQ ID NO: 920368 - DNA, 15 bp, Homo sapiens
caaagtcattgaaat

SEQ ID NO: 920369 - DNA, 15 bp, Homo sapiens
aaagtcattgaaata

SEQ ID NO: 920370 - DNA, 15 bp, Homo sapiens
aagtcattgaaataa

SEQ ID NO: 920371 - DNA, 15 bp, Homo sapiens
agtcattgaaataat

SEQ ID NO: 920372 - DNA, 15 bp, Homo sapiens
gtcattgaaataatt

SEQ ID NO: 920373 - DNA, 15 bp, Homo sapiens
tcattgaaataattt

SEQ ID NO: 920374 - DNA, 15 bp, Homo sapiens
cattgaaataattta

SEQ ID NO: 920375 - DNA, 15 bp, Homo sapiens
attgaaataatttag

SEQ ID NO: 920376 - DNA, 15 bp, Homo sapiens
ttgaaataatttagg

SEQ ID NO: 920377 - DNA, 15 bp, Homo sapiens
tgaaataatttaggc

SEQ ID NO: 920378 - DNA, 15 bp, Homo sapiens
gaaataatttaggcc

SEQ ID NO: 920379 - DNA, 15 bp, Homo sapiens
aaataatttaggccc

SEQ ID NO: 920380 - DNA, 15 bp, Homo sapiens
aataatttaggccca

SEQ ID NO: 920381 - DNA, 15 bp, Homo sapiens
ataatttaggcccaa

SEQ ID NO: 920382 - DNA, 15 bp, Homo sapiens
taatttaggcccaaa

SEQ ID NO: 920383 - DNA, 15 bp, Homo sapiens
aatttaggcccaaaa

SEQ ID NO: 920384 - DNA, 15 bp, Homo sapiens
atttaggcccaaaac

SEQ ID NO: 920385 - DNA, 15 bp, Homo sapiens
tttaggcccaaaaca

SEQ ID NO: 920386 - DNA, 15 bp, Homo sapiens
ttaggcccaaaacaa

SEQ ID NO: 920387 - DNA, 15 bp, Homo sapiens
taggcccaaaacaat

SEQ ID NO: 920388 - DNA, 15 bp, Homo sapiens
aggcccaaaacaata

SEQ ID NO: 920389 - DNA, 15 bp, Homo sapiens
ggcccaaaacaatag

SEQ ID NO: 920390 - DNA, 15 bp, Homo sapiens
gcccaaaacaataga

SEQ ID NO: 920391 - DNA, 15 bp, Homo sapiens
cccaaaacaatagag

SEQ ID NO: 920392 - DNA, 15 bp, Homo sapiens
ccaaaacaatagagc

SEQ ID NO: 920393 - DNA, 15 bp, Homo sapiens
caaaacaatagagcc

SEQ ID NO: 920394 - DNA, 15 bp, Homo sapiens
aaaacaatagagcct

SEQ ID NO: 920395 - DNA, 15 bp, Homo sapiens
aaacaatagagcctg

SEQ ID NO: 920396 - DNA, 15 bp, Homo sapiens
aacaatagagcctga

SEQ ID NO: 920397 - DNA, 15 bp, Homo sapiens
acaatagagcctgaa

SEQ ID NO: 920398 - DNA, 15 bp, Homo sapiens
caatagagcctgaat

SEQ ID NO: 920399 - DNA, 15 bp, Homo sapiens
aatagagcctgaatt

SEQ ID NO: 920400 - DNA, 15 bp, Homo sapiens
atagagcctgaattc

SEQ ID NO: 920401 - DNA, 15 bp, Homo sapiens
tagagcctgaattca

SEQ ID NO: 920402 - DNA, 15 bp, Homo sapiens
agagcctgaattcac

SEQ ID NO: 920403 - DNA, 15 bp, Homo sapiens
gagcctgaattcaca

SEQ ID NO: 920404 - DNA, 15 bp, Homo sapiens
agcctgaattcacat

SEQ ID NO: 920405 - DNA, 15 bp, Homo sapiens
gcctgaattcacatg

SEQ ID NO: 920406 - DNA, 15 bp, Homo sapiens
cctgaattcacatga

SEQ ID NO: 920407 - DNA, 15 bp, Homo sapiens
ctgaattcacatgat

SEQ ID NO: 920408 - DNA, 15 bp, Homo sapiens
tgaattcacatgata

SEQ ID NO: 920409 - DNA, 15 bp, Homo sapiens
gaattcacatgatag

SEQ ID NO: 920410 - DNA, 15 bp, Homo sapiens
aattcacatgatagc

SEQ ID NO: 920411 - DNA, 15 bp, Homo sapiens
attcacatgatagca

SEQ ID NO: 920412 - DNA, 15 bp, Homo sapiens
ttcacatgatagcag

SEQ ID NO: 920413 - DNA, 15 bp, Homo sapiens
tcacatgatagcagt

SEQ ID NO: 920414 - DNA, 15 bp, Homo sapiens
cacatgatagcagtg

SEQ ID NO: 920415 - DNA, 15 bp, Homo sapiens
acatgatagcagtgg

SEQ ID NO: 920416 - DNA, 15 bp, Homo sapiens
catgatagcagtgga

SEQ ID NO: 920417 - DNA, 15 bp, Homo sapiens
atgatagcagtggaa

SEQ ID NO: 920418 - DNA, 15 bp, Homo sapiens
tgatagcagtggaac

SEQ ID NO: 920419 - DNA, 15 bp, Homo sapiens
gatagcagtggaaca

SEQ ID NO: 920420 - DNA, 15 bp, Homo sapiens
atagcagtggaacag

SEQ ID NO: 920421 - DNA, 15 bp, Homo sapiens
tagcagtggaacaga

SEQ ID NO: 920422 - DNA, 15 bp, Homo sapiens
agcagtggaacagat

SEQ ID NO: 920423 - DNA, 15 bp, Homo sapiens
gcagtggaacagata

SEQ ID NO: 920424 - DNA, 15 bp, Homo sapiens
cagtggaacagataa

SEQ ID NO: 920425 - DNA, 15 bp, Homo sapiens
agtggaacagataac

SEQ ID NO: 920426 - DNA, 15 bp, Homo sapiens
gtggaacagataaca

SEQ ID NO: 920427 - DNA, 15 bp, Homo sapiens
tggaacagataacaa

SEQ ID NO: 920428 - DNA, 15 bp, Homo sapiens
ggaacagataacaag

SEQ ID NO: 920429 - DNA, 15 bp, Homo sapiens
gaacagataacaagg

SEQ ID NO: 920430 - DNA, 15 bp, Homo sapiens
aacagataacaaggg

SEQ ID NO: 920431 - DNA, 15 bp, Homo sapiens
acagataacaaggga

SEQ ID NO: 920432 - DNA, 15 bp, Homo sapiens
cagataacaagggag

SEQ ID NO: 920433 - DNA, 15 bp, Homo sapiens
agataacaagggagg

SEQ ID NO: 920434 - DNA, 15 bp, Homo sapiens
gataacaagggagga

SEQ ID NO: 920435 - DNA, 15 bp, Homo sapiens
ataacaagggaggaa

SEQ ID NO: 920436 - DNA, 15 bp, Homo sapiens
taacaagggaggaac

SEQ ID NO: 920437 - DNA, 15 bp, Homo sapiens
aacaagggaggaaca

SEQ ID NO: 920438 - DNA, 15 bp, Homo sapiens
acaagggaggaacag

SEQ ID NO: 920439 - DNA, 15 bp, Homo sapiens
caagggaggaacaga

SEQ ID NO: 920440 - DNA, 15 bp, Homo sapiens
aagggaggaacagat

SEQ ID NO: 920441 - DNA, 15 bp, Homo sapiens
agggaggaacagatg

SEQ ID NO: 920442 - DNA, 15 bp, Homo sapiens
gggaggaacagatgg

SEQ ID NO: 920443 - DNA, 15 bp, Homo sapiens
ggaggaacagatggg

SEQ ID NO: 920444 - DNA, 15 bp, Homo sapiens
gaggaacagatggga

SEQ ID NO: 920445 - DNA, 15 bp, Homo sapiens
aggaacagatgggaa

SEQ ID NO: 920446 - DNA, 15 bp, Homo sapiens
ggaacagatgggaaa

SEQ ID NO: 920447 - DNA, 15 bp, Homo sapiens
gaacagatgggaaag

SEQ ID NO: 920448 - DNA, 15 bp, Homo sapiens
aacagatgggaaagt

SEQ ID NO: 920449 - DNA, 15 bp, Homo sapiens
acagatgggaaagtt

SEQ ID NO: 920450 - DNA, 15 bp, Homo sapiens
cagatgggaaagttc

SEQ ID NO: 920451 - DNA, 15 bp, Homo sapiens
agatgggaaagttcc

SEQ ID NO: 920452 - DNA, 15 bp, Homo sapiens
gatgggaaagttcct

SEQ ID NO: 920453 - DNA, 15 bp, Homo sapiens
atgggaaagttcctc

SEQ ID NO: 920454 - DNA, 15 bp, Homo sapiens
tgggaaagttcctct

SEQ ID NO: 920455 - DNA, 15 bp, Homo sapiens
gggaaagttcctctt

SEQ ID NO: 920456 - DNA, 15 bp, Homo sapiens
ggaaagttcctcttc

SEQ ID NO: 920457 - DNA, 15 bp, Homo sapiens
gaaagttcctcttct

SEQ ID NO: 920458 - DNA, 15 bp, Homo sapiens
aaagttcctcttctg

SEQ ID NO: 920459 - DNA, 15 bp, Homo sapiens
aagttcctcttctgc

SEQ ID NO: 920460 - DNA, 15 bp, Homo sapiens
agttcctcttctgcc

SEQ ID NO: 920461 - DNA, 15 bp, Homo sapiens
gttcctcttctgcct

SEQ ID NO: 920462 - DNA, 15 bp, Homo sapiens
ttcctcttctgcctc

SEQ ID NO: 920463 - DNA, 15 bp, Homo sapiens
tcctcttctgcctct

SEQ ID NO: 920464 - DNA, 15 bp, Homo sapiens
cctcttctgcctctc

SEQ ID NO: 920465 - DNA, 15 bp, Homo sapiens
ctcttctgcctctcc

SEQ ID NO: 920466 - DNA, 15 bp, Homo sapiens
tcttctgcctctcca

SEQ ID NO: 920467 - DNA, 15 bp, Homo sapiens
cttctgcctctccaa

SEQ ID NO: 920468 - DNA, 15 bp, Homo sapiens
ttctgcctctccaac

SEQ ID NO: 920469 - DNA, 15 bp, Homo sapiens
tctgcctctccaacc

SEQ ID NO: 920470 - DNA, 15 bp, Homo sapiens
ctgcctctccaacca

SEQ ID NO: 920471 - DNA, 15 bp, Homo sapiens
tgcctctccaaccaa

SEQ ID NO: 920472 - DNA, 15 bp, Homo sapiens
gcctctccaaccaac

SEQ ID NO: 920473 - DNA, 15 bp, Homo sapiens
cctctccaaccaacc

SEQ ID NO: 920474 - DNA, 15 bp, Homo sapiens
ctctccaaccaaccc

SEQ ID NO: 920475 - DNA, 15 bp, Homo sapiens
tctccaaccaacccc

SEQ ID NO: 920476 - DNA, 15 bp, Homo sapiens
ctccaaccaaccccc

SEQ ID NO: 920477 - DNA, 15 bp, Homo sapiens
tccaaccaaccccct

SEQ ID NO: 920478 - DNA, 15 bp, Homo sapiens
ccaaccaacccccta

SEQ ID NO: 920479 - DNA, 15 bp, Homo sapiens
caaccaaccccctaa

SEQ ID NO: 920480 - DNA, 15 bp, Homo sapiens
aaccaaccccctaat

SEQ ID NO: 920481 - DNA, 15 bp, Homo sapiens
accaaccccctaatt

SEQ ID NO: 920482 - DNA, 15 bp, Homo sapiens
ccaaccccctaattc

SEQ ID NO: 920483 - DNA, 15 bp, Homo sapiens
caaccccctaattcc

SEQ ID NO: 920484 - DNA, 15 bp, Homo sapiens
aaccccctaattcct

SEQ ID NO: 920485 - DNA, 15 bp, Homo sapiens
accccctaattcctg

SEQ ID NO: 920486 - DNA, 15 bp, Homo sapiens
ccccctaattcctgc

SEQ ID NO: 920487 - DNA, 15 bp, Homo sapiens
cccctaattcctgct

SEQ ID NO: 920488 - DNA, 15 bp, Homo sapiens
ccctaattcctgctc

SEQ ID NO: 920489 - DNA, 15 bp, Homo sapiens
cctaattcctgctcc

SEQ ID NO: 920490 - DNA, 15 bp, Homo sapiens
ctaattcctgctcct

SEQ ID NO: 920491 - DNA, 15 bp, Homo sapiens
taattcctgctcctc

SEQ ID NO: 920492 - DNA, 15 bp, Homo sapiens
aattcctgctcctct

SEQ ID NO: 920493 - DNA, 15 bp, Homo sapiens
attcctgctcctctt

SEQ ID NO: 920494 - DNA, 15 bp, Homo sapiens
ttcctgctcctctta

SEQ ID NO: 920495 - DNA, 15 bp, Homo sapiens
tcctgctcctcttat

SEQ ID NO: 920496 - DNA, 15 bp, Homo sapiens
cctgctcctcttatt

SEQ ID NO: 920497 - DNA, 15 bp, Homo sapiens
ctgctcctcttattc

SEQ ID NO: 920498 - DNA, 15 bp, Homo sapiens
tgctcctcttattct

SEQ ID NO: 920499 - DNA, 15 bp, Homo sapiens
gctcctcttattctc

SEQ ID NO: 920500 - DNA, 15 bp, Homo sapiens
ctcctcttattctct

SEQ ID NO: 920501 - DNA, 15 bp, Homo sapiens
tcctcttattctctc

SEQ ID NO: 920502 - DNA, 15 bp, Homo sapiens
cctcttattctctcc

SEQ ID NO: 920503 - DNA, 15 bp, Homo sapiens
ctcttattctctcca

SEQ ID NO: 920504 - DNA, 15 bp, Homo sapiens
tcttattctctccat

SEQ ID NO: 920505 - DNA, 15 bp, Homo sapiens
cttattctctccatt

SEQ ID NO: 920506 - DNA, 15 bp, Homo sapiens
ttattctctccattt

SEQ ID NO: 920507 - DNA, 15 bp, Homo sapiens
tattctctccatttt

SEQ ID NO: 920508 - DNA, 15 bp, Homo sapiens
attctctccatttta

SEQ ID NO: 920509 - DNA, 15 bp, Homo sapiens
ttctctccattttag

SEQ ID NO: 920510 - DNA, 15 bp, Homo sapiens
tctctccattttagc

SEQ ID NO: 920511 - DNA, 15 bp, Homo sapiens
ctctccattttagct

SEQ ID NO: 920512 - DNA, 15 bp, Homo sapiens
tctccattttagcta

SEQ ID NO: 920513 - DNA, 15 bp, Homo sapiens
ctccattttagctat

SEQ ID NO: 920514 - DNA, 15 bp, Homo sapiens
tccattttagctatt

SEQ ID NO: 920515 - DNA, 15 bp, Homo sapiens
ccattttagctattc

SEQ ID NO: 920516 - DNA, 15 bp, Homo sapiens
cattttagctattct

SEQ ID NO: 920517 - DNA, 15 bp, Homo sapiens
attttagctattctg

SEQ ID NO: 920518 - DNA, 15 bp, Homo sapiens
ttttagctattctgg

SEQ ID NO: 920519 - DNA, 15 bp, Homo sapiens
tttagctattctggc

SEQ ID NO: 920520 - DNA, 15 bp, Homo sapiens
ttagctattctggcc

SEQ ID NO: 920521 - DNA, 15 bp, Homo sapiens
tagctattctggcct

SEQ ID NO: 920522 - DNA, 15 bp, Homo sapiens
agctattctggcctt

SEQ ID NO: 920523 - DNA, 15 bp, Homo sapiens
gctattctggccttt

SEQ ID NO: 920524 - DNA, 15 bp, Homo sapiens
ctattctggcctttt

SEQ ID NO: 920525 - DNA, 15 bp, Homo sapiens
tattctggccttttc

SEQ ID NO: 920526 - DNA, 15 bp, Homo sapiens
attctggccttttct

SEQ ID NO: 920527 - DNA, 15 bp, Homo sapiens
ttctggccttttctc

SEQ ID NO: 920528 - DNA, 15 bp, Homo sapiens
tctggccttttctct

SEQ ID NO: 920529 - DNA, 15 bp, Homo sapiens
ctggccttttctctg

SEQ ID NO: 920530 - DNA, 15 bp, Homo sapiens
tggccttttctctgt

SEQ ID NO: 920531 - DNA, 15 bp, Homo sapiens
ggccttttctctgtt

SEQ ID NO: 920532 - DNA, 15 bp, Homo sapiens
gccttttctctgttt

SEQ ID NO: 920533 - DNA, 15 bp, Homo sapiens
ccttttctctgtttc

SEQ ID NO: 920534 - DNA, 15 bp, Homo sapiens
cttttctctgtttct

SEQ ID NO: 920535 - DNA, 15 bp, Homo sapiens
ttttctctgtttcta

SEQ ID NO: 920536 - DNA, 15 bp, Homo sapiens
tttctctgtttctag

SEQ ID NO: 920537 - DNA, 15 bp, Homo sapiens
ttctctgtttctaga

SEQ ID NO: 920538 - DNA, 15 bp, Homo sapiens
tctctgtttctagaa

SEQ ID NO: 920539 - DNA, 15 bp, Homo sapiens
ctctgtttctagaag

SEQ ID NO: 920540 - DNA, 15 bp, Homo sapiens
tctgtttctagaagg

SEQ ID NO: 920541 - DNA, 15 bp, Homo sapiens
ctgtttctagaagga

SEQ ID NO: 920542 - DNA, 15 bp, Homo sapiens
tgtttctagaaggaa

SEQ ID NO: 920543 - DNA, 15 bp, Homo sapiens
gtttctagaaggaac

SEQ ID NO: 920544 - DNA, 15 bp, Homo sapiens
tttctagaaggaact

SEQ ID NO: 920545 - DNA, 15 bp, Homo sapiens
ttctagaaggaacta

SEQ ID NO: 920546 - DNA, 15 bp, Homo sapiens
tctagaaggaactaa

SEQ ID NO: 920547 - DNA, 15 bp, Homo sapiens
ctagaaggaactaat

SEQ ID NO: 920548 - DNA, 15 bp, Homo sapiens
tagaaggaactaatc

SEQ ID NO: 920549 - DNA, 15 bp, Homo sapiens
agaaggaactaatct

SEQ ID NO: 920550 - DNA, 15 bp, Homo sapiens
gaaggaactaatcta

SEQ ID NO: 920551 - DNA, 15 bp, Homo sapiens
aaggaactaatctag

SEQ ID NO: 920552 - DNA, 15 bp, Homo sapiens
aggaactaatctagt

SEQ ID NO: 920553 - DNA, 15 bp, Homo sapiens
ggaactaatctagtt

SEQ ID NO: 920554 - DNA, 15 bp, Homo sapiens
gaactaatctagttg

SEQ ID NO: 920555 - DNA, 15 bp, Homo sapiens
aactaatctagttgc

SEQ ID NO: 920556 - DNA, 15 bp, Homo sapiens
actaatctagttgcc

SEQ ID NO: 920557 - DNA, 15 bp, Homo sapiens
ctaatctagttgccc

SEQ ID NO: 920558 - DNA, 15 bp, Homo sapiens
taatctagttgccca

SEQ ID NO: 920559 - DNA, 15 bp, Homo sapiens
aatctagttgcccaa

SEQ ID NO: 920560 - DNA, 15 bp, Homo sapiens
atctagttgcccaac

SEQ ID NO: 920561 - DNA, 15 bp, Homo sapiens
tctagttgcccaact

SEQ ID NO: 920562 - DNA, 15 bp, Homo sapiens
ctagttgcccaacta

SEQ ID NO: 920563 - DNA, 15 bp, Homo sapiens
tagttgcccaactag

SEQ ID NO: 920564 - DNA, 15 bp, Homo sapiens
agttgcccaactagg

SEQ ID NO: 920565 - DNA, 15 bp, Homo sapiens
gttgcccaactaggg

SEQ ID NO: 920566 - DNA, 15 bp, Homo sapiens
ttgcccaactaggga

SEQ ID NO: 920567 - DNA, 15 bp, Homo sapiens
tgcccaactagggat

SEQ ID NO: 920568 - DNA, 15 bp, Homo sapiens
gcccaactagggatt

SEQ ID NO: 920569 - DNA, 15 bp, Homo sapiens
cccaactagggattc

SEQ ID NO: 920570 - DNA, 15 bp, Homo sapiens
ccaactagggattcc

SEQ ID NO: 920571 - DNA, 15 bp, Homo sapiens
caactagggattcct

SEQ ID NO: 920572 - DNA, 15 bp, Homo sapiens
aactagggattcctc

SEQ ID NO: 920573 - DNA, 15 bp, Homo sapiens
actagggattcctcc

SEQ ID NO: 920574 - DNA, 15 bp, Homo sapiens
ctagggattcctcca

SEQ ID NO: 920575 - DNA, 15 bp, Homo sapiens
tagggattcctccac

SEQ ID NO: 920576 - DNA, 15 bp, Homo sapiens
agggattcctccacc

SEQ ID NO: 920577 - DNA, 15 bp, Homo sapiens
gggattcctccaccc

SEQ ID NO: 920578 - DNA, 15 bp, Homo sapiens
ggattcctccaccct

SEQ ID NO: 920579 - DNA, 15 bp, Homo sapiens
gattcctccaccctt

SEQ ID NO: 920580 - DNA, 15 bp, Homo sapiens
attcctccacccttc

SEQ ID NO: 920581 - DNA, 15 bp, Homo sapiens
ttcctccacccttct

SEQ ID NO: 920582 - DNA, 15 bp, Homo sapiens
tcctccacccttctc

SEQ ID NO: 920583 - DNA, 15 bp, Homo sapiens
cctccacccttctct

SEQ ID NO: 920584 - DNA, 15 bp, Homo sapiens
ctccacccttctctc

SEQ ID NO: 920585 - DNA, 15 bp, Homo sapiens
tccacccttctctct

SEQ ID NO: 920586 - DNA, 15 bp, Homo sapiens
ccacccttctctctc

SEQ ID NO: 920587 - DNA, 15 bp, Homo sapiens
cacccttctctctct

SEQ ID NO: 920588 - DNA, 15 bp, Homo sapiens
acccttctctctctg

SEQ ID NO: 920589 - DNA, 15 bp, Homo sapiens
cccttctctctctga

SEQ ID NO: 920590 - DNA, 15 bp, Homo sapiens
ccttctctctctgac

SEQ ID NO: 920591 - DNA, 15 bp, Homo sapiens
cttctctctctgaca

SEQ ID NO: 920592 - DNA, 15 bp, Homo sapiens
ttctctctctgacat

SEQ ID NO: 920593 - DNA, 15 bp, Homo sapiens
tctctctctgacatc

SEQ ID NO: 920594 - DNA, 15 bp, Homo sapiens
ctctctctgacatct

SEQ ID NO: 920595 - DNA, 15 bp, Homo sapiens
tctctctgacatctt

SEQ ID NO: 920596 - DNA, 15 bp, Homo sapiens
ctctctgacatcttt

SEQ ID NO: 920597 - DNA, 15 bp, Homo sapiens
tctctgacatctttg

SEQ ID NO: 920598 - DNA, 15 bp, Homo sapiens
ctctgacatctttgt

SEQ ID NO: 920599 - DNA, 15 bp, Homo sapiens
tctgacatctttgtt

SEQ ID NO: 920600 - DNA, 15 bp, Homo sapiens
ctgacatctttgttc

SEQ ID NO: 920601 - DNA, 15 bp, Homo sapiens
tgacatctttgttca

SEQ ID NO: 920602 - DNA, 15 bp, Homo sapiens
gacatctttgttcat

SEQ ID NO: 920603 - DNA, 15 bp, Homo sapiens
acatctttgttcatt

SEQ ID NO: 920604 - DNA, 15 bp, Homo sapiens
catctttgttcatta

SEQ ID NO: 920605 - DNA, 15 bp, Homo sapiens
atctttgttcattat

SEQ ID NO: 920606 - DNA, 15 bp, Homo sapiens
tctttgttcattatt

SEQ ID NO: 920607 - DNA, 15 bp, Homo sapiens
ctttgttcattattt

SEQ ID NO: 920608 - DNA, 15 bp, Homo sapiens
tttgttcattatttc

SEQ ID NO: 920609 - DNA, 15 bp, Homo sapiens
ttgttcattatttct

SEQ ID NO: 920610 - DNA, 15 bp, Homo sapiens
tgttcattatttctt

SEQ ID NO: 920611 - DNA, 15 bp, Homo sapiens
gttcattatttcttt

SEQ ID NO: 920612 - DNA, 15 bp, Homo sapiens
ttcattatttctttg

SEQ ID NO: 920613 - DNA, 15 bp, Homo sapiens
tcattatttctttgg

SEQ ID NO: 920614 - DNA, 15 bp, Homo sapiens
cattatttctttggg

SEQ ID NO: 920615 - DNA, 15 bp, Homo sapiens
attatttctttgggt

SEQ ID NO: 920616 - DNA, 15 bp, Homo sapiens
ttatttctttgggtc

SEQ ID NO: 920617 - DNA, 15 bp, Homo sapiens
tatttctttgggtct

SEQ ID NO: 920618 - DNA, 15 bp, Homo sapiens
atttctttgggtctc

SEQ ID NO: 920619 - DNA, 15 bp, Homo sapiens
tttctttgggtctct

SEQ ID NO: 920620 - DNA, 15 bp, Homo sapiens
ttctttgggtctctg

SEQ ID NO: 920621 - DNA, 15 bp, Homo sapiens
tctttgggtctctgc

SEQ ID NO: 920622 - DNA, 15 bp, Homo sapiens
ctttgggtctctgct

SEQ ID NO: 920623 - DNA, 15 bp, Homo sapiens
tttgggtctctgctt

SEQ ID NO: 920624 - DNA, 15 bp, Homo sapiens
ttgggtctctgctta

SEQ ID NO: 920625 - DNA, 15 bp, Homo sapiens
tgggtctctgcttaa

SEQ ID NO: 920626 - DNA, 15 bp, Homo sapiens
gggtctctgcttaaa

SEQ ID NO: 920627 - DNA, 15 bp, Homo sapiens
ggtctctgcttaaat

SEQ ID NO: 920628 - DNA, 15 bp, Homo sapiens
gtctctgcttaaata

SEQ ID NO: 920629 - DNA, 15 bp, Homo sapiens
tctctgcttaaatat

SEQ ID NO: 920630 - DNA, 15 bp, Homo sapiens
ctctgcttaaatatt

SEQ ID NO: 920631 - DNA, 15 bp, Homo sapiens
tctgcttaaatattt

SEQ ID NO: 920632 - DNA, 15 bp, Homo sapiens
ctgcttaaatatttt

SEQ ID NO: 920633 - DNA, 15 bp, Homo sapiens
tgcttaaatatttta

SEQ ID NO: 920634 - DNA, 15 bp, Homo sapiens
gcttaaatattttat

SEQ ID NO: 920635 - DNA, 15 bp, Homo sapiens
cttaaatattttatc

SEQ ID NO: 920636 - DNA, 15 bp, Homo sapiens
ttaaatattttatct

SEQ ID NO: 920637 - DNA, 15 bp, Homo sapiens
taaatattttatctc

SEQ ID NO: 920638 - DNA, 15 bp, Homo sapiens
aaatattttatctct

SEQ ID NO: 920639 - DNA, 15 bp, Homo sapiens
aatattttatctctc

SEQ ID NO: 920640 - DNA, 15 bp, Homo sapiens
atattttatctctct

SEQ ID NO: 920641 - DNA, 15 bp, Homo sapiens
tattttatctctctg

SEQ ID NO: 920642 - DNA, 15 bp, Homo sapiens
attttatctctctga

SEQ ID NO: 920643 - DNA, 15 bp, Homo sapiens
ttttatctctctgac

SEQ ID NO: 920644 - DNA, 15 bp, Homo sapiens
tttatctctctgaca

SEQ ID NO: 920645 - DNA, 15 bp, Homo sapiens
ttatctctctgacat

SEQ ID NO: 920646 - DNA, 15 bp, Homo sapiens
tatctctctgacatc

SEQ ID NO: 920647 - DNA, 15 bp, Homo sapiens
atctctctgacatct

SEQ ID NO: 920648 - DNA, 15 bp, Homo sapiens
ttatttctttgggtt

SEQ ID NO: 920649 - DNA, 15 bp, Homo sapiens
tatttctttgggttt

SEQ ID NO: 920650 - DNA, 15 bp, Homo sapiens
atttctttgggtttc

SEQ ID NO: 920651 - DNA, 15 bp, Homo sapiens
tttctttgggtttct

SEQ ID NO: 920652 - DNA, 15 bp, Homo sapiens
ttctttgggtttctg

SEQ ID NO: 920653 - DNA, 15 bp, Homo sapiens
tctttgggtttctgc

SEQ ID NO: 920654 - DNA, 15 bp, Homo sapiens
ctttgggtttctgct

SEQ ID NO: 920655 - DNA, 15 bp, Homo sapiens
tttgggtttctgctt

SEQ ID NO: 920656 - DNA, 15 bp, Homo sapiens
ttgggtttctgctta

SEQ ID NO: 920657 - DNA, 15 bp, Homo sapiens
tgggtttctgcttaa

SEQ ID NO: 920658 - DNA, 15 bp, Homo sapiens
gggtttctgcttaaa

SEQ ID NO: 920659 - DNA, 15 bp, Homo sapiens
ggtttctgcttaaat

SEQ ID NO: 920660 - DNA, 15 bp, Homo sapiens
gtttctgcttaaata

SEQ ID NO: 920661 - DNA, 15 bp, Homo sapiens
tttctgcttaaatat

SEQ ID NO: 920662 - DNA, 15 bp, Homo sapiens
ttctgcttaaatatc

SEQ ID NO: 920663 - DNA, 15 bp, Homo sapiens
tctgcttaaatatct

SEQ ID NO: 920664 - DNA, 15 bp, Homo sapiens
ctgcttaaatatctg

SEQ ID NO: 920665 - DNA, 15 bp, Homo sapiens
tgcttaaatatctgc

SEQ ID NO: 920666 - DNA, 15 bp, Homo sapiens
gcttaaatatctgct

SEQ ID NO: 920667 - DNA, 15 bp, Homo sapiens
cttaaatatctgctt

SEQ ID NO: 920668 - DNA, 15 bp, Homo sapiens
ttaaatatctgcttc

SEQ ID NO: 920669 - DNA, 15 bp, Homo sapiens
taaatatctgcttcc

SEQ ID NO: 920670 - DNA, 15 bp, Homo sapiens
aaatatctgcttcct

SEQ ID NO: 920671 - DNA, 15 bp, Homo sapiens
aatatctgcttcctc

SEQ ID NO: 920672 - DNA, 15 bp, Homo sapiens
atatctgcttcctcc

SEQ ID NO: 920673 - DNA, 15 bp, Homo sapiens
tatctgcttcctcca

SEQ ID NO: 920674 - DNA, 15 bp, Homo sapiens
atctgcttcctccac

SEQ ID NO: 920675 - DNA, 15 bp, Homo sapiens
tctgcttcctccacc

SEQ ID NO: 920676 - DNA, 15 bp, Homo sapiens
ctgcttcctccaccc

SEQ ID NO: 920677 - DNA, 15 bp, Homo sapiens
tgcttcctccaccct

SEQ ID NO: 920678 - DNA, 15 bp, Homo sapiens
gcttcctccaccctt

SEQ ID NO: 920679 - DNA, 15 bp, Homo sapiens
cttcctccacccttc

SEQ ID NO: 920680 - DNA, 15 bp, Homo sapiens
ctccacccttctctt

SEQ ID NO: 920681 - DNA, 15 bp, Homo sapiens
tccacccttctcttt

SEQ ID NO: 920682 - DNA, 15 bp, Homo sapiens
ccacccttctctttc

SEQ ID NO: 920683 - DNA, 15 bp, Homo sapiens
cacccttctctttct

SEQ ID NO: 920684 - DNA, 15 bp, Homo sapiens
acccttctctttctg

SEQ ID NO: 920685 - DNA, 15 bp, Homo sapiens
cccttctctttctga

SEQ ID NO: 920686 - DNA, 15 bp, Homo sapiens
ccttctctttctgat

SEQ ID NO: 920687 - DNA, 15 bp, Homo sapiens
cttctctttctgata

SEQ ID NO: 920688 - DNA, 15 bp, Homo sapiens
ttctctttctgatat

SEQ ID NO: 920689 - DNA, 15 bp, Homo sapiens
tctctttctgatatc

SEQ ID NO: 920690 - DNA, 15 bp, Homo sapiens
ctctttctgatatct

SEQ ID NO: 920691 - DNA, 15 bp, Homo sapiens
tctttctgatatctt

SEQ ID NO: 920692 - DNA, 15 bp, Homo sapiens
ctttctgatatcttt

SEQ ID NO: 920693 - DNA, 15 bp, Homo sapiens
tttctgatatctttg

SEQ ID NO: 920694 - DNA, 15 bp, Homo sapiens
ttctgatatctttgt

SEQ ID NO: 920695 - DNA, 15 bp, Homo sapiens
tctgatatctttgtt

SEQ ID NO: 920696 - DNA, 15 bp, Homo sapiens
ctgatatctttgttc

SEQ ID NO: 920697 - DNA, 15 bp, Homo sapiens
tgatatctttgttca

SEQ ID NO: 920698 - DNA, 15 bp, Homo sapiens
gatatctttgttcat

SEQ ID NO: 920699 - DNA, 15 bp, Homo sapiens
atatctttgttcatt

SEQ ID NO: 920700 - DNA, 15 bp, Homo sapiens
tatctttgttcatta

SEQ ID NO: 920701 - DNA, 15 bp, Homo sapiens
tgcttaaatattttt

SEQ ID NO: 920702 - DNA, 15 bp, Homo sapiens
gcttaaatatttttc

SEQ ID NO: 920703 - DNA, 15 bp, Homo sapiens
cttaaatatttttcc

SEQ ID NO: 920704 - DNA, 15 bp, Homo sapiens
ttaaatatttttcca

SEQ ID NO: 920705 - DNA, 15 bp, Homo sapiens
taaatatttttccag

SEQ ID NO: 920706 - DNA, 15 bp, Homo sapiens
aaatatttttccagg

SEQ ID NO: 920707 - DNA, 15 bp, Homo sapiens
aatatttttccagga

SEQ ID NO: 920708 - DNA, 15 bp, Homo sapiens
atatttttccaggac

SEQ ID NO: 920709 - DNA, 15 bp, Homo sapiens
tatttttccaggaca

SEQ ID NO: 920710 - DNA, 15 bp, Homo sapiens
atttttccaggacag

SEQ ID NO: 920711 - DNA, 15 bp, Homo sapiens
tttttccaggacagt

SEQ ID NO: 920712 - DNA, 15 bp, Homo sapiens
ttttccaggacagtt

SEQ ID NO: 920713 - DNA, 15 bp, Homo sapiens
tttccaggacagttt

SEQ ID NO: 920714 - DNA, 15 bp, Homo sapiens
ttccaggacagtttt

SEQ ID NO: 920715 - DNA, 15 bp, Homo sapiens
tccaggacagttttc

SEQ ID NO: 920716 - DNA, 15 bp, Homo sapiens
ccaggacagttttca

SEQ ID NO: 920717 - DNA, 15 bp, Homo sapiens
caggacagttttcat

SEQ ID NO: 920718 - DNA, 15 bp, Homo sapiens
aggacagttttcatg

SEQ ID NO: 920719 - DNA, 15 bp, Homo sapiens
ggacagttttcatgc

SEQ ID NO: 920720 - DNA, 15 bp, Homo sapiens
gacagttttcatgcc

SEQ ID NO: 920721 - DNA, 15 bp, Homo sapiens
acagttttcatgccc

SEQ ID NO: 920722 - DNA, 15 bp, Homo sapiens
cagttttcatgcccc

SEQ ID NO: 920723 - DNA, 15 bp, Homo sapiens
agttttcatgcccct

SEQ ID NO: 920724 - DNA, 15 bp, Homo sapiens
gttttcatgcccctc

SEQ ID NO: 920725 - DNA, 15 bp, Homo sapiens
ttttcatgcccctct

SEQ ID NO: 920726 - DNA, 15 bp, Homo sapiens
tttcatgcccctcta

SEQ ID NO: 920727 - DNA, 15 bp, Homo sapiens
ttcatgcccctctaa

SEQ ID NO: 920728 - DNA, 15 bp, Homo sapiens
tcatgcccctctaag

SEQ ID NO: 920729 - DNA, 15 bp, Homo sapiens
catgcccctctaagc

SEQ ID NO: 920730 - DNA, 15 bp, Homo sapiens
atgcccctctaagcc

SEQ ID NO: 920731 - DNA, 15 bp, Homo sapiens
tgcccctctaagcca

SEQ ID NO: 920732 - DNA, 15 bp, Homo sapiens
gcccctctaagccag

SEQ ID NO: 920733 - DNA, 15 bp, Homo sapiens
cccctctaagccagt

SEQ ID NO: 920734 - DNA, 15 bp, Homo sapiens
ccctctaagccagtc

SEQ ID NO: 920735 - DNA, 15 bp, Homo sapiens
cctctaagccagtct

SEQ ID NO: 920736 - DNA, 15 bp, Homo sapiens
ctctaagccagtcta

SEQ ID NO: 920737 - DNA, 15 bp, Homo sapiens
tctaagccagtctag

SEQ ID NO: 920738 - DNA, 15 bp, Homo sapiens
ctaagccagtctaga

SEQ ID NO: 920739 - DNA, 15 bp, Homo sapiens
taagccagtctagac

SEQ ID NO: 920740 - DNA, 15 bp, Homo sapiens
aagccagtctagact

SEQ ID NO: 920741 - DNA, 15 bp, Homo sapiens
agccagtctagacta

SEQ ID NO: 920742 - DNA, 15 bp, Homo sapiens
gccagtctagactag

SEQ ID NO: 920743 - DNA, 15 bp, Homo sapiens
ccagtctagactagg

SEQ ID NO: 920744 - DNA, 15 bp, Homo sapiens
cagtctagactaggt

SEQ ID NO: 920745 - DNA, 15 bp, Homo sapiens
agtctagactaggtt

SEQ ID NO: 920746 - DNA, 15 bp, Homo sapiens
gtctagactaggttt

SEQ ID NO: 920747 - DNA, 15 bp, Homo sapiens
tctagactaggtttt

SEQ ID NO: 920748 - DNA, 15 bp, Homo sapiens
ctagactaggttttc

SEQ ID NO: 920749 - DNA, 15 bp, Homo sapiens
tagactaggttttcc

SEQ ID NO: 920750 - DNA, 15 bp, Homo sapiens
agactaggttttcct

SEQ ID NO: 920751 - DNA, 15 bp, Homo sapiens
gactaggttttcctg

SEQ ID NO: 920752 - DNA, 15 bp, Homo sapiens
actaggttttcctgt

SEQ ID NO: 920753 - DNA, 15 bp, Homo sapiens
ctaggttttcctgtt

SEQ ID NO: 920754 - DNA, 15 bp, Homo sapiens
taggttttcctgttt

SEQ ID NO: 920755 - DNA, 15 bp, Homo sapiens
aggttttcctgtttt

SEQ ID NO: 920756 - DNA, 15 bp, Homo sapiens
ggttttcctgtttta

SEQ ID NO: 920757 - DNA, 15 bp, Homo sapiens
gttttcctgttttac

SEQ ID NO: 920758 - DNA, 15 bp, Homo sapiens
ttttcctgttttact

SEQ ID NO: 920759 - DNA, 15 bp, Homo sapiens
tttcctgttttactc

SEQ ID NO: 920760 - DNA, 15 bp, Homo sapiens
ttcctgttttactcc

SEQ ID NO: 920761 - DNA, 15 bp, Homo sapiens
tcctgttttactccc

SEQ ID NO: 920762 - DNA, 15 bp, Homo sapiens
cctgttttactccct

SEQ ID NO: 920763 - DNA, 15 bp, Homo sapiens
ctgttttactccctc

SEQ ID NO: 920764 - DNA, 15 bp, Homo sapiens
tgttttactccctcg

SEQ ID NO: 920765 - DNA, 15 bp, Homo sapiens
gttttactccctcgc

SEQ ID NO: 920766 - DNA, 15 bp, Homo sapiens
ttttactccctcgca

SEQ ID NO: 920767 - DNA, 15 bp, Homo sapiens
tttactccctcgcag

SEQ ID NO: 920768 - DNA, 15 bp, Homo sapiens
ttactccctcgcagc

SEQ ID NO: 920769 - DNA, 15 bp, Homo sapiens
tactccctcgcagca

SEQ ID NO: 920770 - DNA, 15 bp, Homo sapiens
actccctcgcagcac

SEQ ID NO: 920771 - DNA, 15 bp, Homo sapiens
ctccctcgcagcacc

SEQ ID NO: 920772 - DNA, 15 bp, Homo sapiens
tccctcgcagcacct

SEQ ID NO: 920773 - DNA, 15 bp, Homo sapiens
ccctcgcagcacctt

SEQ ID NO: 920774 - DNA, 15 bp, Homo sapiens
cctcgcagcaccttg

SEQ ID NO: 920775 - DNA, 15 bp, Homo sapiens
ctcgcagcaccttgc

SEQ ID NO: 920776 - DNA, 15 bp, Homo sapiens
tcgcagcaccttgca

SEQ ID NO: 920777 - DNA, 15 bp, Homo sapiens
cgcagcaccttgcag

SEQ ID NO: 920778 - DNA, 15 bp, Homo sapiens
gcagcaccttgcagt

SEQ ID NO: 920779 - DNA, 15 bp, Homo sapiens
cagcaccttgcagtt

SEQ ID NO: 920780 - DNA, 15 bp, Homo sapiens
agcaccttgcagttt

SEQ ID NO: 920781 - DNA, 15 bp, Homo sapiens
gcaccttgcagtttt

SEQ ID NO: 920782 - DNA, 15 bp, Homo sapiens
caccttgcagttttt

SEQ ID NO: 920783 - DNA, 15 bp, Homo sapiens
accttgcagtttttt

SEQ ID NO: 920784 - DNA, 15 bp, Homo sapiens
ccttgcagttttttt

SEQ ID NO: 920785 - DNA, 15 bp, Homo sapiens
cttgcagtttttttc

SEQ ID NO: 920786 - DNA, 15 bp, Homo sapiens
ttgcagtttttttcc

SEQ ID NO: 920787 - DNA, 15 bp, Homo sapiens
tgcagtttttttcca

SEQ ID NO: 920788 - DNA, 15 bp, Homo sapiens
gcagtttttttccat

SEQ ID NO: 920789 - DNA, 15 bp, Homo sapiens
cagtttttttccatt

SEQ ID NO: 920790 - DNA, 15 bp, Homo sapiens
agtttttttccattg

SEQ ID NO: 920791 - DNA, 15 bp, Homo sapiens
gtttttttccattgc

SEQ ID NO: 920792 - DNA, 15 bp, Homo sapiens
tttttttccattgca

SEQ ID NO: 920793 - DNA, 15 bp, Homo sapiens
ttttttccattgcac

SEQ ID NO: 920794 - DNA, 15 bp, Homo sapiens
tttttccattgcact

SEQ ID NO: 920795 - DNA, 15 bp, Homo sapiens
ttttccattgcactt

SEQ ID NO: 920796 - DNA, 15 bp, Homo sapiens
tttccattgcactta

SEQ ID NO: 920797 - DNA, 15 bp, Homo sapiens
ttccattgcacttat

SEQ ID NO: 920798 - DNA, 15 bp, Homo sapiens
tccattgcacttatt

SEQ ID NO: 920799 - DNA, 15 bp, Homo sapiens
ccattgcacttatta

SEQ ID NO: 920800 - DNA, 15 bp, Homo sapiens
cattgcacttattat

SEQ ID NO: 920801 - DNA, 15 bp, Homo sapiens
attgcacttattata

SEQ ID NO: 920802 - DNA, 15 bp, Homo sapiens
ttgcacttattataa

SEQ ID NO: 920803 - DNA, 15 bp, Homo sapiens
tgcacttattataat

SEQ ID NO: 920804 - DNA, 15 bp, Homo sapiens
gcacttattataatc

SEQ ID NO: 920805 - DNA, 15 bp, Homo sapiens
cacttattataatca

SEQ ID NO: 920806 - DNA, 15 bp, Homo sapiens
acttattataatcaa

SEQ ID NO: 920807 - DNA, 15 bp, Homo sapiens
cttattataatcaat

SEQ ID NO: 920808 - DNA, 15 bp, Homo sapiens
ttattataatcaata

SEQ ID NO: 920809 - DNA, 15 bp, Homo sapiens
tattataatcaatag

SEQ ID NO: 920810 - DNA, 15 bp, Homo sapiens
attataatcaatagc

SEQ ID NO: 920811 - DNA, 15 bp, Homo sapiens
ttataatcaatagct

SEQ ID NO: 920812 - DNA, 15 bp, Homo sapiens
tataatcaatagcta

SEQ ID NO: 920813 - DNA, 15 bp, Homo sapiens
ataatcaatagctaa

SEQ ID NO: 920814 - DNA, 15 bp, Homo sapiens
taatcaatagctaaa

SEQ ID NO: 920815 - DNA, 15 bp, Homo sapiens
aatcaatagctaaaa

SEQ ID NO: 920816 - DNA, 15 bp, Homo sapiens
atcaatagctaaaaa

SEQ ID NO: 920817 - DNA, 15 bp, Homo sapiens
tcaatagctaaaaaa

SEQ ID NO: 920818 - DNA, 15 bp, Homo sapiens
caatagctaaaaaat

SEQ ID NO: 920819 - DNA, 15 bp, Homo sapiens
aatagctaaaaaata

SEQ ID NO: 920820 - DNA, 15 bp, Homo sapiens
atagctaaaaaataa

SEQ ID NO: 920821 - DNA, 15 bp, Homo sapiens
tagctaaaaaataat

SEQ ID NO: 920822 - DNA, 15 bp, Homo sapiens
agctaaaaaataata

SEQ ID NO: 920823 - DNA, 15 bp, Homo sapiens
gctaaaaaataatat

SEQ ID NO: 920824 - DNA, 15 bp, Homo sapiens
ctaaaaaataatatt

SEQ ID NO: 920825 - DNA, 15 bp, Homo sapiens
taaaaaataatattt

SEQ ID NO: 920826 - DNA, 15 bp, Homo sapiens
aaaaaataatattta

SEQ ID NO: 920827 - DNA, 15 bp, Homo sapiens
aaaaataatatttac

SEQ ID NO: 920828 - DNA, 15 bp, Homo sapiens
aaaataatatttact

SEQ ID NO: 920829 - DNA, 15 bp, Homo sapiens
aaataatatttacta

SEQ ID NO: 920830 - DNA, 15 bp, Homo sapiens
aataatatttactat

SEQ ID NO: 920831 - DNA, 15 bp, Homo sapiens
ataatatttactatg

SEQ ID NO: 920832 - DNA, 15 bp, Homo sapiens
taatatttactatgc

SEQ ID NO: 920833 - DNA, 15 bp, Homo sapiens
aatatttactatgca

SEQ ID NO: 920834 - DNA, 15 bp, Homo sapiens
atatttactatgcat

SEQ ID NO: 920835 - DNA, 15 bp, Homo sapiens
tatttactatgcatt

SEQ ID NO: 920836 - DNA, 15 bp, Homo sapiens
atttactatgcattt

SEQ ID NO: 920837 - DNA, 15 bp, Homo sapiens
tttactatgcatttg

SEQ ID NO: 920838 - DNA, 15 bp, Homo sapiens
ttactatgcatttgt

SEQ ID NO: 920839 - DNA, 15 bp, Homo sapiens
tactatgcatttgtg

SEQ ID NO: 920840 - DNA, 15 bp, Homo sapiens
actatgcatttgtga

SEQ ID NO: 920841 - DNA, 15 bp, Homo sapiens
ctatgcatttgtgag

SEQ ID NO: 920842 - DNA, 15 bp, Homo sapiens
tatgcatttgtgaga

SEQ ID NO: 920843 - DNA, 15 bp, Homo sapiens
atgcatttgtgagat

SEQ ID NO: 920844 - DNA, 15 bp, Homo sapiens
tgcatttgtgagata

SEQ ID NO: 920845 - DNA, 15 bp, Homo sapiens
gcatttgtgagataa

SEQ ID NO: 920846 - DNA, 15 bp, Homo sapiens
catttgtgagataaa

SEQ ID NO: 920847 - DNA, 15 bp, Homo sapiens
atttgtgagataaat

SEQ ID NO: 920848 - DNA, 15 bp, Homo sapiens
tttgtgagataaatt

SEQ ID NO: 920849 - DNA, 15 bp, Homo sapiens
ttgtgagataaatta

SEQ ID NO: 920850 - DNA, 15 bp, Homo sapiens
tgtgagataaattac

SEQ ID NO: 920851 - DNA, 15 bp, Homo sapiens
gtgagataaattact

SEQ ID NO: 920852 - DNA, 15 bp, Homo sapiens
tgagataaattactc

SEQ ID NO: 920853 - DNA, 15 bp, Homo sapiens
gagataaattactct

SEQ ID NO: 920854 - DNA, 15 bp, Homo sapiens
agataaattactctg

SEQ ID NO: 920855 - DNA, 15 bp, Homo sapiens
gataaattactctgt

SEQ ID NO: 920856 - DNA, 15 bp, Homo sapiens
ataaattactctgtt

SEQ ID NO: 920857 - DNA, 15 bp, Homo sapiens
taaattactctgtta

SEQ ID NO: 920858 - DNA, 15 bp, Homo sapiens
aaattactctgttaa

SEQ ID NO: 920859 - DNA, 15 bp, Homo sapiens
aattactctgttaag

SEQ ID NO: 920860 - DNA, 15 bp, Homo sapiens
attactctgttaagt

SEQ ID NO: 920861 - DNA, 15 bp, Homo sapiens
ttactctgttaagtt

SEQ ID NO: 920862 - DNA, 15 bp, Homo sapiens
tactctgttaagttt

SEQ ID NO: 920863 - DNA, 15 bp, Homo sapiens
actctgttaagtttt

SEQ ID NO: 920864 - DNA, 15 bp, Homo sapiens
ctctgttaagttttc

SEQ ID NO: 920865 - DNA, 15 bp, Homo sapiens
tctgttaagttttct

SEQ ID NO: 920866 - DNA, 15 bp, Homo sapiens
ctgttaagttttctt

SEQ ID NO: 920867 - DNA, 15 bp, Homo sapiens
tgttaagttttcttt

SEQ ID NO: 920868 - DNA, 15 bp, Homo sapiens
gttaagttttcttta

SEQ ID NO: 920869 - DNA, 15 bp, Homo sapiens
ttaagttttctttac

SEQ ID NO: 920870 - DNA, 15 bp, Homo sapiens
taagttttctttaca

SEQ ID NO: 920871 - DNA, 15 bp, Homo sapiens
aagttttctttacaa

SEQ ID NO: 920872 - DNA, 15 bp, Homo sapiens
agttttctttacaag

SEQ ID NO: 920873 - DNA, 15 bp, Homo sapiens
gttttctttacaagg

SEQ ID NO: 920874 - DNA, 15 bp, Homo sapiens
ttttctttacaagga

SEQ ID NO: 920875 - DNA, 15 bp, Homo sapiens
tttctttacaaggat

SEQ ID NO: 920876 - DNA, 15 bp, Homo sapiens
ttctttacaaggatt

SEQ ID NO: 920877 - DNA, 15 bp, Homo sapiens
tctttacaaggatta

SEQ ID NO: 920878 - DNA, 15 bp, Homo sapiens
ctttacaaggattat

SEQ ID NO: 920879 - DNA, 15 bp, Homo sapiens
tttacaaggattatc

SEQ ID NO: 920880 - DNA, 15 bp, Homo sapiens
ttacaaggattatct

SEQ ID NO: 920881 - DNA, 15 bp, Homo sapiens
tacaaggattatctc

SEQ ID NO: 920882 - DNA, 15 bp, Homo sapiens
acaaggattatctcc

SEQ ID NO: 920883 - DNA, 15 bp, Homo sapiens
caaggattatctcct

SEQ ID NO: 920884 - DNA, 15 bp, Homo sapiens
aaggattatctcctt

SEQ ID NO: 920885 - DNA, 15 bp, Homo sapiens
aggattatctccttt

SEQ ID NO: 920886 - DNA, 15 bp, Homo sapiens
ggattatctcctttt

SEQ ID NO: 920887 - DNA, 15 bp, Homo sapiens
gattatctcctttta

SEQ ID NO: 920888 - DNA, 15 bp, Homo sapiens
attatctccttttat

SEQ ID NO: 920889 - DNA, 15 bp, Homo sapiens
ttatctccttttatc

SEQ ID NO: 920890 - DNA, 15 bp, Homo sapiens
tatctccttttatcc

SEQ ID NO: 920891 - DNA, 15 bp, Homo sapiens
atctccttttatcca

SEQ ID NO: 920892 - DNA, 15 bp, Homo sapiens
tctccttttatccaa

SEQ ID NO: 920893 - DNA, 15 bp, Homo sapiens
ctccttttatccaaa

SEQ ID NO: 920894 - DNA, 15 bp, Homo sapiens
tccttttatccaaaa

SEQ ID NO: 920895 - DNA, 15 bp, Homo sapiens
ccttttatccaaaat

SEQ ID NO: 920896 - DNA, 15 bp, Homo sapiens
cttttatccaaaata

SEQ ID NO: 920897 - DNA, 15 bp, Homo sapiens
ttttatccaaaataa

SEQ ID NO: 920898 - DNA, 15 bp, Homo sapiens
tttatccaaaataaa

SEQ ID NO: 920899 - DNA, 15 bp, Homo sapiens
ttatccaaaataaaa

SEQ ID NO: 920900 - DNA, 15 bp, Homo sapiens
tatccaaaataaaaa

SEQ ID NO: 920901 - DNA, 15 bp, Homo sapiens
atccaaaataaaaaa

SEQ ID NO: 920902 - DNA, 15 bp, Homo sapiens
tccaaaataaaaaat

SEQ ID NO: 920903 - DNA, 15 bp, Homo sapiens
ccaaaataaaaaata

SEQ ID NO: 920904 - DNA, 15 bp, Homo sapiens
caaaataaaaaataa

SEQ ID NO: 920905 - DNA, 15 bp, Homo sapiens
aaaataaaaaataaa

SEQ ID NO: 920906 - DNA, 15 bp, Homo sapiens
aaataaaaaataaaa

SEQ ID NO: 920907 - DNA, 15 bp, Homo sapiens
aataaaaaataaaaa

SEQ ID NO: 920908 - DNA, 15 bp, Homo sapiens
ataaaaaataaaaaa

SEQ ID NO: 920909 - DNA, 15 bp, Homo sapiens
taaaaaataaaaaat

SEQ ID NO: 920910 - DNA, 15 bp, Homo sapiens
aaaaaataaaaaata

SEQ ID NO: 920911 - DNA, 15 bp, Homo sapiens
aaaaataaaaaataa

SEQ ID NO: 920912 - DNA, 15 bp, Homo sapiens
taaaaaataaaaaaa

SEQ ID NO: 920913 - DNA, 15 bp, Homo sapiens
aaaaaataaaaaaac

SEQ ID NO: 920914 - DNA, 15 bp, Homo sapiens
aaaaataaaaaaaca

SEQ ID NO: 920915 - DNA, 15 bp, Homo sapiens
aaaataaaaaaacac

SEQ ID NO: 920916 - DNA, 15 bp, Homo sapiens
aaataaaaaaacaca

SEQ ID NO: 920917 - DNA, 15 bp, Homo sapiens
aataaaaaaacacat

SEQ ID NO: 920918 - DNA, 15 bp, Homo sapiens
ataaaaaaacacata

SEQ ID NO: 920919 - DNA, 15 bp, Homo sapiens
taaaaaaacacataa

SEQ ID NO: 920920 - DNA, 15 bp, Homo sapiens
aaaaaaacacataag

SEQ ID NO: 920921 - DNA, 15 bp, Homo sapiens
aaaaaacacataagt

SEQ ID NO: 920922 - DNA, 15 bp, Homo sapiens
aaaaacacataagta

SEQ ID NO: 920923 - DNA, 15 bp, Homo sapiens
aaaacacataagtag

SEQ ID NO: 920924 - DNA, 15 bp, Homo sapiens
aaacacataagtaga

SEQ ID NO: 920925 - DNA, 15 bp, Homo sapiens
aacacataagtagac

SEQ ID NO: 920926 - DNA, 15 bp, Homo sapiens
acacataagtagaca

SEQ ID NO: 920927 - DNA, 15 bp, Homo sapiens
cacataagtagacat

SEQ ID NO: 920928 - DNA, 15 bp, Homo sapiens
acataagtagacatt

SEQ ID NO: 920929 - DNA, 15 bp, Homo sapiens
cataagtagacatta

SEQ ID NO: 920930 - DNA, 15 bp, Homo sapiens
ataagtagacattag

SEQ ID NO: 920931 - DNA, 15 bp, Homo sapiens
taagtagacattagt

SEQ ID NO: 920932 - DNA, 15 bp, Homo sapiens
aagtagacattagta

SEQ ID NO: 920933 - DNA, 15 bp, Homo sapiens
agtagacattagtat

SEQ ID NO: 920934 - DNA, 15 bp, Homo sapiens
gtagacattagtatt

SEQ ID NO: 920935 - DNA, 15 bp, Homo sapiens
tagacattagtatta

SEQ ID NO: 920936 - DNA, 15 bp, Homo sapiens
agacattagtattat

SEQ ID NO: 920937 - DNA, 15 bp, Homo sapiens
gacattagtattatc

SEQ ID NO: 920938 - DNA, 15 bp, Homo sapiens
acattagtattatcc

SEQ ID NO: 920939 - DNA, 15 bp, Homo sapiens
cattagtattatccc

SEQ ID NO: 920940 - DNA, 15 bp, Homo sapiens
attagtattatcccc

SEQ ID NO: 920941 - DNA, 15 bp, Homo sapiens
ttagtattatcccct

SEQ ID NO: 920942 - DNA, 15 bp, Homo sapiens
tagtattatccccta

SEQ ID NO: 920943 - DNA, 15 bp, Homo sapiens
agtattatcccctat

SEQ ID NO: 920944 - DNA, 15 bp, Homo sapiens
gtattatcccctatt

SEQ ID NO: 920945 - DNA, 15 bp, Homo sapiens
tattatcccctattt

SEQ ID NO: 920946 - DNA, 15 bp, Homo sapiens
attatcccctatttt

SEQ ID NO: 920947 - DNA, 15 bp, Homo sapiens
ttatcccctattttc

SEQ ID NO: 920948 - DNA, 15 bp, Homo sapiens
tatcccctattttcc

SEQ ID NO: 920949 - DNA, 15 bp, Homo sapiens
atcccctattttcca

SEQ ID NO: 920950 - DNA, 15 bp, Homo sapiens
tcccctattttccag

SEQ ID NO: 920951 - DNA, 15 bp, Homo sapiens
cccctattttccaga

SEQ ID NO: 920952 - DNA, 15 bp, Homo sapiens
ccctattttccagag

SEQ ID NO: 920953 - DNA, 15 bp, Homo sapiens
cctattttccagaga

SEQ ID NO: 920954 - DNA, 15 bp, Homo sapiens
ctattttccagagaa

SEQ ID NO: 920955 - DNA, 15 bp, Homo sapiens
tattttccagagaag

SEQ ID NO: 920956 - DNA, 15 bp, Homo sapiens
attttccagagaagg

SEQ ID NO: 920957 - DNA, 15 bp, Homo sapiens
ttttccagagaaggg

SEQ ID NO: 920958 - DNA, 15 bp, Homo sapiens
tttccagagaaggga

SEQ ID NO: 920959 - DNA, 15 bp, Homo sapiens
ttccagagaagggaa

SEQ ID NO: 920960 - DNA, 15 bp, Homo sapiens
tccagagaagggaac

SEQ ID NO: 920961 - DNA, 15 bp, Homo sapiens
ccagagaagggaact

SEQ ID NO: 920962 - DNA, 15 bp, Homo sapiens
cagagaagggaactc

SEQ ID NO: 920963 - DNA, 15 bp, Homo sapiens
agagaagggaactca

SEQ ID NO: 920964 - DNA, 15 bp, Homo sapiens
gagaagggaactcaa

SEQ ID NO: 920965 - DNA, 15 bp, Homo sapiens
agaagggaactcaag

SEQ ID NO: 920966 - DNA, 15 bp, Homo sapiens
gaagggaactcaaga

SEQ ID NO: 920967 - DNA, 15 bp, Homo sapiens
aagggaactcaagat

SEQ ID NO: 920968 - DNA, 15 bp, Homo sapiens
agggaactcaagatc

SEQ ID NO: 920969 - DNA, 15 bp, Homo sapiens
gggaactcaagatca

SEQ ID NO: 920970 - DNA, 15 bp, Homo sapiens
ggaactcaagatcag

SEQ ID NO: 920971 - DNA, 15 bp, Homo sapiens
gaactcaagatcaga

SEQ ID NO: 920972 - DNA, 15 bp, Homo sapiens
aactcaagatcagaa

SEQ ID NO: 920973 - DNA, 15 bp, Homo sapiens
actcaagatcagaaa

SEQ ID NO: 920974 - DNA, 15 bp, Homo sapiens
ctcaagatcagaaag

SEQ ID NO: 920975 - DNA, 15 bp, Homo sapiens
tcaagatcagaaagg

SEQ ID NO: 920976 - DNA, 15 bp, Homo sapiens
caagatcagaaaggt

SEQ ID NO: 920977 - DNA, 15 bp, Homo sapiens
aagatcagaaaggtt

SEQ ID NO: 920978 - DNA, 15 bp, Homo sapiens
agatcagaaaggtta

SEQ ID NO: 920979 - DNA, 15 bp, Homo sapiens
gatcagaaaggttag

SEQ ID NO: 920980 - DNA, 15 bp, Homo sapiens
atcagaaaggttagt

SEQ ID NO: 920981 - DNA, 15 bp, Homo sapiens
tcagaaaggttagtt

SEQ ID NO: 920982 - DNA, 15 bp, Homo sapiens
cagaaaggttagtta

SEQ ID NO: 920983 - DNA, 15 bp, Homo sapiens
agaaaggttagttaa

SEQ ID NO: 920984 - DNA, 15 bp, Homo sapiens
gaaaggttagttaac

SEQ ID NO: 920985 - DNA, 15 bp, Homo sapiens
aaaggttagttaact

SEQ ID NO: 920986 - DNA, 15 bp, Homo sapiens
aaggttagttaacta

SEQ ID NO: 920987 - DNA, 15 bp, Homo sapiens
aggttagttaactat

SEQ ID NO: 920988 - DNA, 15 bp, Homo sapiens
ggttagttaactatg

SEQ ID NO: 920989 - DNA, 15 bp, Homo sapiens
gttagttaactatgg

SEQ ID NO: 920990 - DNA, 15 bp, Homo sapiens
ttagttaactatgga

SEQ ID NO: 920991 - DNA, 15 bp, Homo sapiens
tagttaactatggaa

SEQ ID NO: 920992 - DNA, 15 bp, Homo sapiens
agttaactatggaat

SEQ ID NO: 920993 - DNA, 15 bp, Homo sapiens
gttaactatggaatt

SEQ ID NO: 920994 - DNA, 15 bp, Homo sapiens
ttaactatggaattt

SEQ ID NO: 920995 - DNA, 15 bp, Homo sapiens
taactatggaatttg

SEQ ID NO: 920996 - DNA, 15 bp, Homo sapiens
aactatggaatttgg

SEQ ID NO: 920997 - DNA, 15 bp, Homo sapiens
actatggaatttgga

SEQ ID NO: 920998 - DNA, 15 bp, Homo sapiens
ctatggaatttggaa

SEQ ID NO: 920999 - DNA, 15 bp, Homo sapiens
tatggaatttggaag

SEQ ID NO: 921000 - DNA, 15 bp, Homo sapiens
atggaatttggaagt

SEQ ID NO: 921001 - DNA, 15 bp, Homo sapiens
tggaatttggaagtg

SEQ ID NO: 921002 - DNA, 15 bp, Homo sapiens
ggaatttggaagtga

SEQ ID NO: 921003 - DNA, 15 bp, Homo sapiens
gaatttggaagtgac

SEQ ID NO: 921004 - DNA, 15 bp, Homo sapiens
aatttggaagtgact

SEQ ID NO: 921005 - DNA, 15 bp, Homo sapiens
atttggaagtgactg

SEQ ID NO: 921006 - DNA, 15 bp, Homo sapiens
tttggaagtgactgc

SEQ ID NO: 921007 - DNA, 15 bp, Homo sapiens
ttggaagtgactgct

SEQ ID NO: 921008 - DNA, 15 bp, Homo sapiens
tggaagtgactgctc

SEQ ID NO: 921009 - DNA, 15 bp, Homo sapiens
ggaagtgactgctct

SEQ ID NO: 921010 - DNA, 15 bp, Homo sapiens
gaagtgactgctctt

SEQ ID NO: 921011 - DNA, 15 bp, Homo sapiens
aagtgactgctctta

SEQ ID NO: 921012 - DNA, 15 bp, Homo sapiens
agtgactgctcttac

SEQ ID NO: 921013 - DNA, 15 bp, Homo sapiens
gtgactgctcttacc

SEQ ID NO: 921014 - DNA, 15 bp, Homo sapiens
tgactgctcttacct

SEQ ID NO: 921015 - DNA, 15 bp, Homo sapiens
gactgctcttaccta

SEQ ID NO: 921016 - DNA, 15 bp, Homo sapiens
actgctcttacctac

SEQ ID NO: 921017 - DNA, 15 bp, Homo sapiens
ctgctcttacctacc

SEQ ID NO: 921018 - DNA, 15 bp, Homo sapiens
tgctcttacctacct

SEQ ID NO: 921019 - DNA, 15 bp, Homo sapiens
gctcttacctaccta

SEQ ID NO: 921020 - DNA, 15 bp, Homo sapiens
ctcttacctacctag
